United States Patent Application Publication US 2008/0113351 A1 - sequence listing, part 7

SEQ ID NO: 150673 - DNA, 19 bp, Homo sapiens
  siRNA target sequence for PKD1-like (NM_024874.3,1014-1032).
cactcaacaagtaaaaagt

SEQ ID NO: 150674 - DNA, 19 bp, Homo sapiens
  siRNA target sequence for PKD1-like (NM_024874.3,1068-1086).
ggctccctcctacagttat

SEQ ID NO: 150675 - DNA, 19 bp, Homo sapiens
  siRNA target sequence for PKD1-like (NM_024874.3,1072-1090).
ccctcctacagttatgcta

SEQ ID NO: 150676 - DNA, 19 bp, Homo sapiens
  siRNA target sequence for PKD1-like (NM_024874.3,1124-1142).
cagcaccatacccagttat

SEQ ID NO: 150677 - DNA, 19 bp, Homo sapiens
  siRNA target sequence for PKD1-like (NM_024874.3,1126-1144).
gcaccatacccagttataa

SEQ ID NO: 150678 - DNA, 19 bp, Homo sapiens
  siRNA target sequence for PKD1-like (NM_024874.3,1127-1145).
caccatacccagttataaa

SEQ ID NO: 150679 - DNA, 19 bp, Homo sapiens
  siRNA target sequence for PKD1-like (NM_024874.3,1257-1275).
cgactggcagctgattact

SEQ ID NO: 150680 - DNA, 19 bp, Homo sapiens
  siRNA target sequence for PKD1-like (NM_024874.3,1343-1361).
ctccaggcctgtatgaatt

SEQ ID NO: 150681 - DNA, 19 bp, Homo sapiens
  siRNA target sequence for PKD1-like (NM_024874.3,1368-1386).
gattgtagagggtcaaaat

SEQ ID NO: 150682 - DNA, 19 bp, Homo sapiens
  siRNA target sequence for PKD1-like (NM_024874.3,1422-1440).
gccagagccccgtaagaat

SEQ ID NO: 150683 - DNA, 19 bp, Homo sapiens
  siRNA target sequence for PKD1-like (NM_024874.3,1493-1511).
ccacttctacagtcattga

SEQ ID NO: 150684 - DNA, 19 bp, Homo sapiens
  siRNA target sequence for PKD1-like (NM_024874.3,1494-1512).
cacttctacagtcattgat

SEQ ID NO: 150685 - DNA, 19 bp, Homo sapiens
  siRNA target sequence for PKD1-like (NM_024874.3,1523-1541).
gcactgatgatgataaaat

SEQ ID NO: 150686 - DNA, 19 bp, Homo sapiens
  siRNA target sequence for PKD1-like (NM_024874.3,1548-1566).
gtaccattgggaagaactt

SEQ ID NO: 150687 - DNA, 19 bp, Homo sapiens
  siRNA target sequence for PKD1-like (NM_024874.3,1597-1615).
gaagatacagccatattaa

SEQ ID NO: 150688 - DNA, 19 bp, Homo sapiens
  siRNA target sequence for PKD1-like (NM_024874.3,1627-1645).
ctcgtccctgggaactaca

SEQ ID NO: 150689 - DNA, 19 bp, Homo sapiens
  siRNA target sequence for PKD1-like (NM_024874.3,1630-1648).
gtccctgggaactacactt

SEQ ID NO: 150690 - DNA, 19 bp, Homo sapiens
  siRNA target sequence for PKD1-like (NM_024874.3,1633-1651).
cctgggaactacactttca

SEQ ID NO: 150691 - DNA, 19 bp, Homo sapiens
  siRNA target sequence for PKD1-like (NM_024874.3,1672-1690).
gatggagctaccaactcta

SEQ ID NO: 150692 - DNA, 19 bp, Homo sapiens
  siRNA target sequence for PKD1-like (NM_024874.3,1819-1837).
ggcatcaccagctatgagt

SEQ ID NO: 150693 - DNA, 19 bp, Homo sapiens
  siRNA target sequence for PKD1-like (NM_024874.3,1873-1891).
gagatgcagggtgttagaa

SEQ ID NO: 150694 - DNA, 19 bp, Homo sapiens
  siRNA target sequence for PKD1-like (NM_024874.3,1875-1893).
gatgcagggtgttagaaca

SEQ ID NO: 150695 - DNA, 19 bp, Homo sapiens
  siRNA target sequence for PKD1-like (NM_024874.3,1976-1994).
ctgctcaagtgactgttat

SEQ ID NO: 150696 - DNA, 19 bp, Homo sapiens
  siRNA target sequence for PKD1-like (NM_024874.3,2087-2105).
gcaagagctcagatgatca

SEQ ID NO: 150697 - DNA, 19 bp, Homo sapiens
  siRNA target sequence for PKD1-like (NM_024874.3,2220-2238).
caccttgactgtcaaagat

SEQ ID NO: 150698 - DNA, 19 bp, Homo sapiens
  siRNA target sequence for PKD1-like (NM_024874.3,2255-2273).
gccagagctctgtgaatgt

SEQ ID NO: 150699 - DNA, 19 bp, Homo sapiens
  siRNA target sequence for PKD1-like (NM_024874.3,2259-2277).
gagctctgtgaatgtcatt

SEQ ID NO: 150700 - DNA, 19 bp, Homo sapiens
  siRNA target sequence for PKD1-like (NM_024874.3,2356-2374).
gagctggatggctctaagt

SEQ ID NO: 150701 - DNA, 19 bp, Homo sapiens
  siRNA target sequence for PKD1-like (NM_024874.3,2378-2396).
cagatgacaagggaatagt

SEQ ID NO: 150702 - DNA, 19 bp, Homo sapiens
  siRNA target sequence for PKD1-like (NM_024874.3,2458-2476).
gaccatcaccctatccttt

SEQ ID NO: 150703 - DNA, 19 bp, Homo sapiens
  siRNA target sequence for PKD1-like (NM_024874.3,2696-2714).
ccgacatcattgtgcaaaa

SEQ ID NO: 150704 - DNA, 19 bp, Homo sapiens
  siRNA target sequence for PKD1-like (NM_024874.3,2734-2752).
cagagcaccaaaatggtat

SEQ ID NO: 150705 - DNA, 19 bp, Homo sapiens
  siRNA target sequence for PKD1-like (NM_024874.3,2819-2837).
gtgagctgcggaagcaaaa

SEQ ID NO: 150706 - DNA, 19 bp, Homo sapiens
  siRNA target sequence for PKD1-like (NM_024874.3,2925-2943).
caccaaacgctgtatctgt

SEQ ID NO: 150707 - DNA, 19 bp, Homo sapiens
  siRNA target sequence for PKD1-like (NM_024874.3,2947-2965).
cctttttggatggagaatt

SEQ ID NO: 150708 - DNA, 19 bp, Homo sapiens
  siRNA target sequence for PKD1-like (NM_024874.3,3002-3020).
gtgagtggagcgtgttata

SEQ ID NO: 150709 - DNA, 19 bp, Homo sapiens
  siRNA target sequence for PKD1-like (NM_024874.3,3006-3024).
gtggagcgtgttatatgtt

SEQ ID NO: 150710 - DNA, 19 bp, Homo sapiens
  siRNA target sequence for PKD1-like (NM_024874.3,3008-3026).
ggagcgtgttatatgttat

SEQ ID NO: 150711 - DNA, 19 bp, Homo sapiens
  siRNA target sequence for PKD1-like (NM_024874.3,3011-3029).
gcgtgttatatgttatcat

SEQ ID NO: 150712 - DNA, 19 bp, Homo sapiens
  siRNA target sequence for PKD1-like (NM_024874.3,3072-3090).
gactgtgatctgttgttgt

SEQ ID NO: 150713 - DNA, 19 bp, Homo sapiens
  siRNA target sequence for PKD1-like (NM_024874.3,3076-3094).
gtgatctgttgttgtaaga

SEQ ID NO: 150714 - DNA, 19 bp, Homo sapiens
  siRNA target sequence for PKD1-like (NM_024874.3,3179-3197).
cccgagcaggcatcaaaca

SEQ ID NO: 150715 - DNA, 19 bp, Homo sapiens
  siRNA target sequence for PKD1-like (NM_024874.3,3181-3199).
cgagcaggcatcaaacaga

SEQ ID NO: 150716 - DNA, 19 bp, Homo sapiens
  siRNA target sequence for PKD1-like (NM_024874.3,3252-3270).
cgatgatgccatctttaca

SEQ ID NO: 150717 - DNA, 19 bp, Homo sapiens
  siRNA target sequence for PKD2L1 (NM_016112.2,654-672).
gagaaccgggaactttata

SEQ ID NO: 150718 - DNA, 19 bp, Homo sapiens
  siRNA target sequence for PKD2L1 (NM_016112.2,686-704).
gagggagctgttggtatat

SEQ ID NO: 150719 - DNA, 19 bp, Homo sapiens
  siRNA target sequence for PKD2L1 (NM_016112.2,688-706).
gggagctgttggtatatat

SEQ ID NO: 150720 - DNA, 19 bp, Homo sapiens
  siRNA target sequence for PKD2L1 (NM_016112.2,689-707).
ggagctgttggtatatatt

SEQ ID NO: 150721 - DNA, 19 bp, Homo sapiens
  siRNA target sequence for PKD2L1 (NM_016112.2,748-766).
caagctccagtgcttatta

SEQ ID NO: 150722 - DNA, 19 bp, Homo sapiens
  siRNA target sequence for PKD2L1 (NM_016112.2,779-797).
gatgtctgagctcttctta

SEQ ID NO: 150723 - DNA, 19 bp, Homo sapiens
  siRNA target sequence for PKD2L1 (NM_016112.2,782-800).
gtctgagctcttcttacat

SEQ ID NO: 150724 - DNA, 19 bp, Homo sapiens
  siRNA target sequence for PKD2L1 (NM_016112.2,873-891).
ccactactggacagtttgt

SEQ ID NO: 150725 - DNA, 19 bp, Homo sapiens
  siRNA target sequence for PKD2L1 (NM_016112.2,895-913).
ggaccaaatggtacaacaa

SEQ ID NO: 150726 - DNA, 19 bp, Homo sapiens
  siRNA target sequence for PKD2L1 (NM_016112.2,935-953).
ccactccttcatctactat

SEQ ID NO: 150727 - DNA, 19 bp, Homo sapiens
  siRNA target sequence for PKD2L1 (NM_016112.2,976-994).
cgaggctgcggcagctaaa

SEQ ID NO: 150728 - DNA, 19 bp, Homo sapiens
  siRNA target sequence for PKD2L1 (NM_016112.2,990-1008).
ctaaaggtccgcaatgact

SEQ ID NO: 150729 - DNA, 19 bp, Homo sapiens
  siRNA target sequence for PKD2L1 (NM_016112.2,1273-1291).
gcactcgagtggtgttcat

SEQ ID NO: 150730 - DNA, 19 bp, Homo sapiens
  siRNA target sequence for PKD2L1 (NM_016112.2,1307-1325).
caatgccaatatcaatctt

SEQ ID NO: 150731 - DNA, 19 bp, Homo sapiens
  siRNA target sequence for PKD2L1 (NM_016112.2,1424-1442).
ctgggacttctttatcgtt

SEQ ID NO: 150732 - DNA, 19 bp, Homo sapiens
  siRNA target sequence for PKD2L1 (NM_016112.2,1581-1599).
gctgtgggcttccacatat

SEQ ID NO: 150733 - DNA, 19 bp, Homo sapiens
  siRNA target sequence for PKD2L1 (NM_016112.2,1582-1600).
ctgtgggcttccacatatt

SEQ ID NO: 150734 - DNA, 19 bp, Homo sapiens
  siRNA target sequence for PKD2L1 (NM_016112.2,1686-1704).
cagacacagtacaacaaca

SEQ ID NO: 150735 - DNA, 19 bp, Homo sapiens
  siRNA target sequence for PKD2L1 (NM_016112.2,1732-1750).
ggatcaagatattcaagta

SEQ ID NO: 150736 - DNA, 19 bp, Homo sapiens
  siRNA target sequence for PKD2L1 (NM_016112.2,1818-1836).
ggcttcgccgtcatgttct

SEQ ID NO: 150737 - DNA, 19 bp, Homo sapiens
  siRNA target sequence for PKD2L1 (NM_016112.2,1819-1837).
gcttcgccgtcatgttctt

SEQ ID NO: 150738 - DNA, 19 bp, Homo sapiens
  siRNA target sequence for PKD2L1 (NM_016112.2,1823-1841).
cgccgtcatgttcttcatt

SEQ ID NO: 150739 - DNA, 19 bp, Homo sapiens
  siRNA target sequence for PKD2L1 (NM_016112.2,1825-1843).
ccgtcatgttcttcattgt

SEQ ID NO: 150740 - DNA, 19 bp, Homo sapiens
  siRNA target sequence for PKD2L1 (NM_016112.2,1883-1901).
gacccaagtggaaaacttt

SEQ ID NO: 150741 - DNA, 19 bp, Homo sapiens
  siRNA target sequence for PKD2L1 (NM_016112.2,1906-1924).
ctttcatcaagtgcatttt

SEQ ID NO: 150742 - DNA, 19 bp, Homo sapiens
  siRNA target sequence for PKD2L1 (NM_016112.2,1910-1928).
catcaagtgcattttcact

SEQ ID NO: 150743 - DNA, 19 bp, Homo sapiens
  siRNA target sequence for PKD2L1 (NM_016112.2,1927-1945).
ctcagttccggataatcct

SEQ ID NO: 150744 - DNA, 19 bp, Homo sapiens
  siRNA target sequence for PKD2L1 (NM_016112.2,2056-2074).
ccatcatcaatgacacata

SEQ ID NO: 150745 - DNA, 19 bp, Homo sapiens
  siRNA target sequence for PKD2L1 (NM_016112.2,2241-2259).
gatttcaccaacaccttaa

SEQ ID NO: 150746 - DNA, 19 bp, Homo sapiens
  siRNA target sequence for PKD2L1 (NM_016112.2,2271-2289).
cacgcagagcatgaaatca

SEQ ID NO: 150747 - DNA, 19 bp, Homo sapiens
  siRNA target sequence for PKD2L1 (NM_016112.2,2393-2411).
ggccctcaacactgagatt

SEQ ID NO: 150748 - DNA, 19 bp, Homo sapiens
  siRNA target sequence for PKD2L1 (NM_016112.2,2418-2436).
ctaggccgatctattgtga

SEQ ID NO: 150749 - DNA, 19 bp, Homo sapiens
  siRNA target sequence for PKD2L1 (NM_016112.2,2485-2503).
gggtttcaggagaagaatt

SEQ ID NO: 150750 - DNA, 19 bp, Homo sapiens
  siRNA target sequence for PKD2L1 (NM_016112.2,2551-2569).
gagtagtgtcccagattga

SEQ ID NO: 150751 - DNA, 19 bp, Homo sapiens
  siRNA target sequence for PKD2L1 (NM_016112.2,2714-2732).
gagtgaggttccctataaa

SEQ ID NO: 150752 - DNA, 19 bp, Homo sapiens
  siRNA target sequence for PKD2L1 (NM_016112.2,2720-2738).
ggttccctataaaagagaa

SEQ ID NO: 150753 - DNA, 19 bp, Homo sapiens
  siRNA target sequence for PKD2L2 (NM_014386.1,55-73).
gggcttcgaaacataagtt

SEQ ID NO: 150754 - DNA, 19 bp, Homo sapiens
  siRNA target sequence for PKD2L2 (NM_014386.1,104-122).
cacacttcaggaattgtta

SEQ ID NO: 150755 - DNA, 19 bp, Homo sapiens
  siRNA target sequence for PKD2L2 (NM_014386.1,146-164).
cctatgtatattgactttt

SEQ ID NO: 150756 - DNA, 19 bp, Homo sapiens
  siRNA target sequence for PKD2L2 (NM_014386.1,166-184).
ggatggtaaacccacatat

SEQ ID NO: 150757 - DNA, 19 bp, Homo sapiens
  siRNA target sequence for PKD2L2 (NM_014386.1,191-209).
cttaaacaaggttatgtca

SEQ ID NO: 150758 - DNA, 19 bp, Homo sapiens
  siRNA target sequence for PKD2L2 (NM_014386.1,260-278).
gtccattcgcagcataact

SEQ ID NO: 150759 - DNA, 19 bp, Homo sapiens
  siRNA target sequence for PKD2L2 (NM_014386.1,262-280).
ccattcgcagcataactga

SEQ ID NO: 150760 - DNA, 19 bp, Homo sapiens
  siRNA target sequence for PKD2L2 (NM_014386.1,267-285).
cgcagcataactgattttt

SEQ ID NO: 150761 - DNA, 19 bp, Homo sapiens
  siRNA target sequence for PKD2L2 (NM_014386.1,315-333).
ggtctgtactgggattcat

SEQ ID NO: 150762 - DNA, 19 bp, Homo sapiens
  siRNA target sequence for PKD2L2 (NM_014386.1,323-341).
ctgggattcatggtacaat

SEQ ID NO: 150763 - DNA, 19 bp, Homo sapiens
  siRNA target sequence for PKD2L2 (NM_014386.1,325-343).
gggattcatggtacaataa

SEQ ID NO: 150764 - DNA, 19 bp, Homo sapiens
  siRNA target sequence for PKD2L2 (NM_014386.1,368-386).
cagcagtcgcatctactat

SEQ ID NO: 150765 - DNA, 19 bp, Homo sapiens
  siRNA target sequence for PKD2L2 (NM_014386.1,370-388).
gcagtcgcatctactatga

SEQ ID NO: 150766 - DNA, 19 bp, Homo sapiens
  siRNA target sequence for PKD2L2 (NM_014386.1,371-389).
cagtcgcatctactatgaa

SEQ ID NO: 150767 - DNA, 19 bp, Homo sapiens
  siRNA target sequence for PKD2L2 (NM_014386.1,373-391).
gtcgcatctactatgaaaa

SEQ ID NO: 150768 - DNA, 19 bp, Homo sapiens
  siRNA target sequence for PKD2L2 (NM_014386.1,375-393).
cgcatctactatgaaaata

SEQ ID NO: 150769 - DNA, 19 bp, Homo sapiens
  siRNA target sequence for PKD2L2 (NM_014386.1,376-394).
gcatctactatgaaaatat

SEQ ID NO: 150770 - DNA, 19 bp, Homo sapiens
  siRNA target sequence for PKD2L2 (NM_014386.1,380-398).
ctactatgaaaatatactt

SEQ ID NO: 150771 - DNA, 19 bp, Homo sapiens
  siRNA target sequence for PKD2L2 (NM_014386.1,412-430).
gagttcgtcaactaaaagt

SEQ ID NO: 150772 - DNA, 19 bp, Homo sapiens
  siRNA target sequence for PKD2L2 (NM_014386.1,423-441).
ctaaaagtccgcaacaaca

SEQ ID NO: 150773 - DNA, 19 bp, Homo sapiens
  siRNA target sequence for PKD2L2 (NM_014386.1,431-449).
ccgcaacaacacatgcaaa

SEQ ID NO: 150774 - DNA, 19 bp, Homo sapiens
  siRNA target sequence for PKD2L2 (NM_014386.1,467-485).
gtctttgatgagtgaatgt

SEQ ID NO: 150775 - DNA, 19 bp, Homo sapiens
  siRNA target sequence for PKD2L2 (NM_014386.1,550-568).
ggagatattctacttctaa

SEQ ID NO: 150776 - DNA, 19 bp, Homo sapiens
  siRNA target sequence for PKD2L2 (NM_014386.1,589-607).
ggggatttcttggtgttta

SEQ ID NO: 150777 - DNA, 19 bp, Homo sapiens
  siRNA target sequence for PKD2L2 (NM_014386.1,608-626).
ccgaaatgggggatacatt

SEQ ID NO: 150778 - DNA, 19 bp, Homo sapiens
  siRNA target sequence for PKD2L2 (NM_014386.1,629-647).
cactttatcaaaatcgaaa

SEQ ID NO: 150779 - DNA, 19 bp, Homo sapiens
  siRNA target sequence for PKD2L2 (NM_014386.1,695-713).
cacaagagggactagagtt

SEQ ID NO: 150780 - DNA, 19 bp, Homo sapiens
  siRNA target sequence for PKD2L2 (NM_014386.1,697-715).
caagagggactagagttat

SEQ ID NO: 150781 - DNA, 19 bp, Homo sapiens
  siRNA target sequence for PKD2L2 (NM_014386.1,700-718).
gagggactagagttatttt

SEQ ID NO: 150782 - DNA, 19 bp, Homo sapiens
  siRNA target sequence for PKD2L2 (NM_014386.1,702-720).
gggactagagttattttta

SEQ ID NO: 150783 - DNA, 19 bp, Homo sapiens
  siRNA target sequence for PKD2L2 (NM_014386.1,789-807).
gcaactggaggaatactta

SEQ ID NO: 150784 - DNA, 19 bp, Homo sapiens
  siRNA target sequence for PKD2L2 (NM_014386.1,830-848).
gaagctcctcagatatgtt

SEQ ID NO: 150785 - DNA, 19 bp, Homo sapiens
  siRNA target sequence for PKD2L2 (NM_014386.1,839-857).
cagatatgttagctactat

SEQ ID NO: 150786 - DNA, 19 bp, Homo sapiens
  siRNA target sequence for PKD2L2 (NM_014386.1,841-859).
gatatgttagctactatga

SEQ ID NO: 150787 - DNA, 19 bp, Homo sapiens
  siRNA target sequence for PKD2L2 (NM_014386.1,846-864).
gttagctactatgactatt

SEQ ID NO: 150788 - DNA, 19 bp, Homo sapiens
  siRNA target sequence for PKD2L2 (NM_014386.1,970-988).
ggaactggctagaattgct

SEQ ID NO: 150789 - DNA, 19 bp, Homo sapiens
  siRNA target sequence for PKD2L2 (NM_014386.1,1014-1032).
gtttccttcaacacatact

SEQ ID NO: 150790 - DNA, 19 bp, Homo sapiens
  siRNA target sequence for PKD2L2 (NM_014386.1,1018-1036).
ccttcaacacatactataa

SEQ ID NO: 150791 - DNA, 19 bp, Homo sapiens
  siRNA target sequence for PKD2L2 (NM_014386.1,1022-1040).
caacacatactataatgta

SEQ ID NO: 150792 - DNA, 19 bp, Homo sapiens
  siRNA target sequence for PKD2L2 (NM_014386.1,1025-1043).
cacatactataatgtacaa

SEQ ID NO: 150793 - DNA, 19 bp, Homo sapiens
  siRNA target sequence for PKD2L2 (NM_014386.1,1027-1045).
catactataatgtacaaat

SEQ ID NO: 150794 - DNA, 19 bp, Homo sapiens
  siRNA target sequence for PKD2L2 (NM_014386.1,1059-1077).
ggacagctgttgaaaagta

SEQ ID NO: 150795 - DNA, 19 bp, Homo sapiens
  siRNA target sequence for PKD2L2 (NM_014386.1,1064-1082).
gctgttgaaaagtactgaa

SEQ ID NO: 150796 - DNA, 19 bp, Homo sapiens
  siRNA target sequence for PKD2L2 (NM_014386.1,1104-1122).
cttgcatgctggcacattt

SEQ ID NO: 150797 - DNA, 19 bp, Homo sapiens
  siRNA target sequence for PKD2L2 (NM_014386.1,1112-1130).
ctggcacatttattacaat

SEQ ID NO: 150798 - DNA, 19 bp, Homo sapiens
  siRNA target sequence for PKD2L2 (NM_014386.1,1148-1166).
catcttttttgcatggata

SEQ ID NO: 150799 - DNA, 19 bp, Homo sapiens
  siRNA target sequence for PKD2L2 (NM_014386.1,1162-1180).
ggataaagatattcaaatt

SEQ ID NO: 150800 - DNA, 19 bp, Homo sapiens
  siRNA target sequence for PKD2L2 (NM_014386.1,1219-1237).
ccttgtcccgttgtgttaa

SEQ ID NO: 150801 - DNA, 19 bp, Homo sapiens
  siRNA target sequence for PKD2L2 (NM_014386.1,1225-1243).
cccgttgtgttaaagacat

SEQ ID NO: 150802 - DNA, 19 bp, Homo sapiens
  siRNA target sequence for PKD2L2 (NM_014386.1,1226-1244).
ccgttgtgttaaagacata

SEQ ID NO: 150803 - DNA, 19 bp, Homo sapiens
  siRNA target sequence for PKD2L2 (NM_014386.1,1245-1263).
gtaggatttgccatcatgt

SEQ ID NO: 150804 - DNA, 19 bp, Homo sapiens
  siRNA target sequence for PKD2L2 (NM_014386.1,1288-1306).
cccagttaggatttcttgt

SEQ ID NO: 150805 - DNA, 19 bp, Homo sapiens
  siRNA target sequence for PKD2L2 (NM_014386.1,1336-1354).
cttttcagaattccatatt

SEQ ID NO: 150806 - DNA, 19 bp, Homo sapiens
  siRNA target sequence for PKD2L2 (NM_014386.1,1357-1375).
cacaatttcgaattgttct

SEQ ID NO: 150807 - DNA, 19 bp, Homo sapiens
  siRNA target sequence for PKD2L2 (NM_014386.1,1481-1499).
cttggcaattattaatgat

SEQ ID NO: 150808 - DNA, 19 bp, Homo sapiens
  siRNA target sequence for PKD2L2 (NM_014386.1,1486-1504).
caattattaatgataccta

SEQ ID NO: 150809 - DNA, 19 bp, Homo sapiens
  siRNA target sequence for PKD2L2 (NM_014386.1,1514-1532).
gaaagctgactattcaata

SEQ ID NO: 150810 - DNA, 19 bp, Homo sapiens
  siRNA target sequence for PKD2L2 (NM_014386.1,1682-1700).
ctttgacgaaaatgagatt

SEQ ID NO: 150811 - DNA, 19 bp, Homo sapiens
  siRNA target sequence for PKD2L2 (NM_014386.1,1733-1751).
gaggcttgagaaaaagtat

SEQ ID NO: 150812 - DNA, 19 bp, Homo sapiens
  siRNA target sequence for PKD2L2 (NM_014386.1,1735-1753).
ggcttgagaaaaagtatta

SEQ ID NO: 150813 - DNA, 19 bp, Homo sapiens
  siRNA target sequence for PKD2L2 (NM_014386.1,1787-1805).
cactcaagaagaatttcga

SEQ ID NO: 150814 - DNA, 19 bp, Homo sapiens
  siRNA target sequence for PKD2L2 (NM_014386.1,1810-1828).
gcaccacaaccaagtacaa

SEQ ID NO: 150815 - DNA, 19 bp, Homo sapiens
  siRNA target sequence for PKD2L2 (NM_014386.1,1819-1837).
ccaagtacaaaatgagatt

SEQ ID NO: 150816 - DNA, 19 bp, Homo sapiens
  siRNA target sequence for PKDREJ (NM_006071.1,620-638).
ccgtgtcctgtcagataaa

SEQ ID NO: 150817 - DNA, 19 bp, Homo sapiens
  siRNA target sequence for PKDREJ (NM_006071.1,652-670).
cagcgcgtgaggatcaaca

SEQ ID NO: 150818 - DNA, 19 bp, Homo sapiens
  siRNA target sequence for PKDREJ (NM_006071.1,854-872).
ggaacagccccttgttcat

SEQ ID NO: 150819 - DNA, 19 bp, Homo sapiens
  siRNA target sequence for PKDREJ (NM_006071.1,870-888).
cattcacatccccaataat

SEQ ID NO: 150820 - DNA, 19 bp, Homo sapiens
  siRNA target sequence for PKDREJ (NM_006071.1,874-892).
cacatccccaataattcgt

SEQ ID NO: 150821 - DNA, 19 bp, Homo sapiens
  siRNA target sequence for PKDREJ (NM_006071.1,876-894).
catccccaataattcgtta

SEQ ID NO: 150822 - DNA, 19 bp, Homo sapiens
  siRNA target sequence for PKDREJ (NM_006071.1,880-898).
cccaataattcgttacagt

SEQ ID NO: 150823 - DNA, 19 bp, Homo sapiens
  siRNA target sequence for PKDREJ (NM_006071.1,891-909).
gttacagtggggagtgtat

SEQ ID NO: 150824 - DNA, 19 bp, Homo sapiens
  siRNA target sequence for PKDREJ (NM_006071.1,901-919).
ggagtgtatgtgtttaatt

SEQ ID NO: 150825 - DNA, 19 bp, Homo sapiens
  siRNA target sequence for PKDREJ (NM_006071.1,1155-1173).
ctacggtggggatcgaata

SEQ ID NO: 150826 - DNA, 19 bp, Homo sapiens
  siRNA target sequence for PKDREJ (NM_006071.1,1160-1178).
gtggggatcgaataatcct

SEQ ID NO: 150827 - DNA, 19 bp, Homo sapiens
  siRNA target sequence for PKDREJ (NM_006071.1,1203-1221).
cgagcaggccaatctgaaa

SEQ ID NO: 150828 - DNA, 19 bp, Homo sapiens
  siRNA target sequence for PKDREJ (NM_006071.1,1204-1222).
gagcaggccaatctgaaat

SEQ ID NO: 150829 - DNA, 19 bp, Homo sapiens
  siRNA target sequence for PKDREJ (NM_006071.1,1250-1268).
cacttttgccagaaacact

SEQ ID NO: 150830 - DNA, 19 bp, Homo sapiens
  siRNA target sequence for PKDREJ (NM_006071.1,1273-1291).
ggcgaccacgtgtatttct

SEQ ID NO: 150831 - DNA, 19 bp, Homo sapiens
  siRNA target sequence for PKDREJ (NM_006071.1,1380-1398).
cacatgtatcgaaaattgt

SEQ ID NO: 150832 - DNA, 19 bp, Homo sapiens
  siRNA target sequence for PKDREJ (NM_006071.1,1382-1400).
catgtatcgaaaattgtga

SEQ ID NO: 150833 - DNA, 19 bp, Homo sapiens
  siRNA target sequence for PKDREJ (NM_006071.1,1407-1425).
cttcattgtctctgataga

SEQ ID NO: 150834 - DNA, 19 bp, Homo sapiens
  siRNA target sequence for PKDREJ (NM_006071.1,1434-1452).
gttcctaaattgcacaaat

SEQ ID NO: 150835 - DNA, 19 bp, Homo sapiens
  siRNA target sequence for PKDREJ (NM_006071.1,1454-1472).
gtgcaagccgtgatttcta

SEQ ID NO: 150836 - DNA, 19 bp, Homo sapiens
  siRNA target sequence for PKDREJ (NM_006071.1,1456-1474).
gcaagccgtgatttctata

SEQ ID NO: 150837 - DNA, 19 bp, Homo sapiens
  siRNA target sequence for PKDREJ (NM_006071.1,1457-1475).
caagccgtgatttctataa

SEQ ID NO: 150838 - DNA, 19 bp, Homo sapiens
  siRNA target sequence for PKDREJ (NM_006071.1,1496-1514).
caggtggtgagatgctatt

SEQ ID NO: 150839 - DNA, 19 bp, Homo sapiens
  siRNA target sequence for PKDREJ (NM_006071.1,1549-1567).
ggtgcttatctgtctataa

SEQ ID NO: 150840 - DNA, 19 bp, Homo sapiens
  siRNA target sequence for PKDREJ (NM_006071.1,1560-1578).
gtctataaaagcttttgct

SEQ ID NO: 150841 - DNA, 19 bp, Homo sapiens
  siRNA target sequence for PKDREJ (NM_006071.1,1577-1595).
cttttcggcattttttgga

SEQ ID NO: 150842 - DNA, 19 bp, Homo sapiens
  siRNA target sequence for PKDREJ (NM_006071.1,1682-1700).
ctcagatcggagaatgcaa

SEQ ID NO: 150843 - DNA, 19 bp, Homo sapiens
  siRNA target sequence for PKDREJ (NM_006071.1,1686-1704).
gatcggagaatgcaaaatt

SEQ ID NO: 150844 - DNA, 19 bp, Homo sapiens
  siRNA target sequence for PKDREJ (NM_006071.1,1724-1742).
cacttattactaaatttgt

SEQ ID NO: 150845 - DNA, 19 bp, Homo sapiens
  siRNA target sequence for PKDREJ (NM_006071.1,1741-1759).
gttgtccagtgtagtaatt

SEQ ID NO: 150846 - DNA, 19 bp, Homo sapiens
  siRNA target sequence for PKDREJ (NM_006071.1,1754-1772).
gtaattttagggataagca

SEQ ID NO: 150847 - DNA, 19 bp, Homo sapiens
  siRNA target sequence for PKDREJ (NM_006071.1,1770-1788).
gcacgtccctcttacatat

SEQ ID NO: 150848 - DNA, 19 bp, Homo sapiens
  siRNA target sequence for PKDREJ (NM_006071.1,1774-1792).
gtccctcttacatataaaa

SEQ ID NO: 150849 - DNA, 19 bp, Homo sapiens
  siRNA target sequence for PKDREJ (NM_006071.1,1810-1828).
cacagtgttggtgaaatca

SEQ ID NO: 150850 - DNA, 19 bp, Homo sapiens
  siRNA target sequence for PKDREJ (NM_006071.1,1812-1830).
cagtgttggtgaaatcagt

SEQ ID NO: 150851 - DNA, 19 bp, Homo sapiens
  siRNA target sequence for PKDREJ (NM_006071.1,1819-1837).
ggtgaaatcagttcagtaa

SEQ ID NO: 150852 - DNA, 19 bp, Homo sapiens
  siRNA target sequence for PKDREJ (NM_006071.1,1909-1927).
ggtatgttggctagtcaat

SEQ ID NO: 150853 - DNA, 19 bp, Homo sapiens
  siRNA target sequence for PKDREJ (NM_006071.1,1910-1928).
gtatgttggctagtcaata

SEQ ID NO: 150854 - DNA, 19 bp, Homo sapiens
  siRNA target sequence for PKDREJ (NM_006071.1,1922-1940).
gtcaatatggcttgaagat

SEQ ID NO: 150855 - DNA, 19 bp, Homo sapiens
  siRNA target sequence for PKDREJ (NM_006071.1,1924-1942).
caatatggcttgaagatat

SEQ ID NO: 150856 - DNA, 19 bp, Homo sapiens
  siRNA target sequence for PKDREJ (NM_006071.1,1946-1964).
cccaggtctatgattctct

SEQ ID NO: 150857 - DNA, 19 bp, Homo sapiens
  siRNA target sequence for PKDREJ (NM_006071.1,1947-1965).
ccaggtctatgattctcta

SEQ ID NO: 150858 - DNA, 19 bp, Homo sapiens
  siRNA target sequence for PKDREJ (NM_006071.1,2058-2076).
caccgtgggaccaagttca

SEQ ID NO: 150859 - DNA, 19 bp, Homo sapiens
  siRNA target sequence for PKDREJ (NM_006071.1,2079-2097).
gctgtctactttgattcaa

SEQ ID NO: 150860 - DNA, 19 bp, Homo sapiens
  siRNA target sequence for PKDREJ (NM_006071.1,2116-2134).
gcaggttacttactgtata

SEQ ID NO: 150861 - DNA, 19 bp, Homo sapiens
  siRNA target sequence for PKDREJ (NM_006071.1,2137-2155).
gtagcttccgttttgaata

SEQ ID NO: 150862 - DNA, 19 bp, Homo sapiens
  siRNA target sequence for PKDREJ (NM_006071.1,2144-2162).
ccgttttgaataacatgaa

SEQ ID NO: 150863 - DNA, 19 bp, Homo sapiens
  siRNA target sequence for PKDREJ (NM_006071.1,2189-2207).
gagtcaatctccgaaaaca

SEQ ID NO: 150864 - DNA, 19 bp, Homo sapiens
  siRNA target sequence for PKDREJ (NM_006071.1,2263-2281).
gtagtcatgactattacca

SEQ ID NO: 150865 - DNA, 19 bp, Homo sapiens
  siRNA target sequence for PKDREJ (NM_006071.1,2266-2284).
gtcatgactattaccaaat

SEQ ID NO: 150866 - DNA, 19 bp, Homo sapiens
  siRNA target sequence for PKDREJ (NM_006071.1,2339-2357).
gggtatggcaagcaaatca

SEQ ID NO: 150867 - DNA, 19 bp, Homo sapiens
  siRNA target sequence for PKDREJ (NM_006071.1,2395-2413).
cgatctgaacaaatagaaa

SEQ ID NO: 150868 - DNA, 19 bp, Homo sapiens
  siRNA target sequence for PKDREJ (NM_006071.1,2399-2417).
ctgaacaaatagaaatcgt

SEQ ID NO: 150869 - DNA, 19 bp, Homo sapiens
  siRNA target sequence for PKDREJ (NM_006071.1,2415-2433).
cgtgagtactggaatacta

SEQ ID NO: 150870 - DNA, 19 bp, Homo sapiens
  siRNA target sequence for PKDREJ (NM_006071.1,2425-2443).
ggaatactaatgagtttgt

SEQ ID NO: 150871 - DNA, 19 bp, Homo sapiens
  siRNA target sequence for PKDREJ (NM_006071.1,2438-2456).
gtttgtctaatattcttaa

SEQ ID NO: 150872 - DNA, 19 bp, Homo sapiens
  siRNA target sequence for PKDREJ (NM_006071.1,2462-2480).
cttctcctcaccaagtagt

SEQ ID NO: 150873 - DNA, 19 bp, Homo sapiens
  siRNA target sequence for PKDREJ (NM_006071.1,2465-2483).
ctcctcaccaagtagttaa

SEQ ID NO: 150874 - DNA, 19 bp, Homo sapiens
  siRNA target sequence for PKDREJ (NM_006071.1,2468-2486).
ctcaccaagtagttaaaga

SEQ ID NO: 150875 - DNA, 19 bp, Homo sapiens
  siRNA target sequence for PKDREJ (NM_006071.1,2493-2511).
ctatgtaatagaatctcta

SEQ ID NO: 150876 - DNA, 19 bp, Homo sapiens
  siRNA target sequence for PKDREJ (NM_006071.1,2519-2537).
caatactggctaataaagt

SEQ ID NO: 150877 - DNA, 19 bp, Homo sapiens
  siRNA target sequence for PKDREJ (NM_006071.1,2568-2586).
ccccaatttcaacatgtat

SEQ ID NO: 150878 - DNA, 19 bp, Homo sapiens
  siRNA target sequence for PKDREJ (NM_006071.1,2587-2605).
gtcaagaaagttgaaaagt

SEQ ID NO: 150879 - DNA, 19 bp, Homo sapiens
  siRNA target sequence for PKDREJ (NM_006071.1,2695-2713).
gcaaatggtcccatttcta

SEQ ID NO: 150880 - DNA, 19 bp, Homo sapiens
  siRNA target sequence for PKDREJ (NM_006071.1,2737-2755).
gacctctttccttggttaa

SEQ ID NO: 150881 - DNA, 19 bp, Homo sapiens
  siRNA target sequence for PKDREJ (NM_006071.1,2778-2796).
ggaggtgtctggattcaga

SEQ ID NO: 150882 - DNA, 19 bp, Homo sapiens
  siRNA target sequence for PKDREJ (NM_006071.1,2840-2858).
ctgatgtagcggaagtgta

SEQ ID NO: 150883 - DNA, 19 bp, Homo sapiens
  siRNA target sequence for PKDREJ (NM_006071.1,2877-2895).
gacctttgcagcttttaat

SEQ ID NO: 150884 - DNA, 19 bp, Homo sapiens
  siRNA target sequence for PKDREJ (NM_006071.1,2879-2897).
cctttgcagcttttaatct

SEQ ID NO: 150885 - DNA, 19 bp, Homo sapiens
  siRNA target sequence for PKDREJ (NM_006071.1,2920-2938).
gttgatgggtccttgaaga

SEQ ID NO: 150886 - DNA, 19 bp, Homo sapiens
  siRNA target sequence for PKDREJ (NM_006071.1,2923-2941).
gatgggtccttgaagaaga

SEQ ID NO: 150887 - DNA, 19 bp, Homo sapiens
  siRNA target sequence for PKDREJ (NM_006071.1,2988-3006).
ggttctggtccacatagta

SEQ ID NO: 150888 - DNA, 19 bp, Homo sapiens
  siRNA target sequence for PKDREJ (NM_006071.1,2994-3012).
ggtccacatagtaacagaa

SEQ ID NO: 150889 - DNA, 19 bp, Homo sapiens
  siRNA target sequence for PKDREJ (NM_006071.1,3180-3198).
gtccctgctgcaactcata

SEQ ID NO: 150890 - DNA, 19 bp, Homo sapiens
  siRNA target sequence for PKDREJ (NM_006071.1,3219-3237).
ccactgtactgtatccata

SEQ ID NO: 150891 - DNA, 19 bp, Homo sapiens
  siRNA target sequence for PKDREJ (NM_006071.1,3244-3262).
caggcacctcgttttgtca

SEQ ID NO: 150892 - DNA, 19 bp, Homo sapiens
  siRNA target sequence for PKDREJ (NM_006071.1,3248-3266).
cacctcgttttgtcatgaa

SEQ ID NO: 150893 - DNA, 19 bp, Homo sapiens
  siRNA target sequence for PKDREJ (NM_006071.1,3259-3277).
gtcatgaagctcaatgaca

SEQ ID NO: 150894 - DNA, 19 bp, Homo sapiens
  siRNA target sequence for PKDREJ (NM_006071.1,3337-3355).
gaatggagagagggttatt

SEQ ID NO: 150895 - DNA, 19 bp, Homo sapiens
  siRNA target sequence for PKDREJ (NM_006071.1,3341-3359).
ggagagagggttattgcat

SEQ ID NO: 150896 - DNA, 19 bp, Homo sapiens
  siRNA target sequence for PKDREJ (NM_006071.1,3342-3360).
gagagagggttattgcatt

SEQ ID NO: 150897 - DNA, 19 bp, Homo sapiens
  siRNA target sequence for PKDREJ (NM_006071.1,3390-3408).
gcactgcatctgcaagaat

SEQ ID NO: 150898 - DNA, 19 bp, Homo sapiens
  siRNA target sequence for PKDREJ (NM_006071.1,3393-3411).
ctgcatctgcaagaatgta

SEQ ID NO: 150899 - DNA, 19 bp, Homo sapiens
  siRNA target sequence for PKDREJ (NM_006071.1,3460-3478).
ctgcatacccactatgtga

SEQ ID NO: 150900 - DNA, 19 bp, Homo sapiens
  siRNA target sequence for PKDREJ (NM_006071.1,3489-3507).
gattgtgatccctaatcct

SEQ ID NO: 150901 - DNA, 19 bp, Homo sapiens
  siRNA target sequence for PKDREJ (NM_006071.1,3506-3524).
ctgtggatctacggttaaa

SEQ ID NO: 150902 - DNA, 19 bp, Homo sapiens
  siRNA target sequence for PKDREJ (NM_006071.1,3508-3526).
gtggatctacggttaaaca

SEQ ID NO: 150903 - DNA, 19 bp, Homo sapiens
  siRNA target sequence for PKDREJ (NM_006071.1,3511-3529).
gatctacggttaaacatca

SEQ ID NO: 150904 - DNA, 19 bp, Homo sapiens
  siRNA target sequence for PKDREJ (NM_006071.1,3514-3532).
ctacggttaaacatcatca

SEQ ID NO: 150905 - DNA, 19 bp, Homo sapiens
  siRNA target sequence for PKDREJ (NM_006071.1,3654-3672).
gatagttctaccagataat

SEQ ID NO: 150906 - DNA, 19 bp, Homo sapiens
  siRNA target sequence for PKDREJ (NM_006071.1,3667-3685).
gataatgatccttatgata

SEQ ID NO: 150907 - DNA, 19 bp, Homo sapiens
  siRNA target sequence for PKDREJ (NM_006071.1,3676-3694).
ccttatgataatttatgct

SEQ ID NO: 150908 - DNA, 19 bp, Homo sapiens
  siRNA target sequence for PKDREJ (NM_006071.1,3780-3798).
cagcgacgtgcattgttta

SEQ ID NO: 150909 - DNA, 19 bp, Homo sapiens
  siRNA target sequence for PKDREJ (NM_006071.1,3826-3844).
cgaggtagcatcaacactt

SEQ ID NO: 150910 - DNA, 19 bp, Homo sapiens
  siRNA target sequence for PKDREJ (NM_006071.1,3827-3845).
gaggtagcatcaacacttt

SEQ ID NO: 150911 - DNA, 19 bp, Homo sapiens
  siRNA target sequence for PKDREJ (NM_006071.1,3913-3931).
cgatcgcctagctggtatt

SEQ ID NO: 150912 - DNA, 19 bp, Homo sapiens
  siRNA target sequence for PKDREJ (NM_006071.1,3914-3932).
gatcgcctagctggtattt

SEQ ID NO: 150913 - DNA, 19 bp, Homo sapiens
  siRNA target sequence for PKDREJ (NM_006071.1,3918-3936).
gcctagctggtatttaagt

SEQ ID NO: 150914 - DNA, 19 bp, Homo sapiens
  siRNA target sequence for PKDREJ (NM_006071.1,3919-3937).
cctagctggtatttaagta

SEQ ID NO: 150915 - DNA, 19 bp, Homo sapiens
  siRNA target sequence for PKDREJ (NM_006071.1,3955-3973).
ctgtttagcaggcacattt

SEQ ID NO: 150916 - DNA, 19 bp, Homo sapiens
  siRNA target sequence for PKDREJ (NM_006071.1,3965-3983).
ggcacatttggctgttcat

SEQ ID NO: 150917 - DNA, 19 bp, Homo sapiens
  siRNA target sequence for PKDREJ (NM_006071.1,3966-3984).
gcacatttggctgttcata

SEQ ID NO: 150918 - DNA, 19 bp, Homo sapiens
  siRNA target sequence for PKDREJ (NM_006071.1,4045-4063).
gatgagcgtctgactagaa

SEQ ID NO: 150919 - DNA, 19 bp, Homo sapiens
  siRNA target sequence for PKDREJ (NM_006071.1,4051-4069).
cgtctgactagaaaagact

SEQ ID NO: 150920 - DNA, 19 bp, Homo sapiens
  siRNA target sequence for PKDREJ (NM_006071.1,4088-4106).
gtagtaatctccggaaaaa

SEQ ID NO: 150921 - DNA, 19 bp, Homo sapiens
  siRNA target sequence for PKDREJ (NM_006071.1,4091-4109).
gtaatctccggaaaaacca

SEQ ID NO: 150922 - DNA, 19 bp, Homo sapiens
  siRNA target sequence for PKDREJ (NM_006071.1,4107-4125).
ccacatgtggttctctatt

SEQ ID NO: 150923 - DNA, 19 bp, Homo sapiens
  siRNA target sequence for PKDREJ (NM_006071.1,4113-4131).
gtggttctctatttttgct

SEQ ID NO: 150924 - DNA, 19 bp, Homo sapiens
  siRNA target sequence for PKDREJ (NM_006071.1,4196-4214).
gctctcttctttgtaacat

SEQ ID NO: 150925 - DNA, 19 bp, Homo sapiens
  siRNA target sequence for PKDREJ (NM_006071.1,4218-4236).
gttctttaatctaaataga

SEQ ID NO: 150926 - DNA, 19 bp, Homo sapiens
  siRNA target sequence for PKDREJ (NM_006071.1,4269-4287).
catgagatcaatgatgata

SEQ ID NO: 150927 - DNA, 19 bp, Homo sapiens
  siRNA target sequence for PKDREJ (NM_006071.1,4364-4382).
ctcaagcggatctaaagga

SEQ ID NO: 150928 - DNA, 19 bp, Homo sapiens
  siRNA target sequence for PKDREJ (NM_006071.1,4391-4409).
ctcaaaagcatcctctaat

SEQ ID NO: 150929 - DNA, 19 bp, Homo sapiens
  siRNA target sequence for PKDREJ (NM_006071.1,4565-4583).
ggcataggaaagcacaaat

SEQ ID NO: 150930 - DNA, 19 bp, Homo sapiens
  siRNA target sequence for PKDREJ (NM_006071.1,4594-4612).
gagaccctcgggccaaata

SEQ ID NO: 150931 - DNA, 19 bp, Homo sapiens
  siRNA target sequence for PKDREJ (NM_006071.1,4596-4614).
gaccctcgggccaaataca

SEQ ID NO: 150932 - DNA, 19 bp, Homo sapiens
  siRNA target sequence for PKDREJ (NM_006071.1,4598-4616).
ccctcgggccaaatacaaa

SEQ ID NO: 150933 - DNA, 19 bp, Homo sapiens
  siRNA target sequence for PKDREJ (NM_006071.1,4599-4617).
cctcgggccaaatacaaat

SEQ ID NO: 150934 - DNA, 19 bp, Homo sapiens
  siRNA target sequence for PKDREJ (NM_006071.1,4600-4618).
ctcgggccaaatacaaatt

SEQ ID NO: 150935 - DNA, 19 bp, Homo sapiens
  siRNA target sequence for PKDREJ (NM_006071.1,4605-4623).
gccaaatacaaattccaat

SEQ ID NO: 150936 - DNA, 19 bp, Homo sapiens
  siRNA target sequence for PKDREJ (NM_006071.1,4662-4680).
gcacccttcccaaaaggat

SEQ ID NO: 150937 - DNA, 19 bp, Homo sapiens
  siRNA target sequence for PKDREJ (NM_006071.1,4714-4732).
ctaccttggtggtgtgttt

SEQ ID NO: 150938 - DNA, 19 bp, Homo sapiens
  siRNA target sequence for PKDREJ (NM_006071.1,4718-4736).
cttggtggtgtgtttatgt

SEQ ID NO: 150939 - DNA, 19 bp, Homo sapiens
  siRNA target sequence for PKDREJ (NM_006071.1,4756-4774).
gctacttctagcatatcct

SEQ ID NO: 150940 - DNA, 19 bp, Homo sapiens
  siRNA target sequence for PKDREJ (NM_006071.1,4806-4824).
cggctatgacaagtcaata

SEQ ID NO: 150941 - DNA, 19 bp, Homo sapiens
  siRNA target sequence for PKDREJ (NM_006071.1,4809-4827).
ctatgacaagtcaatagaa

SEQ ID NO: 150942 - DNA, 19 bp, Homo sapiens
  siRNA target sequence for PKDREJ (NM_006071.1,4872-4890).
ggtgcagccatctaaaatt

SEQ ID NO: 150943 - DNA, 19 bp, Homo sapiens
  siRNA target sequence for PKDREJ (NM_006071.1,4922-4940).
ccaagtattgcaaaaacct

SEQ ID NO: 150944 - DNA, 19 bp, Homo sapiens
  siRNA target sequence for PKDREJ (NM_006071.1,4923-4941).
caagtattgcaaaaacctt

SEQ ID NO: 150945 - DNA, 19 bp, Homo sapiens
  siRNA target sequence for PKDREJ (NM_006071.1,4980-4998).
ggatggaatgcgtatgcat

SEQ ID NO: 150946 - DNA, 19 bp, Homo sapiens
  siRNA target sequence for PKDREJ (NM_006071.1,4989-5007).
gcgtatgcatccagaagaa

SEQ ID NO: 150947 - DNA, 19 bp, Homo sapiens
  siRNA target sequence for PKDREJ (NM_006071.1,5055-5073).
gtaccaaccccttacagaa

SEQ ID NO: 150948 - DNA, 19 bp, Homo sapiens
  siRNA target sequence for PKDREJ (NM_006071.1,5114-5132).
gaagagcactcctgtttct

SEQ ID NO: 150949 - DNA, 19 bp, Homo sapiens
  siRNA target sequence for PKDREJ (NM_006071.1,5175-5193).
gatccttatcgtcttacta

SEQ ID NO: 150950 - DNA, 19 bp, Homo sapiens
  siRNA target sequence for PKDREJ (NM_006071.1,5194-5212).
cgtcacactgactgctttt

SEQ ID NO: 150951 - DNA, 19 bp, Homo sapiens
  siRNA target sequence for PKDREJ (NM_006071.1,5195-5213).
gtcacactgactgctttta

SEQ ID NO: 150952 - DNA, 19 bp, Homo sapiens
  siRNA target sequence for PKDREJ (NM_006071.1,5199-5217).
cactgactgcttttactat

SEQ ID NO: 150953 - DNA, 19 bp, Homo sapiens
  siRNA target sequence for PKDREJ (NM_006071.1,5214-5232).
ctataaccagtttattcgt

SEQ ID NO: 150954 - DNA, 19 bp, Homo sapiens
  siRNA target sequence for PKDREJ (NM_006071.1,5264-5282).
ctaagctggaagacatcta

SEQ ID NO: 150955 - DNA, 19 bp, Homo sapiens
  siRNA target sequence for PKDREJ (NM_006071.1,5298-5316).
cgtgctgttgcctttgtta

SEQ ID NO: 150956 - DNA, 19 bp, Homo sapiens
  siRNA target sequence for PKDREJ (NM_006071.1,5302-5320).
ctgttgcctttgttacaca

SEQ ID NO: 150957 - DNA, 19 bp, Homo sapiens
  siRNA target sequence for PKDREJ (NM_006071.1,5344-5362).
cctgaaagctcgtctaaaa

SEQ ID NO: 150958 - DNA, 19 bp, Homo sapiens
  siRNA target sequence for PKDREJ (NM_006071.1,5345-5363).
ctgaaagctcgtctaaaat

SEQ ID NO: 150959 - DNA, 19 bp, Homo sapiens
  siRNA target sequence for PKDREJ (NM_006071.1,5365-5383).
cttggccttccattgatga

SEQ ID NO: 150960 - DNA, 19 bp, Homo sapiens
  siRNA target sequence for PKDREJ (NM_006071.1,5382-5400).
gaggcaagtgagagcaaaa

SEQ ID NO: 150961 - DNA, 19 bp, Homo sapiens
  siRNA target sequence for PKDREJ (NM_006071.1,5393-5411).
gagcaaaatctagtgaaaa

SEQ ID NO: 150962 - DNA, 19 bp, Homo sapiens
  siRNA target sequence for PKDREJ (NM_006071.1,5417-5435).
gtctacctgccgaaaagtt

SEQ ID NO: 150963 - DNA, 19 bp, Homo sapiens
  siRNA target sequence for PKDREJ (NM_006071.1,5426-5444).
ccgaaaagtttgtgcaaaa

SEQ ID NO: 150964 - DNA, 19 bp, Homo sapiens
  siRNA target sequence for PKDREJ (NM_006071.1,5548-5566).
gatgagagtaccaatggat

SEQ ID NO: 150965 - DNA, 19 bp, Homo sapiens
  siRNA target sequence for PKDREJ (NM_006071.1,5614-5632).
ctactacacacctatggat

SEQ ID NO: 150966 - DNA, 19 bp, Homo sapiens
  siRNA target sequence for PKDREJ (NM_006071.1,5635-5653).
ggaggatatgcactctatt

SEQ ID NO: 150967 - DNA, 19 bp, Homo sapiens
  siRNA target sequence for PKDREJ (NM_006071.1,5636-5654).
gaggatatgcactctattt

SEQ ID NO: 150968 - DNA, 19 bp, Homo sapiens
  siRNA target sequence for PKDREJ (NM_006071.1,5665-5683).
cagcagcggtttaattcca

SEQ ID NO: 150969 - DNA, 19 bp, Homo sapiens
  siRNA target sequence for PKDREJ (NM_006071.1,5740-5758).
gtggttttggaattaacaa

SEQ ID NO: 150970 - DNA, 19 bp, Homo sapiens
  siRNA target sequence for PKDREJ (NM_006071.1,5742-5760).
ggttttggaattaacaact

SEQ ID NO: 150971 - DNA, 19 bp, Homo sapiens
  siRNA target sequence for PKDREJ (NM_006071.1,5759-5777).
cttttaatccagatataaa

SEQ ID NO: 150972 - DNA, 19 bp, Homo sapiens
  siRNA target sequence for PKDREJ (NM_006071.1,5786-5804).
gtagcatttcggtcatatt

SEQ ID NO: 150973 - DNA, 19 bp, Homo sapiens
  siRNA target sequence for PKDREJ (NM_006071.1,5881-5899).
gcttcagcagaaatctact

SEQ ID NO: 150974 - DNA, 19 bp, Homo sapiens
  siRNA target sequence for PKDREJ (NM_006071.1,5882-5900).
cttcagcagaaatctactt

SEQ ID NO: 150975 - DNA, 19 bp, Homo sapiens
  siRNA target sequence for PKDREJ (NM_006071.1,5885-5903).
cagcagaaatctacttgta

SEQ ID NO: 150976 - DNA, 19 bp, Homo sapiens
  siRNA target sequence for PKDREJ (NM_006071.1,5925-5943).
cttagcctacgttgttgat

SEQ ID NO: 150977 - DNA, 19 bp, Homo sapiens
  siRNA target sequence for PKDREJ (NM_006071.1,5938-5956).
gttgatgagggttgtatca

SEQ ID NO: 150978 - DNA, 19 bp, Homo sapiens
  siRNA target sequence for PKDREJ (NM_006071.1,5946-5964).
gggttgtatcattatgcaa

SEQ ID NO: 150979 - DNA, 19 bp, Homo sapiens
  siRNA target sequence for PKDREJ (NM_006071.1,5976-5994).
ctatgtgagaagtgtgtat

SEQ ID NO: 150980 - DNA, 19 bp, Homo sapiens
  siRNA target sequence for PKDREJ (NM_006071.1,5984-6002).
gaagtgtgtataatttgct

SEQ ID NO: 150981 - DNA, 19 bp, Homo sapiens
  siRNA target sequence for PKDREJ (NM_006071.1,5991-6009).
gtataatttgctcaacttt

SEQ ID NO: 150982 - DNA, 19 bp, Homo sapiens
  siRNA target sequence for PKDREJ (NM_006071.1,6073-6091).
ggcataattcggttttact

SEQ ID NO: 150983 - DNA, 19 bp, Homo sapiens
  siRNA target sequence for PKDREJ (NM_006071.1,6074-6092).
gcataattcggttttactt

SEQ ID NO: 150984 - DNA, 19 bp, Homo sapiens
  siRNA target sequence for PKDREJ (NM_006071.1,6125-6143).
cagtttctcaggtagatca

SEQ ID NO: 150985 - DNA, 19 bp, Homo sapiens
  siRNA target sequence for PKDREJ (NM_006071.1,6131-6149).
ctcaggtagatcacattat

SEQ ID NO: 150986 - DNA, 19 bp, Homo sapiens
  siRNA target sequence for PKDREJ (NM_006071.1,6168-6186).
cctgttatttctgacaatt

SEQ ID NO: 150987 - DNA, 19 bp, Homo sapiens
  siRNA target sequence for PKDREJ (NM_006071.1,6200-6218).
ggtattccagattcttcta

SEQ ID NO: 150988 - DNA, 19 bp, Homo sapiens
  siRNA target sequence for PKDREJ (NM_006071.1,6290-6308).
ccgtgtatttcttcgtata

SEQ ID NO: 150989 - DNA, 19 bp, Homo sapiens
  siRNA target sequence for PKDREJ (NM_006071.1,6292-6310).
gtgtatttcttcgtataca

SEQ ID NO: 150990 - DNA, 19 bp, Homo sapiens
  siRNA target sequence for PKDREJ (NM_006071.1,6303-6321).
cgtatacatggcttttggt

SEQ ID NO: 150991 - DNA, 19 bp, Homo sapiens
  siRNA target sequence for PKDREJ (NM_006071.1,6328-6346).
gtgtttggtcagcatgaat

SEQ ID NO: 150992 - DNA, 19 bp, Homo sapiens
  siRNA target sequence for PKDREJ (NM_006071.1,6340-6358).
catgaatggaactacagta

SEQ ID NO: 150993 - DNA, 19 bp, Homo sapiens
  siRNA target sequence for PKDREJ (NM_006071.1,6480-6498).
ctgcgtcttgatcaactta

SEQ ID NO: 150994 - DNA, 19 bp, Homo sapiens
  siRNA target sequence for PKDREJ (NM_006071.1,6482-6500).
gcgtcttgatcaacttatt

SEQ ID NO: 150995 - DNA, 19 bp, Homo sapiens
  siRNA target sequence for PKDREJ (NM_006071.1,6483-6501).
cgtcttgatcaacttattt

SEQ ID NO: 150996 - DNA, 19 bp, Homo sapiens
  siRNA target sequence for PLA2G10 (NM_003561.1,793-811).
gcggaccggcagagaacaa

SEQ ID NO: 150997 - DNA, 19 bp, Homo sapiens
  siRNA target sequence for PLA2G10 (NM_003561.1,794-812).
cggaccggcagagaacaaa

SEQ ID NO: 150998 - DNA, 19 bp, Homo sapiens
  siRNA target sequence for PLA2G10 (NM_003561.1,795-813).
ggaccggcagagaacaaat

SEQ ID NO: 150999 - DNA, 19 bp, Homo sapiens
  siRNA target sequence for PLA2G10 (NM_003561.1,835-853).
gtgaccaggagattgctaa

SEQ ID NO: 151000 - DNA, 19 bp, Homo sapiens
  siRNA target sequence for PLA2G10 (NM_003561.1,861-879).
gcccaaactgagtacaact

SEQ ID NO: 151001 - DNA, 19 bp, Homo sapiens
  siRNA target sequence for PLA2G1B (NM_000928.2,110-128).
ggcagttccgcaaaatgat

SEQ ID NO: 151002 - DNA, 19 bp, Homo sapiens
  siRNA target sequence for PLA2G1B (NM_000928.2,112-130).
cagttccgcaaaatgatca

SEQ ID NO: 151003 - DNA, 19 bp, Homo sapiens
  siRNA target sequence for PLA2G1B (NM_000928.2,206-224).
gcacccccgtggatgaact

SEQ ID NO: 151004 - DNA, 19 bp, Homo sapiens
  siRNA target sequence for PLA2G1B (NM_000928.2,233-251).
gctgccagacacatgacaa

SEQ ID NO: 151005 - DNA, 19 bp, Homo sapiens
  siRNA target sequence for PLA2G1B (NM_000928.2,270-288).
gaagctggacagctgtaaa

SEQ ID NO: 151006 - DNA, 19 bp, Homo sapiens
  siRNA target sequence for PLA2G1B (NM_000928.2,304-322).
ccgtacacccacacctatt

SEQ ID NO: 151007 - DNA, 19 bp, Homo sapiens
  siRNA target sequence for PLA2G1B (NM_000928.2,374-392).
gtgaggccttcatttgcaa

SEQ ID NO: 151008 - DNA, 19 bp, Homo sapiens
  siRNA target sequence for PLA2G1B (NM_000928.2,422-440).
caaaagctccatataacaa

SEQ ID NO: 151009 - DNA, 19 bp, Homo sapiens
  siRNA target sequence for PLA2G2A (NM_000300.2,331-349).
ggaatttggtgaatttcca

SEQ ID NO: 151010 - DNA, 19 bp, Homo sapiens
  siRNA target sequence for PLA2G2A (NM_000300.2,362-380).
gttgacgacaggaaaggaa

SEQ ID NO: 151011 - DNA, 19 bp, Homo sapiens
  siRNA target sequence for PLA2G2A (NM_000300.2,377-395).
ggaagccgcactcagttat

SEQ ID NO: 151012 - DNA, 19 bp, Homo sapiens
  siRNA target sequence for PLA2G2A (NM_000300.2,501-519).
cgtggatgtggcaccaaat

SEQ ID NO: 151013 - DNA, 19 bp, Homo sapiens
  siRNA target sequence for PLA2G2A (NM_000300.2,522-540).
ctgagctacaagtttagca

SEQ ID NO: 151014 - DNA, 19 bp, Homo sapiens
  siRNA target sequence for PLA2G2A (NM_000300.2,588-606).
caactgtgtgagtgtgata

SEQ ID NO: 151015 - DNA, 19 bp, Homo sapiens
  siRNA target sequence for PLA2G2A (NM_000300.2,612-630).
gctgccacctgttttgcta

SEQ ID NO: 151016 - DNA, 19 bp, Homo sapiens
  siRNA target sequence for PLA2G2A (NM_000300.2,616-634).
ccacctgttttgctagaaa

SEQ ID NO: 151017 - DNA, 19 bp, Homo sapiens
  siRNA target sequence for PLA2G2A (NM_000300.2,635-653).
caagacgacctacaataaa

SEQ ID NO: 151018 - DNA, 19 bp, Homo sapiens
  siRNA target sequence for PLA2G2A (NM_000300.2,640-658).
cgacctacaataaaaagta

SEQ ID NO: 151019 - DNA, 19 bp, Homo sapiens
  siRNA target sequence for PLA2G2A (NM_000300.2,656-674).
gtaccagtactattccaat

SEQ ID NO: 151020 - DNA, 19 bp, Homo sapiens
  siRNA target sequence for PLA2G2E (NM_014589.1,112-130).
cgggaacctggttcagttt

SEQ ID NO: 151021 - DNA, 19 bp, Homo sapiens
  siRNA target sequence for PLA2G2E (NM_014589.1,292-310).
gcccaaactggaaaagtat

SEQ ID NO: 151022 - DNA, 19 bp, Homo sapiens
  siRNA target sequence for PLA2G2E (NM_014589.1,420-438).
gcacctacaaccgcaaata

SEQ ID NO: 151023 - DNA, 19 bp, Homo sapiens
  siRNA target sequence for PLA2G2E (NM_014589.1,421-439).
cacctacaaccgcaaatat

SEQ ID NO: 151024 - DNA, 19 bp, Homo sapiens
  siRNA target sequence for PLA2G2E (NM_014589.1,430-448).
ccgcaaatatgcccattat

SEQ ID NO: 151025 - DNA, 19 bp, Homo sapiens
  siRNA target sequence for PLA2G2F (NM_022819.1,243-261).
ctatgtggaccactatgat

SEQ ID NO: 151026 - DNA, 19 bp, Homo sapiens
  siRNA target sequence for PLA2G2F (NM_022819.1,329-347).
catgcatgtgtgacaagaa

SEQ ID NO: 151027 - DNA, 19 bp, Homo sapiens
  siRNA target sequence for PLA2G2F (NM_022819.1,332-350).
gcatgtgtgacaagaacat

SEQ ID NO: 151028 - DNA, 19 bp, Homo sapiens
  siRNA target sequence for PLA2G2F (NM_022819.1,391-409).
cgtggcttcctcaatgtct

SEQ ID NO: 151029 - DNA, 19 bp, Homo sapiens
  siRNA target sequence for PLA2G2F (NM_022819.1,392-410).
gtggcttcctcaatgtcta

SEQ ID NO: 151030 - DNA, 19 bp, Homo sapiens
  siRNA target sequence for PLA2G2F (NM_022819.1,426-444).
gcccaactgcagcatctat

SEQ ID NO: 151031 - DNA, 19 bp, Homo sapiens
  siRNA target sequence for PLA2G3 (NM_015715.1,809-827).
cgctgcccacagaacatct

SEQ ID NO: 151032 - DNA, 19 bp, Homo sapiens
  siRNA target sequence for PLA2G3 (NM_015715.1,1183-1201).
ggggccaccacatcagaaa

SEQ ID NO: 151033 - DNA, 19 bp, Homo sapiens
  siRNA target sequence for PLA2G3 (NM_015715.1,1698-1716).
gccccatgtcattctacaa

SEQ ID NO: 151034 - DNA, 19 bp, Homo sapiens
  siRNA target sequence for PLA2G5 (NM_000929.1,191-209).
gaggcttgctggacctaaa

SEQ ID NO: 151035 - DNA, 19 bp, Homo sapiens
  siRNA target sequence for PLA2G5 (NM_000929.1,193-211).
ggcttgctggacctaaaat

SEQ ID NO: 151036 - DNA, 19 bp, Homo sapiens
  siRNA target sequence for PLA2G5 (NM_000929.1,195-213).
cttgctggacctaaaatca

SEQ ID NO: 151037 - DNA, 19 bp, Homo sapiens
  siRNA target sequence for PLA2G5 (NM_000929.1,376-394).
cgcacacagtcctacaaat

SEQ ID NO: 151038 - DNA, 19 bp, Homo sapiens
  siRNA target sequence for PLA2G5 (NM_000929.1,377-395).
gcacacagtcctacaaata

SEQ ID NO: 151039 - DNA, 19 bp, Homo sapiens
  siRNA target sequence for PLA2G5 (NM_000929.1,382-400).
cagtcctacaaatacagat

SEQ ID NO: 151040 - DNA, 19 bp, Homo sapiens
  siRNA target sequence for PLCD1 (NM_006225.1,400-418).
ggaccagcgcaatacacta

SEQ ID NO: 151041 - DNA, 19 bp, Homo sapiens
  siRNA target sequence for PLCD1 (NM_006225.1,532-550).
ctcctgcttgcgaaaagct

SEQ ID NO: 151042 - DNA, 19 bp, Homo sapiens
  siRNA target sequence for PLCD1 (NM_006225.1,538-556).
cttgcgaaaagctgacaaa

SEQ ID NO: 151043 - DNA, 19 bp, Homo sapiens
  siRNA target sequence for PLCD1 (NM_006225.1,542-560).
cgaaaagctgacaaaaaca

SEQ ID NO: 151044 - DNA, 19 bp, Homo sapiens
  siRNA target sequence for PLCD1 (NM_006225.1,630-648).
gctatgcccggaagatctt

SEQ ID NO: 151045 - DNA, 19 bp, Homo sapiens
  siRNA target sequence for PLCD1 (NM_006225.1,911-929).
gacggcttcctcatgtact

SEQ ID NO: 151046 - DNA, 19 bp, Homo sapiens
  siRNA target sequence for PLCD1 (NM_006225.1,913-931).
cggcttcctcatgtactta

SEQ ID NO: 151047 - DNA, 19 bp, Homo sapiens
  siRNA target sequence for PLCD1 (NM_006225.1,1153-1171).
catctaccacggctatact

SEQ ID NO: 151048 - DNA, 19 bp, Homo sapiens
  siRNA target sequence for PLCD1 (NM_006225.1,1159-1177).
ccacggctatactttcact

SEQ ID NO: 151049 - DNA, 19 bp, Homo sapiens
  siRNA target sequence for PLCD1 (NM_006225.1,1160-1178).
cacggctatactttcactt

SEQ ID NO: 151050 - DNA, 19 bp, Homo sapiens
  siRNA target sequence for PLCD1 (NM_006225.1,1974-1992).
cacggaagcggctcaacat

SEQ ID NO: 151051 - DNA, 19 bp, Homo sapiens
  siRNA target sequence for PLCD1 (NM_006225.1,2024-2042).
gtcaacaagaataagaatt

SEQ ID NO: 151052 - DNA, 19 bp, Homo sapiens
  siRNA target sequence for PLCD1 (NM_006225.1,2026-2044).
caacaagaataagaattca

SEQ ID NO: 151053 - DNA, 19 bp, Homo sapiens
  siRNA target sequence for PLCD3 (NM_133373.1,412-430).
cgccatcgcagcacatctt

SEQ ID NO: 151054 - DNA, 19 bp, Homo sapiens
  siRNA target sequence for PLCD3 (NM_133373.1,414-432).
ccatcgcagcacatcttct

SEQ ID NO: 151055 - DNA, 19 bp, Homo sapiens
  siRNA target sequence for PLCD3 (NM_133373.1,1199-1217).
cagcaccgaggcctatgtt

SEQ ID NO: 151056 - DNA, 19 bp, Homo sapiens
  siRNA target sequence for PLCD3 (NM_133373.1,1273-1291).
gaggggagcccgtcatcta

SEQ ID NO: 151057 - DNA, 19 bp, Homo sapiens
  siRNA target sequence for PLCD3 (NM_133373.1,1276-1294).
gggagcccgtcatctatca

SEQ ID NO: 151058 - DNA, 19 bp, Homo sapiens
  siRNA target sequence for PLCD3 (NM_133373.1,1277-1295).
ggagcccgtcatctatcat

SEQ ID NO: 151059 - DNA, 19 bp, Homo sapiens
  siRNA target sequence for PLCD3 (NM_133373.1,2003-2021).
gtgtggctacgtcctaaaa

SEQ ID NO: 151060 - DNA, 19 bp, Homo sapiens
  siRNA target sequence for PLCD3 (NM_133373.1,2160-2178).
cccctggtgcgcattgaga

SEQ ID NO: 151061 - DNA, 19 bp, Homo sapiens
  siRNA target sequence for PLCD3 (NM_133373.1,2161-2179).
ccctggtgcgcattgagat

SEQ ID NO: 151062 - DNA, 19 bp, Homo sapiens
  siRNA target sequence for PLCD3 (NM_133373.1,2215-2233).
ctgactacgtgctcaacaa

SEQ ID NO: 151063 - DNA, 19 bp, Homo sapiens
  siRNA target sequence for PLCD3 (NM_133373.1,2340-2358).
gactttgtgggccagttta

SEQ ID NO: 151064 - DNA, 19 bp, Homo sapiens
  siRNA target sequence for PLCD3 (NM_133373.1,2342-2360).
ctttgtgggccagtttaca

SEQ ID NO: 151065 - DNA, 19 bp, Homo sapiens
  siRNA target sequence for PLCD3 (NM_133373.1,2365-2383).
ctcttagcagcctaaagca

SEQ ID NO: 151066 - DNA, 19 bp, Homo sapiens
  siRNA target sequence for PLCD4 (NM_032726.2,268-286).
cgcaaggtgaggtccaaaa

SEQ ID NO: 151067 - DNA, 19 bp, Homo sapiens
  siRNA target sequence for PLCD4 (NM_032726.2,369-387).
gcccagcttctcaatctct

SEQ ID NO: 151068 - DNA, 19 bp, Homo sapiens
  siRNA target sequence for PLCD4 (NM_032726.2,384-402).
ctctgatgtggagacaata

SEQ ID NO: 151069 - DNA, 19 bp, Homo sapiens
  siRNA target sequence for PLCD4 (NM_032726.2,520-538).
gttgaggaggcccagatat

SEQ ID NO: 151070 - DNA, 19 bp, Homo sapiens
  siRNA target sequence for PLCD4 (NM_032726.2,621-639).
gtttcaacgtggagacaaa

SEQ ID NO: 151071 - DNA, 19 bp, Homo sapiens
  siRNA target sequence for PLCD4 (NM_032726.2,643-661).
caggatggtaagatgagtt

SEQ ID NO: 151072 - DNA, 19 bp, Homo sapiens
  siRNA target sequence for PLCD4 (NM_032726.2,676-694).
cggttattgcacctaatga

SEQ ID NO: 151073 - DNA, 19 bp, Homo sapiens
  siRNA target sequence for PLCD4 (NM_032726.2,775-793).
gaattcgtacagttctata

SEQ ID NO: 151074 - DNA, 19 bp, Homo sapiens
  siRNA target sequence for PLCD4 (NM_032726.2,786-804).
gttctataaggcattgact

SEQ ID NO: 151075 - DNA, 19 bp, Homo sapiens
  siRNA target sequence for PLCD4 (NM_032726.2,820-838).
caggaactgtttgaaagtt

SEQ ID NO: 151076 - DNA, 19 bp, Homo sapiens
  siRNA target sequence for PLCD4 (NM_032726.2,1008-1026).
ctacctctgctctaaggat

SEQ ID NO: 151077 - DNA, 19 bp, Homo sapiens
  siRNA target sequence for PLCD4 (NM_032726.2,1054-1072).
cccatctatcaggatatga

SEQ ID NO: 151078 - DNA, 19 bp, Homo sapiens
  siRNA target sequence for PLCD4 (NM_032726.2,1148-1166).
gcagcgtcgagggatatat

SEQ ID NO: 151079 - DNA, 19 bp, Homo sapiens
  siRNA target sequence for PLCD4 (NM_032726.2,1149-1167).
cagcgtcgagggatatata

SEQ ID NO: 151080 - DNA, 19 bp, Homo sapiens
  siRNA target sequence for PLCD4 (NM_032726.2,1223-1241).
gcggggaacctgtcgttta

SEQ ID NO: 151081 - DNA, 19 bp, Homo sapiens
  siRNA target sequence for PLCD4 (NM_032726.2,1260-1278).
ctcccgcatcctgttcaaa

SEQ ID NO: 151082 - DNA, 19 bp, Homo sapiens
  siRNA target sequence for PLCD4 (NM_032726.2,1287-1305).
ggccacagtagcacagtat

SEQ ID NO: 151083 - DNA, 19 bp, Homo sapiens
  siRNA target sequence for PLCD4 (NM_032726.2,1552-1570).
gagttggaagagtcagaat

SEQ ID NO: 151084 - DNA, 19 bp, Homo sapiens
  siRNA target sequence for PLCD4 (NM_032726.2,1670-1688).
ccctctcttccctggttat

SEQ ID NO: 151085 - DNA, 19 bp, Homo sapiens
  siRNA target sequence for PLCD4 (NM_032726.2,1679-1697).
ccctggttatctacttgaa

SEQ ID NO: 151086 - DNA, 19 bp, Homo sapiens
  siRNA target sequence for PLCD4 (NM_032726.2,1711-1729).
cgcagcttcacacattcaa

SEQ ID NO: 151087 - DNA, 19 bp, Homo sapiens
  siRNA target sequence for PLCD4 (NM_032726.2,1741-1759).
cacttctacgagatatcat

SEQ ID NO: 151088 - DNA, 19 bp, Homo sapiens
  siRNA target sequence for PLCD4 (NM_032726.2,1743-1761).
cttctacgagatatcatct

SEQ ID NO: 151089 - DNA, 19 bp, Homo sapiens
  siRNA target sequence for PLCD4 (NM_032726.2,1749-1767).
cgagatatcatctttctct

SEQ ID NO: 151090 - DNA, 19 bp, Homo sapiens
  siRNA target sequence for PLCD4 (NM_032726.2,1809-1827).
gtttgtgcagcacaatact

SEQ ID NO: 151091 - DNA, 19 bp, Homo sapiens
  siRNA target sequence for PLCD4 (NM_032726.2,1819-1837).
cacaatacttggcagttaa

SEQ ID NO: 151092 - DNA, 19 bp, Homo sapiens
  siRNA target sequence for PLCD4 (NM_032726.2,1830-1848).
gcagttaagccgtgtgtat

SEQ ID NO: 151093 - DNA, 19 bp, Homo sapiens
  siRNA target sequence for PLCD4 (NM_032726.2,2009-2027).
cagacttcctgcgtgatat

SEQ ID NO: 151094 - DNA, 19 bp, Homo sapiens
  siRNA target sequence for PLCD4 (NM_032726.2,2021-2039).
gtgatatccagagttcttt

SEQ ID NO: 151095 - DNA, 19 bp, Homo sapiens
  siRNA target sequence for PLCD4 (NM_032726.2,2198-2216).
ggcaggagaccaactatgt

SEQ ID NO: 151096 - DNA, 19 bp, Homo sapiens
  siRNA target sequence for PLCD4 (NM_032726.2,2243-2261).
gggggcagacactatgttt

SEQ ID NO: 151097 - DNA, 19 bp, Homo sapiens
  siRNA target sequence for PLCD4 (NM_032726.2,2292-2310).
gcgttttgtggtaatggat

SEQ ID NO: 151098 - DNA, 19 bp, Homo sapiens
  siRNA target sequence for PLCD4 (NM_032726.2,2293-2311).
cgttttgtggtaatggatt

SEQ ID NO: 151099 - DNA, 19 bp, Homo sapiens
  siRNA target sequence for PLCD4 (NM_032726.2,2325-2343).
ccgaaatgactttattggt

SEQ ID NO: 151100 - DNA, 19 bp, Homo sapiens
  siRNA target sequence for PLCG1 (NM_002660.2,212-230).
gtgggcaccgtcatgactt

SEQ ID NO: 151101 - DNA, 19 bp, Homo sapiens
  siRNA target sequence for PLCG1 (NM_002660.2,216-234).
gcaccgtcatgactttgtt

SEQ ID NO: 151102 - DNA, 19 bp, Homo sapiens
  siRNA target sequence for PLCG1 (NM_002660.2,219-237).
ccgtcatgactttgttcta

SEQ ID NO: 151103 - DNA, 19 bp, Homo sapiens
  siRNA target sequence for PLCG1 (NM_002660.2,336-354).
ccattgacattcgtgaaat

SEQ ID NO: 151104 - DNA, 19 bp, Homo sapiens
  siRNA target sequence for PLCG1 (NM_002660.2,337-355).
cattgacattcgtgaaatt

SEQ ID NO: 151105 - DNA, 19 bp, Homo sapiens
  siRNA target sequence for PLCG1 (NM_002660.2,376-394).
gacctcacgggactttgat

SEQ ID NO: 151106 - DNA, 19 bp, Homo sapiens
  siRNA target sequence for PLCG1 (NM_002660.2,423-441).
cggaccagtcacattgctt

SEQ ID NO: 151107 - DNA, 19 bp, Homo sapiens
  siRNA target sequence for PLCG1 (NM_002660.2,424-442).
ggaccagtcacattgcttt

SEQ ID NO: 151108 - DNA, 19 bp, Homo sapiens
  siRNA target sequence for PLCG1 (NM_002660.2,434-452).
cattgctttgtcattctct

SEQ ID NO: 151109 - DNA, 19 bp, Homo sapiens
  siRNA target sequence for PLCG1 (NM_002660.2,517-535).
gtggatcaagggcttaact

SEQ ID NO: 151110 - DNA, 19 bp, Homo sapiens
  siRNA target sequence for PLCG1 (NM_002660.2,537-555).
ggctgatggaggatacatt

SEQ ID NO: 151111 - DNA, 19 bp, Homo sapiens
  siRNA target sequence for PLCG1 (NM_002660.2,564-582).
ccacacccctgcagattga

SEQ ID NO: 151112 - DNA, 19 bp, Homo sapiens
  siRNA target sequence for PLCG1 (NM_002660.2,618-636).
ggaatcgtgaggatcgtat

SEQ ID NO: 151113 - DNA, 19 bp, Homo sapiens
  siRNA target sequence for PLCG1 (NM_002660.2,619-637).
gaatcgtgaggatcgtata

SEQ ID NO: 151114 - DNA, 19 bp, Homo sapiens
  siRNA target sequence for PLCG1 (NM_002660.2,1074-1092).
gcccggacaccatgaacaa

SEQ ID NO: 151115 - DNA, 19 bp, Homo sapiens
  siRNA target sequence for PLCG1 (NM_002660.2,1236-1254).
cggatgggatgccagttat

SEQ ID NO: 151116 - DNA, 19 bp, Homo sapiens
  siRNA target sequence for PLCG1 (NM_002660.2,1242-1260).
ggatgccagttatttacca

SEQ ID NO: 151117 - DNA, 19 bp, Homo sapiens
  siRNA target sequence for PLCG1 (NM_002660.2,1243-1261).
gatgccagttatttaccat

SEQ ID NO: 151118 - DNA, 19 bp, Homo sapiens
  siRNA target sequence for PLCG1 (NM_002660.2,1389-1407).
gaaacatggcccaatactt

SEQ ID NO: 151119 - DNA, 19 bp, Homo sapiens
  siRNA target sequence for PLCG1 (NM_002660.2,1574-1592).
gacatcagcaactctatca

SEQ ID NO: 151120 - DNA, 19 bp, Homo sapiens
  siRNA target sequence for PLCG1 (NM_002660.2,1620-1638).
ctgtgaaccacgaatggta

SEQ ID NO: 151121 - DNA, 19 bp, Homo sapiens
  siRNA target sequence for PLCG1 (NM_002660.2,1659-1677).
ccagcagcaagatctacta

SEQ ID NO: 151122 - DNA, 19 bp, Homo sapiens
  siRNA target sequence for PLCG1 (NM_002660.2,1815-1833).
ctgagcgcctgcttactga

SEQ ID NO: 151123 - DNA, 19 bp, Homo sapiens
  siRNA target sequence for PLCG1 (NM_002660.2,1899-1917).
gcgactacacgctctcttt

SEQ ID NO: 151124 - DNA, 19 bp, Homo sapiens
  siRNA target sequence for PLCG1 (NM_002660.2,1901-1919).
gactacacgctctctttct

SEQ ID NO: 151125 - DNA, 19 bp, Homo sapiens
  siRNA target sequence for PLCG1 (NM_002660.2,1967-1985).
gctgggacccccaagttct

SEQ ID NO: 151126 - DNA, 19 bp, Homo sapiens
  siRNA target sequence for PLCG1 (NM_002660.2,1992-2010).
cagacaacctcgtctttga

SEQ ID NO: 151127 - DNA, 19 bp, Homo sapiens
  siRNA target sequence for PLCG1 (NM_002660.2,2044-2062).
ggtgcccctgcgctgtaat

SEQ ID NO: 151128 - DNA, 19 bp, Homo sapiens
  siRNA target sequence for PLCG1 (NM_002660.2,2049-2067).
ccctgcgctgtaatgagtt

SEQ ID NO: 151129 - DNA, 19 bp, Homo sapiens
  siRNA target sequence for PLCG1 (NM_002660.2,2050-2068).
cctgcgctgtaatgagttt

SEQ ID NO: 151130 - DNA, 19 bp, Homo sapiens
  siRNA target sequence for PLCG1 (NM_002660.2,2054-2072).
cgctgtaatgagtttgaga

SEQ ID NO: 151131 - DNA, 19 bp, Homo sapiens
  siRNA target sequence for PLCG1 (NM_002660.2,2065-2083).
gtttgagatgcgactttca

SEQ ID NO: 151132 - DNA, 19 bp, Homo sapiens
  siRNA target sequence for PLCG1 (NM_002660.2,2197-2215).
ggtgcggaagcggaatgaa

SEQ ID NO: 151133 - DNA, 19 bp, Homo sapiens
  siRNA target sequence for PLCG1 (NM_002660.2,2207-2225).
cggaatgaacccaactcat

SEQ ID NO: 151134 - DNA, 19 bp, Homo sapiens
  siRNA target sequence for PLCG1 (NM_002660.2,2354-2372).
ccgctataccgcaagatga

SEQ ID NO: 151135 - DNA, 19 bp, Homo sapiens
  siRNA target sequence for PLCG1 (NM_002660.2,2355-2373).
cgctataccgcaagatgaa

SEQ ID NO: 151136 - DNA, 19 bp, Homo sapiens
  siRNA target sequence for PLCG1 (NM_002660.2,2454-2472).
gcaaccctggcttctatgt

SEQ ID NO: 151137 - DNA, 19 bp, Homo sapiens
  siRNA target sequence for PLCG1 (NM_002660.2,2455-2473).
caaccctggcttctatgta

SEQ ID NO: 151138 - DNA, 19 bp, Homo sapiens
  siRNA target sequence for PLCG1 (NM_002660.2,2483-2501).
cctatgccaactttcaagt

SEQ ID NO: 151139 - DNA, 19 bp, Homo sapiens
  siRNA target sequence for PLCG1 (NM_002660.2,2505-2523).
cagtcaaagccctctttga

SEQ ID NO: 151140 - DNA, 19 bp, Homo sapiens
  siRNA target sequence for PLCG1 (NM_002660.2,2649-2667).
caaactacgtggaagagat

SEQ ID NO: 151141 - DNA, 19 bp, Homo sapiens
  siRNA target sequence for PLCG1 (NM_002660.2,3084-3102).
ctgagaaatacgtgaacaa

SEQ ID NO: 151142 - DNA, 19 bp, Homo sapiens
  siRNA target sequence for PLCG1 (NM_002660.2,3180-3198).
cctccaactacgatccttt

SEQ ID NO: 151143 - DNA, 19 bp, Homo sapiens
  siRNA target sequence for PLCG1 (NM_002660.2,3412-3430).
ccgacatctgccaaagaat

SEQ ID NO: 151144 - DNA, 19 bp, Homo sapiens
  siRNA target sequence for PLCG1 (NM_002660.2,3470-3488).
gctggagctgagtatgaca

SEQ ID NO: 151145 - DNA, 19 bp, Homo sapiens
  siRNA target sequence for PLCG1 (NM_002660.2,3565-3583).
gatcagtaaccctgaattt

SEQ ID NO: 151146 - DNA, 19 bp, Homo sapiens
  siRNA target sequence for PLCG1 (NM_002660.2,3689-3707).
gtgcctttgaagaacaact

SEQ ID NO: 151147 - DNA, 19 bp, Homo sapiens
  siRNA target sequence for PLCG1 (NM_002660.2,3692-3710).
cctttgaagaacaactaca

SEQ ID NO: 151148 - DNA, 19 bp, Homo sapiens
  siRNA target sequence for PLCG1 (NM_002660.2,3736-3754).
gctgatcaagattgacatt

SEQ ID NO: 151149 - DNA, 19 bp, Homo sapiens
  siRNA target sequence for PLCG1 (NM_002660.2,3737-3755).
ctgatcaagattgacattt

SEQ ID NO: 151150 - DNA, 19 bp, Homo sapiens
  siRNA target sequence for PLCG1 (NM_002660.2,3857-3875).
cgggaaggctcctttgaat

SEQ ID NO: 151151 - DNA, 19 bp, Homo sapiens
  siRNA target sequence for PLCG1 (NM_002660.2,3919-3937).
gcatctcgcagaccatttt

SEQ ID NO: 151152 - DNA, 19 bp, Homo sapiens
  siRNA target sequence for PLCG2 (NM_002661.1,274-292).
gaaccgtccaggtgatcat

SEQ ID NO: 151153 - DNA, 19 bp, Homo sapiens
  siRNA target sequence for PLCG2 (NM_002661.1,378-396).
gggaagaactccaaagatt

SEQ ID NO: 151154 - DNA, 19 bp, Homo sapiens
  siRNA target sequence for PLCG2 (NM_002661.1,412-430).
cagttcgccagaaagaaga

SEQ ID NO: 151155 - DNA, 19 bp, Homo sapiens
  siRNA target sequence for PLCG2 (NM_002661.1,434-452).
ctgcttcaccatcctatat

SEQ ID NO: 151156 - DNA, 19 bp, Homo sapiens
  siRNA target sequence for PLCG2 (NM_002661.1,496-514).
ctaaagaggatgcagttaa

SEQ ID NO: 151157 - DNA, 19 bp, Homo sapiens
  siRNA target sequence for PLCG2 (NM_002661.1,515-533).
ctggctctctggcttgaaa

SEQ ID NO: 151158 - DNA, 19 bp, Homo sapiens
  siRNA target sequence for PLCG2 (NM_002661.1,517-535).
ggctctctggcttgaaaat

SEQ ID NO: 151159 - DNA, 19 bp, Homo sapiens
  siRNA target sequence for PLCG2 (NM_002661.1,562-580).
ccacgcccaccattatcga

SEQ ID NO: 151160 - DNA, 19 bp, Homo sapiens
  siRNA target sequence for PLCG2 (NM_002661.1,662-680).
gcccctgatcaactttaaa

SEQ ID NO: 151161 - DNA, 19 bp, Homo sapiens
  siRNA target sequence for PLCG2 (NM_002661.1,664-682).
ccctgatcaactttaaagt

SEQ ID NO: 151162 - DNA, 19 bp, Homo sapiens
  siRNA target sequence for PLCG2 (NM_002661.1,666-684).
ctgatcaactttaaagtga

SEQ ID NO: 151163 - DNA, 19 bp, Homo sapiens
  siRNA target sequence for PLCG2 (NM_002661.1,753-771).
cagttccatctcttctata

SEQ ID NO: 151164 - DNA, 19 bp, Homo sapiens
  siRNA target sequence for PLCG2 (NM_002661.1,799-817).
cgattctcgatgaattcaa

SEQ ID NO: 151165 - DNA, 19 bp, Homo sapiens
  siRNA target sequence for PLCG2 (NM_002661.1,800-818).
gattctcgatgaattcaaa

SEQ ID NO: 151166 - DNA, 19 bp, Homo sapiens
  siRNA target sequence for PLCG2 (NM_002661.1,890-908).
ccagaggtttctcatacat

SEQ ID NO: 151167 - DNA, 19 bp, Homo sapiens
  siRNA target sequence for PLCG2 (NM_002661.1,895-913).
ggtttctcatacatgaaca

SEQ ID NO: 151168 - DNA, 19 bp, Homo sapiens
  siRNA target sequence for PLCG2 (NM_002661.1,948-966).
cgtgagcggatgacaaagt

SEQ ID NO: 151169 - DNA, 19 bp, Homo sapiens
  siRNA target sequence for PLCG2 (NM_002661.1,949-967).
gtgagcggatgacaaagtt

SEQ ID NO: 151170 - DNA, 19 bp, Homo sapiens
  siRNA target sequence for PLCG2 (NM_002661.1,951-969).
gagcggatgacaaagttca

SEQ ID NO: 151171 - DNA, 19 bp, Homo sapiens
  siRNA target sequence for PLCG2 (NM_002661.1,953-971).
gcggatgacaaagttcatt

SEQ ID NO: 151172 - DNA, 19 bp, Homo sapiens
  siRNA target sequence for PLCG2 (NM_002661.1,955-973).
ggatgacaaagttcattga

SEQ ID NO: 151173 - DNA, 19 bp, Homo sapiens
  siRNA target sequence for PLCG2 (NM_002661.1,1051-1069).
gcatctgggatgagaagta

SEQ ID NO: 151174 - DNA, 19 bp, Homo sapiens
  siRNA target sequence for PLCG2 (NM_002661.1,1052-1070).
catctgggatgagaagtat

SEQ ID NO: 151175 - DNA, 19 bp, Homo sapiens
  siRNA target sequence for PLCG2 (NM_002661.1,1117-1135).
ggatctcctcgtcacataa

SEQ ID NO: 151176 - DNA, 19 bp, Homo sapiens
  siRNA target sequence for PLCG2 (NM_002661.1,1276-1294).
cgcggactaccaagatcaa

SEQ ID NO: 151177 - DNA, 19 bp, Homo sapiens
  siRNA target sequence for PLCG2 (NM_002661.1,1278-1296).
cggactaccaagatcaagt

SEQ ID NO: 151178 - DNA, 19 bp, Homo sapiens
  siRNA target sequence for PLCG2 (NM_002661.1,1279-1297).
ggactaccaagatcaagtt

SEQ ID NO: 151179 - DNA, 19 bp, Homo sapiens
  siRNA target sequence for PLCG2 (NM_002661.1,1304-1322).
cgtcgtgcaggccatcaaa

SEQ ID NO: 151180 - DNA, 19 bp, Homo sapiens
  siRNA target sequence for PLCG2 (NM_002661.1,1319-1337).
caaagaccacgcctttgtt

SEQ ID NO: 151181 - DNA, 19 bp, Homo sapiens
  siRNA target sequence for PLCG2 (NM_002661.1,1537-1555).
gcgatgtggatgtcaacat

SEQ ID NO: 151182 - DNA, 19 bp, Homo sapiens
  siRNA target sequence for PLCG2 (NM_002661.1,1595-1613).
gtacatgtgggattccatt

SEQ ID NO: 151183 - DNA, 19 bp, Homo sapiens
  siRNA target sequence for PLCG2 (NM_002661.1,1709-1727).
ggatataccccctacagaa

SEQ ID NO: 151184 - DNA, 19 bp, Homo sapiens
  siRNA target sequence for PLCG2 (NM_002661.1,1716-1734).
ccccctacagaactacatt

SEQ ID NO: 151185 - DNA, 19 bp, Homo sapiens
  siRNA target sequence for PLCG2 (NM_002661.1,1717-1735).
cccctacagaactacattt

SEQ ID NO: 151186 - DNA, 19 bp, Homo sapiens
  siRNA target sequence for PLCG2 (NM_002661.1,1718-1736).
ccctacagaactacatttt

SEQ ID NO: 151187 - DNA, 19 bp, Homo sapiens
  siRNA target sequence for PLCG2 (NM_002661.1,1771-1789).
ggacgagtgccgagaagtt

SEQ ID NO: 151188 - DNA, 19 bp, Homo sapiens
  siRNA target sequence for PLCG2 (NM_002661.1,2078-2096).
gtccaagccgtggtactat

SEQ ID NO: 151189 - DNA, 19 bp, Homo sapiens
  siRNA target sequence for PLCG2 (NM_002661.1,2266-2284).
ggacctccgcctattttga

SEQ ID NO: 151190 - DNA, 19 bp, Homo sapiens
  siRNA target sequence for PLCG2 (NM_002661.1,2292-2310).
gtggagctcgtcagttact

SEQ ID NO: 151191 - DNA, 19 bp, Homo sapiens
  siRNA target sequence for PLCG2 (NM_002661.1,2366-2384).
gctcctggagcgctacaat

SEQ ID NO: 151192 - DNA, 19 bp, Homo sapiens
  siRNA target sequence for PLCG2 (NM_002661.1,2367-2385).
ctcctggagcgctacaata

SEQ ID NO: 151193 - DNA, 19 bp, Homo sapiens
  siRNA target sequence for PLCG2 (NM_002661.1,2411-2429).
cgacgtcagcagaatgtat

SEQ ID NO: 151194 - DNA, 19 bp, Homo sapiens
  siRNA target sequence for PLCG2 (NM_002661.1,2432-2450).
ggatcccagtgaaatcaat

SEQ ID NO: 151195 - DNA, 19 bp, Homo sapiens
  siRNA target sequence for PLCG2 (NM_002661.1,2643-2661).
gacttcgaggagctagaaa

SEQ ID NO: 151196 - DNA, 19 bp, Homo sapiens
  siRNA target sequence for PLCG2 (NM_002661.1,2690-2708).
gtctctttgcagaggaata

SEQ ID NO: 151197 - DNA, 19 bp, Homo sapiens
  siRNA target sequence for PLCG2 (NM_002661.1,2952-2970).
gttgtctactgcaaaccaa

SEQ ID NO: 151198 - DNA, 19 bp, Homo sapiens
  siRNA target sequence for PLCG2 (NM_002661.1,3064-3082).
ccgtcgacctcctgaagta

SEQ ID NO: 151199 - DNA, 19 bp, Homo sapiens
  siRNA target sequence for PLCG2 (NM_002661.1,3066-3084).
gtcgacctcctgaagtaca

SEQ ID NO: 151200 - DNA, 19 bp, Homo sapiens
  siRNA target sequence for PLCG2 (NM_002661.1,3195-3213).
cagacggcagataagtaca

SEQ ID NO: 151201 - DNA, 19 bp, Homo sapiens
  siRNA target sequence for PLCG2 (NM_002661.1,3449-3467).
caagacgacggttgtgaat

SEQ ID NO: 151202 - DNA, 19 bp, Homo sapiens
  siRNA target sequence for PLCG2 (NM_002661.1,3452-3470).
gacgacggttgtgaatgat

SEQ ID NO: 151203 - DNA, 19 bp, Homo sapiens
  siRNA target sequence for PLCG2 (NM_002661.1,3454-3472).
cgacggttgtgaatgataa

SEQ ID NO: 151204 - DNA, 19 bp, Homo sapiens
  siRNA target sequence for PLCG2 (NM_002661.1,3455-3473).
gacggttgtgaatgataat

SEQ ID NO: 151205 - DNA, 19 bp, Homo sapiens
  siRNA target sequence for PLCG2 (NM_002661.1,3548-3566).
gcgctttgtggtttatgaa

SEQ ID NO: 151206 - DNA, 19 bp, Homo sapiens
  siRNA target sequence for PLCG2 (NM_002661.1,3575-3593).
gttcagcgatcccaacttt

SEQ ID NO: 151207 - DNA, 19 bp, Homo sapiens
  siRNA target sequence for PLCG2 (NM_002661.1,3661-3679).
ggtacagcgaggacataga

SEQ ID NO: 151208 - DNA, 19 bp, Homo sapiens
  siRNA target sequence for PLCZ1 (NM_033123.2,266-284).
gaggttacttgaaaaatta

SEQ ID NO: 151209 - DNA, 19 bp, Homo sapiens
  siRNA target sequence for PLCZ1 (NM_033123.2,268-286).
ggttacttgaaaaattaga

SEQ ID NO: 151210 - DNA, 19 bp, Homo sapiens
  siRNA target sequence for PLCZ1 (NM_033123.2,285-303).
gatattcggtgcagttata

SEQ ID NO: 151211 - DNA, 19 bp, Homo sapiens
  siRNA target sequence for PLCZ1 (NM_033123.2,329-347).
caatgacaggctgaaacaa

SEQ ID NO: 151212 - DNA, 19 bp, Homo sapiens
  siRNA target sequence for PLCZ1 (NM_033123.2,337-355).
ggctgaaacaaggaagaat

SEQ ID NO: 151213 - DNA, 19 bp, Homo sapiens
  siRNA target sequence for PLCZ1 (NM_033123.2,349-367).
gaagaatcaccatagaaga

SEQ ID NO: 151214 - DNA, 19 bp, Homo sapiens
  siRNA target sequence for PLCZ1 (NM_033123.2,373-391).
gagcaatttatcgaattat

SEQ ID NO: 151215 - DNA, 19 bp, Homo sapiens
  siRNA target sequence for PLCZ1 (NM_033123.2,435-453).
gaaaaccggaaaattcttt

SEQ ID NO: 151216 - DNA, 19 bp, Homo sapiens
  siRNA target sequence for PLCZ1 (NM_033123.2,457-475).
caagtaatctggctcaatt

SEQ ID NO: 151217 - DNA, 19 bp, Homo sapiens
  siRNA target sequence for PLCZ1 (NM_033123.2,503-521).
gatgagtaaagctattgct

SEQ ID NO: 151218 - DNA, 19 bp, Homo sapiens
  siRNA target sequence for PLCZ1 (NM_033123.2,506-524).
gagtaaagctattgctttt

SEQ ID NO: 151219 - DNA, 19 bp, Homo sapiens
  siRNA target sequence for PLCZ1 (NM_033123.2,508-526).
gtaaagctattgcttttga

SEQ ID NO: 151220 - DNA, 19 bp, Homo sapiens
  siRNA target sequence for PLCZ1 (NM_033123.2,536-554).
gaaatacgagcctatcgaa

SEQ ID NO: 151221 - DNA, 19 bp, Homo sapiens
  siRNA target sequence for PLCZ1 (NM_033123.2,542-560).
cgagcctatcgaagaagtt

SEQ ID NO: 151222 - DNA, 19 bp, Homo sapiens
  siRNA target sequence for PLCZ1 (NM_033123.2,543-561).
gagcctatcgaagaagtta

SEQ ID NO: 151223 - DNA, 19 bp, Homo sapiens
  siRNA target sequence for PLCZ1 (NM_033123.2,547-565).
ctatcgaagaagttaggaa

SEQ ID NO: 151224 - DNA, 19 bp, Homo sapiens
  siRNA target sequence for PLCZ1 (NM_033123.2,578-596).
gtcattagaaggttttaca

SEQ ID NO: 151225 - DNA, 19 bp, Homo sapiens
  siRNA target sequence for PLCZ1 (NM_033123.2,605-623).
ggattcacgtgaatgtcta

SEQ ID NO: 151226 - DNA, 19 bp, Homo sapiens
  siRNA target sequence for PLCZ1 (NM_033123.2,610-628).
cacgtgaatgtctactgtt

SEQ ID NO: 151227 - DNA, 19 bp, Homo sapiens
  siRNA target sequence for PLCZ1 (NM_033123.2,612-630).
cgtgaatgtctactgttta

SEQ ID NO: 151228 - DNA, 19 bp, Homo sapiens
  siRNA target sequence for PLCZ1 (NM_033123.2,657-675).
gatatgactcatccattaa

SEQ ID NO: 151229 - DNA, 19 bp, Homo sapiens
  siRNA target sequence for PLCZ1 (NM_033123.2,662-680).
gactcatccattaaatgat

SEQ ID NO: 151230 - DNA, 19 bp, Homo sapiens
  siRNA target sequence for PLCZ1 (NM_033123.2,664-682).
ctcatccattaaatgatta

SEQ ID NO: 151231 - DNA, 19 bp, Homo sapiens
  siRNA target sequence for PLCZ1 (NM_033123.2,691-709).
catcttcacataacacata

SEQ ID NO: 151232 - DNA, 19 bp, Homo sapiens
  siRNA target sequence for PLCZ1 (NM_033123.2,697-715).
cacataacacatatttggt

SEQ ID NO: 151233 - DNA, 19 bp, Homo sapiens
  siRNA target sequence for PLCZ1 (NM_033123.2,741-759).
gacctttggggatatgtaa

SEQ ID NO: 151234 - DNA, 19 bp, Homo sapiens
  siRNA target sequence for PLCZ1 (NM_033123.2,778-796).
gccgttgtttggagattga

SEQ ID NO: 151235 - DNA, 19 bp, Homo sapiens
  siRNA target sequence for PLCZ1 (NM_033123.2,780-798).
cgttgtttggagattgact

SEQ ID NO: 151236 - DNA, 19 bp, Homo sapiens
  siRNA target sequence for PLCZ1 (NM_033123.2,863-881).
gtttaaaactgttatccaa

SEQ ID NO: 151237 - DNA, 19 bp, Homo sapiens
  siRNA target sequence for PLCZ1 (NM_033123.2,873-891).
gttatccaagctatacaca

SEQ ID NO: 151238 - DNA, 19 bp, Homo sapiens
  siRNA target sequence for PLCZ1 (NM_033123.2,917-935).
cccagtggtgctctcttta

SEQ ID NO: 151239 - DNA, 19 bp, Homo sapiens
  siRNA target sequence for PLCZ1 (NM_033123.2,919-937).
cagtggtgctctctttaga

SEQ ID NO: 151240 - DNA, 19 bp, Homo sapiens
  siRNA target sequence for PLCZ1 (NM_033123.2,923-941).
ggtgctctctttagaaaat

SEQ ID NO: 151241 - DNA, 19 bp, Homo sapiens
  siRNA target sequence for PLCZ1 (NM_033123.2,947-965).
ctccactgcccaacaagaa

SEQ ID NO: 151242 - DNA, 19 bp, Homo sapiens
  siRNA target sequence for PLCZ1 (NM_033123.2,952-970).
ctgcccaacaagaagtaat

SEQ ID NO: 151243 - DNA, 19 bp, Homo sapiens
  siRNA target sequence for PLCZ1 (NM_033123.2,999-1017).
gagtccttgctttctgata

SEQ ID NO: 151244 - DNA, 19 bp, Homo sapiens
  siRNA target sequence for PLCZ1 (NM_033123.2,1045-1063).
catcaccagaggcactaaa

SEQ ID NO: 151245 - DNA, 19 bp, Homo sapiens
  siRNA target sequence for PLCZ1 (NM_033123.2,1048-1066).
caccagaggcactaaaatt

SEQ ID NO: 151246 - DNA, 19 bp, Homo sapiens
  siRNA target sequence for PLCZ1 (NM_033123.2,1056-1074).
gcactaaaattcaaaatat

SEQ ID NO: 151247 - DNA, 19 bp, Homo sapiens
  siRNA target sequence for PLCZ1 (NM_033123.2,1175-1193).
gttacctggagtaatgctt

SEQ ID NO: 151248 - DNA, 19 bp, Homo sapiens
  siRNA target sequence for PLCZ1 (NM_033123.2,1185-1203).
gtaatgcttttcaagaaaa

SEQ ID NO: 151249 - DNA, 19 bp, Homo sapiens
  siRNA target sequence for PLCZ1 (NM_033123.2,1211-1229).
caggaagctaaaaattgct

SEQ ID NO: 151250 - DNA, 19 bp, Homo sapiens
  siRNA target sequence for PLCZ1 (NM_033123.2,1234-1252).
ccttatctgatcttgtcat

SEQ ID NO: 151251 - DNA, 19 bp, Homo sapiens
  siRNA target sequence for PLCZ1 (NM_033123.2,1235-1253).
cttatctgatcttgtcatt

SEQ ID NO: 151252 - DNA, 19 bp, Homo sapiens
  siRNA target sequence for PLCZ1 (NM_033123.2,1242-1260).
gatcttgtcatttatacga

SEQ ID NO: 151253 - DNA, 19 bp, Homo sapiens
  siRNA target sequence for PLCZ1 (NM_033123.2,1334-1352).
gacacaagcccgaaaactt

SEQ ID NO: 151254 - DNA, 19 bp, Homo sapiens
  siRNA target sequence for PLCZ1 (NM_033123.2,1338-1356).
caagcccgaaaactttcaa

SEQ ID NO: 151255 - DNA, 19 bp, Homo sapiens
  siRNA target sequence for PLCZ1 (NM_033123.2,1341-1359).
gcccgaaaactttcaaaat

SEQ ID NO: 151256 - DNA, 19 bp, Homo sapiens
  siRNA target sequence for PLCZ1 (NM_033123.2,1361-1379).
gcgagtccatgagtttatt

SEQ ID NO: 151257 - DNA, 19 bp, Homo sapiens
  siRNA target sequence for PLCZ1 (NM_033123.2,1362-1380).
cgagtccatgagtttattt

SEQ ID NO: 151258 - DNA, 19 bp, Homo sapiens
  siRNA target sequence for PLCZ1 (NM_033123.2,1383-1401).
cacaccaggaagttcatta

SEQ ID NO: 151259 - DNA, 19 bp, Homo sapiens
  siRNA target sequence for PLCZ1 (NM_033123.2,1449-1467).
ccccaagaattttggaata

SEQ ID NO: 151260 - DNA, 19 bp, Homo sapiens
  siRNA target sequence for PLCZ1 (NM_033123.2,1450-1468).
cccaagaattttggaatat

SEQ ID NO: 151261 - DNA, 19 bp, Homo sapiens
  siRNA target sequence for PLCZ1 (NM_033123.2,1462-1480).
ggaatataggttgtcaaat

SEQ ID NO: 151262 - DNA, 19 bp, Homo sapiens
  siRNA target sequence for PLCZ1 (NM_033123.2,1511-1529).
gcccatggatctgcaaaat

SEQ ID NO: 151263 - DNA, 19 bp, Homo sapiens
  siRNA target sequence for PLCZ1 (NM_033123.2,1580-1598).
cttaagagagagtaaatca

SEQ ID NO: 151264 - DNA, 19 bp, Homo sapiens
  siRNA target sequence for PLCZ1 (NM_033123.2,1597-1615).
catactttaacccaagtaa

SEQ ID NO: 151265 - DNA, 19 bp, Homo sapiens
  siRNA target sequence for PLCZ1 (NM_033123.2,1601-1619).
ctttaacccaagtaacata

SEQ ID NO: 151266 - DNA, 19 bp, Homo sapiens
  siRNA target sequence for PLCZ1 (NM_033123.2,1631-1649).
gccaattacacttacaata

SEQ ID NO: 151267 - DNA, 19 bp, Homo sapiens
  siRNA target sequence for PLCZ1 (NM_033123.2,1632-1650).
ccaattacacttacaataa

SEQ ID NO: 151268 - DNA, 19 bp, Homo sapiens
  siRNA target sequence for PLCZ1 (NM_033123.2,1667-1685).
ccagttgcctcttactcat

SEQ ID NO: 151269 - DNA, 19 bp, Homo sapiens
  siRNA target sequence for PLCZ1 (NM_033123.2,1668-1686).
cagttgcctcttactcatt

SEQ ID NO: 151270 - DNA, 19 bp, Homo sapiens
  siRNA target sequence for PLCZ1 (NM_033123.2,1701-1719).
ggtgattcattagtaatta

SEQ ID NO: 151271 - DNA, 19 bp, Homo sapiens
  siRNA target sequence for PLCZ1 (NM_033123.2,1754-1772).
gcagcagactcgtgtaatt

SEQ ID NO: 151272 - DNA, 19 bp, Homo sapiens
  siRNA target sequence for PLCZ1 (NM_033123.2,1755-1773).
cagcagactcgtgtaatta

SEQ ID NO: 151273 - DNA, 19 bp, Homo sapiens
  siRNA target sequence for PLCZ1 (NM_033123.2,1757-1775).
gcagactcgtgtaattaaa

SEQ ID NO: 151274 - DNA, 19 bp, Homo sapiens
  siRNA target sequence for PLCZ1 (NM_033123.2,1758-1776).
cagactcgtgtaattaaaa

SEQ ID NO: 151275 - DNA, 19 bp, Homo sapiens
  siRNA target sequence for PLCZ1 (NM_033123.2,1829-1847).
cccagaattggcattgata

SEQ ID NO: 151276 - DNA, 19 bp, Homo sapiens
  siRNA target sequence for PLCZ1 (NM_033123.2,1833-1851).
gaattggcattgatacgtt

SEQ ID NO: 151277 - DNA, 19 bp, Homo sapiens
  siRNA target sequence for PLCZ1 (NM_033123.2,1922-1940).
catgaacaaaggttatcgt

SEQ ID NO: 151278 - DNA, 19 bp, Homo sapiens
  siRNA target sequence for PLCZ1 (NM_033123.2,1928-1946).
caaaggttatcgtcgtatt

SEQ ID NO: 151279 - DNA, 19 bp, Homo sapiens
  siRNA target sequence for PLCZ1 (NM_033123.2,1938-1956).
cgtcgtattcctctgtttt

SEQ ID NO: 151280 - DNA, 19 bp, Homo sapiens
  siRNA target sequence for PLEK (NM_002664.1,103-121).
gggagcgtgttcaatacgt

SEQ ID NO: 151281 - DNA, 19 bp, Homo sapiens
  siRNA target sequence for PLEK (NM_002664.1,127-145).
cccatgtgggttgtattgt

SEQ ID NO: 151282 - DNA, 19 bp, Homo sapiens
  siRNA target sequence for PLEK (NM_002664.1,128-146).
ccatgtgggttgtattgtt

SEQ ID NO: 151283 - DNA, 19 bp, Homo sapiens
  siRNA target sequence for PLEK (NM_002664.1,132-150).
gtgggttgtattgttagaa

SEQ ID NO: 151284 - DNA, 19 bp, Homo sapiens
  siRNA target sequence for PLEK (NM_002664.1,151-169).
gatggaattgaattctata

SEQ ID NO: 151285 - DNA, 19 bp, Homo sapiens
  siRNA target sequence for PLEK (NM_002664.1,418-436).
ctgccagaaaccattgact

SEQ ID NO: 151286 - DNA, 19 bp, Homo sapiens
  siRNA target sequence for PLEK (NM_002664.1,530-548).
caggtaactgcgtcattga

SEQ ID NO: 151287 - DNA, 19 bp, Homo sapiens
  siRNA target sequence for PLEK (NM_002664.1,532-550).
ggtaactgcgtcattgatt

SEQ ID NO: 151288 - DNA, 19 bp, Homo sapiens
  siRNA target sequence for PLEK (NM_002664.1,556-574).
gtatccaaccagtctgtta

SEQ ID NO: 151289 - DNA, 19 bp, Homo sapiens
  siRNA target sequence for PLEK (NM_002664.1,560-578).
ccaaccagtctgttaggaa

SEQ ID NO: 151290 - DNA, 19 bp, Homo sapiens
  siRNA target sequence for PLEK (NM_002664.1,561-579).
caaccagtctgttaggaat

SEQ ID NO: 151291 - DNA, 19 bp, Homo sapiens
  siRNA target sequence for PLEK (NM_002664.1,581-599).
gccaggaaggcctcatgat

SEQ ID NO: 151292 - DNA, 19 bp, Homo sapiens
  siRNA target sequence for PLEK (NM_002664.1,602-620).
cttcatcgctgctcaatga

SEQ ID NO: 151293 - DNA, 19 bp, Homo sapiens
  siRNA target sequence for PLEK (NM_002664.1,814-832).
ctgaagcaggggcatagaa

SEQ ID NO: 151294 - DNA, 19 bp, Homo sapiens
  siRNA target sequence for PLEK (NM_002664.1,875-893).
ctgcctacctgcactacta

SEQ ID NO: 151295 - DNA, 19 bp, Homo sapiens
  siRNA target sequence for PLEK (NM_002664.1,986-1004).
gtgaggaagagaacctttt

SEQ ID NO: 151296 - DNA, 19 bp, Homo sapiens
  siRNA target sequence for PLEK (NM_002664.1,1008-1026).
gatcatcacagcagatgaa

SEQ ID NO: 151297 - DNA, 19 bp, Homo sapiens
  siRNA target sequence for PLEK (NM_002664.1,1021-1039).
gatgaagtgcactatttct

SEQ ID NO: 151298 - DNA, 19 bp, Homo sapiens
  siRNA target sequence for PLG (NM_000301.1,692-710).
gcccacacgctcatggata

SEQ ID NO: 151299 - DNA, 19 bp, Homo sapiens
  siRNA target sequence for PLG (NM_000301.1,695-713).
cacacgctcatggatacat

SEQ ID NO: 151300 - DNA, 19 bp, Homo sapiens
  siRNA target sequence for PLG (NM_000301.1,775-793).
ctgcggccttggtgtttca

SEQ ID NO: 151301 - DNA, 19 bp, Homo sapiens
  siRNA target sequence for PLG (NM_000301.1,958-976).
cagacccctcacacacata

SEQ ID NO: 151302 - DNA, 19 bp, Homo sapiens
  siRNA target sequence for PLG (NM_000301.1,1027-1045).
cgcaatcctgacggaaaaa

SEQ ID NO: 151303 - DNA, 19 bp, Homo sapiens
  siRNA target sequence for PLG (NM_000301.1,1083-1101).
gtgggagtactgtaagata

SEQ ID NO: 151304 - DNA, 19 bp, Homo sapiens
  siRNA target sequence for PLG (NM_000301.1,1120-1138).
ccagtatccacggaacaat

SEQ ID NO: 151305 - DNA, 19 bp, Homo sapiens
  siRNA target sequence for PLG (NM_000301.1,1686-1704).
cacgacaaatccaagaaaa

SEQ ID NO: 151306 - DNA, 19 bp, Homo sapiens
  siRNA target sequence for PLG (NM_000301.1,1688-1706).
cgacaaatccaagaaaact

SEQ ID NO: 151307 - DNA, 19 bp, Homo sapiens
  siRNA target sequence for PLG (NM_000301.1,2028-2046).
cttggagcccacacgaaaa

SEQ ID NO: 151308 - DNA, 19 bp, Homo sapiens
  siRNA target sequence for PLG (NM_000301.1,2031-2049).
ggagcccacacgaaaagat

SEQ ID NO: 151309 - DNA, 19 bp, Homo sapiens
  siRNA target sequence for PLG (NM_000301.1,2032-2050).
gagcccacacgaaaagata

SEQ ID NO: 151310 - DNA, 19 bp, Homo sapiens
  siRNA target sequence for PLG (NM_000301.1,2034-2052).
gcccacacgaaaagatatt

SEQ ID NO: 151311 - DNA, 19 bp, Homo sapiens
  siRNA target sequence for PLG (NM_000301.1,2134-2152).
gctgaccggaccgaatgtt

SEQ ID NO: 151312 - DNA, 19 bp, Homo sapiens
  siRNA target sequence for PLG (NM_000301.1,2135-2153).
ctgaccggaccgaatgttt

SEQ ID NO: 151313 - DNA, 19 bp, Homo sapiens
  siRNA target sequence for PLG (NM_000301.1,2137-2155).
gaccggaccgaatgtttca

SEQ ID NO: 151314 - DNA, 19 bp, Homo sapiens
  siRNA target sequence for PLG (NM_000301.1,2140-2158).
cggaccgaatgtttcatca

SEQ ID NO: 151315 - DNA, 19 bp, Homo sapiens
  siRNA target sequence for PLG (NM_000301.1,2240-2258).
gcaatcgctatgagtttct

SEQ ID NO: 151316 - DNA, 19 bp, Homo sapiens
  siRNA target sequence for PLSCR1 (NM_021105.1,446-464).
ccaaatcagccagtgtata

SEQ ID NO: 151317 - DNA, 19 bp, Homo sapiens
  siRNA target sequence for PLSCR1 (NM_021105.1,518-536).
gcgccacagcctccattaa

SEQ ID NO: 151318 - DNA, 19 bp, Homo sapiens
  siRNA target sequence for PLSCR1 (NM_021105.1,519-537).
cgccacagcctccattaaa

SEQ ID NO: 151319 - DNA, 19 bp, Homo sapiens
  siRNA target sequence for PLSCR1 (NM_021105.1,566-584).
cagatagatcagatactga

SEQ ID NO: 151320 - DNA, 19 bp, Homo sapiens
  siRNA target sequence for PLSCR1 (NM_021105.1,568-586).
gatagatcagatactgatt

SEQ ID NO: 151321 - DNA, 19 bp, Homo sapiens
  siRNA target sequence for PLSCR1 (NM_021105.1,695-713).
gattgctgtacccgaaatt

SEQ ID NO: 151322 - DNA, 19 bp, Homo sapiens
  siRNA target sequence for PLSCR1 (NM_021105.1,1065-1083).
catttacagacgctgataa

SEQ ID NO: 151323 - DNA, 19 bp, Homo sapiens
  siRNA target sequence for PLSCR2 (NM_020359.1,360-378).
ctgtccgccaggattggaa

SEQ ID NO: 151324 - DNA, 19 bp, Homo sapiens
  siRNA target sequence for PLSCR2 (NM_020359.1,362-380).
gtccgccaggattggaata

SEQ ID NO: 151325 - DNA, 19 bp, Homo sapiens
  siRNA target sequence for PLSCR2 (NM_020359.1,364-382).
ccgccaggattggaatact

SEQ ID NO: 151326 - DNA, 19 bp, Homo sapiens
  siRNA target sequence for PLSCR2 (NM_020359.1,365-383).
cgccaggattggaatactt

SEQ ID NO: 151327 - DNA, 19 bp, Homo sapiens
  siRNA target sequence for PLSCR2 (NM_020359.1,366-384).
gccaggattggaatactta

SEQ ID NO: 151328 - DNA, 19 bp, Homo sapiens
  siRNA target sequence for PLSCR2 (NM_020359.1,367-385).
ccaggattggaatacttaa

SEQ ID NO: 151329 - DNA, 19 bp, Homo sapiens
  siRNA target sequence for PLSCR2 (NM_020359.1,388-406).
cagatagatatgatactaa

SEQ ID NO: 151330 - DNA, 19 bp, Homo sapiens
  siRNA target sequence for PLSCR2 (NM_020359.1,390-408).
gatagatatgatactaatt

SEQ ID NO: 151331 - DNA, 19 bp, Homo sapiens
  siRNA target sequence for PLSCR2 (NM_020359.1,429-447).
ggaagttctattcagtttt

SEQ ID NO: 151332 - DNA, 19 bp, Homo sapiens
  siRNA target sequence for PLSCR2 (NM_020359.1,505-523).
gcagaagatactaatttct

SEQ ID NO: 151333 - DNA, 19 bp, Homo sapiens
  siRNA target sequence for PLSCR2 (NM_020359.1,613-631).
ctaagatgtaactgttgtt

SEQ ID NO: 151334 - DNA, 19 bp, Homo sapiens
  siRNA target sequence for PLSCR2 (NM_020359.1,799-817).
gcgggtgttgattttgaga

SEQ ID NO: 151335 - DNA, 19 bp, Homo sapiens
  siRNA target sequence for PLSCR2 (NM_020359.1,800-818).
cgggtgttgattttgagat

SEQ ID NO: 151336 - DNA, 19 bp, Homo sapiens
  siRNA target sequence for PLSCR2 (NM_020359.1,841-859).
gtggttggcaggatttcta

SEQ ID NO: 151337 - DNA, 19 bp, Homo sapiens
  siRNA target sequence for PLSCR2 (NM_020359.1,862-880).
cactggtctgggtttttaa

SEQ ID NO: 151338 - DNA, 19 bp, Homo sapiens
  siRNA target sequence for PLSCR3 (NM_020360.2,446-464).
ggtgcagattgatcagatt

SEQ ID NO: 151339 - DNA, 19 bp, Homo sapiens
  siRNA target sequence for PLSCR3 (NM_020360.2,447-465).
gtgcagattgatcagattt

SEQ ID NO: 151340 - DNA, 19 bp, Homo sapiens
  siRNA target sequence for PLSCR3 (NM_020360.2,512-530).
gacctgtaatcggtatgaa

SEQ ID NO: 151341 - DNA, 19 bp, Homo sapiens
  siRNA target sequence for PLSCR3 (NM_020360.2,879-897).
gtgaagactcgggatgaat

SEQ ID NO: 151342 - DNA, 19 bp, Homo sapiens
  siRNA target sequence for PLSCR4 (NM_020353.1,309-327).
gcttgcctatgggatacta

SEQ ID NO: 151343 - DNA, 19 bp, Homo sapiens
  siRNA target sequence for PLSCR4 (NM_020353.1,364-382).
gccagttggtggtatccat

SEQ ID NO: 151344 - DNA, 19 bp, Homo sapiens
  siRNA target sequence for PLSCR4 (NM_020353.1,390-408).
ggtatcagcctggcaaata

SEQ ID NO: 151345 - DNA, 19 bp, Homo sapiens
  siRNA target sequence for PLSCR4 (NM_020353.1,391-409).
gtatcagcctggcaaatat

SEQ ID NO: 151346 - DNA, 19 bp, Homo sapiens
  siRNA target sequence for PLSCR4 (NM_020353.1,395-413).
cagcctggcaaatatccta

SEQ ID NO: 151347 - DNA, 19 bp, Homo sapiens
  siRNA target sequence for PLSCR4 (NM_020353.1,471-489).
gccctcctggtctggaata

SEQ ID NO: 151348 - DNA, 19 bp, Homo sapiens
  siRNA target sequence for PLSCR4 (NM_020353.1,474-492).
ctcctggtctggaatactt

SEQ ID NO: 151349 - DNA, 19 bp, Homo sapiens
  siRNA target sequence for PLSCR4 (NM_020353.1,477-495).
ctggtctggaatacttagt

SEQ ID NO: 151350 - DNA, 19 bp, Homo sapiens
  siRNA target sequence for PLSCR4 (NM_020353.1,499-517).
gttggacaacatacatgtt

SEQ ID NO: 151351 - DNA, 19 bp, Homo sapiens
  siRNA target sequence for PLSCR4 (NM_020353.1,668-686).
gtcctccgggtcactgatt

SEQ ID NO: 151352 - DNA, 19 bp, Homo sapiens
  siRNA target sequence for PLSCR4 (NM_020353.1,670-688).
cctccgggtcactgattgt

SEQ ID NO: 151353 - DNA, 19 bp, Homo sapiens
  siRNA target sequence for PLSCR4 (NM_020353.1,687-705).
gtatgggccgagaaatcat

SEQ ID NO: 151354 - DNA, 19 bp, Homo sapiens
  siRNA target sequence for PLSCR4 (NM_020353.1,692-710).
ggccgagaaatcatgacaa

SEQ ID NO: 151355 - DNA, 19 bp, Homo sapiens
  siRNA target sequence for PLSCR4 (NM_020353.1,693-711).
gccgagaaatcatgacaat

SEQ ID NO: 151356 - DNA, 19 bp, Homo sapiens
  siRNA target sequence for PLSCR4 (NM_020353.1,836-854).
gcggtgtacagcatccaaa

SEQ ID NO: 151357 - DNA, 19 bp, Homo sapiens
  siRNA target sequence for PLSCR4 (NM_020353.1,954-972).
ccaacatcggcagtattat

SEQ ID NO: 151358 - DNA, 19 bp, Homo sapiens
  siRNA target sequence for PLSCR4 (NM_020353.1,979-997).
gtggaatggtttgttatca

SEQ ID NO: 151359 - DNA, 19 bp, Homo sapiens
  siRNA target sequence for PLSCR4 (NM_020353.1,1007-1025).
gatgctgaccattttgaca

SEQ ID NO: 151360 - DNA, 19 bp, Homo sapiens
  siRNA target sequence for PLSCR4 (NM_020353.1,1013-1031).
gaccattttgacattcact

SEQ ID NO: 151361 - DNA, 19 bp, Homo sapiens
  siRNA target sequence for PLSCR4 (NM_020353.1,1035-1053).
cactagacctggatgtgaa

SEQ ID NO: 151362 - DNA, 19 bp, Homo sapiens
  siRNA target sequence for PPEF1 (NM_006240.2,530-548).
ctgagagctgcgttgatca

SEQ ID NO: 151363 - DNA, 19 bp, Homo sapiens
  siRNA target sequence for PPEF1 (NM_006240.2,644-662).
ggccaaatgcagttatcca

SEQ ID NO: 151364 - DNA, 19 bp, Homo sapiens
  siRNA target sequence for PPEF1 (NM_006240.2,652-670).
gcagttatccaccttcttt

SEQ ID NO: 151365 - DNA, 19 bp, Homo sapiens
  siRNA target sequence for PPEF1 (NM_006240.2,682-700).
ggaaaactacacacatata

SEQ ID NO: 151366 - DNA, 19 bp, Homo sapiens
  siRNA target sequence for PPEF1 (NM_006240.2,707-725).
gaagagctagaattaagaa

SEQ ID NO: 151367 - DNA, 19 bp, Homo sapiens
  siRNA target sequence for PPEF1 (NM_006240.2,754-772).
gagggatagatgggattat

SEQ ID NO: 151368 - DNA, 19 bp, Homo sapiens
  siRNA target sequence for PPEF1 (NM_006240.2,756-774).
gggatagatgggattatgt

SEQ ID NO: 151369 - DNA, 19 bp, Homo sapiens
  siRNA target sequence for PPEF1 (NM_006240.2,790-808).
cccagactcctataatggt

SEQ ID NO: 151370 - DNA, 19 bp, Homo sapiens
  siRNA target sequence for PPEF1 (NM_006240.2,829-847).
cacttgtacggatattgat

SEQ ID NO: 151371 - DNA, 19 bp, Homo sapiens
  siRNA target sequence for PPEF1 (NM_006240.2,831-849).
cttgtacggatattgattt

SEQ ID NO: 151372 - DNA, 19 bp, Homo sapiens
  siRNA target sequence for PPEF1 (NM_006240.2,834-852).
gtacggatattgatttact

SEQ ID NO: 151373 - DNA, 19 bp, Homo sapiens
  siRNA target sequence for PPEF1 (NM_006240.2,837-855).
cggatattgatttacttct

SEQ ID NO: 151374 - DNA, 19 bp, Homo sapiens
  siRNA target sequence for PPEF1 (NM_006240.2,940-958).
gccgaatttcactcacata

SEQ ID NO: 151375 - DNA, 19 bp, Homo sapiens
  siRNA target sequence for PPEF1 (NM_006240.2,973-991).
caaagaggtaacaatctgt

SEQ ID NO: 151376 - DNA, 19 bp, Homo sapiens
  siRNA target sequence for PPEF1 (NM_006240.2,1055-1073).
gagaggaacccgtatgttt

SEQ ID NO: 151377 - DNA, 19 bp, Homo sapiens
  siRNA target sequence for PPEF1 (NM_006240.2,1057-1075).
gaggaacccgtatgttttt

SEQ ID NO: 151378 - DNA, 19 bp, Homo sapiens
  siRNA target sequence for PPEF1 (NM_006240.2,1059-1077).
ggaacccgtatgtttttaa

SEQ ID NO: 151379 - DNA, 19 bp, Homo sapiens
  siRNA target sequence for PPEF1 (NM_006240.2,1063-1081).
cccgtatgtttttaatggt

SEQ ID NO: 151380 - DNA, 19 bp, Homo sapiens
  siRNA target sequence for PPEF1 (NM_006240.2,1091-1109).
gatcgaggaaagaattcca

SEQ ID NO: 151381 - DNA, 19 bp, Homo sapiens
  siRNA target sequence for PPEF1 (NM_006240.2,1131-1149).
gtgtgagttttcttgtcta

SEQ ID NO: 151382 - DNA, 19 bp, Homo sapiens
  siRNA target sequence for PPEF1 (NM_006240.2,1173-1191).
gagggaaccacgaagattt

SEQ ID NO: 151383 - DNA, 19 bp, Homo sapiens
  siRNA target sequence for PPEF1 (NM_006240.2,1181-1199).
cacgaagattttatgatga

SEQ ID NO: 151384 - DNA, 19 bp, Homo sapiens
  siRNA target sequence for PPEF1 (NM_006240.2,1216-1234).
cacgaaagaaattttgcat

SEQ ID NO: 151385 - DNA, 19 bp, Homo sapiens
  siRNA target sequence for PPEF1 (NM_006240.2,1290-1308).
ggctcccaatcggtacaat

SEQ ID NO: 151386 - DNA, 19 bp, Homo sapiens
  siRNA target sequence for PPEF1 (NM_006240.2,1294-1312).
cccaatcggtacaatcgtt

SEQ ID NO: 151387 - DNA, 19 bp, Homo sapiens
  siRNA target sequence for PPEF1 (NM_006240.2,1300-1318).
cggtacaatcgttgacaat

SEQ ID NO: 151388 - DNA, 19 bp, Homo sapiens
  siRNA target sequence for PPEF1 (NM_006240.2,1302-1320).
gtacaatcgttgacaatga

SEQ ID NO: 151389 - DNA, 19 bp, Homo sapiens
  siRNA target sequence for PPEF1 (NM_006240.2,1305-1323).
caatcgttgacaatgaaat

SEQ ID NO: 151390 - DNA, 19 bp, Homo sapiens
  siRNA target sequence for PPEF1 (NM_006240.2,1376-1394).
cgtgtagagaggaacaaga

SEQ ID NO: 151391 - DNA, 19 bp, Homo sapiens
  siRNA target sequence for PPEF1 (NM_006240.2,1377-1395).
gtgtagagaggaacaagat

SEQ ID NO: 151392 - DNA, 19 bp, Homo sapiens
  siRNA target sequence for PPEF1 (NM_006240.2,1506-1524).
gatctcctactgaacactt

SEQ ID NO: 151393 - DNA, 19 bp, Homo sapiens
  siRNA target sequence for PPEF1 (NM_006240.2,1520-1538).
cacttaacagagcatgaat

SEQ ID NO: 151394 - DNA, 19 bp, Homo sapiens
  siRNA target sequence for PPEF1 (NM_006240.2,1539-1557).
gggaacagattattgatat

SEQ ID NO: 151395 - DNA, 19 bp, Homo sapiens
  siRNA target sequence for PPEF1 (NM_006240.2,1540-1558).
ggaacagattattgatatt

SEQ ID NO: 151396 - DNA, 19 bp, Homo sapiens
  siRNA target sequence for PPEF1 (NM_006240.2,1586-1604).
ggctgttttccaaatacgt

SEQ ID NO: 151397 - DNA, 19 bp, Homo sapiens
  siRNA target sequence for PPEF1 (NM_006240.2,1675-1693).
gctcatcaggtctcatgaa

SEQ ID NO: 151398 - DNA, 19 bp, Homo sapiens
  siRNA target sequence for PPEF1 (NM_006240.2,1676-1694).
ctcatcaggtctcatgaat

SEQ ID NO: 151399 - DNA, 19 bp, Homo sapiens
  siRNA target sequence for PPEF1 (NM_006240.2,1700-1718).
cccgaagggtatgaaatct

SEQ ID NO: 151400 - DNA, 19 bp, Homo sapiens
  siRNA target sequence for PPEF1 (NM_006240.2,1702-1720).
cgaagggtatgaaatctgt

SEQ ID NO: 151401 - DNA, 19 bp, Homo sapiens
  siRNA target sequence for PPEF1 (NM_006240.2,1708-1726).
gtatgaaatctgtcatgat

SEQ ID NO: 151402 - DNA, 19 bp, Homo sapiens
  siRNA target sequence for PPEF1 (NM_006240.2,1776-1794).
gcaatcgaggagcttacat

SEQ ID NO: 151403 - DNA, 19 bp, Homo sapiens
  siRNA target sequence for PPEF1 (NM_006240.2,1782-1800).
gaggagcttacatcaaact

SEQ ID NO: 151404 - DNA, 19 bp, Homo sapiens
  siRNA target sequence for PPEF1 (NM_006240.2,1784-1802).
ggagcttacatcaaactat

SEQ ID NO: 151405 - DNA, 19 bp, Homo sapiens
  siRNA target sequence for PPEF1 (NM_006240.2,1808-1826).
ggtacaactcctcgatttt

SEQ ID NO: 151406 - DNA, 19 bp, Homo sapiens
  siRNA target sequence for PPEF1 (NM_006240.2,1812-1830).
caactcctcgatttttcca

SEQ ID NO: 151407 - DNA, 19 bp, Homo sapiens
  siRNA target sequence for PPEF1 (NM_006240.2,1828-1846).
ccagtaccaagtaactaaa

SEQ ID NO: 151408 - DNA, 19 bp, Homo sapiens
  siRNA target sequence for PPEF1 (NM_006240.2,1831-1849).
gtaccaagtaactaaagca

SEQ ID NO: 151409 - DNA, 19 bp, Homo sapiens
  siRNA target sequence for PPEF1 (NM_006240.2,1868-1886).
cgccaaagagtggatacta

SEQ ID NO: 151410 - DNA, 19 bp, Homo sapiens
  siRNA target sequence for PPEF1 (NM_006240.2,1877-1895).
gtggatactatggaaaaca

SEQ ID NO: 151411 - DNA, 19 bp, Homo sapiens
  siRNA target sequence for PPEF1 (NM_006240.2,1897-1915).
cgccatcaagatattaaga

SEQ ID NO: 151412 - DNA, 19 bp, Homo sapiens
  siRNA target sequence for PPEF1 (NM_006240.2,1918-1936).
gagagtgatttcacgaaaa

SEQ ID NO: 151413 - DNA, 19 bp, Homo sapiens
  siRNA target sequence for PPEF1 (NM_006240.2,1942-1960).
ccttactcgtgctttccaa

SEQ ID NO: 151414 - DNA, 19 bp, Homo sapiens
  siRNA target sequence for PPEF1 (NM_006240.2,1998-2016).
gccagtgggctttttgcat

SEQ ID NO: 151415 - DNA, 19 bp, Homo sapiens
  siRNA target sequence for PPEF1 (NM_006240.2,2047-2065).
gagatccctcagttcgaat

SEQ ID NO: 151416 - DNA, 19 bp, Homo sapiens
  siRNA target sequence for PPEF1 (NM_006240.2,2087-2105).
ggaaacgttgaatacatgt

SEQ ID NO: 151417 - DNA, 19 bp, Homo sapiens
  siRNA target sequence for PPEF1 (NM_006240.2,2116-2134).
gaatatccgcattgaaaaa

SEQ ID NO: 151418 - DNA, 19 bp, Homo sapiens
  siRNA target sequence for PPEF1 (NM_006240.2,2150-2168).
cattctactctagttgaaa

SEQ ID NO: 151419 - DNA, 19 bp, Homo sapiens
  siRNA target sequence for PPEF1 (NM_006240.2,2154-2172).
ctactctagttgaaactct

SEQ ID NO: 151420 - DNA, 19 bp, Homo sapiens
  siRNA target sequence for PPEF1 (NM_006240.2,2184-2202).
gatctgacctggaaatcat

SEQ ID NO: 151421 - DNA, 19 bp, Homo sapiens
  siRNA target sequence for PPEF1 (NM_006240.2,2234-2252).
ctgatctccgtggaagaat

SEQ ID NO: 151422 - DNA, 19 bp, Homo sapiens
  siRNA target sequence for PPEF1 (NM_006240.2,2239-2257).
ctccgtggaagaatttcgt

SEQ ID NO: 151423 - DNA, 19 bp, Homo sapiens
  siRNA target sequence for PPEF1 (NM_006240.2,2255-2273).
cgtgccatgtggaaacttt

SEQ ID NO: 151424 - DNA, 19 bp, Homo sapiens
  siRNA target sequence for PPEF1 (NM_006240.2,2256-2274).
gtgccatgtggaaactttt

SEQ ID NO: 151425 - DNA, 19 bp, Homo sapiens
  siRNA target sequence for PPEF1 (NM_006240.2,2329-2347).
cataatggacttgaacaaa

SEQ ID NO: 151426 - DNA, 19 bp, Homo sapiens
  siRNA target sequence for PPEF1 (NM_152225.1,1539-1557).
gggaacagagtggatacta

SEQ ID NO: 151427 - DNA, 19 bp, Homo sapiens
  siRNA target sequence for PPEF1 (NM_152225.1,1540-1558).
ggaacagagtggatactat

SEQ ID NO: 151428 - DNA, 19 bp, Homo sapiens
  siRNA target sequence for PPEF2 (NM_006239.2,491-509).
ggagcatcttccagtctat

SEQ ID NO: 151429 - DNA, 19 bp, Homo sapiens
  siRNA target sequence for PPEF2 (NM_006239.2,492-510).
gagcatcttccagtctata

SEQ ID NO: 151430 - DNA, 19 bp, Homo sapiens
  siRNA target sequence for PPEF2 (NM_006239.2,606-624).
cctgacccgcatattcact

SEQ ID NO: 151431 - DNA, 19 bp, Homo sapiens
  siRNA target sequence for PPEF2 (NM_006239.2,643-661).
gactccgagatgaagaaat

SEQ ID NO: 151432 - DNA, 19 bp, Homo sapiens
  siRNA target sequence for PPEF2 (NM_006239.2,787-805).
cgctacgtcttgaaccttt

SEQ ID NO: 151433 - DNA, 19 bp, Homo sapiens
  siRNA target sequence for PPEF2 (NM_006239.2,788-806).
gctacgtcttgaacctttt

SEQ ID NO: 151434 - DNA, 19 bp, Homo sapiens
  siRNA target sequence for PPEF2 (NM_006239.2,850-868).
cgggtctcaacctgttaca

SEQ ID NO: 151435 - DNA, 19 bp, Homo sapiens
  siRNA target sequence for PPEF2 (NM_006239.2,894-912).
cttacatggccaattggat

SEQ ID NO: 151436 - DNA, 19 bp, Homo sapiens
  siRNA target sequence for PPEF2 (NM_006239.2,902-920).
gccaattggatgacttaat

SEQ ID NO: 151437 - DNA, 19 bp, Homo sapiens
  siRNA target sequence for PPEF2 (NM_006239.2,950-968).
cgccagaacggtcatatgt

SEQ ID NO: 151438 - DNA, 19 bp, Homo sapiens
  siRNA target sequence for PPEF2 (NM_006239.2,953-971).
cagaacggtcatatgtgtt

SEQ ID NO: 151439 - DNA, 19 bp, Homo sapiens
  siRNA target sequence for PPEF2 (NM_006239.2,1004-1022).
cagtagagatcctgatgat

SEQ ID NO: 151440 - DNA, 19 bp, Homo sapiens
  siRNA target sequence for PPEF2 (NM_006239.2,1009-1027).
gagatcctgatgattcttt

SEQ ID NO: 151441 - DNA, 19 bp, Homo sapiens
  siRNA target sequence for PPEF2 (NM_006239.2,1039-1057).
ctggtttaccccaaagagt

SEQ ID NO: 151442 - DNA, 19 bp, Homo sapiens
  siRNA target sequence for PPEF2 (NM_006239.2,1073-1091).
gaaaccatgaggaccatat

SEQ ID NO: 151443 - DNA, 19 bp, Homo sapiens
  siRNA target sequence for PPEF2 (NM_006239.2,1083-1101).
ggaccatatggtgaactta

SEQ ID NO: 151444 - DNA, 19 bp, Homo sapiens
  siRNA target sequence for PPEF2 (NM_006239.2,1087-1105).
catatggtgaacttacgat

SEQ ID NO: 151445 - DNA, 19 bp, Homo sapiens
  siRNA target sequence for PPEF2 (NM_006239.2,1140-1158).
ggtacacgggaaggaaata

SEQ ID NO: 151446 - DNA, 19 bp, Homo sapiens
  siRNA target sequence for PPEF2 (NM_006239.2,1163-1181).
gaaccctgcaagatgtttt

SEQ ID NO: 151447 - DNA, 19 bp, Homo sapiens
  siRNA target sequence for PPEF2 (NM_006239.2,1193-1211).
cactggccactctgataga

SEQ ID NO: 151448 - DNA, 19 bp, Homo sapiens
  siRNA target sequence for PPEF2 (NM_006239.2,1199-1217).
ccactctgatagatgagaa

SEQ ID NO: 151449 - DNA, 19 bp, Homo sapiens
  siRNA target sequence for PPEF2 (NM_006239.2,1238-1256).
gggtgtcagacataactga

SEQ ID NO: 151450 - DNA, 19 bp, Homo sapiens
  siRNA target sequence for PPEF2 (NM_006239.2,1239-1257).
ggtgtcagacataactgat

SEQ ID NO: 151451 - DNA, 19 bp, Homo sapiens
  siRNA target sequence for PPEF2 (NM_006239.2,1279-1297).
gagaggagcaagatagttt

SEQ ID NO: 151452 - DNA, 19 bp, Homo sapiens
  siRNA target sequence for PPEF2 (NM_006239.2,1380-1398).
gggacccatcccatggttt

SEQ ID NO: 151453 - DNA, 19 bp, Homo sapiens
  siRNA target sequence for PPEF2 (NM_006239.2,1673-1691).
ggcaggttgtagatatcct

SEQ ID NO: 151454 - DNA, 19 bp, Homo sapiens
  siRNA target sequence for PPEF2 (NM_006239.2,1717-1735).
ggctgcaaggccaacacta

SEQ ID NO: 151455 - DNA, 19 bp, Homo sapiens
  siRNA target sequence for PPEF2 (NM_006239.2,1718-1736).
gctgcaaggccaacactat

SEQ ID NO: 151456 - DNA, 19 bp, Homo sapiens
  siRNA target sequence for PPEF2 (NM_006239.2,1719-1737).
ctgcaaggccaacactatt

SEQ ID NO: 151457 - DNA, 19 bp, Homo sapiens
  siRNA target sequence for PPEF2 (NM_006239.2,1722-1740).
caaggccaacactattcga

SEQ ID NO: 151458 - DNA, 19 bp, Homo sapiens
  siRNA target sequence for PPEF2 (NM_006239.2,1763-1781).
ctgatgtgacacaacagtt

SEQ ID NO: 151459 - DNA, 19 bp, Homo sapiens
  siRNA target sequence for PPEF2 (NM_006239.2,1806-1824).
cctgatccgttcacatgaa

SEQ ID NO: 151460 - DNA, 19 bp, Homo sapiens
  siRNA target sequence for PPEF2 (NM_006239.2,1812-1830).
ccgttcacatgaatgcaaa

SEQ ID NO: 151461 - DNA, 19 bp, Homo sapiens
  siRNA target sequence for PPEF2 (NM_006239.2,1827-1845).
caaacctgaaggctatgaa

SEQ ID NO: 151462 - DNA, 19 bp, Homo sapiens
  siRNA target sequence for PPEF2 (NM_006239.2,1852-1870).
cacaaccgcaaggtattaa

SEQ ID NO: 151463 - DNA, 19 bp, Homo sapiens
  siRNA target sequence for PPEF2 (NM_006239.2,1858-1876).
cgcaaggtattaacaatct

SEQ ID NO: 151464 - DNA, 19 bp, Homo sapiens
  siRNA target sequence for PPEF2 (NM_006239.2,1859-1877).
gcaaggtattaacaatctt

SEQ ID NO: 151465 - DNA, 19 bp, Homo sapiens
  siRNA target sequence for PPEF2 (NM_006239.2,1884-1902).
ctccaactactatgaagtt

SEQ ID NO: 151466 - DNA, 19 bp, Homo sapiens
  siRNA target sequence for PPEF2 (NM_006239.2,1911-1929).
cagaggggcctatgtcaaa

SEQ ID NO: 151467 - DNA, 19 bp, Homo sapiens
  siRNA target sequence for PPEF2 (NM_006239.2,1913-1931).
gaggggcctatgtcaaact

SEQ ID NO: 151468 - DNA, 19 bp, Homo sapiens
  siRNA target sequence for PPEF2 (NM_006239.2,1940-1958).
ccctgaccccacatattgt

SEQ ID NO: 151469 - DNA, 19 bp, Homo sapiens
  siRNA target sequence for PPEF2 (NM_006239.2,2101-2119).
gcagataaagtcggtttaa

SEQ ID NO: 151470 - DNA, 19 bp, Homo sapiens
  siRNA target sequence for PPEF2 (NM_006239.2,2102-2120).
cagataaagtcggtttaat

SEQ ID NO: 151471 - DNA, 19 bp, Homo sapiens
  siRNA target sequence for PPEF2 (NM_006239.2,2104-2122).
gataaagtcggtttaatca

SEQ ID NO: 151472 - DNA, 19 bp, Homo sapiens
  siRNA target sequence for PPEF2 (NM_006239.2,2272-2290).
cgcgagaacatacaatcaa

SEQ ID NO: 151473 - DNA, 19 bp, Homo sapiens
  siRNA target sequence for PPEF2 (NM_006239.2,2274-2292).
cgagaacatacaatcaagt

SEQ ID NO: 151474 - DNA, 19 bp, Homo sapiens
  siRNA target sequence for PPEF2 (NM_006239.2,2322-2340).
caacctagagaccattttt

SEQ ID NO: 151475 - DNA, 19 bp, Homo sapiens
  siRNA target sequence for PPEF2 (NM_006239.2,2343-2361).
gatcatagacagtgatcat

SEQ ID NO: 151476 - DNA, 19 bp, Homo sapiens
  siRNA target sequence for PPEF2 (NM_006239.2,2411-2429).
gctctcacatgaatatcga

SEQ ID NO: 151477 - DNA, 19 bp, Homo sapiens
  siRNA target sequence for PPEF2 (NM_006239.2,2416-2434).
cacatgaatatcgacatta

SEQ ID NO: 151478 - DNA, 19 bp, Homo sapiens
  siRNA target sequence for PPEF2 (NM_006239.2,2418-2436).
catgaatatcgacattaca

SEQ ID NO: 151479 - DNA, 19 bp, Homo sapiens
  siRNA target sequence for PPEF2 (NM_006239.2,2421-2439).
gaatatcgacattacagat

SEQ ID NO: 151480 - DNA, 19 bp, Homo sapiens
  siRNA target sequence for PPEF2 (NM_006239.2,2454-2472).
ccttgctcggagcattgat

SEQ ID NO: 151481 - DNA, 19 bp, Homo sapiens
  siRNA target sequence for PPEF2 (NM_006239.2,2455-2473).
cttgctcggagcattgatt

SEQ ID NO: 151482 - DNA, 19 bp, Homo sapiens
  siRNA target sequence for PPEF2 (NM_006239.2,2459-2477).
ctcggagcattgatttcaa

SEQ ID NO: 151483 - DNA, 19 bp, Homo sapiens
  siRNA target sequence for PPEF2 (NM_006239.2,2461-2479).
cggagcattgatttcaaca

SEQ ID NO: 151484 - DNA, 19 bp, Homo sapiens
  siRNA target sequence for PPEF2 (NM_006239.2,2462-2480).
ggagcattgatttcaacaa

SEQ ID NO: 151485 - DNA, 19 bp, Homo sapiens
  siRNA target sequence for PPEF2 (NM_006239.2,2463-2481).
gagcattgatttcaacaaa

SEQ ID NO: 151486 - DNA, 19 bp, Homo sapiens
  siRNA target sequence for PPEF2 (NM_006239.2,2482-2500).
gatggccacattgatatca

SEQ ID NO: 151487 - DNA, 19 bp, Homo sapiens
  siRNA target sequence for PPEF2 (NM_006239.2,2521-2539).
cgccttgtggagaaatcct

SEQ ID NO: 151488 - DNA, 19 bp, Homo sapiens
  siRNA target sequence for PPEF2 (NM_006239.2,2545-2563).
gagggcgatgcctcagaat

SEQ ID NO: 151489 - DNA, 19 bp, Homo sapiens
  siRNA target sequence for PPEF2 (NM_006239.2,2566-2584).
ccacaagctacaaatgcta

SEQ ID NO: 151490 - DNA, 19 bp, Homo sapiens
  siRNA target sequence for PPEF2 (NM_006239.2,2567-2585).
cacaagctacaaatgctaa

SEQ ID NO: 151491 - DNA, 19 bp, Homo sapiens
  siRNA target sequence for PPHLN1 (NM_016488.3,90-108).
gtggtctgagggacgatat

SEQ ID NO: 151492 - DNA, 19 bp, Homo sapiens
  siRNA target sequence for PPHLN1 (NM_016488.3,92-110).
ggtctgagggacgatatga

SEQ ID NO: 151493 - DNA, 19 bp, Homo sapiens
  siRNA target sequence for PPHLN1 (NM_016488.3,154-172).
cccagtgatggctacaata

SEQ ID NO: 151494 - DNA, 19 bp, Homo sapiens
  siRNA target sequence for PPHLN1 (NM_016488.3,158-176).
gtgatggctacaatagact

SEQ ID NO: 151495 - DNA, 19 bp, Homo sapiens
  siRNA target sequence for PPHLN1 (NM_016488.3,163-181).
ggctacaatagactagtta

SEQ ID NO: 151496 - DNA, 19 bp, Homo sapiens
  siRNA target sequence for PPHLN1 (NM_016488.3,164-182).
gctacaatagactagttaa

SEQ ID NO: 151497 - DNA, 19 bp, Homo sapiens
  siRNA target sequence for PPHLN1 (NM_016488.3,165-183).
ctacaatagactagttaat

SEQ ID NO: 151498 - DNA, 19 bp, Homo sapiens
  siRNA target sequence for PPHLN1 (NM_016488.3,168-186).
caatagactagttaatatt

SEQ ID NO: 151499 - DNA, 19 bp, Homo sapiens
  siRNA target sequence for PPHLN1 (NM_016488.3,220-238).
ggtgaaggaagctacaata

SEQ ID NO: 151500 - DNA, 19 bp, Homo sapiens
  siRNA target sequence for PPHLN1 (NM_016488.3,226-244).
ggaagctacaatagatatt

SEQ ID NO: 151501 - DNA, 19 bp, Homo sapiens
  siRNA target sequence for PPHLN1 (NM_016488.3,239-257).
gatattacagtcatgttga

SEQ ID NO: 151502 - DNA, 19 bp, Homo sapiens
  siRNA target sequence for PPHLN1 (NM_016488.3,325-343).
gatgaatctggttatagat

SEQ ID NO: 151503 - DNA, 19 bp, Homo sapiens
  siRNA target sequence for PPHLN1 (NM_016488.3,442-460).
gagcggtctccttataaaa

SEQ ID NO: 151504 - DNA, 19 bp, Homo sapiens
  siRNA target sequence for PPHLN1 (NM_016488.3,462-480).
ggacaatacttttttcaga

SEQ ID NO: 151505 - DNA, 19 bp, Homo sapiens
  siRNA target sequence for PPHLN1 (NM_016488.3,487-505).
cctgttggccgaaaggatt

SEQ ID NO: 151506 - DNA, 19 bp, Homo sapiens
  siRNA target sequence for PPHLN1 (NM_016488.3,556-574).
gaaaggagcaaatcatact

SEQ ID NO: 151507 - DNA, 19 bp, Homo sapiens
  siRNA target sequence for PPHLN1 (NM_016488.3,564-582).
caaatcatactctttccat

SEQ ID NO: 151508 - DNA, 19 bp, Homo sapiens
  siRNA target sequence for PPHLN1 (NM_016488.3,620-638).
cctacaaacggcagaatga

SEQ ID NO: 151509 - DNA, 19 bp, Homo sapiens
  siRNA target sequence for PPHLN1 (NM_016488.3,666-684).
gcctgtccagtctttgaaa

SEQ ID NO: 151510 - DNA, 19 bp, Homo sapiens
  siRNA target sequence for PPHLN1 (NM_016488.3,670-688).
gtccagtctttgaaaacat

SEQ ID NO: 151511 - DNA, 19 bp, Homo sapiens
  siRNA target sequence for PPHLN1 (NM_016488.3,725-743).
cttcatcaaaggtgttaga

SEQ ID NO: 151512 - DNA, 19 bp, Homo sapiens
  siRNA target sequence for PPHLN1 (NM_016488.3,752-770).
gtaggctaactgaaaagga

SEQ ID NO: 151513 - DNA, 19 bp, Homo sapiens
  siRNA target sequence for PPHLN1 (NM_016488.3,894-912).
ggaacctgagtcaaacaca

SEQ ID NO: 151514 - DNA, 19 bp, Homo sapiens
  siRNA target sequence for PPHLN1 (NM_016488.3,895-913).
gaacctgagtcaaacacaa

SEQ ID NO: 151515 - DNA, 19 bp, Homo sapiens
  siRNA target sequence for PPHLN1 (NM_016488.3,911-929).
caacacatgggatagaatt

SEQ ID NO: 151516 - DNA, 19 bp, Homo sapiens
  siRNA target sequence for PPHLN1 (NM_016488.3,945-963).
gctaaccactcgctctaaa

SEQ ID NO: 151517 - DNA, 19 bp, Homo sapiens
  siRNA target sequence for PPHLN1 (NM_016488.3,950-968).
ccactcgctctaaagcaat

SEQ ID NO: 151518 - DNA, 19 bp, Homo sapiens
  siRNA target sequence for PPHLN1 (NM_016488.3,951-969).
cactcgctctaaagcaata

SEQ ID NO: 151519 - DNA, 19 bp, Homo sapiens
  siRNA target sequence for PPHLN1 (NM_016488.3,1003-1021).
cgacaagactgtgaaactt

SEQ ID NO: 151520 - DNA, 19 bp, Homo sapiens
  siRNA target sequence for PPHLN1 (NM_016488.3,1293-1311).
gacaggagccccagacatt

SEQ ID NO: 151521 - DNA, 19 bp, Homo sapiens
  siRNA target sequence for PPM2C (NM_018444.1,195-213).
ggaatcccagtcagaagtt

SEQ ID NO: 151522 - DNA, 19 bp, Homo sapiens
  siRNA target sequence for PPM2C (NM_018444.1,360-378).
cagagtcgactgagataca

SEQ ID NO: 151523 - DNA, 19 bp, Homo sapiens
  siRNA target sequence for PPM2C (NM_018444.1,387-405).
ccagcatatgctacctttt

SEQ ID NO: 151524 - DNA, 19 bp, Homo sapiens
  siRNA target sequence for PPM2C (NM_018444.1,434-452).
cacccaaggaaggagatat

SEQ ID NO: 151525 - DNA, 19 bp, Homo sapiens
  siRNA target sequence for PPM2C (NM_018444.1,479-497).
cacacctccacaagtcaat

SEQ ID NO: 151526 - DNA, 19 bp, Homo sapiens
  siRNA target sequence for PPM2C (NM_018444.1,483-501).
cctccacaagtcaatagca

SEQ ID NO: 151527 - DNA, 19 bp, Homo sapiens
  siRNA target sequence for PPM2C (NM_018444.1,484-502).
ctccacaagtcaatagcat

SEQ ID NO: 151528 - DNA, 19 bp, Homo sapiens
  siRNA target sequence for PPM2C (NM_018444.1,489-507).
caagtcaatagcatcctta

SEQ ID NO: 151529 - DNA, 19 bp, Homo sapiens
  siRNA target sequence for PPM2C (NM_018444.1,639-657).
cagaccagagggatgcttt

SEQ ID NO: 151530 - DNA, 19 bp, Homo sapiens
  siRNA target sequence for PPM2C (NM_018444.1,695-713).
ccaggcagtcagtgaaaga

SEQ ID NO: 151531 - DNA, 19 bp, Homo sapiens
  siRNA target sequence for PPM2C (NM_018444.1,752-770).
gactttgctagagattgaa

SEQ ID NO: 151532 - DNA, 19 bp, Homo sapiens
  siRNA target sequence for PPM2C (NM_018444.1,816-834).
cacaagcaccccaatgatt

SEQ ID NO: 151533 - DNA, 19 bp, Homo sapiens
  siRNA target sequence for PPM2C (NM_018444.1,821-839).
gcaccccaatgattacttt

SEQ ID NO: 151534 - DNA, 19 bp, Homo sapiens
  siRNA target sequence for PPM2C (NM_018444.1,822-840).
caccccaatgattacttta

SEQ ID NO: 151535 - DNA, 19 bp, Homo sapiens
  siRNA target sequence for PPM2C (NM_018444.1,824-842).
ccccaatgattactttagt

SEQ ID NO: 151536 - DNA, 19 bp, Homo sapiens
  siRNA target sequence for PPM2C (NM_018444.1,825-843).
cccaatgattactttagta

SEQ ID NO: 151537 - DNA, 19 bp, Homo sapiens
  siRNA target sequence for PPM2C (NM_018444.1,826-844).
ccaatgattactttagtaa

SEQ ID NO: 151538 - DNA, 19 bp, Homo sapiens
  siRNA target sequence for PPM2C (NM_018444.1,841-859).
gtaaggaggcatccaaatt

SEQ ID NO: 151539 - DNA, 19 bp, Homo sapiens
  siRNA target sequence for PPM2C (NM_018444.1,846-864).
gaggcatccaaattgtact

SEQ ID NO: 151540 - DNA, 19 bp, Homo sapiens
  siRNA target sequence for PPM2C (NM_018444.1,848-866).
ggcatccaaattgtacttt

SEQ ID NO: 151541 - DNA, 19 bp, Homo sapiens
  siRNA target sequence for PPM2C (NM_018444.1,880-898).
cttactggcaagagcttat

SEQ ID NO: 151542 - DNA, 19 bp, Homo sapiens
  siRNA target sequence for PPM2C (NM_018444.1,910-928).
ctggtgagtcgactgatat

SEQ ID NO: 151543 - DNA, 19 bp, Homo sapiens
  siRNA target sequence for PPM2C (NM_018444.1,913-931).
gtgagtcgactgatattga

SEQ ID NO: 151544 - DNA, 19 bp, Homo sapiens
  siRNA target sequence for PPM2C (NM_018444.1,917-935).
gtcgactgatattgatgtt

SEQ ID NO: 151545 - DNA, 19 bp, Homo sapiens
  siRNA target sequence for PPM2C (NM_018444.1,919-937).
cgactgatattgatgttaa

SEQ ID NO: 151546 - DNA, 19 bp, Homo sapiens
  siRNA target sequence for PPM2C (NM_018444.1,945-963).
ctaattaatgccttcaaga

SEQ ID NO: 151547 - DNA, 19 bp, Homo sapiens
  siRNA target sequence for PPM2C (NM_018444.1,956-974).
cttcaagaggcttgataat

SEQ ID NO: 151548 - DNA, 19 bp, Homo sapiens
  siRNA target sequence for PPM2C (NM_018444.1,992-1010).
gcaagttggtgatcctaat

SEQ ID NO: 151549 - DNA, 19 bp, Homo sapiens
  siRNA target sequence for PPM2C (NM_018444.1,1000-1018).
gtgatcctaattcttttct

SEQ ID NO: 151550 - DNA, 19 bp, Homo sapiens
  siRNA target sequence for PPM2C (NM_018444.1,1031-1049).
gcttcgagtggcattttct

SEQ ID NO: 151551 - DNA, 19 bp, Homo sapiens
  siRNA target sequence for PPM2C (NM_018444.1,1159-1177).
cagtcacgctgtctaatga

SEQ ID NO: 151552 - DNA, 19 bp, Homo sapiens
  siRNA target sequence for PPM2C (NM_018444.1,1240-1258).
ccaagagtgtcgtgaaaca

SEQ ID NO: 151553 - DNA, 19 bp, Homo sapiens
  siRNA target sequence for PPM2C (NM_018444.1,1318-1336).
ggagcattgaccttcaaaa

SEQ ID NO: 151554 - DNA, 19 bp, Homo sapiens
  siRNA target sequence for PPM2C (NM_018444.1,1328-1346).
ccttcaaaagagagtgata

SEQ ID NO: 151555 - DNA, 19 bp, Homo sapiens
  siRNA target sequence for PPM2C (NM_018444.1,1356-1374).
ccagaccagttgaatgaca

SEQ ID NO: 151556 - DNA, 19 bp, Homo sapiens
  siRNA target sequence for PPM2C (NM_018444.1,1357-1375).
cagaccagttgaatgacaa

SEQ ID NO: 151557 - DNA, 19 bp, Homo sapiens
  siRNA target sequence for PPM2C (NM_018444.1,1361-1379).
ccagttgaatgacaatgaa

SEQ ID NO: 151558 - DNA, 19 bp, Homo sapiens
  siRNA target sequence for PPM2C (NM_018444.1,1385-1403).
caagtttattcctcctaat

SEQ ID NO: 151559 - DNA, 19 bp, Homo sapiens
  siRNA target sequence for PPM2C (NM_018444.1,1429-1447).
ctgagccagaggtaactta

SEQ ID NO: 151560 - DNA, 19 bp, Homo sapiens
  siRNA target sequence for PPM2C (NM_018444.1,1440-1458).
gtaacttaccaccgattaa

SEQ ID NO: 151561 - DNA, 19 bp, Homo sapiens
  siRNA target sequence for PPM2C (NM_018444.1,1453-1471).
gattaaggccacaggataa

SEQ ID NO: 151562 - DNA, 19 bp, Homo sapiens
  siRNA target sequence for PPM2C (NM_018444.1,1640-1658).
caaaatgtcctcggtattt

SEQ ID NO: 151563 - DNA, 19 bp, Homo sapiens
  siRNA target sequence for PPM2C (NM_018444.1,1670-1688).
cgcagcaacccatctcatt

SEQ ID NO: 151564 - DNA, 19 bp, Homo sapiens
  siRNA target sequence for PPM2C (NM_018444.1,1709-1727).
cgagtttgggactgttgat

SEQ ID NO: 151565 - DNA, 19 bp, Homo sapiens
  siRNA target sequence for PPM2C (NM_018444.1,1712-1730).
gtttgggactgttgatcat

SEQ ID NO: 151566 - DNA, 19 bp, Homo sapiens
  siRNA target sequence for PPM2C (NM_018444.1,1728-1746).
catgagcgcctctctaaaa

SEQ ID NO: 151567 - DNA, 19 bp, Homo sapiens
  siRNA target sequence for PPM2C (NM_018444.1,1733-1751).
gcgcctctctaaaatgctt

SEQ ID NO: 151568 - DNA, 19 bp, Homo sapiens
  siRNA target sequence for PPM2C (NM_018444.1,1764-1782).
gagcttgctcgaatgtaca

SEQ ID NO: 151569 - DNA, 19 bp, Homo sapiens
  siRNA target sequence for PPM2C (NM_018444.1,1778-1796).
gtacagagatgacattaca

SEQ ID NO: 151570 - DNA, 19 bp, Homo sapiens
  siRNA target sequence for PPM2C (NM_018444.1,1790-1808).
cattacaatcattgtagtt

SEQ ID NO: 151571 - DNA, 19 bp, Homo sapiens
  siRNA target sequence for PPM2C (NM_018444.1,1795-1813).
caatcattgtagttcagtt

SEQ ID NO: 151572 - DNA, 19 bp, Homo sapiens
  siRNA target sequence for PPM2C (NM_018444.1,1824-1842).
gttgtaggggcgtatcaaa

SEQ ID NO: 151573 - DNA, 19 bp, Homo sapiens
  siRNA target sequence for PPP2R3A (NM_002718.3,622-640).
gatagaccggcgttttgaa

SEQ ID NO: 151574 - DNA, 19 bp, Homo sapiens
  siRNA target sequence for PPP2R3A (NM_002718.3,630-648).
ggcgttttgaacaagctat

SEQ ID NO: 151575 - DNA, 19 bp, Homo sapiens
  siRNA target sequence for PPP2R3A (NM_002718.3,641-659).
caagctatacattattgca

SEQ ID NO: 151576 - DNA, 19 bp, Homo sapiens
  siRNA target sequence for PPP2R3A (NM_002718.3,762-780).
cagatctgaactctatgtt

SEQ ID NO: 151577 - DNA, 19 bp, Homo sapiens
  siRNA target sequence for PPP2R3A (NM_002718.3,778-796).
gtttctaccccatgaaaat

SEQ ID NO: 151578 - DNA, 19 bp, Homo sapiens
  siRNA target sequence for PPP2R3A (NM_002718.3,854-872).
gtcaagagaggatctacat

SEQ ID NO: 151579 - DNA, 19 bp, Homo sapiens
  siRNA target sequence for PPP2R3A (NM_002718.3,856-874).
caagagaggatctacattt

SEQ ID NO: 151580 - DNA, 19 bp, Homo sapiens
  siRNA target sequence for PPP2R3A (NM_002718.3,867-885).
ctacatttcagaataccta

SEQ ID NO: 151581 - DNA, 19 bp, Homo sapiens
  siRNA target sequence for PPP2R3A (NM_002718.3,875-893).
cagaatacctacaacttaa

SEQ ID NO: 151582 - DNA, 19 bp, Homo sapiens
  siRNA target sequence for PPP2R3A (NM_002718.3,903-921).
caggagaagcaatcagttt

SEQ ID NO: 151583 - DNA, 19 bp, Homo sapiens
  siRNA target sequence for PPP2R3A (NM_002718.3,991-1009).
gggaaggaaagttaagtct

SEQ ID NO: 151584 - DNA, 19 bp, Homo sapiens
  siRNA target sequence for PPP2R3A (NM_002718.3,1001-1019).
gttaagtctgactcattta

SEQ ID NO: 151585 - DNA, 19 bp, Homo sapiens
  siRNA target sequence for PPP2R3A (NM_002718.3,1075-1093).
cgccccatcctttggttta

SEQ ID NO: 151586 - DNA, 19 bp, Homo sapiens
  siRNA target sequence for PPP2R3A (NM_002718.3,1077-1095).
ccccatcctttggtttact

SEQ ID NO: 151587 - DNA, 19 bp, Homo sapiens
  siRNA target sequence for PPP2R3A (NM_002718.3,1101-1119).
gttcctcagttgaggaaaa

SEQ ID NO: 151588 - DNA, 19 bp, Homo sapiens
  siRNA target sequence for PPP2R3A (NM_002718.3,1134-1152).
gaaactcactggatacgaa

SEQ ID NO: 151589 - DNA, 19 bp, Homo sapiens
  siRNA target sequence for PPP2R3A (NM_002718.3,1190-1208).
gacttggttactcagattt

SEQ ID NO: 151590 - DNA, 19 bp, Homo sapiens
  siRNA target sequence for PPP2R3A (NM_002718.3,1241-1259).
gggacagacataaagatgt

SEQ ID NO: 151591 - DNA, 19 bp, Homo sapiens
  siRNA target sequence for PPP2R3A (NM_002718.3,1265-1283).
gacatcttattgaaatgct

SEQ ID NO: 151592 - DNA, 19 bp, Homo sapiens
  siRNA target sequence for PPP2R3A (NM_002718.3,1276-1294).
gaaatgctccgaggattta

SEQ ID NO: 151593 - DNA, 19 bp, Homo sapiens
  siRNA target sequence for PPP2R3A (NM_002718.3,1302-1320).
gcacagacatcataaaaca

SEQ ID NO: 151594 - DNA, 19 bp, Homo sapiens
  siRNA target sequence for PPP2R3A (NM_002718.3,1358-1376).
ggaagtggtaatgatacaa

SEQ ID NO: 151595 - DNA, 19 bp, Homo sapiens
  siRNA target sequence for PPP2R3A (NM_002718.3,1364-1382).
ggtaatgatacaatttcta

SEQ ID NO: 151596 - DNA, 19 bp, Homo sapiens
  siRNA target sequence for PPP2R3A (NM_002718.3,1383-1401).
gctctgaaactgtctatat

SEQ ID NO: 151597 - DNA, 19 bp, Homo sapiens
  siRNA target sequence for PPP2R3A (NM_002718.3,1392-1410).
ctgtctatatgaatgtaat

SEQ ID NO: 151598 - DNA, 19 bp, Homo sapiens
  siRNA target sequence for PPP2R3A (NM_002718.3,1406-1424).
gtaatgaccaggttagcat

SEQ ID NO: 151599 - DNA, 19 bp, Homo sapiens
  siRNA target sequence for PPP2R3A (NM_002718.3,1411-1429).
gaccaggttagcatcctat

SEQ ID NO: 151600 - DNA, 19 bp, Homo sapiens
  siRNA target sequence for PPP2R3A (NM_002718.3,1416-1434).
ggttagcatcctatctgaa

SEQ ID NO: 151601 - DNA, 19 bp, Homo sapiens
  siRNA target sequence for PPP2R3A (NM_002718.3,1421-1439).
gcatcctatctgaaaaagt

SEQ ID NO: 151602 - DNA, 19 bp, Homo sapiens
  siRNA target sequence for PPP2R3A (NM_002718.3,1465-1483).
gaataatgaggctctagat

SEQ ID NO: 151603 - DNA, 19 bp, Homo sapiens
  siRNA target sequence for PPP2R3A (NM_002718.3,1474-1492).
ggctctagatttaacagaa

SEQ ID NO: 151604 - DNA, 19 bp, Homo sapiens
  siRNA target sequence for PPP2R3A (NM_002718.3,1488-1506).
cagaactgatcagtaatat

SEQ ID NO: 151605 - DNA, 19 bp, Homo sapiens
  siRNA target sequence for PPP2R3A (NM_002718.3,1557-1575).
cccctaaatatgaagatgt

SEQ ID NO: 151606 - DNA, 19 bp, Homo sapiens
  siRNA target sequence for PPP2R3A (NM_002718.3,1593-1611).
ctgactctggacgatttca

SEQ ID NO: 151607 - DNA, 19 bp, Homo sapiens
  siRNA target sequence for PPP2R3A (NM_002718.3,1595-1613).
gactctggacgatttcaaa

SEQ ID NO: 151608 - DNA, 19 bp, Homo sapiens
  siRNA target sequence for PPP2R3A (NM_002718.3,1599-1617).
ctggacgatttcaaactat

SEQ ID NO: 151609 - DNA, 19 bp, Homo sapiens
  siRNA target sequence for PPP2R3A (NM_002718.3,1602-1620).
gacgatttcaaactattga

SEQ ID NO: 151610 - DNA, 19 bp, Homo sapiens
  siRNA target sequence for PPP2R3A (NM_002718.3,1604-1622).
cgatttcaaactattgaat

SEQ ID NO: 151611 - DNA, 19 bp, Homo sapiens
  siRNA target sequence for PPP2R3A (NM_002718.3,1659-1677).
ctgtacaatccattccaaa

SEQ ID NO: 151612 - DNA, 19 bp, Homo sapiens
  siRNA target sequence for PPP2R3A (NM_002718.3,1664-1682).
caatccattccaaacaact

SEQ ID NO: 151613 - DNA, 19 bp, Homo sapiens
  siRNA target sequence for PPP2R3A (NM_002718.3,1681-1699).
ctccacaaattccttatat

SEQ ID NO: 151614 - DNA, 19 bp, Homo sapiens
  siRNA target sequence for PPP2R3A (NM_002718.3,1686-1704).
caaattccttatataactt

SEQ ID NO: 151615 - DNA, 19 bp, Homo sapiens
  siRNA target sequence for PPP2R3A (NM_002718.3,1708-1726).
ggtaaatgatcctagaact

SEQ ID NO: 151616 - DNA, 19 bp, Homo sapiens
  siRNA target sequence for PPP2R3A (NM_002718.3,1734-1752).
ctgtccaggtccaatcaca

SEQ ID NO: 151617 - DNA, 19 bp, Homo sapiens
  siRNA target sequence for PPP2R3A (NM_002718.3,1765-1783).
gaatcctttagaaaatgtt

SEQ ID NO: 151618 - DNA, 19 bp, Homo sapiens
  siRNA target sequence for PPP2R3A (NM_002718.3,1871-1889).
ggacctagtcatgagttat

SEQ ID NO: 151619 - DNA, 19 bp, Homo sapiens
  siRNA target sequence for PPP2R3A (NM_002718.3,1875-1893).
ctagtcatgagttattaaa

SEQ ID NO: 151620 - DNA, 19 bp, Homo sapiens
  siRNA target sequence for PPP2R3A (NM_002718.3,1878-1896).
gtcatgagttattaaaggt

SEQ ID NO: 151621 - DNA, 19 bp, Homo sapiens
  siRNA target sequence for PPP2R3A (NM_002718.3,2019-2037).
gtaaatcaaaagtttctaa

SEQ ID NO: 151622 - DNA, 19 bp, Homo sapiens
  siRNA target sequence for PPP2R3A (NM_002718.3,2074-2092).
cagtagccaggaagagata

SEQ ID NO: 151623 - DNA, 19 bp, Homo sapiens
  siRNA target sequence for PPP2R3A (NM_002718.3,2076-2094).
gtagccaggaagagataga

SEQ ID NO: 151624 - DNA, 19 bp, Homo sapiens
  siRNA target sequence for PPP2R3A (NM_002718.3,2153-2171).
ccacttgcgaagggtaaaa

SEQ ID NO: 151625 - DNA, 19 bp, Homo sapiens
  siRNA target sequence for PPP2R3A (NM_002718.3,2154-2172).
cacttgcgaagggtaaaaa

SEQ ID NO: 151626 - DNA, 19 bp, Homo sapiens
  siRNA target sequence for PPP2R3A (NM_002718.3,2156-2174).
cttgcgaagggtaaaaact

SEQ ID NO: 151627 - DNA, 19 bp, Homo sapiens
  siRNA target sequence for PPP2R3A (NM_002718.3,2160-2178).
cgaagggtaaaaactctaa

SEQ ID NO: 151628 - DNA, 19 bp, Homo sapiens
  siRNA target sequence for PPP2R3A (NM_002718.3,2161-2179).
gaagggtaaaaactctaat

SEQ ID NO: 151629 - DNA, 19 bp, Homo sapiens
  siRNA target sequence for PPP2R3A (NM_002718.3,2164-2182).
gggtaaaaactctaatttt

SEQ ID NO: 151630 - DNA, 19 bp, Homo sapiens
  siRNA target sequence for PPP2R3A (NM_002718.3,2205-2223).
ccggtcagacccttgtaga

SEQ ID NO: 151631 - DNA, 19 bp, Homo sapiens
  siRNA target sequence for PPP2R3A (NM_002718.3,2206-2224).
cggtcagacccttgtagat

SEQ ID NO: 151632 - DNA, 19 bp, Homo sapiens
  siRNA target sequence for PPP2R3A (NM_002718.3,2219-2237).
gtagatcttgagcctaaat

SEQ ID NO: 151633 - DNA, 19 bp, Homo sapiens
  siRNA target sequence for PPP2R3A (NM_002718.3,2222-2240).
gatcttgagcctaaatcta

SEQ ID NO: 151634 - DNA, 19 bp, Homo sapiens
  siRNA target sequence for PPP2R3A (NM_002718.3,2266-2284).
ctcaccttcctgtctaaca

SEQ ID NO: 151635 - DNA, 19 bp, Homo sapiens
  siRNA target sequence for PPP2R3A (NM_002718.3,2274-2292).
cctgtctaacaaggattat

SEQ ID NO: 151636 - DNA, 19 bp, Homo sapiens
  siRNA target sequence for PPP2R3A (NM_002718.3,2275-2293).
ctgtctaacaaggattatt

SEQ ID NO: 151637 - DNA, 19 bp, Homo sapiens
  siRNA target sequence for PPP2R3A (NM_002718.3,2277-2295).
gtctaacaaggattattga

SEQ ID NO: 151638 - DNA, 19 bp, Homo sapiens
  siRNA target sequence for PPP2R3A (NM_002718.3,2279-2297).
ctaacaaggattattgaaa

SEQ ID NO: 151639 - DNA, 19 bp, Homo sapiens
  siRNA target sequence for PPP2R3A (NM_002718.3,2283-2301).
caaggattattgaaaccaa

SEQ ID NO: 151640 - DNA, 19 bp, Homo sapiens
  siRNA target sequence for PPP2R3A (NM_002718.3,2341-2359).
gcgaatcctggaaagcatt

SEQ ID NO: 151641 - DNA, 19 bp, Homo sapiens
  siRNA target sequence for PPP2R3A (NM_002718.3,2406-2424).
gcctatcacaagaaaagga

SEQ ID NO: 151642 - DNA, 19 bp, Homo sapiens
  siRNA target sequence for PPP2R3A (NM_002718.3,2438-2456).
ctacaggaaaccttgacaa

SEQ ID NO: 151643 - DNA, 19 bp, Homo sapiens
  siRNA target sequence for PPP2R3A (NM_002718.3,2441-2459).
caggaaaccttgacaactt

SEQ ID NO: 151644 - DNA, 19 bp, Homo sapiens
  siRNA target sequence for PPP2R3A (NM_002718.3,2461-2479).
ctcccaggccaatttatca

SEQ ID NO: 151645 - DNA, 19 bp, Homo sapiens
  siRNA target sequence for PPP2R3A (NM_002718.3,2487-2505).
gaagtcctgttggtgataa

SEQ ID NO: 151646 - DNA, 19 bp, Homo sapiens
  siRNA target sequence for PPP2R3A (NM_002718.3,2643-2661).
cggttccccatgtgaataa

SEQ ID NO: 151647 - DNA, 19 bp, Homo sapiens
  siRNA target sequence for PPP2R3A (NM_002718.3,2649-2667).
cccatgtgaataatgttgt

SEQ ID NO: 151648 - DNA, 19 bp, Homo sapiens
  siRNA target sequence for PPP2R3A (NM_002718.3,2672-2690).
gcgccattgtccataaaca

SEQ ID NO: 151649 - DNA, 19 bp, Homo sapiens
  siRNA target sequence for PPP2R3A (NM_002718.3,2673-2691).
cgccattgtccataaacat

SEQ ID NO: 151650 - DNA, 19 bp, Homo sapiens
  siRNA target sequence for PPP2R3A (NM_002718.3,2689-2707).
cattccacggttctacttt

SEQ ID NO: 151651 - DNA, 19 bp, Homo sapiens
  siRNA target sequence for PPP2R3A (NM_002718.3,2717-2735).
ctcccagatacctgtagta

SEQ ID NO: 151652 - DNA, 19 bp, Homo sapiens
  siRNA target sequence for PPP2R3A (NM_002718.3,2719-2737).
cccagatacctgtagtaat

SEQ ID NO: 151653 - DNA, 19 bp, Homo sapiens
  siRNA target sequence for PPP2R3A (NM_002718.3,2721-2739).
cagatacctgtagtaatca

SEQ ID NO: 151654 - DNA, 19 bp, Homo sapiens
  siRNA target sequence for PPP2R3A (NM_002718.3,2727-2745).
cctgtagtaatcatgaaca

SEQ ID NO: 151655 - DNA, 19 bp, Homo sapiens
  siRNA target sequence for PPP2R3A (NM_002718.3,2728-2746).
ctgtagtaatcatgaacaa

SEQ ID NO: 151656 - DNA, 19 bp, Homo sapiens
  siRNA target sequence for PPP2R3A (NM_002718.3,2733-2751).
gtaatcatgaacaaactct

SEQ ID NO: 151657 - DNA, 19 bp, Homo sapiens
  siRNA target sequence for PPP2R3A (NM_002718.3,2757-2775).
gaattgaaactgctttcat

SEQ ID NO: 151658 - DNA, 19 bp, Homo sapiens
  siRNA target sequence for PPP2R3A (NM_002718.3,2897-2915).
gtgacagcacagtcattca

SEQ ID NO: 151659 - DNA, 19 bp, Homo sapiens
  siRNA target sequence for PPP2R3A (NM_002718.3,2925-2943).
ggagaaagttgctgaataa

SEQ ID NO: 151660 - DNA, 19 bp, Homo sapiens
  siRNA target sequence for PPP2R3A (NM_002718.3,2935-2953).
gctgaataaccatcatgat

SEQ ID NO: 151661 - DNA, 19 bp, Homo sapiens
  siRNA target sequence for PPP2R3A (NM_002718.3,2954-2972).
gatgcctctaaattcatct

SEQ ID NO: 151662 - DNA, 19 bp, Homo sapiens
  siRNA target sequence for PPP2R3A (NM_002718.3,3057-3075).
gtctcacgttcctgaaaga

SEQ ID NO: 151663 - DNA, 19 bp, Homo sapiens
  siRNA target sequence for PPP2R3A (NM_002718.3,3105-3123).
ccacggttattcagagaat

SEQ ID NO: 151664 - DNA, 19 bp, Homo sapiens
  siRNA target sequence for PPP2R3A (NM_002718.3,3106-3124).
cacggttattcagagaata

SEQ ID NO: 151665 - DNA, 19 bp, Homo sapiens
  siRNA target sequence for PPP2R3A (NM_002718.3,3108-3126).
cggttattcagagaatatt

SEQ ID NO: 151666 - DNA, 19 bp, Homo sapiens
  siRNA target sequence for PPP2R3A (NM_002718.3,3110-3128).
gttattcagagaatattct

SEQ ID NO: 151667 - DNA, 19 bp, Homo sapiens
  siRNA target sequence for PPP2R3A (NM_002718.3,3162-3180).
cttcgacagagataagaaa

SEQ ID NO: 151668 - DNA, 19 bp, Homo sapiens
  siRNA target sequence for PPP2R3A (NM_002718.3,3218-3236).
gaggaagatataaaccaaa

SEQ ID NO: 151669 - DNA, 19 bp, Homo sapiens
  siRNA target sequence for PPP2R3A (NM_002718.3,3220-3238).
ggaagatataaaccaaatt

SEQ ID NO: 151670 - DNA, 19 bp, Homo sapiens
  siRNA target sequence for PPP2R3A (NM_002718.3,3233-3251).
caaattacagattacttct

SEQ ID NO: 151671 - DNA, 19 bp, Homo sapiens
  siRNA target sequence for PPP2R3A (NM_002718.3,3286-3304).
ctgggaactagatactgat

SEQ ID NO: 151672 - DNA, 19 bp, Homo sapiens
  siRNA target sequence for PPP2R3A (NM_002718.3,3302-3320).
gatcacgacctctacatca

SEQ ID NO: 151673 - DNA, 19 bp, Homo sapiens
  siRNA target sequence for PPP2R3A (NM_002718.3,3328-3346).
cgatctgtctcgatacaat

SEQ ID NO: 151674 - DNA, 19 bp, Homo sapiens
  siRNA target sequence for PPP2R3A (NM_002718.3,3343-3361).
caatgaccaggcttcatca

SEQ ID NO: 151675 - DNA, 19 bp, Homo sapiens
  siRNA target sequence for PPP2R3A (NM_002718.3,3357-3375).
catcaagcaggattattga

SEQ ID NO: 151676 - DNA, 19 bp, Homo sapiens
  siRNA target sequence for PPP2R3A (NM_002718.3,3433-3451).
gagctatgcagattttgtt

SEQ ID NO: 151677 - DNA, 19 bp, Homo sapiens
  siRNA target sequence for PPP2R3A (NM_002718.3,3485-3503).
cctaccagcattgagtatt

SEQ ID NO: 151678 - DNA, 19 bp, Homo sapiens
  siRNA target sequence for PPP2R3A (NM_002718.3,3532-3550).
cggtgtactctccatgtat

SEQ ID NO: 151679 - DNA, 19 bp, Homo sapiens
  siRNA target sequence for PPP2R3A (NM_002718.3,3534-3552).
gtgtactctccatgtatga

SEQ ID NO: 151680 - DNA, 19 bp, Homo sapiens
  siRNA target sequence for PPP2R3A (NM_002718.3,3608-3626).
cccttgccattccatgatt

SEQ ID NO: 151681 - DNA, 19 bp, Homo sapiens
  siRNA target sequence for PPP2R3A (NM_002718.3,3777-3795).
cggtccagaaggatgttga

SEQ ID NO: 151682 - DNA, 19 bp, Homo sapiens
  siRNA target sequence for PPP2R3A (NM_002718.3,3998-4016).
caatcagtggatgaagaat

SEQ ID NO: 151683 - DNA, 19 bp, Homo sapiens
  siRNA target sequence for PPP2R3A (NM_181897.1,355-373).
cgaagggacccggatttaa

SEQ ID NO: 151684 - DNA, 19 bp, Homo sapiens
  siRNA target sequence for PPP2R3A (NM_181897.1,415-433).
ctcccttcacggtttaaga

SEQ ID NO: 151685 - DNA, 19 bp, Homo sapiens
  siRNA target sequence for PPP2R3A (NM_181897.1,432-450).
gaagcggctgaagtcattt

SEQ ID NO: 151686 - DNA, 19 bp, Homo sapiens
  siRNA target sequence for PR48 (NM_013239.2,500-518).
cgcagggacgagagtagtt

SEQ ID NO: 151687 - DNA, 19 bp, Homo sapiens
  siRNA target sequence for PR48 (NM_013239.2,769-787).
ccgtgtccgtccacaagtt

SEQ ID NO: 151688 - DNA, 19 bp, Homo sapiens
  siRNA target sequence for PR48 (NM_013239.2,788-806).
cgtcgccatgtggagaaaa

SEQ ID NO: 151689 - DNA, 19 bp, Homo sapiens
  siRNA target sequence for PR48 (NM_013239.2,789-807).
gtcgccatgtggagaaaaa

SEQ ID NO: 151690 - DNA, 19 bp, Homo sapiens
  siRNA target sequence for PR48 (NM_013239.2,1107-1125).
cagctgaccgaattcttct

SEQ ID NO: 151691 - DNA, 19 bp, Homo sapiens
  siRNA target sequence for PR48 (NM_013239.2,1143-1161).
gtcatctactgcaagttct

SEQ ID NO: 151692 - DNA, 19 bp, Homo sapiens
  siRNA target sequence for PRKCSH (NM_002743.1,207-225).
ccctcaccaatcatcactt

SEQ ID NO: 151693 - DNA, 19 bp, Homo sapiens
  siRNA target sequence for PRKCSH (NM_002743.1,284-302).
caggtcaacgatgactatt

SEQ ID NO: 151694 - DNA, 19 bp, Homo sapiens
  siRNA target sequence for PRKCSH (NM_002743.1,334-352).
cacggctgcctgtcctaat

SEQ ID NO: 151695 - DNA, 19 bp, Homo sapiens
  siRNA target sequence for PRKCSH (NM_002743.1,377-395).
ggctataagcccctgtata

SEQ ID NO: 151696 - DNA, 19 bp, Homo sapiens
  siRNA target sequence for PRKCSH (NM_002743.1,378-396).
gctataagcccctgtatat

SEQ ID NO: 151697 - DNA, 19 bp, Homo sapiens
  siRNA target sequence for PRKCSH (NM_002743.1,409-427).
ggtcaacgatggtgtttgt

SEQ ID NO: 151698 - DNA, 19 bp, Homo sapiens
  siRNA target sequence for PRKCSH (NM_002743.1,545-563).
gggttccgtctgaagaaga

SEQ ID NO: 151699 - DNA, 19 bp, Homo sapiens
  siRNA target sequence for PRKCSH (NM_002743.1,546-564).
ggttccgtctgaagaagat

SEQ ID NO: 151700 - DNA, 19 bp, Homo sapiens
  siRNA target sequence for PRKCSH (NM_002743.1,1496-1514).
cccgaccacgacaagttca

SEQ ID NO: 151701 - DNA, 19 bp, Homo sapiens
  siRNA target sequence for PRKCSH (NM_002743.1,1580-1598).
ctcctgtgcgggaaagaga

SEQ ID NO: 151702 - DNA, 19 bp, Homo sapiens
  siRNA target sequence for PROC (NM_000312.1,497-515).
gaggtgagcttcctcaatt

SEQ ID NO: 151703 - DNA, 19 bp, Homo sapiens
  siRNA target sequence for PROC (NM_000312.1,500-518).
gtgagcttcctcaattgct

SEQ ID NO: 151704 - DNA, 19 bp, Homo sapiens
  siRNA target sequence for PROC (NM_000312.1,621-639).
gtcaccccgcagtgaagtt

SEQ ID NO: 151705 - DNA, 19 bp, Homo sapiens
  siRNA target sequence for PROC (NM_000312.1,1164-1182).
gcaccttcgtcctcaactt

SEQ ID NO: 151706 - DNA, 19 bp, Homo sapiens
  siRNA target sequence for PROC (NM_000312.1,1194-1212).
ccgtggtcccgcacaatga

SEQ ID NO: 151707 - DNA, 19 bp, Homo sapiens
  siRNA target sequence for PROC (NM_000312.1,1196-1214).
gtggtcccgcacaatgagt

SEQ ID NO: 151708 - DNA, 19 bp, Homo sapiens
  siRNA target sequence for PROM2 (NM_144707.1,350-368).
gtggtgcagctcaatcctt

SEQ ID NO: 151709 - DNA, 19 bp, Homo sapiens
  siRNA target sequence for PROM2 (NM_144707.1,382-400).
ggtaaaggccctactgaat

SEQ ID NO: 151710 - DNA, 19 bp, Homo sapiens
  siRNA target sequence for PROM2 (NM_144707.1,408-426).
cctccgtgaaggtgaatga

SEQ ID NO: 151711 - DNA, 19 bp, Homo sapiens
  siRNA target sequence for PROM2 (NM_144707.1,925-943).
ccacctgcaaaccttgaat

SEQ ID NO: 151712 - DNA, 19 bp, Homo sapiens
  siRNA target sequence for PROM2 (NM_144707.1,929-947).
ctgcaaaccttgaatgcta

SEQ ID NO: 151713 - DNA, 19 bp, Homo sapiens
  siRNA target sequence for PROM2 (NM_144707.1,1431-1449).
gctccgtggtcctattcgt

SEQ ID NO: 151714 - DNA, 19 bp, Homo sapiens
  siRNA target sequence for PROM2 (NM_144707.1,1720-1738).
gaacctgtcgcaacttctt

SEQ ID NO: 151715 - DNA, 19 bp, Homo sapiens
  siRNA target sequence for PROM2 (NM_144707.1,1847-1865).
ctggatatcaaccagtata

SEQ ID NO: 151716 - DNA, 19 bp, Homo sapiens
  siRNA target sequence for PROM2 (NM_144707.1,1992-2010).
ccgacttcctcgttcagat

SEQ ID NO: 151717 - DNA, 19 bp, Homo sapiens
  siRNA target sequence for PROM2 (NM_144707.1,2330-2348).
cgggagatgggctacttct

SEQ ID NO: 151718 - DNA, 19 bp, Homo sapiens
  siRNA target sequence for PROM2 (NM_144707.1,2531-2549).
gtcaagacctccaaatact

SEQ ID NO: 151719 - DNA, 19 bp, Homo sapiens
  siRNA target sequence for PROS1 (NM_000313.1,260-278).
gaagcgtcgtgcaaattct

SEQ ID NO: 151720 - DNA, 19 bp, Homo sapiens
  siRNA target sequence for PROS1 (NM_000313.1,263-281).
gcgtcgtgcaaattcttta

SEQ ID NO: 151721 - DNA, 19 bp, Homo sapiens
  siRNA target sequence for PROS1 (NM_000313.1,265-283).
gtcgtgcaaattctttact

SEQ ID NO: 151722 - DNA, 19 bp, Homo sapiens
  siRNA target sequence for PROS1 (NM_000313.1,271-289).
caaattctttacttgaaga

SEQ ID NO: 151723 - DNA, 19 bp, Homo sapiens
  siRNA target sequence for PROS1 (NM_000313.1,313-331).
gagaatgcatcgaagaact

SEQ ID NO: 151724 - DNA, 19 bp, Homo sapiens
  siRNA target sequence for PROS1 (NM_000313.1,323-341).
cgaagaactgtgcaataaa

SEQ ID NO: 151725 - DNA, 19 bp, Homo sapiens
  siRNA target sequence for PROS1 (NM_000313.1,441-459).
gctgcacgtcagtcaacta

SEQ ID NO: 151726 - DNA, 19 bp, Homo sapiens
  siRNA target sequence for PROS1 (NM_000313.1,442-460).
ctgcacgtcagtcaactaa

SEQ ID NO: 151727 - DNA, 19 bp, Homo sapiens
  siRNA target sequence for PROS1 (NM_000313.1,447-465).
cgtcagtcaactaatgctt

SEQ ID NO: 151728 - DNA, 19 bp, Homo sapiens
  siRNA target sequence for PROS1 (NM_000313.1,448-466).
gtcagtcaactaatgctta

SEQ ID NO: 151729 - DNA, 19 bp, Homo sapiens
  siRNA target sequence for PROS1 (NM_000313.1,462-480).
gcttatcctgacctaagaa

SEQ ID NO: 151730 - DNA, 19 bp, Homo sapiens
  siRNA target sequence for PROS1 (NM_000313.1,520-538).
catgcaatgaagatggata

SEQ ID NO: 151731 - DNA, 19 bp, Homo sapiens
  siRNA target sequence for PROS1 (NM_000313.1,655-673).
gttgcagtcaaatttgtga

SEQ ID NO: 151732 - DNA, 19 bp, Homo sapiens
  siRNA target sequence for PROS1 (NM_000313.1,658-676).
gcagtcaaatttgtgataa

SEQ ID NO: 151733 - DNA, 19 bp, Homo sapiens
  siRNA target sequence for PROS1 (NM_000313.1,829-847).
gccccgaaggctacagata

SEQ ID NO: 151734 - DNA, 19 bp, Homo sapiens
  siRNA target sequence for PROS1 (NM_000313.1,830-848).
ccccgaaggctacagatat

SEQ ID NO: 151735 - DNA, 19 bp, Homo sapiens
  siRNA target sequence for PROS1 (NM_000313.1,831-849).
cccgaaggctacagatata

SEQ ID NO: 151736 - DNA, 19 bp, Homo sapiens
  siRNA target sequence for PROS1 (NM_000313.1,832-850).
ccgaaggctacagatataa

SEQ ID NO: 151737 - DNA, 19 bp, Homo sapiens
  siRNA target sequence for PROS1 (NM_000313.1,833-851).
cgaaggctacagatataat

SEQ ID NO: 151738 - DNA, 19 bp, Homo sapiens
  siRNA target sequence for PROS1 (NM_000313.1,837-855).
ggctacagatataatctca

SEQ ID NO: 151739 - DNA, 19 bp, Homo sapiens
  siRNA target sequence for PROS1 (NM_000313.1,903-921).
gctcagctttgtgtcaatt

SEQ ID NO: 151740 - DNA, 19 bp, Homo sapiens
  siRNA target sequence for PROS1 (NM_000313.1,904-922).
ctcagctttgtgtcaatta

SEQ ID NO: 151741 - DNA, 19 bp, Homo sapiens
  siRNA target sequence for PROS1 (NM_000313.1,931-949).
gttacacttgctattgtga

SEQ ID NO: 151742 - DNA, 19 bp, Homo sapiens
  siRNA target sequence for PROS1 (NM_000313.1,972-990).
gcccaagatcagaagagtt

SEQ ID NO: 151743 - DNA, 19 bp, Homo sapiens
  siRNA target sequence for PROS1 (NM_000313.1,1022-1040).
ccttgacacaaagtatgaa

SEQ ID NO: 151744 - DNA, 19 bp, Homo sapiens
  siRNA target sequence for PROS1 (NM_000313.1,1028-1046).
cacaaagtatgaattactt

SEQ ID NO: 151745 - DNA, 19 bp, Homo sapiens
  siRNA target sequence for PROS1 (NM_000313.1,1061-1079).
gtttgcaggggttgtttta

SEQ ID NO: 151746 - DNA, 19 bp, Homo sapiens
  siRNA target sequence for PROS1 (NM_000313.1,1097-1115).
gccagaaatcagcagattt

SEQ ID NO: 151747 - DNA, 19 bp, Homo sapiens
  siRNA target sequence for PROS1 (NM_000313.1,1128-1146).
gatttccggacatatgatt

SEQ ID NO: 151748 - DNA, 19 bp, Homo sapiens
  siRNA target sequence for PROS1 (NM_000313.1,1133-1151).
ccggacatatgattcagaa

SEQ ID NO: 151749 - DNA, 19 bp, Homo sapiens
  siRNA target sequence for PROS1 (NM_000313.1,1147-1165).
cagaaggcgtgatactgta

SEQ ID NO: 151750 - DNA, 19 bp, Homo sapiens
  siRNA target sequence for PROS1 (NM_000313.1,1157-1175).
gatactgtacgcagaatct

SEQ ID NO: 151751 - DNA, 19 bp, Homo sapiens
  siRNA target sequence for PROS1 (NM_000313.1,1163-1181).
gtacgcagaatctatcgat

SEQ ID NO: 151752 - DNA, 19 bp, Homo sapiens
  siRNA target sequence for PROS1 (NM_000313.1,1242-1260).
gaacatacatccaaaatca

SEQ ID NO: 151753 - DNA, 19 bp, Homo sapiens
  siRNA target sequence for PROS1 (NM_000313.1,1266-1284).
ggaggtgatgttattaata

SEQ ID NO: 151754 - DNA, 19 bp, Homo sapiens
  siRNA target sequence for PROS1 (NM_000313.1,1314-1332).
gaattagaacatagtatta

SEQ ID NO: 151755 - DNA, 19 bp, Homo sapiens
  siRNA target sequence for PROS1 (NM_000313.1,1320-1338).
gaacatagtattagcatta

SEQ ID NO: 151756 - DNA, 19 bp, Homo sapiens
  siRNA target sequence for PROS1 (NM_000313.1,1382-1400).
cctttttaagccggaaaat

SEQ ID NO: 151757 - DNA, 19 bp, Homo sapiens
  siRNA target sequence for PROS1 (NM_000313.1,1407-1425).
ctggaaaccaaagtatact

SEQ ID NO: 151758 - DNA, 19 bp, Homo sapiens
  siRNA target sequence for PROS1 (NM_000313.1,1438-1456).
ctcggaaagtggaaagtga

SEQ ID NO: 151759 - DNA, 19 bp, Homo sapiens
  siRNA target sequence for PROS1 (NM_000313.1,1469-1487).
gattaaccctcgtctagat

SEQ ID NO: 151760 - DNA, 19 bp, Homo sapiens
  siRNA target sequence for PROS1 (NM_000313.1,1477-1495).
ctcgtctagatggatgtat

SEQ ID NO: 151761 - DNA, 19 bp, Homo sapiens
  siRNA target sequence for PROS1 (NM_000313.1,1482-1500).
ctagatggatgtatacgaa

SEQ ID NO: 151762 - DNA, 19 bp, Homo sapiens
  siRNA target sequence for PROS1 (NM_000313.1,1492-1510).
gtatacgaagctggaattt

SEQ ID NO: 151763 - DNA, 19 bp, Homo sapiens
  siRNA target sequence for PROS1 (NM_000313.1,1518-1536).
caaggagcttctggaataa

SEQ ID NO: 151764 - DNA, 19 bp, Homo sapiens
  siRNA target sequence for PROS1 (NM_000313.1,1583-1601).
ggagaagggctcctactat

SEQ ID NO: 151765 - DNA, 19 bp, Homo sapiens
  siRNA target sequence for PROS1 (NM_000313.1,1606-1624).
gttctggaattgctcaatt

SEQ ID NO: 151766 - DNA, 19 bp, Homo sapiens
  siRNA target sequence for PROS1 (NM_000313.1,1612-1630).
gaattgctcaatttcacat

SEQ ID NO: 151767 - DNA, 19 bp, Homo sapiens
  siRNA target sequence for PROS1 (NM_000313.1,1699-1717).
cgggcactggtgttatgct

SEQ ID NO: 151768 - DNA, 19 bp, Homo sapiens
  siRNA target sequence for PROS1 (NM_000313.1,1700-1718).
gggcactggtgttatgctt

SEQ ID NO: 151769 - DNA, 19 bp, Homo sapiens
  siRNA target sequence for PROS1 (NM_000313.1,1790-1808).
ggatattctgttatctgtt

SEQ ID NO: 151770 - DNA, 19 bp, Homo sapiens
  siRNA target sequence for PROS1 (NM_000313.1,1828-1846).
ggatacaggccctaagtct

SEQ ID NO: 151771 - DNA, 19 bp, Homo sapiens
  siRNA target sequence for PROS1 (NM_000313.1,1829-1847).
gatacaggccctaagtcta

SEQ ID NO: 151772 - DNA, 19 bp, Homo sapiens
  siRNA target sequence for PROS1 (NM_000313.1,1833-1851).
caggccctaagtctatgtt

SEQ ID NO: 151773 - DNA, 19 bp, Homo sapiens
  siRNA target sequence for PROS1 (NM_000313.1,1843-1861).
gtctatgttccgatcaaca

SEQ ID NO: 151774 - DNA, 19 bp, Homo sapiens
  siRNA target sequence for PROS1 (NM_000313.1,1845-1863).
ctatgttccgatcaacaat

SEQ ID NO: 151775 - DNA, 19 bp, Homo sapiens
  siRNA target sequence for PROS1 (NM_000313.1,1849-1867).
gttccgatcaacaatctca

SEQ ID NO: 151776 - DNA, 19 bp, Homo sapiens
  siRNA target sequence for PROS1 (NM_000313.1,1901-1919).
gttgtcgacaccacttaaa

SEQ ID NO: 151777 - DNA, 19 bp, Homo sapiens
  siRNA target sequence for PROS1 (NM_000313.1,1904-1922).
gtcgacaccacttaaaata

SEQ ID NO: 151778 - DNA, 19 bp, Homo sapiens
  siRNA target sequence for PROS1 (NM_000313.1,1912-1930).
cacttaaaatagaaaccat

SEQ ID NO: 151779 - DNA, 19 bp, Homo sapiens
  siRNA target sequence for PROS1 (NM_000313.1,2037-2055).
ccagtgaatgccttttata

SEQ ID NO: 151780 - DNA, 19 bp, Homo sapiens
  siRNA target sequence for PROS1 (NM_000313.1,2058-2076).
ggctgcatggaagtgaata

SEQ ID NO: 151781 - DNA, 19 bp, Homo sapiens
  siRNA target sequence for PROS1 (NM_000313.1,2060-2078).
ctgcatggaagtgaatatt

SEQ ID NO: 151782 - DNA, 19 bp, Homo sapiens
  siRNA target sequence for PRRG1 (NM_000950.1,221-239).
caagagctaatgggttttt

SEQ ID NO: 151783 - DNA, 19 bp, Homo sapiens
  siRNA target sequence for PRRG1 (NM_000950.1,224-242).
gagctaatgggttttttga

SEQ ID NO: 151784 - DNA, 19 bp, Homo sapiens
  siRNA target sequence for PRRG1 (NM_000950.1,388-406).
ggaagtgactggtttcagt

SEQ ID NO: 151785 - DNA, 19 bp, Homo sapiens
  siRNA target sequence for PRRG1 (NM_000950.1,441-459).
cattatcctccttgtcatt

SEQ ID NO: 151786 - DNA, 19 bp, Homo sapiens
  siRNA target sequence for PRRG1 (NM_000950.1,531-549).
ccctcagcaccttaatatt

SEQ ID NO: 151787 - DNA, 19 bp, Homo sapiens
  siRNA target sequence for PRRG1 (NM_000950.1,532-550).
cctcagcaccttaatatta

SEQ ID NO: 151788 - DNA, 19 bp, Homo sapiens
  siRNA target sequence for PRRG1 (NM_000950.1,533-551).
ctcagcaccttaatattat

SEQ ID NO: 151789 - DNA, 19 bp, Homo sapiens
  siRNA target sequence for PRRG1 (NM_000950.1,535-553).
cagcaccttaatattatca

SEQ ID NO: 151790 - DNA, 19 bp, Homo sapiens
  siRNA target sequence for PRRG1 (NM_000950.1,563-581).
ccccaccagatgaagtgtt

SEQ ID NO: 151791 - DNA, 19 bp, Homo sapiens
  siRNA target sequence for PRRG1 (NM_000950.1,619-637).
gtagttgggcgctcagatt

SEQ ID NO: 151792 - DNA, 19 bp, Homo sapiens
  siRNA target sequence for PRRG1 (NM_000950.1,746-764).
cagagtatgaggacatagt

SEQ ID NO: 151793 - DNA, 19 bp, Homo sapiens
  siRNA target sequence for PVALB (NM_002854.1,245-263).
gctgggattcatcctaaaa

SEQ ID NO: 151794 - DNA, 19 bp, Homo sapiens
  siRNA target sequence for PVALB (NM_002854.1,285-303).
gacctgtctgctaaagaaa

SEQ ID NO: 151795 - DNA, 19 bp, Homo sapiens
  siRNA target sequence for Rab11-FIP3 (NM_014700.1,739-757).
gaactcgacccgttgttct

SEQ ID NO: 151796 - DNA, 19 bp, Homo sapiens
  siRNA target sequence for Rab11-FIP3 (NM_014700.1,1063-1081).
gacttcatccagtttgcta

SEQ ID NO: 151797 - DNA, 19 bp, Homo sapiens
  siRNA target sequence for Rab11-FIP3 (NM_014700.1,1102-1120).
gtgaaggacttaactaagt

SEQ ID NO: 151798 - DNA, 19 bp, Homo sapiens
  siRNA target sequence for Rab11-FIP3 (NM_014700.1,1140-1158).
cggcgtgatcagctttgaa

SEQ ID NO: 151799 - DNA, 19 bp, Homo sapiens
  siRNA target sequence for Rab11-FIP3 (NM_014700.1,1142-1160).
gcgtgatcagctttgaaga

SEQ ID NO: 151800 - DNA, 19 bp, Homo sapiens
  siRNA target sequence for Rab11-FIP3 (NM_014700.1,1259-1277).
cggacgagttcgatgactt

SEQ ID NO: 151801 - DNA, 19 bp, Homo sapiens
  siRNA target sequence for Rab11-FIP3 (NM_014700.1,2545-2563).
ctcatggaggcgattcaga

SEQ ID NO: 151802 - DNA, 19 bp, Homo sapiens
  siRNA target sequence for RAB11-FIP4 (NM_032932.2,861-879).
gcaatgaggagcagtttga

SEQ ID NO: 151803 - DNA, 19 bp, Homo sapiens
  siRNA target sequence for RAB11-FIP4 (NM_032932.2,921-939).
gcccttgccccgatgatga

SEQ ID NO: 151804 - DNA, 19 bp, Homo sapiens
  siRNA target sequence for RAB11-FIP4 (NM_032932.2,993-1011).
ggcagacgcctaggaaaat

SEQ ID NO: 151805 - DNA, 19 bp, Homo sapiens
  siRNA target sequence for RAB11-FIP4 (NM_032932.2,1021-1039).
gtacaacagcgaattgcta

SEQ ID NO: 151806 - DNA, 19 bp, Homo sapiens
  siRNA target sequence for RAB11-FIP4 (NM_032932.2,1027-1045).
cagcgaattgctagatgtt

SEQ ID NO: 151807 - DNA, 19 bp, Homo sapiens
  siRNA target sequence for RAB11-FIP4 (NM_032932.2,1029-1047).
gcgaattgctagatgttta

SEQ ID NO: 151808 - DNA, 19 bp, Homo sapiens
  siRNA target sequence for RAB11-FIP4 (NM_032932.2,1677-1695).
gacagaaccgccttgagtt

SEQ ID NO: 151809 - DNA, 19 bp, Homo sapiens
  siRNA target sequence for RAB11-FIP4 (NM_032932.2,1874-1892).
ctcaagcaggagaattata

SEQ ID NO: 151810 - DNA, 19 bp, Homo sapiens
  siRNA target sequence for RAB11-FIP4 (NM_032932.2,1989-2007).
ctctggctgcggagataga

SEQ ID NO: 151811 - DNA, 19 bp, Homo sapiens
  siRNA target sequence for RAB11-FIP4 (NM_032932.2,1991-2009).
ctggctgcggagatagaca

SEQ ID NO: 151812 - DNA, 19 bp, Homo sapiens
  siRNA target sequence for RAB11-FIP4 (NM_032932.2,2013-2031).
cctcgcgcgatgagctaat

SEQ ID NO: 151813 - DNA, 19 bp, Homo sapiens
  siRNA target sequence for RAB11-FIP4 (NM_032932.2,2016-2034).
cgcgcgatgagctaatgga

SEQ ID NO: 151814 - DNA, 19 bp, Homo sapiens
  siRNA target sequence for RAB11-FIP4 (NM_032932.2,2017-2035).
gcgcgatgagctaatggaa

SEQ ID NO: 151815 - DNA, 19 bp, Homo sapiens
  siRNA target sequence for RAB11-FIP4 (NM_032932.2,2121-2139).
ccatcctcgagatcaaaca

SEQ ID NO: 151816 - DNA, 19 bp, Homo sapiens
  siRNA target sequence for RASGRP1 (NM_005739.2,302-320).
gacagctgcattcaatctt

SEQ ID NO: 151817 - DNA, 19 bp, Homo sapiens
  siRNA target sequence for RASGRP1 (NM_005739.2,337-355).
cctgtgtcgaagtaaccaa

SEQ ID NO: 151818 - DNA, 19 bp, Homo sapiens
  siRNA target sequence for RASGRP1 (NM_005739.2,342-360).
gtcgaagtaaccaactgtt

SEQ ID NO: 151819 - DNA, 19 bp, Homo sapiens
  siRNA target sequence for RASGRP1 (NM_005739.2,375-393).
ccatgcaccgaattgtcat

SEQ ID NO: 151820 - DNA, 19 bp, Homo sapiens
  siRNA target sequence for RASGRP1 (NM_005739.2,459-477).
caggactttgcctgaagat

SEQ ID NO: 151821 - DNA, 19 bp, Homo sapiens
  siRNA target sequence for RASGRP1 (NM_005739.2,461-479).
ggactttgcctgaagatct

SEQ ID NO: 151822 - DNA, 19 bp, Homo sapiens
  siRNA target sequence for RASGRP1 (NM_005739.2,604-622).
cctgattgacacaactcaa

SEQ ID NO: 151823 - DNA, 19 bp, Homo sapiens
  siRNA target sequence for RASGRP1 (NM_005739.2,605-623).
ctgattgacacaactcaaa

SEQ ID NO: 151824 - DNA, 19 bp, Homo sapiens
  siRNA target sequence for RASGRP1 (NM_005739.2,635-653).
gactggtccaggaaactta

SEQ ID NO: 151825 - DNA, 19 bp, Homo sapiens
  siRNA target sequence for RASGRP1 (NM_005739.2,640-658).
gtccaggaaacttactcaa

SEQ ID NO: 151826 - DNA, 19 bp, Homo sapiens
  siRNA target sequence for RASGRP1 (NM_005739.2,762-780).
ctttccggaggatatcgtt

SEQ ID NO: 151827 - DNA, 19 bp, Homo sapiens
  siRNA target sequence for RASGRP1 (NM_005739.2,771-789).
ggatatcgttctctgatta

SEQ ID NO: 151828 - DNA, 19 bp, Homo sapiens
  siRNA target sequence for RASGRP1 (NM_005739.2,772-790).
gatatcgttctctgattat

SEQ ID NO: 151829 - DNA, 19 bp, Homo sapiens
  siRNA target sequence for RASGRP1 (NM_005739.2,828-846).
ccaccatggagcgatctat

SEQ ID NO: 151830 - DNA, 19 bp, Homo sapiens
  siRNA target sequence for RASGRP1 (NM_005739.2,829-847).
caccatggagcgatctatt

SEQ ID NO: 151831 - DNA, 19 bp, Homo sapiens
  siRNA target sequence for RASGRP1 (NM_005739.2,914-932).
cgagcagaagtcttcatca

SEQ ID NO: 151832 - DNA, 19 bp, Homo sapiens
  siRNA target sequence for RASGRP1 (NM_005739.2,915-933).
gagcagaagtcttcatcaa

SEQ ID NO: 151833 - DNA, 19 bp, Homo sapiens
  siRNA target sequence for RASGRP1 (NM_005739.2,917-935).
gcagaagtcttcatcaagt

SEQ ID NO: 151834 - DNA, 19 bp, Homo sapiens
  siRNA target sequence for RASGRP1 (NM_005739.2,961-979).
ccaactacagaacttcaat

SEQ ID NO: 151835 - DNA, 19 bp, Homo sapiens
  siRNA target sequence for RASGRP1 (NM_005739.2,962-980).
caactacagaacttcaata

SEQ ID NO: 151836 - DNA, 19 bp, Homo sapiens
  siRNA target sequence for RASGRP1 (NM_005739.2,1004-1022).
ctgtgtcacagctcaatct

SEQ ID NO: 151837 - DNA, 19 bp, Homo sapiens
  siRNA target sequence for RASGRP1 (NM_005739.2,1053-1071).
cacatgaaatcaataaggt

SEQ ID NO: 151838 - DNA, 19 bp, Homo sapiens
  siRNA target sequence for RASGRP1 (NM_005739.2,1137-1155).
gagagtgcaccgacttcaa

SEQ ID NO: 151839 - DNA, 19 bp, Homo sapiens
  siRNA target sequence for RASGRP1 (NM_005739.2,1139-1157).
gagtgcaccgacttcaaga

SEQ ID NO: 151840 - DNA, 19 bp, Homo sapiens
  siRNA target sequence for RASGRP1 (NM_005739.2,1230-1248).
ggaaagtgaacgtccataa

SEQ ID NO: 151841 - DNA, 19 bp, Homo sapiens
  siRNA target sequence for RASGRP1 (NM_005739.2,1253-1271).
ctggccctatacaatcata

SEQ ID NO: 151842 - DNA, 19 bp, Homo sapiens
  siRNA target sequence for RASGRP1 (NM_005739.2,1331-1349).
gtacacttgctgacgttat

SEQ ID NO: 151843 - DNA, 19 bp, Homo sapiens
  siRNA target sequence for RASGRP1 (NM_005739.2,1344-1362).
cgttatccctggatcttta

SEQ ID NO: 151844 - DNA, 19 bp, Homo sapiens
  siRNA target sequence for RASGRP1 (NM_005739.2,1425-1443).
caccactaacaccttcaaa

SEQ ID NO: 151845 - DNA, 19 bp, Homo sapiens
  siRNA target sequence for RASGRP1 (NM_005739.2,1440-1458).
caaagccaccagtagtagt

SEQ ID NO: 151846 - DNA, 19 bp, Homo sapiens
  siRNA target sequence for RASGRP1 (NM_005739.2,1558-1576).
ccaggatggatacatttct

SEQ ID NO: 151847 - DNA, 19 bp, Homo sapiens
  siRNA target sequence for RASGRP1 (NM_005739.2,1602-1620).
cgagttttccattttcctt

SEQ ID NO: 151848 - DNA, 19 bp, Homo sapiens
  siRNA target sequence for RASGRP1 (NM_005739.2,1664-1682).
gagatcacagcctacttca

SEQ ID NO: 151849 - DNA, 19 bp, Homo sapiens
  siRNA target sequence for RASGRP1 (NM_005739.2,1684-1702).
gagagccagctcaatctat

SEQ ID NO: 151850 - DNA, 19 bp, Homo sapiens
  siRNA target sequence for RASGRP1 (NM_005739.2,1808-1826).
ggatatcgatgtaaagact

SEQ ID NO: 151851 - DNA, 19 bp, Homo sapiens
  siRNA target sequence for RASGRP1 (NM_005739.2,1904-1922).
cccacagagaacaacactt

SEQ ID NO: 151852 - DNA, 19 bp, Homo sapiens
  siRNA target sequence for RASGRP1 (NM_005739.2,1928-1946).
gggccagtgtccaaccttt

SEQ ID NO: 151853 - DNA, 19 bp, Homo sapiens
  siRNA target sequence for RASGRP1 (NM_005739.2,1948-1966).
ctcattgggagccaaagat

SEQ ID NO: 151854 - DNA, 19 bp, Homo sapiens
  siRNA target sequence for RASGRP1 (NM_005739.2,1950-1968).
cattgggagccaaagatct

SEQ ID NO: 151855 - DNA, 19 bp, Homo sapiens
  siRNA target sequence for RASGRP1 (NM_005739.2,2066-2084).
gtgtcctcacagaagattt

SEQ ID NO: 151856 - DNA, 19 bp, Homo sapiens
  siRNA target sequence for RASGRP1 (NM_005739.2,2068-2086).
gtcctcacagaagatttct

SEQ ID NO: 151857 - DNA, 19 bp, Homo sapiens
  siRNA target sequence for RASGRP1 (NM_005739.2,2194-2212).
gacagcccaggatactcta

SEQ ID NO: 151858 - DNA, 19 bp, Homo sapiens
  siRNA target sequence for RASGRP1 (NM_005739.2,2196-2214).
cagcccaggatactctata

SEQ ID NO: 151859 - DNA, 19 bp, Homo sapiens
  siRNA target sequence for RASGRP1 (NM_005739.2,2199-2217).
cccaggatactctatatgt

SEQ ID NO: 151860 - DNA, 19 bp, Homo sapiens
  siRNA target sequence for RASGRP1 (NM_005739.2,2247-2265).
gcccagtcttggtcagaaa

SEQ ID NO: 151861 - DNA, 19 bp, Homo sapiens
  siRNA target sequence for RASGRP1 (NM_005739.2,2262-2280).
gaaagcgggcttttgtcaa

SEQ ID NO: 151862 - DNA, 19 bp, Homo sapiens
  siRNA target sequence for RASGRP1 (NM_005739.2,2294-2312).
gactccctcataaaatcaa

SEQ ID NO: 151863 - DNA, 19 bp, Homo sapiens
  siRNA target sequence for RASGRP1 (NM_005739.2,2395-2413).
cctaaagatccaactgaaa

SEQ ID NO: 151864 - DNA, 19 bp, Homo sapiens
  siRNA target sequence for RASGRP1 (NM_005739.2,2396-2414).
ctaaagatccaactgaaat

SEQ ID NO: 151865 - DNA, 19 bp, Homo sapiens
  siRNA target sequence for RASGRP1 (NM_005739.2,2440-2458).
ccagcttgaaaaaagcaat

SEQ ID NO: 151866 - DNA, 19 bp, Homo sapiens
  siRNA target sequence for RASGRP1 (NM_005739.2,2443-2461).
gcttgaaaaaagcaatcat

SEQ ID NO: 151867 - DNA, 19 bp, Homo sapiens
  siRNA target sequence for RASGRP2 (NM_005825.2,528-546).
ctccacatctaccaacaat

SEQ ID NO: 151868 - DNA, 19 bp, Homo sapiens
  siRNA target sequence for RASGRP2 (NM_005825.2,549-567).
cggaaggacaactccaatt

SEQ ID NO: 151869 - DNA, 19 bp, Homo sapiens
  siRNA target sequence for RASGRP2 (NM_005825.2,706-724).
gcagcctaatcgacataga

SEQ ID NO: 151870 - DNA, 19 bp, Homo sapiens
  siRNA target sequence for RASGRP2 (NM_005825.2,879-897).
ctgtttcaggactatcaca

SEQ ID NO: 151871 - DNA, 19 bp, Homo sapiens
  siRNA target sequence for RASGRP2 (NM_005825.2,1199-1217).
gacggcgacaggcaactat

SEQ ID NO: 151872 - DNA, 19 bp, Homo sapiens
  siRNA target sequence for RASGRP2 (NM_005825.2,1453-1471).
cggtgtctctggatcagta

SEQ ID NO: 151873 - DNA, 19 bp, Homo sapiens
  siRNA target sequence for RASGRP2 (NM_005825.2,1454-1472).
ggtgtctctggatcagtat

SEQ ID NO: 151874 - DNA, 19 bp, Homo sapiens
  siRNA target sequence for RASGRP2 (NM_005825.2,1840-1858).
gcatgggcttcgtacacaa

SEQ ID NO: 151875 - DNA, 19 bp, Homo sapiens
  siRNA target sequence for RASGRP2 (NM_005825.2,2160-2178).
gaggatggggtgtttgaca

SEQ ID NO: 151876 - DNA, 19 bp, Homo sapiens
  siRNA target sequence for RASGRP3 (NM_015376.1,293-311).
gaaagcagcaacattagat

SEQ ID NO: 151877 - DNA, 19 bp, Homo sapiens
  siRNA target sequence for RASGRP3 (NM_015376.1,298-316).
cagcaacattagatgaact

SEQ ID NO: 151878 - DNA, 19 bp, Homo sapiens
  siRNA target sequence for RASGRP3 (NM_015376.1,318-336).
ctgtgcacttgcattgaga

SEQ ID NO: 151879 - DNA, 19 bp, Homo sapiens
  siRNA target sequence for RASGRP3 (NM_015376.1,322-340).
gcacttgcattgagatgtt

SEQ ID NO: 151880 - DNA, 19 bp, Homo sapiens
  siRNA target sequence for RASGRP3 (NM_015376.1,347-365).
caatggagagctggataat

SEQ ID NO: 151881 - DNA, 19 bp, Homo sapiens
  siRNA target sequence for RASGRP3 (NM_015376.1,351-369).
ggagagctggataatagtt

SEQ ID NO: 151882 - DNA, 19 bp, Homo sapiens
  siRNA target sequence for RASGRP3 (NM_015376.1,354-372).
gagctggataatagttatt

SEQ ID NO: 151883 - DNA, 19 bp, Homo sapiens
  siRNA target sequence for RASGRP3 (NM_015376.1,367-385).
gttatttgccaagaatagt

SEQ ID NO: 151884 - DNA, 19 bp, Homo sapiens
  siRNA target sequence for RASGRP3 (NM_015376.1,392-410).
gatgcaccgatggtattta

SEQ ID NO: 151885 - DNA, 19 bp, Homo sapiens
  siRNA target sequence for RASGRP3 (NM_015376.1,395-413).
gcaccgatggtatttatct

SEQ ID NO: 151886 - DNA, 19 bp, Homo sapiens
  siRNA target sequence for RASGRP3 (NM_015376.1,463-481).
gagaaagctgcaatgaatt

SEQ ID NO: 151887 - DNA, 19 bp, Homo sapiens
  siRNA target sequence for RASGRP3 (NM_015376.1,469-487).
gctgcaatgaatttcgatt

SEQ ID NO: 151888 - DNA, 19 bp, Homo sapiens
  siRNA target sequence for RASGRP3 (NM_015376.1,470-488).
ctgcaatgaatttcgatta

SEQ ID NO: 151889 - DNA, 19 bp, Homo sapiens
  siRNA target sequence for RASGRP3 (NM_015376.1,508-526).
ggtactggattctgaagtt

SEQ ID NO: 151890 - DNA, 19 bp, Homo sapiens
  siRNA target sequence for RASGRP3 (NM_015376.1,546-564).
gatcttggtttgattcgta

SEQ ID NO: 151891 - DNA, 19 bp, Homo sapiens
  siRNA target sequence for RASGRP3 (NM_015376.1,581-599).
ggaagtagctagtcaacta

SEQ ID NO: 151892 - DNA, 19 bp, Homo sapiens
  siRNA target sequence for RASGRP3 (NM_015376.1,589-607).
ctagtcaactaggatatga

SEQ ID NO: 151893 - DNA, 19 bp, Homo sapiens
  siRNA target sequence for RASGRP3 (NM_015376.1,615-633).
gtcagcctcatcgacatat

SEQ ID NO: 151894 - DNA, 19 bp, Homo sapiens
  siRNA target sequence for RASGRP3 (NM_015376.1,781-799).
ggatctcattcactgatta

SEQ ID NO: 151895 - DNA, 19 bp, Homo sapiens
  siRNA target sequence for RASGRP3 (NM_015376.1,795-813).
gattaccaaagctatgtca

SEQ ID NO: 151896 - DNA, 19 bp, Homo sapiens
  siRNA target sequence for RASGRP3 (NM_015376.1,816-834).
catggctgcctggagaata

SEQ ID NO: 151897 - DNA, 19 bp, Homo sapiens
  siRNA target sequence for RASGRP3 (NM_015376.1,845-863).
ggaaagatcgattgcttta

SEQ ID NO: 151898 - DNA, 19 bp, Homo sapiens
  siRNA target sequence for RASGRP3 (NM_015376.1,850-868).
gatcgattgctttatttaa

SEQ ID NO: 151899 - DNA, 19 bp, Homo sapiens
  siRNA target sequence for RASGRP3 (NM_015376.1,877-895).
ctaagtgggtccagttgat

SEQ ID NO: 151900 - DNA, 19 bp, Homo sapiens
  siRNA target sequence for RASGRP3 (NM_015376.1,928-946).
cagaagtcatcacaaagtt

SEQ ID NO: 151901 - DNA, 19 bp, Homo sapiens
  siRNA target sequence for RASGRP3 (NM_015376.1,1005-1023).
gtgggaggcctcagtcata

SEQ ID NO: 151902 - DNA, 19 bp, Homo sapiens
  siRNA target sequence for RASGRP3 (NM_015376.1,1027-1045).
ccatttcacgcctcaaaga

SEQ ID NO: 151903 - DNA, 19 bp, Homo sapiens
  siRNA target sequence for RASGRP3 (NM_015376.1,1040-1058).
caaagagacccattctcat

SEQ ID NO: 151904 - DNA, 19 bp, Homo sapiens
  siRNA target sequence for RASGRP3 (NM_015376.1,1056-1074).
catctttcttcagaagtta

SEQ ID NO: 151905 - DNA, 19 bp, Homo sapiens
  siRNA target sequence for RASGRP3 (NM_015376.1,1148-1166).
cgactgcgatggcttcaaa

SEQ ID NO: 151906 - DNA, 19 bp, Homo sapiens
  siRNA target sequence for RASGRP3 (NM_015376.1,1171-1189).
ccatccttggagtacactt

SEQ ID NO: 151907 - DNA, 19 bp, Homo sapiens
  siRNA target sequence for RASGRP3 (NM_015376.1,1175-1193).
ccttggagtacacttgaaa

SEQ ID NO: 151908 - DNA, 19 bp, Homo sapiens
  siRNA target sequence for RASGRP3 (NM_015376.1,1179-1197).
ggagtacacttgaaagact

SEQ ID NO: 151909 - DNA, 19 bp, Homo sapiens
  siRNA target sequence for RASGRP3 (NM_015376.1,1199-1217).
gatagctgtccatgtcatt

SEQ ID NO: 151910 - DNA, 19 bp, Homo sapiens
  siRNA target sequence for RASGRP3 (NM_015376.1,1274-1292).
cgttaccctgagtgaacta

SEQ ID NO: 151911 - DNA, 19 bp, Homo sapiens
  siRNA target sequence for RASGRP3 (NM_015376.1,1406-1424).
ggtgctggagcctagaaat

SEQ ID NO: 151912 - DNA, 19 bp, Homo sapiens
  siRNA target sequence for RASGRP3 (NM_015376.1,1407-1425).
gtgctggagcctagaaatt

SEQ ID NO: 151913 - DNA, 19 bp, Homo sapiens
  siRNA target sequence for RASGRP3 (NM_015376.1,1412-1430).
ggagcctagaaattctaaa

SEQ ID NO: 151914 - DNA, 19 bp, Homo sapiens
  siRNA target sequence for RASGRP3 (NM_015376.1,1506-1524).
gaccccacggtcatcaaca

SEQ ID NO: 151915 - DNA, 19 bp, Homo sapiens
  siRNA target sequence for RASGRP3 (NM_015376.1,1659-1677).
gatcaggatggcctaatta

SEQ ID NO: 151916 - DNA, 19 bp, Homo sapiens
  siRNA target sequence for RASGRP3 (NM_015376.1,1662-1680).
caggatggcctaattagta

SEQ ID NO: 151917 - DNA, 19 bp, Homo sapiens
  siRNA target sequence for RASGRP3 (NM_015376.1,1664-1682).
ggatggcctaattagtaaa

SEQ ID NO: 151918 - DNA, 19 bp, Homo sapiens
  siRNA target sequence for RASGRP3 (NM_015376.1,1669-1687).
gcctaattagtaaagatga

SEQ ID NO: 151919 - DNA, 19 bp, Homo sapiens
  siRNA target sequence for RASGRP3 (NM_015376.1,1740-1758).
ccaggatttatccataatt

SEQ ID NO: 151920 - DNA, 19 bp, Homo sapiens
  siRNA target sequence for RASGRP3 (NM_015376.1,1807-1825).
gatttctctggggcataat

SEQ ID NO: 151921 - DNA, 19 bp, Homo sapiens
  siRNA target sequence for RASGRP3 (NM_015376.1,1829-1847).
gcaaggatacaaatgcaaa

SEQ ID NO: 151922 - DNA, 19 bp, Homo sapiens
  siRNA target sequence for RASGRP3 (NM_015376.1,2011-2029).
ctggacacagggatttaga

SEQ ID NO: 151923 - DNA, 19 bp, Homo sapiens
  siRNA target sequence for RASGRP3 (NM_015376.1,2013-2031).
ggacacagggatttagaca

SEQ ID NO: 151924 - DNA, 19 bp, Homo sapiens
  siRNA target sequence for RASGRP3 (NM_015376.1,2158-2176).
cccacaccttccctaaaat

SEQ ID NO: 151925 - DNA, 19 bp, Homo sapiens
  siRNA target sequence for RASGRP3 (NM_015376.1,2160-2178).
cacaccttccctaaaatga

SEQ ID NO: 151926 - DNA, 19 bp, Homo sapiens
  siRNA target sequence for RASGRP3 (NM_015376.1,2254-2272).
ctggtgtggatgttgtaga

SEQ ID NO: 151927 - DNA, 19 bp, Homo sapiens
  siRNA target sequence for RASGRP3 (NM_015376.1,2276-2294).
gggcacggagtttgaactt

SEQ ID NO: 151928 - DNA, 19 bp, Homo sapiens
  siRNA target sequence for RASGRP3 (NM_015376.1,2278-2296).
gcacggagtttgaacttga

SEQ ID NO: 151929 - DNA, 19 bp, Homo sapiens
  siRNA target sequence for RCN1 (NM_002901.1,501-519).
gaaaccccgcagagtttca

SEQ ID NO: 151930 - DNA, 19 bp, Homo sapiens
  siRNA target sequence for RCN1 (NM_002901.1,505-523).
ccccgcagagtttcatgat

SEQ ID NO: 151931 - DNA, 19 bp, Homo sapiens
  siRNA target sequence for RCN1 (NM_002901.1,506-524).
cccgcagagtttcatgatt

SEQ ID NO: 151932 - DNA, 19 bp, Homo sapiens
  siRNA target sequence for RCN3 (NM_020650.2,569-587).
gcgacgctccccatgatga

SEQ ID NO: 151933 - DNA, 19 bp, Homo sapiens
  siRNA target sequence for RCN3 (NM_020650.2,631-649).
cgggaagtggccaaggaat

SEQ ID NO: 151934 - DNA, 19 bp, Homo sapiens
  siRNA target sequence for RCN3 (NM_020650.2,632-650).
gggaagtggccaaggaatt

SEQ ID NO: 151935 - DNA, 19 bp, Homo sapiens
  siRNA target sequence for RCN3 (NM_020650.2,890-908).
ccggtgaagaatttcatga

SEQ ID NO: 151936 - DNA, 19 bp, Homo sapiens
  siRNA target sequence for RCN3 (NM_020650.2,915-933).
ggatgcagagacctacaaa

SEQ ID NO: 151937 - DNA, 19 bp, Homo sapiens
  siRNA target sequence for RCN3 (NM_020650.2,920-938).
cagagacctacaaaaagat

SEQ ID NO: 151938 - DNA, 19 bp, Homo sapiens
  siRNA target sequence for RCN3 (NM_020650.2,1077-1095).
ggacctggacagaaacaaa

SEQ ID NO: 151939 - DNA, 19 bp, Homo sapiens
  siRNA target sequence for RCN3 (NM_020650.2,1345-1363).
gcggaaatcctgggtaatt

SEQ ID NO: 151940 - DNA, 19 bp, Homo sapiens
  siRNA target sequence for RCV1 (NM_002903.1,392-410).
gtgttccgcagcttcgatt

SEQ ID NO: 151941 - DNA, 19 bp, Homo sapiens
  siRNA target sequence for RCV1 (NM_002903.1,557-575).
gagatcgtcatggctattt

SEQ ID NO: 151942 - DNA, 19 bp, Homo sapiens
  siRNA target sequence for RCV1 (NM_002903.1,658-676).
gtactttggaaagaatgat

SEQ ID NO: 151943 - DNA, 19 bp, Homo sapiens
  siRNA target sequence for REPS1 (NM_031922.2,789-807).
cattgctttgaaacttgta

SEQ ID NO: 151944 - DNA, 19 bp, Homo sapiens
  siRNA target sequence for REPS1 (NM_031922.2,817-835).
cagtctggtttccctttaa

SEQ ID NO: 151945 - DNA, 19 bp, Homo sapiens
  siRNA target sequence for REPS1 (NM_031922.2,819-837).
gtctggtttccctttaaga

SEQ ID NO: 151946 - DNA, 19 bp, Homo sapiens
  siRNA target sequence for REPS1 (NM_031922.2,840-858).
ggaaagtataaatacagta

SEQ ID NO: 151947 - DNA, 19 bp, Homo sapiens
  siRNA target sequence for REPS1 (NM_031922.2,910-928).
cgccatgcagcctcatatt

SEQ ID NO: 151948 - DNA, 19 bp, Homo sapiens
  siRNA target sequence for REPS1 (NM_031922.2,950-968).
ggtcgtattctggtgtaat

SEQ ID NO: 151949 - DNA, 19 bp, Homo sapiens
  siRNA target sequence for REPS1 (NM_031922.2,951-969).
gtcgtattctggtgtaatt

SEQ ID NO: 151950 - DNA, 19 bp, Homo sapiens
  siRNA target sequence for REPS1 (NM_031922.2,1003-1021).
ggatccgtaagccatgata

SEQ ID NO: 151951 - DNA, 19 bp, Homo sapiens
  siRNA target sequence for REPS1 (NM_031922.2,1133-1151).
ccagcggtgggaatagtga

SEQ ID NO: 151952 - DNA, 19 bp, Homo sapiens
  siRNA target sequence for REPS1 (NM_031922.2,1162-1180).
gcgggacctgggccatttt

SEQ ID NO: 151953 - DNA, 19 bp, Homo sapiens
  siRNA target sequence for REPS1 (NM_031922.2,1188-1206).
ctttggtgaagcacaatca

SEQ ID NO: 151954 - DNA, 19 bp, Homo sapiens
  siRNA target sequence for REPS1 (NM_031922.2,1288-1306).
ccaccaaccagtactcttt

SEQ ID NO: 151955 - DNA, 19 bp, Homo sapiens
  siRNA target sequence for REPS1 (NM_031922.2,1291-1309).
ccaaccagtactcttttaa

SEQ ID NO: 151956 - DNA, 19 bp, Homo sapiens
  siRNA target sequence for REPS1 (NM_031922.2,1295-1313).
ccagtactcttttaaccat

SEQ ID NO: 151957 - DNA, 19 bp, Homo sapiens
  siRNA target sequence for REPS1 (NM_031922.2,1329-1347).
ccaggaccagacaacagta

SEQ ID NO: 151958 - DNA, 19 bp, Homo sapiens
  siRNA target sequence for REPS1 (NM_031922.2,1338-1356).
gacaacagtacgaactgta

SEQ ID NO: 151959 - DNA, 19 bp, Homo sapiens
  siRNA target sequence for REPS1 (NM_031922.2,1363-1381).
gctacaactgccattgaaa

SEQ ID NO: 151960 - DNA, 19 bp, Homo sapiens
  siRNA target sequence for REPS1 (NM_031922.2,1384-1402).
cgtaggcaatccagtagtt

SEQ ID NO: 151961 - DNA, 19 bp, Homo sapiens
  siRNA target sequence for REPS1 (NM_031922.2,1389-1407).
gcaatccagtagttatgat

SEQ ID NO: 151962 - DNA, 19 bp, Homo sapiens
  siRNA target sequence for REPS1 (NM_031922.2,1405-1423).
gatgatccctggaaaataa

SEQ ID NO: 151963 - DNA, 19 bp, Homo sapiens
  siRNA target sequence for REPS1 (NM_031922.2,1463-1481).
ccattcagcctgatctaaa

SEQ ID NO: 151964 - DNA, 19 bp, Homo sapiens
  siRNA target sequence for REPS1 (NM_031922.2,1471-1489).
cctgatctaaacggattta

SEQ ID NO: 151965 - DNA, 19 bp, Homo sapiens
  siRNA target sequence for REPS1 (NM_031922.2,1472-1490).
ctgatctaaacggatttat

SEQ ID NO: 151966 - DNA, 19 bp, Homo sapiens
  siRNA target sequence for REPS1 (NM_031922.2,1496-1514).
gatctgcagctaaagagtt

SEQ ID NO: 151967 - DNA, 19 bp, Homo sapiens
  siRNA target sequence for REPS1 (NM_031922.2,1501-1519).
gcagctaaagagtttttta

SEQ ID NO: 151968 - DNA, 19 bp, Homo sapiens
  siRNA target sequence for REPS1 (NM_031922.2,1593-1611).
gacactggatgagttttgt

SEQ ID NO: 151969 - DNA, 19 bp, Homo sapiens
  siRNA target sequence for REPS1 (NM_031922.2,1626-1644).
ggtggttgctaggaagaat

SEQ ID NO: 151970 - DNA, 19 bp, Homo sapiens
  siRNA target sequence for REPS1 (NM_031922.2,1641-1659).
gaatggctatgatttacca

SEQ ID NO: 151971 - DNA, 19 bp, Homo sapiens
  siRNA target sequence for REPS1 (NM_031922.2,1676-1694).
gcttaatgcccaaactgat

SEQ ID NO: 151972 - DNA, 19 bp, Homo sapiens
  siRNA target sequence for REPS1 (NM_031922.2,1677-1695).
cttaatgcccaaactgatt

SEQ ID NO: 151973 - DNA, 19 bp, Homo sapiens
  siRNA target sequence for REPS1 (NM_031922.2,1728-1746).
gccaggtgaggtaggttat

SEQ ID NO: 151974 - DNA, 19 bp, Homo sapiens
  siRNA target sequence for REPS1 (NM_031922.2,1729-1747).
ccaggtgaggtaggttatt

SEQ ID NO: 151975 - DNA, 19 bp, Homo sapiens
  siRNA target sequence for REPS1 (NM_031922.2,1784-1802).
catcgatgccatcactaaa

SEQ ID NO: 151976 - DNA, 19 bp, Homo sapiens
  siRNA target sequence for REPS1 (NM_031922.2,1787-1805).
cgatgccatcactaaacca

SEQ ID NO: 151977 - DNA, 19 bp, Homo sapiens
  siRNA target sequence for REPS1 (NM_031922.2,1836-1854).
gcagtgggagacatttagt

SEQ ID NO: 151978 - DNA, 19 bp, Homo sapiens
  siRNA target sequence for REPS1 (NM_031922.2,1879-1897).
ctgacccaatttgattcta

SEQ ID NO: 151979 - DNA, 19 bp, Homo sapiens
  siRNA target sequence for REPS1 (NM_031922.2,1883-1901).
cccaatttgattctaacat

SEQ ID NO: 151980 - DNA, 19 bp, Homo sapiens
  siRNA target sequence for REPS1 (NM_031922.2,1948-1966).
cgtatgactccaagcaaaa

SEQ ID NO: 151981 - DNA, 19 bp, Homo sapiens
  siRNA target sequence for REPS1 (NM_031922.2,2021-2039).
ctagcccattacttgtgaa

SEQ ID NO: 151982 - DNA, 19 bp, Homo sapiens
  siRNA target sequence for REPS1 (NM_031922.2,2088-2106).
cgcttctggtaatactgta

SEQ ID NO: 151983 - DNA, 19 bp, Homo sapiens
  siRNA target sequence for REPS1 (NM_031922.2,2096-2114).
gtaatactgtagatggtta

SEQ ID NO: 151984 - DNA, 19 bp, Homo sapiens
  siRNA target sequence for REPS1 (NM_031922.2,2104-2122).
gtagatggttacagtagtt

SEQ ID NO: 151985 - DNA, 19 bp, Homo sapiens
  siRNA target sequence for REPS1 (NM_031922.2,2149-2167).
cagatcgggagcaatgtaa

SEQ ID NO: 151986 - DNA, 19 bp, Homo sapiens
  siRNA target sequence for REPS1 (NM_031922.2,2151-2169).
gatcgggagcaatgtaact

SEQ ID NO: 151987 - DNA, 19 bp, Homo sapiens
  siRNA target sequence for REPS1 (NM_031922.2,2186-2204).
caggaacgtcgcctgataa

SEQ ID NO: 151988 - DNA, 19 bp, Homo sapiens
  siRNA target sequence for REPS1 (NM_031922.2,2188-2206).
ggaacgtcgcctgataaca

SEQ ID NO: 151989 - DNA, 19 bp, Homo sapiens
  siRNA target sequence for REPS1 (NM_031922.2,2238-2256).
gccctctcattctagatca

SEQ ID NO: 151990 - DNA, 19 bp, Homo sapiens
  siRNA target sequence for REPS1 (NM_031922.2,2266-2284).
gatatgaatcggaccttta

SEQ ID NO: 151991 - DNA, 19 bp, Homo sapiens
  siRNA target sequence for REPS1 (NM_031922.2,2392-2410).
gatgccgatggcctcataa

SEQ ID NO: 151992 - DNA, 19 bp, Homo sapiens
  siRNA target sequence for REPS1 (NM_031922.2,2449-2467).
ccaaattttgcagatttca

SEQ ID NO: 151993 - DNA, 19 bp, Homo sapiens
  siRNA target sequence for REPS1 (NM_031922.2,2486-2504).
ctgcatcaaatgtaaacga

SEQ ID NO: 151994 - DNA, 19 bp, Homo sapiens
  siRNA target sequence for REPS1 (NM_031922.2,2541-2559).
cctgccggctgaaaaagct

SEQ ID NO: 151995 - DNA, 19 bp, Homo sapiens
  siRNA target sequence for REPS1 (NM_031922.2,2542-2560).
ctgccggctgaaaaagctt

SEQ ID NO: 151996 - DNA, 19 bp, Homo sapiens
  siRNA target sequence for REPS1 (NM_031922.2,2680-2698).
cctgttcgaagaagattaa

SEQ ID NO: 151997 - DNA, 19 bp, Homo sapiens
  siRNA target sequence for REPS1 (NM_031922.2,2687-2705).
gaagaagattaaaatcaga

SEQ ID NO: 151998 - DNA, 19 bp, Homo sapiens
  siRNA target sequence for REPS1 (NM_031922.2,2719-2737).
ccagaagttgatgaacata

SEQ ID NO: 151999 - DNA, 19 bp, Homo sapiens
  siRNA target sequence for REPS1 (NM_031922.2,2823-2841).
ggcatcaattagacgtaat

SEQ ID NO: 152000 - DNA, 19 bp, Homo sapiens
  siRNA target sequence for REPS1 (NM_031922.2,2824-2842).
gcatcaattagacgtaata

SEQ ID NO: 152001 - DNA, 19 bp, Homo sapiens
  siRNA target sequence for REPS1 (NM_031922.2,2825-2843).
catcaattagacgtaataa

SEQ ID NO: 152002 - DNA, 19 bp, Homo sapiens
  siRNA target sequence for REPS1 (NM_031922.2,2876-2894).
gcgaattgcagcaacaatt

SEQ ID NO: 152003 - DNA, 19 bp, Homo sapiens
  siRNA target sequence for REPS2 (NM_004726.1,661-679).
ccatatttaactacagaaa

SEQ ID NO: 152004 - DNA, 19 bp, Homo sapiens
  siRNA target sequence for REPS2 (NM_004726.1,695-713).
gaatggacgatgaggataa

SEQ ID NO: 152005 - DNA, 19 bp, Homo sapiens
  siRNA target sequence for REPS2 (NM_004726.1,834-852).
gatgcatccagcaccttat

SEQ ID NO: 152006 - DNA, 19 bp, Homo sapiens
  siRNA target sequence for REPS2 (NM_004726.1,933-951).
ccttatccggtccttttca

SEQ ID NO: 152007 - DNA, 19 bp, Homo sapiens
  siRNA target sequence for REPS2 (NM_004726.1,950-968).
cagtggagagggaactaca

SEQ ID NO: 152008 - DNA, 19 bp, Homo sapiens
  siRNA target sequence for REPS2 (NM_004726.1,1015-1033).
cagcgcgagtactatgtca

SEQ ID NO: 152009 - DNA, 19 bp, Homo sapiens
  siRNA target sequence for REPS2 (NM_004726.1,1017-1035).
gcgcgagtactatgtcaat

SEQ ID NO: 152010 - DNA, 19 bp, Homo sapiens
  siRNA target sequence for REPS2 (NM_004726.1,1019-1037).
gcgagtactatgtcaatca

SEQ ID NO: 152011 - DNA, 19 bp, Homo sapiens
  siRNA target sequence for REPS2 (NM_004726.1,1021-1039).
gagtactatgtcaatcagt

SEQ ID NO: 152012 - DNA, 19 bp, Homo sapiens
  siRNA target sequence for REPS2 (NM_004726.1,1054-1072).
ccagacccaagctctttca

SEQ ID NO: 152013 - DNA, 19 bp, Homo sapiens
  siRNA target sequence for REPS2 (NM_004726.1,1299-1317).
caaatgggactgtcaatta

SEQ ID NO: 152014 - DNA, 19 bp, Homo sapiens
  siRNA target sequence for REPS2 (NM_004726.1,1304-1322).
gggactgtcaattatttga

SEQ ID NO: 152015 - DNA, 19 bp, Homo sapiens
  siRNA target sequence for REPS2 (NM_004726.1,1305-1323).
ggactgtcaattatttgat

SEQ ID NO: 152016 - DNA, 19 bp, Homo sapiens
  siRNA target sequence for REPS2 (NM_004726.1,1337-1355).
cactgccggcaaatcaaca

SEQ ID NO: 152017 - DNA, 19 bp, Homo sapiens
  siRNA target sequence for REPS2 (NM_004726.1,1416-1434).
ccctaaccaggatgtaact

SEQ ID NO: 152018 - DNA, 19 bp, Homo sapiens
  siRNA target sequence for REPS2 (NM_004726.1,1557-1575).
ctctagcacctccatagaa

SEQ ID NO: 152019 - DNA, 19 bp, Homo sapiens
  siRNA target sequence for REPS2 (NM_004726.1,1559-1577).
ctagcacctccatagaaga

SEQ ID NO: 152020 - DNA, 19 bp, Homo sapiens
  siRNA target sequence for REPS2 (NM_004726.1,1646-1664).
cctccttggatctgaataa

SEQ ID NO: 152021 - DNA, 19 bp, Homo sapiens
  siRNA target sequence for REPS2 (NM_004726.1,1855-1873).
ccatcaaagcccattcgta

SEQ ID NO: 152022 - DNA, 19 bp, Homo sapiens
  siRNA target sequence for REPS2 (NM_004726.1,1864-1882).
cccattcgtaggaaattca

SEQ ID NO: 152023 - DNA, 19 bp, Homo sapiens
  siRNA target sequence for REPS2 (NM_004726.1,1961-1979).
cgcatccaacagtccaaaa

SEQ ID NO: 152024 - DNA, 19 bp, Homo sapiens
  siRNA target sequence for REPS2 (NM_004726.1,2015-2033).
ctatccgcaaaaataaaga

SEQ ID NO: 152025 - DNA, 19 bp, Homo sapiens
  siRNA target sequence for REPS2 (NM_004726.1,2079-2097).
gctcaaggaggttcatcaa

SEQ ID NO: 152026 - DNA, 19 bp, Homo sapiens
  siRNA target sequence for REPS2 (NM_004726.1,2088-2106).
ggttcatcaagaacgaatt

SEQ ID NO: 152027 - DNA, 19 bp, Homo sapiens
  siRNA target sequence for REPS2 (NM_004726.1,2092-2110).
catcaagaacgaattgcat

SEQ ID NO: 152028 - DNA, 19 bp, Homo sapiens
  siRNA target sequence for REPS2 (NM_004726.1,2098-2116).
gaacgaattgcattggaaa

SEQ ID NO: 152029 - DNA, 19 bp, Homo sapiens
  siRNA target sequence for RGN (NM_004683.3,251-269).
cattcctgcaaaaaaggtt

SEQ ID NO: 152030 - DNA, 19 bp, Homo sapiens
  siRNA target sequence for RGN (NM_004683.3,267-285).
gtttgccggtgggattcat

SEQ ID NO: 152031 - DNA, 19 bp, Homo sapiens
  siRNA target sequence for RGN (NM_004683.3,443-461).
gaaaaacaatcgcttcaat

SEQ ID NO: 152032 - DNA, 19 bp, Homo sapiens
  siRNA target sequence for RGN (NM_004683.3,568-586).
ctgatcaccacgtgaaaaa

SEQ ID NO: 152033 - DNA, 19 bp, Homo sapiens
  siRNA target sequence for RGN (NM_004683.3,570-588).
gatcaccacgtgaaaaagt

SEQ ID NO: 152034 - DNA, 19 bp, Homo sapiens
  siRNA target sequence for RGN (NM_004683.3,596-614).
ccaggtggacatttccaat

SEQ ID NO: 152035 - DNA, 19 bp, Homo sapiens
  siRNA target sequence for RGN (NM_004683.3,625-643).
ggtcgctagaccacaaaat

SEQ ID NO: 152036 - DNA, 19 bp, Homo sapiens
  siRNA target sequence for RGN (NM_004683.3,715-733).
ccaaccgcagaagtgttta

SEQ ID NO: 152037 - DNA, 19 bp, Homo sapiens
  siRNA target sequence for RGN (NM_004683.3,760-778).
cagatggaatgtgtattga

SEQ ID NO: 152038 - DNA, 19 bp, Homo sapiens
  siRNA target sequence for RGN (NM_004683.3,794-812).
ctgggtggcctgttacaat

SEQ ID NO: 152039 - DNA, 19 bp, Homo sapiens
  siRNA target sequence for RGN (NM_004683.3,817-835).
gaagagtgattcgtttaga

SEQ ID NO: 152040 - DNA, 19 bp, Homo sapiens
  siRNA target sequence for RGN (NM_004683.3,842-860).
gacagggaaaagacttcaa

SEQ ID NO: 152041 - DNA, 19 bp, Homo sapiens
  siRNA target sequence for RGN (NM_004683.3,866-884).
gaagttgcctgttgataaa

SEQ ID NO: 152042 - DNA, 19 bp, Homo sapiens
  siRNA target sequence for RGN (NM_004683.3,869-887).
gttgcctgttgataaaaca

SEQ ID NO: 152043 - DNA, 19 bp, Homo sapiens
  siRNA target sequence for RGN (NM_004683.3,876-894).
gttgataaaacaacttcat

SEQ ID NO: 152044 - DNA, 19 bp, Homo sapiens
  siRNA target sequence for RHBDL1 (NM_003961.1,39-57).
ggaagacgggggaacaact

SEQ ID NO: 152045 - DNA, 19 bp, Homo sapiens
  siRNA target sequence for RHBDL1 (NM_003961.1,701-719).
cctaccaccccgagtacat

SEQ ID NO: 152046 - DNA, 19 bp, Homo sapiens
  siRNA target sequence for RHBDL1 (NM_003961.1,706-724).
caccccgagtacatgaaga

SEQ ID NO: 152047 - DNA, 19 bp, Homo sapiens
  siRNA target sequence for RHBDL4 (NM_138328.1,130-148).
ggaaagtcctgtttgatca

SEQ ID NO: 152048 - DNA, 19 bp, Homo sapiens
  siRNA target sequence for RHBDL4 (NM_138328.1,159-177).
gggaacacaggctacatta

SEQ ID NO: 152049 - DNA, 19 bp, Homo sapiens
  siRNA target sequence for RHBDL4 (NM_138328.1,281-299).
gatcggctaccaggatttt

SEQ ID NO: 152050 - DNA, 19 bp, Homo sapiens
  siRNA target sequence for RHBDL4 (NM_138328.1,294-312).
gattttgtcagcctaatga

SEQ ID NO: 152051 - DNA, 19 bp, Homo sapiens
  siRNA target sequence for RHBDL4 (NM_138328.1,403-421).
gcctctcgcagcgacttat

SEQ ID NO: 152052 - DNA, 19 bp, Homo sapiens
  siRNA target sequence for RHBDL4 (NM_138328.1,462-480).
cgcaagtggtactatgaca

SEQ ID NO: 152053 - DNA, 19 bp, Homo sapiens
  siRNA target sequence for RHBDL4 (NM_138328.1,496-514).
ccccaccctggttcatgat

SEQ ID NO: 152054 - DNA, 19 bp, Homo sapiens
  siRNA target sequence for RHBDL4 (NM_138328.1,560-578).
gtcactaggtcaatttgta

SEQ ID NO: 152055 - DNA, 19 bp, Homo sapiens
  siRNA target sequence for RHBDL4 (NM_138328.1,562-580).
cactaggtcaatttgtact

SEQ ID NO: 152056 - DNA, 19 bp, Homo sapiens
  siRNA target sequence for RHBDL4 (NM_138328.1,594-612).
ccacgttacttgaagaact

SEQ ID NO: 152057 - DNA, 19 bp, Homo sapiens
  siRNA target sequence for RHBDL4 (NM_138328.1,649-667).
ggcgctacctgacatacat

SEQ ID NO: 152058 - DNA, 19 bp, Homo sapiens
  siRNA target sequence for RHBDL4 (NM_138328.1,651-669).
cgctacctgacatacatct

SEQ ID NO: 152059 - DNA, 19 bp, Homo sapiens
  siRNA target sequence for RHBDL4 (NM_138328.1,671-689).
catgcatgcagggatagaa

SEQ ID NO: 152060 - DNA, 19 bp, Homo sapiens
  siRNA target sequence for RHBDL4 (NM_138328.1,757-775).
cccgaattgggcttgtcta

SEQ ID NO: 152061 - DNA, 19 bp, Homo sapiens
  siRNA target sequence for RHBDL4 (NM_138328.1,942-960).
gtggcccttatctgtatga

SEQ ID NO: 152062 - DNA, 19 bp, Homo sapiens
  siRNA target sequence for RHBDL4 (NM_138328.1,1195-1213).
ccctgctggacttaaagct

SEQ ID NO: 152063 - DNA, 19 bp, Homo sapiens
  siRNA target sequence for RYR3 (NM_001036.2,142-160).
gtgcatcgccaccattcat

SEQ ID NO: 152064 - DNA, 19 bp, Homo sapiens
  siRNA target sequence for RYR3 (NM_001036.2,366-384).
gccacaggaccctgttata

SEQ ID NO: 152065 - DNA, 19 bp, Homo sapiens
  siRNA target sequence for RYR3 (NM_001036.2,411-429).
ctttcagcggaatgtatct

SEQ ID NO: 152066 - DNA, 19 bp, Homo sapiens
  siRNA target sequence for RYR3 (NM_001036.2,428-446).
ctaacatgcttgactacat

SEQ ID NO: 152067 - DNA, 19 bp, Homo sapiens
  siRNA target sequence for RYR3 (NM_001036.2,450-468).
gatcccagacagacaaact

SEQ ID NO: 152068 - DNA, 19 bp, Homo sapiens
  siRNA target sequence for RYR3 (NM_001036.2,620-638).
ctctcagtatcaaatggta

SEQ ID NO: 152069 - DNA, 19 bp, Homo sapiens
  siRNA target sequence for RYR3 (NM_001036.2,702-720).
gtagcatcgaagaaggata

SEQ ID NO: 152070 - DNA, 19 bp, Homo sapiens
  siRNA target sequence for RYR3 (NM_001036.2,706-724).
catcgaagaaggataccta

SEQ ID NO: 152071 - DNA, 19 bp, Homo sapiens
  siRNA target sequence for RYR3 (NM_001036.2,732-750).
ggcatgtagtacgtctttt

SEQ ID NO: 152072 - DNA, 19 bp, Homo sapiens
  siRNA target sequence for RYR3 (NM_001036.2,752-770).
catggtcatgatgaatgtt

SEQ ID NO: 152073 - DNA, 19 bp, Homo sapiens
  siRNA target sequence for RYR3 (NM_001036.2,764-782).
gaatgtttgacgataccat

SEQ ID NO: 152074 - DNA, 19 bp, Homo sapiens
  siRNA target sequence for RYR3 (NM_001036.2,869-887).
gaaccccttcggataagct

SEQ ID NO: 152075 - DNA, 19 bp, Homo sapiens
  siRNA target sequence for RYR3 (NM_001036.2,985-1003).
gcaagaccgggcaaagtca

SEQ ID NO: 152076 - DNA, 19 bp, Homo sapiens
  siRNA target sequence for RYR3 (NM_001036.2,1046-1064).
ctcaaggagaaattagact

SEQ ID NO: 152077 - DNA, 19 bp, Homo sapiens
  siRNA target sequence for RYR3 (NM_001036.2,1066-1084).
cagtcacaagcgagacata

SEQ ID NO: 152078 - DNA, 19 bp, Homo sapiens
  siRNA target sequence for RYR3 (NM_001036.2,1068-1086).
gtcacaagcgagacataga

SEQ ID NO: 152079 - DNA, 19 bp, Homo sapiens
  siRNA target sequence for RYR3 (NM_001036.2,1095-1113).
gagttccagaaatcaagta

SEQ ID NO: 152080 - DNA, 19 bp, Homo sapiens
  siRNA target sequence for RYR3 (NM_001036.2,1172-1190).
gcacaagacgccaaaactt

SEQ ID NO: 152081 - DNA, 19 bp, Homo sapiens
  siRNA target sequence for RYR3 (NM_001036.2,1196-1214).
ctgggacctctaaaaagaa

SEQ ID NO: 152082 - DNA, 19 bp, Homo sapiens
  siRNA target sequence for RYR3 (NM_001036.2,1240-1258).
catggatgatggattaaca

SEQ ID NO: 152083 - DNA, 19 bp, Homo sapiens
  siRNA target sequence for RYR3 (NM_001036.2,1295-1313).
cggatcatccggaacacta

SEQ ID NO: 152084 - DNA, 19 bp, Homo sapiens
  siRNA target sequence for RYR3 (NM_001036.2,1305-1323).
ggaacactacagccttatt

SEQ ID NO: 152085 - DNA, 19 bp, Homo sapiens
  siRNA target sequence for RYR3 (NM_001036.2,1368-1386).
ccctgcctatagaagaagt

SEQ ID NO: 152086 - DNA, 19 bp, Homo sapiens
  siRNA target sequence for RYR3 (NM_001036.2,1462-1480).
caagctccgctcactcaaa

SEQ ID NO: 152087 - DNA, 19 bp, Homo sapiens
  siRNA target sequence for RYR3 (NM_001036.2,1513-1531).
gttggcccttgtcttaaat

SEQ ID NO: 152088 - DNA, 19 bp, Homo sapiens
  siRNA target sequence for RYR3 (NM_001036.2,1518-1536).
cccttgtcttaaattgcat

SEQ ID NO: 152089 - DNA, 19 bp, Homo sapiens
  siRNA target sequence for RYR3 (NM_001036.2,1540-1558).
ccgcttaaatgtctacaat

SEQ ID NO: 152090 - DNA, 19 bp, Homo sapiens
  siRNA target sequence for RYR3 (NM_001036.2,1541-1559).
cgcttaaatgtctacaata

SEQ ID NO: 152091 - DNA, 19 bp, Homo sapiens
  siRNA target sequence for RYR3 (NM_001036.2,1555-1573).
caatagcgtagcacacttt

SEQ ID NO: 152092 - DNA, 19 bp, Homo sapiens
  siRNA target sequence for RYR3 (NM_001036.2,1568-1586).
cactttgcagggattgcaa

SEQ ID NO: 152093 - DNA, 19 bp, Homo sapiens
  siRNA target sequence for RYR3 (NM_001036.2,1674-1692).
gcgctcaattctccaataa

SEQ ID NO: 152094 - DNA, 19 bp, Homo sapiens
  siRNA target sequence for RYR3 (NM_001036.2,1694-1712).
cttgattggctcatcagta

SEQ ID NO: 152095 - DNA, 19 bp, Homo sapiens
  siRNA target sequence for RYR3 (NM_001036.2,1756-1774).
gcactgcatcttaactgaa

SEQ ID NO: 152096 - DNA, 19 bp, Homo sapiens
  siRNA target sequence for RYR3 (NM_001036.2,1776-1794).
gcccagaagccttaaatct

SEQ ID NO: 152097 - DNA, 19 bp, Homo sapiens
  siRNA target sequence for RYR3 (NM_001036.2,1779-1797).
cagaagccttaaatctgat

SEQ ID NO: 152098 - DNA, 19 bp, Homo sapiens
  siRNA target sequence for RYR3 (NM_001036.2,1799-1817).
gcggagggccacatcaagt

SEQ ID NO: 152099 - DNA, 19 bp, Homo sapiens
  siRNA target sequence for RYR3 (NM_001036.2,1908-1926).
gagccaaccagaatctgat

SEQ ID NO: 152100 - DNA, 19 bp, Homo sapiens
  siRNA target sequence for RYR3 (NM_001036.2,1960-1978).
cctgcagacacgactgatt

SEQ ID NO: 152101 - DNA, 19 bp, Homo sapiens
  siRNA target sequence for RYR3 (NM_001036.2,1961-1979).
ctgcagacacgactgatta

SEQ ID NO: 152102 - DNA, 19 bp, Homo sapiens
  siRNA target sequence for RYR3 (NM_001036.2,1966-1984).
gacacgactgattaacgat

SEQ ID NO: 152103 - DNA, 19 bp, Homo sapiens
  siRNA target sequence for RYR3 (NM_001036.2,1970-1988).
cgactgattaacgatgtaa

SEQ ID NO: 152104 - DNA, 19 bp, Homo sapiens
  siRNA target sequence for RYR3 (NM_001036.2,1989-2007).
ccagtatccggccaaacat

SEQ ID NO: 152105 - DNA, 19 bp, Homo sapiens
  siRNA target sequence for RYR3 (NM_001036.2,1992-2010).
gtatccggccaaacatctt

SEQ ID NO: 152106 - DNA, 19 bp, Homo sapiens
  siRNA target sequence for RYR3 (NM_001036.2,2049-2067).
ggtacttcgagctgattat

SEQ ID NO: 152107 - DNA, 19 bp, Homo sapiens
  siRNA target sequence for RYR3 (NM_001036.2,2197-2215).
gtactcctatggctttgat

SEQ ID NO: 152108 - DNA, 19 bp, Homo sapiens
  siRNA target sequence for RYR3 (NM_001036.2,2354-2372).
gtgcaggggatgtttgaga

SEQ ID NO: 152109 - DNA, 19 bp, Homo sapiens
  siRNA target sequence for RYR3 (NM_001036.2,2398-2416).
ccctgtgatgagcttttca

SEQ ID NO: 152110 - DNA, 19 bp, Homo sapiens
  siRNA target sequence for RYR3 (NM_001036.2,2447-2465).
ggacgtcatggagagttta

SEQ ID NO: 152111 - DNA, 19 bp, Homo sapiens
  siRNA target sequence for RYR3 (NM_001036.2,2448-2466).
gacgtcatggagagtttaa

SEQ ID NO: 152112 - DNA, 19 bp, Homo sapiens
  siRNA target sequence for RYR3 (NM_001036.2,2451-2469).
gtcatggagagtttaagtt

SEQ ID NO: 152113 - DNA, 19 bp, Homo sapiens
  siRNA target sequence for RYR3 (NM_001036.2,2485-2503).
ctatgccccttgctatgaa

SEQ ID NO: 152114 - DNA, 19 bp, Homo sapiens
  siRNA target sequence for RYR3 (NM_001036.2,2527-2545).
gagattggagcctgtcaaa

SEQ ID NO: 152115 - DNA, 19 bp, Homo sapiens
  siRNA target sequence for RYR3 (NM_001036.2,2654-2672).
ccacctcacctagaaaaga

SEQ ID NO: 152116 - DNA, 19 bp, Homo sapiens
  siRNA target sequence for RYR3 (NM_001036.2,2655-2673).
cacctcacctagaaaagat

SEQ ID NO: 152117 - DNA, 19 bp, Homo sapiens
  siRNA target sequence for RYR3 (NM_001036.2,2678-2696).
gacagactagctgaaaaca

SEQ ID NO: 152118 - DNA, 19 bp, Homo sapiens
  siRNA target sequence for RYR3 (NM_001036.2,2734-2752).
ctggactttcggcaagata

SEQ ID NO: 152119 - DNA, 19 bp, Homo sapiens
  siRNA target sequence for RYR3 (NM_001036.2,2745-2763).
gcaagatacgagatgacaa

SEQ ID NO: 152120 - DNA, 19 bp, Homo sapiens
  siRNA target sequence for RYR3 (NM_001036.2,2781-2799).
gccttgtggagttttcaaa

SEQ ID NO: 152121 - DNA, 19 bp, Homo sapiens
  siRNA target sequence for RYR3 (NM_001036.2,2796-2814).
caaagctcccagaaactga

SEQ ID NO: 152122 - DNA, 19 bp, Homo sapiens
  siRNA target sequence for RYR3 (NM_001036.2,2821-2839).
ctataacctgcaaatgtca

SEQ ID NO: 152123 - DNA, 19 bp, Homo sapiens
  siRNA target sequence for RYR3 (NM_001036.2,2872-2890).
gtgccacattgctcatgtt

SEQ ID NO: 152124 - DNA, 19 bp, Homo sapiens
  siRNA target sequence for RYR3 (NM_001036.2,2874-2892).
gccacattgctcatgttaa

SEQ ID NO: 152125 - DNA, 19 bp, Homo sapiens
  siRNA target sequence for RYR3 (NM_001036.2,2930-2948).
cccaaaaactatatgatgt

SEQ ID NO: 152126 - DNA, 19 bp, Homo sapiens
  siRNA target sequence for RYR3 (NM_001036.2,2992-3010).
gctgttacctcctcaagaa

SEQ ID NO: 152127 - DNA, 19 bp, Homo sapiens
  siRNA target sequence for RYR3 (NM_001036.2,2993-3011).
ctgttacctcctcaagaaa

SEQ ID NO: 152128 - DNA, 19 bp, Homo sapiens
  siRNA target sequence for RYR3 (NM_001036.2,3000-3018).
ctcctcaagaaattttagt

SEQ ID NO: 152129 - DNA, 19 bp, Homo sapiens
  siRNA target sequence for RYR3 (NM_001036.2,3087-3105).
gcatccaacaggatttgaa

SEQ ID NO: 152130 - DNA, 19 bp, Homo sapiens
  siRNA target sequence for RYR3 (NM_001036.2,3123-3141).
gtctggtgccatatgcatt

SEQ ID NO: 152131 - DNA, 19 bp, Homo sapiens
  siRNA target sequence for RYR3 (NM_001036.2,3146-3164).
gatgagcgtaccaagaagt

SEQ ID NO: 152132 - DNA, 19 bp, Homo sapiens
  siRNA target sequence for RYR3 (NM_001036.2,3152-3170).
cgtaccaagaagtcaaaca

SEQ ID NO: 152133 - DNA, 19 bp, Homo sapiens
  siRNA target sequence for RYR3 (NM_001036.2,3184-3202).
ggaagctgtgcgcactttt

SEQ ID NO: 152134 - DNA, 19 bp, Homo sapiens
  siRNA target sequence for RYR3 (NM_001036.2,3203-3221).
gttggttacgggtataaca

SEQ ID NO: 152135 - DNA, 19 bp, Homo sapiens
  siRNA target sequence for RYR3 (NM_001036.2,3207-3225).
gttacgggtataacattga

SEQ ID NO: 152136 - DNA, 19 bp, Homo sapiens
  siRNA target sequence for RYR3 (NM_001036.2,3226-3244).
gccatcagaccaagaacta

SEQ ID NO: 152137 - DNA, 19 bp, Homo sapiens
  siRNA target sequence for RYR3 (NM_001036.2,3419-3437).
gatgaccaagcctttgtgt

SEQ ID NO: 152138 - DNA, 19 bp, Homo sapiens
  siRNA target sequence for RYR3 (NM_001036.2,3504-3522).
gggatgtggtcggatgtat

SEQ ID NO: 152139 - DNA, 19 bp, Homo sapiens
  siRNA target sequence for RYR3 (NM_001036.2,3506-3524).
gatgtggtcggatgtatga

SEQ ID NO: 152140 - DNA, 19 bp, Homo sapiens
  siRNA target sequence for RYR3 (NM_001036.2,3509-3527).
gtggtcggatgtatgatta

SEQ ID NO: 152141 - DNA, 19 bp, Homo sapiens
  siRNA target sequence for RYR3 (NM_001036.2,3533-3551).
gatgatgcttcaatgatct

SEQ ID NO: 152142 - DNA, 19 bp, Homo sapiens
  siRNA target sequence for RYR3 (NM_001036.2,3640-3658).
ctgctgtctgggtctatct

SEQ ID NO: 152143 - DNA, 19 bp, Homo sapiens
  siRNA target sequence for RYR3 (NM_001036.2,3642-3660).
gctgtctgggtctatctca

SEQ ID NO: 152144 - DNA, 19 bp, Homo sapiens
  siRNA target sequence for RYR3 (NM_001036.2,3689-3707).
gccagtaccttcaagtttt

SEQ ID NO: 152145 - DNA, 19 bp, Homo sapiens
  siRNA target sequence for RYR3 (NM_001036.2,3740-3758).
ccttttgctgtcaacatga

SEQ ID NO: 152146 - DNA, 19 bp, Homo sapiens
  siRNA target sequence for RYR3 (NM_001036.2,3788-3806).
cgcctcccgacgtttgtca

SEQ ID NO: 152147 - DNA, 19 bp, Homo sapiens
  siRNA target sequence for RYR3 (NM_001036.2,3789-3807).
gcctcccgacgtttgtcaa

SEQ ID NO: 152148 - DNA, 19 bp, Homo sapiens
  siRNA target sequence for RYR3 (NM_001036.2,3875-3893).
ctcaaggtgacgcataaga

SEQ ID NO: 152149 - DNA, 19 bp, Homo sapiens
  siRNA target sequence for RYR3 (NM_001036.2,3877-3895).
caaggtgacgcataagaca

SEQ ID NO: 152150 - DNA, 19 bp, Homo sapiens
  siRNA target sequence for RYR3 (NM_001036.2,3880-3898).
ggtgacgcataagacattt

SEQ ID NO: 152151 - DNA, 19 bp, Homo sapiens
  siRNA target sequence for RYR3 (NM_001036.2,3892-3910).
gacatttggcacacagaat

SEQ ID NO: 152152 - DNA, 19 bp, Homo sapiens
  siRNA target sequence for RYR3 (NM_001036.2,4057-4075).
ctacgccatccgcatcttt

SEQ ID NO: 152153 - DNA, 19 bp, Homo sapiens
  siRNA target sequence for RYR3 (NM_001036.2,4110-4128).
gggtgactccagactatca

SEQ ID NO: 152154 - DNA, 19 bp, Homo sapiens
  siRNA target sequence for RYR3 (NM_001036.2,4112-4130).
gtgactccagactatcact

SEQ ID NO: 152155 - DNA, 19 bp, Homo sapiens
  siRNA target sequence for RYR3 (NM_001036.2,4116-4134).
ctccagactatcacttgta

SEQ ID NO: 152156 - DNA, 19 bp, Homo sapiens
  siRNA target sequence for RYR3 (NM_001036.2,4118-4136).
ccagactatcacttgtaca

SEQ ID NO: 152157 - DNA, 19 bp, Homo sapiens
  siRNA target sequence for RYR3 (NM_001036.2,4129-4147).
cttgtacagtgaaaagttt

SEQ ID NO: 152158 - DNA, 19 bp, Homo sapiens
  siRNA target sequence for RYR3 (NM_001036.2,4201-4219).
ggtccatgaaagtgtgaaa

SEQ ID NO: 152159 - DNA, 19 bp, Homo sapiens
  siRNA target sequence for RYR3 (NM_001036.2,4240-4258).
ctggggtggagacattgta

SEQ ID NO: 152160 - DNA, 19 bp, Homo sapiens
  siRNA target sequence for RYR3 (NM_001036.2,4382-4400).
gagcctaataccaaagtgt

SEQ ID NO: 152161 - DNA, 19 bp, Homo sapiens
  siRNA target sequence for RYR3 (NM_001036.2,4476-4494).
ccctgtcagcggccatatt

SEQ ID NO: 152162 - DNA, 19 bp, Homo sapiens
  siRNA target sequence for RYR3 (NM_001036.2,4478-4496).
ctgtcagcggccatattca

SEQ ID NO: 152163 - DNA, 19 bp, Homo sapiens
  siRNA target sequence for RYR3 (NM_001036.2,4536-4554).
ggctggacgtccaaaccat

SEQ ID NO: 152164 - DNA, 19 bp, Homo sapiens
  siRNA target sequence for RYR3 (NM_001036.2,4727-4745).
gacctgatgcggttccatt

SEQ ID NO: 152165 - DNA, 19 bp, Homo sapiens
  siRNA target sequence for RYR3 (NM_001036.2,4873-4891).
ccttcgatctggtttctat

SEQ ID NO: 152166 - DNA, 19 bp, Homo sapiens
  siRNA target sequence for RYR3 (NM_001036.2,5030-5048).
ggggtgggcctgagaacat

SEQ ID NO: 152167 - DNA, 19 bp, Homo sapiens
  siRNA target sequence for RYR3 (NM_001036.2,5269-5287).
ggtcatgggcgtgtttgat

SEQ ID NO: 152168 - DNA, 19 bp, Homo sapiens
  siRNA target sequence for RYR3 (NM_001036.2,5449-5467).
cttgttgcagactcgatta

SEQ ID NO: 152169 - DNA, 19 bp, Homo sapiens
  siRNA target sequence for RYR3 (NM_001036.2,5679-5697).
cacaggagcagatcaacat

SEQ ID NO: 152170 - DNA, 19 bp, Homo sapiens
  siRNA target sequence for RYR3 (NM_001036.2,5748-5766).
gggaggagctgtatgattt

SEQ ID NO: 152171 - DNA, 19 bp, Homo sapiens
  siRNA target sequence for RYR3 (NM_001036.2,5922-5940).
gatgccccacaacattgaa

SEQ ID NO: 152172 - DNA, 19 bp, Homo sapiens
  siRNA target sequence for RYR3 (NM_001036.2,5997-6015).
cagagctggtccgaatgat

SEQ ID NO: 152173 - DNA, 19 bp, Homo sapiens
  siRNA target sequence for RYR3 (NM_001036.2,6176-6194).
gaggagttgctcatgatca

SEQ ID NO: 152174 - DNA, 19 bp, Homo sapiens
  siRNA target sequence for RYR3 (NM_001036.2,6178-6196).
ggagttgctcatgatcaat

SEQ ID NO: 152175 - DNA, 19 bp, Homo sapiens
  siRNA target sequence for RYR3 (NM_001036.2,6298-6316).
gttgggtacagagaaatct

SEQ ID NO: 152176 - DNA, 19 bp, Homo sapiens
  siRNA target sequence for RYR3 (NM_001036.2,6375-6393).
gaattagccggcaaaatca

SEQ ID NO: 152177 - DNA, 19 bp, Homo sapiens
  siRNA target sequence for RYR3 (NM_001036.2,6498-6516).
ctgtgatggacaacaatga

SEQ ID NO: 152178 - DNA, 19 bp, Homo sapiens
  siRNA target sequence for RYR3 (NM_001036.2,6907-6925).
gcatatgggcaatgcaatt

SEQ ID NO: 152179 - DNA, 19 bp, Homo sapiens
  siRNA target sequence for RYR3 (NM_001036.2,6908-6926).
catatgggcaatgcaatta

SEQ ID NO: 152180 - DNA, 19 bp, Homo sapiens
  siRNA target sequence for RYR3 (NM_001036.2,6914-6932).
ggcaatgcaattatgtcat

SEQ ID NO: 152181 - DNA, 19 bp, Homo sapiens
  siRNA target sequence for RYR3 (NM_001036.2,6915-6933).
gcaatgcaattatgtcatt

SEQ ID NO: 152182 - DNA, 19 bp, Homo sapiens
  siRNA target sequence for RYR3 (NM_001036.2,6939-6957).
cggcccttatagatctact

SEQ ID NO: 152183 - DNA, 19 bp, Homo sapiens
  siRNA target sequence for RYR3 (NM_001036.2,7110-7128).
cggtcagtgagccagatat

SEQ ID NO: 152184 - DNA, 19 bp, Homo sapiens
  siRNA target sequence for RYR3 (NM_001036.2,7171-7189).
gttcttggaccgcgtttat

SEQ ID NO: 152185 - DNA, 19 bp, Homo sapiens
  siRNA target sequence for RYR3 (NM_001036.2,7182-7200).
gcgtttatggcattaagga

SEQ ID NO: 152186 - DNA, 19 bp, Homo sapiens
  siRNA target sequence for RYR3 (NM_001036.2,7183-7201).
cgtttatggcattaaggat

SEQ ID NO: 152187 - DNA, 19 bp, Homo sapiens
  siRNA target sequence for RYR3 (NM_001036.2,7190-7208).
ggcattaaggatcaaactt

SEQ ID NO: 152188 - DNA, 19 bp, Homo sapiens
  siRNA target sequence for RYR3 (NM_001036.2,7192-7210).
cattaaggatcaaactttt

SEQ ID NO: 152189 - DNA, 19 bp, Homo sapiens
  siRNA target sequence for RYR3 (NM_001036.2,7294-7312).
ggctgcgcttgcactaaat

SEQ ID NO: 152190 - DNA, 19 bp, Homo sapiens
  siRNA target sequence for RYR3 (NM_001036.2,7295-7313).
gctgcgcttgcactaaata

SEQ ID NO: 152191 - DNA, 19 bp, Homo sapiens
  siRNA target sequence for RYR3 (NM_001036.2,7298-7316).
gcgcttgcactaaataggt

SEQ ID NO: 152192 - DNA, 19 bp, Homo sapiens
  siRNA target sequence for RYR3 (NM_001036.2,7299-7317).
cgcttgcactaaataggta

SEQ ID NO: 152193 - DNA, 19 bp, Homo sapiens
  siRNA target sequence for RYR3 (NM_001036.2,7300-7318).
gcttgcactaaataggtat

SEQ ID NO: 152194 - DNA, 19 bp, Homo sapiens
  siRNA target sequence for RYR3 (NM_001036.2,7301-7319).
cttgcactaaataggtata

SEQ ID NO: 152195 - DNA, 19 bp, Homo sapiens
  siRNA target sequence for RYR3 (NM_001036.2,7334-7352).
ctcccgctcctcacaagat

SEQ ID NO: 152196 - DNA, 19 bp, Homo sapiens
  siRNA target sequence for RYR3 (NM_001036.2,7336-7354).
cccgctcctcacaagatgt

SEQ ID NO: 152197 - DNA, 19 bp, Homo sapiens
  siRNA target sequence for RYR3 (NM_001036.2,7381-7399).
ctgcacctctctgattgat

SEQ ID NO: 152198 - DNA, 19 bp, Homo sapiens
  siRNA target sequence for RYR3 (NM_001036.2,7413-7431).
caatatacaggctatccaa

SEQ ID NO: 152199 - DNA, 19 bp, Homo sapiens
  siRNA target sequence for RYR3 (NM_001036.2,7459-7477).
ggacactatagaagaatgt

SEQ ID NO: 152200 - DNA, 19 bp, Homo sapiens
  siRNA target sequence for RYR3 (NM_001036.2,7476-7494).
gtttgcttgccatttgcaa

SEQ ID NO: 152201 - DNA, 19 bp, Homo sapiens
  siRNA target sequence for RYR3 (NM_001036.2,7498-7516).
cttgaggccttccatgtta

SEQ ID NO: 152202 - DNA, 19 bp, Homo sapiens
  siRNA target sequence for RYR3 (NM_001036.2,7525-7543).
cctgcgacgcctcgttttt

SEQ ID NO: 152203 - DNA, 19 bp, Homo sapiens
  siRNA target sequence for RYR3 (NM_001036.2,7528-7546).
gcgacgcctcgtttttgat

SEQ ID NO: 152204 - DNA, 19 bp, Homo sapiens
  siRNA target sequence for RYR3 (NM_001036.2,7530-7548).
gacgcctcgtttttgatgt

SEQ ID NO: 152205 - DNA, 19 bp, Homo sapiens
  siRNA target sequence for RYR3 (NM_001036.2,7547-7565).
gtgccgcaactcaatgaat

SEQ ID NO: 152206 - DNA, 19 bp, Homo sapiens
  siRNA target sequence for RYR3 (NM_001036.2,7556-7574).
ctcaatgaatactgcaaaa

SEQ ID NO: 152207 - DNA, 19 bp, Homo sapiens
  siRNA target sequence for RYR3 (NM_001036.2,7585-7603).
gcttctgacgaatcactat

SEQ ID NO: 152208 - DNA, 19 bp, Homo sapiens
  siRNA target sequence for RYR3 (NM_001036.2,7676-7694).
cacctaacggagaagcttt

SEQ ID NO: 152209 - DNA, 19 bp, Homo sapiens
  siRNA target sequence for RYR3 (NM_001036.2,7679-7697).
ctaacggagaagcttttct

SEQ ID NO: 152210 - DNA, 19 bp, Homo sapiens
  siRNA target sequence for RYR3 (NM_001036.2,7711-7729).
ctcgctctcccataagaaa

SEQ ID NO: 152211 - DNA, 19 bp, Homo sapiens
  siRNA target sequence for RYR3 (NM_001036.2,7713-7731).
cgctctcccataagaaata

SEQ ID NO: 152212 - DNA, 19 bp, Homo sapiens
  siRNA target sequence for RYR3 (NM_001036.2,7782-7800).
gggccttgccaccagatta

SEQ ID NO: 152213 - DNA, 19 bp, Homo sapiens
  siRNA target sequence for RYR3 (NM_001036.2,7783-7801).
ggccttgccaccagattat

SEQ ID NO: 152214 - DNA, 19 bp, Homo sapiens
  siRNA target sequence for RYR3 (NM_001036.2,7784-7802).
gccttgccaccagattatt

SEQ ID NO: 152215 - DNA, 19 bp, Homo sapiens
  siRNA target sequence for RYR3 (NM_001036.2,7789-7807).
gccaccagattatttagat

SEQ ID NO: 152216 - DNA, 19 bp, Homo sapiens
  siRNA target sequence for RYR3 (NM_001036.2,7858-7876).
caactttgacccaaaacct

SEQ ID NO: 152217 - DNA, 19 bp, Homo sapiens
  siRNA target sequence for RYR3 (NM_001036.2,7874-7892).
cctattaacaccatgaatt

SEQ ID NO: 152218 - DNA, 19 bp, Homo sapiens
  siRNA target sequence for RYR3 (NM_001036.2,7875-7893).
ctattaacaccatgaattt

SEQ ID NO: 152219 - DNA, 19 bp, Homo sapiens
  siRNA target sequence for RYR3 (NM_001036.2,7930-7948).
gtatgctgagcattcacat

SEQ ID NO: 152220 - DNA, 19 bp, Homo sapiens
  siRNA target sequence for RYR3 (NM_001036.2,7937-7955).
gagcattcacatgataaat

SEQ ID NO: 152221 - DNA, 19 bp, Homo sapiens
  siRNA target sequence for RYR3 (NM_001036.2,8025-8043).
cactgataaggcctttcaa

SEQ ID NO: 152222 - DNA, 19 bp, Homo sapiens
  siRNA target sequence for RYR3 (NM_001036.2,8027-8045).
ctgataaggcctttcaaga

SEQ ID NO: 152223 - DNA, 19 bp, Homo sapiens
  siRNA target sequence for RYR3 (NM_001036.2,8084-8102).
gcgcgagagtccctgaaaa

SEQ ID NO: 152224 - DNA, 19 bp, Homo sapiens
  siRNA target sequence for RYR3 (NM_001036.2,8281-8299).
ggtcgtggctgagaactat

SEQ ID NO: 152225 - DNA, 19 bp, Homo sapiens
  siRNA target sequence for RYR3 (NM_001036.2,8288-8306).
gctgagaactatcacaata

SEQ ID NO: 152226 - DNA, 19 bp, Homo sapiens
  siRNA target sequence for RYR3 (NM_001036.2,8289-8307).
ctgagaactatcacaatat

SEQ ID NO: 152227 - DNA, 19 bp, Homo sapiens
  siRNA target sequence for RYR3 (NM_001036.2,8291-8309).
gagaactatcacaatatct

SEQ ID NO: 152228 - DNA, 19 bp, Homo sapiens
  siRNA target sequence for RYR3 (NM_001036.2,8361-8379).
ctcttctggtaccatatga

SEQ ID NO: 152229 - DNA, 19 bp, Homo sapiens
  siRNA target sequence for RYR3 (NM_001036.2,8363-8381).
cttctggtaccatatgaca

SEQ ID NO: 152230 - DNA, 19 bp, Homo sapiens
  siRNA target sequence for RYR3 (NM_001036.2,8421-8439).
cacaggacctgtttaagtt

SEQ ID NO: 152231 - DNA, 19 bp, Homo sapiens
  siRNA target sequence for RYR3 (NM_001036.2,8466-8484).
ccaggggtatgaaggatat

SEQ ID NO: 152232 - DNA, 19 bp, Homo sapiens
  siRNA target sequence for RYR3 (NM_001036.2,8519-8537).
gcctataagttcttgaaga

SEQ ID NO: 152233 - DNA, 19 bp, Homo sapiens
  siRNA target sequence for RYR3 (NM_001036.2,8520-8538).
cctataagttcttgaagaa

SEQ ID NO: 152234 - DNA, 19 bp, Homo sapiens
  siRNA target sequence for RYR3 (NM_001036.2,8622-8640).
cccgtgaccaggagatcaa

SEQ ID NO: 152235 - DNA, 19 bp, Homo sapiens
  siRNA target sequence for RYR3 (NM_001036.2,8623-8641).
ccgtgaccaggagatcaaa

SEQ ID NO: 152236 - DNA, 19 bp, Homo sapiens
  siRNA target sequence for RYR3 (NM_001036.2,8624-8642).
cgtgaccaggagatcaaat

SEQ ID NO: 152237 - DNA, 19 bp, Homo sapiens
  siRNA target sequence for RYR3 (NM_001036.2,8664-8682).
cgctggttgaccagtactt

SEQ ID NO: 152238 - DNA, 19 bp, Homo sapiens
  siRNA target sequence for RYR3 (NM_001036.2,8666-8684).
ctggttgaccagtacttca

SEQ ID NO: 152239 - DNA, 19 bp, Homo sapiens
  siRNA target sequence for RYR3 (NM_001036.2,8685-8703).
ccagtcattgcctctactt

SEQ ID NO: 152240 - DNA, 19 bp, Homo sapiens
  siRNA target sequence for RYR3 (NM_001036.2,8825-8843).
ggtagtgattctactacaa

SEQ ID NO: 152241 - DNA, 19 bp, Homo sapiens
  siRNA target sequence for RYR3 (NM_001036.2,8922-8940).
ctgggttacgagcattctt

SEQ ID NO: 152242 - DNA, 19 bp, Homo sapiens
  siRNA target sequence for RYR3 (NM_001036.2,8925-8943).
ggttacgagcattctttga

SEQ ID NO: 152243 - DNA, 19 bp, Homo sapiens
  siRNA target sequence for RYR3 (NM_001036.2,8926-8944).
gttacgagcattctttgaa

SEQ ID NO: 152244 - DNA, 19 bp, Homo sapiens
  siRNA target sequence for RYR3 (NM_001036.2,9002-9020).
cattcccgaacgcagatta

SEQ ID NO: 152245 - DNA, 19 bp, Homo sapiens
  siRNA target sequence for RYR3 (NM_001036.2,9023-9041).
ggcgtttctcagaatatta

SEQ ID NO: 152246 - DNA, 19 bp, Homo sapiens
  siRNA target sequence for RYR3 (NM_001036.2,9176-9194).
cttgggacgggaaagaaca

SEQ ID NO: 152247 - DNA, 19 bp, Homo sapiens
  siRNA target sequence for RYR3 (NM_001036.2,9179-9197).
gggacgggaaagaacattt

SEQ ID NO: 152248 - DNA, 19 bp, Homo sapiens
  siRNA target sequence for RYR3 (NM_001036.2,9180-9198).
ggacgggaaagaacattta

SEQ ID NO: 152249 - DNA, 19 bp, Homo sapiens
  siRNA target sequence for RYR3 (NM_001036.2,9183-9201).
cgggaaagaacatttatgt

SEQ ID NO: 152250 - DNA, 19 bp, Homo sapiens
  siRNA target sequence for RYR3 (NM_001036.2,9277-9295).
cacccttaatcgctacaat

SEQ ID NO: 152251 - DNA, 19 bp, Homo sapiens
  siRNA target sequence for RYR3 (NM_001036.2,9296-9314).
ccactctcggtcttcaaca

SEQ ID NO: 152252 - DNA, 19 bp, Homo sapiens
  siRNA target sequence for RYR3 (NM_001036.2,9322-9340).
ccccagggagaggtctatt

SEQ ID NO: 152253 - DNA, 19 bp, Homo sapiens
  siRNA target sequence for RYR3 (NM_001036.2,9646-9664).
gaagcgcattgcagtgtat

SEQ ID NO: 152254 - DNA, 19 bp, Homo sapiens
  siRNA target sequence for RYR3 (NM_001036.2,9887-9905).
gtggacaacaacagatcta

SEQ ID NO: 152255 - DNA, 19 bp, Homo sapiens
  siRNA target sequence for RYR3 (NM_001036.2,9890-9908).
gacaacaacagatctaact

SEQ ID NO: 152256 - DNA, 19 bp, Homo sapiens
  siRNA target sequence for RYR3 (NM_001036.2,9971-9989).
ctgtggtgtaaatctcata

SEQ ID NO: 152257 - DNA, 19 bp, Homo sapiens
  siRNA target sequence for RYR3 (NM_001036.2,10171-10189).
cgtggctgcactcaagaaa

SEQ ID NO: 152258 - DNA, 19 bp, Homo sapiens
  siRNA target sequence for RYR3 (NM_001036.2,10192-10210).
gctgcccattggtttgaat

SEQ ID NO: 152259 - DNA, 19 bp, Homo sapiens
  siRNA target sequence for RYR3 (NM_001036.2,10196-10214).
cccattggtttgaatatgt

SEQ ID NO: 152260 - DNA, 19 bp, Homo sapiens
  siRNA target sequence for RYR3 (NM_001036.2,10235-10253).
ctgatctccctcgcaaaat

SEQ ID NO: 152261 - DNA, 19 bp, Homo sapiens
  siRNA target sequence for RYR3 (NM_001036.2,10264-10282).
ccatagggacacagatgaa

SEQ ID NO: 152262 - DNA, 19 bp, Homo sapiens
  siRNA target sequence for RYR3 (NM_001036.2,10292-10310).
gaacatctgcggaacaact

SEQ ID NO: 152263 - DNA, 19 bp, Homo sapiens
  siRNA target sequence for RYR3 (NM_001036.2,10417-10435).
gcgtgtgcagagaatttca

SEQ ID NO: 152264 - DNA, 19 bp, Homo sapiens
  siRNA target sequence for RYR3 (NM_001036.2,10487-10505).
gccgtctggcacaaactgt

SEQ ID NO: 152265 - DNA, 19 bp, Homo sapiens
  siRNA target sequence for RYR3 (NM_001036.2,10488-10506).
ccgtctggcacaaactgtt

SEQ ID NO: 152266 - DNA, 19 bp, Homo sapiens
  siRNA target sequence for RYR3 (NM_001036.2,10489-10507).
cgtctggcacaaactgtta

SEQ ID NO: 152267 - DNA, 19 bp, Homo sapiens
  siRNA target sequence for RYR3 (NM_001036.2,10492-10510).
ctggcacaaactgttatca

SEQ ID NO: 152268 - DNA, 19 bp, Homo sapiens
  siRNA target sequence for RYR3 (NM_001036.2,10572-10590).
ggcaccgctctattaacct

SEQ ID NO: 152269 - DNA, 19 bp, Homo sapiens
  siRNA target sequence for RYR3 (NM_001036.2,10598-10616).
catggctatcagagatttt

SEQ ID NO: 152270 - DNA, 19 bp, Homo sapiens
  siRNA target sequence for RYR3 (NM_001036.2,10602-10620).
gctatcagagattttggat

SEQ ID NO: 152271 - DNA, 19 bp, Homo sapiens
  siRNA target sequence for RYR3 (NM_001036.2,10603-10621).
ctatcagagattttggata

SEQ ID NO: 152272 - DNA, 19 bp, Homo sapiens
  siRNA target sequence for RYR3 (NM_001036.2,10655-10673).
gtacaggatttggctaaat

SEQ ID NO: 152273 - DNA, 19 bp, Homo sapiens
  siRNA target sequence for RYR3 (NM_001036.2,10719-10737).
ctgacccactacatcagat

SEQ ID NO: 152274 - DNA, 19 bp, Homo sapiens
  siRNA target sequence for RYR3 (NM_001036.2,10723-10741).
cccactacatcagatcatt

SEQ ID NO: 152275 - DNA, 19 bp, Homo sapiens
  siRNA target sequence for RYR3 (NM_001036.2,10725-10743).
cactacatcagatcattct

SEQ ID NO: 152276 - DNA, 19 bp, Homo sapiens
  siRNA target sequence for RYR3 (NM_001036.2,10727-10745).
ctacatcagatcattctct

SEQ ID NO: 152277 - DNA, 19 bp, Homo sapiens
  siRNA target sequence for RYR3 (NM_001036.2,10733-10751).
cagatcattctctatttta

SEQ ID NO: 152278 - DNA, 19 bp, Homo sapiens
  siRNA target sequence for RYR3 (NM_001036.2,10767-10785).
cggagaggagcaaattgga

SEQ ID NO: 152279 - DNA, 19 bp, Homo sapiens
  siRNA target sequence for RYR3 (NM_001036.2,10784-10802).
gaagacgaccctttgtaca

SEQ ID NO: 152280 - DNA, 19 bp, Homo sapiens
  siRNA target sequence for RYR3 (NM_001036.2,10819-10837).
gatggccaagagttgtcaa

SEQ ID NO: 152281 - DNA, 19 bp, Homo sapiens
  siRNA target sequence for RYR3 (NM_001036.2,10966-10984).
gatgataagcgctagcaaa

SEQ ID NO: 152282 - DNA, 19 bp, Homo sapiens
  siRNA target sequence for RYR3 (NM_001036.2,11021-11039).
ctggggatcgccattctga

SEQ ID NO: 152283 - DNA, 19 bp, Homo sapiens
  siRNA target sequence for RYR3 (NM_001036.2,11150-11168).
gatttgaatgcatttgaga

SEQ ID NO: 152284 - DNA, 19 bp, Homo sapiens
  siRNA target sequence for RYR3 (NM_001036.2,11226-11244).
gggaacgtggtgaaaaagt

SEQ ID NO: 152285 - DNA, 19 bp, Homo sapiens
  siRNA target sequence for RYR3 (NM_001036.2,11227-11245).
ggaacgtggtgaaaaagta

SEQ ID NO: 152286 - DNA, 19 bp, Homo sapiens
  siRNA target sequence for RYR3 (NM_001036.2,11260-11278).
gttcacgcgtgatctcttt

SEQ ID NO: 152287 - DNA, 19 bp, Homo sapiens
  siRNA target sequence for RYR3 (NM_001036.2,11263-11281).
cacgcgtgatctctttaga

SEQ ID NO: 152288 - DNA, 19 bp, Homo sapiens
  siRNA target sequence for RYR3 (NM_001036.2,11265-11283).
cgcgtgatctctttagatt

SEQ ID NO: 152289 - DNA, 19 bp, Homo sapiens
  siRNA target sequence for RYR3 (NM_001036.2,11275-11293).
ctttagattcctacagtta

SEQ ID NO: 152290 - DNA, 19 bp, Homo sapiens
  siRNA target sequence for RYR3 (NM_001036.2,11294-11312).
ctttgtgagggacataaca

SEQ ID NO: 152291 - DNA, 19 bp, Homo sapiens
  siRNA target sequence for RYR3 (NM_001036.2,11531-11549).
cagggcccttgcattggta

SEQ ID NO: 152292 - DNA, 19 bp, Homo sapiens
  siRNA target sequence for RYR3 (NM_001036.2,11533-11551).
gggcccttgcattggtaat

SEQ ID NO: 152293 - DNA, 19 bp, Homo sapiens
  siRNA target sequence for RYR3 (NM_001036.2,11535-11553).
gcccttgcattggtaatca

SEQ ID NO: 152294 - DNA, 19 bp, Homo sapiens
  siRNA target sequence for RYR3 (NM_001036.2,11536-11554).
cccttgcattggtaatcaa

SEQ ID NO: 152295 - DNA, 19 bp, Homo sapiens
  siRNA target sequence for RYR3 (NM_001036.2,11818-11836).
cttgaaacttaaagactta

SEQ ID NO: 152296 - DNA, 19 bp, Homo sapiens
  siRNA target sequence for RYR3 (NM_001036.2,11929-11947).
gtacacgcagtcagagatt

SEQ ID NO: 152297 - DNA, 19 bp, Homo sapiens
  siRNA target sequence for RYR3 (NM_001036.2,12054-12072).
ctgtgttattgacaaatct

SEQ ID NO: 152298 - DNA, 19 bp, Homo sapiens
  siRNA target sequence for RYR3 (NM_001036.2,12077-12095).
gaacacatgccaaacgatt

SEQ ID NO: 152299 - DNA, 19 bp, Homo sapiens
  siRNA target sequence for RYR3 (NM_001036.2,12125-12143).
gaaagtgtgctaaattact

SEQ ID NO: 152300 - DNA, 19 bp, Homo sapiens
  siRNA target sequence for RYR3 (NM_001036.2,12261-12279).
ctaagcgacagttcatttt

SEQ ID NO: 152301 - DNA, 19 bp, Homo sapiens
  siRNA target sequence for RYR3 (NM_001036.2,12429-12447).
cttcttacgtgttagaaat

SEQ ID NO: 152302 - DNA, 19 bp, Homo sapiens
  siRNA target sequence for RYR3 (NM_001036.2,12672-12690).
ccatcctgggaggaatctt

SEQ ID NO: 152303 - DNA, 19 bp, Homo sapiens
  siRNA target sequence for RYR3 (NM_001036.2,12775-12793).
gcctgacccaacccaattt

SEQ ID NO: 152304 - DNA, 19 bp, Homo sapiens
  siRNA target sequence for RYR3 (NM_001036.2,12779-12797).
gacccaacccaatttggta

SEQ ID NO: 152305 - DNA, 19 bp, Homo sapiens
  siRNA target sequence for RYR3 (NM_001036.2,12846-12864).
gtatcaccactgaactagt

SEQ ID NO: 152306 - DNA, 19 bp, Homo sapiens
  siRNA target sequence for RYR3 (NM_001036.2,12852-12870).
ccactgaactagtacactt

SEQ ID NO: 152307 - DNA, 19 bp, Homo sapiens
  siRNA target sequence for RYR3 (NM_001036.2,12855-12873).
ctgaactagtacacttcat

SEQ ID NO: 152308 - DNA, 19 bp, Homo sapiens
  siRNA target sequence for RYR3 (NM_001036.2,12857-12875).
gaactagtacacttcataa

SEQ ID NO: 152309 - DNA, 19 bp, Homo sapiens
  siRNA target sequence for RYR3 (NM_001036.2,12970-12988).
gggtgacctctcagaaatt

SEQ ID NO: 152310 - DNA, 19 bp, Homo sapiens
  siRNA target sequence for RYR3 (NM_001036.2,12997-13015).
ggatgaaccccctacatta

SEQ ID NO: 152311 - DNA, 19 bp, Homo sapiens
  siRNA target sequence for RYR3 (NM_001036.2,13001-13019).
gaaccccctacattagaga

SEQ ID NO: 152312 - DNA, 19 bp, Homo sapiens
  siRNA target sequence for RYR3 (NM_001036.2,13044-13062).
ctcaggcagcagaaatgaa

SEQ ID NO: 152313 - DNA, 19 bp, Homo sapiens
  siRNA target sequence for RYR3 (NM_001036.2,13216-13234).
gaagccggaagctttcaca

SEQ ID NO: 152314 - DNA, 19 bp, Homo sapiens
  siRNA target sequence for RYR3 (NM_001036.2,13226-13244).
gctttcacagccaatttct

SEQ ID NO: 152315 - DNA, 19 bp, Homo sapiens
  siRNA target sequence for RYR3 (NM_001036.2,13312-13330).
gttccttgctctgtttgta

SEQ ID NO: 152316 - DNA, 19 bp, Homo sapiens
  siRNA target sequence for RYR3 (NM_001036.2,13366-13384).
ggtcactgaagaaccttta

SEQ ID NO: 152317 - DNA, 19 bp, Homo sapiens
  siRNA target sequence for RYR3 (NM_001036.2,13397-13415).
gaggatgttgcaaacctat

SEQ ID NO: 152318 - DNA, 19 bp, Homo sapiens
  siRNA target sequence for RYR3 (NM_001036.2,13403-13421).
gttgcaaacctatggaatt

SEQ ID NO: 152319 - DNA, 19 bp, Homo sapiens
  siRNA target sequence for RYR3 (NM_001036.2,13406-13424).
gcaaacctatggaattcct

SEQ ID NO: 152320 - DNA, 19 bp, Homo sapiens
  siRNA target sequence for RYR3 (NM_001036.2,13411-13429).
cctatggaattcctttaat

SEQ ID NO: 152321 - DNA, 19 bp, Homo sapiens
  siRNA target sequence for RYR3 (NM_001036.2,13439-13457).
gaggaagaagcgatggtat

SEQ ID NO: 152322 - DNA, 19 bp, Homo sapiens
  siRNA target sequence for RYR3 (NM_001036.2,13442-13460).
gaagaagcgatggtattct

SEQ ID NO: 152323 - DNA, 19 bp, Homo sapiens
  siRNA target sequence for RYR3 (NM_001036.2,13636-13654).
caccgaacagccatctgaa

SEQ ID NO: 152324 - DNA, 19 bp, Homo sapiens
  siRNA target sequence for RYR3 (NM_001036.2,13639-13657).
cgaacagccatctgaagat

SEQ ID NO: 152325 - DNA, 19 bp, Homo sapiens
  siRNA target sequence for RYR3 (NM_001036.2,13674-13692).
gggaccgcttggtgatcaa

SEQ ID NO: 152326 - DNA, 19 bp, Homo sapiens
  siRNA target sequence for RYR3 (NM_001036.2,13687-13705).
gatcaacacaccatctttt

SEQ ID NO: 152327 - DNA, 19 bp, Homo sapiens
  siRNA target sequence for RYR3 (NM_001036.2,13695-13713).
caccatcttttcctaataa

SEQ ID NO: 152328 - DNA, 19 bp, Homo sapiens
  siRNA target sequence for RYR3 (NM_001036.2,13790-13808).
cttctgggtttggacaaaa

SEQ ID NO: 152329 - DNA, 19 bp, Homo sapiens
  siRNA target sequence for RYR3 (NM_001036.2,13795-13813).
gggtttggacaaaaatgct

SEQ ID NO: 152330 - DNA, 19 bp, Homo sapiens
  siRNA target sequence for RYR3 (NM_001036.2,13869-13887).
ggctaagttccatagacat

SEQ ID NO: 152331 - DNA, 19 bp, Homo sapiens
  siRNA target sequence for RYR3 (NM_001036.2,13939-13957).
ctaccttgcctggtataca

SEQ ID NO: 152332 - DNA, 19 bp, Homo sapiens
  siRNA target sequence for RYR3 (NM_001036.2,14041-14059).
gaccattctgtcatctgta

SEQ ID NO: 152333 - DNA, 19 bp, Homo sapiens
  siRNA target sequence for RYR3 (NM_001036.2,14103-14121).
ccgtggtggtttatctcta

SEQ ID NO: 152334 - DNA, 19 bp, Homo sapiens
  siRNA target sequence for RYR3 (NM_001036.2,14104-14122).
cgtggtggtttatctctat

SEQ ID NO: 152335 - DNA, 19 bp, Homo sapiens
  siRNA target sequence for RYR3 (NM_001036.2,14107-14125).
ggtggtttatctctatact

SEQ ID NO: 152336 - DNA, 19 bp, Homo sapiens
  siRNA target sequence for RYR3 (NM_001036.2,14174-14192).
gatgacgagcccgatatga

SEQ ID NO: 152337 - DNA, 19 bp, Homo sapiens
  siRNA target sequence for RYR3 (NM_001036.2,14177-14195).
gacgagcccgatatgaagt

SEQ ID NO: 152338 - DNA, 19 bp, Homo sapiens
  siRNA target sequence for RYR3 (NM_001036.2,14252-14270).
ggtggcattggtgatgaaa

SEQ ID NO: 152339 - DNA, 19 bp, Homo sapiens
  siRNA target sequence for RYR3 (NM_001036.2,14253-14271).
gtggcattggtgatgaaat

SEQ ID NO: 152340 - DNA, 19 bp, Homo sapiens
  siRNA target sequence for RYR3 (NM_001036.2,14283-14301).
ctggtgatccttatgaaat

SEQ ID NO: 152341 - DNA, 19 bp, Homo sapiens
  siRNA target sequence for RYR3 (NM_001036.2,14285-14303).
ggtgatccttatgaaatgt

SEQ ID NO: 152342 - DNA, 19 bp, Homo sapiens
  siRNA target sequence for RYR3 (NM_001036.2,14297-14315).
gaaatgtatcgcattgtct

SEQ ID NO: 152343 - DNA, 19 bp, Homo sapiens
  siRNA target sequence for RYR3 (NM_001036.2,14410-14428).
ggaacaagtacgagaagat

SEQ ID NO: 152344 - DNA, 19 bp, Homo sapiens
  siRNA target sequence for RYR3 (NM_001036.2,14411-14429).
gaacaagtacgagaagata

SEQ ID NO: 152345 - DNA, 19 bp, Homo sapiens
  siRNA target sequence for RYR3 (NM_001036.2,14421-14439).
gagaagatatggagactaa

SEQ ID NO: 152346 - DNA, 19 bp, Homo sapiens
  siRNA target sequence for RYR3 (NM_001036.2,14476-14494).
cacaacccctcatggtttt

SEQ ID NO: 152347 - DNA, 19 bp, Homo sapiens
  siRNA target sequence for RYR3 (NM_001036.2,14478-14496).
caacccctcatggttttga

SEQ ID NO: 152348 - DNA, 19 bp, Homo sapiens
  siRNA target sequence for RYR3 (NM_001036.2,14484-14502).
ctcatggttttgaaacaca

SEQ ID NO: 152349 - DNA, 19 bp, Homo sapiens
  siRNA target sequence for RYR3 (NM_001036.2,14486-14504).
catggttttgaaacacata

SEQ ID NO: 152350 - DNA, 19 bp, Homo sapiens
  siRNA target sequence for RYR3 (NM_001036.2,14526-14544).
ccaactacttgttctttct

SEQ ID NO: 152351 - DNA, 19 bp, Homo sapiens
  siRNA target sequence for RYR3 (NM_001036.2,14639-14657).
gccggtgactgctttcgta

SEQ ID NO: 152352 - DNA, 19 bp, Homo sapiens
  siRNA target sequence for RYR3 (NM_001036.2,14640-14658).
ccggtgactgctttcgtaa

SEQ ID NO: 152353 - DNA, 19 bp, Homo sapiens
  siRNA target sequence for RYR3 (NM_001036.2,14641-14659).
cggtgactgctttcgtaaa

SEQ ID NO: 152354 - DNA, 19 bp, Homo sapiens
  siRNA target sequence for RYR3 (NM_001036.2,14643-14661).
gtgactgctttcgtaaaca

SEQ ID NO: 152355 - DNA, 19 bp, Homo sapiens
  siRNA target sequence for RYR3 (NM_001036.2,14645-14663).
gactgctttcgtaaacaat

SEQ ID NO: 152356 - DNA, 19 bp, Homo sapiens
  siRNA target sequence for RYR3 (NM_001036.2,14650-14668).
ctttcgtaaacaatatgaa

SEQ ID NO: 152357 - DNA, 19 bp, Homo sapiens
  siRNA target sequence for RYR3 (NM_001036.2,14655-14673).
gtaaacaatatgaagatca

SEQ ID NO: 152358 - DNA, 19 bp, Homo sapiens
  siRNA target sequence for S100A10 (NM_002966.1,259-277).
ctggctgtggacaaaataa

SEQ ID NO: 152359 - DNA, 19 bp, Homo sapiens
  siRNA target sequence for S100A10 (NM_002966.1,262-280).
gctgtggacaaaataatga

SEQ ID NO: 152360 - DNA, 19 bp, Homo sapiens
  siRNA target sequence for S100A10 (NM_002966.1,345-363).
cctcaccattgcatgcaat

SEQ ID NO: 152361 - DNA, 19 bp, Homo sapiens
  siRNA target sequence for S100A10 (NM_002966.1,359-377).
gcaatgactattttgtagt

SEQ ID NO: 152362 - DNA, 19 bp, Homo sapiens
  siRNA target sequence for S100A11 (NM_005620.1,194-212).
ctggaaaggatggttataa

SEQ ID NO: 152363 - DNA, 19 bp, Homo sapiens
  siRNA target sequence for S100A11 (NM_005620.1,332-350).
gtgatggtcagctagattt

SEQ ID NO: 152364 - DNA, 19 bp, Homo sapiens
  siRNA target sequence for S100A12 (NM_005621.1,87-105).
catctggagggaattgtca

SEQ ID NO: 152365 - DNA, 19 bp, Homo sapiens
  siRNA target sequence for S100A12 (NM_005621.1,90-108).
ctggagggaattgtcaata

SEQ ID NO: 152366 - DNA, 19 bp, Homo sapiens
  siRNA target sequence for S100A12 (NM_005621.1,93-111).
gagggaattgtcaatatct

SEQ ID NO: 152367 - DNA, 19 bp, Homo sapiens
  siRNA target sequence for S100A12 (NM_005621.1,129-147).
cggaaggggcattttgaca

SEQ ID NO: 152368 - DNA, 19 bp, Homo sapiens
  siRNA target sequence for S100A12 (NM_005621.1,212-230).
caaagataaagctgtcatt

SEQ ID NO: 152369 - DNA, 19 bp, Homo sapiens
  siRNA target sequence for S100A12 (NM_005621.1,242-260).
ccaaggcctggatgctaat

SEQ ID NO: 152370 - DNA, 19 bp, Homo sapiens
  siRNA target sequence for S100A12 (NM_005621.1,247-265).
gcctggatgctaatcaaga

SEQ ID NO: 152371 - DNA, 19 bp, Homo sapiens
  siRNA target sequence for S100A12 (NM_005621.1,275-293).
cgactttcaagaattcata

SEQ ID NO: 152372 - DNA, 19 bp, Homo sapiens
  siRNA target sequence for S100A14 (NM_020672.1,167-185).
gaccctcatcaagaacttt

SEQ ID NO: 152373 - DNA, 19 bp, Homo sapiens
  siRNA target sequence for S100A16 (NM_080388.1,305-323).
gaacctggatgccaatcat

SEQ ID NO: 152374 - DNA, 19 bp, Homo sapiens
  siRNA target sequence for S100A4 (NM_002961.2,154-172).
ctcaacaagtcagaactaa

SEQ ID NO: 152375 - DNA, 19 bp, Homo sapiens
  siRNA target sequence for S100A5 (NM_002962.1,319-337).
gtgaccacgtttcacaaat

SEQ ID NO: 152376 - DNA, 19 bp, Homo sapiens
  siRNA target sequence for S100A5 (NM_002962.1,431-449).
gcagcatcgatgacttgat

SEQ ID NO: 152377 - DNA, 19 bp, Homo sapiens
  siRNA target sequence for S100A5 (NM_002962.1,434-452).
gcatcgatgacttgatgaa

SEQ ID NO: 152378 - DNA, 19 bp, Homo sapiens
  siRNA target sequence for S100A5 (NM_002962.1,528-546).
ctacaacgacttctttcta

SEQ ID NO: 152379 - DNA, 19 bp, Homo sapiens
  siRNA target sequence for S100A8 (NM_002964.3,174-192).
ccgagtgtcctcagtatat

SEQ ID NO: 152380 - DNA, 19 bp, Homo sapiens
  siRNA target sequence for S100A8 (NM_002964.3,176-194).
gagtgtcctcagtatatca

SEQ ID NO: 152381 - DNA, 19 bp, Homo sapiens
  siRNA target sequence for S100A8 (NM_002964.3,209-227).
gacgtctggttcaaagagt

SEQ ID NO: 152382 - DNA, 19 bp, Homo sapiens
  siRNA target sequence for S100A8 (NM_002964.3,216-234).
ggttcaaagagttggatat

SEQ ID NO: 152383 - DNA, 19 bp, Homo sapiens
  siRNA target sequence for S100A8 (NM_002964.3,240-258).
ctgatggtgcagttaactt

SEQ ID NO: 152384 - DNA, 19 bp, Homo sapiens
  siRNA target sequence for S100A9 (NM_002965.2,63-81).
gcagctggaacgcaacata

SEQ ID NO: 152385 - DNA, 19 bp, Homo sapiens
  siRNA target sequence for S100Z (NM_130772.1,359-377).
gacaccatgattagaatct

SEQ ID NO: 152386 - DNA, 19 bp, Homo sapiens
  siRNA target sequence for S100Z (NM_130772.1,420-438).
gcaagggggaactgaaact

SEQ ID NO: 152387 - DNA, 19 bp, Homo sapiens
  siRNA target sequence for S100Z (NM_130772.1,466-484).
cctctcgtgccaaaaggaa

SEQ ID NO: 152388 - DNA, 19 bp, Homo sapiens
  siRNA target sequence for S100Z (NM_130772.1,482-500).
gaaacccagttggttgata

SEQ ID NO: 152389 - DNA, 19 bp, Homo sapiens
  siRNA target sequence for S100Z (NM_130772.1,486-504).
cccagttggttgataagat

SEQ ID NO: 152390 - DNA, 19 bp, Homo sapiens
  siRNA target sequence for S100Z (NM_130772.1,487-505).
ccagttggttgataagata

SEQ ID NO: 152391 - DNA, 19 bp, Homo sapiens
  siRNA target sequence for S100Z (NM_130772.1,532-550).
caacgaagtggattttaat

SEQ ID NO: 152392 - DNA, 19 bp, Homo sapiens
  siRNA target sequence for S100Z (NM_130772.1,535-553).
cgaagtggattttaatgaa

SEQ ID NO: 152393 - DNA, 19 bp, Homo sapiens
  siRNA target sequence for S100Z (NM_130772.1,573-591).
ctctgacagttgcttgtaa

SEQ ID NO: 152394 - DNA, 19 bp, Homo sapiens
  siRNA target sequence for S100Z (NM_130772.1,593-611).
gattactttgtagaacaat

SEQ ID NO: 152395 - DNA, 19 bp, Homo sapiens
  siRNA target sequence for SCG2 (NM_003469.2,128-146).
ctgtctcttatccctttaa

SEQ ID NO: 152396 - DNA, 19 bp, Homo sapiens
  siRNA target sequence for SCG2 (NM_003469.2,162-180).
gggctgaagcagcttcatt

SEQ ID NO: 152397 - DNA, 19 bp, Homo sapiens
  siRNA target sequence for SCG2 (NM_003469.2,261-279).
gggctttggagtacataga

SEQ ID NO: 152398 - DNA, 19 bp, Homo sapiens
  siRNA target sequence for SCG2 (NM_003469.2,624-642).
cctttaaacgcacaaatga

SEQ ID NO: 152399 - DNA, 19 bp, Homo sapiens
  siRNA target sequence for SCG2 (NM_003469.2,666-684).
ctcaaagccttgctacatt

SEQ ID NO: 152400 - DNA, 19 bp, Homo sapiens
  siRNA target sequence for SCG2 (NM_003469.2,752-770).
gaggagcaaaaactttata

SEQ ID NO: 152401 - DNA, 19 bp, Homo sapiens
  siRNA target sequence for SCG2 (NM_003469.2,790-808).
ctacaaggctaataacatt

SEQ ID NO: 152402 - DNA, 19 bp, Homo sapiens
  siRNA target sequence for SCG2 (NM_003469.2,1004-1022).
gatgatgtctccaaagtaa

SEQ ID NO: 152403 - DNA, 19 bp, Homo sapiens
  siRNA target sequence for SCG2 (NM_003469.2,1014-1032).
ccaaagtaattgcctattt

SEQ ID NO: 152404 - DNA, 19 bp, Homo sapiens
  siRNA target sequence for SCG2 (NM_003469.2,1168-1186).
gatacccccagaagactta

SEQ ID NO: 152405 - DNA, 19 bp, Homo sapiens
  siRNA target sequence for SCG2 (NM_003469.2,1176-1194).
cagaagacttaattgagat

SEQ ID NO: 152406 - DNA, 19 bp, Homo sapiens
  siRNA target sequence for SCG2 (NM_003469.2,1270-1288).
catctcagaggctgactta

SEQ ID NO: 152407 - DNA, 19 bp, Homo sapiens
  siRNA target sequence for SCG2 (NM_003469.2,1295-1313).
ccagacctgttccaaaata

SEQ ID NO: 152408 - DNA, 19 bp, Homo sapiens
  siRNA target sequence for SCG2 (NM_003469.2,1424-1442).
gcagcaaatcagaaaacgt

SEQ ID NO: 152409 - DNA, 19 bp, Homo sapiens
  siRNA target sequence for SCG2 (NM_003469.2,1443-1461).
cgtattttcccaatccata

SEQ ID NO: 152410 - DNA, 19 bp, Homo sapiens
  siRNA target sequence for SCG2 (NM_003469.2,1444-1462).
gtattttcccaatccatat

SEQ ID NO: 152411 - DNA, 19 bp, Homo sapiens
  siRNA target sequence for SCG2 (NM_003469.2,1458-1476).
catataaccaggagaaagt

SEQ ID NO: 152412 - DNA, 19 bp, Homo sapiens
  siRNA target sequence for SCG2 (NM_003469.2,1480-1498).
gccaaggctcccttatggt

SEQ ID NO: 152413 - DNA, 19 bp, Homo sapiens
  siRNA target sequence for SCG2 (NM_003469.2,1582-1600).
gaacgacaaggatcaagaa

SEQ ID NO: 152414 - DNA, 19 bp, Homo sapiens
  siRNA target sequence for SCG2 (NM_003469.2,1585-1603).
cgacaaggatcaagaatta

SEQ ID NO: 152415 - DNA, 19 bp, Homo sapiens
  siRNA target sequence for SCG2 (NM_003469.2,1615-1633).
ggccaggatgctagttaaa

SEQ ID NO: 152416 - DNA, 19 bp, Homo sapiens
  siRNA target sequence for SCG2 (NM_003469.2,1616-1634).
gccaggatgctagttaaat

SEQ ID NO: 152417 - DNA, 19 bp, Homo sapiens
  siRNA target sequence for SCG2 (NM_003469.2,1617-1635).
ccaggatgctagttaaata

SEQ ID NO: 152418 - DNA, 19 bp, Homo sapiens
  siRNA target sequence for SCG2 (NM_003469.2,1637-1655).
cctgagatcattaattcaa

SEQ ID NO: 152419 - DNA, 19 bp, Homo sapiens
  siRNA target sequence for SCG2 (NM_003469.2,1638-1656).
ctgagatcattaattcaaa

SEQ ID NO: 152420 - DNA, 19 bp, Homo sapiens
  siRNA target sequence for SCG2 (NM_003469.2,1843-1861).
ctgggatgaagatctgtta

SEQ ID NO: 152421 - DNA, 19 bp, Homo sapiens
  siRNA target sequence for SCG2 (NM_003469.2,1903-1921).
gggaagggagcatattgct

SEQ ID NO: 152422 - DNA, 19 bp, Homo sapiens
  siRNA target sequence for SCGN (NM_006998.2,228-246).
ggtctggcagcgctttgat

SEQ ID NO: 152423 - DNA, 19 bp, Homo sapiens
  siRNA target sequence for SCGN (NM_006998.2,249-267).
ggatgaaaaaggttacata

SEQ ID NO: 152424 - DNA, 19 bp, Homo sapiens
  siRNA target sequence for SCGN (NM_006998.2,287-305).
ctttctttctccacatgtt

SEQ ID NO: 152425 - DNA, 19 bp, Homo sapiens
  siRNA target sequence for SCGN (NM_006998.2,306-324).
gatgaaactgggtactgat

SEQ ID NO: 152426 - DNA, 19 bp, Homo sapiens
  siRNA target sequence for SCGN (NM_006998.2,325-343).
gacacggtcatgaaagcaa

SEQ ID NO: 152427 - DNA, 19 bp, Homo sapiens
  siRNA target sequence for SCGN (NM_006998.2,329-347).
cggtcatgaaagcaaattt

SEQ ID NO: 152428 - DNA, 19 bp, Homo sapiens
  siRNA target sequence for SCGN (NM_006998.2,398-416).
gtcgcattcggatgaaaga

SEQ ID NO: 152429 - DNA, 19 bp, Homo sapiens
  siRNA target sequence for SCGN (NM_006998.2,488-506).
gcagcgtggagtttatgca

SEQ ID NO: 152430 - DNA, 19 bp, Homo sapiens
  siRNA target sequence for SCGN (NM_006998.2,504-522).
gcagatttggcgcaaatat

SEQ ID NO: 152431 - DNA, 19 bp, Homo sapiens
  siRNA target sequence for SCGN (NM_006998.2,531-549).
cagcagtggctttatatca

SEQ ID NO: 152432 - DNA, 19 bp, Homo sapiens
  siRNA target sequence for SCGN (NM_006998.2,602-620).
ccatttctgaggctaaact

SEQ ID NO: 152433 - DNA, 19 bp, Homo sapiens
  siRNA target sequence for SCGN (NM_006998.2,634-652).
ggcaccatgatgaagattt

SEQ ID NO: 152434 - DNA, 19 bp, Homo sapiens
  siRNA target sequence for SCGN (NM_006998.2,667-685).
gatggtcggttggatctaa

SEQ ID NO: 152435 - DNA, 19 bp, Homo sapiens
  siRNA target sequence for SCGN (NM_006998.2,671-689).
gtcggttggatctaaatga

SEQ ID NO: 152436 - DNA, 19 bp, Homo sapiens
  siRNA target sequence for SCGN (NM_006998.2,679-697).
gatctaaatgacttagcaa

SEQ ID NO: 152437 - DNA, 19 bp, Homo sapiens
  siRNA target sequence for SCGN (NM_006998.2,703-721).
ctggctcttcaggaaaact

SEQ ID NO: 152438 - DNA, 19 bp, Homo sapiens
  siRNA target sequence for SCGN (NM_006998.2,745-763).
gcttgttctactgaagaaa

SEQ ID NO: 152439 - DNA, 19 bp, Homo sapiens
  siRNA target sequence for SCGN (NM_006998.2,780-798).
gaaaatctttgcctactat

SEQ ID NO: 152440 - DNA, 19 bp, Homo sapiens
  siRNA target sequence for SCGN (NM_006998.2,832-850).
gaagtggatgggtttgtca

SEQ ID NO: 152441 - DNA, 19 bp, Homo sapiens
  siRNA target sequence for SCGN (NM_006998.2,884-902).
gcggggtggaccttgataa

SEQ ID NO: 152442 - DNA, 19 bp, Homo sapiens
  siRNA target sequence for SCGN (NM_006998.2,886-904).
ggggtggaccttgataagt

SEQ ID NO: 152443 - DNA, 19 bp, Homo sapiens
  siRNA target sequence for SCGN (NM_006998.2,887-905).
gggtggaccttgataagtt

SEQ ID NO: 152444 - DNA, 19 bp, Homo sapiens
  siRNA target sequence for SCGN (NM_006998.2,923-941).
gtcactgcgacgtgaacaa

SEQ ID NO: 152445 - DNA, 19 bp, Homo sapiens
  siRNA target sequence for SCGN (NM_006998.2,977-995).
gtcttgggctgaaaatcaa

SEQ ID NO: 152446 - DNA, 19 bp, Homo sapiens
  siRNA target sequence for SCN10A (NM_006514.1,16-34).
ggatccctcgaaactaaca

SEQ ID NO: 152447 - DNA, 19 bp, Homo sapiens
  siRNA target sequence for SCN10A (NM_006514.1,20-38).
ccctcgaaactaacaactt

SEQ ID NO: 152448 - DNA, 19 bp, Homo sapiens
  siRNA target sequence for SCN10A (NM_006514.1,241-259).
gatctagatccgttctaca

SEQ ID NO: 152449 - DNA, 19 bp, Homo sapiens
  siRNA target sequence for SCN10A (NM_006514.1,260-278).
gcacacaccggacatttat

SEQ ID NO: 152450 - DNA, 19 bp, Homo sapiens
  siRNA target sequence for SCN10A (NM_006514.1,263-281).
cacaccggacatttatggt

SEQ ID NO: 152451 - DNA, 19 bp, Homo sapiens
  siRNA target sequence for SCN10A (NM_006514.1,357-375).
cagaagaacggccatcaaa

SEQ ID NO: 152452 - DNA, 19 bp, Homo sapiens
  siRNA target sequence for SCN10A (NM_006514.1,382-400).
gtccactcgtggttcagtt

SEQ ID NO: 152453 - DNA, 19 bp, Homo sapiens
  siRNA target sequence for SCN10A (NM_006514.1,384-402).
ccactcgtggttcagttta

SEQ ID NO: 152454 - DNA, 19 bp, Homo sapiens
  siRNA target sequence for SCN10A (NM_006514.1,385-403).
cactcgtggttcagtttat

SEQ ID NO: 152455 - DNA, 19 bp, Homo sapiens
  siRNA target sequence for SCN10A (NM_006514.1,389-407).
cgtggttcagtttatttat

SEQ ID NO: 152456 - DNA, 19 bp, Homo sapiens
  siRNA target sequence for SCN10A (NM_006514.1,410-428).
cggtcactattttggttaa

SEQ ID NO: 152457 - DNA, 19 bp, Homo sapiens
  siRNA target sequence for SCN10A (NM_006514.1,411-429).
ggtcactattttggttaat

SEQ ID NO: 152458 - DNA, 19 bp, Homo sapiens
  siRNA target sequence for SCN10A (NM_006514.1,414-432).
cactattttggttaattgt

SEQ ID NO: 152459 - DNA, 19 bp, Homo sapiens
  siRNA target sequence for SCN10A (NM_006514.1,475-493).
gtcttcactgtcatttaca

SEQ ID NO: 152460 - DNA, 19 bp, Homo sapiens
  siRNA target sequence for SCN10A (NM_006514.1,513-531).
gatactggcaagaggattt

SEQ ID NO: 152461 - DNA, 19 bp, Homo sapiens
  siRNA target sequence for SCN10A (NM_006514.1,521-539).
caagaggattttgtctaaa

SEQ ID NO: 152462 - DNA, 19 bp, Homo sapiens
  siRNA target sequence for SCN10A (NM_006514.1,524-542).
gaggattttgtctaaatga

SEQ ID NO: 152463 - DNA, 19 bp, Homo sapiens
  siRNA target sequence for SCN10A (NM_006514.1,526-544).
ggattttgtctaaatgagt

SEQ ID NO: 152464 - DNA, 19 bp, Homo sapiens
  siRNA target sequence for SCN10A (NM_006514.1,527-545).
gattttgtctaaatgagtt

SEQ ID NO: 152465 - DNA, 19 bp, Homo sapiens
  siRNA target sequence for SCN10A (NM_006514.1,574-592).
ctggattttagcgtcatta

SEQ ID NO: 152466 - DNA, 19 bp, Homo sapiens
  siRNA target sequence for SCN10A (NM_006514.1,642-660).
gcggacattcagagttctt

SEQ ID NO: 152467 - DNA, 19 bp, Homo sapiens
  siRNA target sequence for SCN10A (NM_006514.1,643-661).
cggacattcagagttctta

SEQ ID NO: 152468 - DNA, 19 bp, Homo sapiens
  siRNA target sequence for SCN10A (NM_006514.1,651-669).
cagagttcttagagcatta

SEQ ID NO: 152469 - DNA, 19 bp, Homo sapiens
  siRNA target sequence for SCN10A (NM_006514.1,834-852).
gaatgacatggctgtcaat

SEQ ID NO: 152470 - DNA, 19 bp, Homo sapiens
  siRNA target sequence for SCN10A (NM_006514.1,986-1004).
ctgacaacccggattttaa

SEQ ID NO: 152471 - DNA, 19 bp, Homo sapiens
  siRNA target sequence for SCN10A (NM_006514.1,988-1006).
gacaacccggattttaact

SEQ ID NO: 152472 - DNA, 19 bp, Homo sapiens
  siRNA target sequence for SCN10A (NM_006514.1,1217-1235).
caaccactgatgaaattga

SEQ ID NO: 152473 - DNA, 19 bp, Homo sapiens
  siRNA target sequence for SCN10A (NM_006514.1,1297-1315).
gcagcactagggattgaca

SEQ ID NO: 152474 - DNA, 19 bp, Homo sapiens
  siRNA target sequence for SCN10A (NM_006514.1,1324-1342).
ctccactcccacaatggat

SEQ ID NO: 152475 - DNA, 19 bp, Homo sapiens
  siRNA target sequence for SCN10A (NM_006514.1,1332-1350).
ccacaatggatcaccttta

SEQ ID NO: 152476 - DNA, 19 bp, Homo sapiens
  siRNA target sequence for SCN10A (NM_006514.1,1333-1351).
cacaatggatcacctttaa

SEQ ID NO: 152477 - DNA, 19 bp, Homo sapiens
  siRNA target sequence for SCN10A (NM_006514.1,1367-1385).
gtgagagaaggcatagaat

SEQ ID NO: 152478 - DNA, 19 bp, Homo sapiens
  siRNA target sequence for SCN10A (NM_006514.1,1427-1445).
caccccgctctgatcctta

SEQ ID NO: 152479 - DNA, 19 bp, Homo sapiens
  siRNA target sequence for SCN10A (NM_006514.1,1501-1519).
catggcagtgtgttccatt

SEQ ID NO: 152480 - DNA, 19 bp, Homo sapiens
  siRNA target sequence for SCN10A (NM_006514.1,1523-1541).
ggtcccctggccgagatat

SEQ ID NO: 152481 - DNA, 19 bp, Homo sapiens
  siRNA target sequence for SCN10A (NM_006514.1,1527-1545).
ccctggccgagatatctca

SEQ ID NO: 152482 - DNA, 19 bp, Homo sapiens
  siRNA target sequence for SCN10A (NM_006514.1,1746-1764).
cgatgtctcggcattcgat

SEQ ID NO: 152483 - DNA, 19 bp, Homo sapiens
  siRNA target sequence for SCN10A (NM_006514.1,1788-1806).
gtcagcagaatacttagat

SEQ ID NO: 152484 - DNA, 19 bp, Homo sapiens
  siRNA target sequence for SCN10A (NM_006514.1,1829-1847).
caatgagtgttgtcagtat

SEQ ID NO: 152485 - DNA, 19 bp, Homo sapiens
  siRNA target sequence for SCN10A (NM_006514.1,1833-1851).
gagtgttgtcagtatcata

SEQ ID NO: 152486 - DNA, 19 bp, Homo sapiens
  siRNA target sequence for SCN10A (NM_006514.1,1837-1855).
gttgtcagtatcataacct

SEQ ID NO: 152487 - DNA, 19 bp, Homo sapiens
  siRNA target sequence for SCN10A (NM_006514.1,1952-1970).
gggtgaagctcaagacaat

SEQ ID NO: 152488 - DNA, 19 bp, Homo sapiens
  siRNA target sequence for SCN10A (NM_006514.1,1953-1971).
ggtgaagctcaagacaatt

SEQ ID NO: 152489 - DNA, 19 bp, Homo sapiens
  siRNA target sequence for SCN10A (NM_006514.1,2026-2044).
gtggtgaacaccatcttca

SEQ ID NO: 152490 - DNA, 19 bp, Homo sapiens
  siRNA target sequence for SCN10A (NM_006514.1,2126-2144).
ctgctgaaatggtcttcaa

SEQ ID NO: 152491 - DNA, 19 bp, Homo sapiens
  siRNA target sequence for SCN10A (NM_006514.1,2153-2171).
ccttcgacccatactatta

SEQ ID NO: 152492 - DNA, 19 bp, Homo sapiens
  siRNA target sequence for SCN10A (NM_006514.1,2154-2172).
cttcgacccatactattat

SEQ ID NO: 152493 - DNA, 19 bp, Homo sapiens
  siRNA target sequence for SCN10A (NM_006514.1,2176-2194).
cagaagaagtggaatatct

SEQ ID NO: 152494 - DNA, 19 bp, Homo sapiens
  siRNA target sequence for SCN10A (NM_006514.1,2275-2293).
cgcttgctgcgcgtattca

SEQ ID NO: 152495 - DNA, 19 bp, Homo sapiens
  siRNA target sequence for SCN10A (NM_006514.1,2276-2294).
gcttgctgcgcgtattcaa

SEQ ID NO: 152496 - DNA, 19 bp, Homo sapiens
  siRNA target sequence for SCN10A (NM_006514.1,2419-2437).
cagctcctaggggaaaact

SEQ ID NO: 152497 - DNA, 19 bp, Homo sapiens
  siRNA target sequence for SCN10A (NM_006514.1,2429-2447).
gggaaaactaccgtaacaa

SEQ ID NO: 152498 - DNA, 19 bp, Homo sapiens
  siRNA target sequence for SCN10A (NM_006514.1,2439-2457).
ccgtaacaaccgaaaaaat

SEQ ID NO: 152499 - DNA, 19 bp, Homo sapiens
  siRNA target sequence for SCN10A (NM_006514.1,2440-2458).
cgtaacaaccgaaaaaata

SEQ ID NO: 152500 - DNA, 19 bp, Homo sapiens
  siRNA target sequence for SCN10A (NM_006514.1,2660-2678).
ccctgctattgaactcttt

SEQ ID NO: 152501 - DNA, 19 bp, Homo sapiens
  siRNA target sequence for SCN10A (NM_006514.1,2664-2682).
gctattgaactctttcagt

SEQ ID NO: 152502 - DNA, 19 bp, Homo sapiens
  siRNA target sequence for SCN10A (NM_006514.1,2757-2775).
ctttggccatcgtaccaaa

SEQ ID NO: 152503 - DNA, 19 bp, Homo sapiens
  siRNA target sequence for SCN10A (NM_006514.1,2779-2797).
gctctttgcagcttcttca

SEQ ID NO: 152504 - DNA, 19 bp, Homo sapiens
  siRNA target sequence for SCN10A (NM_006514.1,3142-3160).
ccaggcactggaacatctt

SEQ ID NO: 152505 - DNA, 19 bp, Homo sapiens
  siRNA target sequence for SCN10A (NM_006514.1,3183-3201).
gggtgagacgtggaaagat

SEQ ID NO: 152506 - DNA, 19 bp, Homo sapiens
  siRNA target sequence for SCN10A (NM_006514.1,3185-3203).
gtgagacgtggaaagatga

SEQ ID NO: 152507 - DNA, 19 bp, Homo sapiens
  siRNA target sequence for SCN10A (NM_006514.1,3342-3360).
cttcacagaaggatgcatt

SEQ ID NO: 152508 - DNA, 19 bp, Homo sapiens
  siRNA target sequence for SCN10A (NM_006514.1,3568-3586).
gacagggtcttcaccttta

SEQ ID NO: 152509 - DNA, 19 bp, Homo sapiens
  siRNA target sequence for SCN10A (NM_006514.1,3669-3687).
cctcattgtgaatatctca

SEQ ID NO: 152510 - DNA, 19 bp, Homo sapiens
  siRNA target sequence for SCN10A (NM_006514.1,3676-3694).
gtgaatatctcactgataa

SEQ ID NO: 152511 - DNA, 19 bp, Homo sapiens
  siRNA target sequence for SCN10A (NM_006514.1,3678-3696).
gaatatctcactgataagt

SEQ ID NO: 152512 - DNA, 19 bp, Homo sapiens
  siRNA target sequence for SCN10A (NM_006514.1,3695-3713).
gtctcacagcgaagattct

SEQ ID NO: 152513 - DNA, 19 bp, Homo sapiens
  siRNA target sequence for SCN10A (NM_006514.1,3703-3721).
gcgaagattctggaatatt

SEQ ID NO: 152514 - DNA, 19 bp, Homo sapiens
  siRNA target sequence for SCN10A (NM_006514.1,3774-3792).
gcgggctctttctcgattt

SEQ ID NO: 152515 - DNA, 19 bp, Homo sapiens
  siRNA target sequence for SCN10A (NM_006514.1,3776-3794).
gggctctttctcgatttga

SEQ ID NO: 152516 - DNA, 19 bp, Homo sapiens
  siRNA target sequence for SCN10A (NM_006514.1,3936-3954).
ctataccgatggagagttt

SEQ ID NO: 152517 - DNA, 19 bp, Homo sapiens
  siRNA target sequence for SCN10A (NM_006514.1,3961-3979).
gtacctttgtcgattgtga

SEQ ID NO: 152518 - DNA, 19 bp, Homo sapiens
  siRNA target sequence for SCN10A (NM_006514.1,3984-4002).
caagtctgactgcaagatt

SEQ ID NO: 152519 - DNA, 19 bp, Homo sapiens
  siRNA target sequence for SCN10A (NM_006514.1,4224-4242).
cacactgaatctctttgtt

SEQ ID NO: 152520 - DNA, 19 bp, Homo sapiens
  siRNA target sequence for SCN10A (NM_006514.1,4234-4252).
ctctttgttggggtcataa

SEQ ID NO: 152521 - DNA, 19 bp, Homo sapiens
  siRNA target sequence for SCN10A (NM_006514.1,4236-4254).
ctttgttggggtcataatt

SEQ ID NO: 152522 - DNA, 19 bp, Homo sapiens
  siRNA target sequence for SCN10A (NM_006514.1,4240-4258).
gttggggtcataattgaca

SEQ ID NO: 152523 - DNA, 19 bp, Homo sapiens
  siRNA target sequence for SCN10A (NM_006514.1,4514-4532).
cgaaaattctgggcaaaat

SEQ ID NO: 152524 - DNA, 19 bp, Homo sapiens
  siRNA target sequence for SCN10A (NM_006514.1,4559-4577).
caggcgaatgtgtcatgaa

SEQ ID NO: 152525 - DNA, 19 bp, Homo sapiens
  siRNA target sequence for SCN10A (NM_006514.1,4649-4667).
ccattgcgagcctgatttt

SEQ ID NO: 152526 - DNA, 19 bp, Homo sapiens
  siRNA target sequence for SCN10A (NM_006514.1,4830-4848).
cgggctgttgctattcctt

SEQ ID NO: 152527 - DNA, 19 bp, Homo sapiens
  siRNA target sequence for SCN10A (NM_006514.1,5263-5281).
gccactcagtttattacct

SEQ ID NO: 152528 - DNA, 19 bp, Homo sapiens
  siRNA target sequence for SCN10A (NM_006514.1,5265-5283).
cactcagtttattaccttt

SEQ ID NO: 152529 - DNA, 19 bp, Homo sapiens
  siRNA target sequence for SCN10A (NM_006514.1,5332-5350).
ccaaaacccaatcgaaata

SEQ ID NO: 152530 - DNA, 19 bp, Homo sapiens
  siRNA target sequence for SCN10A (NM_006514.1,5333-5351).
caaaacccaatcgaaatat

SEQ ID NO: 152531 - DNA, 19 bp, Homo sapiens
  siRNA target sequence for SCN10A (NM_006514.1,5338-5356).
cccaatcgaaatatactga

SEQ ID NO: 152532 - DNA, 19 bp, Homo sapiens
  siRNA target sequence for SCN10A (NM_006514.1,5339-5357).
ccaatcgaaatatactgat

SEQ ID NO: 152533 - DNA, 19 bp, Homo sapiens
  siRNA target sequence for SCN10A (NM_006514.1,5444-5462).
ccggggagttggattctct

SEQ ID NO: 152534 - DNA, 19 bp, Homo sapiens
  siRNA target sequence for SCN10A (NM_006514.1,5606-5624).
gctccatggcactctctaa

SEQ ID NO: 152535 - DNA, 19 bp, Homo sapiens
  siRNA target sequence for SCN10A (NM_006514.1,5777-5795).
gaggccttagtgatagagt

SEQ ID NO: 152536 - DNA, 19 bp, Homo sapiens
  siRNA target sequence for SCN10A (NM_006514.1,5802-5820).
gaggacatctagctcaata

SEQ ID NO: 152537 - DNA, 19 bp, Homo sapiens
  siRNA target sequence for SCN10A (NM_006514.1,5804-5822).
ggacatctagctcaataca

SEQ ID NO: 152538 - DNA, 19 bp, Homo sapiens
  siRNA target sequence for SCN10A (NM_006514.1,5805-5823).
gacatctagctcaatacaa

SEQ ID NO: 152539 - DNA, 19 bp, Homo sapiens
  siRNA target sequence for SCN10A (NM_006514.1,5810-5828).
ctagctcaatacaaaatga

SEQ ID NO: 152540 - DNA, 19 bp, Homo sapiens
  siRNA target sequence for SCN1A (NM_006920.2,342-360).
caatcctcttaggaaaata

SEQ ID NO: 152541 - DNA, 19 bp, Homo sapiens
  siRNA target sequence for SCN1A (NM_006920.2,477-495).
caccttcacaggaatatat

SEQ ID NO: 152542 - DNA, 19 bp, Homo sapiens
  siRNA target sequence for SCN1A (NM_006920.2,534-552).
ctgtttagaagattttact

SEQ ID NO: 152543 - DNA, 19 bp, Homo sapiens
  siRNA target sequence for SCN1A (NM_006920.2,732-750).
gaagaagctctcagatgta

SEQ ID NO: 152544 - DNA, 19 bp, Homo sapiens
  siRNA target sequence for SCN1A (NM_006920.2,853-871).
gcttccttggaggaacata

SEQ ID NO: 152545 - DNA, 19 bp, Homo sapiens
  siRNA target sequence for SCN1A (NM_006920.2,857-875).
ccttggaggaacatagtat

SEQ ID NO: 152546 - DNA, 19 bp, Homo sapiens
  siRNA target sequence for SCN1A (NM_006920.2,931-949).
gagtttgactggaagtcat

SEQ ID NO: 152547 - DNA, 19 bp, Homo sapiens
  siRNA target sequence for SCN1A (NM_006920.2,939-957).
ctggaagtcatatattcaa

SEQ ID NO: 152548 - DNA, 19 bp, Homo sapiens
  siRNA target sequence for SCN1A (NM_006920.2,945-963).
gtcatatattcaagattca

SEQ ID NO: 152549 - DNA, 19 bp, Homo sapiens
  siRNA target sequence for SCN1A (NM_006920.2,997-1015).
gcactactatgtggaaata

SEQ ID NO: 152550 - DNA, 19 bp, Homo sapiens
  siRNA target sequence for SCN1A (NM_006920.2,1030-1048).
caatgtccagagggatata

SEQ ID NO: 152551 - DNA, 19 bp, Homo sapiens
  siRNA target sequence for SCN1A (NM_006920.2,1122-1140).
cttgtttcgactaatgact

SEQ ID NO: 152552 - DNA, 19 bp, Homo sapiens
  siRNA target sequence for SCN1A (NM_006920.2,1389-1407).
ggcaactgcctcagaacat

SEQ ID NO: 152553 - DNA, 19 bp, Homo sapiens
  siRNA target sequence for SCN1A (NM_006920.2,1551-1569).
ggatgaattccaaaaatct

SEQ ID NO: 152554 - DNA, 19 bp, Homo sapiens
  siRNA target sequence for SCN1A (NM_006920.2,1615-1633).
gaagggaaccgattgacat

SEQ ID NO: 152555 - DNA, 19 bp, Homo sapiens
  siRNA target sequence for SCN1A (NM_006920.2,1624-1642).
cgattgacatatgaaaaga

SEQ ID NO: 152556 - DNA, 19 bp, Homo sapiens
  siRNA target sequence for SCN1A (NM_006920.2,2010-2028).
gggaacaaccactgaaact

SEQ ID NO: 152557 - DNA, 19 bp, Homo sapiens
  siRNA target sequence for SCN1A (NM_006920.2,2061-2079).
cgtttccatggactttcta

SEQ ID NO: 152558 - DNA, 19 bp, Homo sapiens
  siRNA target sequence for SCN1A (NM_006920.2,2118-2136).
cagcattctaacaaataca

SEQ ID NO: 152559 - DNA, 19 bp, Homo sapiens
  siRNA target sequence for SCN1A (NM_006920.2,2120-2138).
gcattctaacaaatacagt

SEQ ID NO: 152560 - DNA, 19 bp, Homo sapiens
  siRNA target sequence for SCN1A (NM_006920.2,2181-2199).
gtataaattttccaacata

SEQ ID NO: 152561 - DNA, 19 bp, Homo sapiens
  siRNA target sequence for SCN1A (NM_006920.2,2221-2239).
ccatattggttaaaagtga

SEQ ID NO: 152562 - DNA, 19 bp, Homo sapiens
  siRNA target sequence for SCN1A (NM_006920.2,2345-2363).
cggaccatttcaataatgt

SEQ ID NO: 152563 - DNA, 19 bp, Homo sapiens
  siRNA target sequence for SCN1A (NM_006920.2,2355-2373).
caataatgtgcttacagta

SEQ ID NO: 152564 - DNA, 19 bp, Homo sapiens
  siRNA target sequence for SCN1A (NM_006920.2,2489-2507).
cgcttagcctggtagaact

SEQ ID NO: 152565 - DNA, 19 bp, Homo sapiens
  siRNA target sequence for SCN1A (NM_006920.2,2490-2508).
gcttagcctggtagaactt

SEQ ID NO: 152566 - DNA, 19 bp, Homo sapiens
  siRNA target sequence for SCN1A (NM_006920.2,2517-2535).
caatgtggaaggattatct

SEQ ID NO: 152567 - DNA, 19 bp, Homo sapiens
  siRNA target sequence for SCN1A (NM_006920.2,2536-2554).
gttctccgttcatttcgat

SEQ ID NO: 152568 - DNA, 19 bp, Homo sapiens
  siRNA target sequence for SCN1A (NM_006920.2,2937-2955).
gcttctgagctcatttagt

SEQ ID NO: 152569 - DNA, 19 bp, Homo sapiens
  siRNA target sequence for SCN1A (NM_006920.2,3024-3042).
gcacaaaggagtagcttat

SEQ ID NO: 152570 - DNA, 19 bp, Homo sapiens
  siRNA target sequence for SCN1A (NM_006920.2,3031-3049).
ggagtagcttatgtgaaaa

SEQ ID NO: 152571 - DNA, 19 bp, Homo sapiens
  siRNA target sequence for SCN1A (NM_006920.2,3115-3133).
ccacttgatgatctaaaca

SEQ ID NO: 152572 - DNA, 19 bp, Homo sapiens
  siRNA target sequence for SCN1A (NM_006920.2,3116-3134).
cacttgatgatctaaacaa

SEQ ID NO: 152573 - DNA, 19 bp, Homo sapiens
  siRNA target sequence for SCN1A (NM_006920.2,3118-3136).
cttgatgatctaaacaaca

SEQ ID NO: 152574 - DNA, 19 bp, Homo sapiens
  siRNA target sequence for SCN1A (NM_006920.2,3121-3139).
gatgatctaaacaacaaga

SEQ ID NO: 152575 - DNA, 19 bp, Homo sapiens
  siRNA target sequence for SCN1A (NM_006920.2,3351-3369).
cacggaagactttagtagt

SEQ ID NO: 152576 - DNA, 19 bp, Homo sapiens
  siRNA target sequence for SCN1A (NM_006920.2,3374-3392).
cggatctggaagaaagcaa

SEQ ID NO: 152577 - DNA, 19 bp, Homo sapiens
  siRNA target sequence for SCN1A (NM_006920.2,3441-3459).
catcggcgcacctgtagaa

SEQ ID NO: 152578 - DNA, 19 bp, Homo sapiens
  siRNA target sequence for SCN1A (NM_006920.2,3444-3462).
cggcgcacctgtagaagaa

SEQ ID NO: 152579 - DNA, 19 bp, Homo sapiens
  siRNA target sequence for SCN1A (NM_006920.2,3446-3464).
gcgcacctgtagaagaaca

SEQ ID NO: 152580 - DNA, 19 bp, Homo sapiens
  siRNA target sequence for SCN1A (NM_006920.2,3594-3612).
gacgtgtttccgaatagtt

SEQ ID NO: 152581 - DNA, 19 bp, Homo sapiens
  siRNA target sequence for SCN1A (NM_006920.2,3596-3614).
cgtgtttccgaatagttga

SEQ ID NO: 152582 - DNA, 19 bp, Homo sapiens
  siRNA target sequence for SCN1A (NM_006920.2,3604-3622).
cgaatagttgaacataact

SEQ ID NO: 152583 - DNA, 19 bp, Homo sapiens
  siRNA target sequence for SCN1A (NM_006920.2,3645-3663).
catgattctccttagtagt

SEQ ID NO: 152584 - DNA, 19 bp, Homo sapiens
  siRNA target sequence for SCN1A (NM_006920.2,3781-3799).
gtggcatatggctatcaaa

SEQ ID NO: 152585 - DNA, 19 bp, Homo sapiens
  siRNA target sequence for SCN1A (NM_006920.2,3783-3801).
ggcatatggctatcaaaca

SEQ ID NO: 152586 - DNA, 19 bp, Homo sapiens
  siRNA target sequence for SCN1A (NM_006920.2,4017-4035).
gcttctggtttgtcttata

SEQ ID NO: 152587 - DNA, 19 bp, Homo sapiens
  siRNA target sequence for SCN1A (NM_006920.2,4123-4141).
gacatcgaagacgtgaata

SEQ ID NO: 152588 - DNA, 19 bp, Homo sapiens
  siRNA target sequence for SCN1A (NM_006920.2,4125-4143).
catcgaagacgtgaataat

SEQ ID NO: 152589 - DNA, 19 bp, Homo sapiens
  siRNA target sequence for SCN1A (NM_006920.2,4128-4146).
cgaagacgtgaataatcat

SEQ ID NO: 152590 - DNA, 19 bp, Homo sapiens
  siRNA target sequence for SCN1A (NM_006920.2,4129-4147).
gaagacgtgaataatcata

SEQ ID NO: 152591 - DNA, 19 bp, Homo sapiens
  siRNA target sequence for SCN1A (NM_006920.2,4179-4197).
gactgctcgatggaaaaat

SEQ ID NO: 152592 - DNA, 19 bp, Homo sapiens
  siRNA target sequence for SCN1A (NM_006920.2,4181-4199).
ctgctcgatggaaaaatgt

SEQ ID NO: 152593 - DNA, 19 bp, Homo sapiens
  siRNA target sequence for SCN1A (NM_006920.2,4219-4237).
gtaggatttgggtatctct

SEQ ID NO: 152594 - DNA, 19 bp, Homo sapiens
  siRNA target sequence for SCN1A (NM_006920.2,4308-4326).
ggaactccagcctaagtat

SEQ ID NO: 152595 - DNA, 19 bp, Homo sapiens
  siRNA target sequence for SCN1A (NM_006920.2,4680-4698).
cattttgtcacgcatcaat

SEQ ID NO: 152596 - DNA, 19 bp, Homo sapiens
  siRNA target sequence for SCN1A (NM_006920.2,4743-4761).
catctctctacgccattat

SEQ ID NO: 152597 - DNA, 19 bp, Homo sapiens
  siRNA target sequence for SCN1A (NM_006920.2,4748-4766).
ctctacgccattattattt

SEQ ID NO: 152598 - DNA, 19 bp, Homo sapiens
  siRNA target sequence for SCN1A (NM_006920.2,4750-4768).
ctacgccattattatttta

SEQ ID NO: 152599 - DNA, 19 bp, Homo sapiens
  siRNA target sequence for SCN1A (NM_006920.2,4828-4846).
cttgccgagctgatagaaa

SEQ ID NO: 152600 - DNA, 19 bp, Homo sapiens
  siRNA target sequence for SCN1A (NM_006920.2,5469-5487).
gcttgaaccgcctctcaat

SEQ ID NO: 152601 - DNA, 19 bp, Homo sapiens
  siRNA target sequence for SCN1A (NM_006920.2,5670-5688).
ctcctatcagccaatcact

SEQ ID NO: 152602 - DNA, 19 bp, Homo sapiens
  siRNA target sequence for SCN1A (NM_006920.2,5679-5697).
gccaatcactactacttta

SEQ ID NO: 152603 - DNA, 19 bp, Homo sapiens
  siRNA target sequence for SCN1A (NM_006920.2,5680-5698).
ccaatcactactactttaa

SEQ ID NO: 152604 - DNA, 19 bp, Homo sapiens
  siRNA target sequence for SCN1A (NM_006920.2,5681-5699).
caatcactactactttaaa

SEQ ID NO: 152605 - DNA, 19 bp, Homo sapiens
  siRNA target sequence for SCN1A (NM_006920.2,5754-5772).
ccttttaaagcgaactgta

SEQ ID NO: 152606 - DNA, 19 bp, Homo sapiens
  siRNA target sequence for SCN1A (NM_006920.2,5755-5773).
cttttaaagcgaactgtaa

SEQ ID NO: 152607 - DNA, 19 bp, Homo sapiens
  siRNA target sequence for SCN1A (NM_006920.2,5770-5788).
gtaaaacaagcttccttta

SEQ ID NO: 152608 - DNA, 19 bp, Homo sapiens
  siRNA target sequence for SCN1A (NM_006920.2,5779-5797).
gcttcctttacgtacaata

SEQ ID NO: 152609 - DNA, 19 bp, Homo sapiens
  siRNA target sequence for SCN1A (NM_006920.2,5780-5798).
cttcctttacgtacaataa

SEQ ID NO: 152610 - DNA, 19 bp, Homo sapiens
  siRNA target sequence for SCN1A (NM_006920.2,5783-5801).
cctttacgtacaataaaaa

SEQ ID NO: 152611 - DNA, 19 bp, Homo sapiens
  siRNA target sequence for SCN1A (NM_006920.2,5808-5826).
caaaggtggggctaatctt

SEQ ID NO: 152612 - DNA, 19 bp, Homo sapiens
  siRNA target sequence for SCN1A (NM_006920.2,5812-5830).
ggtggggctaatcttctta

SEQ ID NO: 152613 - DNA, 19 bp, Homo sapiens
  siRNA target sequence for SCN1A (NM_006920.2,5813-5831).
gtggggctaatcttcttat

SEQ ID NO: 152614 - DNA, 19 bp, Homo sapiens
  siRNA target sequence for SCN1A (NM_006920.2,5815-5833).
ggggctaatcttcttataa

SEQ ID NO: 152615 - DNA, 19 bp, Homo sapiens
  siRNA target sequence for SCN1A (NM_006920.2,5816-5834).
gggctaatcttcttataaa

SEQ ID NO: 152616 - DNA, 19 bp, Homo sapiens
  siRNA target sequence for SCN1A (NM_006920.2,5819-5837).
ctaatcttcttataaaaga

SEQ ID NO: 152617 - DNA, 19 bp, Homo sapiens
  siRNA target sequence for SCN1A (NM_006920.2,5868-5886).
ctctattacagaaaaaact

SEQ ID NO: 152618 - DNA, 19 bp, Homo sapiens
  siRNA target sequence for SCN1A (NM_006920.2,5921-5939).
cctatgaccgggtgacaaa

SEQ ID NO: 152619 - DNA, 19 bp, Homo sapiens
  siRNA target sequence for SCN1A (NM_006920.2,5930-5948).
gggtgacaaagccaattgt

SEQ ID NO: 152620 - DNA, 19 bp, Homo sapiens
  siRNA target sequence for SCN2A2 (NM_021007.1,139-157).
gacagcttccgcttcttta

SEQ ID NO: 152621 - DNA, 19 bp, Homo sapiens
  siRNA target sequence for SCN2A2 (NM_021007.1,162-180).
ggaatcccttgctgctatt

SEQ ID NO: 152622 - DNA, 19 bp, Homo sapiens
  siRNA target sequence for SCN2A2 (NM_021007.1,445-463).
cccttcaaccctattagaa

SEQ ID NO: 152623 - DNA, 19 bp, Homo sapiens
  siRNA target sequence for SCN2A2 (NM_021007.1,446-464).
ccttcaaccctattagaaa

SEQ ID NO: 152624 - DNA, 19 bp, Homo sapiens
  siRNA target sequence for SCN2A2 (NM_021007.1,447-465).
cttcaaccctattagaaaa

SEQ ID NO: 152625 - DNA, 19 bp, Homo sapiens
  siRNA target sequence for SCN2A2 (NM_021007.1,507-525).
cattatgtgcacgattctt

SEQ ID NO: 152626 - DNA, 19 bp, Homo sapiens
  siRNA target sequence for SCN2A2 (NM_021007.1,582-600).
gtatacctttacaggaatt

SEQ ID NO: 152627 - DNA, 19 bp, Homo sapiens
  siRNA target sequence for SCN2A2 (NM_021007.1,628-646).
cttgcaaggggcttttgtt

SEQ ID NO: 152628 - DNA, 19 bp, Homo sapiens
  siRNA target sequence for SCN2A2 (NM_021007.1,885-903).
cgtgtttgcgctaatagga

SEQ ID NO: 152629 - DNA, 19 bp, Homo sapiens
  siRNA target sequence for SCN2A2 (NM_021007.1,915-933).
catgggcaacctacgaaat

SEQ ID NO: 152630 - DNA, 19 bp, Homo sapiens
  siRNA target sequence for SCN2A2 (NM_021007.1,918-936).
gggcaacctacgaaataaa

SEQ ID NO: 152631 - DNA, 19 bp, Homo sapiens
  siRNA target sequence for SCN2A2 (NM_021007.1,919-937).
ggcaacctacgaaataaat

SEQ ID NO: 152632 - DNA, 19 bp, Homo sapiens
  siRNA target sequence for SCN2A2 (NM_021007.1,921-939).
caacctacgaaataaatgt

SEQ ID NO: 152633 - DNA, 19 bp, Homo sapiens
  siRNA target sequence for SCN2A2 (NM_021007.1,1005-1023).
ggatgggaatggtactact

SEQ ID NO: 152634 - DNA, 19 bp, Homo sapiens
  siRNA target sequence for SCN2A2 (NM_021007.1,1006-1024).
gatgggaatggtactactt

SEQ ID NO: 152635 - DNA, 19 bp, Homo sapiens
  siRNA target sequence for SCN2A2 (NM_021007.1,1009-1027).
gggaatggtactactttca

SEQ ID NO: 152636 - DNA, 19 bp, Homo sapiens
  siRNA target sequence for SCN2A2 (NM_021007.1,1010-1028).
ggaatggtactactttcaa

SEQ ID NO: 152637 - DNA, 19 bp, Homo sapiens
  siRNA target sequence for SCN2A2 (NM_021007.1,1011-1029).
gaatggtactactttcaat

SEQ ID NO: 152638 - DNA, 19 bp, Homo sapiens
  siRNA target sequence for SCN2A2 (NM_021007.1,1015-1033).
ggtactactttcaatagga

SEQ ID NO: 152639 - DNA, 19 bp, Homo sapiens
  siRNA target sequence for SCN2A2 (NM_021007.1,1537-1555).
ggtgggataggagtttttt

SEQ ID NO: 152640 - DNA, 19 bp, Homo sapiens
  siRNA target sequence for SCN2A2 (NM_021007.1,1541-1559).
ggataggagttttttcaga

SEQ ID NO: 152641 - DNA, 19 bp, Homo sapiens
  siRNA target sequence for SCN2A2 (NM_021007.1,1733-1751).
gaagtaggctgacatatga

SEQ ID NO: 152642 - DNA, 19 bp, Homo sapiens
  siRNA target sequence for SCN2A2 (NM_021007.1,2113-2131).
ctaccagagggcacaacta

SEQ ID NO: 152643 - DNA, 19 bp, Homo sapiens
  siRNA target sequence for SCN2A2 (NM_021007.1,2121-2139).
gggcacaactactgaaaca

SEQ ID NO: 152644 - DNA, 19 bp, Homo sapiens
  siRNA target sequence for SCN2A2 (NM_021007.1,2123-2141).
gcacaactactgaaacaga

SEQ ID NO: 152645 - DNA, 19 bp, Homo sapiens
  siRNA target sequence for SCN2A2 (NM_021007.1,2124-2142).
cacaactactgaaacagaa

SEQ ID NO: 152646 - DNA, 19 bp, Homo sapiens
  siRNA target sequence for SCN2A2 (NM_021007.1,2151-2169).
gagacggtccagttcttat

SEQ ID NO: 152647 - DNA, 19 bp, Homo sapiens
  siRNA target sequence for SCN2A2 (NM_021007.1,2153-2171).
gacggtccagttcttatca

SEQ ID NO: 152648 - DNA, 19 bp, Homo sapiens
  siRNA target sequence for SCN2A2 (NM_021007.1,2156-2174).
ggtccagttcttatcatgt

SEQ ID NO: 152649 - DNA, 19 bp, Homo sapiens
  siRNA target sequence for SCN2A2 (NM_021007.1,2157-2175).
gtccagttcttatcatgtt

SEQ ID NO: 152650 - DNA, 19 bp, Homo sapiens
  siRNA target sequence for SCN2A2 (NM_021007.1,2162-2180).
gttcttatcatgtttccat

SEQ ID NO: 152651 - DNA, 19 bp, Homo sapiens
  siRNA target sequence for SCN2A2 (NM_021007.1,2316-2334).
gatttgggactgttgtaaa

SEQ ID NO: 152652 - DNA, 19 bp, Homo sapiens
  siRNA target sequence for SCN2A2 (NM_021007.1,2325-2343).
ctgttgtaaaccatggtta

SEQ ID NO: 152653 - DNA, 19 bp, Homo sapiens
  siRNA target sequence for SCN2A2 (NM_021007.1,2330-2348).
gtaaaccatggttaaaggt

SEQ ID NO: 152654 - DNA, 19 bp, Homo sapiens
  siRNA target sequence for SCN2A2 (NM_021007.1,2549-2567).
catattattactttcaaga

SEQ ID NO: 152655 - DNA, 19 bp, Homo sapiens
  siRNA target sequence for SCN2A2 (NM_021007.1,3059-3077).
ccttcagttctgacaatct

SEQ ID NO: 152656 - DNA, 19 bp, Homo sapiens
  siRNA target sequence for SCN2A2 (NM_021007.1,3313-3331).
gacggaaatggaactacta

SEQ ID NO: 152657 - DNA, 19 bp, Homo sapiens
  siRNA target sequence for SCN2A2 (NM_021007.1,3315-3333).
cggaaatggaactactagt

SEQ ID NO: 152658 - DNA, 19 bp, Homo sapiens
  siRNA target sequence for SCN2A2 (NM_021007.1,3504-3522).
gaagctaaatgcaactagt

SEQ ID NO: 152659 - DNA, 19 bp, Homo sapiens
  siRNA target sequence for SCN2A2 (NM_021007.1,3507-3525).
gctaaatgcaactagttca

SEQ ID NO: 152660 - DNA, 19 bp, Homo sapiens
  siRNA target sequence for SCN2A2 (NM_021007.1,3508-3526).
ctaaatgcaactagttcat

SEQ ID NO: 152661 - DNA, 19 bp, Homo sapiens
  siRNA target sequence for SCN2A2 (NM_021007.1,3534-3552).
cagcacggttgatattgga

SEQ ID NO: 152662 - DNA, 19 bp, Homo sapiens
  siRNA target sequence for SCN2A2 (NM_021007.1,3631-3649).
gtacggaagttcaagtgtt

SEQ ID NO: 152663 - DNA, 19 bp, Homo sapiens
  siRNA target sequence for SCN2A2 (NM_021007.1,3639-3657).
gttcaagtgttgtcagata

SEQ ID NO: 152664 - DNA, 19 bp, Homo sapiens
  siRNA target sequence for SCN2A2 (NM_021007.1,3645-3663).
gtgttgtcagataagcata

SEQ ID NO: 152665 - DNA, 19 bp, Homo sapiens
  siRNA target sequence for SCN2A2 (NM_021007.1,3650-3668).
gtcagataagcatagaaga

SEQ ID NO: 152666 - DNA, 19 bp, Homo sapiens
  siRNA target sequence for SCN2A2 (NM_021007.1,3802-3820).
gagcagcgaaaaaccatta

SEQ ID NO: 152667 - DNA, 19 bp, Homo sapiens
  siRNA target sequence for SCN2A2 (NM_021007.1,3879-3897).
gctaaagtgggttgcatat

SEQ ID NO: 152668 - DNA, 19 bp, Homo sapiens
  siRNA target sequence for SCN2A2 (NM_021007.1,3955-3973).
gtctcactggttagcttaa

SEQ ID NO: 152669 - DNA, 19 bp, Homo sapiens
  siRNA target sequence for SCN2A2 (NM_021007.1,3957-3975).
ctcactggttagcttaact

SEQ ID NO: 152670 - DNA, 19 bp, Homo sapiens
  siRNA target sequence for SCN2A2 (NM_021007.1,3963-3981).
ggttagcttaactgcaaat

SEQ ID NO: 152671 - DNA, 19 bp, Homo sapiens
  siRNA target sequence for SCN2A2 (NM_021007.1,4138-4156).
ctgatcttttggctaatat

SEQ ID NO: 152672 - DNA, 19 bp, Homo sapiens
  siRNA target sequence for SCN2A2 (NM_021007.1,4186-4204).
ggcaagttttaccattgta

SEQ ID NO: 152673 - DNA, 19 bp, Homo sapiens
  siRNA target sequence for SCN2A2 (NM_021007.1,4187-4205).
gcaagttttaccattgtat

SEQ ID NO: 152674 - DNA, 19 bp, Homo sapiens
  siRNA target sequence for SCN2A2 (NM_021007.1,4219-4237).
ggagagatgtttgatgtaa

SEQ ID NO: 152675 - DNA, 19 bp, Homo sapiens
  siRNA target sequence for SCN2A2 (NM_021007.1,4270-4288).
ctcattgagagcaatcaaa

SEQ ID NO: 152676 - DNA, 19 bp, Homo sapiens
  siRNA target sequence for SCN2A2 (NM_021007.1,4272-4290).
cattgagagcaatcaaact

SEQ ID NO: 152677 - DNA, 19 bp, Homo sapiens
  siRNA target sequence for SCN2A2 (NM_021007.1,4402-4420).
gattcacgaaatgtagaat

SEQ ID NO: 152678 - DNA, 19 bp, Homo sapiens
  siRNA target sequence for SCN2A2 (NM_021007.1,4487-4505).
cattctttaccttgaatct

SEQ ID NO: 152679 - DNA, 19 bp, Homo sapiens
  siRNA target sequence for SCN2A2 (NM_021007.1,4645-4663).
cctcgacctgctaacaaat

SEQ ID NO: 152680 - DNA, 19 bp, Homo sapiens
  siRNA target sequence for SCN2A2 (NM_021007.1,4646-4664).
ctcgacctgctaacaaatt

SEQ ID NO: 152681 - DNA, 19 bp, Homo sapiens
  siRNA target sequence for SCN2A2 (NM_021007.1,4649-4667).
gacctgctaacaaattcca

SEQ ID NO: 152682 - DNA, 19 bp, Homo sapiens
  siRNA target sequence for SCN2A2 (NM_021007.1,4788-4806).
cattctgtactggattaat

SEQ ID NO: 152683 - DNA, 19 bp, Homo sapiens
  siRNA target sequence for SCN2A2 (NM_021007.1,4854-4872).
ctctcttcgttactactat

SEQ ID NO: 152684 - DNA, 19 bp, Homo sapiens
  siRNA target sequence for SCN2A2 (NM_021007.1,4856-4874).
ctcttcgttactactattt

SEQ ID NO: 152685 - DNA, 19 bp, Homo sapiens
  siRNA target sequence for SCN2A2 (NM_021007.1,4858-4876).
cttcgttactactatttca

SEQ ID NO: 152686 - DNA, 19 bp, Homo sapiens
  siRNA target sequence for SCN2A2 (NM_021007.1,4861-4879).
cgttactactatttcacta

SEQ ID NO: 152687 - DNA, 19 bp, Homo sapiens
  siRNA target sequence for SCN2A2 (NM_021007.1,4862-4880).
gttactactatttcactat

SEQ ID NO: 152688 - DNA, 19 bp, Homo sapiens
  siRNA target sequence for SCN2A2 (NM_021007.1,4866-4884).
ctactatttcactattgga

SEQ ID NO: 152689 - DNA, 19 bp, Homo sapiens
  siRNA target sequence for SCN2A2 (NM_021007.1,5790-5808).
cattacgaccacgttgaaa

SEQ ID NO: 152690 - DNA, 19 bp, Homo sapiens
  siRNA target sequence for SCN2A2 (NM_021007.1,5857-5875).
cgctacctcttgaagcaaa

SEQ ID NO: 152691 - DNA, 19 bp, Homo sapiens
  siRNA target sequence for SCN2A2 (NM_021007.1,6015-6033).
gtctccaccctcgtatgat

SEQ ID NO: 152692 - DNA, 19 bp, Homo sapiens
  siRNA target sequence for SCN3A (NM_006922.2,513-531).
ccgcctttttactagagaa

SEQ ID NO: 152693 - DNA, 19 bp, Homo sapiens
  siRNA target sequence for SCN3A (NM_006922.2,514-532).
cgcctttttactagagaat

SEQ ID NO: 152694 - DNA, 19 bp, Homo sapiens
  siRNA target sequence for SCN3A (NM_006922.2,533-551).
ctcttgctgctatcgaaaa

SEQ ID NO: 152695 - DNA, 19 bp, Homo sapiens
  siRNA target sequence for SCN3A (NM_006922.2,973-991).
gagtcacttataaaaatct

SEQ ID NO: 152696 - DNA, 19 bp, Homo sapiens
  siRNA target sequence for SCN3A (NM_006922.2,993-1011).
ggcaagagggttttgctta

SEQ ID NO: 152697 - DNA, 19 bp, Homo sapiens
  siRNA target sequence for SCN3A (NM_006922.2,1156-1174).
gtcattccaggtttaaaga

SEQ ID NO: 152698 - DNA, 19 bp, Homo sapiens
  siRNA target sequence for SCN3A (NM_006922.2,1316-1334).
caagcgattctgcttttga

SEQ ID NO: 152699 - DNA, 19 bp, Homo sapiens
  siRNA target sequence for SCN3A (NM_006922.2,1368-1386).
ggattcaaatgggacattt

SEQ ID NO: 152700 - DNA, 19 bp, Homo sapiens
  siRNA target sequence for SCN3A (NM_006922.2,1406-1424).
catttaactggaaggatta

SEQ ID NO: 152701 - DNA, 19 bp, Homo sapiens
  siRNA target sequence for SCN3A (NM_006922.2,1870-1888).
gctgcttcaagagatttca

SEQ ID NO: 152702 - DNA, 19 bp, Homo sapiens
  siRNA target sequence for SCN3A (NM_006922.2,2056-2074).
gaagacagcgtcaaaagaa

SEQ ID NO: 152703 - DNA, 19 bp, Homo sapiens
  siRNA target sequence for SCN3A (NM_006922.2,2107-2125).
ctgaccagtgacaaaaaat

SEQ ID NO: 152704 - DNA, 19 bp, Homo sapiens
  siRNA target sequence for SCN3A (NM_006922.2,2174-2192).
ccccaagacgcaatagcaa

SEQ ID NO: 152705 - DNA, 19 bp, Homo sapiens
  siRNA target sequence for SCN3A (NM_006922.2,2175-2193).
cccaagacgcaatagcaaa

SEQ ID NO: 152706 - DNA, 19 bp, Homo sapiens
  siRNA target sequence for SCN3A (NM_006922.2,2176-2194).
ccaagacgcaatagcaaaa

SEQ ID NO: 152707 - DNA, 19 bp, Homo sapiens
  siRNA target sequence for SCN3A (NM_006922.2,2226-2244).
ggatgttggatctgaaaat

SEQ ID NO: 152708 - DNA, 19 bp, Homo sapiens
  siRNA target sequence for SCN3A (NM_006922.2,2328-2346).
gcgacgcaacagtaacgtt

SEQ ID NO: 152709 - DNA, 19 bp, Homo sapiens
  siRNA target sequence for SCN3A (NM_006922.2,2329-2347).
cgacgcaacagtaacgtta

SEQ ID NO: 152710 - DNA, 19 bp, Homo sapiens
  siRNA target sequence for SCN3A (NM_006922.2,2333-2351).
gcaacagtaacgttagtca

SEQ ID NO: 152711 - DNA, 19 bp, Homo sapiens
  siRNA target sequence for SCN3A (NM_006922.2,2344-2362).
gttagtcaggccagtatgt

SEQ ID NO: 152712 - DNA, 19 bp, Homo sapiens
  siRNA target sequence for SCN3A (NM_006922.2,2376-2394).
gccagggcttccagcaaat

SEQ ID NO: 152713 - DNA, 19 bp, Homo sapiens
  siRNA target sequence for SCN3A (NM_006922.2,2531-2549).
gctcttaccagatttcaat

SEQ ID NO: 152714 - DNA, 19 bp, Homo sapiens
  siRNA target sequence for SCN3A (NM_006922.2,2982-3000).
ggagcttggtctgtcaaat

SEQ ID NO: 152715 - DNA, 19 bp, Homo sapiens
  siRNA target sequence for SCN3A (NM_006922.2,3534-3552).
gatgcgggagtgtttccaa

SEQ ID NO: 152716 - DNA, 19 bp, Homo sapiens
  siRNA target sequence for SCN3A (NM_006922.2,3592-3610).
gaaggcaataagatagaca

SEQ ID NO: 152717 - DNA, 19 bp, Homo sapiens
  siRNA target sequence for SCN3A (NM_006922.2,3612-3630).
ctgcatgtccaataatact

SEQ ID NO: 152718 - DNA, 19 bp, Homo sapiens
  siRNA target sequence for SCN3A (NM_006922.2,3618-3636).
gtccaataatactggaatt

SEQ ID NO: 152719 - DNA, 19 bp, Homo sapiens
  siRNA target sequence for SCN3A (NM_006922.2,3629-3647).
ctggaattgaaataagcaa

SEQ ID NO: 152720 - DNA, 19 bp, Homo sapiens
  siRNA target sequence for SCN3A (NM_006922.2,3651-3669).
gcttaattatcttagagat

SEQ ID NO: 152721 - DNA, 19 bp, Homo sapiens
  siRNA target sequence for SCN3A (NM_006922.2,3771-3789).
cgtcacagtgccaattgct

SEQ ID NO: 152722 - DNA, 19 bp, Homo sapiens
  siRNA target sequence for SCN3A (NM_006922.2,3831-3849).
cagcagtgagtcagaacta

SEQ ID NO: 152723 - DNA, 19 bp, Homo sapiens
  siRNA target sequence for SCN3A (NM_006922.2,3999-4017).
gtttccattctgtcaagta

SEQ ID NO: 152724 - DNA, 19 bp, Homo sapiens
  siRNA target sequence for SCN3A (NM_006922.2,4003-4021).
ccattctgtcaagtaagta

SEQ ID NO: 152725 - DNA, 19 bp, Homo sapiens
  siRNA target sequence for SCN3A (NM_006922.2,4008-4026).
ctgtcaagtaagtacagaa

SEQ ID NO: 152726 - DNA, 19 bp, Homo sapiens
  siRNA target sequence for SCN3A (NM_006922.2,4038-4056).
gaagatctggtggaatctt

SEQ ID NO: 152727 - DNA, 19 bp, Homo sapiens
  siRNA target sequence for SCN3A (NM_006922.2,4162-4180).
gaacagcgaaagactatca

SEQ ID NO: 152728 - DNA, 19 bp, Homo sapiens
  siRNA target sequence for SCN3A (NM_006922.2,4169-4187).
gaaagactatcaaaaccat

SEQ ID NO: 152729 - DNA, 19 bp, Homo sapiens
  siRNA target sequence for SCN3A (NM_006922.2,4242-4260).
caaatgggttgcttatgga

SEQ ID NO: 152730 - DNA, 19 bp, Homo sapiens
  siRNA target sequence for SCN3A (NM_006922.2,4253-4271).
cttatggatttcaaacata

SEQ ID NO: 152731 - DNA, 19 bp, Homo sapiens
  siRNA target sequence for SCN3A (NM_006922.2,4360-4378).
ctcggtgccatcaaatcat

SEQ ID NO: 152732 - DNA, 19 bp, Homo sapiens
  siRNA target sequence for SCN3A (NM_006922.2,4362-4380).
cggtgccatcaaatcatta

SEQ ID NO: 152733 - DNA, 19 bp, Homo sapiens
  siRNA target sequence for SCN3A (NM_006922.2,4371-4389).
caaatcattacggacatta

SEQ ID NO: 152734 - DNA, 19 bp, Homo sapiens
  siRNA target sequence for SCN3A (NM_006922.2,4440-4458).
ggttgtgaatgctcttgtt

SEQ ID NO: 152735 - DNA, 19 bp, Homo sapiens
  siRNA target sequence for SCN3A (NM_006922.2,4572-4590).
gacaacgggtaacatgttt

SEQ ID NO: 152736 - DNA, 19 bp, Homo sapiens
  siRNA target sequence for SCN3A (NM_006922.2,4574-4592).
caacgggtaacatgtttga

SEQ ID NO: 152737 - DNA, 19 bp, Homo sapiens
  siRNA target sequence for SCN3A (NM_006922.2,4577-4595).
cgggtaacatgtttgacat

SEQ ID NO: 152738 - DNA, 19 bp, Homo sapiens
  siRNA target sequence for SCN3A (NM_006922.2,4591-4609).
gacattagtgatgttaaca

SEQ ID NO: 152739 - DNA, 19 bp, Homo sapiens
  siRNA target sequence for SCN3A (NM_006922.2,4750-4768).
gttgattcacgagatgtta

SEQ ID NO: 152740 - DNA, 19 bp, Homo sapiens
  siRNA target sequence for SCN3A (NM_006922.2,4776-4794).
gcctgtatatgaagaaaat

SEQ ID NO: 152741 - DNA, 19 bp, Homo sapiens
  siRNA target sequence for SCN3A (NM_006922.2,5111-5129).
cggatgaccagggcaaata

SEQ ID NO: 152742 - DNA, 19 bp, Homo sapiens
  siRNA target sequence for SCN3A (NM_006922.2,5116-5134).
gaccagggcaaatacatga

SEQ ID NO: 152743 - DNA, 19 bp, Homo sapiens
  siRNA target sequence for SCN3A (NM_006922.2,5147-5165).
cccggatcaacctagtgtt

SEQ ID NO: 152744 - DNA, 19 bp, Homo sapiens
  siRNA target sequence for SCN3A (NM_006922.2,5150-5168).
ggatcaacctagtgttcat

SEQ ID NO: 152745 - DNA, 19 bp, Homo sapiens
  siRNA target sequence for SCN3A (NM_006922.2,5151-5169).
gatcaacctagtgttcatt

SEQ ID NO: 152746 - DNA, 19 bp, Homo sapiens
  siRNA target sequence for SCN3A (NM_006922.2,5648-5666).
gtgaccctgacacaattca

SEQ ID NO: 152747 - DNA, 19 bp, Homo sapiens
  siRNA target sequence for SCN3A (NM_006922.2,6139-6157).
cctattacaaccactttga

SEQ ID NO: 152748 - DNA, 19 bp, Homo sapiens
  siRNA target sequence for SCN3A (NM_006922.2,6174-6192).
ggtgtctgccgctatcatt

SEQ ID NO: 152749 - DNA, 19 bp, Homo sapiens
  siRNA target sequence for SCN3A (NM_006922.2,6184-6202).
gctatcattcagcgtaatt

SEQ ID NO: 152750 - DNA, 19 bp, Homo sapiens
  siRNA target sequence for SCN3A (NM_006922.2,6189-6207).
cattcagcgtaatttcaga

SEQ ID NO: 152751 - DNA, 19 bp, Homo sapiens
  siRNA target sequence for SCN3A (NM_006922.2,6206-6224).
gatgttatcttttaaagca

SEQ ID NO: 152752 - DNA, 19 bp, Homo sapiens
  siRNA target sequence for SCN3A (NM_006922.2,6271-6289).
gggaggattgacttaccta

SEQ ID NO: 152753 - DNA, 19 bp, Homo sapiens
  siRNA target sequence for SCN3A (NM_006922.2,6273-6291).
gaggattgacttacctata

SEQ ID NO: 152754 - DNA, 19 bp, Homo sapiens
  siRNA target sequence for SCN3A (NM_006922.2,6275-6293).
ggattgacttacctataaa

SEQ ID NO: 152755 - DNA, 19 bp, Homo sapiens
  siRNA target sequence for SCN3A (NM_006922.2,6276-6294).
gattgacttacctataaaa

SEQ ID NO: 152756 - DNA, 19 bp, Homo sapiens
  siRNA target sequence for SCN4A (NM_000334.3,190-208).
ggctgcagcggaataagca

SEQ ID NO: 152757 - DNA, 19 bp, Homo sapiens
  siRNA target sequence for SCN4A (NM_000334.3,352-370).
ccttcatcgtactcaacaa

SEQ ID NO: 152758 - DNA, 19 bp, Homo sapiens
  siRNA target sequence for SCN4A (NM_000334.3,622-640).
gtgtcgacgacttcacatt

SEQ ID NO: 152759 - DNA, 19 bp, Homo sapiens
  siRNA target sequence for SCN4A (NM_000334.3,686-704).
ggcgtacctgacagagttt

SEQ ID NO: 152760 - DNA, 19 bp, Homo sapiens
  siRNA target sequence for SCN4A (NM_000334.3,991-1009).
catggtatggcaatgagat

SEQ ID NO: 152761 - DNA, 19 bp, Homo sapiens
  siRNA target sequence for SCN4A (NM_000334.3,1066-1084).
gggccaccaacgatacctt

SEQ ID NO: 152762 - DNA, 19 bp, Homo sapiens
  siRNA target sequence for SCN4A (NM_000334.3,1067-1085).
ggccaccaacgataccttt

SEQ ID NO: 152763 - DNA, 19 bp, Homo sapiens
  siRNA target sequence for SCN4A (NM_000334.3,1086-1104).
gattgggacgcctacatca

SEQ ID NO: 152764 - DNA, 19 bp, Homo sapiens
  siRNA target sequence for SCN4A (NM_000334.3,1094-1112).
cgcctacatcagtgatgaa

SEQ ID NO: 152765 - DNA, 19 bp, Homo sapiens
  siRNA target sequence for SCN4A (NM_000334.3,1105-1123).
gtgatgaagggaacttcta

SEQ ID NO: 152766 - DNA, 19 bp, Homo sapiens
  siRNA target sequence for SCN4A (NM_000334.3,1191-1209).
ggttatgagtgcatcaaga

SEQ ID NO: 152767 - DNA, 19 bp, Homo sapiens
  siRNA target sequence for SCN4A (NM_000334.3,1444-1462).
ccaccctggccgaggataa

SEQ ID NO: 152768 - DNA, 19 bp, Homo sapiens
  siRNA target sequence for SCN4A (NM_000334.3,1575-1593).
ccagcccatggcaaagact

SEQ ID NO: 152769 - DNA, 19 bp, Homo sapiens
  siRNA target sequence for SCN4A (NM_000334.3,1710-1728).
ccaccatggtggtacaagt

SEQ ID NO: 152770 - DNA, 19 bp, Homo sapiens
  siRNA target sequence for SCN4A (NM_000334.3,1764-1782).
ccgtggctgaagttcaaga

SEQ ID NO: 152771 - DNA, 19 bp, Homo sapiens
  siRNA target sequence for SCN4A (NM_000334.3,1992-2010).
cagcagggttggaatatct

SEQ ID NO: 152772 - DNA, 19 bp, Homo sapiens
  siRNA target sequence for SCN4A (NM_000334.3,2122-2140).
cgtggccaacgctgaacat

SEQ ID NO: 152773 - DNA, 19 bp, Homo sapiens
  siRNA target sequence for SCN4A (NM_000334.3,2432-2450).
catggtcatcggcaatctt

SEQ ID NO: 152774 - DNA, 19 bp, Homo sapiens
  siRNA target sequence for SCN4A (NM_000334.3,2802-2820).
ctggaccaccttaacttca

SEQ ID NO: 152775 - DNA, 19 bp, Homo sapiens
  siRNA target sequence for SCN4A (NM_000334.3,2805-2823).
gaccaccttaacttcatca

SEQ ID NO: 152776 - DNA, 19 bp, Homo sapiens
  siRNA target sequence for SCN4A (NM_000334.3,2892-2910).
gaggaaaccgacactttct

SEQ ID NO: 152777 - DNA, 19 bp, Homo sapiens
  siRNA target sequence for SCN4A (NM_000334.3,3138-3156).
cgcagggcctgcttcaaga

SEQ ID NO: 152778 - DNA, 19 bp, Homo sapiens
  siRNA target sequence for SCN4A (NM_000334.3,3437-3455).
ggagctgggacccatcaaa

SEQ ID NO: 152779 - DNA, 19 bp, Homo sapiens
  siRNA target sequence for SCN4A (NM_000334.3,3729-3747).
gtccgctggctcaatgtca

SEQ ID NO: 152780 - DNA, 19 bp, Homo sapiens
  siRNA target sequence for SCN4A (NM_000334.3,3873-3891).
gaggtgaacctctacatgt

SEQ ID NO: 152781 - DNA, 19 bp, Homo sapiens
  siRNA target sequence for SCN4A (NM_000334.3,3994-4012).
gggggaaagacatctttat

SEQ ID NO: 152782 - DNA, 19 bp, Homo sapiens
  siRNA target sequence for SCN4A (NM_000334.3,4221-4239).
gtggacatcctgtacaaca

SEQ ID NO: 152783 - DNA, 19 bp, Homo sapiens
  siRNA target sequence for SCN4A (NM_000334.3,4605-4623).
gagtcgggcatcgatgata

SEQ ID NO: 152784 - DNA, 19 bp, Homo sapiens
  siRNA target sequence for SCN4A (NM_000334.3,4609-4627).
cgggcatcgatgatatgtt

SEQ ID NO: 152785 - DNA, 19 bp, Homo sapiens
  siRNA target sequence for SCN4A (NM_000334.3,5259-5277).
gaggtgtgcgccatcaaga

SEQ ID NO: 152786 - DNA, 19 bp, Homo sapiens
  siRNA target sequence for SCN4A (NM_000334.3,5399-5417).
caccatgagcaagatgtat

SEQ ID NO: 152787 - DNA, 19 bp, Homo sapiens
  siRNA target sequence for SCN9A (NM_002977.1,74-92).
ctcagagctttgtccattt

SEQ ID NO: 152788 - DNA, 19 bp, Homo sapiens
  siRNA target sequence for SCN9A (NM_002977.1,81-99).
ctttgtccatttcacaaaa

SEQ ID NO: 152789 - DNA, 19 bp, Homo sapiens
  siRNA target sequence for SCN9A (NM_002977.1,348-366).
caatgccacacctgcttta

SEQ ID NO: 152790 - DNA, 19 bp, Homo sapiens
  siRNA target sequence for SCN9A (NM_002977.1,352-370).
gccacacctgctttatata

SEQ ID NO: 152791 - DNA, 19 bp, Homo sapiens
  siRNA target sequence for SCN9A (NM_002977.1,353-371).
ccacacctgctttatatat

SEQ ID NO: 152792 - DNA, 19 bp, Homo sapiens
  siRNA target sequence for SCN9A (NM_002977.1,356-374).
cacctgctttatatatgct

SEQ ID NO: 152793 - DNA, 19 bp, Homo sapiens
  siRNA target sequence for SCN9A (NM_002977.1,384-402).
cagtcctctaagaagaata

SEQ ID NO: 152794 - DNA, 19 bp, Homo sapiens
  siRNA target sequence for SCN9A (NM_002977.1,457-475).
ctgacaaactgcatattta

SEQ ID NO: 152795 - DNA, 19 bp, Homo sapiens
  siRNA target sequence for SCN9A (NM_002977.1,519-537).
cacttttactggaatatat

SEQ ID NO: 152796 - DNA, 19 bp, Homo sapiens
  siRNA target sequence for SCN9A (NM_002977.1,578-596).
gtgtaggagaattcacttt

SEQ ID NO: 152797 - DNA, 19 bp, Homo sapiens
  siRNA target sequence for SCN9A (NM_002977.1,621-639).
ggattttgtcgtcattgtt

SEQ ID NO: 152798 - DNA, 19 bp, Homo sapiens
  siRNA target sequence for SCN9A (NM_002977.1,688-706).
cgaactttcagagtattga

SEQ ID NO: 152799 - DNA, 19 bp, Homo sapiens
  siRNA target sequence for SCN9A (NM_002977.1,698-716).
gagtattgagagctttgaa

SEQ ID NO: 152800 - DNA, 19 bp, Homo sapiens
  siRNA target sequence for SCN9A (NM_002977.1,852-870).
gggaaacctgaagcataaa

SEQ ID NO: 152801 - DNA, 19 bp, Homo sapiens
  siRNA target sequence for SCN9A (NM_002977.1,930-948).
gagtgaagaagactttaga

SEQ ID NO: 152802 - DNA, 19 bp, Homo sapiens
  siRNA target sequence for SCN9A (NM_002977.1,1026-1044).
ggggtacacctgtgtgaaa

SEQ ID NO: 152803 - DNA, 19 bp, Homo sapiens
  siRNA target sequence for SCN9A (NM_002977.1,1027-1045).
gggtacacctgtgtgaaaa

SEQ ID NO: 152804 - DNA, 19 bp, Homo sapiens
  siRNA target sequence for SCN9A (NM_002977.1,1105-1123).
gccttgtttaggctaatga

SEQ ID NO: 152805 - DNA, 19 bp, Homo sapiens
  siRNA target sequence for SCN9A (NM_002977.1,1188-1206).
cttctttgtcgtagtgatt

SEQ ID NO: 152806 - DNA, 19 bp, Homo sapiens
  siRNA target sequence for SCN9A (NM_002977.1,1210-1228).
ctgggctccttttatctaa

SEQ ID NO: 152807 - DNA, 19 bp, Homo sapiens
  siRNA target sequence for SCN9A (NM_002977.1,1217-1235).
ccttttatctaataaactt

SEQ ID NO: 152808 - DNA, 19 bp, Homo sapiens
  siRNA target sequence for SCN9A (NM_002977.1,1272-1290).
gaaccaggcaaacattgaa

SEQ ID NO: 152809 - DNA, 19 bp, Homo sapiens
  siRNA target sequence for SCN9A (NM_002977.1,1372-1390).
gcggcagcggctgaatata

SEQ ID NO: 152810 - DNA, 19 bp, Homo sapiens
  siRNA target sequence for SCN9A (NM_002977.1,1374-1392).
ggcagcggctgaatataca

SEQ ID NO: 152811 - DNA, 19 bp, Homo sapiens
  siRNA target sequence for SCN9A (NM_002977.1,1375-1393).
gcagcggctgaatatacaa

SEQ ID NO: 152812 - DNA, 19 bp, Homo sapiens
  siRNA target sequence for SCN9A (NM_002977.1,1378-1396).
gcggctgaatatacaagta

SEQ ID NO: 152813 - DNA, 19 bp, Homo sapiens
  siRNA target sequence for SCN9A (NM_002977.1,1379-1397).
cggctgaatatacaagtat

SEQ ID NO: 152814 - DNA, 19 bp, Homo sapiens
  siRNA target sequence for SCN9A (NM_002977.1,1426-1444).
gagagttcttctgaaacat

SEQ ID NO: 152815 - DNA, 19 bp, Homo sapiens
  siRNA target sequence for SCN9A (NM_002977.1,1608-1626).
gcataggcgagcacatgaa

SEQ ID NO: 152816 - DNA, 19 bp, Homo sapiens
  siRNA target sequence for SCN9A (NM_002977.1,1700-1718).
gaacaagtctttttagttt

SEQ ID NO: 152817 - DNA, 19 bp, Homo sapiens
  siRNA target sequence for SCN9A (NM_002977.1,1703-1721).
caagtctttttagtttcaa

SEQ ID NO: 152818 - DNA, 19 bp, Homo sapiens
  siRNA target sequence for SCN9A (NM_002977.1,1837-1855).
cgacgcagcagtaacatca

SEQ ID NO: 152819 - DNA, 19 bp, Homo sapiens
  siRNA target sequence for SCN9A (NM_002977.1,1987-2005).
gagggcacgaccaatcaaa

SEQ ID NO: 152820 - DNA, 19 bp, Homo sapiens
  siRNA target sequence for SCN9A (NM_002977.1,1989-2007).
gggcacgaccaatcaaata

SEQ ID NO: 152821 - DNA, 19 bp, Homo sapiens
  siRNA target sequence for SCN9A (NM_002977.1,1994-2012).
cgaccaatcaaatacacaa

SEQ ID NO: 152822 - DNA, 19 bp, Homo sapiens
  siRNA target sequence for SCN9A (NM_002977.1,2010-2028).
caagaaaaggcgttgtagt

SEQ ID NO: 152823 - DNA, 19 bp, Homo sapiens
  siRNA target sequence for SCN9A (NM_002977.1,2092-2110).
gcaagcatattaacaaaca

SEQ ID NO: 152824 - DNA, 19 bp, Homo sapiens
  siRNA target sequence for SCN9A (NM_002977.1,2157-2175).
gtacagatttgcacacaaa

SEQ ID NO: 152825 - DNA, 19 bp, Homo sapiens
  siRNA target sequence for SCN9A (NM_002977.1,2167-2185).
gcacacaaattcttgatct

SEQ ID NO: 152826 - DNA, 19 bp, Homo sapiens
  siRNA target sequence for SCN9A (NM_002977.1,2246-2264).
cttttgtagatcttgcaat

SEQ ID NO: 152827 - DNA, 19 bp, Homo sapiens
  siRNA target sequence for SCN9A (NM_002977.1,2251-2269).
gtagatcttgcaattacca

SEQ ID NO: 152828 - DNA, 19 bp, Homo sapiens
  siRNA target sequence for SCN9A (NM_002977.1,2304-2322).
ggaacaccacccaatgact

SEQ ID NO: 152829 - DNA, 19 bp, Homo sapiens
  siRNA target sequence for SCN9A (NM_002977.1,2369-2387).
gaatctttgcagctgaaat

SEQ ID NO: 152830 - DNA, 19 bp, Homo sapiens
  siRNA target sequence for SCN9A (NM_002977.1,2451-2469).
cagccttattgtgacttta

SEQ ID NO: 152831 - DNA, 19 bp, Homo sapiens
  siRNA target sequence for SCN9A (NM_002977.1,2567-2585).
cattgaacatgctgattaa

SEQ ID NO: 152832 - DNA, 19 bp, Homo sapiens
  siRNA target sequence for SCN9A (NM_002977.1,2600-2618).
cagtaggggctctaggtaa

SEQ ID NO: 152833 - DNA, 19 bp, Homo sapiens
  siRNA target sequence for SCN9A (NM_002977.1,2884-2902).
ctggtggtcctaaacctat

SEQ ID NO: 152834 - DNA, 19 bp, Homo sapiens
  siRNA target sequence for SCN9A (NM_002977.1,3025-3043).
caaaccttacgtgaattta

SEQ ID NO: 152835 - DNA, 19 bp, Homo sapiens
  siRNA target sequence for SCN9A (NM_002977.1,3029-3047).
ccttacgtgaatttattct

SEQ ID NO: 152836 - DNA, 19 bp, Homo sapiens
  siRNA target sequence for SCN9A (NM_002977.1,3030-3048).
cttacgtgaatttattcta

SEQ ID NO: 152837 - DNA, 19 bp, Homo sapiens
  siRNA target sequence for SCN9A (NM_002977.1,3094-3112).
gcagaagatctgaatacta

SEQ ID NO: 152838 - DNA, 19 bp, Homo sapiens
  siRNA target sequence for SCN9A (NM_002977.1,3095-3113).
cagaagatctgaatactaa

SEQ ID NO: 152839 - DNA, 19 bp, Homo sapiens
  siRNA target sequence for SCN9A (NM_002977.1,3097-3115).
gaagatctgaatactaaga

SEQ ID NO: 152840 - DNA, 19 bp, Homo sapiens
  siRNA target sequence for SCN9A (NM_002977.1,3206-3224).
gcagcgtggacaaacactt

SEQ ID NO: 152841 - DNA, 19 bp, Homo sapiens
  siRNA target sequence for SCN9A (NM_002977.1,3209-3227).
gcgtggacaaacacttgat

SEQ ID NO: 152842 - DNA, 19 bp, Homo sapiens
  siRNA target sequence for SCN9A (NM_002977.1,3236-3254).
gtgatggtcaatcatttat

SEQ ID NO: 152843 - DNA, 19 bp, Homo sapiens
  siRNA target sequence for SCN9A (NM_002977.1,3298-3316).
gaatccgatttggaaaata

SEQ ID NO: 152844 - DNA, 19 bp, Homo sapiens
  siRNA target sequence for SCN9A (NM_002977.1,3302-3320).
ccgatttggaaaatatgaa

SEQ ID NO: 152845 - DNA, 19 bp, Homo sapiens
  siRNA target sequence for SCN9A (NM_002977.1,3303-3321).
cgatttggaaaatatgaat

SEQ ID NO: 152846 - DNA, 19 bp, Homo sapiens
  siRNA target sequence for SCN9A (NM_002977.1,3325-3343).
gaggaacttagcagtgatt

SEQ ID NO: 152847 - DNA, 19 bp, Homo sapiens
  siRNA target sequence for SCN9A (NM_002977.1,3338-3356).
gtgattcggatagtgaata

SEQ ID NO: 152848 - DNA, 19 bp, Homo sapiens
  siRNA target sequence for SCN9A (NM_002977.1,3340-3358).
gattcggatagtgaataca

SEQ ID NO: 152849 - DNA, 19 bp, Homo sapiens
  siRNA target sequence for SCN9A (NM_002977.1,3391-3409).
gagtgcagcacagttgata

SEQ ID NO: 152850 - DNA, 19 bp, Homo sapiens
  siRNA target sequence for SCN9A (NM_002977.1,3437-3455).
cagaggctgaacctatgaa

SEQ ID NO: 152851 - DNA, 19 bp, Homo sapiens
  siRNA target sequence for SCN9A (NM_002977.1,3439-3457).
gaggctgaacctatgaatt

SEQ ID NO: 152852 - DNA, 19 bp, Homo sapiens
  siRNA target sequence for SCN9A (NM_002977.1,3465-3483).
gccagaggcctgtttcaca

SEQ ID NO: 152853 - DNA, 19 bp, Homo sapiens
  siRNA target sequence for SCN9A (NM_002977.1,3506-3524).
catgctgccaagttaacat

SEQ ID NO: 152854 - DNA, 19 bp, Homo sapiens
  siRNA target sequence for SCN9A (NM_002977.1,3569-3587).
gctacaagattgttgaaca

SEQ ID NO: 152855 - DNA, 19 bp, Homo sapiens
  siRNA target sequence for SCN9A (NM_002977.1,3583-3601).
gaacacagttggtttgaaa

SEQ ID NO: 152856 - DNA, 19 bp, Homo sapiens
  siRNA target sequence for SCN9A (NM_002977.1,3700-3718).
gcagacaagatcttcactt

SEQ ID NO: 152857 - DNA, 19 bp, Homo sapiens
  siRNA target sequence for SCN9A (NM_002977.1,3857-3875).
cagatcttggccccattaa

SEQ ID NO: 152858 - DNA, 19 bp, Homo sapiens
  siRNA target sequence for SCN9A (NM_002977.1,3859-3877).
gatcttggccccattaaat

SEQ ID NO: 152859 - DNA, 19 bp, Homo sapiens
  siRNA target sequence for SCN9A (NM_002977.1,3942-3960).
cgttgtgaatgcactcata

SEQ ID NO: 152860 - DNA, 19 bp, Homo sapiens
  siRNA target sequence for SCN9A (NM_002977.1,4049-4067).
gcaagttctatgagtgtat

SEQ ID NO: 152861 - DNA, 19 bp, Homo sapiens
  siRNA target sequence for SCN9A (NM_002977.1,4050-4068).
caagttctatgagtgtatt

SEQ ID NO: 152862 - DNA, 19 bp, Homo sapiens
  siRNA target sequence for SCN9A (NM_002977.1,4108-4126).
ccaaatcgttccgaatgtt

SEQ ID NO: 152863 - DNA, 19 bp, Homo sapiens
  siRNA target sequence for SCN9A (NM_002977.1,4109-4127).
caaatcgttccgaatgttt

SEQ ID NO: 152864 - DNA, 19 bp, Homo sapiens
  siRNA target sequence for SCN9A (NM_002977.1,4130-4148).
cccttatgaatgttagtca

SEQ ID NO: 152865 - DNA, 19 bp, Homo sapiens
  siRNA target sequence for SCN9A (NM_002977.1,4131-4149).
ccttatgaatgttagtcaa

SEQ ID NO: 152866 - DNA, 19 bp, Homo sapiens
  siRNA target sequence for SCN9A (NM_002977.1,4132-4150).
cttatgaatgttagtcaaa

SEQ ID NO: 152867 - DNA, 19 bp, Homo sapiens
  siRNA target sequence for SCN9A (NM_002977.1,4189-4207).
gtcggacttggttacctat

SEQ ID NO: 152868 - DNA, 19 bp, Homo sapiens
  siRNA target sequence for SCN9A (NM_002977.1,4193-4211).
gacttggttacctatctct

SEQ ID NO: 152869 - DNA, 19 bp, Homo sapiens
  siRNA target sequence for SCN9A (NM_002977.1,4234-4252).
ggatggacgattattatgt

SEQ ID NO: 152870 - DNA, 19 bp, Homo sapiens
  siRNA target sequence for SCN9A (NM_002977.1,4235-4253).
gatggacgattattatgta

SEQ ID NO: 152871 - DNA, 19 bp, Homo sapiens
  siRNA target sequence for SCN9A (NM_002977.1,4259-4277).
cagtggattctgttaatgt

SEQ ID NO: 152872 - DNA, 19 bp, Homo sapiens
  siRNA target sequence for SCN9A (NM_002977.1,4284-4302).
gcagcccaaatatgaatat

SEQ ID NO: 152873 - DNA, 19 bp, Homo sapiens
  siRNA target sequence for SCN9A (NM_002977.1,4304-4322).
gcctctacatgtatattta

SEQ ID NO: 152874 - DNA, 19 bp, Homo sapiens
  siRNA target sequence for SCN9A (NM_002977.1,4551-4569).
gacaaatcaagcctttgat

SEQ ID NO: 152875 - DNA, 19 bp, Homo sapiens
  siRNA target sequence for SCN9A (NM_002977.1,4558-4576).
caagcctttgatattagta

SEQ ID NO: 152876 - DNA, 19 bp, Homo sapiens
  siRNA target sequence for SCN9A (NM_002977.1,4561-4579).
gcctttgatattagtatca

SEQ ID NO: 152877 - DNA, 19 bp, Homo sapiens
  siRNA target sequence for SCN9A (NM_002977.1,4661-4679).
ggataaatgtggtttttat

SEQ ID NO: 152878 - DNA, 19 bp, Homo sapiens
  siRNA target sequence for SCN9A (NM_002977.1,5593-5611).
cgttcacagatggaagaaa

SEQ ID NO: 152879 - DNA, 19 bp, Homo sapiens
  siRNA target sequence for SCN9A (NM_002977.1,5651-5669).
ccatcacaaccacactaaa

SEQ ID NO: 152880 - DNA, 19 bp, Homo sapiens
  siRNA target sequence for SCN9A (NM_002977.1,5725-5743).
cgcttaaggcaaaatgtca

SEQ ID NO: 152881 - DNA, 19 bp, Homo sapiens
  siRNA target sequence for SCN9A (NM_002977.1,5727-5745).
cttaaggcaaaatgtcaaa

SEQ ID NO: 152882 - DNA, 19 bp, Homo sapiens
  siRNA target sequence for SCN9A (NM_002977.1,5782-5800).
gatgatgatttactcaata

SEQ ID NO: 152883 - DNA, 19 bp, Homo sapiens
  siRNA target sequence for SCUBE1 (NM_173050.1,377-395).
cgagtgtcaggacaataat

SEQ ID NO: 152884 - DNA, 19 bp, Homo sapiens
  siRNA target sequence for SCUBE1 (NM_173050.1,380-398).
gtgtcaggacaataatggt

SEQ ID NO: 152885 - DNA, 19 bp, Homo sapiens
  siRNA target sequence for SCUBE1 (NM_173050.1,496-514).
gctccaatgagggtatgaa

SEQ ID NO: 152886 - DNA, 19 bp, Homo sapiens
  siRNA target sequence for SCUBE1 (NM_173050.1,615-633).
cagaaggactgcacactaa

SEQ ID NO: 152887 - DNA, 19 bp, Homo sapiens
  siRNA target sequence for SCUBE1 (NM_173050.1,625-643).
gcacactaacctgtaatta

SEQ ID NO: 152888 - DNA, 19 bp, Homo sapiens
  siRNA target sequence for SCUBE1 (NM_173050.1,626-644).
cacactaacctgtaattat

SEQ ID NO: 152889 - DNA, 19 bp, Homo sapiens
  siRNA target sequence for SCUBE1 (NM_173050.1,630-648).
ctaacctgtaattatggaa

SEQ ID NO: 152890 - DNA, 19 bp, Homo sapiens
  siRNA target sequence for SCUBE1 (NM_173050.1,697-715).
gtggttgccaccagaagta

SEQ ID NO: 152891 - DNA, 19 bp, Homo sapiens
  siRNA target sequence for SCUBE1 (NM_173050.1,746-764).
cgagacgtgcgcagtcaat

SEQ ID NO: 152892 - DNA, 19 bp, Homo sapiens
  siRNA target sequence for SCUBE1 (NM_173050.1,747-765).
gagacgtgcgcagtcaata

SEQ ID NO: 152893 - DNA, 19 bp, Homo sapiens
  siRNA target sequence for SCUBE1 (NM_173050.1,814-832).
gcagctgccccgttggatt

SEQ ID NO: 152894 - DNA, 19 bp, Homo sapiens
  siRNA target sequence for SCUBE1 (NM_173050.1,818-836).
ctgccccgttggattcaca

SEQ ID NO: 152895 - DNA, 19 bp, Homo sapiens
  siRNA target sequence for SCUBE1 (NM_173050.1,840-858).
cagccggacgggaagacat

SEQ ID NO: 152896 - DNA, 19 bp, Homo sapiens
  siRNA target sequence for SCUBE1 (NM_173050.1,1340-1358).
cgtgccagactcggaaaat

SEQ ID NO: 152897 - DNA, 19 bp, Homo sapiens
  siRNA target sequence for SCUBE1 (NM_173050.1,1341-1359).
gtgccagactcggaaaata

SEQ ID NO: 152898 - DNA, 19 bp, Homo sapiens
  siRNA target sequence for SCUBE1 (NM_173050.1,1963-1981).
catgtatgccaggaacata

SEQ ID NO: 152899 - DNA, 19 bp, Homo sapiens
  siRNA target sequence for SCUBE1 (NM_173050.1,2926-2944).
cacggtccttcatcaaact

SEQ ID NO: 152900 - DNA, 19 bp, Homo sapiens
  siRNA target sequence for SCUBE2 (NM_020974.1,226-244).
gtgcccaagggctagatga

SEQ ID NO: 152901 - DNA, 19 bp, Homo sapiens
  siRNA target sequence for SCUBE2 (NM_020974.1,370-388).
gctgtgtccatgactgttt

SEQ ID NO: 152902 - DNA, 19 bp, Homo sapiens
  siRNA target sequence for SCUBE2 (NM_020974.1,373-391).
gtgtccatgactgtttgaa

SEQ ID NO: 152903 - DNA, 19 bp, Homo sapiens
  siRNA target sequence for SCUBE2 (NM_020974.1,438-456).
gctcatgacggtcataatt

SEQ ID NO: 152904 - DNA, 19 bp, Homo sapiens
  siRNA target sequence for SCUBE2 (NM_020974.1,446-464).
cggtcataattgtcttgat

SEQ ID NO: 152905 - DNA, 19 bp, Homo sapiens
  siRNA target sequence for SCUBE2 (NM_020974.1,448-466).
gtcataattgtcttgatgt

SEQ ID NO: 152906 - DNA, 19 bp, Homo sapiens
  siRNA target sequence for SCUBE2 (NM_020974.1,516-534).
gtcatggggagctatgagt

SEQ ID NO: 152907 - DNA, 19 bp, Homo sapiens
  siRNA target sequence for SCUBE2 (NM_020974.1,599-617).
gggcctgagctgcatgaat

SEQ ID NO: 152908 - DNA, 19 bp, Homo sapiens
  siRNA target sequence for SCUBE2 (NM_020974.1,600-618).
ggcctgagctgcatgaata

SEQ ID NO: 152909 - DNA, 19 bp, Homo sapiens
  siRNA target sequence for SCUBE2 (NM_020974.1,601-619).
gcctgagctgcatgaataa

SEQ ID NO: 152910 - DNA, 19 bp, Homo sapiens
  siRNA target sequence for SCUBE2 (NM_020974.1,719-737).
catcttgacctgtaaccat

SEQ ID NO: 152911 - DNA, 19 bp, Homo sapiens
  siRNA target sequence for SCUBE2 (NM_020974.1,960-978).
gaccgcacctgtaaggata

SEQ ID NO: 152912 - DNA, 19 bp, Homo sapiens
  siRNA target sequence for SCUBE2 (NM_020974.1,963-981).
cgcacctgtaaggatactt

SEQ ID NO: 152913 - DNA, 19 bp, Homo sapiens
  siRNA target sequence for SCUBE2 (NM_020974.1,1023-1041).
cagttggatgggaagacat

SEQ ID NO: 152914 - DNA, 19 bp, Homo sapiens
  siRNA target sequence for SCUBE2 (NM_020974.1,1067-1085).
ccgcaatggaggttgtgat

SEQ ID NO: 152915 - DNA, 19 bp, Homo sapiens
  siRNA target sequence for SCUBE2 (NM_020974.1,1121-1139).
cggctgcaagaaaggattt

SEQ ID NO: 152916 - DNA, 19 bp, Homo sapiens
  siRNA target sequence for SCUBE2 (NM_020974.1,1176-1194).
gatgagtgctctttggata

SEQ ID NO: 152917 - DNA, 19 bp, Homo sapiens
  siRNA target sequence for SCUBE2 (NM_020974.1,1454-1472).
cctgcactgcggtaagagt

SEQ ID NO: 152918 - DNA, 19 bp, Homo sapiens
  siRNA target sequence for SCUBE2 (NM_020974.1,1549-1567).
gtgtaacctttaagctaaa

SEQ ID NO: 152919 - DNA, 19 bp, Homo sapiens
  siRNA target sequence for SCUBE2 (NM_020974.1,1569-1587).
gaaggcaagtgtagtttga

SEQ ID NO: 152920 - DNA, 19 bp, Homo sapiens
  siRNA target sequence for SCUBE2 (NM_020974.1,1572-1590).
ggcaagtgtagtttgaaaa

SEQ ID NO: 152921 - DNA, 19 bp, Homo sapiens
  siRNA target sequence for SCUBE2 (NM_020974.1,1657-1675).
gcttccgctacgtaaacct

SEQ ID NO: 152922 - DNA, 19 bp, Homo sapiens
  siRNA target sequence for SCUBE2 (NM_020974.1,1658-1676).
cttccgctacgtaaacctt

SEQ ID NO: 152923 - DNA, 19 bp, Homo sapiens
  siRNA target sequence for SCUBE2 (NM_020974.1,1662-1680).
cgctacgtaaaccttacat

SEQ ID NO: 152924 - DNA, 19 bp, Homo sapiens
  siRNA target sequence for SCUBE2 (NM_020974.1,1723-1741).
gcacccctaaggaaatgtt

SEQ ID NO: 152925 - DNA, 19 bp, Homo sapiens
  siRNA target sequence for SCUBE2 (NM_020974.1,1724-1742).
cacccctaaggaaatgttt

SEQ ID NO: 152926 - DNA, 19 bp, Homo sapiens
  siRNA target sequence for SCUBE2 (NM_020974.1,1728-1746).
cctaaggaaatgtttatca

SEQ ID NO: 152927 - DNA, 19 bp, Homo sapiens
  siRNA target sequence for SCUBE2 (NM_020974.1,1778-1796).
ggaggtgacagcttcttgt

SEQ ID NO: 152928 - DNA, 19 bp, Homo sapiens
  siRNA target sequence for SCUBE2 (NM_020974.1,1843-1861).
ccatccgcacgctcagaaa

SEQ ID NO: 152929 - DNA, 19 bp, Homo sapiens
  siRNA target sequence for SCUBE2 (NM_020974.1,1973-1991).
gggtcatgcagaaaaccaa

SEQ ID NO: 152930 - DNA, 19 bp, Homo sapiens
  siRNA target sequence for SCUBE2 (NM_020974.1,2002-2020).
gcagggctgggacctatta

SEQ ID NO: 152931 - DNA, 19 bp, Homo sapiens
  siRNA target sequence for SCUBE2 (NM_020974.1,2003-2021).
cagggctgggacctattat

SEQ ID NO: 152932 - DNA, 19 bp, Homo sapiens
  siRNA target sequence for SCUBE2 (NM_020974.1,2005-2023).
gggctgggacctattatga

SEQ ID NO: 152933 - DNA, 19 bp, Homo sapiens
  siRNA target sequence for SCUBE2 (NM_020974.1,2006-2024).
ggctgggacctattatgat

SEQ ID NO: 152934 - DNA, 19 bp, Homo sapiens
  siRNA target sequence for SCUBE2 (NM_020974.1,2028-2046).
gcacgagaacgctgcattt

SEQ ID NO: 152935 - DNA, 19 bp, Homo sapiens
  siRNA target sequence for SCUBE2 (NM_020974.1,2029-2047).
cacgagaacgctgcatttt

SEQ ID NO: 152936 - DNA, 19 bp, Homo sapiens
  siRNA target sequence for SCUBE2 (NM_020974.1,2031-2049).
cgagaacgctgcattttat

SEQ ID NO: 152937 - DNA, 19 bp, Homo sapiens
  siRNA target sequence for SCUBE2 (NM_020974.1,2132-2150).
gaccccagaagcttggaat

SEQ ID NO: 152938 - DNA, 19 bp, Homo sapiens
  siRNA target sequence for SCUBE2 (NM_020974.1,2134-2152).
ccccagaagcttggaatat

SEQ ID NO: 152939 - DNA, 19 bp, Homo sapiens
  siRNA target sequence for SCUBE2 (NM_020974.1,2142-2160).
gcttggaatatgtctgaat

SEQ ID NO: 152940 - DNA, 19 bp, Homo sapiens
  siRNA target sequence for SCUBE2 (NM_020974.1,2281-2299).
gccttgccaccaaacatca

SEQ ID NO: 152941 - DNA, 19 bp, Homo sapiens
  siRNA target sequence for SCUBE2 (NM_020974.1,2341-2359).
gttcacctggacatttcta

SEQ ID NO: 152942 - DNA, 19 bp, Homo sapiens
  siRNA target sequence for SCUBE2 (NM_020974.1,2365-2383).
ccaccactcaccgatgtat

SEQ ID NO: 152943 - DNA, 19 bp, Homo sapiens
  siRNA target sequence for SCUBE2 (NM_020974.1,2366-2384).
caccactcaccgatgtatt

SEQ ID NO: 152944 - DNA, 19 bp, Homo sapiens
  siRNA target sequence for SCUBE2 (NM_020974.1,2386-2404).
gttgcccagtgggaacata

SEQ ID NO: 152945 - DNA, 19 bp, Homo sapiens
  siRNA target sequence for SCUBE2 (NM_020974.1,2405-2423).
ccagcctgaatttggaaaa

SEQ ID NO: 152946 - DNA, 19 bp, Homo sapiens
  siRNA target sequence for SCUBE2 (NM_020974.1,2406-2424).
cagcctgaatttggaaaaa

SEQ ID NO: 152947 - DNA, 19 bp, Homo sapiens
  siRNA target sequence for SCUBE2 (NM_020974.1,2466-2484).
gatggctccacaaacataa

SEQ ID NO: 152948 - DNA, 19 bp, Homo sapiens
  siRNA target sequence for SCUBE2 (NM_020974.1,2676-2694).
ctggtgatgcggaaaacct

SEQ ID NO: 152949 - DNA, 19 bp, Homo sapiens
  siRNA target sequence for SCUBE2 (NM_020974.1,2702-2720).
caattctgtgacaacatat

SEQ ID NO: 152950 - DNA, 19 bp, Homo sapiens
  siRNA target sequence for SCUBE2 (NM_020974.1,2825-2843).
ggtcccatacgtgacatat

SEQ ID NO: 152951 - DNA, 19 bp, Homo sapiens
  siRNA target sequence for SCUBE2 (NM_020974.1,2828-2846).
cccatacgtgacatatgat

SEQ ID NO: 152952 - DNA, 19 bp, Homo sapiens
  siRNA target sequence for SCUBE2 (NM_020974.1,3032-3050).
ccgattgctacgttccaaa

SEQ ID NO: 152953 - DNA, 19 bp, Homo sapiens
  siRNA target sequence for SCUBE2 (NM_020974.1,3058-3076).
ggtttttgagaccttacaa

SEQ ID NO: 152954 - DNA, 19 bp, Homo sapiens
  siRNA target sequence for SEPN1 (NM_020451.1,297-315).
ctgacggggatatgtacat

SEQ ID NO: 152955 - DNA, 19 bp, Homo sapiens
  siRNA target sequence for SEPN1 (NM_020451.1,299-317).
gacggggatatgtacatca

SEQ ID NO: 152956 - DNA, 19 bp, Homo sapiens
  siRNA target sequence for SEPN1 (NM_020451.1,760-778).
gtccaacaaccgcttctat

SEQ ID NO: 152957 - DNA, 19 bp, Homo sapiens
  siRNA target sequence for SEPN1 (NM_020451.1,833-851).
caccctcggccctttgtga

SEQ ID NO: 152958 - DNA, 19 bp, Homo sapiens
  siRNA target sequence for SEPN1 (NM_020451.1,1123-1141).
ggtggacatcggctacata

SEQ ID NO: 152959 - DNA, 19 bp, Homo sapiens
  siRNA target sequence for SEPN1 (NM_020451.1,1316-1334).
gccatgtaccccttcaaga

SEQ ID NO: 152960 - DNA, 19 bp, Homo sapiens
  siRNA target sequence for SEPN1 (NM_020451.1,1463-1481).
gagactgtcctggaaagtt

SEQ ID NO: 152961 - DNA, 19 bp, Homo sapiens
  siRNA target sequence for SEPN1 (NM_020451.1,1619-1637).
cccgtggagatgatgatct

SEQ ID NO: 152962 - DNA, 19 bp, Homo sapiens
  siRNA target sequence for SEPN1 (NM_020451.1,1712-1730).
gaaatcgagagcaatctct

SEQ ID NO: 152963 - DNA, 19 bp, Homo sapiens
  siRNA target sequence for SLC25A12 (NM_003705.2,16-34).
gtcaaggtgcagacaacta

SEQ ID NO: 152964 - DNA, 19 bp, Homo sapiens
  siRNA target sequence for SLC25A12 (NM_003705.2,38-56).
gaggggatcctcatgagtt

SEQ ID NO: 152965 - DNA, 19 bp, Homo sapiens
  siRNA target sequence for SLC25A12 (NM_003705.2,40-58).
ggggatcctcatgagttaa

SEQ ID NO: 152966 - DNA, 19 bp, Homo sapiens
  siRNA target sequence for SLC25A12 (NM_003705.2,43-61).
gatcctcatgagttaagaa

SEQ ID NO: 152967 - DNA, 19 bp, Homo sapiens
  siRNA target sequence for SLC25A12 (NM_003705.2,123-141).
ctttgttcagcgctatctt

SEQ ID NO: 152968 - DNA, 19 bp, Homo sapiens
  siRNA target sequence for SLC25A12 (NM_003705.2,133-151).
cgctatcttggactgtata

SEQ ID NO: 152969 - DNA, 19 bp, Homo sapiens
  siRNA target sequence for SLC25A12 (NM_003705.2,134-152).
gctatcttggactgtataa

SEQ ID NO: 152970 - DNA, 19 bp, Homo sapiens
  siRNA target sequence for SLC25A12 (NM_003705.2,135-153).
ctatcttggactgtataat

SEQ ID NO: 152971 - DNA, 19 bp, Homo sapiens
  siRNA target sequence for SLC25A12 (NM_003705.2,147-165).
gtataatgatccaaatagt

SEQ ID NO: 152972 - DNA, 19 bp, Homo sapiens
  siRNA target sequence for SLC25A12 (NM_003705.2,189-207).
ggcaggagtagctgatcaa

SEQ ID NO: 152973 - DNA, 19 bp, Homo sapiens
  siRNA target sequence for SLC25A12 (NM_003705.2,194-212).
gagtagctgatcaaaccaa

SEQ ID NO: 152974 - DNA, 19 bp, Homo sapiens
  siRNA target sequence for SLC25A12 (NM_003705.2,218-236).
ggttgatctcctatcaaga

SEQ ID NO: 152975 - DNA, 19 bp, Homo sapiens
  siRNA target sequence for SLC25A12 (NM_003705.2,356-374).
gacagactattattcatca

SEQ ID NO: 152976 - DNA, 19 bp, Homo sapiens
  siRNA target sequence for SLC25A12 (NM_003705.2,383-401).
cttttaactgggattgtga

SEQ ID NO: 152977 - DNA, 19 bp, Homo sapiens
  siRNA target sequence for SLC25A12 (NM_003705.2,430-448).
cggaagaagcatcttaact

SEQ ID NO: 152978 - DNA, 19 bp, Homo sapiens
  siRNA target sequence for SLC25A12 (NM_003705.2,439-457).
catcttaactacacagaat

SEQ ID NO: 152979 - DNA, 19 bp, Homo sapiens
  siRNA target sequence for SLC25A12 (NM_003705.2,452-470).
cagaattcacgcagtttct

SEQ ID NO: 152980 - DNA, 19 bp, Homo sapiens
  siRNA target sequence for SLC25A12 (NM_003705.2,504-522).
ctttgcactcaaagacaaa

SEQ ID NO: 152981 - DNA, 19 bp, Homo sapiens
  siRNA target sequence for SLC25A12 (NM_003705.2,596-614).
cttttgtggaggagaactt

SEQ ID NO: 152982 - DNA, 19 bp, Homo sapiens
  siRNA target sequence for SLC25A12 (NM_003705.2,601-619).
gtggaggagaacttagttt

SEQ ID NO: 152983 - DNA, 19 bp, Homo sapiens
  siRNA target sequence for SLC25A12 (NM_003705.2,603-621).
ggaggagaacttagtttca

SEQ ID NO: 152984 - DNA, 19 bp, Homo sapiens
  siRNA target sequence for SLC25A12 (NM_003705.2,670-688).
gcatttaactcgttactga

SEQ ID NO: 152985 - DNA, 19 bp, Homo sapiens
  siRNA target sequence for SLC25A12 (NM_003705.2,671-689).
catttaactcgttactgaa

SEQ ID NO: 152986 - DNA, 19 bp, Homo sapiens
  siRNA target sequence for SLC25A12 (NM_003705.2,696-714).
ggagcttgttcgtaagata

SEQ ID NO: 152987 - DNA, 19 bp, Homo sapiens
  siRNA target sequence for SLC25A12 (NM_003705.2,697-715).
gagcttgttcgtaagatat

SEQ ID NO: 152988 - DNA, 19 bp, Homo sapiens
  siRNA target sequence for SLC25A12 (NM_003705.2,699-717).
gcttgttcgtaagatatat

SEQ ID NO: 152989 - DNA, 19 bp, Homo sapiens
  siRNA target sequence for SLC25A12 (NM_003705.2,700-718).
cttgttcgtaagatatata

SEQ ID NO: 152990 - DNA, 19 bp, Homo sapiens
  siRNA target sequence for SLC25A12 (NM_003705.2,703-721).
gttcgtaagatatatagca

SEQ ID NO: 152991 - DNA, 19 bp, Homo sapiens
  siRNA target sequence for SLC25A12 (NM_003705.2,798-816).
cacaccactagaaattgat

SEQ ID NO: 152992 - DNA, 19 bp, Homo sapiens
  siRNA target sequence for SLC25A12 (NM_003705.2,826-844).
cagcttgcagacttatata

SEQ ID NO: 152993 - DNA, 19 bp, Homo sapiens
  siRNA target sequence for SLC25A12 (NM_003705.2,828-846).
gcttgcagacttatataat

SEQ ID NO: 152994 - DNA, 19 bp, Homo sapiens
  siRNA target sequence for SLC25A12 (NM_003705.2,832-850).
gcagacttatataatgctt

SEQ ID NO: 152995 - DNA, 19 bp, Homo sapiens
  siRNA target sequence for SLC25A12 (NM_003705.2,847-865).
gcttcagggcgcttgactt

SEQ ID NO: 152996 - DNA, 19 bp, Homo sapiens
  siRNA target sequence for SLC25A12 (NM_003705.2,848-866).
cttcagggcgcttgacttt

SEQ ID NO: 152997 - DNA, 19 bp, Homo sapiens
  siRNA target sequence for SLC25A12 (NM_003705.2,979-997).
gccgagtctgcttacagat

SEQ ID NO: 152998 - DNA, 19 bp, Homo sapiens
  siRNA target sequence for SLC25A12 (NM_003705.2,980-998).
ccgagtctgcttacagatt

SEQ ID NO: 152999 - DNA, 19 bp, Homo sapiens
  siRNA target sequence for SLC25A12 (NM_003705.2,1099-1117).
gttggggagctaatgtaca

SEQ ID NO: 153000 - DNA, 19 bp, Homo sapiens
  siRNA target sequence for SLC25A12 (NM_003705.2,1102-1120).
ggggagctaatgtacaaaa

SEQ ID NO: 153001 - DNA, 19 bp, Homo sapiens
  siRNA target sequence for SLC25A12 (NM_003705.2,1103-1121).
gggagctaatgtacaaaaa

SEQ ID NO: 153002 - DNA, 19 bp, Homo sapiens
  siRNA target sequence for SLC25A12 (NM_003705.2,1105-1123).
gagctaatgtacaaaaaca

SEQ ID NO: 153003 - DNA, 19 bp, Homo sapiens
  siRNA target sequence for SLC25A12 (NM_003705.2,1149-1167).
gcgttatgagggcttcttt

SEQ ID NO: 153004 - DNA, 19 bp, Homo sapiens
  siRNA target sequence for SLC25A12 (NM_003705.2,1181-1199).
gtctgataccacaacttat

SEQ ID NO: 153005 - DNA, 19 bp, Homo sapiens
  siRNA target sequence for SLC25A12 (NM_003705.2,1219-1237).
gccattaaactgactgtta

SEQ ID NO: 153006 - DNA, 19 bp, Homo sapiens
  siRNA target sequence for SLC25A12 (NM_003705.2,1321-1339).
ggctctcaggtcattttta

SEQ ID NO: 153007 - DNA, 19 bp, Homo sapiens
  siRNA target sequence for SLC25A12 (NM_003705.2,1340-1358).
ccaacccattggagatagt

SEQ ID NO: 153008 - DNA, 19 bp, Homo sapiens
  siRNA target sequence for SLC25A12 (NM_003705.2,1434-1452).
gggaatttttggtctgtat

SEQ ID NO: 153009 - DNA, 19 bp, Homo sapiens
  siRNA target sequence for SLC25A12 (NM_003705.2,1436-1454).
gaatttttggtctgtataa

SEQ ID NO: 153010 - DNA, 19 bp, Homo sapiens
  siRNA target sequence for SLC25A12 (NM_003705.2,1550-1568).
gacacgtgggaggtttaaa

SEQ ID NO: 153011 - DNA, 19 bp, Homo sapiens
  siRNA target sequence for SLC25A12 (NM_003705.2,1663-1681).
gctggccagacgacataca

SEQ ID NO: 153012 - DNA, 19 bp, Homo sapiens
  siRNA target sequence for SLC25A12 (NM_003705.2,1682-1700).
gtggtgtcatcgactgttt

SEQ ID NO: 153013 - DNA, 19 bp, Homo sapiens
  siRNA target sequence for SLC25A12 (NM_003705.2,1684-1702).
ggtgtcatcgactgtttca

SEQ ID NO: 153014 - DNA, 19 bp, Homo sapiens
  siRNA target sequence for SLC25A12 (NM_003705.2,1692-1710).
cgactgtttcaggaagatt

SEQ ID NO: 153015 - DNA, 19 bp, Homo sapiens
  siRNA target sequence for SLC25A12 (NM_003705.2,1746-1764).
gactgcagctcgagtgttt

SEQ ID NO: 153016 - DNA, 19 bp, Homo sapiens
  siRNA target sequence for SLC25A12 (NM_003705.2,1750-1768).
gcagctcgagtgtttcgat

SEQ ID NO: 153017 - DNA, 19 bp, Homo sapiens
  siRNA target sequence for SLC25A12 (NM_003705.2,1784-1802).
gtgttaccttggtcactta

SEQ ID NO: 153018 - DNA, 19 bp, Homo sapiens
  siRNA target sequence for SLC25A12 (NM_003705.2,1810-1828).
ctccagcggtggttttaca

SEQ ID NO: 153019 - DNA, 19 bp, Homo sapiens
  siRNA target sequence for SLC25A12 (NM_003705.2,1812-1830).
ccagcggtggttttacatt

SEQ ID NO: 153020 - DNA, 19 bp, Homo sapiens
  siRNA target sequence for SLC25A12 (NM_003705.2,1845-1863).
caaacccgctggttcagaa

SEQ ID NO: 153021 - DNA, 19 bp, Homo sapiens
  siRNA target sequence for SLC25A12 (NM_003705.2,1943-1961).
cgtttgcaggcatcgaaaa

SEQ ID NO: 153022 - DNA, 19 bp, Homo sapiens
  siRNA target sequence for SLC25A12 (NM_003705.2,1970-1988).
gcctttatctcccgaaatt

SEQ ID NO: 153023 - DNA, 19 bp, Homo sapiens
  siRNA target sequence for SLC25A12 (NM_003705.2,1971-1989).
cctttatctcccgaaattt

SEQ ID NO: 153024 - DNA, 19 bp, Homo sapiens
  siRNA target sequence for SLC25A13 (NM_014251.1,148-166).
ccaaggtggctttaaccaa

SEQ ID NO: 153025 - DNA, 19 bp, Homo sapiens
  siRNA target sequence for SLC25A13 (NM_014251.1,174-192).
gatccagctgagcttagaa

SEQ ID NO: 153026 - DNA, 19 bp, Homo sapiens
  siRNA target sequence for SLC25A13 (NM_014251.1,178-196).
cagctgagcttagaacaat

SEQ ID NO: 153027 - DNA, 19 bp, Homo sapiens
  siRNA target sequence for SLC25A13 (NM_014251.1,180-198).
gctgagcttagaacaatat

SEQ ID NO: 153028 - DNA, 19 bp, Homo sapiens
  siRNA target sequence for SLC25A13 (NM_014251.1,181-199).
ctgagcttagaacaatatt

SEQ ID NO: 153029 - DNA, 19 bp, Homo sapiens
  siRNA target sequence for SLC25A13 (NM_014251.1,219-237).
gagaaaaacggtgaatttt

SEQ ID NO: 153030 - DNA, 19 bp, Homo sapiens
  siRNA target sequence for SLC25A13 (NM_014251.1,258-276).
gtcactcgatacttgaaca

SEQ ID NO: 153031 - DNA, 19 bp, Homo sapiens
  siRNA target sequence for SLC25A13 (NM_014251.1,260-278).
cactcgatacttgaacatt

SEQ ID NO: 153032 - DNA, 19 bp, Homo sapiens
  siRNA target sequence for SLC25A13 (NM_014251.1,285-303).
gaaagccagcctaatccaa

SEQ ID NO: 153033 - DNA, 19 bp, Homo sapiens
  siRNA target sequence for SLC25A13 (NM_014251.1,329-347).
ggtggatcagaccaaagat

SEQ ID NO: 153034 - DNA, 19 bp, Homo sapiens
  siRNA target sequence for SLC25A13 (NM_014251.1,504-522).
caacatattccatttaact

SEQ ID NO: 153035 - DNA, 19 bp, Homo sapiens
  siRNA target sequence for SLC25A13 (NM_014251.1,514-532).
catttaactgggattcaga

SEQ ID NO: 153036 - DNA, 19 bp, Homo sapiens
  siRNA target sequence for SLC25A13 (NM_014251.1,572-590).
cctgacatatgcggaattt

SEQ ID NO: 153037 - DNA, 19 bp, Homo sapiens
  siRNA target sequence for SLC25A13 (NM_014251.1,767-785).
cacatcccatcaagttagt

SEQ ID NO: 153038 - DNA, 19 bp, Homo sapiens
  siRNA target sequence for SLC25A13 (NM_014251.1,769-787).
catcccatcaagttagttt

SEQ ID NO: 153039 - DNA, 19 bp, Homo sapiens
  siRNA target sequence for SLC25A13 (NM_014251.1,777-795).
caagttagtttctcctatt

SEQ ID NO: 153040 - DNA, 19 bp, Homo sapiens
  siRNA target sequence for SLC25A13 (NM_014251.1,788-806).
ctcctattttaatggattt

SEQ ID NO: 153041 - DNA, 19 bp, Homo sapiens
  siRNA target sequence for SLC25A13 (NM_014251.1,790-808).
cctattttaatggatttaa

SEQ ID NO: 153042 - DNA, 19 bp, Homo sapiens
  siRNA target sequence for SLC25A13 (NM_014251.1,802-820).
gatttaattcgctccttaa

SEQ ID NO: 153043 - DNA, 19 bp, Homo sapiens
  siRNA target sequence for SLC25A13 (NM_014251.1,884-902).
gactaaggaggagtttgtt

SEQ ID NO: 153044 - DNA, 19 bp, Homo sapiens
  siRNA target sequence for SLC25A13 (NM_014251.1,900-918).
gttctggcagctcagaaat

SEQ ID NO: 153045 - DNA, 19 bp, Homo sapiens
  siRNA target sequence for SLC25A13 (NM_014251.1,934-952).
ccatggaagttgacatctt

SEQ ID NO: 153046 - DNA, 19 bp, Homo sapiens
  siRNA target sequence for SLC25A13 (NM_014251.1,942-960).
gttgacatcttgtttcagt

SEQ ID NO: 153047 - DNA, 19 bp, Homo sapiens
  siRNA target sequence for SLC25A13 (NM_014251.1,953-971).
gtttcagttagcagattta

SEQ ID NO: 153048 - DNA, 19 bp, Homo sapiens
  siRNA target sequence for SLC25A13 (NM_014251.1,1070-1088).
gaaggcctcaggtgattca

SEQ ID NO: 153049 - DNA, 19 bp, Homo sapiens
  siRNA target sequence for SLC25A13 (NM_014251.1,1087-1105).
cagctcgaccagttcttct

SEQ ID NO: 153050 - DNA, 19 bp, Homo sapiens
  siRNA target sequence for SLC25A13 (NM_014251.1,1175-1193).
gtatcctatcgatcttgta

SEQ ID NO: 153051 - DNA, 19 bp, Homo sapiens
  siRNA target sequence for SLC25A13 (NM_014251.1,1179-1197).
cctatcgatcttgtaaaaa

SEQ ID NO: 153052 - DNA, 19 bp, Homo sapiens
  siRNA target sequence for SLC25A13 (NM_014251.1,1233-1251).
gtgggagaactcatgtata

SEQ ID NO: 153053 - DNA, 19 bp, Homo sapiens
  siRNA target sequence for SLC25A13 (NM_014251.1,1274-1292).
gaaagtgctacgctatgaa

SEQ ID NO: 153054 - DNA, 19 bp, Homo sapiens
  siRNA target sequence for SLC25A13 (NM_014251.1,1295-1313).
cttctttggactgtataga

SEQ ID NO: 153055 - DNA, 19 bp, Homo sapiens
  siRNA target sequence for SLC25A13 (NM_014251.1,1314-1332).
ggtctgttgccacagttat

SEQ ID NO: 153056 - DNA, 19 bp, Homo sapiens
  siRNA target sequence for SLC25A13 (NM_014251.1,1373-1391).
cgattttgtgagggataaa

SEQ ID NO: 153057 - DNA, 19 bp, Homo sapiens
  siRNA target sequence for SLC25A13 (NM_014251.1,1490-1508).
cgtcaagatccgtttgcaa

SEQ ID NO: 153058 - DNA, 19 bp, Homo sapiens
  siRNA target sequence for SLC25A13 (NM_014251.1,1559-1577).
gcgggacctggggtttttt

SEQ ID NO: 153059 - DNA, 19 bp, Homo sapiens
  siRNA target sequence for SLC25A13 (NM_014251.1,1589-1607).
gggtgccaaagcatgcttt

SEQ ID NO: 153060 - DNA, 19 bp, Homo sapiens
  siRNA target sequence for SLC25A13 (NM_014251.1,1621-1639).
ctttctcggccatctactt

SEQ ID NO: 153061 - DNA, 19 bp, Homo sapiens
  siRNA target sequence for SLC25A13 (NM_014251.1,1642-1660).
cgtgctatgctcatgtgaa

SEQ ID NO: 153062 - DNA, 19 bp, Homo sapiens
  siRNA target sequence for SLC25A13 (NM_014251.1,1656-1674).
gtgaaggcttcctttgcaa

SEQ ID NO: 153063 - DNA, 19 bp, Homo sapiens
  siRNA target sequence for SLC25A13 (NM_014251.1,1810-1828).
cttacagcggagtgataga

SEQ ID NO: 153064 - DNA, 19 bp, Homo sapiens
  siRNA target sequence for SLC25A13 (NM_014251.1,1818-1836).
ggagtgatagactgcttta

SEQ ID NO: 153065 - DNA, 19 bp, Homo sapiens
  siRNA target sequence for SLC25A13 (NM_014251.1,1821-1839).
gtgatagactgctttagaa

SEQ ID NO: 153066 - DNA, 19 bp, Homo sapiens
  siRNA target sequence for SLC25A13 (NM_014251.1,1879-1897).
gagctggtgctcgtgtatt

SEQ ID NO: 153067 - DNA, 19 bp, Homo sapiens
  siRNA target sequence for SLC25A13 (NM_014251.1,1884-1902).
ggtgctcgtgtatttcgat

SEQ ID NO: 153068 - DNA, 19 bp, Homo sapiens
  siRNA target sequence for SLC25A13 (NM_014251.1,1928-1946).
gctgacttacgaattgcta

SEQ ID NO: 153069 - DNA, 19 bp, Homo sapiens
  siRNA target sequence for SLC25A13 (NM_014251.1,1944-1962).
ctacagcgatggttctaca

SEQ ID NO: 153070 - DNA, 19 bp, Homo sapiens
  siRNA target sequence for SLC25A13 (NM_014251.1,2063-2081).
ggcagttgctacatttgca

SEQ ID NO: 153071 - DNA, 19 bp, Homo sapiens
  siRNA target sequence for SLC25A13 (NM_014251.1,2093-2111).
caaatttggactttaccta

SEQ ID NO: 153072 - DNA, 19 bp, Homo sapiens
  siRNA target sequence for SMOC1 (NM_022137.2,343-361).
caggccccaggtttctaat

SEQ ID NO: 153073 - DNA, 19 bp, Homo sapiens
  siRNA target sequence for SMOC1 (NM_022137.2,345-363).
ggccccaggtttctaataa

SEQ ID NO: 153074 - DNA, 19 bp, Homo sapiens
  siRNA target sequence for SMOC1 (NM_022137.2,347-365).
ccccaggtttctaataagt

SEQ ID NO: 153075 - DNA, 19 bp, Homo sapiens
  siRNA target sequence for SMOC1 (NM_022137.2,609-627).
ggcgaggatggctccttta

SEQ ID NO: 153076 - DNA, 19 bp, Homo sapiens
  siRNA target sequence for SMOC1 (NM_022137.2,635-653).
gcagtgccatacttacact

SEQ ID NO: 153077 - DNA, 19 bp, Homo sapiens
  siRNA target sequence for SMOC1 (NM_022137.2,697-715).
gctcttctgtgcagaataa

SEQ ID NO: 153078 - DNA, 19 bp, Homo sapiens
  siRNA target sequence for SMOC1 (NM_022137.2,710-728).
gaataaaactcctgtatgt

SEQ ID NO: 153079 - DNA, 19 bp, Homo sapiens
  siRNA target sequence for SMOC1 (NM_022137.2,846-864).
gccccaactctatggatta

SEQ ID NO: 153080 - DNA, 19 bp, Homo sapiens
  siRNA target sequence for SMOC1 (NM_022137.2,850-868).
caactctatggattaaaca

SEQ ID NO: 153081 - DNA, 19 bp, Homo sapiens
  siRNA target sequence for SMOC1 (NM_022137.2,882-900).
gactccaaactgaacaaca

SEQ ID NO: 153082 - DNA, 19 bp, Homo sapiens
  siRNA target sequence for SMOC1 (NM_022137.2,910-928).
gaaattcagagaaagtcta

SEQ ID NO: 153083 - DNA, 19 bp, Homo sapiens
  siRNA target sequence for SMOC1 (NM_022137.2,978-996).
ccccgtgagggtattgtca

SEQ ID NO: 153084 - DNA, 19 bp, Homo sapiens
  siRNA target sequence for SMOC1 (NM_022137.2,979-997).
cccgtgagggtattgtcat

SEQ ID NO: 153085 - DNA, 19 bp, Homo sapiens
  siRNA target sequence for SMOC1 (NM_022137.2,1008-1026).
gcccctgggggactctata

SEQ ID NO: 153086 - DNA, 19 bp, Homo sapiens
  siRNA target sequence for SMOC1 (NM_022137.2,1009-1027).
cccctgggggactctataa

SEQ ID NO: 153087 - DNA, 19 bp, Homo sapiens
  siRNA target sequence for SMOC1 (NM_022137.2,1137-1155).
gacgccagggccaagacta

SEQ ID NO: 153088 - DNA, 19 bp, Homo sapiens
  siRNA target sequence for SMOC1 (NM_022137.2,1378-1396).
gcagcaacgacattaacaa

SEQ ID NO: 153089 - DNA, 19 bp, Homo sapiens
  siRNA target sequence for SMOC1 (NM_022137.2,1418-1436).
gcgctacgtgaagaagaaa

SEQ ID NO: 153090 - DNA, 19 bp, Homo sapiens
  siRNA target sequence for SMOC1 (NM_022137.2,1522-1540).
gctgcctgggtgttagcaa

SEQ ID NO: 153091 - DNA, 19 bp, Homo sapiens
  siRNA target sequence for SMOC1 (NM_022137.2,1523-1541).
ctgcctgggtgttagcaaa

SEQ ID NO: 153092 - DNA, 19 bp, Homo sapiens
  siRNA target sequence for SMOC2 (NM_022138.1,95-113).
ggcgctcacgtttttgaga

SEQ ID NO: 153093 - DNA, 19 bp, Homo sapiens
  siRNA target sequence for SMOC2 (NM_022138.1,114-132).
gtggatcaagataaagaca

SEQ ID NO: 153094 - DNA, 19 bp, Homo sapiens
  siRNA target sequence for SMOC2 (NM_022138.1,197-215).
cttcctttcccgttgtgaa

SEQ ID NO: 153095 - DNA, 19 bp, Homo sapiens
  siRNA target sequence for SMOC2 (NM_022138.1,240-258).
ccccagctagagattgcat

SEQ ID NO: 153096 - DNA, 19 bp, Homo sapiens
  siRNA target sequence for SMOC2 (NM_022138.1,241-259).
cccagctagagattgcata

SEQ ID NO: 153097 - DNA, 19 bp, Homo sapiens
  siRNA target sequence for SMOC2 (NM_022138.1,242-260).
ccagctagagattgcatat

SEQ ID NO: 153098 - DNA, 19 bp, Homo sapiens
  siRNA target sequence for SMOC2 (NM_022138.1,245-263).
gctagagattgcatatcga

SEQ ID NO: 153099 - DNA, 19 bp, Homo sapiens
  siRNA target sequence for SMOC2 (NM_022138.1,286-304).
ggtgtgtggccgaaaggaa

SEQ ID NO: 153100 - DNA, 19 bp, Homo sapiens
  siRNA target sequence for SMOC2 (NM_022138.1,483-501).
ggttccgtaaatgaaaagt

SEQ ID NO: 153101 - DNA, 19 bp, Homo sapiens
  siRNA target sequence for SMOC2 (NM_022138.1,551-569).
cgttctgaattcagatgat

SEQ ID NO: 153102 - DNA, 19 bp, Homo sapiens
  siRNA target sequence for SMOC2 (NM_022138.1,663-681).
cggcagaacaaaaccaata

SEQ ID NO: 153103 - DNA, 19 bp, Homo sapiens
  siRNA target sequence for SMOC2 (NM_022138.1,878-896).
gtacgagcagccgaaatgt

SEQ ID NO: 153104 - DNA, 19 bp, Homo sapiens
  siRNA target sequence for SMOC2 (NM_022138.1,961-979).
gttgtccgggtgccaaaaa

SEQ ID NO: 153105 - DNA, 19 bp, Homo sapiens
  siRNA target sequence for SMOC2 (NM_022138.1,1118-1136).
cttcaaactactggataaa

SEQ ID NO: 153106 - DNA, 19 bp, Homo sapiens
  siRNA target sequence for SMOC2 (NM_022138.1,1184-1202).
gttccttcgcaaaaaatca

SEQ ID NO: 153107 - DNA, 19 bp, Homo sapiens
  siRNA target sequence for SMOC2 (NM_022138.1,1240-1258).
gtgacgtgaataatgacaa

SEQ ID NO: 153108 - DNA, 19 bp, Homo sapiens
  siRNA target sequence for SMOC2 (NM_022138.1,1261-1279).
ccatctccgtacaagaact

SEQ ID NO: 153109 - DNA, 19 bp, Homo sapiens
  siRNA target sequence for SMOC2 (NM_022138.1,1353-1371).
gctgaaagtacgtctaata

SEQ ID NO: 153110 - DNA, 19 bp, Homo sapiens
  siRNA target sequence for SPARCL1 (NM_004684.2,368-386).
gcaatcccgacaaatgcaa

SEQ ID NO: 153111 - DNA, 19 bp, Homo sapiens
  siRNA target sequence for SPARCL1 (NM_004684.2,513-531).
cccaccataaggctgaaaa

SEQ ID NO: 153112 - DNA, 19 bp, Homo sapiens
  siRNA target sequence for SPARCL1 (NM_004684.2,514-532).
ccaccataaggctgaaaaa

SEQ ID NO: 153113 - DNA, 19 bp, Homo sapiens
  siRNA target sequence for SPARCL1 (NM_004684.2,515-533).
caccataaggctgaaaaat

SEQ ID NO: 153114 - DNA, 19 bp, Homo sapiens
  siRNA target sequence for SPARCL1 (NM_004684.2,517-535).
ccataaggctgaaaaatca

SEQ ID NO: 153115 - DNA, 19 bp, Homo sapiens
  siRNA target sequence for SPARCL1 (NM_004684.2,527-545).
gaaaaatcatcagtactaa

SEQ ID NO: 153116 - DNA, 19 bp, Homo sapiens
  siRNA target sequence for SPARCL1 (NM_004684.2,537-555).
cagtactaaagtcaaaaga

SEQ ID NO: 153117 - DNA, 19 bp, Homo sapiens
  siRNA target sequence for SPARCL1 (NM_004684.2,597-615).
gccaagagctgggattgaa

SEQ ID NO: 153118 - DNA, 19 bp, Homo sapiens
  siRNA target sequence for SPARCL1 (NM_004684.2,625-643).
ggacagtgatggtcactta

SEQ ID NO: 153119 - DNA, 19 bp, Homo sapiens
  siRNA target sequence for SPARCL1 (NM_004684.2,626-644).
gacagtgatggtcacttaa

SEQ ID NO: 153120 - DNA, 19 bp, Homo sapiens
  siRNA target sequence for SPARCL1 (NM_004684.2,722-740).
ctctcagagaacactgatt

SEQ ID NO: 153121 - DNA, 19 bp, Homo sapiens
  siRNA target sequence for SPARCL1 (NM_004684.2,755-773).
gttagttccttcacagatt

SEQ ID NO: 153122 - DNA, 19 bp, Homo sapiens
  siRNA target sequence for SPARCL1 (NM_004684.2,892-910).
ccaagagcaggatccaaat

SEQ ID NO: 153123 - DNA, 19 bp, Homo sapiens
  siRNA target sequence for SPARCL1 (NM_004684.2,893-911).
caagagcaggatccaaata

SEQ ID NO: 153124 - DNA, 19 bp, Homo sapiens
  siRNA target sequence for SPARCL1 (NM_004684.2,896-914).
gagcaggatccaaatattt

SEQ ID NO: 153125 - DNA, 19 bp, Homo sapiens
  siRNA target sequence for SPARCL1 (NM_004684.2,962-980).
cacaatgataaccaagaaa

SEQ ID NO: 153126 - DNA, 19 bp, Homo sapiens
  siRNA target sequence for SPARCL1 (NM_004684.2,1060-1078).
gtctgatcaaccaactcaa

SEQ ID NO: 153127 - DNA, 19 bp, Homo sapiens
  siRNA target sequence for SPARCL1 (NM_004684.2,1164-1182).
catcgaacgtcaataagca

SEQ ID NO: 153128 - DNA, 19 bp, Homo sapiens
  siRNA target sequence for SPARCL1 (NM_004684.2,1204-1222).
gagtcaagagggtaaaact

SEQ ID NO: 153129 - DNA, 19 bp, Homo sapiens
  siRNA target sequence for SPARCL1 (NM_004684.2,1282-1300).
gctcatggaacctactgat

SEQ ID NO: 153130 - DNA, 19 bp, Homo sapiens
  siRNA target sequence for SPARCL1 (NM_004684.2,1285-1303).
catggaacctactgatgat

SEQ ID NO: 153131 - DNA, 19 bp, Homo sapiens
  siRNA target sequence for SPARCL1 (NM_004684.2,1292-1310).
cctactgatgatggtaata

SEQ ID NO: 153132 - DNA, 19 bp, Homo sapiens
  siRNA target sequence for SPARCL1 (NM_004684.2,1434-1452).
ccgagagagctcaatccat

SEQ ID NO: 153133 - DNA, 19 bp, Homo sapiens
  siRNA target sequence for SPARCL1 (NM_004684.2,1435-1453).
cgagagagctcaatccatt

SEQ ID NO: 153134 - DNA, 19 bp, Homo sapiens
  siRNA target sequence for SPARCL1 (NM_004684.2,1496-1514).
gaaaatgaaaatataggta

SEQ ID NO: 153135 - DNA, 19 bp, Homo sapiens
  siRNA target sequence for SPARCL1 (NM_004684.2,1620-1638).
gcatgagcttccagtgtaa

SEQ ID NO: 153136 - DNA, 19 bp, Homo sapiens
  siRNA target sequence for SPARCL1 (NM_004684.2,1621-1639).
catgagcttccagtgtaaa

SEQ ID NO: 153137 - DNA, 19 bp, Homo sapiens
  siRNA target sequence for SPARCL1 (NM_004684.2,1713-1731).
caacaaaaccccttgatca

SEQ ID NO: 153138 - DNA, 19 bp, Homo sapiens
  siRNA target sequence for SPARCL1 (NM_004684.2,1745-1763).
gacaatcagacctatgcta

SEQ ID NO: 153139 - DNA, 19 bp, Homo sapiens
  siRNA target sequence for SPARCL1 (NM_004684.2,1760-1778).
gctagttcctgtcatctat

SEQ ID NO: 153140 - DNA, 19 bp, Homo sapiens
  siRNA target sequence for SPARCL1 (NM_004684.2,1761-1779).
ctagttcctgtcatctatt

SEQ ID NO: 153141 - DNA, 19 bp, Homo sapiens
  siRNA target sequence for SPARCL1 (NM_004684.2,1770-1788).
gtcatctattcgctactaa

SEQ ID NO: 153142 - DNA, 19 bp, Homo sapiens
  siRNA target sequence for SPARCL1 (NM_004684.2,1772-1790).
catctattcgctactaaat

SEQ ID NO: 153143 - DNA, 19 bp, Homo sapiens
  siRNA target sequence for SPARCL1 (NM_004684.2,1775-1793).
ctattcgctactaaatgca

SEQ ID NO: 153144 - DNA, 19 bp, Homo sapiens
  siRNA target sequence for SPARCL1 (NM_004684.2,1849-1867).
caaatctattcctacttgt

SEQ ID NO: 153145 - DNA, 19 bp, Homo sapiens
  siRNA target sequence for SPARCL1 (NM_004684.2,1860-1878).
ctacttgtacggactttga

SEQ ID NO: 153146 - DNA, 19 bp, Homo sapiens
  siRNA target sequence for SPARCL1 (NM_004684.2,1863-1881).
cttgtacggactttgaagt

SEQ ID NO: 153147 - DNA, 19 bp, Homo sapiens
  siRNA target sequence for SPARCL1 (NM_004684.2,1866-1884).
gtacggactttgaagtgat

SEQ ID NO: 153148 - DNA, 19 bp, Homo sapiens
  siRNA target sequence for SPARCL1 (NM_004684.2,1958-1976).
gctggttatctaaatgaga

SEQ ID NO: 153149 - DNA, 19 bp, Homo sapiens
  siRNA target sequence for SPARCL1 (NM_004684.2,2031-2049).
gggaccatcccattgatct

SEQ ID NO: 153150 - DNA, 19 bp, Homo sapiens
  siRNA target sequence for SPARCL1 (NM_004684.2,2098-2116).
gcactggcagtttagtgaa

SEQ ID NO: 153151 - DNA, 19 bp, Homo sapiens
  siRNA target sequence for SPARCL1 (NM_004684.2,2103-2121).
ggcagtttagtgaacttga

SEQ ID NO: 153152 - DNA, 19 bp, Homo sapiens
  siRNA target sequence for SPARCL1 (NM_004684.2,2120-2138).
gaccaacaccctatggata

SEQ ID NO: 153153 - DNA, 19 bp, Homo sapiens
  siRNA target sequence for SPARCL1 (NM_004684.2,2139-2157).
gagtcttgacacattctga

SEQ ID NO: 153154 - DNA, 19 bp, Homo sapiens
  siRNA target sequence for SPOCK2 (NM_014767.1,541-559).
caatcagcaaggagatgaa

SEQ ID NO: 153155 - DNA, 19 bp, Homo sapiens
  siRNA target sequence for SPOCK3 (NM_016950.1,215-233).
cggtcggacggcggtaatt

SEQ ID NO: 153156 - DNA, 19 bp, Homo sapiens
  siRNA target sequence for SPOCK3 (NM_016950.1,216-234).
ggtcggacggcggtaattt

SEQ ID NO: 153157 - DNA, 19 bp, Homo sapiens
  siRNA target sequence for SPOCK3 (NM_016950.1,217-235).
gtcggacggcggtaatttt

SEQ ID NO: 153158 - DNA, 19 bp, Homo sapiens
  siRNA target sequence for SPOCK3 (NM_016950.1,219-237).
cggacggcggtaattttct

SEQ ID NO: 153159 - DNA, 19 bp, Homo sapiens
  siRNA target sequence for SPOCK3 (NM_016950.1,354-372).
ccttcgatcaggctttaga

SEQ ID NO: 153160 - DNA, 19 bp, Homo sapiens
  siRNA target sequence for SPOCK3 (NM_016950.1,377-395).
gctaaggatccatgcttaa

SEQ ID NO: 153161 - DNA, 19 bp, Homo sapiens
  siRNA target sequence for SPOCK3 (NM_016950.1,408-426).
gtcgccataaagtatgcat

SEQ ID NO: 153162 - DNA, 19 bp, Homo sapiens
  siRNA target sequence for SPOCK3 (NM_016950.1,419-437).
gtatgcattgctcaagatt

SEQ ID NO: 153163 - DNA, 19 bp, Homo sapiens
  siRNA target sequence for SPOCK3 (NM_016950.1,442-460).
gactgcagtctgcattagt

SEQ ID NO: 153164 - DNA, 19 bp, Homo sapiens
  siRNA target sequence for SPOCK3 (NM_016950.1,459-477).
gtcaccggaggcttacaca

SEQ ID NO: 153165 - DNA, 19 bp, Homo sapiens
  siRNA target sequence for SPOCK3 (NM_016950.1,565-583).
ccctgtttgtggttcagat

SEQ ID NO: 153166 - DNA, 19 bp, Homo sapiens
  siRNA target sequence for SPOCK3 (NM_016950.1,587-605).
catacctactcttttcagt

SEQ ID NO: 153167 - DNA, 19 bp, Homo sapiens
  siRNA target sequence for SPOCK3 (NM_016950.1,597-615).
cttttcagtgcaaactaga

SEQ ID NO: 153168 - DNA, 19 bp, Homo sapiens
  siRNA target sequence for SPOCK3 (NM_016950.1,620-638).
caggcatgtgtcttaggaa

SEQ ID NO: 153169 - DNA, 19 bp, Homo sapiens
  siRNA target sequence for SPOCK3 (NM_016950.1,622-640).
ggcatgtgtcttaggaaaa

SEQ ID NO: 153170 - DNA, 19 bp, Homo sapiens
  siRNA target sequence for SPOCK3 (NM_016950.1,683-701).
gataagcccaccagtacaa

SEQ ID NO: 153171 - DNA, 19 bp, Homo sapiens
  siRNA target sequence for SPOCK3 (NM_016950.1,691-709).
caccagtacaagcagaaat

SEQ ID NO: 153172 - DNA, 19 bp, Homo sapiens
  siRNA target sequence for SPOCK3 (NM_016950.1,694-712).
cagtacaagcagaaatgtt

SEQ ID NO: 153173 - DNA, 19 bp, Homo sapiens
  siRNA target sequence for SPOCK3 (NM_016950.1,696-714).
gtacaagcagaaatgttaa

SEQ ID NO: 153174 - DNA, 19 bp, Homo sapiens
  siRNA target sequence for SPOCK3 (NM_016950.1,741-759).
gggaagtggcaaacagatt

SEQ ID NO: 153175 - DNA, 19 bp, Homo sapiens
  siRNA target sequence for SPOCK3 (NM_016950.1,782-800).
catgaaagtggaagtcaaa

SEQ ID NO: 153176 - DNA, 19 bp, Homo sapiens
  siRNA target sequence for SPOCK3 (NM_016950.1,852-870).
gcatcttgccaatttgcaa

SEQ ID NO: 153177 - DNA, 19 bp, Homo sapiens
  siRNA target sequence for SPOCK3 (NM_016950.1,886-904).
gatgtttaacagacttgat

SEQ ID NO: 153178 - DNA, 19 bp, Homo sapiens
  siRNA target sequence for SPOCK3 (NM_016950.1,895-913).
cagacttgatacaaactat

SEQ ID NO: 153179 - DNA, 19 bp, Homo sapiens
  siRNA target sequence for SPOCK3 (NM_016950.1,906-924).
caaactatgacctgctatt

SEQ ID NO: 153180 - DNA, 19 bp, Homo sapiens
  siRNA target sequence for SPOCK3 (NM_016950.1,931-949).
gtcagagctcagaagcatt

SEQ ID NO: 153181 - DNA, 19 bp, Homo sapiens
  siRNA target sequence for SPOCK3 (NM_016950.1,1073-1091).
cagactgagctcagcaata

SEQ ID NO: 153182 - DNA, 19 bp, Homo sapiens
  siRNA target sequence for SPOCK3 (NM_016950.1,1075-1093).
gactgagctcagcaatatt

SEQ ID NO: 153183 - DNA, 19 bp, Homo sapiens
  siRNA target sequence for SPOCK3 (NM_016950.1,1079-1097).
gagctcagcaatattcaga

SEQ ID NO: 153184 - DNA, 19 bp, Homo sapiens
  siRNA target sequence for SPOCK3 (NM_016950.1,1228-1246).
catgggatccagaataaat

SEQ ID NO: 153185 - DNA, 19 bp, Homo sapiens
  siRNA target sequence for SPOCK3 (NM_016950.1,1231-1249).
gggatccagaataaatggt

SEQ ID NO: 153186 - DNA, 19 bp, Homo sapiens
  siRNA target sequence for SPOCK3 (NM_016950.1,1253-1271).
gcagattgtgctatagatt

SEQ ID NO: 153187 - DNA, 19 bp, Homo sapiens
  siRNA target sequence for SPOCK3 (NM_016950.1,1254-1272).
cagattgtgctatagattt

SEQ ID NO: 153188 - DNA, 19 bp, Homo sapiens
  siRNA target sequence for SPOCK3 (NM_016950.1,1276-1294).
gatctccggagattttgct

SEQ ID NO: 153189 - DNA, 19 bp, Homo sapiens
  siRNA target sequence for SPOCK3 (NM_016950.1,1339-1357).
cgatattatgaatgatgaa

SEQ ID NO: 153190 - DNA, 19 bp, Homo sapiens
  siRNA target sequence for SPOCK3 (NM_016950.1,1407-1425).
gtgatgaccatgatgtata

SEQ ID NO: 153191 - DNA, 19 bp, Homo sapiens
  siRNA target sequence for SRI (NM_003130.2,129-147).
cgtttcccggacaaactca

SEQ ID NO: 153192 - DNA, 19 bp, Homo sapiens
  siRNA target sequence for SRI (NM_003130.2,146-164).
caggatccgctgtatggtt

SEQ ID NO: 153193 - DNA, 19 bp, Homo sapiens
  siRNA target sequence for SRI (NM_003130.2,194-212).
cagatagatgctgatgaat

SEQ ID NO: 153194 - DNA, 19 bp, Homo sapiens
  siRNA target sequence for SRI (NM_003130.2,276-294).
gccggcttatggtttcaat

SEQ ID NO: 153195 - DNA, 19 bp, Homo sapiens
  siRNA target sequence for SRI (NM_003130.2,291-309).
caatgctggatagagatat

SEQ ID NO: 153196 - DNA, 19 bp, Homo sapiens
  siRNA target sequence for SRI (NM_003130.2,312-330).
ctggcacaatgggtttcaa

SEQ ID NO: 153197 - DNA, 19 bp, Homo sapiens
  siRNA target sequence for SRI (NM_003130.2,315-333).
gcacaatgggtttcaatga

SEQ ID NO: 153198 - DNA, 19 bp, Homo sapiens
  siRNA target sequence for SRI (NM_003130.2,316-334).
cacaatgggtttcaatgaa

SEQ ID NO: 153199 - DNA, 19 bp, Homo sapiens
  siRNA target sequence for SRI (NM_003130.2,363-381).
gctggagacaacactttat

SEQ ID NO: 153200 - DNA, 19 bp, Homo sapiens
  siRNA target sequence for SRI (NM_003130.2,408-426).
cagtagacccacaagaatt

SEQ ID NO: 153201 - DNA, 19 bp, Homo sapiens
  siRNA target sequence for SRI (NM_003130.2,465-483).
cccaggctgtgaattcaat

SEQ ID NO: 153202 - DNA, 19 bp, Homo sapiens
  siRNA target sequence for SRI (NM_003130.2,466-484).
ccaggctgtgaattcaatt

SEQ ID NO: 153203 - DNA, 19 bp, Homo sapiens
  siRNA target sequence for SRI (NM_003130.2,469-487).
ggctgtgaattcaattgca

SEQ ID NO: 153204 - DNA, 19 bp, Homo sapiens
  siRNA target sequence for SRI (NM_003130.2,475-493).
gaattcaattgcaaaacga

SEQ ID NO: 153205 - DNA, 19 bp, Homo sapiens
  siRNA target sequence for SRI (NM_003130.2,491-509).
cgatacagcaccaatggaa

SEQ ID NO: 153206 - DNA, 19 bp, Homo sapiens
  siRNA target sequence for SRI (NM_003130.2,533-551).
gcctgctgcgtcaaactga

SEQ ID NO: 153207 - DNA, 19 bp, Homo sapiens
  siRNA target sequence for SRI (NM_003130.2,544-562).
caaactgagggctcttaca

SEQ ID NO: 153208 - DNA, 19 bp, Homo sapiens
  siRNA target sequence for SRI (NM_003130.2,557-575).
cttacagacagctttcgaa

SEQ ID NO: 153209 - DNA, 19 bp, Homo sapiens
  siRNA target sequence for SRI (NM_003130.2,590-608).
cagcaaggtgttgtgaatt

SEQ ID NO: 153210 - DNA, 19 bp, Homo sapiens
  siRNA target sequence for SRI (NM_003130.2,610-628).
cccatatgatgatttcatt

SEQ ID NO: 153211 - DNA, 19 bp, Homo sapiens
  siRNA target sequence for SRI (NM_003130.2,612-630).
catatgatgatttcattca

SEQ ID NO: 153212 - DNA, 19 bp, Homo sapiens
  siRNA target sequence for SSR1 (NM_003144.2,352-370).
ccgagtgcagatacaacta

SEQ ID NO: 153213 - DNA, 19 bp, Homo sapiens
  siRNA target sequence for SSR1 (NM_003144.2,353-371).
cgagtgcagatacaactat

SEQ ID NO: 153214 - DNA, 19 bp, Homo sapiens
  siRNA target sequence for SSR1 (NM_003144.2,354-372).
gagtgcagatacaactata

SEQ ID NO: 153215 - DNA, 19 bp, Homo sapiens
  siRNA target sequence for SSR1 (NM_003144.2,356-374).
gtgcagatacaactatact

SEQ ID NO: 153216 - DNA, 19 bp, Homo sapiens
  siRNA target sequence for SSR1 (NM_003144.2,365-383).
caactatactgtttgtaaa

SEQ ID NO: 153217 - DNA, 19 bp, Homo sapiens
  siRNA target sequence for SSR1 (NM_003144.2,375-393).
gtttgtaaaaggagaagat

SEQ ID NO: 153218 - DNA, 19 bp, Homo sapiens
  siRNA target sequence for SSR1 (NM_003144.2,441-459).
gggtacagaagattttatt

SEQ ID NO: 153219 - DNA, 19 bp, Homo sapiens
  siRNA target sequence for SSR1 (NM_003144.2,600-618).
catgggcggacgaccattt

SEQ ID NO: 153220 - DNA, 19 bp, Homo sapiens
  siRNA target sequence for SSR1 (NM_003144.2,603-621).
gggcggacgaccatttggt

SEQ ID NO: 153221 - DNA, 19 bp, Homo sapiens
  siRNA target sequence for SSR1 (NM_003144.2,604-622).
ggcggacgaccatttggtt

SEQ ID NO: 153222 - DNA, 19 bp, Homo sapiens
  siRNA target sequence for SSR1 (NM_003144.2,605-623).
gcggacgaccatttggttt

SEQ ID NO: 153223 - DNA, 19 bp, Homo sapiens
  siRNA target sequence for SSR1 (NM_003144.2,614-632).
catttggtttggtcatcaa

SEQ ID NO: 153224 - DNA, 19 bp, Homo sapiens
  siRNA target sequence for SSR1 (NM_003144.2,619-637).
ggtttggtcatcaatctga

SEQ ID NO: 153225 - DNA, 19 bp, Homo sapiens
  siRNA target sequence for SSR1 (NM_003144.2,625-643).
gtcatcaatctgaactaca

SEQ ID NO: 153226 - DNA, 19 bp, Homo sapiens
  siRNA target sequence for SSR1 (NM_003144.2,646-664).
gatttgaacggcaatgtat

SEQ ID NO: 153227 - DNA, 19 bp, Homo sapiens
  siRNA target sequence for SSR1 (NM_003144.2,651-669).
gaacggcaatgtattccaa

SEQ ID NO: 153228 - DNA, 19 bp, Homo sapiens
  siRNA target sequence for SSR1 (NM_003144.2,674-692).
cagtcttcaatcaaacagt

SEQ ID NO: 153229 - DNA, 19 bp, Homo sapiens
  siRNA target sequence for SSR1 (NM_003144.2,724-742).
ggagaaacaatctttatgt

SEQ ID NO: 153230 - DNA, 19 bp, Homo sapiens
  siRNA target sequence for SSR1 (NM_003144.2,725-743).
gagaaacaatctttatgta

SEQ ID NO: 153231 - DNA, 19 bp, Homo sapiens
  siRNA target sequence for SSR1 (NM_003144.2,758-776).
gtcttgggcttctggttat

SEQ ID NO: 153232 - DNA, 19 bp, Homo sapiens
  siRNA target sequence for SSR1 (NM_003144.2,821-839).
ccatacagaaagtagaaat

SEQ ID NO: 153233 - DNA, 19 bp, Homo sapiens
  siRNA target sequence for SSR1 (NM_003144.2,832-850).
gtagaaatgggtacatcaa

SEQ ID NO: 153234 - DNA, 19 bp, Homo sapiens
  siRNA target sequence for SSR1 (NM_003144.2,845-863).
catcaagtcagaatgatgt

SEQ ID NO: 153235 - DNA, 19 bp, Homo sapiens
  siRNA target sequence for SSR1 (NM_003144.2,890-908).
cattgaatcaaatcaataa

SEQ ID NO: 153236 - DNA, 19 bp, Homo sapiens
  siRNA target sequence for SSR4 (NM_006280.1,180-198).
ccactgagaccgtcttcat

SEQ ID NO: 153237 - DNA, 19 bp, Homo sapiens
  siRNA target sequence for SSR4 (NM_006280.1,181-199).
cactgagaccgtcttcatt

SEQ ID NO: 153238 - DNA, 19 bp, Homo sapiens
  siRNA target sequence for SSR4 (NM_006280.1,252-270).
ctgacgtcggtggaaaaca

SEQ ID NO: 153239 - DNA, 19 bp, Homo sapiens
  siRNA target sequence for SSR4 (NM_006280.1,254-272).
gacgtcggtggaaaacaat

SEQ ID NO: 153240 - DNA, 19 bp, Homo sapiens
  siRNA target sequence for SSR4 (NM_006280.1,347-365).
ggcacctatgaggttagat

SEQ ID NO: 153241 - DNA, 19 bp, Homo sapiens
  siRNA target sequence for SSR4 (NM_006280.1,348-366).
gcacctatgaggttagatt

SEQ ID NO: 153242 - DNA, 19 bp, Homo sapiens
  siRNA target sequence for SSR4 (NM_006280.1,351-369).
cctatgaggttagattctt

SEQ ID NO: 153243 - DNA, 19 bp, Homo sapiens
  siRNA target sequence for SSR4 (NM_006280.1,396-414).
ggaaggctcagaggaataa

SEQ ID NO: 153244 - DNA, 19 bp, Homo sapiens
  siRNA target sequence for SSR4 (NM_006280.1,510-528).
cggcgatcggccttgtgat

SEQ ID NO: 153245 - DNA, 19 bp, Homo sapiens
  siRNA target sequence for SSR4 (NM_006280.1,513-531).
cgatcggccttgtgatcta

SEQ ID NO: 153246 - DNA, 19 bp, Homo sapiens
  siRNA target sequence for SSR4 (NM_006280.1,518-536).
ggccttgtgatctactact

SEQ ID NO: 153247 - DNA, 19 bp, Homo sapiens
  siRNA target sequence for SSR4 (NM_006280.1,519-537).
gccttgtgatctactactt

SEQ ID NO: 153248 - DNA, 19 bp, Homo sapiens
  siRNA target sequence for STAB1 (NM_015136.1,130-148).
gtgaaaaccacgtttgtca

SEQ ID NO: 153249 - DNA, 19 bp, Homo sapiens
  siRNA target sequence for STAB1 (NM_015136.1,375-393).
cgctgagaccccatgcaat

SEQ ID NO: 153250 - DNA, 19 bp, Homo sapiens
  siRNA target sequence for STAB1 (NM_015136.1,874-892).
ggctgccccagcaactcta

SEQ ID NO: 153251 - DNA, 19 bp, Homo sapiens
  siRNA target sequence for STAB1 (NM_015136.1,1185-1203).
gggctgccgggaaatcctt

SEQ ID NO: 153252 - DNA, 19 bp, Homo sapiens
  siRNA target sequence for STAB1 (NM_015136.1,1186-1204).
ggctgccgggaaatcctta

SEQ ID NO: 153253 - DNA, 19 bp, Homo sapiens
  siRNA target sequence for STAB1 (NM_015136.1,1378-1396).
gagatcaccgtcaccttta

SEQ ID NO: 153254 - DNA, 19 bp, Homo sapiens
  siRNA target sequence for STAB1 (NM_015136.1,1383-1401).
caccgtcacctttaaccaa

SEQ ID NO: 153255 - DNA, 19 bp, Homo sapiens
  siRNA target sequence for STAB1 (NM_015136.1,1385-1403).
ccgtcacctttaaccaatt

SEQ ID NO: 153256 - DNA, 19 bp, Homo sapiens
  siRNA target sequence for STAB1 (NM_015136.1,1387-1405).
gtcacctttaaccaattca

SEQ ID NO: 153257 - DNA, 19 bp, Homo sapiens
  siRNA target sequence for STAB1 (NM_015136.1,1441-1459).
cagacgttcaacatctaca

SEQ ID NO: 153258 - DNA, 19 bp, Homo sapiens
  siRNA target sequence for STAB1 (NM_015136.1,1537-1555).
ggggatcccaagagaacta

SEQ ID NO: 153259 - DNA, 19 bp, Homo sapiens
  siRNA target sequence for STAB1 (NM_015136.1,1538-1556).
gggatcccaagagaactat

SEQ ID NO: 153260 - DNA, 19 bp, Homo sapiens
  siRNA target sequence for STAB1 (NM_015136.1,1581-1599).
ggccttcagccgctttgaa

SEQ ID NO: 153261 - DNA, 19 bp, Homo sapiens
  siRNA target sequence for STAB1 (NM_015136.1,1582-1600).
gccttcagccgctttgaaa

SEQ ID NO: 153262 - DNA, 19 bp, Homo sapiens
  siRNA target sequence for STAB1 (NM_015136.1,1719-1737).
cacagcgggtctctctaaa

SEQ ID NO: 153263 - DNA, 19 bp, Homo sapiens
  siRNA target sequence for STAB1 (NM_015136.1,1721-1739).
cagcgggtctctctaaact

SEQ ID NO: 153264 - DNA, 19 bp, Homo sapiens
  siRNA target sequence for STAB1 (NM_015136.1,1775-1793).
gccagctgaccgttgagaa

SEQ ID NO: 153265 - DNA, 19 bp, Homo sapiens
  siRNA target sequence for STAB1 (NM_015136.1,1995-2013).
cgaggagcagcacaagatt

SEQ ID NO: 153266 - DNA, 19 bp, Homo sapiens
  siRNA target sequence for STAB1 (NM_015136.1,2123-2141).
cggggctcaatgtgctaaa

SEQ ID NO: 153267 - DNA, 19 bp, Homo sapiens
  siRNA target sequence for STAB1 (NM_015136.1,2126-2144).
ggctcaatgtgctaaagaa

SEQ ID NO: 153268 - DNA, 19 bp, Homo sapiens
  siRNA target sequence for STAB1 (NM_015136.1,2186-2204).
gctgctgcaaaggtttttt

SEQ ID NO: 153269 - DNA, 19 bp, Homo sapiens
  siRNA target sequence for STAB1 (NM_015136.1,2527-2545).
ctgcatgcccgctgtgtta

SEQ ID NO: 153270 - DNA, 19 bp, Homo sapiens
  siRNA target sequence for STAB1 (NM_015136.1,2562-2580).
cagatgtcgctgtcttgat

SEQ ID NO: 153271 - DNA, 19 bp, Homo sapiens
  siRNA target sequence for STAB1 (NM_015136.1,2987-3005).
gctgttatggagacatctt

SEQ ID NO: 153272 - DNA, 19 bp, Homo sapiens
  siRNA target sequence for STAB1 (NM_015136.1,3042-3060).
ctaccaatggcttaagagt

SEQ ID NO: 153273 - DNA, 19 bp, Homo sapiens
  siRNA target sequence for STAB1 (NM_015136.1,3279-3297).
ggagattcgcaacattagt

SEQ ID NO: 153274 - DNA, 19 bp, Homo sapiens
  siRNA target sequence for STAB1 (NM_015136.1,3350-3368).
ccaacggtgtcctacacat

SEQ ID NO: 153275 - DNA, 19 bp, Homo sapiens
  siRNA target sequence for STAB1 (NM_015136.1,3485-3503).
ggttggtgccccagattga

SEQ ID NO: 153276 - DNA, 19 bp, Homo sapiens
  siRNA target sequence for STAB1 (NM_015136.1,3674-3692).
cccactggatcgtcttcta

SEQ ID NO: 153277 - DNA, 19 bp, Homo sapiens
  siRNA target sequence for STAB1 (NM_015136.1,3676-3694).
cactggatcgtcttctaca

SEQ ID NO: 153278 - DNA, 19 bp, Homo sapiens
  siRNA target sequence for STAB1 (NM_015136.1,3828-3846).
ggccctgcgggagaaatgt

SEQ ID NO: 153279 - DNA, 19 bp, Homo sapiens
  siRNA target sequence for STAB1 (NM_015136.1,3830-3848).
ccctgcgggagaaatgtgt

SEQ ID NO: 153280 - DNA, 19 bp, Homo sapiens
  siRNA target sequence for STAB1 (NM_015136.1,4255-4273).
ctccgctgtgaccagaaaa

SEQ ID NO: 153281 - DNA, 19 bp, Homo sapiens
  siRNA target sequence for STAB1 (NM_015136.1,4651-4669).
ctggacccctgctctaaga

SEQ ID NO: 153282 - DNA, 19 bp, Homo sapiens
  siRNA target sequence for STAB1 (NM_015136.1,4654-4672).
gacccctgctctaagaaca

SEQ ID NO: 153283 - DNA, 19 bp, Homo sapiens
  siRNA target sequence for STAB1 (NM_015136.1,4714-4732).
gatggccagaggacatgta

SEQ ID NO: 153284 - DNA, 19 bp, Homo sapiens
  siRNA target sequence for STAB1 (NM_015136.1,4794-4812).
gctcctgagggataagcat

SEQ ID NO: 153285 - DNA, 19 bp, Homo sapiens
  siRNA target sequence for STAB1 (NM_015136.1,4827-4845).
cctccgcctcctggaatat

SEQ ID NO: 153286 - DNA, 19 bp, Homo sapiens
  siRNA target sequence for STAB1 (NM_015136.1,4881-4899).
cgtgccgcacgcagatcta

SEQ ID NO: 153287 - DNA, 19 bp, Homo sapiens
  siRNA target sequence for STAB1 (NM_015136.1,4882-4900).
gtgccgcacgcagatctaa

SEQ ID NO: 153288 - DNA, 19 bp, Homo sapiens
  siRNA target sequence for STAB1 (NM_015136.1,4885-4903).
ccgcacgcagatctaatga

SEQ ID NO: 153289 - DNA, 19 bp, Homo sapiens
  siRNA target sequence for STAB1 (NM_015136.1,5060-5078).
gggagggcagcatatacct

SEQ ID NO: 153290 - DNA, 19 bp, Homo sapiens
  siRNA target sequence for STAB1 (NM_015136.1,5069-5087).
gcatatacctcaatgactt

SEQ ID NO: 153291 - DNA, 19 bp, Homo sapiens
  siRNA target sequence for STAB1 (NM_015136.1,5172-5190).
gcactgggagcctgatgat

SEQ ID NO: 153292 - DNA, 19 bp, Homo sapiens
  siRNA target sequence for STAB1 (NM_015136.1,5195-5213).
ccatcccgaggagaaatgt

SEQ ID NO: 153293 - DNA, 19 bp, Homo sapiens
  siRNA target sequence for STAB1 (NM_015136.1,5300-5318).
cccataggcccttcacaat

SEQ ID NO: 153294 - DNA, 19 bp, Homo sapiens
  siRNA target sequence for STAB1 (NM_015136.1,5491-5509).
gggacccccatctctttct

SEQ ID NO: 153295 - DNA, 19 bp, Homo sapiens
  siRNA target sequence for STAB1 (NM_015136.1,5642-5660).
ctcgctgtgaccactttga

SEQ ID NO: 153296 - DNA, 19 bp, Homo sapiens
  siRNA target sequence for STAB1 (NM_015136.1,5644-5662).
cgctgtgaccactttgaga

SEQ ID NO: 153297 - DNA, 19 bp, Homo sapiens
  siRNA target sequence for STAB1 (NM_015136.1,5758-5776).
cgcttctacccgaagttct

SEQ ID NO: 153298 - DNA, 19 bp, Homo sapiens
  siRNA target sequence for STAB1 (NM_015136.1,5862-5880).
gggctgccaccgcaattgt

SEQ ID NO: 153299 - DNA, 19 bp, Homo sapiens
  siRNA target sequence for STAB1 (NM_015136.1,5864-5882).
gctgccaccgcaattgtgt

SEQ ID NO: 153300 - DNA, 19 bp, Homo sapiens
  siRNA target sequence for STAB1 (NM_015136.1,6018-6036).
gtgccgttcaggttttgct

SEQ ID NO: 153301 - DNA, 19 bp, Homo sapiens
  siRNA target sequence for STAB1 (NM_015136.1,6261-6279).
gtgcagcctgggctatgaa

SEQ ID NO: 153302 - DNA, 19 bp, Homo sapiens
  siRNA target sequence for STAB1 (NM_015136.1,6353-6371).
gtagccaggtaggaacaat

SEQ ID NO: 153303 - DNA, 19 bp, Homo sapiens
  siRNA target sequence for STAB1 (NM_015136.1,6364-6382).
ggaacaatggtcacttgta

SEQ ID NO: 153304 - DNA, 19 bp, Homo sapiens
  siRNA target sequence for STAB1 (NM_015136.1,6680-6698).
gcccttatggtctgaactt

SEQ ID NO: 153305 - DNA, 19 bp, Homo sapiens
  siRNA target sequence for STAB1 (NM_015136.1,6731-6749).
gagccgtccttgcttcatt

SEQ ID NO: 153306 - DNA, 19 bp, Homo sapiens
  siRNA target sequence for STAB1 (NM_015136.1,7108-7126).
gatgatgagctcacgtata

SEQ ID NO: 153307 - DNA, 19 bp, Homo sapiens
  siRNA target sequence for STAB1 (NM_015136.1,7566-7584).
cttccaggcggaagatgat

SEQ ID NO: 153308 - DNA, 19 bp, Homo sapiens
  siRNA target sequence for STAB2 (NM_017564.8,189-207).
gatgctacaacatttagta

SEQ ID NO: 153309 - DNA, 19 bp, Homo sapiens
  siRNA target sequence for STAB2 (NM_017564.8,192-210).
gctacaacatttagtaatt

SEQ ID NO: 153310 - DNA, 19 bp, Homo sapiens
  siRNA target sequence for STAB2 (NM_017564.8,280-298).
gataggaagtctcttctta

SEQ ID NO: 153311 - DNA, 19 bp, Homo sapiens
  siRNA target sequence for STAB2 (NM_017564.8,438-456).
ccccggatgccgccatatt

SEQ ID NO: 153312 - DNA, 19 bp, Homo sapiens
  siRNA target sequence for STAB2 (NM_017564.8,439-457).
cccggatgccgccatattt

SEQ ID NO: 153313 - DNA, 19 bp, Homo sapiens
  siRNA target sequence for STAB2 (NM_017564.8,441-459).
cggatgccgccatatttgt

SEQ ID NO: 153314 - DNA, 19 bp, Homo sapiens
  siRNA target sequence for STAB2 (NM_017564.8,442-460).
ggatgccgccatatttgta

SEQ ID NO: 153315 - DNA, 19 bp, Homo sapiens
  siRNA target sequence for STAB2 (NM_017564.8,635-653).
gtgctgacgacaacttatt

SEQ ID NO: 153316 - DNA, 19 bp, Homo sapiens
  siRNA target sequence for STAB2 (NM_017564.8,696-714).
gtgcaacagtggactagat

SEQ ID NO: 153317 - DNA, 19 bp, Homo sapiens
  siRNA target sequence for STAB2 (NM_017564.8,789-807).
cttgctctgcccagaaaat

SEQ ID NO: 153318 - DNA, 19 bp, Homo sapiens
  siRNA target sequence for STAB2 (NM_017564.8,851-869).
gcaaatgccttcccaatta

SEQ ID NO: 153319 - DNA, 19 bp, Homo sapiens
  siRNA target sequence for STAB2 (NM_017564.8,897-915).
catcaatccatgtttacga

SEQ ID NO: 153320 - DNA, 19 bp, Homo sapiens
  siRNA target sequence for STAB2 (NM_017564.8,904-922).
ccatgtttacgaaaaatct

SEQ ID NO: 153321 - DNA, 19 bp, Homo sapiens
  siRNA target sequence for STAB2 (NM_017564.8,925-943).
caccctcatgctcattgta

SEQ ID NO: 153322 - DNA, 19 bp, Homo sapiens
  siRNA target sequence for STAB2 (NM_017564.8,1018-1036).
gtggacccctgccaaatta

SEQ ID NO: 153323 - DNA, 19 bp, Homo sapiens
  siRNA target sequence for STAB2 (NM_017564.8,1021-1039).
gacccctgccaaattaact

SEQ ID NO: 153324 - DNA, 19 bp, Homo sapiens
  siRNA target sequence for STAB2 (NM_017564.8,1023-1041).
cccctgccaaattaacttt

SEQ ID NO: 153325 - DNA, 19 bp, Homo sapiens
  siRNA target sequence for STAB2 (NM_017564.8,1061-1079).
ctacagtgtgcaaatatga

SEQ ID NO: 153326 - DNA, 19 bp, Homo sapiens
  siRNA target sequence for STAB2 (NM_017564.8,1100-1118).
gcgagtgtaaggagcatta

SEQ ID NO: 153327 - DNA, 19 bp, Homo sapiens
  siRNA target sequence for STAB2 (NM_017564.8,1135-1153).
ggagtggggtgcagtatga

SEQ ID NO: 153328 - DNA, 19 bp, Homo sapiens
  siRNA target sequence for STAB2 (NM_017564.8,1141-1159).
gggtgcagtatgactgata

SEQ ID NO: 153329 - DNA, 19 bp, Homo sapiens
  siRNA target sequence for STAB2 (NM_017564.8,1142-1160).
ggtgcagtatgactgatat

SEQ ID NO: 153330 - DNA, 19 bp, Homo sapiens
  siRNA target sequence for STAB2 (NM_017564.8,1143-1161).
gtgcagtatgactgatata

SEQ ID NO: 153331 - DNA, 19 bp, Homo sapiens
  siRNA target sequence for STAB2 (NM_017564.8,1146-1164).
cagtatgactgatatatgt

SEQ ID NO: 153332 - DNA, 19 bp, Homo sapiens
  siRNA target sequence for STAB2 (NM_017564.8,1148-1166).
gtatgactgatatatgtaa

SEQ ID NO: 153333 - DNA, 19 bp, Homo sapiens
  siRNA target sequence for STAB2 (NM_017564.8,1152-1170).
gactgatatatgtaaatca

SEQ ID NO: 153334 - DNA, 19 bp, Homo sapiens
  siRNA target sequence for STAB2 (NM_017564.8,1177-1195).
ccgtgtcataggaatgcaa

SEQ ID NO: 153335 - DNA, 19 bp, Homo sapiens
  siRNA target sequence for STAB2 (NM_017564.8,1209-1227).
cgcaccaggccgaactgaa

SEQ ID NO: 153336 - DNA, 19 bp, Homo sapiens
  siRNA target sequence for STAB2 (NM_017564.8,1210-1228).
gcaccaggccgaactgaat

SEQ ID NO: 153337 - DNA, 19 bp, Homo sapiens
  siRNA target sequence for STAB2 (NM_017564.8,1214-1232).
caggccgaactgaatgcat

SEQ ID NO: 153338 - DNA, 19 bp, Homo sapiens
  siRNA target sequence for STAB2 (NM_017564.8,1216-1234).
ggccgaactgaatgcattt

SEQ ID NO: 153339 - DNA, 19 bp, Homo sapiens
  siRNA target sequence for STAB2 (NM_017564.8,1229-1247).
gcatttgccagaaaggtta

SEQ ID NO: 153340 - DNA, 19 bp, Homo sapiens
  siRNA target sequence for STAB2 (NM_017564.8,1249-1267).
gtgggtgatggcttaacgt

SEQ ID NO: 153341 - DNA, 19 bp, Homo sapiens
  siRNA target sequence for STAB2 (NM_017564.8,1258-1276).
ggcttaacgtgttatggaa

SEQ ID NO: 153342 - DNA, 19 bp, Homo sapiens
  siRNA target sequence for STAB2 (NM_017564.8,1259-1277).
gcttaacgtgttatggaaa

SEQ ID NO: 153343 - DNA, 19 bp, Homo sapiens
  siRNA target sequence for STAB2 (NM_017564.8,1265-1283).
cgtgttatggaaacattat

SEQ ID NO: 153344 - DNA, 19 bp, Homo sapiens
  siRNA target sequence for STAB2 (NM_017564.8,1284-1302).
ggagcgactcagagaatta

SEQ ID NO: 153345 - DNA, 19 bp, Homo sapiens
  siRNA target sequence for STAB2 (NM_017564.8,1330-1348).
ggaaggctgacctctttca

SEQ ID NO: 153346 - DNA, 19 bp, Homo sapiens
  siRNA target sequence for STAB2 (NM_017564.8,1331-1349).
gaaggctgacctctttcat

SEQ ID NO: 153347 - DNA, 19 bp, Homo sapiens
  siRNA target sequence for STAB2 (NM_017564.8,1347-1365).
catctcactcctagacaaa

SEQ ID NO: 153348 - DNA, 19 bp, Homo sapiens
  siRNA target sequence for STAB2 (NM_017564.8,1450-1468).
gagcttttggtggataata

SEQ ID NO: 153349 - DNA, 19 bp, Homo sapiens
  siRNA target sequence for STAB2 (NM_017564.8,1488-1506).
gaaactccacataattgct

SEQ ID NO: 153350 - DNA, 19 bp, Homo sapiens
  siRNA target sequence for STAB2 (NM_017564.8,1508-1526).
gtcagatgaacatcgaata

SEQ ID NO: 153351 - DNA, 19 bp, Homo sapiens
  siRNA target sequence for STAB2 (NM_017564.8,1515-1533).
gaacatcgaatatatgaat

SEQ ID NO: 153352 - DNA, 19 bp, Homo sapiens
  siRNA target sequence for STAB2 (NM_017564.8,1561-1579).
ggaaagtcgggggaaatct

SEQ ID NO: 153353 - DNA, 19 bp, Homo sapiens
  siRNA target sequence for STAB2 (NM_017564.8,1593-1611).
ggacaatcaaataaagctt

SEQ ID NO: 153354 - DNA, 19 bp, Homo sapiens
  siRNA target sequence for STAB2 (NM_017564.8,1632-1650).
gaaggtaaaaattatacaa

SEQ ID NO: 153355 - DNA, 19 bp, Homo sapiens
  siRNA target sequence for STAB2 (NM_017564.8,1694-1712).
gagccatggacaagttaga

SEQ ID NO: 153356 - DNA, 19 bp, Homo sapiens
  siRNA target sequence for STAB2 (NM_017564.8,1762-1780).
ccaaggtacagcaagttca

SEQ ID NO: 153357 - DNA, 19 bp, Homo sapiens
  siRNA target sequence for STAB2 (NM_017564.8,1772-1790).
gcaagttcagatctttgtt

SEQ ID NO: 153358 - DNA, 19 bp, Homo sapiens
  siRNA target sequence for STAB2 (NM_017564.8,1835-1853).
gtggaccatacaccatttt

SEQ ID NO: 153359 - DNA, 19 bp, Homo sapiens
  siRNA target sequence for STAB2 (NM_017564.8,1838-1856).
gaccatacaccatttttgt

SEQ ID NO: 153360 - DNA, 19 bp, Homo sapiens
  siRNA target sequence for STAB2 (NM_017564.8,1867-1885).
gaagcattgaataacatga

SEQ ID NO: 153361 - DNA, 19 bp, Homo sapiens
  siRNA target sequence for STAB2 (NM_017564.8,2020-2038).
gccaaccagctcatacagt

SEQ ID NO: 153362 - DNA, 19 bp, Homo sapiens
  siRNA target sequence for STAB2 (NM_017564.8,2021-2039).
ccaaccagctcatacagtt

SEQ ID NO: 153363 - DNA, 19 bp, Homo sapiens
  siRNA target sequence for STAB2 (NM_017564.8,2026-2044).
cagctcatacagttcaaca

SEQ ID NO: 153364 - DNA, 19 bp, Homo sapiens
  siRNA target sequence for STAB2 (NM_017564.8,2105-2123).
ccaaaaatggccgaattta

SEQ ID NO: 153365 - DNA, 19 bp, Homo sapiens
  siRNA target sequence for STAB2 (NM_017564.8,2126-2144).
cactgacaggagttctcat

SEQ ID NO: 153366 - DNA, 19 bp, Homo sapiens
  siRNA target sequence for STAB2 (NM_017564.8,2173-2191).
catcgatgtgatgaaacaa

SEQ ID NO: 153367 - DNA, 19 bp, Homo sapiens
  siRNA target sequence for STAB2 (NM_017564.8,2463-2481).
cggcaacgggacatgcatt

SEQ ID NO: 153368 - DNA, 19 bp, Homo sapiens
  siRNA target sequence for STAB2 (NM_017564.8,2464-2482).
ggcaacgggacatgcattt

SEQ ID NO: 153369 - DNA, 19 bp, Homo sapiens
  siRNA target sequence for STAB2 (NM_017564.8,2538-2556).
cggacctcggtgtaacaaa

SEQ ID NO: 153370 - DNA, 19 bp, Homo sapiens
  siRNA target sequence for STAB2 (NM_017564.8,2539-2557).
ggacctcggtgtaacaaaa

SEQ ID NO: 153371 - DNA, 19 bp, Homo sapiens
  siRNA target sequence for STAB2 (NM_017564.8,2540-2558).
gacctcggtgtaacaaaaa

SEQ ID NO: 153372 - DNA, 19 bp, Homo sapiens
  siRNA target sequence for STAB2 (NM_017564.8,2542-2560).
cctcggtgtaacaaaaaat

SEQ ID NO: 153373 - DNA, 19 bp, Homo sapiens
  siRNA target sequence for STAB2 (NM_017564.8,2568-2586).
cgttcacggaacatgcaat

SEQ ID NO: 153374 - DNA, 19 bp, Homo sapiens
  siRNA target sequence for STAB2 (NM_017564.8,2569-2587).
gttcacggaacatgcaata

SEQ ID NO: 153375 - DNA, 19 bp, Homo sapiens
  siRNA target sequence for STAB2 (NM_017564.8,2572-2590).
cacggaacatgcaataaca

SEQ ID NO: 153376 - DNA, 19 bp, Homo sapiens
  siRNA target sequence for STAB2 (NM_017564.8,2641-2659).
gccgggagactctgtgata

SEQ ID NO: 153377 - DNA, 19 bp, Homo sapiens
  siRNA target sequence for STAB2 (NM_017564.8,2645-2663).
ggagactctgtgataagca

SEQ ID NO: 153378 - DNA, 19 bp, Homo sapiens
  siRNA target sequence for STAB2 (NM_017564.8,2704-2722).
cacgccacctgtgaataca

SEQ ID NO: 153379 - DNA, 19 bp, Homo sapiens
  siRNA target sequence for STAB2 (NM_017564.8,2793-2811).
cccttgcacaggactaact

SEQ ID NO: 153380 - DNA, 19 bp, Homo sapiens
  siRNA target sequence for STAB2 (NM_017564.8,2825-2843).
gccgcaatgcagaatgcat

SEQ ID NO: 153381 - DNA, 19 bp, Homo sapiens
  siRNA target sequence for STAB2 (NM_017564.8,2903-2921).
gagactgctcggagatcaa

SEQ ID NO: 153382 - DNA, 19 bp, Homo sapiens
  siRNA target sequence for STAB2 (NM_017564.8,2956-2974).
gacaacgcatcctgtttgt

SEQ ID NO: 153383 - DNA, 19 bp, Homo sapiens
  siRNA target sequence for STAB2 (NM_017564.8,2958-2976).
caacgcatcctgtttgtat

SEQ ID NO: 153384 - DNA, 19 bp, Homo sapiens
  siRNA target sequence for STAB2 (NM_017564.8,3003-3021).
gtgcaagaaaggatttcga

SEQ ID NO: 153385 - DNA, 19 bp, Homo sapiens
  siRNA target sequence for STAB2 (NM_017564.8,3030-3048).
gattgactgtgaaccaata

SEQ ID NO: 153386 - DNA, 19 bp, Homo sapiens
  siRNA target sequence for STAB2 (NM_017564.8,3034-3052).
gactgtgaaccaataactt

SEQ ID NO: 153387 - DNA, 19 bp, Homo sapiens
  siRNA target sequence for STAB2 (NM_017564.8,3036-3054).
ctgtgaaccaataacttca

SEQ ID NO: 153388 - DNA, 19 bp, Homo sapiens
  siRNA target sequence for STAB2 (NM_017564.8,3060-3078).
ggaacaaaccgggaaatgt

SEQ ID NO: 153389 - DNA, 19 bp, Homo sapiens
  siRNA target sequence for STAB2 (NM_017564.8,3068-3086).
ccgggaaatgtcatccatt

SEQ ID NO: 153390 - DNA, 19 bp, Homo sapiens
  siRNA target sequence for STAB2 (NM_017564.8,3082-3100).
ccattggcaagctgtcaat

SEQ ID NO: 153391 - DNA, 19 bp, Homo sapiens
  siRNA target sequence for STAB2 (NM_017564.8,3087-3105).
ggcaagctgtcaatctact

SEQ ID NO: 153392 - DNA, 19 bp, Homo sapiens
  siRNA target sequence for STAB2 (NM_017564.8,3088-3106).
gcaagctgtcaatctactt

SEQ ID NO: 153393 - DNA, 19 bp, Homo sapiens
  siRNA target sequence for STAB2 (NM_017564.8,3117-3135).
ctggagctgtgtttgtcaa

SEQ ID NO: 153394 - DNA, 19 bp, Homo sapiens
  siRNA target sequence for STAB2 (NM_017564.8,3176-3194).
cagcagtggaattgtcatt

SEQ ID NO: 153395 - DNA, 19 bp, Homo sapiens
  siRNA target sequence for STAB2 (NM_017564.8,3196-3214).
ctctccgaagcagctatat

SEQ ID NO: 153396 - DNA, 19 bp, Homo sapiens
  siRNA target sequence for STAB2 (NM_017564.8,3198-3216).
ctccgaagcagctatattt

SEQ ID NO: 153397 - DNA, 19 bp, Homo sapiens
  siRNA target sequence for STAB2 (NM_017564.8,3219-3237).
ccgatggataaataatgct

SEQ ID NO: 153398 - DNA, 19 bp, Homo sapiens
  siRNA target sequence for STAB2 (NM_017564.8,3313-3331).
gaccaggatgagaaaagct

SEQ ID NO: 153399 - DNA, 19 bp, Homo sapiens
  siRNA target sequence for STAB2 (NM_017564.8,3348-3366).
caatattccagccctaata

SEQ ID NO: 153400 - DNA, 19 bp, Homo sapiens
  siRNA target sequence for STAB2 (NM_017564.8,3359-3377).
ccctaataaagtaccatat

SEQ ID NO: 153401 - DNA, 19 bp, Homo sapiens
  siRNA target sequence for STAB2 (NM_017564.8,3378-3396).
gctactaggcacatacaga

SEQ ID NO: 153402 - DNA, 19 bp, Homo sapiens
  siRNA target sequence for STAB2 (NM_017564.8,3470-3488).
caaaggtggatgggaatat

SEQ ID NO: 153403 - DNA, 19 bp, Homo sapiens
  siRNA target sequence for STAB2 (NM_017564.8,3475-3493).
gtggatgggaatatcacaa

SEQ ID NO: 153404 - DNA, 19 bp, Homo sapiens
  siRNA target sequence for STAB2 (NM_017564.8,3530-3548).
ccacaaatggagtgataca

SEQ ID NO: 153405 - DNA, 19 bp, Homo sapiens
  siRNA target sequence for STAB2 (NM_017564.8,3541-3559).
gtgatacacatcatcaaca

SEQ ID NO: 153406 - DNA, 19 bp, Homo sapiens
  siRNA target sequence for STAB2 (NM_017564.8,3570-3588).
cccacaaagacgtctaact

SEQ ID NO: 153407 - DNA, 19 bp, Homo sapiens
  siRNA target sequence for STAB2 (NM_017564.8,3583-3601).
ctaactggctccttaccaa

SEQ ID NO: 153408 - DNA, 19 bp, Homo sapiens
  siRNA target sequence for STAB2 (NM_017564.8,3618-3636).
ggaacagatgcctgactat

SEQ ID NO: 153409 - DNA, 19 bp, Homo sapiens
  siRNA target sequence for STAB2 (NM_017564.8,3648-3666).
gggctacatcattcaatat

SEQ ID NO: 153410 - DNA, 19 bp, Homo sapiens
  siRNA target sequence for STAB2 (NM_017564.8,3649-3667).
ggctacatcattcaatata

SEQ ID NO: 153411 - DNA, 19 bp, Homo sapiens
  siRNA target sequence for STAB2 (NM_017564.8,3693-3711).
cgatgcctacacagtgttt

SEQ ID NO: 153412 - DNA, 19 bp, Homo sapiens
  siRNA target sequence for STAB2 (NM_017564.8,3704-3722).
cagtgtttgctccaaacaa

SEQ ID NO: 153413 - DNA, 19 bp, Homo sapiens
  siRNA target sequence for STAB2 (NM_017564.8,3706-3724).
gtgtttgctccaaacaaca

SEQ ID NO: 153414 - DNA, 19 bp, Homo sapiens
  siRNA target sequence for STAB2 (NM_017564.8,3708-3726).
gtttgctccaaacaacaat

SEQ ID NO: 153415 - DNA, 19 bp, Homo sapiens
  siRNA target sequence for STAB2 (NM_017564.8,3727-3745).
gccatcgagaattacatca

SEQ ID NO: 153416 - DNA, 19 bp, Homo sapiens
  siRNA target sequence for STAB2 (NM_017564.8,3774-3792).
ggacgtcctccggtatcat

SEQ ID NO: 153417 - DNA, 19 bp, Homo sapiens
  siRNA target sequence for STAB2 (NM_017564.8,3859-3877).
ggtttctcctatttcctta

SEQ ID NO: 153418 - DNA, 19 bp, Homo sapiens
  siRNA target sequence for STAB2 (NM_017564.8,3907-3925).
gtaaatgaggctccaataa

SEQ ID NO: 153419 - DNA, 19 bp, Homo sapiens
  siRNA target sequence for STAB2 (NM_017564.8,3913-3931).
gaggctccaataaactaca

SEQ ID NO: 153420 - DNA, 19 bp, Homo sapiens
  siRNA target sequence for STAB2 (NM_017564.8,3932-3950).
ccaatgtagccactgataa

SEQ ID NO: 153421 - DNA, 19 bp, Homo sapiens
  siRNA target sequence for STAB2 (NM_017564.8,4061-4079).
cctgcccattcggaactaa

SEQ ID NO: 153422 - DNA, 19 bp, Homo sapiens
  siRNA target sequence for STAB2 (NM_017564.8,4062-4080).
ctgcccattcggaactaaa

SEQ ID NO: 153423 - DNA, 19 bp, Homo sapiens
  siRNA target sequence for STAB2 (NM_017564.8,4065-4083).
cccattcggaactaaatct

SEQ ID NO: 153424 - DNA, 19 bp, Homo sapiens
  siRNA target sequence for STAB2 (NM_017564.8,4067-4085).
cattcggaactaaatctct

SEQ ID NO: 153425 - DNA, 19 bp, Homo sapiens
  siRNA target sequence for STAB2 (NM_017564.8,4073-4091).
gaactaaatctctaggtaa

SEQ ID NO: 153426 - DNA, 19 bp, Homo sapiens
  siRNA target sequence for STAB2 (NM_017564.8,4095-4113).
gaagaggagatgcatctat

SEQ ID NO: 153427 - DNA, 19 bp, Homo sapiens
  siRNA target sequence for STAB2 (NM_017564.8,4106-4124).
gcatctatacctcctattt

SEQ ID NO: 153428 - DNA, 19 bp, Homo sapiens
  siRNA target sequence for STAB2 (NM_017564.8,4129-4147).
ggaagacgaaccctgttta

SEQ ID NO: 153429 - DNA, 19 bp, Homo sapiens
  siRNA target sequence for STAB2 (NM_017564.8,4168-4186).
gtgagaaccgtcattacga

SEQ ID NO: 153430 - DNA, 19 bp, Homo sapiens
  siRNA target sequence for STAB2 (NM_017564.8,4232-4250).
cagggaatgcccagaatgt

SEQ ID NO: 153431 - DNA, 19 bp, Homo sapiens
  siRNA target sequence for STAB2 (NM_017564.8,4234-4252).
gggaatgcccagaatgtct

SEQ ID NO: 153432 - DNA, 19 bp, Homo sapiens
  siRNA target sequence for STAB2 (NM_017564.8,4245-4263).
gaatgtctgctttggtaat

SEQ ID NO: 153433 - DNA, 19 bp, Homo sapiens
  siRNA target sequence for STAB2 (NM_017564.8,4459-4477).
gtgcattgtgacaatgcaa

SEQ ID NO: 153434 - DNA, 19 bp, Homo sapiens
  siRNA target sequence for STAB2 (NM_017564.8,4557-4575).
gtgtgcagcaggattccaa

SEQ ID NO: 153435 - DNA, 19 bp, Homo sapiens
  siRNA target sequence for STAB2 (NM_017564.8,4634-4652).
ctgccaaggctgactgtaa

SEQ ID NO: 153436 - DNA, 19 bp, Homo sapiens
  siRNA target sequence for STAB2 (NM_017564.8,4709-4727).
gcattgtgtgcctggaaat

SEQ ID NO: 153437 - DNA, 19 bp, Homo sapiens
  siRNA target sequence for STAB2 (NM_017564.8,4809-4827).
ctgtttgccagcatacact

SEQ ID NO: 153438 - DNA, 19 bp, Homo sapiens
  siRNA target sequence for STAB2 (NM_017564.8,4905-4923).
ccacactgggcaagtagaa

SEQ ID NO: 153439 - DNA, 19 bp, Homo sapiens
  siRNA target sequence for STAB2 (NM_017564.8,4915-4933).
caagtagaaaggacttgta

SEQ ID NO: 153440 - DNA, 19 bp, Homo sapiens
  siRNA target sequence for STAB2 (NM_017564.8,4931-4949).
gtacttgcaagccaaacta

SEQ ID NO: 153441 - DNA, 19 bp, Homo sapiens
  siRNA target sequence for STAB2 (NM_017564.8,4947-4965).
ctacattggagatggattt

SEQ ID NO: 153442 - DNA, 19 bp, Homo sapiens
  siRNA target sequence for STAB2 (NM_017564.8,5037-5055).
ggagcatttcgtgaaagat

SEQ ID NO: 153443 - DNA, 19 bp, Homo sapiens
  siRNA target sequence for STAB2 (NM_017564.8,5066-5084).
caggccccttcactgtttt

SEQ ID NO: 153444 - DNA, 19 bp, Homo sapiens
  siRNA target sequence for STAB2 (NM_017564.8,5070-5088).
ccccttcactgtttttgca

SEQ ID NO: 153445 - DNA, 19 bp, Homo sapiens
  siRNA target sequence for STAB2 (NM_017564.8,5113-5131).
gaagctcgggttaaagact

SEQ ID NO: 153446 - DNA, 19 bp, Homo sapiens
  siRNA target sequence for STAB2 (NM_017564.8,5122-5140).
gttaaagactgggacaaat

SEQ ID NO: 153447 - DNA, 19 bp, Homo sapiens
  siRNA target sequence for STAB2 (NM_017564.8,5132-5150).
gggacaaatacggtttaat

SEQ ID NO: 153448 - DNA, 19 bp, Homo sapiens
  siRNA target sequence for STAB2 (NM_017564.8,5264-5282).
ctcagagcacggtgtatat

SEQ ID NO: 153449 - DNA, 19 bp, Homo sapiens
  siRNA target sequence for STAB2 (NM_017564.8,5309-5327).
gtgatatcatcagtactaa

SEQ ID NO: 153450 - DNA, 19 bp, Homo sapiens
  siRNA target sequence for STAB2 (NM_017564.8,5324-5342).
ctaatgggattgttcatat

SEQ ID NO: 153451 - DNA, 19 bp, Homo sapiens
  siRNA target sequence for STAB2 (NM_017564.8,5420-5438).
cgactttggcaacaaacaa

SEQ ID NO: 153452 - DNA, 19 bp, Homo sapiens
  siRNA target sequence for STAB2 (NM_017564.8,5448-5466).
caaatttagcaacttaata

SEQ ID NO: 153453 - DNA, 19 bp, Homo sapiens
  siRNA target sequence for STAB2 (NM_017564.8,5736-5754).
cggtgacctctttctgaat

SEQ ID NO: 153454 - DNA, 19 bp, Homo sapiens
  siRNA target sequence for STAB2 (NM_017564.8,5775-5793).
gcagcgggagctcttgttt

SEQ ID NO: 153455 - DNA, 19 bp, Homo sapiens
  siRNA target sequence for STAB2 (NM_017564.8,5803-5821).
gtggcctacggcattgact

SEQ ID NO: 153456 - DNA, 19 bp, Homo sapiens
  siRNA target sequence for STAB2 (NM_017564.8,5850-5868).
ccgctgtgacacctttact

SEQ ID NO: 153457 - DNA, 19 bp, Homo sapiens
  siRNA target sequence for STAB2 (NM_017564.8,5916-5934).
ctgcccaaggtggagtaaa

SEQ ID NO: 153458 - DNA, 19 bp, Homo sapiens
  siRNA target sequence for STAB2 (NM_017564.8,6008-6026).
gcagcctggtgatacagat

SEQ ID NO: 153459 - DNA, 19 bp, Homo sapiens
  siRNA target sequence for STAB2 (NM_017564.8,6082-6100).
ccagatgccccgtgtaata

SEQ ID NO: 153460 - DNA, 19 bp, Homo sapiens
  siRNA target sequence for STAB2 (NM_017564.8,6104-6122).
ggggtgtctgccttgatca

SEQ ID NO: 153461 - DNA, 19 bp, Homo sapiens
  siRNA target sequence for STAB2 (NM_017564.8,6107-6125).
gtgtctgccttgatcagta

SEQ ID NO: 153462 - DNA, 19 bp, Homo sapiens
  siRNA target sequence for STAB2 (NM_017564.8,6128-6146).
cggccaccggagagtgtaa

SEQ ID NO: 153463 - DNA, 19 bp, Homo sapiens
  siRNA target sequence for STAB2 (NM_017564.8,6129-6147).
ggccaccggagagtgtaaa

SEQ ID NO: 153464 - DNA, 19 bp, Homo sapiens
  siRNA target sequence for STAB2 (NM_017564.8,6130-6148).
gccaccggagagtgtaaat

SEQ ID NO: 153465 - DNA, 19 bp, Homo sapiens
  siRNA target sequence for STAB2 (NM_017564.8,6336-6354).
gtgtacgcctccttgttct

SEQ ID NO: 153466 - DNA, 19 bp, Homo sapiens
  siRNA target sequence for STAB2 (NM_017564.8,6390-6408).
gtgtaacctggattatgaa

SEQ ID NO: 153467 - DNA, 19 bp, Homo sapiens
  siRNA target sequence for STAB2 (NM_017564.8,6630-6648).
gcacaagtgtgagtgtaaa

SEQ ID NO: 153468 - DNA, 19 bp, Homo sapiens
  siRNA target sequence for STAB2 (NM_017564.8,6631-6649).
cacaagtgtgagtgtaaaa

SEQ ID NO: 153469 - DNA, 19 bp, Homo sapiens
  siRNA target sequence for STAB2 (NM_017564.8,6797-6815).
ccccactgggccagtataa

SEQ ID NO: 153470 - DNA, 19 bp, Homo sapiens
  siRNA target sequence for STAB2 (NM_017564.8,6800-6818).
cactgggccagtataagct

SEQ ID NO: 153471 - DNA, 19 bp, Homo sapiens
  siRNA target sequence for STAB2 (NM_017564.8,7012-7030).
ggacctagacccaacaaga

SEQ ID NO: 153472 - DNA, 19 bp, Homo sapiens
  siRNA target sequence for STAB2 (NM_017564.8,7050-7068).
ctgctatcggatgaaagat

SEQ ID NO: 153473 - DNA, 19 bp, Homo sapiens
  siRNA target sequence for STAB2 (NM_017564.8,7052-7070).
gctatcggatgaaagatgt

SEQ ID NO: 153474 - DNA, 19 bp, Homo sapiens
  siRNA target sequence for STAB2 (NM_017564.8,7096-7114).
gtgggagatggcttctcat

SEQ ID NO: 153475 - DNA, 19 bp, Homo sapiens
  siRNA target sequence for STAB2 (NM_017564.8,7318-7336).
caccacctcgccaatgtca

SEQ ID NO: 153476 - DNA, 19 bp, Homo sapiens
  siRNA target sequence for STAB2 (NM_017564.8,7326-7344).
cgccaatgtcagcatgttt

SEQ ID NO: 153477 - DNA, 19 bp, Homo sapiens
  siRNA target sequence for STAB2 (NM_017564.8,7434-7452).
gacggagaccaggtttgtt

SEQ ID NO: 153478 - DNA, 19 bp, Homo sapiens
  siRNA target sequence for STAB2 (NM_017564.8,7436-7454).
cggagaccaggtttgttga

SEQ ID NO: 153479 - DNA, 19 bp, Homo sapiens
  siRNA target sequence for STAB2 (NM_017564.8,7437-7455).
ggagaccaggtttgttgat

SEQ ID NO: 153480 - DNA, 19 bp, Homo sapiens
  siRNA target sequence for STAB2 (NM_017564.8,7488-7506).
ctccaatgggatcattcat

SEQ ID NO: 153481 - DNA, 19 bp, Homo sapiens
  siRNA target sequence for STAB2 (NM_017564.8,7636-7654).
cggataaaccggagaacaa

SEQ ID NO: 153482 - DNA, 19 bp, Homo sapiens
  siRNA target sequence for STAB2 (NM_017564.8,7637-7655).
ggataaaccggagaacaat

SEQ ID NO: 153483 - DNA, 19 bp, Homo sapiens
  siRNA target sequence for STAB2 (NM_017564.8,7657-7675).
ggcttccagcattttgagt

SEQ ID NO: 153484 - DNA, 19 bp, Homo sapiens
  siRNA target sequence for SWAP70 (NM_015055.1,273-291).
cagggctacatgccttatt

SEQ ID NO: 153485 - DNA, 19 bp, Homo sapiens
  siRNA target sequence for SWAP70 (NM_015055.1,275-293).
gggctacatgccttattta

SEQ ID NO: 153486 - DNA, 19 bp, Homo sapiens
  siRNA target sequence for SWAP70 (NM_015055.1,298-316).
ggttcattttggaaaaggt

SEQ ID NO: 153487 - DNA, 19 bp, Homo sapiens
  siRNA target sequence for SWAP70 (NM_015055.1,339-357).
gaattcaataggatgtgtt

SEQ ID NO: 153488 - DNA, 19 bp, Homo sapiens
  siRNA target sequence for SWAP70 (NM_015055.1,455-473).
ggacaagtatccattaatt

SEQ ID NO: 153489 - DNA, 19 bp, Homo sapiens
  siRNA target sequence for SWAP70 (NM_015055.1,529-547).
gaggttggcagcaagaaca

SEQ ID NO: 153490 - DNA, 19 bp, Homo sapiens
  siRNA target sequence for SWAP70 (NM_015055.1,531-549).
ggttggcagcaagaacaat

SEQ ID NO: 153491 - DNA, 19 bp, Homo sapiens
  siRNA target sequence for SWAP70 (NM_015055.1,595-613).
ctgcatgggaacttattga

SEQ ID NO: 153492 - DNA, 19 bp, Homo sapiens
  siRNA target sequence for SWAP70 (NM_015055.1,601-619).
gggaacttattgagcttat

SEQ ID NO: 153493 - DNA, 19 bp, Homo sapiens
  siRNA target sequence for SWAP70 (NM_015055.1,606-624).
cttattgagcttattggaa

SEQ ID NO: 153494 - DNA, 19 bp, Homo sapiens
  siRNA target sequence for SWAP70 (NM_015055.1,662-680).
gtctatggcaattaatgaa

SEQ ID NO: 153495 - DNA, 19 bp, Homo sapiens
  siRNA target sequence for SWAP70 (NM_015055.1,664-682).
ctatggcaattaatgaagt

SEQ ID NO: 153496 - DNA, 19 bp, Homo sapiens
  siRNA target sequence for SWAP70 (NM_015055.1,713-731).
gcagggttacatgatgaaa

SEQ ID NO: 153497 - DNA, 19 bp, Homo sapiens
  siRNA target sequence for SWAP70 (NM_015055.1,735-753).
ggccacagacggaaaaact

SEQ ID NO: 153498 - DNA, 19 bp, Homo sapiens
  siRNA target sequence for SWAP70 (NM_015055.1,774-792).
ctaaaacccaacataattt

SEQ ID NO: 153499 - DNA, 19 bp, Homo sapiens
  siRNA target sequence for SWAP70 (NM_015055.1,780-798).
cccaacataatttcttact

SEQ ID NO: 153500 - DNA, 19 bp, Homo sapiens
  siRNA target sequence for SWAP70 (NM_015055.1,781-799).
ccaacataatttcttacta

SEQ ID NO: 153501 - DNA, 19 bp, Homo sapiens
  siRNA target sequence for SWAP70 (NM_015055.1,782-800).
caacataatttcttactat

SEQ ID NO: 153502 - DNA, 19 bp, Homo sapiens
  siRNA target sequence for SWAP70 (NM_015055.1,900-918).
ctcgtaaaatgttttgata

SEQ ID NO: 153503 - DNA, 19 bp, Homo sapiens
  siRNA target sequence for SWAP70 (NM_015055.1,910-928).
gttttgataagacttttga

SEQ ID NO: 153504 - DNA, 19 bp, Homo sapiens
  siRNA target sequence for SWAP70 (NM_015055.1,934-952).
gtgcttcagataagaagaa

SEQ ID NO: 153505 - DNA, 19 bp, Homo sapiens
  siRNA target sequence for SWAP70 (NM_015055.1,969-987).
caagccattcattctacta

SEQ ID NO: 153506 - DNA, 19 bp, Homo sapiens
  siRNA target sequence for SWAP70 (NM_015055.1,1080-1098).
gaactggagcgacaaatga

SEQ ID NO: 153507 - DNA, 19 bp, Homo sapiens
  siRNA target sequence for SWAP70 (NM_015055.1,1338-1356).
ctggaagacatgtacctaa

SEQ ID NO: 153508 - DNA, 19 bp, Homo sapiens
  siRNA target sequence for SWAP70 (NM_015055.1,1643-1661).
gctggagatggcaactaat

SEQ ID NO: 153509 - DNA, 19 bp, Homo sapiens
  siRNA target sequence for SWAP70 (NM_015055.1,1644-1662).
ctggagatggcaactaata

SEQ ID NO: 153510 - DNA, 19 bp, Homo sapiens
  siRNA target sequence for SWAP70 (NM_015055.1,1682-1700).
caaagtggcccatcatgaa

SEQ ID NO: 153511 - DNA, 19 bp, Homo sapiens
  siRNA target sequence for SWAP70 (NM_015055.1,1688-1706).
ggcccatcatgaaggatta

SEQ ID NO: 153512 - DNA, 19 bp, Homo sapiens
  siRNA target sequence for SWAP70 (NM_015055.1,1689-1707).
gcccatcatgaaggattaa

SEQ ID NO: 153513 - DNA, 19 bp, Homo sapiens
  siRNA target sequence for SWAP70 (NM_015055.1,1690-1708).
cccatcatgaaggattaat

SEQ ID NO: 153514 - DNA, 19 bp, Homo sapiens
  siRNA target sequence for SWAP70 (NM_015055.1,1702-1720).
gattaattcgactgataga

SEQ ID NO: 153515 - DNA, 19 bp, Homo sapiens
  siRNA target sequence for SYP (NM_003179.1,227-245).
ggctgcaccaagtgtactt

SEQ ID NO: 153516 - DNA, 19 bp, Homo sapiens
  siRNA target sequence for SYP (NM_003179.1,228-246).
gctgcaccaagtgtacttt

SEQ ID NO: 153517 - DNA, 19 bp, Homo sapiens
  siRNA target sequence for SYP (NM_003179.1,269-287).
gcaccaccaaggtcttctt

SEQ ID NO: 153518 - DNA, 19 bp, Homo sapiens
  siRNA target sequence for SYP (NM_003179.1,270-288).
caccaccaaggtcttctta

SEQ ID NO: 153519 - DNA, 19 bp, Homo sapiens
  siRNA target sequence for SYP (NM_003179.1,273-291).
caccaaggtcttcttagtt

SEQ ID NO: 153520 - DNA, 19 bp, Homo sapiens
  siRNA target sequence for SYP (NM_003179.1,302-320).
cctcgtcagccgaattctt

SEQ ID NO: 153521 - DNA, 19 bp, Homo sapiens
  siRNA target sequence for SYP (NM_003179.1,387-405).
gaacaagtaccgagagaat

SEQ ID NO: 153522 - DNA, 19 bp, Homo sapiens
  siRNA target sequence for SYP (NM_003179.1,439-457).
gctgtgttcgccttcatgt

SEQ ID NO: 153523 - DNA, 19 bp, Homo sapiens
  siRNA target sequence for SYP (NM_003179.1,448-466).
gccttcatgtggctagtta

SEQ ID NO: 153524 - DNA, 19 bp, Homo sapiens
  siRNA target sequence for SYP (NM_003179.1,550-568).
cgccagacagggaacacat

SEQ ID NO: 153525 - DNA, 19 bp, Homo sapiens
  siRNA target sequence for TGM1 (NM_000359.1,397-415).
gagagggcatgctagtagt

SEQ ID NO: 153526 - DNA, 19 bp, Homo sapiens
  siRNA target sequence for TGM1 (NM_000359.1,468-486).
cacacagacgagtatgagt

SEQ ID NO: 153527 - DNA, 19 bp, Homo sapiens
  siRNA target sequence for TGM1 (NM_000359.1,536-554).
cctgtcccggacctatgaa

SEQ ID NO: 153528 - DNA, 19 bp, Homo sapiens
  siRNA target sequence for TGM1 (NM_000359.1,537-555).
ctgtcccggacctatgaat

SEQ ID NO: 153529 - DNA, 19 bp, Homo sapiens
  siRNA target sequence for TGM1 (NM_000359.1,746-764).
cacagtccgcacacaatca

SEQ ID NO: 153530 - DNA, 19 bp, Homo sapiens
  siRNA target sequence for TGM1 (NM_000359.1,871-889).
ggcaggagtatgttcttaa

SEQ ID NO: 153531 - DNA, 19 bp, Homo sapiens
  siRNA target sequence for TGM1 (NM_000359.1,872-890).
gcaggagtatgttcttaat

SEQ ID NO: 153532 - DNA, 19 bp, Homo sapiens
  siRNA target sequence for TGM1 (NM_000359.1,972-990).
ctggatgcctgcttataca

SEQ ID NO: 153533 - DNA, 19 bp, Homo sapiens
  siRNA target sequence for TGM1 (NM_000359.1,1022-1040).
ccgtggagacccagtcaat

SEQ ID NO: 153534 - DNA, 19 bp, Homo sapiens
  siRNA target sequence for TGM1 (NM_000359.1,1026-1044).
ggagacccagtcaatgtct

SEQ ID NO: 153535 - DNA, 19 bp, Homo sapiens
  siRNA target sequence for TGM1 (NM_000359.1,1067-1085).
gaactccctggatgacaat

SEQ ID NO: 153536 - DNA, 19 bp, Homo sapiens
  siRNA target sequence for TGM1 (NM_000359.1,1266-1284).
cgtactgtcaccaacttca

SEQ ID NO: 153537 - DNA, 19 bp, Homo sapiens
  siRNA target sequence for TGM1 (NM_000359.1,1267-1285).
gtactgtcaccaacttcaa

SEQ ID NO: 153538 - DNA, 19 bp, Homo sapiens
  siRNA target sequence for TGM1 (NM_000359.1,1544-1562).
gtacgacacgcctttcatt

SEQ ID NO: 153539 - DNA, 19 bp, Homo sapiens
  siRNA target sequence for TGM1 (NM_000359.1,1547-1565).
cgacacgcctttcattttt

SEQ ID NO: 153540 - DNA, 19 bp, Homo sapiens
  siRNA target sequence for TGM1 (NM_000359.1,1550-1568).
cacgcctttcatttttgct

SEQ ID NO: 153541 - DNA, 19 bp, Homo sapiens
  siRNA target sequence for TGM1 (NM_000359.1,1611-1629).
ggcagcttcaagattgttt

SEQ ID NO: 153542 - DNA, 19 bp, Homo sapiens
  siRNA target sequence for TGM1 (NM_000359.1,1612-1630).
gcagcttcaagattgttta

SEQ ID NO: 153543 - DNA, 19 bp, Homo sapiens
  siRNA target sequence for TGM1 (NM_000359.1,1615-1633).
gcttcaagattgtttatgt

SEQ ID NO: 153544 - DNA, 19 bp, Homo sapiens
  siRNA target sequence for TGM1 (NM_000359.1,1643-1661).
ggccatcggcacactcatt

SEQ ID NO: 153545 - DNA, 19 bp, Homo sapiens
  siRNA target sequence for TGM1 (NM_000359.1,1645-1663).
ccatcggcacactcattgt

SEQ ID NO: 153546 - DNA, 19 bp, Homo sapiens
  siRNA target sequence for TGM1 (NM_000359.1,1695-1713).
gacatcacctacctctata

SEQ ID NO: 153547 - DNA, 19 bp, Homo sapiens
  siRNA target sequence for TGM1 (NM_000359.1,1771-1789).
gcagcaaacccaatgtgta

SEQ ID NO: 153548 - DNA, 19 bp, Homo sapiens
  siRNA target sequence for TGM1 (NM_000359.1,2195-2213).
ggagtgtgaagtacagatt

SEQ ID NO: 153549 - DNA, 19 bp, Homo sapiens
  siRNA target sequence for TGM1 (NM_000359.1,2309-2327).
cattggaggcaatgaaaca

SEQ ID NO: 153550 - DNA, 19 bp, Homo sapiens
  siRNA target sequence for TGM2 (NM_004613.2,316-334).
gaccaaggcccgttttcca

SEQ ID NO: 153551 - DNA, 19 bp, Homo sapiens
  siRNA target sequence for TGM2 (NM_004613.2,324-342).
cccgttttccactaagaga

SEQ ID NO: 153552 - DNA, 19 bp, Homo sapiens
  siRNA target sequence for TGM2 (NM_004613.2,608-626).
ggctcggccaagttcatca

SEQ ID NO: 153553 - DNA, 19 bp, Homo sapiens
  siRNA target sequence for TGM2 (NM_004613.2,609-627).
gctcggccaagttcatcaa

SEQ ID NO: 153554 - DNA, 19 bp, Homo sapiens
  siRNA target sequence for TGM2 (NM_004613.2,678-696).
gcctgatccttctagatgt

SEQ ID NO: 153555 - DNA, 19 bp, Homo sapiens
  siRNA target sequence for TGM2 (NM_004613.2,815-833).
ggacgctgggacaacaact

SEQ ID NO: 153556 - DNA, 19 bp, Homo sapiens
  siRNA target sequence for TGM2 (NM_004613.2,816-834).
gacgctgggacaacaacta

SEQ ID NO: 153557 - DNA, 19 bp, Homo sapiens
  siRNA target sequence for TGM2 (NM_004613.2,903-921).
gctgccagcgcgtcaagta

SEQ ID NO: 153558 - DNA, 19 bp, Homo sapiens
  siRNA target sequence for TGM2 (NM_004613.2,904-922).
ctgccagcgcgtcaagtat

SEQ ID NO: 153559 - DNA, 19 bp, Homo sapiens
  siRNA target sequence for TGM2 (NM_004613.2,986-1004).
cgcgtcgtgaccaactaca

SEQ ID NO: 153560 - DNA, 19 bp, Homo sapiens
  siRNA target sequence for TGM2 (NM_004613.2,987-1005).
gcgtcgtgaccaactacaa

SEQ ID NO: 153561 - DNA, 19 bp, Homo sapiens
  siRNA target sequence for TGM2 (NM_004613.2,1040-1058).
gagtacttccgcaatgagt

SEQ ID NO: 153562 - DNA, 19 bp, Homo sapiens
  siRNA target sequence for TGM2 (NM_004613.2,1042-1060).
gtacttccgcaatgagttt

SEQ ID NO: 153563 - DNA, 19 bp, Homo sapiens
  siRNA target sequence for TGM2 (NM_004613.2,1074-1092).
gtgacaagagcgagatgat

SEQ ID NO: 153564 - DNA, 19 bp, Homo sapiens
  siRNA target sequence for TGM2 (NM_004613.2,1370-1388).
ctgaagatcagcactaaga

SEQ ID NO: 153565 - DNA, 19 bp, Homo sapiens
  siRNA target sequence for TGM2 (NM_004613.2,1398-1416).
gagacgagcgggaggatat

SEQ ID NO: 153566 - DNA, 19 bp, Homo sapiens
  siRNA target sequence for TGM2 (NM_004613.2,1730-1748).
ctttgcatcctctatgaga

SEQ ID NO: 153567 - DNA, 19 bp, Homo sapiens
  siRNA target sequence for TGM2 (NM_004613.2,1734-1752).
gcatcctctatgagaaata

SEQ ID NO: 153568 - DNA, 19 bp, Homo sapiens
  siRNA target sequence for TGM2 (NM_004613.2,1799-1817).
ctcgtggagccagttatca

SEQ ID NO: 153569 - DNA, 19 bp, Homo sapiens
  siRNA target sequence for TGM2 (NM_004613.2,2133-2151).
gcttccggaatgtcatcat

SEQ ID NO: 153570 - DNA, 19 bp, Homo sapiens
  siRNA target sequence for TGM3 (NM_003245.2,45-63).
ctaggagtccagagtatca

SEQ ID NO: 153571 - DNA, 19 bp, Homo sapiens
  siRNA target sequence for TGM3 (NM_003245.2,48-66).
ggagtccagagtatcaact

SEQ ID NO: 153572 - DNA, 19 bp, Homo sapiens
  siRNA target sequence for TGM3 (NM_003245.2,91-109).
cgcatcacacagacaagtt

SEQ ID NO: 153573 - DNA, 19 bp, Homo sapiens
  siRNA target sequence for TGM3 (NM_003245.2,174-192).
ggccttggctctaacgaaa

SEQ ID NO: 153574 - DNA, 19 bp, Homo sapiens
  siRNA target sequence for TGM3 (NM_003245.2,302-320).
ggccagcaatggcaatact

SEQ ID NO: 153575 - DNA, 19 bp, Homo sapiens
  siRNA target sequence for TGM3 (NM_003245.2,304-322).
ccagcaatggcaatactct

SEQ ID NO: 153576 - DNA, 19 bp, Homo sapiens
  siRNA target sequence for TGM3 (NM_003245.2,354-372).
cccataggacggtacacaa

SEQ ID NO: 153577 - DNA, 19 bp, Homo sapiens
  siRNA target sequence for TGM3 (NM_003245.2,355-373).
ccataggacggtacacaat

SEQ ID NO: 153578 - DNA, 19 bp, Homo sapiens
  siRNA target sequence for TGM3 (NM_003245.2,370-388).
caatggccctccagatctt

SEQ ID NO: 153579 - DNA, 19 bp, Homo sapiens
  siRNA target sequence for TGM3 (NM_003245.2,413-431).
gaaacttgggacgttcata

SEQ ID NO: 153580 - DNA, 19 bp, Homo sapiens
  siRNA target sequence for TGM3 (NM_003245.2,482-500).
cgctgagagagaagagtat

SEQ ID NO: 153581 - DNA, 19 bp, Homo sapiens
  siRNA target sequence for TGM3 (NM_003245.2,611-629).
cttggataggagtctgaat

SEQ ID NO: 153582 - DNA, 19 bp, Homo sapiens
  siRNA target sequence for TGM3 (NM_003245.2,635-653).
ccgtgacgctgctactgat

SEQ ID NO: 153583 - DNA, 19 bp, Homo sapiens
  siRNA target sequence for TGM3 (NM_003245.2,798-816).
gagatcctcaaaaattgga

SEQ ID NO: 153584 - DNA, 19 bp, Homo sapiens
  siRNA target sequence for TGM3 (NM_003245.2,939-957).
gacacagaccgaaatctca

SEQ ID NO: 153585 - DNA, 19 bp, Homo sapiens
  siRNA target sequence for TGM3 (NM_003245.2,1003-1021).
gtagtgatagcgtatggaa

SEQ ID NO: 153586 - DNA, 19 bp, Homo sapiens
  siRNA target sequence for TGM3 (NM_003245.2,1006-1024).
gtgatagcgtatggaattt

SEQ ID NO: 153587 - DNA, 19 bp, Homo sapiens
  siRNA target sequence for TGM3 (NM_003245.2,1098-1116).
gctaccccgcaggaaagaa

SEQ ID NO: 153588 - DNA, 19 bp, Homo sapiens
  siRNA target sequence for TGM3 (NM_003245.2,1442-1460).
gtcttcaatgggtttggaa

SEQ ID NO: 153589 - DNA, 19 bp, Homo sapiens
  siRNA target sequence for TGM3 (NM_003245.2,1447-1465).
caatgggtttggaaacaga

SEQ ID NO: 153590 - DNA, 19 bp, Homo sapiens
  siRNA target sequence for TGM3 (NM_003245.2,1511-1529).
gctggcagtaggcaaagaa

SEQ ID NO: 153591 - DNA, 19 bp, Homo sapiens
  siRNA target sequence for TGM3 (NM_003245.2,1536-1554).
ctggtcctactgctcaaaa

SEQ ID NO: 153592 - DNA, 19 bp, Homo sapiens
  siRNA target sequence for TGM3 (NM_003245.2,1613-1631).
caacggcacgcttgtacat

SEQ ID NO: 153593 - DNA, 19 bp, Homo sapiens
  siRNA target sequence for TGM3 (NM_003245.2,1616-1634).
cggcacgcttgtacatgaa

SEQ ID NO: 153594 - DNA, 19 bp, Homo sapiens
  siRNA target sequence for TGM3 (NM_003245.2,1618-1636).
gcacgcttgtacatgaagt

SEQ ID NO: 153595 - DNA, 19 bp, Homo sapiens
  siRNA target sequence for TGM3 (NM_003245.2,1680-1698).
gcagaacatcccataaaga

SEQ ID NO: 153596 - DNA, 19 bp, Homo sapiens
  siRNA target sequence for TGM3 (NM_003245.2,1697-1715).
gatctcgtacgctcagtat

SEQ ID NO: 153597 - DNA, 19 bp, Homo sapiens
  siRNA target sequence for TGM3 (NM_003245.2,1702-1720).
cgtacgctcagtatgagaa

SEQ ID NO: 153598 - DNA, 19 bp, Homo sapiens
  siRNA target sequence for TGM3 (NM_003245.2,1997-2015).
gtcccgggtccgttttgat

SEQ ID NO: 153599 - DNA, 19 bp, Homo sapiens
  siRNA target sequence for TGM3 (NM_003245.2,1999-2017).
cccgggtccgttttgatat

SEQ ID NO: 153600 - DNA, 19 bp, Homo sapiens
  siRNA target sequence for TGM3 (NM_003245.2,2079-2097).
gcaatcaaggccatgttgt

SEQ ID NO: 153601 - DNA, 19 bp, Homo sapiens
  siRNA target sequence for TGM4 (NM_003241.1,75-93).
ctccacattgacttcttga

SEQ ID NO: 153602 - DNA, 19 bp, Homo sapiens
  siRNA target sequence for TGM4 (NM_003241.1,291-309).
ccctcagaccactacaact

SEQ ID NO: 153603 - DNA, 19 bp, Homo sapiens
  siRNA target sequence for TGM4 (NM_003241.1,311-329).
gcaggcaacccttcaaaat

SEQ ID NO: 153604 - DNA, 19 bp, Homo sapiens
  siRNA target sequence for TGM4 (NM_003241.1,392-410).
ccaactaaacgtgaaaact

SEQ ID NO: 153605 - DNA, 19 bp, Homo sapiens
  siRNA target sequence for TGM4 (NM_003241.1,455-473).
cttcaacccatggtgtaaa

SEQ ID NO: 153606 - DNA, 19 bp, Homo sapiens
  siRNA target sequence for TGM4 (NM_003241.1,546-564).
gtgggggctgccagaagta

SEQ ID NO: 153607 - DNA, 19 bp, Homo sapiens
  siRNA target sequence for TGM4 (NM_003241.1,550-568).
gggctgccagaagtatcaa

SEQ ID NO: 153608 - DNA, 19 bp, Homo sapiens
  siRNA target sequence for TGM4 (NM_003241.1,552-570).
gctgccagaagtatcaaat

SEQ ID NO: 153609 - DNA, 19 bp, Homo sapiens
  siRNA target sequence for TGM4 (NM_003241.1,555-573).
gccagaagtatcaaatgca

SEQ ID NO: 153610 - DNA, 19 bp, Homo sapiens
  siRNA target sequence for TGM4 (NM_003241.1,584-602).
ctttggtcagtttgagaaa

SEQ ID NO: 153611 - DNA, 19 bp, Homo sapiens
  siRNA target sequence for TGM4 (NM_003241.1,685-703).
gggccatgtgtgctatgat

SEQ ID NO: 153612 - DNA, 19 bp, Homo sapiens
  siRNA target sequence for TGM4 (NM_003241.1,760-778).
gtggcacagccccatacaa

SEQ ID NO: 153613 - DNA, 19 bp, Homo sapiens
  siRNA target sequence for TGM4 (NM_003241.1,952-970).
cggtggacacctatgtgaa

SEQ ID NO: 153614 - DNA, 19 bp, Homo sapiens
  siRNA target sequence for TGM4 (NM_003241.1,1157-1175).
ccgcaaaggtgacatcttt

SEQ ID NO: 153615 - DNA, 19 bp, Homo sapiens
  siRNA target sequence for TGM4 (NM_003241.1,1158-1176).
cgcaaaggtgacatcttta

SEQ ID NO: 153616 - DNA, 19 bp, Homo sapiens
  siRNA target sequence for TGM4 (NM_003241.1,1164-1182).
ggtgacatctttattgtct

SEQ ID NO: 153617 - DNA, 19 bp, Homo sapiens
  siRNA target sequence for TGM4 (NM_003241.1,1165-1183).
gtgacatctttattgtcta

SEQ ID NO: 153618 - DNA, 19 bp, Homo sapiens
  siRNA target sequence for TGM4 (NM_003241.1,1196-1214).
cgtcttctcagaagtgaat

SEQ ID NO: 153619 - DNA, 19 bp, Homo sapiens
  siRNA target sequence for TGM4 (NM_003241.1,1256-1274).
ggaggagttacacgtaatt

SEQ ID NO: 153620 - DNA, 19 bp, Homo sapiens
  siRNA target sequence for TGM4 (NM_003241.1,1257-1275).
gaggagttacacgtaattt

SEQ ID NO: 153621 - DNA, 19 bp, Homo sapiens
  siRNA target sequence for TGM4 (NM_003241.1,1285-1303).
ccacaagcatcgggaaaaa

SEQ ID NO: 153622 - DNA, 19 bp, Homo sapiens
  siRNA target sequence for TGM4 (NM_003241.1,1329-1347).
gacaggcggagagatatca

SEQ ID NO: 153623 - DNA, 19 bp, Homo sapiens
  siRNA target sequence for TGM4 (NM_003241.1,1339-1357).
gagatatcacctatgagta

SEQ ID NO: 153624 - DNA, 19 bp, Homo sapiens
  siRNA target sequence for TGM4 (NM_003241.1,1433-1451).
gcacagacgacctgtaaaa

SEQ ID NO: 153625 - DNA, 19 bp, Homo sapiens
  siRNA target sequence for TGM4 (NM_003241.1,1438-1456).
gacgacctgtaaaagagaa

SEQ ID NO: 153626 - DNA, 19 bp, Homo sapiens
  siRNA target sequence for TGM4 (NM_003241.1,1461-1479).
cttcacatgtcggtacaat

SEQ ID NO: 153627 - DNA, 19 bp, Homo sapiens
  siRNA target sequence for TGM4 (NM_003241.1,1466-1484).
catgtcggtacaatcagat

SEQ ID NO: 153628 - DNA, 19 bp, Homo sapiens
  siRNA target sequence for TGM4 (NM_003241.1,1469-1487).
gtcggtacaatcagatgat

SEQ ID NO: 153629 - DNA, 19 bp, Homo sapiens
  siRNA target sequence for TGM4 (NM_003241.1,1471-1489).
cggtacaatcagatgatgt

SEQ ID NO: 153630 - DNA, 19 bp, Homo sapiens
  siRNA target sequence for TGM4 (NM_003241.1,1491-1509).
ctgctgggaaactctgtta

SEQ ID NO: 153631 - DNA, 19 bp, Homo sapiens
  siRNA target sequence for TGM4 (NM_003241.1,1493-1511).
gctgggaaactctgttaat

SEQ ID NO: 153632 - DNA, 19 bp, Homo sapiens
  siRNA target sequence for TGM4 (NM_003241.1,1535-1553).
gaccgctgccctacagaat

SEQ ID NO: 153633 - DNA, 19 bp, Homo sapiens
  siRNA target sequence for TGM4 (NM_003241.1,1537-1555).
ccgctgccctacagaatgt

SEQ ID NO: 153634 - DNA, 19 bp, Homo sapiens
  siRNA target sequence for TGM4 (NM_003241.1,1562-1580).
cttgggctcctttgaacta

SEQ ID NO: 153635 - DNA, 19 bp, Homo sapiens
  siRNA target sequence for TGM4 (NM_003241.1,1567-1585).
gctcctttgaactacagtt

SEQ ID NO: 153636 - DNA, 19 bp, Homo sapiens
  siRNA target sequence for TGM4 (NM_003241.1,1691-1709).
caacagcctggctatatta

SEQ ID NO: 153637 - DNA, 19 bp, Homo sapiens
  siRNA target sequence for TGM4 (NM_003241.1,1694-1712).
cagcctggctatattagat

SEQ ID NO: 153638 - DNA, 19 bp, Homo sapiens
  siRNA target sequence for TGM4 (NM_003241.1,1696-1714).
gcctggctatattagatga

SEQ ID NO: 153639 - DNA, 19 bp, Homo sapiens
  siRNA target sequence for TGM4 (NM_003241.1,1697-1715).
cctggctatattagatgat

SEQ ID NO: 153640 - DNA, 19 bp, Homo sapiens
  siRNA target sequence for TGM4 (NM_003241.1,1720-1738).
cagttatcagaggtttcat

SEQ ID NO: 153641 - DNA, 19 bp, Homo sapiens
  siRNA target sequence for TGM4 (NM_003241.1,1752-1770).
gtggagtctaaggaaatca

SEQ ID NO: 153642 - DNA, 19 bp, Homo sapiens
  siRNA target sequence for TGM4 (NM_003241.1,1804-1822).
ctgagttctctatagagtt

SEQ ID NO: 153643 - DNA, 19 bp, Homo sapiens
  siRNA target sequence for TGM4 (NM_003241.1,1847-1865).
gctacttgtctgcaattgt

SEQ ID NO: 153644 - DNA, 19 bp, Homo sapiens
  siRNA target sequence for TGM4 (NM_003241.1,1851-1869).
cttgtctgcaattgtatct

SEQ ID NO: 153645 - DNA, 19 bp, Homo sapiens
  siRNA target sequence for TGM4 (NM_003241.1,1891-1909).
ctttgactgacgtcaagtt

SEQ ID NO: 153646 - DNA, 19 bp, Homo sapiens
  siRNA target sequence for TGM4 (NM_003241.1,2014-2032).
ctggacccaagaaatttat

SEQ ID NO: 153647 - DNA, 19 bp, Homo sapiens
  siRNA target sequence for TGM4 (NM_003241.1,2017-2035).
gacccaagaaatttatcgt

SEQ ID NO: 153648 - DNA, 19 bp, Homo sapiens
  siRNA target sequence for TGM4 (NM_003241.1,2033-2051).
cgtcaagttaagttccaaa

SEQ ID NO: 153649 - DNA, 19 bp, Homo sapiens
  siRNA target sequence for TGM4 (NM_003241.1,2048-2066).
caaacaagtgaaagagatt

SEQ ID NO: 153650 - DNA, 19 bp, Homo sapiens
  siRNA target sequence for TGM5 (NM_004245.1,226-244).
cccagaggcaggagtatgt

SEQ ID NO: 153651 - DNA, 19 bp, Homo sapiens
  siRNA target sequence for TGM5 (NM_004245.1,236-254).
ggagtatgtcatgaatgat

SEQ ID NO: 153652 - DNA, 19 bp, Homo sapiens
  siRNA target sequence for TGM5 (NM_004245.1,317-335).
gtttgaagacaaaatcata

SEQ ID NO: 153653 - DNA, 19 bp, Homo sapiens
  siRNA target sequence for TGM5 (NM_004245.1,671-689).
ctctggccacgatacagat

SEQ ID NO: 153654 - DNA, 19 bp, Homo sapiens
  siRNA target sequence for TGM5 (NM_004245.1,913-931).
gagaagtggacctgaacta

SEQ ID NO: 153655 - DNA, 19 bp, Homo sapiens
  siRNA target sequence for TGM5 (NM_004245.1,937-955).
cgccctttgtgttttcgat

SEQ ID NO: 153656 - DNA, 19 bp, Homo sapiens
  siRNA target sequence for TGM5 (NM_004245.1,1013-1031).
ccaggacacgagttctgtt

SEQ ID NO: 153657 - DNA, 19 bp, Homo sapiens
  siRNA target sequence for TGM5 (NM_004245.1,1022-1040).
gagttctgttggcaatttt

SEQ ID NO: 153658 - DNA, 19 bp, Homo sapiens
  siRNA target sequence for TGM5 (NM_004245.1,1024-1042).
gttctgttggcaattttat

SEQ ID NO: 153659 - DNA, 19 bp, Homo sapiens
  siRNA target sequence for TGM5 (NM_004245.1,1319-1337).
gggccaggatatatgcttt

SEQ ID NO: 153660 - DNA, 19 bp, Homo sapiens
  siRNA target sequence for TGM5 (NM_004245.1,1440-1458).
caggacacagcgttcatca

SEQ ID NO: 153661 - DNA, 19 bp, Homo sapiens
  siRNA target sequence for TGM5 (NM_004245.1,1598-1616).
caagatcatcaccttatct

SEQ ID NO: 153662 - DNA, 19 bp, Homo sapiens
  siRNA target sequence for TGM5 (NM_004245.1,1601-1619).
gatcatcaccttatcttat

SEQ ID NO: 153663 - DNA, 19 bp, Homo sapiens
  siRNA target sequence for TGM5 (NM_004245.1,1604-1622).
catcaccttatcttatcca

SEQ ID NO: 153664 - DNA, 19 bp, Homo sapiens
  siRNA target sequence for TGM5 (NM_004245.1,1621-1639).
caagcatcacgattaatgt

SEQ ID NO: 153665 - DNA, 19 bp, Homo sapiens
  siRNA target sequence for TGM5 (NM_004245.1,1624-1642).
gcatcacgattaatgttct

SEQ ID NO: 153666 - DNA, 19 bp, Homo sapiens
  siRNA target sequence for TGM5 (NM_004245.1,1625-1643).
catcacgattaatgttcta

SEQ ID NO: 153667 - DNA, 19 bp, Homo sapiens
  siRNA target sequence for TGM5 (NM_004245.1,1670-1688).
ctccatacaggtgatattt

SEQ ID NO: 153668 - DNA, 19 bp, Homo sapiens
  siRNA target sequence for TGM5 (NM_004245.1,1673-1691).
catacaggtgatattttca

SEQ ID NO: 153669 - DNA, 19 bp, Homo sapiens
  siRNA target sequence for TGM5 (NM_004245.1,1843-1861).
ggcagatccaagctaatat

SEQ ID NO: 153670 - DNA, 19 bp, Homo sapiens
  siRNA target sequence for TGM5 (NM_004245.1,1845-1863).
cagatccaagctaatatga

SEQ ID NO: 153671 - DNA, 19 bp, Homo sapiens
  siRNA target sequence for TGM5 (NM_004245.1,1847-1865).
gatccaagctaatatgaga

SEQ ID NO: 153672 - DNA, 19 bp, Homo sapiens
  siRNA target sequence for TGM5 (NM_004245.1,1864-1882).
gaagcaacaagtttaagga

SEQ ID NO: 153673 - DNA, 19 bp, Homo sapiens
  siRNA target sequence for TGM5 (NM_004245.1,1891-1909).
gttacaggaatgtttatgt

SEQ ID NO: 153674 - DNA, 19 bp, Homo sapiens
  siRNA target sequence for TGM5 (NM_004245.1,1898-1916).
gaatgtttatgtagacttt

SEQ ID NO: 153675 - DNA, 19 bp, Homo sapiens
  siRNA target sequence for TGM7 (NM_052955.1,267-285).
gtctggagcgcttctgatt

SEQ ID NO: 153676 - DNA, 19 bp, Homo sapiens
  siRNA target sequence for TGM7 (NM_052955.1,346-364).
gccattacactctgaaaat

SEQ ID NO: 153677 - DNA, 19 bp, Homo sapiens
  siRNA target sequence for TGM7 (NM_052955.1,397-415).
cttacccgctgggaacttt

SEQ ID NO: 153678 - DNA, 19 bp, Homo sapiens
  siRNA target sequence for TGM7 (NM_052955.1,452-470).
cgtctacctgccaagtgaa

SEQ ID NO: 153679 - DNA, 19 bp, Homo sapiens
  siRNA target sequence for TGM7 (NM_052955.1,453-471).
gtctacctgccaagtgaaa

SEQ ID NO: 153680 - DNA, 19 bp, Homo sapiens
  siRNA target sequence for TGM7 (NM_052955.1,485-503).
gtatatcatgcgagattat

SEQ ID NO: 153681 - DNA, 19 bp, Homo sapiens
  siRNA target sequence for TGM7 (NM_052955.1,496-514).
gagattatggctttgttta

SEQ ID NO: 153682 - DNA, 19 bp, Homo sapiens
  siRNA target sequence for TGM7 (NM_052955.1,563-581).
gtttgaagaggacatcata

SEQ ID NO: 153683 - DNA, 19 bp, Homo sapiens
  siRNA target sequence for TGM7 (NM_052955.1,605-623).
caagagcctgtatcactta

SEQ ID NO: 153684 - DNA, 19 bp, Homo sapiens
  siRNA target sequence for TGM7 (NM_052955.1,610-628).
gcctgtatcacttaaagaa

SEQ ID NO: 153685 - DNA, 19 bp, Homo sapiens
  siRNA target sequence for TGM7 (NM_052955.1,652-670).
ggaacgacgtggtgtatgt

SEQ ID NO: 153686 - DNA, 19 bp, Homo sapiens
  siRNA target sequence for TGM7 (NM_052955.1,844-862).
gggtcttcgcctctgttat

SEQ ID NO: 153687 - DNA, 19 bp, Homo sapiens
  siRNA target sequence for TGM7 (NM_052955.1,846-864).
gtcttcgcctctgttatgt

SEQ ID NO: 153688 - DNA, 19 bp, Homo sapiens
  siRNA target sequence for TGM7 (NM_052955.1,858-876).
gttatgtgcaccgtaatga

SEQ ID NO: 153689 - DNA, 19 bp, Homo sapiens
  siRNA target sequence for TGM7 (NM_052955.1,866-884).
caccgtaatgagatgctta

SEQ ID NO: 153690 - DNA, 19 bp, Homo sapiens
  siRNA target sequence for TGM7 (NM_052955.1,922-940).
cgcacaacgtggataggaa

SEQ ID NO: 153691 - DNA, 19 bp, Homo sapiens
  siRNA target sequence for TGM7 (NM_052955.1,944-962).
gaccatcgatacgtactat

SEQ ID NO: 153692 - DNA, 19 bp, Homo sapiens
  siRNA target sequence for TGM7 (NM_052955.1,1036-1054).
ggatgatccggaaagatct

SEQ ID NO: 153693 - DNA, 19 bp, Homo sapiens
  siRNA target sequence for TGM7 (NM_052955.1,1205-1223).
gaacgccgatgaagtcatt

SEQ ID NO: 153694 - DNA, 19 bp, Homo sapiens
  siRNA target sequence for TGM7 (NM_052955.1,1368-1386).
gagagagctgtcttcatga

SEQ ID NO: 153695 - DNA, 19 bp, Homo sapiens
  siRNA target sequence for TGM7 (NM_052955.1,1704-1722).
ctgccctacagcaattaca

SEQ ID NO: 153696 - DNA, 19 bp, Homo sapiens
  siRNA target sequence for TGM7 (NM_052955.1,1706-1724).
gccctacagcaattacaga

SEQ ID NO: 153697 - DNA, 19 bp, Homo sapiens
  siRNA target sequence for TGM7 (NM_052955.1,1793-1811).
catgctggtcctaaaagat

SEQ ID NO: 153698 - DNA, 19 bp, Homo sapiens
  siRNA target sequence for TGM7 (NM_052955.1,1799-1817).
ggtcctaaaagatatctgt

SEQ ID NO: 153699 - DNA, 19 bp, Homo sapiens
  siRNA target sequence for TGM7 (NM_052955.1,1821-1839).
gagcctccccacttgtcta

SEQ ID NO: 153700 - DNA, 19 bp, Homo sapiens
  siRNA target sequence for TGM7 (NM_052955.1,1823-1841).
gcctccccacttgtctatt

SEQ ID NO: 153701 - DNA, 19 bp, Homo sapiens
  siRNA target sequence for TGM7 (NM_052955.1,1825-1843).
ctccccacttgtctattga

SEQ ID NO: 153702 - DNA, 19 bp, Homo sapiens
  siRNA target sequence for TGM7 (NM_052955.1,2078-2096).
cgaggtcaaggagatcaaa

SEQ ID NO: 153703 - DNA, 19 bp, Homo sapiens
  siRNA target sequence for THBD (NM_000361.2,354-372).
cggtggctgccgatgtcat

SEQ ID NO: 153704 - DNA, 19 bp, Homo sapiens
  siRNA target sequence for THBD (NM_000361.2,489-507).
gggttacgggagacaacaa

SEQ ID NO: 153705 - DNA, 19 bp, Homo sapiens
  siRNA target sequence for THBD (NM_000361.2,491-509).
gttacgggagacaacaaca

SEQ ID NO: 153706 - DNA, 19 bp, Homo sapiens
  siRNA target sequence for THBD (NM_000361.2,810-828).
ccctcggcttacagctaat

SEQ ID NO: 153707 - DNA, 19 bp, Homo sapiens
  siRNA target sequence for THBD (NM_000361.2,1295-1313).
cagcccctgaaccaaacta

SEQ ID NO: 153708 - DNA, 19 bp, Homo sapiens
  siRNA target sequence for THBS1 (NM_003246.2,256-274).
gagacaacagcgtgtttga

SEQ ID NO: 153709 - DNA, 19 bp, Homo sapiens
  siRNA target sequence for THBS1 (NM_003246.2,258-276).
gacaacagcgtgtttgaca

SEQ ID NO: 153710 - DNA, 19 bp, Homo sapiens
  siRNA target sequence for THBS1 (NM_003246.2,382-400).
cccctgtgcctgatgacaa

SEQ ID NO: 153711 - DNA, 19 bp, Homo sapiens
  siRNA target sequence for THBS1 (NM_003246.2,571-589).
gcctgaccgtccaaggaaa

SEQ ID NO: 153712 - DNA, 19 bp, Homo sapiens
  siRNA target sequence for THBS1 (NM_003246.2,787-805).
gcgtcaatgacaatttcca

SEQ ID NO: 153713 - DNA, 19 bp, Homo sapiens
  siRNA target sequence for THBS1 (NM_003246.2,816-834).
cagaatgtgaggtttgtct

SEQ ID NO: 153714 - DNA, 19 bp, Homo sapiens
  siRNA target sequence for THBS1 (NM_003246.2,934-952).
ctgccatccgcactaacta

SEQ ID NO: 153715 - DNA, 19 bp, Homo sapiens
  siRNA target sequence for THBS1 (NM_003246.2,936-954).
gccatccgcactaactaca

SEQ ID NO: 153716 - DNA, 19 bp, Homo sapiens
  siRNA target sequence for THBS1 (NM_003246.2,937-955).
ccatccgcactaactacat

SEQ ID NO: 153717 - DNA, 19 bp, Homo sapiens
  siRNA target sequence for THBS1 (NM_003246.2,938-956).
catccgcactaactacatt

SEQ ID NO: 153718 - DNA, 19 bp, Homo sapiens
  siRNA target sequence for THBS1 (NM_003246.2,1122-1140).
cctcccctatgctatcaca

SEQ ID NO: 153719 - DNA, 19 bp, Homo sapiens
  siRNA target sequence for THBS1 (NM_003246.2,1123-1141).
ctcccctatgctatcacaa

SEQ ID NO: 153720 - DNA, 19 bp, Homo sapiens
  siRNA target sequence for THBS1 (NM_003246.2,1142-1160).
cggagttcagtacagaaat

SEQ ID NO: 153721 - DNA, 19 bp, Homo sapiens
  siRNA target sequence for THBS1 (NM_003246.2,1144-1162).
gagttcagtacagaaataa

SEQ ID NO: 153722 - DNA, 19 bp, Homo sapiens
  siRNA target sequence for THBS1 (NM_003246.2,1163-1181).
cgaggaatggactgttgat

SEQ ID NO: 153723 - DNA, 19 bp, Homo sapiens
  siRNA target sequence for THBS1 (NM_003246.2,1201-1219).
gtcagaactcagttaccat

SEQ ID NO: 153724 - DNA, 19 bp, Homo sapiens
  siRNA target sequence for THBS1 (NM_003246.2,1357-1375).
cgagctgtggcaatggaat

SEQ ID NO: 153725 - DNA, 19 bp, Homo sapiens
  siRNA target sequence for THBS1 (NM_003246.2,1393-1411).
cctgcgatagcctcaacaa

SEQ ID NO: 153726 - DNA, 19 bp, Homo sapiens
  siRNA target sequence for THBS1 (NM_003246.2,1702-1720).
gtggaggaggggtacagaa

SEQ ID NO: 153727 - DNA, 19 bp, Homo sapiens
  siRNA target sequence for THBS1 (NM_003246.2,1707-1725).
ggaggggtacagaaacgta

SEQ ID NO: 153728 - DNA, 19 bp, Homo sapiens
  siRNA target sequence for THBS1 (NM_003246.2,1766-1784).
ggactgcgttggtgatgta

SEQ ID NO: 153729 - DNA, 19 bp, Homo sapiens
  siRNA target sequence for THBS1 (NM_003246.2,1767-1785).
gactgcgttggtgatgtaa

SEQ ID NO: 153730 - DNA, 19 bp, Homo sapiens
  siRNA target sequence for THBS1 (NM_003246.2,1769-1787).
ctgcgttggtgatgtaaca

SEQ ID NO: 153731 - DNA, 19 bp, Homo sapiens
  siRNA target sequence for THBS1 (NM_003246.2,1771-1789).
gcgttggtgatgtaacaga

SEQ ID NO: 153732 - DNA, 19 bp, Homo sapiens
  siRNA target sequence for THBS1 (NM_003246.2,1805-1823).
caagcaggactgtccaatt

SEQ ID NO: 153733 - DNA, 19 bp, Homo sapiens
  siRNA target sequence for THBS1 (NM_003246.2,2140-2158).
cccacgactgcaacaagaa

SEQ ID NO: 153734 - DNA, 19 bp, Homo sapiens
  siRNA target sequence for THBS1 (NM_003246.2,2265-2283).
gatggctggcccaatgaga

SEQ ID NO: 153735 - DNA, 19 bp, Homo sapiens
  siRNA target sequence for THBS1 (NM_003246.2,2304-2322).
gcgacttaccactgcaaaa

SEQ ID NO: 153736 - DNA, 19 bp, Homo sapiens
  siRNA target sequence for THBS1 (NM_003246.2,2305-2323).
cgacttaccactgcaaaaa

SEQ ID NO: 153737 - DNA, 19 bp, Homo sapiens
  siRNA target sequence for THBS1 (NM_003246.2,2313-2331).
cactgcaaaaaggataatt

SEQ ID NO: 153738 - DNA, 19 bp, Homo sapiens
  siRNA target sequence for THBS1 (NM_003246.2,2402-2420).
cgatgacaatgataaaatt

SEQ ID NO: 153739 - DNA, 19 bp, Homo sapiens
  siRNA target sequence for THBS1 (NM_003246.2,2456-2474).
cccagctcagtatgactat

SEQ ID NO: 153740 - DNA, 19 bp, Homo sapiens
  siRNA target sequence for THBS1 (NM_003246.2,2458-2476).
cagctcagtatgactatga

SEQ ID NO: 153741 - DNA, 19 bp, Homo sapiens
  siRNA target sequence for THBS1 (NM_003246.2,2460-2478).
gctcagtatgactatgaca

SEQ ID NO: 153742 - DNA, 19 bp, Homo sapiens
  siRNA target sequence for THBS1 (NM_003246.2,2564-2582).
cgcctgtgctgcagacatt

SEQ ID NO: 153743 - DNA, 19 bp, Homo sapiens
  siRNA target sequence for THBS1 (NM_003246.2,2637-2655).
gaccagagagacactgata

SEQ ID NO: 153744 - DNA, 19 bp, Homo sapiens
  siRNA target sequence for THBS1 (NM_003246.2,2746-2764).
gtgacaacaatcaggatat

SEQ ID NO: 153745 - DNA, 19 bp, Homo sapiens
  siRNA target sequence for THBS1 (NM_003246.2,2750-2768).
caacaatcaggatattgat

SEQ ID NO: 153746 - DNA, 19 bp, Homo sapiens
  siRNA target sequence for THBS1 (NM_003246.2,2753-2771).
caatcaggatattgatgaa

SEQ ID NO: 153747 - DNA, 19 bp, Homo sapiens
  siRNA target sequence for THBS1 (NM_003246.2,3016-3034).
gtcctgagaatgttgacat

SEQ ID NO: 153748 - DNA, 19 bp, Homo sapiens
  siRNA target sequence for THBS1 (NM_003246.2,3160-3178).
ctggactcgctgtaggtta

SEQ ID NO: 153749 - DNA, 19 bp, Homo sapiens
  siRNA target sequence for THBS1 (NM_003246.2,3163-3181).
gactcgctgtaggttatga

SEQ ID NO: 153750 - DNA, 19 bp, Homo sapiens
  siRNA target sequence for THBS1 (NM_003246.2,3171-3189).
gtaggttatgatgagttta

SEQ ID NO: 153751 - DNA, 19 bp, Homo sapiens
  siRNA target sequence for THBS1 (NM_003246.2,3226-3244).
ccgaaagggacgatgacta

SEQ ID NO: 153752 - DNA, 19 bp, Homo sapiens
  siRNA target sequence for THBS1 (NM_003246.2,3227-3245).
cgaaagggacgatgactat

SEQ ID NO: 153753 - DNA, 19 bp, Homo sapiens
  siRNA target sequence for THBS1 (NM_003246.2,3236-3254).
cgatgactatgctggattt

SEQ ID NO: 153754 - DNA, 19 bp, Homo sapiens
  siRNA target sequence for THBS1 (NM_003246.2,3240-3258).
gactatgctggatttgtct

SEQ ID NO: 153755 - DNA, 19 bp, Homo sapiens
  siRNA target sequence for THBS1 (NM_003246.2,3353-3371).
ctcgggcctttctgtgaaa

SEQ ID NO: 153756 - DNA, 19 bp, Homo sapiens
  siRNA target sequence for THBS1 (NM_003246.2,3355-3373).
cgggcctttctgtgaaagt

SEQ ID NO: 153757 - DNA, 19 bp, Homo sapiens
  siRNA target sequence for THBS1 (NM_003246.2,3356-3374).
gggcctttctgtgaaagtt

SEQ ID NO: 153758 - DNA, 19 bp, Homo sapiens
  siRNA target sequence for THBS1 (NM_003246.2,3461-3479).
gcatgaccctcgtcacata

SEQ ID NO: 153759 - DNA, 19 bp, Homo sapiens
  siRNA target sequence for THBS1 (NM_003246.2,3489-3507).
gatttcaccgcctacagat

SEQ ID NO: 153760 - DNA, 19 bp, Homo sapiens
  siRNA target sequence for THBS1 (NM_003246.2,3523-3541).
ggccaaagacgggtttcat

SEQ ID NO: 153761 - DNA, 19 bp, Homo sapiens
  siRNA target sequence for THBS1 (NM_003246.2,3539-3557).
cattagagtggtgatgtat

SEQ ID NO: 153762 - DNA, 19 bp, Homo sapiens
  siRNA target sequence for THBS1 (NM_003246.2,3583-3601).
caggacccatctatgataa

SEQ ID NO: 153763 - DNA, 19 bp, Homo sapiens
  siRNA target sequence for THBS1 (NM_003246.2,3605-3623).
ctatgctggtggtagacta

SEQ ID NO: 153764 - DNA, 19 bp, Homo sapiens
  siRNA target sequence for THBS1 (NM_003246.2,3659-3677).
ctctgacctgaaatacgaa

SEQ ID NO: 153765 - DNA, 19 bp, Homo sapiens
  siRNA target sequence for THBS2 (NM_003247.2,323-341).
gaccttcgaccttttcagt

SEQ ID NO: 153766 - DNA, 19 bp, Homo sapiens
  siRNA target sequence for THBS2 (NM_003247.2,414-432).
cgcttcgtgcgctttgact

SEQ ID NO: 153767 - DNA, 19 bp, Homo sapiens
  siRNA target sequence for THBS2 (NM_003247.2,415-433).
gcttcgtgcgctttgacta

SEQ ID NO: 153768 - DNA, 19 bp, Homo sapiens
  siRNA target sequence for THBS2 (NM_003247.2,744-762).
ggctgcgacctcatagaca

SEQ ID NO: 153769 - DNA, 19 bp, Homo sapiens
  siRNA target sequence for THBS2 (NM_003247.2,869-887).
gaacgtccacctagtgttt

SEQ ID NO: 153770 - DNA, 19 bp, Homo sapiens
  siRNA target sequence for THBS2 (NM_003247.2,872-890).
cgtccacctagtgtttgaa

SEQ ID NO: 153771 - DNA, 19 bp, Homo sapiens
  siRNA target sequence for THBS2 (NM_003247.2,873-891).
gtccacctagtgtttgaaa

SEQ ID NO: 153772 - DNA, 19 bp, Homo sapiens
  siRNA target sequence for THBS2 (NM_003247.2,1057-1075).
gcgaggagctgggaaacat

SEQ ID NO: 153773 - DNA, 19 bp, Homo sapiens
  siRNA target sequence for THBS2 (NM_003247.2,1130-1148).
caagagagtgtcgaatgat

SEQ ID NO: 153774 - DNA, 19 bp, Homo sapiens
  siRNA target sequence for THBS2 (NM_003247.2,1141-1159).
cgaatgataaccagtttct

SEQ ID NO: 153775 - DNA, 19 bp, Homo sapiens
  siRNA target sequence for THBS2 (NM_003247.2,1182-1200).
cctaagacaaggaacatgt

SEQ ID NO: 153776 - DNA, 19 bp, Homo sapiens
  siRNA target sequence for THBS2 (NM_003247.2,1267-1285).
cgtgtacctgcaagaaatt

SEQ ID NO: 153777 - DNA, 19 bp, Homo sapiens
  siRNA target sequence for THBS2 (NM_003247.2,1270-1288).
gtacctgcaagaaatttaa

SEQ ID NO: 153778 - DNA, 19 bp, Homo sapiens
  siRNA target sequence for THBS2 (NM_003247.2,1892-1910).
ccccgtggatggctgttta

SEQ ID NO: 153779 - DNA, 19 bp, Homo sapiens
  siRNA target sequence for THBS2 (NM_003247.2,2535-2553).
cgccaggctgactatgaca

SEQ ID NO: 153780 - DNA, 19 bp, Homo sapiens
  siRNA target sequence for THBS2 (NM_003247.2,2672-2690).
cttcaatgaacgagacaat

SEQ ID NO: 153781 - DNA, 19 bp, Homo sapiens
  siRNA target sequence for THBS2 (NM_003247.2,2675-2693).
caatgaacgagacaattgt

SEQ ID NO: 153782 - DNA, 19 bp, Homo sapiens
  siRNA target sequence for THBS2 (NM_003247.2,3024-3042).
gatggacggggtgatattt

SEQ ID NO: 153783 - DNA, 19 bp, Homo sapiens
  siRNA target sequence for THBS2 (NM_003247.2,3028-3046).
gacggggtgatatttgtaa

SEQ ID NO: 153784 - DNA, 19 bp, Homo sapiens
  siRNA target sequence for THBS2 (NM_003247.2,3236-3254).
cggcatcgctgtaggtttt

SEQ ID NO: 153785 - DNA, 19 bp, Homo sapiens
  siRNA target sequence for THBS2 (NM_003247.2,3238-3256).
gcatcgctgtaggttttga

SEQ ID NO: 153786 - DNA, 19 bp, Homo sapiens
  siRNA target sequence for THBS2 (NM_003247.2,3280-3298).
gtggcacattctacgtaaa

SEQ ID NO: 153787 - DNA, 19 bp, Homo sapiens
  siRNA target sequence for THBS2 (NM_003247.2,3282-3300).
ggcacattctacgtaaaca

SEQ ID NO: 153788 - DNA, 19 bp, Homo sapiens
  siRNA target sequence for THBS2 (NM_003247.2,3284-3302).
cacattctacgtaaacact

SEQ ID NO: 153789 - DNA, 19 bp, Homo sapiens
  siRNA target sequence for THBS2 (NM_003247.2,3516-3534).
gggcaggtgcgaaccttat

SEQ ID NO: 153790 - DNA, 19 bp, Homo sapiens
  siRNA target sequence for THBS2 (NM_003247.2,3564-3582).
gactacacggcctataggt

SEQ ID NO: 153791 - DNA, 19 bp, Homo sapiens
  siRNA target sequence for THBS2 (NM_003247.2,3600-3618).
cccaagactggctacatca

SEQ ID NO: 153792 - DNA, 19 bp, Homo sapiens
  siRNA target sequence for THBS2 (NM_003247.2,3664-3682).
ctatctatgaccaaaccta

SEQ ID NO: 153793 - DNA, 19 bp, Homo sapiens
  siRNA target sequence for THBS2 (NM_003247.2,3693-3711).
cggctgggtctatttgtct

SEQ ID NO: 153794 - DNA, 19 bp, Homo sapiens
  siRNA target sequence for THBS2 (NM_003247.2,3694-3712).
ggctgggtctatttgtctt

SEQ ID NO: 153795 - DNA, 19 bp, Homo sapiens
  siRNA target sequence for THBS2 (NM_003247.2,3717-3735).
caagaaatggtctatttct

SEQ ID NO: 153796 - DNA, 19 bp, Homo sapiens
  siRNA target sequence for THBS2 (NM_003247.2,3746-3764).
gtacgaatgcagagatatt

SEQ ID NO: 153797 - DNA, 19 bp, Homo sapiens
  siRNA target sequence for THBS3 (NM_007112.3,63-81).
ctcctttgctttttcacat

SEQ ID NO: 153798 - DNA, 19 bp, Homo sapiens
  siRNA target sequence for THBS3 (NM_007112.3,183-201).
ggggacatctacctcttat

SEQ ID NO: 153799 - DNA, 19 bp, Homo sapiens
  siRNA target sequence for THBS3 (NM_007112.3,186-204).
gacatctacctcttatcca

SEQ ID NO: 153800 - DNA, 19 bp, Homo sapiens
  siRNA target sequence for THBS3 (NM_007112.3,234-252).
gtcctctttggcctctatt

SEQ ID NO: 153801 - DNA, 19 bp, Homo sapiens
  siRNA target sequence for THBS3 (NM_007112.3,286-304).
ctgttgtaggcaagatcaa

SEQ ID NO: 153802 - DNA, 19 bp, Homo sapiens
  siRNA target sequence for THBS3 (NM_007112.3,288-306).
gttgtaggcaagatcaaca

SEQ ID NO: 153803 - DNA, 19 bp, Homo sapiens
  siRNA target sequence for THBS3 (NM_007112.3,295-313).
gcaagatcaacaaagtact

SEQ ID NO: 153804 - DNA, 19 bp, Homo sapiens
  siRNA target sequence for THBS3 (NM_007112.3,516-534).
gtcgatgggctggagatta

SEQ ID NO: 153805 - DNA, 19 bp, Homo sapiens
  siRNA target sequence for THBS3 (NM_007112.3,538-556).
ctggacagaaggcgtattt

SEQ ID NO: 153806 - DNA, 19 bp, Homo sapiens
  siRNA target sequence for THBS3 (NM_007112.3,540-558).
ggacagaaggcgtatttga

SEQ ID NO: 153807 - DNA, 19 bp, Homo sapiens
  siRNA target sequence for THBS3 (NM_007112.3,573-591).
gtggaatctatgaaaatta

SEQ ID NO: 153808 - DNA, 19 bp, Homo sapiens
  siRNA target sequence for THBS3 (NM_007112.3,755-773).
gctgcgggatgatatacga

SEQ ID NO: 153809 - DNA, 19 bp, Homo sapiens
  siRNA target sequence for THBS3 (NM_007112.3,1084-1102).
ctggtgtgggcattgacta

SEQ ID NO: 153810 - DNA, 19 bp, Homo sapiens
  siRNA target sequence for THBS3 (NM_007112.3,1431-1449).
ccctgcatggacaacaaca

SEQ ID NO: 153811 - DNA, 19 bp, Homo sapiens
  siRNA target sequence for THBS3 (NM_007112.3,1433-1451).
ctgcatggacaacaacaaa

SEQ ID NO: 153812 - DNA, 19 bp, Homo sapiens
  siRNA target sequence for THBS3 (NM_007112.3,1520-1538).
gggggaccagtgtgatgat

SEQ ID NO: 153813 - DNA, 19 bp, Homo sapiens
  siRNA target sequence for THBS3 (NM_007112.3,1549-1567).
gggatgggatcaagaatgt

SEQ ID NO: 153814 - DNA, 19 bp, Homo sapiens
  siRNA target sequence for THBS3 (NM_007112.3,1550-1568).
ggatgggatcaagaatgtt

SEQ ID NO: 153815 - DNA, 19 bp, Homo sapiens
  siRNA target sequence for THBS3 (NM_007112.3,1580-1598).
ccggctgttccccaacaaa

SEQ ID NO: 153816 - DNA, 19 bp, Homo sapiens
  siRNA target sequence for THBS3 (NM_007112.3,1582-1600).
ggctgttccccaacaaaga

SEQ ID NO: 153817 - DNA, 19 bp, Homo sapiens
  siRNA target sequence for THBS3 (NM_007112.3,1649-1667).
ccccaacgttcccaacaat

SEQ ID NO: 153818 - DNA, 19 bp, Homo sapiens
  siRNA target sequence for THBS3 (NM_007112.3,1728-1746).
gatggcatccccaatggat

SEQ ID NO: 153819 - DNA, 19 bp, Homo sapiens
  siRNA target sequence for THBS3 (NM_007112.3,1827-1845).
cctgaaatgagcaatccta

SEQ ID NO: 153820 - DNA, 19 bp, Homo sapiens
  siRNA target sequence for THBS3 (NM_007112.3,1875-1893).
ggggatgtctgtgatacta

SEQ ID NO: 153821 - DNA, 19 bp, Homo sapiens
  siRNA target sequence for THBS3 (NM_007112.3,1941-1959).
ccacagctgccaaatagct

SEQ ID NO: 153822 - DNA, 19 bp, Homo sapiens
  siRNA target sequence for THBS3 (NM_007112.3,1964-1982).
gctggactctgataacgat

SEQ ID NO: 153823 - DNA, 19 bp, Homo sapiens
  siRNA target sequence for THBS3 (NM_007112.3,2040-2058).
cctcctggtcccgataact

SEQ ID NO: 153824 - DNA, 19 bp, Homo sapiens
  siRNA target sequence for THBS3 (NM_007112.3,2067-2085).
gtacccaatcccaatcaga

SEQ ID NO: 153825 - DNA, 19 bp, Homo sapiens
  siRNA target sequence for THBS3 (NM_007112.3,2159-2177).
ggatgtgtgtcctgaaagt

SEQ ID NO: 153826 - DNA, 19 bp, Homo sapiens
  siRNA target sequence for THBS3 (NM_007112.3,2183-2201).
ggtaacgcttacggatttt

SEQ ID NO: 153827 - DNA, 19 bp, Homo sapiens
  siRNA target sequence for THBS3 (NM_007112.3,2273-2291).
ccagggcatggaaatcgtt

SEQ ID NO: 153828 - DNA, 19 bp, Homo sapiens
  siRNA target sequence for THBS3 (NM_007112.3,2372-2390).
gaacacagtgactgatgat

SEQ ID NO: 153829 - DNA, 19 bp, Homo sapiens
  siRNA target sequence for THBS3 (NM_007112.3,2397-2415).
gcaggctttctcttcagtt

SEQ ID NO: 153830 - DNA, 19 bp, Homo sapiens
  siRNA target sequence for THBS3 (NM_007112.3,2609-2627).
gtggacagacccacgaaat

SEQ ID NO: 153831 - DNA, 19 bp, Homo sapiens
  siRNA target sequence for THBS3 (NM_007112.3,2611-2629).
ggacagacccacgaaatgt

SEQ ID NO: 153832 - DNA, 19 bp, Homo sapiens
  siRNA target sequence for THBS3 (NM_007112.3,2675-2693).
gcctcaagttggctacatt

SEQ ID NO: 153833 - DNA, 19 bp, Homo sapiens
  siRNA target sequence for THBS3 (NM_007112.3,2728-2746).
cggattctggggtgatcat

SEQ ID NO: 153834 - DNA, 19 bp, Homo sapiens
  siRNA target sequence for THBS3 (NM_007112.3,2729-2747).
ggattctggggtgatcatt

SEQ ID NO: 153835 - DNA, 19 bp, Homo sapiens
  siRNA target sequence for THBS4 (NM_003248.3,484-502).
ccctgaatgatctctatgt

SEQ ID NO: 153836 - DNA, 19 bp, Homo sapiens
  siRNA target sequence for THBS4 (NM_003248.3,486-504).
ctgaatgatctctatgtga

SEQ ID NO: 153837 - DNA, 19 bp, Homo sapiens
  siRNA target sequence for THBS4 (NM_003248.3,538-556).
ccaccatcttcggtcttta

SEQ ID NO: 153838 - DNA, 19 bp, Homo sapiens
  siRNA target sequence for THBS4 (NM_003248.3,542-560).
catcttcggtctttactct

SEQ ID NO: 153839 - DNA, 19 bp, Homo sapiens
  siRNA target sequence for THBS4 (NM_003248.3,548-566).
cggtctttactcttcaact

SEQ ID NO: 153840 - DNA, 19 bp, Homo sapiens
  siRNA target sequence for THBS4 (NM_003248.3,592-610).
ctgtgatgggacgcttaaa

SEQ ID NO: 153841 - DNA, 19 bp, Homo sapiens
  siRNA target sequence for THBS4 (NM_003248.3,594-612).
gtgatgggacgcttaaaca

SEQ ID NO: 153842 - DNA, 19 bp, Homo sapiens
  siRNA target sequence for THBS4 (NM_003248.3,596-614).
gatgggacgcttaaacaaa

SEQ ID NO: 153843 - DNA, 19 bp, Homo sapiens
  siRNA target sequence for THBS4 (NM_003248.3,1055-1073).
ggttaaggaaacatcattt

SEQ ID NO: 153844 - DNA, 19 bp, Homo sapiens
  siRNA target sequence for THBS4 (NM_003248.3,1102-1120).
cttgcggtcctctcaagtt

SEQ ID NO: 153845 - DNA, 19 bp, Homo sapiens
  siRNA target sequence for THBS4 (NM_003248.3,1105-1123).
gcggtcctctcaagtttca

SEQ ID NO: 153846 - DNA, 19 bp, Homo sapiens
  siRNA target sequence for THBS4 (NM_003248.3,1107-1125).
ggtcctctcaagtttcagt

SEQ ID NO: 153847 - DNA, 19 bp, Homo sapiens
  siRNA target sequence for THBS4 (NM_003248.3,1285-1303).
ggatcacctgtattgatgt

SEQ ID NO: 153848 - DNA, 19 bp, Homo sapiens
  siRNA target sequence for THBS4 (NM_003248.3,1286-1304).
gatcacctgtattgatgtt

SEQ ID NO: 153849 - DNA, 19 bp, Homo sapiens
  siRNA target sequence for THBS4 (NM_003248.3,1335-1353).
ggcgtgcactgcataaatt

SEQ ID NO: 153850 - DNA, 19 bp, Homo sapiens
  siRNA target sequence for THBS4 (NM_003248.3,1336-1354).
gcgtgcactgcataaattt

SEQ ID NO: 153851 - DNA, 19 bp, Homo sapiens
  siRNA target sequence for THBS4 (NM_003248.3,1460-1478).
cattgatgagtgtcgaaat

SEQ ID NO: 153852 - DNA, 19 bp, Homo sapiens
  siRNA target sequence for THBS4 (NM_003248.3,1493-1511).
caactcgatctgcgttaat

SEQ ID NO: 153853 - DNA, 19 bp, Homo sapiens
  siRNA target sequence for THBS4 (NM_003248.3,1496-1514).
ctcgatctgcgttaatact

SEQ ID NO: 153854 - DNA, 19 bp, Homo sapiens
  siRNA target sequence for THBS4 (NM_003248.3,1498-1516).
cgatctgcgttaatacttt

SEQ ID NO: 153855 - DNA, 19 bp, Homo sapiens
  siRNA target sequence for THBS4 (NM_003248.3,1549-1567).
ggtatactggtgatcagat

SEQ ID NO: 153856 - DNA, 19 bp, Homo sapiens
  siRNA target sequence for THBS4 (NM_003248.3,1550-1568).
gtatactggtgatcagata

SEQ ID NO: 153857 - DNA, 19 bp, Homo sapiens
  siRNA target sequence for THBS4 (NM_003248.3,1610-1628).
gaacccttgcagtgtgaat

SEQ ID NO: 153858 - DNA, 19 bp, Homo sapiens
  siRNA target sequence for THBS4 (NM_003248.3,1625-1643).
gaatgcccagtgcattgaa

SEQ ID NO: 153859 - DNA, 19 bp, Homo sapiens
  siRNA target sequence for THBS4 (NM_003248.3,1684-1702).
gggctggagatggctatat

SEQ ID NO: 153860 - DNA, 19 bp, Homo sapiens
  siRNA target sequence for THBS4 (NM_003248.3,1729-1747).
gttaccccgacgaagaact

SEQ ID NO: 153861 - DNA, 19 bp, Homo sapiens
  siRNA target sequence for THBS4 (NM_003248.3,1872-1890).
ctgaatgagcaggataact

SEQ ID NO: 153862 - DNA, 19 bp, Homo sapiens
  siRNA target sequence for THBS4 (NM_003248.3,1874-1892).
gaatgagcaggataactgt

SEQ ID NO: 153863 - DNA, 19 bp, Homo sapiens
  siRNA target sequence for THBS4 (NM_003248.3,1918-1936).
ggaacagcgataaagatat

SEQ ID NO: 153864 - DNA, 19 bp, Homo sapiens
  siRNA target sequence for THBS4 (NM_003248.3,1922-1940).
cagcgataaagatatcttt

SEQ ID NO: 153865 - DNA, 19 bp, Homo sapiens
  siRNA target sequence for THBS4 (NM_003248.3,2058-2076).
ctggacaactgcccaaaat

SEQ ID NO: 153866 - DNA, 19 bp, Homo sapiens
  siRNA target sequence for THBS4 (NM_003248.3,2164-2182).
ctgatgtggataatgatct

SEQ ID NO: 153867 - DNA, 19 bp, Homo sapiens
  siRNA target sequence for THBS4 (NM_003248.3,2639-2657).
gtacacagcttttaatgga

SEQ ID NO: 153868 - DNA, 19 bp, Homo sapiens
  siRNA target sequence for THBS4 (NM_003248.3,2647-2665).
cttttaatggagttgactt

SEQ ID NO: 153869 - DNA, 19 bp, Homo sapiens
  siRNA target sequence for THBS4 (NM_003248.3,2684-2702).
gaatacccagacagatgat

SEQ ID NO: 153870 - DNA, 19 bp, Homo sapiens
  siRNA target sequence for THBS4 (NM_003248.3,2689-2707).
cccagacagatgatgacta

SEQ ID NO: 153871 - DNA, 19 bp, Homo sapiens
  siRNA target sequence for THBS4 (NM_003248.3,2765-2783).
gcagacggagcagacatat

SEQ ID NO: 153872 - DNA, 19 bp, Homo sapiens
  siRNA target sequence for THBS4 (NM_003248.3,2766-2784).
cagacggagcagacatatt

SEQ ID NO: 153873 - DNA, 19 bp, Homo sapiens
  siRNA target sequence for THBS4 (NM_003248.3,3005-3023).
cagggtacgattttatgaa

SEQ ID NO: 153874 - DNA, 19 bp, Homo sapiens
  siRNA target sequence for THBS4 (NM_003248.3,3078-3096).
ggccgacttggcgttttct

SEQ ID NO: 153875 - DNA, 19 bp, Homo sapiens
  siRNA target sequence for THBS4 (NM_003248.3,3119-3137).
ctggtccaacctcaagtat

SEQ ID NO: 153876 - DNA, 19 bp, Homo sapiens
  siRNA target sequence for THBS4 (NM_003248.3,3161-3179).
ggacttccaagagtttcaa

SEQ ID NO: 153877 - DNA, 19 bp, Homo sapiens
  siRNA target sequence for THBS4 (NM_003248.3,3162-3180).
gacttccaagagtttcaaa

SEQ ID NO: 153878 - DNA, 19 bp, Homo sapiens
  siRNA target sequence for THBS4 (NM_003248.3,3171-3189).
gagtttcaaacccagaatt

SEQ ID NO: 153879 - DNA, 19 bp, Homo sapiens
  siRNA target sequence for TKT (NM_001064.1,53-71).
cggccaaccgcctacgtat

SEQ ID NO: 153880 - DNA, 19 bp, Homo sapiens
  siRNA target sequence for TKT (NM_001064.1,160-178).
cacaccatgcgctacaagt

SEQ ID NO: 153881 - DNA, 19 bp, Homo sapiens
  siRNA target sequence for TKT (NM_001064.1,332-350).
cggtcccgaaacaagcttt

SEQ ID NO: 153882 - DNA, 19 bp, Homo sapiens
  siRNA target sequence for TKT (NM_001064.1,406-424).
gcctacaccggcaaatact

SEQ ID NO: 153883 - DNA, 19 bp, Homo sapiens
  siRNA target sequence for TKT (NM_001064.1,407-425).
cctacaccggcaaatactt

SEQ ID NO: 153884 - DNA, 19 bp, Homo sapiens
  siRNA target sequence for TKT (NM_001064.1,432-450).
ggccagctaccgagtctat

SEQ ID NO: 153885 - DNA, 19 bp, Homo sapiens
  siRNA target sequence for TKT (NM_001064.1,433-451).
gccagctaccgagtctatt

SEQ ID NO: 153886 - DNA, 19 bp, Homo sapiens
  siRNA target sequence for TKT (NM_001064.1,437-455).
gctaccgagtctattgctt

SEQ ID NO: 153887 - DNA, 19 bp, Homo sapiens
  siRNA target sequence for TKT (NM_001064.1,502-520).
gccttcgccagcatctata

SEQ ID NO: 153888 - DNA, 19 bp, Homo sapiens
  siRNA target sequence for TKT (NM_001064.1,503-521).
ccttcgccagcatctataa

SEQ ID NO: 153889 - DNA, 19 bp, Homo sapiens
  siRNA target sequence for TKT (NM_001064.1,746-764).
cgggggtagaagataagga

SEQ ID NO: 153890 - DNA, 19 bp, Homo sapiens
  siRNA target sequence for TKT (NM_001064.1,1014-1032).
ggatggggacaccaaaaat

SEQ ID NO: 153891 - DNA, 19 bp, Homo sapiens
  siRNA target sequence for TKT (NM_001064.1,1034-1052).
ccaccttctcggagatctt

SEQ ID NO: 153892 - DNA, 19 bp, Homo sapiens
  siRNA target sequence for TKT (NM_001064.1,1043-1061).
cggagatcttcaaaaagga

SEQ ID NO: 153893 - DNA, 19 bp, Homo sapiens
  siRNA target sequence for TKT (NM_001064.1,1312-1330).
cggtcagtccccacatcaa

SEQ ID NO: 153894 - DNA, 19 bp, Homo sapiens
  siRNA target sequence for TKT (NM_001064.1,1374-1392).
ggaactagccgccaataca

SEQ ID NO: 153895 - DNA, 19 bp, Homo sapiens
  siRNA target sequence for TKT (NM_001064.1,1375-1393).
gaactagccgccaatacaa

SEQ ID NO: 153896 - DNA, 19 bp, Homo sapiens
  siRNA target sequence for TKT (NM_001064.1,1671-1689).
caccgtggaggaccattat

SEQ ID NO: 153897 - DNA, 19 bp, Homo sapiens
  siRNA target sequence for TKTL1 (NM_012253.1,381-399).
ctacagtctggacaatctt

SEQ ID NO: 153898 - DNA, 19 bp, Homo sapiens
  siRNA target sequence for TKTL1 (NM_012253.1,393-411).
caatcttgtggcaatcttt

SEQ ID NO: 153899 - DNA, 19 bp, Homo sapiens
  siRNA target sequence for TKTL1 (NM_012253.1,448-466).
gccgagcactgcataaaca

SEQ ID NO: 153900 - DNA, 19 bp, Homo sapiens
  siRNA target sequence for TKTL1 (NM_012253.1,449-467).
ccgagcactgcataaacat

SEQ ID NO: 153901 - DNA, 19 bp, Homo sapiens
  siRNA target sequence for TKTL1 (NM_012253.1,451-469).
gagcactgcataaacatct

SEQ ID NO: 153902 - DNA, 19 bp, Homo sapiens
  siRNA target sequence for TKTL1 (NM_012253.1,489-507).
ctttgggtggaacacttat

SEQ ID NO: 153903 - DNA, 19 bp, Homo sapiens
  siRNA target sequence for TKTL1 (NM_012253.1,654-672).
gccaatgccgagagaaaga

SEQ ID NO: 153904 - DNA, 19 bp, Homo sapiens
  siRNA target sequence for TKTL1 (NM_012253.1,856-874).
ctgggctacgcgaacaaca

SEQ ID NO: 153905 - DNA, 19 bp, Homo sapiens
  siRNA target sequence for TKTL1 (NM_012253.1,892-910).
ggtgacaccaggtactcta

SEQ ID NO: 153906 - DNA, 19 bp, Homo sapiens
  siRNA target sequence for TKTL1 (NM_012253.1,895-913).
gacaccaggtactctactt

SEQ ID NO: 153907 - DNA, 19 bp, Homo sapiens
  siRNA target sequence for TKTL1 (NM_012253.1,1047-1065).
ctttctgactcgagcattt

SEQ ID NO: 153908 - DNA, 19 bp, Homo sapiens
  siRNA target sequence for TKTL1 (NM_012253.1,1087-1105).
ctcgctgagagcaacatca

SEQ ID NO: 153909 - DNA, 19 bp, Homo sapiens
  siRNA target sequence for TKTL1 (NM_012253.1,1196-1214).
ccaagtgcacgatcttcta

SEQ ID NO: 153910 - DNA, 19 bp, Homo sapiens
  siRNA target sequence for TKTL1 (NM_012253.1,1206-1224).
gatcttctacccaactgat

SEQ ID NO: 153911 - DNA, 19 bp, Homo sapiens
  siRNA target sequence for TKTL1 (NM_012253.1,1289-1307).
ccacccgaccagaaactat

SEQ ID NO: 153912 - DNA, 19 bp, Homo sapiens
  siRNA target sequence for TKTL1 (NM_012253.1,1293-1311).
ccgaccagaaactatggtt

SEQ ID NO: 153913 - DNA, 19 bp, Homo sapiens
  siRNA target sequence for TKTL1 (NM_012253.1,1294-1312).
cgaccagaaactatggtta

SEQ ID NO: 153914 - DNA, 19 bp, Homo sapiens
  siRNA target sequence for TKTL1 (NM_012253.1,1321-1339).
ccacaagaacgctttgaga

SEQ ID NO: 153915 - DNA, 19 bp, Homo sapiens
  siRNA target sequence for TKTL1 (NM_012253.1,1374-1392).
cagctggagcagtgtaatt

SEQ ID NO: 153916 - DNA, 19 bp, Homo sapiens
  siRNA target sequence for TKTL1 (NM_012253.1,1380-1398).
gagcagtgtaatttcctat

SEQ ID NO: 153917 - DNA, 19 bp, Homo sapiens
  siRNA target sequence for TKTL1 (NM_012253.1,1383-1401).
cagtgtaatttcctatcaa

SEQ ID NO: 153918 - DNA, 19 bp, Homo sapiens
  siRNA target sequence for TKTL1 (NM_012253.1,1385-1403).
gtgtaatttcctatcaaaa

SEQ ID NO: 153919 - DNA, 19 bp, Homo sapiens
  siRNA target sequence for TKTL1 (NM_012253.1,1424-1442).
gtgacaaggtcacagttat

SEQ ID NO: 153920 - DNA, 19 bp, Homo sapiens
  siRNA target sequence for TKTL1 (NM_012253.1,1428-1446).
caaggtcacagttattgga

SEQ ID NO: 153921 - DNA, 19 bp, Homo sapiens
  siRNA target sequence for TKTL1 (NM_012253.1,1489-1507).
ctttcgaaacaagatattt

SEQ ID NO: 153922 - DNA, 19 bp, Homo sapiens
  siRNA target sequence for TKTL1 (NM_012253.1,1709-1727).
gtgggaagtccgaggaatt

SEQ ID NO: 153923 - DNA, 19 bp, Homo sapiens
  siRNA target sequence for TKTL1 (NM_012253.1,1712-1730).
ggaagtccgaggaattgct

SEQ ID NO: 153924 - DNA, 19 bp, Homo sapiens
  siRNA target sequence for TKTL1 (NM_012253.1,1718-1736).
ccgaggaattgctggatat

SEQ ID NO: 153925 - DNA, 19 bp, Homo sapiens
  siRNA target sequence for TLL1 (NM_012464.3,689-707).
ggtggcctcggggattgtt

SEQ ID NO: 153926 - DNA, 19 bp, Homo sapiens
  siRNA target sequence for TLL1 (NM_012464.3,690-708).
gtggcctcggggattgttt

SEQ ID NO: 153927 - DNA, 19 bp, Homo sapiens
  siRNA target sequence for TLL1 (NM_012464.3,728-746).
ctgcgctggcctcgattat

SEQ ID NO: 153928 - DNA, 19 bp, Homo sapiens
  siRNA target sequence for TLL1 (NM_012464.3,730-748).
gcgctggcctcgattatga

SEQ ID NO: 153929 - DNA, 19 bp, Homo sapiens
  siRNA target sequence for TLL1 (NM_012464.3,731-749).
cgctggcctcgattatgat

SEQ ID NO: 153930 - DNA, 19 bp, Homo sapiens
  siRNA target sequence for TLL1 (NM_012464.3,732-750).
gctggcctcgattatgatt

SEQ ID NO: 153931 - DNA, 19 bp, Homo sapiens
  siRNA target sequence for TLL1 (NM_012464.3,762-780).
gggaacgaagaggataaaa

SEQ ID NO: 153932 - DNA, 19 bp, Homo sapiens
  siRNA target sequence for TLL1 (NM_012464.3,805-823).
cgtgtaaagccgctgtatt

SEQ ID NO: 153933 - DNA, 19 bp, Homo sapiens
  siRNA target sequence for TLL1 (NM_012464.3,806-824).
gtgtaaagccgctgtattt

SEQ ID NO: 153934 - DNA, 19 bp, Homo sapiens
  siRNA target sequence for TLL1 (NM_012464.3,896-914).
gaacccctttggaaacctt

SEQ ID NO: 153935 - DNA, 19 bp, Homo sapiens
  siRNA target sequence for TLL1 (NM_012464.3,936-954).
ggagaccatgctatgtcaa

SEQ ID NO: 153936 - DNA, 19 bp, Homo sapiens
  siRNA target sequence for TLL1 (NM_012464.3,969-987).
ctctaccaacttatagaca

SEQ ID NO: 153937 - DNA, 19 bp, Homo sapiens
  siRNA target sequence for TLL1 (NM_012464.3,1119-1137).
cctggaggcgttattcctt

SEQ ID NO: 153938 - DNA, 19 bp, Homo sapiens
  siRNA target sequence for TLL1 (NM_012464.3,1120-1138).
ctggaggcgttattcctta

SEQ ID NO: 153939 - DNA, 19 bp, Homo sapiens
  siRNA target sequence for TLL1 (NM_012464.3,1125-1143).
ggcgttattccttatgtta

SEQ ID NO: 153940 - DNA, 19 bp, Homo sapiens
  siRNA target sequence for TLL1 (NM_012464.3,1126-1144).
gcgttattccttatgttat

SEQ ID NO: 153941 - DNA, 19 bp, Homo sapiens
  siRNA target sequence for TLL1 (NM_012464.3,1220-1238).
gactttcatagaaagaagt

SEQ ID NO: 153942 - DNA, 19 bp, Homo sapiens
  siRNA target sequence for TLL1 (NM_012464.3,1237-1255).
gtgatgaagagagttacat

SEQ ID NO: 153943 - DNA, 19 bp, Homo sapiens
  siRNA target sequence for TLL1 (NM_012464.3,1245-1263).
gagagttacattgtattca

SEQ ID NO: 153944 - DNA, 19 bp, Homo sapiens
  siRNA target sequence for TLL1 (NM_012464.3,1311-1329).
ggacctcaggcaatctcta

SEQ ID NO: 153945 - DNA, 19 bp, Homo sapiens
  siRNA target sequence for TLL1 (NM_012464.3,1312-1330).
gacctcaggcaatctctat

SEQ ID NO: 153946 - DNA, 19 bp, Homo sapiens
  siRNA target sequence for TLL1 (NM_012464.3,1405-1423).
caagaccagatcgagataa

SEQ ID NO: 153947 - DNA, 19 bp, Homo sapiens
  siRNA target sequence for TLL1 (NM_012464.3,1408-1426).
gaccagatcgagataacca

SEQ ID NO: 153948 - DNA, 19 bp, Homo sapiens
  siRNA target sequence for TLL1 (NM_012464.3,1416-1434).
cgagataaccacgtaacta

SEQ ID NO: 153949 - DNA, 19 bp, Homo sapiens
  siRNA target sequence for TLL1 (NM_012464.3,1417-1435).
gagataaccacgtaactat

SEQ ID NO: 153950 - DNA, 19 bp, Homo sapiens
  siRNA target sequence for TLL1 (NM_012464.3,1419-1437).
gataaccacgtaactatca

SEQ ID NO: 153951 - DNA, 19 bp, Homo sapiens
  siRNA target sequence for TLL1 (NM_012464.3,1424-1442).
ccacgtaactatcataaga

SEQ ID NO: 153952 - DNA, 19 bp, Homo sapiens
  siRNA target sequence for TLL1 (NM_012464.3,1461-1479).
caagagtacaattttctga

SEQ ID NO: 153953 - DNA, 19 bp, Homo sapiens
  siRNA target sequence for TLL1 (NM_012464.3,1502-1520).
ctcacttggagaaagatat

SEQ ID NO: 153954 - DNA, 19 bp, Homo sapiens
  siRNA target sequence for TLL1 (NM_012464.3,1556-1574).
cttctcaagggggatgttt

SEQ ID NO: 153955 - DNA, 19 bp, Homo sapiens
  siRNA target sequence for TLL1 (NM_012464.3,1567-1585).
ggatgtttctggataccat

SEQ ID NO: 153956 - DNA, 19 bp, Homo sapiens
  siRNA target sequence for TLL1 (NM_012464.3,1587-1605).
ctcccctcccgtgatgata

SEQ ID NO: 153957 - DNA, 19 bp, Homo sapiens
  siRNA target sequence for TLL1 (NM_012464.3,1589-1607).
cccctcccgtgatgataat

SEQ ID NO: 153958 - DNA, 19 bp, Homo sapiens
  siRNA target sequence for TLL1 (NM_012464.3,1631-1649).
gcgaacccgtctaagcaaa

SEQ ID NO: 153959 - DNA, 19 bp, Homo sapiens
  siRNA target sequence for TLL1 (NM_012464.3,1662-1680).
caggcaagaaagctgtata

SEQ ID NO: 153960 - DNA, 19 bp, Homo sapiens
  siRNA target sequence for TLL1 (NM_012464.3,1744-1762).
ccaatggctacccttctta

SEQ ID NO: 153961 - DNA, 19 bp, Homo sapiens
  siRNA target sequence for TLL1 (NM_012464.3,1771-1789).
gcatctggagagtttctgt

SEQ ID NO: 153962 - DNA, 19 bp, Homo sapiens
  siRNA target sequence for TLL1 (NM_012464.3,1822-1840).
caacgatggatctatacaa

SEQ ID NO: 153963 - DNA, 19 bp, Homo sapiens
  siRNA target sequence for TLL1 (NM_012464.3,1852-1870).
gctggtatgactatattga

SEQ ID NO: 153964 - DNA, 19 bp, Homo sapiens
  siRNA target sequence for TLL1 (NM_012464.3,1853-1871).
ctggtatgactatattgaa

SEQ ID NO: 153965 - DNA, 19 bp, Homo sapiens
  siRNA target sequence for TLL1 (NM_012464.3,1855-1873).
ggtatgactatattgaagt

SEQ ID NO: 153966 - DNA, 19 bp, Homo sapiens
  siRNA target sequence for TLL1 (NM_012464.3,1856-1874).
gtatgactatattgaagta

SEQ ID NO: 153967 - DNA, 19 bp, Homo sapiens
  siRNA target sequence for TLL1 (NM_012464.3,1880-1898).
cgggtactggagaaaatca

SEQ ID NO: 153968 - DNA, 19 bp, Homo sapiens
  siRNA target sequence for TLL1 (NM_012464.3,1925-1943).
caaattgcctgaagttctt

SEQ ID NO: 153969 - DNA, 19 bp, Homo sapiens
  siRNA target sequence for TLL1 (NM_012464.3,2027-2045).
gatctgtggaggtgagata

SEQ ID NO: 153970 - DNA, 19 bp, Homo sapiens
  siRNA target sequence for TLL1 (NM_012464.3,2032-2050).
gtggaggtgagatacgtaa

SEQ ID NO: 153971 - DNA, 19 bp, Homo sapiens
  siRNA target sequence for TLL1 (NM_012464.3,2034-2052).
ggaggtgagatacgtaaaa

SEQ ID NO: 153972 - DNA, 19 bp, Homo sapiens
  siRNA target sequence for TLL1 (NM_012464.3,2035-2053).
gaggtgagatacgtaaaaa

SEQ ID NO: 153973 - DNA, 19 bp, Homo sapiens
  siRNA target sequence for TLL1 (NM_012464.3,2038-2056).
gtgagatacgtaaaaatga

SEQ ID NO: 153974 - DNA, 19 bp, Homo sapiens
  siRNA target sequence for TLL1 (NM_012464.3,2075-2093).
caattatcctgatgactat

SEQ ID NO: 153975 - DNA, 19 bp, Homo sapiens
  siRNA target sequence for TLL1 (NM_012464.3,2090-2108).
ctatcgcccgatgaaagaa

SEQ ID NO: 153976 - DNA, 19 bp, Homo sapiens
  siRNA target sequence for TLL1 (NM_012464.3,2095-2113).
gcccgatgaaagaatgtgt

SEQ ID NO: 153977 - DNA, 19 bp, Homo sapiens
  siRNA target sequence for TLL1 (NM_012464.3,2145-2163).
gtcgggctgacctttcagt

SEQ ID NO: 153978 - DNA, 19 bp, Homo sapiens
  siRNA target sequence for TLL1 (NM_012464.3,2251-2269).
gtttctgtggttatgacaa

SEQ ID NO: 153979 - DNA, 19 bp, Homo sapiens
  siRNA target sequence for TLL1 (NM_012464.3,2265-2283).
gacaaacctgaagacataa

SEQ ID NO: 153980 - DNA, 19 bp, Homo sapiens
  siRNA target sequence for TLL1 (NM_012464.3,2267-2285).
caaacctgaagacataaga

SEQ ID NO: 153981 - DNA, 19 bp, Homo sapiens
  siRNA target sequence for TLL1 (NM_012464.3,2320-2338).
ctgacggaactgtgaacaa

SEQ ID NO: 153982 - DNA, 19 bp, Homo sapiens
  siRNA target sequence for TLL1 (NM_012464.3,2341-2359).
cagggtttgctgctaactt

SEQ ID NO: 153983 - DNA, 19 bp, Homo sapiens
  siRNA target sequence for TLL1 (NM_012464.3,2343-2361).
gggtttgctgctaactttt

SEQ ID NO: 153984 - DNA, 19 bp, Homo sapiens
  siRNA target sequence for TLL1 (NM_012464.3,2496-2514).
gcttgtggtggacttctta

SEQ ID NO: 153985 - DNA, 19 bp, Homo sapiens
  siRNA target sequence for TLL1 (NM_012464.3,2500-2518).
gtggtggacttcttaccaa

SEQ ID NO: 153986 - DNA, 19 bp, Homo sapiens
  siRNA target sequence for TLL1 (NM_012464.3,2520-2538).
cttaacggcaccataacca

SEQ ID NO: 153987 - DNA, 19 bp, Homo sapiens
  siRNA target sequence for TLL1 (NM_012464.3,2552-2570).
caaggagtaccctcctaat

SEQ ID NO: 153988 - DNA, 19 bp, Homo sapiens
  siRNA target sequence for TLL1 (NM_012464.3,2556-2574).
gagtaccctcctaataaga

SEQ ID NO: 153989 - DNA, 19 bp, Homo sapiens
  siRNA target sequence for TLL1 (NM_012464.3,2750-2768).
cacatcccagttcaacaat

SEQ ID NO: 153990 - DNA, 19 bp, Homo sapiens
  siRNA target sequence for TLL1 (NM_012464.3,2756-2774).
ccagttcaacaatatgaga

SEQ ID NO: 153991 - DNA, 19 bp, Homo sapiens
  siRNA target sequence for TLL1 (NM_012464.3,2762-2780).
caacaatatgagaattgaa

SEQ ID NO: 153992 - DNA, 19 bp, Homo sapiens
  siRNA target sequence for TLL1 (NM_012464.3,2778-2796).
gaattcaaatctgacaata

SEQ ID NO: 153993 - DNA, 19 bp, Homo sapiens
  siRNA target sequence for TLL1 (NM_012464.3,2816-2834).
caaagcacattttttctca

SEQ ID NO: 153994 - DNA, 19 bp, Homo sapiens
  siRNA target sequence for TLL1 (NM_012464.3,2906-2924).
gtgtcaatgccgtaatgga

SEQ ID NO: 153995 - DNA, 19 bp, Homo sapiens
  siRNA target sequence for TLL1 (NM_012464.3,2908-2926).
gtcaatgccgtaatggatt

SEQ ID NO: 153996 - DNA, 19 bp, Homo sapiens
  siRNA target sequence for TLL1 (NM_012464.3,2923-2941).
gatttgtgctacatgacaa

SEQ ID NO: 153997 - DNA, 19 bp, Homo sapiens
  siRNA target sequence for TLL1 (NM_012464.3,3069-3087).
cctggccaccgaatcaaat

SEQ ID NO: 153998 - DNA, 19 bp, Homo sapiens
  siRNA target sequence for TLL1 (NM_012464.3,3092-3110).
ctttagtgaatttgagatt

SEQ ID NO: 153999 - DNA, 19 bp, Homo sapiens
  siRNA target sequence for TLL1 (NM_012464.3,3127-3145).
gtgcttatgaccacttaga

SEQ ID NO: 154000 - DNA, 19 bp, Homo sapiens
  siRNA target sequence for TLL1 (NM_012464.3,3186-3204).
cgactgtgtggcaacaaga

SEQ ID NO: 154001 - DNA, 19 bp, Homo sapiens
  siRNA target sequence for TLL1 (NM_012464.3,3187-3205).
gactgtgtggcaacaagat

SEQ ID NO: 154002 - DNA, 19 bp, Homo sapiens
  siRNA target sequence for TLL1 (NM_012464.3,3258-3276).
gatgcatctgttcaaagaa

SEQ ID NO: 154003 - DNA, 19 bp, Homo sapiens
  siRNA target sequence for TLL1 (NM_012464.3,3279-3297).
ggctttcaagctacacatt

SEQ ID NO: 154004 - DNA, 19 bp, Homo sapiens
  siRNA target sequence for TLL1 (NM_012464.3,3305-3323).
gtgtggcggacgattgaaa

SEQ ID NO: 154005 - DNA, 19 bp, Homo sapiens
  siRNA target sequence for TLL1 (NM_012464.3,3315-3333).
cgattgaaagcagaatcaa

SEQ ID NO: 154006 - DNA, 19 bp, Homo sapiens
  siRNA target sequence for TLL1 (NM_012464.3,3347-3365).
gtactcacatgctcagttt

SEQ ID NO: 154007 - DNA, 19 bp, Homo sapiens
  siRNA target sequence for TLL1 (NM_012464.3,3395-3413).
ctgtgaatggctattagta

SEQ ID NO: 154008 - DNA, 19 bp, Homo sapiens
  siRNA target sequence for TLL1 (NM_012464.3,3420-3438).
cggggctctcgacttgaat

SEQ ID NO: 154009 - DNA, 19 bp, Homo sapiens
  siRNA target sequence for TLL1 (NM_012464.3,3421-3439).
ggggctctcgacttgaatt

SEQ ID NO: 154010 - DNA, 19 bp, Homo sapiens
  siRNA target sequence for TLL1 (NM_012464.3,3422-3440).
gggctctcgacttgaatta

SEQ ID NO: 154011 - DNA, 19 bp, Homo sapiens
  siRNA target sequence for TLL1 (NM_012464.3,3423-3441).
ggctctcgacttgaattat

SEQ ID NO: 154012 - DNA, 19 bp, Homo sapiens
  siRNA target sequence for TLL1 (NM_012464.3,3427-3445).
ctcgacttgaattatcctt

SEQ ID NO: 154013 - DNA, 19 bp, Homo sapiens
  siRNA target sequence for TLL1 (NM_012464.3,3500-3518).
ctttgatggtcttgattca

SEQ ID NO: 154014 - DNA, 19 bp, Homo sapiens
  siRNA target sequence for TLL1 (NM_012464.3,3527-3545).
ggggcttggtcgattctgt

SEQ ID NO: 154015 - DNA, 19 bp, Homo sapiens
  siRNA target sequence for TLL1 (NM_012464.3,3643-3661).
gatacaaaagcataagata

SEQ ID NO: 154016 - DNA, 19 bp, Homo sapiens
  siRNA target sequence for TLL1 (NM_012464.3,3664-3682).
cagataccacacataccaa

SEQ ID NO: 154017 - DNA, 19 bp, Homo sapiens
  siRNA target sequence for TLL1 (NM_012464.3,3666-3684).
gataccacacataccaaaa

SEQ ID NO: 154018 - DNA, 19 bp, Homo sapiens
  siRNA target sequence for TLL2 (NM_012465.2,445-463).
gctgtttcacattgacaaa

SEQ ID NO: 154019 - DNA, 19 bp, Homo sapiens
  siRNA target sequence for TLL2 (NM_012465.2,748-766).
gagccagagggccattttt

SEQ ID NO: 154020 - DNA, 19 bp, Homo sapiens
  siRNA target sequence for TLL2 (NM_012465.2,823-841).
ggatgaggaaagctttatt

SEQ ID NO: 154021 - DNA, 19 bp, Homo sapiens
  siRNA target sequence for TLL2 (NM_012465.2,827-845).
gaggaaagctttattgtat

SEQ ID NO: 154022 - DNA, 19 bp, Homo sapiens
  siRNA target sequence for TLL2 (NM_012465.2,1043-1061).
ggtcaggagtataatttct

SEQ ID NO: 154023 - DNA, 19 bp, Homo sapiens
  siRNA target sequence for TLL2 (NM_012465.2,1095-1113).
gagagacatacgactttga

SEQ ID NO: 154024 - DNA, 19 bp, Homo sapiens
  siRNA target sequence for TLL2 (NM_012465.2,1225-1243).
gctcagtcagggagacata

SEQ ID NO: 154025 - DNA, 19 bp, Homo sapiens
  siRNA target sequence for TLL2 (NM_012465.2,1250-1268).
gcccggaagctgtacaaat

SEQ ID NO: 154026 - DNA, 19 bp, Homo sapiens
  siRNA target sequence for TLL2 (NM_012465.2,1294-1312).
ggacacaacgggaaacttt

SEQ ID NO: 154027 - DNA, 19 bp, Homo sapiens
  siRNA target sequence for TLL2 (NM_012465.2,1295-1313).
gacacaacgggaaactttt

SEQ ID NO: 154028 - DNA, 19 bp, Homo sapiens
  siRNA target sequence for TLL2 (NM_012465.2,1329-1347).
caaatgggtacccatctta

SEQ ID NO: 154029 - DNA, 19 bp, Homo sapiens
  siRNA target sequence for TLL2 (NM_012465.2,1379-1397).
ccaggggaaaagatcgtat

SEQ ID NO: 154030 - DNA, 19 bp, Homo sapiens
  siRNA target sequence for TLL2 (NM_012465.2,1380-1398).
caggggaaaagatcgtatt

SEQ ID NO: 154031 - DNA, 19 bp, Homo sapiens
  siRNA target sequence for TLL2 (NM_012465.2,1382-1400).
ggggaaaagatcgtattaa

SEQ ID NO: 154032 - DNA, 19 bp, Homo sapiens
  siRNA target sequence for TLL2 (NM_012465.2,1385-1403).
gaaaagatcgtattaaact

SEQ ID NO: 154033 - DNA, 19 bp, Homo sapiens
  siRNA target sequence for TLL2 (NM_012465.2,1430-1448).
cgactgtgctggtatgatt

SEQ ID NO: 154034 - DNA, 19 bp, Homo sapiens
  siRNA target sequence for TLL2 (NM_012465.2,1633-1651).
caaagatgccggtcagatt

SEQ ID NO: 154035 - DNA, 19 bp, Homo sapiens
  siRNA target sequence for TLL2 (NM_012465.2,1637-1655).
gatgccggtcagattcaat

SEQ ID NO: 154036 - DNA, 19 bp, Homo sapiens
  siRNA target sequence for TLL2 (NM_012465.2,1701-1719).
ggaggattacggtttcaga

SEQ ID NO: 154037 - DNA, 19 bp, Homo sapiens
  siRNA target sequence for TLL2 (NM_012465.2,1740-1758).
ccttccaagcttttgagat

SEQ ID NO: 154038 - DNA, 19 bp, Homo sapiens
  siRNA target sequence for TLL2 (NM_012465.2,1765-1783).
gcacgacagctgtgcatat

SEQ ID NO: 154039 - DNA, 19 bp, Homo sapiens
  siRNA target sequence for TLL2 (NM_012465.2,1835-1853).
cacttttgtggctatgaga

SEQ ID NO: 154040 - DNA, 19 bp, Homo sapiens
  siRNA target sequence for TLL2 (NM_012465.2,1856-1874).
ccggaggatgtgaaatcga

SEQ ID NO: 154041 - DNA, 19 bp, Homo sapiens
  siRNA target sequence for TLL2 (NM_012465.2,1903-1921).
gtccgatggctctatcaat

SEQ ID NO: 154042 - DNA, 19 bp, Homo sapiens
  siRNA target sequence for TLL2 (NM_012465.2,1926-1944).
cgggctttgcagccaattt

SEQ ID NO: 154043 - DNA, 19 bp, Homo sapiens
  siRNA target sequence for TLL2 (NM_012465.2,2203-2221).
ccttcagtttgaagtgttt

SEQ ID NO: 154044 - DNA, 19 bp, Homo sapiens
  siRNA target sequence for TLL2 (NM_012465.2,2231-2249).
ggcaatgacgtctgtaagt

SEQ ID NO: 154045 - DNA, 19 bp, Homo sapiens
  siRNA target sequence for TLL2 (NM_012465.2,2232-2250).
gcaatgacgtctgtaagta

SEQ ID NO: 154046 - DNA, 19 bp, Homo sapiens
  siRNA target sequence for TLL2 (NM_012465.2,2242-2260).
ctgtaagtacgactttgta

SEQ ID NO: 154047 - DNA, 19 bp, Homo sapiens
  siRNA target sequence for TLL2 (NM_012465.2,2244-2262).
gtaagtacgactttgtaga

SEQ ID NO: 154048 - DNA, 19 bp, Homo sapiens
  siRNA target sequence for TLL2 (NM_012465.2,2337-2355).
cctcgcagagcaacaacat

SEQ ID NO: 154049 - DNA, 19 bp, Homo sapiens
  siRNA target sequence for TLL2 (NM_012465.2,2547-2565).
ctggctgtgcacacaagat

SEQ ID NO: 154050 - DNA, 19 bp, Homo sapiens
  siRNA target sequence for TLL2 (NM_012465.2,2715-2733).
cctatgaccacctggaaat

SEQ ID NO: 154051 - DNA, 19 bp, Homo sapiens
  siRNA target sequence for TLL2 (NM_012465.2,2811-2829).
ccggcagcagtatgtttct

SEQ ID NO: 154052 - DNA, 19 bp, Homo sapiens
  siRNA target sequence for TLL2 (NM_012465.2,2813-2831).
ggcagcagtatgtttctca

SEQ ID NO: 154053 - DNA, 19 bp, Homo sapiens
  siRNA target sequence for TLL2 (NM_012465.2,2820-2838).
gtatgtttctcaggtttta

SEQ ID NO: 154054 - DNA, 19 bp, Homo sapiens
  siRNA target sequence for TLL2 (NM_012465.2,2918-2936).
cagaccaaagagctctatt

SEQ ID NO: 154055 - DNA, 19 bp, Homo sapiens
  siRNA target sequence for TLL2 (NM_012465.2,3129-3147).
gtggctctgggccattaga

SEQ ID NO: 154056 - DNA, 19 bp, Homo sapiens
  siRNA target sequence for TLL2 (NM_012465.2,3138-3156).
ggccattagaagaaatcta

SEQ ID NO: 154057 - DNA, 19 bp, Homo sapiens
  siRNA target sequence for TLL2 (NM_012465.2,3162-3180).
caggtgattccctgatgat

SEQ ID NO: 154058 - DNA, 19 bp, Homo sapiens
  siRNA target sequence for TMG3 (NM_024082.2,421-439).
cattcggtcctgaaacgat

SEQ ID NO: 154059 - DNA, 19 bp, Homo sapiens
  siRNA target sequence for TMG3 (NM_024082.2,570-588).
gaaagggtacccaaatgca

SEQ ID NO: 154060 - DNA, 19 bp, Homo sapiens
  siRNA target sequence for TMG3 (NM_024082.2,615-633).
gagctcagatgccatgtat

SEQ ID NO: 154061 - DNA, 19 bp, Homo sapiens
  siRNA target sequence for TMG3 (NM_024082.2,617-635).
gctcagatgccatgtatgt

SEQ ID NO: 154062 - DNA, 19 bp, Homo sapiens
  siRNA target sequence for TMG3 (NM_024082.2,655-673).
gtggcactgctgattgtca

SEQ ID NO: 154063 - DNA, 19 bp, Homo sapiens
  siRNA target sequence for TMG3 (NM_024082.2,1009-1027).
gaggccagcgtgtcttaca

SEQ ID NO: 154064 - DNA, 19 bp, Homo sapiens
  siRNA target sequence for TMG3 (NM_024082.2,1040-1058).
caaagtacgaggagatagt

SEQ ID NO: 154065 - DNA, 19 bp, Homo sapiens
  siRNA target sequence for TNNC1 (NM_003280.1,234-252).
cggcacggtggactttgat

SEQ ID NO: 154066 - DNA, 19 bp, Homo sapiens
  siRNA target sequence for TNNC1 (NM_003280.1,327-345).
cttccgcatgtttgacaaa

SEQ ID NO: 154067 - DNA, 19 bp, Homo sapiens
  siRNA target sequence for TNNC1 (NM_003280.1,481-499).
gagttcctggagttcatga

SEQ ID NO: 154068 - DNA, 19 bp, Homo sapiens
  siRNA target sequence for TNNC2 (NM_003279.2,95-113).
cctacctcagcgaagagat

SEQ ID NO: 154069 - DNA, 19 bp, Homo sapiens
  siRNA target sequence for TNNC2 (NM_003279.2,459-477).
gatcgaatctctgatgaaa

SEQ ID NO: 154070 - DNA, 19 bp, Homo sapiens
  siRNA target sequence for TPO (NM_000547.3,327-345).
gccaacaagcggagtgatt

SEQ ID NO: 154071 - DNA, 19 bp, Homo sapiens
  siRNA target sequence for TPO (NM_000547.3,423-441).
gcatccaacggatgcttta

SEQ ID NO: 154072 - DNA, 19 bp, Homo sapiens
  siRNA target sequence for TPO (NM_000547.3,424-442).
catccaacggatgctttat

SEQ ID NO: 154073 - DNA, 19 bp, Homo sapiens
  siRNA target sequence for TPO (NM_000547.3,451-469).
ctgctgagcatcattgcaa

SEQ ID NO: 154074 - DNA, 19 bp, Homo sapiens
  siRNA target sequence for TPO (NM_000547.3,476-494).
ctggatgtctcccttacat

SEQ ID NO: 154075 - DNA, 19 bp, Homo sapiens
  siRNA target sequence for TPO (NM_000547.3,516-534).
cacttgcctggcgaacaaa

SEQ ID NO: 154076 - DNA, 19 bp, Homo sapiens
  siRNA target sequence for TPO (NM_000547.3,518-536).
cttgcctggcgaacaaata

SEQ ID NO: 154077 - DNA, 19 bp, Homo sapiens
  siRNA target sequence for TPO (NM_000547.3,699-717).
ccgggaggtgacaagacat

SEQ ID NO: 154078 - DNA, 19 bp, Homo sapiens
  siRNA target sequence for TPO (NM_000547.3,708-726).
gacaagacatgtcattcaa

SEQ ID NO: 154079 - DNA, 19 bp, Homo sapiens
  siRNA target sequence for TPO (NM_000547.3,710-728).
caagacatgtcattcaagt

SEQ ID NO: 154080 - DNA, 19 bp, Homo sapiens
  siRNA target sequence for TPO (NM_000547.3,885-903).
cccatgttttcccatacaa

SEQ ID NO: 154081 - DNA, 19 bp, Homo sapiens
  siRNA target sequence for TPO (NM_000547.3,1411-1429).
gctctgcaccagatcatca

SEQ ID NO: 154082 - DNA, 19 bp, Homo sapiens
  siRNA target sequence for TPO (NM_000547.3,1479-1497).
gtacgtgggtccctatgaa

SEQ ID NO: 154083 - DNA, 19 bp, Homo sapiens
  siRNA target sequence for TPO (NM_000547.3,1774-1792).
ctctttgtgctgtccaatt

SEQ ID NO: 154084 - DNA, 19 bp, Homo sapiens
  siRNA target sequence for TPO (NM_000547.3,1931-1949).
ggagcgtggccgacaagat

SEQ ID NO: 154085 - DNA, 19 bp, Homo sapiens
  siRNA target sequence for TPO (NM_000547.3,1994-2012).
gaggcttagctgaaaactt

SEQ ID NO: 154086 - DNA, 19 bp, Homo sapiens
  siRNA target sequence for TPO (NM_000547.3,2077-2095).
cgggacggtgactggtttt

SEQ ID NO: 154087 - DNA, 19 bp, Homo sapiens
  siRNA target sequence for TPO (NM_000547.3,2080-2098).
gacggtgactggttttggt

SEQ ID NO: 154088 - DNA, 19 bp, Homo sapiens
  siRNA target sequence for TPO (NM_000547.3,2207-2225).
ccttccaagtcggcaaatt

SEQ ID NO: 154089 - DNA, 19 bp, Homo sapiens
  siRNA target sequence for TPO (NM_000547.3,2219-2237).
gcaaattccccgaagactt

SEQ ID NO: 154090 - DNA, 19 bp, Homo sapiens
  siRNA target sequence for TPO (NM_000547.3,2220-2238).
caaattccccgaagacttt

SEQ ID NO: 154091 - DNA, 19 bp, Homo sapiens
  siRNA target sequence for TPO (NM_000547.3,2368-2386).
cgcgtgctggtgtattcct

SEQ ID NO: 154092 - DNA, 19 bp, Homo sapiens
  siRNA target sequence for TPO (NM_000547.3,2677-2695).
ctcacctcgacggtgattt

SEQ ID NO: 154093 - DNA, 19 bp, Homo sapiens
  siRNA target sequence for TPO (NM_000547.3,2703-2721).
gacacgcactggcactaaa

SEQ ID NO: 154094 - DNA, 19 bp, Homo sapiens
  siRNA target sequence for TPO (NM_000547.3,2707-2725).
cgcactggcactaaatcca

SEQ ID NO: 154095 - DNA, 19 bp, Homo sapiens
  siRNA target sequence for TPO (NM_175720.1,2805-2823).
ccgtacgactcttttccaa

SEQ ID NO: 154096 - DNA, 19 bp, Homo sapiens
  siRNA target sequence for TPO (NM_175720.1,2806-2824).
cgtacgactcttttccaaa

SEQ ID NO: 154097 - DNA, 19 bp, Homo sapiens
  siRNA target sequence for TPO (NM_175722.1,890-908).
gttttcccatacaaatcat

SEQ ID NO: 154098 - DNA, 19 bp, Homo sapiens
  siRNA target sequence for TRPA1 (NM_007332.1,222-240).
gccccagggcgttgtctat

SEQ ID NO: 154099 - DNA, 19 bp, Homo sapiens
  siRNA target sequence for TRPA1 (NM_007332.1,224-242).
cccagggcgttgtctatga

SEQ ID NO: 154100 - DNA, 19 bp, Homo sapiens
  siRNA target sequence for TRPA1 (NM_007332.1,251-269).
cggacgacacggaggattt

SEQ ID NO: 154101 - DNA, 19 bp, Homo sapiens
  siRNA target sequence for TRPA1 (NM_007332.1,278-296).
cgcttaaggtggtttttga

SEQ ID NO: 154102 - DNA, 19 bp, Homo sapiens
  siRNA target sequence for TRPA1 (NM_007332.1,295-313).
gaaggaagtgcatatggat

SEQ ID NO: 154103 - DNA, 19 bp, Homo sapiens
  siRNA target sequence for TRPA1 (NM_007332.1,304-322).
gcatatggattacaaaact

SEQ ID NO: 154104 - DNA, 19 bp, Homo sapiens
  siRNA target sequence for TRPA1 (NM_007332.1,355-373).
gatatggacaccttcttct

SEQ ID NO: 154105 - DNA, 19 bp, Homo sapiens
  siRNA target sequence for TRPA1 (NM_007332.1,366-384).
cttcttcttgcattatgct

SEQ ID NO: 154106 - DNA, 19 bp, Homo sapiens
  siRNA target sequence for TRPA1 (NM_007332.1,395-413).
gccaaattgagctaatgga

SEQ ID NO: 154107 - DNA, 19 bp, Homo sapiens
  siRNA target sequence for TRPA1 (NM_007332.1,412-430).
gagaagatcaccagagatt

SEQ ID NO: 154108 - DNA, 19 bp, Homo sapiens
  siRNA target sequence for TRPA1 (NM_007332.1,550-568).
ctccgaaacttcaacatga

SEQ ID NO: 154109 - DNA, 19 bp, Homo sapiens
  siRNA target sequence for TRPA1 (NM_007332.1,630-648).
gcatagaactattgatgtt

SEQ ID NO: 154110 - DNA, 19 bp, Homo sapiens
  siRNA target sequence for TRPA1 (NM_007332.1,631-649).
catagaactattgatgtta

SEQ ID NO: 154111 - DNA, 19 bp, Homo sapiens
  siRNA target sequence for TRPA1 (NM_007332.1,684-702).
cattgcgtgcaccacaaat

SEQ ID NO: 154112 - DNA, 19 bp, Homo sapiens
  siRNA target sequence for TRPA1 (NM_007332.1,688-706).
gcgtgcaccacaaataata

SEQ ID NO: 154113 - DNA, 19 bp, Homo sapiens
  siRNA target sequence for TRPA1 (NM_007332.1,707-725).
gcgaagcattgcagatttt

SEQ ID NO: 154114 - DNA, 19 bp, Homo sapiens
  siRNA target sequence for TRPA1 (NM_007332.1,713-731).
cattgcagattttgcttaa

SEQ ID NO: 154115 - DNA, 19 bp, Homo sapiens
  siRNA target sequence for TRPA1 (NM_007332.1,739-757).
gctaagccatgtaaatcaa

SEQ ID NO: 154116 - DNA, 19 bp, Homo sapiens
  siRNA target sequence for TRPA1 (NM_007332.1,740-758).
ctaagccatgtaaatcaaa

SEQ ID NO: 154117 - DNA, 19 bp, Homo sapiens
  siRNA target sequence for TRPA1 (NM_007332.1,764-782).
ggggatgtttccctattca

SEQ ID NO: 154118 - DNA, 19 bp, Homo sapiens
  siRNA target sequence for TRPA1 (NM_007332.1,854-872).
gtagacagttgcacattaa

SEQ ID NO: 154119 - DNA, 19 bp, Homo sapiens
  siRNA target sequence for TRPA1 (NM_007332.1,859-877).
cagttgcacattaacttta

SEQ ID NO: 154120 - DNA, 19 bp, Homo sapiens
  siRNA target sequence for TRPA1 (NM_007332.1,993-1011).
cacagccattcattttgct

SEQ ID NO: 154121 - DNA, 19 bp, Homo sapiens
  siRNA target sequence for TRPA1 (NM_007332.1,1020-1038).
gggagccactgagattgtt

SEQ ID NO: 154122 - DNA, 19 bp, Homo sapiens
  siRNA target sequence for TRPA1 (NM_007332.1,1021-1039).
ggagccactgagattgtta

SEQ ID NO: 154123 - DNA, 19 bp, Homo sapiens
  siRNA target sequence for TRPA1 (NM_007332.1,1022-1040).
gagccactgagattgttaa

SEQ ID NO: 154124 - DNA, 19 bp, Homo sapiens
  siRNA target sequence for TRPA1 (NM_007332.1,1036-1054).
gttaaactgatgatatcgt

SEQ ID NO: 154125 - DNA, 19 bp, Homo sapiens
  siRNA target sequence for TRPA1 (NM_007332.1,1044-1062).
gatgatatcgtcctattct

SEQ ID NO: 154126 - DNA, 19 bp, Homo sapiens
  siRNA target sequence for TRPA1 (NM_007332.1,1068-1086).
cgtggatattgttaacaca

SEQ ID NO: 154127 - DNA, 19 bp, Homo sapiens
  siRNA target sequence for TRPA1 (NM_007332.1,1069-1087).
gtggatattgttaacacaa

SEQ ID NO: 154128 - DNA, 19 bp, Homo sapiens
  siRNA target sequence for TRPA1 (NM_007332.1,1083-1101).
cacaaccgatggatgtcat

SEQ ID NO: 154129 - DNA, 19 bp, Homo sapiens
  siRNA target sequence for TRPA1 (NM_007332.1,1143-1161).
gctagcagactatttaatt

SEQ ID NO: 154130 - DNA, 19 bp, Homo sapiens
  siRNA target sequence for TRPA1 (NM_007332.1,1165-1183).
gtgggagcagatattaata

SEQ ID NO: 154131 - DNA, 19 bp, Homo sapiens
  siRNA target sequence for TRPA1 (NM_007332.1,1169-1187).
gagcagatattaataagat

SEQ ID NO: 154132 - DNA, 19 bp, Homo sapiens
  siRNA target sequence for TRPA1 (NM_007332.1,1174-1192).
gatattaataagatcgatt

SEQ ID NO: 154133 - DNA, 19 bp, Homo sapiens
  siRNA target sequence for TRPA1 (NM_007332.1,1199-1217).
gacgctctccacttatatt

SEQ ID NO: 154134 - DNA, 19 bp, Homo sapiens
  siRNA target sequence for TRPA1 (NM_007332.1,1229-1247).
ctgcatcttggaatattgt

SEQ ID NO: 154135 - DNA, 19 bp, Homo sapiens
  siRNA target sequence for TRPA1 (NM_007332.1,1238-1256).
ggaatattgtaaatttgct

SEQ ID NO: 154136 - DNA, 19 bp, Homo sapiens
  siRNA target sequence for TRPA1 (NM_007332.1,1262-1280).
ctaaaggtgcccaagtaga

SEQ ID NO: 154137 - DNA, 19 bp, Homo sapiens
  siRNA target sequence for TRPA1 (NM_007332.1,1267-1285).
ggtgcccaagtagacataa

SEQ ID NO: 154138 - DNA, 19 bp, Homo sapiens
  siRNA target sequence for TRPA1 (NM_007332.1,1272-1290).
ccaagtagacataaaagat

SEQ ID NO: 154139 - DNA, 19 bp, Homo sapiens
  siRNA target sequence for TRPA1 (NM_007332.1,1321-1339).
gtacagcaaccttatggat

SEQ ID NO: 154140 - DNA, 19 bp, Homo sapiens
  siRNA target sequence for TRPA1 (NM_007332.1,1331-1349).
cttatggattaaaaaatct

SEQ ID NO: 154141 - DNA, 19 bp, Homo sapiens
  siRNA target sequence for TRPA1 (NM_007332.1,1412-1430).
ggtgtactcctctacatta

SEQ ID NO: 154142 - DNA, 19 bp, Homo sapiens
  siRNA target sequence for TRPA1 (NM_007332.1,1413-1431).
gtgtactcctctacattat

SEQ ID NO: 154143 - DNA, 19 bp, Homo sapiens
  siRNA target sequence for TRPA1 (NM_007332.1,1451-1469).
ctggttctgtaaataacct

SEQ ID NO: 154144 - DNA, 19 bp, Homo sapiens
  siRNA target sequence for TRPA1 (NM_007332.1,1535-1553).
ccagttatgggcgtatcaa

SEQ ID NO: 154145 - DNA, 19 bp, Homo sapiens
  siRNA target sequence for TRPA1 (NM_007332.1,1536-1554).
cagttatgggcgtatcaat

SEQ ID NO: 154146 - DNA, 19 bp, Homo sapiens
  siRNA target sequence for TRPA1 (NM_007332.1,1566-1584).
gctcctacaagacataagt

SEQ ID NO: 154147 - DNA, 19 bp, Homo sapiens
  siRNA target sequence for TRPA1 (NM_007332.1,1652-1670).
gacatgataaagtagttca

SEQ ID NO: 154148 - DNA, 19 bp, Homo sapiens
  siRNA target sequence for TRPA1 (NM_007332.1,1768-1786).
gtcattcttgatactaatt

SEQ ID NO: 154149 - DNA, 19 bp, Homo sapiens
  siRNA target sequence for TRPA1 (NM_007332.1,1880-1898).
gccacaatgctgacatagt

SEQ ID NO: 154150 - DNA, 19 bp, Homo sapiens
  siRNA target sequence for TRPA1 (NM_007332.1,1889-1907).
ctgacatagtcctgaacaa

SEQ ID NO: 154151 - DNA, 19 bp, Homo sapiens
  siRNA target sequence for TRPA1 (NM_007332.1,1930-1948).
cttgcacttcacaataaga

SEQ ID NO: 154152 - DNA, 19 bp, Homo sapiens
  siRNA target sequence for TRPA1 (NM_007332.1,2068-2086).
gaatgcatgaaggtacttt

SEQ ID NO: 154153 - DNA, 19 bp, Homo sapiens
  siRNA target sequence for TRPA1 (NM_007332.1,2072-2090).
gcatgaaggtacttttaga

SEQ ID NO: 154154 - DNA, 19 bp, Homo sapiens
  siRNA target sequence for TRPA1 (NM_007332.1,2073-2091).
catgaaggtacttttagat

SEQ ID NO: 154155 - DNA, 19 bp, Homo sapiens
  siRNA target sequence for TRPA1 (NM_007332.1,2118-2136).
caagtcctgccgagactat

SEQ ID NO: 154156 - DNA, 19 bp, Homo sapiens
  siRNA target sequence for TRPA1 (NM_007332.1,2121-2139).
gtcctgccgagactattat

SEQ ID NO: 154157 - DNA, 19 bp, Homo sapiens
  siRNA target sequence for TRPA1 (NM_007332.1,2123-2141).
cctgccgagactattatat

SEQ ID NO: 154158 - DNA, 19 bp, Homo sapiens
  siRNA target sequence for TRPA1 (NM_007332.1,2126-2144).
gccgagactattatatcga

SEQ ID NO: 154159 - DNA, 19 bp, Homo sapiens
  siRNA target sequence for TRPA1 (NM_007332.1,2131-2149).
gactattatatcgagtata

SEQ ID NO: 154160 - DNA, 19 bp, Homo sapiens
  siRNA target sequence for TRPA1 (NM_007332.1,2133-2151).
ctattatatcgagtataat

SEQ ID NO: 154161 - DNA, 19 bp, Homo sapiens
  siRNA target sequence for TRPA1 (NM_007332.1,2142-2160).
cgagtataatttcaaatat

SEQ ID NO: 154162 - DNA, 19 bp, Homo sapiens
  siRNA target sequence for TRPA1 (NM_007332.1,2192-2210).
cacctacacaggatgttat

SEQ ID NO: 154163 - DNA, 19 bp, Homo sapiens
  siRNA target sequence for TRPA1 (NM_007332.1,2253-2271).
ccgcatagagcttctcaat

SEQ ID NO: 154164 - DNA, 19 bp, Homo sapiens
  siRNA target sequence for TRPA1 (NM_007332.1,2255-2273).
gcatagagcttctcaatca

SEQ ID NO: 154165 - DNA, 19 bp, Homo sapiens
  siRNA target sequence for TRPA1 (NM_007332.1,2256-2274).
catagagcttctcaatcat

SEQ ID NO: 154166 - DNA, 19 bp, Homo sapiens
  siRNA target sequence for TRPA1 (NM_007332.1,2301-2319).
gaaatggttggcttatgga

SEQ ID NO: 154167 - DNA, 19 bp, Homo sapiens
  siRNA target sequence for TRPA1 (NM_007332.1,2307-2325).
gttggcttatggatttaga

SEQ ID NO: 154168 - DNA, 19 bp, Homo sapiens
  siRNA target sequence for TRPA1 (NM_007332.1,2317-2335).
ggatttagagctcatatga

SEQ ID NO: 154169 - DNA, 19 bp, Homo sapiens
  siRNA target sequence for TRPA1 (NM_007332.1,2318-2336).
gatttagagctcatatgat

SEQ ID NO: 154170 - DNA, 19 bp, Homo sapiens
  siRNA target sequence for TRPA1 (NM_007332.1,2329-2347).
catatgatgaatttaggat

SEQ ID NO: 154171 - DNA, 19 bp, Homo sapiens
  siRNA target sequence for TRPA1 (NM_007332.1,2337-2355).
gaatttaggatcttactgt

SEQ ID NO: 154172 - DNA, 19 bp, Homo sapiens
  siRNA target sequence for TRPA1 (NM_007332.1,2354-2372).
gtcttggtctcatacctat

SEQ ID NO: 154173 - DNA, 19 bp, Homo sapiens
  siRNA target sequence for TRPA1 (NM_007332.1,2373-2391).
gaccattctcgttgtcaat

SEQ ID NO: 154174 - DNA, 19 bp, Homo sapiens
  siRNA target sequence for TRPA1 (NM_007332.1,2458-2476).
ctagataccacgaattcat

SEQ ID NO: 154175 - DNA, 19 bp, Homo sapiens
  siRNA target sequence for TRPA1 (NM_007332.1,2465-2483).
ccacgaattcatatctaat

SEQ ID NO: 154176 - DNA, 19 bp, Homo sapiens
  siRNA target sequence for TRPA1 (NM_007332.1,2466-2484).
cacgaattcatatctaata

SEQ ID NO: 154177 - DNA, 19 bp, Homo sapiens
  siRNA target sequence for TRPA1 (NM_007332.1,2468-2486).
cgaattcatatctaataaa

SEQ ID NO: 154178 - DNA, 19 bp, Homo sapiens
  siRNA target sequence for TRPA1 (NM_007332.1,2516-2534).
gtatatttgggtattgcaa

SEQ ID NO: 154179 - DNA, 19 bp, Homo sapiens
  siRNA target sequence for TRPA1 (NM_007332.1,2590-2608).
gttcttgaatggattatct

SEQ ID NO: 154180 - DNA, 19 bp, Homo sapiens
  siRNA target sequence for TRPA1 (NM_007332.1,2593-2611).
cttgaatggattatctaca

SEQ ID NO: 154181 - DNA, 19 bp, Homo sapiens
  siRNA target sequence for TRPA1 (NM_007332.1,2607-2625).
ctacacgacgggcatcatt

SEQ ID NO: 154182 - DNA, 19 bp, Homo sapiens
  siRNA target sequence for TRPA1 (NM_007332.1,2610-2628).
cacgacgggcatcattttt

SEQ ID NO: 154183 - DNA, 19 bp, Homo sapiens
  siRNA target sequence for TRPA1 (NM_007332.1,2612-2630).
cgacgggcatcatttttgt

SEQ ID NO: 154184 - DNA, 19 bp, Homo sapiens
  siRNA target sequence for TRPA1 (NM_007332.1,2631-2649).
gctgcccttgtttgttgaa

SEQ ID NO: 154185 - DNA, 19 bp, Homo sapiens
  siRNA target sequence for TRPA1 (NM_007332.1,2632-2650).
ctgcccttgtttgttgaaa

SEQ ID NO: 154186 - DNA, 19 bp, Homo sapiens
  siRNA target sequence for TRPA1 (NM_007332.1,2637-2655).
cttgtttgttgaaatacca

SEQ ID NO: 154187 - DNA, 19 bp, Homo sapiens
  siRNA target sequence for TRPA1 (NM_007332.1,2667-2685).
gtggcaatgtggagcaatt

SEQ ID NO: 154188 - DNA, 19 bp, Homo sapiens
  siRNA target sequence for TRPA1 (NM_007332.1,2670-2688).
gcaatgtggagcaattgct

SEQ ID NO: 154189 - DNA, 19 bp, Homo sapiens
  siRNA target sequence for TRPA1 (NM_007332.1,2677-2695).
ggagcaattgctgtttact

SEQ ID NO: 154190 - DNA, 19 bp, Homo sapiens
  siRNA target sequence for TRPA1 (NM_007332.1,2681-2699).
caattgctgtttacttcta

SEQ ID NO: 154191 - DNA, 19 bp, Homo sapiens
  siRNA target sequence for TRPA1 (NM_007332.1,2697-2715).
ctattggatgaatttctta

SEQ ID NO: 154192 - DNA, 19 bp, Homo sapiens
  siRNA target sequence for TRPA1 (NM_007332.1,2755-2773).
gttatgttggaggtaattt

SEQ ID NO: 154193 - DNA, 19 bp, Homo sapiens
  siRNA target sequence for TRPA1 (NM_007332.1,2784-2802).
gttgaggtctacagttgta

SEQ ID NO: 154194 - DNA, 19 bp, Homo sapiens
  siRNA target sequence for TRPA1 (NM_007332.1,2787-2805).
gaggtctacagttgtattt

SEQ ID NO: 154195 - DNA, 19 bp, Homo sapiens
  siRNA target sequence for TRPA1 (NM_007332.1,2789-2807).
ggtctacagttgtatttat

SEQ ID NO: 154196 - DNA, 19 bp, Homo sapiens
  siRNA target sequence for TRPA1 (NM_007332.1,2822-2840).
cttttggactcagctttta

SEQ ID NO: 154197 - DNA, 19 bp, Homo sapiens
  siRNA target sequence for TRPA1 (NM_007332.1,2865-2883).
cttcagctctccattgctt

SEQ ID NO: 154198 - DNA, 19 bp, Homo sapiens
  siRNA target sequence for TRPA1 (NM_007332.1,2903-2921).
gcatgatgctaggagatat

SEQ ID NO: 154199 - DNA, 19 bp, Homo sapiens
  siRNA target sequence for TRPA1 (NM_007332.1,2982-3000).
gtcctttgcacaacttgtt

SEQ ID NO: 154200 - DNA, 19 bp, Homo sapiens
  siRNA target sequence for TRPA1 (NM_007332.1,3018-3036).
cccaattgtcctcatgaat

SEQ ID NO: 154201 - DNA, 19 bp, Homo sapiens
  siRNA target sequence for TRPA1 (NM_007332.1,3025-3043).
gtcctcatgaatttactta

SEQ ID NO: 154202 - DNA, 19 bp, Homo sapiens
  siRNA target sequence for TRPA1 (NM_007332.1,3104-3122).
ctatgcaggtggaacttca

SEQ ID NO: 154203 - DNA, 19 bp, Homo sapiens
  siRNA target sequence for TRPA1 (NM_007332.1,3118-3136).
cttcataccagcttagaga

SEQ ID NO: 154204 - DNA, 19 bp, Homo sapiens
  siRNA target sequence for TRPA1 (NM_007332.1,3141-3159).
gctgccactttggtttcta

SEQ ID NO: 154205 - DNA, 19 bp, Homo sapiens
  siRNA target sequence for TRPA1 (NM_007332.1,3160-3178).
cgcaaagtggatcagaaat

SEQ ID NO: 154206 - DNA, 19 bp, Homo sapiens
  siRNA target sequence for TRPA1 (NM_007332.1,3183-3201).
catcgtgtatcccaacaaa

SEQ ID NO: 154207 - DNA, 19 bp, Homo sapiens
  siRNA target sequence for TRPA1 (NM_007332.1,3204-3222).
cagatctggtgggatgtta

SEQ ID NO: 154208 - DNA, 19 bp, Homo sapiens
  siRNA target sequence for TRPA1 (NM_007332.1,3206-3224).
gatctggtgggatgttatt

SEQ ID NO: 154209 - DNA, 19 bp, Homo sapiens
  siRNA target sequence for TRPA1 (NM_007332.1,3211-3229).
ggtgggatgttattccata

SEQ ID NO: 154210 - DNA, 19 bp, Homo sapiens
  siRNA target sequence for TRPA1 (NM_007332.1,3248-3266).
gcactggggaaataagaca

SEQ ID NO: 154211 - DNA, 19 bp, Homo sapiens
  siRNA target sequence for TRPA1 (NM_007332.1,3280-3298).
gctgataaatctttagaaa

SEQ ID NO: 154212 - DNA, 19 bp, Homo sapiens
  siRNA target sequence for TRPA1 (NM_007332.1,3322-3340).
cggctgaaggatcttactt

SEQ ID NO: 154213 - DNA, 19 bp, Homo sapiens
  siRNA target sequence for TRPA1 (NM_007332.1,3323-3341).
ggctgaaggatcttacttt

SEQ ID NO: 154214 - DNA, 19 bp, Homo sapiens
  siRNA target sequence for TRPA1 (NM_007332.1,3415-3433).
gatgatagccattgttctt

SEQ ID NO: 154215 - DNA, 19 bp, Homo sapiens
  siRNA target sequence for TRPA1 (NM_007332.1,3422-3440).
gccattgttcttttcaaga

SEQ ID NO: 154216 - DNA, 19 bp, Homo sapiens
  siRNA target sequence for TSC (NM_017899.1,263-281).
gcttctcatcggatcagat

SEQ ID NO: 154217 - DNA, 19 bp, Homo sapiens
  siRNA target sequence for TSC (NM_017899.1,285-303).
gcagctccatcggagattt

SEQ ID NO: 154218 - DNA, 19 bp, Homo sapiens
  siRNA target sequence for TSC (NM_017899.1,286-304).
cagctccatcggagattta

SEQ ID NO: 154219 - DNA, 19 bp, Homo sapiens
  siRNA target sequence for TSC (NM_017899.1,375-393).
ccccatccgatccaaaatt

SEQ ID NO: 154220 - DNA, 19 bp, Homo sapiens
  siRNA target sequence for TSC (NM_017899.1,377-395).
ccatccgatccaaaattgt

SEQ ID NO: 154221 - DNA, 19 bp, Homo sapiens
  siRNA target sequence for TSC (NM_017899.1,442-460).
ctggctgatgagatcaatt

SEQ ID NO: 154222 - DNA, 19 bp, Homo sapiens
  siRNA target sequence for TSC (NM_017899.1,446-464).
ctgatgagatcaatttcga

SEQ ID NO: 154223 - DNA, 19 bp, Homo sapiens
  siRNA target sequence for TSC (NM_017899.1,592-610).
cgcatcactctggaagaat

SEQ ID NO: 154224 - DNA, 19 bp, Homo sapiens
  siRNA target sequence for TSC (NM_017899.1,593-611).
gcatcactctggaagaata

SEQ ID NO: 154225 - DNA, 19 bp, Homo sapiens
  siRNA target sequence for TSC (NM_017899.1,597-615).
cactctggaagaatatcga

SEQ ID NO: 154226 - DNA, 19 bp, Homo sapiens
  siRNA target sequence for TSC (NM_017899.1,607-625).
gaatatcgaaatgtaaagt

SEQ ID NO: 154227 - DNA, 19 bp, Homo sapiens
  siRNA target sequence for UCC1 (NM_017549.1,206-224).
cgcgcgtccggatctcaaa

SEQ ID NO: 154228 - DNA, 19 bp, Homo sapiens
  siRNA target sequence for UCC1 (NM_017549.1,207-225).
gcgcgtccggatctcaaaa

SEQ ID NO: 154229 - DNA, 19 bp, Homo sapiens
  siRNA target sequence for UCC1 (NM_017549.1,634-652).
gatcccctgcaagagatta

SEQ ID NO: 154230 - DNA, 19 bp, Homo sapiens
  siRNA target sequence for UCC1 (NM_017549.1,637-655).
cccctgcaagagattattt

SEQ ID NO: 154231 - DNA, 19 bp, Homo sapiens
  siRNA target sequence for UCC1 (NM_017549.1,640-658).
ctgcaagagattatttgaa

SEQ ID NO: 154232 - DNA, 19 bp, Homo sapiens
  siRNA target sequence for UCC1 (NM_017549.1,643-661).
caagagattatttgaatat

SEQ ID NO: 154233 - DNA, 19 bp, Homo sapiens
  siRNA target sequence for UCC1 (NM_017549.1,741-759).
cctgggatcctcttgacat

SEQ ID NO: 154234 - DNA, 19 bp, Homo sapiens
  siRNA target sequence for UCC1 (NM_017549.1,827-845).
gagtggtcggacagaaagt

SEQ ID NO: 154235 - DNA, 19 bp, Homo sapiens
  siRNA target sequence for UCC1 (NM_017549.1,899-917).
cctgtccaggaaaccttta

SEQ ID NO: 154236 - DNA, 19 bp, Homo sapiens
  siRNA target sequence for UCC1 (NM_017549.1,902-920).
gtccaggaaacctttacca

SEQ ID NO: 154237 - DNA, 19 bp, Homo sapiens
  siRNA target sequence for UCC1 (NM_017549.1,919-937).
cataaactacagtgtgata

SEQ ID NO: 154238 - DNA, 19 bp, Homo sapiens
  siRNA target sequence for UCC1 (NM_017549.1,942-960).
ctacgcggttttttgacat

SEQ ID NO: 154239 - DNA, 19 bp, Homo sapiens
  siRNA target sequence for UCC1 (NM_017549.1,956-974).
gacatccagctgggtatta

SEQ ID NO: 154240 - DNA, 19 bp, Homo sapiens
  siRNA target sequence for UMOD (NM_003361.1,194-212).
gatggtgctctgaatgtca

SEQ ID NO: 154241 - DNA, 19 bp, Homo sapiens
  siRNA target sequence for UMOD (NM_003361.1,993-1011).
gtgtgaggagtgcagtata

SEQ ID NO: 154242 - DNA, 19 bp, Homo sapiens
  siRNA target sequence for UMOD (NM_003361.1,995-1013).
gtgaggagtgcagtataga

SEQ ID NO: 154243 - DNA, 19 bp, Homo sapiens
  siRNA target sequence for UMOD (NM_003361.1,1012-1030).
gacgaggactgcaaatcga

SEQ ID NO: 154244 - DNA, 19 bp, Homo sapiens
  siRNA target sequence for UMOD (NM_003361.1,1014-1032).
cgaggactgcaaatcgaat

SEQ ID NO: 154245 - DNA, 19 bp, Homo sapiens
  siRNA target sequence for UMOD (NM_003361.1,1017-1035).
ggactgcaaatcgaataat

SEQ ID NO: 154246 - DNA, 19 bp, Homo sapiens
  siRNA target sequence for UMOD (NM_003361.1,1197-1215).
ccggtgctcgggcttcaat

SEQ ID NO: 154247 - DNA, 19 bp, Homo sapiens
  siRNA target sequence for UMOD (NM_003361.1,1199-1217).
ggtgctcgggcttcaatga

SEQ ID NO: 154248 - DNA, 19 bp, Homo sapiens
  siRNA target sequence for UMOD (NM_003361.1,1294-1312).
gaaacccatgccacttaca

SEQ ID NO: 154249 - DNA, 19 bp, Homo sapiens
  siRNA target sequence for UMOD (NM_003361.1,1348-1366).
cgtgacctcaacatcaaaa

SEQ ID NO: 154250 - DNA, 19 bp, Homo sapiens
  siRNA target sequence for UMOD (NM_003361.1,1432-1450).
gtcagtgctctaaacatca

SEQ ID NO: 154251 - DNA, 19 bp, Homo sapiens
  siRNA target sequence for UMOD (NM_003361.1,1587-1605).
cgacctgtcccgatttgca

SEQ ID NO: 154252 - DNA, 19 bp, Homo sapiens
  siRNA target sequence for UMOD (NM_003361.1,1646-1664).
ccacggaccccctgaagta

SEQ ID NO: 154253 - DNA, 19 bp, Homo sapiens
  siRNA target sequence for UMOD (NM_003361.1,1764-1782).
ccggtttgctggaaactat

SEQ ID NO: 154254 - DNA, 19 bp, Homo sapiens
  siRNA target sequence for UMOD (NM_003361.1,1766-1784).
ggtttgctggaaactatga

SEQ ID NO: 154255 - DNA, 19 bp, Homo sapiens
  siRNA target sequence for UMOD (NM_003361.1,1775-1793).
gaaactatgacctagtcta

SEQ ID NO: 154256 - DNA, 19 bp, Homo sapiens
  siRNA target sequence for UMOD (NM_003361.1,1866-1884).
ccgaagtgggagtgtcata

SEQ ID NO: 154257 - DNA, 19 bp, Homo sapiens
  siRNA target sequence for UMOD (NM_003361.1,1868-1886).
gaagtgggagtgtcataga

SEQ ID NO: 154258 - DNA, 19 bp, Homo sapiens
  siRNA target sequence for UMOD (NM_003361.1,1871-1889).
gtgggagtgtcatagatca

SEQ ID NO: 154259 - DNA, 19 bp, Homo sapiens
  siRNA target sequence for UMOD (NM_003361.1,1942-1960).
gtctcaagggcttttagca

SEQ ID NO: 154260 - DNA, 19 bp, Homo sapiens
  siRNA target sequence for USP13 (NM_003940.1,213-231).
ccggcgacagggtctacaa

SEQ ID NO: 154261 - DNA, 19 bp, Homo sapiens
  siRNA target sequence for USP13 (NM_003940.1,215-233).
ggcgacagggtctacaaga

SEQ ID NO: 154262 - DNA, 19 bp, Homo sapiens
  siRNA target sequence for USP13 (NM_003940.1,216-234).
gcgacagggtctacaagaa

SEQ ID NO: 154263 - DNA, 19 bp, Homo sapiens
  siRNA target sequence for USP13 (NM_003940.1,280-298).
ctatgtatgcatgaataca

SEQ ID NO: 154264 - DNA, 19 bp, Homo sapiens
  siRNA target sequence for USP13 (NM_003940.1,316-334).
ggaacatgttgaaagacat

SEQ ID NO: 154265 - DNA, 19 bp, Homo sapiens
  siRNA target sequence for USP13 (NM_003940.1,405-423).
ctggtggagcgttaccaaa

SEQ ID NO: 154266 - DNA, 19 bp, Homo sapiens
  siRNA target sequence for USP13 (NM_003940.1,478-496).
cgacgattatgaatatgaa

SEQ ID NO: 154267 - DNA, 19 bp, Homo sapiens
  siRNA target sequence for USP13 (NM_003940.1,497-515).
gatgaagccaaacttgtta

SEQ ID NO: 154268 - DNA, 19 bp, Homo sapiens
  siRNA target sequence for USP13 (NM_003940.1,566-584).
gccctggtaacaattgctt

SEQ ID NO: 154269 - DNA, 19 bp, Homo sapiens
  siRNA target sequence for USP13 (NM_003940.1,571-589).
ggtaacaattgcttgtgat

SEQ ID NO: 154270 - DNA, 19 bp, Homo sapiens
  siRNA target sequence for USP13 (NM_003940.1,590-608).
gcagttctcagctcaaaat

SEQ ID NO: 154271 - DNA, 19 bp, Homo sapiens
  siRNA target sequence for USP13 (NM_003940.1,647-665).
gaattgccagtatctaaat

SEQ ID NO: 154272 - DNA, 19 bp, Homo sapiens
  siRNA target sequence for USP13 (NM_003940.1,735-753).
gcgacctgcgagaaaacct

SEQ ID NO: 154273 - DNA, 19 bp, Homo sapiens
  siRNA target sequence for USP13 (NM_003940.1,822-840).
ggcatgcgctggagcatta

SEQ ID NO: 154274 - DNA, 19 bp, Homo sapiens
  siRNA target sequence for USP13 (NM_003940.1,824-842).
catgcgctggagcattaca

SEQ ID NO: 154275 - DNA, 19 bp, Homo sapiens
  siRNA target sequence for USP13 (NM_003940.1,888-906).
ctgacggggcagatgttta

SEQ ID NO: 154276 - DNA, 19 bp, Homo sapiens
  siRNA target sequence for USP13 (NM_003940.1,890-908).
gacggggcagatgtttatt

SEQ ID NO: 154277 - DNA, 19 bp, Homo sapiens
  siRNA target sequence for USP13 (NM_003940.1,949-967).
caagcacttagcgcatttt

SEQ ID NO: 154278 - DNA, 19 bp, Homo sapiens
  siRNA target sequence for USP13 (NM_003940.1,952-970).
gcacttagcgcattttgga

SEQ ID NO: 154279 - DNA, 19 bp, Homo sapiens
  siRNA target sequence for USP13 (NM_003940.1,953-971).
cacttagcgcattttggaa

SEQ ID NO: 154280 - DNA, 19 bp, Homo sapiens
  siRNA target sequence for USP13 (NM_003940.1,955-973).
cttagcgcattttggaatt

SEQ ID NO: 154281 - DNA, 19 bp, Homo sapiens
  siRNA target sequence for USP13 (NM_003940.1,968-986).
ggaattgatatgcttcata

SEQ ID NO: 154282 - DNA, 19 bp, Homo sapiens
  siRNA target sequence for USP13 (NM_003940.1,969-987).
gaattgatatgcttcatat

SEQ ID NO: 154283 - DNA, 19 bp, Homo sapiens
  siRNA target sequence for USP13 (NM_003940.1,1058-1076).
gagtcgggcacgaaactga

SEQ ID NO: 154284 - DNA, 19 bp, Homo sapiens
  siRNA target sequence for USP13 (NM_003940.1,1095-1113).
gctacacgggtctgaagaa

SEQ ID NO: 154285 - DNA, 19 bp, Homo sapiens
  siRNA target sequence for USP13 (NM_003940.1,1246-1264).
cacacagatgactaagtta

SEQ ID NO: 154286 - DNA, 19 bp, Homo sapiens
  siRNA target sequence for USP13 (NM_003940.1,1302-1320).
cggtgaaatctgaactcat

SEQ ID NO: 154287 - DNA, 19 bp, Homo sapiens
  siRNA target sequence for USP13 (NM_003940.1,1303-1321).
ggtgaaatctgaactcatt

SEQ ID NO: 154288 - DNA, 19 bp, Homo sapiens
  siRNA target sequence for USP13 (NM_003940.1,1363-1381).
gatctctccgcgcatgttt

SEQ ID NO: 154289 - DNA, 19 bp, Homo sapiens
  siRNA target sequence for USP13 (NM_003940.1,1375-1393).
catgtttaaggcctttgta

SEQ ID NO: 154290 - DNA, 19 bp, Homo sapiens
  siRNA target sequence for USP13 (NM_003940.1,1406-1424).
ccggaattctcctctaaca

SEQ ID NO: 154291 - DNA, 19 bp, Homo sapiens
  siRNA target sequence for USP13 (NM_003940.1,1450-1468).
cttgcacctggtgaatcta

SEQ ID NO: 154292 - DNA, 19 bp, Homo sapiens
  siRNA target sequence for USP13 (NM_003940.1,1453-1471).
gcacctggtgaatctagta

SEQ ID NO: 154293 - DNA, 19 bp, Homo sapiens
  siRNA target sequence for USP13 (NM_003940.1,1499-1517).
ccaagcgatgtttttcgtt

SEQ ID NO: 154294 - DNA, 19 bp, Homo sapiens
  siRNA target sequence for USP13 (NM_003940.1,1500-1518).
caagcgatgtttttcgttt

SEQ ID NO: 154295 - DNA, 19 bp, Homo sapiens
  siRNA target sequence for USP13 (NM_003940.1,1503-1521).
gcgatgtttttcgtttttt

SEQ ID NO: 154296 - DNA, 19 bp, Homo sapiens
  siRNA target sequence for USP13 (NM_003940.1,1634-1652).
ctgatcgcttatgaactaa

SEQ ID NO: 154297 - DNA, 19 bp, Homo sapiens
  siRNA target sequence for USP13 (NM_003940.1,1693-1711).
gttggtacgtgccaagata

SEQ ID NO: 154298 - DNA, 19 bp, Homo sapiens
  siRNA target sequence for USP13 (NM_003940.1,1697-1715).
gtacgtgccaagataccat

SEQ ID NO: 154299 - DNA, 19 bp, Homo sapiens
  siRNA target sequence for USP13 (NM_003940.1,1789-1807).
gtctgcgggtgtgaaaaca

SEQ ID NO: 154300 - DNA, 19 bp, Homo sapiens
  siRNA target sequence for USP13 (NM_003940.1,1817-1835).
gcttcattccctgaatact

SEQ ID NO: 154301 - DNA, 19 bp, Homo sapiens
  siRNA target sequence for USP13 (NM_003940.1,1841-1859).
gtgcagataaagaagttca

SEQ ID NO: 154302 - DNA, 19 bp, Homo sapiens
  siRNA target sequence for USP13 (NM_003940.1,1875-1893).
gggttcccaaaaaatttga

SEQ ID NO: 154303 - DNA, 19 bp, Homo sapiens
  siRNA target sequence for USP13 (NM_003940.1,1876-1894).
ggttcccaaaaaatttgat

SEQ ID NO: 154304 - DNA, 19 bp, Homo sapiens
  siRNA target sequence for USP13 (NM_003940.1,1910-1928).
ccagacctacttgatatca

SEQ ID NO: 154305 - DNA, 19 bp, Homo sapiens
  siRNA target sequence for USP13 (NM_003940.1,1911-1929).
cagacctacttgatatcaa

SEQ ID NO: 154306 - DNA, 19 bp, Homo sapiens
  siRNA target sequence for USP13 (NM_003940.1,2010-2028).
caaaagatcgcctgatgaa

SEQ ID NO: 154307 - DNA, 19 bp, Homo sapiens
  siRNA target sequence for USP13 (NM_003940.1,2015-2033).
gatcgcctgatgaaccaat

SEQ ID NO: 154308 - DNA, 19 bp, Homo sapiens
  siRNA target sequence for USP13 (NM_003940.1,2019-2037).
gcctgatgaaccaattgat

SEQ ID NO: 154309 - DNA, 19 bp, Homo sapiens
  siRNA target sequence for USP13 (NM_003940.1,2020-2038).
cctgatgaaccaattgata

SEQ ID NO: 154310 - DNA, 19 bp, Homo sapiens
  siRNA target sequence for USP13 (NM_003940.1,2106-2124).
gtcgcaaggctgtgtactt

SEQ ID NO: 154311 - DNA, 19 bp, Homo sapiens
  siRNA target sequence for USP13 (NM_003940.1,2108-2126).
cgcaaggctgtgtacttca

SEQ ID NO: 154312 - DNA, 19 bp, Homo sapiens
  siRNA target sequence for USP13 (NM_003940.1,2151-2169).
ccttcaactggatcattgt

SEQ ID NO: 154313 - DNA, 19 bp, Homo sapiens
  siRNA target sequence for USP13 (NM_003940.1,2200-2218).
gctgaccatgcctggttat

SEQ ID NO: 154314 - DNA, 19 bp, Homo sapiens
  siRNA target sequence for USP13 (NM_003940.1,2285-2303).
gaaatcgtagctatcatca

SEQ ID NO: 154315 - DNA, 19 bp, Homo sapiens
  siRNA target sequence for USP13 (NM_003940.1,2338-2356).
ggcactacgagcaacgaat

SEQ ID NO: 154316 - DNA, 19 bp, Homo sapiens
  siRNA target sequence for USP13 (NM_003940.1,2339-2357).
gcactacgagcaacgaata

SEQ ID NO: 154317 - DNA, 19 bp, Homo sapiens
  siRNA target sequence for USP13 (NM_003940.1,2340-2358).
cactacgagcaacgaataa

SEQ ID NO: 154318 - DNA, 19 bp, Homo sapiens
  siRNA target sequence for USP13 (NM_003940.1,2342-2360).
ctacgagcaacgaataata

SEQ ID NO: 154319 - DNA, 19 bp, Homo sapiens
  siRNA target sequence for USP13 (NM_003940.1,2346-2364).
gagcaacgaataataacct

SEQ ID NO: 154320 - DNA, 19 bp, Homo sapiens
  siRNA target sequence for USP13 (NM_003940.1,2372-2390).
gcactggattggatcttta

SEQ ID NO: 154321 - DNA, 19 bp, Homo sapiens
  siRNA target sequence for USP13 (NM_003940.1,2392-2410).
ccaccctgagtttgaagaa

SEQ ID NO: 154322 - DNA, 19 bp, Homo sapiens
  siRNA target sequence for USP13 (NM_003940.1,2415-2433).
gtgattttgtgattgagat

SEQ ID NO: 154323 - DNA, 19 bp, Homo sapiens
  siRNA target sequence for USP13 (NM_003940.1,2444-2462).
gccaatgcaaacattattt

SEQ ID NO: 154324 - DNA, 19 bp, Homo sapiens
  siRNA target sequence for USP13 (NM_003940.1,2502-2520).
ctggaacatatgagctatt

SEQ ID NO: 154325 - DNA, 19 bp, Homo sapiens
  siRNA target sequence for USP13 (NM_003940.1,2513-2531).
gagctatttgcattcatca

SEQ ID NO: 154326 - DNA, 19 bp, Homo sapiens
  siRNA target sequence for USP13 (NM_003940.1,2539-2557).
gggaacatccacaatgagt

SEQ ID NO: 154327 - DNA, 19 bp, Homo sapiens
  siRNA target sequence for USP13 (NM_003940.1,2547-2565).
ccacaatgagtggtcatta

SEQ ID NO: 154328 - DNA, 19 bp, Homo sapiens
  siRNA target sequence for USP13 (NM_003940.1,2561-2579).
cattacatttgccatatca

SEQ ID NO: 154329 - DNA, 19 bp, Homo sapiens
  siRNA target sequence for USP32 (NM_032582.2,217-235).
ggcgctgaggagagttaca

SEQ ID NO: 154330 - DNA, 19 bp, Homo sapiens
  siRNA target sequence for USP32 (NM_032582.2,394-412).
gctgcacttcaataattta

SEQ ID NO: 154331 - DNA, 19 bp, Homo sapiens
  siRNA target sequence for USP32 (NM_032582.2,395-413).
ctgcacttcaataatttaa

SEQ ID NO: 154332 - DNA, 19 bp, Homo sapiens
  siRNA target sequence for USP32 (NM_032582.2,486-504).
gtgaatctgggaactatgt

SEQ ID NO: 154333 - DNA, 19 bp, Homo sapiens
  siRNA target sequence for USP32 (NM_032582.2,488-506).
gaatctgggaactatgtta

SEQ ID NO: 154334 - DNA, 19 bp, Homo sapiens
  siRNA target sequence for USP32 (NM_032582.2,532-550).
ccacgtggtggatggtaaa

SEQ ID NO: 154335 - DNA, 19 bp, Homo sapiens
  siRNA target sequence for USP32 (NM_032582.2,583-601).
gggtgaaaaggtaaactat

SEQ ID NO: 154336 - DNA, 19 bp, Homo sapiens
  siRNA target sequence for USP32 (NM_032582.2,745-763).
ggaggaatcagacatcatt

SEQ ID NO: 154337 - DNA, 19 bp, Homo sapiens
  siRNA target sequence for USP32 (NM_032582.2,757-775).
catcattgatcttgagaaa

SEQ ID NO: 154338 - DNA, 19 bp, Homo sapiens
  siRNA target sequence for USP32 (NM_032582.2,770-788).
gagaaacgctattggttat

SEQ ID NO: 154339 - DNA, 19 bp, Homo sapiens
  siRNA target sequence for USP32 (NM_032582.2,801-819).
cccggactggacgatttga

SEQ ID NO: 154340 - DNA, 19 bp, Homo sapiens
  siRNA target sequence for USP32 (NM_032582.2,802-820).
ccggactggacgatttgat

SEQ ID NO: 154341 - DNA, 19 bp, Homo sapiens
  siRNA target sequence for USP32 (NM_032582.2,803-821).
cggactggacgatttgatt

SEQ ID NO: 154342 - DNA, 19 bp, Homo sapiens
  siRNA target sequence for USP32 (NM_032582.2,804-822).
ggactggacgatttgattt

SEQ ID NO: 154343 - DNA, 19 bp, Homo sapiens
  siRNA target sequence for USP32 (NM_032582.2,805-823).
gactggacgatttgattta

SEQ ID NO: 154344 - DNA, 19 bp, Homo sapiens
  siRNA target sequence for USP32 (NM_032582.2,807-825).
ctggacgatttgatttaga

SEQ ID NO: 154345 - DNA, 19 bp, Homo sapiens
  siRNA target sequence for USP32 (NM_032582.2,809-827).
ggacgatttgatttagaga

SEQ ID NO: 154346 - DNA, 19 bp, Homo sapiens
  siRNA target sequence for USP32 (NM_032582.2,813-831).
gatttgatttagagacatt

SEQ ID NO: 154347 - DNA, 19 bp, Homo sapiens
  siRNA target sequence for USP32 (NM_032582.2,826-844).
gacatttggcccattggtt

SEQ ID NO: 154348 - DNA, 19 bp, Homo sapiens
  siRNA target sequence for USP32 (NM_032582.2,841-859).
ggtttcaccacctattcgt

SEQ ID NO: 154349 - DNA, 19 bp, Homo sapiens
  siRNA target sequence for USP32 (NM_032582.2,902-920).
cgtgacaatcacatagatt

SEQ ID NO: 154350 - DNA, 19 bp, Homo sapiens
  siRNA target sequence for USP32 (NM_032582.2,928-946).
gatatcctgtgggttatca

SEQ ID NO: 154351 - DNA, 19 bp, Homo sapiens
  siRNA target sequence for USP32 (NM_032582.2,1048-1066).
ggtggttgcacttttagaa

SEQ ID NO: 154352 - DNA, 19 bp, Homo sapiens
  siRNA target sequence for USP32 (NM_032582.2,1106-1124).
catatggatctctctgata

SEQ ID NO: 154353 - DNA, 19 bp, Homo sapiens
  siRNA target sequence for USP32 (NM_032582.2,1111-1129).
ggatctctctgatattgta

SEQ ID NO: 154354 - DNA, 19 bp, Homo sapiens
  siRNA target sequence for USP32 (NM_032582.2,1145-1163).
gcacatgacaccacaaaga

SEQ ID NO: 154355 - DNA, 19 bp, Homo sapiens
  siRNA target sequence for USP32 (NM_032582.2,1192-1210).
gatctggagtgtgaaaaat

SEQ ID NO: 154356 - DNA, 19 bp, Homo sapiens
  siRNA target sequence for USP32 (NM_032582.2,1214-1232).
cttgccaatgagtttttga

SEQ ID NO: 154357 - DNA, 19 bp, Homo sapiens
  siRNA target sequence for USP32 (NM_032582.2,1243-1261).
ccaggtgtgtcacatagtt

SEQ ID NO: 154358 - DNA, 19 bp, Homo sapiens
  siRNA target sequence for USP32 (NM_032582.2,1255-1273).
catagttctggggttaaga

SEQ ID NO: 154359 - DNA, 19 bp, Homo sapiens
  siRNA target sequence for USP32 (NM_032582.2,1350-1368).
gacacaactggtttatcat

SEQ ID NO: 154360 - DNA, 19 bp, Homo sapiens
  siRNA target sequence for USP32 (NM_032582.2,1435-1453).
gccatcatctgttttgaat

SEQ ID NO: 154361 - DNA, 19 bp, Homo sapiens
  siRNA target sequence for USP32 (NM_032582.2,1492-1510).
ggagcaggtcgaagataga

SEQ ID NO: 154362 - DNA, 19 bp, Homo sapiens
  siRNA target sequence for USP32 (NM_032582.2,1495-1513).
gcaggtcgaagatagaatt

SEQ ID NO: 154363 - DNA, 19 bp, Homo sapiens
  siRNA target sequence for USP32 (NM_032582.2,1498-1516).
ggtcgaagatagaattgga

SEQ ID NO: 154364 - DNA, 19 bp, Homo sapiens
  siRNA target sequence for USP32 (NM_032582.2,1522-1540).
cctcagttacgtgaatact

SEQ ID NO: 154365 - DNA, 19 bp, Homo sapiens
  siRNA target sequence for USP32 (NM_032582.2,1525-1543).
cagttacgtgaatactaca

SEQ ID NO: 154366 - DNA, 19 bp, Homo sapiens
  siRNA target sequence for USP32 (NM_032582.2,1646-1664).
gctcgacaacataacactt

SEQ ID NO: 154367 - DNA, 19 bp, Homo sapiens
  siRNA target sequence for USP32 (NM_032582.2,1655-1673).
cataacacttctgacaata

SEQ ID NO: 154368 - DNA, 19 bp, Homo sapiens
  siRNA target sequence for USP32 (NM_032582.2,1695-1713).
ccaatgggaatattttgtt

SEQ ID NO: 154369 - DNA, 19 bp, Homo sapiens
  siRNA target sequence for USP32 (NM_032582.2,1729-1747).
gaaaccaggggctattgat

SEQ ID NO: 154370 - DNA, 19 bp, Homo sapiens
  siRNA target sequence for USP32 (NM_032582.2,1745-1763).
gataatcagccattagtaa

SEQ ID NO: 154371 - DNA, 19 bp, Homo sapiens
  siRNA target sequence for USP32 (NM_032582.2,1753-1771).
gccattagtaactcaagaa

SEQ ID NO: 154372 - DNA, 19 bp, Homo sapiens
  siRNA target sequence for USP32 (NM_032582.2,1772-1790).
ccagtaaaggctacatcat

SEQ ID NO: 154373 - DNA, 19 bp, Homo sapiens
  siRNA target sequence for USP32 (NM_032582.2,1775-1793).
gtaaaggctacatcattaa

SEQ ID NO: 154374 - DNA, 19 bp, Homo sapiens
  siRNA target sequence for USP32 (NM_032582.2,1802-1820).
ggaggacgattaaaacgaa

SEQ ID NO: 154375 - DNA, 19 bp, Homo sapiens
  siRNA target sequence for USP32 (NM_032582.2,1818-1836).
gaactccacagctgattca

SEQ ID NO: 154376 - DNA, 19 bp, Homo sapiens
  siRNA target sequence for USP32 (NM_032582.2,1898-1916).
gcaaacctggccttaccta

SEQ ID NO: 154377 - DNA, 19 bp, Homo sapiens
  siRNA target sequence for USP32 (NM_032582.2,1908-1926).
ccttacctagaccagttat

SEQ ID NO: 154378 - DNA, 19 bp, Homo sapiens
  siRNA target sequence for USP32 (NM_032582.2,1913-1931).
cctagaccagttatcaaga

SEQ ID NO: 154379 - DNA, 19 bp, Homo sapiens
  siRNA target sequence for USP32 (NM_032582.2,2004-2022).
ctcggacacagcagtctaa

SEQ ID NO: 154380 - DNA, 19 bp, Homo sapiens
  siRNA target sequence for USP32 (NM_032582.2,2006-2024).
cggacacagcagtctaaca

SEQ ID NO: 154381 - DNA, 19 bp, Homo sapiens
  siRNA target sequence for USP32 (NM_032582.2,2007-2025).
ggacacagcagtctaacat

SEQ ID NO: 154382 - DNA, 19 bp, Homo sapiens
  siRNA target sequence for USP32 (NM_032582.2,3105-3123).
ctcaggacaaccaaaaagt

SEQ ID NO: 154383 - DNA, 19 bp, Homo sapiens
  siRNA target sequence for USP32 (NM_032582.2,3610-3628).
cgacagtatgggctatcaa

SEQ ID NO: 154384 - DNA, 19 bp, Homo sapiens
  siRNA target sequence for VSNL1 (NM_003385.3,310-328).
ggtacaaaggatttctcaa

SEQ ID NO: 154385 - DNA, 19 bp, Homo sapiens
  siRNA target sequence for VSNL1 (NM_003385.3,337-355).
caagtgggaggctaaatct

SEQ ID NO: 154386 - DNA, 19 bp, Homo sapiens
  siRNA target sequence for VSNL1 (NM_003385.3,346-364).
ggctaaatctcgaggaatt

SEQ ID NO: 154387 - DNA, 19 bp, Homo sapiens
  siRNA target sequence for VSNL1 (NM_003385.3,347-365).
gctaaatctcgaggaattt

SEQ ID NO: 154388 - DNA, 19 bp, Homo sapiens
  siRNA target sequence for VSNL1 (NM_003385.3,380-398).
gaagttctttccttatgga

SEQ ID NO: 154389 - DNA, 19 bp, Homo sapiens
  siRNA target sequence for VSNL1 (NM_003385.3,521-539).
gctgaactgggccttcaat

SEQ ID NO: 154390 - DNA, 19 bp, Homo sapiens
  siRNA target sequence for VSNL1 (NM_003385.3,552-570).
gatggtgatggcaagatca

SEQ ID NO: 154391 - DNA, 19 bp, Homo sapiens
  siRNA target sequence for VSNL1 (NM_003385.3,665-683).
gcagcgagtagacaagatt

SEQ ID NO: 154392 - DNA, 19 bp, Homo sapiens
  siRNA target sequence for VSNL1 (NM_003385.3,666-684).
cagcgagtagacaagattt

SEQ ID NO: 154393 - DNA, 19 bp, Homo sapiens
  siRNA target sequence for VSNL1 (NM_003385.3,669-687).
cgagtagacaagattttca

SEQ ID NO: 154394 - DNA, 19 bp, Homo sapiens
  siRNA target sequence for VSNL1 (NM_003385.3,714-732).
cagattacactggatgaat

SEQ ID NO: 154395 - DNA, 19 bp, Homo sapiens
  siRNA target sequence for VSNL1 (NM_003385.3,751-769).
gcgacccttccattgtatt

SEQ ID NO: 154396 - DNA, 19 bp, Homo sapiens
  siRNA target sequence for VSNL1 (NM_003385.3,752-770).
cgacccttccattgtatta

SEQ ID NO: 154397 - DNA, 19 bp, Homo sapiens
  siRNA target sequence for ACE (NM_000789.2,230-248).
gcgcacgacaccaacatca

SEQ ID NO: 154398 - DNA, 19 bp, Homo sapiens
  siRNA target sequence for ACE (NM_000789.2,341-359).
ccgatctggcagaacttca

SEQ ID NO: 154399 - DNA, 19 bp, Homo sapiens
  siRNA target sequence for ACE (NM_000789.2,426-444).
ctaagcggcagcagtacaa

SEQ ID NO: 154400 - DNA, 19 bp, Homo sapiens
  siRNA target sequence for ACE (NM_000789.2,446-464).
gccctgctaagcaacatga

SEQ ID NO: 154401 - DNA, 19 bp, Homo sapiens
  siRNA target sequence for ACE (NM_000789.2,626-644).
ccgctgtacgaggatttca

SEQ ID NO: 154402 - DNA, 19 bp, Homo sapiens
  siRNA target sequence for ACE (NM_000789.2,813-831).
gccgatacggagacagata

SEQ ID NO: 154403 - DNA, 19 bp, Homo sapiens
  siRNA target sequence for ACE (NM_000789.2,815-833).
cgatacggagacagataca

SEQ ID NO: 154404 - DNA, 19 bp, Homo sapiens
  siRNA target sequence for ACE (NM_000789.2,882-900).
cccagagctgggaaaacat

SEQ ID NO: 154405 - DNA, 19 bp, Homo sapiens
  siRNA target sequence for ACE (NM_000789.2,972-990).
ggaacgccacgcacatgtt

SEQ ID NO: 154406 - DNA, 19 bp, Homo sapiens
  siRNA target sequence for ACE (NM_000789.2,993-1011).
gggtggcagaggagttctt

SEQ ID NO: 154407 - DNA, 19 bp, Homo sapiens
  siRNA target sequence for ACE (NM_000789.2,1313-1331).
cctgaacatctgcacaaaa

SEQ ID NO: 154408 - DNA, 19 bp, Homo sapiens
  siRNA target sequence for ACE (NM_000789.2,1360-1378).
cacggaaagtgacatcaat

SEQ ID NO: 154409 - DNA, 19 bp, Homo sapiens
  siRNA target sequence for ACE (NM_000789.2,1362-1380).
cggaaagtgacatcaatta

SEQ ID NO: 154410 - DNA, 19 bp, Homo sapiens
  siRNA target sequence for ACE (NM_000789.2,1364-1382).
gaaagtgacatcaattact

SEQ ID NO: 154411 - DNA, 19 bp, Homo sapiens
  siRNA target sequence for ACE (NM_000789.2,1444-1462).
gcgctggggggtctttagt

SEQ ID NO: 154412 - DNA, 19 bp, Homo sapiens
  siRNA target sequence for ACE (NM_000789.2,1473-1491).
ccccttcccgctacaactt

SEQ ID NO: 154413 - DNA, 19 bp, Homo sapiens
  siRNA target sequence for ACE (NM_000789.2,1535-1553).
cctgttacccgaaacgaaa

SEQ ID NO: 154414 - DNA, 19 bp, Homo sapiens
  siRNA target sequence for ACE (NM_000789.2,1545-1563).
gaaacgaaacccactttga

SEQ ID NO: 154415 - DNA, 19 bp, Homo sapiens
  siRNA target sequence for ACE (NM_000789.2,1608-1626).
ggtactttgtgagttttgt

SEQ ID NO: 154416 - DNA, 19 bp, Homo sapiens
  siRNA target sequence for ACE (NM_000789.2,2030-2048).
gccaactggaactacaaca

SEQ ID NO: 154417 - DNA, 19 bp, Homo sapiens
  siRNA target sequence for ACE (NM_000789.2,2167-2185).
cactatcaagcggatcata

SEQ ID NO: 154418 - DNA, 19 bp, Homo sapiens
  siRNA target sequence for ACE (NM_000789.2,2169-2187).
ctatcaagcggatcataaa

SEQ ID NO: 154419 - DNA, 19 bp, Homo sapiens
  siRNA target sequence for ACE (NM_000789.2,2324-2342).
ccagatctgacgaatgtga

SEQ ID NO: 154420 - DNA, 19 bp, Homo sapiens
  siRNA target sequence for ACE (NM_000789.2,2344-2362).
ggccacgtcccggaaatat

SEQ ID NO: 154421 - DNA, 19 bp, Homo sapiens
  siRNA target sequence for ACE (NM_000789.2,2346-2364).
ccacgtcccggaaatatga

SEQ ID NO: 154422 - DNA, 19 bp, Homo sapiens
  siRNA target sequence for ACE (NM_000789.2,2347-2365).
cacgtcccggaaatatgaa

SEQ ID NO: 154423 - DNA, 19 bp, Homo sapiens
  siRNA target sequence for ACE (NM_000789.2,2349-2367).
cgtcccggaaatatgaaga

SEQ ID NO: 154424 - DNA, 19 bp, Homo sapiens
  siRNA target sequence for ACE (NM_000789.2,2430-2448).
cgaaatacgtggaactcat

SEQ ID NO: 154425 - DNA, 19 bp, Homo sapiens
  siRNA target sequence for ACE (NM_000789.2,2464-2482).
gctcaatggctatgtagat

SEQ ID NO: 154426 - DNA, 19 bp, Homo sapiens
  siRNA target sequence for ACE (NM_000789.2,2489-2507).
gactcgtggaggtctatgt

SEQ ID NO: 154427 - DNA, 19 bp, Homo sapiens
  siRNA target sequence for ACE (NM_000789.2,2680-2698).
gacctggtccaacatctat

SEQ ID NO: 154428 - DNA, 19 bp, Homo sapiens
  siRNA target sequence for ACE (NM_000789.2,2682-2700).
cctggtccaacatctatga

SEQ ID NO: 154429 - DNA, 19 bp, Homo sapiens
  siRNA target sequence for ACE (NM_000789.2,2685-2703).
ggtccaacatctatgactt

SEQ ID NO: 154430 - DNA, 19 bp, Homo sapiens
  siRNA target sequence for ACE (NM_000789.2,2739-2757).
ccacagaggctatgctaaa

SEQ ID NO: 154431 - DNA, 19 bp, Homo sapiens
  siRNA target sequence for ACE (NM_000789.2,2742-2760).
cagaggctatgctaaagca

SEQ ID NO: 154432 - DNA, 19 bp, Homo sapiens
  siRNA target sequence for ACE (NM_000789.2,2769-2787).
cgcccaggaggatgtttaa

SEQ ID NO: 154433 - DNA, 19 bp, Homo sapiens
  siRNA target sequence for ACE (NM_000789.2,2782-2800).
gtttaaggaggctgatgat

SEQ ID NO: 154434 - DNA, 19 bp, Homo sapiens
  siRNA target sequence for ACE (NM_000789.2,2994-3012).
gccacatccagtatttcat

SEQ ID NO: 154435 - DNA, 19 bp, Homo sapiens
  siRNA target sequence for ACE (NM_000789.2,3010-3028).
catgcagtacaaagactta

SEQ ID NO: 154436 - DNA, 19 bp, Homo sapiens
  siRNA target sequence for ACE (NM_000789.2,3150-3168).
gcagcgacgagcatgacat

SEQ ID NO: 154437 - DNA, 19 bp, Homo sapiens
  siRNA target sequence for ACE (NM_000789.2,3153-3171).
gcgacgagcatgacatcaa

SEQ ID NO: 154438 - DNA, 19 bp, Homo sapiens
  siRNA target sequence for ACE (NM_000789.2,3155-3173).
gacgagcatgacatcaact

SEQ ID NO: 154439 - DNA, 19 bp, Homo sapiens
  siRNA target sequence for ACE (NM_000789.2,3157-3175).
cgagcatgacatcaacttt

SEQ ID NO: 154440 - DNA, 19 bp, Homo sapiens
  siRNA target sequence for ACE (NM_000789.2,3261-3279).
gcatcaccaaggagaacta

SEQ ID NO: 154441 - DNA, 19 bp, Homo sapiens
  siRNA target sequence for ACE (NM_000789.2,3339-3357).
ggactcaaggtgactttga

SEQ ID NO: 154442 - DNA, 19 bp, Homo sapiens
  siRNA target sequence for ACE (NM_000789.2,3381-3399).
cttctagcgtgccttacat

SEQ ID NO: 154443 - DNA, 19 bp, Homo sapiens
  siRNA target sequence for ACE (NM_000789.2,3608-3626).
gccatgttgagctacttca

SEQ ID NO: 154444 - DNA, 19 bp, Homo sapiens
  siRNA target sequence for ACE (NM_000789.2,3609-3627).
ccatgttgagctacttcaa

SEQ ID NO: 154445 - DNA, 19 bp, Homo sapiens
  siRNA target sequence for ACE (NM_152831.1,2010-2028).
cgccgaactccgatgactt

SEQ ID NO: 154446 - DNA, 19 bp, Homo sapiens
  siRNA target sequence for ACE (NM_152831.1,2017-2035).
ctccgatgacttctacaat

SEQ ID NO: 154447 - DNA, 19 bp, Homo sapiens
  siRNA target sequence for ACE (NM_152831.1,2136-2154).
gggaagccccagtgtacat

SEQ ID NO: 154448 - DNA, 19 bp, Homo sapiens
  siRNA target sequence for ACE (NM_152831.1,2141-2159).
gccccagtgtacatgtcaa

SEQ ID NO: 154449 - DNA, 19 bp, Homo sapiens
  siRNA target sequence for ACE (NM_152831.1,2142-2160).
ccccagtgtacatgtcaaa

SEQ ID NO: 154450 - DNA, 19 bp, Homo sapiens
  siRNA target sequence for ACE (NM_152831.1,2227-2245).
ggtcccagttcatgattta

SEQ ID NO: 154451 - DNA, 19 bp, Homo sapiens
  siRNA target sequence for ACE (NM_152831.1,2230-2248).
cccagttcatgatttactt

SEQ ID NO: 154452 - DNA, 19 bp, Homo sapiens
  siRNA target sequence for ACE (NM_152831.1,2231-2249).
ccagttcatgatttacttt

SEQ ID NO: 154453 - DNA, 19 bp, Homo sapiens
  siRNA target sequence for ACE2 (NM_021804.1,211-229).
cgaagacctgttctatcaa

SEQ ID NO: 154454 - DNA, 19 bp, Homo sapiens
  siRNA target sequence for ACE2 (NM_021804.1,212-230).
gaagacctgttctatcaaa

SEQ ID NO: 154455 - DNA, 19 bp, Homo sapiens
  siRNA target sequence for ACE2 (NM_021804.1,215-233).
gacctgttctatcaaagtt

SEQ ID NO: 154456 - DNA, 19 bp, Homo sapiens
  siRNA target sequence for ACE2 (NM_021804.1,234-252).
cacttgcttcttggaatta

SEQ ID NO: 154457 - DNA, 19 bp, Homo sapiens
  siRNA target sequence for ACE2 (NM_021804.1,304-322).
caaatggtctgccttttta

SEQ ID NO: 154458 - DNA, 19 bp, Homo sapiens
  siRNA target sequence for ACE2 (NM_021804.1,333-351).
ccacacttgcccaaatgta

SEQ ID NO: 154459 - DNA, 19 bp, Homo sapiens
  siRNA target sequence for ACE2 (NM_021804.1,343-361).
ccaaatgtatccactacaa

SEQ ID NO: 154460 - DNA, 19 bp, Homo sapiens
  siRNA target sequence for ACE2 (NM_021804.1,349-367).
gtatccactacaagaaatt

SEQ ID NO: 154461 - DNA, 19 bp, Homo sapiens
  siRNA target sequence for ACE2 (NM_021804.1,394-412).
gcaggctcttcagcaaaat

SEQ ID NO: 154462 - DNA, 19 bp, Homo sapiens
  siRNA target sequence for ACE2 (NM_021804.1,446-464).
cggttgaacacaattctaa

SEQ ID NO: 154463 - DNA, 19 bp, Homo sapiens
  siRNA target sequence for ACE2 (NM_021804.1,448-466).
gttgaacacaattctaaat

SEQ ID NO: 154464 - DNA, 19 bp, Homo sapiens
  siRNA target sequence for ACE2 (NM_021804.1,551-569).
gaaataatggcaaacagtt

SEQ ID NO: 154465 - DNA, 19 bp, Homo sapiens
  siRNA target sequence for ACE2 (NM_021804.1,633-651).
ggccattatatgaagagta

SEQ ID NO: 154466 - DNA, 19 bp, Homo sapiens
  siRNA target sequence for ACE2 (NM_021804.1,634-652).
gccattatatgaagagtat

SEQ ID NO: 154467 - DNA, 19 bp, Homo sapiens
  siRNA target sequence for ACE2 (NM_021804.1,647-665).
gagtatgtggtcttgaaaa

SEQ ID NO: 154468 - DNA, 19 bp, Homo sapiens
  siRNA target sequence for ACE2 (NM_021804.1,692-710).
gaggactatggggattatt

SEQ ID NO: 154469 - DNA, 19 bp, Homo sapiens
  siRNA target sequence for ACE2 (NM_021804.1,695-713).
gactatggggattattgga

SEQ ID NO: 154470 - DNA, 19 bp, Homo sapiens
  siRNA target sequence for ACE2 (NM_021804.1,734-752).
ggggtagatggctatgact

SEQ ID NO: 154471 - DNA, 19 bp, Homo sapiens
  siRNA target sequence for ACE2 (NM_021804.1,799-817).
gattaaaccattatatgaa

SEQ ID NO: 154472 - DNA, 19 bp, Homo sapiens
  siRNA target sequence for ACE2 (NM_021804.1,833-851).
gtgagggcaaagttgatga

SEQ ID NO: 154473 - DNA, 19 bp, Homo sapiens
  siRNA target sequence for ACE2 (NM_021804.1,835-853).
gagggcaaagttgatgaat

SEQ ID NO: 154474 - DNA, 19 bp, Homo sapiens
  siRNA target sequence for ACE2 (NM_021804.1,850-868).
gaatgcctatccttcctat

SEQ ID NO: 154475 - DNA, 19 bp, Homo sapiens
  siRNA target sequence for ACE2 (NM_021804.1,854-872).
gcctatccttcctatatca

SEQ ID NO: 154476 - DNA, 19 bp, Homo sapiens
  siRNA target sequence for ACE2 (NM_021804.1,856-874).
ctatccttcctatatcagt

SEQ ID NO: 154477 - DNA, 19 bp, Homo sapiens
  siRNA target sequence for ACE2 (NM_021804.1,865-883).
ctatatcagtccaattgga

SEQ ID NO: 154478 - DNA, 19 bp, Homo sapiens
  siRNA target sequence for ACE2 (NM_021804.1,885-903).
gcctccctgctcatttgct

SEQ ID NO: 154479 - DNA, 19 bp, Homo sapiens
  siRNA target sequence for ACE2 (NM_021804.1,916-934).
gggtagattttggacaaat

SEQ ID NO: 154480 - DNA, 19 bp, Homo sapiens
  siRNA target sequence for ACE2 (NM_021804.1,918-936).
gtagattttggacaaatct

SEQ ID NO: 154481 - DNA, 19 bp, Homo sapiens
  siRNA target sequence for ACE2 (NM_021804.1,1033-1051).
ggccgagaagttctttgta

SEQ ID NO: 154482 - DNA, 19 bp, Homo sapiens
  siRNA target sequence for ACE2 (NM_021804.1,1065-1083).
ctaatatgactcaaggatt

SEQ ID NO: 154483 - DNA, 19 bp, Homo sapiens
  siRNA target sequence for ACE2 (NM_021804.1,1099-1117).
gctaacggacccaggaaat

SEQ ID NO: 154484 - DNA, 19 bp, Homo sapiens
  siRNA target sequence for ACE2 (NM_021804.1,1163-1181).
ggcgacttcaggatcctta

SEQ ID NO: 154485 - DNA, 19 bp, Homo sapiens
  siRNA target sequence for ACE2 (NM_021804.1,1164-1182).
gcgacttcaggatccttat

SEQ ID NO: 154486 - DNA, 19 bp, Homo sapiens
  siRNA target sequence for ACE2 (NM_021804.1,1232-1250).
gggcatatccagtatgata

SEQ ID NO: 154487 - DNA, 19 bp, Homo sapiens
  siRNA target sequence for ACE2 (NM_021804.1,1233-1251).
ggcatatccagtatgatat

SEQ ID NO: 154488 - DNA, 19 bp, Homo sapiens
  siRNA target sequence for ACE2 (NM_021804.1,1254-1272).
catatgctgcacaaccttt

SEQ ID NO: 154489 - DNA, 19 bp, Homo sapiens
  siRNA target sequence for ACE2 (NM_021804.1,1276-1294).
gctaagaaatggagctaat

SEQ ID NO: 154490 - DNA, 19 bp, Homo sapiens
  siRNA target sequence for ACE2 (NM_021804.1,1316-1334).
ggggaaatcatgtcacttt

SEQ ID NO: 154491 - DNA, 19 bp, Homo sapiens
  siRNA target sequence for ACE2 (NM_021804.1,1337-1355).
gcagccacacctaagcatt

SEQ ID NO: 154492 - DNA, 19 bp, Homo sapiens
  siRNA target sequence for ACE2 (NM_021804.1,1338-1356).
cagccacacctaagcattt

SEQ ID NO: 154493 - DNA, 19 bp, Homo sapiens
  siRNA target sequence for ACE2 (NM_021804.1,1340-1358).
gccacacctaagcatttaa

SEQ ID NO: 154494 - DNA, 19 bp, Homo sapiens
  siRNA target sequence for ACE2 (NM_021804.1,1341-1359).
ccacacctaagcatttaaa

SEQ ID NO: 154495 - DNA, 19 bp, Homo sapiens
  siRNA target sequence for ACE2 (NM_021804.1,1375-1393).
gtcacccgattttcaagaa

SEQ ID NO: 154496 - DNA, 19 bp, Homo sapiens
  siRNA target sequence for ACE2 (NM_021804.1,1442-1460).
gttgggactctgccattta

SEQ ID NO: 154497 - DNA, 19 bp, Homo sapiens
  siRNA target sequence for ACE2 (NM_021804.1,1446-1464).
ggactctgccatttactta

SEQ ID NO: 154498 - DNA, 19 bp, Homo sapiens
  siRNA target sequence for ACE2 (NM_021804.1,1453-1471).
gccatttacttacatgtta

SEQ ID NO: 154499 - DNA, 19 bp, Homo sapiens
  siRNA target sequence for ACE2 (NM_021804.1,1455-1473).
catttacttacatgttaga

SEQ ID NO: 154500 - DNA, 19 bp, Homo sapiens
  siRNA target sequence for ACE2 (NM_021804.1,1479-1497).
ggaggtggatggtctttaa

SEQ ID NO: 154501 - DNA, 19 bp, Homo sapiens
  siRNA target sequence for ACE2 (NM_021804.1,1480-1498).
gaggtggatggtctttaaa

SEQ ID NO: 154502 - DNA, 19 bp, Homo sapiens
  siRNA target sequence for ACE2 (NM_021804.1,1537-1555).
ggagatgaagcgagagata

SEQ ID NO: 154503 - DNA, 19 bp, Homo sapiens
  siRNA target sequence for ACE2 (NM_021804.1,1540-1558).
gatgaagcgagagatagtt

SEQ ID NO: 154504 - DNA, 19 bp, Homo sapiens
  siRNA target sequence for ACE2 (NM_021804.1,1574-1592).
gtgccccatgatgaaacat

SEQ ID NO: 154505 - DNA, 19 bp, Homo sapiens
  siRNA target sequence for ACE2 (NM_021804.1,1577-1595).
ccccatgatgaaacatact

SEQ ID NO: 154506 - DNA, 19 bp, Homo sapiens
  siRNA target sequence for ACE2 (NM_021804.1,1579-1597).
ccatgatgaaacatactgt

SEQ ID NO: 154507 - DNA, 19 bp, Homo sapiens
  siRNA target sequence for ACE2 (NM_021804.1,1612-1630).
gttccatgtttctaatgat

SEQ ID NO: 154508 - DNA, 19 bp, Homo sapiens
  siRNA target sequence for ACE2 (NM_021804.1,1628-1646).
gattactcattcattcgat

SEQ ID NO: 154509 - DNA, 19 bp, Homo sapiens
  siRNA target sequence for ACE2 (NM_021804.1,1651-1669).
cacaaggaccctttaccaa

SEQ ID NO: 154510 - DNA, 19 bp, Homo sapiens
  siRNA target sequence for ACE2 (NM_021804.1,1653-1671).
caaggaccctttaccaatt

SEQ ID NO: 154511 - DNA, 19 bp, Homo sapiens
  siRNA target sequence for ACE2 (NM_021804.1,1656-1674).
ggaccctttaccaattcca

SEQ ID NO: 154512 - DNA, 19 bp, Homo sapiens
  siRNA target sequence for ACE2 (NM_021804.1,1666-1684).
ccaattccagtttcaagaa

SEQ ID NO: 154513 - DNA, 19 bp, Homo sapiens
  siRNA target sequence for ACE2 (NM_021804.1,1692-1710).
gtcaagcagctaaacatga

SEQ ID NO: 154514 - DNA, 19 bp, Homo sapiens
  siRNA target sequence for ACE2 (NM_021804.1,1732-1750).
catctcaaactctacagaa

SEQ ID NO: 154515 - DNA, 19 bp, Homo sapiens
  siRNA target sequence for ACE2 (NM_021804.1,1755-1773).
gacagaaactgttcaatat

SEQ ID NO: 154516 - DNA, 19 bp, Homo sapiens
  siRNA target sequence for ACE2 (NM_021804.1,1801-1819).
gaccctagcattggaaaat

SEQ ID NO: 154517 - DNA, 19 bp, Homo sapiens
  siRNA target sequence for ACE2 (NM_021804.1,1804-1822).
cctagcattggaaaatgtt

SEQ ID NO: 154518 - DNA, 19 bp, Homo sapiens
  siRNA target sequence for ACE2 (NM_021804.1,1851-1869).
cactgctcaactactttga

SEQ ID NO: 154519 - DNA, 19 bp, Homo sapiens
  siRNA target sequence for ACE2 (NM_021804.1,1861-1879).
ctactttgagcccttattt

SEQ ID NO: 154520 - DNA, 19 bp, Homo sapiens
  siRNA target sequence for ACE2 (NM_021804.1,1927-1945).
cgactggagtccatatgca

SEQ ID NO: 154521 - DNA, 19 bp, Homo sapiens
  siRNA target sequence for ACE2 (NM_021804.1,1938-1956).
catatgcagaccaaagcat

SEQ ID NO: 154522 - DNA, 19 bp, Homo sapiens
  siRNA target sequence for ACE2 (NM_021804.1,1944-1962).
cagaccaaagcatcaaagt

SEQ ID NO: 154523 - DNA, 19 bp, Homo sapiens
  siRNA target sequence for ACE2 (NM_021804.1,1946-1964).
gaccaaagcatcaaagtga

SEQ ID NO: 154524 - DNA, 19 bp, Homo sapiens
  siRNA target sequence for ACE2 (NM_021804.1,2003-2021).
gaatggaacgacaatgaaa

SEQ ID NO: 154525 - DNA, 19 bp, Homo sapiens
  siRNA target sequence for ACE2 (NM_021804.1,2007-2025).
ggaacgacaatgaaatgta

SEQ ID NO: 154526 - DNA, 19 bp, Homo sapiens
  siRNA target sequence for ACE2 (NM_021804.1,2023-2041).
gtacctgttccgatcatct

SEQ ID NO: 154527 - DNA, 19 bp, Homo sapiens
  siRNA target sequence for ACE2 (NM_021804.1,2026-2044).
cctgttccgatcatctgtt

SEQ ID NO: 154528 - DNA, 19 bp, Homo sapiens
  siRNA target sequence for ACE2 (NM_021804.1,2032-2050).
ccgatcatctgttgcatat

SEQ ID NO: 154529 - DNA, 19 bp, Homo sapiens
  siRNA target sequence for ACE2 (NM_021804.1,2051-2069).
gctatgaggcagtactttt

SEQ ID NO: 154530 - DNA, 19 bp, Homo sapiens
  siRNA target sequence for ACE2 (NM_021804.1,2108-2126).
gatgtgcgagtggctaatt

SEQ ID NO: 154531 - DNA, 19 bp, Homo sapiens
  siRNA target sequence for ACE2 (NM_021804.1,2111-2129).
gtgcgagtggctaatttga

SEQ ID NO: 154532 - DNA, 19 bp, Homo sapiens
  siRNA target sequence for ACE2 (NM_021804.1,2113-2131).
gcgagtggctaatttgaaa

SEQ ID NO: 154533 - DNA, 19 bp, Homo sapiens
  siRNA target sequence for ACE2 (NM_021804.1,2174-2192).
gtgtctgatatcattccta

SEQ ID NO: 154534 - DNA, 19 bp, Homo sapiens
  siRNA target sequence for ACE2 (NM_021804.1,2221-2239).
gtcccggagccgtatcaat

SEQ ID NO: 154535 - DNA, 19 bp, Homo sapiens
  siRNA target sequence for ACE2 (NM_021804.1,2223-2241).
cccggagccgtatcaatga

SEQ ID NO: 154536 - DNA, 19 bp, Homo sapiens
  siRNA target sequence for ACE2 (NM_021804.1,2224-2242).
ccggagccgtatcaatgat

SEQ ID NO: 154537 - DNA, 19 bp, Homo sapiens
  siRNA target sequence for ACE2 (NM_021804.1,2229-2247).
gccgtatcaatgatgcttt

SEQ ID NO: 154538 - DNA, 19 bp, Homo sapiens
  siRNA target sequence for ACE2 (NM_021804.1,2243-2261).
gctttccgtctgaatgaca

SEQ ID NO: 154539 - DNA, 19 bp, Homo sapiens
  siRNA target sequence for ACE2 (NM_021804.1,2244-2262).
ctttccgtctgaatgacaa

SEQ ID NO: 154540 - DNA, 19 bp, Homo sapiens
  siRNA target sequence for ACE2 (NM_021804.1,2278-2296).
ggggatacagccaacactt

SEQ ID NO: 154541 - DNA, 19 bp, Homo sapiens
  siRNA target sequence for ACE2 (NM_021804.1,2323-2341).
catatggctgattgttttt

SEQ ID NO: 154542 - DNA, 19 bp, Homo sapiens
  siRNA target sequence for ACE2 (NM_021804.1,2370-2388).
gcattgtcatcctgatctt

SEQ ID NO: 154543 - DNA, 19 bp, Homo sapiens
  siRNA target sequence for ACE2 (NM_021804.1,2442-2460).
cttatgcctccatcgatat

SEQ ID NO: 154544 - DNA, 19 bp, Homo sapiens
  siRNA target sequence for ACE2 (NM_021804.1,2447-2465).
gcctccatcgatattagca

SEQ ID NO: 154545 - DNA, 19 bp, Homo sapiens
  siRNA target sequence for ACE2 (NM_021804.1,2448-2466).
cctccatcgatattagcaa

SEQ ID NO: 154546 - DNA, 19 bp, Homo sapiens
  siRNA target sequence for ACE2 (NM_021804.1,2449-2467).
ctccatcgatattagcaaa

SEQ ID NO: 154547 - DNA, 19 bp, Homo sapiens
  siRNA target sequence for ACE2 (NM_021804.1,2501-2519).
gatgttcagacctcctttt

SEQ ID NO: 154548 - DNA, 19 bp, Homo sapiens
  siRNA target sequence for ADAM10 (NM_001110.1,473-491).
gtgttgctgagagtgttaa

SEQ ID NO: 154549 - DNA, 19 bp, Homo sapiens
  siRNA target sequence for ADAM10 (NM_001110.1,514-532).
ggggatgggaggtcagtat

SEQ ID NO: 154550 - DNA, 19 bp, Homo sapiens
  siRNA target sequence for ADAM10 (NM_001110.1,529-547).
gtatgggaatcctttaaat

SEQ ID NO: 154551 - DNA, 19 bp, Homo sapiens
  siRNA target sequence for ADAM10 (NM_001110.1,560-578).
cattatgaaggattatctt

SEQ ID NO: 154552 - DNA, 19 bp, Homo sapiens
  siRNA target sequence for ADAM10 (NM_001110.1,640-658).
ccaatttttacgtctagat

SEQ ID NO: 154553 - DNA, 19 bp, Homo sapiens
  siRNA target sequence for ADAM10 (NM_001110.1,641-659).
caatttttacgtctagatt

SEQ ID NO: 154554 - DNA, 19 bp, Homo sapiens
  siRNA target sequence for ADAM10 (NM_001110.1,675-693).
gacatttcaacctacgaat

SEQ ID NO: 154555 - DNA, 19 bp, Homo sapiens
  siRNA target sequence for ADAM10 (NM_001110.1,700-718).
ggacacttcccttttcagt

SEQ ID NO: 154556 - DNA, 19 bp, Homo sapiens
  siRNA target sequence for ADAM10 (NM_001110.1,755-773).
gattatgatacctctcata

SEQ ID NO: 154557 - DNA, 19 bp, Homo sapiens
  siRNA target sequence for ADAM10 (NM_001110.1,813-831).
gccatgggtctgttattga

SEQ ID NO: 154558 - DNA, 19 bp, Homo sapiens
  siRNA target sequence for ADAM10 (NM_001110.1,834-852).
gaagatttgaaggattcat

SEQ ID NO: 154559 - DNA, 19 bp, Homo sapiens
  siRNA target sequence for ADAM10 (NM_001110.1,856-874).
gactcgtggtggcacattt

SEQ ID NO: 154560 - DNA, 19 bp, Homo sapiens
  siRNA target sequence for ADAM10 (NM_001110.1,864-882).
gtggcacattttatgttga

SEQ ID NO: 154561 - DNA, 19 bp, Homo sapiens
  siRNA target sequence for ADAM10 (NM_001110.1,883-901).
gccagcagagagatatatt

SEQ ID NO: 154562 - DNA, 19 bp, Homo sapiens
  siRNA target sequence for ADAM10 (NM_001110.1,884-902).
ccagcagagagatatatta

SEQ ID NO: 154563 - DNA, 19 bp, Homo sapiens
  siRNA target sequence for ADAM10 (NM_001110.1,885-903).
cagcagagagatatattaa

SEQ ID NO: 154564 - DNA, 19 bp, Homo sapiens
  siRNA target sequence for ADAM10 (NM_001110.1,908-926).
cgaactctgccatttcact

SEQ ID NO: 154565 - DNA, 19 bp, Homo sapiens
  siRNA target sequence for ADAM10 (NM_001110.1,938-956).
catgaagatgatattaact

SEQ ID NO: 154566 - DNA, 19 bp, Homo sapiens
  siRNA target sequence for ADAM10 (NM_001110.1,1050-1068).
cacagatacctcaagaaga

SEQ ID NO: 154567 - DNA, 19 bp, Homo sapiens
  siRNA target sequence for ADAM10 (NM_001110.1,1077-1095).
ctaatggtccagaacttct

SEQ ID NO: 154568 - DNA, 19 bp, Homo sapiens
  siRNA target sequence for ADAM10 (NM_001110.1,1096-1114).
gaggaaaaaacgtacaact

SEQ ID NO: 154569 - DNA, 19 bp, Homo sapiens
  siRNA target sequence for ADAM10 (NM_001110.1,1099-1117).
gaaaaaacgtacaacttca

SEQ ID NO: 154570 - DNA, 19 bp, Homo sapiens
  siRNA target sequence for ADAM10 (NM_001110.1,1150-1168).
gactgatcatttgttcttt

SEQ ID NO: 154571 - DNA, 19 bp, Homo sapiens
  siRNA target sequence for ADAM10 (NM_001110.1,1193-1211).
gtgattgcccagatatcca

SEQ ID NO: 154572 - DNA, 19 bp, Homo sapiens
  siRNA target sequence for ADAM10 (NM_001110.1,1224-1242).
cgattgatacaatttacca

SEQ ID NO: 154573 - DNA, 19 bp, Homo sapiens
  siRNA target sequence for ADAM10 (NM_001110.1,1259-1277).
ggaatccgtaacatcagtt

SEQ ID NO: 154574 - DNA, 19 bp, Homo sapiens
  siRNA target sequence for ADAM10 (NM_001110.1,1260-1278).
gaatccgtaacatcagttt

SEQ ID NO: 154575 - DNA, 19 bp, Homo sapiens
  siRNA target sequence for ADAM10 (NM_001110.1,1283-1301).
gtgaaacgcataagaatca

SEQ ID NO: 154576 - DNA, 19 bp, Homo sapiens
  siRNA target sequence for ADAM10 (NM_001110.1,1289-1307).
cgcataagaatcaatacaa

SEQ ID NO: 154577 - DNA, 19 bp, Homo sapiens
  siRNA target sequence for ADAM10 (NM_001110.1,1318-1336).
gaaggaccctacaaatcct

SEQ ID NO: 154578 - DNA, 19 bp, Homo sapiens
  siRNA target sequence for ADAM10 (NM_001110.1,1339-1357).
ccgtttcccaaatattggt

SEQ ID NO: 154579 - DNA, 19 bp, Homo sapiens
  siRNA target sequence for ADAM10 (NM_001110.1,1378-1396).
gaattctgagcagaatcat

SEQ ID NO: 154580 - DNA, 19 bp, Homo sapiens
  siRNA target sequence for ADAM10 (NM_001110.1,1383-1401).
ctgagcagaatcatgatga

SEQ ID NO: 154581 - DNA, 19 bp, Homo sapiens
  siRNA target sequence for ADAM10 (NM_001110.1,1420-1438).
cttcacagaccgagatttt

SEQ ID NO: 154582 - DNA, 19 bp, Homo sapiens
  siRNA target sequence for ADAM10 (NM_001110.1,1425-1443).
cagaccgagattttgatga

SEQ ID NO: 154583 - DNA, 19 bp, Homo sapiens
  siRNA target sequence for ADAM10 (NM_001110.1,1481-1499).
ggaagctctggaggaatat

SEQ ID NO: 154584 - DNA, 19 bp, Homo sapiens
  siRNA target sequence for ADAM10 (NM_001110.1,1567-1585).
gaactatgggtctcatgta

SEQ ID NO: 154585 - DNA, 19 bp, Homo sapiens
  siRNA target sequence for ADAM10 (NM_001110.1,1580-1598).
catgtacctcccaaagtct

SEQ ID NO: 154586 - DNA, 19 bp, Homo sapiens
  siRNA target sequence for ADAM10 (NM_001110.1,1589-1607).
cccaaagtctctcacatta

SEQ ID NO: 154587 - DNA, 19 bp, Homo sapiens
  siRNA target sequence for ADAM10 (NM_001110.1,1591-1609).
caaagtctctcacattact

SEQ ID NO: 154588 - DNA, 19 bp, Homo sapiens
  siRNA target sequence for ADAM10 (NM_001110.1,1614-1632).
ctcacgaagttggacataa

SEQ ID NO: 154589 - DNA, 19 bp, Homo sapiens
  siRNA target sequence for ADAM10 (NM_001110.1,1616-1634).
cacgaagttggacataact

SEQ ID NO: 154590 - DNA, 19 bp, Homo sapiens
  siRNA target sequence for ADAM10 (NM_001110.1,1633-1651).
ctttggatccccacatgat

SEQ ID NO: 154591 - DNA, 19 bp, Homo sapiens
  siRNA target sequence for ADAM10 (NM_001110.1,1670-1688).
ccaggagaatctaagaatt

SEQ ID NO: 154592 - DNA, 19 bp, Homo sapiens
  siRNA target sequence for ADAM10 (NM_001110.1,1700-1718).
gaaaatggcaattacatca

SEQ ID NO: 154593 - DNA, 19 bp, Homo sapiens
  siRNA target sequence for ADAM10 (NM_001110.1,1720-1738).
gtatgcaagagcaacatct

SEQ ID NO: 154594 - DNA, 19 bp, Homo sapiens
  siRNA target sequence for ADAM10 (NM_001110.1,1740-1758).
gggacaaacttaacaacaa

SEQ ID NO: 154595 - DNA, 19 bp, Homo sapiens
  siRNA target sequence for ADAM10 (NM_001110.1,1741-1759).
ggacaaacttaacaacaat

SEQ ID NO: 154596 - DNA, 19 bp, Homo sapiens
  siRNA target sequence for ADAM10 (NM_001110.1,1769-1787).
ctctgtagtattagaaata

SEQ ID NO: 154597 - DNA, 19 bp, Homo sapiens
  siRNA target sequence for ADAM10 (NM_001110.1,1890-1908).
gctatagtgaccagtgtaa

SEQ ID NO: 154598 - DNA, 19 bp, Homo sapiens
  siRNA target sequence for ADAM10 (NM_001110.1,1917-1935).
gctgcttcgatgcaaatca

SEQ ID NO: 154599 - DNA, 19 bp, Homo sapiens
  siRNA target sequence for ADAM10 (NM_001110.1,1918-1936).
ctgcttcgatgcaaatcaa

SEQ ID NO: 154600 - DNA, 19 bp, Homo sapiens
  siRNA target sequence for ADAM10 (NM_001110.1,2033-2051).
gagaagtgtcgggatgatt

SEQ ID NO: 154601 - DNA, 19 bp, Homo sapiens
  siRNA target sequence for ADAM10 (NM_001110.1,2102-2120).
gcatctgaccctaaaccaa

SEQ ID NO: 154602 - DNA, 19 bp, Homo sapiens
  siRNA target sequence for ADAM10 (NM_001110.1,2118-2136).
caaacttcacagactgtaa

SEQ ID NO: 154603 - DNA, 19 bp, Homo sapiens
  siRNA target sequence for ADAM10 (NM_001110.1,2131-2149).
ctgtaataggcatacacaa

SEQ ID NO: 154604 - DNA, 19 bp, Homo sapiens
  siRNA target sequence for ADAM10 (NM_001110.1,2141-2159).
catacacaagtgtgcatta

SEQ ID NO: 154605 - DNA, 19 bp, Homo sapiens
  siRNA target sequence for ADAM10 (NM_001110.1,2163-2181).
ggcaatgtgcaggttctat

SEQ ID NO: 154606 - DNA, 19 bp, Homo sapiens
  siRNA target sequence for ADAM10 (NM_001110.1,2252-2270).
catgtatgctgtatgaaga

SEQ ID NO: 154607 - DNA, 19 bp, Homo sapiens
  siRNA target sequence for ADAM10 (NM_001110.1,2269-2287).
gaaaatggacccatcaact

SEQ ID NO: 154608 - DNA, 19 bp, Homo sapiens
  siRNA target sequence for ADAM10 (NM_001110.1,2354-2372).
ggatccccttgcaacgatt

SEQ ID NO: 154609 - DNA, 19 bp, Homo sapiens
  siRNA target sequence for ADAM10 (NM_001110.1,2355-2373).
gatccccttgcaacgattt

SEQ ID NO: 154610 - DNA, 19 bp, Homo sapiens
  siRNA target sequence for ADAM10 (NM_001110.1,2368-2386).
cgattttagaggttactgt

SEQ ID NO: 154611 - DNA, 19 bp, Homo sapiens
  siRNA target sequence for ADAM10 (NM_001110.1,2395-2413).
catgcggtgcagattagta

SEQ ID NO: 154612 - DNA, 19 bp, Homo sapiens
  siRNA target sequence for ADAM10 (NM_001110.1,2398-2416).
gcggtgcagattagtagat

SEQ ID NO: 154613 - DNA, 19 bp, Homo sapiens
  siRNA target sequence for ADAM10 (NM_001110.1,2432-2450).
gctaggcttaaaaaagcaa

SEQ ID NO: 154614 - DNA, 19 bp, Homo sapiens
  siRNA target sequence for ADAM10 (NM_001110.1,2502-2520).
ggtgggcagtattacttat

SEQ ID NO: 154615 - DNA, 19 bp, Homo sapiens
  siRNA target sequence for ADAM12 (NM_003474.2,388-406).
gcccgaggggtgagcttat

SEQ ID NO: 154616 - DNA, 19 bp, Homo sapiens
  siRNA target sequence for ADAM12 (NM_003474.2,391-409).
cgaggggtgagcttatgga

SEQ ID NO: 154617 - DNA, 19 bp, Homo sapiens
  siRNA target sequence for ADAM12 (NM_003474.2,392-410).
gaggggtgagcttatggaa

SEQ ID NO: 154618 - DNA, 19 bp, Homo sapiens
  siRNA target sequence for ADAM12 (NM_003474.2,479-497).
gcttcgactccaagaatca

SEQ ID NO: 154619 - DNA, 19 bp, Homo sapiens
  siRNA target sequence for ADAM12 (NM_003474.2,480-498).
cttcgactccaagaatcat

SEQ ID NO: 154620 - DNA, 19 bp, Homo sapiens
  siRNA target sequence for ADAM12 (NM_003474.2,635-653).
gaaattacacggtaattct

SEQ ID NO: 154621 - DNA, 19 bp, Homo sapiens
  siRNA target sequence for ADAM12 (NM_003474.2,673-691).
ggacatgtacggggatatt

SEQ ID NO: 154622 - DNA, 19 bp, Homo sapiens
  siRNA target sequence for ADAM12 (NM_003474.2,679-697).
gtacggggatattctgatt

SEQ ID NO: 154623 - DNA, 19 bp, Homo sapiens
  siRNA target sequence for ADAM12 (NM_003474.2,725-743).
gtctcaggggacttattgt

SEQ ID NO: 154624 - DNA, 19 bp, Homo sapiens
  siRNA target sequence for ADAM12 (NM_003474.2,727-745).
ctcaggggacttattgtgt

SEQ ID NO: 154625 - DNA, 19 bp, Homo sapiens
  siRNA target sequence for ADAM12 (NM_003474.2,729-747).
caggggacttattgtgttt

SEQ ID NO: 154626 - DNA, 19 bp, Homo sapiens
  siRNA target sequence for ADAM12 (NM_003474.2,758-776).
gctatgtcttagaaccaat

SEQ ID NO: 154627 - DNA, 19 bp, Homo sapiens
  siRNA target sequence for ADAM12 (NM_003474.2,834-852).
gggatcatgtggatcacat

SEQ ID NO: 154628 - DNA, 19 bp, Homo sapiens
  siRNA target sequence for ADAM12 (NM_003474.2,863-881).
caaacctcgctgcaaagaa

SEQ ID NO: 154629 - DNA, 19 bp, Homo sapiens
  siRNA target sequence for ADAM12 (NM_003474.2,868-886).
ctcgctgcaaagaatgtgt

SEQ ID NO: 154630 - DNA, 19 bp, Homo sapiens
  siRNA target sequence for ADAM12 (NM_003474.2,870-888).
cgctgcaaagaatgtgttt

SEQ ID NO: 154631 - DNA, 19 bp, Homo sapiens
  siRNA target sequence for ADAM12 (NM_003474.2,932-950).
ccctcaaggcaactaagta

SEQ ID NO: 154632 - DNA, 19 bp, Homo sapiens
  siRNA target sequence for ADAM12 (NM_003474.2,933-951).
cctcaaggcaactaagtat

SEQ ID NO: 154633 - DNA, 19 bp, Homo sapiens
  siRNA target sequence for ADAM12 (NM_003474.2,969-987).
ggcagacaaccgagagttt

SEQ ID NO: 154634 - DNA, 19 bp, Homo sapiens
  siRNA target sequence for ADAM12 (NM_003474.2,1024-1042).
cgattaatagagattgcta

SEQ ID NO: 154635 - DNA, 19 bp, Homo sapiens
  siRNA target sequence for ADAM12 (NM_003474.2,1025-1043).
gattaatagagattgctaa

SEQ ID NO: 154636 - DNA, 19 bp, Homo sapiens
  siRNA target sequence for ADAM12 (NM_003474.2,1193-1211).
ctcgcaaatcccatgacaa

SEQ ID NO: 154637 - DNA, 19 bp, Homo sapiens
  siRNA target sequence for ADAM12 (NM_003474.2,1224-1242).
cagtggggtttatttccaa

SEQ ID NO: 154638 - DNA, 19 bp, Homo sapiens
  siRNA target sequence for ADAM12 (NM_003474.2,1365-1383).
ccacaatttcgggatgaat

SEQ ID NO: 154639 - DNA, 19 bp, Homo sapiens
  siRNA target sequence for ADAM12 (NM_003474.2,1400-1418).
ggggctgtagctgtcaaat

SEQ ID NO: 154640 - DNA, 19 bp, Homo sapiens
  siRNA target sequence for ADAM12 (NM_003474.2,1412-1430).
gtcaaatggcggttgagaa

SEQ ID NO: 154641 - DNA, 19 bp, Homo sapiens
  siRNA target sequence for ADAM12 (NM_003474.2,1532-1550).
gggtgtgcctgtttaacct

SEQ ID NO: 154642 - DNA, 19 bp, Homo sapiens
  siRNA target sequence for ADAM12 (NM_003474.2,1917-1935).
gggaccaggtgctaaacct

SEQ ID NO: 154643 - DNA, 19 bp, Homo sapiens
  siRNA target sequence for ADAM12 (NM_003474.2,1947-1965).
ctgctttgagagagtcaat

SEQ ID NO: 154644 - DNA, 19 bp, Homo sapiens
  siRNA target sequence for ADAM12 (NM_003474.2,1993-2011).
ggcaaagtctcgaagagtt

SEQ ID NO: 154645 - DNA, 19 bp, Homo sapiens
  siRNA target sequence for ADAM12 (NM_003474.2,2024-2042).
gcgagatgagagatgctaa

SEQ ID NO: 154646 - DNA, 19 bp, Homo sapiens
  siRNA target sequence for ADAM12 (NM_003474.2,2079-2097).
gccagtcattggtaccaat

SEQ ID NO: 154647 - DNA, 19 bp, Homo sapiens
  siRNA target sequence for ADAM12 (NM_003474.2,2090-2108).
gtaccaatgccgtttccat

SEQ ID NO: 154648 - DNA, 19 bp, Homo sapiens
  siRNA target sequence for ADAM12 (NM_003474.2,2094-2112).
caatgccgtttccatagaa

SEQ ID NO: 154649 - DNA, 19 bp, Homo sapiens
  siRNA target sequence for ADAM12 (NM_003474.2,2131-2149).
caaggaggccggattctgt

SEQ ID NO: 154650 - DNA, 19 bp, Homo sapiens
  siRNA target sequence for ADAM12 (NM_003474.2,2235-2253).
ctgcctgaatcgtcaatgt

SEQ ID NO: 154651 - DNA, 19 bp, Homo sapiens
  siRNA target sequence for ADAM12 (NM_003474.2,2237-2255).
gcctgaatcgtcaatgtca

SEQ ID NO: 154652 - DNA, 19 bp, Homo sapiens
  siRNA target sequence for ADAM12 (NM_003474.2,2238-2256).
cctgaatcgtcaatgtcaa

SEQ ID NO: 154653 - DNA, 19 bp, Homo sapiens
  siRNA target sequence for ADAM12 (NM_003474.2,2239-2257).
ctgaatcgtcaatgtcaaa

SEQ ID NO: 154654 - DNA, 19 bp, Homo sapiens
  siRNA target sequence for ADAM12 (NM_003474.2,2241-2259).
gaatcgtcaatgtcaaaat

SEQ ID NO: 154655 - DNA, 19 bp, Homo sapiens
  siRNA target sequence for ADAM12 (NM_003474.2,2405-2423).
ccatccggcaagcagataa

SEQ ID NO: 154656 - DNA, 19 bp, Homo sapiens
  siRNA target sequence for ADAM12 (NM_003474.2,2409-2427).
ccggcaagcagataaccaa

SEQ ID NO: 154657 - DNA, 19 bp, Homo sapiens
  siRNA target sequence for ADAM12 (NM_003474.2,2471-2489).
ctgccggatttgtggttta

SEQ ID NO: 154658 - DNA, 19 bp, Homo sapiens
  siRNA target sequence for ADAM12 (NM_003474.2,2474-2492).
ccggatttgtggtttatct

SEQ ID NO: 154659 - DNA, 19 bp, Homo sapiens
  siRNA target sequence for ADAM12 (NM_003474.2,2476-2494).
ggatttgtggtttatctca

SEQ ID NO: 154660 - DNA, 19 bp, Homo sapiens
  siRNA target sequence for ADAM12 (NM_003474.2,2512-2530).
cgactgctgtttacaaata

SEQ ID NO: 154661 - DNA, 19 bp, Homo sapiens
  siRNA target sequence for ADAM15 (NM_003815.2,67-85).
ctggccgctcccaaatata

SEQ ID NO: 154662 - DNA, 19 bp, Homo sapiens
  siRNA target sequence for ADAM15 (NM_003815.2,155-173).
caggacgatctcccaatta

SEQ ID NO: 154663 - DNA, 19 bp, Homo sapiens
  siRNA target sequence for ADAM15 (NM_003815.2,164-182).
ctcccaattagcctcaaaa

SEQ ID NO: 154664 - DNA, 19 bp, Homo sapiens
  siRNA target sequence for ADAM15 (NM_003815.2,168-186).
caattagcctcaaaaaggt

SEQ ID NO: 154665 - DNA, 19 bp, Homo sapiens
  siRNA target sequence for ADAM15 (NM_003815.2,442-460).
gaccccagagagaagctat

SEQ ID NO: 154666 - DNA, 19 bp, Homo sapiens
  siRNA target sequence for ADAM15 (NM_003815.2,488-506).
cagggtcctcccattattt

SEQ ID NO: 154667 - DNA, 19 bp, Homo sapiens
  siRNA target sequence for ADAM15 (NM_003815.2,499-517).
cattatttcgcgaatccaa

SEQ ID NO: 154668 - DNA, 19 bp, Homo sapiens
  siRNA target sequence for ADAM15 (NM_003815.2,550-568).
gagctggcgggaatctgta

SEQ ID NO: 154669 - DNA, 19 bp, Homo sapiens
  siRNA target sequence for ADAM15 (NM_003815.2,621-639).
ggcgggatgtggtaacaga

SEQ ID NO: 154670 - DNA, 19 bp, Homo sapiens
  siRNA target sequence for ADAM15 (NM_003815.2,837-855).
cagctgtcaccctcgaaaa

SEQ ID NO: 154671 - DNA, 19 bp, Homo sapiens
  siRNA target sequence for ADAM15 (NM_003815.2,839-857).
gctgtcaccctcgaaaact

SEQ ID NO: 154672 - DNA, 19 bp, Homo sapiens
  siRNA target sequence for ADAM15 (NM_003815.2,840-858).
ctgtcaccctcgaaaactt

SEQ ID NO: 154673 - DNA, 19 bp, Homo sapiens
  siRNA target sequence for ADAM15 (NM_003815.2,914-932).
ctggtgactggtacttcat

SEQ ID NO: 154674 - DNA, 19 bp, Homo sapiens
  siRNA target sequence for ADAM15 (NM_003815.2,917-935).
gtgactggtacttcattct

SEQ ID NO: 154675 - DNA, 19 bp, Homo sapiens
  siRNA target sequence for ADAM15 (NM_003815.2,1082-1100).
gatttgcctgggaatagct

SEQ ID NO: 154676 - DNA, 19 bp, Homo sapiens
  siRNA target sequence for ADAM15 (NM_003815.2,1160-1178).
ctaccaggcctgaacttca

SEQ ID NO: 154677 - DNA, 19 bp, Homo sapiens
  siRNA target sequence for ADAM15 (NM_003815.2,1268-1286).
gctgctttctgcggaaata

SEQ ID NO: 154678 - DNA, 19 bp, Homo sapiens
  siRNA target sequence for ADAM15 (NM_003815.2,1397-1415).
gacggaccctgttgtcaaa

SEQ ID NO: 154679 - DNA, 19 bp, Homo sapiens
  siRNA target sequence for ADAM15 (NM_003815.2,1399-1417).
cggaccctgttgtcaaaat

SEQ ID NO: 154680 - DNA, 19 bp, Homo sapiens
  siRNA target sequence for ADAM15 (NM_003815.2,1400-1418).
ggaccctgttgtcaaaatt

SEQ ID NO: 154681 - DNA, 19 bp, Homo sapiens
  siRNA target sequence for ADAM15 (NM_003815.2,1645-1663).
cctccagacagctaatact

SEQ ID NO: 154682 - DNA, 19 bp, Homo sapiens
  siRNA target sequence for ADAM15 (NM_003815.2,1693-1711).
caaccccagtggcagttat

SEQ ID NO: 154683 - DNA, 19 bp, Homo sapiens
  siRNA target sequence for ADAM15 (NM_003815.2,1714-1732).
gtcctgcacccctagagat

SEQ ID NO: 154684 - DNA, 19 bp, Homo sapiens
  siRNA target sequence for ADAM15 (NM_003815.2,2105-2123).
ctcagcctcctggtcttat

SEQ ID NO: 154685 - DNA, 19 bp, Homo sapiens
  siRNA target sequence for ADAM15 (NM_003815.2,2267-2285).
ctggcacgaggcactaagt

SEQ ID NO: 154686 - DNA, 19 bp, Homo sapiens
  siRNA target sequence for ADAM17 (NM_003183.3,258-276).
ctcgagaagcttgattctt

SEQ ID NO: 154687 - DNA, 19 bp, Homo sapiens
  siRNA target sequence for ADAM17 (NM_003183.3,278-296).
gctctcagactacgatatt

SEQ ID NO: 154688 - DNA, 19 bp, Homo sapiens
  siRNA target sequence for ADAM17 (NM_003183.3,291-309).
gatattctctctttatcta

SEQ ID NO: 154689 - DNA, 19 bp, Homo sapiens
  siRNA target sequence for ADAM17 (NM_003183.3,315-333).
cagcagcattcggtaagaa

SEQ ID NO: 154690 - DNA, 19 bp, Homo sapiens
  siRNA target sequence for ADAM17 (NM_003183.3,317-335).
gcagcattcggtaagaaaa

SEQ ID NO: 154691 - DNA, 19 bp, Homo sapiens
  siRNA target sequence for ADAM17 (NM_003183.3,318-336).
cagcattcggtaagaaaaa

SEQ ID NO: 154692 - DNA, 19 bp, Homo sapiens
  siRNA target sequence for ADAM17 (NM_003183.3,347-365).
gacttcaacacatgtagaa

SEQ ID NO: 154693 - DNA, 19 bp, Homo sapiens
  siRNA target sequence for ADAM17 (NM_003183.3,360-378).
gtagaaacactactaactt

SEQ ID NO: 154694 - DNA, 19 bp, Homo sapiens
  siRNA target sequence for ADAM17 (NM_003183.3,415-433).
catcaagtactgaacgttt

SEQ ID NO: 154695 - DNA, 19 bp, Homo sapiens
  siRNA target sequence for ADAM17 (NM_003183.3,421-439).
gtactgaacgtttttcaca

SEQ ID NO: 154696 - DNA, 19 bp, Homo sapiens
  siRNA target sequence for ADAM17 (NM_003183.3,424-442).
ctgaacgtttttcacaaaa

SEQ ID NO: 154697 - DNA, 19 bp, Homo sapiens
  siRNA target sequence for ADAM17 (NM_003183.3,542-560).
ggttctagcccacataaga

SEQ ID NO: 154698 - DNA, 19 bp, Homo sapiens
  siRNA target sequence for ADAM17 (NM_003183.3,561-579).
gatgatgatgttataatca

SEQ ID NO: 154699 - DNA, 19 bp, Homo sapiens
  siRNA target sequence for ADAM17 (NM_003183.3,570-588).
gttataatcagaatcaaca

SEQ ID NO: 154700 - DNA, 19 bp, Homo sapiens
  siRNA target sequence for ADAM17 (NM_003183.3,614-632).
gccactttggagatttgtt

SEQ ID NO: 154701 - DNA, 19 bp, Homo sapiens
  siRNA target sequence for ADAM17 (NM_003183.3,615-633).
ccactttggagatttgtta

SEQ ID NO: 154702 - DNA, 19 bp, Homo sapiens
  siRNA target sequence for ADAM17 (NM_003183.3,630-648).
gttaatgataccaaagaca

SEQ ID NO: 154703 - DNA, 19 bp, Homo sapiens
  siRNA target sequence for ADAM17 (NM_003183.3,706-724).
caaaagtgtgtggttattt

SEQ ID NO: 154704 - DNA, 19 bp, Homo sapiens
  siRNA target sequence for ADAM17 (NM_003183.3,718-736).
gttatttaaaagtggataa

SEQ ID NO: 154705 - DNA, 19 bp, Homo sapiens
  siRNA target sequence for ADAM17 (NM_003183.3,746-764).
gctcccaaaagggttagta

SEQ ID NO: 154706 - DNA, 19 bp, Homo sapiens
  siRNA target sequence for ADAM17 (NM_003183.3,789-807).
gttcatcgagtgaaaagaa

SEQ ID NO: 154707 - DNA, 19 bp, Homo sapiens
  siRNA target sequence for ADAM17 (NM_003183.3,824-842).
catgaagaacacgtgtaaa

SEQ ID NO: 154708 - DNA, 19 bp, Homo sapiens
  siRNA target sequence for ADAM17 (NM_003183.3,827-845).
gaagaacacgtgtaaatta

SEQ ID NO: 154709 - DNA, 19 bp, Homo sapiens
  siRNA target sequence for ADAM17 (NM_003183.3,855-873).
gcagatcatcgcttctaca

SEQ ID NO: 154710 - DNA, 19 bp, Homo sapiens
  siRNA target sequence for ADAM17 (NM_003183.3,858-876).
gatcatcgcttctacagat

SEQ ID NO: 154711 - DNA, 19 bp, Homo sapiens
  siRNA target sequence for ADAM17 (NM_003183.3,894-912).
gagagtacaactacaaatt

SEQ ID NO: 154712 - DNA, 19 bp, Homo sapiens
  siRNA target sequence for ADAM17 (NM_003183.3,932-950).
cagagttgatgacatctat

SEQ ID NO: 154713 - DNA, 19 bp, Homo sapiens
  siRNA target sequence for ADAM17 (NM_003183.3,942-960).
gacatctatcggaacactt

SEQ ID NO: 154714 - DNA, 19 bp, Homo sapiens
  siRNA target sequence for ADAM17 (NM_003183.3,953-971).
gaacacttcatgggataat

SEQ ID NO: 154715 - DNA, 19 bp, Homo sapiens
  siRNA target sequence for ADAM17 (NM_003183.3,975-993).
ggttttaaaggctatggaa

SEQ ID NO: 154716 - DNA, 19 bp, Homo sapiens
  siRNA target sequence for ADAM17 (NM_003183.3,985-1003).
gctatggaatacagataga

SEQ ID NO: 154717 - DNA, 19 bp, Homo sapiens
  siRNA target sequence for ADAM17 (NM_003183.3,1002-1020).
gagcagattcgcattctca

SEQ ID NO: 154718 - DNA, 19 bp, Homo sapiens
  siRNA target sequence for ADAM17 (NM_003183.3,1115-1133).
gctagagcaatttagcttt

SEQ ID NO: 154719 - DNA, 19 bp, Homo sapiens
  siRNA target sequence for ADAM17 (NM_003183.3,1119-1137).
gagcaatttagctttgata

SEQ ID NO: 154720 - DNA, 19 bp, Homo sapiens
  siRNA target sequence for ADAM17 (NM_003183.3,1199-1217).
gggaactcttggattagct

SEQ ID NO: 154721 - DNA, 19 bp, Homo sapiens
  siRNA target sequence for ADAM17 (NM_003183.3,1200-1218).
ggaactcttggattagctt

SEQ ID NO: 154722 - DNA, 19 bp, Homo sapiens
  siRNA target sequence for ADAM17 (NM_003183.3,1311-1329).
ggtttgacgagcacaaaga

SEQ ID NO: 154723 - DNA, 19 bp, Homo sapiens
  siRNA target sequence for ADAM17 (NM_003183.3,1312-1330).
gtttgacgagcacaaagaa

SEQ ID NO: 154724 - DNA, 19 bp, Homo sapiens
  siRNA target sequence for ADAM17 (NM_003183.3,1415-1433).
ggatggtctagcagaatgt

SEQ ID NO: 154725 - DNA, 19 bp, Homo sapiens
  siRNA target sequence for ADAM17 (NM_003183.3,1445-1463).
ggaccagggagggaaatat

SEQ ID NO: 154726 - DNA, 19 bp, Homo sapiens
  siRNA target sequence for ADAM17 (NM_003183.3,1453-1471).
gagggaaatatgtcatgta

SEQ ID NO: 154727 - DNA, 19 bp, Homo sapiens
  siRNA target sequence for ADAM17 (NM_003183.3,1486-1504).
gtggcgatcacgagaacaa

SEQ ID NO: 154728 - DNA, 19 bp, Homo sapiens
  siRNA target sequence for ADAM17 (NM_003183.3,1488-1506).
ggcgatcacgagaacaata

SEQ ID NO: 154729 - DNA, 19 bp, Homo sapiens
  siRNA target sequence for ADAM17 (NM_003183.3,1489-1507).
gcgatcacgagaacaataa

SEQ ID NO: 154730 - DNA, 19 bp, Homo sapiens
  siRNA target sequence for ADAM17 (NM_003183.3,1491-1509).
gatcacgagaacaataaga

SEQ ID NO: 154731 - DNA, 19 bp, Homo sapiens
  siRNA target sequence for ADAM17 (NM_003183.3,1494-1512).
cacgagaacaataagatgt

SEQ ID NO: 154732 - DNA, 19 bp, Homo sapiens
  siRNA target sequence for ADAM17 (NM_003183.3,1522-1540).
gcagtaaacaatcaatcta

SEQ ID NO: 154733 - DNA, 19 bp, Homo sapiens
  siRNA target sequence for ADAM17 (NM_003183.3,1555-1573).
gtaaggcccaggagtgttt

SEQ ID NO: 154734 - DNA, 19 bp, Homo sapiens
  siRNA target sequence for ADAM17 (NM_003183.3,1578-1596).
gaacgcagcaataaagttt

SEQ ID NO: 154735 - DNA, 19 bp, Homo sapiens
  siRNA target sequence for ADAM17 (NM_003183.3,1630-1648).
gtgatcctggcatcatgta

SEQ ID NO: 154736 - DNA, 19 bp, Homo sapiens
  siRNA target sequence for ADAM17 (NM_003183.3,1763-1781).
gtgccaggaggcgattaat

SEQ ID NO: 154737 - DNA, 19 bp, Homo sapiens
  siRNA target sequence for ADAM17 (NM_003183.3,1766-1784).
ccaggaggcgattaatgct

SEQ ID NO: 154738 - DNA, 19 bp, Homo sapiens
  siRNA target sequence for ADAM17 (NM_003183.3,1799-1817).
gtcctactgcacaggtaat

SEQ ID NO: 154739 - DNA, 19 bp, Homo sapiens
  siRNA target sequence for ADAM17 (NM_003183.3,1882-1900).
gtaaggatgggaaatgcat

SEQ ID NO: 154740 - DNA, 19 bp, Homo sapiens
  siRNA target sequence for ADAM17 (NM_003183.3,2003-2021).
ctatgtcgatgctgaacaa

SEQ ID NO: 154741 - DNA, 19 bp, Homo sapiens
  siRNA target sequence for ADAM17 (NM_003183.3,2007-2025).
gtcgatgctgaacaaaaga

SEQ ID NO: 154742 - DNA, 19 bp, Homo sapiens
  siRNA target sequence for ADAM17 (NM_003183.3,2013-2031).
gctgaacaaaagaacttat

SEQ ID NO: 154743 - DNA, 19 bp, Homo sapiens
  siRNA target sequence for ADAM17 (NM_003183.3,2193-2211).
ctggttttctccttgatat

SEQ ID NO: 154744 - DNA, 19 bp, Homo sapiens
  siRNA target sequence for ADAM17 (NM_003183.3,2293-2311).
ccagtaacgtcgaaatgct

SEQ ID NO: 154745 - DNA, 19 bp, Homo sapiens
  siRNA target sequence for ADAM17 (NM_003183.3,2329-2347).
catcggttcgcattatcaa

SEQ ID NO: 154746 - DNA, 19 bp, Homo sapiens
  siRNA target sequence for ADAM17 (NM_003183.3,2481-2499).
gacgaggatgggtttgaga

SEQ ID NO: 154747 - DNA, 19 bp, Homo sapiens
  siRNA target sequence for ADAM17 (NM_003183.3,2524-2542).
cagctgccaagtcatttga

SEQ ID NO: 154748 - DNA, 19 bp, Homo sapiens
  siRNA target sequence for ADAM17 (NM_003183.3,2574-2592).
gaaaaggctgcctccttta

SEQ ID NO: 154749 - DNA, 19 bp, Homo sapiens
  siRNA target sequence for ADAM17 (NM_021832.1,473-491).
gaaagcgagtacactgtaa

SEQ ID NO: 154750 - DNA, 19 bp, Homo sapiens
  siRNA target sequence for ADAM19 (NM_023038.2,169-187).
ctgcagcatgaacttatca

SEQ ID NO: 154751 - DNA, 19 bp, Homo sapiens
  siRNA target sequence for ADAM19 (NM_023038.2,212-230).
gccccgtgagagaaaagca

SEQ ID NO: 154752 - DNA, 19 bp, Homo sapiens
  siRNA target sequence for ADAM19 (NM_023038.2,213-231).
ccccgtgagagaaaagcat

SEQ ID NO: 154753 - DNA, 19 bp, Homo sapiens
  siRNA target sequence for ADAM19 (NM_023038.2,359-377).
ccaccacacggaaattgga

SEQ ID NO: 154754 - DNA, 19 bp, Homo sapiens
  siRNA target sequence for ADAM19 (NM_023038.2,435-453).
cagcacttgccgaggaatt

SEQ ID NO: 154755 - DNA, 19 bp, Homo sapiens
  siRNA target sequence for ADAM19 (NM_023038.2,438-456).
cacttgccgaggaattaga

SEQ ID NO: 154756 - DNA, 19 bp, Homo sapiens
  siRNA target sequence for ADAM19 (NM_023038.2,512-530).
gcaagggccaacaccttat

SEQ ID NO: 154757 - DNA, 19 bp, Homo sapiens
  siRNA target sequence for ADAM19 (NM_023038.2,513-531).
caagggccaacaccttatt

SEQ ID NO: 154758 - DNA, 19 bp, Homo sapiens
  siRNA target sequence for ADAM19 (NM_023038.2,517-535).
ggccaacaccttatttaca

SEQ ID NO: 154759 - DNA, 19 bp, Homo sapiens
  siRNA target sequence for ADAM19 (NM_023038.2,519-537).
ccaacaccttatttacaga

SEQ ID NO: 154760 - DNA, 19 bp, Homo sapiens
  siRNA target sequence for ADAM19 (NM_023038.2,600-618).
ggactgggctcttcagttt

SEQ ID NO: 154761 - DNA, 19 bp, Homo sapiens
  siRNA target sequence for ADAM19 (NM_023038.2,636-654).
gcgacctcgcaggatgaaa

SEQ ID NO: 154762 - DNA, 19 bp, Homo sapiens
  siRNA target sequence for ADAM19 (NM_023038.2,637-655).
cgacctcgcaggatgaaaa

SEQ ID NO: 154763 - DNA, 19 bp, Homo sapiens
  siRNA target sequence for ADAM19 (NM_023038.2,661-679).
gatttaaactccatgaagt

SEQ ID NO: 154764 - DNA, 19 bp, Homo sapiens
  siRNA target sequence for ADAM19 (NM_023038.2,699-717).
ggctgattatttagagttt

SEQ ID NO: 154765 - DNA, 19 bp, Homo sapiens
  siRNA target sequence for ADAM19 (NM_023038.2,703-721).
gattatttagagtttcaga

SEQ ID NO: 154766 - DNA, 19 bp, Homo sapiens
  siRNA target sequence for ADAM19 (NM_023038.2,765-783).
gatcgccaactatgttgat

SEQ ID NO: 154767 - DNA, 19 bp, Homo sapiens
  siRNA target sequence for ADAM19 (NM_023038.2,843-861).
cgggaacatgtgtgaagtt

SEQ ID NO: 154768 - DNA, 19 bp, Homo sapiens
  siRNA target sequence for ADAM19 (NM_023038.2,846-864).
gaacatgtgtgaagtttca

SEQ ID NO: 154769 - DNA, 19 bp, Homo sapiens
  siRNA target sequence for ADAM19 (NM_023038.2,920-938).
cccagaagtaccatgacaa

SEQ ID NO: 154770 - DNA, 19 bp, Homo sapiens
  siRNA target sequence for ADAM19 (NM_023038.2,930-948).
ccatgacaacgcccaatta

SEQ ID NO: 154771 - DNA, 19 bp, Homo sapiens
  siRNA target sequence for ADAM19 (NM_023038.2,934-952).
gacaacgcccaattaatca

SEQ ID NO: 154772 - DNA, 19 bp, Homo sapiens
  siRNA target sequence for ADAM19 (NM_023038.2,1185-1203).
ctttcccaaagtgttcaat

SEQ ID NO: 154773 - DNA, 19 bp, Homo sapiens
  siRNA target sequence for ADAM19 (NM_023038.2,1525-1543).
cactgccctaccaacttct

SEQ ID NO: 154774 - DNA, 19 bp, Homo sapiens
  siRNA target sequence for ADAM19 (NM_023038.2,1732-1750).
cacaggaagtgcaacatga

SEQ ID NO: 154775 - DNA, 19 bp, Homo sapiens
  siRNA target sequence for ADAM19 (NM_023038.2,1819-1837).
cccattgacaccactatca

SEQ ID NO: 154776 - DNA, 19 bp, Homo sapiens
  siRNA target sequence for ADAM19 (NM_023038.2,1820-1838).
ccattgacaccactatcat

SEQ ID NO: 154777 - DNA, 19 bp, Homo sapiens
  siRNA target sequence for ADAM19 (NM_023038.2,1941-1959).
gtgtggctacaaccatatt

SEQ ID NO: 154778 - DNA, 19 bp, Homo sapiens
  siRNA target sequence for ADAM19 (NM_023038.2,1979-1997).
ggaacacctccttctttga

SEQ ID NO: 154779 - DNA, 19 bp, Homo sapiens
  siRNA target sequence for ADAM19 (NM_023038.2,1980-1998).
gaacacctccttctttgaa

SEQ ID NO: 154780 - DNA, 19 bp, Homo sapiens
  siRNA target sequence for ADAM19 (NM_023038.2,2027-2045).
gccatggggtctgtaacaa

SEQ ID NO: 154781 - DNA, 19 bp, Homo sapiens
  siRNA target sequence for ADAM19 (NM_023038.2,2192-2210).
cggtcctcatgctgatgta

SEQ ID NO: 154782 - DNA, 19 bp, Homo sapiens
  siRNA target sequence for ADAM19 (NM_023038.2,2220-2238).
cagacagaacaacaaacta

SEQ ID NO: 154783 - DNA, 19 bp, Homo sapiens
  siRNA target sequence for ADAM19 (NM_023038.2,2267-2285).
ccaagctgaggcaacagtt

SEQ ID NO: 154784 - DNA, 19 bp, Homo sapiens
  siRNA target sequence for ADAM19 (NM_023038.2,2291-2309).
gtcccttcagggtttctca

SEQ ID NO: 154785 - DNA, 19 bp, Homo sapiens
  siRNA target sequence for ADAM19 (NM_023038.2,2324-2342).
gtcatgccaacccaacttt

SEQ ID NO: 154786 - DNA, 19 bp, Homo sapiens
  siRNA target sequence for ADAM19 (NM_023038.2,2363-2381).
gcaagcgaaaggtgatcaa

SEQ ID NO: 154787 - DNA, 19 bp, Homo sapiens
  siRNA target sequence for ADAM19 (NM_023038.2,2575-2593).
gcaccaaattgcatcgttt

SEQ ID NO: 154788 - DNA, 19 bp, Homo sapiens
  siRNA target sequence for ADAM19 (NM_023038.2,2882-2900).
gggcaaaacattcatgttt

SEQ ID NO: 154789 - DNA, 19 bp, Homo sapiens
  siRNA target sequence for ADAM19 (NM_033274.1,2798-2816).
gggatgattagctcgaaaa

SEQ ID NO: 154790 - DNA, 19 bp, Homo sapiens
  siRNA target sequence for ADAM19 (NM_033274.1,2799-2817).
ggatgattagctcgaaaat

SEQ ID NO: 154791 - DNA, 19 bp, Homo sapiens
  siRNA target sequence for ADAM20 (NM_003814.3,227-245).
ctctggtttgggatgtttt

SEQ ID NO: 154792 - DNA, 19 bp, Homo sapiens
  siRNA target sequence for ADAM20 (NM_003814.3,381-399).
ggggacagagatacattgt

SEQ ID NO: 154793 - DNA, 19 bp, Homo sapiens
  siRNA target sequence for ADAM20 (NM_003814.3,408-426).
gggtaaataagctgttgtt

SEQ ID NO: 154794 - DNA, 19 bp, Homo sapiens
  siRNA target sequence for ADAM20 (NM_003814.3,568-586).
gggctttcttggaatgcta

SEQ ID NO: 154795 - DNA, 19 bp, Homo sapiens
  siRNA target sequence for ADAM20 (NM_003814.3,658-676).
gatagacagtgatgataca

SEQ ID NO: 154796 - DNA, 19 bp, Homo sapiens
  siRNA target sequence for ADAM20 (NM_003814.3,733-751).
gttgcaattgtcatataat

SEQ ID NO: 154797 - DNA, 19 bp, Homo sapiens
  siRNA target sequence for ADAM20 (NM_003814.3,787-805).
gacccatcagcggtttgtt

SEQ ID NO: 154798 - DNA, 19 bp, Homo sapiens
  siRNA target sequence for ADAM20 (NM_003814.3,811-829).
ggtagtggtcgtggataat

SEQ ID NO: 154799 - DNA, 19 bp, Homo sapiens
  siRNA target sequence for ADAM20 (NM_003814.3,812-830).
gtagtggtcgtggataata

SEQ ID NO: 154800 - DNA, 19 bp, Homo sapiens
  siRNA target sequence for ADAM20 (NM_003814.3,815-833).
gtggtcgtggataatatta

SEQ ID NO: 154801 - DNA, 19 bp, Homo sapiens
  siRNA target sequence for ADAM20 (NM_003814.3,817-835).
ggtcgtggataatattaga

SEQ ID NO: 154802 - DNA, 19 bp, Homo sapiens
  siRNA target sequence for ADAM20 (NM_003814.3,818-836).
gtcgtggataatattagat

SEQ ID NO: 154803 - DNA, 19 bp, Homo sapiens
  siRNA target sequence for ADAM20 (NM_003814.3,820-838).
cgtggataatattagatat

SEQ ID NO: 154804 - DNA, 19 bp, Homo sapiens
  siRNA target sequence for ADAM20 (NM_003814.3,823-841).
ggataatattagatatctt

SEQ ID NO: 154805 - DNA, 19 bp, Homo sapiens
  siRNA target sequence for ADAM20 (NM_003814.3,824-842).
gataatattagatatcttt

SEQ ID NO: 154806 - DNA, 19 bp, Homo sapiens
  siRNA target sequence for ADAM20 (NM_003814.3,871-889).
gcatgaagtatttaacgtt

SEQ ID NO: 154807 - DNA, 19 bp, Homo sapiens
  siRNA target sequence for ADAM20 (NM_003814.3,917-935).
cctttggaggttgatgtaa

SEQ ID NO: 154808 - DNA, 19 bp, Homo sapiens
  siRNA target sequence for ADAM20 (NM_003814.3,1007-1025).
gaggacttttctatttgga

SEQ ID NO: 154809 - DNA, 19 bp, Homo sapiens
  siRNA target sequence for ADAM20 (NM_003814.3,1036-1054).
ccttaataatcgactacaa

SEQ ID NO: 154810 - DNA, 19 bp, Homo sapiens
  siRNA target sequence for ADAM20 (NM_003814.3,1099-1117).
gcttggtgttgcctatgtt

SEQ ID NO: 154811 - DNA, 19 bp, Homo sapiens
  siRNA target sequence for ADAM20 (NM_003814.3,1121-1139).
ggaatatgccagaatcctt

SEQ ID NO: 154812 - DNA, 19 bp, Homo sapiens
  siRNA target sequence for ADAM20 (NM_003814.3,1168-1186).
caacaggttggtcgttttt

SEQ ID NO: 154813 - DNA, 19 bp, Homo sapiens
  siRNA target sequence for ADAM20 (NM_003814.3,1171-1189).
caggttggtcgtttttgca

SEQ ID NO: 154814 - DNA, 19 bp, Homo sapiens
  siRNA target sequence for ADAM20 (NM_003814.3,1173-1191).
ggttggtcgtttttgcaat

SEQ ID NO: 154815 - DNA, 19 bp, Homo sapiens
  siRNA target sequence for ADAM20 (NM_003814.3,1174-1192).
gttggtcgtttttgcaatt

SEQ ID NO: 154816 - DNA, 19 bp, Homo sapiens
  siRNA target sequence for ADAM20 (NM_003814.3,1201-1219).
ccacgagcttggtcataat

SEQ ID NO: 154817 - DNA, 19 bp, Homo sapiens
  siRNA target sequence for ADAM20 (NM_003814.3,1287-1305).
gaaaggtgacaactaaatt

SEQ ID NO: 154818 - DNA, 19 bp, Homo sapiens
  siRNA target sequence for ADAM20 (NM_003814.3,1292-1310).
gtgacaactaaatttagca

SEQ ID NO: 154819 - DNA, 19 bp, Homo sapiens
  siRNA target sequence for ADAM20 (NM_003814.3,1347-1365).
gtagtggattatgtattca

SEQ ID NO: 154820 - DNA, 19 bp, Homo sapiens
  siRNA target sequence for ADAM20 (NM_003814.3,1371-1389).
ctccatatccagggaatat

SEQ ID NO: 154821 - DNA, 19 bp, Homo sapiens
  siRNA target sequence for ADAM20 (NM_003814.3,1399-1417).
gaagtactgtgggaatcta

SEQ ID NO: 154822 - DNA, 19 bp, Homo sapiens
  siRNA target sequence for ADAM20 (NM_003814.3,1410-1428).
ggaatctagtggttgaaga

SEQ ID NO: 154823 - DNA, 19 bp, Homo sapiens
  siRNA target sequence for ADAM20 (NM_003814.3,1486-1504).
gttaaactgtactctacat

SEQ ID NO: 154824 - DNA, 19 bp, Homo sapiens
  siRNA target sequence for ADAM20 (NM_003814.3,1556-1574).
ccatcaggaactttatgta

SEQ ID NO: 154825 - DNA, 19 bp, Homo sapiens
  siRNA target sequence for ADAM20 (NM_003814.3,1698-1716).
cgtgtaataaccatgatat

SEQ ID NO: 154826 - DNA, 19 bp, Homo sapiens
  siRNA target sequence for ADAM20 (NM_003814.3,1712-1730).
gatatacaatgtaaagaga

SEQ ID NO: 154827 - DNA, 19 bp, Homo sapiens
  siRNA target sequence for ADAM20 (NM_003814.3,1801-1819).
cggtcactgtggtattgta

SEQ ID NO: 154828 - DNA, 19 bp, Homo sapiens
  siRNA target sequence for ADAM20 (NM_003814.3,1811-1829).
ggtattgtaggcacaacat

SEQ ID NO: 154829 - DNA, 19 bp, Homo sapiens
  siRNA target sequence for ADAM20 (NM_003814.3,1812-1830).
gtattgtaggcacaacata

SEQ ID NO: 154830 - DNA, 19 bp, Homo sapiens
  siRNA target sequence for ADAM20 (NM_003814.3,1839-1857).
gttggacccctgatatcat

SEQ ID NO: 154831 - DNA, 19 bp, Homo sapiens
  siRNA target sequence for ADAM20 (NM_003814.3,1866-1884).
gggttcagtgtgaaaatgt

SEQ ID NO: 154832 - DNA, 19 bp, Homo sapiens
  siRNA target sequence for ADAM20 (NM_003814.3,1887-1905).
gagtaattcccaatctgat

SEQ ID NO: 154833 - DNA, 19 bp, Homo sapiens
  siRNA target sequence for ADAM20 (NM_003814.3,1953-1971).
ggggcactgattatcattt

SEQ ID NO: 154834 - DNA, 19 bp, Homo sapiens
  siRNA target sequence for ADAM20 (NM_003814.3,1974-1992).
ggatggctatacctgatat

SEQ ID NO: 154835 - DNA, 19 bp, Homo sapiens
  siRNA target sequence for ADAM20 (NM_003814.3,1978-1996).
ggctatacctgatattggt

SEQ ID NO: 154836 - DNA, 19 bp, Homo sapiens
  siRNA target sequence for ADAM20 (NM_003814.3,2000-2018).
gtgaaagatggcacagtat

SEQ ID NO: 154837 - DNA, 19 bp, Homo sapiens
  siRNA target sequence for ADAM20 (NM_003814.3,2002-2020).
gaaagatggcacagtatgt

SEQ ID NO: 154838 - DNA, 19 bp, Homo sapiens
  siRNA target sequence for ADAM20 (NM_003814.3,2013-2031).
cagtatgtggtccagaaaa

SEQ ID NO: 154839 - DNA, 19 bp, Homo sapiens
  siRNA target sequence for ADAM20 (NM_003814.3,2015-2033).
gtatgtggtccagaaaaga

SEQ ID NO: 154840 - DNA, 19 bp, Homo sapiens
  siRNA target sequence for ADAM20 (NM_003814.3,2047-2065).
gaagtgtgccagtatggtt

SEQ ID NO: 154841 - DNA, 19 bp, Homo sapiens
  siRNA target sequence for ADAM20 (NM_003814.3,2052-2070).
gtgccagtatggttcatct

SEQ ID NO: 154842 - DNA, 19 bp, Homo sapiens
  siRNA target sequence for ADAM20 (NM_003814.3,2201-2219).
ggcccacctcctaagaaca

SEQ ID NO: 154843 - DNA, 19 bp, Homo sapiens
  siRNA target sequence for ADAM20 (NM_003814.3,2269-2287).
gtgccttcttcctttggtt

SEQ ID NO: 154844 - DNA, 19 bp, Homo sapiens
  siRNA target sequence for ADAM21 (NM_003813.2,13-31).
gggaccctcgtgtacatca

SEQ ID NO: 154845 - DNA, 19 bp, Homo sapiens
  siRNA target sequence for ADAM21 (NM_003813.2,55-73).
cttggggtatttttgtcta

SEQ ID NO: 154846 - DNA, 19 bp, Homo sapiens
  siRNA target sequence for ADAM21 (NM_003813.2,206-224).
gccagaaacacgttgttca

SEQ ID NO: 154847 - DNA, 19 bp, Homo sapiens
  siRNA target sequence for ADAM21 (NM_003813.2,207-225).
ccagaaacacgttgttcat

SEQ ID NO: 154848 - DNA, 19 bp, Homo sapiens
  siRNA target sequence for ADAM21 (NM_003813.2,208-226).
cagaaacacgttgttcata

SEQ ID NO: 154849 - DNA, 19 bp, Homo sapiens
  siRNA target sequence for ADAM21 (NM_003813.2,315-333).
cccagatgactgttactat

SEQ ID NO: 154850 - DNA, 19 bp, Homo sapiens
  siRNA target sequence for ADAM21 (NM_003813.2,317-335).
cagatgactgttactatca

SEQ ID NO: 154851 - DNA, 19 bp, Homo sapiens
  siRNA target sequence for ADAM21 (NM_003813.2,389-407).
ggggctttcgaggagtatt

SEQ ID NO: 154852 - DNA, 19 bp, Homo sapiens
  siRNA target sequence for ADAM21 (NM_003813.2,390-408).
gggctttcgaggagtatta

SEQ ID NO: 154853 - DNA, 19 bp, Homo sapiens
  siRNA target sequence for ADAM21 (NM_003813.2,391-409).
ggctttcgaggagtattaa

SEQ ID NO: 154854 - DNA, 19 bp, Homo sapiens
  siRNA target sequence for ADAM21 (NM_003813.2,392-410).
gctttcgaggagtattaaa

SEQ ID NO: 154855 - DNA, 19 bp, Homo sapiens
  siRNA target sequence for ADAM21 (NM_003813.2,420-438).
cctcacttatgaaattgaa

SEQ ID NO: 154856 - DNA, 19 bp, Homo sapiens
  siRNA target sequence for ADAM21 (NM_003813.2,541-559).
gcacgccaacagttggaat

SEQ ID NO: 154857 - DNA, 19 bp, Homo sapiens
  siRNA target sequence for ADAM21 (NM_003813.2,576-594).
ctcagctctggaaccaaaa

SEQ ID NO: 154858 - DNA, 19 bp, Homo sapiens
  siRNA target sequence for ADAM21 (NM_003813.2,609-627).
gtggactcatgcatggttt

SEQ ID NO: 154859 - DNA, 19 bp, Homo sapiens
  siRNA target sequence for ADAM21 (NM_003813.2,643-661).
gtggtgaaccatgatttct

SEQ ID NO: 154860 - DNA, 19 bp, Homo sapiens
  siRNA target sequence for ADAM21 (NM_003813.2,690-708).
ggtgcaagaggatgtattt

SEQ ID NO: 154861 - DNA, 19 bp, Homo sapiens
  siRNA target sequence for ADAM21 (NM_003813.2,720-738).
catagtggattccatgtat

SEQ ID NO: 154862 - DNA, 19 bp, Homo sapiens
  siRNA target sequence for ADAM21 (NM_003813.2,748-766).
ggtacttacataattttga

SEQ ID NO: 154863 - DNA, 19 bp, Homo sapiens
  siRNA target sequence for ADAM21 (NM_003813.2,749-767).
gtacttacataattttgat

SEQ ID NO: 154864 - DNA, 19 bp, Homo sapiens
  siRNA target sequence for ADAM21 (NM_003813.2,803-821).
caatgacaagcatagaaca

SEQ ID NO: 154865 - DNA, 19 bp, Homo sapiens
  siRNA target sequence for ADAM21 (NM_003813.2,817-835).
gaacaggtcctgaacgatt

SEQ ID NO: 154866 - DNA, 19 bp, Homo sapiens
  siRNA target sequence for ADAM21 (NM_003813.2,820-838).
caggtcctgaacgatttct

SEQ ID NO: 154867 - DNA, 19 bp, Homo sapiens
  siRNA target sequence for ADAM21 (NM_003813.2,822-840).
ggtcctgaacgatttctct

SEQ ID NO: 154868 - DNA, 19 bp, Homo sapiens
  siRNA target sequence for ADAM21 (NM_003813.2,831-849).
cgatttctctcaatggaaa

SEQ ID NO: 154869 - DNA, 19 bp, Homo sapiens
  siRNA target sequence for ADAM21 (NM_003813.2,877-895).
gatgctgcacatatgttca

SEQ ID NO: 154870 - DNA, 19 bp, Homo sapiens
  siRNA target sequence for ADAM21 (NM_003813.2,883-901).
gcacatatgttcataaaaa

SEQ ID NO: 154871 - DNA, 19 bp, Homo sapiens
  siRNA target sequence for ADAM21 (NM_003813.2,894-912).
cataaaaaattcacttata

SEQ ID NO: 154872 - DNA, 19 bp, Homo sapiens
  siRNA target sequence for ADAM21 (NM_003813.2,961-979).
gattgtggagttgataatt

SEQ ID NO: 154873 - DNA, 19 bp, Homo sapiens
  siRNA target sequence for ADAM21 (NM_003813.2,1011-1029).
cactgtggcccatgagtta

SEQ ID NO: 154874 - DNA, 19 bp, Homo sapiens
  siRNA target sequence for ADAM21 (NM_003813.2,1043-1061).
gtatgcagcatgatgaaga

SEQ ID NO: 154875 - DNA, 19 bp, Homo sapiens
  siRNA target sequence for ADAM21 (NM_003813.2,1084-1102).
ggttgcatcatgaatactt

SEQ ID NO: 154876 - DNA, 19 bp, Homo sapiens
  siRNA target sequence for ADAM21 (NM_003813.2,1106-1124).
gagtgccagcagagaaatt

SEQ ID NO: 154877 - DNA, 19 bp, Homo sapiens
  siRNA target sequence for ADAM21 (NM_003813.2,1136-1154).
gttacgctgattttatgaa

SEQ ID NO: 154878 - DNA, 19 bp, Homo sapiens
  siRNA target sequence for ADAM21 (NM_003813.2,1161-1179).
cttaaaccagggatcatgt

SEQ ID NO: 154879 - DNA, 19 bp, Homo sapiens
  siRNA target sequence for ADAM21 (NM_003813.2,1200-1218).
gggggaaatctttatgcta

SEQ ID NO: 154880 - DNA, 19 bp, Homo sapiens
  siRNA target sequence for ADAM21 (NM_003813.2,1303-1321).
ctgttgaactgcactctaa

SEQ ID NO: 154881 - DNA, 19 bp, Homo sapiens
  siRNA target sequence for ADAM21 (NM_003813.2,1444-1462).
catcagtgtccagaagata

SEQ ID NO: 154882 - DNA, 19 bp, Homo sapiens
  siRNA target sequence for ADAM21 (NM_003813.2,1449-1467).
gtgtccagaagatagatat

SEQ ID NO: 154883 - DNA, 19 bp, Homo sapiens
  siRNA target sequence for ADAM21 (NM_003813.2,1451-1469).
gtccagaagatagatatgt

SEQ ID NO: 154884 - DNA, 19 bp, Homo sapiens
  siRNA target sequence for ADAM21 (NM_003813.2,1494-1512).
cagtgcctactgctatcaa

SEQ ID NO: 154885 - DNA, 19 bp, Homo sapiens
  siRNA target sequence for ADAM21 (NM_003813.2,1541-1559).
gcagggagatttttggtaa

SEQ ID NO: 154886 - DNA, 19 bp, Homo sapiens
  siRNA target sequence for ADAM21 (NM_003813.2,1542-1560).
cagggagatttttggtaaa

SEQ ID NO: 154887 - DNA, 19 bp, Homo sapiens
  siRNA target sequence for ADAM21 (NM_003813.2,1544-1562).
gggagatttttggtaaaga

SEQ ID NO: 154888 - DNA, 19 bp, Homo sapiens
  siRNA target sequence for ADAM21 (NM_003813.2,1574-1592).
catctcagaattgctataa

SEQ ID NO: 154889 - DNA, 19 bp, Homo sapiens
  siRNA target sequence for ADAM21 (NM_003813.2,1630-1648).
ggtataaatggcacaacat

SEQ ID NO: 154890 - DNA, 19 bp, Homo sapiens
  siRNA target sequence for ADAM21 (NM_003813.2,1631-1649).
gtataaatggcacaacata

SEQ ID NO: 154891 - DNA, 19 bp, Homo sapiens
  siRNA target sequence for ADAM21 (NM_003813.2,1646-1664).
catacctaaaatgtcatat

SEQ ID NO: 154892 - DNA, 19 bp, Homo sapiens
  siRNA target sequence for ADAM21 (NM_003813.2,1658-1676).
gtcatatctctgatgtctt

SEQ ID NO: 154893 - DNA, 19 bp, Homo sapiens
  siRNA target sequence for ADAM21 (NM_003813.2,1766-1784).
cctgctggggtattgacta

SEQ ID NO: 154894 - DNA, 19 bp, Homo sapiens
  siRNA target sequence for ADAM21 (NM_003813.2,1769-1787).
gctggggtattgactatca

SEQ ID NO: 154895 - DNA, 19 bp, Homo sapiens
  siRNA target sequence for ADAM21 (NM_003813.2,2033-2051).
caaagagaggagttttttt

SEQ ID NO: 154896 - DNA, 19 bp, Homo sapiens
  siRNA target sequence for ADAM21 (NM_003813.2,2053-2071).
ccgctgattgtgattcctt

SEQ ID NO: 154897 - DNA, 19 bp, Homo sapiens
  siRNA target sequence for ADAM21 (NM_003813.2,2099-2117).
ctgtcgggcttcttatgta

SEQ ID NO: 154898 - DNA, 19 bp, Homo sapiens
  siRNA target sequence for ADAM21 (NM_003813.2,2103-2121).
cgggcttcttatgtatcta

SEQ ID NO: 154899 - DNA, 19 bp, Homo sapiens
  siRNA target sequence for ADAM21 (NM_003813.2,2115-2133).
gtatctacgacaatgttct

SEQ ID NO: 154900 - DNA, 19 bp, Homo sapiens
  siRNA target sequence for ADAM28 (NM_014265.1,87-105).
gttgcagtaagtgctataa

SEQ ID NO: 154901 - DNA, 19 bp, Homo sapiens
  siRNA target sequence for ADAM28 (NM_014265.1,137-155).
ggtttatcctataagactt

SEQ ID NO: 154902 - DNA, 19 bp, Homo sapiens
  siRNA target sequence for ADAM28 (NM_014265.1,151-169).
gacttcatccactgcataa

SEQ ID NO: 154903 - DNA, 19 bp, Homo sapiens
  siRNA target sequence for ADAM28 (NM_014265.1,289-307).
caggctacacggaaacata

SEQ ID NO: 154904 - DNA, 19 bp, Homo sapiens
  siRNA target sequence for ADAM28 (NM_014265.1,291-309).
ggctacacggaaacatatt

SEQ ID NO: 154905 - DNA, 19 bp, Homo sapiens
  siRNA target sequence for ADAM28 (NM_014265.1,292-310).
gctacacggaaacatatta

SEQ ID NO: 154906 - DNA, 19 bp, Homo sapiens
  siRNA target sequence for ADAM28 (NM_014265.1,296-314).
cacggaaacatattataat

SEQ ID NO: 154907 - DNA, 19 bp, Homo sapiens
  siRNA target sequence for ADAM28 (NM_014265.1,342-360).
ccacaaattatggatgatt

SEQ ID NO: 154908 - DNA, 19 bp, Homo sapiens
  siRNA target sequence for ADAM28 (NM_014265.1,353-371).
ggatgattgttattatcaa

SEQ ID NO: 154909 - DNA, 19 bp, Homo sapiens
  siRNA target sequence for ADAM28 (NM_014265.1,402-420).
gctagcatcagcacatgta

SEQ ID NO: 154910 - DNA, 19 bp, Homo sapiens
  siRNA target sequence for ADAM28 (NM_014265.1,444-462).
cagggggatcaaagatact

SEQ ID NO: 154911 - DNA, 19 bp, Homo sapiens
  siRNA target sequence for ADAM28 (NM_014265.1,446-464).
gggggatcaaagatacttt

SEQ ID NO: 154912 - DNA, 19 bp, Homo sapiens
  siRNA target sequence for ADAM28 (NM_014265.1,448-466).
gggatcaaagatactttat

SEQ ID NO: 154913 - DNA, 19 bp, Homo sapiens
  siRNA target sequence for ADAM28 (NM_014265.1,501-519).
gagcatgcactcttcaagt

SEQ ID NO: 154914 - DNA, 19 bp, Homo sapiens
  siRNA target sequence for ADAM28 (NM_014265.1,503-521).
gcatgcactcttcaagtat

SEQ ID NO: 154915 - DNA, 19 bp, Homo sapiens
  siRNA target sequence for ADAM28 (NM_014265.1,504-522).
catgcactcttcaagtata

SEQ ID NO: 154916 - DNA, 19 bp, Homo sapiens
  siRNA target sequence for ADAM28 (NM_014265.1,515-533).
caagtataaccctgatgaa

SEQ ID NO: 154917 - DNA, 19 bp, Homo sapiens
  siRNA target sequence for ADAM28 (NM_014265.1,606-624).
cctgccaccaaactagtaa

SEQ ID NO: 154918 - DNA, 19 bp, Homo sapiens
  siRNA target sequence for ADAM28 (NM_014265.1,607-625).
ctgccaccaaactagtaaa

SEQ ID NO: 154919 - DNA, 19 bp, Homo sapiens
  siRNA target sequence for ADAM28 (NM_014265.1,642-660).
gttcaggaacatgagaaat

SEQ ID NO: 154920 - DNA, 19 bp, Homo sapiens
  siRNA target sequence for ADAM28 (NM_014265.1,681-699).
ctggataatggtgagttta

SEQ ID NO: 154921 - DNA, 19 bp, Homo sapiens
  siRNA target sequence for ADAM28 (NM_014265.1,730-748).
gaaagagggtatttgagat

SEQ ID NO: 154922 - DNA, 19 bp, Homo sapiens
  siRNA target sequence for ADAM28 (NM_014265.1,888-906).
gggagtgttctctcaagaa

SEQ ID NO: 154923 - DNA, 19 bp, Homo sapiens
  siRNA target sequence for ADAM28 (NM_014265.1,918-936).
gatattgctcagttaatca

SEQ ID NO: 154924 - DNA, 19 bp, Homo sapiens
  siRNA target sequence for ADAM28 (NM_014265.1,929-947).
gttaatcacagcaacagaa

SEQ ID NO: 154925 - DNA, 19 bp, Homo sapiens
  siRNA target sequence for ADAM28 (NM_014265.1,1022-1040).
ccacagcgataatcttctt

SEQ ID NO: 154926 - DNA, 19 bp, Homo sapiens
  siRNA target sequence for ADAM28 (NM_014265.1,1023-1041).
cacagcgataatcttctta

SEQ ID NO: 154927 - DNA, 19 bp, Homo sapiens
  siRNA target sequence for ADAM28 (NM_014265.1,1025-1043).
cagcgataatcttcttaga

SEQ ID NO: 154928 - DNA, 19 bp, Homo sapiens
  siRNA target sequence for ADAM28 (NM_014265.1,1027-1045).
gcgataatcttcttagagt

SEQ ID NO: 154929 - DNA, 19 bp, Homo sapiens
  siRNA target sequence for ADAM28 (NM_014265.1,1028-1046).
cgataatcttcttagagtt

SEQ ID NO: 154930 - DNA, 19 bp, Homo sapiens
  siRNA target sequence for ADAM28 (NM_014265.1,1072-1090).
gccacaactttggaatgtt

SEQ ID NO: 154931 - DNA, 19 bp, Homo sapiens
  siRNA target sequence for ADAM28 (NM_014265.1,1088-1106).
gtttcatgacgactattct

SEQ ID NO: 154932 - DNA, 19 bp, Homo sapiens
  siRNA target sequence for ADAM28 (NM_014265.1,1112-1130).
gtgtccttctacaatatgt

SEQ ID NO: 154933 - DNA, 19 bp, Homo sapiens
  siRNA target sequence for ADAM28 (NM_014265.1,1186-1204).
gtctcagctatgacaagtt

SEQ ID NO: 154934 - DNA, 19 bp, Homo sapiens
  siRNA target sequence for ADAM28 (NM_014265.1,1240-1258).
ctccattgcctacagatat

SEQ ID NO: 154935 - DNA, 19 bp, Homo sapiens
  siRNA target sequence for ADAM28 (NM_014265.1,1242-1260).
ccattgcctacagatatca

SEQ ID NO: 154936 - DNA, 19 bp, Homo sapiens
  siRNA target sequence for ADAM28 (NM_014265.1,1248-1266).
cctacagatatcatatcca

SEQ ID NO: 154937 - DNA, 19 bp, Homo sapiens
  siRNA target sequence for ADAM28 (NM_014265.1,1317-1335).
gggacatctgaggaatgta

SEQ ID NO: 154938 - DNA, 19 bp, Homo sapiens
  siRNA target sequence for ADAM28 (NM_014265.1,1353-1371).
gctaagacatgtaaaatca

SEQ ID NO: 154939 - DNA, 19 bp, Homo sapiens
  siRNA target sequence for ADAM28 (NM_014265.1,1395-1413).
ggagaatgttgtgaaaaat

SEQ ID NO: 154940 - DNA, 19 bp, Homo sapiens
  siRNA target sequence for ADAM28 (NM_014265.1,1439-1457).
gtgcagaccagcaaaagat

SEQ ID NO: 154941 - DNA, 19 bp, Homo sapiens
  siRNA target sequence for ADAM28 (NM_014265.1,1463-1481).
cgacctgcctgaaatgtgt

SEQ ID NO: 154942 - DNA, 19 bp, Homo sapiens
  siRNA target sequence for ADAM28 (NM_014265.1,1464-1482).
gacctgcctgaaatgtgta

SEQ ID NO: 154943 - DNA, 19 bp, Homo sapiens
  siRNA target sequence for ADAM28 (NM_014265.1,1469-1487).
gcctgaaatgtgtaatggt

SEQ ID NO: 154944 - DNA, 19 bp, Homo sapiens
  siRNA target sequence for ADAM28 (NM_014265.1,1470-1488).
cctgaaatgtgtaatggta

SEQ ID NO: 154945 - DNA, 19 bp, Homo sapiens
  siRNA target sequence for ADAM28 (NM_014265.1,1615-1633).
gaactgaggttgcagataa

SEQ ID NO: 154946 - DNA, 19 bp, Homo sapiens
  siRNA target sequence for ADAM28 (NM_014265.1,1626-1644).
gcagataagtcatgttaca

SEQ ID NO: 154947 - DNA, 19 bp, Homo sapiens
  siRNA target sequence for ADAM28 (NM_014265.1,1627-1645).
cagataagtcatgttacaa

SEQ ID NO: 154948 - DNA, 19 bp, Homo sapiens
  siRNA target sequence for ADAM28 (NM_014265.1,1704-1722).
ccctgcaaagcaaatgata

SEQ ID NO: 154949 - DNA, 19 bp, Homo sapiens
  siRNA target sequence for ADAM28 (NM_014265.1,1708-1726).
gcaaagcaaatgataccat

SEQ ID NO: 154950 - DNA, 19 bp, Homo sapiens
  siRNA target sequence for ADAM28 (NM_014265.1,1858-1876).
ctaagtgtggcgataacaa

SEQ ID NO: 154951 - DNA, 19 bp, Homo sapiens
  siRNA target sequence for ADAM28 (NM_014265.1,1867-1885).
gcgataacaaggtttgcat

SEQ ID NO: 154952 - DNA, 19 bp, Homo sapiens
  siRNA target sequence for ADAM28 (NM_014265.1,1868-1886).
cgataacaaggtttgcatt

SEQ ID NO: 154953 - DNA, 19 bp, Homo sapiens
  siRNA target sequence for ADAM28 (NM_014265.1,1893-1911).
gaatgtgtggatattgaga

SEQ ID NO: 154954 - DNA, 19 bp, Homo sapiens
  siRNA target sequence for ADAM28 (NM_014265.1,2066-2084).
cccaatggcggtcattttt

SEQ ID NO: 154955 - DNA, 19 bp, Homo sapiens
  siRNA target sequence for ADAM28 (NM_014265.1,2139-2157).
gatcagaggccactatcta

SEQ ID NO: 154956 - DNA, 19 bp, Homo sapiens
  siRNA target sequence for ADAM28 (NM_014265.1,2188-2206).
ggaaaccccagatggtaaa

SEQ ID NO: 154957 - DNA, 19 bp, Homo sapiens
  siRNA target sequence for ADAM28 (NM_014265.1,2237-2255).
gaagccccatgtgtatgat

SEQ ID NO: 154958 - DNA, 19 bp, Homo sapiens
  siRNA target sequence for ADAM28 (NM_014265.1,2249-2267).
gtatgatctgccagtagaa

SEQ ID NO: 154959 - DNA, 19 bp, Homo sapiens
  siRNA target sequence for ADAM28 (NM_014265.1,2317-2335).
ctactgttttcaaggataa

SEQ ID NO: 154960 - DNA, 19 bp, Homo sapiens
  siRNA target sequence for ADAM28 (NM_014265.1,2344-2362).
ctacacctaaggactcaaa

SEQ ID NO: 154961 - DNA, 19 bp, Homo sapiens
  siRNA target sequence for ADAM28 (NM_014265.1,2349-2367).
cctaaggactcaaatccaa

SEQ ID NO: 154962 - DNA, 19 bp, Homo sapiens
  siRNA target sequence for ADAM28 (NM_014265.1,2350-2368).
ctaaggactcaaatccaaa

SEQ ID NO: 154963 - DNA, 19 bp, Homo sapiens
  siRNA target sequence for ADAM28 (NM_021777.1,1631-1649).
gtgcatgtgcgaaggaaaa

SEQ ID NO: 154964 - DNA, 19 bp, Homo sapiens
  siRNA target sequence for ADAM28 (NM_021777.1,1639-1657).
gcgaaggaaaatcatttca

SEQ ID NO: 154965 - DNA, 19 bp, Homo sapiens
  siRNA target sequence for ADAM30 (NM_021794.2,189-207).
gtttgctccttctactagt

SEQ ID NO: 154966 - DNA, 19 bp, Homo sapiens
  siRNA target sequence for ADAM30 (NM_021794.2,226-244).
gtctcttggcgaagatgta

SEQ ID NO: 154967 - DNA, 19 bp, Homo sapiens
  siRNA target sequence for ADAM30 (NM_021794.2,234-252).
gcgaagatgtaatttttca

SEQ ID NO: 154968 - DNA, 19 bp, Homo sapiens
  siRNA target sequence for ADAM30 (NM_021794.2,254-272).
cctgaaggggagtttgact

SEQ ID NO: 154969 - DNA, 19 bp, Homo sapiens
  siRNA target sequence for ADAM30 (NM_021794.2,262-280).
ggagtttgactcgtatgaa

SEQ ID NO: 154970 - DNA, 19 bp, Homo sapiens
  siRNA target sequence for ADAM30 (NM_021794.2,342-360).
cctacctactgcagttaaa

SEQ ID NO: 154971 - DNA, 19 bp, Homo sapiens
  siRNA target sequence for ADAM30 (NM_021794.2,410-428).
cgacatctgcgcgttttct

SEQ ID NO: 154972 - DNA, 19 bp, Homo sapiens
  siRNA target sequence for ADAM30 (NM_021794.2,454-472).
ggaggatcatccttacata

SEQ ID NO: 154973 - DNA, 19 bp, Homo sapiens
  siRNA target sequence for ADAM30 (NM_021794.2,458-476).
gatcatccttacataccaa

SEQ ID NO: 154974 - DNA, 19 bp, Homo sapiens
  siRNA target sequence for ADAM30 (NM_021794.2,474-492).
caaaggactgcaactacat

SEQ ID NO: 154975 - DNA, 19 bp, Homo sapiens
  siRNA target sequence for ADAM30 (NM_021794.2,514-532).
ggactctaaagctactata

SEQ ID NO: 154976 - DNA, 19 bp, Homo sapiens
  siRNA target sequence for ADAM30 (NM_021794.2,546-564).
ggggtctccgaggtgtatt

SEQ ID NO: 154977 - DNA, 19 bp, Homo sapiens
  siRNA target sequence for ADAM30 (NM_021794.2,547-565).
gggtctccgaggtgtattt

SEQ ID NO: 154978 - DNA, 19 bp, Homo sapiens
  siRNA target sequence for ADAM30 (NM_021794.2,548-566).
ggtctccgaggtgtattta

SEQ ID NO: 154979 - DNA, 19 bp, Homo sapiens
  siRNA target sequence for ADAM30 (NM_021794.2,551-569).
ctccgaggtgtatttaaca

SEQ ID NO: 154980 - DNA, 19 bp, Homo sapiens
  siRNA target sequence for ADAM30 (NM_021794.2,576-594).
ccaaacattaccaaattga

SEQ ID NO: 154981 - DNA, 19 bp, Homo sapiens
  siRNA target sequence for ADAM30 (NM_021794.2,601-619).
caaggcctctcccagtttt

SEQ ID NO: 154982 - DNA, 19 bp, Homo sapiens
  siRNA target sequence for ADAM30 (NM_021794.2,604-622).
ggcctctcccagttttgaa

SEQ ID NO: 154983 - DNA, 19 bp, Homo sapiens
  siRNA target sequence for ADAM30 (NM_021794.2,609-627).
ctcccagttttgaacatgt

SEQ ID NO: 154984 - DNA, 19 bp, Homo sapiens
  siRNA target sequence for ADAM30 (NM_021794.2,664-682).
ggtttgtggcttaagtgat

SEQ ID NO: 154985 - DNA, 19 bp, Homo sapiens
  siRNA target sequence for ADAM30 (NM_021794.2,696-714).
ggcagatggccccttatga

SEQ ID NO: 154986 - DNA, 19 bp, Homo sapiens
  siRNA target sequence for ADAM30 (NM_021794.2,698-716).
cagatggccccttatgaga

SEQ ID NO: 154987 - DNA, 19 bp, Homo sapiens
  siRNA target sequence for ADAM30 (NM_021794.2,700-718).
gatggccccttatgagaat

SEQ ID NO: 154988 - DNA, 19 bp, Homo sapiens
  siRNA target sequence for ADAM30 (NM_021794.2,734-752).
gactttcctggatcctata

SEQ ID NO: 154989 - DNA, 19 bp, Homo sapiens
  siRNA target sequence for ADAM30 (NM_021794.2,778-796).
cctactctttgatcaaagt

SEQ ID NO: 154990 - DNA, 19 bp, Homo sapiens
  siRNA target sequence for ADAM30 (NM_021794.2,779-797).
ctactctttgatcaaagta

SEQ ID NO: 154991 - DNA, 19 bp, Homo sapiens
  siRNA target sequence for ADAM30 (NM_021794.2,784-802).
ctttgatcaaagtaggtat

SEQ ID NO: 154992 - DNA, 19 bp, Homo sapiens
  siRNA target sequence for ADAM30 (NM_021794.2,788-806).
gatcaaagtaggtataggt

SEQ ID NO: 154993 - DNA, 19 bp, Homo sapiens
  siRNA target sequence for ADAM30 (NM_021794.2,798-816).
ggtataggtttgtgaacaa

SEQ ID NO: 154994 - DNA, 19 bp, Homo sapiens
  siRNA target sequence for ADAM30 (NM_021794.2,811-829).
gaacaacaatctttctcaa

SEQ ID NO: 154995 - DNA, 19 bp, Homo sapiens
  siRNA target sequence for ADAM30 (NM_021794.2,859-877).
gattatggacacctacttt

SEQ ID NO: 154996 - DNA, 19 bp, Homo sapiens
  siRNA target sequence for ADAM30 (NM_021794.2,865-883).
ggacacctactttcaagat

SEQ ID NO: 154997 - DNA, 19 bp, Homo sapiens
  siRNA target sequence for ADAM30 (NM_021794.2,884-902).
gttcgtatgaggatacact

SEQ ID NO: 154998 - DNA, 19 bp, Homo sapiens
  siRNA target sequence for ADAM30 (NM_021794.2,934-952).
caaaatacgcgttggatat

SEQ ID NO: 154999 - DNA, 19 bp, Homo sapiens
  siRNA target sequence for ADAM30 (NM_021794.2,953-971).
ccagagttagctgaagttt

SEQ ID NO: 155000 - DNA, 19 bp, Homo sapiens
  siRNA target sequence for ADAM30 (NM_021794.2,968-986).
gttttaggcagatttgtaa

SEQ ID NO: 155001 - DNA, 19 bp, Homo sapiens
  siRNA target sequence for ADAM30 (NM_021794.2,1010-1028).
gctcgcctgtcatcagatt

SEQ ID NO: 155002 - DNA, 19 bp, Homo sapiens
  siRNA target sequence for ADAM30 (NM_021794.2,1020-1038).
catcagattgggcacattt

SEQ ID NO: 155003 - DNA, 19 bp, Homo sapiens
  siRNA target sequence for ADAM30 (NM_021794.2,1029-1047).
gggcacatttatatcttca

SEQ ID NO: 155004 - DNA, 19 bp, Homo sapiens
  siRNA target sequence for ADAM30 (NM_021794.2,1030-1048).
ggcacatttatatcttcaa

SEQ ID NO: 155005 - DNA, 19 bp, Homo sapiens
  siRNA target sequence for ADAM30 (NM_021794.2,1031-1049).
gcacatttatatcttcaaa

SEQ ID NO: 155006 - DNA, 19 bp, Homo sapiens
  siRNA target sequence for ADAM30 (NM_021794.2,1115-1133).
gtgagtactttactagata

SEQ ID NO: 155007 - DNA, 19 bp, Homo sapiens
  siRNA target sequence for ADAM30 (NM_021794.2,1117-1135).
gagtactttactagataca

SEQ ID NO: 155008 - DNA, 19 bp, Homo sapiens
  siRNA target sequence for ADAM30 (NM_021794.2,1119-1137).
gtactttactagatacaaa

SEQ ID NO: 155009 - DNA, 19 bp, Homo sapiens
  siRNA target sequence for ADAM30 (NM_021794.2,1221-1239).
ggggtaggcttaattgcat

SEQ ID NO: 155010 - DNA, 19 bp, Homo sapiens
  siRNA target sequence for ADAM30 (NM_021794.2,1250-1268).
ggacgcactgggtttagca

SEQ ID NO: 155011 - DNA, 19 bp, Homo sapiens
  siRNA target sequence for ADAM30 (NM_021794.2,1253-1271).
cgcactgggtttagcaatt

SEQ ID NO: 155012 - DNA, 19 bp, Homo sapiens
  siRNA target sequence for ADAM30 (NM_021794.2,1300-1318).
ctcttcgggagcaacatgt

SEQ ID NO: 155013 - DNA, 19 bp, Homo sapiens
  siRNA target sequence for ADAM30 (NM_021794.2,1310-1328).
gcaacatgtctaaataata

SEQ ID NO: 155014 - DNA, 19 bp, Homo sapiens
  siRNA target sequence for ADAM30 (NM_021794.2,1335-1353).
gactaggttatgtgcttaa

SEQ ID NO: 155015 - DNA, 19 bp, Homo sapiens
  siRNA target sequence for ADAM30 (NM_021794.2,1337-1355).
ctaggttatgtgcttaaga

SEQ ID NO: 155016 - DNA, 19 bp, Homo sapiens
  siRNA target sequence for ADAM30 (NM_021794.2,1340-1358).
ggttatgtgcttaagagat

SEQ ID NO: 155017 - DNA, 19 bp, Homo sapiens
  siRNA target sequence for ADAM30 (NM_021794.2,1424-1442).
gatcggtgttgccaatcaa

SEQ ID NO: 155018 - DNA, 19 bp, Homo sapiens
  siRNA target sequence for ADAM30 (NM_021794.2,1427-1445).
cggtgttgccaatcaaatt

SEQ ID NO: 155019 - DNA, 19 bp, Homo sapiens
  siRNA target sequence for ADAM30 (NM_021794.2,1429-1447).
gtgttgccaatcaaattgt

SEQ ID NO: 155020 - DNA, 19 bp, Homo sapiens
  siRNA target sequence for ADAM30 (NM_021794.2,1434-1452).
gccaatcaaattgtaagtt

SEQ ID NO: 155021 - DNA, 19 bp, Homo sapiens
  siRNA target sequence for ADAM30 (NM_021794.2,1454-1472).
caaccaggtgccaactgta

SEQ ID NO: 155022 - DNA, 19 bp, Homo sapiens
  siRNA target sequence for ADAM30 (NM_021794.2,1558-1576).
gtactgcgacgggaattca

SEQ ID NO: 155023 - DNA, 19 bp, Homo sapiens
  siRNA target sequence for ADAM30 (NM_021794.2,1561-1579).
ctgcgacgggaattcaagt

SEQ ID NO: 155024 - DNA, 19 bp, Homo sapiens
  siRNA target sequence for ADAM30 (NM_021794.2,1584-1602).
gcccaaatgacgtttataa

SEQ ID NO: 155025 - DNA, 19 bp, Homo sapiens
  siRNA target sequence for ADAM30 (NM_021794.2,1611-1629).
gaaccccttgcaagtatga

SEQ ID NO: 155026 - DNA, 19 bp, Homo sapiens
  siRNA target sequence for ADAM30 (NM_021794.2,1650-1668).
ggtgcagatccagatatat

SEQ ID NO: 155027 - DNA, 19 bp, Homo sapiens
  siRNA target sequence for ADAM30 (NM_021794.2,1719-1737).
gctatgatgcagttaactt

SEQ ID NO: 155028 - DNA, 19 bp, Homo sapiens
  siRNA target sequence for ADAM30 (NM_021794.2,1720-1738).
ctatgatgcagttaactta

SEQ ID NO: 155029 - DNA, 19 bp, Homo sapiens
  siRNA target sequence for ADAM30 (NM_021794.2,1735-1753).
cttaataggtgatcaattt

SEQ ID NO: 155030 - DNA, 19 bp, Homo sapiens
  siRNA target sequence for ADAM30 (NM_021794.2,1770-1788).
caggaattcgaaattttaa

SEQ ID NO: 155031 - DNA, 19 bp, Homo sapiens
  siRNA target sequence for ADAM30 (NM_021794.2,1772-1790).
ggaattcgaaattttaaaa

SEQ ID NO: 155032 - DNA, 19 bp, Homo sapiens
  siRNA target sequence for ADAM30 (NM_021794.2,1815-1833).
gtggcaggctacagtgtat

SEQ ID NO: 155033 - DNA, 19 bp, Homo sapiens
  siRNA target sequence for ADAM30 (NM_021794.2,1817-1835).
ggcaggctacagtgtataa

SEQ ID NO: 155034 - DNA, 19 bp, Homo sapiens
  siRNA target sequence for ADAM30 (NM_021794.2,1818-1836).
gcaggctacagtgtataaa

SEQ ID NO: 155035 - DNA, 19 bp, Homo sapiens
  siRNA target sequence for ADAM30 (NM_021794.2,1821-1839).
ggctacagtgtataaatgt

SEQ ID NO: 155036 - DNA, 19 bp, Homo sapiens
  siRNA target sequence for ADAM30 (NM_021794.2,1826-1844).
cagtgtataaatgttgaaa

SEQ ID NO: 155037 - DNA, 19 bp, Homo sapiens
  siRNA target sequence for ADAM30 (NM_021794.2,1858-1876).
gccagagcatacgactata

SEQ ID NO: 155038 - DNA, 19 bp, Homo sapiens
  siRNA target sequence for ADAM30 (NM_021794.2,1859-1877).
ccagagcatacgactataa

SEQ ID NO: 155039 - DNA, 19 bp, Homo sapiens
  siRNA target sequence for ADAM30 (NM_021794.2,1860-1878).
cagagcatacgactataat

SEQ ID NO: 155040 - DNA, 19 bp, Homo sapiens
  siRNA target sequence for ADAM30 (NM_021794.2,1862-1880).
gagcatacgactataattt

SEQ ID NO: 155041 - DNA, 19 bp, Homo sapiens
  siRNA target sequence for ADAM30 (NM_021794.2,1864-1882).
gcatacgactataatttct

SEQ ID NO: 155042 - DNA, 19 bp, Homo sapiens
  siRNA target sequence for ADAM30 (NM_021794.2,1865-1883).
catacgactataatttcta

SEQ ID NO: 155043 - DNA, 19 bp, Homo sapiens
  siRNA target sequence for ADAM30 (NM_021794.2,1912-1930).
ctggggcacaggctatcat

SEQ ID NO: 155044 - DNA, 19 bp, Homo sapiens
  siRNA target sequence for ADAM30 (NM_021794.2,1914-1932).
ggggcacaggctatcatct

SEQ ID NO: 155045 - DNA, 19 bp, Homo sapiens
  siRNA target sequence for ADAM30 (NM_021794.2,1915-1933).
gggcacaggctatcatcta

SEQ ID NO: 155046 - DNA, 19 bp, Homo sapiens
  siRNA target sequence for ADAM30 (NM_021794.2,1916-1934).
ggcacaggctatcatctat

SEQ ID NO: 155047 - DNA, 19 bp, Homo sapiens
  siRNA target sequence for ADAM30 (NM_021794.2,1924-1942).
ctatcatctatccatgaaa

SEQ ID NO: 155048 - DNA, 19 bp, Homo sapiens
  siRNA target sequence for ADAM30 (NM_021794.2,1950-1968).
gaatacctgacctaggtat

SEQ ID NO: 155049 - DNA, 19 bp, Homo sapiens
  siRNA target sequence for ADAM30 (NM_021794.2,1955-1973).
cctgacctaggtatgataa

SEQ ID NO: 155050 - DNA, 19 bp, Homo sapiens
  siRNA target sequence for ADAM30 (NM_021794.2,1956-1974).
ctgacctaggtatgataaa

SEQ ID NO: 155051 - DNA, 19 bp, Homo sapiens
  siRNA target sequence for ADAM30 (NM_021794.2,1960-1978).
cctaggtatgataaatgat

SEQ ID NO: 155052 - DNA, 19 bp, Homo sapiens
  siRNA target sequence for ADAM30 (NM_021794.2,2048-2066).
gactgtttgcctgagaaat

SEQ ID NO: 155053 - DNA, 19 bp, Homo sapiens
  siRNA target sequence for ADAM30 (NM_021794.2,2194-2212).
ggcgattccctcgtcaatt

SEQ ID NO: 155054 - DNA, 19 bp, Homo sapiens
  siRNA target sequence for ADAM30 (NM_021794.2,2195-2213).
gcgattccctcgtcaattt

SEQ ID NO: 155055 - DNA, 19 bp, Homo sapiens
  siRNA target sequence for ADAM30 (NM_021794.2,2227-2245).
cataatgtttcgccttatt

SEQ ID NO: 155056 - DNA, 19 bp, Homo sapiens
  siRNA target sequence for ADAM30 (NM_021794.2,2233-2251).
gtttcgccttattttatta

SEQ ID NO: 155057 - DNA, 19 bp, Homo sapiens
  siRNA target sequence for ADAM30 (NM_021794.2,2285-2303).
gtgataggaaaccacttaa

SEQ ID NO: 155058 - DNA, 19 bp, Homo sapiens
  siRNA target sequence for ADAM33 (NM_025220.2,409-427).
cccaaccacacggatcatt

SEQ ID NO: 155059 - DNA, 19 bp, Homo sapiens
  siRNA target sequence for ADAM33 (NM_025220.2,570-588).
ctcaacccacgagatcttt

SEQ ID NO: 155060 - DNA, 19 bp, Homo sapiens
  siRNA target sequence for ADAM33 (NM_025220.2,713-731).
ggaagtacctggaactgta

SEQ ID NO: 155061 - DNA, 19 bp, Homo sapiens
  siRNA target sequence for ADAM33 (NM_025220.2,742-760).
gaccacaccctgttcttga

SEQ ID NO: 155062 - DNA, 19 bp, Homo sapiens
  siRNA target sequence for ADAM33 (NM_025220.2,1571-1589).
gtcccccagacgtttacct

SEQ ID NO: 155063 - DNA, 19 bp, Homo sapiens
  siRNA target sequence for ADAM33 (NM_025220.2,2061-2079).
cagccacggggtttgcaat

SEQ ID NO: 155064 - DNA, 19 bp, Homo sapiens
  siRNA target sequence for ADAM8 (NM_001109.1,196-214).
gccacagggcacaacttca

SEQ ID NO: 155065 - DNA, 19 bp, Homo sapiens
  siRNA target sequence for ADAM8 (NM_001109.1,253-271).
ggctacacagagacctata

SEQ ID NO: 155066 - DNA, 19 bp, Homo sapiens
  siRNA target sequence for ADAM8 (NM_001109.1,706-724).
gtggacaagctatatcaga

SEQ ID NO: 155067 - DNA, 19 bp, Homo sapiens
  siRNA target sequence for ADAM8 (NM_001109.1,1153-1171).
gcctacctggagagctttt

SEQ ID NO: 155068 - DNA, 19 bp, Homo sapiens
  siRNA target sequence for ADAM8 (NM_001109.1,1740-1758).
ggatggcactgcgtatgaa

SEQ ID NO: 155069 - DNA, 19 bp, Homo sapiens
  siRNA target sequence for ADAM8 (NM_001109.1,1816-1834).
caggacttacacgtttaca

SEQ ID NO: 155070 - DNA, 19 bp, Homo sapiens
  siRNA target sequence for ADAM8 (NM_001109.1,1818-1836).
ggacttacacgtttacaga

SEQ ID NO: 155071 - DNA, 19 bp, Homo sapiens
  siRNA target sequence for ADAM8 (NM_001109.1,1819-1837).
gacttacacgtttacagat

SEQ ID NO: 155072 - DNA, 19 bp, Homo sapiens
  siRNA target sequence for ADAM9 (NM_003816.1,181-199).
caacagacctcacatcttt

SEQ ID NO: 155073 - DNA, 19 bp, Homo sapiens
  siRNA target sequence for ADAM9 (NM_003816.1,250-268).
gcccctaggccctattcaa

SEQ ID NO: 155074 - DNA, 19 bp, Homo sapiens
  siRNA target sequence for ADAM9 (NM_003816.1,251-269).
cccctaggccctattcaaa

SEQ ID NO: 155075 - DNA, 19 bp, Homo sapiens
  siRNA target sequence for ADAM9 (NM_003816.1,252-270).
ccctaggccctattcaaaa

SEQ ID NO: 155076 - DNA, 19 bp, Homo sapiens
  siRNA target sequence for ADAM9 (NM_003816.1,257-275).
ggccctattcaaaacaagt

SEQ ID NO: 155077 - DNA, 19 bp, Homo sapiens
  siRNA target sequence for ADAM9 (NM_003816.1,258-276).
gccctattcaaaacaagta

SEQ ID NO: 155078 - DNA, 19 bp, Homo sapiens
  siRNA target sequence for ADAM9 (NM_003816.1,259-277).
ccctattcaaaacaagtat

SEQ ID NO: 155079 - DNA, 19 bp, Homo sapiens
  siRNA target sequence for ADAM9 (NM_003816.1,334-352).
gaccttttgcctgaagatt

SEQ ID NO: 155080 - DNA, 19 bp, Homo sapiens
  siRNA target sequence for ADAM9 (NM_003816.1,396-414).
ccatcccaatatacagaat

SEQ ID NO: 155081 - DNA, 19 bp, Homo sapiens
  siRNA target sequence for ADAM9 (NM_003816.1,400-418).
cccaatatacagaatcatt

SEQ ID NO: 155082 - DNA, 19 bp, Homo sapiens
  siRNA target sequence for ADAM9 (NM_003816.1,436-454).
gtggagggagttcataatt

SEQ ID NO: 155083 - DNA, 19 bp, Homo sapiens
  siRNA target sequence for ADAM9 (NM_003816.1,438-456).
ggagggagttcataattca

SEQ ID NO: 155084 - DNA, 19 bp, Homo sapiens
  siRNA target sequence for ADAM9 (NM_003816.1,439-457).
gagggagttcataattcat

SEQ ID NO: 155085 - DNA, 19 bp, Homo sapiens
  siRNA target sequence for ADAM9 (NM_003816.1,490-508).
ggattgctgcatttagaga

SEQ ID NO: 155086 - DNA, 19 bp, Homo sapiens
  siRNA target sequence for ADAM9 (NM_003816.1,532-550).
ctgcagaacagctctcatt

SEQ ID NO: 155087 - DNA, 19 bp, Homo sapiens
  siRNA target sequence for ADAM9 (NM_003816.1,553-571).
gagcacatcatttatcgaa

SEQ ID NO: 155088 - DNA, 19 bp, Homo sapiens
  siRNA target sequence for ADAM9 (NM_003816.1,558-576).
catcatttatcgaatggat

SEQ ID NO: 155089 - DNA, 19 bp, Homo sapiens
  siRNA target sequence for ADAM9 (NM_003816.1,604-622).
ggagtttccaacaaggata

SEQ ID NO: 155090 - DNA, 19 bp, Homo sapiens
  siRNA target sequence for ADAM9 (NM_003816.1,605-623).
gagtttccaacaaggatat

SEQ ID NO: 155091 - DNA, 19 bp, Homo sapiens
  siRNA target sequence for ADAM9 (NM_003816.1,739-757).
gacaaggaaaggtatgaca

SEQ ID NO: 155092 - DNA, 19 bp, Homo sapiens
  siRNA target sequence for ADAM9 (NM_003816.1,802-820).
ctggcaaactacttggata

SEQ ID NO: 155093 - DNA, 19 bp, Homo sapiens
  siRNA target sequence for ADAM9 (NM_003816.1,853-871).
ctagttggactggagattt

SEQ ID NO: 155094 - DNA, 19 bp, Homo sapiens
  siRNA target sequence for ADAM9 (NM_003816.1,938-956).
ggcgggaaaagtttcttat

SEQ ID NO: 155095 - DNA, 19 bp, Homo sapiens
  siRNA target sequence for ADAM9 (NM_003816.1,940-958).
cgggaaaagtttcttatca

SEQ ID NO: 155096 - DNA, 19 bp, Homo sapiens
  siRNA target sequence for ADAM9 (NM_003816.1,975-993).
cagtgcacagctagttcta

SEQ ID NO: 155097 - DNA, 19 bp, Homo sapiens
  siRNA target sequence for ADAM9 (NM_003816.1,977-995).
gtgcacagctagttctaaa

SEQ ID NO: 155098 - DNA, 19 bp, Homo sapiens
  siRNA target sequence for ADAM9 (NM_003816.1,1052-1070).
gccacgcaggcgggattaa

SEQ ID NO: 155099 - DNA, 19 bp, Homo sapiens
  siRNA target sequence for ADAM9 (NM_003816.1,1053-1071).
ccacgcaggcgggattaat

SEQ ID NO: 155100 - DNA, 19 bp, Homo sapiens
  siRNA target sequence for ADAM9 (NM_003816.1,1057-1075).
gcaggcgggattaatgtgt

SEQ ID NO: 155101 - DNA, 19 bp, Homo sapiens
  siRNA target sequence for ADAM9 (NM_003816.1,1058-1076).
caggcgggattaatgtgtt

SEQ ID NO: 155102 - DNA, 19 bp, Homo sapiens
  siRNA target sequence for ADAM9 (NM_003816.1,1147-1165).
cacgatgatgggagagatt

SEQ ID NO: 155103 - DNA, 19 bp, Homo sapiens
  siRNA target sequence for ADAM9 (NM_003816.1,1177-1195).
gcaaagagctgcatcatga

SEQ ID NO: 155104 - DNA, 19 bp, Homo sapiens
  siRNA target sequence for ADAM9 (NM_003816.1,1270-1288).
ggaggaaactgccttctta

SEQ ID NO: 155105 - DNA, 19 bp, Homo sapiens
  siRNA target sequence for ADAM9 (NM_003816.1,1271-1289).
gaggaaactgccttcttaa

SEQ ID NO: 155106 - DNA, 19 bp, Homo sapiens
  siRNA target sequence for ADAM9 (NM_003816.1,1299-1317).
gcctgatgaagcctatagt

SEQ ID NO: 155107 - DNA, 19 bp, Homo sapiens
  siRNA target sequence for ADAM9 (NM_003816.1,1318-1336).
gctccctcctgtggtaata

SEQ ID NO: 155108 - DNA, 19 bp, Homo sapiens
  siRNA target sequence for ADAM9 (NM_003816.1,1319-1337).
ctccctcctgtggtaataa

SEQ ID NO: 155109 - DNA, 19 bp, Homo sapiens
  siRNA target sequence for ADAM9 (NM_003816.1,1321-1339).
ccctcctgtggtaataagt

SEQ ID NO: 155110 - DNA, 19 bp, Homo sapiens
  siRNA target sequence for ADAM9 (NM_003816.1,1408-1426).
ggaagtacctgtaagctta

SEQ ID NO: 155111 - DNA, 19 bp, Homo sapiens
  siRNA target sequence for ADAM9 (NM_003816.1,1409-1427).
gaagtacctgtaagcttaa

SEQ ID NO: 155112 - DNA, 19 bp, Homo sapiens
  siRNA target sequence for ADAM9 (NM_003816.1,1444-1462).
gcatatggtgactgttgta

SEQ ID NO: 155113 - DNA, 19 bp, Homo sapiens
  siRNA target sequence for ADAM9 (NM_003816.1,1445-1463).
catatggtgactgttgtaa

SEQ ID NO: 155114 - DNA, 19 bp, Homo sapiens
  siRNA target sequence for ADAM9 (NM_003816.1,1477-1495).
cttccaggaggtactttat

SEQ ID NO: 155115 - DNA, 19 bp, Homo sapiens
  siRNA target sequence for ADAM9 (NM_003816.1,1525-1543).
ccagagtactgcaatggtt

SEQ ID NO: 155116 - DNA, 19 bp, Homo sapiens
  siRNA target sequence for ADAM9 (NM_003816.1,1620-1638).
cggcatgtgccagtattat

SEQ ID NO: 155117 - DNA, 19 bp, Homo sapiens
  siRNA target sequence for ADAM9 (NM_003816.1,1623-1641).
catgtgccagtattatgat

SEQ ID NO: 155118 - DNA, 19 bp, Homo sapiens
  siRNA target sequence for ADAM9 (NM_003816.1,1632-1650).
gtattatgatgctcaatgt

SEQ ID NO: 155119 - DNA, 19 bp, Homo sapiens
  siRNA target sequence for ADAM9 (NM_003816.1,1643-1661).
ctcaatgtcaagtcatctt

SEQ ID NO: 155120 - DNA, 19 bp, Homo sapiens
  siRNA target sequence for ADAM9 (NM_003816.1,1681-1699).
gcccccaaagattgtttca

SEQ ID NO: 155121 - DNA, 19 bp, Homo sapiens
  siRNA target sequence for ADAM9 (NM_003816.1,1682-1700).
cccccaaagattgtttcat

SEQ ID NO: 155122 - DNA, 19 bp, Homo sapiens
  siRNA target sequence for ADAM9 (NM_003816.1,1738-1756).
ggtttctctggcaatgaat

SEQ ID NO: 155123 - DNA, 19 bp, Homo sapiens
  siRNA target sequence for ADAM9 (NM_003816.1,1747-1765).
ggcaatgaatacaagaagt

SEQ ID NO: 155124 - DNA, 19 bp, Homo sapiens
  siRNA target sequence for ADAM9 (NM_003816.1,1802-1820).
gtgagaatgtacaagagat

SEQ ID NO: 155125 - DNA, 19 bp, Homo sapiens
  siRNA target sequence for ADAM9 (NM_003816.1,1818-1836).
gatacctgtatttggaatt

SEQ ID NO: 155126 - DNA, 19 bp, Homo sapiens
  siRNA target sequence for ADAM9 (NM_003816.1,1858-1876).
cctagtcgaggcaccaaat

SEQ ID NO: 155127 - DNA, 19 bp, Homo sapiens
  siRNA target sequence for ADAM9 (NM_003816.1,1913-1931).
cagatcctgggatggttaa

SEQ ID NO: 155128 - DNA, 19 bp, Homo sapiens
  siRNA target sequence for ADAM9 (NM_003816.1,1926-1944).
ggttaacgaaggcacaaaa

SEQ ID NO: 155129 - DNA, 19 bp, Homo sapiens
  siRNA target sequence for ADAM9 (NM_003816.1,2032-2050).
ggacatggggtatgtaata

SEQ ID NO: 155130 - DNA, 19 bp, Homo sapiens
  siRNA target sequence for ADAM9 (NM_003816.1,2035-2053).
catggggtatgtaatagca

SEQ ID NO: 155131 - DNA, 19 bp, Homo sapiens
  siRNA target sequence for ADAM9 (NM_003816.1,2077-2095).
ggctgggctcccccaaatt

SEQ ID NO: 155132 - DNA, 19 bp, Homo sapiens
  siRNA target sequence for ADAM9 (NM_003816.1,2079-2097).
ctgggctcccccaaattgt

SEQ ID NO: 155133 - DNA, 19 bp, Homo sapiens
  siRNA target sequence for ADAM9 (NM_003816.1,2081-2099).
gggctcccccaaattgtga

SEQ ID NO: 155134 - DNA, 19 bp, Homo sapiens
  siRNA target sequence for ADAM9 (NM_003816.1,2087-2105).
ccccaaattgtgagactaa

SEQ ID NO: 155135 - DNA, 19 bp, Homo sapiens
  siRNA target sequence for ADAM9 (NM_003816.1,2127-2145).
cagtggacctacatacaat

SEQ ID NO: 155136 - DNA, 19 bp, Homo sapiens
  siRNA target sequence for ADAM9 (NM_003816.1,2129-2147).
gtggacctacatacaatga

SEQ ID NO: 155137 - DNA, 19 bp, Homo sapiens
  siRNA target sequence for ADAM9 (NM_003816.1,2131-2149).
ggacctacatacaatgaaa

SEQ ID NO: 155138 - DNA, 19 bp, Homo sapiens
  siRNA target sequence for ADAM9 (NM_003816.1,2132-2150).
gacctacatacaatgaaat

SEQ ID NO: 155139 - DNA, 19 bp, Homo sapiens
  siRNA target sequence for ADAM9 (NM_003816.1,2190-2208).
cctaattgttccccttatt

SEQ ID NO: 155140 - DNA, 19 bp, Homo sapiens
  siRNA target sequence for ADAM9 (NM_003816.1,2358-2376).
gacacctcccagagaagtt

SEQ ID NO: 155141 - DNA, 19 bp, Homo sapiens
  siRNA target sequence for ADAM9 (NM_003816.1,2365-2383).
cccagagaagttcctatat

SEQ ID NO: 155142 - DNA, 19 bp, Homo sapiens
  siRNA target sequence for ADAM9 (NM_003816.1,2366-2384).
ccagagaagttcctatata

SEQ ID NO: 155143 - DNA, 19 bp, Homo sapiens
  siRNA target sequence for ADAM9 (NM_003816.1,2452-2470).
ccaccacaaccgaaagtat

SEQ ID NO: 155144 - DNA, 19 bp, Homo sapiens
  siRNA target sequence for ADAMDEC1 (NM_014479.2,106-124).
ctgtactttggctcattgt

SEQ ID NO: 155145 - DNA, 19 bp, Homo sapiens
  siRNA target sequence for ADAMDEC1 (NM_014479.2,116-134).
gctcattgttcaaactcaa

SEQ ID NO: 155146 - DNA, 19 bp, Homo sapiens
  siRNA target sequence for ADAMDEC1 (NM_014479.2,167-185).
gctccatgaaatagtttgt

SEQ ID NO: 155147 - DNA, 19 bp, Homo sapiens
  siRNA target sequence for ADAMDEC1 (NM_014479.2,276-294).
caatatcagatgatcttaa

SEQ ID NO: 155148 - DNA, 19 bp, Homo sapiens
  siRNA target sequence for ADAMDEC1 (NM_014479.2,297-315).
ggagaagaaatcattctct

SEQ ID NO: 155149 - DNA, 19 bp, Homo sapiens
  siRNA target sequence for ADAMDEC1 (NM_014479.2,342-360).
gggccagactacactgaaa

SEQ ID NO: 155150 - DNA, 19 bp, Homo sapiens
  siRNA target sequence for ADAMDEC1 (NM_014479.2,410-428).
ggaacactgttactataaa

SEQ ID NO: 155151 - DNA, 19 bp, Homo sapiens
  siRNA target sequence for ADAMDEC1 (NM_014479.2,552-570).
gaacatgccgtctttacat

SEQ ID NO: 155152 - DNA, 19 bp, Homo sapiens
  siRNA target sequence for ADAMDEC1 (NM_014479.2,617-635).
gagcactgacgggaaacaa

SEQ ID NO: 155153 - DNA, 19 bp, Homo sapiens
  siRNA target sequence for ADAMDEC1 (NM_014479.2,636-654).
ggcccaattcgaatctcta

SEQ ID NO: 155154 - DNA, 19 bp, Homo sapiens
  siRNA target sequence for ADAMDEC1 (NM_014479.2,639-657).
ccaattcgaatctctagat

SEQ ID NO: 155155 - DNA, 19 bp, Homo sapiens
  siRNA target sequence for ADAMDEC1 (NM_014479.2,683-701).
ctttcttcgggcacagaaa

SEQ ID NO: 155156 - DNA, 19 bp, Homo sapiens
  siRNA target sequence for ADAMDEC1 (NM_014479.2,687-705).
cttcgggcacagaaataca

SEQ ID NO: 155157 - DNA, 19 bp, Homo sapiens
  siRNA target sequence for ADAMDEC1 (NM_014479.2,698-716).
gaaatacattgatctctat

SEQ ID NO: 155158 - DNA, 19 bp, Homo sapiens
  siRNA target sequence for ADAMDEC1 (NM_014479.2,765-783).
ctgataagaagctttgtgt

SEQ ID NO: 155159 - DNA, 19 bp, Homo sapiens
  siRNA target sequence for ADAMDEC1 (NM_014479.2,797-815).
cctactcaatgtgatatat

SEQ ID NO: 155160 - DNA, 19 bp, Homo sapiens
  siRNA target sequence for ADAMDEC1 (NM_014479.2,860-878).
gtctgatggggataagata

SEQ ID NO: 155161 - DNA, 19 bp, Homo sapiens
  siRNA target sequence for ADAMDEC1 (NM_014479.2,894-912).
gcaagcaccacgtttgaca

SEQ ID NO: 155162 - DNA, 19 bp, Homo sapiens
  siRNA target sequence for ADAMDEC1 (NM_014479.2,895-913).
caagcaccacgtttgacaa

SEQ ID NO: 155163 - DNA, 19 bp, Homo sapiens
  siRNA target sequence for ADAMDEC1 (NM_014479.2,969-987).
cttctcagcgggattagct

SEQ ID NO: 155164 - DNA, 19 bp, Homo sapiens
  siRNA target sequence for ADAMDEC1 (NM_014479.2,976-994).
gcgggattagcttcaacaa

SEQ ID NO: 155165 - DNA, 19 bp, Homo sapiens
  siRNA target sequence for ADAMDEC1 (NM_014479.2,977-995).
cgggattagcttcaacaat

SEQ ID NO: 155166 - DNA, 19 bp, Homo sapiens
  siRNA target sequence for ADAMDEC1 (NM_014479.2,1047-1065).
gctgttattgaggctaaaa

SEQ ID NO: 155167 - DNA, 19 bp, Homo sapiens
  siRNA target sequence for ADAMDEC1 (NM_014479.2,1162-1180).
gcagttgtgtgatgaatca

SEQ ID NO: 155168 - DNA, 19 bp, Homo sapiens
  siRNA target sequence for ADAMDEC1 (NM_014479.2,1179-1197).
cagtatctgagttcaaaat

SEQ ID NO: 155169 - DNA, 19 bp, Homo sapiens
  siRNA target sequence for ADAMDEC1 (NM_014479.2,1219-1237).
cttgccgtgcacattttga

SEQ ID NO: 155170 - DNA, 19 bp, Homo sapiens
  siRNA target sequence for ADAMDEC1 (NM_014479.2,1223-1241).
ccgtgcacattttgaaaga

SEQ ID NO: 155171 - DNA, 19 bp, Homo sapiens
  siRNA target sequence for ADAMDEC1 (NM_014479.2,1315-1333).
gtgggaaccaccttctaga

SEQ ID NO: 155172 - DNA, 19 bp, Homo sapiens
  siRNA target sequence for ADAMDEC1 (NM_014479.2,1318-1336).
ggaaccaccttctagaagt

SEQ ID NO: 155173 - DNA, 19 bp, Homo sapiens
  siRNA target sequence for ADAMDEC1 (NM_014479.2,1392-1410).
gccctaacgtgtaaactga

SEQ ID NO: 155174 - DNA, 19 bp, Homo sapiens
  siRNA target sequence for ADAMDEC1 (NM_014479.2,1393-1411).
ccctaacgtgtaaactgaa

SEQ ID NO: 155175 - DNA, 19 bp, Homo sapiens
  siRNA target sequence for ADAMDEC1 (NM_014479.2,1407-1425).
ctgaagcctggaactgatt

SEQ ID NO: 155176 - DNA, 19 bp, Homo sapiens
  siRNA target sequence for ADAMTS1 (NM_006988.2,600-618).
ctggcgcactgcttctact

SEQ ID NO: 155177 - DNA, 19 bp, Homo sapiens
  siRNA target sequence for ADAMTS1 (NM_006988.2,696-714).
ctgggggaggcgtatttca

SEQ ID NO: 155178 - DNA, 19 bp, Homo sapiens
  siRNA target sequence for ADAMTS1 (NM_006988.2,1065-1083).
ggcagtggtctaaagcatt

SEQ ID NO: 155179 - DNA, 19 bp, Homo sapiens
  siRNA target sequence for ADAMTS1 (NM_006988.2,1102-1120).
cggtggcagccagattgta

SEQ ID NO: 155180 - DNA, 19 bp, Homo sapiens
  siRNA target sequence for ADAMTS1 (NM_006988.2,1125-1143).
caccccagcattcgtaatt

SEQ ID NO: 155181 - DNA, 19 bp, Homo sapiens
  siRNA target sequence for ADAMTS1 (NM_006988.2,1127-1145).
ccccagcattcgtaattca

SEQ ID NO: 155182 - DNA, 19 bp, Homo sapiens
  siRNA target sequence for ADAMTS1 (NM_006988.2,1129-1147).
ccagcattcgtaattcagt

SEQ ID NO: 155183 - DNA, 19 bp, Homo sapiens
  siRNA target sequence for ADAMTS1 (NM_006988.2,1130-1148).
cagcattcgtaattcagtt

SEQ ID NO: 155184 - DNA, 19 bp, Homo sapiens
  siRNA target sequence for ADAMTS1 (NM_006988.2,1220-1238).
cctcactctgcggaacttt

SEQ ID NO: 155185 - DNA, 19 bp, Homo sapiens
  siRNA target sequence for ADAMTS1 (NM_006988.2,1221-1239).
ctcactctgcggaactttt

SEQ ID NO: 155186 - DNA, 19 bp, Homo sapiens
  siRNA target sequence for ADAMTS1 (NM_006988.2,1225-1243).
ctctgcggaacttttgcaa

SEQ ID NO: 155187 - DNA, 19 bp, Homo sapiens
  siRNA target sequence for ADAMTS1 (NM_006988.2,1286-1304).
gcactatgacacagcaatt

SEQ ID NO: 155188 - DNA, 19 bp, Homo sapiens
  siRNA target sequence for ADAMTS1 (NM_006988.2,1329-1347).
gggtcccagacatgtgata

SEQ ID NO: 155189 - DNA, 19 bp, Homo sapiens
  siRNA target sequence for ADAMTS1 (NM_006988.2,1331-1349).
gtcccagacatgtgatact

SEQ ID NO: 155190 - DNA, 19 bp, Homo sapiens
  siRNA target sequence for ADAMTS1 (NM_006988.2,1393-1411).
gctgctccgtcatagaaga

SEQ ID NO: 155191 - DNA, 19 bp, Homo sapiens
  siRNA target sequence for ADAMTS1 (NM_006988.2,1396-1414).
gctccgtcatagaagatga

SEQ ID NO: 155192 - DNA, 19 bp, Homo sapiens
  siRNA target sequence for ADAMTS1 (NM_006988.2,1397-1415).
ctccgtcatagaagatgat

SEQ ID NO: 155193 - DNA, 19 bp, Homo sapiens
  siRNA target sequence for ADAMTS1 (NM_006988.2,1433-1451).
caccacagcccatgaatta

SEQ ID NO: 155194 - DNA, 19 bp, Homo sapiens
  siRNA target sequence for ADAMTS1 (NM_006988.2,1487-1505).
gcagtgtgccagccttaat

SEQ ID NO: 155195 - DNA, 19 bp, Homo sapiens
  siRNA target sequence for ADAMTS1 (NM_006988.2,1490-1508).
gtgtgccagccttaatggt

SEQ ID NO: 155196 - DNA, 19 bp, Homo sapiens
  siRNA target sequence for ADAMTS1 (NM_006988.2,1526-1544).
catgatggcgtcaatgctt

SEQ ID NO: 155197 - DNA, 19 bp, Homo sapiens
  siRNA target sequence for ADAMTS1 (NM_006988.2,1575-1593).
ccttgcagtgcctacatga

SEQ ID NO: 155198 - DNA, 19 bp, Homo sapiens
  siRNA target sequence for ADAMTS1 (NM_006988.2,1576-1594).
cttgcagtgcctacatgat

SEQ ID NO: 155199 - DNA, 19 bp, Homo sapiens
  siRNA target sequence for ADAMTS1 (NM_006988.2,1584-1602).
gcctacatgattacatcat

SEQ ID NO: 155200 - DNA, 19 bp, Homo sapiens
  siRNA target sequence for ADAMTS1 (NM_006988.2,1698-1716).
cggcagtgccagtttacat

SEQ ID NO: 155201 - DNA, 19 bp, Homo sapiens
  siRNA target sequence for ADAMTS1 (NM_006988.2,1796-1814).
gctggtgtgtcaaaccaaa

SEQ ID NO: 155202 - DNA, 19 bp, Homo sapiens
  siRNA target sequence for ADAMTS1 (NM_006988.2,1883-1901).
caaaaccgacagaaagcat

SEQ ID NO: 155203 - DNA, 19 bp, Homo sapiens
  siRNA target sequence for ADAMTS1 (NM_006988.2,2003-2021).
caacccagtcccaaagaat

SEQ ID NO: 155204 - DNA, 19 bp, Homo sapiens
  siRNA target sequence for ADAMTS1 (NM_006988.2,2073-2091).
gaggactgtccagacaata

SEQ ID NO: 155205 - DNA, 19 bp, Homo sapiens
  siRNA target sequence for ADAMTS1 (NM_006988.2,2075-2093).
ggactgtccagacaataat

SEQ ID NO: 155206 - DNA, 19 bp, Homo sapiens
  siRNA target sequence for ADAMTS1 (NM_006988.2,2078-2096).
ctgtccagacaataatgga

SEQ ID NO: 155207 - DNA, 19 bp, Homo sapiens
  siRNA target sequence for ADAMTS1 (NM_006988.2,2121-2139).
gaagcacacaacgagtttt

SEQ ID NO: 155208 - DNA, 19 bp, Homo sapiens
  siRNA target sequence for ADAMTS1 (NM_006988.2,2124-2142).
gcacacaacgagttttcaa

SEQ ID NO: 155209 - DNA, 19 bp, Homo sapiens
  siRNA target sequence for ADAMTS1 (NM_006988.2,2125-2143).
cacacaacgagttttcaaa

SEQ ID NO: 155210 - DNA, 19 bp, Homo sapiens
  siRNA target sequence for ADAMTS1 (NM_006988.2,2129-2147).
caacgagttttcaaaagct

SEQ ID NO: 155211 - DNA, 19 bp, Homo sapiens
  siRNA target sequence for ADAMTS1 (NM_006988.2,2162-2180).
gcctgcggtggaatggatt

SEQ ID NO: 155212 - DNA, 19 bp, Homo sapiens
  siRNA target sequence for ADAMTS1 (NM_006988.2,2261-2279).
gcagcccaaggttgtagat

SEQ ID NO: 155213 - DNA, 19 bp, Homo sapiens
  siRNA target sequence for ADAMTS1 (NM_006988.2,2341-2359).
gttgtgatcgcatcataga

SEQ ID NO: 155214 - DNA, 19 bp, Homo sapiens
  siRNA target sequence for ADAMTS1 (NM_006988.2,2349-2367).
cgcatcatagactccaaaa

SEQ ID NO: 155215 - DNA, 19 bp, Homo sapiens
  siRNA target sequence for ADAMTS1 (NM_006988.2,2350-2368).
gcatcatagactccaaaaa

SEQ ID NO: 155216 - DNA, 19 bp, Homo sapiens
  siRNA target sequence for ADAMTS1 (NM_006988.2,2397-2415).
ggaaatggatctacttgta

SEQ ID NO: 155217 - DNA, 19 bp, Homo sapiens
  siRNA target sequence for ADAMTS1 (NM_006988.2,2440-2458).
gtgcaaaacctggatatca

SEQ ID NO: 155218 - DNA, 19 bp, Homo sapiens
  siRNA target sequence for ADAMTS1 (NM_006988.2,2488-2506).
ccaacatcgaagtgaaaca

SEQ ID NO: 155219 - DNA, 19 bp, Homo sapiens
  siRNA target sequence for ADAMTS1 (NM_006988.2,2516-2534).
gaggggatccaggaacaat

SEQ ID NO: 155220 - DNA, 19 bp, Homo sapiens
  siRNA target sequence for ADAMTS1 (NM_006988.2,2556-2574).
gctgctgatggcacatata

SEQ ID NO: 155221 - DNA, 19 bp, Homo sapiens
  siRNA target sequence for ADAMTS1 (NM_006988.2,2557-2575).
ctgctgatggcacatatat

SEQ ID NO: 155222 - DNA, 19 bp, Homo sapiens
  siRNA target sequence for ADAMTS1 (NM_006988.2,2560-2578).
ctgatggcacatatattct

SEQ ID NO: 155223 - DNA, 19 bp, Homo sapiens
  siRNA target sequence for ADAMTS1 (NM_006988.2,2562-2580).
gatggcacatatattctta

SEQ ID NO: 155224 - DNA, 19 bp, Homo sapiens
  siRNA target sequence for ADAMTS1 (NM_006988.2,2577-2595).
cttaatggtgactacactt

SEQ ID NO: 155225 - DNA, 19 bp, Homo sapiens
  siRNA target sequence for ADAMTS1 (NM_006988.2,2599-2617).
ccaccttagagcaagacat

SEQ ID NO: 155226 - DNA, 19 bp, Homo sapiens
  siRNA target sequence for ADAMTS1 (NM_006988.2,2600-2618).
caccttagagcaagacatt

SEQ ID NO: 155227 - DNA, 19 bp, Homo sapiens
  siRNA target sequence for ADAMTS1 (NM_006988.2,2602-2620).
ccttagagcaagacattat

SEQ ID NO: 155228 - DNA, 19 bp, Homo sapiens
  siRNA target sequence for ADAMTS1 (NM_006988.2,2656-2674).
ctgcggcattggaaagaat

SEQ ID NO: 155229 - DNA, 19 bp, Homo sapiens
  siRNA target sequence for ADAMTS1 (NM_006988.2,2705-2723).
gaccatccaggttcttact

SEQ ID NO: 155230 - DNA, 19 bp, Homo sapiens
  siRNA target sequence for ADAMTS1 (NM_006988.2,2707-2725).
ccatccaggttcttactgt

SEQ ID NO: 155231 - DNA, 19 bp, Homo sapiens
  siRNA target sequence for ADAMTS1 (NM_006988.2,2734-2752).
cccttcgacctaaaattaa

SEQ ID NO: 155232 - DNA, 19 bp, Homo sapiens
  siRNA target sequence for ADAMTS1 (NM_006988.2,2735-2753).
ccttcgacctaaaattaaa

SEQ ID NO: 155233 - DNA, 19 bp, Homo sapiens
  siRNA target sequence for ADAMTS1 (NM_006988.2,2789-2807).
caatgctatccccactttt

SEQ ID NO: 155234 - DNA, 19 bp, Homo sapiens
  siRNA target sequence for ADAMTS1 (NM_006988.2,2809-2827).
cagcatgggtcattgaaga

SEQ ID NO: 155235 - DNA, 19 bp, Homo sapiens
  siRNA target sequence for ADAMTS1 (NM_006988.2,2823-2841).
gaagagtggggcgaatgtt

SEQ ID NO: 155236 - DNA, 19 bp, Homo sapiens
  siRNA target sequence for ADAMTS1 (NM_006988.2,2826-2844).
gagtggggcgaatgttcta

SEQ ID NO: 155237 - DNA, 19 bp, Homo sapiens
  siRNA target sequence for ADAMTS1 (NM_006988.2,2831-2849).
gggcgaatgttctaagtca

SEQ ID NO: 155238 - DNA, 19 bp, Homo sapiens
  siRNA target sequence for ADAMTS1 (NM_006988.2,2877-2895).
gtagaatgccgagacatta

SEQ ID NO: 155239 - DNA, 19 bp, Homo sapiens
  siRNA target sequence for ADAMTS1 (NM_006988.2,2984-3002).
gggggagtggtcatcatgt

SEQ ID NO: 155240 - DNA, 19 bp, Homo sapiens
  siRNA target sequence for ADAMTS1 (NM_006988.2,2985-3003).
ggggagtggtcatcatgtt

SEQ ID NO: 155241 - DNA, 19 bp, Homo sapiens
  siRNA target sequence for ADAMTS1 (NM_006988.2,3078-3096).
gagagctgtgatcctttaa

SEQ ID NO: 155242 - DNA, 19 bp, Homo sapiens
  siRNA target sequence for ADAMTS1 (NM_006988.2,3098-3116).
gaaacctaaacatttcata

SEQ ID NO: 155243 - DNA, 19 bp, Homo sapiens
  siRNA target sequence for ADAMTS10 (NM_030957.1,460-478).
ccgagtcccgcctcttcta

SEQ ID NO: 155244 - DNA, 19 bp, Homo sapiens
  siRNA target sequence for ADAMTS10 (NM_030957.1,464-482).
gtcccgcctcttctacaaa

SEQ ID NO: 155245 - DNA, 19 bp, Homo sapiens
  siRNA target sequence for ADAMTS10 (NM_030957.1,1244-1262).
gaacggtgtggctaaccat

SEQ ID NO: 155246 - DNA, 19 bp, Homo sapiens
  siRNA target sequence for ADAMTS10 (NM_030957.1,1366-1384).
gaagctgcagcgtcaatga

SEQ ID NO: 155247 - DNA, 19 bp, Homo sapiens
  siRNA target sequence for ADAMTS10 (NM_030957.1,1685-1703).
ctttcagcatggagtcaaa

SEQ ID NO: 155248 - DNA, 19 bp, Homo sapiens
  siRNA target sequence for ADAMTS10 (NM_030957.1,1700-1718).
caaatcgcgtcagtgtaaa

SEQ ID NO: 155249 - DNA, 19 bp, Homo sapiens
  siRNA target sequence for ADAMTS10 (NM_030957.1,2103-2121).
cctttccgtgggaaattct

SEQ ID NO: 155250 - DNA, 19 bp, Homo sapiens
  siRNA target sequence for ADAMTS10 (NM_030957.1,2104-2122).
ctttccgtgggaaattcta

SEQ ID NO: 155251 - DNA, 19 bp, Homo sapiens
  siRNA target sequence for ADAMTS10 (NM_030957.1,2178-2196).
gcggaaggcttcaacttct

SEQ ID NO: 155252 - DNA, 19 bp, Homo sapiens
  siRNA target sequence for ADAMTS10 (NM_030957.1,2615-2633).
cctgggaccgattaatgca

SEQ ID NO: 155253 - DNA, 19 bp, Homo sapiens
  siRNA target sequence for ADAMTS10 (NM_030957.1,2616-2634).
ctgggaccgattaatgcat

SEQ ID NO: 155254 - DNA, 19 bp, Homo sapiens
  siRNA target sequence for ADAMTS10 (NM_030957.1,3478-3496).
gccccctggtgctcaaatt

SEQ ID NO: 155255 - DNA, 19 bp, Homo sapiens
  siRNA target sequence for ADAMTS10 (NM_030957.1,3522-3540).
cgccagatgtgctgcaaaa

SEQ ID NO: 155256 - DNA, 19 bp, Homo sapiens
  siRNA target sequence for ADAMTS12 (NM_030955.1,344-362).
gagctggcttgcaaacctt

SEQ ID NO: 155257 - DNA, 19 bp, Homo sapiens
  siRNA target sequence for ADAMTS12 (NM_030955.1,445-463).
ggaggcaagagcattttat

SEQ ID NO: 155258 - DNA, 19 bp, Homo sapiens
  siRNA target sequence for ADAMTS12 (NM_030955.1,448-466).
ggcaagagcattttatcaa

SEQ ID NO: 155259 - DNA, 19 bp, Homo sapiens
  siRNA target sequence for ADAMTS12 (NM_030955.1,491-509).
gggtccagtccgagtagat

SEQ ID NO: 155260 - DNA, 19 bp, Homo sapiens
  siRNA target sequence for ADAMTS12 (NM_030955.1,586-604).
cagaggactgggtgtacta

SEQ ID NO: 155261 - DNA, 19 bp, Homo sapiens
  siRNA target sequence for ADAMTS12 (NM_030955.1,588-606).
gaggactgggtgtactaca

SEQ ID NO: 155262 - DNA, 19 bp, Homo sapiens
  siRNA target sequence for ADAMTS12 (NM_030955.1,593-611).
ctgggtgtactacagaatt

SEQ ID NO: 155263 - DNA, 19 bp, Homo sapiens
  siRNA target sequence for ADAMTS12 (NM_030955.1,646-664).
cggtcaatcaaggatttct

SEQ ID NO: 155264 - DNA, 19 bp, Homo sapiens
  siRNA target sequence for ADAMTS12 (NM_030955.1,654-672).
caaggatttctttccaata

SEQ ID NO: 155265 - DNA, 19 bp, Homo sapiens
  siRNA target sequence for ADAMTS12 (NM_030955.1,657-675).
ggatttctttccaatagct

SEQ ID NO: 155266 - DNA, 19 bp, Homo sapiens
  siRNA target sequence for ADAMTS12 (NM_030955.1,663-681).
ctttccaatagctacatca

SEQ ID NO: 155267 - DNA, 19 bp, Homo sapiens
  siRNA target sequence for ADAMTS12 (NM_030955.1,696-714).
gggaacctctcccatgtta

SEQ ID NO: 155268 - DNA, 19 bp, Homo sapiens
  siRNA target sequence for ADAMTS12 (NM_030955.1,697-715).
ggaacctctcccatgttaa

SEQ ID NO: 155269 - DNA, 19 bp, Homo sapiens
  siRNA target sequence for ADAMTS12 (NM_030955.1,702-720).
ctctcccatgttaagatga

SEQ ID NO: 155270 - DNA, 19 bp, Homo sapiens
  siRNA target sequence for ADAMTS12 (NM_030955.1,807-825).
catggactgactggatttt

SEQ ID NO: 155271 - DNA, 19 bp, Homo sapiens
  siRNA target sequence for ADAMTS12 (NM_030955.1,894-912).
cacccgcacatcgtttaca

SEQ ID NO: 155272 - DNA, 19 bp, Homo sapiens
  siRNA target sequence for ADAMTS12 (NM_030955.1,938-956).
ggagccaacctgtggatta

SEQ ID NO: 155273 - DNA, 19 bp, Homo sapiens
  siRNA target sequence for ADAMTS12 (NM_030955.1,1085-1103).
ggccgacacaaagatgatt

SEQ ID NO: 155274 - DNA, 19 bp, Homo sapiens
  siRNA target sequence for ADAMTS12 (NM_030955.1,1087-1105).
ccgacacaaagatgattga

SEQ ID NO: 155275 - DNA, 19 bp, Homo sapiens
  siRNA target sequence for ADAMTS12 (NM_030955.1,1088-1106).
cgacacaaagatgattgaa

SEQ ID NO: 155276 - DNA, 19 bp, Homo sapiens
  siRNA target sequence for ADAMTS12 (NM_030955.1,1158-1176).
gtcactgggttgttccata

SEQ ID NO: 155277 - DNA, 19 bp, Homo sapiens
  siRNA target sequence for ADAMTS12 (NM_030955.1,1169-1187).
gttccataacccaagcatt

SEQ ID NO: 155278 - DNA, 19 bp, Homo sapiens
  siRNA target sequence for ADAMTS12 (NM_030955.1,1220-1238).
cattctactcgaagaagaa

SEQ ID NO: 155279 - DNA, 19 bp, Homo sapiens
  siRNA target sequence for ADAMTS12 (NM_030955.1,1437-1455).
cagcctcaccgcagttgta

SEQ ID NO: 155280 - DNA, 19 bp, Homo sapiens
  siRNA target sequence for ADAMTS12 (NM_030955.1,1440-1458).
cctcaccgcagttgtaaca

SEQ ID NO: 155281 - DNA, 19 bp, Homo sapiens
  siRNA target sequence for ADAMTS12 (NM_030955.1,1441-1459).
ctcaccgcagttgtaacat

SEQ ID NO: 155282 - DNA, 19 bp, Homo sapiens
  siRNA target sequence for ADAMTS12 (NM_030955.1,1443-1461).
caccgcagttgtaacatca

SEQ ID NO: 155283 - DNA, 19 bp, Homo sapiens
  siRNA target sequence for ADAMTS12 (NM_030955.1,1478-1496).
ccctctggctttcacaatt

SEQ ID NO: 155284 - DNA, 19 bp, Homo sapiens
  siRNA target sequence for ADAMTS12 (NM_030955.1,1563-1581).
ggcagacatccgtacatca

SEQ ID NO: 155285 - DNA, 19 bp, Homo sapiens
  siRNA target sequence for ADAMTS12 (NM_030955.1,1564-1582).
gcagacatccgtacatcat

SEQ ID NO: 155286 - DNA, 19 bp, Homo sapiens
  siRNA target sequence for ADAMTS12 (NM_030955.1,1678-1696).
gtcttgatgacatacctaa

SEQ ID NO: 155287 - DNA, 19 bp, Homo sapiens
  siRNA target sequence for ADAMTS12 (NM_030955.1,1729-1747).
ccggagtgatctatgatgt

SEQ ID NO: 155288 - DNA, 19 bp, Homo sapiens
  siRNA target sequence for ADAMTS12 (NM_030955.1,1730-1748).
cggagtgatctatgatgtt

SEQ ID NO: 155289 - DNA, 19 bp, Homo sapiens
  siRNA target sequence for ADAMTS12 (NM_030955.1,1732-1750).
gagtgatctatgatgttca

SEQ ID NO: 155290 - DNA, 19 bp, Homo sapiens
  siRNA target sequence for ADAMTS12 (NM_030955.1,1752-1770).
caccagtgccagctacaat

SEQ ID NO: 155291 - DNA, 19 bp, Homo sapiens
  siRNA target sequence for ADAMTS12 (NM_030955.1,1754-1772).
ccagtgccagctacaatat

SEQ ID NO: 155292 - DNA, 19 bp, Homo sapiens
  siRNA target sequence for ADAMTS12 (NM_030955.1,1757-1775).
gtgccagctacaatatgga

SEQ ID NO: 155293 - DNA, 19 bp, Homo sapiens
  siRNA target sequence for ADAMTS12 (NM_030955.1,1919-1937).
catcacagtggggaagaaa

SEQ ID NO: 155294 - DNA, 19 bp, Homo sapiens
  siRNA target sequence for ADAMTS12 (NM_030955.1,2036-2054).
caaccccgagccaaagttt

SEQ ID NO: 155295 - DNA, 19 bp, Homo sapiens
  siRNA target sequence for ADAMTS12 (NM_030955.1,2141-2159).
gatgcagtgcagtgaattt

SEQ ID NO: 155296 - DNA, 19 bp, Homo sapiens
  siRNA target sequence for ADAMTS12 (NM_030955.1,2160-2178).
gacactgttccctacaaga

SEQ ID NO: 155297 - DNA, 19 bp, Homo sapiens
  siRNA target sequence for ADAMTS12 (NM_030955.1,2170-2188).
cctacaagaatgaactcta

SEQ ID NO: 155298 - DNA, 19 bp, Homo sapiens
  siRNA target sequence for ADAMTS12 (NM_030955.1,2231-2249).
ctactgccgacccatagat

SEQ ID NO: 155299 - DNA, 19 bp, Homo sapiens
  siRNA target sequence for ADAMTS12 (NM_030955.1,2250-2268).
ggccagttttctgagaaaa

SEQ ID NO: 155300 - DNA, 19 bp, Homo sapiens
  siRNA target sequence for ADAMTS12 (NM_030955.1,2363-2381).
ctatgagatcgattccaat

SEQ ID NO: 155301 - DNA, 19 bp, Homo sapiens
  siRNA target sequence for ADAMTS12 (NM_030955.1,2456-2474).
gaaggaaggatctggttat

SEQ ID NO: 155302 - DNA, 19 bp, Homo sapiens
  siRNA target sequence for ADAMTS12 (NM_030955.1,2464-2482).
gatctggttatgttgacat

SEQ ID NO: 155303 - DNA, 19 bp, Homo sapiens
  siRNA target sequence for ADAMTS12 (NM_030955.1,2480-2498).
cattgggctcattccaaaa

SEQ ID NO: 155304 - DNA, 19 bp, Homo sapiens
  siRNA target sequence for ADAMTS12 (NM_030955.1,2500-2518).
gagcaagggacataagagt

SEQ ID NO: 155305 - DNA, 19 bp, Homo sapiens
  siRNA target sequence for ADAMTS12 (NM_030955.1,2604-2622).
cagtggaacgggaactata

SEQ ID NO: 155306 - DNA, 19 bp, Homo sapiens
  siRNA target sequence for ADAMTS12 (NM_030955.1,2608-2626).
ggaacgggaactataagct

SEQ ID NO: 155307 - DNA, 19 bp, Homo sapiens
  siRNA target sequence for ADAMTS12 (NM_030955.1,2703-2721).
gtgtggatccagcttctat

SEQ ID NO: 155308 - DNA, 19 bp, Homo sapiens
  siRNA target sequence for ADAMTS12 (NM_030955.1,2753-2771).
gtacacaatccagaaagat

SEQ ID NO: 155309 - DNA, 19 bp, Homo sapiens
  siRNA target sequence for ADAMTS12 (NM_030955.1,2765-2783).
gaaagatggccttgacaat

SEQ ID NO: 155310 - DNA, 19 bp, Homo sapiens
  siRNA target sequence for ADAMTS12 (NM_030955.1,2860-2878).
gccaaactgcccattgcat

SEQ ID NO: 155311 - DNA, 19 bp, Homo sapiens
  siRNA target sequence for ADAMTS12 (NM_030955.1,2861-2879).
ccaaactgcccattgcata

SEQ ID NO: 155312 - DNA, 19 bp, Homo sapiens
  siRNA target sequence for ADAMTS12 (NM_030955.1,2893-2911).
ggatggtgaaagctacatt

SEQ ID NO: 155313 - DNA, 19 bp, Homo sapiens
  siRNA target sequence for ADAMTS12 (NM_030955.1,3316-3334).
ctagccggagagttctgaa

SEQ ID NO: 155314 - DNA, 19 bp, Homo sapiens
  siRNA target sequence for ADAMTS12 (NM_030955.1,3345-3363).
ggcactatttccaatggaa

SEQ ID NO: 155315 - DNA, 19 bp, Homo sapiens
  siRNA target sequence for ADAMTS12 (NM_030955.1,3736-3754).
ggcctgtgactccatttta

SEQ ID NO: 155316 - DNA, 19 bp, Homo sapiens
  siRNA target sequence for ADAMTS12 (NM_030955.1,3745-3763).
ctccattttacaatacctt

SEQ ID NO: 155317 - DNA, 19 bp, Homo sapiens
  siRNA target sequence for ADAMTS12 (NM_030955.1,3846-3864).
gtaatatggaccaagatca

SEQ ID NO: 155318 - DNA, 19 bp, Homo sapiens
  siRNA target sequence for ADAMTS12 (NM_030955.1,3879-3897).
gacgctccagtggaaagta

SEQ ID NO: 155319 - DNA, 19 bp, Homo sapiens
  siRNA target sequence for ADAMTS12 (NM_030955.1,3881-3899).
cgctccagtggaaagtaca

SEQ ID NO: 155320 - DNA, 19 bp, Homo sapiens
  siRNA target sequence for ADAMTS12 (NM_030955.1,4118-4136).
ccgtaaccacctgaaactt

SEQ ID NO: 155321 - DNA, 19 bp, Homo sapiens
  siRNA target sequence for ADAMTS12 (NM_030955.1,4128-4146).
ctgaaacttccaaacaaca

SEQ ID NO: 155322 - DNA, 19 bp, Homo sapiens
  siRNA target sequence for ADAMTS12 (NM_030955.1,4187-4205).
ggatgcaacaagtctgatt

SEQ ID NO: 155323 - DNA, 19 bp, Homo sapiens
  siRNA target sequence for ADAMTS12 (NM_030955.1,4188-4206).
gatgcaacaagtctgatta

SEQ ID NO: 155324 - DNA, 19 bp, Homo sapiens
  siRNA target sequence for ADAMTS12 (NM_030955.1,4192-4210).
caacaagtctgattactga

SEQ ID NO: 155325 - DNA, 19 bp, Homo sapiens
  siRNA target sequence for ADAMTS12 (NM_030955.1,4383-4401).
cctgaccctgcaaaaagat

SEQ ID NO: 155326 - DNA, 19 bp, Homo sapiens
  siRNA target sequence for ADAMTS12 (NM_030955.1,4462-4480).
gcagtgggggcttcaagat

SEQ ID NO: 155327 - DNA, 19 bp, Homo sapiens
  siRNA target sequence for ADAMTS12 (NM_030955.1,4682-4700).
cctctgtgattggacaaaa

SEQ ID NO: 155328 - DNA, 19 bp, Homo sapiens
  siRNA target sequence for ADAMTS12 (NM_030955.1,4845-4863).
gaccaagaccaatgtctat

SEQ ID NO: 155329 - DNA, 19 bp, Homo sapiens
  siRNA target sequence for ADAMTS12 (NM_030955.1,4847-4865).
ccaagaccaatgtctatgt

SEQ ID NO: 155330 - DNA, 19 bp, Homo sapiens
  siRNA target sequence for ADAMTS12 (NM_030955.1,4876-4894).
ccagacctccagaattcaa

SEQ ID NO: 155331 - DNA, 19 bp, Homo sapiens
  siRNA target sequence for ADAMTS12 (NM_030955.1,4884-4902).
ccagaattcaaaaaatgca

SEQ ID NO: 155332 - DNA, 19 bp, Homo sapiens
  siRNA target sequence for ADAMTS12 (NM_030955.1,4907-4925).
gcaggcctgcaagaaaagt

SEQ ID NO: 155333 - DNA, 19 bp, Homo sapiens
  siRNA target sequence for ADAMTS12 (NM_030955.1,4919-4937).
gaaaagtgccgatttactt

SEQ ID NO: 155334 - DNA, 19 bp, Homo sapiens
  siRNA target sequence for ADAMTS12 (NM_030955.1,5076-5094).
caacggttgctccaaaagt

SEQ ID NO: 155335 - DNA, 19 bp, Homo sapiens
  siRNA target sequence for ADAMTS12 (NM_030955.1,5079-5097).
cggttgctccaaaagtcaa

SEQ ID NO: 155336 - DNA, 19 bp, Homo sapiens
  siRNA target sequence for ADAMTS13 (NM_139025.1,483-501).
ctgtgtggccggaatcctt

SEQ ID NO: 155337 - DNA, 19 bp, Homo sapiens
  siRNA target sequence for ADAMTS13 (NM_139025.1,2113-2131).
ccacggaagggctctttca

SEQ ID NO: 155338 - DNA, 19 bp, Homo sapiens
  siRNA target sequence for ADAMTS13 (NM_139025.1,2138-2156).
gcagagcgagagaatatgt

SEQ ID NO: 155339 - DNA, 19 bp, Homo sapiens
  siRNA target sequence for ADAMTS13 (NM_139025.1,2144-2162).
cgagagaatatgtcacatt

SEQ ID NO: 155340 - DNA, 19 bp, Homo sapiens
  siRNA target sequence for ADAMTS13 (NM_139025.1,2401-2419).
gctgacatccaggtttaca

SEQ ID NO: 155341 - DNA, 19 bp, Homo sapiens
  siRNA target sequence for ADAMTS13 (NM_139025.1,2548-2566).
gggctgcgctgggtaaact

SEQ ID NO: 155342 - DNA, 19 bp, Homo sapiens
  siRNA target sequence for ADAMTS13 (NM_139025.1,2549-2567).
ggctgcgctgggtaaacta

SEQ ID NO: 155343 - DNA, 19 bp, Homo sapiens
  siRNA target sequence for ADAMTS13 (NM_139025.1,2551-2569).
ctgcgctgggtaaactaca

SEQ ID NO: 155344 - DNA, 19 bp, Homo sapiens
  siRNA target sequence for ADAMTS13 (NM_139025.1,2765-2783).
gcagcctcctgaagacatt

SEQ ID NO: 155345 - DNA, 19 bp, Homo sapiens
  siRNA target sequence for ADAMTS13 (NM_139025.1,4413-4431).
gggctgccggctcttcatt

SEQ ID NO: 155346 - DNA, 19 bp, Homo sapiens
  siRNA target sequence for ADAMTS13 (NM_139025.1,4414-4432).
ggctgccggctcttcatta

SEQ ID NO: 155347 - DNA, 19 bp, Homo sapiens
  siRNA target sequence for ADAMTS13 (NM_139025.1,4416-4434).
ctgccggctcttcattaat

SEQ ID NO: 155348 - DNA, 19 bp, Homo sapiens
  siRNA target sequence for ADAMTS13 (NM_139025.1,4418-4436).
gccggctcttcattaatgt

SEQ ID NO: 155349 - DNA, 19 bp, Homo sapiens
  siRNA target sequence for ADAMTS13 (NM_139025.1,4501-4519).
gccaatgccagctacatct

SEQ ID NO: 155350 - DNA, 19 bp, Homo sapiens
  siRNA target sequence for ADAMTS13 (NM_139028.1,1317-1335).
cggcaggagccttagtctt

SEQ ID NO: 155351 - DNA, 19 bp, Homo sapiens
  siRNA target sequence for ADAMTS15 (NM_139055.1,144-162).
cggggatcagggactcatt

SEQ ID NO: 155352 - DNA, 19 bp, Homo sapiens
  siRNA target sequence for ADAMTS15 (NM_139055.1,146-164).
gggatcagggactcatttt

SEQ ID NO: 155353 - DNA, 19 bp, Homo sapiens
  siRNA target sequence for ADAMTS15 (NM_139055.1,206-224).
cgccggatgctcagttctt

SEQ ID NO: 155354 - DNA, 19 bp, Homo sapiens
  siRNA target sequence for ADAMTS15 (NM_139055.1,291-309).
cctgcgacgctgcttctat

SEQ ID NO: 155355 - DNA, 19 bp, Homo sapiens
  siRNA target sequence for ADAMTS15 (NM_139055.1,292-310).
ctgcgacgctgcttctatt

SEQ ID NO: 155356 - DNA, 19 bp, Homo sapiens
  siRNA target sequence for ADAMTS15 (NM_139055.1,294-312).
gcgacgctgcttctattct

SEQ ID NO: 155357 - DNA, 19 bp, Homo sapiens
  siRNA target sequence for ADAMTS15 (NM_139055.1,629-647).
ccaagcgtttcgtgtctat

SEQ ID NO: 155358 - DNA, 19 bp, Homo sapiens
  siRNA target sequence for ADAMTS15 (NM_139055.1,859-877).
ctgacgctgcgcaacttct

SEQ ID NO: 155359 - DNA, 19 bp, Homo sapiens
  siRNA target sequence for ADAMTS15 (NM_139055.1,1107-1125).
gccccatgacaatgtgaaa

SEQ ID NO: 155360 - DNA, 19 bp, Homo sapiens
  siRNA target sequence for ADAMTS15 (NM_139055.1,1153-1171).
cgagccaaccacatgatgt

SEQ ID NO: 155361 - DNA, 19 bp, Homo sapiens
  siRNA target sequence for ADAMTS15 (NM_139055.1,1367-1385).
ccaagccctgtccttacat

SEQ ID NO: 155362 - DNA, 19 bp, Homo sapiens
  siRNA target sequence for ADAMTS15 (NM_139055.1,2019-2037).
ggtgtgtgggggagacaat

SEQ ID NO: 155363 - DNA, 19 bp, Homo sapiens
  siRNA target sequence for ADAMTS15 (NM_139055.1,2020-2038).
gtgtgtgggggagacaata

SEQ ID NO: 155364 - DNA, 19 bp, Homo sapiens
  siRNA target sequence for ADAMTS15 (NM_139055.1,2133-2151).
ccgccagcgcggttacaaa

SEQ ID NO: 155365 - DNA, 19 bp, Homo sapiens
  siRNA target sequence for ADAMTS15 (NM_139055.1,2379-2397).
ggtccgctactccttctat

SEQ ID NO: 155366 - DNA, 19 bp, Homo sapiens
  siRNA target sequence for ADAMTS17 (NM_139057.1,544-562).
gtggacgagaacatctgat

SEQ ID NO: 155367 - DNA, 19 bp, Homo sapiens
  siRNA target sequence for ADAMTS17 (NM_139057.1,558-576).
ctgatcaggcgcaaatggt

SEQ ID NO: 155368 - DNA, 19 bp, Homo sapiens
  siRNA target sequence for ADAMTS17 (NM_139057.1,623-641).
ctgcaaggttctaacagaa

SEQ ID NO: 155369 - DNA, 19 bp, Homo sapiens
  siRNA target sequence for ADAMTS17 (NM_139057.1,799-817).
ccgtcatgaacatggtata

SEQ ID NO: 155370 - DNA, 19 bp, Homo sapiens
  siRNA target sequence for ADAMTS17 (NM_139057.1,838-856).
gcctggggattaaaattaa

SEQ ID NO: 155371 - DNA, 19 bp, Homo sapiens
  siRNA target sequence for ADAMTS17 (NM_139057.1,842-860).
ggggattaaaattaacatt

SEQ ID NO: 155372 - DNA, 19 bp, Homo sapiens
  siRNA target sequence for ADAMTS17 (NM_139057.1,886-904).
gacaacgtcccgctaagtt

SEQ ID NO: 155373 - DNA, 19 bp, Homo sapiens
  siRNA target sequence for ADAMTS17 (NM_139057.1,888-906).
caacgtcccgctaagttgt

SEQ ID NO: 155374 - DNA, 19 bp, Homo sapiens
  siRNA target sequence for ADAMTS17 (NM_139057.1,976-994).
cgcgatacctcggcaataa

SEQ ID NO: 155375 - DNA, 19 bp, Homo sapiens
  siRNA target sequence for ADAMTS17 (NM_139057.1,979-997).
gatacctcggcaataacca

SEQ ID NO: 155376 - DNA, 19 bp, Homo sapiens
  siRNA target sequence for ADAMTS17 (NM_139057.1,1049-1067).
gaccaggacagatttctgt

SEQ ID NO: 155377 - DNA, 19 bp, Homo sapiens
  siRNA target sequence for ADAMTS17 (NM_139057.1,1141-1159).
gtgtgcttgccgaagacaa

SEQ ID NO: 155378 - DNA, 19 bp, Homo sapiens
  siRNA target sequence for ADAMTS17 (NM_139057.1,1221-1239).
gacgatgaccactcatctt

SEQ ID NO: 155379 - DNA, 19 bp, Homo sapiens
  siRNA target sequence for ADAMTS17 (NM_139057.1,1245-1263).
ggcaggtcccacatcatgt

SEQ ID NO: 155380 - DNA, 19 bp, Homo sapiens
  siRNA target sequence for ADAMTS17 (NM_139057.1,1320-1338).
cgagatgaccttgaaaact

SEQ ID NO: 155381 - DNA, 19 bp, Homo sapiens
  siRNA target sequence for ADAMTS17 (NM_139057.1,1321-1339).
gagatgaccttgaaaactt

SEQ ID NO: 155382 - DNA, 19 bp, Homo sapiens
  siRNA target sequence for ADAMTS17 (NM_139057.1,1486-1504).
gaaacatggagcatctaat

SEQ ID NO: 155383 - DNA, 19 bp, Homo sapiens
  siRNA target sequence for ADAMTS17 (NM_139057.1,1682-1700).
catgtgcagccgaacatgt

SEQ ID NO: 155384 - DNA, 19 bp, Homo sapiens
  siRNA target sequence for ADAMTS17 (NM_139057.1,1713-1731).
cgcttcaggcagaggaaat

SEQ ID NO: 155385 - DNA, 19 bp, Homo sapiens
  siRNA target sequence for ADAMTS17 (NM_139057.1,1897-1915).
ccgtggtggttgacgataa

SEQ ID NO: 155386 - DNA, 19 bp, Homo sapiens
  siRNA target sequence for ADAMTS17 (NM_139057.1,2025-2043).
cacggcaagtgccagaaaa

SEQ ID NO: 155387 - DNA, 19 bp, Homo sapiens
  siRNA target sequence for ADAMTS17 (NM_139057.1,2154-2172).
gggacagctctcaaagact

SEQ ID NO: 155388 - DNA, 19 bp, Homo sapiens
  siRNA target sequence for ADAMTS17 (NM_139057.1,2175-2193).
ggtaaggggtccatcaaca

SEQ ID NO: 155389 - DNA, 19 bp, Homo sapiens
  siRNA target sequence for ADAMTS17 (NM_139057.1,2228-2246).
gattgcaggcacaactgtt

SEQ ID NO: 155390 - DNA, 19 bp, Homo sapiens
  siRNA target sequence for ADAMTS17 (NM_139057.1,2331-2349).
cacgaccaagattatggaa

SEQ ID NO: 155391 - DNA, 19 bp, Homo sapiens
  siRNA target sequence for ADAMTS17 (NM_139057.1,2333-2351).
cgaccaagattatggaatt

SEQ ID NO: 155392 - DNA, 19 bp, Homo sapiens
  siRNA target sequence for ADAMTS17 (NM_139057.1,2336-2354).
ccaagattatggaattcat

SEQ ID NO: 155393 - DNA, 19 bp, Homo sapiens
  siRNA target sequence for ADAMTS17 (NM_139057.1,2337-2355).
caagattatggaattcatt

SEQ ID NO: 155394 - DNA, 19 bp, Homo sapiens
  siRNA target sequence for ADAMTS17 (NM_139057.1,2378-2396).
ccgcactgcggaaaatcaa

SEQ ID NO: 155395 - DNA, 19 bp, Homo sapiens
  siRNA target sequence for ADAMTS17 (NM_139057.1,2379-2397).
cgcactgcggaaaatcaaa

SEQ ID NO: 155396 - DNA, 19 bp, Homo sapiens
  siRNA target sequence for ADAMTS17 (NM_139057.1,2415-2433).
caggactctttgttcatct

SEQ ID NO: 155397 - DNA, 19 bp, Homo sapiens
  siRNA target sequence for ADAMTS17 (NM_139057.1,2500-2518).
cgtgtacacggattgtcaa

SEQ ID NO: 155398 - DNA, 19 bp, Homo sapiens
  siRNA target sequence for ADAMTS17 (NM_139057.1,2503-2521).
gtacacggattgtcaacaa

SEQ ID NO: 155399 - DNA, 19 bp, Homo sapiens
  siRNA target sequence for ADAMTS17 (NM_139057.1,2937-2955).
ggctgctacgagtggaaaa

SEQ ID NO: 155400 - DNA, 19 bp, Homo sapiens
  siRNA target sequence for ADAMTS17 (NM_139057.1,3150-3168).
gctgctctgacctacaaat

SEQ ID NO: 155401 - DNA, 19 bp, Homo sapiens
  siRNA target sequence for ADAMTS17 (NM_139057.1,3153-3171).
gctctgacctacaaatgca

SEQ ID NO: 155402 - DNA, 19 bp, Homo sapiens
  siRNA target sequence for ADAMTS17 (NM_139057.1,3177-3195).
gaccagtggacggtatatt

SEQ ID NO: 155403 - DNA, 19 bp, Homo sapiens
  siRNA target sequence for ADAMTS17 (NM_139057.1,3198-3216).
cgggtcatccgagaaaaga

SEQ ID NO: 155404 - DNA, 19 bp, Homo sapiens
  siRNA target sequence for ADAMTS17 (NM_139057.1,3199-3217).
gggtcatccgagaaaagaa

SEQ ID NO: 155405 - DNA, 19 bp, Homo sapiens
  siRNA target sequence for ADAMTS19 (NM_133638.1,52-70).
ctgtcgaatgggatcgttt

SEQ ID NO: 155406 - DNA, 19 bp, Homo sapiens
  siRNA target sequence for ADAMTS19 (NM_133638.1,479-497).
cggatggcgacgaagtgtt

SEQ ID NO: 155407 - DNA, 19 bp, Homo sapiens
  siRNA target sequence for ADAMTS19 (NM_133638.1,649-667).
gacgcaggctgcttctaca

SEQ ID NO: 155408 - DNA, 19 bp, Homo sapiens
  siRNA target sequence for ADAMTS19 (NM_133638.1,691-709).
ggctcgctggcttctttca

SEQ ID NO: 155409 - DNA, 19 bp, Homo sapiens
  siRNA target sequence for ADAMTS19 (NM_133638.1,722-740).
gtggcctgatgggatttat

SEQ ID NO: 155410 - DNA, 19 bp, Homo sapiens
  siRNA target sequence for ADAMTS19 (NM_133638.1,734-752).
gatttatacagctcaatga

SEQ ID NO: 155411 - DNA, 19 bp, Homo sapiens
  siRNA target sequence for ADAMTS19 (NM_133638.1,744-762).
gctcaatgaggacttcata

SEQ ID NO: 155412 - DNA, 19 bp, Homo sapiens
  siRNA target sequence for ADAMTS19 (NM_133638.1,745-763).
ctcaatgaggacttcatat

SEQ ID NO: 155413 - DNA, 19 bp, Homo sapiens
  siRNA target sequence for ADAMTS19 (NM_133638.1,769-787).
gagccactcaatgatacaa

SEQ ID NO: 155414 - DNA, 19 bp, Homo sapiens
  siRNA target sequence for ADAMTS19 (NM_133638.1,814-832).
gtatataggcagaaaaggt

SEQ ID NO: 155415 - DNA, 19 bp, Homo sapiens
  siRNA target sequence for ADAMTS19 (NM_133638.1,862-880).
gctcttcacagtcattact

SEQ ID NO: 155416 - DNA, 19 bp, Homo sapiens
  siRNA target sequence for ADAMTS19 (NM_133638.1,872-890).
gtcattactgtggtatcat

SEQ ID NO: 155417 - DNA, 19 bp, Homo sapiens
  siRNA target sequence for ADAMTS19 (NM_133638.1,874-892).
cattactgtggtatcattt

SEQ ID NO: 155418 - DNA, 19 bp, Homo sapiens
  siRNA target sequence for ADAMTS19 (NM_133638.1,879-897).
ctgtggtatcatttcagat

SEQ ID NO: 155419 - DNA, 19 bp, Homo sapiens
  siRNA target sequence for ADAMTS19 (NM_133638.1,881-899).
gtggtatcatttcagataa

SEQ ID NO: 155420 - DNA, 19 bp, Homo sapiens
  siRNA target sequence for ADAMTS19 (NM_133638.1,901-919).
ggaagacctaggtctagaa

SEQ ID NO: 155421 - DNA, 19 bp, Homo sapiens
  siRNA target sequence for ADAMTS19 (NM_133638.1,902-920).
gaagacctaggtctagaaa

SEQ ID NO: 155422 - DNA, 19 bp, Homo sapiens
  siRNA target sequence for ADAMTS19 (NM_133638.1,932-950).
gtggaagagggaaacgata

SEQ ID NO: 155423 - DNA, 19 bp, Homo sapiens
  siRNA target sequence for ADAMTS19 (NM_133638.1,940-958).
gggaaacgatattcataca

SEQ ID NO: 155424 - DNA, 19 bp, Homo sapiens
  siRNA target sequence for ADAMTS19 (NM_133638.1,941-959).
ggaaacgatattcatacaa

SEQ ID NO: 155425 - DNA, 19 bp, Homo sapiens
  siRNA target sequence for ADAMTS19 (NM_133638.1,965-983).
ctcaagaatacaacataga

SEQ ID NO: 155426 - DNA, 19 bp, Homo sapiens
  siRNA target sequence for ADAMTS19 (NM_133638.1,1002-1020).
cccagcaatggtttcctat

SEQ ID NO: 155427 - DNA, 19 bp, Homo sapiens
  siRNA target sequence for ADAMTS19 (NM_133638.1,1036-1054).
gccaggagattcattctaa

SEQ ID NO: 155428 - DNA, 19 bp, Homo sapiens
  siRNA target sequence for ADAMTS19 (NM_133638.1,1040-1058).
ggagattcattctaaccat

SEQ ID NO: 155429 - DNA, 19 bp, Homo sapiens
  siRNA target sequence for ADAMTS19 (NM_133638.1,1108-1126).
gtcaatcttcgtgtgataa

SEQ ID NO: 155430 - DNA, 19 bp, Homo sapiens
  siRNA target sequence for ADAMTS19 (NM_133638.1,1114-1132).
cttcgtgtgataaagctta

SEQ ID NO: 155431 - DNA, 19 bp, Homo sapiens
  siRNA target sequence for ADAMTS19 (NM_133638.1,1118-1136).
gtgtgataaagcttattct

SEQ ID NO: 155432 - DNA, 19 bp, Homo sapiens
  siRNA target sequence for ADAMTS19 (NM_133638.1,1148-1166).
ctccaccagaactatatat

SEQ ID NO: 155433 - DNA, 19 bp, Homo sapiens
  siRNA target sequence for ADAMTS19 (NM_133638.1,1259-1277).
caaactggggggaagacat

SEQ ID NO: 155434 - DNA, 19 bp, Homo sapiens
  siRNA target sequence for ADAMTS19 (NM_133638.1,1285-1303).
gtggatgcagctatactta

SEQ ID NO: 155435 - DNA, 19 bp, Homo sapiens
  siRNA target sequence for ADAMTS19 (NM_133638.1,1288-1306).
gatgcagctatacttataa

SEQ ID NO: 155436 - DNA, 19 bp, Homo sapiens
  siRNA target sequence for ADAMTS19 (NM_133638.1,1291-1309).
gcagctatacttataacaa

SEQ ID NO: 155437 - DNA, 19 bp, Homo sapiens
  siRNA target sequence for ADAMTS19 (NM_133638.1,1329-1347).
caaagatgaaccatgtgat

SEQ ID NO: 155438 - DNA, 19 bp, Homo sapiens
  siRNA target sequence for ADAMTS19 (NM_133638.1,1351-1369).
gttggtatagcttacttga

SEQ ID NO: 155439 - DNA, 19 bp, Homo sapiens
  siRNA target sequence for ADAMTS19 (NM_133638.1,1454-1472).
gtcacaacatgggcattaa

SEQ ID NO: 155440 - DNA, 19 bp, Homo sapiens
  siRNA target sequence for ADAMTS19 (NM_133638.1,1458-1476).
caacatgggcattaaccat

SEQ ID NO: 155441 - DNA, 19 bp, Homo sapiens
  siRNA target sequence for ADAMTS19 (NM_133638.1,1464-1482).
gggcattaaccatgacaat

SEQ ID NO: 155442 - DNA, 19 bp, Homo sapiens
  siRNA target sequence for ADAMTS19 (NM_133638.1,1466-1484).
gcattaaccatgacaatga

SEQ ID NO: 155443 - DNA, 19 bp, Homo sapiens
  siRNA target sequence for ADAMTS19 (NM_133638.1,1496-1514).
gtgctgatggtcttcatat

SEQ ID NO: 155444 - DNA, 19 bp, Homo sapiens
  siRNA target sequence for ADAMTS19 (NM_133638.1,1501-1519).
gatggtcttcatatcatgt

SEQ ID NO: 155445 - DNA, 19 bp, Homo sapiens
  siRNA target sequence for ADAMTS19 (NM_133638.1,1530-1548).
gattaaaggacagaatctt

SEQ ID NO: 155446 - DNA, 19 bp, Homo sapiens
  siRNA target sequence for ADAMTS19 (NM_133638.1,1617-1635).
ctgcttgctacaaacaaat

SEQ ID NO: 155447 - DNA, 19 bp, Homo sapiens
  siRNA target sequence for ADAMTS19 (NM_133638.1,1637-1655).
cgcagagtgtcaattctgt

SEQ ID NO: 155448 - DNA, 19 bp, Homo sapiens
  siRNA target sequence for ADAMTS19 (NM_133638.1,1674-1692).
gccagggatgacatacact

SEQ ID NO: 155449 - DNA, 19 bp, Homo sapiens
  siRNA target sequence for ADAMTS19 (NM_133638.1,1683-1701).
gacatacactgctgatgaa

SEQ ID NO: 155450 - DNA, 19 bp, Homo sapiens
  siRNA target sequence for ADAMTS19 (NM_133638.1,1720-1738).
gggccattggcttcttttt

SEQ ID NO: 155451 - DNA, 19 bp, Homo sapiens
  siRNA target sequence for ADAMTS19 (NM_133638.1,1722-1740).
gccattggcttctttttgt

SEQ ID NO: 155452 - DNA, 19 bp, Homo sapiens
  siRNA target sequence for ADAMTS19 (NM_133638.1,1724-1742).
cattggcttctttttgtca

SEQ ID NO: 155453 - DNA, 19 bp, Homo sapiens
  siRNA target sequence for ADAMTS19 (NM_133638.1,1743-1761).
ggagatgcagcatgttatt

SEQ ID NO: 155454 - DNA, 19 bp, Homo sapiens
  siRNA target sequence for ADAMTS19 (NM_133638.1,1756-1774).
gttatttgcacaggattat

SEQ ID NO: 155455 - DNA, 19 bp, Homo sapiens
  siRNA target sequence for ADAMTS19 (NM_133638.1,1812-1830).
gctagacccaccaatggat

SEQ ID NO: 155456 - DNA, 19 bp, Homo sapiens
  siRNA target sequence for ADAMTS19 (NM_133638.1,1835-1853).
ctgactgtgaccttggtaa

SEQ ID NO: 155457 - DNA, 19 bp, Homo sapiens
  siRNA target sequence for ADAMTS19 (NM_133638.1,1962-1980).
cagtcgagagcgcaaatgt

SEQ ID NO: 155458 - DNA, 19 bp, Homo sapiens
  siRNA target sequence for ADAMTS19 (NM_133638.1,2085-2103).
gcaatgtcaggcttatagt

SEQ ID NO: 155459 - DNA, 19 bp, Homo sapiens
  siRNA target sequence for ADAMTS19 (NM_133638.1,2095-2113).
gcttatagtgttagaactt

SEQ ID NO: 155460 - DNA, 19 bp, Homo sapiens
  siRNA target sequence for ADAMTS19 (NM_133638.1,2111-2129).
cttcctccccaaagcatat

SEQ ID NO: 155461 - DNA, 19 bp, Homo sapiens
  siRNA target sequence for ADAMTS19 (NM_133638.1,2114-2132).
cctccccaaagcatatact

SEQ ID NO: 155462 - DNA, 19 bp, Homo sapiens
  siRNA target sequence for ADAMTS19 (NM_133638.1,2243-2261).
gtggctatcagggattaga

SEQ ID NO: 155463 - DNA, 19 bp, Homo sapiens
  siRNA target sequence for ADAMTS19 (NM_133638.1,2245-2263).
ggctatcagggattagata

SEQ ID NO: 155464 - DNA, 19 bp, Homo sapiens
  siRNA target sequence for ADAMTS19 (NM_133638.1,2317-2335).
cttgcaagagaagatcatt

SEQ ID NO: 155465 - DNA, 19 bp, Homo sapiens
  siRNA target sequence for ADAMTS19 (NM_133638.1,2394-2412).
caccagaggagcaggttat

SEQ ID NO: 155466 - DNA, 19 bp, Homo sapiens
  siRNA target sequence for ADAMTS19 (NM_133638.1,2397-2415).
cagaggagcaggttatgta

SEQ ID NO: 155467 - DNA, 19 bp, Homo sapiens
  siRNA target sequence for ADAMTS19 (NM_133638.1,2399-2417).
gaggagcaggttatgtaga

SEQ ID NO: 155468 - DNA, 19 bp, Homo sapiens
  siRNA target sequence for ADAMTS19 (NM_133638.1,2402-2420).
gagcaggttatgtagaagt

SEQ ID NO: 155469 - DNA, 19 bp, Homo sapiens
  siRNA target sequence for ADAMTS19 (NM_133638.1,2469-2487).
gccggcacatagctattta

SEQ ID NO: 155470 - DNA, 19 bp, Homo sapiens
  siRNA target sequence for ADAMTS19 (NM_133638.1,2472-2490).
ggcacatagctatttagct

SEQ ID NO: 155471 - DNA, 19 bp, Homo sapiens
  siRNA target sequence for ADAMTS19 (NM_133638.1,2503-2521).
ggcaaacagtctattaata

SEQ ID NO: 155472 - DNA, 19 bp, Homo sapiens
  siRNA target sequence for ADAMTS19 (NM_133638.1,2522-2540).
gtgactggaagattgaaca

SEQ ID NO: 155473 - DNA, 19 bp, Homo sapiens
  siRNA target sequence for ADAMTS19 (NM_133638.1,2539-2557).
cactctggagccttcaatt

SEQ ID NO: 155474 - DNA, 19 bp, Homo sapiens
  siRNA target sequence for ADAMTS19 (NM_133638.1,2564-2582).
gaactaccgttcattatgt

SEQ ID NO: 155475 - DNA, 19 bp, Homo sapiens
  siRNA target sequence for ADAMTS19 (NM_133638.1,2621-2639).
ctactacagcacctttaca

SEQ ID NO: 155476 - DNA, 19 bp, Homo sapiens
  siRNA target sequence for ADAMTS19 (NM_133638.1,2624-2642).
ctacagcacctttacatct

SEQ ID NO: 155477 - DNA, 19 bp, Homo sapiens
  siRNA target sequence for ADAMTS19 (NM_133638.1,2677-2695).
cttcactatgaatacacta

SEQ ID NO: 155478 - DNA, 19 bp, Homo sapiens
  siRNA target sequence for ADAMTS19 (NM_133638.1,2735-2753).
cacctgagcccctcttcat

SEQ ID NO: 155479 - DNA, 19 bp, Homo sapiens
  siRNA target sequence for ADAMTS19 (NM_133638.1,2761-2779).
cacacaagctgggaagatt

SEQ ID NO: 155480 - DNA, 19 bp, Homo sapiens
  siRNA target sequence for ADAMTS19 (NM_133638.1,2859-2877).
ggacaatgagaaatgcaaa

SEQ ID NO: 155481 - DNA, 19 bp, Homo sapiens
  siRNA target sequence for ADAMTS19 (NM_133638.1,2891-2909).
cagagccacagattcgaaa

SEQ ID NO: 155482 - DNA, 19 bp, Homo sapiens
  siRNA target sequence for ADAMTS19 (NM_133638.1,2958-2976).
cccttgttcacgaacttgt

SEQ ID NO: 155483 - DNA, 19 bp, Homo sapiens
  siRNA target sequence for ADAMTS19 (NM_133638.1,3169-3187).
cgtcatcggaccgttagat

SEQ ID NO: 155484 - DNA, 19 bp, Homo sapiens
  siRNA target sequence for ADAMTS19 (NM_133638.1,3172-3190).
catcggaccgttagatgta

SEQ ID NO: 155485 - DNA, 19 bp, Homo sapiens
  siRNA target sequence for ADAMTS19 (NM_133638.1,3317-3335).
gaatgcagtcccgtgtaat

SEQ ID NO: 155486 - DNA, 19 bp, Homo sapiens
  siRNA target sequence for ADAMTS19 (NM_133638.1,3321-3339).
gcagtcccgtgtaatccaa

SEQ ID NO: 155487 - DNA, 19 bp, Homo sapiens
  siRNA target sequence for ADAMTS19 (NM_133638.1,3322-3340).
cagtcccgtgtaatccaat

SEQ ID NO: 155488 - DNA, 19 bp, Homo sapiens
  siRNA target sequence for ADAMTS19 (NM_133638.1,3326-3344).
cccgtgtaatccaatgcat

SEQ ID NO: 155489 - DNA, 19 bp, Homo sapiens
  siRNA target sequence for ADAMTS19 (NM_133638.1,3337-3355).
caatgcatgcataagatca

SEQ ID NO: 155490 - DNA, 19 bp, Homo sapiens
  siRNA target sequence for ADAMTS19 (NM_133638.1,3469-3487).
ctggctgctctgactttca

SEQ ID NO: 155491 - DNA, 19 bp, Homo sapiens
  siRNA target sequence for ADAMTS19 (NM_133638.1,3518-3536).
gccgagtgatacgtgaaaa

SEQ ID NO: 155492 - DNA, 19 bp, Homo sapiens
  siRNA target sequence for ADAMTS19 (NM_133638.1,3521-3539).
gagtgatacgtgaaaagaa

SEQ ID NO: 155493 - DNA, 19 bp, Homo sapiens
  siRNA target sequence for ADAMTS19 (NM_133638.1,3530-3548).
gtgaaaagaacctatgtca

SEQ ID NO: 155494 - DNA, 19 bp, Homo sapiens
  siRNA target sequence for ADAMTS19 (NM_133638.1,3565-3583).
cagcgctgctgtgaaacat

SEQ ID NO: 155495 - DNA, 19 bp, Homo sapiens
  siRNA target sequence for ADAMTS3 (NM_014243.1,119-137).
gaaatggtgcaaatagatt

SEQ ID NO: 155496 - DNA, 19 bp, Homo sapiens
  siRNA target sequence for ADAMTS3 (NM_014243.1,134-152).
gatttaccaataaagagat

SEQ ID NO: 155497 - DNA, 19 bp, Homo sapiens
  siRNA target sequence for ADAMTS3 (NM_014243.1,172-190).
gactccagtcagcacaaat

SEQ ID NO: 155498 - DNA, 19 bp, Homo sapiens
  siRNA target sequence for ADAMTS3 (NM_014243.1,177-195).
cagtcagcacaaatctaga

SEQ ID NO: 155499 - DNA, 19 bp, Homo sapiens
  siRNA target sequence for ADAMTS3 (NM_014243.1,202-220).
ctatctctcccatactctt

SEQ ID NO: 155500 - DNA, 19 bp, Homo sapiens
  siRNA target sequence for ADAMTS3 (NM_014243.1,289-307).
cacggcatttggaaaagat

SEQ ID NO: 155501 - DNA, 19 bp, Homo sapiens
  siRNA target sequence for ADAMTS3 (NM_014243.1,378-396).
ctctggtgcctgggaatat

SEQ ID NO: 155502 - DNA, 19 bp, Homo sapiens
  siRNA target sequence for ADAMTS3 (NM_014243.1,422-440).
ccaggaagtgctacgtata

SEQ ID NO: 155503 - DNA, 19 bp, Homo sapiens
  siRNA target sequence for ADAMTS3 (NM_014243.1,455-473).
gagcctttgcagactaact

SEQ ID NO: 155504 - DNA, 19 bp, Homo sapiens
  siRNA target sequence for ADAMTS3 (NM_014243.1,463-481).
gcagactaactgtgcttat

SEQ ID NO: 155505 - DNA, 19 bp, Homo sapiens
  siRNA target sequence for ADAMTS3 (NM_014243.1,536-554).
ggtctggctggaatgataa

SEQ ID NO: 155506 - DNA, 19 bp, Homo sapiens
  siRNA target sequence for ADAMTS3 (NM_014243.1,558-576).
gtgataatgaagagtattt

SEQ ID NO: 155507 - DNA, 19 bp, Homo sapiens
  siRNA target sequence for ADAMTS3 (NM_014243.1,621-639).
gaaggattcatgttgtcta

SEQ ID NO: 155508 - DNA, 19 bp, Homo sapiens
  siRNA target sequence for ADAMTS3 (NM_014243.1,624-642).
ggattcatgttgtctacaa

SEQ ID NO: 155509 - DNA, 19 bp, Homo sapiens
  siRNA target sequence for ADAMTS3 (NM_014243.1,629-647).
catgttgtctacaagagat

SEQ ID NO: 155510 - DNA, 19 bp, Homo sapiens
  siRNA target sequence for ADAMTS3 (NM_014243.1,656-674).
gaacaggctcccatagaca

SEQ ID NO: 155511 - DNA, 19 bp, Homo sapiens
  siRNA target sequence for ADAMTS3 (NM_014243.1,719-737).
gatgatctaggtactgttt

SEQ ID NO: 155512 - DNA, 19 bp, Homo sapiens
  siRNA target sequence for ADAMTS3 (NM_014243.1,751-769).
ccagcagctgaatgaaaca

SEQ ID NO: 155513 - DNA, 19 bp, Homo sapiens
  siRNA target sequence for ADAMTS3 (NM_014243.1,785-803).
cacgcgggagaaaacgatt

SEQ ID NO: 155514 - DNA, 19 bp, Homo sapiens
  siRNA target sequence for ADAMTS3 (NM_014243.1,788-806).
gcgggagaaaacgattaca

SEQ ID NO: 155515 - DNA, 19 bp, Homo sapiens
  siRNA target sequence for ADAMTS3 (NM_014243.1,789-807).
cgggagaaaacgattacaa

SEQ ID NO: 155516 - DNA, 19 bp, Homo sapiens
  siRNA target sequence for ADAMTS3 (NM_014243.1,792-810).
gagaaaacgattacaatat

SEQ ID NO: 155517 - DNA, 19 bp, Homo sapiens
  siRNA target sequence for ADAMTS3 (NM_014243.1,835-853).
ctctgtggtccgtttccat

SEQ ID NO: 155518 - DNA, 19 bp, Homo sapiens
  siRNA target sequence for ADAMTS3 (NM_014243.1,922-940).
gtccctcggagtgcatata

SEQ ID NO: 155519 - DNA, 19 bp, Homo sapiens
  siRNA target sequence for ADAMTS3 (NM_014243.1,924-942).
ccctcggagtgcatataaa

SEQ ID NO: 155520 - DNA, 19 bp, Homo sapiens
  siRNA target sequence for ADAMTS3 (NM_014243.1,925-943).
cctcggagtgcatataaat

SEQ ID NO: 155521 - DNA, 19 bp, Homo sapiens
  siRNA target sequence for ADAMTS3 (NM_014243.1,961-979).
gataatgctgggatatgca

SEQ ID NO: 155522 - DNA, 19 bp, Homo sapiens
  siRNA target sequence for ADAMTS3 (NM_014243.1,982-1000).
gtccatcagcctcatagaa

SEQ ID NO: 155523 - DNA, 19 bp, Homo sapiens
  siRNA target sequence for ADAMTS3 (NM_014243.1,1045-1063).
gtcccaacagcaaagatct

SEQ ID NO: 155524 - DNA, 19 bp, Homo sapiens
  siRNA target sequence for ADAMTS3 (NM_014243.1,1048-1066).
ccaacagcaaagatctgat

SEQ ID NO: 155525 - DNA, 19 bp, Homo sapiens
  siRNA target sequence for ADAMTS3 (NM_014243.1,1082-1100).
caccatgaccatgcaattt

SEQ ID NO: 155526 - DNA, 19 bp, Homo sapiens
  siRNA target sequence for ADAMTS3 (NM_014243.1,1084-1102).
ccatgaccatgcaattttt

SEQ ID NO: 155527 - DNA, 19 bp, Homo sapiens
  siRNA target sequence for ADAMTS3 (NM_014243.1,1091-1109).
catgcaatttttttaacca

SEQ ID NO: 155528 - DNA, 19 bp, Homo sapiens
  siRNA target sequence for ADAMTS3 (NM_014243.1,1125-1143).
ctgctggaatgcaaggata

SEQ ID NO: 155529 - DNA, 19 bp, Homo sapiens
  siRNA target sequence for ADAMTS3 (NM_014243.1,1179-1197).
gttgtaccctgaatcatga

SEQ ID NO: 155530 - DNA, 19 bp, Homo sapiens
  siRNA target sequence for ADAMTS3 (NM_014243.1,1321-1339).
ggtacaagcagcattccat

SEQ ID NO: 155531 - DNA, 19 bp, Homo sapiens
  siRNA target sequence for ADAMTS3 (NM_014243.1,1354-1372).
ccgatgcagtggtcaagaa

SEQ ID NO: 155532 - DNA, 19 bp, Homo sapiens
  siRNA target sequence for ADAMTS3 (NM_014243.1,1364-1382).
ggtcaagaactgaaaagat

SEQ ID NO: 155533 - DNA, 19 bp, Homo sapiens
  siRNA target sequence for ADAMTS3 (NM_014243.1,1452-1470).
ctggaatcaattattctat

SEQ ID NO: 155534 - DNA, 19 bp, Homo sapiens
  siRNA target sequence for ADAMTS3 (NM_014243.1,1471-1489).
ggatgagcaatgtcgtttt

SEQ ID NO: 155535 - DNA, 19 bp, Homo sapiens
  siRNA target sequence for ADAMTS3 (NM_014243.1,1496-1514).
ggtgttggctataaaatgt

SEQ ID NO: 155536 - DNA, 19 bp, Homo sapiens
  siRNA target sequence for ADAMTS3 (NM_014243.1,1604-1622).
ccacttgatgggactgaat

SEQ ID NO: 155537 - DNA, 19 bp, Homo sapiens
  siRNA target sequence for ADAMTS3 (NM_014243.1,1641-1659).
gctataagggtcattgcat

SEQ ID NO: 155538 - DNA, 19 bp, Homo sapiens
  siRNA target sequence for ADAMTS3 (NM_014243.1,1657-1675).
catgtggaagaatgctaat

SEQ ID NO: 155539 - DNA, 19 bp, Homo sapiens
  siRNA target sequence for ADAMTS3 (NM_014243.1,1698-1716).
gggggtcatggactaaatt

SEQ ID NO: 155540 - DNA, 19 bp, Homo sapiens
  siRNA target sequence for ADAMTS3 (NM_014243.1,1699-1717).
ggggtcatggactaaattt

SEQ ID NO: 155541 - DNA, 19 bp, Homo sapiens
  siRNA target sequence for ADAMTS3 (NM_014243.1,1823-1841).
gagtaccagctttgtaaca

SEQ ID NO: 155542 - DNA, 19 bp, Homo sapiens
  siRNA target sequence for ADAMTS3 (NM_014243.1,1825-1843).
gtaccagctttgtaacaca

SEQ ID NO: 155543 - DNA, 19 bp, Homo sapiens
  siRNA target sequence for ADAMTS3 (NM_014243.1,1894-1912).
gcgaaactcccactttgaa

SEQ ID NO: 155544 - DNA, 19 bp, Homo sapiens
  siRNA target sequence for ADAMTS3 (NM_014243.1,1930-1948).
ccactggttgccatatgaa

SEQ ID NO: 155545 - DNA, 19 bp, Homo sapiens
  siRNA target sequence for ADAMTS3 (NM_014243.1,1998-2016).
ctggagatgttgcttacat

SEQ ID NO: 155546 - DNA, 19 bp, Homo sapiens
  siRNA target sequence for ADAMTS3 (NM_014243.1,2036-2054).
ggaacgcactgttcttaca

SEQ ID NO: 155547 - DNA, 19 bp, Homo sapiens
  siRNA target sequence for ADAMTS3 (NM_014243.1,2037-2055).
gaacgcactgttcttacaa

SEQ ID NO: 155548 - DNA, 19 bp, Homo sapiens
  siRNA target sequence for ADAMTS3 (NM_014243.1,2121-2139).
ctaataaggttgaggataa

SEQ ID NO: 155549 - DNA, 19 bp, Homo sapiens
  siRNA target sequence for ADAMTS3 (NM_014243.1,2217-2235).
ggtaccttaagatgtttga

SEQ ID NO: 155550 - DNA, 19 bp, Homo sapiens
  siRNA target sequence for ADAMTS3 (NM_014243.1,2218-2236).
gtaccttaagatgtttgat

SEQ ID NO: 155551 - DNA, 19 bp, Homo sapiens
  siRNA target sequence for ADAMTS3 (NM_014243.1,2247-2265).
gggctagacatgtgttaat

SEQ ID NO: 155552 - DNA, 19 bp, Homo sapiens
  siRNA target sequence for ADAMTS3 (NM_014243.1,2250-2268).
ctagacatgtgttaatcca

SEQ ID NO: 155553 - DNA, 19 bp, Homo sapiens
  siRNA target sequence for ADAMTS3 (NM_014243.1,2275-2293).
cgaggcttctcctcatatt

SEQ ID NO: 155554 - DNA, 19 bp, Homo sapiens
  siRNA target sequence for ADAMTS3 (NM_014243.1,2308-2326).
ccaggctacaggccattat

SEQ ID NO: 155555 - DNA, 19 bp, Homo sapiens
  siRNA target sequence for ADAMTS3 (NM_014243.1,2309-2327).
caggctacaggccattata

SEQ ID NO: 155556 - DNA, 19 bp, Homo sapiens
  siRNA target sequence for ADAMTS3 (NM_014243.1,2353-2371).
caagtcgcggaccttcata

SEQ ID NO: 155557 - DNA, 19 bp, Homo sapiens
  siRNA target sequence for ADAMTS3 (NM_014243.1,2356-2374).
gtcgcggaccttcatagat

SEQ ID NO: 155558 - DNA, 19 bp, Homo sapiens
  siRNA target sequence for ADAMTS3 (NM_014243.1,2358-2376).
cgcggaccttcatagatct

SEQ ID NO: 155559 - DNA, 19 bp, Homo sapiens
  siRNA target sequence for ADAMTS3 (NM_014243.1,2359-2377).
gcggaccttcatagatctt

SEQ ID NO: 155560 - DNA, 19 bp, Homo sapiens
  siRNA target sequence for ADAMTS3 (NM_014243.1,2383-2401).
ggagtgggattataacatt

SEQ ID NO: 155561 - DNA, 19 bp, Homo sapiens
  siRNA target sequence for ADAMTS3 (NM_014243.1,2425-2443).
caccgatggacctttacat

SEQ ID NO: 155562 - DNA, 19 bp, Homo sapiens
  siRNA target sequence for ADAMTS3 (NM_014243.1,2427-2445).
ccgatggacctttacatga

SEQ ID NO: 155563 - DNA, 19 bp, Homo sapiens
  siRNA target sequence for ADAMTS3 (NM_014243.1,2428-2446).
cgatggacctttacatgat

SEQ ID NO: 155564 - DNA, 19 bp, Homo sapiens
  siRNA target sequence for ADAMTS3 (NM_014243.1,2436-2454).
ctttacatgatcctgttat

SEQ ID NO: 155565 - DNA, 19 bp, Homo sapiens
  siRNA target sequence for ADAMTS3 (NM_014243.1,2484-2502).
cccgctctagcctgacata

SEQ ID NO: 155566 - DNA, 19 bp, Homo sapiens
  siRNA target sequence for ADAMTS3 (NM_014243.1,2485-2503).
ccgctctagcctgacatat

SEQ ID NO: 155567 - DNA, 19 bp, Homo sapiens
  siRNA target sequence for ADAMTS3 (NM_014243.1,2486-2504).
cgctctagcctgacatata

SEQ ID NO: 155568 - DNA, 19 bp, Homo sapiens
  siRNA target sequence for ADAMTS3 (NM_014243.1,2487-2505).
gctctagcctgacatataa

SEQ ID NO: 155569 - DNA, 19 bp, Homo sapiens
  siRNA target sequence for ADAMTS3 (NM_014243.1,2490-2508).
ctagcctgacatataagta

SEQ ID NO: 155570 - DNA, 19 bp, Homo sapiens
  siRNA target sequence for ADAMTS3 (NM_014243.1,2535-2553).
caatcaacagcaacaatgt

SEQ ID NO: 155571 - DNA, 19 bp, Homo sapiens
  siRNA target sequence for ADAMTS3 (NM_014243.1,2627-2645).
ggtttccagtacactaaat

SEQ ID NO: 155572 - DNA, 19 bp, Homo sapiens
  siRNA target sequence for ADAMTS3 (NM_014243.1,2632-2650).
ccagtacactaaatatgga

SEQ ID NO: 155573 - DNA, 19 bp, Homo sapiens
  siRNA target sequence for ADAMTS3 (NM_014243.1,2633-2651).
cagtacactaaatatggat

SEQ ID NO: 155574 - DNA, 19 bp, Homo sapiens
  siRNA target sequence for ADAMTS3 (NM_014243.1,2649-2667).
gatgccgtaggaaaagtga

SEQ ID NO: 155575 - DNA, 19 bp, Homo sapiens
  siRNA target sequence for ADAMTS3 (NM_014243.1,2652-2670).
gccgtaggaaaagtgataa

SEQ ID NO: 155576 - DNA, 19 bp, Homo sapiens
  siRNA target sequence for ADAMTS3 (NM_014243.1,2654-2672).
cgtaggaaaagtgataata

SEQ ID NO: 155577 - DNA, 19 bp, Homo sapiens
  siRNA target sequence for ADAMTS3 (NM_014243.1,2704-2722).
caaaaagccgaaacctatt

SEQ ID NO: 155578 - DNA, 19 bp, Homo sapiens
  siRNA target sequence for ADAMTS3 (NM_014243.1,2724-2742).
gacgaatgtgcaatattca

SEQ ID NO: 155579 - DNA, 19 bp, Homo sapiens
  siRNA target sequence for ADAMTS3 (NM_014243.1,2727-2745).
gaatgtgcaatattcaaga

SEQ ID NO: 155580 - DNA, 19 bp, Homo sapiens
  siRNA target sequence for ADAMTS3 (NM_014243.1,2864-2882).
cgctctgtgcacagcaaat

SEQ ID NO: 155581 - DNA, 19 bp, Homo sapiens
  siRNA target sequence for ADAMTS3 (NM_014243.1,3066-3084).
gtcaactgcctccttgtaa

SEQ ID NO: 155582 - DNA, 19 bp, Homo sapiens
  siRNA target sequence for ADAMTS3 (NM_014243.1,3073-3091).
gcctccttgtaatgatgaa

SEQ ID NO: 155583 - DNA, 19 bp, Homo sapiens
  siRNA target sequence for ADAMTS3 (NM_014243.1,3147-3165).
gctccataccaggttataa

SEQ ID NO: 155584 - DNA, 19 bp, Homo sapiens
  siRNA target sequence for ADAMTS3 (NM_014243.1,3150-3168).
ccataccaggttataacaa

SEQ ID NO: 155585 - DNA, 19 bp, Homo sapiens
  siRNA target sequence for ADAMTS3 (NM_014243.1,3158-3176).
ggttataacaagttatgtt

SEQ ID NO: 155586 - DNA, 19 bp, Homo sapiens
  siRNA target sequence for ADAMTS3 (NM_014243.1,3205-3223).
cctgccaccaccatacctt

SEQ ID NO: 155587 - DNA, 19 bp, Homo sapiens
  siRNA target sequence for ADAMTS3 (NM_014243.1,3284-3302).
ctagtgatgcctacatctt

SEQ ID NO: 155588 - DNA, 19 bp, Homo sapiens
  siRNA target sequence for ADAMTS3 (NM_014243.1,3294-3312).
ctacatctttggttcctta

SEQ ID NO: 155589 - DNA, 19 bp, Homo sapiens
  siRNA target sequence for ADAMTS3 (NM_014243.1,3362-3380).
gtgggaggtccaaatgcat

SEQ ID NO: 155590 - DNA, 19 bp, Homo sapiens
  siRNA target sequence for ADAMTS3 (NM_014243.1,3391-3409).
caggccaaacagtaaacct

SEQ ID NO: 155591 - DNA, 19 bp, Homo sapiens
  siRNA target sequence for ADAMTS3 (NM_014243.1,3619-3637).
cagacgtccgacaagatca

SEQ ID NO: 155592 - DNA, 19 bp, Homo sapiens
  siRNA target sequence for ADAMTS4 (NM_005099.2,787-805).
cctgactggcaccatcaat

SEQ ID NO: 155593 - DNA, 19 bp, Homo sapiens
  siRNA target sequence for ADAMTS4 (NM_005099.2,853-871).
gttaggcgtgttacaatat

SEQ ID NO: 155594 - DNA, 19 bp, Homo sapiens
  siRNA target sequence for ADAMTS4 (NM_005099.2,904-922).
gggaggcacccctaactct

SEQ ID NO: 155595 - DNA, 19 bp, Homo sapiens
  siRNA target sequence for ADAMTS4 (NM_005099.2,1493-1511).
ctgggtcatgtcttcaaca

SEQ ID NO: 155596 - DNA, 19 bp, Homo sapiens
  siRNA target sequence for ADAMTS4 (NM_005099.2,1720-1738).
ccctggcaaggactatgat

SEQ ID NO: 155597 - DNA, 19 bp, Homo sapiens
  siRNA target sequence for ADAMTS4 (NM_005099.2,1942-1960).
ccaggacttcaatattcca

SEQ ID NO: 155598 - DNA, 19 bp, Homo sapiens
  siRNA target sequence for ADAMTS4 (NM_005099.2,2284-2302).
ggcactgggctactactat

SEQ ID NO: 155599 - DNA, 19 bp, Homo sapiens
  siRNA target sequence for ADAMTS4 (NM_005099.2,2491-2509).
caggtacggatacaacaat

SEQ ID NO: 155600 - DNA, 19 bp, Homo sapiens
  siRNA target sequence for ADAMTS4 (NM_005099.2,2493-2511).
ggtacggatacaacaatgt

SEQ ID NO: 155601 - DNA, 19 bp, Homo sapiens
  siRNA target sequence for ADAMTS4 (NM_005099.2,2615-2633).
gccctcaatggtgaataca

SEQ ID NO: 155602 - DNA, 19 bp, Homo sapiens
  siRNA target sequence for ADAMTS4 (NM_005099.2,2860-2878).
gcaccgaagagcacagatt

SEQ ID NO: 155603 - DNA, 19 bp, Homo sapiens
  siRNA target sequence for ADAMTS5 (NM_007038.1,544-562).
gctctctggctgtctttga

SEQ ID NO: 155604 - DNA, 19 bp, Homo sapiens
  siRNA target sequence for ADAMTS5 (NM_007038.1,1214-1232).
gtttactcgggaggattta

SEQ ID NO: 155605 - DNA, 19 bp, Homo sapiens
  siRNA target sequence for ADAMTS5 (NM_007038.1,1266-1284).
gcagacgttgggaccatat

SEQ ID NO: 155606 - DNA, 19 bp, Homo sapiens
  siRNA target sequence for ADAMTS5 (NM_007038.1,1269-1287).
gacgttgggaccatatgtt

SEQ ID NO: 155607 - DNA, 19 bp, Homo sapiens
  siRNA target sequence for ADAMTS5 (NM_007038.1,1271-1289).
cgttgggaccatatgttct

SEQ ID NO: 155608 - DNA, 19 bp, Homo sapiens
  siRNA target sequence for ADAMTS5 (NM_007038.1,1295-1313).
gcgcagctgtgctgtgatt

SEQ ID NO: 155609 - DNA, 19 bp, Homo sapiens
  siRNA target sequence for ADAMTS5 (NM_007038.1,1348-1366).
ctcacgaaatcggacattt

SEQ ID NO: 155610 - DNA, 19 bp, Homo sapiens
  siRNA target sequence for ADAMTS5 (NM_007038.1,1352-1370).
cgaaatcggacatttactt

SEQ ID NO: 155611 - DNA, 19 bp, Homo sapiens
  siRNA target sequence for ADAMTS5 (NM_007038.1,1378-1396).
cccatgacgattccaaatt

SEQ ID NO: 155612 - DNA, 19 bp, Homo sapiens
  siRNA target sequence for ADAMTS5 (NM_007038.1,1420-1438).
cagaagataagcgcttaat

SEQ ID NO: 155613 - DNA, 19 bp, Homo sapiens
  siRNA target sequence for ADAMTS5 (NM_007038.1,1422-1440).
gaagataagcgcttaatgt

SEQ ID NO: 155614 - DNA, 19 bp, Homo sapiens
  siRNA target sequence for ADAMTS5 (NM_007038.1,1445-1463).
catccttaccagcattgat

SEQ ID NO: 155615 - DNA, 19 bp, Homo sapiens
  siRNA target sequence for ADAMTS5 (NM_007038.1,1453-1471).
ccagcattgatgcatctaa

SEQ ID NO: 155616 - DNA, 19 bp, Homo sapiens
  siRNA target sequence for ADAMTS5 (NM_007038.1,1890-1908).
gcctatcgtcactgtaata

SEQ ID NO: 155617 - DNA, 19 bp, Homo sapiens
  siRNA target sequence for ADAMTS5 (NM_007038.1,1985-2003).
cccacccaatggtaaatca

SEQ ID NO: 155618 - DNA, 19 bp, Homo sapiens
  siRNA target sequence for ADAMTS5 (NM_007038.1,1986-2004).
ccacccaatggtaaatcat

SEQ ID NO: 155619 - DNA, 19 bp, Homo sapiens
  siRNA target sequence for ADAMTS5 (NM_007038.1,1987-2005).
cacccaatggtaaatcatt

SEQ ID NO: 155620 - DNA, 19 bp, Homo sapiens
  siRNA target sequence for ADAMTS5 (NM_007038.1,1991-2009).
caatggtaaatcatttcgt

SEQ ID NO: 155621 - DNA, 19 bp, Homo sapiens
  siRNA target sequence for ADAMTS5 (NM_007038.1,2035-2053).
gctatcagtctgatgcaaa

SEQ ID NO: 155622 - DNA, 19 bp, Homo sapiens
  siRNA target sequence for ADAMTS5 (NM_007038.1,2049-2067).
gcaaaaggagtcaaaactt

SEQ ID NO: 155623 - DNA, 19 bp, Homo sapiens
  siRNA target sequence for ADAMTS5 (NM_007038.1,2143-2161).
ctggctactatgtggtatt

SEQ ID NO: 155624 - DNA, 19 bp, Homo sapiens
  siRNA target sequence for ADAMTS5 (NM_007038.1,2145-2163).
ggctactatgtggtatttt

SEQ ID NO: 155625 - DNA, 19 bp, Homo sapiens
  siRNA target sequence for ADAMTS5 (NM_007038.1,2260-2278).
gctcaaagctgcagtatga

SEQ ID NO: 155626 - DNA, 19 bp, Homo sapiens
  siRNA target sequence for ADAMTS5 (NM_007038.1,2301-2319).
gacaactccagctgtacaa

SEQ ID NO: 155627 - DNA, 19 bp, Homo sapiens
  siRNA target sequence for ADAMTS5 (NM_007038.1,2308-2326).
ccagctgtacaaagattgt

SEQ ID NO: 155628 - DNA, 19 bp, Homo sapiens
  siRNA target sequence for ADAMTS5 (NM_007038.1,2342-2360).
gaaaagtaagggttacact

SEQ ID NO: 155629 - DNA, 19 bp, Homo sapiens
  siRNA target sequence for ADAMTS5 (NM_007038.1,2379-2397).
gaaggggcaacccacataa

SEQ ID NO: 155630 - DNA, 19 bp, Homo sapiens
  siRNA target sequence for ADAMTS5 (NM_007038.1,2384-2402).
ggcaacccacataaaagtt

SEQ ID NO: 155631 - DNA, 19 bp, Homo sapiens
  siRNA target sequence for ADAMTS5 (NM_007038.1,2428-2446).
ctagattcactgcctattt

SEQ ID NO: 155632 - DNA, 19 bp, Homo sapiens
  siRNA target sequence for ADAMTS5 (NM_007038.1,2501-2519).
cacttcagagactatcatt

SEQ ID NO: 155633 - DNA, 19 bp, Homo sapiens
  siRNA target sequence for ADAMTS5 (NM_007038.1,2593-2611).
ctgccacgaaggaaattct

SEQ ID NO: 155634 - DNA, 19 bp, Homo sapiens
  siRNA target sequence for ADAMTS5 (NM_007038.1,2599-2617).
cgaaggaaattctaatagt

SEQ ID NO: 155635 - DNA, 19 bp, Homo sapiens
  siRNA target sequence for ADAMTS5 (NM_007038.1,2636-2654).
ccccactaaaccattagat

SEQ ID NO: 155636 - DNA, 19 bp, Homo sapiens
  siRNA target sequence for ADAMTS5 (NM_007038.1,2638-2656).
ccactaaaccattagatgt

SEQ ID NO: 155637 - DNA, 19 bp, Homo sapiens
  siRNA target sequence for ADAMTS5 (NM_007038.1,2646-2664).
ccattagatgtccgttata

SEQ ID NO: 155638 - DNA, 19 bp, Homo sapiens
  siRNA target sequence for ADAMTS5 (NM_007038.1,2657-2675).
ccgttatagcttttttgtt

SEQ ID NO: 155639 - DNA, 19 bp, Homo sapiens
  siRNA target sequence for ADAMTS5 (NM_007038.1,2687-2705).
cactccaaaagtaaactct

SEQ ID NO: 155640 - DNA, 19 bp, Homo sapiens
  siRNA target sequence for ADAMTS5 (NM_007038.1,2710-2728).
ctagtcatggcagcaataa

SEQ ID NO: 155641 - DNA, 19 bp, Homo sapiens
  siRNA target sequence for ADAMTS5 (NM_007038.1,2831-2849).
ggatggaaaccggaagtta

SEQ ID NO: 155642 - DNA, 19 bp, Homo sapiens
  siRNA target sequence for ADAMTS5 (NM_007038.1,2835-2853).
ggaaaccggaagttagcaa

SEQ ID NO: 155643 - DNA, 19 bp, Homo sapiens
  siRNA target sequence for ADAMTS5 (NM_007038.1,2836-2854).
gaaaccggaagttagcaaa

SEQ ID NO: 155644 - DNA, 19 bp, Homo sapiens
  siRNA target sequence for ADAMTS5 (NM_007038.1,2840-2858).
ccggaagttagcaaaagga

SEQ ID NO: 155645 - DNA, 19 bp, Homo sapiens
  siRNA target sequence for ADAMTS6 (NM_014273.2,66-84).
catggcttcatcggaattt

SEQ ID NO: 155646 - DNA, 19 bp, Homo sapiens
  siRNA target sequence for ADAMTS6 (NM_014273.2,139-157).
gaacactaccagctaacta

SEQ ID NO: 155647 - DNA, 19 bp, Homo sapiens
  siRNA target sequence for ADAMTS6 (NM_014273.2,144-162).
ctaccagctaactattcca

SEQ ID NO: 155648 - DNA, 19 bp, Homo sapiens
  siRNA target sequence for ADAMTS6 (NM_014273.2,147-165).
ccagctaactattccaata

SEQ ID NO: 155649 - DNA, 19 bp, Homo sapiens
  siRNA target sequence for ADAMTS6 (NM_014273.2,148-166).
cagctaactattccaataa

SEQ ID NO: 155650 - DNA, 19 bp, Homo sapiens
  siRNA target sequence for ADAMTS6 (NM_014273.2,160-178).
ccaataagggttgatcaaa

SEQ ID NO: 155651 - DNA, 19 bp, Homo sapiens
  siRNA target sequence for ADAMTS6 (NM_014273.2,161-179).
caataagggttgatcaaaa

SEQ ID NO: 155652 - DNA, 19 bp, Homo sapiens
  siRNA target sequence for ADAMTS6 (NM_014273.2,233-251).
ggagtatggaccctattga

SEQ ID NO: 155653 - DNA, 19 bp, Homo sapiens
  siRNA target sequence for ADAMTS6 (NM_014273.2,253-271).
ccacagcaggcagtatcta

SEQ ID NO: 155654 - DNA, 19 bp, Homo sapiens
  siRNA target sequence for ADAMTS6 (NM_014273.2,254-272).
cacagcaggcagtatctaa

SEQ ID NO: 155655 - DNA, 19 bp, Homo sapiens
  siRNA target sequence for ADAMTS6 (NM_014273.2,256-274).
cagcaggcagtatctaagt

SEQ ID NO: 155656 - DNA, 19 bp, Homo sapiens
  siRNA target sequence for ADAMTS6 (NM_014273.2,258-276).
gcaggcagtatctaagtta

SEQ ID NO: 155657 - DNA, 19 bp, Homo sapiens
  siRNA target sequence for ADAMTS6 (NM_014273.2,298-316).
ggcaagcactttcatctaa

SEQ ID NO: 155658 - DNA, 19 bp, Homo sapiens
  siRNA target sequence for ADAMTS6 (NM_014273.2,299-317).
gcaagcactttcatctaaa

SEQ ID NO: 155659 - DNA, 19 bp, Homo sapiens
  siRNA target sequence for ADAMTS6 (NM_014273.2,323-341).
ctctcaacacagattttgt

SEQ ID NO: 155660 - DNA, 19 bp, Homo sapiens
  siRNA target sequence for ADAMTS6 (NM_014273.2,411-429).
ctgtcattacacaggatat

SEQ ID NO: 155661 - DNA, 19 bp, Homo sapiens
  siRNA target sequence for ADAMTS6 (NM_014273.2,432-450).
gcaagatcaacgtagtaca

SEQ ID NO: 155662 - DNA, 19 bp, Homo sapiens
  siRNA target sequence for ADAMTS6 (NM_014273.2,433-451).
caagatcaacgtagtacaa

SEQ ID NO: 155663 - DNA, 19 bp, Homo sapiens
  siRNA target sequence for ADAMTS6 (NM_014273.2,436-454).
gatcaacgtagtacaacta

SEQ ID NO: 155664 - DNA, 19 bp, Homo sapiens
  siRNA target sequence for ADAMTS6 (NM_014273.2,452-470).
ctaaagtggctttaagcaa

SEQ ID NO: 155665 - DNA, 19 bp, Homo sapiens
  siRNA target sequence for ADAMTS6 (NM_014273.2,480-498).
gttgcatggtgttattgct

SEQ ID NO: 155666 - DNA, 19 bp, Homo sapiens
  siRNA target sequence for ADAMTS6 (NM_014273.2,542-560).
cagaggattccaagcattt

SEQ ID NO: 155667 - DNA, 19 bp, Homo sapiens
  siRNA target sequence for ADAMTS6 (NM_014273.2,624-642).
gtatgatcactctcattgt

SEQ ID NO: 155668 - DNA, 19 bp, Homo sapiens
  siRNA target sequence for ADAMTS6 (NM_014273.2,690-708).
cacatccactgtttcttat

SEQ ID NO: 155669 - DNA, 19 bp, Homo sapiens
  siRNA target sequence for ADAMTS6 (NM_014273.2,704-722).
cttattcactaccaattaa

SEQ ID NO: 155670 - DNA, 19 bp, Homo sapiens
  siRNA target sequence for ADAMTS6 (NM_014273.2,787-805).
gtagtggcagacaaaatga

SEQ ID NO: 155671 - DNA, 19 bp, Homo sapiens
  siRNA target sequence for ADAMTS6 (NM_014273.2,816-834).
ccatggccgcaaagacatt

SEQ ID NO: 155672 - DNA, 19 bp, Homo sapiens
  siRNA target sequence for ADAMTS6 (NM_014273.2,821-839).
gccgcaaagacattgaaca

SEQ ID NO: 155673 - DNA, 19 bp, Homo sapiens
  siRNA target sequence for ADAMTS6 (NM_014273.2,892-910).
ctaggaaacgttgtgaata

SEQ ID NO: 155674 - DNA, 19 bp, Homo sapiens
  siRNA target sequence for ADAMTS6 (NM_014273.2,896-914).
gaaacgttgtgaatattat

SEQ ID NO: 155675 - DNA, 19 bp, Homo sapiens
  siRNA target sequence for ADAMTS6 (NM_014273.2,938-956).
cagaagatcagccaaactt

SEQ ID NO: 155676 - DNA, 19 bp, Homo sapiens
  siRNA target sequence for ADAMTS6 (NM_014273.2,1058-1076).
ggattgcccaccacgataa

SEQ ID NO: 155677 - DNA, 19 bp, Homo sapiens
  siRNA target sequence for ADAMTS6 (NM_014273.2,1059-1077).
gattgcccaccacgataat

SEQ ID NO: 155678 - DNA, 19 bp, Homo sapiens
  siRNA target sequence for ADAMTS6 (NM_014273.2,1068-1086).
ccacgataatgcagttctt

SEQ ID NO: 155679 - DNA, 19 bp, Homo sapiens
  siRNA target sequence for ADAMTS6 (NM_014273.2,1069-1087).
cacgataatgcagttctta

SEQ ID NO: 155680 - DNA, 19 bp, Homo sapiens
  siRNA target sequence for ADAMTS6 (NM_014273.2,1071-1089).
cgataatgcagttcttatt

SEQ ID NO: 155681 - DNA, 19 bp, Homo sapiens
  siRNA target sequence for ADAMTS6 (NM_014273.2,1175-1193).
ggagctgcagcattaatga

SEQ ID NO: 155682 - DNA, 19 bp, Homo sapiens
  siRNA target sequence for ADAMTS6 (NM_014273.2,1176-1194).
gagctgcagcattaatgaa

SEQ ID NO: 155683 - DNA, 19 bp, Homo sapiens
  siRNA target sequence for ADAMTS6 (NM_014273.2,1206-1224).
gggttcagcttttaccatt

SEQ ID NO: 155684 - DNA, 19 bp, Homo sapiens
  siRNA target sequence for ADAMTS6 (NM_014273.2,1250-1268).
gtatgaaccatgatggaat

SEQ ID NO: 155685 - DNA, 19 bp, Homo sapiens
  siRNA target sequence for ADAMTS6 (NM_014273.2,1319-1337).
cacattactgcgaatacca

SEQ ID NO: 155686 - DNA, 19 bp, Homo sapiens
  siRNA target sequence for ADAMTS6 (NM_014273.2,1321-1339).
cattactgcgaataccaat

SEQ ID NO: 155687 - DNA, 19 bp, Homo sapiens
  siRNA target sequence for ADAMTS6 (NM_014273.2,1326-1344).
ctgcgaataccaatccttt

SEQ ID NO: 155688 - DNA, 19 bp, Homo sapiens
  siRNA target sequence for ADAMTS6 (NM_014273.2,1328-1346).
gcgaataccaatccttttt

SEQ ID NO: 155689 - DNA, 19 bp, Homo sapiens
  siRNA target sequence for ADAMTS6 (NM_014273.2,1356-1374).
cttgcagtcgagactacat

SEQ ID NO: 155690 - DNA, 19 bp, Homo sapiens
  siRNA target sequence for ADAMTS6 (NM_014273.2,1429-1447).
cgctgtgtcaccaacagta

SEQ ID NO: 155691 - DNA, 19 bp, Homo sapiens
  siRNA target sequence for ADAMTS6 (NM_014273.2,1430-1448).
gctgtgtcaccaacagtat

SEQ ID NO: 155692 - DNA, 19 bp, Homo sapiens
  siRNA target sequence for ADAMTS6 (NM_014273.2,1459-1477).
gaggggacactgtgtcaaa

SEQ ID NO: 155693 - DNA, 19 bp, Homo sapiens
  siRNA target sequence for ADAMTS6 (NM_014273.2,1470-1488).
gtgtcaaactgggaatatt

SEQ ID NO: 155694 - DNA, 19 bp, Homo sapiens
  siRNA target sequence for ADAMTS6 (NM_014273.2,1500-1518).
gtgttatcagggagattgt

SEQ ID NO: 155695 - DNA, 19 bp, Homo sapiens
  siRNA target sequence for ADAMTS6 (NM_014273.2,1684-1702).
cggtatcgctcctgtaaca

SEQ ID NO: 155696 - DNA, 19 bp, Homo sapiens
  siRNA target sequence for ADAMTS6 (NM_014273.2,1686-1704).
gtatcgctcctgtaacaca

SEQ ID NO: 155697 - DNA, 19 bp, Homo sapiens
  siRNA target sequence for ADAMTS6 (NM_014273.2,1719-1737).
gggttcccgagattttcga

SEQ ID NO: 155698 - DNA, 19 bp, Homo sapiens
  siRNA target sequence for ADAMTS6 (NM_014273.2,1725-1743).
ccgagattttcgagagaaa

SEQ ID NO: 155699 - DNA, 19 bp, Homo sapiens
  siRNA target sequence for ADAMTS6 (NM_014273.2,1744-1762).
cagtgtgcagactttgaca

SEQ ID NO: 155700 - DNA, 19 bp, Homo sapiens
  siRNA target sequence for ADAMTS6 (NM_014273.2,1746-1764).
gtgtgcagactttgacaat

SEQ ID NO: 155701 - DNA, 19 bp, Homo sapiens
  siRNA target sequence for ADAMTS6 (NM_014273.2,1748-1766).
gtgcagactttgacaatat

SEQ ID NO: 155702 - DNA, 19 bp, Homo sapiens
  siRNA target sequence for ADAMTS6 (NM_014273.2,1767-1785).
gcctttccgaggaaagtat

SEQ ID NO: 155703 - DNA, 19 bp, Homo sapiens
  siRNA target sequence for ADAMTS6 (NM_014273.2,1768-1786).
cctttccgaggaaagtatt

SEQ ID NO: 155704 - DNA, 19 bp, Homo sapiens
  siRNA target sequence for ADAMTS6 (NM_014273.2,1769-1787).
ctttccgaggaaagtatta

SEQ ID NO: 155705 - DNA, 19 bp, Homo sapiens
  siRNA target sequence for ADAMTS6 (NM_014273.2,1906-1924).
gcggattcactggatatct

SEQ ID NO: 155706 - DNA, 19 bp, Homo sapiens
  siRNA target sequence for ADAMTS6 (NM_014273.2,1944-1962).
gcacgtaggctgtgataat

SEQ ID NO: 155707 - DNA, 19 bp, Homo sapiens
  siRNA target sequence for ADAMTS6 (NM_014273.2,1945-1963).
cacgtaggctgtgataata

SEQ ID NO: 155708 - DNA, 19 bp, Homo sapiens
  siRNA target sequence for ADAMTS6 (NM_014273.2,1947-1965).
cgtaggctgtgataatatt

SEQ ID NO: 155709 - DNA, 19 bp, Homo sapiens
  siRNA target sequence for ADAMTS6 (NM_014273.2,2019-2037).
cacatgtgatgccattgaa

SEQ ID NO: 155710 - DNA, 19 bp, Homo sapiens
  siRNA target sequence for ADAMTS6 (NM_014273.2,2030-2048).
ccattgaagggttcttcaa

SEQ ID NO: 155711 - DNA, 19 bp, Homo sapiens
  siRNA target sequence for ADAMTS6 (NM_014273.2,2031-2049).
cattgaagggttcttcaat

SEQ ID NO: 155712 - DNA, 19 bp, Homo sapiens
  siRNA target sequence for ADAMTS6 (NM_014273.2,2039-2057).
ggttcttcaatgattcact

SEQ ID NO: 155713 - DNA, 19 bp, Homo sapiens
  siRNA target sequence for ADAMTS6 (NM_014273.2,2077-2095).
gaagtggtgcagataccaa

SEQ ID NO: 155714 - DNA, 19 bp, Homo sapiens
  siRNA target sequence for ADAMTS6 (NM_014273.2,2122-2140).
gaagttgccatgtcaaaga

SEQ ID NO: 155715 - DNA, 19 bp, Homo sapiens
  siRNA target sequence for ADAMTS6 (NM_014273.2,2128-2146).
gccatgtcaaagaactata

SEQ ID NO: 155716 - DNA, 19 bp, Homo sapiens
  siRNA target sequence for ADAMTS6 (NM_014273.2,2159-2177).
ctgaaggagatgattacta

SEQ ID NO: 155717 - DNA, 19 bp, Homo sapiens
  siRNA target sequence for ADAMTS6 (NM_014273.2,2204-2222).
ggcctaggaaatttgatgt

SEQ ID NO: 155718 - DNA, 19 bp, Homo sapiens
  siRNA target sequence for ADAMTS6 (NM_014273.2,2225-2243).
ctgggacagcttttcatta

SEQ ID NO: 155719 - DNA, 19 bp, Homo sapiens
  siRNA target sequence for ADAMTS6 (NM_014273.2,2227-2245).
gggacagcttttcattaca

SEQ ID NO: 155720 - DNA, 19 bp, Homo sapiens
  siRNA target sequence for ADAMTS6 (NM_014273.2,2281-2299).
ctaggtcctacctcagaaa

SEQ ID NO: 155721 - DNA, 19 bp, Homo sapiens
  siRNA target sequence for ADAMTS6 (NM_014273.2,2285-2303).
gtcctacctcagaaaatct

SEQ ID NO: 155722 - DNA, 19 bp, Homo sapiens
  siRNA target sequence for ADAMTS6 (NM_014273.2,2288-2306).
ctacctcagaaaatctcat

SEQ ID NO: 155723 - DNA, 19 bp, Homo sapiens
  siRNA target sequence for ADAMTS6 (NM_014273.2,2338-2356).
ggaattaggtataagttca

SEQ ID NO: 155724 - DNA, 19 bp, Homo sapiens
  siRNA target sequence for ADAMTS6 (NM_014273.2,2339-2357).
gaattaggtataagttcaa

SEQ ID NO: 155725 - DNA, 19 bp, Homo sapiens
  siRNA target sequence for ADAMTS6 (NM_014273.2,2399-2417).
gctttacatggaatcatca

SEQ ID NO: 155726 - DNA, 19 bp, Homo sapiens
  siRNA target sequence for ADAMTS6 (NM_014273.2,2525-2543).
gtttgttaaaaaagctaat

SEQ ID NO: 155727 - DNA, 19 bp, Homo sapiens
  siRNA target sequence for ADAMTS6 (NM_014273.2,2538-2556).
gctaattggaaacatttct

SEQ ID NO: 155728 - DNA, 19 bp, Homo sapiens
  siRNA target sequence for ADAMTS6 (NM_014273.2,2573-2591).
gctgtaatttagcaaaaga

SEQ ID NO: 155729 - DNA, 19 bp, Homo sapiens
  siRNA target sequence for ADAMTS8 (NM_007037.2,1434-1452).
cacatcctgacgttaatgt

SEQ ID NO: 155730 - DNA, 19 bp, Homo sapiens
  siRNA target sequence for ADAMTS8 (NM_007037.2,1436-1454).
catcctgacgttaatgtct

SEQ ID NO: 155731 - DNA, 19 bp, Homo sapiens
  siRNA target sequence for ADAMTS8 (NM_007037.2,1453-1471).
ctgtggcagcccgaatcta

SEQ ID NO: 155732 - DNA, 19 bp, Homo sapiens
  siRNA target sequence for ADAMTS8 (NM_007037.2,1455-1473).
gtggcagcccgaatctaca

SEQ ID NO: 155733 - DNA, 19 bp, Homo sapiens
  siRNA target sequence for ADAMTS8 (NM_007037.2,1520-1538).
gctgatcgtagaagatgaa

SEQ ID NO: 155734 - DNA, 19 bp, Homo sapiens
  siRNA target sequence for ADAMTS8 (NM_007037.2,1521-1539).
ctgatcgtagaagatgaaa

SEQ ID NO: 155735 - DNA, 19 bp, Homo sapiens
  siRNA target sequence for ADAMTS8 (NM_007037.2,1572-1590).
cttacactgcgtaacttct

SEQ ID NO: 155736 - DNA, 19 bp, Homo sapiens
  siRNA target sequence for ADAMTS8 (NM_007037.2,1928-1946).
cccctgcagcgccatgtat

SEQ ID NO: 155737 - DNA, 19 bp, Homo sapiens
  siRNA target sequence for ADAMTS8 (NM_007037.2,1930-1948).
cctgcagcgccatgtatct

SEQ ID NO: 155738 - DNA, 19 bp, Homo sapiens
  siRNA target sequence for ADAMTS8 (NM_007037.2,2162-2180).
cctgtgccacacgaagaat

SEQ ID NO: 155739 - DNA, 19 bp, Homo sapiens
  siRNA target sequence for ADAMTS8 (NM_007037.2,2478-2496).
cagcagtgtgagaagtata

SEQ ID NO: 155740 - DNA, 19 bp, Homo sapiens
  siRNA target sequence for ADAMTS8 (NM_007037.2,2568-2586).
cgggaccgctgcaagttgt

SEQ ID NO: 155741 - DNA, 19 bp, Homo sapiens
  siRNA target sequence for ADAMTS8 (NM_007037.2,2600-2618).
ggggaggagcgagttcaaa

SEQ ID NO: 155742 - DNA, 19 bp, Homo sapiens
  siRNA target sequence for ADAMTS8 (NM_007037.2,2605-2623).
ggagcgagttcaaagtgtt

SEQ ID NO: 155743 - DNA, 19 bp, Homo sapiens
  siRNA target sequence for ADAMTS8 (NM_007037.2,2727-2745).
cctcggaagctggacaaat

SEQ ID NO: 155744 - DNA, 19 bp, Homo sapiens
  siRNA target sequence for ADAMTS8 (NM_007037.2,2804-2822).
caccaattatggctacaat

SEQ ID NO: 155745 - DNA, 19 bp, Homo sapiens
  siRNA target sequence for ADAMTS8 (NM_007037.2,3122-3140).
caccttctttgttcctaat

SEQ ID NO: 155746 - DNA, 19 bp, Homo sapiens
  siRNA target sequence for ADAMTS8 (NM_007037.2,3175-3193).
gagcaaccaccaacatcat

SEQ ID NO: 155747 - DNA, 19 bp, Homo sapiens
  siRNA target sequence for ADAMTS8 (NM_007037.2,3263-3281).
ctggcagaggcgaactgta

SEQ ID NO: 155748 - DNA, 19 bp, Homo sapiens
  siRNA target sequence for ADAMTS9 (NM_020249.2,134-152).
gcacccgaggcaagtgaaa

SEQ ID NO: 155749 - DNA, 19 bp, Homo sapiens
  siRNA target sequence for ADAMTS9 (NM_020249.2,138-156).
ccgaggcaagtgaaattat

SEQ ID NO: 155750 - DNA, 19 bp, Homo sapiens
  siRNA target sequence for ADAMTS9 (NM_020249.2,139-157).
cgaggcaagtgaaattatt

SEQ ID NO: 155751 - DNA, 19 bp, Homo sapiens
  siRNA target sequence for ADAMTS9 (NM_020249.2,142-160).
ggcaagtgaaattattaga

SEQ ID NO: 155752 - DNA, 19 bp, Homo sapiens
  siRNA target sequence for ADAMTS9 (NM_020249.2,163-181).
ccctgagcgaatacgaaat

SEQ ID NO: 155753 - DNA, 19 bp, Homo sapiens
  siRNA target sequence for ADAMTS9 (NM_020249.2,223-241).
ccacgaacgtccacttcaa

SEQ ID NO: 155754 - DNA, 19 bp, Homo sapiens
  siRNA target sequence for ADAMTS9 (NM_020249.2,227-245).
gaacgtccacttcaaaaga

SEQ ID NO: 155755 - DNA, 19 bp, Homo sapiens
  siRNA target sequence for ADAMTS9 (NM_020249.2,244-262).
gaacgcgacggagcattaa

SEQ ID NO: 155756 - DNA, 19 bp, Homo sapiens
  siRNA target sequence for ADAMTS9 (NM_020249.2,248-266).
gcgacggagcattaactct

SEQ ID NO: 155757 - DNA, 19 bp, Homo sapiens
  siRNA target sequence for ADAMTS9 (NM_020249.2,343-361).
ccttcggccagcagtttct

SEQ ID NO: 155758 - DNA, 19 bp, Homo sapiens
  siRNA target sequence for ADAMTS9 (NM_020249.2,344-362).
cttcggccagcagtttcta

SEQ ID NO: 155759 - DNA, 19 bp, Homo sapiens
  siRNA target sequence for ADAMTS9 (NM_020249.2,373-391).
ccgccaatgccggatttat

SEQ ID NO: 155760 - DNA, 19 bp, Homo sapiens
  siRNA target sequence for ADAMTS9 (NM_020249.2,432-450).
gtgaatcagaccaagtttt

SEQ ID NO: 155761 - DNA, 19 bp, Homo sapiens
  siRNA target sequence for ADAMTS9 (NM_020249.2,434-452).
gaatcagaccaagttttat

SEQ ID NO: 155762 - DNA, 19 bp, Homo sapiens
  siRNA target sequence for ADAMTS9 (NM_020249.2,466-484).
cggaactcaagcactgttt

SEQ ID NO: 155763 - DNA, 19 bp, Homo sapiens
  siRNA target sequence for ADAMTS9 (NM_020249.2,473-491).
caagcactgtttctacaaa

SEQ ID NO: 155764 - DNA, 19 bp, Homo sapiens
  siRNA target sequence for ADAMTS9 (NM_020249.2,554-572).
cacattccggtctcatgat

SEQ ID NO: 155765 - DNA, 19 bp, Homo sapiens
  siRNA target sequence for ADAMTS9 (NM_020249.2,565-583).
ctcatgatggggattattt

SEQ ID NO: 155766 - DNA, 19 bp, Homo sapiens
  siRNA target sequence for ADAMTS9 (NM_020249.2,567-585).
catgatggggattatttta

SEQ ID NO: 155767 - DNA, 19 bp, Homo sapiens
  siRNA target sequence for ADAMTS9 (NM_020249.2,635-653).
caaaccccacatcatttat

SEQ ID NO: 155768 - DNA, 19 bp, Homo sapiens
  siRNA target sequence for ADAMTS9 (NM_020249.2,763-781).
ggggagaaaggattaacct

SEQ ID NO: 155769 - DNA, 19 bp, Homo sapiens
  siRNA target sequence for ADAMTS9 (NM_020249.2,786-804).
ggtgacgtagcagcattaa

SEQ ID NO: 155770 - DNA, 19 bp, Homo sapiens
  siRNA target sequence for ADAMTS9 (NM_020249.2,787-805).
gtgacgtagcagcattaaa

SEQ ID NO: 155771 - DNA, 19 bp, Homo sapiens
  siRNA target sequence for ADAMTS9 (NM_020249.2,789-807).
gacgtagcagcattaaaca

SEQ ID NO: 155772 - DNA, 19 bp, Homo sapiens
  siRNA target sequence for ADAMTS9 (NM_020249.2,848-866).
gacggacaacacaagagaa

SEQ ID NO: 155773 - DNA, 19 bp, Homo sapiens
  siRNA target sequence for ADAMTS9 (NM_020249.2,886-904).
caaaacgttttttatccta

SEQ ID NO: 155774 - DNA, 19 bp, Homo sapiens
  siRNA target sequence for ADAMTS9 (NM_020249.2,902-920).
ctatccacggtttgtagaa

SEQ ID NO: 155775 - DNA, 19 bp, Homo sapiens
  siRNA target sequence for ADAMTS9 (NM_020249.2,907-925).
cacggtttgtagaagtctt

SEQ ID NO: 155776 - DNA, 19 bp, Homo sapiens
  siRNA target sequence for ADAMTS9 (NM_020249.2,997-1015).
caattgtagcctctatcta

SEQ ID NO: 155777 - DNA, 19 bp, Homo sapiens
  siRNA target sequence for ADAMTS9 (NM_020249.2,1083-1101).
caggatgggccttccatat

SEQ ID NO: 155778 - DNA, 19 bp, Homo sapiens
  siRNA target sequence for ADAMTS9 (NM_020249.2,1085-1103).
ggatgggccttccatatct

SEQ ID NO: 155779 - DNA, 19 bp, Homo sapiens
  siRNA target sequence for ADAMTS9 (NM_020249.2,1086-1104).
gatgggccttccatatctt

SEQ ID NO: 155780 - DNA, 19 bp, Homo sapiens
  siRNA target sequence for ADAMTS9 (NM_020249.2,1090-1108).
ggccttccatatcttttaa

SEQ ID NO: 155781 - DNA, 19 bp, Homo sapiens
  siRNA target sequence for ADAMTS9 (NM_020249.2,1091-1109).
gccttccatatcttttaat

SEQ ID NO: 155782 - DNA, 19 bp, Homo sapiens
  siRNA target sequence for ADAMTS9 (NM_020249.2,1135-1153).
gccagtggcagcattcgaa

SEQ ID NO: 155783 - DNA, 19 bp, Homo sapiens
  siRNA target sequence for ADAMTS9 (NM_020249.2,1218-1236).
gctcacgacaaatgtgata

SEQ ID NO: 155784 - DNA, 19 bp, Homo sapiens
  siRNA target sequence for ADAMTS9 (NM_020249.2,1223-1241).
cgacaaatgtgatacctta

SEQ ID NO: 155785 - DNA, 19 bp, Homo sapiens
  siRNA target sequence for ADAMTS9 (NM_020249.2,1247-1265).
ggctgaactgggaaccatt

SEQ ID NO: 155786 - DNA, 19 bp, Homo sapiens
  siRNA target sequence for ADAMTS9 (NM_020249.2,1248-1266).
gctgaactgggaaccattt

SEQ ID NO: 155787 - DNA, 19 bp, Homo sapiens
  siRNA target sequence for ADAMTS9 (NM_020249.2,1279-1297).
gaagctgttctattagtga

SEQ ID NO: 155788 - DNA, 19 bp, Homo sapiens
  siRNA target sequence for ADAMTS9 (NM_020249.2,1283-1301).
ctgttctattagtgaagat

SEQ ID NO: 155789 - DNA, 19 bp, Homo sapiens
  siRNA target sequence for ADAMTS9 (NM_020249.2,1296-1314).
gaagatagtggattgagta

SEQ ID NO: 155790 - DNA, 19 bp, Homo sapiens
  siRNA target sequence for ADAMTS9 (NM_020249.2,1305-1323).
ggattgagtacagctttta

SEQ ID NO: 155791 - DNA, 19 bp, Homo sapiens
  siRNA target sequence for ADAMTS9 (NM_020249.2,1365-1383).
gatgacaacaacaaatgta

SEQ ID NO: 155792 - DNA, 19 bp, Homo sapiens
  siRNA target sequence for ADAMTS9 (NM_020249.2,1507-1525).
gcgagtgtttgcttaacga

SEQ ID NO: 155793 - DNA, 19 bp, Homo sapiens
  siRNA target sequence for ADAMTS9 (NM_020249.2,1508-1526).
cgagtgtttgcttaacgaa

SEQ ID NO: 155794 - DNA, 19 bp, Homo sapiens
  siRNA target sequence for ADAMTS9 (NM_020249.2,1571-1589).
cctttacaacgtgaataaa

SEQ ID NO: 155795 - DNA, 19 bp, Homo sapiens
  siRNA target sequence for ADAMTS9 (NM_020249.2,1580-1598).
cgtgaataaacaatgtgaa

SEQ ID NO: 155796 - DNA, 19 bp, Homo sapiens
  siRNA target sequence for ADAMTS9 (NM_020249.2,1581-1599).
gtgaataaacaatgtgaat

SEQ ID NO: 155797 - DNA, 19 bp, Homo sapiens
  siRNA target sequence for ADAMTS9 (NM_020249.2,1618-1636).
ctcaggtgtgcccatatat

SEQ ID NO: 155798 - DNA, 19 bp, Homo sapiens
  siRNA target sequence for ADAMTS9 (NM_020249.2,1648-1666).
gacggctctggtgcaataa

SEQ ID NO: 155799 - DNA, 19 bp, Homo sapiens
  siRNA target sequence for ADAMTS9 (NM_020249.2,1651-1669).
ggctctggtgcaataacgt

SEQ ID NO: 155800 - DNA, 19 bp, Homo sapiens
  siRNA target sequence for ADAMTS9 (NM_020249.2,1667-1685).
cgtcaatggagtacacaaa

SEQ ID NO: 155801 - DNA, 19 bp, Homo sapiens
  siRNA target sequence for ADAMTS9 (NM_020249.2,1824-1842).
ggaacctgctccagaacat

SEQ ID NO: 155802 - DNA, 19 bp, Homo sapiens
  siRNA target sequence for ADAMTS9 (NM_020249.2,1912-1930).
gtgtaggacgtagaatgaa

SEQ ID NO: 155803 - DNA, 19 bp, Homo sapiens
  siRNA target sequence for ADAMTS9 (NM_020249.2,1914-1932).
gtaggacgtagaatgaaat

SEQ ID NO: 155804 - DNA, 19 bp, Homo sapiens
  siRNA target sequence for ADAMTS9 (NM_020249.2,1970-1988).
gcgagacttccgagatgaa

SEQ ID NO: 155805 - DNA, 19 bp, Homo sapiens
  siRNA target sequence for ADAMTS9 (NM_020249.2,1998-2016).
cactttgacgggaagcatt

SEQ ID NO: 155806 - DNA, 19 bp, Homo sapiens
  siRNA target sequence for ADAMTS9 (NM_020249.2,2004-2022).
gacgggaagcattttaaca

SEQ ID NO: 155807 - DNA, 19 bp, Homo sapiens
  siRNA target sequence for ADAMTS9 (NM_020249.2,2043-2061).
gtgcgctgggtccctaaat

SEQ ID NO: 155808 - DNA, 19 bp, Homo sapiens
  siRNA target sequence for ADAMTS9 (NM_020249.2,2046-2064).
cgctgggtccctaaataca

SEQ ID NO: 155809 - DNA, 19 bp, Homo sapiens
  siRNA target sequence for ADAMTS9 (NM_020249.2,2132-2150).
gcttcgagacagagtgata

SEQ ID NO: 155810 - DNA, 19 bp, Homo sapiens
  siRNA target sequence for ADAMTS9 (NM_020249.2,2161-2179).
cttgtggccaggacacaaa

SEQ ID NO: 155811 - DNA, 19 bp, Homo sapiens
  siRNA target sequence for ADAMTS9 (NM_020249.2,2164-2182).
gtggccaggacacaaatga

SEQ ID NO: 155812 - DNA, 19 bp, Homo sapiens
  siRNA target sequence for ADAMTS9 (NM_020249.2,2214-2232).
ggatgcgatcatgttttaa

SEQ ID NO: 155813 - DNA, 19 bp, Homo sapiens
  siRNA target sequence for ADAMTS9 (NM_020249.2,2219-2237).
cgatcatgttttaaactca

SEQ ID NO: 155814 - DNA, 19 bp, Homo sapiens
  siRNA target sequence for ADAMTS9 (NM_020249.2,2261-2279).
ggtttgtggtggcgataat

SEQ ID NO: 155815 - DNA, 19 bp, Homo sapiens
  siRNA target sequence for ADAMTS9 (NM_020249.2,2273-2291).
cgataattcttcatgcaaa

SEQ ID NO: 155816 - DNA, 19 bp, Homo sapiens
  siRNA target sequence for ADAMTS9 (NM_020249.2,2274-2292).
gataattcttcatgcaaaa

SEQ ID NO: 155817 - DNA, 19 bp, Homo sapiens
  siRNA target sequence for ADAMTS9 (NM_020249.2,2297-2315).
ggcaggaacatttaataca

SEQ ID NO: 155818 - DNA, 19 bp, Homo sapiens
  siRNA target sequence for ADAMTS9 (NM_020249.2,2305-2323).
catttaatacagtacatta

SEQ ID NO: 155819 - DNA, 19 bp, Homo sapiens
  siRNA target sequence for ADAMTS9 (NM_020249.2,2316-2334).
gtacattatggttacaata

SEQ ID NO: 155820 - DNA, 19 bp, Homo sapiens
  siRNA target sequence for ADAMTS9 (NM_020249.2,2375-2393).
gcggcagcacagtttctca

SEQ ID NO: 155821 - DNA, 19 bp, Homo sapiens
  siRNA target sequence for ADAMTS9 (NM_020249.2,2395-2413).
gggaaacagacgatgacaa

SEQ ID NO: 155822 - DNA, 19 bp, Homo sapiens
  siRNA target sequence for ADAMTS9 (NM_020249.2,2409-2427).
gacaactacttagctttat

SEQ ID NO: 155823 - DNA, 19 bp, Homo sapiens
  siRNA target sequence for ADAMTS9 (NM_020249.2,2411-2429).
caactacttagctttatca

SEQ ID NO: 155824 - DNA, 19 bp, Homo sapiens
  siRNA target sequence for ADAMTS9 (NM_020249.2,2535-2553).
gccgtagaaagaattaact

SEQ ID NO: 155825 - DNA, 19 bp, Homo sapiens
  siRNA target sequence for ADAMTS9 (NM_020249.2,2537-2555).
cgtagaaagaattaactca

SEQ ID NO: 155826 - DNA, 19 bp, Homo sapiens
  siRNA target sequence for ADAMTS9 (NM_020249.2,2538-2556).
gtagaaagaattaactcaa

SEQ ID NO: 155827 - DNA, 19 bp, Homo sapiens
  siRNA target sequence for ADAMTS9 (NM_020249.2,2596-2614).
cggtgggaaagttgtacaa

SEQ ID NO: 155828 - DNA, 19 bp, Homo sapiens
  siRNA target sequence for ADAMTS9 (NM_020249.2,2615-2633).
ccccgatgtacgctattct

SEQ ID NO: 155829 - DNA, 19 bp, Homo sapiens
  siRNA target sequence for ADAMTS9 (NM_020249.2,2616-2634).
cccgatgtacgctattctt

SEQ ID NO: 155830 - DNA, 19 bp, Homo sapiens
  siRNA target sequence for ADAMTS9 (NM_020249.2,2617-2635).
ccgatgtacgctattcttt

SEQ ID NO: 155831 - DNA, 19 bp, Homo sapiens
  siRNA target sequence for ADAMTS9 (NM_020249.2,2619-2637).
gatgtacgctattctttca

SEQ ID NO: 155832 - DNA, 19 bp, Homo sapiens
  siRNA target sequence for ADAMTS9 (NM_020249.2,2715-2733).
caaggggaacggaaacgaa

SEQ ID NO: 155833 - DNA, 19 bp, Homo sapiens
  siRNA target sequence for ADAMTS9 (NM_020249.2,2719-2737).
gggaacggaaacgaaaact

SEQ ID NO: 155834 - DNA, 19 bp, Homo sapiens
  siRNA target sequence for ADAMTS9 (NM_020249.2,2724-2742).
cggaaacgaaaacttgttt

SEQ ID NO: 155835 - DNA, 19 bp, Homo sapiens
  siRNA target sequence for ADAMTS9 (NM_020249.2,2856-2874).
gccagcaggagtgaatgta

SEQ ID NO: 155836 - DNA, 19 bp, Homo sapiens
  siRNA target sequence for ADAMTS9 (NM_020249.2,2858-2876).
cagcaggagtgaatgtagt

SEQ ID NO: 155837 - DNA, 19 bp, Homo sapiens
  siRNA target sequence for ADAMTS9 (NM_020249.2,2951-2969).
gaaggttgatgatggtttt

SEQ ID NO: 155838 - DNA, 19 bp, Homo sapiens
  siRNA target sequence for ADAMTS9 (NM_020249.2,3026-3044).
gggtggctggcgctattct

SEQ ID NO: 155839 - DNA, 19 bp, Homo sapiens
  siRNA target sequence for ADAMTS9 (NM_020249.2,3086-3104).
gaggagaagggctatttgt

SEQ ID NO: 155840 - DNA, 19 bp, Homo sapiens
  siRNA target sequence for ADAMTS9 (NM_020249.2,3088-3106).
ggagaagggctatttgtgt

SEQ ID NO: 155841 - DNA, 19 bp, Homo sapiens
  siRNA target sequence for ADAMTS9 (NM_020249.2,3103-3121).
gtgtcaatacccgaaatga

SEQ ID NO: 155842 - DNA, 19 bp, Homo sapiens
  siRNA target sequence for ADAMTS9 (NM_020249.2,3107-3125).
caatacccgaaatgatgta

SEQ ID NO: 155843 - DNA, 19 bp, Homo sapiens
  siRNA target sequence for ADAMTS9 (NM_020249.2,3134-3152).
cagcaaatgcacacatcaa

SEQ ID NO: 155844 - DNA, 19 bp, Homo sapiens
  siRNA target sequence for ADAMTS9 (NM_182920.1,3272-3290).
gtttggtgaagatcgatta

SEQ ID NO: 155845 - DNA, 19 bp, Homo sapiens
  siRNA target sequence for ADAMTS9 (NM_182920.1,3277-3295).
gtgaagatcgattaaatga

SEQ ID NO: 155846 - DNA, 19 bp, Homo sapiens
  siRNA target sequence for ADAMTS9 (NM_182920.1,3279-3297).
gaagatcgattaaatgata

SEQ ID NO: 155847 - DNA, 19 bp, Homo sapiens
  siRNA target sequence for ADAMTS9 (NM_182920.1,3282-3300).
gatcgattaaatgatagaa

SEQ ID NO: 155848 - DNA, 19 bp, Homo sapiens
  siRNA target sequence for ADAMTS9 (NM_182920.1,3417-3435).
ctaagagcagtgaaatgca

SEQ ID NO: 155849 - DNA, 19 bp, Homo sapiens
  siRNA target sequence for ADAMTS9 (NM_182920.1,3433-3451).
gcatcattgggacttatat

SEQ ID NO: 155850 - DNA, 19 bp, Homo sapiens
  siRNA target sequence for ADAMTS9 (NM_182920.1,3437-3455).
cattgggacttatatgtca

SEQ ID NO: 155851 - DNA, 19 bp, Homo sapiens
  siRNA target sequence for ADAMTS9 (NM_182920.1,3483-3501).
gcaactagaccaactgata

SEQ ID NO: 155852 - DNA, 19 bp, Homo sapiens
  siRNA target sequence for ADAMTS9 (NM_182920.1,3509-3527).
ctgtgaattaccatcatgt

SEQ ID NO: 155853 - DNA, 19 bp, Homo sapiens
  siRNA target sequence for ADAMTS9 (NM_182920.1,3805-3823).
gggcaacccggcaagtgat

SEQ ID NO: 155854 - DNA, 19 bp, Homo sapiens
  siRNA target sequence for ADAMTS9 (NM_182920.1,3872-3890).
ggattatatcccagaaact

SEQ ID NO: 155855 - DNA, 19 bp, Homo sapiens
  siRNA target sequence for ADAMTS9 (NM_182920.1,4075-4093).
cccagcggcgtgttgttgt

SEQ ID NO: 155856 - DNA, 19 bp, Homo sapiens
  siRNA target sequence for ADAMTS9 (NM_182920.1,4076-4094).
ccagcggcgtgttgttgta

SEQ ID NO: 155857 - DNA, 19 bp, Homo sapiens
  siRNA target sequence for ADAMTS9 (NM_182920.1,4077-4095).
cagcggcgtgttgttgtat

SEQ ID NO: 155858 - DNA, 19 bp, Homo sapiens
  siRNA target sequence for ADAMTS9 (NM_182920.1,4081-4099).
ggcgtgttgttgtatgtca

SEQ ID NO: 155859 - DNA, 19 bp, Homo sapiens
  siRNA target sequence for ADAMTS9 (NM_182920.1,4124-4142).
cgactgtgtggagagaata

SEQ ID NO: 155860 - DNA, 19 bp, Homo sapiens
  siRNA target sequence for ADAMTS9 (NM_182920.1,4125-4143).
gactgtgtggagagaataa

SEQ ID NO: 155861 - DNA, 19 bp, Homo sapiens
  siRNA target sequence for ADAMTS9 (NM_182920.1,4223-4241).
gtgtggtggaggcataaga

SEQ ID NO: 155862 - DNA, 19 bp, Homo sapiens
  siRNA target sequence for ADAMTS9 (NM_182920.1,4284-4302).
ccagatttgagctgtgaaa

SEQ ID NO: 155863 - DNA, 19 bp, Homo sapiens
  siRNA target sequence for ADAMTS9 (NM_182920.1,4285-4303).
cagatttgagctgtgaaat

SEQ ID NO: 155864 - DNA, 19 bp, Homo sapiens
  siRNA target sequence for ADAMTS9 (NM_182920.1,4292-4310).
gagctgtgaaattcttgat

SEQ ID NO: 155865 - DNA, 19 bp, Homo sapiens
  siRNA target sequence for ADAMTS9 (NM_182920.1,4318-4336).
ccgatcgtgagcagtgtaa

SEQ ID NO: 155866 - DNA, 19 bp, Homo sapiens
  siRNA target sequence for ADAMTS9 (NM_182920.1,4320-4338).
gatcgtgagcagtgtaaca

SEQ ID NO: 155867 - DNA, 19 bp, Homo sapiens
  siRNA target sequence for ADAMTS9 (NM_182920.1,4402-4420).
gtggtcgagggcataaaca

SEQ ID NO: 155868 - DNA, 19 bp, Homo sapiens
  siRNA target sequence for ADAMTS9 (NM_182920.1,4408-4426).
gagggcataaacaacgaaa

SEQ ID NO: 155869 - DNA, 19 bp, Homo sapiens
  siRNA target sequence for ADAMTS9 (NM_182920.1,4411-4429).
ggcataaacaacgaaatgt

SEQ ID NO: 155870 - DNA, 19 bp, Homo sapiens
  siRNA target sequence for ADAMTS9 (NM_182920.1,4412-4430).
gcataaacaacgaaatgtt

SEQ ID NO: 155871 - DNA, 19 bp, Homo sapiens
  siRNA target sequence for ADAMTS9 (NM_182920.1,4455-4473).
catttagaaagtgattact

SEQ ID NO: 155872 - DNA, 19 bp, Homo sapiens
  siRNA target sequence for ADAMTS9 (NM_182920.1,4605-4623).
cagatcggaacacacaaaa

SEQ ID NO: 155873 - DNA, 19 bp, Homo sapiens
  siRNA target sequence for ADAMTS9 (NM_182920.1,4607-4625).
gatcggaacacacaaaata

SEQ ID NO: 155874 - DNA, 19 bp, Homo sapiens
  siRNA target sequence for ADAMTS9 (NM_182920.1,4689-4707).
cggtgtcccctctacactt

SEQ ID NO: 155875 - DNA, 19 bp, Homo sapiens
  siRNA target sequence for ADAMTS9 (NM_182920.1,4775-4793).
gtgtgtggatgacaacaaa

SEQ ID NO: 155876 - DNA, 19 bp, Homo sapiens
  siRNA target sequence for ADAMTS9 (NM_182920.1,4860-4878).
caaccctgcgagtatgtct

SEQ ID NO: 155877 - DNA, 19 bp, Homo sapiens
  siRNA target sequence for ADAMTS9 (NM_182920.1,4917-4935).
ggaaaaggctacaaacaaa

SEQ ID NO: 155878 - DNA, 19 bp, Homo sapiens
  siRNA target sequence for ADAMTS9 (NM_182920.1,4941-4959).
gtctcgtgcagcgagattt

SEQ ID NO: 155879 - DNA, 19 bp, Homo sapiens
  siRNA target sequence for ADAMTS9 (NM_182920.1,4961-4979).
caccgggaaggagaattat

SEQ ID NO: 155880 - DNA, 19 bp, Homo sapiens
  siRNA target sequence for ADAMTS9 (NM_182920.1,5209-5227).
cctgccgtaatgtctataa

SEQ ID NO: 155881 - DNA, 19 bp, Homo sapiens
  siRNA target sequence for ADAMTS9 (NM_182920.1,5213-5231).
ccgtaatgtctataactgt

SEQ ID NO: 155882 - DNA, 19 bp, Homo sapiens
  siRNA target sequence for ADAMTS9 (NM_182920.1,5248-5266).
gcaaggaggtaaaaagact

SEQ ID NO: 155883 - DNA, 19 bp, Homo sapiens
  siRNA target sequence for ADAMTS9 (NM_182920.1,5289-5307).
gaatatttcctgatgatta

SEQ ID NO: 155884 - DNA, 19 bp, Homo sapiens
  siRNA target sequence for ADAMTS9 (NM_182920.1,5393-5411).
gaatttctccgaggtttat

SEQ ID NO: 155885 - DNA, 19 bp, Homo sapiens
  siRNA target sequence for ADAMTS9 (NM_182920.1,5420-5438).
gttacacaacccaacagaa

SEQ ID NO: 155886 - DNA, 19 bp, Homo sapiens
  siRNA target sequence for ADAMTS9 (NM_182920.1,5470-5488).
gccaatgtcggaaggatta

SEQ ID NO: 155887 - DNA, 19 bp, Homo sapiens
  siRNA target sequence for ADAMTS9 (NM_182920.1,5495-5513).
cgctgggttttccagtttt

SEQ ID NO: 155888 - DNA, 19 bp, Homo sapiens
  siRNA target sequence for ADAMTS9 (NM_182920.1,5546-5564).
gataatcaccactgactta

SEQ ID NO: 155889 - DNA, 19 bp, Homo sapiens
  siRNA target sequence for ADAMTS9 (NM_182920.1,5552-5570).
caccactgacttacagttt

SEQ ID NO: 155890 - DNA, 19 bp, Homo sapiens
  siRNA target sequence for ADAMTS9 (NM_182920.1,5641-5659).
cacagggtcgttttagcat

SEQ ID NO: 155891 - DNA, 19 bp, Homo sapiens
  siRNA target sequence for ADAMTS9 (NM_182920.1,5649-5667).
cgttttagcatcaaccttt

SEQ ID NO: 155892 - DNA, 19 bp, Homo sapiens
  siRNA target sequence for ADAMTS9 (NM_182920.1,5650-5668).
gttttagcatcaaccttta

SEQ ID NO: 155893 - DNA, 19 bp, Homo sapiens
  siRNA target sequence for ADAMTS9 (NM_182920.1,5670-5688).
ggaaccggcttgtctttaa

SEQ ID NO: 155894 - DNA, 19 bp, Homo sapiens
  siRNA target sequence for ADAMTS9 (NM_182920.1,5704-5722).
ggatatcacaagggaatta

SEQ ID NO: 155895 - DNA, 19 bp, Homo sapiens
  siRNA target sequence for ADAMTS9 (NM_182920.1,5727-5745).
gtctctgacatcaagaagt

SEQ ID NO: 155896 - DNA, 19 bp, Homo sapiens
  siRNA target sequence for ADAMTS9 (NM_182920.1,5771-5789).
gaaatgcggtggttactgt

SEQ ID NO: 155897 - DNA, 19 bp, Homo sapiens
  siRNA target sequence for ADAMTS9 (NM_182920.1,5777-5795).
cggtggttactgtggaaaa

SEQ ID NO: 155898 - DNA, 19 bp, Homo sapiens
  siRNA target sequence for ADAMTS9 (NM_182920.1,5818-5836).
gcctggaggtgcgagtttt

SEQ ID NO: 155899 - DNA, 19 bp, Homo sapiens
  siRNA target sequence for ADAMTS9 (NM_182920.1,5819-5837).
cctggaggtgcgagtttta

SEQ ID NO: 155900 - DNA, 19 bp, Homo sapiens
  siRNA target sequence for ADAMTS9 (NM_182920.1,5820-5838).
ctggaggtgcgagttttat

SEQ ID NO: 155901 - DNA, 19 bp, Homo sapiens
  siRNA target sequence for ADH1A (NM_000667.2,341-359).
catcccactcgctattcct

SEQ ID NO: 155902 - DNA, 19 bp, Homo sapiens
  siRNA target sequence for ADH1A (NM_000667.2,410-428).
gaaaaacgatgtaagcaat

SEQ ID NO: 155903 - DNA, 19 bp, Homo sapiens
  siRNA target sequence for ADH1A (NM_000667.2,1174-1192).
gtatccgtaccattctgat

SEQ ID NO: 155904 - DNA, 19 bp, Homo sapiens
  siRNA target sequence for ADH1A (NM_000667.2,1178-1196).
ccgtaccattctgatgttt

SEQ ID NO: 155905 - DNA, 19 bp, Homo sapiens
  siRNA target sequence for ADH1A (NM_000667.2,1179-1197).
cgtaccattctgatgtttt

SEQ ID NO: 155906 - DNA, 19 bp, Homo sapiens
  siRNA target sequence for ADH1B (NM_000668.3,1023-1041).
ctgtttatggtggctttaa

SEQ ID NO: 155907 - DNA, 19 bp, Homo sapiens
  siRNA target sequence for ADH1C (NM_000669.2,1012-1030).
cgtggaaaggagctatttt

SEQ ID NO: 155908 - DNA, 19 bp, Homo sapiens
  siRNA target sequence for ADH1C (NM_000669.2,1157-1175).
gcttcgctctggaaagagt

SEQ ID NO: 155909 - DNA, 19 bp, Homo sapiens
  siRNA target sequence for ADH1C (NM_000669.2,1158-1176).
cttcgctctggaaagagta

SEQ ID NO: 155910 - DNA, 19 bp, Homo sapiens
  siRNA target sequence for ADH4 (NM_000670.2,483-501).
caccaagggcaaagttatt

SEQ ID NO: 155911 - DNA, 19 bp, Homo sapiens
  siRNA target sequence for ADH4 (NM_000670.2,545-563).
gcattgaagaggttgaagt

SEQ ID NO: 155912 - DNA, 19 bp, Homo sapiens
  siRNA target sequence for ADH4 (NM_000670.2,589-607).
cgcattcagatcattgcta

SEQ ID NO: 155913 - DNA, 19 bp, Homo sapiens
  siRNA target sequence for ADH4 (NM_000670.2,763-781).
gcacctctatgtagaaaat

SEQ ID NO: 155914 - DNA, 19 bp, Homo sapiens
  siRNA target sequence for ADH4 (NM_000670.2,834-852).
caaaagtcctgctagtgat

SEQ ID NO: 155915 - DNA, 19 bp, Homo sapiens
  siRNA target sequence for ADH4 (NM_000670.2,844-862).
gctagtgatcaacaactaa

SEQ ID NO: 155916 - DNA, 19 bp, Homo sapiens
  siRNA target sequence for ADH4 (NM_000670.2,845-863).
ctagtgatcaacaactaat

SEQ ID NO: 155917 - DNA, 19 bp, Homo sapiens
  siRNA target sequence for ADH4 (NM_000670.2,848-866).
gtgatcaacaactaatgga

SEQ ID NO: 155918 - DNA, 19 bp, Homo sapiens
  siRNA target sequence for ADH4 (NM_000670.2,948-966).
ggtgtcagatatcaatctt

SEQ ID NO: 155919 - DNA, 19 bp, Homo sapiens
  siRNA target sequence for ADH4 (NM_000670.2,960-978).
caatcttgccaaaatagat

SEQ ID NO: 155920 - DNA, 19 bp, Homo sapiens
  siRNA target sequence for ADH4 (NM_000670.2,1031-1049).
gctatggggctgcaatcaa

SEQ ID NO: 155921 - DNA, 19 bp, Homo sapiens
  siRNA target sequence for ADH4 (NM_000670.2,1141-1159).
gcttccagaatcataggta

SEQ ID NO: 155922 - DNA, 19 bp, Homo sapiens
  siRNA target sequence for ADH4 (NM_000670.2,1142-1160).
cttccagaatcataggtat

SEQ ID NO: 155923 - DNA, 19 bp, Homo sapiens
  siRNA target sequence for ADH4 (NM_000670.2,1145-1163).
ccagaatcataggtattga

SEQ ID NO: 155924 - DNA, 19 bp, Homo sapiens
  siRNA target sequence for ADH4 (NM_000670.2,1148-1166).
gaatcataggtattgacat

SEQ ID NO: 155925 - DNA, 19 bp, Homo sapiens
  siRNA target sequence for ADH4 (NM_000670.2,1215-1233).
cctcaatcctagagactta

SEQ ID NO: 155926 - DNA, 19 bp, Homo sapiens
  siRNA target sequence for ADH4 (NM_000670.2,1218-1236).
caatcctagagacttacat

SEQ ID NO: 155927 - DNA, 19 bp, Homo sapiens
  siRNA target sequence for ADH4 (NM_000670.2,1240-1258).
ccgatccaggaagttatca

SEQ ID NO: 155928 - DNA, 19 bp, Homo sapiens
  siRNA target sequence for ADH4 (NM_000670.2,1241-1259).
cgatccaggaagttatcat

SEQ ID NO: 155929 - DNA, 19 bp, Homo sapiens
  siRNA target sequence for ADH4 (NM_000670.2,1301-1319).
caggtggatctgaaaccat

SEQ ID NO: 155930 - DNA, 19 bp, Homo sapiens
  siRNA target sequence for ADH4 (NM_000670.2,1353-1371).
gggatcatgtactttcatt

SEQ ID NO: 155931 - DNA, 19 bp, Homo sapiens
  siRNA target sequence for ADH4 (NM_000670.2,1385-1403).
gtagcaaaggattgactat

SEQ ID NO: 155932 - DNA, 19 bp, Homo sapiens
  siRNA target sequence for ADH4 (NM_000670.2,1388-1406).
gcaaaggattgactatttt

SEQ ID NO: 155933 - DNA, 19 bp, Homo sapiens
  siRNA target sequence for ADH4 (NM_000670.2,1389-1407).
caaaggattgactattttt

SEQ ID NO: 155934 - DNA, 19 bp, Homo sapiens
  siRNA target sequence for ADH4 (NM_000670.2,1425-1443).
cggccgtactataaatgga

SEQ ID NO: 155935 - DNA, 19 bp, Homo sapiens
  siRNA target sequence for ADH4 (NM_000670.2,1426-1444).
ggccgtactataaatggaa

SEQ ID NO: 155936 - DNA, 19 bp, Homo sapiens
  siRNA target sequence for ADH4 (NM_000670.2,1486-1504).
ctggtcactgactataaga

SEQ ID NO: 155937 - DNA, 19 bp, Homo sapiens
  siRNA target sequence for ADH4 (NM_000670.2,1488-1506).
ggtcactgactataagaat

SEQ ID NO: 155938 - DNA, 19 bp, Homo sapiens
  siRNA target sequence for ADH4 (NM_000670.2,1562-1580).
gtgaggcatttgacctaat

SEQ ID NO: 155939 - DNA, 19 bp, Homo sapiens
  siRNA target sequence for ADH4 (NM_000670.2,1564-1582).
gaggcatttgacctaatga

SEQ ID NO: 155940 - DNA, 19 bp, Homo sapiens
  siRNA target sequence for ADH4 (NM_000670.2,1589-1607).
gaaaaagcgtccgaacaat

SEQ ID NO: 155941 - DNA, 19 bp, Homo sapiens
  siRNA target sequence for ADH4 (NM_000670.2,1599-1617).
ccgaacaatcctcatcttt

SEQ ID NO: 155942 - DNA, 19 bp, Homo sapiens
  siRNA target sequence for ADH4 (NM_000670.2,1626-1644).
ccaggagcaattcagaata

SEQ ID NO: 155943 - DNA, 19 bp, Homo sapiens
  siRNA target sequence for ADH4 (NM_000670.2,1632-1650).
gcaattcagaatactatct

SEQ ID NO: 155944 - DNA, 19 bp, Homo sapiens
  siRNA target sequence for ADH5 (NM_000671.2,687-705).
catttcaaccggttatggt

SEQ ID NO: 155945 - DNA, 19 bp, Homo sapiens
  siRNA target sequence for ADH6 (NM_000672.2,140-158).
gaagcctggtgcaccattt

SEQ ID NO: 155946 - DNA, 19 bp, Homo sapiens
  siRNA target sequence for ADH6 (NM_000672.2,143-161).
gcctggtgcaccattttct

SEQ ID NO: 155947 - DNA, 19 bp, Homo sapiens
  siRNA target sequence for ADH6 (NM_000672.2,144-162).
cctggtgcaccattttcta

SEQ ID NO: 155948 - DNA, 19 bp, Homo sapiens
  siRNA target sequence for ADH6 (NM_000672.2,148-166).
gtgcaccattttctattga

SEQ ID NO: 155949 - DNA, 19 bp, Homo sapiens
  siRNA target sequence for ADH6 (NM_000672.2,151-169).
caccattttctattgaaga

SEQ ID NO: 155950 - DNA, 19 bp, Homo sapiens
  siRNA target sequence for ADH6 (NM_000672.2,235-253).
gtacagagatgaaagtgtt

SEQ ID NO: 155951 - DNA, 19 bp, Homo sapiens
  siRNA target sequence for ADH6 (NM_000672.2,307-325).
ctggaatcgttgagagtat

SEQ ID NO: 155952 - DNA, 19 bp, Homo sapiens
  siRNA target sequence for ADH6 (NM_000672.2,421-439).
gcaatttttgtatacaatt

SEQ ID NO: 155953 - DNA, 19 bp, Homo sapiens
  siRNA target sequence for ADH6 (NM_000672.2,580-598).
cagtcgctcctctagagaa

SEQ ID NO: 155954 - DNA, 19 bp, Homo sapiens
  siRNA target sequence for ADH6 (NM_000672.2,584-602).
cgctcctctagagaaagta

SEQ ID NO: 155955 - DNA, 19 bp, Homo sapiens
  siRNA target sequence for ADH6 (NM_000672.2,585-603).
gctcctctagagaaagtat

SEQ ID NO: 155956 - DNA, 19 bp, Homo sapiens
  siRNA target sequence for ADH6 (NM_000672.2,594-612).
gagaaagtatgcctaatta

SEQ ID NO: 155957 - DNA, 19 bp, Homo sapiens
  siRNA target sequence for ADH6 (NM_000672.2,632-650).
gtttggtgctgcaatcaat

SEQ ID NO: 155958 - DNA, 19 bp, Homo sapiens
  siRNA target sequence for ADH6 (NM_000672.2,765-783).
gtcaacaaggagaaattta

SEQ ID NO: 155959 - DNA, 19 bp, Homo sapiens
  siRNA target sequence for ADH6 (NM_000672.2,830-848).
cttaaagaaacccattcaa

SEQ ID NO: 155960 - DNA, 19 bp, Homo sapiens
  siRNA target sequence for ADH6 (NM_000672.2,868-886).
cagatgctggtatagactt

SEQ ID NO: 155961 - DNA, 19 bp, Homo sapiens
  siRNA target sequence for ADH6 (NM_000672.2,889-907).
gctttgaggccattggaaa

SEQ ID NO: 155962 - DNA, 19 bp, Homo sapiens
  siRNA target sequence for ADH6 (NM_000672.2,930-948).
ctcgcctcctgcaatgaga

SEQ ID NO: 155963 - DNA, 19 bp, Homo sapiens
  siRNA target sequence for ADH6 (NM_000672.2,977-995).
gttgcctgccagtgttcaa

SEQ ID NO: 155964 - DNA, 19 bp, Homo sapiens
  siRNA target sequence for ADH6 (NM_000672.2,984-1002).
gccagtgttcaactcaaaa

SEQ ID NO: 155965 - DNA, 19 bp, Homo sapiens
  siRNA target sequence for ADH6 (NM_000672.2,1126-1144).
cactaattactcatactct

SEQ ID NO: 155966 - DNA, 19 bp, Homo sapiens
  siRNA target sequence for ADH6 (NM_000672.2,1164-1182).
gaagcagttgaattaatga

SEQ ID NO: 155967 - DNA, 19 bp, Homo sapiens
  siRNA target sequence for ADH7 (NM_000673.2,103-121).
gggcactgctggaaaagtt

SEQ ID NO: 155968 - DNA, 19 bp, Homo sapiens
  siRNA target sequence for ADH7 (NM_000673.2,104-122).
ggcactgctggaaaagtta

SEQ ID NO: 155969 - DNA, 19 bp, Homo sapiens
  siRNA target sequence for ADH7 (NM_000673.2,185-203).
gttgccccaccaaagacta

SEQ ID NO: 155970 - DNA, 19 bp, Homo sapiens
  siRNA target sequence for ADH7 (NM_000673.2,251-269).
gaccatgtgataaaaggaa

SEQ ID NO: 155971 - DNA, 19 bp, Homo sapiens
  siRNA target sequence for ADH7 (NM_000673.2,277-295).
gtccaagtttccagtgatt

SEQ ID NO: 155972 - DNA, 19 bp, Homo sapiens
  siRNA target sequence for ADH7 (NM_000673.2,422-440).
gatggcaacctttgcatta

SEQ ID NO: 155973 - DNA, 19 bp, Homo sapiens
  siRNA target sequence for ADH7 (NM_000673.2,436-454).
cattaggagcgatattact

SEQ ID NO: 155974 - DNA, 19 bp, Homo sapiens
  siRNA target sequence for ADH7 (NM_000673.2,476-494).
ggcaccaccagatttacat

SEQ ID NO: 155975 - DNA, 19 bp, Homo sapiens
  siRNA target sequence for ADH7 (NM_000673.2,564-582).
cttctgttgctaagattga

SEQ ID NO: 155976 - DNA, 19 bp, Homo sapiens
  siRNA target sequence for ADH7 (NM_000673.2,597-615).
ctgagaaagtctgtttaat

SEQ ID NO: 155977 - DNA, 19 bp, Homo sapiens
  siRNA target sequence for ADH7 (NM_000673.2,636-654).
gatatggcgctgctgttaa

SEQ ID NO: 155978 - DNA, 19 bp, Homo sapiens
  siRNA target sequence for ADH7 (NM_000673.2,719-737).
gtcatcatgggctgtaagt

SEQ ID NO: 155979 - DNA, 19 bp, Homo sapiens
  siRNA target sequence for ADH7 (NM_000673.2,762-780).
ggattgacctcaacaaaga

SEQ ID NO: 155980 - DNA, 19 bp, Homo sapiens
  siRNA target sequence for ADH7 (NM_000673.2,883-901).
cgtgggatacacctttgaa

SEQ ID NO: 155981 - DNA, 19 bp, Homo sapiens
  siRNA target sequence for ADH7 (NM_000673.2,887-905).
ggatacacctttgaagtta

SEQ ID NO: 155982 - DNA, 19 bp, Homo sapiens
  siRNA target sequence for ADH7 (NM_000673.2,888-906).
gatacacctttgaagttat

SEQ ID NO: 155983 - DNA, 19 bp, Homo sapiens
  siRNA target sequence for ADH7 (NM_000673.2,939-957).
catcctgccacatgaacta

SEQ ID NO: 155984 - DNA, 19 bp, Homo sapiens
  siRNA target sequence for ADH7 (NM_000673.2,1050-1068).
gtgtctttggaggtttgaa

SEQ ID NO: 155985 - DNA, 19 bp, Homo sapiens
  siRNA target sequence for ADH7 (NM_000673.2,1121-1139).
gacctggaccagttgataa

SEQ ID NO: 155986 - DNA, 19 bp, Homo sapiens
  siRNA target sequence for ADH7 (NM_000673.2,1126-1144).
ggaccagttgataactcat

SEQ ID NO: 155987 - DNA, 19 bp, Homo sapiens
  siRNA target sequence for ADH7 (NM_000673.2,1135-1153).
gataactcatgttttacca

SEQ ID NO: 155988 - DNA, 19 bp, Homo sapiens
  siRNA target sequence for ADH7 (NM_000673.2,1172-1190).
ggatttgagctgctcaatt

SEQ ID NO: 155989 - DNA, 19 bp, Homo sapiens
  siRNA target sequence for AICDA (NM_020661.1,94-112).
gaaccggaggaagtttctt

SEQ ID NO: 155990 - DNA, 19 bp, Homo sapiens
  siRNA target sequence for AICDA (NM_020661.1,185-203).
gacagtgctacatcctttt

SEQ ID NO: 155991 - DNA, 19 bp, Homo sapiens
  siRNA target sequence for AICDA (NM_020661.1,215-233).
ggttatcttcgcaataaga

SEQ ID NO: 155992 - DNA, 19 bp, Homo sapiens
  siRNA target sequence for AICDA (NM_020661.1,216-234).
gttatcttcgcaataagaa

SEQ ID NO: 155993 - DNA, 19 bp, Homo sapiens
  siRNA target sequence for AICDA (NM_020661.1,237-255).
gctgccacgtggaattgct

SEQ ID NO: 155994 - DNA, 19 bp, Homo sapiens
  siRNA target sequence for AICDA (NM_020661.1,351-369).
gacatgtggccgactttct

SEQ ID NO: 155995 - DNA, 19 bp, Homo sapiens
  siRNA target sequence for AICDA (NM_020661.1,476-494).
gtgcaaatagccatcatga

SEQ ID NO: 155996 - DNA, 19 bp, Homo sapiens
  siRNA target sequence for AICDA (NM_020661.1,487-505).
catcatgaccttcaaagat

SEQ ID NO: 155997 - DNA, 19 bp, Homo sapiens
  siRNA target sequence for AICDA (NM_020661.1,599-617).
cagcttcggcgcatccttt

SEQ ID NO: 155998 - DNA, 19 bp, Homo sapiens
  siRNA target sequence for AICDA (NM_020661.1,621-639).
ccctgtatgaggttgatga

SEQ ID NO: 155999 - DNA, 19 bp, Homo sapiens
  siRNA target sequence for AICDA (NM_020661.1,640-658).
cttacgagacgcatttcgt

SEQ ID NO: 156000 - DNA, 19 bp, Homo sapiens
  siRNA target sequence for AICDA (NM_020661.1,645-663).
gagacgcatttcgtacttt

SEQ ID NO: 156001 - DNA, 19 bp, Homo sapiens
  siRNA target sequence for ANPEP (NM_001150.1,123-141).
ggccaagggcttctatatt

SEQ ID NO: 156002 - DNA, 19 bp, Homo sapiens
  siRNA target sequence for ANPEP (NM_001150.1,124-142).
gccaagggcttctatattt

SEQ ID NO: 156003 - DNA, 19 bp, Homo sapiens
  siRNA target sequence for ANPEP (NM_001150.1,308-326).
ccaccttggaccaaagtaa

SEQ ID NO: 156004 - DNA, 19 bp, Homo sapiens
  siRNA target sequence for ANPEP (NM_001150.1,309-327).
caccttggaccaaagtaaa

SEQ ID NO: 156005 - DNA, 19 bp, Homo sapiens
  siRNA target sequence for ANPEP (NM_001150.1,323-341).
gtaaagcgtggaatcgtta

SEQ ID NO: 156006 - DNA, 19 bp, Homo sapiens
  siRNA target sequence for ANPEP (NM_001150.1,356-374).
cgctgaaacccgattccta

SEQ ID NO: 156007 - DNA, 19 bp, Homo sapiens
  siRNA target sequence for ANPEP (NM_001150.1,409-427).
gacaggggcctgtacgttt

SEQ ID NO: 156008 - DNA, 19 bp, Homo sapiens
  siRNA target sequence for ANPEP (NM_001150.1,411-429).
caggggcctgtacgttttt

SEQ ID NO: 156009 - DNA, 19 bp, Homo sapiens
  siRNA target sequence for ANPEP (NM_001150.1,928-946).
cacaccacgcccaagatgt

SEQ ID NO: 156010 - DNA, 19 bp, Homo sapiens
  siRNA target sequence for ANPEP (NM_001150.1,951-969).
gtacttgctggccttcatt

SEQ ID NO: 156011 - DNA, 19 bp, Homo sapiens
  siRNA target sequence for ANPEP (NM_001150.1,1001-1019).
catccaatggtgtcttgat

SEQ ID NO: 156012 - DNA, 19 bp, Homo sapiens
  siRNA target sequence for ANPEP (NM_001150.1,1419-1437).
cctcatggtgctgaatgat

SEQ ID NO: 156013 - DNA, 19 bp, Homo sapiens
  siRNA target sequence for ANPEP (NM_001150.1,1490-1508).
cacccgcctcggagatcaa

SEQ ID NO: 156014 - DNA, 19 bp, Homo sapiens
  siRNA target sequence for ANPEP (NM_001150.1,1591-1609).
ctgtccgaggacgtattca

SEQ ID NO: 156015 - DNA, 19 bp, Homo sapiens
  siRNA target sequence for ANPEP (NM_001150.1,1724-1742).
ccgtgcgggacatcatgaa

SEQ ID NO: 156016 - DNA, 19 bp, Homo sapiens
  siRNA target sequence for ANPEP (NM_001150.1,1825-1843).
gaccccgattccaatgtta

SEQ ID NO: 156017 - DNA, 19 bp, Homo sapiens
  siRNA target sequence for ANPEP (NM_001150.1,1917-1935).
ctactggctgatagatgta

SEQ ID NO: 156018 - DNA, 19 bp, Homo sapiens
  siRNA target sequence for ANPEP (NM_001150.1,1920-1938).
ctggctgatagatgtaaga

SEQ ID NO: 156019 - DNA, 19 bp, Homo sapiens
  siRNA target sequence for ANPEP (NM_001150.1,1937-1955).
gagcccagaacgatctctt

SEQ ID NO: 156020 - DNA, 19 bp, Homo sapiens
  siRNA target sequence for ANPEP (NM_001150.1,2003-2021).
gctattaccgggtgaacta

SEQ ID NO: 156021 - DNA, 19 bp, Homo sapiens
  siRNA target sequence for ANPEP (NM_001150.1,2088-2106).
caatcgggcacagatcatt

SEQ ID NO: 156022 - DNA, 19 bp, Homo sapiens
  siRNA target sequence for ANPEP (NM_001150.1,2219-2237).
gcagcctgagctacttcaa

SEQ ID NO: 156023 - DNA, 19 bp, Homo sapiens
  siRNA target sequence for ANPEP (NM_001150.1,2228-2246).
gctacttcaagctcatgtt

SEQ ID NO: 156024 - DNA, 19 bp, Homo sapiens
  siRNA target sequence for ANPEP (NM_001150.1,2260-2278).
gtctatggccccatgaaga

SEQ ID NO: 156025 - DNA, 19 bp, Homo sapiens
  siRNA target sequence for ANPEP (NM_001150.1,2295-2313).
ggtcacacccctcttcatt

SEQ ID NO: 156026 - DNA, 19 bp, Homo sapiens
  siRNA target sequence for ANPEP (NM_001150.1,2314-2332).
cacttcagaaataatacca

SEQ ID NO: 156027 - DNA, 19 bp, Homo sapiens
  siRNA target sequence for ANPEP (NM_001150.1,2663-2681).
ccctgaacccggacttaat

SEQ ID NO: 156028 - DNA, 19 bp, Homo sapiens
  siRNA target sequence for ANPEP (NM_001150.1,2741-2759).
gtctggtctgggactttgt

SEQ ID NO: 156029 - DNA, 19 bp, Homo sapiens
  siRNA target sequence for ANPEP (NM_001150.1,2771-2789).
ggaagaagctttttaacga

SEQ ID NO: 156030 - DNA, 19 bp, Homo sapiens
  siRNA target sequence for ANPEP (NM_001150.1,2772-2790).
gaagaagctttttaacgat

SEQ ID NO: 156031 - DNA, 19 bp, Homo sapiens
  siRNA target sequence for ANPEP (NM_001150.1,2778-2796).
gctttttaacgattatggt

SEQ ID NO: 156032 - DNA, 19 bp, Homo sapiens
  siRNA target sequence for ANPEP (NM_001150.1,2843-2861).
gattctccaccgagtatga

SEQ ID NO: 156033 - DNA, 19 bp, Homo sapiens
  siRNA target sequence for APOBEC3A (NM_145699.2,107-125).
cttgatggatccacacata

SEQ ID NO: 156034 - DNA, 19 bp, Homo sapiens
  siRNA target sequence for APOBEC3G (NM_021822.1,400-418).
caggtgtattccgaactta

SEQ ID NO: 156035 - DNA, 19 bp, Homo sapiens
  siRNA target sequence for APOBEC3G (NM_021822.1,403-421).
gtgtattccgaacttaagt

SEQ ID NO: 156036 - DNA, 19 bp, Homo sapiens
  siRNA target sequence for APOBEC3G (NM_021822.1,556-574).
gccgaggacccgaaggtta

SEQ ID NO: 156037 - DNA, 19 bp, Homo sapiens
  siRNA target sequence for APOBEC3G (NM_021822.1,731-749).
gccaaagagagctatttga

SEQ ID NO: 156038 - DNA, 19 bp, Homo sapiens
  siRNA target sequence for APOBEC3G (NM_021822.1,742-760).
ctatttgagccttggaata

SEQ ID NO: 156039 - DNA, 19 bp, Homo sapiens
  siRNA target sequence for APOBEC3G (NM_021822.1,1021-1039).
gacgtgattcccttttgga

SEQ ID NO: 156040 - DNA, 19 bp, Homo sapiens
  siRNA target sequence for APOBEC3G (NM_021822.1,1105-1123).
gcccaggaaatggctaaat

SEQ ID NO: 156041 - DNA, 19 bp, Homo sapiens
  siRNA target sequence for APOBEC3G (NM_021822.1,1166-1184).
cccgcatctatgatgatca

SEQ ID NO: 156042 - DNA, 19 bp, Homo sapiens
  siRNA target sequence for APOBEC3G (NM_021822.1,1167-1185).
ccgcatctatgatgatcaa

SEQ ID NO: 156043 - DNA, 19 bp, Homo sapiens
  siRNA target sequence for APOBEC3G (NM_021822.1,1217-1235).
ccgaggctggggccaaaat

SEQ ID NO: 156044 - DNA, 19 bp, Homo sapiens
  siRNA target sequence for APOBEC3G (NM_021822.1,1218-1236).
cgaggctggggccaaaatt

SEQ ID NO: 156045 - DNA, 19 bp, Homo sapiens
  siRNA target sequence for APOBEC3G (NM_021822.1,1219-1237).
gaggctggggccaaaattt

SEQ ID NO: 156046 - DNA, 19 bp, Homo sapiens
  siRNA target sequence for APOBEC3G (NM_021822.1,1225-1243).
ggggccaaaatttcaataa

SEQ ID NO: 156047 - DNA, 19 bp, Homo sapiens
  siRNA target sequence for ARTS-1 (NM_016442.2,203-221).
gaagcatctccaaaacgta

SEQ ID NO: 156048 - DNA, 19 bp, Homo sapiens
  siRNA target sequence for ARTS-1 (NM_016442.2,224-242).
gatgggacaccatttcctt

SEQ ID NO: 156049 - DNA, 19 bp, Homo sapiens
  siRNA target sequence for ARTS-1 (NM_016442.2,229-247).
gacaccatttccttggaat

SEQ ID NO: 156050 - DNA, 19 bp, Homo sapiens
  siRNA target sequence for ARTS-1 (NM_016442.2,231-249).
caccatttccttggaataa

SEQ ID NO: 156051 - DNA, 19 bp, Homo sapiens
  siRNA target sequence for ARTS-1 (NM_016442.2,265-283).
gtacgtcatcccagttcat

SEQ ID NO: 156052 - DNA, 19 bp, Homo sapiens
  siRNA target sequence for ARTS-1 (NM_016442.2,268-286).
cgtcatcccagttcattat

SEQ ID NO: 156053 - DNA, 19 bp, Homo sapiens
  siRNA target sequence for ARTS-1 (NM_016442.2,325-343).
ctggggaaccacgaaagta

SEQ ID NO: 156054 - DNA, 19 bp, Homo sapiens
  siRNA target sequence for ARTS-1 (NM_016442.2,327-345).
ggggaaccacgaaagtaga

SEQ ID NO: 156055 - DNA, 19 bp, Homo sapiens
  siRNA target sequence for ARTS-1 (NM_016442.2,526-544).
cccgtacacagttgtcatt

SEQ ID NO: 156056 - DNA, 19 bp, Homo sapiens
  siRNA target sequence for ARTS-1 (NM_016442.2,528-546).
cgtacacagttgtcattca

SEQ ID NO: 156057 - DNA, 19 bp, Homo sapiens
  siRNA target sequence for ARTS-1 (NM_016442.2,545-563).
cactatgctggcaatcttt

SEQ ID NO: 156058 - DNA, 19 bp, Homo sapiens
  siRNA target sequence for ARTS-1 (NM_016442.2,555-573).
gcaatctttcggagacttt

SEQ ID NO: 156059 - DNA, 19 bp, Homo sapiens
  siRNA target sequence for ARTS-1 (NM_016442.2,575-593).
cacggattttacaaaagca

SEQ ID NO: 156060 - DNA, 19 bp, Homo sapiens
  siRNA target sequence for ARTS-1 (NM_016442.2,698-716).
gcaagtttctcaatcaaaa

SEQ ID NO: 156061 - DNA, 19 bp, Homo sapiens
  siRNA target sequence for ARTS-1 (NM_016442.2,734-752).
cacctagccatctccaata

SEQ ID NO: 156062 - DNA, 19 bp, Homo sapiens
  siRNA target sequence for ARTS-1 (NM_016442.2,864-882).
ctgtcagcaagataaccaa

SEQ ID NO: 156063 - DNA, 19 bp, Homo sapiens
  siRNA target sequence for ARTS-1 (NM_016442.2,885-903).
gtggagtcaaggtttctgt

SEQ ID NO: 156064 - DNA, 19 bp, Homo sapiens
  siRNA target sequence for ARTS-1 (NM_016442.2,887-905).
ggagtcaaggtttctgttt

SEQ ID NO: 156065 - DNA, 19 bp, Homo sapiens
  siRNA target sequence for ARTS-1 (NM_016442.2,908-926).
gctgtgccagacaagataa

SEQ ID NO: 156066 - DNA, 19 bp, Homo sapiens
  siRNA target sequence for ARTS-1 (NM_016442.2,909-927).
ctgtgccagacaagataaa

SEQ ID NO: 156067 - DNA, 19 bp, Homo sapiens
  siRNA target sequence for ARTS-1 (NM_016442.2,922-940).
gataaatcaagcagattat

SEQ ID NO: 156068 - DNA, 19 bp, Homo sapiens
  siRNA target sequence for ARTS-1 (NM_016442.2,951-969).
ctgcggtgactcttctaga

SEQ ID NO: 156069 - DNA, 19 bp, Homo sapiens
  siRNA target sequence for ARTS-1 (NM_016442.2,953-971).
gcggtgactcttctagaat

SEQ ID NO: 156070 - DNA, 19 bp, Homo sapiens
  siRNA target sequence for ARTS-1 (NM_016442.2,997-1015).
gtatcccctacccaaacaa

SEQ ID NO: 156071 - DNA, 19 bp, Homo sapiens
  siRNA target sequence for ARTS-1 (NM_016442.2,1023-1041).
ctgctattcccgactttca

SEQ ID NO: 156072 - DNA, 19 bp, Homo sapiens
  siRNA target sequence for ARTS-1 (NM_016442.2,1025-1043).
gctattcccgactttcagt

SEQ ID NO: 156073 - DNA, 19 bp, Homo sapiens
  siRNA target sequence for ARTS-1 (NM_016442.2,1060-1078).
ctggggactgacaacatat

SEQ ID NO: 156074 - DNA, 19 bp, Homo sapiens
  siRNA target sequence for ARTS-1 (NM_016442.2,1325-1343).
gtagatgctttaaattcct

SEQ ID NO: 156075 - DNA, 19 bp, Homo sapiens
  siRNA target sequence for ARTS-1 (NM_016442.2,1386-1404).
gggagatgtttgatgatgt

SEQ ID NO: 156076 - DNA, 19 bp, Homo sapiens
  siRNA target sequence for ARTS-1 (NM_016442.2,1490-1508).
ctccagaagcatagctata

SEQ ID NO: 156077 - DNA, 19 bp, Homo sapiens
  siRNA target sequence for ARTS-1 (NM_016442.2,1492-1510).
ccagaagcatagctataaa

SEQ ID NO: 156078 - DNA, 19 bp, Homo sapiens
  siRNA target sequence for ARTS-1 (NM_016442.2,1523-1541).
gaggacctgtgggatagta

SEQ ID NO: 156079 - DNA, 19 bp, Homo sapiens
  siRNA target sequence for ARTS-1 (NM_016442.2,1533-1551).
gggatagtatggcaagtat

SEQ ID NO: 156080 - DNA, 19 bp, Homo sapiens
  siRNA target sequence for ARTS-1 (NM_016442.2,1534-1552).
ggatagtatggcaagtatt

SEQ ID NO: 156081 - DNA, 19 bp, Homo sapiens
  siRNA target sequence for ARTS-1 (NM_016442.2,1554-1572).
gccctacagatggtgtaaa

SEQ ID NO: 156082 - DNA, 19 bp, Homo sapiens
  siRNA target sequence for ARTS-1 (NM_016442.2,1638-1656).
gggtggatgtgaaaaccat

SEQ ID NO: 156083 - DNA, 19 bp, Homo sapiens
  siRNA target sequence for ARTS-1 (NM_016442.2,1682-1700).
ggttttcccctaataacca

SEQ ID NO: 156084 - DNA, 19 bp, Homo sapiens
  siRNA target sequence for ARTS-1 (NM_016442.2,1683-1701).
gttttcccctaataaccat

SEQ ID NO: 156085 - DNA, 19 bp, Homo sapiens
  siRNA target sequence for ARTS-1 (NM_016442.2,1825-1843).
ggtccatcgatttttgcta

SEQ ID NO: 156086 - DNA, 19 bp, Homo sapiens
  siRNA target sequence for ARTS-1 (NM_016442.2,1826-1844).
gtccatcgatttttgctaa

SEQ ID NO: 156087 - DNA, 19 bp, Homo sapiens
  siRNA target sequence for ARTS-1 (NM_016442.2,1879-1897).
ggtggaatggatcaaattt

SEQ ID NO: 156088 - DNA, 19 bp, Homo sapiens
  siRNA target sequence for ARTS-1 (NM_016442.2,1940-1958).
gatggatgggactctttga

SEQ ID NO: 156089 - DNA, 19 bp, Homo sapiens
  siRNA target sequence for ARTS-1 (NM_016442.2,2072-2090).
gatttatccctgtacttga

SEQ ID NO: 156090 - DNA, 19 bp, Homo sapiens
  siRNA target sequence for ARTS-1 (NM_016442.2,2079-2097).
ccctgtacttgaaacatga

SEQ ID NO: 156091 - DNA, 19 bp, Homo sapiens
  siRNA target sequence for ARTS-1 (NM_016442.2,2112-2130).
ccgtgtttcaaggtttgaa

SEQ ID NO: 156092 - DNA, 19 bp, Homo sapiens
  siRNA target sequence for ARTS-1 (NM_016442.2,2113-2131).
cgtgtttcaaggtttgaat

SEQ ID NO: 156093 - DNA, 19 bp, Homo sapiens
  siRNA target sequence for ARTS-1 (NM_016442.2,2177-2195).
gaagtggaaactcaattca

SEQ ID NO: 156094 - DNA, 19 bp, Homo sapiens
  siRNA target sequence for ARTS-1 (NM_016442.2,2299-2317).
cgcctgtgtgcacaactat

SEQ ID NO: 156095 - DNA, 19 bp, Homo sapiens
  siRNA target sequence for ARTS-1 (NM_016442.2,2335-2353).
ggcagaaggctatttcaga

SEQ ID NO: 156096 - DNA, 19 bp, Homo sapiens
  siRNA target sequence for ARTS-1 (NM_016442.2,2352-2370).
gaaagtggaaggaatccaa

SEQ ID NO: 156097 - DNA, 19 bp, Homo sapiens
  siRNA target sequence for ARTS-1 (NM_016442.2,2433-2451).
cagaaggctgggattttct

SEQ ID NO: 156098 - DNA, 19 bp, Homo sapiens
  siRNA target sequence for ARTS-1 (NM_016442.2,2438-2456).
ggctgggattttctttata

SEQ ID NO: 156099 - DNA, 19 bp, Homo sapiens
  siRNA target sequence for ARTS-1 (NM_016442.2,2515-2533).
cagaacccaaaataaggaa

SEQ ID NO: 156100 - DNA, 19 bp, Homo sapiens
  siRNA target sequence for ARTS-1 (NM_016442.2,2536-2554).
gcttcaatggctactagat

SEQ ID NO: 156101 - DNA, 19 bp, Homo sapiens
  siRNA target sequence for ARTS-1 (NM_016442.2,2588-2606).
gagtttccacaaattctta

SEQ ID NO: 156102 - DNA, 19 bp, Homo sapiens
  siRNA target sequence for ARTS-1 (NM_016442.2,2590-2608).
gtttccacaaattcttaca

SEQ ID NO: 156103 - DNA, 19 bp, Homo sapiens
  siRNA target sequence for ARTS-1 (NM_016442.2,2635-2653).
cccactggcctggcaattt

SEQ ID NO: 156104 - DNA, 19 bp, Homo sapiens
  siRNA target sequence for ARTS-1 (NM_016442.2,2637-2655).
cactggcctggcaatttct

SEQ ID NO: 156105 - DNA, 19 bp, Homo sapiens
  siRNA target sequence for ARTS-1 (NM_016442.2,2639-2657).
ctggcctggcaatttctga

SEQ ID NO: 156106 - DNA, 19 bp, Homo sapiens
  siRNA target sequence for ARTS-1 (NM_016442.2,2665-2683).
ctggaacaaacttgtacaa

SEQ ID NO: 156107 - DNA, 19 bp, Homo sapiens
  siRNA target sequence for ARTS-1 (NM_016442.2,2706-2724).
ccatagcccacatggtaat

SEQ ID NO: 156108 - DNA, 19 bp, Homo sapiens
  siRNA target sequence for ARTS-1 (NM_016442.2,2754-2772).
cacggcttgaagaggtaaa

SEQ ID NO: 156109 - DNA, 19 bp, Homo sapiens
  siRNA target sequence for ARTS-1 (NM_016442.2,2819-2837).
gtccaacagacaattgaaa

SEQ ID NO: 156110 - DNA, 19 bp, Homo sapiens
  siRNA target sequence for ARTS-1 (NM_016442.2,2854-2872).
cggttggatggataagaat

SEQ ID NO: 156111 - DNA, 19 bp, Homo sapiens
  siRNA target sequence for ARTS-1 (NM_016442.2,2859-2877).
ggatggataagaattttga

SEQ ID NO: 156112 - DNA, 19 bp, Homo sapiens
  siRNA target sequence for BSPRY (NM_017688.1,91-109).
cgagggaactggttatcca

SEQ ID NO: 156113 - DNA, 19 bp, Homo sapiens
  siRNA target sequence for BSPRY (NM_017688.1,227-245).
cgaggcgctgcagaaactt

SEQ ID NO: 156114 - DNA, 19 bp, Homo sapiens
  siRNA target sequence for BSPRY (NM_017688.1,360-378).
ccccaggagtcggaaatgt

SEQ ID NO: 156115 - DNA, 19 bp, Homo sapiens
  siRNA target sequence for BSPRY (NM_017688.1,366-384).
gagtcggaaatgttaaact

SEQ ID NO: 156116 - DNA, 19 bp, Homo sapiens
  siRNA target sequence for BSPRY (NM_017688.1,749-767).
ggtcttctctcgctatgat

SEQ ID NO: 156117 - DNA, 19 bp, Homo sapiens
  siRNA target sequence for BSPRY (NM_017688.1,773-791).
gtttcgtttctcacacaat

SEQ ID NO: 156118 - DNA, 19 bp, Homo sapiens
  siRNA target sequence for BSPRY (NM_017688.1,951-969).
gtggccgatcagaccattt

SEQ ID NO: 156119 - DNA, 19 bp, Homo sapiens
  siRNA target sequence for BSPRY (NM_017688.1,953-971).
ggccgatcagaccatttct

SEQ ID NO: 156120 - DNA, 19 bp, Homo sapiens
  siRNA target sequence for BSPRY (NM_017688.1,954-972).
gccgatcagaccatttcta

SEQ ID NO: 156121 - DNA, 19 bp, Homo sapiens
  siRNA target sequence for BSPRY (NM_017688.1,955-973).
ccgatcagaccatttctat

SEQ ID NO: 156122 - DNA, 19 bp, Homo sapiens
  siRNA target sequence for CA1 (NM_001738.1,157-175).
cagactggggatatgatga

SEQ ID NO: 156123 - DNA, 19 bp, Homo sapiens
  siRNA target sequence for CA1 (NM_001738.1,161-179).
ctggggatatgatgacaaa

SEQ ID NO: 156124 - DNA, 19 bp, Homo sapiens
  siRNA target sequence for CA1 (NM_001738.1,211-229).
ccattgccaatggaaataa

SEQ ID NO: 156125 - DNA, 19 bp, Homo sapiens
  siRNA target sequence for CA1 (NM_001738.1,453-471).
gagcatggttcagaacata

SEQ ID NO: 156126 - DNA, 19 bp, Homo sapiens
  siRNA target sequence for CA1 (NM_001738.1,455-473).
gcatggttcagaacataca

SEQ ID NO: 156127 - DNA, 19 bp, Homo sapiens
  siRNA target sequence for CA1 (NM_001738.1,504-522).
cacgtagctcactggaatt

SEQ ID NO: 156128 - DNA, 19 bp, Homo sapiens
  siRNA target sequence for CA1 (NM_001738.1,506-524).
cgtagctcactggaattct

SEQ ID NO: 156129 - DNA, 19 bp, Homo sapiens
  siRNA target sequence for CA1 (NM_001738.1,636-654).
gccctccaagcaattaaaa

SEQ ID NO: 156130 - DNA, 19 bp, Homo sapiens
  siRNA target sequence for CA1 (NM_001738.1,662-680).
caaacgagccccattcaca

SEQ ID NO: 156131 - DNA, 19 bp, Homo sapiens
  siRNA target sequence for CA1 (NM_001738.1,745-763).
ctcatcctcctctttatga

SEQ ID NO: 156132 - DNA, 19 bp, Homo sapiens
  siRNA target sequence for CA1 (NM_001738.1,753-771).
cctctttatgagagtgtaa

SEQ ID NO: 156133 - DNA, 19 bp, Homo sapiens
  siRNA target sequence for CA1 (NM_001738.1,756-774).
ctttatgagagtgtaactt

SEQ ID NO: 156134 - DNA, 19 bp, Homo sapiens
  siRNA target sequence for CA1 (NM_001738.1,768-786).
gtaacttggatcatctgta

SEQ ID NO: 156135 - DNA, 19 bp, Homo sapiens
  siRNA target sequence for CA1 (NM_001738.1,822-840).
caattccgcagccttctat

SEQ ID NO: 156136 - DNA, 19 bp, Homo sapiens
  siRNA target sequence for CA1 (NM_001738.1,827-845).
ccgcagccttctatcaaat

SEQ ID NO: 156137 - DNA, 19 bp, Homo sapiens
  siRNA target sequence for CA1 (NM_001738.1,830-848).
cagccttctatcaaatgtt

SEQ ID NO: 156138 - DNA, 19 bp, Homo sapiens
  siRNA target sequence for CA10 (NM_020178.2,824-842).
ggtgaactcagcttggaat

SEQ ID NO: 156139 - DNA, 19 bp, Homo sapiens
  siRNA target sequence for CA10 (NM_020178.2,862-880).
ggcagtcgccagtcaacat

SEQ ID NO: 156140 - DNA, 19 bp, Homo sapiens
  siRNA target sequence for CA10 (NM_020178.2,863-881).
gcagtcgccagtcaacata

SEQ ID NO: 156141 - DNA, 19 bp, Homo sapiens
  siRNA target sequence for CA10 (NM_020178.2,882-900).
gagaccagtcacatgatct

SEQ ID NO: 156142 - DNA, 19 bp, Homo sapiens
  siRNA target sequence for CA10 (NM_020178.2,1002-1020).
gagcacttggtcaacatat

SEQ ID NO: 156143 - DNA, 19 bp, Homo sapiens
  siRNA target sequence for CA10 (NM_020178.2,1021-1039).
ctggagggcccatgacata

SEQ ID NO: 156144 - DNA, 19 bp, Homo sapiens
  siRNA target sequence for CA10 (NM_020178.2,1055-1073).
ggagatccgactacacttt

SEQ ID NO: 156145 - DNA, 19 bp, Homo sapiens
  siRNA target sequence for CA10 (NM_020178.2,1139-1157).
gctcatccactataaccat

SEQ ID NO: 156146 - DNA, 19 bp, Homo sapiens
  siRNA target sequence for CA10 (NM_020178.2,1154-1172).
ccatgagctatatacgaat

SEQ ID NO: 156147 - DNA, 19 bp, Homo sapiens
  siRNA target sequence for CA10 (NM_020178.2,1158-1176).
gagctatatacgaatgtca

SEQ ID NO: 156148 - DNA, 19 bp, Homo sapiens
  siRNA target sequence for CA10 (NM_020178.2,1200-1218).
ggattggtggtagtttcta

SEQ ID NO: 156149 - DNA, 19 bp, Homo sapiens
  siRNA target sequence for CA10 (NM_020178.2,1201-1219).
gattggtggtagtttctat

SEQ ID NO: 156150 - DNA, 19 bp, Homo sapiens
  siRNA target sequence for CA10 (NM_020178.2,1260-1278).
cgaatgctcaacagagata

SEQ ID NO: 156151 - DNA, 19 bp, Homo sapiens
  siRNA target sequence for CA10 (NM_020178.2,1266-1284).
ctcaacagagatactatca

SEQ ID NO: 156152 - DNA, 19 bp, Homo sapiens
  siRNA target sequence for CA10 (NM_020178.2,1348-1366).
cagagacctctagtttcat

SEQ ID NO: 156153 - DNA, 19 bp, Homo sapiens
  siRNA target sequence for CA10 (NM_020178.2,1350-1368).
gagacctctagtttcatca

SEQ ID NO: 156154 - DNA, 19 bp, Homo sapiens
  siRNA target sequence for CA10 (NM_020178.2,1406-1424).
gacagcaagttggatcata

SEQ ID NO: 156155 - DNA, 19 bp, Homo sapiens
  siRNA target sequence for CA10 (NM_020178.2,1408-1426).
cagcaagttggatcataat

SEQ ID NO: 156156 - DNA, 19 bp, Homo sapiens
  siRNA target sequence for CA10 (NM_020178.2,1410-1428).
gcaagttggatcataatga

SEQ ID NO: 156157 - DNA, 19 bp, Homo sapiens
  siRNA target sequence for CA10 (NM_020178.2,1411-1429).
caagttggatcataatgaa

SEQ ID NO: 156158 - DNA, 19 bp, Homo sapiens
  siRNA target sequence for CA10 (NM_020178.2,1427-1445).
gaacaaacctgtctatata

SEQ ID NO: 156159 - DNA, 19 bp, Homo sapiens
  siRNA target sequence for CA10 (NM_020178.2,1450-1468).
ggatgcagatgcattcctt

SEQ ID NO: 156160 - DNA, 19 bp, Homo sapiens
  siRNA target sequence for CA10 (NM_020178.2,1551-1569).
cgctgcatccgcaccaata

SEQ ID NO: 156161 - DNA, 19 bp, Homo sapiens
  siRNA target sequence for CA10 (NM_020178.2,1555-1573).
gcatccgcaccaatatcaa

SEQ ID NO: 156162 - DNA, 19 bp, Homo sapiens
  siRNA target sequence for CA10 (NM_020178.2,1588-1606).
ggaaggactgtccaaacaa

SEQ ID NO: 156163 - DNA, 19 bp, Homo sapiens
  siRNA target sequence for CA11 (NM_001217.2,466-484).
gtggagctacaaggataat

SEQ ID NO: 156164 - DNA, 19 bp, Homo sapiens
  siRNA target sequence for CA11 (NM_001217.2,468-486).
ggagctacaaggataatct

SEQ ID NO: 156165 - DNA, 19 bp, Homo sapiens
  siRNA target sequence for CA11 (NM_001217.2,704-722).
cgacctgtggtcaatgtgt

SEQ ID NO: 156166 - DNA, 19 bp, Homo sapiens
  siRNA target sequence for CA11 (NM_001217.2,789-807).
gagccggctcggaacatca

SEQ ID NO: 156167 - DNA, 19 bp, Homo sapiens
  siRNA target sequence for CA11 (NM_001217.2,991-1009).
catctcctacaagaatgat

SEQ ID NO: 156168 - DNA, 19 bp, Homo sapiens
  siRNA target sequence for CA12 (NM_001218.2,373-391).
gtttctcctgaccaacaat

SEQ ID NO: 156169 - DNA, 19 bp, Homo sapiens
  siRNA target sequence for CA12 (NM_001218.2,623-641).
ctggctgttctcattgaga

SEQ ID NO: 156170 - DNA, 19 bp, Homo sapiens
  siRNA target sequence for CA12 (NM_001218.2,656-674).
ccgtcctatgacaagatct

SEQ ID NO: 156171 - DNA, 19 bp, Homo sapiens
  siRNA target sequence for CA12 (NM_001218.2,657-675).
cgtcctatgacaagatctt

SEQ ID NO: 156172 - DNA, 19 bp, Homo sapiens
  siRNA target sequence for CA12 (NM_001218.2,676-694).
cagtcaccttcaacatgta

SEQ ID NO: 156173 - DNA, 19 bp, Homo sapiens
  siRNA target sequence for CA12 (NM_001218.2,714-732).
cattcgtcccgggattcaa

SEQ ID NO: 156174 - DNA, 19 bp, Homo sapiens
  siRNA target sequence for CA12 (NM_001218.2,718-736).
cgtcccgggattcaacatt

SEQ ID NO: 156175 - DNA, 19 bp, Homo sapiens
  siRNA target sequence for CA12 (NM_001218.2,750-768).
cggagaggaccgctgaata

SEQ ID NO: 156176 - DNA, 19 bp, Homo sapiens
  siRNA target sequence for CA12 (NM_001218.2,752-770).
gagaggaccgctgaatatt

SEQ ID NO: 156177 - DNA, 19 bp, Homo sapiens
  siRNA target sequence for CA12 (NM_001218.2,832-850).
ccgaaaccccgtgcaaatt

SEQ ID NO: 156178 - DNA, 19 bp, Homo sapiens
  siRNA target sequence for CA12 (NM_001218.2,833-851).
cgaaaccccgtgcaaattt

SEQ ID NO: 156179 - DNA, 19 bp, Homo sapiens
  siRNA target sequence for CA12 (NM_001218.2,1081-1099).
gtccatttggcttttcaga

SEQ ID NO: 156180 - DNA, 19 bp, Homo sapiens
  siRNA target sequence for CA14 (NM_012113.1,441-459).
ccagtcgcccatcgatatt

SEQ ID NO: 156181 - DNA, 19 bp, Homo sapiens
  siRNA target sequence for CA14 (NM_012113.1,718-736).
gtacattatgactctgatt

SEQ ID NO: 156182 - DNA, 19 bp, Homo sapiens
  siRNA target sequence for CA14 (NM_012113.1,815-833).
ctaagaatatagcttatga

SEQ ID NO: 156183 - DNA, 19 bp, Homo sapiens
  siRNA target sequence for CA14 (NM_012113.1,886-904).
gtgcctcccttcaacctaa

SEQ ID NO: 156184 - DNA, 19 bp, Homo sapiens
  siRNA target sequence for CA14 (NM_012113.1,930-948).
gcagtacttccgctacaat

SEQ ID NO: 156185 - DNA, 19 bp, Homo sapiens
  siRNA target sequence for CA14 (NM_012113.1,1008-1026).
gtcccagatttcaatggaa

SEQ ID NO: 156186 - DNA, 19 bp, Homo sapiens
  siRNA target sequence for CA14 (NM_012113.1,1147-1165).
caagcaggatcctcgtata

SEQ ID NO: 156187 - DNA, 19 bp, Homo sapiens
  siRNA target sequence for CA14 (NM_012113.1,1150-1168).
gcaggatcctcgtatacca

SEQ ID NO: 156188 - DNA, 19 bp, Homo sapiens
  siRNA target sequence for CA14 (NM_012113.1,1160-1178).
cgtataccacaggtgaaat

SEQ ID NO: 156189 - DNA, 19 bp, Homo sapiens
  siRNA target sequence for CA2 (NM_000067.1,79-97).
gggggtacggcaaacacaa

SEQ ID NO: 156190 - DNA, 19 bp, Homo sapiens
  siRNA target sequence for CA2 (NM_000067.1,167-185).
cactcatacagccaagtat

SEQ ID NO: 156191 - DNA, 19 bp, Homo sapiens
  siRNA target sequence for CA2 (NM_000067.1,312-330).
cccctggatggcacttaca

SEQ ID NO: 156192 - DNA, 19 bp, Homo sapiens
  siRNA target sequence for CA2 (NM_000067.1,318-336).
gatggcacttacagattga

SEQ ID NO: 156193 - DNA, 19 bp, Homo sapiens
  siRNA target sequence for CA2 (NM_000067.1,379-397).
cagagcatactgtggataa

SEQ ID NO: 156194 - DNA, 19 bp, Homo sapiens
  siRNA target sequence for CA2 (NM_000067.1,381-399).
gagcatactgtggataaaa

SEQ ID NO: 156195 - DNA, 19 bp, Homo sapiens
  siRNA target sequence for CA2 (NM_000067.1,481-499).
gactggccgttctaggtat

SEQ ID NO: 156196 - DNA, 19 bp, Homo sapiens
  siRNA target sequence for CA2 (NM_000067.1,483-501).
ctggccgttctaggtattt

SEQ ID NO: 156197 - DNA, 19 bp, Homo sapiens
  siRNA target sequence for CA2 (NM_000067.1,485-503).
ggccgttctaggtattttt

SEQ ID NO: 156198 - DNA, 19 bp, Homo sapiens
  siRNA target sequence for CA2 (NM_000067.1,486-504).
gccgttctaggtatttttt

SEQ ID NO: 156199 - DNA, 19 bp, Homo sapiens
  siRNA target sequence for CA2 (NM_000067.1,489-507).
gttctaggtatttttttga

SEQ ID NO: 156200 - DNA, 19 bp, Homo sapiens
  siRNA target sequence for CA2 (NM_000067.1,580-598).
gtgctgacttcactaactt

SEQ ID NO: 156201 - DNA, 19 bp, Homo sapiens
  siRNA target sequence for CA2 (NM_000067.1,721-739).
gcgagcaggtgttgaaatt

SEQ ID NO: 156202 - DNA, 19 bp, Homo sapiens
  siRNA target sequence for CA2 (NM_000067.1,731-749).
gttgaaattccgtaaactt

SEQ ID NO: 156203 - DNA, 19 bp, Homo sapiens
  siRNA target sequence for CA3 (NM_005181.2,721-739).
ctgaccactggcatgaact

SEQ ID NO: 156204 - DNA, 19 bp, Homo sapiens
  siRNA target sequence for CA3 (NM_005181.2,772-790).
ccgttgagctgcatactaa

SEQ ID NO: 156205 - DNA, 19 bp, Homo sapiens
  siRNA target sequence for CA3 (NM_005181.2,773-791).
cgttgagctgcatactaaa

SEQ ID NO: 156206 - DNA, 19 bp, Homo sapiens
  siRNA target sequence for CA3 (NM_005181.2,777-795).
gagctgcatactaaagaca

SEQ ID NO: 156207 - DNA, 19 bp, Homo sapiens
  siRNA target sequence for CA3 (NM_005181.2,872-890).
gaagacctgccgagttgta

SEQ ID NO: 156208 - DNA, 19 bp, Homo sapiens
  siRNA target sequence for CA3 (NM_005181.2,875-893).
gacctgccgagttgtattt

SEQ ID NO: 156209 - DNA, 19 bp, Homo sapiens
  siRNA target sequence for CA3 (NM_005181.2,880-898).
gccgagttgtatttgatga

SEQ ID NO: 156210 - DNA, 19 bp, Homo sapiens
  siRNA target sequence for CA3 (NM_005181.2,881-899).
ccgagttgtatttgatgat

SEQ ID NO: 156211 - DNA, 19 bp, Homo sapiens
  siRNA target sequence for CA3 (NM_005181.2,973-991).
ggggctcttcggatgatca

SEQ ID NO: 156212 - DNA, 19 bp, Homo sapiens
  siRNA target sequence for CA3 (NM_005181.2,974-992).
gggctcttcggatgatcat

SEQ ID NO: 156213 - DNA, 19 bp, Homo sapiens
  siRNA target sequence for CA3 (NM_005181.2,1027-1045).
cagcggagcttcatttggt

SEQ ID NO: 156214 - DNA, 19 bp, Homo sapiens
  siRNA target sequence for CA3 (NM_005181.2,1052-1070).
gaacccgaagtataacact

SEQ ID NO: 156215 - DNA, 19 bp, Homo sapiens
  siRNA target sequence for CA3 (NM_005181.2,1056-1074).
ccgaagtataacactttta

SEQ ID NO: 156216 - DNA, 19 bp, Homo sapiens
  siRNA target sequence for CA3 (NM_005181.2,1057-1075).
cgaagtataacacttttaa

SEQ ID NO: 156217 - DNA, 19 bp, Homo sapiens
  siRNA target sequence for CA3 (NM_005181.2,1094-1112).
cgatgggatcgctgtgatt

SEQ ID NO: 156218 - DNA, 19 bp, Homo sapiens
  siRNA target sequence for CA3 (NM_005181.2,1144-1162).
gcgagttccagattttcct

SEQ ID NO: 156219 - DNA, 19 bp, Homo sapiens
  siRNA target sequence for CA3 (NM_005181.2,1145-1163).
cgagttccagattttcctt

SEQ ID NO: 156220 - DNA, 19 bp, Homo sapiens
  siRNA target sequence for CA3 (NM_005181.2,1283-1301).
gccctgcgaggaatgcatt

SEQ ID NO: 156221 - DNA, 19 bp, Homo sapiens
  siRNA target sequence for CA4 (NM_000717.2,266-284).
ggctacgataagaagcaaa

SEQ ID NO: 156222 - DNA, 19 bp, Homo sapiens
  siRNA target sequence for CA4 (NM_000717.2,285-303).
cgtggactgtccaaaataa

SEQ ID NO: 156223 - DNA, 19 bp, Homo sapiens
  siRNA target sequence for CA4 (NM_000717.2,399-417).
ggtccgacttgccatataa

SEQ ID NO: 156224 - DNA, 19 bp, Homo sapiens
  siRNA target sequence for CA4 (NM_000717.2,453-471).
ccatggagatgcacatagt

SEQ ID NO: 156225 - DNA, 19 bp, Homo sapiens
  siRNA target sequence for CA4 (NM_000717.2,454-472).
catggagatgcacatagta

SEQ ID NO: 156226 - DNA, 19 bp, Homo sapiens
  siRNA target sequence for CA4 (NM_000717.2,488-506).
gggacatcgaggaatgtga

SEQ ID NO: 156227 - DNA, 19 bp, Homo sapiens
  siRNA target sequence for CA4 (NM_000717.2,492-510).
catcgaggaatgtgaaaga

SEQ ID NO: 156228 - DNA, 19 bp, Homo sapiens
  siRNA target sequence for CA4 (NM_000717.2,517-535).
ggaccctgaagacgaaatt

SEQ ID NO: 156229 - DNA, 19 bp, Homo sapiens
  siRNA target sequence for CA4 (NM_000717.2,595-613).
ggtggaggcactgtctaat

SEQ ID NO: 156230 - DNA, 19 bp, Homo sapiens
  siRNA target sequence for CA4 (NM_000717.2,723-741).
caccgacctgcgatgagaa

SEQ ID NO: 156231 - DNA, 19 bp, Homo sapiens
  siRNA target sequence for CA4 (NM_000717.2,875-893).
gggcagcgcacggtgataa

SEQ ID NO: 156232 - DNA, 19 bp, Homo sapiens
  siRNA target sequence for CA4 (NM_000717.2,876-894).
ggcagcgcacggtgataaa

SEQ ID NO: 156233 - DNA, 19 bp, Homo sapiens
  siRNA target sequence for CA4 (NM_000717.2,878-896).
cagcgcacggtgataaagt

SEQ ID NO: 156234 - DNA, 19 bp, Homo sapiens
  siRNA target sequence for CA5A (NM_001739.1,174-192).
gcatggcaaaccagcaata

SEQ ID NO: 156235 - DNA, 19 bp, Homo sapiens
  siRNA target sequence for CA5A (NM_001739.1,175-193).
catggcaaaccagcaataa

SEQ ID NO: 156236 - DNA, 19 bp, Homo sapiens
  siRNA target sequence for CA5A (NM_001739.1,386-404).
cgaggcatcaggaattagt

SEQ ID NO: 156237 - DNA, 19 bp, Homo sapiens
  siRNA target sequence for CA5A (NM_001739.1,658-676).
cggaaataaaacataagga

SEQ ID NO: 156238 - DNA, 19 bp, Homo sapiens
  siRNA target sequence for CA5B (NM_007220.2,142-160).
cctctccaggcaaattgct

SEQ ID NO: 156239 - DNA, 19 bp, Homo sapiens
  siRNA target sequence for CA5B (NM_007220.2,201-219).
ccctgcagcctctatactt

SEQ ID NO: 156240 - DNA, 19 bp, Homo sapiens
  siRNA target sequence for CA5B (NM_007220.2,203-221).
ctgcagcctctatacttgt

SEQ ID NO: 156241 - DNA, 19 bp, Homo sapiens
  siRNA target sequence for CA5B (NM_007220.2,208-226).
gcctctatacttgtactta

SEQ ID NO: 156242 - DNA, 19 bp, Homo sapiens
  siRNA target sequence for CA5B (NM_007220.2,212-230).
ctatacttgtacttacaaa

SEQ ID NO: 156243 - DNA, 19 bp, Homo sapiens
  siRNA target sequence for CA5B (NM_007220.2,433-451).
cagataaatcagtgatcaa

SEQ ID NO: 156244 - DNA, 19 bp, Homo sapiens
  siRNA target sequence for CA5B (NM_007220.2,457-475).
gacccctggaacacaacta

SEQ ID NO: 156245 - DNA, 19 bp, Homo sapiens
  siRNA target sequence for CA5B (NM_007220.2,477-495).
cgattgaagcagttccatt

SEQ ID NO: 156246 - DNA, 19 bp, Homo sapiens
  siRNA target sequence for CA5B (NM_007220.2,478-496).
gattgaagcagttccattt

SEQ ID NO: 156247 - DNA, 19 bp, Homo sapiens
  siRNA target sequence for CA5B (NM_007220.2,535-553).
ccgtggacagcaaatgctt

SEQ ID NO: 156248 - DNA, 19 bp, Homo sapiens
  siRNA target sequence for CA5B (NM_007220.2,684-702).
cagaaattagtggatactt

SEQ ID NO: 156249 - DNA, 19 bp, Homo sapiens
  siRNA target sequence for CA5B (NM_007220.2,695-713).
ggatactttgccgtcaatt

SEQ ID NO: 156250 - DNA, 19 bp, Homo sapiens
  siRNA target sequence for CA5B (NM_007220.2,696-714).
gatactttgccgtcaatta

SEQ ID NO: 156251 - DNA, 19 bp, Homo sapiens
  siRNA target sequence for CA5B (NM_007220.2,700-718).
ctttgccgtcaattaagca

SEQ ID NO: 156252 - DNA, 19 bp, Homo sapiens
  siRNA target sequence for CA5B (NM_007220.2,706-724).
cgtcaattaagcataagga

SEQ ID NO: 156253 - DNA, 19 bp, Homo sapiens
  siRNA target sequence for CA5B (NM_007220.2,829-847).
ctgtcacctggatcattaa

SEQ ID NO: 156254 - DNA, 19 bp, Homo sapiens
  siRNA target sequence for CA5B (NM_007220.2,856-874).
cagtagaggttgatcatga

SEQ ID NO: 156255 - DNA, 19 bp, Homo sapiens
  siRNA target sequence for CA5B (NM_007220.2,891-909).
cggaccctgcttttcactt

SEQ ID NO: 156256 - DNA, 19 bp, Homo sapiens
  siRNA target sequence for CA5B (NM_007220.2,985-1003).
catccttccggcatgatta

SEQ ID NO: 156257 - DNA, 19 bp, Homo sapiens
  siRNA target sequence for CA6 (NM_001215.1,195-213).
gaaggggctcaatatgaca

SEQ ID NO: 156258 - DNA, 19 bp, Homo sapiens
  siRNA target sequence for CA6 (NM_001215.1,237-255).
gttccccatggtcaacaat

SEQ ID NO: 156259 - DNA, 19 bp, Homo sapiens
  siRNA target sequence for CA6 (NM_001215.1,403-421).
catgtgatcgagattcaca

SEQ ID NO: 156260 - DNA, 19 bp, Homo sapiens
  siRNA target sequence for CA6 (NM_001215.1,408-426).
gatcgagattcacattgtt

SEQ ID NO: 156261 - DNA, 19 bp, Homo sapiens
  siRNA target sequence for CA6 (NM_001215.1,418-436).
cacattgttcactacaatt

SEQ ID NO: 156262 - DNA, 19 bp, Homo sapiens
  siRNA target sequence for CA6 (NM_001215.1,513-531).
gaattaccctgaaaacact

SEQ ID NO: 156263 - DNA, 19 bp, Homo sapiens
  siRNA target sequence for CA6 (NM_001215.1,725-743).
ccaggacacaggtttggaa

SEQ ID NO: 156264 - DNA, 19 bp, Homo sapiens
  siRNA target sequence for CA6 (NM_001215.1,840-858).
cccgaatcaggaatacact

SEQ ID NO: 156265 - DNA, 19 bp, Homo sapiens
  siRNA target sequence for CA6 (NM_001215.1,863-881).
gctctgaattccagtttta

SEQ ID NO: 156266 - DNA, 19 bp, Homo sapiens
  siRNA target sequence for CA6 (NM_001215.1,876-894).
gttttacctacataagatt

SEQ ID NO: 156267 - DNA, 19 bp, Homo sapiens
  siRNA target sequence for CA7 (NM_005182.1,88-106).
caatcacccatcaatatca

SEQ ID NO: 156268 - DNA, 19 bp, Homo sapiens
  siRNA target sequence for CA7 (NM_005182.1,205-223).
caggtagacttcaatgaca

SEQ ID NO: 156269 - DNA, 19 bp, Homo sapiens
  siRNA target sequence for CA7 (NM_005182.1,462-480).
cgagcaccccagcatgaat

SEQ ID NO: 156270 - DNA, 19 bp, Homo sapiens
  siRNA target sequence for CA7 (NM_005182.1,685-703).
cggagcctgctttttacct

SEQ ID NO: 156271 - DNA, 19 bp, Homo sapiens
  siRNA target sequence for CA8 (NM_004056.3,258-276).
ctgagcttcatcgaagata

SEQ ID NO: 156272 - DNA, 19 bp, Homo sapiens
  siRNA target sequence for CA8 (NM_004056.3,365-383).
ggtgtttcctgatgctaat

SEQ ID NO: 156273 - DNA, 19 bp, Homo sapiens
  siRNA target sequence for CA8 (NM_004056.3,386-404).
ggaataccagtctcctatt

SEQ ID NO: 156274 - DNA, 19 bp, Homo sapiens
  siRNA target sequence for CA8 (NM_004056.3,387-405).
gaataccagtctcctatta

SEQ ID NO: 156275 - DNA, 19 bp, Homo sapiens
  siRNA target sequence for CA8 (NM_004056.3,392-410).
ccagtctcctattaaccta

SEQ ID NO: 156276 - DNA, 19 bp, Homo sapiens
  siRNA target sequence for CA8 (NM_004056.3,393-411).
cagtctcctattaacctaa

SEQ ID NO: 156277 - DNA, 19 bp, Homo sapiens
  siRNA target sequence for CA8 (NM_004056.3,399-417).
cctattaacctaaactcaa

SEQ ID NO: 156278 - DNA, 19 bp, Homo sapiens
  siRNA target sequence for CA8 (NM_004056.3,413-431).
ctcaagagaggctaggtat

SEQ ID NO: 156279 - DNA, 19 bp, Homo sapiens
  siRNA target sequence for CA8 (NM_004056.3,450-468).
gtccgcctctccccaaatt

SEQ ID NO: 156280 - DNA, 19 bp, Homo sapiens
  siRNA target sequence for CA8 (NM_004056.3,452-470).
ccgcctctccccaaattat

SEQ ID NO: 156281 - DNA, 19 bp, Homo sapiens
  siRNA target sequence for CA8 (NM_004056.3,496-514).
ccaatgatggacataccat

SEQ ID NO: 156282 - DNA, 19 bp, Homo sapiens
  siRNA target sequence for CA8 (NM_004056.3,497-515).
caatgatggacataccatt

SEQ ID NO: 156283 - DNA, 19 bp, Homo sapiens
  siRNA target sequence for CA8 (NM_004056.3,518-536).
ggttatcctgaagtcaaaa

SEQ ID NO: 156284 - DNA, 19 bp, Homo sapiens
  siRNA target sequence for CA8 (NM_004056.3,519-537).
gttatcctgaagtcaaaat

SEQ ID NO: 156285 - DNA, 19 bp, Homo sapiens
  siRNA target sequence for CA8 (NM_004056.3,628-646).
ctgagcacacggttaattt

SEQ ID NO: 156286 - DNA, 19 bp, Homo sapiens
  siRNA target sequence for CA8 (NM_004056.3,630-648).
gagcacacggttaatttca

SEQ ID NO: 156287 - DNA, 19 bp, Homo sapiens
  siRNA target sequence for CA8 (NM_004056.3,632-650).
gcacacggttaatttcaaa

SEQ ID NO: 156288 - DNA, 19 bp, Homo sapiens
  siRNA target sequence for CA8 (NM_004056.3,680-698).
ctggaactccactctgttt

SEQ ID NO: 156289 - DNA, 19 bp, Homo sapiens
  siRNA target sequence for CA8 (NM_004056.3,804-822).
ctccaagatattcagtata

SEQ ID NO: 156290 - DNA, 19 bp, Homo sapiens
  siRNA target sequence for CA8 (NM_004056.3,824-842).
ggggaagtccaaaacaata

SEQ ID NO: 156291 - DNA, 19 bp, Homo sapiens
  siRNA target sequence for CA8 (NM_004056.3,886-904).
gggattactgggtgtatga

SEQ ID NO: 156292 - DNA, 19 bp, Homo sapiens
  siRNA target sequence for CA8 (NM_004056.3,887-905).
ggattactgggtgtatgaa

SEQ ID NO: 156293 - DNA, 19 bp, Homo sapiens
  siRNA target sequence for CA8 (NM_004056.3,933-951).
gaaggtgtcacctggatat

SEQ ID NO: 156294 - DNA, 19 bp, Homo sapiens
  siRNA target sequence for CA8 (NM_004056.3,936-954).
ggtgtcacctggatattat

SEQ ID NO: 156295 - DNA, 19 bp, Homo sapiens
  siRNA target sequence for CA8 (NM_004056.3,956-974).
ccgataccctttaactata

SEQ ID NO: 156296 - DNA, 19 bp, Homo sapiens
  siRNA target sequence for CA8 (NM_004056.3,957-975).
cgataccctttaactatat

SEQ ID NO: 156297 - DNA, 19 bp, Homo sapiens
  siRNA target sequence for CA8 (NM_004056.3,978-996).
cagctacagatagaagaat

SEQ ID NO: 156298 - DNA, 19 bp, Homo sapiens
  siRNA target sequence for CA8 (NM_004056.3,980-998).
gctacagatagaagaattt

SEQ ID NO: 156299 - DNA, 19 bp, Homo sapiens
  siRNA target sequence for CA8 (NM_004056.3,1051-1069).
ggattttgggagacaactt

SEQ ID NO: 156300 - DNA, 19 bp, Homo sapiens
  siRNA target sequence for CA8 (NM_004056.3,1073-1091).
gcccactcagcctcttagt

SEQ ID NO: 156301 - DNA, 19 bp, Homo sapiens
  siRNA target sequence for CA9 (NM_001216.1,919-937).
ctgtctcgcttggaagaaa

SEQ ID NO: 156302 - DNA, 19 bp, Homo sapiens
  siRNA target sequence for CA9 (NM_001216.1,966-984).
cccaggactggacatatct

SEQ ID NO: 156303 - DNA, 19 bp, Homo sapiens
  siRNA target sequence for CA9 (NM_001216.1,1005-1023).
cagccgctacttccaatat

SEQ ID NO: 156304 - DNA, 19 bp, Homo sapiens
  siRNA target sequence for CA9 (NM_001216.1,1007-1025).
gccgctacttccaatatga

SEQ ID NO: 156305 - DNA, 19 bp, Homo sapiens
  siRNA target sequence for CA9 (NM_001216.1,1169-1187).
gagcgacgcagcctttgaa

SEQ ID NO: 156306 - DNA, 19 bp, Homo sapiens
  siRNA target sequence for CA9 (NM_001216.1,1249-1267).
ccagtccagctgaattcct

SEQ ID NO: 156307 - DNA, 19 bp, Homo sapiens
  siRNA target sequence for CA9 (NM_001216.1,1284-1302).
catcctagccctggttttt

SEQ ID NO: 156308 - DNA, 19 bp, Homo sapiens
  siRNA target sequence for CDA (NM_001785.1,207-225).
ctgcccctacagtcacttt

SEQ ID NO: 156309 - DNA, 19 bp, Homo sapiens
  siRNA target sequence for CDA (NM_001785.1,357-375).
ggatttcagggcaattgct

SEQ ID NO: 156310 - DNA, 19 bp, Homo sapiens
  siRNA target sequence for CDA (NM_001785.1,358-376).
gatttcagggcaattgcta

SEQ ID NO: 156311 - DNA, 19 bp, Homo sapiens
  siRNA target sequence for CDA (NM_001785.1,381-399).
cagtgacatgcaagatgat

SEQ ID NO: 156312 - DNA, 19 bp, Homo sapiens
  siRNA target sequence for CDA (NM_001785.1,471-489).
caagccggatggtacgtat

SEQ ID NO: 156313 - DNA, 19 bp, Homo sapiens
  siRNA target sequence for CDA (NM_001785.1,474-492).
gccggatggtacgtatatt

SEQ ID NO: 156314 - DNA, 19 bp, Homo sapiens
  siRNA target sequence for CDA (NM_001785.1,476-494).
cggatggtacgtatattgt

SEQ ID NO: 156315 - DNA, 19 bp, Homo sapiens
  siRNA target sequence for CDADC1 (NM_030911.1,148-166).
cagcatgaccggtcagata

SEQ ID NO: 156316 - DNA, 19 bp, Homo sapiens
  siRNA target sequence for CDADC1 (NM_030911.1,161-179).
cagataccaaggctttcta

SEQ ID NO: 156317 - DNA, 19 bp, Homo sapiens
  siRNA target sequence for CDADC1 (NM_030911.1,238-256).
gcggcaaaaatctcagaaa

SEQ ID NO: 156318 - DNA, 19 bp, Homo sapiens
  siRNA target sequence for CDADC1 (NM_030911.1,296-314).
gagaggaccagagtatcta

SEQ ID NO: 156319 - DNA, 19 bp, Homo sapiens
  siRNA target sequence for CDADC1 (NM_030911.1,349-367).
ggtggtgaaaaacatgaaa

SEQ ID NO: 156320 - DNA, 19 bp, Homo sapiens
  siRNA target sequence for CDADC1 (NM_030911.1,380-398).
cactgttctagtgaagatt

SEQ ID NO: 156321 - DNA, 19 bp, Homo sapiens
  siRNA target sequence for CDADC1 (NM_030911.1,382-400).
ctgttctagtgaagattta

SEQ ID NO: 156322 - DNA, 19 bp, Homo sapiens
  siRNA target sequence for CDADC1 (NM_030911.1,409-427).
gcagattgctcttattaaa

SEQ ID NO: 156323 - DNA, 19 bp, Homo sapiens
  siRNA target sequence for CDADC1 (NM_030911.1,439-457).
gctgaaaaactgtgatctt

SEQ ID NO: 156324 - DNA, 19 bp, Homo sapiens
  siRNA target sequence for CDADC1 (NM_030911.1,506-524).
gctggagttaaccgaattt

SEQ ID NO: 156325 - DNA, 19 bp, Homo sapiens
  siRNA target sequence for CDADC1 (NM_030911.1,509-527).
ggagttaaccgaatttcat

SEQ ID NO: 156326 - DNA, 19 bp, Homo sapiens
  siRNA target sequence for CDADC1 (NM_030911.1,510-528).
gagttaaccgaatttcata

SEQ ID NO: 156327 - DNA, 19 bp, Homo sapiens
  siRNA target sequence for CDADC1 (NM_030911.1,512-530).
gttaaccgaatttcatact

SEQ ID NO: 156328 - DNA, 19 bp, Homo sapiens
  siRNA target sequence for CDADC1 (NM_030911.1,533-551).
cctgctgatccagaaataa

SEQ ID NO: 156329 - DNA, 19 bp, Homo sapiens
  siRNA target sequence for CDADC1 (NM_030911.1,556-574).
gcttacggaggcttctagt

SEQ ID NO: 156330 - DNA, 19 bp, Homo sapiens
  siRNA target sequence for CDADC1 (NM_030911.1,557-575).
cttacggaggcttctagtt

SEQ ID NO: 156331 - DNA, 19 bp, Homo sapiens
  siRNA target sequence for CDADC1 (NM_030911.1,565-583).
ggcttctagttctgaagat

SEQ ID NO: 156332 - DNA, 19 bp, Homo sapiens
  siRNA target sequence for CDADC1 (NM_030911.1,633-651).
cccatgtgtgtgtcttact

SEQ ID NO: 156333 - DNA, 19 bp, Homo sapiens
  siRNA target sequence for CDADC1 (NM_030911.1,683-701).
gtagaggagacctcttaca

SEQ ID NO: 156334 - DNA, 19 bp, Homo sapiens
  siRNA target sequence for CDADC1 (NM_030911.1,686-704).
gaggagacctcttacaaat

SEQ ID NO: 156335 - DNA, 19 bp, Homo sapiens
  siRNA target sequence for CDADC1 (NM_030911.1,688-706).
ggagacctcttacaaatgt

SEQ ID NO: 156336 - DNA, 19 bp, Homo sapiens
  siRNA target sequence for CDADC1 (NM_030911.1,739-757).
ggatgctaacactgacttt

SEQ ID NO: 156337 - DNA, 19 bp, Homo sapiens
  siRNA target sequence for CDADC1 (NM_030911.1,901-919).
catgaaagaccttatccta

SEQ ID NO: 156338 - DNA, 19 bp, Homo sapiens
  siRNA target sequence for CDADC1 (NM_030911.1,940-958).
cagtgtgccgaactttaaa

SEQ ID NO: 156339 - DNA, 19 bp, Homo sapiens
  siRNA target sequence for CDADC1 (NM_030911.1,942-960).
gtgtgccgaactttaaaca

SEQ ID NO: 156340 - DNA, 19 bp, Homo sapiens
  siRNA target sequence for CDADC1 (NM_030911.1,964-982).
cggattttaccgtagcaat

SEQ ID NO: 156341 - DNA, 19 bp, Homo sapiens
  siRNA target sequence for CDADC1 (NM_030911.1,975-993).
gtagcaatccagaacagat

SEQ ID NO: 156342 - DNA, 19 bp, Homo sapiens
  siRNA target sequence for CDADC1 (NM_030911.1,1054-1072).
caggttattggcatatcga

SEQ ID NO: 156343 - DNA, 19 bp, Homo sapiens
  siRNA target sequence for CDADC1 (NM_030911.1,1070-1088).
cgaactgaggatcataaaa

SEQ ID NO: 156344 - DNA, 19 bp, Homo sapiens
  siRNA target sequence for CDADC1 (NM_030911.1,1163-1181).
ggatgtggttacaatgctt

SEQ ID NO: 156345 - DNA, 19 bp, Homo sapiens
  siRNA target sequence for CDADC1 (NM_030911.1,1164-1182).
gatgtggttacaatgcttt

SEQ ID NO: 156346 - DNA, 19 bp, Homo sapiens
  siRNA target sequence for CDADC1 (NM_030911.1,1264-1282).
catacatgcggaacagaat

SEQ ID NO: 156347 - DNA, 19 bp, Homo sapiens
  siRNA target sequence for CDADC1 (NM_030911.1,1274-1292).
gaacagaatgccttgacat

SEQ ID NO: 156348 - DNA, 19 bp, Homo sapiens
  siRNA target sequence for CDADC1 (NM_030911.1,1290-1308).
catttaggtgtcaagaaat

SEQ ID NO: 156349 - DNA, 19 bp, Homo sapiens
  siRNA target sequence for CDADC1 (NM_030911.1,1339-1357).
gacaaagtgcccatgtgat

SEQ ID NO: 156350 - DNA, 19 bp, Homo sapiens
  siRNA target sequence for CDADC1 (NM_030911.1,1355-1373).
gatgagtgtgtacctttaa

SEQ ID NO: 156351 - DNA, 19 bp, Homo sapiens
  siRNA target sequence for CDADC1 (NM_030911.1,1358-1376).
gagtgtgtacctttaatta

SEQ ID NO: 156352 - DNA, 19 bp, Homo sapiens
  siRNA target sequence for CDADC1 (NM_030911.1,1399-1417).
ctatgcaggagatgtagat

SEQ ID NO: 156353 - DNA, 19 bp, Homo sapiens
  siRNA target sequence for CDADC1 (NM_030911.1,1495-1513).
gaatccatcaggagcttat

SEQ ID NO: 156354 - DNA, 19 bp, Homo sapiens
  siRNA target sequence for CDADC1 (NM_030911.1,1506-1524).
gagcttatggtcttgaaca

SEQ ID NO: 156355 - DNA, 19 bp, Homo sapiens
  siRNA target sequence for CGI-63 (NM_016011.1,238-256).
cagatgtccgtgtgaagat

SEQ ID NO: 156356 - DNA, 19 bp, Homo sapiens
  siRNA target sequence for CGI-63 (NM_016011.1,277-295).
catctgacataaatatgat

SEQ ID NO: 156357 - DNA, 19 bp, Homo sapiens
  siRNA target sequence for CGI-63 (NM_016011.1,535-553).
cagcctacaggatgttgat

SEQ ID NO: 156358 - DNA, 19 bp, Homo sapiens
  siRNA target sequence for CGI-63 (NM_016011.1,647-665).
gggcctaagaaccatcaat

SEQ ID NO: 156359 - DNA, 19 bp, Homo sapiens
  siRNA target sequence for CGI-63 (NM_016011.1,649-667).
gcctaagaaccatcaatgt

SEQ ID NO: 156360 - DNA, 19 bp, Homo sapiens
  siRNA target sequence for CGI-63 (NM_016011.1,750-768).
ctaagaaggcccgaaatga

SEQ ID NO: 156361 - DNA, 19 bp, Homo sapiens
  siRNA target sequence for CGI-63 (NM_016011.1,759-777).
cccgaaatgaaaaacttct

SEQ ID NO: 156362 - DNA, 19 bp, Homo sapiens
  siRNA target sequence for CGI-63 (NM_016011.1,858-876).
cgtggaggaaccatggtaa

SEQ ID NO: 156363 - DNA, 19 bp, Homo sapiens
  siRNA target sequence for CGI-63 (NM_016011.1,915-933).
gtgagcctgctcattttta

SEQ ID NO: 156364 - DNA, 19 bp, Homo sapiens
  siRNA target sequence for CRIP2 (NM_001312.2,92-110).
gcgacaagaccgtgtactt

SEQ ID NO: 156365 - DNA, 19 bp, Homo sapiens
  siRNA target sequence for CRIP2 (NM_001312.2,134-152).
ggaaggactggcacaagtt

SEQ ID NO: 156366 - DNA, 19 bp, Homo sapiens
  siRNA target sequence for CRIP2 (NM_001312.2,644-662).
cggtgggcagctacatcta

SEQ ID NO: 156367 - DNA, 19 bp, Homo sapiens
  siRNA target sequence for CRYZ (NM_001889.2,684-702).
catgaagtgttcaatcaca

SEQ ID NO: 156368 - DNA, 19 bp, Homo sapiens
  siRNA target sequence for CRYZ (NM_001889.2,773-791).
gttagctaatgtaaatctt

SEQ ID NO: 156369 - DNA, 19 bp, Homo sapiens
  siRNA target sequence for CRYZ (NM_001889.2,820-838).
gaggacgagtgatagttgt

SEQ ID NO: 156370 - DNA, 19 bp, Homo sapiens
  siRNA target sequence for CRYZ (NM_001889.2,841-859).
gcagcagaggtactattga

SEQ ID NO: 156371 - DNA, 19 bp, Homo sapiens
  siRNA target sequence for CRYZ (NM_001889.2,842-860).
cagcagaggtactattgaa

SEQ ID NO: 156372 - DNA, 19 bp, Homo sapiens
  siRNA target sequence for CRYZ (NM_001889.2,844-862).
gcagaggtactattgaaat

SEQ ID NO: 156373 - DNA, 19 bp, Homo sapiens
  siRNA target sequence for CRYZ (NM_001889.2,845-863).
cagaggtactattgaaata

SEQ ID NO: 156374 - DNA, 19 bp, Homo sapiens
  siRNA target sequence for CRYZ (NM_001889.2,881-899).
ggcaaaggagtcgagtata

SEQ ID NO: 156375 - DNA, 19 bp, Homo sapiens
  siRNA target sequence for CRYZ (NM_001889.2,882-900).
gcaaaggagtcgagtataa

SEQ ID NO: 156376 - DNA, 19 bp, Homo sapiens
  siRNA target sequence for CRYZ (NM_001889.2,883-901).
caaaggagtcgagtataat

SEQ ID NO: 156377 - DNA, 19 bp, Homo sapiens
  siRNA target sequence for CRYZ (NM_001889.2,887-905).
ggagtcgagtataattgga

SEQ ID NO: 156378 - DNA, 19 bp, Homo sapiens
  siRNA target sequence for CRYZ (NM_001889.2,895-913).
gtataattggagttactct

SEQ ID NO: 156379 - DNA, 19 bp, Homo sapiens
  siRNA target sequence for CRYZ (NM_001889.2,980-998).
ctggttgaaacctgtgata

SEQ ID NO: 156380 - DNA, 19 bp, Homo sapiens
  siRNA target sequence for CRYZ (NM_001889.2,990-1008).
cctgtgataggttctcaat

SEQ ID NO: 156381 - DNA, 19 bp, Homo sapiens
  siRNA target sequence for CRYZ (NM_001889.2,1025-1043).
ggccgaggctcatgaaaat

SEQ ID NO: 156382 - DNA, 19 bp, Homo sapiens
  siRNA target sequence for CRYZ (NM_001889.2,1026-1044).
gccgaggctcatgaaaata

SEQ ID NO: 156383 - DNA, 19 bp, Homo sapiens
  siRNA target sequence for CRYZ (NM_001889.2,1029-1047).
gaggctcatgaaaatatca

SEQ ID NO: 156384 - DNA, 19 bp, Homo sapiens
  siRNA target sequence for CRYZL1 (NM_005111.5,88-106).
gaaaggcttatatttccaa

SEQ ID NO: 156385 - DNA, 19 bp, Homo sapiens
  siRNA target sequence for CRYZL1 (NM_005111.5,162-180).
ctgttacagaggataactt

SEQ ID NO: 156386 - DNA, 19 bp, Homo sapiens
  siRNA target sequence for CRYZL1 (NM_005111.5,306-324).
gaagcaaggtatcattctt

SEQ ID NO: 156387 - DNA, 19 bp, Homo sapiens
  siRNA target sequence for CRYZL1 (NM_005111.5,309-327).
gcaaggtatcattctttca

SEQ ID NO: 156388 - DNA, 19 bp, Homo sapiens
  siRNA target sequence for CRYZL1 (NM_005111.5,310-328).
caaggtatcattctttcaa

SEQ ID NO: 156389 - DNA, 19 bp, Homo sapiens
  siRNA target sequence for CRYZL1 (NM_005111.5,396-414).
gagtacatgagcattactt

SEQ ID NO: 156390 - DNA, 19 bp, Homo sapiens
  siRNA target sequence for CRYZL1 (NM_005111.5,542-560).
ggagcaagtgcatttggta

SEQ ID NO: 156391 - DNA, 19 bp, Homo sapiens
  siRNA target sequence for CRYZL1 (NM_005111.5,546-564).
caagtgcatttggtacaat

SEQ ID NO: 156392 - DNA, 19 bp, Homo sapiens
  siRNA target sequence for CRYZL1 (NM_005111.5,729-747).
gcctgggagtagatattgt

SEQ ID NO: 156393 - DNA, 19 bp, Homo sapiens
  siRNA target sequence for CRYZL1 (NM_005111.5,755-773).
gctggagtgagattatata

SEQ ID NO: 156394 - DNA, 19 bp, Homo sapiens
  siRNA target sequence for CRYZL1 (NM_005111.5,758-776).
ggagtgagattatatagta

SEQ ID NO: 156395 - DNA, 19 bp, Homo sapiens
  siRNA target sequence for CRYZL1 (NM_005111.5,759-777).
gagtgagattatatagtaa

SEQ ID NO: 156396 - DNA, 19 bp, Homo sapiens
  siRNA target sequence for CRYZL1 (NM_005111.5,812-830).
ccacataaacatgatatca

SEQ ID NO: 156397 - DNA, 19 bp, Homo sapiens
  siRNA target sequence for CRYZL1 (NM_005111.5,813-831).
cacataaacatgatatcat

SEQ ID NO: 156398 - DNA, 19 bp, Homo sapiens
  siRNA target sequence for CRYZL1 (NM_005111.5,927-945).
cgttagctttcctgaatga

SEQ ID NO: 156399 - DNA, 19 bp, Homo sapiens
  siRNA target sequence for CRYZL1 (NM_005111.5,940-958).
gaatgatgaagtttggaat

SEQ ID NO: 156400 - DNA, 19 bp, Homo sapiens
  siRNA target sequence for CRYZL1 (NM_005111.5,990-1008).
gtatcttaaaggatgtgat

SEQ ID NO: 156401 - DNA, 19 bp, Homo sapiens
  siRNA target sequence for CRYZL1 (NM_005111.5,1006-1024).
gatggagaagttatcaact

SEQ ID NO: 156402 - DNA, 19 bp, Homo sapiens
  siRNA target sequence for CSRP1 (NM_004078.1,92-110).
gtcagaagacggtttactt

SEQ ID NO: 156403 - DNA, 19 bp, Homo sapiens
  siRNA target sequence for CSRP1 (NM_004078.1,308-326).
gggagtcgctgggtatcaa

SEQ ID NO: 156404 - DNA, 19 bp, Homo sapiens
  siRNA target sequence for CSRP1 (NM_004078.1,360-378).
caaccccaatgcatccaaa

SEQ ID NO: 156405 - DNA, 19 bp, Homo sapiens
  siRNA target sequence for CSRP1 (NM_004078.1,472-490).
cataaggcctgctttcgat

SEQ ID NO: 156406 - DNA, 19 bp, Homo sapiens
  siRNA target sequence for CSRP1 (NM_004078.1,544-562).
gagatttactgcaaaggat

SEQ ID NO: 156407 - DNA, 19 bp, Homo sapiens
  siRNA target sequence for CSRP1 (NM_004078.1,554-572).
gcaaaggatgttatgctaa

SEQ ID NO: 156408 - DNA, 19 bp, Homo sapiens
  siRNA target sequence for CSRP1 (NM_004078.1,555-573).
caaaggatgttatgctaaa

SEQ ID NO: 156409 - DNA, 19 bp, Homo sapiens
  siRNA target sequence for DCTD (NM_001921.1,25-43).
cgggacgactatttggaat

SEQ ID NO: 156410 - DNA, 19 bp, Homo sapiens
  siRNA target sequence for DCTD (NM_001921.1,114-132).
cgcctgcatcgtgaattca

SEQ ID NO: 156411 - DNA, 19 bp, Homo sapiens
  siRNA target sequence for DCTD (NM_001921.1,116-134).
cctgcatcgtgaattcaga

SEQ ID NO: 156412 - DNA, 19 bp, Homo sapiens
  siRNA target sequence for DCTD (NM_001921.1,265-283).
gccatcatgaacaaaaatt

SEQ ID NO: 156413 - DNA, 19 bp, Homo sapiens
  siRNA target sequence for DCTD (NM_001921.1,289-307).
gatgtgaaaggctgtagta

SEQ ID NO: 156414 - DNA, 19 bp, Homo sapiens
  siRNA target sequence for DCTD (NM_001921.1,317-335).
ccttgttcccttgtaatga

SEQ ID NO: 156415 - DNA, 19 bp, Homo sapiens
  siRNA target sequence for DCTD (NM_001921.1,359-377).
caggtataaaagaagtgat

SEQ ID NO: 156416 - DNA, 19 bp, Homo sapiens
  siRNA target sequence for DCTD (NM_001921.1,361-379).
ggtataaaagaagtgattt

SEQ ID NO: 156417 - DNA, 19 bp, Homo sapiens
  siRNA target sequence for DCTD (NM_001921.1,421-439).
gcgaggctcctgtttaata

SEQ ID NO: 156418 - DNA, 19 bp, Homo sapiens
  siRNA target sequence for DCTD (NM_001921.1,422-440).
cgaggctcctgtttaatat

SEQ ID NO: 156419 - DNA, 19 bp, Homo sapiens
  siRNA target sequence for DCTD (NM_001921.1,446-464).
gggtgacattccggaaatt

SEQ ID NO: 156420 - DNA, 19 bp, Homo sapiens
  siRNA target sequence for DCTD (NM_001921.1,448-466).
gtgacattccggaaattca

SEQ ID NO: 156421 - DNA, 19 bp, Homo sapiens
  siRNA target sequence for DCTD (NM_001921.1,450-468).
gacattccggaaattcata

SEQ ID NO: 156422 - DNA, 19 bp, Homo sapiens
  siRNA target sequence for DCTD (NM_001921.1,470-488).
cgaagtgcagcaagattgt

SEQ ID NO: 156423 - DNA, 19 bp, Homo sapiens
  siRNA target sequence for DCTD (NM_001921.1,474-492).
gtgcagcaagattgtcatt

SEQ ID NO: 156424 - DNA, 19 bp, Homo sapiens
  siRNA target sequence for DCTD (NM_001921.1,512-530).
gcagaccgagtcaaaagct

SEQ ID NO: 156425 - DNA, 19 bp, Homo sapiens
  siRNA target sequence for DKFZP547N043 (NM_032018.2,200-218).
ggcactgtttgttcagttt

SEQ ID NO: 156426 - DNA, 19 bp, Homo sapiens
  siRNA target sequence for DKFZP547N043 (NM_032018.2,202-220).
cactgtttgttcagtttaa

SEQ ID NO: 156427 - DNA, 19 bp, Homo sapiens
  siRNA target sequence for DKFZP547N043 (NM_032018.2,309-327).
gggaagggtggaatgtgtt

SEQ ID NO: 156428 - DNA, 19 bp, Homo sapiens
  siRNA target sequence for DKFZP547N043 (NM_032018.2,336-354).
ctcagcgaaccccttttga

SEQ ID NO: 156429 - DNA, 19 bp, Homo sapiens
  siRNA target sequence for DKFZP547N043 (NM_032018.2,340-358).
gcgaaccccttttgaagtt

SEQ ID NO: 156430 - DNA, 19 bp, Homo sapiens
  siRNA target sequence for DKFZP547N043 (NM_032018.2,342-360).
gaaccccttttgaagttga

SEQ ID NO: 156431 - DNA, 19 bp, Homo sapiens
  siRNA target sequence for DKFZP547N043 (NM_032018.2,381-399).
gagaccctcctgcatgaaa

SEQ ID NO: 156432 - DNA, 19 bp, Homo sapiens
  siRNA target sequence for DKFZP547N043 (NM_032018.2,389-407).
cctgcatgaaatgatacat

SEQ ID NO: 156433 - DNA, 19 bp, Homo sapiens
  siRNA target sequence for DKFZP547N043 (NM_032018.2,409-427).
cctatttatttgtcactaa

SEQ ID NO: 156434 - DNA, 19 bp, Homo sapiens
  siRNA target sequence for DKFZP547N043 (NM_032018.2,471-489).
catatgcatcgcatcaaca

SEQ ID NO: 156435 - DNA, 19 bp, Homo sapiens
  siRNA target sequence for DKFZP547N043 (NM_032018.2,490-508).
gcctgactggagccaatat

SEQ ID NO: 156436 - DNA, 19 bp, Homo sapiens
  siRNA target sequence for DKFZP547N043 (NM_032018.2,491-509).
cctgactggagccaatata

SEQ ID NO: 156437 - DNA, 19 bp, Homo sapiens
  siRNA target sequence for DKFZP547N043 (NM_032018.2,492-510).
ctgactggagccaatataa

SEQ ID NO: 156438 - DNA, 19 bp, Homo sapiens
  siRNA target sequence for DKFZP547N043 (NM_032018.2,502-520).
ccaatataacggtatacca

SEQ ID NO: 156439 - DNA, 19 bp, Homo sapiens
  siRNA target sequence for DKFZP547N043 (NM_032018.2,503-521).
caatataacggtataccat

SEQ ID NO: 156440 - DNA, 19 bp, Homo sapiens
  siRNA target sequence for DKFZP547N043 (NM_032018.2,511-529).
cggtataccatacttttca

SEQ ID NO: 156441 - DNA, 19 bp, Homo sapiens
  siRNA target sequence for DKFZP547N043 (NM_032018.2,530-548).
cgatgaggtggatgagtat

SEQ ID NO: 156442 - DNA, 19 bp, Homo sapiens
  siRNA target sequence for DKFZP547N043 (NM_032018.2,594-612).
ccgtattacggctatgtca

SEQ ID NO: 156443 - DNA, 19 bp, Homo sapiens
  siRNA target sequence for DKFZP547N043 (NM_032018.2,595-613).
cgtattacggctatgtcaa

SEQ ID NO: 156444 - DNA, 19 bp, Homo sapiens
  siRNA target sequence for DKFZP547N043 (NM_032018.2,609-627).
gtcaaacgagctactaaca

SEQ ID NO: 156445 - DNA, 19 bp, Homo sapiens
  siRNA target sequence for DKFZP547N043 (NM_032018.2,679-697).
gaggcacttacataaaaat

SEQ ID NO: 156446 - DNA, 19 bp, Homo sapiens
  siRNA target sequence for DKFZP547N043 (NM_032018.2,759-777).
gtattggccgcagagaata

SEQ ID NO: 156447 - DNA, 19 bp, Homo sapiens
  siRNA target sequence for DKFZP547N043 (NM_032018.2,766-784).
ccgcagagaataaagataa

SEQ ID NO: 156448 - DNA, 19 bp, Homo sapiens
  siRNA target sequence for DKFZP547N043 (NM_032018.2,806-824).
gctagtaatcccttttagt

SEQ ID NO: 156449 - DNA, 19 bp, Homo sapiens
  siRNA target sequence for DKFZP547N043 (NM_032018.2,881-899).
cacttcacatgccattaat

SEQ ID NO: 156450 - DNA, 19 bp, Homo sapiens
  siRNA target sequence for DKFZP547N043 (NM_032018.2,1007-1025).
ggtctcccctgctgttagt

SEQ ID NO: 156451 - DNA, 19 bp, Homo sapiens
  siRNA target sequence for DKFZP547N043 (NM_032018.2,1008-1026).
gtctcccctgctgttagta

SEQ ID NO: 156452 - DNA, 19 bp, Homo sapiens
  siRNA target sequence for DKFZP547N043 (NM_032018.2,1028-1046).
cagtcaccaaaatgttcta

SEQ ID NO: 156453 - DNA, 19 bp, Homo sapiens
  siRNA target sequence for DKFZP547N043 (NM_032018.2,1049-1067).
caactactttcctagagta

SEQ ID NO: 156454 - DNA, 19 bp, Homo sapiens
  siRNA target sequence for DKFZP547N043 (NM_032018.2,1052-1070).
ctactttcctagagtatca

SEQ ID NO: 156455 - DNA, 19 bp, Homo sapiens
  siRNA target sequence for DKFZP547N043 (NM_032018.2,1055-1073).
ctttcctagagtatcattt

SEQ ID NO: 156456 - DNA, 19 bp, Homo sapiens
  siRNA target sequence for DKFZP547N043 (NM_032018.2,1065-1083).
gtatcatttgccaaccaaa

SEQ ID NO: 156457 - DNA, 19 bp, Homo sapiens
  siRNA target sequence for DKFZP547N043 (NM_032018.2,1076-1094).
caaccaaaaggctttcaga

SEQ ID NO: 156458 - DNA, 19 bp, Homo sapiens
  siRNA target sequence for DKFZP547N043 (NM_032018.2,1100-1118).
gaatggatctccaaggata

SEQ ID NO: 156459 - DNA, 19 bp, Homo sapiens
  siRNA target sequence for DKFZP547N043 (NM_032018.2,1105-1123).
gatctccaaggataagtgt

SEQ ID NO: 156460 - DNA, 19 bp, Homo sapiens
  siRNA target sequence for DKFZP547N043 (NM_032018.2,1174-1192).
gggtttcatcttctaagat

SEQ ID NO: 156461 - DNA, 19 bp, Homo sapiens
  siRNA target sequence for DKFZP547N043 (NM_032018.2,1195-1213).
ccctaagaaattcttcaaa

SEQ ID NO: 156462 - DNA, 19 bp, Homo sapiens
  siRNA target sequence for DKFZP547N043 (NM_032018.2,1251-1269).
gtgagtgggtctgaagata

SEQ ID NO: 156463 - DNA, 19 bp, Homo sapiens
  siRNA target sequence for DKFZP547N043 (NM_032018.2,1284-1302).
cgacctaggctagaagata

SEQ ID NO: 156464 - DNA, 19 bp, Homo sapiens
  siRNA target sequence for DKFZP547N043 (NM_032018.2,1285-1303).
gacctaggctagaagataa

SEQ ID NO: 156465 - DNA, 19 bp, Homo sapiens
  siRNA target sequence for DKFZP547N043 (NM_032018.2,1348-1366).
gcagtggtaatgatccaaa

SEQ ID NO: 156466 - DNA, 19 bp, Homo sapiens
  siRNA target sequence for DKFZP547N043 (NM_032018.2,1351-1369).
gtggtaatgatccaaagta

SEQ ID NO: 156467 - DNA, 19 bp, Homo sapiens
  siRNA target sequence for DPF3 (NM_012074.1,45-63).
cgctcggggaccagttcta

SEQ ID NO: 156468 - DNA, 19 bp, Homo sapiens
  siRNA target sequence for DPF3 (NM_012074.1,47-65).
ctcggggaccagttctaca

SEQ ID NO: 156469 - DNA, 19 bp, Homo sapiens
  siRNA target sequence for DPF3 (NM_012074.1,292-310).
gcggctgctggagataaaa

SEQ ID NO: 156470 - DNA, 19 bp, Homo sapiens
  siRNA target sequence for DPF3 (NM_012074.1,585-603).
ctgccgtgatagatgctaa

SEQ ID NO: 156471 - DNA, 19 bp, Homo sapiens
  siRNA target sequence for DPF3 (NM_012074.1,632-650).
gcaacagtggcgtatagga

SEQ ID NO: 156472 - DNA, 19 bp, Homo sapiens
  siRNA target sequence for DPF3 (NM_012074.1,633-651).
caacagtggcgtataggaa

SEQ ID NO: 156473 - DNA, 19 bp, Homo sapiens
  siRNA target sequence for DUSP12 (NM_007240.1,99-117).
gtgcagccaggattgtatt

SEQ ID NO: 156474 - DNA, 19 bp, Homo sapiens
  siRNA target sequence for DUSP12 (NM_007240.1,219-237).
cctggggtcgaggatctat

SEQ ID NO: 156475 - DNA, 19 bp, Homo sapiens
  siRNA target sequence for DUSP12 (NM_007240.1,370-388).
gtcgaagtgtggccataat

SEQ ID NO: 156476 - DNA, 19 bp, Homo sapiens
  siRNA target sequence for DUSP12 (NM_007240.1,372-390).
cgaagtgtggccataataa

SEQ ID NO: 156477 - DNA, 19 bp, Homo sapiens
  siRNA target sequence for DUSP12 (NM_007240.1,481-499).
ggtttgagtggcaactgaa

SEQ ID NO: 156478 - DNA, 19 bp, Homo sapiens
  siRNA target sequence for DUSP12 (NM_007240.1,486-504).
gagtggcaactgaaattat

SEQ ID NO: 156479 - DNA, 19 bp, Homo sapiens
  siRNA target sequence for DUSP12 (NM_007240.1,490-508).
ggcaactgaaattatacca

SEQ ID NO: 156480 - DNA, 19 bp, Homo sapiens
  siRNA target sequence for DUSP12 (NM_007240.1,527-545).
ggatacctctagtgcaatt

SEQ ID NO: 156481 - DNA, 19 bp, Homo sapiens
  siRNA target sequence for DUSP12 (NM_007240.1,528-546).
gatacctctagtgcaattt

SEQ ID NO: 156482 - DNA, 19 bp, Homo sapiens
  siRNA target sequence for DUSP12 (NM_007240.1,532-550).
cctctagtgcaatttataa

SEQ ID NO: 156483 - DNA, 19 bp, Homo sapiens
  siRNA target sequence for DUSP12 (NM_007240.1,631-649).
ctaccgtttcacaaggatt

SEQ ID NO: 156484 - DNA, 19 bp, Homo sapiens
  siRNA target sequence for DUSP12 (NM_007240.1,634-652).
ccgtttcacaaggattgaa

SEQ ID NO: 156485 - DNA, 19 bp, Homo sapiens
  siRNA target sequence for DUSP12 (NM_007240.1,635-653).
cgtttcacaaggattgaaa

SEQ ID NO: 156486 - DNA, 19 bp, Homo sapiens
  siRNA target sequence for DUSP12 (NM_007240.1,640-658).
cacaaggattgaaagatga

SEQ ID NO: 156487 - DNA, 19 bp, Homo sapiens
  siRNA target sequence for DUSP12 (NM_007240.1,654-672).
gatgaggttctctacaagt

SEQ ID NO: 156488 - DNA, 19 bp, Homo sapiens
  siRNA target sequence for DUSP12 (NM_007240.1,676-694).
gaaagtgcaggcgatcatt

SEQ ID NO: 156489 - DNA, 19 bp, Homo sapiens
  siRNA target sequence for DUSP12 (NM_007240.1,680-698).
gtgcaggcgatcattattt

SEQ ID NO: 156490 - DNA, 19 bp, Homo sapiens
  siRNA target sequence for DUSP12 (NM_007240.1,683-701).
caggcgatcattatttcga

SEQ ID NO: 156491 - DNA, 19 bp, Homo sapiens
  siRNA target sequence for DUSP12 (NM_007240.1,791-809).
gaggcaagctcaatgtaca

SEQ ID NO: 156492 - DNA, 19 bp, Homo sapiens
  siRNA target sequence for DUSP12 (NM_007240.1,794-812).
gcaagctcaatgtacatct

SEQ ID NO: 156493 - DNA, 19 bp, Homo sapiens
  siRNA target sequence for DUSP12 (NM_007240.1,795-813).
caagctcaatgtacatctt

SEQ ID NO: 156494 - DNA, 19 bp, Homo sapiens
  siRNA target sequence for DUSP12 (NM_007240.1,798-816).
gctcaatgtacatcttatt

SEQ ID NO: 156495 - DNA, 19 bp, Homo sapiens
  siRNA target sequence for DUSP12 (NM_007240.1,799-817).
ctcaatgtacatcttattt

SEQ ID NO: 156496 - DNA, 19 bp, Homo sapiens
  siRNA target sequence for DUSP12 (NM_007240.1,805-823).
gtacatcttatttcattga

SEQ ID NO: 156497 - DNA, 19 bp, Homo sapiens
  siRNA target sequence for DUSP12 (NM_007240.1,946-964).
ggataacacctgcttttca

SEQ ID NO: 156498 - DNA, 19 bp, Homo sapiens
  siRNA target sequence for ECE1 (NM_001397.1,523-541).
gagagaaaggcgcaagtat

SEQ ID NO: 156499 - DNA, 19 bp, Homo sapiens
  siRNA target sequence for ECE1 (NM_001397.1,527-545).
gaaaggcgcaagtatacta

SEQ ID NO: 156500 - DNA, 19 bp, Homo sapiens
  siRNA target sequence for ECE1 (NM_001397.1,584-602).
gggccaaacctctaatgga

SEQ ID NO: 156501 - DNA, 19 bp, Homo sapiens
  siRNA target sequence for ECE1 (NM_001397.1,593-611).
ctctaatggagttgattga

SEQ ID NO: 156502 - DNA, 19 bp, Homo sapiens
  siRNA target sequence for ECE1 (NM_001397.1,783-801).
cttgccctcgagagactat

SEQ ID NO: 156503 - DNA, 19 bp, Homo sapiens
  siRNA target sequence for ECE1 (NM_001397.1,794-812).
gagactattacctgaacaa

SEQ ID NO: 156504 - DNA, 19 bp, Homo sapiens
  siRNA target sequence for ECE1 (NM_001397.1,829-847).
gtgctgaccggatatctga

SEQ ID NO: 156505 - DNA, 19 bp, Homo sapiens
  siRNA target sequence for ECE1 (NM_001397.1,985-1003).
ctcatctaccacaaagtga

SEQ ID NO: 156506 - DNA, 19 bp, Homo sapiens
  siRNA target sequence for ECE1 (NM_001397.1,1068-1086).
ctaccccgtggagatcaat

SEQ ID NO: 156507 - DNA, 19 bp, Homo sapiens
  siRNA target sequence for ECE1 (NM_001397.1,1072-1090).
cccgtggagatcaatgaat

SEQ ID NO: 156508 - DNA, 19 bp, Homo sapiens
  siRNA target sequence for ECE1 (NM_001397.1,1096-1114).
cctattgtggtctatgaca

SEQ ID NO: 156509 - DNA, 19 bp, Homo sapiens
  siRNA target sequence for ECE1 (NM_001397.1,1160-1178).
gatgcctgctcaacaacta

SEQ ID NO: 156510 - DNA, 19 bp, Homo sapiens
  siRNA target sequence for ECE1 (NM_001397.1,1163-1181).
gcctgctcaacaactacat

SEQ ID NO: 156511 - DNA, 19 bp, Homo sapiens
  siRNA target sequence for ECE1 (NM_001397.1,1188-1206).
gaacctggtgcggaaaaca

SEQ ID NO: 156512 - DNA, 19 bp, Homo sapiens
  siRNA target sequence for ECE1 (NM_001397.1,1345-1363).
cccatgtttgtcaaagcaa

SEQ ID NO: 156513 - DNA, 19 bp, Homo sapiens
  siRNA target sequence for ECE1 (NM_001397.1,1396-1414).
gagatcatcctggagatta

SEQ ID NO: 156514 - DNA, 19 bp, Homo sapiens
  siRNA target sequence for ECE1 (NM_001397.1,1456-1474).
gatgaggaaacccgaaaat

SEQ ID NO: 156515 - DNA, 19 bp, Homo sapiens
  siRNA target sequence for ECE1 (NM_001397.1,1468-1486).
cgaaaatcagccaaggaaa

SEQ ID NO: 156516 - DNA, 19 bp, Homo sapiens
  siRNA target sequence for ECE1 (NM_001397.1,1490-1508).
ccgatgccatctacaacat

SEQ ID NO: 156517 - DNA, 19 bp, Homo sapiens
  siRNA target sequence for ECE1 (NM_001397.1,1513-1531).
ggataccccaacttcatca

SEQ ID NO: 156518 - DNA, 19 bp, Homo sapiens
  siRNA target sequence for ECE1 (NM_001397.1,1549-1567).
gacaaagtgtttaatgact

SEQ ID NO: 156519 - DNA, 19 bp, Homo sapiens
  siRNA target sequence for ECE1 (NM_001397.1,1600-1618).
gccatgcggtttttcaact

SEQ ID NO: 156520 - DNA, 19 bp, Homo sapiens
  siRNA target sequence for ECE1 (NM_001397.1,1601-1619).
ccatgcggtttttcaactt

SEQ ID NO: 156521 - DNA, 19 bp, Homo sapiens
  siRNA target sequence for ECE1 (NM_001397.1,1606-1624).
cggtttttcaacttctcat

SEQ ID NO: 156522 - DNA, 19 bp, Homo sapiens
  siRNA target sequence for ECE1 (NM_001397.1,1704-1722).
ctactcgcccaccaagaat

SEQ ID NO: 156523 - DNA, 19 bp, Homo sapiens
  siRNA target sequence for ECE1 (NM_001397.1,1824-1842).
gctgactcatgcttttgat

SEQ ID NO: 156524 - DNA, 19 bp, Homo sapiens
  siRNA target sequence for ECE1 (NM_001397.1,2221-2239).
ggctccctctccaattcca

SEQ ID NO: 156525 - DNA, 19 bp, Homo sapiens
  siRNA target sequence for ECEL1 (NM_004826.1,228-246).
cggcgcactacgatgagtt

SEQ ID NO: 156526 - DNA, 19 bp, Homo sapiens
  siRNA target sequence for ECEL1 (NM_004826.1,660-678).
ccatcggcgagcaaaacga

SEQ ID NO: 156527 - DNA, 19 bp, Homo sapiens
  siRNA target sequence for ECEL1 (NM_004826.1,1068-1086).
cagcatacagggtgttcat

SEQ ID NO: 156528 - DNA, 19 bp, Homo sapiens
  siRNA target sequence for ECEL1 (NM_004826.1,1208-1226).
gtcagctccatgtacaaca

SEQ ID NO: 156529 - DNA, 19 bp, Homo sapiens
  siRNA target sequence for ECEL1 (NM_004826.1,1278-1296).
ggctgctagaccagatctt

SEQ ID NO: 156530 - DNA, 19 bp, Homo sapiens
  siRNA target sequence for ECEL1 (NM_004826.1,1622-1640).
ctagtggaagacatcaagt

SEQ ID NO: 156531 - DNA, 19 bp, Homo sapiens
  siRNA target sequence for ECEL1 (NM_004826.1,1707-1725).
ccaagctccagtacatgat

SEQ ID NO: 156532 - DNA, 19 bp, Homo sapiens
  siRNA target sequence for ECEL1 (NM_004826.1,1909-1927).
ggcgctcaatgcctactat

SEQ ID NO: 156533 - DNA, 19 bp, Homo sapiens
  siRNA target sequence for ECEL1 (NM_004826.1,1911-1929).
cgctcaatgcctactatct

SEQ ID NO: 156534 - DNA, 19 bp, Homo sapiens
  siRNA target sequence for ECEL1 (NM_004826.1,1912-1930).
gctcaatgcctactatcta

SEQ ID NO: 156535 - DNA, 19 bp, Homo sapiens
  siRNA target sequence for ECEL1 (NM_004826.1,2017-2035).
gggcatcggcaccatcatt

SEQ ID NO: 156536 - DNA, 19 bp, Homo sapiens
  siRNA target sequence for ECEL1 (NM_004826.1,2149-2167).
gtgcatcgtccgtctctat

SEQ ID NO: 156537 - DNA, 19 bp, Homo sapiens
  siRNA target sequence for ECEL1 (NM_004826.1,2151-2169).
gcatcgtccgtctctatga

SEQ ID NO: 156538 - DNA, 19 bp, Homo sapiens
  siRNA target sequence for ECEL1 (NM_004826.1,2252-2270).
gcctaccacgcctatcaga

SEQ ID NO: 156539 - DNA, 19 bp, Homo sapiens
  siRNA target sequence for ECEL1 (NM_004826.1,2253-2271).
cctaccacgcctatcagaa

SEQ ID NO: 156540 - DNA, 19 bp, Homo sapiens
  siRNA target sequence for EEA1 (NM_003566.1,176-194).
ggctctcaaggttctgatt

SEQ ID NO: 156541 - DNA, 19 bp, Homo sapiens
  siRNA target sequence for EEA1 (NM_003566.1,182-200).
caaggttctgatttagatt

SEQ ID NO: 156542 - DNA, 19 bp, Homo sapiens
  siRNA target sequence for EEA1 (NM_003566.1,222-240).
cagtggacgtcaataatga

SEQ ID NO: 156543 - DNA, 19 bp, Homo sapiens
  siRNA target sequence for EEA1 (NM_003566.1,267-285).
cccagtgtatgaaatctct

SEQ ID NO: 156544 - DNA, 19 bp, Homo sapiens
  siRNA target sequence for EEA1 (NM_003566.1,348-366).
gtcatggaggagagtctaa

SEQ ID NO: 156545 - DNA, 19 bp, Homo sapiens
  siRNA target sequence for EEA1 (NM_003566.1,425-443).
gcttcacttaaggaagaaa

SEQ ID NO: 156546 - DNA, 19 bp, Homo sapiens
  siRNA target sequence for EEA1 (NM_003566.1,447-465).
ggtactcggaagaattaaa

SEQ ID NO: 156547 - DNA, 19 bp, Homo sapiens
  siRNA target sequence for EEA1 (NM_003566.1,469-487).
ggaattagaaaaatatcaa

SEQ ID NO: 156548 - DNA, 19 bp, Homo sapiens
  siRNA target sequence for EEA1 (NM_003566.1,518-536).
gggttggtgactgattcat

SEQ ID NO: 156549 - DNA, 19 bp, Homo sapiens
  siRNA target sequence for EEA1 (NM_003566.1,520-538).
gttggtgactgattcatca

SEQ ID NO: 156550 - DNA, 19 bp, Homo sapiens
  siRNA target sequence for EEA1 (NM_003566.1,537-555).
cagcagaactacagtcttt

SEQ ID NO: 156551 - DNA, 19 bp, Homo sapiens
  siRNA target sequence for EEA1 (NM_003566.1,550-568).
gtctttggaacagcaatta

SEQ ID NO: 156552 - DNA, 19 bp, Homo sapiens
  siRNA target sequence for EEA1 (NM_003566.1,633-651).
cccaacttgctactgaaat

SEQ ID NO: 156553 - DNA, 19 bp, Homo sapiens
  siRNA target sequence for EEA1 (NM_003566.1,634-652).
ccaacttgctactgaaatt

SEQ ID NO: 156554 - DNA, 19 bp, Homo sapiens
  siRNA target sequence for EEA1 (NM_003566.1,654-672).
cagatataaagtcaaagta

SEQ ID NO: 156555 - DNA, 19 bp, Homo sapiens
  siRNA target sequence for EEA1 (NM_003566.1,698-716).
gctgctgaacaaaaagtga

SEQ ID NO: 156556 - DNA, 19 bp, Homo sapiens
  siRNA target sequence for EEA1 (NM_003566.1,717-735).
cacgtctgacagaagaatt

SEQ ID NO: 156557 - DNA, 19 bp, Homo sapiens
  siRNA target sequence for EEA1 (NM_003566.1,719-737).
cgtctgacagaagaattaa

SEQ ID NO: 156558 - DNA, 19 bp, Homo sapiens
  siRNA target sequence for EEA1 (NM_003566.1,720-738).
gtctgacagaagaattaaa

SEQ ID NO: 156559 - DNA, 19 bp, Homo sapiens
  siRNA target sequence for EEA1 (NM_003566.1,739-757).
caaagaggcaactgtaatt

SEQ ID NO: 156560 - DNA, 19 bp, Homo sapiens
  siRNA target sequence for EEA1 (NM_003566.1,784-802).
gagacctggtatagaagat

SEQ ID NO: 156561 - DNA, 19 bp, Homo sapiens
  siRNA target sequence for EEA1 (NM_003566.1,807-825).
ccgtgctaaagaaagaact

SEQ ID NO: 156562 - DNA, 19 bp, Homo sapiens
  siRNA target sequence for EEA1 (NM_003566.1,827-845).
gtccaagttcaaacactaa

SEQ ID NO: 156563 - DNA, 19 bp, Homo sapiens
  siRNA target sequence for EEA1 (NM_003566.1,833-851).
gttcaaacactaatggata

SEQ ID NO: 156564 - DNA, 19 bp, Homo sapiens
  siRNA target sequence for EEA1 (NM_003566.1,872-890).
cgagaatctgaaaaactca

SEQ ID NO: 156565 - DNA, 19 bp, Homo sapiens
  siRNA target sequence for EEA1 (NM_003566.1,998-1016).
caggaactacaaaaactga

SEQ ID NO: 156566 - DNA, 19 bp, Homo sapiens
  siRNA target sequence for EEA1 (NM_003566.1,1079-1097).
gaacaagactatactaagt

SEQ ID NO: 156567 - DNA, 19 bp, Homo sapiens
  siRNA target sequence for EEA1 (NM_003566.1,1115-1133).
gaagaatctgtgagtaaaa

SEQ ID NO: 156568 - DNA, 19 bp, Homo sapiens
  siRNA target sequence for EEA1 (NM_003566.1,1118-1136).
gaatctgtgagtaaaaaga

SEQ ID NO: 156569 - DNA, 19 bp, Homo sapiens
  siRNA target sequence for EEA1 (NM_003566.1,1144-1162).
ggcaacccttcatcaaaaa

SEQ ID NO: 156570 - DNA, 19 bp, Homo sapiens
  siRNA target sequence for EEA1 (NM_003566.1,1146-1164).
caacccttcatcaaaaaga

SEQ ID NO: 156571 - DNA, 19 bp, Homo sapiens
  siRNA target sequence for EEA1 (NM_003566.1,1180-1198).
gcttcagtcaagattgtct

SEQ ID NO: 156572 - DNA, 19 bp, Homo sapiens
  siRNA target sequence for EEA1 (NM_003566.1,1205-1223).
gaaacctcactgcatagaa

SEQ ID NO: 156573 - DNA, 19 bp, Homo sapiens
  siRNA target sequence for EEA1 (NM_003566.1,1248-1266).
gagaagctactcaaaagct

SEQ ID NO: 156574 - DNA, 19 bp, Homo sapiens
  siRNA target sequence for EEA1 (NM_003566.1,1293-1311).
ccaagtaccagcatctaaa

SEQ ID NO: 156575 - DNA, 19 bp, Homo sapiens
  siRNA target sequence for EEA1 (NM_003566.1,1460-1478).
cagctttcaagtgaaaagt

SEQ ID NO: 156576 - DNA, 19 bp, Homo sapiens
  siRNA target sequence for EEA1 (NM_003566.1,1501-1519).
ggctgatttacaactcaaa

SEQ ID NO: 156577 - DNA, 19 bp, Homo sapiens
  siRNA target sequence for EEA1 (NM_003566.1,1576-1594).
gcatcaattagataaaaca

SEQ ID NO: 156578 - DNA, 19 bp, Homo sapiens
  siRNA target sequence for EEA1 (NM_003566.1,1712-1730).
cagaaccttgaagctttat

SEQ ID NO: 156579 - DNA, 19 bp, Homo sapiens
  siRNA target sequence for EEA1 (NM_003566.1,1714-1732).
gaaccttgaagctttatta

SEQ ID NO: 156580 - DNA, 19 bp, Homo sapiens
  siRNA target sequence for EEA1 (NM_003566.1,1808-1826).
ggagagactgctgttctta

SEQ ID NO: 156581 - DNA, 19 bp, Homo sapiens
  siRNA target sequence for EEA1 (NM_003566.1,1891-1909).
gaatcagtcagaaagtcat

SEQ ID NO: 156582 - DNA, 19 bp, Homo sapiens
  siRNA target sequence for EEA1 (NM_003566.1,1946-1964).
gagcagaaggcacatctta

SEQ ID NO: 156583 - DNA, 19 bp, Homo sapiens
  siRNA target sequence for EEA1 (NM_003566.1,1948-1966).
gcagaaggcacatcttaga

SEQ ID NO: 156584 - DNA, 19 bp, Homo sapiens
  siRNA target sequence for EEA1 (NM_003566.1,1982-2000).
gtcctttccctagaaacta

SEQ ID NO: 156585 - DNA, 19 bp, Homo sapiens
  siRNA target sequence for EEA1 (NM_003566.1,1984-2002).
cctttccctagaaactagt

SEQ ID NO: 156586 - DNA, 19 bp, Homo sapiens
  siRNA target sequence for EEA1 (NM_003566.1,2005-2023).
caatgaattaaatagtcaa

SEQ ID NO: 156587 - DNA, 19 bp, Homo sapiens
  siRNA target sequence for EEA1 (NM_003566.1,2044-2062).
ggtctcccagcttgacata

SEQ ID NO: 156588 - DNA, 19 bp, Homo sapiens
  siRNA target sequence for EEA1 (NM_003566.1,2073-2091).
ccaaaaccgaactattact

SEQ ID NO: 156589 - DNA, 19 bp, Homo sapiens
  siRNA target sequence for EEA1 (NM_003566.1,2074-2092).
caaaaccgaactattacta

SEQ ID NO: 156590 - DNA, 19 bp, Homo sapiens
  siRNA target sequence for EEA1 (NM_003566.1,2121-2139).
gagctgatcttcagaatca

SEQ ID NO: 156591 - DNA, 19 bp, Homo sapiens
  siRNA target sequence for EEA1 (NM_003566.1,2143-2161).
ggacacagctcaaaatgca

SEQ ID NO: 156592 - DNA, 19 bp, Homo sapiens
  siRNA target sequence for EEA1 (NM_003566.1,2177-2195).
caggagttaaataagatta

SEQ ID NO: 156593 - DNA, 19 bp, Homo sapiens
  siRNA target sequence for EEA1 (NM_003566.1,2179-2197).
ggagttaaataagattact

SEQ ID NO: 156594 - DNA, 19 bp, Homo sapiens
  siRNA target sequence for EEA1 (NM_003566.1,2212-2230).
ggtcactgcaaagttacaa

SEQ ID NO: 156595 - DNA, 19 bp, Homo sapiens
  siRNA target sequence for EEA1 (NM_003566.1,2254-2272).
gctggaaagtcatcttaaa

SEQ ID NO: 156596 - DNA, 19 bp, Homo sapiens
  siRNA target sequence for EEA1 (NM_003566.1,2284-2302).
gaaatacctctctttagaa

SEQ ID NO: 156597 - DNA, 19 bp, Homo sapiens
  siRNA target sequence for EEA1 (NM_003566.1,2315-2333).
gagctagaaggtcaaatta

SEQ ID NO: 156598 - DNA, 19 bp, Homo sapiens
  siRNA target sequence for EEA1 (NM_003566.1,2371-2389).
caaggagcaggctttgcaa

SEQ ID NO: 156599 - DNA, 19 bp, Homo sapiens
  siRNA target sequence for EEA1 (NM_003566.1,2437-2455).
cacagaattgagtaaacaa

SEQ ID NO: 156600 - DNA, 19 bp, Homo sapiens
  siRNA target sequence for EEA1 (NM_003566.1,2439-2457).
cagaattgagtaaacaact

SEQ ID NO: 156601 - DNA, 19 bp, Homo sapiens
  siRNA target sequence for EEA1 (NM_003566.1,2448-2466).
gtaaacaacttgaaatgga

SEQ ID NO: 156602 - DNA, 19 bp, Homo sapiens
  siRNA target sequence for EEA1 (NM_003566.1,2471-2489).
gaaatagtatccagtacaa

SEQ ID NO: 156603 - DNA, 19 bp, Homo sapiens
  siRNA target sequence for EEA1 (NM_003566.1,2484-2502).
gtacaagattggatctaca

SEQ ID NO: 156604 - DNA, 19 bp, Homo sapiens
  siRNA target sequence for EEA1 (NM_003566.1,2487-2505).
caagattggatctacagaa

SEQ ID NO: 156605 - DNA, 19 bp, Homo sapiens
  siRNA target sequence for EEA1 (NM_003566.1,2490-2508).
gattggatctacagaaaaa

SEQ ID NO: 156606 - DNA, 19 bp, Homo sapiens
  siRNA target sequence for EEA1 (NM_003566.1,2513-2531).
gaagcccttgaaagtatca

SEQ ID NO: 156607 - DNA, 19 bp, Homo sapiens
  siRNA target sequence for EEA1 (NM_003566.1,2677-2695).
gaaagaagctttaatgaca

SEQ ID NO: 156608 - DNA, 19 bp, Homo sapiens
  siRNA target sequence for EEA1 (NM_003566.1,2692-2710).
gacagagctttctacagta

SEQ ID NO: 156609 - DNA, 19 bp, Homo sapiens
  siRNA target sequence for EEA1 (NM_003566.1,2703-2721).
ctacagtaaaggacaaact

SEQ ID NO: 156610 - DNA, 19 bp, Homo sapiens
  siRNA target sequence for EEA1 (NM_003566.1,2716-2734).
caaactatcaaaagtttct

SEQ ID NO: 156611 - DNA, 19 bp, Homo sapiens
  siRNA target sequence for EEA1 (NM_003566.1,2720-2738).
ctatcaaaagtttctgatt

SEQ ID NO: 156612 - DNA, 19 bp, Homo sapiens
  siRNA target sequence for EEA1 (NM_003566.1,2909-2927).
gcttctcatcagttgaaat

SEQ ID NO: 156613 - DNA, 19 bp, Homo sapiens
  siRNA target sequence for EEA1 (NM_003566.1,2910-2928).
cttctcatcagttgaaatt

SEQ ID NO: 156614 - DNA, 19 bp, Homo sapiens
  siRNA target sequence for EEA1 (NM_003566.1,2954-2972).
cttatacaggcccagaata

SEQ ID NO: 156615 - DNA, 19 bp, Homo sapiens
  siRNA target sequence for EEA1 (NM_003566.1,3002-3020).
caacttcaggggaacataa

SEQ ID NO: 156616 - DNA, 19 bp, Homo sapiens
  siRNA target sequence for EEA1 (NM_003566.1,3066-3084).
cactccaaggagagcttaa

SEQ ID NO: 156617 - DNA, 19 bp, Homo sapiens
  siRNA target sequence for EEA1 (NM_003566.1,3070-3088).
ccaaggagagcttaaaatt

SEQ ID NO: 156618 - DNA, 19 bp, Homo sapiens
  siRNA target sequence for EEA1 (NM_003566.1,3226-3244).
gcttcaatctgatttctat

SEQ ID NO: 156619 - DNA, 19 bp, Homo sapiens
  siRNA target sequence for EEA1 (NM_003566.1,3271-3289).
caggcaagatcttaagtct

SEQ ID NO: 156620 - DNA, 19 bp, Homo sapiens
  siRNA target sequence for EEA1 (NM_003566.1,3311-3329).
gcacaggaggacttgattt

SEQ ID NO: 156621 - DNA, 19 bp, Homo sapiens
  siRNA target sequence for EEA1 (NM_003566.1,3317-3335).
gaggacttgatttcaaaca

SEQ ID NO: 156622 - DNA, 19 bp, Homo sapiens
  siRNA target sequence for EEA1 (NM_003566.1,3319-3337).
ggacttgatttcaaacaga

SEQ ID NO: 156623 - DNA, 19 bp, Homo sapiens
  siRNA target sequence for EEA1 (NM_003566.1,3430-3448).
gcaggagcgatgtaaagca

SEQ ID NO: 156624 - DNA, 19 bp, Homo sapiens
  siRNA target sequence for EEA1 (NM_003566.1,3438-3456).
gatgtaaagcactacaaga

SEQ ID NO: 156625 - DNA, 19 bp, Homo sapiens
  siRNA target sequence for EEA1 (NM_003566.1,3441-3459).
gtaaagcactacaagacat

SEQ ID NO: 156626 - DNA, 19 bp, Homo sapiens
  siRNA target sequence for EEA1 (NM_003566.1,3505-3523).
gtctaaattggcagagata

SEQ ID NO: 156627 - DNA, 19 bp, Homo sapiens
  siRNA target sequence for EEA1 (NM_003566.1,3627-3645).
ctaaacagcttctaattca

SEQ ID NO: 156628 - DNA, 19 bp, Homo sapiens
  siRNA target sequence for EEA1 (NM_003566.1,3898-3916).
gaaggagtggcaatctagt

SEQ ID NO: 156629 - DNA, 19 bp, Homo sapiens
  siRNA target sequence for EEA1 (NM_003566.1,3901-3919).
ggagtggcaatctagtcaa

SEQ ID NO: 156630 - DNA, 19 bp, Homo sapiens
  siRNA target sequence for EEA1 (NM_003566.1,3915-3933).
gtcaacggagagttagtga

SEQ ID NO: 156631 - DNA, 19 bp, Homo sapiens
  siRNA target sequence for EEA1 (NM_003566.1,3940-3958).
gaaacaaacggatgactta

SEQ ID NO: 156632 - DNA, 19 bp, Homo sapiens
  siRNA target sequence for EEA1 (NM_003566.1,3955-3973).
cttacggggtgaaattgca

SEQ ID NO: 156633 - DNA, 19 bp, Homo sapiens
  siRNA target sequence for EEA1 (NM_003566.1,3960-3978).
ggggtgaaattgcagtatt

SEQ ID NO: 156634 - DNA, 19 bp, Homo sapiens
  siRNA target sequence for EEA1 (NM_003566.1,3961-3979).
gggtgaaattgcagtatta

SEQ ID NO: 156635 - DNA, 19 bp, Homo sapiens
  siRNA target sequence for EEA1 (NM_003566.1,3980-3998).
gaagcaacggttcagaata

SEQ ID NO: 156636 - DNA, 19 bp, Homo sapiens
  siRNA target sequence for EEA1 (NM_003566.1,3984-4002).
caacggttcagaataatca

SEQ ID NO: 156637 - DNA, 19 bp, Homo sapiens
  siRNA target sequence for EEA1 (NM_003566.1,4019-4037).
ctactggaaagatgtctta

SEQ ID NO: 156638 - DNA, 19 bp, Homo sapiens
  siRNA target sequence for EEA1 (NM_003566.1,4060-4078).
gcttcaaaccaaagtatta

SEQ ID NO: 156639 - DNA, 19 bp, Homo sapiens
  siRNA target sequence for EEA1 (NM_003566.1,4064-4082).
caaaccaaagtattagaat

SEQ ID NO: 156640 - DNA, 19 bp, Homo sapiens
  siRNA target sequence for EEA1 (NM_003566.1,4121-4139).
ctgggcagagaaaaccaat

SEQ ID NO: 156641 - DNA, 19 bp, Homo sapiens
  siRNA target sequence for EEA1 (NM_003566.1,4158-4176).
cacaagcgttgaatagaaa

SEQ ID NO: 156642 - DNA, 19 bp, Homo sapiens
  siRNA target sequence for EEA1 (NM_003566.1,4160-4178).
caagcgttgaatagaaagt

SEQ ID NO: 156643 - DNA, 19 bp, Homo sapiens
  siRNA target sequence for EEA1 (NM_003566.1,4177-4195).
gtgggccgaagacaatgaa

SEQ ID NO: 156644 - DNA, 19 bp, Homo sapiens
  siRNA target sequence for EEA1 (NM_003566.1,4183-4201).
cgaagacaatgaagtacaa

SEQ ID NO: 156645 - DNA, 19 bp, Homo sapiens
  siRNA target sequence for EEA1 (NM_003566.1,4254-4272).
gccgacagtgtggaaatat

SEQ ID NO: 156646 - DNA, 19 bp, Homo sapiens
  siRNA target sequence for EEA1 (NM_003566.1,4273-4291).
cttctgtgctgaatgttca

SEQ ID NO: 156647 - DNA, 19 bp, Homo sapiens
  siRNA target sequence for ENPEP (NM_001977.2,263-281).
gagagggctctaagagata

SEQ ID NO: 156648 - DNA, 19 bp, Homo sapiens
  siRNA target sequence for ENPEP (NM_001977.2,278-296).
gatactgcattcaaacgaa

SEQ ID NO: 156649 - DNA, 19 bp, Homo sapiens
  siRNA target sequence for ENPEP (NM_001977.2,282-300).
ctgcattcaaacgaaacat

SEQ ID NO: 156650 - DNA, 19 bp, Homo sapiens
  siRNA target sequence for ENPEP (NM_001977.2,284-302).
gcattcaaacgaaacatgt

SEQ ID NO: 156651 - DNA, 19 bp, Homo sapiens
  siRNA target sequence for ENPEP (NM_001977.2,719-737).
ggaggtgtttcgagtacaa

SEQ ID NO: 156652 - DNA, 19 bp, Homo sapiens
  siRNA target sequence for ENPEP (NM_001977.2,722-740).
ggtgtttcgagtacaaaaa

SEQ ID NO: 156653 - DNA, 19 bp, Homo sapiens
  siRNA target sequence for ENPEP (NM_001977.2,839-857).
gctccctcgtgggatttta

SEQ ID NO: 156654 - DNA, 19 bp, Homo sapiens
  siRNA target sequence for ENPEP (NM_001977.2,840-858).
ctccctcgtgggattttat

SEQ ID NO: 156655 - DNA, 19 bp, Homo sapiens
  siRNA target sequence for ENPEP (NM_001977.2,1000-1018).
gaatacggagcactttcaa

SEQ ID NO: 156656 - DNA, 19 bp, Homo sapiens
  siRNA target sequence for ENPEP (NM_001977.2,1039-1057).
gagtcagtggatgataaat

SEQ ID NO: 156657 - DNA, 19 bp, Homo sapiens
  siRNA target sequence for ENPEP (NM_001977.2,1058-1076).
ggactcgaacaacttttga

SEQ ID NO: 156658 - DNA, 19 bp, Homo sapiens
  siRNA target sequence for ENPEP (NM_001977.2,1061-1079).
ctcgaacaacttttgagaa

SEQ ID NO: 156659 - DNA, 19 bp, Homo sapiens
  siRNA target sequence for ENPEP (NM_001977.2,1120-1138).
catcaatttgactctgtaa

SEQ ID NO: 156660 - DNA, 19 bp, Homo sapiens
  siRNA target sequence for ENPEP (NM_001977.2,1129-1147).
gactctgtaaagagaatat

SEQ ID NO: 156661 - DNA, 19 bp, Homo sapiens
  siRNA target sequence for ENPEP (NM_001977.2,1194-1212).
gcacacagccgaatatgct

SEQ ID NO: 156662 - DNA, 19 bp, Homo sapiens
  siRNA target sequence for ENPEP (NM_001977.2,1202-1220).
ccgaatatgctgcaaacat

SEQ ID NO: 156663 - DNA, 19 bp, Homo sapiens
  siRNA target sequence for ENPEP (NM_001977.2,1203-1221).
cgaatatgctgcaaacata

SEQ ID NO: 156664 - DNA, 19 bp, Homo sapiens
  siRNA target sequence for ENPEP (NM_001977.2,1214-1232).
caaacataactaaaagtgt

SEQ ID NO: 156665 - DNA, 19 bp, Homo sapiens
  siRNA target sequence for ENPEP (NM_001977.2,1218-1236).
cataactaaaagtgtgttt

SEQ ID NO: 156666 - DNA, 19 bp, Homo sapiens
  siRNA target sequence for ENPEP (NM_001977.2,1223-1241).
ctaaaagtgtgtttgatta

SEQ ID NO: 156667 - DNA, 19 bp, Homo sapiens
  siRNA target sequence for ENPEP (NM_001977.2,1336-1354).
ctcatcacgtacagagaaa

SEQ ID NO: 156668 - DNA, 19 bp, Homo sapiens
  siRNA target sequence for ENPEP (NM_001977.2,1349-1367).
gagaaacgaacctgcttta

SEQ ID NO: 156669 - DNA, 19 bp, Homo sapiens
  siRNA target sequence for ENPEP (NM_001977.2,1362-1380).
gctttatgaccctaaggaa

SEQ ID NO: 156670 - DNA, 19 bp, Homo sapiens
  siRNA target sequence for ENPEP (NM_001977.2,1363-1381).
ctttatgaccctaaggaat

SEQ ID NO: 156671 - DNA, 19 bp, Homo sapiens
  siRNA target sequence for ENPEP (NM_001977.2,1515-1533).
gtttctgggagtaaaccat

SEQ ID NO: 156672 - DNA, 19 bp, Homo sapiens
  siRNA target sequence for ENPEP (NM_001977.2,1554-1572).
gcgtgaccaaatgttactt

SEQ ID NO: 156673 - DNA, 19 bp, Homo sapiens
  siRNA target sequence for ENPEP (NM_001977.2,1608-1626).
gatgtcttcgcatccaatt

SEQ ID NO: 156674 - DNA, 19 bp, Homo sapiens
  siRNA target sequence for ENPEP (NM_001977.2,1611-1629).
gtcttcgcatccaattatt

SEQ ID NO: 156675 - DNA, 19 bp, Homo sapiens
  siRNA target sequence for ENPEP (NM_001977.2,1613-1631).
cttcgcatccaattattgt

SEQ ID NO: 156676 - DNA, 19 bp, Homo sapiens
  siRNA target sequence for ENPEP (NM_001977.2,1638-1656).
gacaacccctgatgaaata

SEQ ID NO: 156677 - DNA, 19 bp, Homo sapiens
  siRNA target sequence for ENPEP (NM_001977.2,1689-1707).
gggatcttctattttgaga

SEQ ID NO: 156678 - DNA, 19 bp, Homo sapiens
  siRNA target sequence for ENPEP (NM_001977.2,1690-1708).
ggatcttctattttgagaa

SEQ ID NO: 156679 - DNA, 19 bp, Homo sapiens
  siRNA target sequence for ENPEP (NM_001977.2,1831-1849).
ctaccagtgaaagaagtaa

SEQ ID NO: 156680 - DNA, 19 bp, Homo sapiens
  siRNA target sequence for ENPEP (NM_001977.2,1874-1892).
gttatcctgtgcttaacgt

SEQ ID NO: 156681 - DNA, 19 bp, Homo sapiens
  siRNA target sequence for ENPEP (NM_001977.2,1891-1909).
gtgaacggtgtcaagaaca

SEQ ID NO: 156682 - DNA, 19 bp, Homo sapiens
  siRNA target sequence for ENPEP (NM_001977.2,1913-1931).
cacagaaacgctttttgtt

SEQ ID NO: 156683 - DNA, 19 bp, Homo sapiens
  siRNA target sequence for ENPEP (NM_001977.2,2108-2126).
cagatcatattgggtttta

SEQ ID NO: 156684 - DNA, 19 bp, Homo sapiens
  siRNA target sequence for ENPEP (NM_001977.2,2119-2137).
gggttttatcgtgtaaatt

SEQ ID NO: 156685 - DNA, 19 bp, Homo sapiens
  siRNA target sequence for ENPEP (NM_001977.2,2120-2138).
ggttttatcgtgtaaatta

SEQ ID NO: 156686 - DNA, 19 bp, Homo sapiens
  siRNA target sequence for ENPEP (NM_001977.2,2177-2195).
ccttgaaccacaagacatt

SEQ ID NO: 156687 - DNA, 19 bp, Homo sapiens
  siRNA target sequence for ENPEP (NM_001977.2,2203-2221).
gcagatcgtgcaagtctta

SEQ ID NO: 156688 - DNA, 19 bp, Homo sapiens
  siRNA target sequence for ENPEP (NM_001977.2,2204-2222).
cagatcgtgcaagtcttat

SEQ ID NO: 156689 - DNA, 19 bp, Homo sapiens
  siRNA target sequence for ENPEP (NM_001977.2,2246-2264).
gagctcaacttctagatta

SEQ ID NO: 156690 - DNA, 19 bp, Homo sapiens
  siRNA target sequence for ENPEP (NM_001977.2,2248-2266).
gctcaacttctagattata

SEQ ID NO: 156691 - DNA, 19 bp, Homo sapiens
  siRNA target sequence for ENPEP (NM_001977.2,2336-2354).
cagctgtaacctacatcat

SEQ ID NO: 156692 - DNA, 19 bp, Homo sapiens
  siRNA target sequence for ENPEP (NM_001977.2,2341-2359).
gtaacctacatcattagca

SEQ ID NO: 156693 - DNA, 19 bp, Homo sapiens
  siRNA target sequence for ENPEP (NM_001977.2,2346-2364).
ctacatcattagcatgttt

SEQ ID NO: 156694 - DNA, 19 bp, Homo sapiens
  siRNA target sequence for ENPEP (NM_001977.2,2352-2370).
cattagcatgtttgaagat

SEQ ID NO: 156695 - DNA, 19 bp, Homo sapiens
  siRNA target sequence for ENPEP (NM_001977.2,2386-2404).
cctatgattgaggaatact

SEQ ID NO: 156696 - DNA, 19 bp, Homo sapiens
  siRNA target sequence for ENPEP (NM_001977.2,2532-2550).
caatgcttcctcgttattt

SEQ ID NO: 156697 - DNA, 19 bp, Homo sapiens
  siRNA target sequence for ENPEP (NM_001977.2,2659-2677).
gagcaataccagaaaactt

SEQ ID NO: 156698 - DNA, 19 bp, Homo sapiens
  siRNA target sequence for ENPEP (NM_001977.2,2667-2685).
ccagaaaacttcattagct

SEQ ID NO: 156699 - DNA, 19 bp, Homo sapiens
  siRNA target sequence for ENPEP (NM_001977.2,2701-2719).
ctgctgtatggattagcat

SEQ ID NO: 156700 - DNA, 19 bp, Homo sapiens
  siRNA target sequence for ENPEP (NM_001977.2,2716-2734).
gcatcagtgaagaacgtta

SEQ ID NO: 156701 - DNA, 19 bp, Homo sapiens
  siRNA target sequence for ENPEP (NM_001977.2,2727-2745).
gaacgttactcttttgtca

SEQ ID NO: 156702 - DNA, 19 bp, Homo sapiens
  siRNA target sequence for ENPEP (NM_001977.2,2761-2779).
ctcaaggacacgaacctta

SEQ ID NO: 156703 - DNA, 19 bp, Homo sapiens
  siRNA target sequence for ENPEP (NM_001977.2,2763-2781).
caaggacacgaaccttatt

SEQ ID NO: 156704 - DNA, 19 bp, Homo sapiens
  siRNA target sequence for ENPEP (NM_001977.2,2769-2787).
cacgaaccttattaaaact

SEQ ID NO: 156705 - DNA, 19 bp, Homo sapiens
  siRNA target sequence for ENPEP (NM_001977.2,2771-2789).
cgaaccttattaaaactca

SEQ ID NO: 156706 - DNA, 19 bp, Homo sapiens
  siRNA target sequence for ENPEP (NM_001977.2,2794-2812).
gtgtttacagtcattcgat

SEQ ID NO: 156707 - DNA, 19 bp, Homo sapiens
  siRNA target sequence for ENPEP (NM_001977.2,2796-2814).
gtttacagtcattcgatat

SEQ ID NO: 156708 - DNA, 19 bp, Homo sapiens
  siRNA target sequence for ENPEP (NM_001977.2,2803-2821).
gtcattcgatatatctcat

SEQ ID NO: 156709 - DNA, 19 bp, Homo sapiens
  siRNA target sequence for ENPEP (NM_001977.2,2805-2823).
cattcgatatatctcatat

SEQ ID NO: 156710 - DNA, 19 bp, Homo sapiens
  siRNA target sequence for ENPEP (NM_001977.2,2809-2827).
cgatatatctcatataaca

SEQ ID NO: 156711 - DNA, 19 bp, Homo sapiens
  siRNA target sequence for ENPEP (NM_001977.2,2872-2890).
gactatctagtcaacagat

SEQ ID NO: 156712 - DNA, 19 bp, Homo sapiens
  siRNA target sequence for ENPEP (NM_001977.2,2874-2892).
ctatctagtcaacagatat

SEQ ID NO: 156713 - DNA, 19 bp, Homo sapiens
  siRNA target sequence for ENPEP (NM_001977.2,2906-2924).
gaaaccttggccgaattgt

SEQ ID NO: 156714 - DNA, 19 bp, Homo sapiens
  siRNA target sequence for ENPEP (NM_001977.2,2916-2934).
ccgaattgtcacaatagca

SEQ ID NO: 156715 - DNA, 19 bp, Homo sapiens
  siRNA target sequence for ENPEP (NM_001977.2,2963-2981).
ggcagatggagagcttttt

SEQ ID NO: 156716 - DNA, 19 bp, Homo sapiens
  siRNA target sequence for ENPEP (NM_001977.2,2964-2982).
gcagatggagagctttttt

SEQ ID NO: 156717 - DNA, 19 bp, Homo sapiens
  siRNA target sequence for FASN (NM_004104.3,289-307).
gaaggacctgtctaggttt

SEQ ID NO: 156718 - DNA, 19 bp, Homo sapiens
  siRNA target sequence for FASN (NM_004104.3,373-391).
gctggaagtcacctatgaa

SEQ ID NO: 156719 - DNA, 19 bp, Homo sapiens
  siRNA target sequence for FASN (NM_004104.3,975-993).
cccctgagtcatttgaata

SEQ ID NO: 156720 - DNA, 19 bp, Homo sapiens
  siRNA target sequence for FASN (NM_004104.3,977-995).
cctgagtcatttgaataca

SEQ ID NO: 156721 - DNA, 19 bp, Homo sapiens
  siRNA target sequence for FASN (NM_004104.3,1942-1960).
gaggggacagtgcatcaaa

SEQ ID NO: 156722 - DNA, 19 bp, Homo sapiens
  siRNA target sequence for FASN (NM_004104.3,2313-2331).
cgtcctccgccgagtacaa

SEQ ID NO: 156723 - DNA, 19 bp, Homo sapiens
  siRNA target sequence for FASN (NM_004104.3,2314-2332).
gtcctccgccgagtacaat

SEQ ID NO: 156724 - DNA, 19 bp, Homo sapiens
  siRNA target sequence for FASN (NM_004104.3,2316-2334).
cctccgccgagtacaatgt

SEQ ID NO: 156725 - DNA, 19 bp, Homo sapiens
  siRNA target sequence for FASN (NM_004104.3,2795-2813).
ggctacctgagcatagtgt

SEQ ID NO: 156726 - DNA, 19 bp, Homo sapiens
  siRNA target sequence for FASN (NM_004104.3,5340-5358).
gcgttgacctggtcttgaa

SEQ ID NO: 156727 - DNA, 19 bp, Homo sapiens
  siRNA target sequence for FASN (NM_004104.3,5410-5428).
cggtcgcttcctggaaatt

SEQ ID NO: 156728 - DNA, 19 bp, Homo sapiens
  siRNA target sequence for FASN (NM_004104.3,5504-5522).
ctactggatgcgttcttca

SEQ ID NO: 156729 - DNA, 19 bp, Homo sapiens
  siRNA target sequence for FASN (NM_004104.3,5849-5867).
cagaagctcgtgttgactt

SEQ ID NO: 156730 - DNA, 19 bp, Homo sapiens
  siRNA target sequence for FASN (NM_004104.3,6153-6171).
ctgagctggactactttgt

SEQ ID NO: 156731 - DNA, 19 bp, Homo sapiens
  siRNA target sequence for FASN (NM_004104.3,6238-6256).
cgccatggagcgtatctgt

SEQ ID NO: 156732 - DNA, 19 bp, Homo sapiens
  siRNA target sequence for FASN (NM_004104.3,6244-6262).
ggagcgtatctgtgagaaa

SEQ ID NO: 156733 - DNA, 19 bp, Homo sapiens
  siRNA target sequence for FASN (NM_004104.3,6312-6330).
gcgacgtgggcattttggt

SEQ ID NO: 156734 - DNA, 19 bp, Homo sapiens
  siRNA target sequence for FASN (NM_004104.3,7211-7229).
gagacggaggccatatgct

SEQ ID NO: 156735 - DNA, 19 bp, Homo sapiens
  siRNA target sequence for FBXO30 (NM_032145.3,257-275).
gattggttgtccattggtt

SEQ ID NO: 156736 - DNA, 19 bp, Homo sapiens
  siRNA target sequence for FBXO30 (NM_032145.3,304-322).
ctgatgagcatcgactttt

SEQ ID NO: 156737 - DNA, 19 bp, Homo sapiens
  siRNA target sequence for FBXO30 (NM_032145.3,306-324).
gatgagcatcgacttttat

SEQ ID NO: 156738 - DNA, 19 bp, Homo sapiens
  siRNA target sequence for FBXO30 (NM_032145.3,357-375).
gactttggatgtccattta

SEQ ID NO: 156739 - DNA, 19 bp, Homo sapiens
  siRNA target sequence for FBXO30 (NM_032145.3,428-446).
ggtgtgctgtactatggaa

SEQ ID NO: 156740 - DNA, 19 bp, Homo sapiens
  siRNA target sequence for FBXO30 (NM_032145.3,433-451).
gctgtactatggaatggaa

SEQ ID NO: 156741 - DNA, 19 bp, Homo sapiens
  siRNA target sequence for FBXO30 (NM_032145.3,434-452).
ctgtactatggaatggaat

SEQ ID NO: 156742 - DNA, 19 bp, Homo sapiens
  siRNA target sequence for FBXO30 (NM_032145.3,449-467).
gaatcgatggccagttagt

SEQ ID NO: 156743 - DNA, 19 bp, Homo sapiens
  siRNA target sequence for FBXO30 (NM_032145.3,472-490).
cagaccggaaatcatatga

SEQ ID NO: 156744 - DNA, 19 bp, Homo sapiens
  siRNA target sequence for FBXO30 (NM_032145.3,476-494).
ccggaaatcatatgaaaat

SEQ ID NO: 156745 - DNA, 19 bp, Homo sapiens
  siRNA target sequence for FBXO30 (NM_032145.3,513-531).
gaagtggcacaattggata

SEQ ID NO: 156746 - DNA, 19 bp, Homo sapiens
  siRNA target sequence for FBXO30 (NM_032145.3,551-569).
ccaaaggatgctcttagaa

SEQ ID NO: 156747 - DNA, 19 bp, Homo sapiens
  siRNA target sequence for FBXO30 (NM_032145.3,563-581).
cttagaatccctcaaagta

SEQ ID NO: 156748 - DNA, 19 bp, Homo sapiens
  siRNA target sequence for FBXO30 (NM_032145.3,579-597).
gtagccaccatgatgtcaa

SEQ ID NO: 156749 - DNA, 19 bp, Homo sapiens
  siRNA target sequence for FBXO30 (NM_032145.3,595-613).
caaaagcaactgataaagt

SEQ ID NO: 156750 - DNA, 19 bp, Homo sapiens
  siRNA target sequence for FBXO30 (NM_032145.3,606-624).
gataaagtatccaaaccta

SEQ ID NO: 156751 - DNA, 19 bp, Homo sapiens
  siRNA target sequence for FBXO30 (NM_032145.3,630-648).
caaatctcagttaaatcaa

SEQ ID NO: 156752 - DNA, 19 bp, Homo sapiens
  siRNA target sequence for FBXO30 (NM_032145.3,683-701).
gtctgttgatgaagaatct

SEQ ID NO: 156753 - DNA, 19 bp, Homo sapiens
  siRNA target sequence for FBXO30 (NM_032145.3,700-718).
cttatggtgcactttatca

SEQ ID NO: 156754 - DNA, 19 bp, Homo sapiens
  siRNA target sequence for FBXO30 (NM_032145.3,764-782).
cctgaatactgctacaaga

SEQ ID NO: 156755 - DNA, 19 bp, Homo sapiens
  siRNA target sequence for FBXO30 (NM_032145.3,781-799).
gagacattggcatgttaaa

SEQ ID NO: 156756 - DNA, 19 bp, Homo sapiens
  siRNA target sequence for FBXO30 (NM_032145.3,828-846).
cagcaaaatgcgagagaaa

SEQ ID NO: 156757 - DNA, 19 bp, Homo sapiens
  siRNA target sequence for FBXO30 (NM_032145.3,981-999).
gacttgaatacaagttctt

SEQ ID NO: 156758 - DNA, 19 bp, Homo sapiens
  siRNA target sequence for FBXO30 (NM_032145.3,1055-1073).
catagaccagaatcagaat

SEQ ID NO: 156759 - DNA, 19 bp, Homo sapiens
  siRNA target sequence for FBXO30 (NM_032145.3,1070-1088).
gaatttacatggtgattca

SEQ ID NO: 156760 - DNA, 19 bp, Homo sapiens
  siRNA target sequence for FBXO30 (NM_032145.3,1077-1095).
catggtgattcaaaacaaa

SEQ ID NO: 156761 - DNA, 19 bp, Homo sapiens
  siRNA target sequence for FBXO30 (NM_032145.3,1115-1133).
ctgtgtggcatcatcagat

SEQ ID NO: 156762 - DNA, 19 bp, Homo sapiens
  siRNA target sequence for FBXO30 (NM_032145.3,1126-1144).
catcagatggcacttcaaa

SEQ ID NO: 156763 - DNA, 19 bp, Homo sapiens
  siRNA target sequence for FBXO30 (NM_032145.3,1131-1149).
gatggcacttcaaaacctt

SEQ ID NO: 156764 - DNA, 19 bp, Homo sapiens
  siRNA target sequence for FBXO30 (NM_032145.3,1213-1231).
gcacagttcagcatatcct

SEQ ID NO: 156765 - DNA, 19 bp, Homo sapiens
  siRNA target sequence for FBXO30 (NM_032145.3,1295-1313).
gaatgtggatgtcttatct

SEQ ID NO: 156766 - DNA, 19 bp, Homo sapiens
  siRNA target sequence for FBXO30 (NM_032145.3,1374-1392).
gataaagcagtagatacat

SEQ ID NO: 156767 - DNA, 19 bp, Homo sapiens
  siRNA target sequence for FBXO30 (NM_032145.3,1483-1501).
gagggaggggtatatctga

SEQ ID NO: 156768 - DNA, 19 bp, Homo sapiens
  siRNA target sequence for FBXO30 (NM_032145.3,1485-1503).
gggaggggtatatctgata

SEQ ID NO: 156769 - DNA, 19 bp, Homo sapiens
  siRNA target sequence for FBXO30 (NM_032145.3,1533-1551).
gttgggactcagacttttt

SEQ ID NO: 156770 - DNA, 19 bp, Homo sapiens
  siRNA target sequence for FBXO30 (NM_032145.3,1552-1570).
cacttccatctgcaatatt

SEQ ID NO: 156771 - DNA, 19 bp, Homo sapiens
  siRNA target sequence for FBXO30 (NM_032145.3,1557-1575).
ccatctgcaatattagcta

SEQ ID NO: 156772 - DNA, 19 bp, Homo sapiens
  siRNA target sequence for FBXO30 (NM_032145.3,1629-1647).
ccacagctttcaaatccaa

SEQ ID NO: 156773 - DNA, 19 bp, Homo sapiens
  siRNA target sequence for FBXO30 (NM_032145.3,1662-1680).
cttgggctggatttagtat

SEQ ID NO: 156774 - DNA, 19 bp, Homo sapiens
  siRNA target sequence for FBXO30 (NM_032145.3,1705-1723).
ccaagcagcgttcaatgtt

SEQ ID NO: 156775 - DNA, 19 bp, Homo sapiens
  siRNA target sequence for FBXO30 (NM_032145.3,1706-1724).
caagcagcgttcaatgttt

SEQ ID NO: 156776 - DNA, 19 bp, Homo sapiens
  siRNA target sequence for FBXO30 (NM_032145.3,1712-1730).
gcgttcaatgtttaccttt

SEQ ID NO: 156777 - DNA, 19 bp, Homo sapiens
  siRNA target sequence for FBXO30 (NM_032145.3,1824-1842).
cagaggtgccctttagctt

SEQ ID NO: 156778 - DNA, 19 bp, Homo sapiens
  siRNA target sequence for FBXO30 (NM_032145.3,1829-1847).
gtgccctttagcttactat

SEQ ID NO: 156779 - DNA, 19 bp, Homo sapiens
  siRNA target sequence for FBXO30 (NM_032145.3,1855-1873).
cctattctcagcgtagatt

SEQ ID NO: 156780 - DNA, 19 bp, Homo sapiens
  siRNA target sequence for FBXO30 (NM_032145.3,1867-1885).
gtagattttgtccatcaat

SEQ ID NO: 156781 - DNA, 19 bp, Homo sapiens
  siRNA target sequence for FBXO30 (NM_032145.3,1882-1900).
caatacaaggagcaaagat

SEQ ID NO: 156782 - DNA, 19 bp, Homo sapiens
  siRNA target sequence for FBXO30 (NM_032145.3,1891-1909).
gagcaaagattatacatga

SEQ ID NO: 156783 - DNA, 19 bp, Homo sapiens
  siRNA target sequence for FBXO30 (NM_032145.3,1932-1950).
gttcagccatgtgtatcta

SEQ ID NO: 156784 - DNA, 19 bp, Homo sapiens
  siRNA target sequence for FBXO30 (NM_032145.3,1942-1960).
gtgtatctacagtattagt

SEQ ID NO: 156785 - DNA, 19 bp, Homo sapiens
  siRNA target sequence for FBXO30 (NM_032145.3,1959-1977).
gtggagcctgctagaaact

SEQ ID NO: 156786 - DNA, 19 bp, Homo sapiens
  siRNA target sequence for FBXO30 (NM_032145.3,1992-2010).
cataatgaccatctaagta

SEQ ID NO: 156787 - DNA, 19 bp, Homo sapiens
  siRNA target sequence for FBXO30 (NM_032145.3,2049-2067).
ctcgatggcttcagcttat

SEQ ID NO: 156788 - DNA, 19 bp, Homo sapiens
  siRNA target sequence for FBXO30 (NM_032145.3,2051-2069).
cgatggcttcagcttatgt

SEQ ID NO: 156789 - DNA, 19 bp, Homo sapiens
  siRNA target sequence for FBXO30 (NM_032145.3,2125-2143).
ctcgtggcatggtcatact

SEQ ID NO: 156790 - DNA, 19 bp, Homo sapiens
  siRNA target sequence for FBXO30 (NM_032145.3,2186-2204).
gcagataaaagaaaaggta

SEQ ID NO: 156791 - DNA, 19 bp, Homo sapiens
  siRNA target sequence for FBXO30 (NM_032145.3,2201-2219).
ggtatggcgatttagtact

SEQ ID NO: 156792 - DNA, 19 bp, Homo sapiens
  siRNA target sequence for FBXO30 (NM_032145.3,2207-2225).
gcgatttagtactgcattt

SEQ ID NO: 156793 - DNA, 19 bp, Homo sapiens
  siRNA target sequence for FBXO30 (NM_032145.3,2370-2388).
cgttcactacgctcagttt

SEQ ID NO: 156794 - DNA, 19 bp, Homo sapiens
  siRNA target sequence for FBXO30 (NM_032145.3,2371-2389).
gttcactacgctcagtttt

SEQ ID NO: 156795 - DNA, 19 bp, Homo sapiens
  siRNA target sequence for FBXO30 (NM_032145.3,2374-2392).
cactacgctcagttttaaa

SEQ ID NO: 156796 - DNA, 19 bp, Homo sapiens
  siRNA target sequence for FGD1 (NM_004463.2,898-916).
cactggatccccagtttgt

SEQ ID NO: 156797 - DNA, 19 bp, Homo sapiens
  siRNA target sequence for FGD1 (NM_004463.2,1054-1072).
gaaaccggatcctggttaa

SEQ ID NO: 156798 - DNA, 19 bp, Homo sapiens
  siRNA target sequence for FGD1 (NM_004463.2,1060-1078).
ggatcctggttaaaagttt

SEQ ID NO: 156799 - DNA, 19 bp, Homo sapiens
  siRNA target sequence for FGD1 (NM_004463.2,1365-1383).
gtatcctcactgattgaga

SEQ ID NO: 156800 - DNA, 19 bp, Homo sapiens
  siRNA target sequence for FGD1 (NM_004463.2,1369-1387).
cctcactgattgagaagtt

SEQ ID NO: 156801 - DNA, 19 bp, Homo sapiens
  siRNA target sequence for FGD1 (NM_004463.2,1447-1465).
ccccagagccagtcatgtt

SEQ ID NO: 156802 - DNA, 19 bp, Homo sapiens
  siRNA target sequence for FGD1 (NM_004463.2,1575-1593).
cgggacagcggcattgata

SEQ ID NO: 156803 - DNA, 19 bp, Homo sapiens
  siRNA target sequence for FGD1 (NM_004463.2,1986-2004).
gtccacggcatcttctcta

SEQ ID NO: 156804 - DNA, 19 bp, Homo sapiens
  siRNA target sequence for FGD1 (NM_004463.2,1989-2007).
cacggcatcttctctaaca

SEQ ID NO: 156805 - DNA, 19 bp, Homo sapiens
  siRNA target sequence for FGD1 (NM_004463.2,2190-2208).
gagcgctccacccagttta

SEQ ID NO: 156806 - DNA, 19 bp, Homo sapiens
  siRNA target sequence for FGD1 (NM_004463.2,2192-2210).
gcgctccacccagtttaaa

SEQ ID NO: 156807 - DNA, 19 bp, Homo sapiens
  siRNA target sequence for FGD1 (NM_004463.2,2194-2212).
gctccacccagtttaaagt

SEQ ID NO: 156808 - DNA, 19 bp, Homo sapiens
  siRNA target sequence for FGD1 (NM_004463.2,2197-2215).
ccacccagtttaaagtcat

SEQ ID NO: 156809 - DNA, 19 bp, Homo sapiens
  siRNA target sequence for FGD1 (NM_004463.2,2242-2260).
cctgtggcaacctgacatt

SEQ ID NO: 156810 - DNA, 19 bp, Homo sapiens
  siRNA target sequence for FGD1 (NM_004463.2,2313-2331).
ctcaaggactatctgttaa

SEQ ID NO: 156811 - DNA, 19 bp, Homo sapiens
  siRNA target sequence for FGD1 (NM_004463.2,2357-2375).
caaggatgcccaaaagtct

SEQ ID NO: 156812 - DNA, 19 bp, Homo sapiens
  siRNA target sequence for FGD1 (NM_004463.2,2559-2577).
gaccgatacctcatactat

SEQ ID NO: 156813 - DNA, 19 bp, Homo sapiens
  siRNA target sequence for FGD1 (NM_004463.2,2562-2580).
cgatacctcatactattca

SEQ ID NO: 156814 - DNA, 19 bp, Homo sapiens
  siRNA target sequence for FGD1 (NM_004463.2,2563-2581).
gatacctcatactattcaa

SEQ ID NO: 156815 - DNA, 19 bp, Homo sapiens
  siRNA target sequence for FGD1 (NM_004463.2,2636-2654).
cgtgcgggcacgcattgat

SEQ ID NO: 156816 - DNA, 19 bp, Homo sapiens
  siRNA target sequence for FGD1 (NM_004463.2,2639-2657).
gcgggcacgcattgatgta

SEQ ID NO: 156817 - DNA, 19 bp, Homo sapiens
  siRNA target sequence for FGD1 (NM_004463.2,2641-2659).
gggcacgcattgatgtaga

SEQ ID NO: 156818 - DNA, 19 bp, Homo sapiens
  siRNA target sequence for FGD1 (NM_004463.2,2642-2660).
ggcacgcattgatgtagat

SEQ ID NO: 156819 - DNA, 19 bp, Homo sapiens
  siRNA target sequence for FGD1 (NM_004463.2,2811-2829).
cagacgctggagactttca

SEQ ID NO: 156820 - DNA, 19 bp, Homo sapiens
  siRNA target sequence for FGD1 (NM_004463.2,2912-2930).
gcccatccgggaaaaggaa

SEQ ID NO: 156821 - DNA, 19 bp, Homo sapiens
  siRNA target sequence for FGD1 (NM_004463.2,2952-2970).
caggagcccttcaattcta

SEQ ID NO: 156822 - DNA, 19 bp, Homo sapiens
  siRNA target sequence for FGD1 (NM_004463.2,3073-3091).
gtgtgtgcactgattgcta

SEQ ID NO: 156823 - DNA, 19 bp, Homo sapiens
  siRNA target sequence for FGD1 (NM_004463.2,3259-3277).
ggttcgtggtccctgaaaa

SEQ ID NO: 156824 - DNA, 19 bp, Homo sapiens
  siRNA target sequence for FGD1 (NM_004463.2,3260-3278).
gttcgtggtccctgaaaat

SEQ ID NO: 156825 - DNA, 19 bp, Homo sapiens
  siRNA target sequence for FGD1 (NM_004463.2,3279-3297).
gaacccttggtgctgtata

SEQ ID NO: 156826 - DNA, 19 bp, Homo sapiens
  siRNA target sequence for FGD1 (NM_004463.2,3283-3301).
ccttggtgctgtatatcta

SEQ ID NO: 156827 - DNA, 19 bp, Homo sapiens
  siRNA target sequence for FGD1 (NM_004463.2,3391-3409).
gaaggcatgtcttcaagat

SEQ ID NO: 156828 - DNA, 19 bp, Homo sapiens
  siRNA target sequence for FGD2 (NM_173558.2,900-918).
ggaaccagtgcagagaatt

SEQ ID NO: 156829 - DNA, 19 bp, Homo sapiens
  siRNA target sequence for FGD2 (NM_173558.2,1094-1112).
gcctcgaggacgacatagt

SEQ ID NO: 156830 - DNA, 19 bp, Homo sapiens
  siRNA target sequence for FGD2 (NM_173558.2,1095-1113).
cctcgaggacgacatagta

SEQ ID NO: 156831 - DNA, 19 bp, Homo sapiens
  siRNA target sequence for FGD2 (NM_173558.2,1177-1195).
cccatggagcgctaccttt

SEQ ID NO: 156832 - DNA, 19 bp, Homo sapiens
  siRNA target sequence for FGD2 (NM_173558.2,1178-1196).
ccatggagcgctacctttt

SEQ ID NO: 156833 - DNA, 19 bp, Homo sapiens
  siRNA target sequence for FGD2 (NM_173558.2,1415-1433).
cagccattgaccaaatcga

SEQ ID NO: 156834 - DNA, 19 bp, Homo sapiens
  siRNA target sequence for FGD2 (NM_173558.2,1892-1910).
ccctcgtgctctatgtcta

SEQ ID NO: 156835 - DNA, 19 bp, Homo sapiens
  siRNA target sequence for FGD2 (NM_173558.2,1893-1911).
cctcgtgctctatgtctat

SEQ ID NO: 156836 - DNA, 19 bp, Homo sapiens
  siRNA target sequence for FGD3 (NM_033086.1,623-641).
ggacggctctccagacata

SEQ ID NO: 156837 - DNA, 19 bp, Homo sapiens
  siRNA target sequence for FGD3 (NM_033086.1,654-672).
gagctgagtggtagcttaa

SEQ ID NO: 156838 - DNA, 19 bp, Homo sapiens
  siRNA target sequence for FGD3 (NM_033086.1,715-733).
gtgtggctggagagaactt

SEQ ID NO: 156839 - DNA, 19 bp, Homo sapiens
  siRNA target sequence for FGD3 (NM_033086.1,1135-1153).
cggaggagtgggacacaaa

SEQ ID NO: 156840 - DNA, 19 bp, Homo sapiens
  siRNA target sequence for FGD3 (NM_033086.1,1259-1277).
ccagcgctccccactgttt

SEQ ID NO: 156841 - DNA, 19 bp, Homo sapiens
  siRNA target sequence for FGD3 (NM_033086.1,1262-1280).
gcgctccccactgtttaaa

SEQ ID NO: 156842 - DNA, 19 bp, Homo sapiens
  siRNA target sequence for FGD3 (NM_033086.1,1587-1605).
ggccaaatccagaaactgt

SEQ ID NO: 156843 - DNA, 19 bp, Homo sapiens
  siRNA target sequence for FGD3 (NM_033086.1,1757-1775).
gccaaacacagcacataca

SEQ ID NO: 156844 - DNA, 19 bp, Homo sapiens
  siRNA target sequence for FGD3 (NM_033086.1,2020-2038).
ggctcgagcccagaaaact

SEQ ID NO: 156845 - DNA, 19 bp, Homo sapiens
  siRNA target sequence for FGD3 (NM_033086.1,2196-2214).
cgtgtctgcagagattgtt

SEQ ID NO: 156846 - DNA, 19 bp, Homo sapiens
  siRNA target sequence for FGD3 (NM_033086.1,2197-2215).
gtgtctgcagagattgttt

SEQ ID NO: 156847 - DNA, 19 bp, Homo sapiens
  siRNA target sequence for FGD4 (NM_139241.1,447-465).
ctgcttcttgtgtctcaaa

SEQ ID NO: 156848 - DNA, 19 bp, Homo sapiens
  siRNA target sequence for FGD4 (NM_139241.1,506-524).
gaaggaggcagctcattat

SEQ ID NO: 156849 - DNA, 19 bp, Homo sapiens
  siRNA target sequence for FGD4 (NM_139241.1,603-621).
ccacacctcaacaaaaact

SEQ ID NO: 156850 - DNA, 19 bp, Homo sapiens
  siRNA target sequence for FGD4 (NM_139241.1,756-774).
gctcagatacttctattca

SEQ ID NO: 156851 - DNA, 19 bp, Homo sapiens
  siRNA target sequence for FGD4 (NM_139241.1,791-809).
cttgatacgcacatagtga

SEQ ID NO: 156852 - DNA, 19 bp, Homo sapiens
  siRNA target sequence for FGD4 (NM_139241.1,912-930).
cagtgctccccctagaaga

SEQ ID NO: 156853 - DNA, 19 bp, Homo sapiens
  siRNA target sequence for FGD4 (NM_139241.1,914-932).
gtgctccccctagaagaaa

SEQ ID NO: 156854 - DNA, 19 bp, Homo sapiens
  siRNA target sequence for FGD4 (NM_139241.1,916-934).
gctccccctagaagaaaga

SEQ ID NO: 156855 - DNA, 19 bp, Homo sapiens
  siRNA target sequence for FGD4 (NM_139241.1,955-973).
ggtacaagagagggaaaat

SEQ ID NO: 156856 - DNA, 19 bp, Homo sapiens
  siRNA target sequence for FGD4 (NM_139241.1,1055-1073).
gccaatgaacttttgctta

SEQ ID NO: 156857 - DNA, 19 bp, Homo sapiens
  siRNA target sequence for FGD4 (NM_139241.1,1069-1087).
gcttactgaaagagcttat

SEQ ID NO: 156858 - DNA, 19 bp, Homo sapiens
  siRNA target sequence for FGD4 (NM_139241.1,1093-1111).
ccgacttgacctcttagat

SEQ ID NO: 156859 - DNA, 19 bp, Homo sapiens
  siRNA target sequence for FGD4 (NM_139241.1,1095-1113).
gacttgacctcttagatca

SEQ ID NO: 156860 - DNA, 19 bp, Homo sapiens
  siRNA target sequence for FGD4 (NM_139241.1,1109-1127).
gatcaggtattttattgca

SEQ ID NO: 156861 - DNA, 19 bp, Homo sapiens
  siRNA target sequence for FGD4 (NM_139241.1,1260-1278).
gggaaactactcctagaat

SEQ ID NO: 156862 - DNA, 19 bp, Homo sapiens
  siRNA target sequence for FGD4 (NM_139241.1,1261-1279).
ggaaactactcctagaatt

SEQ ID NO: 156863 - DNA, 19 bp, Homo sapiens
  siRNA target sequence for FGD4 (NM_139241.1,1294-1312).
gaaattggcaccattcctt

SEQ ID NO: 156864 - DNA, 19 bp, Homo sapiens
  siRNA target sequence for FGD4 (NM_139241.1,1323-1341).
gagaatatgtgaaaggatt

SEQ ID NO: 156865 - DNA, 19 bp, Homo sapiens
  siRNA target sequence for FGD4 (NM_139241.1,1379-1397).
cgtattccccagttcaaat

SEQ ID NO: 156866 - DNA, 19 bp, Homo sapiens
  siRNA target sequence for FGD4 (NM_139241.1,1475-1493).
cggattccccggtatgaga

SEQ ID NO: 156867 - DNA, 19 bp, Homo sapiens
  siRNA target sequence for FGD4 (NM_139241.1,1476-1494).
ggattccccggtatgagat

SEQ ID NO: 156868 - DNA, 19 bp, Homo sapiens
  siRNA target sequence for FGD4 (NM_139241.1,1485-1503).
ggtatgagatgctccttaa

SEQ ID NO: 156869 - DNA, 19 bp, Homo sapiens
  siRNA target sequence for FGD4 (NM_139241.1,1495-1513).
gctccttaaggactatcta

SEQ ID NO: 156870 - DNA, 19 bp, Homo sapiens
  siRNA target sequence for FGD4 (NM_139241.1,1496-1514).
ctccttaaggactatctaa

SEQ ID NO: 156871 - DNA, 19 bp, Homo sapiens
  siRNA target sequence for FGD4 (NM_139241.1,1537-1555).
ggactggaatgatgctaaa

SEQ ID NO: 156872 - DNA, 19 bp, Homo sapiens
  siRNA target sequence for FGD4 (NM_139241.1,1588-1606).
ccattctaatagtgcaata

SEQ ID NO: 156873 - DNA, 19 bp, Homo sapiens
  siRNA target sequence for FGD4 (NM_139241.1,1589-1607).
cattctaatagtgcaataa

SEQ ID NO: 156874 - DNA, 19 bp, Homo sapiens
  siRNA target sequence for FGD4 (NM_139241.1,1627-1645).
gaaactcttagagatttat

SEQ ID NO: 156875 - DNA, 19 bp, Homo sapiens
  siRNA target sequence for FGD4 (NM_139241.1,1718-1736).
ctagctgctcggaacactt

SEQ ID NO: 156876 - DNA, 19 bp, Homo sapiens
  siRNA target sequence for FGD4 (NM_139241.1,1833-1851).
gggttggcattgatggaat

SEQ ID NO: 156877 - DNA, 19 bp, Homo sapiens
  siRNA target sequence for FGD4 (NM_139241.1,1838-1856).
ggcattgatggaatgaaaa

SEQ ID NO: 156878 - DNA, 19 bp, Homo sapiens
  siRNA target sequence for FGD4 (NM_139241.1,1932-1950).
ccagttctgcgcaagacaa

SEQ ID NO: 156879 - DNA, 19 bp, Homo sapiens
  siRNA target sequence for FGD4 (NM_139241.1,1933-1951).
cagttctgcgcaagacaaa

SEQ ID NO: 156880 - DNA, 19 bp, Homo sapiens
  siRNA target sequence for FGD4 (NM_139241.1,2085-2103).
caagatggatccgagataa

SEQ ID NO: 156881 - DNA, 19 bp, Homo sapiens
  siRNA target sequence for FGD4 (NM_139241.1,2088-2106).
gatggatccgagataatga

SEQ ID NO: 156882 - DNA, 19 bp, Homo sapiens
  siRNA target sequence for FGD4 (NM_139241.1,2091-2109).
ggatccgagataatgaagt

SEQ ID NO: 156883 - DNA, 19 bp, Homo sapiens
  siRNA target sequence for FGD4 (NM_139241.1,2105-2123).
gaagtgacaatgtgtatga

SEQ ID NO: 156884 - DNA, 19 bp, Homo sapiens
  siRNA target sequence for FGD4 (NM_139241.1,2169-2187).
gtcgagcatgtggatatgt

SEQ ID NO: 156885 - DNA, 19 bp, Homo sapiens
  siRNA target sequence for FGD4 (NM_139241.1,2206-2224).
cgactacaaagctcaactt

SEQ ID NO: 156886 - DNA, 19 bp, Homo sapiens
  siRNA target sequence for FGD4 (NM_139241.1,2261-2279).
gactgttatcaaatcataa

SEQ ID NO: 156887 - DNA, 19 bp, Homo sapiens
  siRNA target sequence for FGD4 (NM_139241.1,2326-2344).
gattgaatcagcagaagta

SEQ ID NO: 156888 - DNA, 19 bp, Homo sapiens
  siRNA target sequence for FGD4 (NM_139241.1,2435-2453).
cctcttgtgctgtacatgt

SEQ ID NO: 156889 - DNA, 19 bp, Homo sapiens
  siRNA target sequence for FGD4 (NM_139241.1,2436-2454).
ctcttgtgctgtacatgta

SEQ ID NO: 156890 - DNA, 19 bp, Homo sapiens
  siRNA target sequence for FGD4 (NM_139241.1,2502-2520).
gctatgtggtggatgaaat

SEQ ID NO: 156891 - DNA, 19 bp, Homo sapiens
  siRNA target sequence for FGD4 (NM_139241.1,2620-2638).
gaaagtcatccttttagct

SEQ ID NO: 156892 - DNA, 19 bp, Homo sapiens
  siRNA target sequence for FGD4 (NM_139241.1,2650-2668).
gacaccaggtggtccaaat

SEQ ID NO: 156893 - DNA, 19 bp, Homo sapiens
  siRNA target sequence for FLJ10759 (NM_018207.1,556-574).
gcgcttctctgcttcttct

SEQ ID NO: 156894 - DNA, 19 bp, Homo sapiens
  siRNA target sequence for FLJ10759 (NM_018207.1,860-878).
ccgacatcgagcagaaagt

SEQ ID NO: 156895 - DNA, 19 bp, Homo sapiens
  siRNA target sequence for FLJ10759 (NM_018207.1,1017-1035).
gaccaacctcacatatgaa

SEQ ID NO: 156896 - DNA, 19 bp, Homo sapiens
  siRNA target sequence for FLJ10759 (NM_018207.1,1258-1276).
ggttctgaagccttcagta

SEQ ID NO: 156897 - DNA, 19 bp, Homo sapiens
  siRNA target sequence for FLJ10759 (NM_018207.1,1574-1592).
gcaagctctgctcttactt

SEQ ID NO: 156898 - DNA, 19 bp, Homo sapiens
  siRNA target sequence for FLJ23049 (NM_024687.1,175-193).
cacaagagcaactttttaa

SEQ ID NO: 156899 - DNA, 19 bp, Homo sapiens
  siRNA target sequence for FLJ23049 (NM_024687.1,366-384).
gtcgaactggatgatactt

SEQ ID NO: 156900 - DNA, 19 bp, Homo sapiens
  siRNA target sequence for FLJ23049 (NM_024687.1,368-386).
cgaactggatgatacttat

SEQ ID NO: 156901 - DNA, 19 bp, Homo sapiens
  siRNA target sequence for FLJ23049 (NM_024687.1,471-489).
catgattgtcagaagaata

SEQ ID NO: 156902 - DNA, 19 bp, Homo sapiens
  siRNA target sequence for FLJ23049 (NM_024687.1,474-492).
gattgtcagaagaatagct

SEQ ID NO: 156903 - DNA, 19 bp, Homo sapiens
  siRNA target sequence for FLJ23049 (NM_024687.1,508-526).
gcatccatcaacatcatgt

SEQ ID NO: 156904 - DNA, 19 bp, Homo sapiens
  siRNA target sequence for FLJ23049 (NM_024687.1,509-527).
catccatcaacatcatgtt

SEQ ID NO: 156905 - DNA, 19 bp, Homo sapiens
  siRNA target sequence for FLJ23049 (NM_024687.1,516-534).
caacatcatgttttcgata

SEQ ID NO: 156906 - DNA, 19 bp, Homo sapiens
  siRNA target sequence for FLJ23049 (NM_024687.1,568-586).
gaaacagctctacttatta

SEQ ID NO: 156907 - DNA, 19 bp, Homo sapiens
  siRNA target sequence for FLJ23049 (NM_024687.1,577-595).
ctacttattataaagataa

SEQ ID NO: 156908 - DNA, 19 bp, Homo sapiens
  siRNA target sequence for FLJ23049 (NM_024687.1,635-653).
cgtggatcctgatgtgtat

SEQ ID NO: 156909 - DNA, 19 bp, Homo sapiens
  siRNA target sequence for FLJ23049 (NM_024687.1,638-656).
ggatcctgatgtgtattct

SEQ ID NO: 156910 - DNA, 19 bp, Homo sapiens
  siRNA target sequence for FLJ23049 (NM_024687.1,776-794).
cactttgctaggtagagat

SEQ ID NO: 156911 - DNA, 19 bp, Homo sapiens
  siRNA target sequence for FLJ23049 (NM_024687.1,778-796).
ctttgctaggtagagattt

SEQ ID NO: 156912 - DNA, 19 bp, Homo sapiens
  siRNA target sequence for FLJ23049 (NM_024687.1,782-800).
gctaggtagagatttagaa

SEQ ID NO: 156913 - DNA, 19 bp, Homo sapiens
  siRNA target sequence for FLJ23049 (NM_024687.1,804-822).
gctcccattgaggagaaat

SEQ ID NO: 156914 - DNA, 19 bp, Homo sapiens
  siRNA target sequence for FLJ23049 (NM_024687.1,848-866).
ggaattgagcaatctgtat

SEQ ID NO: 156915 - DNA, 19 bp, Homo sapiens
  siRNA target sequence for FLJ23049 (NM_024687.1,849-867).
gaattgagcaatctgtata

SEQ ID NO: 156916 - DNA, 19 bp, Homo sapiens
  siRNA target sequence for FLJ23049 (NM_024687.1,863-881).
gtataagaggccaagcttt

SEQ ID NO: 156917 - DNA, 19 bp, Homo sapiens
  siRNA target sequence for FLJ23049 (NM_024687.1,869-887).
gaggccaagctttgaagaa

SEQ ID NO: 156918 - DNA, 19 bp, Homo sapiens
  siRNA target sequence for FLJ23049 (NM_024687.1,872-890).
gccaagctttgaagaatca

SEQ ID NO: 156919 - DNA, 19 bp, Homo sapiens
  siRNA target sequence for FLJ23049 (NM_024687.1,873-891).
ccaagctttgaagaatcaa

SEQ ID NO: 156920 - DNA, 19 bp, Homo sapiens
  siRNA target sequence for FLJ23049 (NM_024687.1,902-920).
gtcatcactgttgttacaa

SEQ ID NO: 156921 - DNA, 19 bp, Homo sapiens
  siRNA target sequence for FLJ23049 (NM_024687.1,904-922).
catcactgttgttacaaga

SEQ ID NO: 156922 - DNA, 19 bp, Homo sapiens
  siRNA target sequence for FLJ23049 (NM_024687.1,934-952).
gaagtaagcctataacaaa

SEQ ID NO: 156923 - DNA, 19 bp, Homo sapiens
  siRNA target sequence for FLJ23049 (NM_024687.1,937-955).
gtaagcctataacaaaaca

SEQ ID NO: 156924 - DNA, 19 bp, Homo sapiens
  siRNA target sequence for FLJ23049 (NM_024687.1,1014-1032).
ccttctcatcgtttagaat

SEQ ID NO: 156925 - DNA, 19 bp, Homo sapiens
  siRNA target sequence for FLJ23049 (NM_024687.1,1018-1036).
ctcatcgtttagaatgcaa

SEQ ID NO: 156926 - DNA, 19 bp, Homo sapiens
  siRNA target sequence for FLJ23049 (NM_024687.1,1023-1041).
cgtttagaatgcaacaatt

SEQ ID NO: 156927 - DNA, 19 bp, Homo sapiens
  siRNA target sequence for FLJ23049 (NM_024687.1,1078-1096).
ggattccagaccatagctt

SEQ ID NO: 156928 - DNA, 19 bp, Homo sapiens
  siRNA target sequence for FLJ23049 (NM_024687.1,1086-1104).
gaccatagcttaagtgaat

SEQ ID NO: 156929 - DNA, 19 bp, Homo sapiens
  siRNA target sequence for FLJ23049 (NM_024687.1,1108-1126).
ctgataatgcaattgtctt

SEQ ID NO: 156930 - DNA, 19 bp, Homo sapiens
  siRNA target sequence for FLJ23049 (NM_024687.1,1262-1280).
ctctcatcctcgatcaaga

SEQ ID NO: 156931 - DNA, 19 bp, Homo sapiens
  siRNA target sequence for FLJ23049 (NM_024687.1,1303-1321).
ctagagctgcttctgaaat

SEQ ID NO: 156932 - DNA, 19 bp, Homo sapiens
  siRNA target sequence for FLJ23049 (NM_024687.1,1355-1373).
gaatgagctttccttagat

SEQ ID NO: 156933 - DNA, 19 bp, Homo sapiens
  siRNA target sequence for FLJ23049 (NM_024687.1,1374-1392).
gacactactgatcaacata

SEQ ID NO: 156934 - DNA, 19 bp, Homo sapiens
  siRNA target sequence for FLJ23049 (NM_024687.1,1381-1399).
ctgatcaacatactttaga

SEQ ID NO: 156935 - DNA, 19 bp, Homo sapiens
  siRNA target sequence for FLJ23049 (NM_024687.1,1490-1508).
cagcagccaatcactgaat

SEQ ID NO: 156936 - DNA, 19 bp, Homo sapiens
  siRNA target sequence for FLJ23049 (NM_024687.1,1492-1510).
gcagccaatcactgaatat

SEQ ID NO: 156937 - DNA, 19 bp, Homo sapiens
  siRNA target sequence for FLJ23049 (NM_024687.1,1493-1511).
cagccaatcactgaatata

SEQ ID NO: 156938 - DNA, 19 bp, Homo sapiens
  siRNA target sequence for FLJ23049 (NM_024687.1,1496-1514).
ccaatcactgaatataagt

SEQ ID NO: 156939 - DNA, 19 bp, Homo sapiens
  siRNA target sequence for FLJ23049 (NM_024687.1,1582-1600).
gttctggaagagataccaa

SEQ ID NO: 156940 - DNA, 19 bp, Homo sapiens
  siRNA target sequence for FLJ23049 (NM_024687.1,1683-1701).
ctaccgtggtcaaagagta

SEQ ID NO: 156941 - DNA, 19 bp, Homo sapiens
  siRNA target sequence for FLJ32919 (NM_144588.3,482-500).
gtaggtgccctgatgattt

SEQ ID NO: 156942 - DNA, 19 bp, Homo sapiens
  siRNA target sequence for FLJ32919 (NM_144588.3,486-504).
gtgccctgatgatttcagt

SEQ ID NO: 156943 - DNA, 19 bp, Homo sapiens
  siRNA target sequence for FLJ32919 (NM_144588.3,562-580).
gctgatgcggaggaagtat

SEQ ID NO: 156944 - DNA, 19 bp, Homo sapiens
  siRNA target sequence for FLJ32919 (NM_144588.3,565-583).
gatgcggaggaagtatcat

SEQ ID NO: 156945 - DNA, 19 bp, Homo sapiens
  siRNA target sequence for FLJ32919 (NM_144588.3,641-659).
gaggtgaagagcttcttga

SEQ ID NO: 156946 - DNA, 19 bp, Homo sapiens
  siRNA target sequence for FLJ32919 (NM_144588.3,809-827).
gttctcacccttttaaaca

SEQ ID NO: 156947 - DNA, 19 bp, Homo sapiens
  siRNA target sequence for FLJ32919 (NM_144588.3,1043-1061).
gagccagatgaagagttta

SEQ ID NO: 156948 - DNA, 19 bp, Homo sapiens
  siRNA target sequence for FLJ32919 (NM_144588.3,1153-1171).
cgggttcctgagcaagaat

SEQ ID NO: 156949 - DNA, 19 bp, Homo sapiens
  siRNA target sequence for FLJ32919 (NM_144588.3,1220-1238).
cgctaccccaccaacaact

SEQ ID NO: 156950 - DNA, 19 bp, Homo sapiens
  siRNA target sequence for FLJ32919 (NM_144588.3,1221-1239).
gctaccccaccaacaactt

SEQ ID NO: 156951 - DNA, 19 bp, Homo sapiens
  siRNA target sequence for FLJ40722 (NM_173678.1,970-988).
ggggtgaacacaaatctaa

SEQ ID NO: 156952 - DNA, 19 bp, Homo sapiens
  siRNA target sequence for FLJ40722 (NM_173678.1,1196-1214).
ctggcttccctggtaacat

SEQ ID NO: 156953 - DNA, 19 bp, Homo sapiens
  siRNA target sequence for FLJ40722 (NM_173678.1,1198-1216).
ggcttccctggtaacatca

SEQ ID NO: 156954 - DNA, 19 bp, Homo sapiens
  siRNA target sequence for FLJ40722 (NM_173678.1,1309-1327).
cgcaaggcgctctctcaat

SEQ ID NO: 156955 - DNA, 19 bp, Homo sapiens
  siRNA target sequence for FLJ40722 (NM_173678.1,1310-1328).
gcaaggcgctctctcaatt

SEQ ID NO: 156956 - DNA, 19 bp, Homo sapiens
  siRNA target sequence for FLJ40722 (NM_173678.1,1322-1340).
ctcaattccaggctatact

SEQ ID NO: 156957 - DNA, 19 bp, Homo sapiens
  siRNA target sequence for FLJ40722 (NM_173678.1,1324-1342).
caattccaggctatactga

SEQ ID NO: 156958 - DNA, 19 bp, Homo sapiens
  siRNA target sequence for FLJ40722 (NM_173678.1,1377-1395).
ggcaaagttgagagttgat

SEQ ID NO: 156959 - DNA, 19 bp, Homo sapiens
  siRNA target sequence for FLJ40722 (NM_173678.1,1425-1443).
gggggtccctgcttacata

SEQ ID NO: 156960 - DNA, 19 bp, Homo sapiens
  siRNA target sequence for FLJ40722 (NM_173678.1,1426-1444).
ggggtccctgcttacatat

SEQ ID NO: 156961 - DNA, 19 bp, Homo sapiens
  siRNA target sequence for FLJ40722 (NM_173678.1,1655-1673).
ccgtggagatcaatggaat

SEQ ID NO: 156962 - DNA, 19 bp, Homo sapiens
  siRNA target sequence for FLJ40722 (NM_173678.1,1769-1787).
ctggcctgagggtacagat

SEQ ID NO: 156963 - DNA, 19 bp, Homo sapiens
  siRNA target sequence for FLJ40722 (NM_173678.1,2569-2587).
caggtactgagcagaaatt

SEQ ID NO: 156964 - DNA, 19 bp, Homo sapiens
  siRNA target sequence for FLJ40722 (NM_173678.1,2571-2589).
ggtactgagcagaaattct

SEQ ID NO: 156965 - DNA, 19 bp, Homo sapiens
  siRNA target sequence for FYCO1 (NM_024513.1,258-276).
ctgtgacagaactaagcaa

SEQ ID NO: 156966 - DNA, 19 bp, Homo sapiens
  siRNA target sequence for FYCO1 (NM_024513.1,315-333).
gcaccagcttgcataaatt

SEQ ID NO: 156967 - DNA, 19 bp, Homo sapiens
  siRNA target sequence for FYCO1 (NM_024513.1,319-337).
cagcttgcataaattttct

SEQ ID NO: 156968 - DNA, 19 bp, Homo sapiens
  siRNA target sequence for FYCO1 (NM_024513.1,349-367).
gtatctcctgcaatttgat

SEQ ID NO: 156969 - DNA, 19 bp, Homo sapiens
  siRNA target sequence for FYCO1 (NM_024513.1,589-607).
gaccagtgactggtactat

SEQ ID NO: 156970 - DNA, 19 bp, Homo sapiens
  siRNA target sequence for FYCO1 (NM_024513.1,693-711).
cgtcgaggggctttgactt

SEQ ID NO: 156971 - DNA, 19 bp, Homo sapiens
  siRNA target sequence for FYCO1 (NM_024513.1,1992-2010).
cacagttagacgataccaa

SEQ ID NO: 156972 - DNA, 19 bp, Homo sapiens
  siRNA target sequence for FYCO1 (NM_024513.1,2121-2139).
ccctgcaggccgattacca

SEQ ID NO: 156973 - DNA, 19 bp, Homo sapiens
  siRNA target sequence for FYCO1 (NM_024513.1,2470-2488).
cccacccactgacaatgaa

SEQ ID NO: 156974 - DNA, 19 bp, Homo sapiens
  siRNA target sequence for FYCO1 (NM_024513.1,2696-2714).
cagaatgaagcccttaaca

SEQ ID NO: 156975 - DNA, 19 bp, Homo sapiens
  siRNA target sequence for FYCO1 (NM_024513.1,2828-2846).
ctgtcccaggccaaatgca

SEQ ID NO: 156976 - DNA, 19 bp, Homo sapiens
  siRNA target sequence for FYCO1 (NM_024513.1,2937-2955).
gcgcactgaccgtggaaaa

SEQ ID NO: 156977 - DNA, 19 bp, Homo sapiens
  siRNA target sequence for FYCO1 (NM_024513.1,2940-2958).
cactgaccgtggaaaagga

SEQ ID NO: 156978 - DNA, 19 bp, Homo sapiens
  siRNA target sequence for FYCO1 (NM_024513.1,3236-3254).
gactaccagagcagactta

SEQ ID NO: 156979 - DNA, 19 bp, Homo sapiens
  siRNA target sequence for FYCO1 (NM_024513.1,3449-3467).
ctgcgtgaagacctagaaa

SEQ ID NO: 156980 - DNA, 19 bp, Homo sapiens
  siRNA target sequence for FYCO1 (NM_024513.1,3505-3523).
ccaagagtattacaacaaa

SEQ ID NO: 156981 - DNA, 19 bp, Homo sapiens
  siRNA target sequence for FYCO1 (NM_024513.1,3587-3605).
ctcaacagaaccaagaagt

SEQ ID NO: 156982 - DNA, 19 bp, Homo sapiens
  siRNA target sequence for FYCO1 (NM_024513.1,3792-3810).
gtggccgcatcttctgtta

SEQ ID NO: 156983 - DNA, 19 bp, Homo sapiens
  siRNA target sequence for FYCO1 (NM_024513.1,3794-3812).
ggccgcatcttctgttact

SEQ ID NO: 156984 - DNA, 19 bp, Homo sapiens
  siRNA target sequence for FYCO1 (NM_024513.1,3795-3813).
gccgcatcttctgttacta

SEQ ID NO: 156985 - DNA, 19 bp, Homo sapiens
  siRNA target sequence for FYCO1 (NM_024513.1,3797-3815).
cgcatcttctgttactact

SEQ ID NO: 156986 - DNA, 19 bp, Homo sapiens
  siRNA target sequence for FYCO1 (NM_024513.1,3989-4007).
ggaggccaaggagcaaata

SEQ ID NO: 156987 - DNA, 19 bp, Homo sapiens
  siRNA target sequence for FYCO1 (NM_024513.1,4023-4041).
cggacgacgctgtgtttga

SEQ ID NO: 156988 - DNA, 19 bp, Homo sapiens
  siRNA target sequence for FYCO1 (NM_024513.1,4025-4043).
gacgacgctgtgtttgata

SEQ ID NO: 156989 - DNA, 19 bp, Homo sapiens
  siRNA target sequence for FYCO1 (NM_024513.1,4028-4046).
gacgctgtgtttgatatca

SEQ ID NO: 156990 - DNA, 19 bp, Homo sapiens
  siRNA target sequence for FYCO1 (NM_024513.1,4133-4151).
gcggctgaacaggatacta

SEQ ID NO: 156991 - DNA, 19 bp, Homo sapiens
  siRNA target sequence for FYCO1 (NM_024513.1,4136-4154).
gctgaacaggatactacat

SEQ ID NO: 156992 - DNA, 19 bp, Homo sapiens
  siRNA target sequence for FYCO1 (NM_024513.1,4139-4157).
gaacaggatactacatcaa

SEQ ID NO: 156993 - DNA, 19 bp, Homo sapiens
  siRNA target sequence for FYCO1 (NM_024513.1,4230-4248).
gagaactgatgatcaaagt

SEQ ID NO: 156994 - DNA, 19 bp, Homo sapiens
  siRNA target sequence for FYCO1 (NM_024513.1,4431-4449).
caccgctggatcagtgtaa

SEQ ID NO: 156995 - DNA, 19 bp, Homo sapiens
  siRNA target sequence for FYCO1 (NM_024513.1,4524-4542).
gcatctacatgctcatctt

SEQ ID NO: 156996 - DNA, 19 bp, Homo sapiens
  siRNA target sequence for FYCO1 (NM_024513.1,4557-4575).
caaggtttgtctctaaaaa

SEQ ID NO: 156997 - DNA, 19 bp, Homo sapiens
  siRNA target sequence for FYCO1 (NM_024513.1,4609-4627).
gatctacgatggaagtgat

SEQ ID NO: 156998 - DNA, 19 bp, Homo sapiens
  siRNA target sequence for GDA (NM_004293.1,201-219).
gagcgacagcggcaaaata

SEQ ID NO: 156999 - DNA, 19 bp, Homo sapiens
  siRNA target sequence for GDA (NM_004293.1,205-223).
gacagcggcaaaatagtgt

SEQ ID NO: 157000 - DNA, 19 bp, Homo sapiens
  siRNA target sequence for GDA (NM_004293.1,207-225).
cagcggcaaaatagtgttt

SEQ ID NO: 157001 - DNA, 19 bp, Homo sapiens
  siRNA target sequence for GDA (NM_004293.1,209-227).
gcggcaaaatagtgttttt

SEQ ID NO: 157002 - DNA, 19 bp, Homo sapiens
  siRNA target sequence for GDA (NM_004293.1,269-287).
gcttcaagccgtgtgaaat

SEQ ID NO: 157003 - DNA, 19 bp, Homo sapiens
  siRNA target sequence for GDA (NM_004293.1,270-288).
cttcaagccgtgtgaaata

SEQ ID NO: 157004 - DNA, 19 bp, Homo sapiens
  siRNA target sequence for GDA (NM_004293.1,299-317).
gccaccatgagttcttcat

SEQ ID NO: 157005 - DNA, 19 bp, Homo sapiens
  siRNA target sequence for GDA (NM_004293.1,318-336).
gcctgggctggttgataca

SEQ ID NO: 157006 - DNA, 19 bp, Homo sapiens
  siRNA target sequence for GDA (NM_004293.1,360-378).
ctttgctggaagtagcata

SEQ ID NO: 157007 - DNA, 19 bp, Homo sapiens
  siRNA target sequence for GDA (NM_004293.1,398-416).
ggctgaccaagtacacatt

SEQ ID NO: 157008 - DNA, 19 bp, Homo sapiens
  siRNA target sequence for GDA (NM_004293.1,444-462).
cgactttgcagaagaagta

SEQ ID NO: 157009 - DNA, 19 bp, Homo sapiens
  siRNA target sequence for GDA (NM_004293.1,472-490).
gttgtcaggagaacactaa

SEQ ID NO: 157010 - DNA, 19 bp, Homo sapiens
  siRNA target sequence for GDA (NM_004293.1,549-567).
ccttgccgacattacagat

SEQ ID NO: 157011 - DNA, 19 bp, Homo sapiens
  siRNA target sequence for GDA (NM_004293.1,550-568).
cttgccgacattacagata

SEQ ID NO: 157012 - DNA, 19 bp, Homo sapiens
  siRNA target sequence for GDA (NM_004293.1,553-571).
gccgacattacagataaat

SEQ ID NO: 157013 - DNA, 19 bp, Homo sapiens
  siRNA target sequence for GDA (NM_004293.1,554-572).
ccgacattacagataaatt

SEQ ID NO: 157014 - DNA, 19 bp, Homo sapiens
  siRNA target sequence for GDA (NM_004293.1,616-634).
gacacttttccagaataca

SEQ ID NO: 157015 - DNA, 19 bp, Homo sapiens
  siRNA target sequence for GDA (NM_004293.1,687-705).
gctccaaaagaactattct

SEQ ID NO: 157016 - DNA, 19 bp, Homo sapiens
  siRNA target sequence for GDA (NM_004293.1,688-706).
ctccaaaagaactattcta

SEQ ID NO: 157017 - DNA, 19 bp, Homo sapiens
  siRNA target sequence for GDA (NM_004293.1,717-735).
catagtgacaccacgtttt

SEQ ID NO: 157018 - DNA, 19 bp, Homo sapiens
  siRNA target sequence for GDA (NM_004293.1,762-780).
gggtgaactgggcaacatt

SEQ ID NO: 157019 - DNA, 19 bp, Homo sapiens
  siRNA target sequence for GDA (NM_004293.1,788-806).
cccgtgatttgcacattca

SEQ ID NO: 157020 - DNA, 19 bp, Homo sapiens
  siRNA target sequence for GDA (NM_004293.1,790-808).
cgtgatttgcacattcaga

SEQ ID NO: 157021 - DNA, 19 bp, Homo sapiens
  siRNA target sequence for GDA (NM_004293.1,798-816).
gcacattcagagccatata

SEQ ID NO: 157022 - DNA, 19 bp, Homo sapiens
  siRNA target sequence for GDA (NM_004293.1,799-817).
cacattcagagccatataa

SEQ ID NO: 157023 - DNA, 19 bp, Homo sapiens
  siRNA target sequence for GDA (NM_004293.1,810-828).
ccatataagtgaaaatcgt

SEQ ID NO: 157024 - DNA, 19 bp, Homo sapiens
  siRNA target sequence for GDA (NM_004293.1,852-870).
cttataccccagttataaa

SEQ ID NO: 157025 - DNA, 19 bp, Homo sapiens
  siRNA target sequence for GDA (NM_004293.1,876-894).
cacatctgtgtatgataaa

SEQ ID NO: 157026 - DNA, 19 bp, Homo sapiens
  siRNA target sequence for GDA (NM_004293.1,946-964).
gcagaagaactgaacgtat

SEQ ID NO: 157027 - DNA, 19 bp, Homo sapiens
  siRNA target sequence for GDA (NM_004293.1,987-1005).
cgcacactgtcccaattct

SEQ ID NO: 157028 - DNA, 19 bp, Homo sapiens
  siRNA target sequence for GDA (NM_004293.1,989-1007).
cacactgtcccaattctaa

SEQ ID NO: 157029 - DNA, 19 bp, Homo sapiens
  siRNA target sequence for GDA (NM_004293.1,993-1011).
ctgtcccaattctaattta

SEQ ID NO: 157030 - DNA, 19 bp, Homo sapiens
  siRNA target sequence for GDA (NM_004293.1,1015-1033).
ctcagcagtggatttctaa

SEQ ID NO: 157031 - DNA, 19 bp, Homo sapiens
  siRNA target sequence for GDA (NM_004293.1,1086-1104).
ggctggtggctattcatat

SEQ ID NO: 157032 - DNA, 19 bp, Homo sapiens
  siRNA target sequence for GDA (NM_004293.1,1087-1105).
gctggtggctattcatatt

SEQ ID NO: 157033 - DNA, 19 bp, Homo sapiens
  siRNA target sequence for GDA (NM_004293.1,1091-1109).
gtggctattcatattccat

SEQ ID NO: 157034 - DNA, 19 bp, Homo sapiens
  siRNA target sequence for GDA (NM_004293.1,1134-1152).
gatggtttccaatatcctt

SEQ ID NO: 157035 - DNA, 19 bp, Homo sapiens
  siRNA target sequence for GDA (NM_004293.1,1197-1215).
cttcagactagctactctt

SEQ ID NO: 157036 - DNA, 19 bp, Homo sapiens
  siRNA target sequence for GDA (NM_004293.1,1368-1386).
ccagaagttcctctatcta

SEQ ID NO: 157037 - DNA, 19 bp, Homo sapiens
  siRNA target sequence for GDA (NM_004293.1,1377-1395).
cctctatctaggagatgat

SEQ ID NO: 157038 - DNA, 19 bp, Homo sapiens
  siRNA target sequence for GDA (NM_004293.1,1388-1406).
gagatgatcgaaatattga

SEQ ID NO: 157039 - DNA, 19 bp, Homo sapiens
  siRNA target sequence for GGT1 (NM_005265.1,640-658).
caacagcaccacacgaaaa

SEQ ID NO: 157040 - DNA, 19 bp, Homo sapiens
  siRNA target sequence for HGS (NM_004712.3,190-208).
gggacacacaagcaaaata

SEQ ID NO: 157041 - DNA, 19 bp, Homo sapiens
  siRNA target sequence for HGS (NM_004712.3,248-266).
cccacacgtcgccttgtat

SEQ ID NO: 157042 - DNA, 19 bp, Homo sapiens
  siRNA target sequence for HGS (NM_004712.3,282-300).
gaatctgtggtaaagaact

SEQ ID NO: 157043 - DNA, 19 bp, Homo sapiens
  siRNA target sequence for HGS (NM_004712.3,370-388).
gacaagtggaggtaaacgt

SEQ ID NO: 157044 - DNA, 19 bp, Homo sapiens
  siRNA target sequence for HGS (NM_004712.3,381-399).
gtaaacgtccgtaacaaga

SEQ ID NO: 157045 - DNA, 19 bp, Homo sapiens
  siRNA target sequence for HGS (NM_004712.3,435-453).
cggaacgagcccaagtaca

SEQ ID NO: 157046 - DNA, 19 bp, Homo sapiens
  siRNA target sequence for HGS (NM_004712.3,495-513).
cacgtctttccagaattca

SEQ ID NO: 157047 - DNA, 19 bp, Homo sapiens
  siRNA target sequence for HGS (NM_004712.3,497-515).
cgtctttccagaattcaaa

SEQ ID NO: 157048 - DNA, 19 bp, Homo sapiens
  siRNA target sequence for HGS (NM_004712.3,627-645).
gcgtgtgggcagatattct

SEQ ID NO: 157049 - DNA, 19 bp, Homo sapiens
  siRNA target sequence for HGS (NM_004712.3,629-647).
gtgtgggcagatattctgt

SEQ ID NO: 157050 - DNA, 19 bp, Homo sapiens
  siRNA target sequence for HGS (NM_004712.3,1050-1068).
gagctcgcacggtatctca

SEQ ID NO: 157051 - DNA, 19 bp, Homo sapiens
  siRNA target sequence for HGS (NM_004712.3,1335-1353).
gtgaaccgcatgaagagta

SEQ ID NO: 157052 - DNA, 19 bp, Homo sapiens
  siRNA target sequence for HGS (NM_004712.3,1460-1478).
cgagcgcaggctgtactat

SEQ ID NO: 157053 - DNA, 19 bp, Homo sapiens
  siRNA target sequence for HGS (NM_004712.3,1885-1903).
caatgcacggcgtgtacat

SEQ ID NO: 157054 - DNA, 19 bp, Homo sapiens
  siRNA target sequence for HGS (NM_004712.3,2190-2208).
ggctaccagccttacaaca

SEQ ID NO: 157055 - DNA, 19 bp, Homo sapiens
  siRNA target sequence for HGS (NM_004712.3,2191-2209).
gctaccagccttacaacat

SEQ ID NO: 157056 - DNA, 19 bp, Homo sapiens
  siRNA target sequence for HGS (NM_004712.3,2385-2403).
gaggcccagctcatttcat

SEQ ID NO: 157057 - DNA, 19 bp, Homo sapiens
  siRNA target sequence for HS3ST1 (NM_005114.1,567-585).
cggagcgcgtgctatctga

SEQ ID NO: 157058 - DNA, 19 bp, Homo sapiens
  siRNA target sequence for HS3ST1 (NM_005114.1,666-684).
ggctcaatgtggactacaa

SEQ ID NO: 157059 - DNA, 19 bp, Homo sapiens
  siRNA target sequence for HS3ST1 (NM_005114.1,845-863).
gcttcgaacttctacttta

SEQ ID NO: 157060 - DNA, 19 bp, Homo sapiens
  siRNA target sequence for HS3ST1 (NM_005114.1,846-864).
cttcgaacttctactttaa

SEQ ID NO: 157061 - DNA, 19 bp, Homo sapiens
  siRNA target sequence for HS3ST1 (NM_005114.1,943-961).
ccaagtcgatcccaaacta

SEQ ID NO: 157062 - DNA, 19 bp, Homo sapiens
  siRNA target sequence for HS3ST1 (NM_005114.1,949-967).
cgatcccaaactactcaat

SEQ ID NO: 157063 - DNA, 19 bp, Homo sapiens
  siRNA target sequence for HS3ST1 (NM_005114.1,964-982).
caataaactgcacgaatat

SEQ ID NO: 157064 - DNA, 19 bp, Homo sapiens
  siRNA target sequence for HS3ST1 (NM_005114.1,989-1007).
gagccaaataagaagttct

SEQ ID NO: 157065 - DNA, 19 bp, Homo sapiens
  siRNA target sequence for HS3ST1 (NM_005114.1,1016-1034).
gttggcagaacatttgact

SEQ ID NO: 157066 - DNA, 19 bp, Homo sapiens
  siRNA target sequence for HSXIAPAF1 (NM_017523.2,259-277).
cggtgtgcaggaactgtaa

SEQ ID NO: 157067 - DNA, 19 bp, Homo sapiens
  siRNA target sequence for HSXIAPAF1 (NM_017523.2,260-278).
ggtgtgcaggaactgtaaa

SEQ ID NO: 157068 - DNA, 19 bp, Homo sapiens
  siRNA target sequence for HSXIAPAF1 (NM_017523.2,261-279).
gtgtgcaggaactgtaaaa

SEQ ID NO: 157069 - DNA, 19 bp, Homo sapiens
  siRNA target sequence for HSXIAPAF1 (NM_017523.2,263-281).
gtgcaggaactgtaaaaga

SEQ ID NO: 157070 - DNA, 19 bp, Homo sapiens
  siRNA target sequence for HSXIAPAF1 (NM_017523.2,486-504).
cgccctgttgagtgtaagt

SEQ ID NO: 157071 - DNA, 19 bp, Homo sapiens
  siRNA target sequence for HSXIAPAF1 (NM_017523.2,654-672).
ctcgggaaaggggaaagaa

SEQ ID NO: 157072 - DNA, 19 bp, Homo sapiens
  siRNA target sequence for HSXIAPAF1 (NM_017523.2,678-696).
gctcctgaaagggaaatct

SEQ ID NO: 157073 - DNA, 19 bp, Homo sapiens
  siRNA target sequence for HSXIAPAF1 (NM_017523.2,688-706).
gggaaatctactgtcatta

SEQ ID NO: 157074 - DNA, 19 bp, Homo sapiens
  siRNA target sequence for HSXIAPAF1 (NM_017523.2,719-737).
gattccagaaaataagtat

SEQ ID NO: 157075 - DNA, 19 bp, Homo sapiens
  siRNA target sequence for HSXIAPAF1 (NM_017523.2,741-759).
caccatatgggtaaatgtt

SEQ ID NO: 157076 - DNA, 19 bp, Homo sapiens
  siRNA target sequence for HSXIAPAF1 (NM_017523.2,760-778).
gtccagactcagagtttaa

SEQ ID NO: 157077 - DNA, 19 bp, Homo sapiens
  siRNA target sequence for HSXIAPAF1 (NM_017523.2,762-780).
ccagactcagagtttaaga

SEQ ID NO: 157078 - DNA, 19 bp, Homo sapiens
  siRNA target sequence for HSXIAPAF1 (NM_017523.2,867-885).
gatgttcgtccaaagacaa

SEQ ID NO: 157079 - DNA, 19 bp, Homo sapiens
  siRNA target sequence for HSXIAPAF1 (NM_017523.2,883-901).
caagaagtataaacagatt

SEQ ID NO: 157080 - DNA, 19 bp, Homo sapiens
  siRNA target sequence for HSXIAPAF1 (NM_017523.2,998-1016).
ctcccctagaggagataaa

SEQ ID NO: 157081 - DNA, 19 bp, Homo sapiens
  siRNA target sequence for HSXIAPAF1 (NM_017523.2,1066-1084).
ccctgccgatcctaaatca

SEQ ID NO: 157082 - DNA, 19 bp, Homo sapiens
  siRNA target sequence for HSXIAPAF1 (NM_017523.2,1067-1085).
cctgccgatcctaaatcaa

SEQ ID NO: 157083 - DNA, 19 bp, Homo sapiens
  siRNA target sequence for HSXIAPAF1 (NM_017523.2,1070-1088).
gccgatcctaaatcaacat

SEQ ID NO: 157084 - DNA, 19 bp, Homo sapiens
  siRNA target sequence for HSXIAPAF1 (NM_017523.2,1072-1090).
cgatcctaaatcaacatca

SEQ ID NO: 157085 - DNA, 19 bp, Homo sapiens
  siRNA target sequence for HSXIAPAF1 (NM_017523.2,1100-1118).
ccggtggttagcttcatca

SEQ ID NO: 157086 - DNA, 19 bp, Homo sapiens
  siRNA target sequence for HSXIAPAF1 (NM_017523.2,1101-1119).
cggtggttagcttcatcaa

SEQ ID NO: 157087 - DNA, 19 bp, Homo sapiens
  siRNA target sequence for HSXIAPAF1 (NM_017523.2,1103-1121).
gtggttagcttcatcaaaa

SEQ ID NO: 157088 - DNA, 19 bp, Homo sapiens
  siRNA target sequence for KEL (NM_000420.2,444-462).
gacatctgtgtgtttggat

SEQ ID NO: 157089 - DNA, 19 bp, Homo sapiens
  siRNA target sequence for KEL (NM_000420.2,543-561).
caaagagaccaataattct

SEQ ID NO: 157090 - DNA, 19 bp, Homo sapiens
  siRNA target sequence for KEL (NM_000420.2,570-588).
gcttgccacaaagaacaaa

SEQ ID NO: 157091 - DNA, 19 bp, Homo sapiens
  siRNA target sequence for KEL (NM_000420.2,678-696).
ggatacacttgccattgaa

SEQ ID NO: 157092 - DNA, 19 bp, Homo sapiens
  siRNA target sequence for KEL (NM_000420.2,744-762).
ctggcgcatctctggtaaa

SEQ ID NO: 157093 - DNA, 19 bp, Homo sapiens
  siRNA target sequence for KEL (NM_000420.2,748-766).
cgcatctctggtaaatgga

SEQ ID NO: 157094 - DNA, 19 bp, Homo sapiens
  siRNA target sequence for KEL (NM_000420.2,785-803).
gaacgctgagacttctgat

SEQ ID NO: 157095 - DNA, 19 bp, Homo sapiens
  siRNA target sequence for KEL (NM_000420.2,882-900).
gatagaccagccagagttt

SEQ ID NO: 157096 - DNA, 19 bp, Homo sapiens
  siRNA target sequence for KEL (NM_000420.2,919-937).
gatcaagaacagaagatct

SEQ ID NO: 157097 - DNA, 19 bp, Homo sapiens
  siRNA target sequence for KEL (NM_000420.2,1167-1185).
cttgcaagcgacattcaca

SEQ ID NO: 157098 - DNA, 19 bp, Homo sapiens
  siRNA target sequence for KEL (NM_000420.2,1469-1487).
ccacgctggcggctttgtt

SEQ ID NO: 157099 - DNA, 19 bp, Homo sapiens
  siRNA target sequence for KEL (NM_000420.2,1472-1490).
cgctggcggctttgtttgt

SEQ ID NO: 157100 - DNA, 19 bp, Homo sapiens
  siRNA target sequence for KEL (NM_000420.2,1515-1533).
ccgaagtgctgccatgaaa

SEQ ID NO: 157101 - DNA, 19 bp, Homo sapiens
  siRNA target sequence for KEL (NM_000420.2,1516-1534).
cgaagtgctgccatgaaat

SEQ ID NO: 157102 - DNA, 19 bp, Homo sapiens
  siRNA target sequence for KEL (NM_000420.2,1520-1538).
gtgctgccatgaaattatt

SEQ ID NO: 157103 - DNA, 19 bp, Homo sapiens
  siRNA target sequence for KEL (NM_000420.2,1675-1693).
gagctggcccgacaagaat

SEQ ID NO: 157104 - DNA, 19 bp, Homo sapiens
  siRNA target sequence for KEL (NM_000420.2,1678-1696).
ctggcccgacaagaataca

SEQ ID NO: 157105 - DNA, 19 bp, Homo sapiens
  siRNA target sequence for KEL (NM_000420.2,1684-1702).
cgacaagaatacaacgata

SEQ ID NO: 157106 - DNA, 19 bp, Homo sapiens
  siRNA target sequence for KEL (NM_000420.2,1685-1703).
gacaagaatacaacgatat

SEQ ID NO: 157107 - DNA, 19 bp, Homo sapiens
  siRNA target sequence for KEL (NM_000420.2,1748-1766).
ggtccctccgagctagaat

SEQ ID NO: 157108 - DNA, 19 bp, Homo sapiens
  siRNA target sequence for KEL (NM_000420.2,1749-1767).
gtccctccgagctagaatt

SEQ ID NO: 157109 - DNA, 19 bp, Homo sapiens
  siRNA target sequence for KEL (NM_000420.2,1751-1769).
ccctccgagctagaattgt

SEQ ID NO: 157110 - DNA, 19 bp, Homo sapiens
  siRNA target sequence for KEL (NM_000420.2,1817-1835).
cttgggacgtcaatgctta

SEQ ID NO: 157111 - DNA, 19 bp, Homo sapiens
  siRNA target sequence for KEL (NM_000420.2,1820-1838).
gggacgtcaatgcttacta

SEQ ID NO: 157112 - DNA, 19 bp, Homo sapiens
  siRNA target sequence for KEL (NM_000420.2,1821-1839).
ggacgtcaatgcttactat

SEQ ID NO: 157113 - DNA, 19 bp, Homo sapiens
  siRNA target sequence for KEL (NM_000420.2,1822-1840).
gacgtcaatgcttactatt

SEQ ID NO: 157114 - DNA, 19 bp, Homo sapiens
  siRNA target sequence for KEL (NM_000420.2,1832-1850).
cttactattcggtatctga

SEQ ID NO: 157115 - DNA, 19 bp, Homo sapiens
  siRNA target sequence for KEL (NM_000420.2,1954-1972).
gagctgttgcacatcttct

SEQ ID NO: 157116 - DNA, 19 bp, Homo sapiens
  siRNA target sequence for KEL (NM_000420.2,2037-2055).
gtgcctgaagcgccattat

SEQ ID NO: 157117 - DNA, 19 bp, Homo sapiens
  siRNA target sequence for KEL (NM_000420.2,2040-2058).
cctgaagcgccattatgct

SEQ ID NO: 157118 - DNA, 19 bp, Homo sapiens
  siRNA target sequence for KEL (NM_000420.2,2056-2074).
gctgcctttccattaccta

SEQ ID NO: 157119 - DNA, 19 bp, Homo sapiens
  siRNA target sequence for KEL (NM_000420.2,2075-2093).
gcagaacctccttcaatga

SEQ ID NO: 157120 - DNA, 19 bp, Homo sapiens
  siRNA target sequence for KEL (NM_000420.2,2096-2114).
ccctcacattcttagagaa

SEQ ID NO: 157121 - DNA, 19 bp, Homo sapiens
  siRNA target sequence for KEL (NM_000420.2,2335-2353).
ccagcctttgccaggtatt

SEQ ID NO: 157122 - DNA, 19 bp, Homo sapiens
  siRNA target sequence for KIAA1576 (NM_020927.1,319-337).
cgtcaaagcctgtggatta

SEQ ID NO: 157123 - DNA, 19 bp, Homo sapiens
  siRNA target sequence for KIAA1576 (NM_020927.1,320-338).
gtcaaagcctgtggattaa

SEQ ID NO: 157124 - DNA, 19 bp, Homo sapiens
  siRNA target sequence for KIAA1576 (NM_020927.1,359-377).
cgacaagggaatattgaca

SEQ ID NO: 157125 - DNA, 19 bp, Homo sapiens
  siRNA target sequence for KIAA1576 (NM_020927.1,412-430).
gtgttctgggattgttgaa

SEQ ID NO: 157126 - DNA, 19 bp, Homo sapiens
  siRNA target sequence for KIAA1576 (NM_020927.1,437-455).
ggggacagcgtgaaaggat

SEQ ID NO: 157127 - DNA, 19 bp, Homo sapiens
  siRNA target sequence for KIAA1576 (NM_020927.1,438-456).
gggacagcgtgaaaggata

SEQ ID NO: 157128 - DNA, 19 bp, Homo sapiens
  siRNA target sequence for KIAA1576 (NM_020927.1,439-457).
ggacagcgtgaaaggatat

SEQ ID NO: 157129 - DNA, 19 bp, Homo sapiens
  siRNA target sequence for KIAA1576 (NM_020927.1,444-462).
gcgtgaaaggatatgagat

SEQ ID NO: 157130 - DNA, 19 bp, Homo sapiens
  siRNA target sequence for KIAA1576 (NM_020927.1,445-463).
cgtgaaaggatatgagatt

SEQ ID NO: 157131 - DNA, 19 bp, Homo sapiens
  siRNA target sequence for KIAA1576 (NM_020927.1,478-496).
ggcatttgtcaattacaat

SEQ ID NO: 157132 - DNA, 19 bp, Homo sapiens
  siRNA target sequence for KIAA1576 (NM_020927.1,516-534).
gcacaccagtggagtttgt

SEQ ID NO: 157133 - DNA, 19 bp, Homo sapiens
  siRNA target sequence for KIAA1576 (NM_020927.1,572-590).
gctgcattccccatgaact

SEQ ID NO: 157134 - DNA, 19 bp, Homo sapiens
  siRNA target sequence for KIAA1576 (NM_020927.1,573-591).
ctgcattccccatgaactt

SEQ ID NO: 157135 - DNA, 19 bp, Homo sapiens
  siRNA target sequence for KIAA1576 (NM_020927.1,601-619).
ctatgtgatgctgtttgaa

SEQ ID NO: 157136 - DNA, 19 bp, Homo sapiens
  siRNA target sequence for KIAA1576 (NM_020927.1,795-813).
cagactacgtgcaagaagt

SEQ ID NO: 157137 - DNA, 19 bp, Homo sapiens
  siRNA target sequence for KIAA1576 (NM_020927.1,799-817).
ctacgtgcaagaagttaaa

SEQ ID NO: 157138 - DNA, 19 bp, Homo sapiens
  siRNA target sequence for KIAA1576 (NM_020927.1,830-848).
gaaggtgtggacatcgttt

SEQ ID NO: 157139 - DNA, 19 bp, Homo sapiens
  siRNA target sequence for KIAA1576 (NM_020927.1,834-852).
gtgtggacatcgttttgga

SEQ ID NO: 157140 - DNA, 19 bp, Homo sapiens
  siRNA target sequence for KIAA1576 (NM_020927.1,836-854).
gtggacatcgttttggatt

SEQ ID NO: 157141 - DNA, 19 bp, Homo sapiens
  siRNA target sequence for KIAA1576 (NM_020927.1,865-883).
ggacaacactggaaaaggt

SEQ ID NO: 157142 - DNA, 19 bp, Homo sapiens
  siRNA target sequence for KIAA1576 (NM_020927.1,923-941).
ggctcatccaacatggtaa

SEQ ID NO: 157143 - DNA, 19 bp, Homo sapiens
  siRNA target sequence for KIAA1576 (NM_020927.1,1116-1134).
ggctctacaaccagaagaa

SEQ ID NO: 157144 - DNA, 19 bp, Homo sapiens
  siRNA target sequence for KIAA1576 (NM_020927.1,1222-1240).
gttaattctggatgtagaa

SEQ ID NO: 157145 - DNA, 19 bp, Homo sapiens
  siRNA target sequence for KPNB1 (NM_002265.4,499-517).
gttgcagctggtctacaaa

SEQ ID NO: 157146 - DNA, 19 bp, Homo sapiens
  siRNA target sequence for KPNB1 (NM_002265.4,503-521).
cagctggtctacaaatcaa

SEQ ID NO: 157147 - DNA, 19 bp, Homo sapiens
  siRNA target sequence for KPNB1 (NM_002265.4,514-532).
caaatcaagaactctttga

SEQ ID NO: 157148 - DNA, 19 bp, Homo sapiens
  siRNA target sequence for KPNB1 (NM_002265.4,522-540).
gaactctttgacatctaaa

SEQ ID NO: 157149 - DNA, 19 bp, Homo sapiens
  siRNA target sequence for KPNB1 (NM_002265.4,533-551).
catctaaagatccagatat

SEQ ID NO: 157150 - DNA, 19 bp, Homo sapiens
  siRNA target sequence for KPNB1 (NM_002265.4,570-588).
gaggtggcttgctattgat

SEQ ID NO: 157151 - DNA, 19 bp, Homo sapiens
  siRNA target sequence for KPNB1 (NM_002265.4,774-792).
gaaggagtcgacattggaa

SEQ ID NO: 157152 - DNA, 19 bp, Homo sapiens
  siRNA target sequence for KPNB1 (NM_002265.4,823-841).
ccagagcagctacaagata

SEQ ID NO: 157153 - DNA, 19 bp, Homo sapiens
  siRNA target sequence for KPNB1 (NM_002265.4,829-847).
cagctacaagataaatcca

SEQ ID NO: 157154 - DNA, 19 bp, Homo sapiens
  siRNA target sequence for KPNB1 (NM_002265.4,835-853).
caagataaatccaatgaga

SEQ ID NO: 157155 - DNA, 19 bp, Homo sapiens
  siRNA target sequence for KPNB1 (NM_002265.4,906-924).
gaagctagctgctacgaat

SEQ ID NO: 157156 - DNA, 19 bp, Homo sapiens
  siRNA target sequence for KPNB1 (NM_002265.4,974-992).
ctgaaaggcactttattat

SEQ ID NO: 157157 - DNA, 19 bp, Homo sapiens
  siRNA target sequence for KPNB1 (NM_002265.4,1062-1080).
gaagataatgtccttatat

SEQ ID NO: 157158 - DNA, 19 bp, Homo sapiens
  siRNA target sequence for KPNB1 (NM_002265.4,1065-1083).
gataatgtccttatattat

SEQ ID NO: 157159 - DNA, 19 bp, Homo sapiens
  siRNA target sequence for KPNB1 (NM_002265.4,1073-1091).
ccttatattatcagtacat

SEQ ID NO: 157160 - DNA, 19 bp, Homo sapiens
  siRNA target sequence for KPNB1 (NM_002265.4,1125-1143).
cacaatcgaagcaatgaaa

SEQ ID NO: 157161 - DNA, 19 bp, Homo sapiens
  siRNA target sequence for KPNB1 (NM_002265.4,1260-1278).
gcacaccagcaagttttat

SEQ ID NO: 157162 - DNA, 19 bp, Homo sapiens
  siRNA target sequence for KPNB1 (NM_002265.4,1280-1298).
cgaagggagcactacagta

SEQ ID NO: 157163 - DNA, 19 bp, Homo sapiens
  siRNA target sequence for KPNB1 (NM_002265.4,1328-1346).
ctaaacaggacgaaaatga

SEQ ID NO: 157164 - DNA, 19 bp, Homo sapiens
  siRNA target sequence for KPNB1 (NM_002265.4,1403-1421).
ccacctgctgtgaagatga

SEQ ID NO: 157165 - DNA, 19 bp, Homo sapiens
  siRNA target sequence for KPNB1 (NM_002265.4,1432-1450).
catgtcctccccttcatta

SEQ ID NO: 157166 - DNA, 19 bp, Homo sapiens
  siRNA target sequence for KPNB1 (NM_002265.4,1492-1510).
gcagtgatggcttttggtt

SEQ ID NO: 157167 - DNA, 19 bp, Homo sapiens
  siRNA target sequence for KPNB1 (NM_002265.4,1539-1557).
gctcaaaccactagttata

SEQ ID NO: 157168 - DNA, 19 bp, Homo sapiens
  siRNA target sequence for KPNB1 (NM_002265.4,1562-1580).
ctatgcccaccctaataga

SEQ ID NO: 157169 - DNA, 19 bp, Homo sapiens
  siRNA target sequence for KPNB1 (NM_002265.4,1566-1584).
gcccaccctaatagaatta

SEQ ID NO: 157170 - DNA, 19 bp, Homo sapiens
  siRNA target sequence for KPNB1 (NM_002265.4,1567-1585).
cccaccctaatagaattaa

SEQ ID NO: 157171 - DNA, 19 bp, Homo sapiens
  siRNA target sequence for KPNB1 (NM_002265.4,1568-1586).
ccaccctaatagaattaat

SEQ ID NO: 157172 - DNA, 19 bp, Homo sapiens
  siRNA target sequence for KPNB1 (NM_002265.4,1689-1707).
cctgctacagtgtctgatt

SEQ ID NO: 157173 - DNA, 19 bp, Homo sapiens
  siRNA target sequence for KPNB1 (NM_002265.4,1790-1808).
cagacgttgctgatgatca

SEQ ID NO: 157174 - DNA, 19 bp, Homo sapiens
  siRNA target sequence for KPNB1 (NM_002265.4,1816-1834).
ccagctacttactgcttat

SEQ ID NO: 157175 - DNA, 19 bp, Homo sapiens
  siRNA target sequence for KPNB1 (NM_002265.4,1969-1987).
cctgctgtccagaaaacga

SEQ ID NO: 157176 - DNA, 19 bp, Homo sapiens
  siRNA target sequence for KPNB1 (NM_002265.4,2041-2059).
cagagcacatccgatagaa

SEQ ID NO: 157177 - DNA, 19 bp, Homo sapiens
  siRNA target sequence for KPNB1 (NM_002265.4,2051-2069).
ccgatagaatccagttcaa

SEQ ID NO: 157178 - DNA, 19 bp, Homo sapiens
  siRNA target sequence for KPNB1 (NM_002265.4,2052-2070).
cgatagaatccagttcaat

SEQ ID NO: 157179 - DNA, 19 bp, Homo sapiens
  siRNA target sequence for KPNB1 (NM_002265.4,2090-2108).
gtgcaactcttcagaatgt

SEQ ID NO: 157180 - DNA, 19 bp, Homo sapiens
  siRNA target sequence for KPNB1 (NM_002265.4,2093-2111).
caactcttcagaatgttct

SEQ ID NO: 157181 - DNA, 19 bp, Homo sapiens
  siRNA target sequence for KPNB1 (NM_002265.4,2155-2173).
gttatggcctccctgttaa

SEQ ID NO: 157182 - DNA, 19 bp, Homo sapiens
  siRNA target sequence for KPNB1 (NM_002265.4,2195-2213).
ggtctgggggagtacaaga

SEQ ID NO: 157183 - DNA, 19 bp, Homo sapiens
  siRNA target sequence for KPNB1 (NM_002265.4,2255-2273).
gtggtgaattcctcaagta

SEQ ID NO: 157184 - DNA, 19 bp, Homo sapiens
  siRNA target sequence for KPNB1 (NM_002265.4,2271-2289).
gtacatggaggcctttaaa

SEQ ID NO: 157185 - DNA, 19 bp, Homo sapiens
  siRNA target sequence for KPNB1 (NM_002265.4,2292-2310).
cttcctgggcattggatta

SEQ ID NO: 157186 - DNA, 19 bp, Homo sapiens
  siRNA target sequence for KPNB1 (NM_002265.4,2369-2387).
gccgtgccctgcaatccaa

SEQ ID NO: 157187 - DNA, 19 bp, Homo sapiens
  siRNA target sequence for KPNB1 (NM_002265.4,2375-2393).
ccctgcaatccaacatcat

SEQ ID NO: 157188 - DNA, 19 bp, Homo sapiens
  siRNA target sequence for KPNB1 (NM_002265.4,2376-2394).
cctgcaatccaacatcata

SEQ ID NO: 157189 - DNA, 19 bp, Homo sapiens
  siRNA target sequence for KPNB1 (NM_002265.4,2380-2398).
caatccaacatcatacctt

SEQ ID NO: 157190 - DNA, 19 bp, Homo sapiens
  siRNA target sequence for KPNB1 (NM_002265.4,2459-2477).
ctgtgaagccgcagattct

SEQ ID NO: 157191 - DNA, 19 bp, Homo sapiens
  siRNA target sequence for KPNB1 (NM_002265.4,2461-2479).
gtgaagccgcagattctgt

SEQ ID NO: 157192 - DNA, 19 bp, Homo sapiens
  siRNA target sequence for KPNB1 (NM_002265.4,2489-2507).
gtgatattgcccttgctat

SEQ ID NO: 157193 - DNA, 19 bp, Homo sapiens
  siRNA target sequence for KPNB1 (NM_002265.4,2503-2521).
gctattggaggagagttta

SEQ ID NO: 157194 - DNA, 19 bp, Homo sapiens
  siRNA target sequence for KPNB1 (NM_002265.4,2535-2553).
ggttgtattgaatactctt

SEQ ID NO: 157195 - DNA, 19 bp, Homo sapiens
  siRNA target sequence for KPNB1 (NM_002265.4,2578-2596).
gacaagtcagactatgaca

SEQ ID NO: 157196 - DNA, 19 bp, Homo sapiens
  siRNA target sequence for KPNB1 (NM_002265.4,2595-2613).
catggtggattatctgaat

SEQ ID NO: 157197 - DNA, 19 bp, Homo sapiens
  siRNA target sequence for KPNB1 (NM_002265.4,2647-2665).
ggaatcgtccagggattaa

SEQ ID NO: 157198 - DNA, 19 bp, Homo sapiens
  siRNA target sequence for KPNB1 (NM_002265.4,2703-2721).
ggtacaacccagagtagaa

SEQ ID NO: 157199 - DNA, 19 bp, Homo sapiens
  siRNA target sequence for KPNB1 (NM_002265.4,2704-2722).
gtacaacccagagtagaat

SEQ ID NO: 157200 - DNA, 19 bp, Homo sapiens
  siRNA target sequence for KPNB1 (NM_002265.4,2783-2801).
cttgtgctgctggactaat

SEQ ID NO: 157201 - DNA, 19 bp, Homo sapiens
  siRNA target sequence for KPNB1 (NM_002265.4,2794-2812).
ggactaataggggacttat

SEQ ID NO: 157202 - DNA, 19 bp, Homo sapiens
  siRNA target sequence for KPNB1 (NM_002265.4,2797-2815).
ctaataggggacttatgta

SEQ ID NO: 157203 - DNA, 19 bp, Homo sapiens
  siRNA target sequence for KPNB1 (NM_002265.4,2857-2875).
ccaatgatccatgaattgt

SEQ ID NO: 157204 - DNA, 19 bp, Homo sapiens
  siRNA target sequence for KPNB1 (NM_002265.4,2858-2876).
caatgatccatgaattgtt

SEQ ID NO: 157205 - DNA, 19 bp, Homo sapiens
  siRNA target sequence for KPNB1 (NM_002265.4,2862-2880).
gatccatgaattgttaact

SEQ ID NO: 157206 - DNA, 19 bp, Homo sapiens
  siRNA target sequence for KPNB1 (NM_002265.4,2884-2902).
gggcggagatcgaagacta

SEQ ID NO: 157207 - DNA, 19 bp, Homo sapiens
  siRNA target sequence for KPNB1 (NM_002265.4,2885-2903).
ggcggagatcgaagactaa

SEQ ID NO: 157208 - DNA, 19 bp, Homo sapiens
  siRNA target sequence for KPNB1 (NM_002265.4,2887-2905).
cggagatcgaagactaaca

SEQ ID NO: 157209 - DNA, 19 bp, Homo sapiens
  siRNA target sequence for KPNB1 (NM_002265.4,2888-2906).
ggagatcgaagactaacaa

SEQ ID NO: 157210 - DNA, 19 bp, Homo sapiens
  siRNA target sequence for KPNB1 (NM_002265.4,2889-2907).
gagatcgaagactaacaaa

SEQ ID NO: 157211 - DNA, 19 bp, Homo sapiens
  siRNA target sequence for KPNB1 (NM_002265.4,2921-2939).
ctacatgggcaacaaaaga

SEQ ID NO: 157212 - DNA, 19 bp, Homo sapiens
  siRNA target sequence for KUB3 (NM_033276.1,223-241).
gacgctggagacaaatcca

SEQ ID NO: 157213 - DNA, 19 bp, Homo sapiens
  siRNA target sequence for KUB3 (NM_033276.1,225-243).
cgctggagacaaatccata

SEQ ID NO: 157214 - DNA, 19 bp, Homo sapiens
  siRNA target sequence for KUB3 (NM_033276.1,226-244).
gctggagacaaatccatat

SEQ ID NO: 157215 - DNA, 19 bp, Homo sapiens
  siRNA target sequence for KUB3 (NM_033276.1,313-331).
cgaagactgtaatggaaat

SEQ ID NO: 157216 - DNA, 19 bp, Homo sapiens
  siRNA target sequence for KUB3 (NM_033276.1,341-359).
ggttttgatgcttcaacat

SEQ ID NO: 157217 - DNA, 19 bp, Homo sapiens
  siRNA target sequence for KUB3 (NM_033276.1,351-369).
cttcaacatctcagatagt

SEQ ID NO: 157218 - DNA, 19 bp, Homo sapiens
  siRNA target sequence for KUB3 (NM_033276.1,375-393).
gccagaataatatccataa

SEQ ID NO: 157219 - DNA, 19 bp, Homo sapiens
  siRNA target sequence for KUB3 (NM_033276.1,376-394).
ccagaataatatccataat

SEQ ID NO: 157220 - DNA, 19 bp, Homo sapiens
  siRNA target sequence for KUB3 (NM_033276.1,415-433).
ggtcacacacgagcttatt

SEQ ID NO: 157221 - DNA, 19 bp, Homo sapiens
  siRNA target sequence for KUB3 (NM_033276.1,418-436).
cacacacgagcttattcat

SEQ ID NO: 157222 - DNA, 19 bp, Homo sapiens
  siRNA target sequence for KUB3 (NM_033276.1,503-521).
gttcgagctgctaacctta

SEQ ID NO: 157223 - DNA, 19 bp, Homo sapiens
  siRNA target sequence for KUB3 (NM_033276.1,599-617).
gacagagccactctttcta

SEQ ID NO: 157224 - DNA, 19 bp, Homo sapiens
  siRNA target sequence for KUB3 (NM_033276.1,637-655).
cagcaaagaagtagctaaa

SEQ ID NO: 157225 - DNA, 19 bp, Homo sapiens
  siRNA target sequence for KUB3 (NM_033276.1,668-686).
gaagtttttgaatcttgtt

SEQ ID NO: 157226 - DNA, 19 bp, Homo sapiens
  siRNA target sequence for KUB3 (NM_033276.1,688-706).
caatgaccatgaacctttt

SEQ ID NO: 157227 - DNA, 19 bp, Homo sapiens
  siRNA target sequence for KUB3 (NM_033276.1,708-726).
gaaggatcccacataacaa

SEQ ID NO: 157228 - DNA, 19 bp, Homo sapiens
  siRNA target sequence for KUB3 (NM_033276.1,715-733).
cccacataacaagacttat

SEQ ID NO: 157229 - DNA, 19 bp, Homo sapiens
  siRNA target sequence for KUB3 (NM_033276.1,719-737).
cataacaagacttatgcaa

SEQ ID NO: 157230 - DNA, 19 bp, Homo sapiens
  siRNA target sequence for KUB3 (NM_033276.1,724-742).
caagacttatgcaagatat

SEQ ID NO: 157231 - DNA, 19 bp, Homo sapiens
  siRNA target sequence for KUB3 (NM_033276.1,763-781).
ccgtgatcggtattattca

SEQ ID NO: 157232 - DNA, 19 bp, Homo sapiens
  siRNA target sequence for KUB3 (NM_033276.1,764-782).
cgtgatcggtattattcaa

SEQ ID NO: 157233 - DNA, 19 bp, Homo sapiens
  siRNA target sequence for KUB3 (NM_033276.1,770-788).
cggtattattcaaatatat

SEQ ID NO: 157234 - DNA, 19 bp, Homo sapiens
  siRNA target sequence for LAP3 (NM_015907.1,853-871).
ctcaaaagtgctagtagta

SEQ ID NO: 157235 - DNA, 19 bp, Homo sapiens
  siRNA target sequence for LAP3 (NM_015907.1,883-901).
catatcagacccaagtctt

SEQ ID NO: 157236 - DNA, 19 bp, Homo sapiens
  siRNA target sequence for LAP3 (NM_015907.1,990-1008).
cagccccaatgcaaacgaa

SEQ ID NO: 157237 - DNA, 19 bp, Homo sapiens
  siRNA target sequence for LAP3 (NM_015907.1,1024-1042).
gttgggaaaggaattacct

SEQ ID NO: 157238 - DNA, 19 bp, Homo sapiens
  siRNA target sequence for LAP3 (NM_015907.1,1108-1126).
ggagctgcaactatatgct

SEQ ID NO: 157239 - DNA, 19 bp, Homo sapiens
  siRNA target sequence for LAP3 (NM_015907.1,1158-1176).
gcccattaatattataggt

SEQ ID NO: 157240 - DNA, 19 bp, Homo sapiens
  siRNA target sequence for LAP3 (NM_015907.1,1313-1331).
gttacgcacacacgtttaa

SEQ ID NO: 157241 - DNA, 19 bp, Homo sapiens
  siRNA target sequence for LMLN (NM_033029.1,127-145).
gtgggtccgaagcgtttta

SEQ ID NO: 157242 - DNA, 19 bp, Homo sapiens
  siRNA target sequence for LMLN (NM_033029.1,129-147).
gggtccgaagcgttttact

SEQ ID NO: 157243 - DNA, 19 bp, Homo sapiens
  siRNA target sequence for LMLN (NM_033029.1,277-295).
ggtcaagagagatgttgat

SEQ ID NO: 157244 - DNA, 19 bp, Homo sapiens
  siRNA target sequence for LMLN (NM_033029.1,315-333).
ctgtctatgataaaagtgt

SEQ ID NO: 157245 - DNA, 19 bp, Homo sapiens
  siRNA target sequence for LMLN (NM_033029.1,362-380).
cttgtaaagaacaagcttt

SEQ ID NO: 157246 - DNA, 19 bp, Homo sapiens
  siRNA target sequence for LMLN (NM_033029.1,383-401).
ccacaagcgatttcttatt

SEQ ID NO: 157247 - DNA, 19 bp, Homo sapiens
  siRNA target sequence for LMLN (NM_033029.1,384-402).
cacaagcgatttcttattt

SEQ ID NO: 157248 - DNA, 19 bp, Homo sapiens
  siRNA target sequence for LMLN (NM_033029.1,389-407).
gcgatttcttatttagaga

SEQ ID NO: 157249 - DNA, 19 bp, Homo sapiens
  siRNA target sequence for LMLN (NM_033029.1,390-408).
cgatttcttatttagagaa

SEQ ID NO: 157250 - DNA, 19 bp, Homo sapiens
  siRNA target sequence for LMLN (NM_033029.1,425-443).
cgacctgcgggcactatct

SEQ ID NO: 157251 - DNA, 19 bp, Homo sapiens
  siRNA target sequence for LMLN (NM_033029.1,426-444).
gacctgcgggcactatctt

SEQ ID NO: 157252 - DNA, 19 bp, Homo sapiens
  siRNA target sequence for LMLN (NM_033029.1,429-447).
ctgcgggcactatcttact

SEQ ID NO: 157253 - DNA, 19 bp, Homo sapiens
  siRNA target sequence for LMLN (NM_033029.1,442-460).
cttacttagcagacaatgt

SEQ ID NO: 157254 - DNA, 19 bp, Homo sapiens
  siRNA target sequence for LMLN (NM_033029.1,450-468).
gcagacaatgtgcaacaaa

SEQ ID NO: 157255 - DNA, 19 bp, Homo sapiens
  siRNA target sequence for LMLN (NM_033029.1,648-666).
cagactttgttctttacgt

SEQ ID NO: 157256 - DNA, 19 bp, Homo sapiens
  siRNA target sequence for LMLN (NM_033029.1,709-727).
ctcttatgcagcctattgt

SEQ ID NO: 157257 - DNA, 19 bp, Homo sapiens
  siRNA target sequence for LMLN (NM_033029.1,711-729).
cttatgcagcctattgtca

SEQ ID NO: 157258 - DNA, 19 bp, Homo sapiens
  siRNA target sequence for LMLN (NM_033029.1,929-947).
ggcctcccaccttttaatt

SEQ ID NO: 157259 - DNA, 19 bp, Homo sapiens
  siRNA target sequence for LMLN (NM_033029.1,930-948).
gcctcccaccttttaatta

SEQ ID NO: 157260 - DNA, 19 bp, Homo sapiens
  siRNA target sequence for LMLN (NM_033029.1,1005-1023).
gggatgttcgagataataa

SEQ ID NO: 157261 - DNA, 19 bp, Homo sapiens
  siRNA target sequence for LMLN (NM_033029.1,1051-1069).
ggtaacgcctcgtgttgtt

SEQ ID NO: 157262 - DNA, 19 bp, Homo sapiens
  siRNA target sequence for LMLN (NM_033029.1,1070-1088).
gaggaagcacgaaaacatt

SEQ ID NO: 157263 - DNA, 19 bp, Homo sapiens
  siRNA target sequence for LMLN (NM_033029.1,1072-1090).
ggaagcacgaaaacatttt

SEQ ID NO: 157264 - DNA, 19 bp, Homo sapiens
  siRNA target sequence for LMLN (NM_033029.1,1147-1165).
gctcaaccattgggaaaaa

SEQ ID NO: 157265 - DNA, 19 bp, Homo sapiens
  siRNA target sequence for LMLN (NM_033029.1,1158-1176).
gggaaaaaaggttattaga

SEQ ID NO: 157266 - DNA, 19 bp, Homo sapiens
  siRNA target sequence for LMLN (NM_033029.1,1278-1296).
gtgacacgctcagaagtaa

SEQ ID NO: 157267 - DNA, 19 bp, Homo sapiens
  siRNA target sequence for LMLN (NM_033029.1,1332-1350).
cagttgccgtgtgtaattt

SEQ ID NO: 157268 - DNA, 19 bp, Homo sapiens
  siRNA target sequence for LMLN (NM_033029.1,1464-1482).
gccctttcagtcaggaatt

SEQ ID NO: 157269 - DNA, 19 bp, Homo sapiens
  siRNA target sequence for LMLN (NM_033029.1,1477-1495).
ggaattcagttggcattta

SEQ ID NO: 157270 - DNA, 19 bp, Homo sapiens
  siRNA target sequence for LMLN (NM_033029.1,1488-1506).
ggcatttaagtggtgaata

SEQ ID NO: 157271 - DNA, 19 bp, Homo sapiens
  siRNA target sequence for LMLN (NM_033029.1,1489-1507).
gcatttaagtggtgaatat

SEQ ID NO: 157272 - DNA, 19 bp, Homo sapiens
  siRNA target sequence for LMLN (NM_033029.1,1508-1526).
cagcgcagctcagattgta

SEQ ID NO: 157273 - DNA, 19 bp, Homo sapiens
  siRNA target sequence for LMLN (NM_033029.1,1510-1528).
gcgcagctcagattgtaga

SEQ ID NO: 157274 - DNA, 19 bp, Homo sapiens
  siRNA target sequence for LMLN (NM_033029.1,1511-1529).
cgcagctcagattgtagaa

SEQ ID NO: 157275 - DNA, 19 bp, Homo sapiens
  siRNA target sequence for LMLN (NM_033029.1,1513-1531).
cagctcagattgtagaata

SEQ ID NO: 157276 - DNA, 19 bp, Homo sapiens
  siRNA target sequence for LMLN (NM_033029.1,1581-1599).
gacctcattccgtttgtct

SEQ ID NO: 157277 - DNA, 19 bp, Homo sapiens
  siRNA target sequence for LMLN (NM_033029.1,1583-1601).
cctcattccgtttgtctaa

SEQ ID NO: 157278 - DNA, 19 bp, Homo sapiens
  siRNA target sequence for LMLN (NM_033029.1,1584-1602).
ctcattccgtttgtctaat

SEQ ID NO: 157279 - DNA, 19 bp, Homo sapiens
  siRNA target sequence for LMLN (NM_033029.1,1591-1609).
cgtttgtctaattcagaaa

SEQ ID NO: 157280 - DNA, 19 bp, Homo sapiens
  siRNA target sequence for LMLN (NM_033029.1,1689-1707).
ctcctcaaggtctgaaagt

SEQ ID NO: 157281 - DNA, 19 bp, Homo sapiens
  siRNA target sequence for LMLN (NM_033029.1,1710-1728).
gggtccaagatacttcata

SEQ ID NO: 157282 - DNA, 19 bp, Homo sapiens
  siRNA target sequence for LMLN (NM_033029.1,1711-1729).
ggtccaagatacttcatat

SEQ ID NO: 157283 - DNA, 19 bp, Homo sapiens
  siRNA target sequence for LMLN (NM_033029.1,1712-1730).
gtccaagatacttcatatt

SEQ ID NO: 157284 - DNA, 19 bp, Homo sapiens
  siRNA target sequence for LNPEP (NM_005575.1,153-171).
ccaaagagccttgtttaca

SEQ ID NO: 157285 - DNA, 19 bp, Homo sapiens
  siRNA target sequence for LNPEP (NM_005575.1,231-249).
gtcttggtgagcatgagat

SEQ ID NO: 157286 - DNA, 19 bp, Homo sapiens
  siRNA target sequence for LNPEP (NM_005575.1,292-310).
gggcatgtccttcatgaat

SEQ ID NO: 157287 - DNA, 19 bp, Homo sapiens
  siRNA target sequence for LNPEP (NM_005575.1,293-311).
ggcatgtccttcatgaata

SEQ ID NO: 157288 - DNA, 19 bp, Homo sapiens
  siRNA target sequence for LNPEP (NM_005575.1,415-433).
cgtggttgctgtttctgta

SEQ ID NO: 157289 - DNA, 19 bp, Homo sapiens
  siRNA target sequence for LNPEP (NM_005575.1,496-514).
ccagtcaattggactaatt

SEQ ID NO: 157290 - DNA, 19 bp, Homo sapiens
  siRNA target sequence for LNPEP (NM_005575.1,614-632).
ctaacctcgatgacattca

SEQ ID NO: 157291 - DNA, 19 bp, Homo sapiens
  siRNA target sequence for LNPEP (NM_005575.1,631-649).
caggggttctgtgacaatt

SEQ ID NO: 157292 - DNA, 19 bp, Homo sapiens
  siRNA target sequence for LNPEP (NM_005575.1,667-685).
ggtcacatggaatatcatt

SEQ ID NO: 157293 - DNA, 19 bp, Homo sapiens
  siRNA target sequence for LNPEP (NM_005575.1,689-707).
catagcacaggtcataata

SEQ ID NO: 157294 - DNA, 19 bp, Homo sapiens
  siRNA target sequence for LNPEP (NM_005575.1,731-749).
gcagtttcaagccaagaaa

SEQ ID NO: 157295 - DNA, 19 bp, Homo sapiens
  siRNA target sequence for LNPEP (NM_005575.1,758-776).
gagatcctggaatatgcat

SEQ ID NO: 157296 - DNA, 19 bp, Homo sapiens
  siRNA target sequence for LNPEP (NM_005575.1,812-830).
cttctagcagggcacaatt

SEQ ID NO: 157297 - DNA, 19 bp, Homo sapiens
  siRNA target sequence for LNPEP (NM_005575.1,818-836).
gcagggcacaattatacgt

SEQ ID NO: 157298 - DNA, 19 bp, Homo sapiens
  siRNA target sequence for LNPEP (NM_005575.1,819-837).
cagggcacaattatacgtt

SEQ ID NO: 157299 - DNA, 19 bp, Homo sapiens
  siRNA target sequence for LNPEP (NM_005575.1,826-844).
caattatacgttgaagata

SEQ ID NO: 157300 - DNA, 19 bp, Homo sapiens
  siRNA target sequence for LNPEP (NM_005575.1,845-863).
gagtactcggcaaatatat

SEQ ID NO: 157301 - DNA, 19 bp, Homo sapiens
  siRNA target sequence for LNPEP (NM_005575.1,850-868).
ctcggcaaatatatctagt

SEQ ID NO: 157302 - DNA, 19 bp, Homo sapiens
  siRNA target sequence for LNPEP (NM_005575.1,853-871).
ggcaaatatatctagttct

SEQ ID NO: 157303 - DNA, 19 bp, Homo sapiens
  siRNA target sequence for LNPEP (NM_005575.1,1028-1046).
gagcaatacaccgctttat

SEQ ID NO: 157304 - DNA, 19 bp, Homo sapiens
  siRNA target sequence for LNPEP (NM_005575.1,1030-1048).
gcaatacaccgctttatca

SEQ ID NO: 157305 - DNA, 19 bp, Homo sapiens
  siRNA target sequence for LNPEP (NM_005575.1,1065-1083).
catcagtcgttctagatga

SEQ ID NO: 157306 - DNA, 19 bp, Homo sapiens
  siRNA target sequence for LNPEP (NM_005575.1,1165-1183).
cctgagtcaggacgtaaat

SEQ ID NO: 157307 - DNA, 19 bp, Homo sapiens
  siRNA target sequence for LNPEP (NM_005575.1,1168-1186).
gagtcaggacgtaaatgga

SEQ ID NO: 157308 - DNA, 19 bp, Homo sapiens
  siRNA target sequence for LNPEP (NM_005575.1,1251-1269).
ctgtgaagcttcttgagtt

SEQ ID NO: 157309 - DNA, 19 bp, Homo sapiens
  siRNA target sequence for LNPEP (NM_005575.1,1297-1315).
cccacttaagaaattggat

SEQ ID NO: 157310 - DNA, 19 bp, Homo sapiens
  siRNA target sequence for LNPEP (NM_005575.1,1391-1409).
ctgtatgacagtaacactt

SEQ ID NO: 157311 - DNA, 19 bp, Homo sapiens
  siRNA target sequence for LNPEP (NM_005575.1,1410-1428).
cttcaatggcggatagaaa

SEQ ID NO: 157312 - DNA, 19 bp, Homo sapiens
  siRNA target sequence for LNPEP (NM_005575.1,1475-1493).
ggcaatctggtaacaatga

SEQ ID NO: 157313 - DNA, 19 bp, Homo sapiens
  siRNA target sequence for LNPEP (NM_005575.1,1476-1494).
gcaatctggtaacaatgaa

SEQ ID NO: 157314 - DNA, 19 bp, Homo sapiens
  siRNA target sequence for LNPEP (NM_005575.1,1520-1538).
gaaggttttgccactttca

SEQ ID NO: 157315 - DNA, 19 bp, Homo sapiens
  siRNA target sequence for LNPEP (NM_005575.1,1529-1547).
gccactttcatggagtatt

SEQ ID NO: 157316 - DNA, 19 bp, Homo sapiens
  siRNA target sequence for LNPEP (NM_005575.1,1530-1548).
ccactttcatggagtattt

SEQ ID NO: 157317 - DNA, 19 bp, Homo sapiens
  siRNA target sequence for LNPEP (NM_005575.1,1594-1612).
cttagatgctcgatttaaa

SEQ ID NO: 157318 - DNA, 19 bp, Homo sapiens
  siRNA target sequence for LNPEP (NM_005575.1,1598-1616).
gatgctcgatttaaaacca

SEQ ID NO: 157319 - DNA, 19 bp, Homo sapiens
  siRNA target sequence for LNPEP (NM_005575.1,1798-1816).
cagctatgcatctattcaa

SEQ ID NO: 157320 - DNA, 19 bp, Homo sapiens
  siRNA target sequence for LNPEP (NM_005575.1,1820-1838).
gatgatctgtgggatagtt

SEQ ID NO: 157321 - DNA, 19 bp, Homo sapiens
  siRNA target sequence for LNPEP (NM_005575.1,1836-1854).
gttttaatgaggtcacaaa

SEQ ID NO: 157322 - DNA, 19 bp, Homo sapiens
  siRNA target sequence for LNPEP (NM_005575.1,1849-1867).
cacaaaccaaacactagat

SEQ ID NO: 157323 - DNA, 19 bp, Homo sapiens
  siRNA target sequence for LNPEP (NM_005575.1,1860-1878).
cactagatgtaaagagaat

SEQ ID NO: 157324 - DNA, 19 bp, Homo sapiens
  siRNA target sequence for LNPEP (NM_005575.1,1862-1880).
ctagatgtaaagagaatga

SEQ ID NO: 157325 - DNA, 19 bp, Homo sapiens
  siRNA target sequence for LNPEP (NM_005575.1,2017-2035).
gcatattccactatcctat

SEQ ID NO: 157326 - DNA, 19 bp, Homo sapiens
  siRNA target sequence for LNPEP (NM_005575.1,2070-2088).
cggtatcattactggataa

SEQ ID NO: 157327 - DNA, 19 bp, Homo sapiens
  siRNA target sequence for LNPEP (NM_005575.1,2072-2090).
gtatcattactggataaga

SEQ ID NO: 157328 - DNA, 19 bp, Homo sapiens
  siRNA target sequence for LNPEP (NM_005575.1,2101-2119).
catcaatcttacagaagaa

SEQ ID NO: 157329 - DNA, 19 bp, Homo sapiens
  siRNA target sequence for LNPEP (NM_005575.1,2120-2138).
gtgctgtgggtcaaagtga

SEQ ID NO: 157330 - DNA, 19 bp, Homo sapiens
  siRNA target sequence for LNPEP (NM_005575.1,2122-2140).
gctgtgggtcaaagtgaat

SEQ ID NO: 157331 - DNA, 19 bp, Homo sapiens
  siRNA target sequence for LNPEP (NM_005575.1,2127-2145).
gggtcaaagtgaatataaa

SEQ ID NO: 157332 - DNA, 19 bp, Homo sapiens
  siRNA target sequence for LNPEP (NM_005575.1,2193-2211).
cactaatccatcagttgaa

SEQ ID NO: 157333 - DNA, 19 bp, Homo sapiens
  siRNA target sequence for LNPEP (NM_005575.1,2240-2258).
gaccgagccaaccttatca

SEQ ID NO: 157334 - DNA, 19 bp, Homo sapiens
  siRNA target sequence for LNPEP (NM_005575.1,2243-2261).
cgagccaaccttatcaaca

SEQ ID NO: 157335 - DNA, 19 bp, Homo sapiens
  siRNA target sequence for LNPEP (NM_005575.1,2246-2264).
gccaaccttatcaacaaca

SEQ ID NO: 157336 - DNA, 19 bp, Homo sapiens
  siRNA target sequence for LNPEP (NM_005575.1,2304-2322).
gggcctttgatttgattaa

SEQ ID NO: 157337 - DNA, 19 bp, Homo sapiens
  siRNA target sequence for LNPEP (NM_005575.1,2305-2323).
ggcctttgatttgattaat

SEQ ID NO: 157338 - DNA, 19 bp, Homo sapiens
  siRNA target sequence for LNPEP (NM_005575.1,2432-2450).
ctggtgactagggtattta

SEQ ID NO: 157339 - DNA, 19 bp, Homo sapiens
  siRNA target sequence for LNPEP (NM_005575.1,2435-2453).
gtgactagggtatttaaat

SEQ ID NO: 157340 - DNA, 19 bp, Homo sapiens
  siRNA target sequence for LNPEP (NM_005575.1,2437-2455).
gactagggtatttaaatta

SEQ ID NO: 157341 - DNA, 19 bp, Homo sapiens
  siRNA target sequence for LNPEP (NM_005575.1,2439-2457).
ctagggtatttaaattact

SEQ ID NO: 157342 - DNA, 19 bp, Homo sapiens
  siRNA target sequence for LNPEP (NM_005575.1,2520-2538).
ggtcagccctgctagagtt

SEQ ID NO: 157343 - DNA, 19 bp, Homo sapiens
  siRNA target sequence for LNPEP (NM_005575.1,2555-2573).
ctggggaactgctctacta

SEQ ID NO: 157344 - DNA, 19 bp, Homo sapiens
  siRNA target sequence for LNPEP (NM_005575.1,2557-2575).
ggggaactgctctactact

SEQ ID NO: 157345 - DNA, 19 bp, Homo sapiens
  siRNA target sequence for LNPEP (NM_005575.1,2627-2645).
cctactgatgtcatgacaa

SEQ ID NO: 157346 - DNA, 19 bp, Homo sapiens
  siRNA target sequence for LNPEP (NM_005575.1,2653-2671).
caaagttggagcaaaaact

SEQ ID NO: 157347 - DNA, 19 bp, Homo sapiens
  siRNA target sequence for LNPEP (NM_005575.1,2674-2692).
caaaggctggtcattcctt

SEQ ID NO: 157348 - DNA, 19 bp, Homo sapiens
  siRNA target sequence for LNPEP (NM_005575.1,2799-2817).
gcctgaatggagataactt

SEQ ID NO: 157349 - DNA, 19 bp, Homo sapiens
  siRNA target sequence for LNPEP (NM_005575.1,2831-2849).
ctgtcttttatcattagaa

SEQ ID NO: 157350 - DNA, 19 bp, Homo sapiens
  siRNA target sequence for LNPEP (NM_005575.1,2847-2865).
gaacagtgggtcgacattt

SEQ ID NO: 157351 - DNA, 19 bp, Homo sapiens
  siRNA target sequence for LNPEP (NM_005575.1,2875-2893).
cttactggcatgggatttt

SEQ ID NO: 157352 - DNA, 19 bp, Homo sapiens
  siRNA target sequence for LNPEP (NM_005575.1,2935-2953).
ggggtcctataccatacaa

SEQ ID NO: 157353 - DNA, 19 bp, Homo sapiens
  siRNA target sequence for LNPEP (NM_005575.1,2936-2954).
gggtcctataccatacaaa

SEQ ID NO: 157354 - DNA, 19 bp, Homo sapiens
  siRNA target sequence for LNPEP (NM_005575.1,2937-2955).
ggtcctataccatacaaaa

SEQ ID NO: 157355 - DNA, 19 bp, Homo sapiens
  siRNA target sequence for LNPEP (NM_005575.1,2938-2956).
gtcctataccatacaaaat

SEQ ID NO: 157356 - DNA, 19 bp, Homo sapiens
  siRNA target sequence for LNPEP (NM_005575.1,2941-2959).
ctataccatacaaaatatt

SEQ ID NO: 157357 - DNA, 19 bp, Homo sapiens
  siRNA target sequence for LNPEP (NM_005575.1,3064-3082).
ggaggctttggaagtcatt

SEQ ID NO: 157358 - DNA, 19 bp, Homo sapiens
  siRNA target sequence for LOC51321 (NM_016627.1,693-711).
cagatggtgtggggatatt

SEQ ID NO: 157359 - DNA, 19 bp, Homo sapiens
  siRNA target sequence for LOC51321 (NM_016627.1,695-713).
gatggtgtggggatattca

SEQ ID NO: 157360 - DNA, 19 bp, Homo sapiens
  siRNA target sequence for LOC51321 (NM_016627.1,786-804).
cttcaagtgactattcaat

SEQ ID NO: 157361 - DNA, 19 bp, Homo sapiens
  siRNA target sequence for LOC51321 (NM_016627.1,808-826).
cgacaactattatattcca

SEQ ID NO: 157362 - DNA, 19 bp, Homo sapiens
  siRNA target sequence for LOC51321 (NM_016627.1,825-843).
cagaaataactagtgtttt

SEQ ID NO: 157363 - DNA, 19 bp, Homo sapiens
  siRNA target sequence for LOC51321 (NM_016627.1,845-863).
ctacttcgatcctgtaaga

SEQ ID NO: 157364 - DNA, 19 bp, Homo sapiens
  siRNA target sequence for LOC51321 (NM_016627.1,848-866).
cttcgatcctgtaagactt

SEQ ID NO: 157365 - DNA, 19 bp, Homo sapiens
  siRNA target sequence for LOC51321 (NM_016627.1,871-889).
ccatgagatcggacacata

SEQ ID NO: 157366 - DNA, 19 bp, Homo sapiens
  siRNA target sequence for LOC51321 (NM_016627.1,1132-1150).
cgtggaagcctttaaggaa

SEQ ID NO: 157367 - DNA, 19 bp, Homo sapiens
  siRNA target sequence for LOC51725 (NM_016298.1,206-224).
cacctcctgcctggtaata

SEQ ID NO: 157368 - DNA, 19 bp, Homo sapiens
  siRNA target sequence for LOC51725 (NM_016298.1,308-326).
gtgcctcaactccgaatat

SEQ ID NO: 157369 - DNA, 19 bp, Homo sapiens
  siRNA target sequence for LOC51725 (NM_016298.1,340-358).
ccatgtcccgccacaaact

SEQ ID NO: 157370 - DNA, 19 bp, Homo sapiens
  siRNA target sequence for LOC51725 (NM_016298.1,412-430).
ggaaccgctggccaaatgt

SEQ ID NO: 157371 - DNA, 19 bp, Homo sapiens
  siRNA target sequence for LOC51725 (NM_016298.1,445-463).
cccttcatgaaaacatcat

SEQ ID NO: 157372 - DNA, 19 bp, Homo sapiens
  siRNA target sequence for LOC51725 (NM_016298.1,472-490).
cccccagtgaggagtgttt

SEQ ID NO: 157373 - DNA, 19 bp, Homo sapiens
  siRNA target sequence for LOC51725 (NM_016298.1,516-534).
cagaaggtcctcttcagat

SEQ ID NO: 157374 - DNA, 19 bp, Homo sapiens
  siRNA target sequence for LOC51725 (NM_016298.1,524-542).
cctcttcagatccttgaaa

SEQ ID NO: 157375 - DNA, 19 bp, Homo sapiens
  siRNA target sequence for LOC51725 (NM_016298.1,581-599).
ggaggaaccaactatgaat

SEQ ID NO: 157376 - DNA, 19 bp, Homo sapiens
  siRNA target sequence for LOC51725 (NM_016298.1,689-707).
gatggcagagctaagtcaa

SEQ ID NO: 157377 - DNA, 19 bp, Homo sapiens
  siRNA target sequence for LOC51725 (NM_016298.1,717-735).
gaggtgctagccaaaacca

SEQ ID NO: 157378 - DNA, 19 bp, Homo sapiens
  siRNA target sequence for LOC51725 (NM_016298.1,719-737).
ggtgctagccaaaaccaaa

SEQ ID NO: 157379 - DNA, 19 bp, Homo sapiens
  siRNA target sequence for LOC51725 (NM_016298.1,798-816).
gcctctgctttaacaaatt

SEQ ID NO: 157380 - DNA, 19 bp, Homo sapiens
  siRNA target sequence for LOC51725 (NM_016298.1,800-818).
ctctgctttaacaaattca

SEQ ID NO: 157381 - DNA, 19 bp, Homo sapiens
  siRNA target sequence for LOC51725 (NM_016298.1,851-869).
ctccgagaaagaacagatt

SEQ ID NO: 157382 - DNA, 19 bp, Homo sapiens
  siRNA target sequence for LOC51725 (NM_016298.1,895-913).
gagagggcgctcccaaaaa

SEQ ID NO: 157383 - DNA, 19 bp, Homo sapiens
  siRNA target sequence for LOC51725 (NM_016298.1,897-915).
gagggcgctcccaaaaaga

SEQ ID NO: 157384 - DNA, 19 bp, Homo sapiens
  siRNA target sequence for LOC51725 (NM_016298.1,948-966).
gttcgtacagccatggaaa

SEQ ID NO: 157385 - DNA, 19 bp, Homo sapiens
  siRNA target sequence for LOC51725 (NM_016298.1,1023-1041).
gatgcaaaggactataaca

SEQ ID NO: 157386 - DNA, 19 bp, Homo sapiens
  siRNA target sequence for LOC51725 (NM_016298.1,1026-1044).
gcaaaggactataacatgt

SEQ ID NO: 157387 - DNA, 19 bp, Homo sapiens
  siRNA target sequence for LOC51725 (NM_016298.1,1027-1045).
caaaggactataacatgta

SEQ ID NO: 157388 - DNA, 19 bp, Homo sapiens
  siRNA target sequence for LOC51725 (NM_016298.1,1031-1049).
ggactataacatgtatcta

SEQ ID NO: 157389 - DNA, 19 bp, Homo sapiens
  siRNA target sequence for LOC51725 (NM_016298.1,1059-1077).
gggcggatgctgatacact

SEQ ID NO: 157390 - DNA, 19 bp, Homo sapiens
  siRNA target sequence for LOC51725 (NM_016298.1,1060-1078).
ggcggatgctgatacactt

SEQ ID NO: 157391 - DNA, 19 bp, Homo sapiens
  siRNA target sequence for LOC51725 (NM_016298.1,1103-1121).
caaggagagagactttgtt

SEQ ID NO: 157392 - DNA, 19 bp, Homo sapiens
  siRNA target sequence for LOC51725 (NM_016298.1,1131-1149).
ctggaggctcaggaagtta

SEQ ID NO: 157393 - DNA, 19 bp, Homo sapiens
  siRNA target sequence for LOC51725 (NM_016298.1,1136-1154).
ggctcaggaagttaagact

SEQ ID NO: 157394 - DNA, 19 bp, Homo sapiens
  siRNA target sequence for LOC51725 (NM_016298.1,1151-1169).
gactgtttacaccttcaaa

SEQ ID NO: 157395 - DNA, 19 bp, Homo sapiens
  siRNA target sequence for LOC51725 (NM_016298.1,1153-1171).
ctgtttacaccttcaaagt

SEQ ID NO: 157396 - DNA, 19 bp, Homo sapiens
  siRNA target sequence for LOC51725 (NM_016298.1,1220-1238).
gagttgtaagccaagtgaa

SEQ ID NO: 157397 - DNA, 19 bp, Homo sapiens
  siRNA target sequence for LOC51725 (NM_016298.1,1244-1262).
ggcagtggatacttcagat

SEQ ID NO: 157398 - DNA, 19 bp, Homo sapiens
  siRNA target sequence for LOC51725 (NM_016298.1,1280-1298).
ggacctgcccaaatcagat

SEQ ID NO: 157399 - DNA, 19 bp, Homo sapiens
  siRNA target sequence for LOC51725 (NM_016298.1,1355-1373).
ctctgaatccagaagcatt

SEQ ID NO: 157400 - DNA, 19 bp, Homo sapiens
  siRNA target sequence for LOC51725 (NM_016298.1,1388-1406).
ggattttgccacacaaaca

SEQ ID NO: 157401 - DNA, 19 bp, Homo sapiens
  siRNA target sequence for LOC51725 (NM_016298.1,1599-1617).
gtccacacagacattcagt

SEQ ID NO: 157402 - DNA, 19 bp, Homo sapiens
  siRNA target sequence for LOC51725 (NM_016298.1,1655-1673).
cgcctacttgggatgtaca

SEQ ID NO: 157403 - DNA, 19 bp, Homo sapiens
  siRNA target sequence for LOC51725 (NM_016298.1,1656-1674).
gcctacttgggatgtacat

SEQ ID NO: 157404 - DNA, 19 bp, Homo sapiens
  siRNA target sequence for LOC51725 (NM_016298.1,1657-1675).
cctacttgggatgtacatt

SEQ ID NO: 157405 - DNA, 19 bp, Homo sapiens
  siRNA target sequence for LOC51725 (NM_016298.1,1672-1690).
catttgttcaaaaccattt

SEQ ID NO: 157406 - DNA, 19 bp, Homo sapiens
  siRNA target sequence for LOC51725 (NM_016298.1,1701-1719).
gggcaaaaggcaaaagtaa

SEQ ID NO: 157407 - DNA, 19 bp, Homo sapiens
  siRNA target sequence for LOC51725 (NM_016298.1,1917-1935).
gtgctgatgaggaatatct

SEQ ID NO: 157408 - DNA, 19 bp, Homo sapiens
  siRNA target sequence for LOC51725 (NM_016298.1,1957-1975).
gaggaatggtccttttgca

SEQ ID NO: 157409 - DNA, 19 bp, Homo sapiens
  siRNA target sequence for LOC51725 (NM_016298.1,2116-2134).
gtcctttcaacattgtaga

SEQ ID NO: 157410 - DNA, 19 bp, Homo sapiens
  siRNA target sequence for LOC51725 (NM_016298.1,2126-2144).
cattgtagagcacaaaact

SEQ ID NO: 157411 - DNA, 19 bp, Homo sapiens
  siRNA target sequence for LOC51725 (NM_016298.1,2187-2205).
gcccgagagagcttagtct

SEQ ID NO: 157412 - DNA, 19 bp, Homo sapiens
  siRNA target sequence for LOC51725 (NM_016298.1,2202-2220).
gtctccacctttagaatca

SEQ ID NO: 157413 - DNA, 19 bp, Homo sapiens
  siRNA target sequence for LRAP (NM_022350.1,136-154).
ctgcaatggttaattcaca

SEQ ID NO: 157414 - DNA, 19 bp, Homo sapiens
  siRNA target sequence for LRAP (NM_022350.1,162-180).
ccaatgtttaacattcaca

SEQ ID NO: 157415 - DNA, 19 bp, Homo sapiens
  siRNA target sequence for LRAP (NM_022350.1,206-224).
cttgccccaaatatgcatt

SEQ ID NO: 157416 - DNA, 19 bp, Homo sapiens
  siRNA target sequence for LRAP (NM_022350.1,233-251).
gttctcagtgccatctagt

SEQ ID NO: 157417 - DNA, 19 bp, Homo sapiens
  siRNA target sequence for LRAP (NM_022350.1,236-254).
ctcagtgccatctagttat

SEQ ID NO: 157418 - DNA, 19 bp, Homo sapiens
  siRNA target sequence for LRAP (NM_022350.1,240-258).
gtgccatctagttatcact

SEQ ID NO: 157419 - DNA, 19 bp, Homo sapiens
  siRNA target sequence for LRAP (NM_022350.1,427-445).
gcaatgctacccagtttat

SEQ ID NO: 157420 - DNA, 19 bp, Homo sapiens
  siRNA target sequence for LRAP (NM_022350.1,452-470).
gcacagcaaagatcttgaa

SEQ ID NO: 157421 - DNA, 19 bp, Homo sapiens
  siRNA target sequence for LRAP (NM_022350.1,493-511).
cagaggaagattcaagata

SEQ ID NO: 157422 - DNA, 19 bp, Homo sapiens
  siRNA target sequence for LRAP (NM_022350.1,542-560).
gagttaccctgctcatgaa

SEQ ID NO: 157423 - DNA, 19 bp, Homo sapiens
  siRNA target sequence for LRAP (NM_022350.1,572-590).
gctggttccagagaaactt

SEQ ID NO: 157424 - DNA, 19 bp, Homo sapiens
  siRNA target sequence for LRAP (NM_022350.1,588-606).
cttacgcctcacctgaaat

SEQ ID NO: 157425 - DNA, 19 bp, Homo sapiens
  siRNA target sequence for LRAP (NM_022350.1,592-610).
cgcctcacctgaaatacta

SEQ ID NO: 157426 - DNA, 19 bp, Homo sapiens
  siRNA target sequence for LRAP (NM_022350.1,620-638).
ggacttccaagccaagtta

SEQ ID NO: 157427 - DNA, 19 bp, Homo sapiens
  siRNA target sequence for LRAP (NM_022350.1,685-703).
gtggtgaaacaagaattct

SEQ ID NO: 157428 - DNA, 19 bp, Homo sapiens
  siRNA target sequence for LRAP (NM_022350.1,774-792).
gccaacttttcaatcaaga

SEQ ID NO: 157429 - DNA, 19 bp, Homo sapiens
  siRNA target sequence for LRAP (NM_022350.1,775-793).
ccaacttttcaatcaagat

SEQ ID NO: 157430 - DNA, 19 bp, Homo sapiens
  siRNA target sequence for LRAP (NM_022350.1,823-841).
ccaacatgccaaaggttaa

SEQ ID NO: 157431 - DNA, 19 bp, Homo sapiens
  siRNA target sequence for LRAP (NM_022350.1,827-845).
catgccaaaggttaagaca

SEQ ID NO: 157432 - DNA, 19 bp, Homo sapiens
  siRNA target sequence for LRAP (NM_022350.1,830-848).
gccaaaggttaagacaatt

SEQ ID NO: 157433 - DNA, 19 bp, Homo sapiens
  siRNA target sequence for LRAP (NM_022350.1,859-877).
gaggtcttttggaagatca

SEQ ID NO: 157434 - DNA, 19 bp, Homo sapiens
  siRNA target sequence for LRAP (NM_022350.1,878-896).
ctttgaaactactgtaaaa

SEQ ID NO: 157435 - DNA, 19 bp, Homo sapiens
  siRNA target sequence for LRAP (NM_022350.1,915-933).
gcctacatagtttgtgatt

SEQ ID NO: 157436 - DNA, 19 bp, Homo sapiens
  siRNA target sequence for LRAP (NM_022350.1,916-934).
cctacatagtttgtgattt

SEQ ID NO: 157437 - DNA, 19 bp, Homo sapiens
  siRNA target sequence for LRAP (NM_022350.1,965-983).
ggtcaaggtgtccatctat

SEQ ID NO: 157438 - DNA, 19 bp, Homo sapiens
  siRNA target sequence for LRAP (NM_022350.1,989-1007).
cccagacaaacggaatcaa

SEQ ID NO: 157439 - DNA, 19 bp, Homo sapiens
  siRNA target sequence for LRAP (NM_022350.1,995-1013).
caaacggaatcaaacacat

SEQ ID NO: 157440 - DNA, 19 bp, Homo sapiens
  siRNA target sequence for LRAP (NM_022350.1,1027-1045).
catcactgaagctacttga

SEQ ID NO: 157441 - DNA, 19 bp, Homo sapiens
  siRNA target sequence for LRAP (NM_022350.1,1131-1149).
gaaaattggggcctcatta

SEQ ID NO: 157442 - DNA, 19 bp, Homo sapiens
  siRNA target sequence for LRAP (NM_022350.1,1208-1226).
gtgggtcaccagagtcata

SEQ ID NO: 157443 - DNA, 19 bp, Homo sapiens
  siRNA target sequence for LRAP (NM_022350.1,1219-1237).
gagtcatagcccatgaact

SEQ ID NO: 157444 - DNA, 19 bp, Homo sapiens
  siRNA target sequence for LRAP (NM_022350.1,1293-1311).
cttaaggagggttttgcaa

SEQ ID NO: 157445 - DNA, 19 bp, Homo sapiens
  siRNA target sequence for LRAP (NM_022350.1,1309-1327).
caaaatacatggaacttat

SEQ ID NO: 157446 - DNA, 19 bp, Homo sapiens
  siRNA target sequence for LRAP (NM_022350.1,1319-1337).
ggaacttatcgctgttaat

SEQ ID NO: 157447 - DNA, 19 bp, Homo sapiens
  siRNA target sequence for LRAP (NM_022350.1,1323-1341).
cttatcgctgttaatgcta

SEQ ID NO: 157448 - DNA, 19 bp, Homo sapiens
  siRNA target sequence for LRAP (NM_022350.1,1352-1370).
gctgcaatttgatgactat

SEQ ID NO: 157449 - DNA, 19 bp, Homo sapiens
  siRNA target sequence for LRAP (NM_022350.1,1355-1373).
gcaatttgatgactatttt

SEQ ID NO: 157450 - DNA, 19 bp, Homo sapiens
  siRNA target sequence for LRAP (NM_022350.1,1440-1458).
gcggaaaccccgactcaaa

SEQ ID NO: 157451 - DNA, 19 bp, Homo sapiens
  siRNA target sequence for LRAP (NM_022350.1,1473-1491).
gatgaagtttcctataaca

SEQ ID NO: 157452 - DNA, 19 bp, Homo sapiens
  siRNA target sequence for LRAP (NM_022350.1,1551-1569).
ggaataattcagtacttaa

SEQ ID NO: 157453 - DNA, 19 bp, Homo sapiens
  siRNA target sequence for LRAP (NM_022350.1,1571-1589).
gaagttcagctatagaaat

SEQ ID NO: 157454 - DNA, 19 bp, Homo sapiens
  siRNA target sequence for LRAP (NM_022350.1,1607-1625).
gtggagcagtctgtcaaat

SEQ ID NO: 157455 - DNA, 19 bp, Homo sapiens
  siRNA target sequence for LRAP (NM_022350.1,1610-1628).
gagcagtctgtcaaatagt

SEQ ID NO: 157456 - DNA, 19 bp, Homo sapiens
  siRNA target sequence for LRAP (NM_022350.1,1613-1631).
cagtctgtcaaatagttgt

SEQ ID NO: 157457 - DNA, 19 bp, Homo sapiens
  siRNA target sequence for LRAP (NM_022350.1,1648-1666).
catctggtggagtttgtca

SEQ ID NO: 157458 - DNA, 19 bp, Homo sapiens
  siRNA target sequence for LRAP (NM_022350.1,1665-1683).
cattcggatcccaagatga

SEQ ID NO: 157459 - DNA, 19 bp, Homo sapiens
  siRNA target sequence for LRAP (NM_022350.1,1671-1689).
gatcccaagatgacaagta

SEQ ID NO: 157460 - DNA, 19 bp, Homo sapiens
  siRNA target sequence for LRAP (NM_022350.1,1674-1692).
cccaagatgacaagtaaca

SEQ ID NO: 157461 - DNA, 19 bp, Homo sapiens
  siRNA target sequence for LRAP (NM_022350.1,1675-1693).
ccaagatgacaagtaacat

SEQ ID NO: 157462 - DNA, 19 bp, Homo sapiens
  siRNA target sequence for LRAP (NM_022350.1,1763-1781).
ccccctgctggtggttaaa

SEQ ID NO: 157463 - DNA, 19 bp, Homo sapiens
  siRNA target sequence for LRAP (NM_022350.1,1766-1784).
cctgctggtggttaaacaa

SEQ ID NO: 157464 - DNA, 19 bp, Homo sapiens
  siRNA target sequence for LRAP (NM_022350.1,1895-1913).
ctactccacgagttcttct

SEQ ID NO: 157465 - DNA, 19 bp, Homo sapiens
  siRNA target sequence for LRAP (NM_022350.1,1900-1918).
ccacgagttcttctaatgt

SEQ ID NO: 157466 - DNA, 19 bp, Homo sapiens
  siRNA target sequence for LRAP (NM_022350.1,1903-1921).
cgagttcttctaatgtgat

SEQ ID NO: 157467 - DNA, 19 bp, Homo sapiens
  siRNA target sequence for LRAP (NM_022350.1,1973-1991).
gaccagttgggtgaaattt

SEQ ID NO: 157468 - DNA, 19 bp, Homo sapiens
  siRNA target sequence for LRAP (NM_022350.1,1978-1996).
gttgggtgaaatttaatgt

SEQ ID NO: 157469 - DNA, 19 bp, Homo sapiens
  siRNA target sequence for LRAP (NM_022350.1,1998-2016).
gactcaaatggttactaca

SEQ ID NO: 157470 - DNA, 19 bp, Homo sapiens
  siRNA target sequence for LRAP (NM_022350.1,2008-2026).
gttactacatcgttcacta

SEQ ID NO: 157471 - DNA, 19 bp, Homo sapiens
  siRNA target sequence for LRAP (NM_022350.1,2037-2055).
ggatgggaccaactcatta

SEQ ID NO: 157472 - DNA, 19 bp, Homo sapiens
  siRNA target sequence for LRAP (NM_022350.1,2041-2059).
gggaccaactcattacaca

SEQ ID NO: 157473 - DNA, 19 bp, Homo sapiens
  siRNA target sequence for LRAP (NM_022350.1,2098-2116).
gagtaggtctgattcatga

SEQ ID NO: 157474 - DNA, 19 bp, Homo sapiens
  siRNA target sequence for LRAP (NM_022350.1,2104-2122).
gtctgattcatgatgtgtt

SEQ ID NO: 157475 - DNA, 19 bp, Homo sapiens
  siRNA target sequence for LRAP (NM_022350.1,2160-2178).
gctcttgacatgacttact

SEQ ID NO: 157476 - DNA, 19 bp, Homo sapiens
  siRNA target sequence for LRAP (NM_022350.1,2161-2179).
ctcttgacatgacttacta

SEQ ID NO: 157477 - DNA, 19 bp, Homo sapiens
  siRNA target sequence for LRAP (NM_022350.1,2177-2195).
ctacctccaacatgaaaca

SEQ ID NO: 157478 - DNA, 19 bp, Homo sapiens
  siRNA target sequence for LRAP (NM_022350.1,2211-2229).
ctcgaaggtctgagttact

SEQ ID NO: 157479 - DNA, 19 bp, Homo sapiens
  siRNA target sequence for LRAP (NM_022350.1,2224-2242).
gttacttggaatcgtttta

SEQ ID NO: 157480 - DNA, 19 bp, Homo sapiens
  siRNA target sequence for LRAP (NM_022350.1,2261-2279).
gaatatttcagatatctct

SEQ ID NO: 157481 - DNA, 19 bp, Homo sapiens
  siRNA target sequence for LRAP (NM_022350.1,2291-2309).
gcgttaccttcttcagtat

SEQ ID NO: 157482 - DNA, 19 bp, Homo sapiens
  siRNA target sequence for LRAP (NM_022350.1,2529-2547).
gcaggatggaattaccttt

SEQ ID NO: 157483 - DNA, 19 bp, Homo sapiens
  siRNA target sequence for LRAP (NM_022350.1,2611-2629).
cgagcaagcatcaggaaaa

SEQ ID NO: 157484 - DNA, 19 bp, Homo sapiens
  siRNA target sequence for LRAP (NM_022350.1,2740-2758).
gggattttgtaagagaaaa

SEQ ID NO: 157485 - DNA, 19 bp, Homo sapiens
  siRNA target sequence for LRAP (NM_022350.1,2784-2802).
gacttgggctcatatgaca

SEQ ID NO: 157486 - DNA, 19 bp, Homo sapiens
  siRNA target sequence for LRAP (NM_022350.1,2786-2804).
cttgggctcatatgacata

SEQ ID NO: 157487 - DNA, 19 bp, Homo sapiens
  siRNA target sequence for LRAP (NM_022350.1,2790-2808).
ggctcatatgacataagga

SEQ ID NO: 157488 - DNA, 19 bp, Homo sapiens
  siRNA target sequence for LRAP (NM_022350.1,2799-2817).
gacataaggatgatcatct

SEQ ID NO: 157489 - DNA, 19 bp, Homo sapiens
  siRNA target sequence for LRAP (NM_022350.1,2832-2850).
cacttttcttccaaggata

SEQ ID NO: 157490 - DNA, 19 bp, Homo sapiens
  siRNA target sequence for LRAP (NM_022350.1,2852-2870).
gttgcaagaggtgaaacta

SEQ ID NO: 157491 - DNA, 19 bp, Homo sapiens
  siRNA target sequence for LRAP (NM_022350.1,2895-2913).
ggatcacatctggatattt

SEQ ID NO: 157492 - DNA, 19 bp, Homo sapiens
  siRNA target sequence for LRAP (NM_022350.1,2896-2914).
gatcacatctggatatttt

SEQ ID NO: 157493 - DNA, 19 bp, Homo sapiens
  siRNA target sequence for LRAP (NM_022350.1,2922-2940).
gttctggaaacgataacca

SEQ ID NO: 157494 - DNA, 19 bp, Homo sapiens
  siRNA target sequence for LRAP (NM_022350.1,2925-2943).
ctggaaacgataaccaaaa

SEQ ID NO: 157495 - DNA, 19 bp, Homo sapiens
  siRNA target sequence for LRAP (NM_022350.1,2980-2998).
ggacttggctaatggttaa

SEQ ID NO: 157496 - DNA, 19 bp, Homo sapiens
  siRNA target sequence for LRAP (NM_022350.1,2981-2999).
gacttggctaatggttaat

SEQ ID NO: 157497 - DNA, 19 bp, Homo sapiens
  siRNA target sequence for LTA4H (NM_000895.1,141-159).
cgctgcagcgtcgacttta

SEQ ID NO: 157498 - DNA, 19 bp, Homo sapiens
  siRNA target sequence for LTA4H (NM_000895.1,143-161).
ctgcagcgtcgactttact

SEQ ID NO: 157499 - DNA, 19 bp, Homo sapiens
  siRNA target sequence for LTA4H (NM_000895.1,218-236).
gcgcagcctggttttggat

SEQ ID NO: 157500 - DNA, 19 bp, Homo sapiens
  siRNA target sequence for LTA4H (NM_000895.1,238-256).
caaaggaccttacaataga

SEQ ID NO: 157501 - DNA, 19 bp, Homo sapiens
  siRNA target sequence for LTA4H (NM_000895.1,318-336).
ggatcgccaatggaaatct

SEQ ID NO: 157502 - DNA, 19 bp, Homo sapiens
  siRNA target sequence for LTA4H (NM_000895.1,342-360).
cctatcgctttgagcaaaa

SEQ ID NO: 157503 - DNA, 19 bp, Homo sapiens
  siRNA target sequence for LTA4H (NM_000895.1,347-365).
cgctttgagcaaaaatcaa

SEQ ID NO: 157504 - DNA, 19 bp, Homo sapiens
  siRNA target sequence for LTA4H (NM_000895.1,390-408).
gagacctctccaaaatctt

SEQ ID NO: 157505 - DNA, 19 bp, Homo sapiens
  siRNA target sequence for LTA4H (NM_000895.1,445-463).
ggaaggaacacccatatct

SEQ ID NO: 157506 - DNA, 19 bp, Homo sapiens
  siRNA target sequence for LTA4H (NM_000895.1,449-467).
ggaacacccatatctcttt

SEQ ID NO: 157507 - DNA, 19 bp, Homo sapiens
  siRNA target sequence for LTA4H (NM_000895.1,512-530).
ggacactccttctgtgaaa

SEQ ID NO: 157508 - DNA, 19 bp, Homo sapiens
  siRNA target sequence for LTA4H (NM_000895.1,572-590).
ggcacttatgagtgctatt

SEQ ID NO: 157509 - DNA, 19 bp, Homo sapiens
  siRNA target sequence for LTA4H (NM_000895.1,664-682).
cctgctacctgattgcttt

SEQ ID NO: 157510 - DNA, 19 bp, Homo sapiens
  siRNA target sequence for LTA4H (NM_000895.1,665-683).
ctgctacctgattgcttta

SEQ ID NO: 157511 - DNA, 19 bp, Homo sapiens
  siRNA target sequence for LTA4H (NM_000895.1,667-685).
gctacctgattgctttagt

SEQ ID NO: 157512 - DNA, 19 bp, Homo sapiens
  siRNA target sequence for LTA4H (NM_000895.1,749-767).
ggtggaaaagtctgcttat

SEQ ID NO: 157513 - DNA, 19 bp, Homo sapiens
  siRNA target sequence for LTA4H (NM_000895.1,758-776).
gtctgcttatgagttttct

SEQ ID NO: 157514 - DNA, 19 bp, Homo sapiens
  siRNA target sequence for LTA4H (NM_000895.1,810-828).
ctgggaggaccgtatgtat

SEQ ID NO: 157515 - DNA, 19 bp, Homo sapiens
  siRNA target sequence for LTA4H (NM_000895.1,821-839).
gtatgtatggggacagtat

SEQ ID NO: 157516 - DNA, 19 bp, Homo sapiens
  siRNA target sequence for LTA4H (NM_000895.1,829-847).
ggggacagtatgacctatt

SEQ ID NO: 157517 - DNA, 19 bp, Homo sapiens
  siRNA target sequence for LTA4H (NM_000895.1,832-850).
gacagtatgacctattggt

SEQ ID NO: 157518 - DNA, 19 bp, Homo sapiens
  siRNA target sequence for LTA4H (NM_000895.1,947-965).
cattgcacatgaaatatct

SEQ ID NO: 157519 - DNA, 19 bp, Homo sapiens
  siRNA target sequence for LTA4H (NM_000895.1,980-998).
gaatctagtgaccaacaaa

SEQ ID NO: 157520 - DNA, 19 bp, Homo sapiens
  siRNA target sequence for LTA4H (NM_000895.1,1003-1021).
gggatcacttttggttaaa

SEQ ID NO: 157521 - DNA, 19 bp, Homo sapiens
  siRNA target sequence for LTA4H (NM_000895.1,1004-1022).
ggatcacttttggttaaat

SEQ ID NO: 157522 - DNA, 19 bp, Homo sapiens
  siRNA target sequence for LTA4H (NM_000895.1,1016-1034).
gttaaatgagggacatact

SEQ ID NO: 157523 - DNA, 19 bp, Homo sapiens
  siRNA target sequence for LTA4H (NM_000895.1,1052-1070).
catttgcggacgattgttt

SEQ ID NO: 157524 - DNA, 19 bp, Homo sapiens
  siRNA target sequence for LTA4H (NM_000895.1,1062-1080).
cgattgtttggtgaaaagt

SEQ ID NO: 157525 - DNA, 19 bp, Homo sapiens
  siRNA target sequence for LTA4H (NM_000895.1,1063-1081).
gattgtttggtgaaaagtt

SEQ ID NO: 157526 - DNA, 19 bp, Homo sapiens
  siRNA target sequence for LTA4H (NM_000895.1,1116-1134).
ctacagaattcggtaaaga

SEQ ID NO: 157527 - DNA, 19 bp, Homo sapiens
  siRNA target sequence for LTA4H (NM_000895.1,1119-1137).
cagaattcggtaaagacat

SEQ ID NO: 157528 - DNA, 19 bp, Homo sapiens
  siRNA target sequence for LTA4H (NM_000895.1,1188-1206).
gaccctgatgtagcttatt

SEQ ID NO: 157529 - DNA, 19 bp, Homo sapiens
  siRNA target sequence for LTA4H (NM_000895.1,1207-1225).
cttcagttccctatgagaa

SEQ ID NO: 157530 - DNA, 19 bp, Homo sapiens
  siRNA target sequence for LTA4H (NM_000895.1,1223-1241).
gaagggctttgctttactt

SEQ ID NO: 157531 - DNA, 19 bp, Homo sapiens
  siRNA target sequence for LTA4H (NM_000895.1,1281-1299).
ctaggattcttaaaagctt

SEQ ID NO: 157532 - DNA, 19 bp, Homo sapiens
  siRNA target sequence for LTA4H (NM_000895.1,1305-1323).
gagaagttttcctataaga

SEQ ID NO: 157533 - DNA, 19 bp, Homo sapiens
  siRNA target sequence for LTA4H (NM_000895.1,1316-1334).
ctataagagcataactact

SEQ ID NO: 157534 - DNA, 19 bp, Homo sapiens
  siRNA target sequence for LTA4H (NM_000895.1,1383-1401).
gttctcaatcaagttgatt

SEQ ID NO: 157535 - DNA, 19 bp, Homo sapiens
  siRNA target sequence for LTA4H (NM_000895.1,1388-1406).
caatcaagttgattggaat

SEQ ID NO: 157536 - DNA, 19 bp, Homo sapiens
  siRNA target sequence for LTA4H (NM_000895.1,1432-1450).
ctcccataaagcccaatta

SEQ ID NO: 157537 - DNA, 19 bp, Homo sapiens
  siRNA target sequence for LTA4H (NM_000895.1,1435-1453).
ccataaagcccaattatga

SEQ ID NO: 157538 - DNA, 19 bp, Homo sapiens
  siRNA target sequence for LTA4H (NM_000895.1,1442-1460).
gcccaattatgatatgact

SEQ ID NO: 157539 - DNA, 19 bp, Homo sapiens
  siRNA target sequence for LTA4H (NM_000895.1,1459-1477).
ctctgacaaatgcttgtat

SEQ ID NO: 157540 - DNA, 19 bp, Homo sapiens
  siRNA target sequence for LTA4H (NM_000895.1,1471-1489).
cttgtattgccttaagtca

SEQ ID NO: 157541 - DNA, 19 bp, Homo sapiens
  siRNA target sequence for LTA4H (NM_000895.1,1495-1513).
ggattactgccaaagaaga

SEQ ID NO: 157542 - DNA, 19 bp, Homo sapiens
  siRNA target sequence for LTA4H (NM_000895.1,1547-1565).
ggatctctcttctcatcaa

SEQ ID NO: 157543 - DNA, 19 bp, Homo sapiens
  siRNA target sequence for LTA4H (NM_000895.1,1553-1571).
ctcttctcatcaattgaat

SEQ ID NO: 157544 - DNA, 19 bp, Homo sapiens
  siRNA target sequence for LTA4H (NM_000895.1,1627-1645).
gaatgcaagaggtgtacaa

SEQ ID NO: 157545 - DNA, 19 bp, Homo sapiens
  siRNA target sequence for LTA4H (NM_000895.1,1685-1703).
gctgcggctctgcattcaa

SEQ ID NO: 157546 - DNA, 19 bp, Homo sapiens
  siRNA target sequence for LTA4H (NM_000895.1,1686-1704).
ctgcggctctgcattcaat

SEQ ID NO: 157547 - DNA, 19 bp, Homo sapiens
  siRNA target sequence for LTA4H (NM_000895.1,1690-1708).
ggctctgcattcaatccaa

SEQ ID NO: 157548 - DNA, 19 bp, Homo sapiens
  siRNA target sequence for LTA4H (NM_000895.1,1747-1765).
ctgaacaaggaagaatgaa

SEQ ID NO: 157549 - DNA, 19 bp, Homo sapiens
  siRNA target sequence for LTA4H (NM_000895.1,1875-1893).
ctggtggggaaagacttaa

SEQ ID NO: 157550 - DNA, 19 bp, Homo sapiens
  siRNA target sequence for LTB4DH (NM_012212.2,137-155).
cactttgttggctatccta

SEQ ID NO: 157551 - DNA, 19 bp, Homo sapiens
  siRNA target sequence for LTB4DH (NM_012212.2,143-161).
gttggctatcctactaata

SEQ ID NO: 157552 - DNA, 19 bp, Homo sapiens
  siRNA target sequence for LTB4DH (NM_012212.2,147-165).
gctatcctactaatagtga

SEQ ID NO: 157553 - DNA, 19 bp, Homo sapiens
  siRNA target sequence for LTB4DH (NM_012212.2,156-174).
ctaatagtgactttgagtt

SEQ ID NO: 157554 - DNA, 19 bp, Homo sapiens
  siRNA target sequence for LTB4DH (NM_012212.2,253-271).
gagagtggcagccaaaaga

SEQ ID NO: 157555 - DNA, 19 bp, Homo sapiens
  siRNA target sequence for LTB4DH (NM_012212.2,255-273).
gagtggcagccaaaagatt

SEQ ID NO: 157556 - DNA, 19 bp, Homo sapiens
  siRNA target sequence for LTB4DH (NM_012212.2,257-275).
gtggcagccaaaagattga

SEQ ID NO: 157557 - DNA, 19 bp, Homo sapiens
  siRNA target sequence for LTB4DH (NM_012212.2,298-316).
gcagcaagtggccaaagtt

SEQ ID NO: 157558 - DNA, 19 bp, Homo sapiens
  siRNA target sequence for LTB4DH (NM_012212.2,332-350).
gtagccctaccaaaaggaa

SEQ ID NO: 157559 - DNA, 19 bp, Homo sapiens
  siRNA target sequence for LTB4DH (NM_012212.2,336-354).
ccctaccaaaaggaactat

SEQ ID NO: 157560 - DNA, 19 bp, Homo sapiens
  siRNA target sequence for LTB4DH (NM_012212.2,376-394).
gacaacgcactccatttct

SEQ ID NO: 157561 - DNA, 19 bp, Homo sapiens
  siRNA target sequence for LTB4DH (NM_012212.2,378-396).
caacgcactccatttctga

SEQ ID NO: 157562 - DNA, 19 bp, Homo sapiens
  siRNA target sequence for LTB4DH (NM_012212.2,427-445).
gtggccagacacaatacca

SEQ ID NO: 157563 - DNA, 19 bp, Homo sapiens
  siRNA target sequence for LTB4DH (NM_012212.2,489-507).
cctactttggcctacttga

SEQ ID NO: 157564 - DNA, 19 bp, Homo sapiens
  siRNA target sequence for LTB4DH (NM_012212.2,490-508).
ctactttggcctacttgaa

SEQ ID NO: 157565 - DNA, 19 bp, Homo sapiens
  siRNA target sequence for LTB4DH (NM_012212.2,572-590).
gtcgtggggcagattgcaa

SEQ ID NO: 157566 - DNA, 19 bp, Homo sapiens
  siRNA target sequence for LTB4DH (NM_012212.2,592-610).
gctcaagggctgcaaagtt

SEQ ID NO: 157567 - DNA, 19 bp, Homo sapiens
  siRNA target sequence for LTB4DH (NM_012212.2,659-677).
ggatttgatgtcgtcttta

SEQ ID NO: 157568 - DNA, 19 bp, Homo sapiens
  siRNA target sequence for LTB4DH (NM_012212.2,660-678).
gatttgatgtcgtctttaa

SEQ ID NO: 157569 - DNA, 19 bp, Homo sapiens
  siRNA target sequence for LTB4DH (NM_012212.2,668-686).
gtcgtctttaactacaaga

SEQ ID NO: 157570 - DNA, 19 bp, Homo sapiens
  siRNA target sequence for LTB4DH (NM_012212.2,685-703).
gacggtagagtctttggaa

SEQ ID NO: 157571 - DNA, 19 bp, Homo sapiens
  siRNA target sequence for LTB4DH (NM_012212.2,720-738).
cgtctcctgatggttatga

SEQ ID NO: 157572 - DNA, 19 bp, Homo sapiens
  siRNA target sequence for LTB4DH (NM_012212.2,725-743).
cctgatggttatgattgtt

SEQ ID NO: 157573 - DNA, 19 bp, Homo sapiens
  siRNA target sequence for LTB4DH (NM_012212.2,726-744).
ctgatggttatgattgtta

SEQ ID NO: 157574 - DNA, 19 bp, Homo sapiens
  siRNA target sequence for LTB4DH (NM_012212.2,728-746).
gatggttatgattgttatt

SEQ ID NO: 157575 - DNA, 19 bp, Homo sapiens
  siRNA target sequence for LTB4DH (NM_012212.2,755-773).
gtaggtggagagttttcaa

SEQ ID NO: 157576 - DNA, 19 bp, Homo sapiens
  siRNA target sequence for LTB4DH (NM_012212.2,758-776).
ggtggagagttttcaaaca

SEQ ID NO: 157577 - DNA, 19 bp, Homo sapiens
  siRNA target sequence for LTB4DH (NM_012212.2,777-795).
ctgttatcggccagatgaa

SEQ ID NO: 157578 - DNA, 19 bp, Homo sapiens
  siRNA target sequence for LTB4DH (NM_012212.2,779-797).
gttatcggccagatgaaga

SEQ ID NO: 157579 - DNA, 19 bp, Homo sapiens
  siRNA target sequence for LTB4DH (NM_012212.2,895-913).
gcttcgcatggaagctttt

SEQ ID NO: 157580 - DNA, 19 bp, Homo sapiens
  siRNA target sequence for LTB4DH (NM_012212.2,972-990).
gggtcttagagggtaaaat

SEQ ID NO: 157581 - DNA, 19 bp, Homo sapiens
  siRNA target sequence for LTB4DH (NM_012212.2,1061-1079).
gataatttggggaagacaa

SEQ ID NO: 157582 - DNA, 19 bp, Homo sapiens
  siRNA target sequence for MADHIP (NM_004799.1,489-507).
ctatagttgggatgatcaa

SEQ ID NO: 157583 - DNA, 19 bp, Homo sapiens
  siRNA target sequence for MADHIP (NM_004799.1,567-585).
gaagaatgttcttgttgta

SEQ ID NO: 157584 - DNA, 19 bp, Homo sapiens
  siRNA target sequence for MADHIP (NM_004799.1,580-598).
gttgtagccgtcatgcata

SEQ ID NO: 157585 - DNA, 19 bp, Homo sapiens
  siRNA target sequence for MADHIP (NM_004799.1,583-601).
gtagccgtcatgcataact

SEQ ID NO: 157586 - DNA, 19 bp, Homo sapiens
  siRNA target sequence for MADHIP (NM_004799.1,589-607).
gtcatgcataactgtgata

SEQ ID NO: 157587 - DNA, 19 bp, Homo sapiens
  siRNA target sequence for MADHIP (NM_004799.1,595-613).
cataactgtgataaaagga

SEQ ID NO: 157588 - DNA, 19 bp, Homo sapiens
  siRNA target sequence for MADHIP (NM_004799.1,602-620).
gtgataaaaggacattaca

SEQ ID NO: 157589 - DNA, 19 bp, Homo sapiens
  siRNA target sequence for MADHIP (NM_004799.1,611-629).
ggacattacaaaacgattt

SEQ ID NO: 157590 - DNA, 19 bp, Homo sapiens
  siRNA target sequence for MADHIP (NM_004799.1,612-630).
gacattacaaaacgattta

SEQ ID NO: 157591 - DNA, 19 bp, Homo sapiens
  siRNA target sequence for MADHIP (NM_004799.1,614-632).
cattacaaaacgatttaca

SEQ ID NO: 157592 - DNA, 19 bp, Homo sapiens
  siRNA target sequence for MADHIP (NM_004799.1,661-679).
cttatggatgcttttagct

SEQ ID NO: 157593 - DNA, 19 bp, Homo sapiens
  siRNA target sequence for MADHIP (NM_004799.1,699-717).
cagacaaactgatcaattt

SEQ ID NO: 157594 - DNA, 19 bp, Homo sapiens
  siRNA target sequence for MADHIP (NM_004799.1,733-751).
gagtccactgaaaaagata

SEQ ID NO: 157595 - DNA, 19 bp, Homo sapiens
  siRNA target sequence for MADHIP (NM_004799.1,798-816).
ggggagatctgttaaccat

SEQ ID NO: 157596 - DNA, 19 bp, Homo sapiens
  siRNA target sequence for MADHIP (NM_004799.1,819-837).
gtgtcctacttcatctgat

SEQ ID NO: 157597 - DNA, 19 bp, Homo sapiens
  siRNA target sequence for MADHIP (NM_004799.1,824-842).
ctacttcatctgatagtct

SEQ ID NO: 157598 - DNA, 19 bp, Homo sapiens
  siRNA target sequence for MADHIP (NM_004799.1,858-876).
cccttcacaattaaaggat

SEQ ID NO: 157599 - DNA, 19 bp, Homo sapiens
  siRNA target sequence for MADHIP (NM_004799.1,873-891).
ggatgacggaagtataggt

SEQ ID NO: 157600 - DNA, 19 bp, Homo sapiens
  siRNA target sequence for MADHIP (NM_004799.1,874-892).
gatgacggaagtataggta

SEQ ID NO: 157601 - DNA, 19 bp, Homo sapiens
  siRNA target sequence for MADHIP (NM_004799.1,900-918).
ctccatgtctgcgattaca

SEQ ID NO: 157602 - DNA, 19 bp, Homo sapiens
  siRNA target sequence for MADHIP (NM_004799.1,903-921).
catgtctgcgattacaagt

SEQ ID NO: 157603 - DNA, 19 bp, Homo sapiens
  siRNA target sequence for MADHIP (NM_004799.1,906-924).
gtctgcgattacaagttta

SEQ ID NO: 157604 - DNA, 19 bp, Homo sapiens
  siRNA target sequence for MADHIP (NM_004799.1,920-938).
gtttaacggttgattcagt

SEQ ID NO: 157605 - DNA, 19 bp, Homo sapiens
  siRNA target sequence for MADHIP (NM_004799.1,927-945).
ggttgattcagtaatctca

SEQ ID NO: 157606 - DNA, 19 bp, Homo sapiens
  siRNA target sequence for MADHIP (NM_004799.1,981-999).
gcaagagaactatatacca

SEQ ID NO: 157607 - DNA, 19 bp, Homo sapiens
  siRNA target sequence for MADHIP (NM_004799.1,1006-1024).
gacctcactggcaaaatca

SEQ ID NO: 157608 - DNA, 19 bp, Homo sapiens
  siRNA target sequence for MADHIP (NM_004799.1,1042-1060).
ctagggagtccaaattcct

SEQ ID NO: 157609 - DNA, 19 bp, Homo sapiens
  siRNA target sequence for MADHIP (NM_004799.1,1073-1091).
gtgaggggattttgatgaa

SEQ ID NO: 157610 - DNA, 19 bp, Homo sapiens
  siRNA target sequence for MADHIP (NM_004799.1,1129-1147).
ctccggtctggtttacctt

SEQ ID NO: 157611 - DNA, 19 bp, Homo sapiens
  siRNA target sequence for MADHIP (NM_004799.1,1214-1232).
gccttgtgcctaatgaagt

SEQ ID NO: 157612 - DNA, 19 bp, Homo sapiens
  siRNA target sequence for MADHIP (NM_004799.1,1276-1294).
ggcactacagaattcctta

SEQ ID NO: 157613 - DNA, 19 bp, Homo sapiens
  siRNA target sequence for MADHIP (NM_004799.1,1278-1296).
cactacagaattccttaat

SEQ ID NO: 157614 - DNA, 19 bp, Homo sapiens
  siRNA target sequence for MADHIP (NM_004799.1,1321-1339).
caggacatgactaattgga

SEQ ID NO: 157615 - DNA, 19 bp, Homo sapiens
  siRNA target sequence for MADHIP (NM_004799.1,1331-1349).
ctaattggaagttgactaa

SEQ ID NO: 157616 - DNA, 19 bp, Homo sapiens
  siRNA target sequence for MADHIP (NM_004799.1,1390-1408).
gaaaagtttctacagatta

SEQ ID NO: 157617 - DNA, 19 bp, Homo sapiens
  siRNA target sequence for MADHIP (NM_004799.1,1409-1427).
gtcagcctgaggacactaa

SEQ ID NO: 157618 - DNA, 19 bp, Homo sapiens
  siRNA target sequence for MADHIP (NM_004799.1,1413-1431).
gcctgaggacactaatggt

SEQ ID NO: 157619 - DNA, 19 bp, Homo sapiens
  siRNA target sequence for MADHIP (NM_004799.1,1419-1437).
ggacactaatggtgatagt

SEQ ID NO: 157620 - DNA, 19 bp, Homo sapiens
  siRNA target sequence for MADHIP (NM_004799.1,1459-1477).
gcagatgcaggtctagatt

SEQ ID NO: 157621 - DNA, 19 bp, Homo sapiens
  siRNA target sequence for MADHIP (NM_004799.1,1487-1505).
cttgcattagtgaaagtga

SEQ ID NO: 157622 - DNA, 19 bp, Homo sapiens
  siRNA target sequence for MADHIP (NM_004799.1,1533-1551).
cacaccagcagcaaattat

SEQ ID NO: 157623 - DNA, 19 bp, Homo sapiens
  siRNA target sequence for MADHIP (NM_004799.1,1535-1553).
caccagcagcaaattatct

SEQ ID NO: 157624 - DNA, 19 bp, Homo sapiens
  siRNA target sequence for MADHIP (NM_004799.1,1561-1579).
ggttgtgattcctatggaa

SEQ ID NO: 157625 - DNA, 19 bp, Homo sapiens
  siRNA target sequence for MADHIP (NM_004799.1,1582-1600).
caagacccaggtgtttctt

SEQ ID NO: 157626 - DNA, 19 bp, Homo sapiens
  siRNA target sequence for MADHIP (NM_004799.1,1611-1629).
gactttaccctccaaagaa

SEQ ID NO: 157627 - DNA, 19 bp, Homo sapiens
  siRNA target sequence for MADHIP (NM_004799.1,1742-1760).
gcactggtgacctaatgaa

SEQ ID NO: 157628 - DNA, 19 bp, Homo sapiens
  siRNA target sequence for MADHIP (NM_004799.1,1831-1849).
gcaagcctgccatctatca

SEQ ID NO: 157629 - DNA, 19 bp, Homo sapiens
  siRNA target sequence for MADHIP (NM_004799.1,1871-1889).
gacccaagcaaccttctaa

SEQ ID NO: 157630 - DNA, 19 bp, Homo sapiens
  siRNA target sequence for MADHIP (NM_004799.1,1874-1892).
ccaagcaaccttctaatct

SEQ ID NO: 157631 - DNA, 19 bp, Homo sapiens
  siRNA target sequence for MADHIP (NM_004799.1,1875-1893).
caagcaaccttctaatctt

SEQ ID NO: 157632 - DNA, 19 bp, Homo sapiens
  siRNA target sequence for MADHIP (NM_004799.1,1911-1929).
gccattatcagaccattta

SEQ ID NO: 157633 - DNA, 19 bp, Homo sapiens
  siRNA target sequence for MADHIP (NM_004799.1,1913-1931).
cattatcagaccatttaca

SEQ ID NO: 157634 - DNA, 19 bp, Homo sapiens
  siRNA target sequence for MADHIP (NM_004799.1,1993-2011).
gcaaaattaggggaaaact

SEQ ID NO: 157635 - DNA, 19 bp, Homo sapiens
  siRNA target sequence for MADHIP (NM_004799.1,2032-2050).
ccatctttgggaaacatct

SEQ ID NO: 157636 - DNA, 19 bp, Homo sapiens
  siRNA target sequence for MADHIP (NM_004799.1,2049-2067).
ctctaatgtcgatacaaat

SEQ ID NO: 157637 - DNA, 19 bp, Homo sapiens
  siRNA target sequence for MADHIP (NM_004799.1,2235-2253).
ggctccaaattgcatgaaa

SEQ ID NO: 157638 - DNA, 19 bp, Homo sapiens
  siRNA target sequence for MADHIP (NM_004799.1,2325-2343).
ctgctgtagcctgaaatgt

SEQ ID NO: 157639 - DNA, 19 bp, Homo sapiens
  siRNA target sequence for MADHIP (NM_004799.1,2327-2345).
gctgtagcctgaaatgtaa

SEQ ID NO: 157640 - DNA, 19 bp, Homo sapiens
  siRNA target sequence for MADHIP (NM_004799.1,2333-2351).
gcctgaaatgtaaactgtt

SEQ ID NO: 157641 - DNA, 19 bp, Homo sapiens
  siRNA target sequence for MADHIP (NM_004799.1,2334-2352).
cctgaaatgtaaactgtta

SEQ ID NO: 157642 - DNA, 19 bp, Homo sapiens
  siRNA target sequence for MADHIP (NM_004799.1,2368-2386).
gaagctagagtgtgtgtaa

SEQ ID NO: 157643 - DNA, 19 bp, Homo sapiens
  siRNA target sequence for MADHIP (NM_004799.1,2371-2389).
gctagagtgtgtgtaatct

SEQ ID NO: 157644 - DNA, 19 bp, Homo sapiens
  siRNA target sequence for MADHIP (NM_004799.1,2381-2399).
gtgtaatctgccattcagt

SEQ ID NO: 157645 - DNA, 19 bp, Homo sapiens
  siRNA target sequence for MADHIP (NM_004799.1,2390-2408).
gccattcagtgctaatgaa

SEQ ID NO: 157646 - DNA, 19 bp, Homo sapiens
  siRNA target sequence for MADHIP (NM_004799.1,2391-2409).
ccattcagtgctaatgaat

SEQ ID NO: 157647 - DNA, 19 bp, Homo sapiens
  siRNA target sequence for MADHIP (NM_004799.1,2448-2466).
gagccctaaccctaacaat

SEQ ID NO: 157648 - DNA, 19 bp, Homo sapiens
  siRNA target sequence for MADHIP (NM_004799.1,2463-2481).
caatcctgctgaatactgt

SEQ ID NO: 157649 - DNA, 19 bp, Homo sapiens
  siRNA target sequence for MADHIP (NM_004799.1,2471-2489).
ctgaatactgttctactat

SEQ ID NO: 157650 - DNA, 19 bp, Homo sapiens
  siRNA target sequence for MADHIP (NM_004799.1,2550-2568).
ggtacctgtgggagtttta

SEQ ID NO: 157651 - DNA, 19 bp, Homo sapiens
  siRNA target sequence for MADHIP (NM_004799.1,2551-2569).
gtacctgtgggagttttaa

SEQ ID NO: 157652 - DNA, 19 bp, Homo sapiens
  siRNA target sequence for MADHIP (NM_004799.1,2653-2671).
gctgatgcagccaaattaa

SEQ ID NO: 157653 - DNA, 19 bp, Homo sapiens
  siRNA target sequence for MADHIP (NM_004799.1,2719-2737).
ccagtcaagccagtaacta

SEQ ID NO: 157654 - DNA, 19 bp, Homo sapiens
  siRNA target sequence for MADHIP (NM_004799.1,2749-2767).
ccagcagagacggatattt

SEQ ID NO: 157655 - DNA, 19 bp, Homo sapiens
  siRNA target sequence for MADHIP (NM_004799.1,2753-2771).
cagagacggatatttgtct

SEQ ID NO: 157656 - DNA, 19 bp, Homo sapiens
  siRNA target sequence for MADHIP (NM_004799.1,2755-2773).
gagacggatatttgtctat

SEQ ID NO: 157657 - DNA, 19 bp, Homo sapiens
  siRNA target sequence for MADHIP (NM_004799.1,2809-2827).
ggaagtgcaatgaatctta

SEQ ID NO: 157658 - DNA, 19 bp, Homo sapiens
  siRNA target sequence for MADHIP (NM_004799.1,2810-2828).
gaagtgcaatgaatcttat

SEQ ID NO: 157659 - DNA, 19 bp, Homo sapiens
  siRNA target sequence for MADHIP (NM_004799.1,2899-2917).
ccatcacagatttcagtaa

SEQ ID NO: 157660 - DNA, 19 bp, Homo sapiens
  siRNA target sequence for MADHIP (NM_004799.1,2939-2957).
gccctgacccacttgtatt

SEQ ID NO: 157661 - DNA, 19 bp, Homo sapiens
  siRNA target sequence for MADHIP (NM_004799.1,2942-2960).
ctgacccacttgtatttgt

SEQ ID NO: 157662 - DNA, 19 bp, Homo sapiens
  siRNA target sequence for MADHIP (NM_004799.1,2944-2962).
gacccacttgtatttgttt

SEQ ID NO: 157663 - DNA, 19 bp, Homo sapiens
  siRNA target sequence for MADHIP (NM_004799.1,3027-3045).
cacaaccaagggaatgcat

SEQ ID NO: 157664 - DNA, 19 bp, Homo sapiens
  siRNA target sequence for MADHIP (NM_004799.1,3052-3070).
ggtcagtctgagatagtca

SEQ ID NO: 157665 - DNA, 19 bp, Homo sapiens
  siRNA target sequence for MADHIP (NM_004799.1,3053-3071).
gtcagtctgagatagtcat

SEQ ID NO: 157666 - DNA, 19 bp, Homo sapiens
  siRNA target sequence for MADHIP (NM_004799.1,3101-3119).
gtttgccaaaggatatctt

SEQ ID NO: 157667 - DNA, 19 bp, Homo sapiens
  siRNA target sequence for MADHIP (NM_004799.1,3105-3123).
gccaaaggatatctttaat

SEQ ID NO: 157668 - DNA, 19 bp, Homo sapiens
  siRNA target sequence for MADHIP (NM_004799.1,3278-3296).
caaccccaccttacttgtt

SEQ ID NO: 157669 - DNA, 19 bp, Homo sapiens
  siRNA target sequence for MADHIP (NM_004799.1,3298-3316).
gggattcttatccagaaat

SEQ ID NO: 157670 - DNA, 19 bp, Homo sapiens
  siRNA target sequence for MADHIP (NM_004799.1,3323-3341).
ctccttgggctaaagtatt

SEQ ID NO: 157671 - DNA, 19 bp, Homo sapiens
  siRNA target sequence for MADHIP (NM_004799.1,3343-3361).
cctatccgtctgatgttga

SEQ ID NO: 157672 - DNA, 19 bp, Homo sapiens
  siRNA target sequence for MADHIP (NM_004799.1,3373-3391).
gaatatcgactttatccat

SEQ ID NO: 157673 - DNA, 19 bp, Homo sapiens
  siRNA target sequence for MADHIP (NM_004799.1,3410-3428).
gatttcggaagccattgtt

SEQ ID NO: 157674 - DNA, 19 bp, Homo sapiens
  siRNA target sequence for MADHIP (NM_004799.1,3437-3455).
cggggcataccatcatgaa

SEQ ID NO: 157675 - DNA, 19 bp, Homo sapiens
  siRNA target sequence for MADHIP (NM_004799.1,3438-3456).
ggggcataccatcatgaat

SEQ ID NO: 157676 - DNA, 19 bp, Homo sapiens
  siRNA target sequence for MADHIP (NM_004799.1,3440-3458).
ggcataccatcatgaatct

SEQ ID NO: 157677 - DNA, 19 bp, Homo sapiens
  siRNA target sequence for MADHIP (NM_004799.1,3441-3459).
gcataccatcatgaatctt

SEQ ID NO: 157678 - DNA, 19 bp, Homo sapiens
  siRNA target sequence for MADHIP (NM_004799.1,3483-3501).
gtataccttgccagtagtt

SEQ ID NO: 157679 - DNA, 19 bp, Homo sapiens
  siRNA target sequence for MADHIP (NM_004799.1,3530-3548).
ggaaaactagcatcaaaat

SEQ ID NO: 157680 - DNA, 19 bp, Homo sapiens
  siRNA target sequence for MADHIP (NM_004799.1,3531-3549).
gaaaactagcatcaaaatt

SEQ ID NO: 157681 - DNA, 19 bp, Homo sapiens
  siRNA target sequence for MADHIP (NM_004799.1,3688-3706).
caggctatcagtattcaca

SEQ ID NO: 157682 - DNA, 19 bp, Homo sapiens
  siRNA target sequence for MADHIP (NM_007323.1,258-276).
ctactttattggatacaaa

SEQ ID NO: 157683 - DNA, 19 bp, Homo sapiens
  siRNA target sequence for MADHIP (NM_007323.1,368-386).
caaccacaactgaaagtct

SEQ ID NO: 157684 - DNA, 19 bp, Homo sapiens
  siRNA target sequence for MADHIP (NM_007323.1,448-466).
ggactgtaatctaaatcca

SEQ ID NO: 157685 - DNA, 19 bp, Homo sapiens
  siRNA target sequence for MADHIP (NM_007323.1,464-482).
ccagagattgccacaatgt

SEQ ID NO: 157686 - DNA, 19 bp, Homo sapiens
  siRNA target sequence for MADHIP (NM_007323.1,2440-2458).
gctaatgaatggtaagtat

SEQ ID NO: 157687 - DNA, 19 bp, Homo sapiens
  siRNA target sequence for MADHIP (NM_007323.1,2441-2459).
ctaatgaatggtaagtatt

SEQ ID NO: 157688 - DNA, 19 bp, Homo sapiens
  siRNA target sequence for MBTPS2 (NM_015884.1,234-252).
ctcccctttccacataaga

SEQ ID NO: 157689 - DNA, 19 bp, Homo sapiens
  siRNA target sequence for MBTPS2 (NM_015884.1,270-288).
caatcgtgccttttacagt

SEQ ID NO: 157690 - DNA, 19 bp, Homo sapiens
  siRNA target sequence for MBTPS2 (NM_015884.1,298-316).
cggaaagcaaggatgcttt

SEQ ID NO: 157691 - DNA, 19 bp, Homo sapiens
  siRNA target sequence for MBTPS2 (NM_015884.1,299-317).
ggaaagcaaggatgcttta

SEQ ID NO: 157692 - DNA, 19 bp, Homo sapiens
  siRNA target sequence for MBTPS2 (NM_015884.1,312-330).
gctttaccaatggttcaat

SEQ ID NO: 157693 - DNA, 19 bp, Homo sapiens
  siRNA target sequence for MBTPS2 (NM_015884.1,346-364).
ggcgtaattgccatgttta

SEQ ID NO: 157694 - DNA, 19 bp, Homo sapiens
  siRNA target sequence for MBTPS2 (NM_015884.1,513-531).
caatgaacaggtgttacaa

SEQ ID NO: 157695 - DNA, 19 bp, Homo sapiens
  siRNA target sequence for MBTPS2 (NM_015884.1,535-553).
gtggttcctggtataaatt

SEQ ID NO: 157696 - DNA, 19 bp, Homo sapiens
  siRNA target sequence for MBTPS2 (NM_015884.1,559-577).
gtcaatcaactgacctatt

SEQ ID NO: 157697 - DNA, 19 bp, Homo sapiens
  siRNA target sequence for MBTPS2 (NM_015884.1,565-583).
caactgacctatttcttca

SEQ ID NO: 157698 - DNA, 19 bp, Homo sapiens
  siRNA target sequence for MBTPS2 (NM_015884.1,579-597).
cttcacggcagttctcatt

SEQ ID NO: 157699 - DNA, 19 bp, Homo sapiens
  siRNA target sequence for MBTPS2 (NM_015884.1,582-600).
cacggcagttctcattagt

SEQ ID NO: 157700 - DNA, 19 bp, Homo sapiens
  siRNA target sequence for MBTPS2 (NM_015884.1,622-640).
catgggatagcagctatta

SEQ ID NO: 157701 - DNA, 19 bp, Homo sapiens
  siRNA target sequence for MBTPS2 (NM_015884.1,632-650).
cagctattagggaacaagt

SEQ ID NO: 157702 - DNA, 19 bp, Homo sapiens
  siRNA target sequence for MBTPS2 (NM_015884.1,642-660).
ggaacaagttcgatttaat

SEQ ID NO: 157703 - DNA, 19 bp, Homo sapiens
  siRNA target sequence for MBTPS2 (NM_015884.1,716-734).
ccactcatttgcaacttat

SEQ ID NO: 157704 - DNA, 19 bp, Homo sapiens
  siRNA target sequence for MBTPS2 (NM_015884.1,742-760).
gtccagcagctaaggatat

SEQ ID NO: 157705 - DNA, 19 bp, Homo sapiens
  siRNA target sequence for MBTPS2 (NM_015884.1,747-765).
gcagctaaggatattttgt

SEQ ID NO: 157706 - DNA, 19 bp, Homo sapiens
  siRNA target sequence for MBTPS2 (NM_015884.1,820-838).
ctcctcccagtaattctct

SEQ ID NO: 157707 - DNA, 19 bp, Homo sapiens
  siRNA target sequence for MBTPS2 (NM_015884.1,829-847).
gtaattctcttgccatttt

SEQ ID NO: 157708 - DNA, 19 bp, Homo sapiens
  siRNA target sequence for MBTPS2 (NM_015884.1,946-964).
caggattgtcctgttacta

SEQ ID NO: 157709 - DNA, 19 bp, Homo sapiens
  siRNA target sequence for MBTPS2 (NM_015884.1,948-966).
ggattgtcctgttactaat

SEQ ID NO: 157710 - DNA, 19 bp, Homo sapiens
  siRNA target sequence for MBTPS2 (NM_015884.1,958-976).
gttactaatgtgcaagatt

SEQ ID NO: 157711 - DNA, 19 bp, Homo sapiens
  siRNA target sequence for MBTPS2 (NM_015884.1,962-980).
ctaatgtgcaagattggaa

SEQ ID NO: 157712 - DNA, 19 bp, Homo sapiens
  siRNA target sequence for MBTPS2 (NM_015884.1,999-1017).
cgcctatgagccccaaatt

SEQ ID NO: 157713 - DNA, 19 bp, Homo sapiens
  siRNA target sequence for MBTPS2 (NM_015884.1,1002-1020).
ctatgagccccaaattggt

SEQ ID NO: 157714 - DNA, 19 bp, Homo sapiens
  siRNA target sequence for MBTPS2 (NM_015884.1,1059-1077).
cccagttagagcatacaaa

SEQ ID NO: 157715 - DNA, 19 bp, Homo sapiens
  siRNA target sequence for MBTPS2 (NM_015884.1,1091-1109).
caactgaatgctgtaacaa

SEQ ID NO: 157716 - DNA, 19 bp, Homo sapiens
  siRNA target sequence for MBTPS2 (NM_015884.1,1094-1112).
ctgaatgctgtaacaatca

SEQ ID NO: 157717 - DNA, 19 bp, Homo sapiens
  siRNA target sequence for MBTPS2 (NM_015884.1,1096-1114).
gaatgctgtaacaatcaca

SEQ ID NO: 157718 - DNA, 19 bp, Homo sapiens
  siRNA target sequence for MBTPS2 (NM_015884.1,1204-1222).
caagtttgcagaaccaata

SEQ ID NO: 157719 - DNA, 19 bp, Homo sapiens
  siRNA target sequence for MBTPS2 (NM_015884.1,1214-1232).
gaaccaataaagactgtaa

SEQ ID NO: 157720 - DNA, 19 bp, Homo sapiens
  siRNA target sequence for MBTPS2 (NM_015884.1,1241-1259).
caagttcaagtttctgtat

SEQ ID NO: 157721 - DNA, 19 bp, Homo sapiens
  siRNA target sequence for MBTPS2 (NM_015884.1,1281-1299).
cactcgcttaataaaagta

SEQ ID NO: 157722 - DNA, 19 bp, Homo sapiens
  siRNA target sequence for MBTPS2 (NM_015884.1,1303-1321).
cacccacctcagattgata

SEQ ID NO: 157723 - DNA, 19 bp, Homo sapiens
  siRNA target sequence for MBTPS2 (NM_015884.1,1309-1327).
cctcagattgatatgttat

SEQ ID NO: 157724 - DNA, 19 bp, Homo sapiens
  siRNA target sequence for MBTPS2 (NM_015884.1,1310-1328).
ctcagattgatatgttata

SEQ ID NO: 157725 - DNA, 19 bp, Homo sapiens
  siRNA target sequence for MBTPS2 (NM_015884.1,1314-1332).
gattgatatgttatacgta

SEQ ID NO: 157726 - DNA, 19 bp, Homo sapiens
  siRNA target sequence for MBTPS2 (NM_015884.1,1380-1398).
cccacgttttaactttcta

SEQ ID NO: 157727 - DNA, 19 bp, Homo sapiens
  siRNA target sequence for MBTPS2 (NM_015884.1,1454-1472).
caggagctctggctattgt

SEQ ID NO: 157728 - DNA, 19 bp, Homo sapiens
  siRNA target sequence for MBTPS2 (NM_015884.1,1456-1474).
ggagctctggctattgtta

SEQ ID NO: 157729 - DNA, 19 bp, Homo sapiens
  siRNA target sequence for MEP1A (NM_005588.1,18-36).
gattagatccacttgcatt

SEQ ID NO: 157730 - DNA, 19 bp, Homo sapiens
  siRNA target sequence for MEP1A (NM_005588.1,181-199).
gacatcctcttgcagaaat

SEQ ID NO: 157731 - DNA, 19 bp, Homo sapiens
  siRNA target sequence for MEP1A (NM_005588.1,233-251).
ggacgttccccattcctta

SEQ ID NO: 157732 - DNA, 19 bp, Homo sapiens
  siRNA target sequence for MEP1A (NM_005588.1,280-298).
gctaaaggagccattctgt

SEQ ID NO: 157733 - DNA, 19 bp, Homo sapiens
  siRNA target sequence for MEP1A (NM_005588.1,369-387).
catatttcaacagtttgat

SEQ ID NO: 157734 - DNA, 19 bp, Homo sapiens
  siRNA target sequence for MEP1A (NM_005588.1,481-499).
ctgcatgctttgggatttt

SEQ ID NO: 157735 - DNA, 19 bp, Homo sapiens
  siRNA target sequence for MEP1A (NM_005588.1,515-533).
ggacggaccgggatgatta

SEQ ID NO: 157736 - DNA, 19 bp, Homo sapiens
  siRNA target sequence for MEP1A (NM_005588.1,516-534).
gacggaccgggatgattat

SEQ ID NO: 157737 - DNA, 19 bp, Homo sapiens
  siRNA target sequence for MEP1A (NM_005588.1,524-542).
gggatgattatgtgaacat

SEQ ID NO: 157738 - DNA, 19 bp, Homo sapiens
  siRNA target sequence for MEP1A (NM_005588.1,540-558).
catctggtgggaccaaatt

SEQ ID NO: 157739 - DNA, 19 bp, Homo sapiens
  siRNA target sequence for MEP1A (NM_005588.1,576-594).
caactttgacacctatgat

SEQ ID NO: 157740 - DNA, 19 bp, Homo sapiens
  siRNA target sequence for MEP1A (NM_005588.1,579-597).
ctttgacacctatgatgat

SEQ ID NO: 157741 - DNA, 19 bp, Homo sapiens
  siRNA target sequence for MEP1A (NM_005588.1,585-603).
cacctatgatgatagctta

SEQ ID NO: 157742 - DNA, 19 bp, Homo sapiens
  siRNA target sequence for MEP1A (NM_005588.1,587-605).
cctatgatgatagcttaat

SEQ ID NO: 157743 - DNA, 19 bp, Homo sapiens
  siRNA target sequence for MEP1A (NM_005588.1,623-641).
cctatgattatgagtcttt

SEQ ID NO: 157744 - DNA, 19 bp, Homo sapiens
  siRNA target sequence for MEP1A (NM_005588.1,645-663).
gcactaccagcctttctca

SEQ ID NO: 157745 - DNA, 19 bp, Homo sapiens
  siRNA target sequence for MEP1A (NM_005588.1,646-664).
cactaccagcctttctcat

SEQ ID NO: 157746 - DNA, 19 bp, Homo sapiens
  siRNA target sequence for MEP1A (NM_005588.1,707-725).
ctgagtttaactccattat

SEQ ID NO: 157747 - DNA, 19 bp, Homo sapiens
  siRNA target sequence for MEP1A (NM_005588.1,764-782).
ggctgaaccgaatgtacaa

SEQ ID NO: 157748 - DNA, 19 bp, Homo sapiens
  siRNA target sequence for MEP1A (NM_005588.1,808-826).
gaccactgtacttttgaga

SEQ ID NO: 157749 - DNA, 19 bp, Homo sapiens
  siRNA target sequence for MEP1A (NM_005588.1,935-953).
caggtgccggctacttcat

SEQ ID NO: 157750 - DNA, 19 bp, Homo sapiens
  siRNA target sequence for MEP1A (NM_005588.1,1204-1222).
cagaagtttcgctaccttt

SEQ ID NO: 157751 - DNA, 19 bp, Homo sapiens
  siRNA target sequence for MEP1A (NM_005588.1,1253-1271).
caactgggggaatttacct

SEQ ID NO: 157752 - DNA, 19 bp, Homo sapiens
  siRNA target sequence for MEP1A (NM_005588.1,1259-1277).
ggggaatttacctagatga

SEQ ID NO: 157753 - DNA, 19 bp, Homo sapiens
  siRNA target sequence for MEP1A (NM_005588.1,1262-1280).
gaatttacctagatgacat

SEQ ID NO: 157754 - DNA, 19 bp, Homo sapiens
  siRNA target sequence for MEP1A (NM_005588.1,1374-1392).
gagccctcgattctacaat

SEQ ID NO: 157755 - DNA, 19 bp, Homo sapiens
  siRNA target sequence for MEP1A (NM_005588.1,1389-1407).
caattcggagggatatggt

SEQ ID NO: 157756 - DNA, 19 bp, Homo sapiens
  siRNA target sequence for MEP1A (NM_005588.1,1405-1423).
ggttttggggtaactttat

SEQ ID NO: 157757 - DNA, 19 bp, Homo sapiens
  siRNA target sequence for MEP1A (NM_005588.1,1406-1424).
gttttggggtaactttata

SEQ ID NO: 157758 - DNA, 19 bp, Homo sapiens
  siRNA target sequence for MEP1A (NM_005588.1,1438-1456).
gaaagctctggttacttga

SEQ ID NO: 157759 - DNA, 19 bp, Homo sapiens
  siRNA target sequence for MEP1A (NM_005588.1,1448-1466).
gttacttgagacttgcttt

SEQ ID NO: 157760 - DNA, 19 bp, Homo sapiens
  siRNA target sequence for MEP1A (NM_005588.1,1501-1519).
gagtggccggtagaaaaca

SEQ ID NO: 157761 - DNA, 19 bp, Homo sapiens
  siRNA target sequence for MEP1A (NM_005588.1,1503-1521).
gtggccggtagaaaacaga

SEQ ID NO: 157762 - DNA, 19 bp, Homo sapiens
  siRNA target sequence for MEP1A (NM_005588.1,1520-1538).
gacaggtgataattaccat

SEQ ID NO: 157763 - DNA, 19 bp, Homo sapiens
  siRNA target sequence for MEP1A (NM_005588.1,1610-1628).
catctccagcgataaatga

SEQ ID NO: 157764 - DNA, 19 bp, Homo sapiens
  siRNA target sequence for MEP1A (NM_005588.1,1748-1766).
gtttcctgaaaaatgatga

SEQ ID NO: 157765 - DNA, 19 bp, Homo sapiens
  siRNA target sequence for MEP1A (NM_005588.1,1898-1916).
cgggaaaggccatgttaga

SEQ ID NO: 157766 - DNA, 19 bp, Homo sapiens
  siRNA target sequence for MEP1A (NM_005588.1,2188-2206).
gctggcgtgatcttcttga

SEQ ID NO: 157767 - DNA, 19 bp, Homo sapiens
  siRNA target sequence for MEP1B (NM_005925.1,105-123).
gcttggcaactccagaaaa

SEQ ID NO: 157768 - DNA, 19 bp, Homo sapiens
  siRNA target sequence for MEP1B (NM_005925.1,141-159).
gaatggaccaggacatatt

SEQ ID NO: 157769 - DNA, 19 bp, Homo sapiens
  siRNA target sequence for MEP1B (NM_005925.1,149-167).
caggacatatttgatatca

SEQ ID NO: 157770 - DNA, 19 bp, Homo sapiens
  siRNA target sequence for MEP1B (NM_005925.1,173-191).
ggtttgggactggatcttt

SEQ ID NO: 157771 - DNA, 19 bp, Homo sapiens
  siRNA target sequence for MEP1B (NM_005925.1,174-192).
gtttgggactggatctttt

SEQ ID NO: 157772 - DNA, 19 bp, Homo sapiens
  siRNA target sequence for MEP1B (NM_005925.1,207-225).
gacttgatagggcacaaat

SEQ ID NO: 157773 - DNA, 19 bp, Homo sapiens
  siRNA target sequence for MEP1B (NM_005925.1,209-227).
cttgatagggcacaaatta

SEQ ID NO: 157774 - DNA, 19 bp, Homo sapiens
  siRNA target sequence for MEP1B (NM_005925.1,212-230).
gatagggcacaaattagaa

SEQ ID NO: 157775 - DNA, 19 bp, Homo sapiens
  siRNA target sequence for MEP1B (NM_005925.1,218-236).
gcacaaattagaaattcca

SEQ ID NO: 157776 - DNA, 19 bp, Homo sapiens
  siRNA target sequence for MEP1B (NM_005925.1,234-252).
ccatcattggagaaaagta

SEQ ID NO: 157777 - DNA, 19 bp, Homo sapiens
  siRNA target sequence for MEP1B (NM_005925.1,261-279).
ctcataccattccatatgt

SEQ ID NO: 157778 - DNA, 19 bp, Homo sapiens
  siRNA target sequence for MEP1B (NM_005925.1,322-340).
caatgcatttgaacgttat

SEQ ID NO: 157779 - DNA, 19 bp, Homo sapiens
  siRNA target sequence for MEP1B (NM_005925.1,332-350).
gaacgttatcgccttaaaa

SEQ ID NO: 157780 - DNA, 19 bp, Homo sapiens
  siRNA target sequence for MEP1B (NM_005925.1,335-353).
cgttatcgccttaaaacat

SEQ ID NO: 157781 - DNA, 19 bp, Homo sapiens
  siRNA target sequence for MEP1B (NM_005925.1,344-362).
cttaaaacatgtattgact

SEQ ID NO: 157782 - DNA, 19 bp, Homo sapiens
  siRNA target sequence for MEP1B (NM_005925.1,372-390).
gggctggagaaacaaacta

SEQ ID NO: 157783 - DNA, 19 bp, Homo sapiens
  siRNA target sequence for MEP1B (NM_005925.1,373-391).
ggctggagaaacaaactat

SEQ ID NO: 157784 - DNA, 19 bp, Homo sapiens
  siRNA target sequence for MEP1B (NM_005925.1,417-435).
gctggtcttcagtaggaaa

SEQ ID NO: 157785 - DNA, 19 bp, Homo sapiens
  siRNA target sequence for MEP1B (NM_005925.1,481-499).
ccgaatagcaacagttcaa

SEQ ID NO: 157786 - DNA, 19 bp, Homo sapiens
  siRNA target sequence for MEP1B (NM_005925.1,483-501).
gaatagcaacagttcaaca

SEQ ID NO: 157787 - DNA, 19 bp, Homo sapiens
  siRNA target sequence for MEP1B (NM_005925.1,543-561).
gttctgaccgggatgacta

SEQ ID NO: 157788 - DNA, 19 bp, Homo sapiens
  siRNA target sequence for MEP1B (NM_005925.1,554-572).
gatgactatgtcaggataa

SEQ ID NO: 157789 - DNA, 19 bp, Homo sapiens
  siRNA target sequence for MEP1B (NM_005925.1,557-575).
gactatgtcaggataatgt

SEQ ID NO: 157790 - DNA, 19 bp, Homo sapiens
  siRNA target sequence for MEP1B (NM_005925.1,604-622).
caattttaacacctatagt

SEQ ID NO: 157791 - DNA, 19 bp, Homo sapiens
  siRNA target sequence for MEP1B (NM_005925.1,613-631).
cacctatagtgacgatata

SEQ ID NO: 157792 - DNA, 19 bp, Homo sapiens
  siRNA target sequence for MEP1B (NM_005925.1,616-634).
ctatagtgacgatatatca

SEQ ID NO: 157793 - DNA, 19 bp, Homo sapiens
  siRNA target sequence for MEP1B (NM_005925.1,640-658).
cctgaatgttccctatgat

SEQ ID NO: 157794 - DNA, 19 bp, Homo sapiens
  siRNA target sequence for MEP1B (NM_005925.1,647-665).
gttccctatgattacactt

SEQ ID NO: 157795 - DNA, 19 bp, Homo sapiens
  siRNA target sequence for MEP1B (NM_005925.1,666-684).
cagtaatgcactacagtaa

SEQ ID NO: 157796 - DNA, 19 bp, Homo sapiens
  siRNA target sequence for MEP1B (NM_005925.1,668-686).
gtaatgcactacagtaaaa

SEQ ID NO: 157797 - DNA, 19 bp, Homo sapiens
  siRNA target sequence for MEP1B (NM_005925.1,702-720).
gaacagagccgacaattgt

SEQ ID NO: 157798 - DNA, 19 bp, Homo sapiens
  siRNA target sequence for MEP1B (NM_005925.1,710-728).
ccgacaattgtcacaagaa

SEQ ID NO: 157799 - DNA, 19 bp, Homo sapiens
  siRNA target sequence for MEP1B (NM_005925.1,711-729).
cgacaattgtcacaagaat

SEQ ID NO: 157800 - DNA, 19 bp, Homo sapiens
  siRNA target sequence for MEP1B (NM_005925.1,771-789).
gtgactctgatctcctaaa

SEQ ID NO: 157801 - DNA, 19 bp, Homo sapiens
  siRNA target sequence for MEP1B (NM_005925.1,773-791).
gactctgatctcctaaagt

SEQ ID NO: 157802 - DNA, 19 bp, Homo sapiens
  siRNA target sequence for MEP1B (NM_005925.1,962-980).
caaggttctggtttcttca

SEQ ID NO: 157803 - DNA, 19 bp, Homo sapiens
  siRNA target sequence for MEP1B (NM_005925.1,988-1006).
cgatagcagctctgtaaat

SEQ ID NO: 157804 - DNA, 19 bp, Homo sapiens
  siRNA target sequence for MEP1B (NM_005925.1,1065-1083).
gcctgcaattttacttata

SEQ ID NO: 157805 - DNA, 19 bp, Homo sapiens
  siRNA target sequence for MEP1B (NM_005925.1,1101-1119).
gtgatcaactgaacatcta

SEQ ID NO: 157806 - DNA, 19 bp, Homo sapiens
  siRNA target sequence for MEP1B (NM_005925.1,1103-1121).
gatcaactgaacatctata

SEQ ID NO: 157807 - DNA, 19 bp, Homo sapiens
  siRNA target sequence for MEP1B (NM_005925.1,1194-1212).
ggagctggcaactttatca

SEQ ID NO: 157808 - DNA, 19 bp, Homo sapiens
  siRNA target sequence for MEP1B (NM_005925.1,1195-1213).
gagctggcaactttatcat

SEQ ID NO: 157809 - DNA, 19 bp, Homo sapiens
  siRNA target sequence for MEP1B (NM_005925.1,1197-1215).
gctggcaactttatcatgt

SEQ ID NO: 157810 - DNA, 19 bp, Homo sapiens
  siRNA target sequence for MEP1B (NM_005925.1,1211-1229).
catgtaacattgaaagtga

SEQ ID NO: 157811 - DNA, 19 bp, Homo sapiens
  siRNA target sequence for MEP1B (NM_005925.1,1287-1305).
gtctgtctattgatgacat

SEQ ID NO: 157812 - DNA, 19 bp, Homo sapiens
  siRNA target sequence for MEP1B (NM_005925.1,1320-1338).
cacggtgccctcatcatat

SEQ ID NO: 157813 - DNA, 19 bp, Homo sapiens
  siRNA target sequence for MEP1B (NM_005925.1,1322-1340).
cggtgccctcatcatatct

SEQ ID NO: 157814 - DNA, 19 bp, Homo sapiens
  siRNA target sequence for MEP1B (NM_005925.1,1350-1368).
ggaatttcacacagttcat

SEQ ID NO: 157815 - DNA, 19 bp, Homo sapiens
  siRNA target sequence for MEP1B (NM_005925.1,1351-1369).
gaatttcacacagttcatt

SEQ ID NO: 157816 - DNA, 19 bp, Homo sapiens
  siRNA target sequence for MEP1B (NM_005925.1,1366-1384).
cattggcagcccaaatgga

SEQ ID NO: 157817 - DNA, 19 bp, Homo sapiens
  siRNA target sequence for MEP1B (NM_005925.1,1375-1393).
cccaaatggaactctgtat

SEQ ID NO: 157818 - DNA, 19 bp, Homo sapiens
  siRNA target sequence for MEP1B (NM_005925.1,1376-1394).
ccaaatggaactctgtata

SEQ ID NO: 157819 - DNA, 19 bp, Homo sapiens
  siRNA target sequence for MEP1B (NM_005925.1,1456-1474).
gactaatgcagggatatat

SEQ ID NO: 157820 - DNA, 19 bp, Homo sapiens
  siRNA target sequence for MEP1B (NM_005925.1,1490-1508).
ggagccaatgatgatcaat

SEQ ID NO: 157821 - DNA, 19 bp, Homo sapiens
  siRNA target sequence for MEP1B (NM_005925.1,1491-1509).
gagccaatgatgatcaatt

SEQ ID NO: 157822 - DNA, 19 bp, Homo sapiens
  siRNA target sequence for MEP1B (NM_005925.1,1528-1546).
gcaacaagccacaatgaca

SEQ ID NO: 157823 - DNA, 19 bp, Homo sapiens
  siRNA target sequence for MEP1B (NM_005925.1,1532-1550).
caagccacaatgacacttt

SEQ ID NO: 157824 - DNA, 19 bp, Homo sapiens
  siRNA target sequence for MEP1B (NM_005925.1,1537-1555).
cacaatgacacttttggat

SEQ ID NO: 157825 - DNA, 19 bp, Homo sapiens
  siRNA target sequence for MEP1B (NM_005925.1,1585-1603).
caatcagcggagtataact

SEQ ID NO: 157826 - DNA, 19 bp, Homo sapiens
  siRNA target sequence for MEP1B (NM_005925.1,1621-1639).
caccgataatggaaactat

SEQ ID NO: 157827 - DNA, 19 bp, Homo sapiens
  siRNA target sequence for MEP1B (NM_005925.1,1623-1641).
ccgataatggaaactattt

SEQ ID NO: 157828 - DNA, 19 bp, Homo sapiens
  siRNA target sequence for MEP1B (NM_005925.1,1644-1662).
gggacaggccttctaaagt

SEQ ID NO: 157829 - DNA, 19 bp, Homo sapiens
  siRNA target sequence for MEP1B (NM_005925.1,1668-1686).
cagtggctttgttctctaa

SEQ ID NO: 157830 - DNA, 19 bp, Homo sapiens
  siRNA target sequence for MEP1B (NM_005925.1,1672-1690).
ggctttgttctctaatgga

SEQ ID NO: 157831 - DNA, 19 bp, Homo sapiens
  siRNA target sequence for MEP1B (NM_005925.1,1673-1691).
gctttgttctctaatggaa

SEQ ID NO: 157832 - DNA, 19 bp, Homo sapiens
  siRNA target sequence for MEP1B (NM_005925.1,1773-1791).
gagatgatgtttatatcct

SEQ ID NO: 157833 - DNA, 19 bp, Homo sapiens
  siRNA target sequence for MEP1B (NM_005925.1,1793-1811).
ctgacagtggaagacatat

SEQ ID NO: 157834 - DNA, 19 bp, Homo sapiens
  siRNA target sequence for MEP1B (NM_005925.1,1870-1888).
ctcaaaaaccacctgtaaa

SEQ ID NO: 157835 - DNA, 19 bp, Homo sapiens
  siRNA target sequence for MEP1B (NM_005925.1,1992-2010).
cccgagacaccatagtcat

SEQ ID NO: 157836 - DNA, 19 bp, Homo sapiens
  siRNA target sequence for MEP1B (NM_005925.1,1993-2011).
ccgagacaccatagtcatt

SEQ ID NO: 157837 - DNA, 19 bp, Homo sapiens
  siRNA target sequence for MEP1B (NM_005925.1,2006-2024).
gtcattgctgtttcatcta

SEQ ID NO: 157838 - DNA, 19 bp, Homo sapiens
  siRNA target sequence for MEP1B (NM_005925.1,2056-2074).
cacccttgtcagtgtctat

SEQ ID NO: 157839 - DNA, 19 bp, Homo sapiens
  siRNA target sequence for MEP1B (NM_005925.1,2071-2089).
ctattgcaccaggaagaaa

SEQ ID NO: 157840 - DNA, 19 bp, Homo sapiens
  siRNA target sequence for MEP1B (NM_005925.1,2077-2095).
caccaggaagaaatatcgt

SEQ ID NO: 157841 - DNA, 19 bp, Homo sapiens
  siRNA target sequence for MEP1B (NM_005925.1,2104-2122).
gagctcaaatcgaccaaat

SEQ ID NO: 157842 - DNA, 19 bp, Homo sapiens
  siRNA target sequence for MGC16186 (NM_032372.2,446-464).
gtgacccaatagaatacct

SEQ ID NO: 157843 - DNA, 19 bp, Homo sapiens
  siRNA target sequence for MGC45594 (NM_175907.2,374-392).
cgtccggaaccgatttgtt

SEQ ID NO: 157844 - DNA, 19 bp, Homo sapiens
  siRNA target sequence for MGC45594 (NM_175907.2,401-419).
cgcatctgacatcaactat

SEQ ID NO: 157845 - DNA, 19 bp, Homo sapiens
  siRNA target sequence for MGC45594 (NM_175907.2,402-420).
gcatctgacatcaactatt

SEQ ID NO: 157846 - DNA, 19 bp, Homo sapiens
  siRNA target sequence for MGC45594 (NM_175907.2,429-447).
cgctatgacccctcagtta

SEQ ID NO: 157847 - DNA, 19 bp, Homo sapiens
  siRNA target sequence for MGC45594 (NM_175907.2,430-448).
gctatgacccctcagttaa

SEQ ID NO: 157848 - DNA, 19 bp, Homo sapiens
  siRNA target sequence for MGC45594 (NM_175907.2,444-462).
gttaagcctccctttgaca

SEQ ID NO: 157849 - DNA, 19 bp, Homo sapiens
  siRNA target sequence for MGC45594 (NM_175907.2,450-468).
cctccctttgacataggtt

SEQ ID NO: 157850 - DNA, 19 bp, Homo sapiens
  siRNA target sequence for MGC45594 (NM_175907.2,451-469).
ctccctttgacataggttt

SEQ ID NO: 157851 - DNA, 19 bp, Homo sapiens
  siRNA target sequence for MGC45594 (NM_175907.2,455-473).
ctttgacataggtttcgaa

SEQ ID NO: 157852 - DNA, 19 bp, Homo sapiens
  siRNA target sequence for MGC45594 (NM_175907.2,529-547).
gccaagctgtggcttacat

SEQ ID NO: 157853 - DNA, 19 bp, Homo sapiens
  siRNA target sequence for MGC45594 (NM_175907.2,610-628).
cagtgaaacccgagtatct

SEQ ID NO: 157854 - DNA, 19 bp, Homo sapiens
  siRNA target sequence for MGC45594 (NM_175907.2,645-663).
ggcaccaccgcatacatca

SEQ ID NO: 157855 - DNA, 19 bp, Homo sapiens
  siRNA target sequence for MGC45594 (NM_175907.2,826-844).
gctgtgatcgtcctatcaa

SEQ ID NO: 157856 - DNA, 19 bp, Homo sapiens
  siRNA target sequence for MGC45594 (NM_175907.2,829-847).
gtgatcgtcctatcaacta

SEQ ID NO: 157857 - DNA, 19 bp, Homo sapiens
  siRNA target sequence for MGC45594 (NM_175907.2,831-849).
gatcgtcctatcaactata

SEQ ID NO: 157858 - DNA, 19 bp, Homo sapiens
  siRNA target sequence for MGC45594 (NM_175907.2,834-852).
cgtcctatcaactataaaa

SEQ ID NO: 157859 - DNA, 19 bp, Homo sapiens
  siRNA target sequence for MGC45594 (NM_175907.2,859-877).
ccgtaggtaccgtccttaa

SEQ ID NO: 157860 - DNA, 19 bp, Homo sapiens
  siRNA target sequence for MGC45594 (NM_175907.2,899-917).
cgatgtggtctatgaatct

SEQ ID NO: 157861 - DNA, 19 bp, Homo sapiens
  siRNA target sequence for MGC45594 (NM_175907.2,921-939).
gggggagccatgtttgact

SEQ ID NO: 157862 - DNA, 19 bp, Homo sapiens
  siRNA target sequence for MGC45594 (NM_175907.2,961-979).
cgaaagggcgcttgatagt

SEQ ID NO: 157863 - DNA, 19 bp, Homo sapiens
  siRNA target sequence for MGC45594 (NM_175907.2,962-980).
gaaagggcgcttgatagta

SEQ ID NO: 157864 - DNA, 19 bp, Homo sapiens
  siRNA target sequence for MGC45594 (NM_175907.2,1049-1067).
caaactgctcaagaaatct

SEQ ID NO: 157865 - DNA, 19 bp, Homo sapiens
  siRNA target sequence for MGC45594 (NM_175907.2,1089-1107).
ctgaaccattacctttcta

SEQ ID NO: 157866 - DNA, 19 bp, Homo sapiens
  siRNA target sequence for MGC45594 (NM_175907.2,1150-1168).
gcggagacctggtttgtga

SEQ ID NO: 157867 - DNA, 19 bp, Homo sapiens
  siRNA target sequence for MGC45594 (NM_175907.2,1220-1238).
catattccgtgctgtcaat

SEQ ID NO: 157868 - DNA, 19 bp, Homo sapiens
  siRNA target sequence for MGC45594 (NM_175907.2,1227-1245).
cgtgctgtcaattatatgt

SEQ ID NO: 157869 - DNA, 19 bp, Homo sapiens
  siRNA target sequence for MGC45594 (NM_175907.2,1244-1262).
gtacatgggaaaaaacact

SEQ ID NO: 157870 - DNA, 19 bp, Homo sapiens
  siRNA target sequence for MGC45594 (NM_175907.2,1259-1277).
cactggaaaaattgtagtt

SEQ ID NO: 157871 - DNA, 19 bp, Homo sapiens
  siRNA target sequence for MGC45594 (NM_175907.2,1261-1279).
ctggaaaaattgtagttga

SEQ ID NO: 157872 - DNA, 19 bp, Homo sapiens
  siRNA target sequence for MID2 (NM_012216.2,286-304).
gtccaatctgcctagagtt

SEQ ID NO: 157873 - DNA, 19 bp, Homo sapiens
  siRNA target sequence for MID2 (NM_012216.2,355-373).
gtgcccatcgcattttggt

SEQ ID NO: 157874 - DNA, 19 bp, Homo sapiens
  siRNA target sequence for MID2 (NM_012216.2,357-375).
gcccatcgcattttggtat

SEQ ID NO: 157875 - DNA, 19 bp, Homo sapiens
  siRNA target sequence for MID2 (NM_012216.2,360-378).
catcgcattttggtatcaa

SEQ ID NO: 157876 - DNA, 19 bp, Homo sapiens
  siRNA target sequence for MID2 (NM_012216.2,383-401).
cagctctggtgaatccatt

SEQ ID NO: 157877 - DNA, 19 bp, Homo sapiens
  siRNA target sequence for MID2 (NM_012216.2,426-444).
cctacctgcaggtatgtta

SEQ ID NO: 157878 - DNA, 19 bp, Homo sapiens
  siRNA target sequence for MID2 (NM_012216.2,593-611).
gtctagcgagcgaattgct

SEQ ID NO: 157879 - DNA, 19 bp, Homo sapiens
  siRNA target sequence for MID2 (NM_012216.2,603-621).
cgaattgcttgccaattct

SEQ ID NO: 157880 - DNA, 19 bp, Homo sapiens
  siRNA target sequence for MID2 (NM_012216.2,636-654).
ccaagggatgcagtaaaaa

SEQ ID NO: 157881 - DNA, 19 bp, Homo sapiens
  siRNA target sequence for MID2 (NM_012216.2,699-717).
gccacgcaccccaacaaga

SEQ ID NO: 157882 - DNA, 19 bp, Homo sapiens
  siRNA target sequence for MID2 (NM_012216.2,809-827).
catgtactgtgtatctgat

SEQ ID NO: 157883 - DNA, 19 bp, Homo sapiens
  siRNA target sequence for MID2 (NM_012216.2,817-835).
gtgtatctgatgaccaatt

SEQ ID NO: 157884 - DNA, 19 bp, Homo sapiens
  siRNA target sequence for MID2 (NM_012216.2,836-854).
gatctgtgccttatgcaaa

SEQ ID NO: 157885 - DNA, 19 bp, Homo sapiens
  siRNA target sequence for MID2 (NM_012216.2,881-899).
ggtcgcatccctgaatgat

SEQ ID NO: 157886 - DNA, 19 bp, Homo sapiens
  siRNA target sequence for MID2 (NM_012216.2,886-904).
catccctgaatgatcgatt

SEQ ID NO: 157887 - DNA, 19 bp, Homo sapiens
  siRNA target sequence for MID2 (NM_012216.2,953-971).
gcgcaacagcgaactagaa

SEQ ID NO: 157888 - DNA, 19 bp, Homo sapiens
  siRNA target sequence for MID2 (NM_012216.2,954-972).
cgcaacagcgaactagaaa

SEQ ID NO: 157889 - DNA, 19 bp, Homo sapiens
  siRNA target sequence for MID2 (NM_012216.2,1004-1022).
gcaggttgaggtgaatact

SEQ ID NO: 157890 - DNA, 19 bp, Homo sapiens
  siRNA target sequence for MID2 (NM_012216.2,1035-1053).
gcaaaacttatggaagaat

SEQ ID NO: 157891 - DNA, 19 bp, Homo sapiens
  siRNA target sequence for MID2 (NM_012216.2,1054-1072).
gtgacgagttggtagagat

SEQ ID NO: 157892 - DNA, 19 bp, Homo sapiens
  siRNA target sequence for MID2 (NM_012216.2,1088-1106).
gcaaatgatcgctgtcaaa

SEQ ID NO: 157893 - DNA, 19 bp, Homo sapiens
  siRNA target sequence for MID2 (NM_012216.2,1089-1107).
caaatgatcgctgtcaaaa

SEQ ID NO: 157894 - DNA, 19 bp, Homo sapiens
  siRNA target sequence for MID2 (NM_012216.2,1094-1112).
gatcgctgtcaaaatcaaa

SEQ ID NO: 157895 - DNA, 19 bp, Homo sapiens
  siRNA target sequence for MID2 (NM_012216.2,1142-1160).
ggcacagcaggttgctaat

SEQ ID NO: 157896 - DNA, 19 bp, Homo sapiens
  siRNA target sequence for MID2 (NM_012216.2,1180-1198).
ggtcaacagtcctcatcaa

SEQ ID NO: 157897 - DNA, 19 bp, Homo sapiens
  siRNA target sequence for MID2 (NM_012216.2,1204-1222).
ctgagcatatcctgaaaga

SEQ ID NO: 157898 - DNA, 19 bp, Homo sapiens
  siRNA target sequence for MID2 (NM_012216.2,1247-1265).
gtctgcaaaaaatattgct

SEQ ID NO: 157899 - DNA, 19 bp, Homo sapiens
  siRNA target sequence for MID2 (NM_012216.2,1302-1320).
ctgattccagacatcaatt

SEQ ID NO: 157900 - DNA, 19 bp, Homo sapiens
  siRNA target sequence for MID2 (NM_012216.2,1304-1322).
gattccagacatcaatttt

SEQ ID NO: 157901 - DNA, 19 bp, Homo sapiens
  siRNA target sequence for MID2 (NM_012216.2,1373-1391).
gctagaggggttagattat

SEQ ID NO: 157902 - DNA, 19 bp, Homo sapiens
  siRNA target sequence for MID2 (NM_012216.2,1374-1392).
ctagaggggttagattatt

SEQ ID NO: 157903 - DNA, 19 bp, Homo sapiens
  siRNA target sequence for MID2 (NM_012216.2,1377-1395).
gaggggttagattatttaa

SEQ ID NO: 157904 - DNA, 19 bp, Homo sapiens
  siRNA target sequence for MID2 (NM_012216.2,1379-1397).
ggggttagattatttaaca

SEQ ID NO: 157905 - DNA, 19 bp, Homo sapiens
  siRNA target sequence for MID2 (NM_012216.2,1411-1429).
catctatccgagaagaact

SEQ ID NO: 157906 - DNA, 19 bp, Homo sapiens
  siRNA target sequence for MID2 (NM_012216.2,1437-1455).
gcctcccatgacaccatta

SEQ ID NO: 157907 - DNA, 19 bp, Homo sapiens
  siRNA target sequence for MID2 (NM_012216.2,1439-1457).
ctcccatgacaccattaca

SEQ ID NO: 157908 - DNA, 19 bp, Homo sapiens
  siRNA target sequence for MID2 (NM_012216.2,1492-1510).
gctcctatgagcttcagta

SEQ ID NO: 157909 - DNA, 19 bp, Homo sapiens
  siRNA target sequence for MID2 (NM_012216.2,1524-1542).
ggccaggctaacttcatca

SEQ ID NO: 157910 - DNA, 19 bp, Homo sapiens
  siRNA target sequence for MID2 (NM_012216.2,1563-1581).
ggcctgtggccagagataa

SEQ ID NO: 157911 - DNA, 19 bp, Homo sapiens
  siRNA target sequence for MID2 (NM_012216.2,1566-1584).
ctgtggccagagataagga

SEQ ID NO: 157912 - DNA, 19 bp, Homo sapiens
  siRNA target sequence for MID2 (NM_012216.2,1568-1586).
gtggccagagataaggaaa

SEQ ID NO: 157913 - DNA, 19 bp, Homo sapiens
  siRNA target sequence for MID2 (NM_012216.2,1596-1614).
gcagtaagctgctcaagat

SEQ ID NO: 157914 - DNA, 19 bp, Homo sapiens
  siRNA target sequence for MID2 (NM_012216.2,1630-1648).
gaggcctgtataattcagt

SEQ ID NO: 157915 - DNA, 19 bp, Homo sapiens
  siRNA target sequence for MID2 (NM_012216.2,1661-1679).
gattgttcccaacattaaa

SEQ ID NO: 157916 - DNA, 19 bp, Homo sapiens
  siRNA target sequence for MID2 (NM_012216.2,1711-1729).
gcgggactcgctacatctt

SEQ ID NO: 157917 - DNA, 19 bp, Homo sapiens
  siRNA target sequence for MID2 (NM_012216.2,1713-1731).
gggactcgctacatcttca

SEQ ID NO: 157918 - DNA, 19 bp, Homo sapiens
  siRNA target sequence for MID2 (NM_012216.2,1774-1792).
ctacccgactaaaaacaaa

SEQ ID NO: 157919 - DNA, 19 bp, Homo sapiens
  siRNA target sequence for MID2 (NM_012216.2,1872-1890).
gatgaaagctctctaaaga

SEQ ID NO: 157920 - DNA, 19 bp, Homo sapiens
  siRNA target sequence for MID2 (NM_012216.2,1983-2001).
gtcatgggttcctcaacat

SEQ ID NO: 157921 - DNA, 19 bp, Homo sapiens
  siRNA target sequence for MID2 (NM_012216.2,2073-2091).
gtcttctctcgctgcaata

SEQ ID NO: 157922 - DNA, 19 bp, Homo sapiens
  siRNA target sequence for MID2 (NM_012216.2,2080-2098).
ctcgctgcaatagtaactt

SEQ ID NO: 157923 - DNA, 19 bp, Homo sapiens
  siRNA target sequence for MID2 (NM_012216.2,2169-2187).
ctggattatgacaacaata

SEQ ID NO: 157924 - DNA, 19 bp, Homo sapiens
  siRNA target sequence for MID2 (NM_012216.2,2183-2201).
caatatgctgtctttctat

SEQ ID NO: 157925 - DNA, 19 bp, Homo sapiens
  siRNA target sequence for MID2 (NM_012216.2,2219-2237).
ccatcttcatacttttgat

SEQ ID NO: 157926 - DNA, 19 bp, Homo sapiens
  siRNA target sequence for MID2 (NM_012216.2,2256-2274).
gtttgtccaacatttacaa

SEQ ID NO: 157927 - DNA, 19 bp, Homo sapiens
  siRNA target sequence for MID2 (NM_012216.2,2278-2296).
ggaacaaatccctaatgat

SEQ ID NO: 157928 - DNA, 19 bp, Homo sapiens
  siRNA target sequence for MID2 (NM_012216.2,2305-2323).
gcttgcctgccccagattt

SEQ ID NO: 157929 - DNA, 19 bp, Homo sapiens
  siRNA target sequence for MID2 (NM_012216.2,2385-2403).
gggatgaaaacctgtcatt

SEQ ID NO: 157930 - DNA, 19 bp, Homo sapiens
  siRNA target sequence for MIPEP (NM_005932.1,428-446).
ggccgacttggctgatttt

SEQ ID NO: 157931 - DNA, 19 bp, Homo sapiens
  siRNA target sequence for MIPEP (NM_005932.1,430-448).
ccgacttggctgattttgt

SEQ ID NO: 157932 - DNA, 19 bp, Homo sapiens
  siRNA target sequence for MIPEP (NM_005932.1,616-634).
gagtggctgaactgtttat

SEQ ID NO: 157933 - DNA, 19 bp, Homo sapiens
  siRNA target sequence for MIPEP (NM_005932.1,622-640).
ctgaactgtttatgtttga

SEQ ID NO: 157934 - DNA, 19 bp, Homo sapiens
  siRNA target sequence for MIPEP (NM_005932.1,652-670).
gtggaatccatctagacaa

SEQ ID NO: 157935 - DNA, 19 bp, Homo sapiens
  siRNA target sequence for MIPEP (NM_005932.1,687-705).
gcagtggacctcaatgtta

SEQ ID NO: 157936 - DNA, 19 bp, Homo sapiens
  siRNA target sequence for MIPEP (NM_005932.1,688-706).
cagtggacctcaatgttaa

SEQ ID NO: 157937 - DNA, 19 bp, Homo sapiens
  siRNA target sequence for MIPEP (NM_005932.1,710-728).
cttggatttgagtagtaca

SEQ ID NO: 157938 - DNA, 19 bp, Homo sapiens
  siRNA target sequence for MIPEP (NM_005932.1,758-776).
gattgagaagcatctctta

SEQ ID NO: 157939 - DNA, 19 bp, Homo sapiens
  siRNA target sequence for MIPEP (NM_005932.1,783-801).
cacattcgtcgtaacttta

SEQ ID NO: 157940 - DNA, 19 bp, Homo sapiens
  siRNA target sequence for MIPEP (NM_005932.1,785-803).
cattcgtcgtaactttaca

SEQ ID NO: 157941 - DNA, 19 bp, Homo sapiens
  siRNA target sequence for MIPEP (NM_005932.1,802-820).
catctgctggggatcatat

SEQ ID NO: 157942 - DNA, 19 bp, Homo sapiens
  siRNA target sequence for MIPEP (NM_005932.1,805-823).
ctgctggggatcatatcat

SEQ ID NO: 157943 - DNA, 19 bp, Homo sapiens
  siRNA target sequence for MIPEP (NM_005932.1,807-825).
gctggggatcatatcataa

SEQ ID NO: 157944 - DNA, 19 bp, Homo sapiens
  siRNA target sequence for MIPEP (NM_005932.1,811-829).
gggatcatatcataattga

SEQ ID NO: 157945 - DNA, 19 bp, Homo sapiens
  siRNA target sequence for MIPEP (NM_005932.1,812-830).
ggatcatatcataattgat

SEQ ID NO: 157946 - DNA, 19 bp, Homo sapiens
  siRNA target sequence for MIPEP (NM_005932.1,860-878).
ggtgcgagaagctgcttat

SEQ ID NO: 157947 - DNA, 19 bp, Homo sapiens
  siRNA target sequence for MIPEP (NM_005932.1,861-879).
gtgcgagaagctgcttata

SEQ ID NO: 157948 - DNA, 19 bp, Homo sapiens
  siRNA target sequence for MIPEP (NM_005932.1,929-947).
gctcagcagcagagatctt

SEQ ID NO: 157949 - DNA, 19 bp, Homo sapiens
  siRNA target sequence for MIPEP (NM_005932.1,940-958).
gagatcttctggcaaagtt

SEQ ID NO: 157950 - DNA, 19 bp, Homo sapiens
  siRNA target sequence for MIPEP (NM_005932.1,960-978).
gtggggtattccacgtttt

SEQ ID NO: 157951 - DNA, 19 bp, Homo sapiens
  siRNA target sequence for MIPEP (NM_005932.1,986-1004).
ggctctccaaggaacgata

SEQ ID NO: 157952 - DNA, 19 bp, Homo sapiens
  siRNA target sequence for MIPEP (NM_005932.1,992-1010).
ccaaggaacgatagctaaa

SEQ ID NO: 157953 - DNA, 19 bp, Homo sapiens
  siRNA target sequence for MIPEP (NM_005932.1,1138-1156).
cctgggaccccccttacta

SEQ ID NO: 157954 - DNA, 19 bp, Homo sapiens
  siRNA target sequence for MIPEP (NM_005932.1,1198-1216).
gcctatattgcccgttttt

SEQ ID NO: 157955 - DNA, 19 bp, Homo sapiens
  siRNA target sequence for MIPEP (NM_005932.1,1231-1249).
gcatggaaggcctgaatat

SEQ ID NO: 157956 - DNA, 19 bp, Homo sapiens
  siRNA target sequence for MIPEP (NM_005932.1,1232-1250).
catggaaggcctgaatatt

SEQ ID NO: 157957 - DNA, 19 bp, Homo sapiens
  siRNA target sequence for MIPEP (NM_005932.1,1239-1257).
ggcctgaatattttgctta

SEQ ID NO: 157958 - DNA, 19 bp, Homo sapiens
  siRNA target sequence for MIPEP (NM_005932.1,1259-1277).
cagactgttggggatttca

SEQ ID NO: 157959 - DNA, 19 bp, Homo sapiens
  siRNA target sequence for MIPEP (NM_005932.1,1315-1333).
gcgaagatgtccgaaaact

SEQ ID NO: 157960 - DNA, 19 bp, Homo sapiens
  siRNA target sequence for MIPEP (NM_005932.1,1365-1383).
gggtacatttactgtgatt

SEQ ID NO: 157961 - DNA, 19 bp, Homo sapiens
  siRNA target sequence for MIPEP (NM_005932.1,1432-1450).
gtggaggcagactaaagga

SEQ ID NO: 157962 - DNA, 19 bp, Homo sapiens
  siRNA target sequence for MIPEP (NM_005932.1,1448-1466).
ggaagatggagactatcaa

SEQ ID NO: 157963 - DNA, 19 bp, Homo sapiens
  siRNA target sequence for MIPEP (NM_005932.1,1507-1525).
caaggagttctccaacttt

SEQ ID NO: 157964 - DNA, 19 bp, Homo sapiens
  siRNA target sequence for MIPEP (NM_005932.1,1619-1637).
gaccaggtgccctactgat

SEQ ID NO: 157965 - DNA, 19 bp, Homo sapiens
  siRNA target sequence for MIPEP (NM_005932.1,1644-1662).
gaggttccttctattctga

SEQ ID NO: 157966 - DNA, 19 bp, Homo sapiens
  siRNA target sequence for MIPEP (NM_005932.1,1667-1685).
gtactttgcaaatgattat

SEQ ID NO: 157967 - DNA, 19 bp, Homo sapiens
  siRNA target sequence for MIPEP (NM_005932.1,1670-1688).
ctttgcaaatgattatcga

SEQ ID NO: 157968 - DNA, 19 bp, Homo sapiens
  siRNA target sequence for MIPEP (NM_005932.1,1729-1747).
cactgccaaaaaatatggt

SEQ ID NO: 157969 - DNA, 19 bp, Homo sapiens
  siRNA target sequence for MIPEP (NM_005932.1,1745-1763).
ggtgtctcgtctttgtgaa

SEQ ID NO: 157970 - DNA, 19 bp, Homo sapiens
  siRNA target sequence for MIPEP (NM_005932.1,1746-1764).
gtgtctcgtctttgtgaat

SEQ ID NO: 157971 - DNA, 19 bp, Homo sapiens
  siRNA target sequence for MIPEP (NM_005932.1,1748-1766).
gtctcgtctttgtgaatct

SEQ ID NO: 157972 - DNA, 19 bp, Homo sapiens
  siRNA target sequence for MIPEP (NM_005932.1,1812-1830).
gccactctggatcaaatct

SEQ ID NO: 157973 - DNA, 19 bp, Homo sapiens
  siRNA target sequence for MIPEP (NM_005932.1,1813-1831).
ccactctggatcaaatcta

SEQ ID NO: 157974 - DNA, 19 bp, Homo sapiens
  siRNA target sequence for MIPEP (NM_005932.1,1853-1871).
gaattcaaccacagacatt

SEQ ID NO: 157975 - DNA, 19 bp, Homo sapiens
  siRNA target sequence for MIPEP (NM_005932.1,1895-1913).
ctatggcctaccatatgtt

SEQ ID NO: 157976 - DNA, 19 bp, Homo sapiens
  siRNA target sequence for MIPEP (NM_005932.1,1954-1972).
ggtatggtgctagatatta

SEQ ID NO: 157977 - DNA, 19 bp, Homo sapiens
  siRNA target sequence for MIPEP (NM_005932.1,1959-1977).
ggtgctagatattactctt

SEQ ID NO: 157978 - DNA, 19 bp, Homo sapiens
  siRNA target sequence for MIPEP (NM_005932.1,1992-2010).
gcggtcgcctccatggttt

SEQ ID NO: 157979 - DNA, 19 bp, Homo sapiens
  siRNA target sequence for MIPEP (NM_005932.1,2020-2038).
gttttctacaggatccttt

SEQ ID NO: 157980 - DNA, 19 bp, Homo sapiens
  siRNA target sequence for MIPEP (NM_005932.1,2108-2126).
catggttgaaggtatgctt

SEQ ID NO: 157981 - DNA, 19 bp, Homo sapiens
  siRNA target sequence for MIPEP (NM_005932.1,2129-2147).
gaagtgtccttctgttgat

SEQ ID NO: 157982 - DNA, 19 bp, Homo sapiens
  siRNA target sequence for MIPEP (NM_005932.1,2178-2196).
gatctggacttcgaaactt

SEQ ID NO: 157983 - DNA, 19 bp, Homo sapiens
  siRNA target sequence for MIRAB13 (NM_033386.1,649-667).
ccctggggcttatgagaat

SEQ ID NO: 157984 - DNA, 19 bp, Homo sapiens
  siRNA target sequence for MIRAB13 (NM_033386.1,778-796).
gcagcaactcgcagaagat

SEQ ID NO: 157985 - DNA, 19 bp, Homo sapiens
  siRNA target sequence for MIRAB13 (NM_033386.1,906-924).
gggttcctggcaaactaca

SEQ ID NO: 157986 - DNA, 19 bp, Homo sapiens
  siRNA target sequence for MIRAB13 (NM_033386.1,1854-1872).
ccccaacgcctctcttgtt

SEQ ID NO: 157987 - DNA, 19 bp, Homo sapiens
  siRNA target sequence for MIRAB13 (NM_033386.1,1938-1956).
cctgcaaggagaatccttt

SEQ ID NO: 157988 - DNA, 19 bp, Homo sapiens
  siRNA target sequence for MIRAB13 (NM_033386.1,1939-1957).
ctgcaaggagaatcctttt

SEQ ID NO: 157989 - DNA, 19 bp, Homo sapiens
  siRNA target sequence for MIRAB13 (NM_033386.1,2336-2354).
ctccggtgcctcctcaata

SEQ ID NO: 157990 - DNA, 19 bp, Homo sapiens
  siRNA target sequence for MIRAB13 (NM_033386.1,2432-2450).
cagcgcaacgctatcatca

SEQ ID NO: 157991 - DNA, 19 bp, Homo sapiens
  siRNA target sequence for MIRAB13 (NM_033386.1,2435-2453).
cgcaacgctatcatcaact

SEQ ID NO: 157992 - DNA, 19 bp, Homo sapiens
  siRNA target sequence for MME (NM_000902.2,123-141).
gatataactgatatcaaca

SEQ ID NO: 157993 - DNA, 19 bp, Homo sapiens
  siRNA target sequence for MME (NM_000902.2,247-265).
caacctacgatgatggtat

SEQ ID NO: 157994 - DNA, 19 bp, Homo sapiens
  siRNA target sequence for MME (NM_000902.2,295-313).
ctgctcgactgatccaaaa

SEQ ID NO: 157995 - DNA, 19 bp, Homo sapiens
  siRNA target sequence for MME (NM_000902.2,297-315).
gctcgactgatccaaaaca

SEQ ID NO: 157996 - DNA, 19 bp, Homo sapiens
  siRNA target sequence for MME (NM_000902.2,298-316).
ctcgactgatccaaaacat

SEQ ID NO: 157997 - DNA, 19 bp, Homo sapiens
  siRNA target sequence for MME (NM_000902.2,363-381).
ggaggctggttgaaacgta

SEQ ID NO: 157998 - DNA, 19 bp, Homo sapiens
  siRNA target sequence for MME (NM_000902.2,364-382).
gaggctggttgaaacgtaa

SEQ ID NO: 157999 - DNA, 19 bp, Homo sapiens
  siRNA target sequence for MME (NM_000902.2,367-385).
gctggttgaaacgtaatgt

SEQ ID NO: 158000 - DNA, 19 bp, Homo sapiens
  siRNA target sequence for MME (NM_000902.2,370-388).
ggttgaaacgtaatgtcat

SEQ ID NO: 158001 - DNA, 19 bp, Homo sapiens
  siRNA target sequence for MME (NM_000902.2,371-389).
gttgaaacgtaatgtcatt

SEQ ID NO: 158002 - DNA, 19 bp, Homo sapiens
  siRNA target sequence for MME (NM_000902.2,401-419).
ctcccgttacggcaacttt

SEQ ID NO: 158003 - DNA, 19 bp, Homo sapiens
  siRNA target sequence for MME (NM_000902.2,403-421).
cccgttacggcaactttga

SEQ ID NO: 158004 - DNA, 19 bp, Homo sapiens
  siRNA target sequence for MME (NM_000902.2,405-423).
cgttacggcaactttgaca

SEQ ID NO: 158005 - DNA, 19 bp, Homo sapiens
  siRNA target sequence for MME (NM_000902.2,510-528).
gcattgtacaggtcttgta

SEQ ID NO: 158006 - DNA, 19 bp, Homo sapiens
  siRNA target sequence for MME (NM_000902.2,521-539).
gtcttgtataaatgaatct

SEQ ID NO: 158007 - DNA, 19 bp, Homo sapiens
  siRNA target sequence for MME (NM_000902.2,559-577).
gagaacctctactcaaact

SEQ ID NO: 158008 - DNA, 19 bp, Homo sapiens
  siRNA target sequence for MME (NM_000902.2,663-681).
gcacaactgaattctaaat

SEQ ID NO: 158009 - DNA, 19 bp, Homo sapiens
  siRNA target sequence for MME (NM_000902.2,664-682).
cacaactgaattctaaata

SEQ ID NO: 158010 - DNA, 19 bp, Homo sapiens
  siRNA target sequence for MME (NM_000902.2,707-725).
gtttgttggcactgatgat

SEQ ID NO: 158011 - DNA, 19 bp, Homo sapiens
  siRNA target sequence for MME (NM_000902.2,714-732).
ggcactgatgataagaatt

SEQ ID NO: 158012 - DNA, 19 bp, Homo sapiens
  siRNA target sequence for MME (NM_000902.2,716-734).
cactgatgataagaattct

SEQ ID NO: 158013 - DNA, 19 bp, Homo sapiens
  siRNA target sequence for MME (NM_000902.2,771-789).
ggcctcccttctagagatt

SEQ ID NO: 158014 - DNA, 19 bp, Homo sapiens
  siRNA target sequence for MME (NM_000902.2,799-817).
gcactggaatctataaaga

SEQ ID NO: 158015 - DNA, 19 bp, Homo sapiens
  siRNA target sequence for MME (NM_000902.2,809-827).
ctataaagaggcttgtaca

SEQ ID NO: 158016 - DNA, 19 bp, Homo sapiens
  siRNA target sequence for MME (NM_000902.2,823-841).
gtacagcatatgtggattt

SEQ ID NO: 158017 - DNA, 19 bp, Homo sapiens
  siRNA target sequence for MME (NM_000902.2,880-898).
gattgcccatcgatgaaaa

SEQ ID NO: 158018 - DNA, 19 bp, Homo sapiens
  siRNA target sequence for MME (NM_000902.2,961-979).
ctaaacctgaagatcgaaa

SEQ ID NO: 158019 - DNA, 19 bp, Homo sapiens
  siRNA target sequence for MME (NM_000902.2,984-1002).
ccaatgcttctgtataaca

SEQ ID NO: 158020 - DNA, 19 bp, Homo sapiens
  siRNA target sequence for MME (NM_000902.2,985-1003).
caatgcttctgtataacaa

SEQ ID NO: 158021 - DNA, 19 bp, Homo sapiens
  siRNA target sequence for MME (NM_000902.2,1014-1032).
gcccagatccaaaataact

SEQ ID NO: 158022 - DNA, 19 bp, Homo sapiens
  siRNA target sequence for MME (NM_000902.2,1055-1073).
gccattcagctggttgaat

SEQ ID NO: 158023 - DNA, 19 bp, Homo sapiens
  siRNA target sequence for MME (NM_000902.2,1056-1074).
ccattcagctggttgaatt

SEQ ID NO: 158024 - DNA, 19 bp, Homo sapiens
  siRNA target sequence for MME (NM_000902.2,1057-1075).
cattcagctggttgaattt

SEQ ID NO: 158025 - DNA, 19 bp, Homo sapiens
  siRNA target sequence for MME (NM_000902.2,1066-1084).
ggttgaatttcacaaatga

SEQ ID NO: 158026 - DNA, 19 bp, Homo sapiens
  siRNA target sequence for MME (NM_000902.2,1140-1158).
gctccagaatatttaacca

SEQ ID NO: 158027 - DNA, 19 bp, Homo sapiens
  siRNA target sequence for MME (NM_000902.2,1141-1159).
ctccagaatatttaaccaa

SEQ ID NO: 158028 - DNA, 19 bp, Homo sapiens
  siRNA target sequence for MME (NM_000902.2,1280-1298).
ccgcaaggccctttatggt

SEQ ID NO: 158029 - DNA, 19 bp, Homo sapiens
  siRNA target sequence for MME (NM_000902.2,1281-1299).
cgcaaggccctttatggta

SEQ ID NO: 158030 - DNA, 19 bp, Homo sapiens
  siRNA target sequence for MME (NM_000902.2,1321-1339).
ggagacgttgtgcaaacta

SEQ ID NO: 158031 - DNA, 19 bp, Homo sapiens
  siRNA target sequence for MME (NM_000902.2,1322-1340).
gagacgttgtgcaaactat

SEQ ID NO: 158032 - DNA, 19 bp, Homo sapiens
  siRNA target sequence for MME (NM_000902.2,1410-1428).
catgtggtcgaggatttga

SEQ ID NO: 158033 - DNA, 19 bp, Homo sapiens
  siRNA target sequence for MME (NM_000902.2,1436-1454).
gatccgagaagtttttatt

SEQ ID NO: 158034 - DNA, 19 bp, Homo sapiens
  siRNA target sequence for MME (NM_000902.2,1477-1495).
ggatggatgccgagacaaa

SEQ ID NO: 158035 - DNA, 19 bp, Homo sapiens
  siRNA target sequence for MME (NM_000902.2,1478-1496).
gatggatgccgagacaaaa

SEQ ID NO: 158036 - DNA, 19 bp, Homo sapiens
  siRNA target sequence for MME (NM_000902.2,1538-1556).
cggctatcctgatgacatt

SEQ ID NO: 158037 - DNA, 19 bp, Homo sapiens
  siRNA target sequence for MME (NM_000902.2,1589-1607).
cctcgagttgaactacaaa

SEQ ID NO: 158038 - DNA, 19 bp, Homo sapiens
  siRNA target sequence for MME (NM_000902.2,1592-1610).
cgagttgaactacaaagaa

SEQ ID NO: 158039 - DNA, 19 bp, Homo sapiens
  siRNA target sequence for MME (NM_000902.2,1595-1613).
gttgaactacaaagaagat

SEQ ID NO: 158040 - DNA, 19 bp, Homo sapiens
  siRNA target sequence for MME (NM_000902.2,1619-1637).
cttcgagaacataattcaa

SEQ ID NO: 158041 - DNA, 19 bp, Homo sapiens
  siRNA target sequence for MME (NM_000902.2,1691-1709).
caaagatgagtggataagt

SEQ ID NO: 158042 - DNA, 19 bp, Homo sapiens
  siRNA target sequence for MME (NM_000902.2,1708-1726).
gtggagcagctgtagtcaa

SEQ ID NO: 158043 - DNA, 19 bp, Homo sapiens
  siRNA target sequence for MME (NM_000902.2,1713-1731).
gcagctgtagtcaatgcat

SEQ ID NO: 158044 - DNA, 19 bp, Homo sapiens
  siRNA target sequence for MME (NM_000902.2,1803-1821).
cagtccaactcattgaact

SEQ ID NO: 158045 - DNA, 19 bp, Homo sapiens
  siRNA target sequence for MME (NM_000902.2,1839-1857).
gtcataggacacgaaatca

SEQ ID NO: 158046 - DNA, 19 bp, Homo sapiens
  siRNA target sequence for MME (NM_000902.2,1869-1887).
gatgacaatggcagaaact

SEQ ID NO: 158047 - DNA, 19 bp, Homo sapiens
  siRNA target sequence for MME (NM_000902.2,1872-1890).
gacaatggcagaaacttta

SEQ ID NO: 158048 - DNA, 19 bp, Homo sapiens
  siRNA target sequence for MME (NM_000902.2,1930-1948).
ctgcaagtaactttaagga

SEQ ID NO: 158049 - DNA, 19 bp, Homo sapiens
  siRNA target sequence for MME (NM_000902.2,1958-1976).
gtgcatggtgtatcagtat

SEQ ID NO: 158050 - DNA, 19 bp, Homo sapiens
  siRNA target sequence for MME (NM_000902.2,2004-2022).
ggacagcaccttaatggaa

SEQ ID NO: 158051 - DNA, 19 bp, Homo sapiens
  siRNA target sequence for MME (NM_000902.2,2005-2023).
gacagcaccttaatggaat

SEQ ID NO: 158052 - DNA, 19 bp, Homo sapiens
  siRNA target sequence for MME (NM_000902.2,2056-2074).
gaggtcttggtcaagcata

SEQ ID NO: 158053 - DNA, 19 bp, Homo sapiens
  siRNA target sequence for MME (NM_000902.2,2070-2088).
gcatacagagcctatcaga

SEQ ID NO: 158054 - DNA, 19 bp, Homo sapiens
  siRNA target sequence for MME (NM_000902.2,2071-2089).
catacagagcctatcagaa

SEQ ID NO: 158055 - DNA, 19 bp, Homo sapiens
  siRNA target sequence for MME (NM_000902.2,2102-2120).
gaatggcgaagaaaaatta

SEQ ID NO: 158056 - DNA, 19 bp, Homo sapiens
  siRNA target sequence for MME (NM_000902.2,2125-2143).
ctggacttgacctaaatca

SEQ ID NO: 158057 - DNA, 19 bp, Homo sapiens
  siRNA target sequence for MME (NM_000902.2,2174-2192).
ggtgtggtgtggaacctat

SEQ ID NO: 158058 - DNA, 19 bp, Homo sapiens
  siRNA target sequence for MME (NM_000902.2,2175-2193).
gtgtggtgtggaacctata

SEQ ID NO: 158059 - DNA, 19 bp, Homo sapiens
  siRNA target sequence for MME (NM_000902.2,2196-2214).
ccagagtatgcggttaact

SEQ ID NO: 158060 - DNA, 19 bp, Homo sapiens
  siRNA target sequence for MME (NM_000902.2,2232-2250).
cacagtccaggcaatttca

SEQ ID NO: 158061 - DNA, 19 bp, Homo sapiens
  siRNA target sequence for MME (NM_000902.2,2267-2285).
gcagaactctgcagagttt

SEQ ID NO: 158062 - DNA, 19 bp, Homo sapiens
  siRNA target sequence for MME (NM_000902.2,2294-2312).
ctttcactgccgcaagaat

SEQ ID NO: 158063 - DNA, 19 bp, Homo sapiens
  siRNA target sequence for MME (NM_000902.2,2298-2316).
cactgccgcaagaattcat

SEQ ID NO: 158064 - DNA, 19 bp, Homo sapiens
  siRNA target sequence for MME (NM_000902.2,2302-2320).
gccgcaagaattcatacat

SEQ ID NO: 158065 - DNA, 19 bp, Homo sapiens
  siRNA target sequence for MME (NM_000902.2,2304-2322).
cgcaagaattcatacatga

SEQ ID NO: 158066 - DNA, 19 bp, Homo sapiens
  siRNA target sequence for MMEL2 (NM_033467.1,216-234).
gccggctgtgcttcttaca

SEQ ID NO: 158067 - DNA, 19 bp, Homo sapiens
  siRNA target sequence for MMEL2 (NM_033467.1,425-443).
cctgagaccaactcaagat

SEQ ID NO: 158068 - DNA, 19 bp, Homo sapiens
  siRNA target sequence for MMEL2 (NM_033467.1,428-446).
gagaccaactcaagataca

SEQ ID NO: 158069 - DNA, 19 bp, Homo sapiens
  siRNA target sequence for MMEL2 (NM_033467.1,768-786).
ccagccggcacatcatcta

SEQ ID NO: 158070 - DNA, 19 bp, Homo sapiens
  siRNA target sequence for MMEL2 (NM_033467.1,771-789).
gccggcacatcatctacat

SEQ ID NO: 158071 - DNA, 19 bp, Homo sapiens
  siRNA target sequence for MMEL2 (NM_033467.1,772-790).
ccggcacatcatctacata

SEQ ID NO: 158072 - DNA, 19 bp, Homo sapiens
  siRNA target sequence for MMEL2 (NM_033467.1,774-792).
ggcacatcatctacataga

SEQ ID NO: 158073 - DNA, 19 bp, Homo sapiens
  siRNA target sequence for MMEL2 (NM_033467.1,812-830).
ccctcccgagagtactact

SEQ ID NO: 158074 - DNA, 19 bp, Homo sapiens
  siRNA target sequence for MMEL2 (NM_033467.1,1087-1105).
ctggactctgttcatacaa

SEQ ID NO: 158075 - DNA, 19 bp, Homo sapiens
  siRNA target sequence for MMEL2 (NM_033467.1,1109-1127).
gtgctatcctctgtcaaaa

SEQ ID NO: 158076 - DNA, 19 bp, Homo sapiens
  siRNA target sequence for MMEL2 (NM_033467.1,1247-1265).
gtgctggaccgcattggta

SEQ ID NO: 158077 - DNA, 19 bp, Homo sapiens
  siRNA target sequence for MMEL2 (NM_033467.1,1263-1281).
gtagcctaagccagagatt

SEQ ID NO: 158078 - DNA, 19 bp, Homo sapiens
  siRNA target sequence for MMEL2 (NM_033467.1,1336-1354).
ggtgcgctggcgtgaatgt

SEQ ID NO: 158079 - DNA, 19 bp, Homo sapiens
  siRNA target sequence for MMEL2 (NM_033467.1,1456-1474).
caaggtgcggacagtgttt

SEQ ID NO: 158080 - DNA, 19 bp, Homo sapiens
  siRNA target sequence for MMEL2 (NM_033467.1,1607-1625).
gaggagtactccaatctga

SEQ ID NO: 158081 - DNA, 19 bp, Homo sapiens
  siRNA target sequence for MMEL2 (NM_033467.1,1745-1763).
gtggtcaatgcgttctact

SEQ ID NO: 158082 - DNA, 19 bp, Homo sapiens
  siRNA target sequence for MMEL2 (NM_033467.1,1767-1785).
caaaccgaaaccagattgt

SEQ ID NO: 158083 - DNA, 19 bp, Homo sapiens
  siRNA target sequence for MMEL2 (NM_033467.1,1905-1923).
gccggaacttcgacaagaa

SEQ ID NO: 158084 - DNA, 19 bp, Homo sapiens
  siRNA target sequence for MMEL2 (NM_033467.1,2053-2071).
cacccttggggaaaacatt

SEQ ID NO: 158085 - DNA, 19 bp, Homo sapiens
  siRNA target sequence for MMEL2 (NM_033467.1,2085-2103).
gggtgcggcaagcctataa

SEQ ID NO: 158086 - DNA, 19 bp, Homo sapiens
  siRNA target sequence for MMEL2 (NM_033467.1,2222-2240).
cccgagttcgccatccaat

SEQ ID NO: 158087 - DNA, 19 bp, Homo sapiens
  siRNA target sequence for MMP10 (NM_002425.1,25-43).
gatgcatcttgcattcctt

SEQ ID NO: 158088 - DNA, 19 bp, Homo sapiens
  siRNA target sequence for MMP10 (NM_002425.1,145-163).
ctacaacctcgaaaaggat

SEQ ID NO: 158089 - DNA, 19 bp, Homo sapiens
  siRNA target sequence for MMP10 (NM_002425.1,185-203).
gacagtaatctcattgtta

SEQ ID NO: 158090 - DNA, 19 bp, Homo sapiens
  siRNA target sequence for MMP10 (NM_002425.1,638-656).
gcatcaggcaccaatttat

SEQ ID NO: 158091 - DNA, 19 bp, Homo sapiens
  siRNA target sequence for MMP10 (NM_002425.1,841-859).
ggtgcccacaaaatctgtt

SEQ ID NO: 158092 - DNA, 19 bp, Homo sapiens
  siRNA target sequence for MMP10 (NM_002425.1,919-937).
cactctgaggggagaatat

SEQ ID NO: 158093 - DNA, 19 bp, Homo sapiens
  siRNA target sequence for MMP10 (NM_002425.1,927-945).
ggggagaatatctgttctt

SEQ ID NO: 158094 - DNA, 19 bp, Homo sapiens
  siRNA target sequence for MMP10 (NM_002425.1,979-997).
gaaccctgaacctgaattt

SEQ ID NO: 158095 - DNA, 19 bp, Homo sapiens
  siRNA target sequence for MMP10 (NM_002425.1,1018-1036).
gccctctcttccatcatat

SEQ ID NO: 158096 - DNA, 19 bp, Homo sapiens
  siRNA target sequence for MMP10 (NM_002425.1,1023-1041).
ctcttccatcatatttgga

SEQ ID NO: 158097 - DNA, 19 bp, Homo sapiens
  siRNA target sequence for MMP10 (NM_002425.1,1065-1083).
gggacaccgtttttatttt

SEQ ID NO: 158098 - DNA, 19 bp, Homo sapiens
  siRNA target sequence for MMP10 (NM_002425.1,1120-1138).
ggtacaagcaggttatcca

SEQ ID NO: 158099 - DNA, 19 bp, Homo sapiens
  siRNA target sequence for MMP10 (NM_002425.1,1121-1139).
gtacaagcaggttatccaa

SEQ ID NO: 158100 - DNA, 19 bp, Homo sapiens
  siRNA target sequence for MMP10 (NM_002425.1,1156-1174).
gggttttcctccaaccata

SEQ ID NO: 158101 - DNA, 19 bp, Homo sapiens
  siRNA target sequence for MMP10 (NM_002425.1,1276-1294).
gcaaggcttccctagacta

SEQ ID NO: 158102 - DNA, 19 bp, Homo sapiens
  siRNA target sequence for MMP10 (NM_002425.1,1277-1295).
caaggcttccctagactaa

SEQ ID NO: 158103 - DNA, 19 bp, Homo sapiens
  siRNA target sequence for MMP10 (NM_002425.1,1369-1387).
cagtggatcatcacagttt

SEQ ID NO: 158104 - DNA, 19 bp, Homo sapiens
  siRNA target sequence for MMP10 (NM_002425.1,1371-1389).
gtggatcatcacagtttga

SEQ ID NO: 158105 - DNA, 19 bp, Homo sapiens
  siRNA target sequence for MMP10 (NM_002425.1,1405-1423).
caggatggtgacacacata

SEQ ID NO: 158106 - DNA, 19 bp, Homo sapiens
  siRNA target sequence for MMP10 (NM_002425.1,1407-1425).
ggatggtgacacacatatt

SEQ ID NO: 158107 - DNA, 19 bp, Homo sapiens
  siRNA target sequence for MMP10 (NM_002425.1,1408-1426).
gatggtgacacacatatta

SEQ ID NO: 158108 - DNA, 19 bp, Homo sapiens
  siRNA target sequence for MMP10 (NM_002425.1,1418-1436).
cacatattaaagagtaaca

SEQ ID NO: 158109 - DNA, 19 bp, Homo sapiens
  siRNA target sequence for MMP10 (NM_002425.1,1429-1447).
gagtaacagctggttacat

SEQ ID NO: 158110 - DNA, 19 bp, Homo sapiens
  siRNA target sequence for MMP14 (NM_004995.2,512-530).
gtggtgttccagacaagtt

SEQ ID NO: 158111 - DNA, 19 bp, Homo sapiens
  siRNA target sequence for MMP14 (NM_004995.2,570-588).
cgccatccagggtctcaaa

SEQ ID NO: 158112 - DNA, 19 bp, Homo sapiens
  siRNA target sequence for MMP14 (NM_004995.2,571-589).
gccatccagggtctcaaat

SEQ ID NO: 158113 - DNA, 19 bp, Homo sapiens
  siRNA target sequence for MMP14 (NM_004995.2,1022-1040).
ggatggacacggagaattt

SEQ ID NO: 158114 - DNA, 19 bp, Homo sapiens
  siRNA target sequence for MMP14 (NM_004995.2,1065-1083).
gggcatccagcaactttat

SEQ ID NO: 158115 - DNA, 19 bp, Homo sapiens
  siRNA target sequence for MMP14 (NM_004995.2,1260-1278).
gcgggtgaggaataaccaa

SEQ ID NO: 158116 - DNA, 19 bp, Homo sapiens
  siRNA target sequence for MMP14 (NM_004995.2,1365-1383).
caaattcgtcttcttcaaa

SEQ ID NO: 158117 - DNA, 19 bp, Homo sapiens
  siRNA target sequence for MMP14 (NM_004995.2,1460-1478).
ggctgcctaccgacaagat

SEQ ID NO: 158118 - DNA, 19 bp, Homo sapiens
  siRNA target sequence for MMP14 (NM_004995.2,1461-1479).
gctgcctaccgacaagatt

SEQ ID NO: 158119 - DNA, 19 bp, Homo sapiens
  siRNA target sequence for MMP14 (NM_004995.2,1464-1482).
gcctaccgacaagattgat

SEQ ID NO: 158120 - DNA, 19 bp, Homo sapiens
  siRNA target sequence for MMP14 (NM_004995.2,1578-1596).
gtaccccaagaacatcaaa

SEQ ID NO: 158121 - DNA, 19 bp, Homo sapiens
  siRNA target sequence for MMP14 (NM_004995.2,1643-1661).
gcgatgaagtcttcactta

SEQ ID NO: 158122 - DNA, 19 bp, Homo sapiens
  siRNA target sequence for MMP14 (NM_004995.2,1645-1663).
gatgaagtcttcacttact

SEQ ID NO: 158123 - DNA, 19 bp, Homo sapiens
  siRNA target sequence for MMP14 (NM_004995.2,1795-1813).
gagacggaggtgatcatca

SEQ ID NO: 158124 - DNA, 19 bp, Homo sapiens
  siRNA target sequence for MMP14 (NM_004995.2,1797-1815).
gacggaggtgatcatcatt

SEQ ID NO: 158125 - DNA, 19 bp, Homo sapiens
  siRNA target sequence for MMP15 (NM_002428.1,396-414).
gttcggggtacgagtgaaa

SEQ ID NO: 158126 - DNA, 19 bp, Homo sapiens
  siRNA target sequence for MMP15 (NM_002428.1,785-803).
ctgacctgcatggaaacaa

SEQ ID NO: 158127 - DNA, 19 bp, Homo sapiens
  siRNA target sequence for MMP15 (NM_002428.1,1320-1338).
gcgccaagacggtcgtttt

SEQ ID NO: 158128 - DNA, 19 bp, Homo sapiens
  siRNA target sequence for MMP15 (NM_002428.1,1322-1340).
gccaagacggtcgttttgt

SEQ ID NO: 158129 - DNA, 19 bp, Homo sapiens
  siRNA target sequence for MMP15 (NM_002428.1,1327-1345).
gacggtcgttttgtctttt

SEQ ID NO: 158130 - DNA, 19 bp, Homo sapiens
  siRNA target sequence for MMP15 (NM_002428.1,1432-1450).
ccctatgaccgcattgaca

SEQ ID NO: 158131 - DNA, 19 bp, Homo sapiens
  siRNA target sequence for MMP15 (NM_002428.1,1616-1634).
cagcctacacctacttcta

SEQ ID NO: 158132 - DNA, 19 bp, Homo sapiens
  siRNA target sequence for MMP15 (NM_002428.1,2009-2027).
cgccacgtgtcctgcttta

SEQ ID NO: 158133 - DNA, 19 bp, Homo sapiens
  siRNA target sequence for MMP15 (NM_002428.1,2011-2029).
ccacgtgtcctgctttact

SEQ ID NO: 158134 - DNA, 19 bp, Homo sapiens
  siRNA target sequence for MMP16 (NM_005941.2,138-156).
gaagacggttggatttcgt

SEQ ID NO: 158135 - DNA, 19 bp, Homo sapiens
  siRNA target sequence for MMP16 (NM_005941.2,158-176).
catcattcgggggtgtttt

SEQ ID NO: 158136 - DNA, 19 bp, Homo sapiens
  siRNA target sequence for MMP16 (NM_005941.2,161-179).
cattcgggggtgtttttct

SEQ ID NO: 158137 - DNA, 19 bp, Homo sapiens
  siRNA target sequence for MMP16 (NM_005941.2,167-185).
ggggtgtttttcttgcaaa

SEQ ID NO: 158138 - DNA, 19 bp, Homo sapiens
  siRNA target sequence for MMP16 (NM_005941.2,182-200).
caaaccttgctttggattt

SEQ ID NO: 158139 - DNA, 19 bp, Homo sapiens
  siRNA target sequence for MMP16 (NM_005941.2,216-234).
gcggaacggagcagtattt

SEQ ID NO: 158140 - DNA, 19 bp, Homo sapiens
  siRNA target sequence for MMP16 (NM_005941.2,218-236).
ggaacggagcagtatttca

SEQ ID NO: 158141 - DNA, 19 bp, Homo sapiens
  siRNA target sequence for MMP16 (NM_005941.2,222-240).
cggagcagtatttcaatgt

SEQ ID NO: 158142 - DNA, 19 bp, Homo sapiens
  siRNA target sequence for MMP16 (NM_005941.2,235-253).
caatgtggaggtttggtta

SEQ ID NO: 158143 - DNA, 19 bp, Homo sapiens
  siRNA target sequence for MMP16 (NM_005941.2,275-293).
ccgactgaccccagaatgt

SEQ ID NO: 158144 - DNA, 19 bp, Homo sapiens
  siRNA target sequence for MMP16 (NM_005941.2,435-453).
gaggtagctccaaatttca

SEQ ID NO: 158145 - DNA, 19 bp, Homo sapiens
  siRNA target sequence for MMP16 (NM_005941.2,458-476).
cgtcgaaagcgatatgcat

SEQ ID NO: 158146 - DNA, 19 bp, Homo sapiens
  siRNA target sequence for MMP16 (NM_005941.2,459-477).
gtcgaaagcgatatgcatt

SEQ ID NO: 158147 - DNA, 19 bp, Homo sapiens
  siRNA target sequence for MMP16 (NM_005941.2,494-512).
cagcacaagcacatcactt

SEQ ID NO: 158148 - DNA, 19 bp, Homo sapiens
  siRNA target sequence for MMP16 (NM_005941.2,523-541).
gaacgtaactccaaaagta

SEQ ID NO: 158149 - DNA, 19 bp, Homo sapiens
  siRNA target sequence for MMP16 (NM_005941.2,548-566).
cctgagactcgtaaagcta

SEQ ID NO: 158150 - DNA, 19 bp, Homo sapiens
  siRNA target sequence for MMP16 (NM_005941.2,549-567).
ctgagactcgtaaagctat

SEQ ID NO: 158151 - DNA, 19 bp, Homo sapiens
  siRNA target sequence for MMP16 (NM_005941.2,617-635).
gaagttccctacagtgaat

SEQ ID NO: 158152 - DNA, 19 bp, Homo sapiens
  siRNA target sequence for MMP16 (NM_005941.2,623-641).
ccctacagtgaattagaaa

SEQ ID NO: 158153 - DNA, 19 bp, Homo sapiens
  siRNA target sequence for MMP16 (NM_005941.2,650-668).
cgtgatgtggatataacca

SEQ ID NO: 158154 - DNA, 19 bp, Homo sapiens
  siRNA target sequence for MMP16 (NM_005941.2,651-669).
gtgatgtggatataaccat

SEQ ID NO: 158155 - DNA, 19 bp, Homo sapiens
  siRNA target sequence for MMP16 (NM_005941.2,653-671).
gatgtggatataaccatta

SEQ ID NO: 158156 - DNA, 19 bp, Homo sapiens
  siRNA target sequence for MMP16 (NM_005941.2,868-886).
gggattggagcattccaat

SEQ ID NO: 158157 - DNA, 19 bp, Homo sapiens
  siRNA target sequence for MMP16 (NM_005941.2,906-924).
ctccattttaccagtacat

SEQ ID NO: 158158 - DNA, 19 bp, Homo sapiens
  siRNA target sequence for MMP16 (NM_005941.2,940-958).
caaactacctaatgatgat

SEQ ID NO: 158159 - DNA, 19 bp, Homo sapiens
  siRNA target sequence for MMP16 (NM_005941.2,1030-1048).
gcccccacaccgctctatt

SEQ ID NO: 158160 - DNA, 19 bp, Homo sapiens
  siRNA target sequence for MMP16 (NM_005941.2,1033-1051).
cccacaccgctctattcct

SEQ ID NO: 158161 - DNA, 19 bp, Homo sapiens
  siRNA target sequence for MMP16 (NM_005941.2,1052-1070).
ccggctgacccaaggaaaa

SEQ ID NO: 158162 - DNA, 19 bp, Homo sapiens
  siRNA target sequence for MMP16 (NM_005941.2,1150-1168).
ctttaacactctagctatt

SEQ ID NO: 158163 - DNA, 19 bp, Homo sapiens
  siRNA target sequence for MMP16 (NM_005941.2,1172-1190).
cgtcgtgagatgtttgttt

SEQ ID NO: 158164 - DNA, 19 bp, Homo sapiens
  siRNA target sequence for MMP16 (NM_005941.2,1175-1193).
cgtgagatgtttgttttca

SEQ ID NO: 158165 - DNA, 19 bp, Homo sapiens
  siRNA target sequence for MMP16 (NM_005941.2,1203-1221).
ggttttggcgagtgagaaa

SEQ ID NO: 158166 - DNA, 19 bp, Homo sapiens
  siRNA target sequence for MMP16 (NM_005941.2,1238-1256).
ggatacccaatgcaaatta

SEQ ID NO: 158167 - DNA, 19 bp, Homo sapiens
  siRNA target sequence for MMP16 (NM_005941.2,1244-1262).
ccaatgcaaattacttact

SEQ ID NO: 158168 - DNA, 19 bp, Homo sapiens
  siRNA target sequence for MMP16 (NM_005941.2,1273-1291).
cttgcctcctagtatcgat

SEQ ID NO: 158169 - DNA, 19 bp, Homo sapiens
  siRNA target sequence for MMP16 (NM_005941.2,1281-1299).
ctagtatcgatgcagttta

SEQ ID NO: 158170 - DNA, 19 bp, Homo sapiens
  siRNA target sequence for MMP16 (NM_005941.2,1284-1302).
gtatcgatgcagtttatga

SEQ ID NO: 158171 - DNA, 19 bp, Homo sapiens
  siRNA target sequence for MMP16 (NM_005941.2,1324-1342).
gttctttaaaggtaacaaa

SEQ ID NO: 158172 - DNA, 19 bp, Homo sapiens
  siRNA target sequence for MMP16 (NM_005941.2,1348-1366).
ggtgttcaaggatacaact

SEQ ID NO: 158173 - DNA, 19 bp, Homo sapiens
  siRNA target sequence for MMP16 (NM_005941.2,1351-1369).
gttcaaggatacaactctt

SEQ ID NO: 158174 - DNA, 19 bp, Homo sapiens
  siRNA target sequence for MMP16 (NM_005941.2,1354-1372).
caaggatacaactcttcaa

SEQ ID NO: 158175 - DNA, 19 bp, Homo sapiens
  siRNA target sequence for MMP16 (NM_005941.2,1374-1392).
ctggttaccctcatgactt

SEQ ID NO: 158176 - DNA, 19 bp, Homo sapiens
  siRNA target sequence for MMP16 (NM_005941.2,1377-1395).
gttaccctcatgacttgat

SEQ ID NO: 158177 - DNA, 19 bp, Homo sapiens
  siRNA target sequence for MMP16 (NM_005941.2,1410-1428).
gaattccccctcatggtat

SEQ ID NO: 158178 - DNA, 19 bp, Homo sapiens
  siRNA target sequence for MMP16 (NM_005941.2,1415-1433).
ccccctcatggtattgatt

SEQ ID NO: 158179 - DNA, 19 bp, Homo sapiens
  siRNA target sequence for MMP16 (NM_005941.2,1417-1435).
ccctcatggtattgattca

SEQ ID NO: 158180 - DNA, 19 bp, Homo sapiens
  siRNA target sequence for MMP16 (NM_005941.2,1448-1466).
gaggacgtcgggaaaacct

SEQ ID NO: 158181 - DNA, 19 bp, Homo sapiens
  siRNA target sequence for MMP16 (NM_005941.2,1450-1468).
ggacgtcgggaaaacctat

SEQ ID NO: 158182 - DNA, 19 bp, Homo sapiens
  siRNA target sequence for MMP16 (NM_005941.2,1451-1469).
gacgtcgggaaaacctatt

SEQ ID NO: 158183 - DNA, 19 bp, Homo sapiens
  siRNA target sequence for MMP16 (NM_005941.2,1454-1472).
gtcgggaaaacctatttct

SEQ ID NO: 158184 - DNA, 19 bp, Homo sapiens
  siRNA target sequence for MMP16 (NM_005941.2,1471-1489).
cttcaagggagacagatat

SEQ ID NO: 158185 - DNA, 19 bp, Homo sapiens
  siRNA target sequence for MMP16 (NM_005941.2,1483-1501).
cagatattggagatatagt

SEQ ID NO: 158186 - DNA, 19 bp, Homo sapiens
  siRNA target sequence for MMP16 (NM_005941.2,1576-1594).
gggagcatttgtacacaaa

SEQ ID NO: 158187 - DNA, 19 bp, Homo sapiens
  siRNA target sequence for MMP16 (NM_005941.2,1595-1613).
gaaaatggctttacgtatt

SEQ ID NO: 158188 - DNA, 19 bp, Homo sapiens
  siRNA target sequence for MMP16 (NM_005941.2,1603-1621).
ctttacgtatttctacaaa

SEQ ID NO: 158189 - DNA, 19 bp, Homo sapiens
  siRNA target sequence for MMP16 (NM_005941.2,1628-1646).
gagtattggaaattcaaca

SEQ ID NO: 158190 - DNA, 19 bp, Homo sapiens
  siRNA target sequence for MMP16 (NM_005941.2,1657-1675).
caaggtagaacctggatat

SEQ ID NO: 158191 - DNA, 19 bp, Homo sapiens
  siRNA target sequence for MMP16 (NM_005941.2,1716-1734).
caacagacagagttaaaga

SEQ ID NO: 158192 - DNA, 19 bp, Homo sapiens
  siRNA target sequence for MMP16 (NM_005941.2,1741-1759).
cagcccaccagatgatgta

SEQ ID NO: 158193 - DNA, 19 bp, Homo sapiens
  siRNA target sequence for MMP16 (NM_005941.2,1743-1761).
gcccaccagatgatgtaga

SEQ ID NO: 158194 - DNA, 19 bp, Homo sapiens
  siRNA target sequence for MMP16 (NM_005941.2,1843-1861).
ccttgtattggtttacact

SEQ ID NO: 158195 - DNA, 19 bp, Homo sapiens
  siRNA target sequence for MMP16 (NM_005941.2,1892-1910).
cgccacatactgtactgta

SEQ ID NO: 158196 - DNA, 19 bp, Homo sapiens
  siRNA target sequence for MMP16 (NM_005941.2,1906-1924).
ctgtaaacgctctatgcaa

SEQ ID NO: 158197 - DNA, 19 bp, Homo sapiens
  siRNA target sequence for MMP16 (NM_022564.1,1334-1352).
gtgaagggagacactctat

SEQ ID NO: 158198 - DNA, 19 bp, Homo sapiens
  siRNA target sequence for MMP16 (NM_022564.1,1336-1354).
gaagggagacactctatct

SEQ ID NO: 158199 - DNA, 19 bp, Homo sapiens
  siRNA target sequence for MMP16 (NM_022564.1,1364-1382).
gatggttggctctacaaat

SEQ ID NO: 158200 - DNA, 19 bp, Homo sapiens
  siRNA target sequence for MMP16 (NM_022564.1,1368-1386).
gttggctctacaaatacca

SEQ ID NO: 158201 - DNA, 19 bp, Homo sapiens
  siRNA target sequence for MMP16 (NM_022564.1,1375-1393).
ctacaaataccattggaaa

SEQ ID NO: 158202 - DNA, 19 bp, Homo sapiens
  siRNA target sequence for MMP16 (NM_022564.1,1420-1438).
gcctgtgctctcaagacaa

SEQ ID NO: 158203 - DNA, 19 bp, Homo sapiens
  siRNA target sequence for MMP16 (NM_022564.1,1426-1444).
gctctcaagacaaactgaa

SEQ ID NO: 158204 - DNA, 19 bp, Homo sapiens
  siRNA target sequence for MMP16 (NM_022564.1,1463-1481).
gaattatcttccatcacat

SEQ ID NO: 158205 - DNA, 19 bp, Homo sapiens
  siRNA target sequence for MMP17 (NM_016155.2,572-590).
cggtgcgtgcactcatgta

SEQ ID NO: 158206 - DNA, 19 bp, Homo sapiens
  siRNA target sequence for MMP17 (NM_016155.2,574-592).
gtgcgtgcactcatgtact

SEQ ID NO: 158207 - DNA, 19 bp, Homo sapiens
  siRNA target sequence for MMP17 (NM_016155.2,677-695).
ccaaggccgaccataacga

SEQ ID NO: 158208 - DNA, 19 bp, Homo sapiens
  siRNA target sequence for MMP17 (NM_016155.2,1290-1308).
ccacaagatcgtcttcttt

SEQ ID NO: 158209 - DNA, 19 bp, Homo sapiens
  siRNA target sequence for MMP17 (NM_016155.2,1291-1309).
cacaagatcgtcttcttta

SEQ ID NO: 158210 - DNA, 19 bp, Homo sapiens
  siRNA target sequence for MMP17 (NM_016155.2,1293-1311).
caagatcgtcttctttaaa

SEQ ID NO: 158211 - DNA, 19 bp, Homo sapiens
  siRNA target sequence for MMP17 (NM_016155.2,1296-1314).
gatcgtcttctttaaagga

SEQ ID NO: 158212 - DNA, 19 bp, Homo sapiens
  siRNA target sequence for MMP17 (NM_016155.2,1567-1585).
gacggtgcctcctacttct

SEQ ID NO: 158213 - DNA, 19 bp, Homo sapiens
  siRNA target sequence for MMP19 (NM_002429.2,193-211).
gtggactacctgtcacaat

SEQ ID NO: 158214 - DNA, 19 bp, Homo sapiens
  siRNA target sequence for MMP19 (NM_002429.2,195-213).
ggactacctgtcacaatat

SEQ ID NO: 158215 - DNA, 19 bp, Homo sapiens
  siRNA target sequence for MMP19 (NM_002429.2,230-248).
ctctagaaggatctaataa

SEQ ID NO: 158216 - DNA, 19 bp, Homo sapiens
  siRNA target sequence for MMP19 (NM_002429.2,589-607).
cgccaaagctcgtactgtt

SEQ ID NO: 158217 - DNA, 19 bp, Homo sapiens
  siRNA target sequence for MMP19 (NM_002429.2,597-615).
ctcgtactgttccaatact

SEQ ID NO: 158218 - DNA, 19 bp, Homo sapiens
  siRNA target sequence for MMP19 (NM_002429.2,599-617).
cgtactgttccaatacttt

SEQ ID NO: 158219 - DNA, 19 bp, Homo sapiens
  siRNA target sequence for MMP19 (NM_002429.2,603-621).
ctgttccaatacttttgat

SEQ ID NO: 158220 - DNA, 19 bp, Homo sapiens
  siRNA target sequence for MMP19 (NM_002429.2,766-784).
cttgggcactcccgatatt

SEQ ID NO: 158221 - DNA, 19 bp, Homo sapiens
  siRNA target sequence for MMP19 (NM_002429.2,1009-1027).
cgtgggaagacctatgctt

SEQ ID NO: 158222 - DNA, 19 bp, Homo sapiens
  siRNA target sequence for MMP19 (NM_002429.2,1013-1031).
ggaagacctatgctttcaa

SEQ ID NO: 158223 - DNA, 19 bp, Homo sapiens
  siRNA target sequence for MMP19 (NM_002429.2,1036-1054).
gactatgtgtggactgtat

SEQ ID NO: 158224 - DNA, 19 bp, Homo sapiens
  siRNA target sequence for MMP19 (NM_002429.2,1042-1060).
gtgtggactgtatcagatt

SEQ ID NO: 158225 - DNA, 19 bp, Homo sapiens
  siRNA target sequence for MMP19 (NM_002429.2,1044-1062).
gtggactgtatcagattca

SEQ ID NO: 158226 - DNA, 19 bp, Homo sapiens
  siRNA target sequence for MMP19 (NM_002429.2,1131-1149).
ctactcgcctcgaacacaa

SEQ ID NO: 158227 - DNA, 19 bp, Homo sapiens
  siRNA target sequence for MMP19 (NM_002429.2,1136-1154).
cgcctcgaacacaatggat

SEQ ID NO: 158228 - DNA, 19 bp, Homo sapiens
  siRNA target sequence for MMP19 (NM_002429.2,1137-1155).
gcctcgaacacaatggatt

SEQ ID NO: 158229 - DNA, 19 bp, Homo sapiens
  siRNA target sequence for MMP19 (NM_002429.2,1141-1159).
cgaacacaatggattcact

SEQ ID NO: 158230 - DNA, 19 bp, Homo sapiens
  siRNA target sequence for MMP19 (NM_002429.2,1142-1160).
gaacacaatggattcactt

SEQ ID NO: 158231 - DNA, 19 bp, Homo sapiens
  siRNA target sequence for MMP19 (NM_002429.2,1173-1191).
caaggtgtggcgctacatt

SEQ ID NO: 158232 - DNA, 19 bp, Homo sapiens
  siRNA target sequence for MMP19 (NM_002429.2,1176-1194).
ggtgtggcgctacattaat

SEQ ID NO: 158233 - DNA, 19 bp, Homo sapiens
  siRNA target sequence for MMP19 (NM_002429.2,1177-1195).
gtgtggcgctacattaatt

SEQ ID NO: 158234 - DNA, 19 bp, Homo sapiens
  siRNA target sequence for MMP19 (NM_002429.2,1181-1199).
ggcgctacattaatttcaa

SEQ ID NO: 158235 - DNA, 19 bp, Homo sapiens
  siRNA target sequence for MMP19 (NM_002429.2,1183-1201).
cgctacattaatttcaaga

SEQ ID NO: 158236 - DNA, 19 bp, Homo sapiens
  siRNA target sequence for MMP19 (NM_002429.2,1184-1202).
gctacattaatttcaagat

SEQ ID NO: 158237 - DNA, 19 bp, Homo sapiens
  siRNA target sequence for MMP19 (NM_002429.2,1265-1283).
ggcctctcaaccaaaaggt

SEQ ID NO: 158238 - DNA, 19 bp, Homo sapiens
  siRNA target sequence for MMP19 (NM_002429.2,1343-1361).
gcagctaccccaaaccaat

SEQ ID NO: 158239 - DNA, 19 bp, Homo sapiens
  siRNA target sequence for MMP19 (NM_002429.2,1392-1410).
gccctcggctgctatgagt

SEQ ID NO: 158240 - DNA, 19 bp, Homo sapiens
  siRNA target sequence for MMP19 (NM_002429.2,1417-1435).
gatggccgagtctacttct

SEQ ID NO: 158241 - DNA, 19 bp, Homo sapiens
  siRNA target sequence for MMP19 (NM_002429.2,1482-1500).
gaaaggctatcccagaaat

SEQ ID NO: 158242 - DNA, 19 bp, Homo sapiens
  siRNA target sequence for MMP19 (NM_002429.2,1486-1504).
ggctatcccagaaatattt

SEQ ID NO: 158243 - DNA, 19 bp, Homo sapiens
  siRNA target sequence for MMP19 (NM_002429.2,1521-1539).
ctgtcgtccccggactata

SEQ ID NO: 158244 - DNA, 19 bp, Homo sapiens
  siRNA target sequence for MMP19 (NM_002429.2,1523-1541).
gtcgtccccggactataga

SEQ ID NO: 158245 - DNA, 19 bp, Homo sapiens
  siRNA target sequence for MMP19 (NM_002429.2,1525-1543).
cgtccccggactatagaca

SEQ ID NO: 158246 - DNA, 19 bp, Homo sapiens
  siRNA target sequence for MMP19 (NM_002429.2,1549-1567).
ccatcaggtgggaatacca

SEQ ID NO: 158247 - DNA, 19 bp, Homo sapiens
  siRNA target sequence for MMP19 (NM_002429.2,1574-1592).
caggtacgggcataacctt

SEQ ID NO: 158248 - DNA, 19 bp, Homo sapiens
  siRNA target sequence for MMP19 (NM_002429.2,1611-1629).
cacagaaaccacgtttgaa

SEQ ID NO: 158249 - DNA, 19 bp, Homo sapiens
  siRNA target sequence for MMP19 (NM_002429.2,1613-1631).
cagaaaccacgtttgaata

SEQ ID NO: 158250 - DNA, 19 bp, Homo sapiens
  siRNA target sequence for MMP20 (NM_004771.2,50-68).
ctcatcatggctttgaagt

SEQ ID NO: 158251 - DNA, 19 bp, Homo sapiens
  siRNA target sequence for MMP20 (NM_004771.2,135-153).
cacaggcgtatcttgacaa

SEQ ID NO: 158252 - DNA, 19 bp, Homo sapiens
  siRNA target sequence for MMP20 (NM_004771.2,137-155).
caggcgtatcttgacaaat

SEQ ID NO: 158253 - DNA, 19 bp, Homo sapiens
  siRNA target sequence for MMP20 (NM_004771.2,139-157).
ggcgtatcttgacaaatat

SEQ ID NO: 158254 - DNA, 19 bp, Homo sapiens
  siRNA target sequence for MMP20 (NM_004771.2,140-158).
gcgtatcttgacaaatatt

SEQ ID NO: 158255 - DNA, 19 bp, Homo sapiens
  siRNA target sequence for MMP20 (NM_004771.2,194-212).
gttgcaagaggaagcaatt

SEQ ID NO: 158256 - DNA, 19 bp, Homo sapiens
  siRNA target sequence for MMP20 (NM_004771.2,232-250).
ggagctacaagcgttcttt

SEQ ID NO: 158257 - DNA, 19 bp, Homo sapiens
  siRNA target sequence for MMP20 (NM_004771.2,256-274).
ccaagtcaccgggaagtta

SEQ ID NO: 158258 - DNA, 19 bp, Homo sapiens
  siRNA target sequence for MMP20 (NM_004771.2,500-518).
ggagaagcggatattatga

SEQ ID NO: 158259 - DNA, 19 bp, Homo sapiens
  siRNA target sequence for MMP20 (NM_004771.2,501-519).
gagaagcggatattatgat

SEQ ID NO: 158260 - DNA, 19 bp, Homo sapiens
  siRNA target sequence for MMP20 (NM_004771.2,503-521).
gaagcggatattatgatat

SEQ ID NO: 158261 - DNA, 19 bp, Homo sapiens
  siRNA target sequence for MMP20 (NM_004771.2,506-524).
gcggatattatgatatctt

SEQ ID NO: 158262 - DNA, 19 bp, Homo sapiens
  siRNA target sequence for MMP20 (NM_004771.2,507-525).
cggatattatgatatcttt

SEQ ID NO: 158263 - DNA, 19 bp, Homo sapiens
  siRNA target sequence for MMP20 (NM_004771.2,534-552).
gagatcacggggattccta

SEQ ID NO: 158264 - DNA, 19 bp, Homo sapiens
  siRNA target sequence for MMP20 (NM_004771.2,539-557).
cacggggattcctatccat

SEQ ID NO: 158265 - DNA, 19 bp, Homo sapiens
  siRNA target sequence for MMP20 (NM_004771.2,573-591).
ggactctagcccatgcatt

SEQ ID NO: 158266 - DNA, 19 bp, Homo sapiens
  siRNA target sequence for MMP20 (NM_004771.2,643-661).
gtggactatgggaacgaat

SEQ ID NO: 158267 - DNA, 19 bp, Homo sapiens
  siRNA target sequence for MMP20 (NM_004771.2,648-666).
ctatgggaacgaatggttt

SEQ ID NO: 158268 - DNA, 19 bp, Homo sapiens
  siRNA target sequence for MMP20 (NM_004771.2,652-670).
gggaacgaatggttttaat

SEQ ID NO: 158269 - DNA, 19 bp, Homo sapiens
  siRNA target sequence for MMP20 (NM_004771.2,653-671).
ggaacgaatggttttaatt

SEQ ID NO: 158270 - DNA, 19 bp, Homo sapiens
  siRNA target sequence for MMP20 (NM_004771.2,749-767).
ccaacttataagtacaaga

SEQ ID NO: 158271 - DNA, 19 bp, Homo sapiens
  siRNA target sequence for MMP20 (NM_004771.2,750-768).
caacttataagtacaagaa

SEQ ID NO: 158272 - DNA, 19 bp, Homo sapiens
  siRNA target sequence for MMP20 (NM_004771.2,825-843).
gacctcggaaagtattcct

SEQ ID NO: 158273 - DNA, 19 bp, Homo sapiens
  siRNA target sequence for MMP20 (NM_004771.2,1080-1098).
ggggcactgcttacttctt

SEQ ID NO: 158274 - DNA, 19 bp, Homo sapiens
  siRNA target sequence for MMP20 (NM_004771.2,1083-1101).
gcactgcttacttcttcaa

SEQ ID NO: 158275 - DNA, 19 bp, Homo sapiens
  siRNA target sequence for MMP20 (NM_004771.2,1103-1121).
ggtccccactactggataa

SEQ ID NO: 158276 - DNA, 19 bp, Homo sapiens
  siRNA target sequence for MMP20 (NM_004771.2,1117-1135).
gataacaagaggattccaa

SEQ ID NO: 158277 - DNA, 19 bp, Homo sapiens
  siRNA target sequence for MMP20 (NM_004771.2,1142-1160).
ggtcctcctcggactattt

SEQ ID NO: 158278 - DNA, 19 bp, Homo sapiens
  siRNA target sequence for MMP20 (NM_004771.2,1148-1166).
cctcggactatttatgact

SEQ ID NO: 158279 - DNA, 19 bp, Homo sapiens
  siRNA target sequence for MMP20 (NM_004771.2,1176-1194).
caaggcacgtgcagcaaat

SEQ ID NO: 158280 - DNA, 19 bp, Homo sapiens
  siRNA target sequence for MMP20 (NM_004771.2,1179-1197).
ggcacgtgcagcaaataga

SEQ ID NO: 158281 - DNA, 19 bp, Homo sapiens
  siRNA target sequence for MMP20 (NM_004771.2,1241-1259).
gtgggagatgaatactaca

SEQ ID NO: 158282 - DNA, 19 bp, Homo sapiens
  siRNA target sequence for MMP20 (NM_004771.2,1355-1373).
gaattaaatggctacattt

SEQ ID NO: 158283 - DNA, 19 bp, Homo sapiens
  siRNA target sequence for MMP20 (NM_004771.2,1383-1401).
caggaccaaaaacatacaa

SEQ ID NO: 158284 - DNA, 19 bp, Homo sapiens
  siRNA target sequence for MMP20 (NM_004771.2,1385-1403).
ggaccaaaaacatacaagt

SEQ ID NO: 158285 - DNA, 19 bp, Homo sapiens
  siRNA target sequence for MMP20 (NM_004771.2,1386-1404).
gaccaaaaacatacaagta

SEQ ID NO: 158286 - DNA, 19 bp, Homo sapiens
  siRNA target sequence for MMP21 (NM_147191.1,756-774).
ctggcgcctaggtgacatt

SEQ ID NO: 158287 - DNA, 19 bp, Homo sapiens
  siRNA target sequence for MMP21 (NM_147191.1,760-778).
cgcctaggtgacattcact

SEQ ID NO: 158288 - DNA, 19 bp, Homo sapiens
  siRNA target sequence for MMP21 (NM_147191.1,761-779).
gcctaggtgacattcactt

SEQ ID NO: 158289 - DNA, 19 bp, Homo sapiens
  siRNA target sequence for MMP21 (NM_147191.1,762-780).
cctaggtgacattcacttt

SEQ ID NO: 158290 - DNA, 19 bp, Homo sapiens
  siRNA target sequence for MMP21 (NM_147191.1,818-836).
cgggcatcagccttctcaa

SEQ ID NO: 158291 - DNA, 19 bp, Homo sapiens
  siRNA target sequence for MMP21 (NM_147191.1,837-855).
ggtggccgtccatgaaatt

SEQ ID NO: 158292 - DNA, 19 bp, Homo sapiens
  siRNA target sequence for MMP21 (NM_147191.1,882-900).
ctacaggacgggatccata

SEQ ID NO: 158293 - DNA, 19 bp, Homo sapiens
  siRNA target sequence for MMP21 (NM_147191.1,887-905).
ggacgggatccataatgca

SEQ ID NO: 158294 - DNA, 19 bp, Homo sapiens
  siRNA target sequence for MMP21 (NM_147191.1,893-911).
gatccataatgcaaccaaa

SEQ ID NO: 158295 - DNA, 19 bp, Homo sapiens
  siRNA target sequence for MMP21 (NM_147191.1,1048-1066).
gtgatggtgagatttagca

SEQ ID NO: 158296 - DNA, 19 bp, Homo sapiens
  siRNA target sequence for MMP21 (NM_147191.1,1053-1071).
ggtgagatttagcacatat

SEQ ID NO: 158297 - DNA, 19 bp, Homo sapiens
  siRNA target sequence for MMP21 (NM_147191.1,1054-1072).
gtgagatttagcacatatt

SEQ ID NO: 158298 - DNA, 19 bp, Homo sapiens
  siRNA target sequence for MMP21 (NM_147191.1,1092-1110).
ctggctttatgaaaatcga

SEQ ID NO: 158299 - DNA, 19 bp, Homo sapiens
  siRNA target sequence for MMP21 (NM_147191.1,1094-1112).
ggctttatgaaaatcgaaa

SEQ ID NO: 158300 - DNA, 19 bp, Homo sapiens
  siRNA target sequence for MMP21 (NM_147191.1,1102-1120).
gaaaatcgaaacaatagga

SEQ ID NO: 158301 - DNA, 19 bp, Homo sapiens
  siRNA target sequence for MMP21 (NM_147191.1,1130-1148).
gggaccctatccaaatcct

SEQ ID NO: 158302 - DNA, 19 bp, Homo sapiens
  siRNA target sequence for MMP21 (NM_147191.1,1163-1181).
gaatcccaacacacaacat

SEQ ID NO: 158303 - DNA, 19 bp, Homo sapiens
  siRNA target sequence for MMP21 (NM_147191.1,1208-1226).
ggaaaagagatgaacgtta

SEQ ID NO: 158304 - DNA, 19 bp, Homo sapiens
  siRNA target sequence for MMP21 (NM_147191.1,1349-1367).
ccctagacacggcgtttta

SEQ ID NO: 158305 - DNA, 19 bp, Homo sapiens
  siRNA target sequence for MMP21 (NM_147191.1,1350-1368).
cctagacacggcgttttat

SEQ ID NO: 158306 - DNA, 19 bp, Homo sapiens
  siRNA target sequence for MMP21 (NM_147191.1,1371-1389).
ccgaagacagaagttaatt

SEQ ID NO: 158307 - DNA, 19 bp, Homo sapiens
  siRNA target sequence for MMP21 (NM_147191.1,1372-1390).
cgaagacagaagttaattt

SEQ ID NO: 158308 - DNA, 19 bp, Homo sapiens
  siRNA target sequence for MMP21 (NM_147191.1,1402-1420).
gagtcccttgtatttgcat

SEQ ID NO: 158309 - DNA, 19 bp, Homo sapiens
  siRNA target sequence for MMP21 (NM_147191.1,1406-1424).
cccttgtatttgcatttga

SEQ ID NO: 158310 - DNA, 19 bp, Homo sapiens
  siRNA target sequence for MMP21 (NM_147191.1,1431-1449).
cagaaatcgagtacttaat

SEQ ID NO: 158311 - DNA, 19 bp, Homo sapiens
  siRNA target sequence for MMP21 (NM_147191.1,1461-1479).
gaggattactgaagttttt

SEQ ID NO: 158312 - DNA, 19 bp, Homo sapiens
  siRNA target sequence for MMP21 (NM_147191.1,1464-1482).
gattactgaagtttttcca

SEQ ID NO: 158313 - DNA, 19 bp, Homo sapiens
  siRNA target sequence for MMP21 (NM_147191.1,1525-1543).
gcttattactcctatgcat

SEQ ID NO: 158314 - DNA, 19 bp, Homo sapiens
  siRNA target sequence for MMP21 (NM_147191.1,1573-1591).
gcatactggaaggtagtta

SEQ ID NO: 158315 - DNA, 19 bp, Homo sapiens
  siRNA target sequence for MMP21 (NM_147191.1,1574-1592).
catactggaaggtagttaa

SEQ ID NO: 158316 - DNA, 19 bp, Homo sapiens
  siRNA target sequence for MMP21 (NM_147191.1,1675-1693).
gtttgtgacgtccatatct

SEQ ID NO: 158317 - DNA, 19 bp, Homo sapiens
  siRNA target sequence for MMP24 (NM_006690.2,244-262).
gggcagaactggttaaagt

SEQ ID NO: 158318 - DNA, 19 bp, Homo sapiens
  siRNA target sequence for MMP24 (NM_006690.2,338-356).
ccactatgcagcagtttta

SEQ ID NO: 158319 - DNA, 19 bp, Homo sapiens
  siRNA target sequence for MMP24 (NM_006690.2,392-410).
cgatcgagtggatgaagaa

SEQ ID NO: 158320 - DNA, 19 bp, Homo sapiens
  siRNA target sequence for MMP24 (NM_006690.2,427-445).
cctgatcacccccacttaa

SEQ ID NO: 158321 - DNA, 19 bp, Homo sapiens
  siRNA target sequence for MMP24 (NM_006690.2,446-464).
gccgtaggcggagaaacaa

SEQ ID NO: 158322 - DNA, 19 bp, Homo sapiens
  siRNA target sequence for MMP24 (NM_006690.2,509-527).
cctacagcattcacaacta

SEQ ID NO: 158323 - DNA, 19 bp, Homo sapiens
  siRNA target sequence for MMP24 (NM_006690.2,510-528).
ctacagcattcacaactat

SEQ ID NO: 158324 - DNA, 19 bp, Homo sapiens
  siRNA target sequence for MMP24 (NM_006690.2,547-565).
ctagacacgcggaaagcta

SEQ ID NO: 158325 - DNA, 19 bp, Homo sapiens
  siRNA target sequence for MMP24 (NM_006690.2,597-615).
gaccccactgacctttgaa

SEQ ID NO: 158326 - DNA, 19 bp, Homo sapiens
  siRNA target sequence for MMP24 (NM_006690.2,621-639).
gccataccatgagatcaaa

SEQ ID NO: 158327 - DNA, 19 bp, Homo sapiens
  siRNA target sequence for MMP24 (NM_006690.2,622-640).
ccataccatgagatcaaaa

SEQ ID NO: 158328 - DNA, 19 bp, Homo sapiens
  siRNA target sequence for MMP24 (NM_006690.2,1287-1305).
catcgacgcagcctatgaa

SEQ ID NO: 158329 - DNA, 19 bp, Homo sapiens
  siRNA target sequence for MMP24 (NM_006690.2,1307-1325).
gggccgatgggagatttgt

SEQ ID NO: 158330 - DNA, 19 bp, Homo sapiens
  siRNA target sequence for MMP24 (NM_006690.2,1309-1327).
gccgatgggagatttgtct

SEQ ID NO: 158331 - DNA, 19 bp, Homo sapiens
  siRNA target sequence for MMP24 (NM_006690.2,1310-1328).
ccgatgggagatttgtctt

SEQ ID NO: 158332 - DNA, 19 bp, Homo sapiens
  siRNA target sequence for MMP24 (NM_006690.2,1456-1474).
gtgggcaagacctactttt

SEQ ID NO: 158333 - DNA, 19 bp, Homo sapiens
  siRNA target sequence for MMP24 (NM_006690.2,1597-1615).
gaaggatattacacctatt

SEQ ID NO: 158334 - DNA, 19 bp, Homo sapiens
  siRNA target sequence for MMP24 (NM_006690.2,1630-1648).
gactactggaagtttgaca

SEQ ID NO: 158335 - DNA, 19 bp, Homo sapiens
  siRNA target sequence for MMP25 (NM_022468.3,408-426).
gttgcgcgatgccatcaaa

SEQ ID NO: 158336 - DNA, 19 bp, Homo sapiens
  siRNA target sequence for MMP25 (NM_022468.3,1084-1102).
ccccaaaccccatatgaca

SEQ ID NO: 158337 - DNA, 19 bp, Homo sapiens
  siRNA target sequence for MMP25 (NM_022468.3,1817-1835).
ccgaaacctgcgattgtca

SEQ ID NO: 158338 - DNA, 19 bp, Homo sapiens
  siRNA target sequence for MMP26 (NM_021801.2,21-39).
gcagctcgtcatcttaaga

SEQ ID NO: 158339 - DNA, 19 bp, Homo sapiens
  siRNA target sequence for MMP26 (NM_021801.2,25-43).
ctcgtcatcttaagagtta

SEQ ID NO: 158340 - DNA, 19 bp, Homo sapiens
  siRNA target sequence for MMP26 (NM_021801.2,27-45).
cgtcatcttaagagttact

SEQ ID NO: 158341 - DNA, 19 bp, Homo sapiens
  siRNA target sequence for MMP26 (NM_021801.2,28-46).
gtcatcttaagagttacta

SEQ ID NO: 158342 - DNA, 19 bp, Homo sapiens
  siRNA target sequence for MMP26 (NM_021801.2,80-98).
cccctgctgcagaccataa

SEQ ID NO: 158343 - DNA, 19 bp, Homo sapiens
  siRNA target sequence for MMP26 (NM_021801.2,115-133).
gagggctatttccatcaat

SEQ ID NO: 158344 - DNA, 19 bp, Homo sapiens
  siRNA target sequence for MMP26 (NM_021801.2,186-204).
gctcctgcaacaattccat

SEQ ID NO: 158345 - DNA, 19 bp, Homo sapiens
  siRNA target sequence for MMP26 (NM_021801.2,305-323).
gatgcaagtggaataagca

SEQ ID NO: 158346 - DNA, 19 bp, Homo sapiens
  siRNA target sequence for MMP26 (NM_021801.2,372-390).
cgcagtgaaagacagtata

SEQ ID NO: 158347 - DNA, 19 bp, Homo sapiens
  siRNA target sequence for MMP26 (NM_021801.2,413-431).
gcaatgtgacccctttgat

SEQ ID NO: 158348 - DNA, 19 bp, Homo sapiens
  siRNA target sequence for MMP26 (NM_021801.2,414-432).
caatgtgacccctttgata

SEQ ID NO: 158349 - DNA, 19 bp, Homo sapiens
  siRNA target sequence for MMP26 (NM_021801.2,458-476).
cagacatcaaggtttcttt

SEQ ID NO: 158350 - DNA, 19 bp, Homo sapiens
  siRNA target sequence for MMP26 (NM_021801.2,528-546).
cttaggccatgccttttta

SEQ ID NO: 158351 - DNA, 19 bp, Homo sapiens
  siRNA target sequence for MMP26 (NM_021801.2,535-553).
catgcctttttaccaaatt

SEQ ID NO: 158352 - DNA, 19 bp, Homo sapiens
  siRNA target sequence for MMP26 (NM_021801.2,624-642).
gttcctggttgcaactcat

SEQ ID NO: 158353 - DNA, 19 bp, Homo sapiens
  siRNA target sequence for MMP26 (NM_021801.2,630-648).
ggttgcaactcatgagatt

SEQ ID NO: 158354 - DNA, 19 bp, Homo sapiens
  siRNA target sequence for MMP26 (NM_021801.2,640-658).
catgagattgggcattctt

SEQ ID NO: 158355 - DNA, 19 bp, Homo sapiens
  siRNA target sequence for MMP26 (NM_021801.2,676-694).
gggaatcagagctccataa

SEQ ID NO: 158356 - DNA, 19 bp, Homo sapiens
  siRNA target sequence for MMP26 (NM_021801.2,677-695).
ggaatcagagctccataat

SEQ ID NO: 158357 - DNA, 19 bp, Homo sapiens
  siRNA target sequence for MMP26 (NM_021801.2,743-761).
ccgatgatatccaaaggat

SEQ ID NO: 158358 - DNA, 19 bp, Homo sapiens
  siRNA target sequence for MMP27 (NM_022122.1,100-118).
ctggctcaggcatatctca

SEQ ID NO: 158359 - DNA, 19 bp, Homo sapiens
  siRNA target sequence for MMP27 (NM_022122.1,110-128).
catatctcaaccagttcta

SEQ ID NO: 158360 - DNA, 19 bp, Homo sapiens
  siRNA target sequence for MMP27 (NM_022122.1,165-183).
caagaataggagtctcata

SEQ ID NO: 158361 - DNA, 19 bp, Homo sapiens
  siRNA target sequence for MMP27 (NM_022122.1,245-263).
caaacacccttgagatcat

SEQ ID NO: 158362 - DNA, 19 bp, Homo sapiens
  siRNA target sequence for MMP27 (NM_022122.1,337-355).
ctcacctacagaataataa

SEQ ID NO: 158363 - DNA, 19 bp, Homo sapiens
  siRNA target sequence for MMP27 (NM_022122.1,341-359).
cctacagaataataaacta

SEQ ID NO: 158364 - DNA, 19 bp, Homo sapiens
  siRNA target sequence for MMP27 (NM_022122.1,393-411).
ggctatccaagaaggttta

SEQ ID NO: 158365 - DNA, 19 bp, Homo sapiens
  siRNA target sequence for MMP27 (NM_022122.1,412-430).
gaagtgtggagcaaagtca

SEQ ID NO: 158366 - DNA, 19 bp, Homo sapiens
  siRNA target sequence for MMP27 (NM_022122.1,462-480).
gattgcagacatcatgatt

SEQ ID NO: 158367 - DNA, 19 bp, Homo sapiens
  siRNA target sequence for MMP27 (NM_022122.1,503-521).
gtcggtgtcctcgctattt

SEQ ID NO: 158368 - DNA, 19 bp, Homo sapiens
  siRNA target sequence for MMP27 (NM_022122.1,506-524).
ggtgtcctcgctattttga

SEQ ID NO: 158369 - DNA, 19 bp, Homo sapiens
  siRNA target sequence for MMP27 (NM_022122.1,507-525).
gtgtcctcgctattttgat

SEQ ID NO: 158370 - DNA, 19 bp, Homo sapiens
  siRNA target sequence for MMP27 (NM_022122.1,571-589).
ctgggtggtgacactcatt

SEQ ID NO: 158371 - DNA, 19 bp, Homo sapiens
  siRNA target sequence for MMP27 (NM_022122.1,620-638).
gagcaggattcaacttgtt

SEQ ID NO: 158372 - DNA, 19 bp, Homo sapiens
  siRNA target sequence for MMP27 (NM_022122.1,691-709).
gatcaaacagccttgatgt

SEQ ID NO: 158373 - DNA, 19 bp, Homo sapiens
  siRNA target sequence for MMP27 (NM_022122.1,700-718).
gccttgatgttcccaaatt

SEQ ID NO: 158374 - DNA, 19 bp, Homo sapiens
  siRNA target sequence for MMP27 (NM_022122.1,702-720).
cttgatgttcccaaattat

SEQ ID NO: 158375 - DNA, 19 bp, Homo sapiens
  siRNA target sequence for MMP27 (NM_022122.1,880-898).
cgcagagaagtaatgttct

SEQ ID NO: 158376 - DNA, 19 bp, Homo sapiens
  siRNA target sequence for MMP27 (NM_022122.1,917-935).
ggaggatctattatgatat

SEQ ID NO: 158377 - DNA, 19 bp, Homo sapiens
  siRNA target sequence for MMP27 (NM_022122.1,938-956).
cggatgttgagtttgaatt

SEQ ID NO: 158378 - DNA, 19 bp, Homo sapiens
  siRNA target sequence for MMP27 (NM_022122.1,939-957).
ggatgttgagtttgaatta

SEQ ID NO: 158379 - DNA, 19 bp, Homo sapiens
  siRNA target sequence for MMP27 (NM_022122.1,940-958).
gatgttgagtttgaattaa

SEQ ID NO: 158380 - DNA, 19 bp, Homo sapiens
  siRNA target sequence for MMP27 (NM_022122.1,1050-1068).
ctggatgatcagaggatat

SEQ ID NO: 158381 - DNA, 19 bp, Homo sapiens
  siRNA target sequence for MMP27 (NM_022122.1,1087-1105).
cccaaatccatccatacat

SEQ ID NO: 158382 - DNA, 19 bp, Homo sapiens
  siRNA target sequence for MMP27 (NM_022122.1,1098-1116).
ccatacattaggttttcca

SEQ ID NO: 158383 - DNA, 19 bp, Homo sapiens
  siRNA target sequence for MMP27 (NM_022122.1,1135-1153).
gatgcagccgtctgtgata

SEQ ID NO: 158384 - DNA, 19 bp, Homo sapiens
  siRNA target sequence for MMP27 (NM_022122.1,1138-1156).
gcagccgtctgtgataaga

SEQ ID NO: 158385 - DNA, 19 bp, Homo sapiens
  siRNA target sequence for MMP27 (NM_022122.1,1193-1211).
gctggaggtttgatgaaat

SEQ ID NO: 158386 - DNA, 19 bp, Homo sapiens
  siRNA target sequence for MMP27 (NM_022122.1,1236-1254).
cccgcagagagtggtaaaa

SEQ ID NO: 158387 - DNA, 19 bp, Homo sapiens
  siRNA target sequence for MMP27 (NM_022122.1,1238-1256).
cgcagagagtggtaaaaca

SEQ ID NO: 158388 - DNA, 19 bp, Homo sapiens
  siRNA target sequence for MMP27 (NM_022122.1,1296-1314).
gtacaaaggattcttcttt

SEQ ID NO: 158389 - DNA, 19 bp, Homo sapiens
  siRNA target sequence for MMP27 (NM_022122.1,1319-1337).
gccgtggatcaaagcaatt

SEQ ID NO: 158390 - DNA, 19 bp, Homo sapiens
  siRNA target sequence for MMP27 (NM_022122.1,1320-1338).
ccgtggatcaaagcaattt

SEQ ID NO: 158391 - DNA, 19 bp, Homo sapiens
  siRNA target sequence for MMP27 (NM_022122.1,1322-1340).
gtggatcaaagcaatttga

SEQ ID NO: 158392 - DNA, 19 bp, Homo sapiens
  siRNA target sequence for MMP27 (NM_022122.1,1333-1351).
caatttgaatacgacatta

SEQ ID NO: 158393 - DNA, 19 bp, Homo sapiens
  siRNA target sequence for MMP27 (NM_022122.1,1367-1385).
cccgaatcatgagaactaa

SEQ ID NO: 158394 - DNA, 19 bp, Homo sapiens
  siRNA target sequence for MMP27 (NM_022122.1,1368-1386).
ccgaatcatgagaactaat

SEQ ID NO: 158395 - DNA, 19 bp, Homo sapiens
  siRNA target sequence for MMP27 (NM_022122.1,1369-1387).
cgaatcatgagaactaata

SEQ ID NO: 158396 - DNA, 19 bp, Homo sapiens
  siRNA target sequence for MMP27 (NM_022122.1,1377-1395).
gagaactaatacttggttt

SEQ ID NO: 158397 - DNA, 19 bp, Homo sapiens
  siRNA target sequence for MMP27 (NM_022122.1,1413-1431).
gaactcctcatttggtttt

SEQ ID NO: 158398 - DNA, 19 bp, Homo sapiens
  siRNA target sequence for MMP27 (NM_022122.1,1457-1475).
caggaggcataaagatatt

SEQ ID NO: 158399 - DNA, 19 bp, Homo sapiens
  siRNA target sequence for MMP28 (NM_024302.2,401-419).
gtacggatacctcaatgaa

SEQ ID NO: 158400 - DNA, 19 bp, Homo sapiens
  siRNA target sequence for MMP28 (NM_024302.2,459-477).
gccatcagagcgtttcagt

SEQ ID NO: 158401 - DNA, 19 bp, Homo sapiens
  siRNA target sequence for MMP28 (NM_024302.2,541-559).
cccgctgcggggttacaga

SEQ ID NO: 158402 - DNA, 19 bp, Homo sapiens
  siRNA target sequence for MMP28 (NM_024302.2,542-560).
ccgctgcggggttacagat

SEQ ID NO: 158403 - DNA, 19 bp, Homo sapiens
  siRNA target sequence for MMP28 (NM_024302.2,606-624).
gctagacaccggaccaaaa

SEQ ID NO: 158404 - DNA, 19 bp, Homo sapiens
  siRNA target sequence for MMP28 (NM_024302.2,620-638).
caaaatgaggcgtaagaaa

SEQ ID NO: 158405 - DNA, 19 bp, Homo sapiens
  siRNA target sequence for MMP28 (NM_024302.2,854-872).
gctgggcaatgcctttgat

SEQ ID NO: 158406 - DNA, 19 bp, Homo sapiens
  siRNA target sequence for MMP28 (NM_024302.2,1224-1242).
gaaacgcagggccctaaat

SEQ ID NO: 158407 - DNA, 19 bp, Homo sapiens
  siRNA target sequence for MMP28 (NM_024302.2,1279-1297).
ggcaacagcaactgtacat

SEQ ID NO: 158408 - DNA, 19 bp, Homo sapiens
  siRNA target sequence for MMP28 (NM_024302.2,1353-1371).
cgtccactgcaggaaagat

SEQ ID NO: 158409 - DNA, 19 bp, Homo sapiens
  siRNA target sequence for MMP28 (NM_024302.2,1399-1417).
ctgcggcagtgtcattgaa

SEQ ID NO: 158410 - DNA, 19 bp, Homo sapiens
  siRNA target sequence for MMP28 (NM_024302.2,1402-1420).
cggcagtgtcattgaatga

SEQ ID NO: 158411 - DNA, 19 bp, Homo sapiens
  siRNA target sequence for MMP28 (NM_024302.2,1403-1421).
ggcagtgtcattgaatgat

SEQ ID NO: 158412 - DNA, 19 bp, Homo sapiens
  siRNA target sequence for MMP9 (NM_004994.1,166-184).
gtaccgctatggttacact

SEQ ID NO: 158413 - DNA, 19 bp, Homo sapiens
  siRNA target sequence for MMP9 (NM_004994.1,199-217).
gcgtggagagtcgaaatct

SEQ ID NO: 158414 - DNA, 19 bp, Homo sapiens
  siRNA target sequence for MMP9 (NM_004994.1,201-219).
gtggagagtcgaaatctct

SEQ ID NO: 158415 - DNA, 19 bp, Homo sapiens
  siRNA target sequence for MMP9 (NM_004994.1,371-389).
caccacaacatcacctatt

SEQ ID NO: 158416 - DNA, 19 bp, Homo sapiens
  siRNA target sequence for MMP9 (NM_004994.1,374-392).
cacaacatcacctattgga

SEQ ID NO: 158417 - DNA, 19 bp, Homo sapiens
  siRNA target sequence for MMP9 (NM_004994.1,384-402).
cctattggatccaaaacta

SEQ ID NO: 158418 - DNA, 19 bp, Homo sapiens
  siRNA target sequence for MMP9 (NM_004994.1,671-689).
gttccaactcggtttggaa

SEQ ID NO: 158419 - DNA, 19 bp, Homo sapiens
  siRNA target sequence for MMP9 (NM_004994.1,1138-1156).
cgctaccacctcgaacttt

SEQ ID NO: 158420 - DNA, 19 bp, Homo sapiens
  siRNA target sequence for MMP9 (NM_004994.1,1183-1201).
cccggaccaaggatacagt

SEQ ID NO: 158421 - DNA, 19 bp, Homo sapiens
  siRNA target sequence for MMP9 (NM_004994.1,1184-1202).
ccggaccaaggatacagtt

SEQ ID NO: 158422 - DNA, 19 bp, Homo sapiens
  siRNA target sequence for MMP9 (NM_004994.1,1185-1203).
cggaccaaggatacagttt

SEQ ID NO: 158423 - DNA, 19 bp, Homo sapiens
  siRNA target sequence for MMP9 (NM_004994.1,1187-1205).
gaccaaggatacagtttgt

SEQ ID NO: 158424 - DNA, 19 bp, Homo sapiens
  siRNA target sequence for MMP9 (NM_004994.1,1231-1249).
ccacgcgctgggcttagat

SEQ ID NO: 158425 - DNA, 19 bp, Homo sapiens
  siRNA target sequence for MMP9 (NM_004994.1,1234-1252).
cgcgctgggcttagatcat

SEQ ID NO: 158426 - DNA, 19 bp, Homo sapiens
  siRNA target sequence for MMP9 (NM_004994.1,1235-1253).
gcgctgggcttagatcatt

SEQ ID NO: 158427 - DNA, 19 bp, Homo sapiens
  siRNA target sequence for MMP9 (NM_004994.1,1269-1287).
cgctcatgtaccctatgta

SEQ ID NO: 158428 - DNA, 19 bp, Homo sapiens
  siRNA target sequence for MMP9 (NM_004994.1,1563-1581).
cctgcaacgtgaacatctt

SEQ ID NO: 158429 - DNA, 19 bp, Homo sapiens
  siRNA target sequence for MMP9 (NM_004994.1,1630-1648).
gaagtactggcgattctct

SEQ ID NO: 158430 - DNA, 19 bp, Homo sapiens
  siRNA target sequence for MMP9 (NM_004994.1,2021-2039).
cgagagaaagcctatttct

SEQ ID NO: 158431 - DNA, 19 bp, Homo sapiens
  siRNA target sequence for MMP9 (NM_004994.1,2067-2085).
gttcccggagtgagttgaa

SEQ ID NO: 158432 - DNA, 19 bp, Homo sapiens
  siRNA target sequence for MNAT1 (NM_002431.1,47-65).
ggttgccctcggtgtaaga

SEQ ID NO: 158433 - DNA, 19 bp, Homo sapiens
  siRNA target sequence for MNAT1 (NM_002431.1,56-74).
cggtgtaagaccaccaaat

SEQ ID NO: 158434 - DNA, 19 bp, Homo sapiens
  siRNA target sequence for MNAT1 (NM_002431.1,118-136).
cactctctgtgaaagttgt

SEQ ID NO: 158435 - DNA, 19 bp, Homo sapiens
  siRNA target sequence for MNAT1 (NM_002431.1,180-198).
gtggtactccactcagaaa

SEQ ID NO: 158436 - DNA, 19 bp, Homo sapiens
  siRNA target sequence for MNAT1 (NM_002431.1,208-226).
cagggtacaactctttgaa

SEQ ID NO: 158437 - DNA, 19 bp, Homo sapiens
  siRNA target sequence for MNAT1 (NM_002431.1,306-324).
gtctaagagaatacaatga

SEQ ID NO: 158438 - DNA, 19 bp, Homo sapiens
  siRNA target sequence for MNAT1 (NM_002431.1,363-381).
ccaacaatgtggatttgga

SEQ ID NO: 158439 - DNA, 19 bp, Homo sapiens
  siRNA target sequence for MPI (NM_002435.1,460-478).
ggccagttgaggagattgt

SEQ ID NO: 158440 - DNA, 19 bp, Homo sapiens
  siRNA target sequence for MPI (NM_002435.1,470-488).
ggagattgtaacctttcta

SEQ ID NO: 158441 - DNA, 19 bp, Homo sapiens
  siRNA target sequence for MPI (NM_002435.1,675-693).
gcggctgccggaaacaaca

SEQ ID NO: 158442 - DNA, 19 bp, Homo sapiens
  siRNA target sequence for MPI (NM_002435.1,704-722).
ctttggggagcttttgcta

SEQ ID NO: 158443 - DNA, 19 bp, Homo sapiens
  siRNA target sequence for MPI (NM_002435.1,901-919).
cacccaagttcattgatgt

SEQ ID NO: 158444 - DNA, 19 bp, Homo sapiens
  siRNA target sequence for MPI (NM_002435.1,922-940).
caaccctgtgtgaaatgct

SEQ ID NO: 158445 - DNA, 19 bp, Homo sapiens
  siRNA target sequence for MPI (NM_002435.1,1065-1083).
ggctctgtcactgaataca

SEQ ID NO: 158446 - DNA, 19 bp, Homo sapiens
  siRNA target sequence for MPI (NM_002435.1,1237-1255).
cgaaggacctgctgatatt

SEQ ID NO: 158447 - DNA, 19 bp, Homo sapiens
  siRNA target sequence for MPRP-1 (NM_145243.2,127-145).
gctagaaaccatgttttct

SEQ ID NO: 158448 - DNA, 19 bp, Homo sapiens
  siRNA target sequence for MPRP-1 (NM_145243.2,128-146).
ctagaaaccatgttttctt

SEQ ID NO: 158449 - DNA, 19 bp, Homo sapiens
  siRNA target sequence for MPRP-1 (NM_145243.2,139-157).
gttttcttccgatttaatt

SEQ ID NO: 158450 - DNA, 19 bp, Homo sapiens
  siRNA target sequence for MPRP-1 (NM_145243.2,170-188).
ggagaaaatgtaacacatt

SEQ ID NO: 158451 - DNA, 19 bp, Homo sapiens
  siRNA target sequence for MPRP-1 (NM_145243.2,171-189).
gagaaaatgtaacacatta

SEQ ID NO: 158452 - DNA, 19 bp, Homo sapiens
  siRNA target sequence for MPRP-1 (NM_145243.2,204-222).
gggctgtcatcaagtacaa

SEQ ID NO: 158453 - DNA, 19 bp, Homo sapiens
  siRNA target sequence for MPRP-1 (NM_145243.2,214-232).
caagtacaagttaaccata

SEQ ID NO: 158454 - DNA, 19 bp, Homo sapiens
  siRNA target sequence for MPRP-1 (NM_145243.2,250-268).
ggactgggagtaaatcagt

SEQ ID NO: 158455 - DNA, 19 bp, Homo sapiens
  siRNA target sequence for MPRP-1 (NM_145243.2,340-358).
ctctcaagtaccaaaagta

SEQ ID NO: 158456 - DNA, 19 bp, Homo sapiens
  siRNA target sequence for MPRP-1 (NM_145243.2,372-390).
gattaccagcaaatgtact

SEQ ID NO: 158457 - DNA, 19 bp, Homo sapiens
  siRNA target sequence for MPRP-1 (NM_145243.2,381-399).
caaatgtactgtatggaat

SEQ ID NO: 158458 - DNA, 19 bp, Homo sapiens
  siRNA target sequence for MPRP-1 (NM_145243.2,483-501).
cataagagctattaggaat

SEQ ID NO: 158459 - DNA, 19 bp, Homo sapiens
  siRNA target sequence for MPRP-1 (NM_145243.2,488-506).
gagctattaggaatttcca

SEQ ID NO: 158460 - DNA, 19 bp, Homo sapiens
  siRNA target sequence for MPRP-1 (NM_145243.2,530-548).
ctccggttcctctcttgtt

SEQ ID NO: 158461 - DNA, 19 bp, Homo sapiens
  siRNA target sequence for MPRP-1 (NM_145243.2,532-550).
ccggttcctctcttgttga

SEQ ID NO: 158462 - DNA, 19 bp, Homo sapiens
  siRNA target sequence for MPRP-1 (NM_145243.2,546-564).
gttgatgattcttaaacca

SEQ ID NO: 158463 - DNA, 19 bp, Homo sapiens
  siRNA target sequence for MPRP-1 (NM_145243.2,678-696).
gctattccttggtttgagt

SEQ ID NO: 158464 - DNA, 19 bp, Homo sapiens
  siRNA target sequence for MPRP-1 (NM_145243.2,679-697).
ctattccttggtttgagta

SEQ ID NO: 158465 - DNA, 19 bp, Homo sapiens
  siRNA target sequence for MPRP-1 (NM_145243.2,688-706).
ggtttgagtagttttggat

SEQ ID NO: 158466 - DNA, 19 bp, Homo sapiens
  siRNA target sequence for MPRP-1 (NM_145243.2,708-726).
gctctttgtggtgttttat

SEQ ID NO: 158467 - DNA, 19 bp, Homo sapiens
  siRNA target sequence for MPRP-1 (NM_145243.2,869-887).
cccgatacctggctgttaa

SEQ ID NO: 158468 - DNA, 19 bp, Homo sapiens
  siRNA target sequence for MPRP-1 (NM_145243.2,870-888).
ccgatacctggctgttaaa

SEQ ID NO: 158469 - DNA, 19 bp, Homo sapiens
  siRNA target sequence for MPRP-1 (NM_145243.2,929-947).
cagggatctctcagatcaa

SEQ ID NO: 158470 - DNA, 19 bp, Homo sapiens
  siRNA target sequence for MPRP-1 (NM_145243.2,961-979).
gtggttgattccccaatta

SEQ ID NO: 158471 - DNA, 19 bp, Homo sapiens
  siRNA target sequence for MPRP-1 (NM_145243.2,963-981).
ggttgattccccaattatt

SEQ ID NO: 158472 - DNA, 19 bp, Homo sapiens
  siRNA target sequence for MPRP-1 (NM_145243.2,964-982).
gttgattccccaattatta

SEQ ID NO: 158473 - DNA, 19 bp, Homo sapiens
  siRNA target sequence for MPRP-1 (NM_145243.2,987-1005).
cttcgtgcttccaaatgga

SEQ ID NO: 158474 - DNA, 19 bp, Homo sapiens
  siRNA target sequence for MPRP-1 (NM_145243.2,1045-1063).
gatattcatcaactttctt

SEQ ID NO: 158475 - DNA, 19 bp, Homo sapiens
  siRNA target sequence for MPRP-1 (NM_145243.2,1065-1083).
ccttctgggccatgaaata

SEQ ID NO: 158476 - DNA, 19 bp, Homo sapiens
  siRNA target sequence for MPRP-1 (NM_145243.2,1137-1155).
ggatttcctaggtatgatt

SEQ ID NO: 158477 - DNA, 19 bp, Homo sapiens
  siRNA target sequence for MPRP-1 (NM_145243.2,1138-1156).
gatttcctaggtatgattt

SEQ ID NO: 158478 - DNA, 19 bp, Homo sapiens
  siRNA target sequence for MPRP-1 (NM_145243.2,1187-1205).
gagatagcttggcactttt

SEQ ID NO: 158479 - DNA, 19 bp, Homo sapiens
  siRNA target sequence for MPRP-1 (NM_145243.2,1208-1226).
gccagtggatacagtctaa

SEQ ID NO: 158480 - DNA, 19 bp, Homo sapiens
  siRNA target sequence for MPRP-1 (NM_145243.2,1209-1227).
ccagtggatacagtctaaa

SEQ ID NO: 158481 - DNA, 19 bp, Homo sapiens
  siRNA target sequence for MPRP-1 (NM_145243.2,1270-1288).
gaggccgaagctgacaaaa

SEQ ID NO: 158482 - DNA, 19 bp, Homo sapiens
  siRNA target sequence for MPRP-1 (NM_145243.2,1272-1290).
ggccgaagctgacaaaatt

SEQ ID NO: 158483 - DNA, 19 bp, Homo sapiens
  siRNA target sequence for MPRP-1 (NM_145243.2,1351-1369).
caaatggagttcgttgata

SEQ ID NO: 158484 - DNA, 19 bp, Homo sapiens
  siRNA target sequence for MPRP-1 (NM_145243.2,1385-1403).
ccaagatgccagaatggtt

SEQ ID NO: 158485 - DNA, 19 bp, Homo sapiens
  siRNA target sequence for MPRP-1 (NM_145243.2,1386-1404).
caagatgccagaatggtta

SEQ ID NO: 158486 - DNA, 19 bp, Homo sapiens
  siRNA target sequence for MPRP-1 (NM_145243.2,1389-1407).
gatgccagaatggttatct

SEQ ID NO: 158487 - DNA, 19 bp, Homo sapiens
  siRNA target sequence for MPRP-1 (NM_145243.2,1392-1410).
gccagaatggttatctaca

SEQ ID NO: 158488 - DNA, 19 bp, Homo sapiens
  siRNA target sequence for MPRP-1 (NM_145243.2,1424-1442).
gcaatcgagttgagtactt

SEQ ID NO: 158489 - DNA, 19 bp, Homo sapiens
  siRNA target sequence for MPRP-1 (NM_145243.2,1429-1447).
cgagttgagtacttggata

SEQ ID NO: 158490 - DNA, 19 bp, Homo sapiens
  siRNA target sequence for MPRP-1 (NM_145243.2,1456-1474).
cctcaggctctcaaaatta

SEQ ID NO: 158491 - DNA, 19 bp, Homo sapiens
  siRNA target sequence for MPRP-1 (NM_145243.2,1507-1525).
ccagaccctcgattactat

SEQ ID NO: 158492 - DNA, 19 bp, Homo sapiens
  siRNA target sequence for MPRP-1 (NM_145243.2,1510-1528).
gaccctcgattactattca

SEQ ID NO: 158493 - DNA, 19 bp, Homo sapiens
  siRNA target sequence for MPRP-1 (NM_145243.2,1512-1530).
ccctcgattactattcaaa

SEQ ID NO: 158494 - DNA, 19 bp, Homo sapiens
  siRNA target sequence for MPRP-1 (NM_145243.2,1514-1532).
ctcgattactattcaaact

SEQ ID NO: 158495 - DNA, 19 bp, Homo sapiens
  siRNA target sequence for MPRP-1 (NM_145243.2,1516-1534).
cgattactattcaaactca

SEQ ID NO: 158496 - DNA, 19 bp, Homo sapiens
  siRNA target sequence for MPRP-1 (NM_145243.2,1535-1553).
gcacgaagcattttcttga

SEQ ID NO: 158497 - DNA, 19 bp, Homo sapiens
  siRNA target sequence for MT4 (NM_032935.1,65-83).
gcacaacctgcaactgtaa

SEQ ID NO: 158498 - DNA, 19 bp, Homo sapiens
  siRNA target sequence for MTMR4 (NM_004687.3,222-240).
gccctcattgccatctcta

SEQ ID NO: 158499 - DNA, 19 bp, Homo sapiens
  siRNA target sequence for MTMR4 (NM_004687.3,238-256).
ctaactaccggctgcatat

SEQ ID NO: 158500 - DNA, 19 bp, Homo sapiens
  siRNA target sequence for MTMR4 (NM_004687.3,242-260).
ctaccggctgcatatcaaa

SEQ ID NO: 158501 - DNA, 19 bp, Homo sapiens
  siRNA target sequence for MTMR4 (NM_004687.3,246-264).
cggctgcatatcaaattca

SEQ ID NO: 158502 - DNA, 19 bp, Homo sapiens
  siRNA target sequence for MTMR4 (NM_004687.3,281-299).
cgtccccctccggatgatt

SEQ ID NO: 158503 - DNA, 19 bp, Homo sapiens
  siRNA target sequence for MTMR4 (NM_004687.3,285-303).
cccctccggatgattgaca

SEQ ID NO: 158504 - DNA, 19 bp, Homo sapiens
  siRNA target sequence for MTMR4 (NM_004687.3,304-322).
gtgtggagagccgtgatat

SEQ ID NO: 158505 - DNA, 19 bp, Homo sapiens
  siRNA target sequence for MTMR4 (NM_004687.3,306-324).
gtggagagccgtgatatgt

SEQ ID NO: 158506 - DNA, 19 bp, Homo sapiens
  siRNA target sequence for MTMR4 (NM_004687.3,592-610).
ggagagtctcacacatcaa

SEQ ID NO: 158507 - DNA, 19 bp, Homo sapiens
  siRNA target sequence for MTMR4 (NM_004687.3,715-733).
ggattcccgtggttgtgta

SEQ ID NO: 158508 - DNA, 19 bp, Homo sapiens
  siRNA target sequence for MTMR4 (NM_004687.3,716-734).
gattcccgtggttgtgtat

SEQ ID NO: 158509 - DNA, 19 bp, Homo sapiens
  siRNA target sequence for MTMR4 (NM_004687.3,721-739).
ccgtggttgtgtatagaca

SEQ ID NO: 158510 - DNA, 19 bp, Homo sapiens
  siRNA target sequence for MTMR4 (NM_004687.3,802-820).
gcaatgctgatgatgagta

SEQ ID NO: 158511 - DNA, 19 bp, Homo sapiens
  siRNA target sequence for MTMR4 (NM_004687.3,822-840).
ctggtcacgtccattgcta

SEQ ID NO: 158512 - DNA, 19 bp, Homo sapiens
  siRNA target sequence for MTMR4 (NM_004687.3,824-842).
ggtcacgtccattgctaaa

SEQ ID NO: 158513 - DNA, 19 bp, Homo sapiens
  siRNA target sequence for MTMR4 (NM_004687.3,884-902).
cctcagcaccgggaataat

SEQ ID NO: 158514 - DNA, 19 bp, Homo sapiens
  siRNA target sequence for MTMR4 (NM_004687.3,914-932).
ggcgtgtgatgctgacttt

SEQ ID NO: 158515 - DNA, 19 bp, Homo sapiens
  siRNA target sequence for MTMR4 (NM_004687.3,916-934).
cgtgtgatgctgactttga

SEQ ID NO: 158516 - DNA, 19 bp, Homo sapiens
  siRNA target sequence for MTMR4 (NM_004687.3,1184-1202).
ggcactggagagtaccaaa

SEQ ID NO: 158517 - DNA, 19 bp, Homo sapiens
  siRNA target sequence for MTMR4 (NM_004687.3,1212-1230).
cacttgtcggtgatgctaa

SEQ ID NO: 158518 - DNA, 19 bp, Homo sapiens
  siRNA target sequence for MTMR4 (NM_004687.3,1322-1340).
cgtagccctggccaaaata

SEQ ID NO: 158519 - DNA, 19 bp, Homo sapiens
  siRNA target sequence for MTMR4 (NM_004687.3,1403-1421).
ggattttgggcacaagttt

SEQ ID NO: 158520 - DNA, 19 bp, Homo sapiens
  siRNA target sequence for MTMR4 (NM_004687.3,1452-1470).
gaggaccaaaacgaacaat

SEQ ID NO: 158521 - DNA, 19 bp, Homo sapiens
  siRNA target sequence for MTMR4 (NM_004687.3,1670-1688).
ccttcgagctggcaataaa

SEQ ID NO: 158522 - DNA, 19 bp, Homo sapiens
  siRNA target sequence for MTMR4 (NM_004687.3,1674-1692).
cgagctggcaataaaaact

SEQ ID NO: 158523 - DNA, 19 bp, Homo sapiens
  siRNA target sequence for MTMR4 (NM_004687.3,1727-1745).
ggtcctgcatcctgtttgt

SEQ ID NO: 158524 - DNA, 19 bp, Homo sapiens
  siRNA target sequence for MTMR4 (NM_004687.3,1763-1781).
cctctggacagctgtttat

SEQ ID NO: 158525 - DNA, 19 bp, Homo sapiens
  siRNA target sequence for MTMR4 (NM_004687.3,1868-1886).
ccgctctctggacagatta

SEQ ID NO: 158526 - DNA, 19 bp, Homo sapiens
  siRNA target sequence for MTMR4 (NM_004687.3,1873-1891).
ctctggacagattacctaa

SEQ ID NO: 158527 - DNA, 19 bp, Homo sapiens
  siRNA target sequence for MTMR4 (NM_004687.3,1895-1913).
cagatccatggatgatctt

SEQ ID NO: 158528 - DNA, 19 bp, Homo sapiens
  siRNA target sequence for MTMR4 (NM_004687.3,1897-1915).
gatccatggatgatcttct

SEQ ID NO: 158529 - DNA, 19 bp, Homo sapiens
  siRNA target sequence for MTMR4 (NM_004687.3,2062-2080).
gagggcctcagcaaactgt

SEQ ID NO: 158530 - DNA, 19 bp, Homo sapiens
  siRNA target sequence for MTMR4 (NM_004687.3,2113-2131).
gcagccagaaagactactt

SEQ ID NO: 158531 - DNA, 19 bp, Homo sapiens
  siRNA target sequence for MTMR4 (NM_004687.3,2221-2239).
cctctgatcctgagatcaa

SEQ ID NO: 158532 - DNA, 19 bp, Homo sapiens
  siRNA target sequence for MTMR4 (NM_004687.3,2224-2242).
ctgatcctgagatcaaagt

SEQ ID NO: 158533 - DNA, 19 bp, Homo sapiens
  siRNA target sequence for MTMR4 (NM_004687.3,2291-2309).
gctgggtaggactttagat

SEQ ID NO: 158534 - DNA, 19 bp, Homo sapiens
  siRNA target sequence for MTMR4 (NM_004687.3,2318-2336).
ggagccacctgaacattgt

SEQ ID NO: 158535 - DNA, 19 bp, Homo sapiens
  siRNA target sequence for MTMR4 (NM_004687.3,2474-2492).
gccctccaagtgtgttctt

SEQ ID NO: 158536 - DNA, 19 bp, Homo sapiens
  siRNA target sequence for MTMR4 (NM_004687.3,2477-2495).
ctccaagtgtgttcttgat

SEQ ID NO: 158537 - DNA, 19 bp, Homo sapiens
  siRNA target sequence for MTMR4 (NM_004687.3,2479-2497).
ccaagtgtgttcttgatca

SEQ ID NO: 158538 - DNA, 19 bp, Homo sapiens
  siRNA target sequence for MTMR4 (NM_004687.3,2500-2518).
gcctcagcaccgtttgcaa

SEQ ID NO: 158539 - DNA, 19 bp, Homo sapiens
  siRNA target sequence for MTMR4 (NM_004687.3,2641-2659).
cccatggggaggaagacat

SEQ ID NO: 158540 - DNA, 19 bp, Homo sapiens
  siRNA target sequence for MTMR4 (NM_004687.3,2680-2698).
ggaatgggcagttattgga

SEQ ID NO: 158541 - DNA, 19 bp, Homo sapiens
  siRNA target sequence for MTMR4 (NM_004687.3,2712-2730).
gggaaaatgccattggaat

SEQ ID NO: 158542 - DNA, 19 bp, Homo sapiens
  siRNA target sequence for MTMR4 (NM_004687.3,2732-2750).
ggtccggaagccaatttct

SEQ ID NO: 158543 - DNA, 19 bp, Homo sapiens
  siRNA target sequence for MTMR4 (NM_004687.3,2757-2775).
cagatcagtgagttctctt

SEQ ID NO: 158544 - DNA, 19 bp, Homo sapiens
  siRNA target sequence for MTMR4 (NM_004687.3,2759-2777).
gatcagtgagttctctttt

SEQ ID NO: 158545 - DNA, 19 bp, Homo sapiens
  siRNA target sequence for MTMR4 (NM_004687.3,3016-3034).
ggttgtccagtcatccaaa

SEQ ID NO: 158546 - DNA, 19 bp, Homo sapiens
  siRNA target sequence for MTMR4 (NM_004687.3,3155-3173).
cgaagcagggtacaaacaa

SEQ ID NO: 158547 - DNA, 19 bp, Homo sapiens
  siRNA target sequence for MTMR4 (NM_004687.3,3266-3284).
ctatgaggatgattttaca

SEQ ID NO: 158548 - DNA, 19 bp, Homo sapiens
  siRNA target sequence for MTMR4 (NM_004687.3,3270-3288).
gaggatgattttacatgtt

SEQ ID NO: 158549 - DNA, 19 bp, Homo sapiens
  siRNA target sequence for MTMR4 (NM_004687.3,3296-3314).
gtcagatggcagtgatact

SEQ ID NO: 158550 - DNA, 19 bp, Homo sapiens
  siRNA target sequence for MTMR4 (NM_004687.3,3304-3322).
gcagtgatactgaggattt

SEQ ID NO: 158551 - DNA, 19 bp, Homo sapiens
  siRNA target sequence for MTMR4 (NM_004687.3,3305-3323).
cagtgatactgaggatttt

SEQ ID NO: 158552 - DNA, 19 bp, Homo sapiens
  siRNA target sequence for MTMR4 (NM_004687.3,3361-3379).
gctgggaacctgttgataa

SEQ ID NO: 158553 - DNA, 19 bp, Homo sapiens
  siRNA target sequence for MTMR4 (NM_004687.3,3364-3382).
gggaacctgttgataagaa

SEQ ID NO: 158554 - DNA, 19 bp, Homo sapiens
  siRNA target sequence for MTMR4 (NM_004687.3,3561-3579).
ctcgtctgtaactcatgtt

SEQ ID NO: 158555 - DNA, 19 bp, Homo sapiens
  siRNA target sequence for MTMR4 (NM_004687.3,3572-3590).
ctcatgttacgaacacatt

SEQ ID NO: 158556 - DNA, 19 bp, Homo sapiens
  siRNA target sequence for MTMR4 (NM_004687.3,3574-3592).
catgttacgaacacattca

SEQ ID NO: 158557 - DNA, 19 bp, Homo sapiens
  siRNA target sequence for MTMR4 (NM_004687.3,3577-3595).
gttacgaacacattcaagt

SEQ ID NO: 158558 - DNA, 19 bp, Homo sapiens
  siRNA target sequence for MTMR4 (NM_004687.3,3627-3645).
ctgaagaaacccattgcta

SEQ ID NO: 158559 - DNA, 19 bp, Homo sapiens
  siRNA target sequence for NLN (NM_020726.1,189-207).
ctcagaatgacgttaggaa

SEQ ID NO: 158560 - DNA, 19 bp, Homo sapiens
  siRNA target sequence for NLN (NM_020726.1,199-217).
cgttaggaagagaagtgat

SEQ ID NO: 158561 - DNA, 19 bp, Homo sapiens
  siRNA target sequence for NLN (NM_020726.1,228-246).
caggcaatgtcttcctata

SEQ ID NO: 158562 - DNA, 19 bp, Homo sapiens
  siRNA target sequence for NLN (NM_020726.1,230-248).
ggcaatgtcttcctatact

SEQ ID NO: 158563 - DNA, 19 bp, Homo sapiens
  siRNA target sequence for NLN (NM_020726.1,232-250).
caatgtcttcctatactgt

SEQ ID NO: 158564 - DNA, 19 bp, Homo sapiens
  siRNA target sequence for NLN (NM_020726.1,251-269).
ggctggcagaaatgtttta

SEQ ID NO: 158565 - DNA, 19 bp, Homo sapiens
  siRNA target sequence for NLN (NM_020726.1,359-377).
cggtattgaggaagtaact

SEQ ID NO: 158566 - DNA, 19 bp, Homo sapiens
  siRNA target sequence for NLN (NM_020726.1,360-378).
ggtattgaggaagtaactt

SEQ ID NO: 158567 - DNA, 19 bp, Homo sapiens
  siRNA target sequence for NLN (NM_020726.1,361-379).
gtattgaggaagtaactta

SEQ ID NO: 158568 - DNA, 19 bp, Homo sapiens
  siRNA target sequence for NLN (NM_020726.1,402-420).
gcagatgtagaagtaaagt

SEQ ID NO: 158569 - DNA, 19 bp, Homo sapiens
  siRNA target sequence for NLN (NM_020726.1,405-423).
gatgtagaagtaaagtata

SEQ ID NO: 158570 - DNA, 19 bp, Homo sapiens
  siRNA target sequence for NLN (NM_020726.1,455-473).
gcatgtatcctctgacaaa

SEQ ID NO: 158571 - DNA, 19 bp, Homo sapiens
  siRNA target sequence for NLN (NM_020726.1,514-532).
ctcgttttgatattgagat

SEQ ID NO: 158572 - DNA, 19 bp, Homo sapiens
  siRNA target sequence for NLN (NM_020726.1,533-551).
gagcatgagaggagatata

SEQ ID NO: 158573 - DNA, 19 bp, Homo sapiens
  siRNA target sequence for NLN (NM_020726.1,544-562).
gagatatatttgagagaat

SEQ ID NO: 158574 - DNA, 19 bp, Homo sapiens
  siRNA target sequence for NLN (NM_020726.1,669-687).
gaacaagtacagaatgaaa

SEQ ID NO: 158575 - DNA, 19 bp, Homo sapiens
  siRNA target sequence for NLN (NM_020726.1,706-724).
gaatgagtgagctatgtat

SEQ ID NO: 158576 - DNA, 19 bp, Homo sapiens
  siRNA target sequence for NLN (NM_020726.1,988-1006).
ccaaggtggccaaactact

SEQ ID NO: 158577 - DNA, 19 bp, Homo sapiens
  siRNA target sequence for NLN (NM_020726.1,996-1014).
gccaaactactcggttata

SEQ ID NO: 158578 - DNA, 19 bp, Homo sapiens
  siRNA target sequence for NLN (NM_020726.1,1024-1042).
ctgacttcgtccttgaaat

SEQ ID NO: 158579 - DNA, 19 bp, Homo sapiens
  siRNA target sequence for NLN (NM_020726.1,1026-1044).
gacttcgtccttgaaatga

SEQ ID NO: 158580 - DNA, 19 bp, Homo sapiens
  siRNA target sequence for NLN (NM_020726.1,1064-1082).
ccgcgtaacagcctttcta

SEQ ID NO: 158581 - DNA, 19 bp, Homo sapiens
  siRNA target sequence for NLN (NM_020726.1,1067-1085).
cgtaacagcctttctagat

SEQ ID NO: 158582 - DNA, 19 bp, Homo sapiens
  siRNA target sequence for NLN (NM_020726.1,1122-1140).
gaacgagagtttattttga

SEQ ID NO: 158583 - DNA, 19 bp, Homo sapiens
  siRNA target sequence for NLN (NM_020726.1,1159-1177).
gcaaagacaggggttttga

SEQ ID NO: 158584 - DNA, 19 bp, Homo sapiens
  siRNA target sequence for NLN (NM_020726.1,1166-1184).
caggggttttgaatatgat

SEQ ID NO: 158585 - DNA, 19 bp, Homo sapiens
  siRNA target sequence for NLN (NM_020726.1,1197-1215).
gcctgggatctatattact

SEQ ID NO: 158586 - DNA, 19 bp, Homo sapiens
  siRNA target sequence for NLN (NM_020726.1,1198-1216).
cctgggatctatattacta

SEQ ID NO: 158587 - DNA, 19 bp, Homo sapiens
  siRNA target sequence for NLN (NM_020726.1,1201-1219).
gggatctatattactacat

SEQ ID NO: 158588 - DNA, 19 bp, Homo sapiens
  siRNA target sequence for NLN (NM_020726.1,1203-1221).
gatctatattactacatga

SEQ ID NO: 158589 - DNA, 19 bp, Homo sapiens
  siRNA target sequence for NLN (NM_020726.1,1230-1248).
gaggaactcaagtattcca

SEQ ID NO: 158590 - DNA, 19 bp, Homo sapiens
  siRNA target sequence for NLN (NM_020726.1,1232-1250).
ggaactcaagtattccata

SEQ ID NO: 158591 - DNA, 19 bp, Homo sapiens
  siRNA target sequence for NLN (NM_020726.1,1319-1337).
ggagttgttgggactttca

SEQ ID NO: 158592 - DNA, 19 bp, Homo sapiens
  siRNA target sequence for NLN (NM_020726.1,1320-1338).
gagttgttgggactttcat

SEQ ID NO: 158593 - DNA, 19 bp, Homo sapiens
  siRNA target sequence for NLN (NM_020726.1,1322-1340).
gttgttgggactttcattt

SEQ ID NO: 158594 - DNA, 19 bp, Homo sapiens
  siRNA target sequence for NLN (NM_020726.1,1367-1385).
gaacaagagtgttacactt

SEQ ID NO: 158595 - DNA, 19 bp, Homo sapiens
  siRNA target sequence for NLN (NM_020726.1,1370-1388).
caagagtgttacactttat

SEQ ID NO: 158596 - DNA, 19 bp, Homo sapiens
  siRNA target sequence for NLN (NM_020726.1,1534-1552).
ctgccctcgtggtgaactt

SEQ ID NO: 158597 - DNA, 19 bp, Homo sapiens
  siRNA target sequence for NLN (NM_020726.1,1598-1616).
ggtgaggacttactttcat

SEQ ID NO: 158598 - DNA, 19 bp, Homo sapiens
  siRNA target sequence for NLN (NM_020726.1,1603-1621).
ggacttactttcatgagtt

SEQ ID NO: 158599 - DNA, 19 bp, Homo sapiens
  siRNA target sequence for NLN (NM_020726.1,1626-1644).
cacgtgatgcatcagattt

SEQ ID NO: 158600 - DNA, 19 bp, Homo sapiens
  siRNA target sequence for NLN (NM_020726.1,1652-1670).
gactgattttgcacgattt

SEQ ID NO: 158601 - DNA, 19 bp, Homo sapiens
  siRNA target sequence for NLN (NM_020726.1,1663-1681).
cacgatttagcggaacaaa

SEQ ID NO: 158602 - DNA, 19 bp, Homo sapiens
  siRNA target sequence for NLN (NM_020726.1,1666-1684).
gatttagcggaacaaatgt

SEQ ID NO: 158603 - DNA, 19 bp, Homo sapiens
  siRNA target sequence for NLN (NM_020726.1,1707-1725).
ccatcgcaaatgcttgaaa

SEQ ID NO: 158604 - DNA, 19 bp, Homo sapiens
  siRNA target sequence for NLN (NM_020726.1,1708-1726).
catcgcaaatgcttgaaaa

SEQ ID NO: 158605 - DNA, 19 bp, Homo sapiens
  siRNA target sequence for NLN (NM_020726.1,1743-1761).
gattccctccgaagattgt

SEQ ID NO: 158606 - DNA, 19 bp, Homo sapiens
  siRNA target sequence for NLN (NM_020726.1,1747-1765).
ccctccgaagattgtcaaa

SEQ ID NO: 158607 - DNA, 19 bp, Homo sapiens
  siRNA target sequence for NLN (NM_020726.1,1748-1766).
cctccgaagattgtcaaaa

SEQ ID NO: 158608 - DNA, 19 bp, Homo sapiens
  siRNA target sequence for NLN (NM_020726.1,1751-1769).
ccgaagattgtcaaaacat

SEQ ID NO: 158609 - DNA, 19 bp, Homo sapiens
  siRNA target sequence for NLN (NM_020726.1,1752-1770).
cgaagattgtcaaaacatt

SEQ ID NO: 158610 - DNA, 19 bp, Homo sapiens
  siRNA target sequence for NLN (NM_020726.1,1753-1771).
gaagattgtcaaaacatta

SEQ ID NO: 158611 - DNA, 19 bp, Homo sapiens
  siRNA target sequence for NLN (NM_020726.1,1791-1809).
gcagacgatctgcttgaaa

SEQ ID NO: 158612 - DNA, 19 bp, Homo sapiens
  siRNA target sequence for NLN (NM_020726.1,1792-1810).
cagacgatctgcttgaaaa

SEQ ID NO: 158613 - DNA, 19 bp, Homo sapiens
  siRNA target sequence for NLN (NM_020726.1,1847-1865).
gaccctgcgccagattgtt

SEQ ID NO: 158614 - DNA, 19 bp, Homo sapiens
  siRNA target sequence for NLN (NM_020726.1,1859-1877).
gattgttttgagcaaagtt

SEQ ID NO: 158615 - DNA, 19 bp, Homo sapiens
  siRNA target sequence for NLN (NM_020726.1,1934-1952).
ctgctcagaaatattagga

SEQ ID NO: 158616 - DNA, 19 bp, Homo sapiens
  siRNA target sequence for NLN (NM_020726.1,2006-2024).
gggatacgatggccaatat

SEQ ID NO: 158617 - DNA, 19 bp, Homo sapiens
  siRNA target sequence for NLN (NM_020726.1,2007-2025).
ggatacgatggccaatatt

SEQ ID NO: 158618 - DNA, 19 bp, Homo sapiens
  siRNA target sequence for NLN (NM_020726.1,2008-2026).
gatacgatggccaatatta

SEQ ID NO: 158619 - DNA, 19 bp, Homo sapiens
  siRNA target sequence for NLN (NM_020726.1,2012-2030).
cgatggccaatattatgga

SEQ ID NO: 158620 - DNA, 19 bp, Homo sapiens
  siRNA target sequence for NLN (NM_020726.1,2018-2036).
ccaatattatggatatctt

SEQ ID NO: 158621 - DNA, 19 bp, Homo sapiens
  siRNA target sequence for NLN (NM_020726.1,2163-2181).
gacatgctccacaatttct

SEQ ID NO: 158622 - DNA, 19 bp, Homo sapiens
  siRNA target sequence for NLN (NM_020726.1,2199-2217).
caaaaagcgttcctaatga

SEQ ID NO: 158623 - DNA, 19 bp, Homo sapiens
  siRNA target sequence for NPEPPS (NM_006310.2,655-673).
gcaacttttgatatctcat

SEQ ID NO: 158624 - DNA, 19 bp, Homo sapiens
  siRNA target sequence for NPEPPS (NM_006310.2,1020-1038).
gaactggggccttgttact

SEQ ID NO: 158625 - DNA, 19 bp, Homo sapiens
  siRNA target sequence for NPEPPS (NM_006310.2,1023-1041).
ctggggccttgttacttat

SEQ ID NO: 158626 - DNA, 19 bp, Homo sapiens
  siRNA target sequence for NPEPPS (NM_006310.2,1600-1618).
gtagaagatgacagattat

SEQ ID NO: 158627 - DNA, 19 bp, Homo sapiens
  siRNA target sequence for NPEPPS (NM_006310.2,1641-1659).
ctgtgctggtgggtcatat

SEQ ID NO: 158628 - DNA, 19 bp, Homo sapiens
  siRNA target sequence for NPEPPS (NM_006310.2,1643-1661).
gtgctggtgggtcatatgt

SEQ ID NO: 158629 - DNA, 19 bp, Homo sapiens
  siRNA target sequence for NPEPPS (NM_006310.2,1653-1671).
gtcatatgttggtgaagat

SEQ ID NO: 158630 - DNA, 19 bp, Homo sapiens
  siRNA target sequence for NPEPPS (NM_006310.2,1680-1698).
gtggatggtccctatcaca

SEQ ID NO: 158631 - DNA, 19 bp, Homo sapiens
  siRNA target sequence for NPEPPS (NM_006310.2,1682-1700).
ggatggtccctatcacaat

SEQ ID NO: 158632 - DNA, 19 bp, Homo sapiens
  siRNA target sequence for NPEPPS (NM_006310.2,1687-1705).
gtccctatcacaatctcta

SEQ ID NO: 158633 - DNA, 19 bp, Homo sapiens
  siRNA target sequence for NPEPPS (NM_006310.2,1695-1713).
cacaatctctactagtgaa

SEQ ID NO: 158634 - DNA, 19 bp, Homo sapiens
  siRNA target sequence for NPEPPS (NM_006310.2,1716-1734).
ccccaaccaggccaaacta

SEQ ID NO: 158635 - DNA, 19 bp, Homo sapiens
  siRNA target sequence for NPEPPS (NM_006310.2,1787-1805).
cagaccaatgggtgaagtt

SEQ ID NO: 158636 - DNA, 19 bp, Homo sapiens
  siRNA target sequence for NPEPPS (NM_006310.2,1789-1807).
gaccaatgggtgaagttaa

SEQ ID NO: 158637 - DNA, 19 bp, Homo sapiens
  siRNA target sequence for NPEPPS (NM_006310.2,1792-1810).
caatgggtgaagttaaact

SEQ ID NO: 158638 - DNA, 19 bp, Homo sapiens
  siRNA target sequence for NPEPPS (NM_006310.2,1798-1816).
gtgaagttaaacttaggaa

SEQ ID NO: 158639 - DNA, 19 bp, Homo sapiens
  siRNA target sequence for NPEPPS (NM_006310.2,1850-1868).
ccatgctggaaagtttatt

SEQ ID NO: 158640 - DNA, 19 bp, Homo sapiens
  siRNA target sequence for NPEPPS (NM_006310.2,1898-1916).
ctgtggatcgacttggatt

SEQ ID NO: 158641 - DNA, 19 bp, Homo sapiens
  siRNA target sequence for NPEPPS (NM_006310.2,1907-1925).
gacttggattacagaatga

SEQ ID NO: 158642 - DNA, 19 bp, Homo sapiens
  siRNA target sequence for NPEPPS (NM_006310.2,1958-1976).
gcactgtagaggttctaaa

SEQ ID NO: 158643 - DNA, 19 bp, Homo sapiens
  siRNA target sequence for NPEPPS (NM_006310.2,1959-1977).
cactgtagaggttctaaaa

SEQ ID NO: 158644 - DNA, 19 bp, Homo sapiens
  siRNA target sequence for NPEPPS (NM_006310.2,1961-1979).
ctgtagaggttctaaaagt

SEQ ID NO: 158645 - DNA, 19 bp, Homo sapiens
  siRNA target sequence for NPEPPS (NM_006310.2,1963-1981).
gtagaggttctaaaagtca

SEQ ID NO: 158646 - DNA, 19 bp, Homo sapiens
  siRNA target sequence for NPEPPS (NM_006310.2,1993-2011).
gtgaatgagcccaattata

SEQ ID NO: 158647 - DNA, 19 bp, Homo sapiens
  siRNA target sequence for NPEPPS (NM_006310.2,1995-2013).
gaatgagcccaattatact

SEQ ID NO: 158648 - DNA, 19 bp, Homo sapiens
  siRNA target sequence for NPEPPS (NM_006310.2,2061-2079).
gtcccacacagacttctat

SEQ ID NO: 158649 - DNA, 19 bp, Homo sapiens
  siRNA target sequence for NPEPPS (NM_006310.2,2237-2255).
cccgtcgtcggtttaagga

SEQ ID NO: 158650 - DNA, 19 bp, Homo sapiens
  siRNA target sequence for NPEPPS (NM_006310.2,2323-2341).
catggtgatggcactactt

SEQ ID NO: 158651 - DNA, 19 bp, Homo sapiens
  siRNA target sequence for NPEPPS (NM_006310.2,2386-2404).
gagaaaaaccgaatcgaaa

SEQ ID NO: 158652 - DNA, 19 bp, Homo sapiens
  siRNA target sequence for NPEPPS (NM_006310.2,2407-2425).
gtccttggcgctactcttt

SEQ ID NO: 158653 - DNA, 19 bp, Homo sapiens
  siRNA target sequence for NPEPPS (NM_006310.2,2427-2445).
gcctgacctgattcaaaaa

SEQ ID NO: 158654 - DNA, 19 bp, Homo sapiens
  siRNA target sequence for NPEPPS (NM_006310.2,2451-2469).
cacgtttgcactttcagaa

SEQ ID NO: 158655 - DNA, 19 bp, Homo sapiens
  siRNA target sequence for NPEPPS (NM_006310.2,2476-2494).
cgtccacaggacactgtat

SEQ ID NO: 158656 - DNA, 19 bp, Homo sapiens
  siRNA target sequence for NPEPPS (NM_006310.2,2484-2502).
ggacactgtatcggtaatt

SEQ ID NO: 158657 - DNA, 19 bp, Homo sapiens
  siRNA target sequence for NPEPPS (NM_006310.2,2487-2505).
cactgtatcggtaattggt

SEQ ID NO: 158658 - DNA, 19 bp, Homo sapiens
  siRNA target sequence for NPEPPS (NM_006310.2,2520-2538).
cagcaagcatggtaggaaa

SEQ ID NO: 158659 - DNA, 19 bp, Homo sapiens
  siRNA target sequence for NPEPPS (NM_006310.2,2539-2557).
gctgcttggaaattcataa

SEQ ID NO: 158660 - DNA, 19 bp, Homo sapiens
  siRNA target sequence for NPEPPS (NM_006310.2,2590-2608).
cagggaggattcttaatat

SEQ ID NO: 158661 - DNA, 19 bp, Homo sapiens
  siRNA target sequence for NPEPPS (NM_006310.2,2612-2630).
gactaataaagctatcagt

SEQ ID NO: 158662 - DNA, 19 bp, Homo sapiens
  siRNA target sequence for NPEPPS (NM_006310.2,2634-2652).
gggatttgcagttgataaa

SEQ ID NO: 158663 - DNA, 19 bp, Homo sapiens
  siRNA target sequence for PAM (NM_015057.1,255-273).
gaccgctaccggaggattt

SEQ ID NO: 158664 - DNA, 19 bp, Homo sapiens
  siRNA target sequence for PAM (NM_015057.1,257-275).
ccgctaccggaggatttat

SEQ ID NO: 158665 - DNA, 19 bp, Homo sapiens
  siRNA target sequence for PAM (NM_015057.1,258-276).
cgctaccggaggatttata

SEQ ID NO: 158666 - DNA, 19 bp, Homo sapiens
  siRNA target sequence for PAM (NM_015057.1,321-339).
cacccagcctccaggaata

SEQ ID NO: 158667 - DNA, 19 bp, Homo sapiens
  siRNA target sequence for PAM (NM_015057.1,403-421).
gaagcaagtctgaaaactt

SEQ ID NO: 158668 - DNA, 19 bp, Homo sapiens
  siRNA target sequence for PAM (NM_015057.1,406-424).
gcaagtctgaaaacttaga

SEQ ID NO: 158669 - DNA, 19 bp, Homo sapiens
  siRNA target sequence for PAM (NM_015057.1,410-428).
gtctgaaaacttagagaat

SEQ ID NO: 158670 - DNA, 19 bp, Homo sapiens
  siRNA target sequence for PAM (NM_015057.1,432-450).
gtaatcataccagatatca

SEQ ID NO: 158671 - DNA, 19 bp, Homo sapiens
  siRNA target sequence for PAM (NM_015057.1,461-479).
caatccttctgctttcaat

SEQ ID NO: 158672 - DNA, 19 bp, Homo sapiens
  siRNA target sequence for PAM (NM_015057.1,532-550).
cattggcagccgcatctaa

SEQ ID NO: 158673 - DNA, 19 bp, Homo sapiens
  siRNA target sequence for PAM (NM_015057.1,537-555).
gcagccgcatctaagaact

SEQ ID NO: 158674 - DNA, 19 bp, Homo sapiens
  siRNA target sequence for PAM (NM_015057.1,560-578).
gcagagtggagaatcagat

SEQ ID NO: 158675 - DNA, 19 bp, Homo sapiens
  siRNA target sequence for PAM (NM_015057.1,646-664).
gtgaagtttttgaattgat

SEQ ID NO: 158676 - DNA, 19 bp, Homo sapiens
  siRNA target sequence for PAM (NM_015057.1,817-835).
gaagtactgggatgaatga

SEQ ID NO: 158677 - DNA, 19 bp, Homo sapiens
  siRNA target sequence for PAM (NM_015057.1,955-973).
gccatgcttgccaaactat

SEQ ID NO: 158678 - DNA, 19 bp, Homo sapiens
  siRNA target sequence for PAM (NM_015057.1,998-1016).
gctacagagaagtgtacaa

SEQ ID NO: 158679 - DNA, 19 bp, Homo sapiens
  siRNA target sequence for PAM (NM_015057.1,1006-1024).
gaagtgtacaagcagtttt

SEQ ID NO: 158680 - DNA, 19 bp, Homo sapiens
  siRNA target sequence for PAM (NM_015057.1,1038-1056).
caaattcaggactggttta

SEQ ID NO: 158681 - DNA, 19 bp, Homo sapiens
  siRNA target sequence for PAM (NM_015057.1,1051-1069).
ggtttagtaatggcattaa

SEQ ID NO: 158682 - DNA, 19 bp, Homo sapiens
  siRNA target sequence for PAM (NM_015057.1,1213-1231).
cagttaggggccatatata

SEQ ID NO: 158683 - DNA, 19 bp, Homo sapiens
  siRNA target sequence for PAM (NM_015057.1,1215-1233).
gttaggggccatatataca

SEQ ID NO: 158684 - DNA, 19 bp, Homo sapiens
  siRNA target sequence for PAM (NM_015057.1,1223-1241).
ccatatatacaattctaca

SEQ ID NO: 158685 - DNA, 19 bp, Homo sapiens
  siRNA target sequence for PAM (NM_015057.1,1237-1255).
ctacatcccgtattagaaa

SEQ ID NO: 158686 - DNA, 19 bp, Homo sapiens
  siRNA target sequence for PAM (NM_015057.1,1327-1345).
gcatgacagccataaggat

SEQ ID NO: 158687 - DNA, 19 bp, Homo sapiens
  siRNA target sequence for PAM (NM_015057.1,1393-1411).
gccacactgaaggtcaaaa

SEQ ID NO: 158688 - DNA, 19 bp, Homo sapiens
  siRNA target sequence for PAM (NM_015057.1,1394-1412).
ccacactgaaggtcaaaat

SEQ ID NO: 158689 - DNA, 19 bp, Homo sapiens
  siRNA target sequence for PAM (NM_015057.1,1395-1413).
cacactgaaggtcaaaata

SEQ ID NO: 158690 - DNA, 19 bp, Homo sapiens
  siRNA target sequence for PAM (NM_015057.1,1459-1477).
gagatgatggctttgttgt

SEQ ID NO: 158691 - DNA, 19 bp, Homo sapiens
  siRNA target sequence for PAM (NM_015057.1,1580-1598).
ggaaaaggacttgcatatt

SEQ ID NO: 158692 - DNA, 19 bp, Homo sapiens
  siRNA target sequence for PAM (NM_015057.1,1586-1604).
ggacttgcatattataagt

SEQ ID NO: 158693 - DNA, 19 bp, Homo sapiens
  siRNA target sequence for PAM (NM_015057.1,1644-1662).
cgagagtttgcgctaatga

SEQ ID NO: 158694 - DNA, 19 bp, Homo sapiens
  siRNA target sequence for PAM (NM_015057.1,1647-1665).
gagtttgcgctaatgaaaa

SEQ ID NO: 158695 - DNA, 19 bp, Homo sapiens
  siRNA target sequence for PAM (NM_015057.1,1649-1667).
gtttgcgctaatgaaaaca

SEQ ID NO: 158696 - DNA, 19 bp, Homo sapiens
  siRNA target sequence for PAM (NM_015057.1,1745-1763).
ggttgagctaccaattaca

SEQ ID NO: 158697 - DNA, 19 bp, Homo sapiens
  siRNA target sequence for PAM (NM_015057.1,1746-1764).
gttgagctaccaattacaa

SEQ ID NO: 158698 - DNA, 19 bp, Homo sapiens
  siRNA target sequence for PAM (NM_015057.1,1768-1786).
ctccaaagatagtacactt

SEQ ID NO: 158699 - DNA, 19 bp, Homo sapiens
  siRNA target sequence for PAM (NM_015057.1,1804-1822).
gctctcacgcccttttagt

SEQ ID NO: 158700 - DNA, 19 bp, Homo sapiens
  siRNA target sequence for PAM (NM_015057.1,1805-1823).
ctctcacgcccttttagtt

SEQ ID NO: 158701 - DNA, 19 bp, Homo sapiens
  siRNA target sequence for PAM (NM_015057.1,1827-1845).
gaagatgggagcatattct

SEQ ID NO: 158702 - DNA, 19 bp, Homo sapiens
  siRNA target sequence for PAM (NM_015057.1,1889-1907).
gagcagacggcaatccaaa

SEQ ID NO: 158703 - DNA, 19 bp, Homo sapiens
  siRNA target sequence for PAM (NM_015057.1,1896-1914).
cggcaatccaaaccttata

SEQ ID NO: 158704 - DNA, 19 bp, Homo sapiens
  siRNA target sequence for PAM (NM_015057.1,1909-1927).
cttataaacctaaaaagat

SEQ ID NO: 158705 - DNA, 19 bp, Homo sapiens
  siRNA target sequence for PAM (NM_015057.1,1953-1971).
gtatatacagcctgcaata

SEQ ID NO: 158706 - DNA, 19 bp, Homo sapiens
  siRNA target sequence for PAM (NM_015057.1,1974-1992).
ggaagtagttctgttattt

SEQ ID NO: 158707 - DNA, 19 bp, Homo sapiens
  siRNA target sequence for PAM (NM_015057.1,1998-2016).
gatggagaactctacatgt

SEQ ID NO: 158708 - DNA, 19 bp, Homo sapiens
  siRNA target sequence for PAM (NM_015057.1,2004-2022).
gaactctacatgtttggaa

SEQ ID NO: 158709 - DNA, 19 bp, Homo sapiens
  siRNA target sequence for PAM (NM_015057.1,2009-2027).
ctacatgtttggaaaagat

SEQ ID NO: 158710 - DNA, 19 bp, Homo sapiens
  siRNA target sequence for PAM (NM_015057.1,2025-2043).
gatgccatttactctgata

SEQ ID NO: 158711 - DNA, 19 bp, Homo sapiens
  siRNA target sequence for PAM (NM_015057.1,2028-2046).
gccatttactctgatagtt

SEQ ID NO: 158712 - DNA, 19 bp, Homo sapiens
  siRNA target sequence for PAM (NM_015057.1,2044-2062).
gttcaagtttggtaactga

SEQ ID NO: 158713 - DNA, 19 bp, Homo sapiens
  siRNA target sequence for PAM (NM_015057.1,2050-2068).
gtttggtaactgatttgaa

SEQ ID NO: 158714 - DNA, 19 bp, Homo sapiens
  siRNA target sequence for PAM (NM_015057.1,2141-2159).
gacatttggtgtaaataat

SEQ ID NO: 158715 - DNA, 19 bp, Homo sapiens
  siRNA target sequence for PAM (NM_015057.1,2143-2161).
catttggtgtaaataataa

SEQ ID NO: 158716 - DNA, 19 bp, Homo sapiens
  siRNA target sequence for PAM (NM_015057.1,2490-2508).
ggtcaagaggcaagacaaa

SEQ ID NO: 158717 - DNA, 19 bp, Homo sapiens
  siRNA target sequence for PAM (NM_015057.1,2498-2516).
ggcaagacaaagaggaatt

SEQ ID NO: 158718 - DNA, 19 bp, Homo sapiens
  siRNA target sequence for PAM (NM_015057.1,2575-2593).
gggttaacattgaagaaca

SEQ ID NO: 158719 - DNA, 19 bp, Homo sapiens
  siRNA target sequence for PAM (NM_015057.1,2600-2618).
gttacgacaagaagaaaaa

SEQ ID NO: 158720 - DNA, 19 bp, Homo sapiens
  siRNA target sequence for PAM (NM_015057.1,2619-2637).
cggcaacgtgtaatcagaa

SEQ ID NO: 158721 - DNA, 19 bp, Homo sapiens
  siRNA target sequence for PAM (NM_015057.1,2795-2813).
ggatgcaagcaaaatcaca

SEQ ID NO: 158722 - DNA, 19 bp, Homo sapiens
  siRNA target sequence for PAM (NM_015057.1,2799-2817).
gcaagcaaaatcacaacat

SEQ ID NO: 158723 - DNA, 19 bp, Homo sapiens
  siRNA target sequence for PAM (NM_015057.1,2826-2844).
ggctctgtgcgatttgact

SEQ ID NO: 158724 - DNA, 19 bp, Homo sapiens
  siRNA target sequence for PAM (NM_015057.1,2974-2992).
gatgtcccactcttgttca

SEQ ID NO: 158725 - DNA, 19 bp, Homo sapiens
  siRNA target sequence for PAM (NM_015057.1,3032-3050).
caaccatacggcagtactt

SEQ ID NO: 158726 - DNA, 19 bp, Homo sapiens
  siRNA target sequence for PAM (NM_015057.1,3035-3053).
ccatacggcagtactttta

SEQ ID NO: 158727 - DNA, 19 bp, Homo sapiens
  siRNA target sequence for PAM (NM_015057.1,3036-3054).
catacggcagtacttttaa

SEQ ID NO: 158728 - DNA, 19 bp, Homo sapiens
  siRNA target sequence for PAM (NM_015057.1,3040-3058).
cggcagtacttttaatgga

SEQ ID NO: 158729 - DNA, 19 bp, Homo sapiens
  siRNA target sequence for PAM (NM_015057.1,3041-3059).
ggcagtacttttaatggat

SEQ ID NO: 158730 - DNA, 19 bp, Homo sapiens
  siRNA target sequence for PAM (NM_015057.1,3063-3081).
caggtcttcacatttggaa

SEQ ID NO: 158731 - DNA, 19 bp, Homo sapiens
  siRNA target sequence for PAM (NM_015057.1,3120-3138).
gtgccatattggaatgcaa

SEQ ID NO: 158732 - DNA, 19 bp, Homo sapiens
  siRNA target sequence for PAM (NM_015057.1,3142-3160).
cagctcccatgcctaacat

SEQ ID NO: 158733 - DNA, 19 bp, Homo sapiens
  siRNA target sequence for PAM (NM_015057.1,3147-3165).
cccatgcctaacattggat

SEQ ID NO: 158734 - DNA, 19 bp, Homo sapiens
  siRNA target sequence for PAM (NM_015057.1,3214-3232).
cttttttacgaattgatga

SEQ ID NO: 158735 - DNA, 19 bp, Homo sapiens
  siRNA target sequence for PAM (NM_015057.1,3299-3317).
ggtacctgcttctatatca

SEQ ID NO: 158736 - DNA, 19 bp, Homo sapiens
  siRNA target sequence for PAM (NM_015057.1,3316-3334).
cagaacctcctccatttaa

SEQ ID NO: 158737 - DNA, 19 bp, Homo sapiens
  siRNA target sequence for PAM (NM_015057.1,3416-3434).
gtgtcttgatcctgtatat

SEQ ID NO: 158738 - DNA, 19 bp, Homo sapiens
  siRNA target sequence for PAM (NM_015057.1,3418-3436).
gtcttgatcctgtatatga

SEQ ID NO: 158739 - DNA, 19 bp, Homo sapiens
  siRNA target sequence for PAM (NM_015057.1,3423-3441).
gatcctgtatatgatgtaa

SEQ ID NO: 158740 - DNA, 19 bp, Homo sapiens
  siRNA target sequence for PAM (NM_015057.1,3446-3464).
gaggtttcgaccaaatact

SEQ ID NO: 158741 - DNA, 19 bp, Homo sapiens
  siRNA target sequence for PAM (NM_015057.1,3530-3548).
gtccagatgtagtatccta

SEQ ID NO: 158742 - DNA, 19 bp, Homo sapiens
  siRNA target sequence for PAM (NM_015057.1,3584-3602).
cctcactacccgatctcat

SEQ ID NO: 158743 - DNA, 19 bp, Homo sapiens
  siRNA target sequence for PAM (NM_015057.1,3639-3657).
gcagctatgcaggacttaa

SEQ ID NO: 158744 - DNA, 19 bp, Homo sapiens
  siRNA target sequence for PAM (NM_015057.1,3640-3658).
cagctatgcaggacttaaa

SEQ ID NO: 158745 - DNA, 19 bp, Homo sapiens
  siRNA target sequence for PAM (NM_015057.1,3643-3661).
ctatgcaggacttaaaaat

SEQ ID NO: 158746 - DNA, 19 bp, Homo sapiens
  siRNA target sequence for PAM (NM_015057.1,3690-3708).
caagcagtaatgaaggttt

SEQ ID NO: 158747 - DNA, 19 bp, Homo sapiens
  siRNA target sequence for PAM (NM_015057.1,3720-3738).
gattatagtgtggtaaaca

SEQ ID NO: 158748 - DNA, 19 bp, Homo sapiens
  siRNA target sequence for PAM (NM_015057.1,3766-3784).
gttattctgcccattcagt

SEQ ID NO: 158749 - DNA, 19 bp, Homo sapiens
  siRNA target sequence for PAM (NM_015057.1,3800-3818).
cagtgccgacactgatatt

SEQ ID NO: 158750 - DNA, 19 bp, Homo sapiens
  siRNA target sequence for PAM (NM_015057.1,3802-3820).
gtgccgacactgatatttt

SEQ ID NO: 158751 - DNA, 19 bp, Homo sapiens
  siRNA target sequence for PAM (NM_015057.1,3805-3823).
ccgacactgatattttact

SEQ ID NO: 158752 - DNA, 19 bp, Homo sapiens
  siRNA target sequence for PAM (NM_015057.1,3927-3945).
cttgcagagactgatgtat

SEQ ID NO: 158753 - DNA, 19 bp, Homo sapiens
  siRNA target sequence for PAM (NM_015057.1,3939-3957).
gatgtattggcttatgact

SEQ ID NO: 158754 - DNA, 19 bp, Homo sapiens
  siRNA target sequence for PAM (NM_015057.1,4069-4087).
ctcatggacaggcatctat

SEQ ID NO: 158755 - DNA, 19 bp, Homo sapiens
  siRNA target sequence for PAM (NM_015057.1,4071-4089).
catggacaggcatctatta

SEQ ID NO: 158756 - DNA, 19 bp, Homo sapiens
  siRNA target sequence for PAM (NM_015057.1,4161-4179).
ggtcagatacctcagttat

SEQ ID NO: 158757 - DNA, 19 bp, Homo sapiens
  siRNA target sequence for PAM (NM_015057.1,4162-4180).
gtcagatacctcagttatt

SEQ ID NO: 158758 - DNA, 19 bp, Homo sapiens
  siRNA target sequence for PAM (NM_015057.1,4164-4182).
cagatacctcagttattat

SEQ ID NO: 158759 - DNA, 19 bp, Homo sapiens
  siRNA target sequence for PAM (NM_015057.1,4198-4216).
gtgatggcagtgcttcaaa

SEQ ID NO: 158760 - DNA, 19 bp, Homo sapiens
  siRNA target sequence for PAM (NM_015057.1,4331-4349).
cttagtcttaggagttgaa

SEQ ID NO: 158761 - DNA, 19 bp, Homo sapiens
  siRNA target sequence for PAM (NM_015057.1,4337-4355).
cttaggagttgaagaactt

SEQ ID NO: 158762 - DNA, 19 bp, Homo sapiens
  siRNA target sequence for PAM (NM_015057.1,4433-4451).
gaggttattgcgtgtctat

SEQ ID NO: 158763 - DNA, 19 bp, Homo sapiens
  siRNA target sequence for PAM (NM_015057.1,4508-4526).
caaattagcagagtgtatt

SEQ ID NO: 158764 - DNA, 19 bp, Homo sapiens
  siRNA target sequence for PAM (NM_015057.1,4579-4597).
gcatggtgaaattggataa

SEQ ID NO: 158765 - DNA, 19 bp, Homo sapiens
  siRNA target sequence for PAM (NM_015057.1,4583-4601).
ggtgaaattggataatgat

SEQ ID NO: 158766 - DNA, 19 bp, Homo sapiens
  siRNA target sequence for PAM (NM_015057.1,4599-4617).
gatcctcaaggatatctca

SEQ ID NO: 158767 - DNA, 19 bp, Homo sapiens
  siRNA target sequence for PAM (NM_015057.1,4642-4660).
ctgtccttcaggaatgtca

SEQ ID NO: 158768 - DNA, 19 bp, Homo sapiens
  siRNA target sequence for PAM (NM_015057.1,4722-4740).
ctttgtgatctgctgaatt

SEQ ID NO: 158769 - DNA, 19 bp, Homo sapiens
  siRNA target sequence for PAM (NM_015057.1,4741-4759).
gtttggatcaggatatcca

SEQ ID NO: 158770 - DNA, 19 bp, Homo sapiens
  siRNA target sequence for PAM (NM_015057.1,4761-4779).
gaagcaaacttcaagacat

SEQ ID NO: 158771 - DNA, 19 bp, Homo sapiens
  siRNA target sequence for PAM (NM_015057.1,4791-4809).
ctccttgcagctgttatgt

SEQ ID NO: 158772 - DNA, 19 bp, Homo sapiens
  siRNA target sequence for PAM (NM_015057.1,4819-4837).
gtcacacgtctgttaagct

SEQ ID NO: 158773 - DNA, 19 bp, Homo sapiens
  siRNA target sequence for PAM (NM_015057.1,4847-4865).
cttcccgattgcgtatgat

SEQ ID NO: 158774 - DNA, 19 bp, Homo sapiens
  siRNA target sequence for PAM (NM_015057.1,4910-4928).
gaacgactcaacactagtt

SEQ ID NO: 158775 - DNA, 19 bp, Homo sapiens
  siRNA target sequence for PAM (NM_015057.1,4913-4931).
cgactcaacactagttcat

SEQ ID NO: 158776 - DNA, 19 bp, Homo sapiens
  siRNA target sequence for PAM (NM_015057.1,4939-4957).
cccttttggtggcacatat

SEQ ID NO: 158777 - DNA, 19 bp, Homo sapiens
  siRNA target sequence for PAM (NM_015057.1,4997-5015).
gacaagcttccgtgaagtt

SEQ ID NO: 158778 - DNA, 19 bp, Homo sapiens
  siRNA target sequence for PAM (NM_015057.1,5099-5117).
ctctaacacctgtggatta

SEQ ID NO: 158779 - DNA, 19 bp, Homo sapiens
  siRNA target sequence for PAM (NM_015057.1,5101-5119).
ctaacacctgtggattact

SEQ ID NO: 158780 - DNA, 19 bp, Homo sapiens
  siRNA target sequence for PAM (NM_015057.1,5161-5179).
ctgaggttgatggacttaa

SEQ ID NO: 158781 - DNA, 19 bp, Homo sapiens
  siRNA target sequence for PAM (NM_015057.1,5163-5181).
gaggttgatggacttaatt

SEQ ID NO: 158782 - DNA, 19 bp, Homo sapiens
  siRNA target sequence for PAM (NM_015057.1,5165-5183).
ggttgatggacttaattct

SEQ ID NO: 158783 - DNA, 19 bp, Homo sapiens
  siRNA target sequence for PAM (NM_015057.1,5203-5221).
gtgctaaccgatttacaaa

SEQ ID NO: 158784 - DNA, 19 bp, Homo sapiens
  siRNA target sequence for PAM (NM_015057.1,5205-5223).
gctaaccgatttacaaaaa

SEQ ID NO: 158785 - DNA, 19 bp, Homo sapiens
  siRNA target sequence for PAM (NM_015057.1,5258-5276).
gtcccctgatgcaatctgt

SEQ ID NO: 158786 - DNA, 19 bp, Homo sapiens
  siRNA target sequence for PAM (NM_015057.1,5260-5278).
cccctgatgcaatctgttt

SEQ ID NO: 158787 - DNA, 19 bp, Homo sapiens
  siRNA target sequence for PAM (NM_015057.1,5261-5279).
ccctgatgcaatctgtttt

SEQ ID NO: 158788 - DNA, 19 bp, Homo sapiens
  siRNA target sequence for PAM (NM_015057.1,5273-5291).
ctgtttttcagtagacaaa

SEQ ID NO: 158789 - DNA, 19 bp, Homo sapiens
  siRNA target sequence for PAM (NM_015057.1,5410-5428).
ggacatctctggaattagt

SEQ ID NO: 158790 - DNA, 19 bp, Homo sapiens
  siRNA target sequence for PAM (NM_015057.1,5427-5445).
gtgaaaggaacgtacacaa

SEQ ID NO: 158791 - DNA, 19 bp, Homo sapiens
  siRNA target sequence for PAM (NM_015057.1,5448-5466).
gatgactcacccagtgata

SEQ ID NO: 158792 - DNA, 19 bp, Homo sapiens
  siRNA target sequence for PAM (NM_015057.1,5453-5471).
ctcacccagtgatatagct

SEQ ID NO: 158793 - DNA, 19 bp, Homo sapiens
  siRNA target sequence for PAM (NM_015057.1,5589-5607).
cctgatggtgtgacattca

SEQ ID NO: 158794 - DNA, 19 bp, Homo sapiens
  siRNA target sequence for PAM (NM_015057.1,5656-5674).
gacagatcccacagatact

SEQ ID NO: 158795 - DNA, 19 bp, Homo sapiens
  siRNA target sequence for PAM (NM_015057.1,5663-5681).
cccacagatactctactat

SEQ ID NO: 158796 - DNA, 19 bp, Homo sapiens
  siRNA target sequence for PAM (NM_015057.1,5664-5682).
ccacagatactctactata

SEQ ID NO: 158797 - DNA, 19 bp, Homo sapiens
  siRNA target sequence for PAM (NM_015057.1,5667-5685).
cagatactctactatagga

SEQ ID NO: 158798 - DNA, 19 bp, Homo sapiens
  siRNA target sequence for PAM (NM_015057.1,5673-5691).
ctctactataggagtgaat

SEQ ID NO: 158799 - DNA, 19 bp, Homo sapiens
  siRNA target sequence for PAM (NM_015057.1,5870-5888).
catgctgctcccccttatt

SEQ ID NO: 158800 - DNA, 19 bp, Homo sapiens
  siRNA target sequence for PAM (NM_015057.1,5873-5891).
gctgctcccccttattata

SEQ ID NO: 158801 - DNA, 19 bp, Homo sapiens
  siRNA target sequence for PAM (NM_015057.1,5947-5965).
gccttgtccaacaattgct

SEQ ID NO: 158802 - DNA, 19 bp, Homo sapiens
  siRNA target sequence for PAM (NM_015057.1,5948-5966).
ccttgtccaacaattgctt

SEQ ID NO: 158803 - DNA, 19 bp, Homo sapiens
  siRNA target sequence for PAM (NM_015057.1,5967-5985).
ccgtcagttgccattttga

SEQ ID NO: 158804 - DNA, 19 bp, Homo sapiens
  siRNA target sequence for PAM (NM_015057.1,5968-5986).
cgtcagttgccattttgaa

SEQ ID NO: 158805 - DNA, 19 bp, Homo sapiens
  siRNA target sequence for PAM (NM_015057.1,6004-6022).
ctgccttcaaccctaatca

SEQ ID NO: 158806 - DNA, 19 bp, Homo sapiens
  siRNA target sequence for PAM (NM_015057.1,6015-6033).
cctaatcagtcgacagata

SEQ ID NO: 158807 - DNA, 19 bp, Homo sapiens
  siRNA target sequence for PAM (NM_015057.1,6083-6101).
cagtcactatgctgtcata

SEQ ID NO: 158808 - DNA, 19 bp, Homo sapiens
  siRNA target sequence for PAM (NM_015057.1,6104-6122).
gagtgagcacccgtataaa

SEQ ID NO: 158809 - DNA, 19 bp, Homo sapiens
  siRNA target sequence for PAM (NM_015057.1,6123-6141).
cctgcctgtgtgatgcatt

SEQ ID NO: 158810 - DNA, 19 bp, Homo sapiens
  siRNA target sequence for PAM (NM_015057.1,6124-6142).
ctgcctgtgtgatgcatta

SEQ ID NO: 158811 - DNA, 19 bp, Homo sapiens
  siRNA target sequence for PAM (NM_015057.1,6126-6144).
gcctgtgtgatgcattaca

SEQ ID NO: 158812 - DNA, 19 bp, Homo sapiens
  siRNA target sequence for PAM (NM_015057.1,6167-6185).
gaggtggatgacaatcgaa

SEQ ID NO: 158813 - DNA, 19 bp, Homo sapiens
  siRNA target sequence for PAM (NM_015057.1,6172-6190).
ggatgacaatcgaatttga

SEQ ID NO: 158814 - DNA, 19 bp, Homo sapiens
  siRNA target sequence for PAM (NM_015057.1,6214-6232).
cagaagatgtccttcgttt

SEQ ID NO: 158815 - DNA, 19 bp, Homo sapiens
  siRNA target sequence for PAM (NM_015057.1,6264-6282).
ggatatggaccaaaattga

SEQ ID NO: 158816 - DNA, 19 bp, Homo sapiens
  siRNA target sequence for PAM (NM_015057.1,6342-6360).
gggtggcctactatggttt

SEQ ID NO: 158817 - DNA, 19 bp, Homo sapiens
  siRNA target sequence for PAM (NM_015057.1,6343-6361).
ggtggcctactatggtttt

SEQ ID NO: 158818 - DNA, 19 bp, Homo sapiens
  siRNA target sequence for PAM (NM_015057.1,6451-6469).
gttttgcaattggatatga

SEQ ID NO: 158819 - DNA, 19 bp, Homo sapiens
  siRNA target sequence for PAM (NM_015057.1,6486-6504).
gatgagggagtcatccaat

SEQ ID NO: 158820 - DNA, 19 bp, Homo sapiens
  siRNA target sequence for PAM (NM_015057.1,6563-6581).
cctagcacttcctattggt

SEQ ID NO: 158821 - DNA, 19 bp, Homo sapiens
  siRNA target sequence for PAM (NM_015057.1,6564-6582).
ctagcacttcctattggta

SEQ ID NO: 158822 - DNA, 19 bp, Homo sapiens
  siRNA target sequence for PAM (NM_015057.1,6568-6586).
cacttcctattggtaatga

SEQ ID NO: 158823 - DNA, 19 bp, Homo sapiens
  siRNA target sequence for PAM (NM_015057.1,6570-6588).
cttcctattggtaatgaat

SEQ ID NO: 158824 - DNA, 19 bp, Homo sapiens
  siRNA target sequence for PAM (NM_015057.1,6805-6823).
ggcttcagccagattcata

SEQ ID NO: 158825 - DNA, 19 bp, Homo sapiens
  siRNA target sequence for PAM (NM_015057.1,6806-6824).
gcttcagccagattcatat

SEQ ID NO: 158826 - DNA, 19 bp, Homo sapiens
  siRNA target sequence for PAM (NM_015057.1,6825-6843).
gcggatcctcagaaaacat

SEQ ID NO: 158827 - DNA, 19 bp, Homo sapiens
  siRNA target sequence for PAM (NM_015057.1,6854-6872).
gaataaggatgatattcgt

SEQ ID NO: 158828 - DNA, 19 bp, Homo sapiens
  siRNA target sequence for PAM (NM_015057.1,6880-6898).
ggcctaccaccataactgt

SEQ ID NO: 158829 - DNA, 19 bp, Homo sapiens
  siRNA target sequence for PAM (NM_015057.1,6927-6945).
gtacatgttcccaatatga

SEQ ID NO: 158830 - DNA, 19 bp, Homo sapiens
  siRNA target sequence for PAM (NM_015057.1,6986-7004).
gtctttacaacaagatcaa

SEQ ID NO: 158831 - DNA, 19 bp, Homo sapiens
  siRNA target sequence for PAM (NM_015057.1,7057-7075).
ctaatactgacatgactta

SEQ ID NO: 158832 - DNA, 19 bp, Homo sapiens
  siRNA target sequence for PAM (NM_015057.1,7082-7100).
gctggcatcaccaaagcta

SEQ ID NO: 158833 - DNA, 19 bp, Homo sapiens
  siRNA target sequence for PAM (NM_015057.1,7092-7110).
ccaaagctagatgtttcat

SEQ ID NO: 158834 - DNA, 19 bp, Homo sapiens
  siRNA target sequence for PAM (NM_015057.1,7125-7143).
gtgaaggaagctcgatata

SEQ ID NO: 158835 - DNA, 19 bp, Homo sapiens
  siRNA target sequence for PAM (NM_015057.1,7127-7145).
gaaggaagctcgatatatt

SEQ ID NO: 158836 - DNA, 19 bp, Homo sapiens
  siRNA target sequence for PAM (NM_015057.1,7137-7155).
cgatatattgccataacaa

SEQ ID NO: 158837 - DNA, 19 bp, Homo sapiens
  siRNA target sequence for PAM (NM_015057.1,7180-7198).
catttgaagaactacgttt

SEQ ID NO: 158838 - DNA, 19 bp, Homo sapiens
  siRNA target sequence for PAM (NM_015057.1,7219-7237).
gacccagtgagaatatgct

SEQ ID NO: 158839 - DNA, 19 bp, Homo sapiens
  siRNA target sequence for PAM (NM_015057.1,7235-7253).
gctgatccgtgtcaataat

SEQ ID NO: 158840 - DNA, 19 bp, Homo sapiens
  siRNA target sequence for PAM (NM_015057.1,7238-7256).
gatccgtgtcaataatgat

SEQ ID NO: 158841 - DNA, 19 bp, Homo sapiens
  siRNA target sequence for PAM (NM_015057.1,7294-7312).
gactctacactcttcatgt

SEQ ID NO: 158842 - DNA, 19 bp, Homo sapiens
  siRNA target sequence for PAM (NM_015057.1,7364-7382).
cccaccaaaagggatgata

SEQ ID NO: 158843 - DNA, 19 bp, Homo sapiens
  siRNA target sequence for PAM (NM_015057.1,7393-7411).
ctcagttggtcaaaccaaa

SEQ ID NO: 158844 - DNA, 19 bp, Homo sapiens
  siRNA target sequence for PAM (NM_015057.1,7414-7432).
ctgaacctcagcctaataa

SEQ ID NO: 158845 - DNA, 19 bp, Homo sapiens
  siRNA target sequence for PAM (NM_015057.1,7424-7442).
gcctaataaggttcgaaaa

SEQ ID NO: 158846 - DNA, 19 bp, Homo sapiens
  siRNA target sequence for PAM (NM_015057.1,7425-7443).
cctaataaggttcgaaaat

SEQ ID NO: 158847 - DNA, 19 bp, Homo sapiens
  siRNA target sequence for PAM (NM_015057.1,7426-7444).
ctaataaggttcgaaaatt

SEQ ID NO: 158848 - DNA, 19 bp, Homo sapiens
  siRNA target sequence for PAM (NM_015057.1,7500-7518).
gagcagataggcatagtga

SEQ ID NO: 158849 - DNA, 19 bp, Homo sapiens
  siRNA target sequence for PAM (NM_015057.1,7579-7597).
ggctgaatgatgagacaat

SEQ ID NO: 158850 - DNA, 19 bp, Homo sapiens
  siRNA target sequence for PAM (NM_015057.1,7604-7622).
gtatgtccctaacatgaat

SEQ ID NO: 158851 - DNA, 19 bp, Homo sapiens
  siRNA target sequence for PAM (NM_015057.1,7608-7626).
gtccctaacatgaatggtt

SEQ ID NO: 158852 - DNA, 19 bp, Homo sapiens
  siRNA target sequence for PAM (NM_015057.1,7639-7657).
ggtgcctctcttttaatca

SEQ ID NO: 158853 - DNA, 19 bp, Homo sapiens
  siRNA target sequence for PAM (NM_015057.1,7640-7658).
gtgcctctcttttaatcaa

SEQ ID NO: 158854 - DNA, 19 bp, Homo sapiens
  siRNA target sequence for PAM (NM_015057.1,7643-7661).
cctctcttttaatcaacat

SEQ ID NO: 158855 - DNA, 19 bp, Homo sapiens
  siRNA target sequence for PAM (NM_015057.1,7686-7704).
gttgacgaatctaaaacta

SEQ ID NO: 158856 - DNA, 19 bp, Homo sapiens
  siRNA target sequence for PAM (NM_015057.1,7689-7707).
gacgaatctaaaactaata

SEQ ID NO: 158857 - DNA, 19 bp, Homo sapiens
  siRNA target sequence for PAM (NM_015057.1,7691-7709).
cgaatctaaaactaatact

SEQ ID NO: 158858 - DNA, 19 bp, Homo sapiens
  siRNA target sequence for PAM (NM_015057.1,7861-7879).
gaggtatcccaattggaat

SEQ ID NO: 158859 - DNA, 19 bp, Homo sapiens
  siRNA target sequence for PAM (NM_015057.1,7912-7930).
gagaggtaaccaattctga

SEQ ID NO: 158860 - DNA, 19 bp, Homo sapiens
  siRNA target sequence for PAM (NM_015057.1,7992-8010).
gaggcatggtccttagcta

SEQ ID NO: 158861 - DNA, 19 bp, Homo sapiens
  siRNA target sequence for PAM (NM_015057.1,8099-8117).
ctcagtgcaagcttttaat

SEQ ID NO: 158862 - DNA, 19 bp, Homo sapiens
  siRNA target sequence for PAM (NM_015057.1,8128-8146).
gttgcagtgcccaaggatt

SEQ ID NO: 158863 - DNA, 19 bp, Homo sapiens
  siRNA target sequence for PAM (NM_015057.1,8134-8152).
gtgcccaaggatttgatta

SEQ ID NO: 158864 - DNA, 19 bp, Homo sapiens
  siRNA target sequence for PAM (NM_015057.1,8178-8196).
cgaggaaacatctcaacat

SEQ ID NO: 158865 - DNA, 19 bp, Homo sapiens
  siRNA target sequence for PAM (NM_015057.1,8329-8347).
ctagtgaatccctcatctt

SEQ ID NO: 158866 - DNA, 19 bp, Homo sapiens
  siRNA target sequence for PAM (NM_015057.1,8411-8429).
caccttgcagacattgaaa

SEQ ID NO: 158867 - DNA, 19 bp, Homo sapiens
  siRNA target sequence for PAM (NM_015057.1,8475-8493).
ccaggttctcggttgtcat

SEQ ID NO: 158868 - DNA, 19 bp, Homo sapiens
  siRNA target sequence for PAM (NM_015057.1,8531-8549).
cccatcgggtgctagttct

SEQ ID NO: 158869 - DNA, 19 bp, Homo sapiens
  siRNA target sequence for PAM (NM_015057.1,8558-8576).
ctcctcaccacatgataaa

SEQ ID NO: 158870 - DNA, 19 bp, Homo sapiens
  siRNA target sequence for PAM (NM_015057.1,8596-8614).
ctgctcctgttaagacaaa

SEQ ID NO: 158871 - DNA, 19 bp, Homo sapiens
  siRNA target sequence for PAM (NM_015057.1,8623-8641).
ctcctcgggaacgttctaa

SEQ ID NO: 158872 - DNA, 19 bp, Homo sapiens
  siRNA target sequence for PAM (NM_015057.1,8625-8643).
cctcgggaacgttctaaat

SEQ ID NO: 158873 - DNA, 19 bp, Homo sapiens
  siRNA target sequence for PAM (NM_015057.1,8635-8653).
gttctaaatcagactctta

SEQ ID NO: 158874 - DNA, 19 bp, Homo sapiens
  siRNA target sequence for PAM (NM_015057.1,8667-8685).
gataccctccgcaagaaga

SEQ ID NO: 158875 - DNA, 19 bp, Homo sapiens
  siRNA target sequence for PAM (NM_015057.1,8671-8689).
ccctccgcaagaagaaaat

SEQ ID NO: 158876 - DNA, 19 bp, Homo sapiens
  siRNA target sequence for PAM (NM_015057.1,8717-8735).
gtcaacgtcaccaaaacca

SEQ ID NO: 158877 - DNA, 19 bp, Homo sapiens
  siRNA target sequence for PAM (NM_015057.1,8760-8778).
gattcccctggatctgaaa

SEQ ID NO: 158878 - DNA, 19 bp, Homo sapiens
  siRNA target sequence for PAM (NM_015057.1,8832-8850).
gaagtctgcacctcaagta

SEQ ID NO: 158879 - DNA, 19 bp, Homo sapiens
  siRNA target sequence for PAM (NM_015057.1,8835-8853).
gtctgcacctcaagtactt

SEQ ID NO: 158880 - DNA, 19 bp, Homo sapiens
  siRNA target sequence for PAM (NM_015057.1,8910-8928).
gtggatgaaggttcaaata

SEQ ID NO: 158881 - DNA, 19 bp, Homo sapiens
  siRNA target sequence for PAM (NM_015057.1,8953-8971).
caccactgaaagatgaaca

SEQ ID NO: 158882 - DNA, 19 bp, Homo sapiens
  siRNA target sequence for PAM (NM_015057.1,9001-9019).
gaaaatgtgctaatagaca

SEQ ID NO: 158883 - DNA, 19 bp, Homo sapiens
  siRNA target sequence for PAM (NM_015057.1,9123-9141).
gccagagctgtgtttgctt

SEQ ID NO: 158884 - DNA, 19 bp, Homo sapiens
  siRNA target sequence for PAM (NM_015057.1,9151-9169).
ggcatgaaggcatagtaca

SEQ ID NO: 158885 - DNA, 19 bp, Homo sapiens
  siRNA target sequence for PAM (NM_015057.1,9152-9170).
gcatgaaggcatagtacat

SEQ ID NO: 158886 - DNA, 19 bp, Homo sapiens
  siRNA target sequence for PAM (NM_015057.1,9174-9192).
gcaatggcttgttcttctt

SEQ ID NO: 158887 - DNA, 19 bp, Homo sapiens
  siRNA target sequence for PAM (NM_015057.1,9175-9193).
caatggcttgttcttcttt

SEQ ID NO: 158888 - DNA, 19 bp, Homo sapiens
  siRNA target sequence for PAM (NM_015057.1,9222-9240).
gaacatgctcctataagga

SEQ ID NO: 158889 - DNA, 19 bp, Homo sapiens
  siRNA target sequence for PAM (NM_015057.1,9228-9246).
gctcctataaggagtagtt

SEQ ID NO: 158890 - DNA, 19 bp, Homo sapiens
  siRNA target sequence for PAM (NM_015057.1,9229-9247).
ctcctataaggagtagttt

SEQ ID NO: 158891 - DNA, 19 bp, Homo sapiens
  siRNA target sequence for PAM (NM_015057.1,9231-9249).
cctataaggagtagtttaa

SEQ ID NO: 158892 - DNA, 19 bp, Homo sapiens
  siRNA target sequence for PAM (NM_015057.1,9313-9331).
catctgcactgaatatgtt

SEQ ID NO: 158893 - DNA, 19 bp, Homo sapiens
  siRNA target sequence for PAM (NM_015057.1,9340-9358).
caccccatggaccagatat

SEQ ID NO: 158894 - DNA, 19 bp, Homo sapiens
  siRNA target sequence for PAM (NM_015057.1,9342-9360).
ccccatggaccagatatat

SEQ ID NO: 158895 - DNA, 19 bp, Homo sapiens
  siRNA target sequence for PAM (NM_015057.1,9365-9383).
gatgggtagcatcaacaaa

SEQ ID NO: 158896 - DNA, 19 bp, Homo sapiens
  siRNA target sequence for PAM (NM_015057.1,9386-9404).
caaggtattgtctatgctt

SEQ ID NO: 158897 - DNA, 19 bp, Homo sapiens
  siRNA target sequence for PAM (NM_015057.1,9408-9426).
gaaccacctctgcatgaaa

SEQ ID NO: 158898 - DNA, 19 bp, Homo sapiens
  siRNA target sequence for PAM (NM_015057.1,9445-9463).
ccgagaccacttttgaaat

SEQ ID NO: 158899 - DNA, 19 bp, Homo sapiens
  siRNA target sequence for PAM (NM_015057.1,9459-9477).
gaaatgtccatgcataaca

SEQ ID NO: 158900 - DNA, 19 bp, Homo sapiens
  siRNA target sequence for PAM (NM_015057.1,9501-9519).
cccttaactttacaacatt

SEQ ID NO: 158901 - DNA, 19 bp, Homo sapiens
  siRNA target sequence for PAM (NM_015057.1,9542-9560).
ctctttggctactatcaaa

SEQ ID NO: 158902 - DNA, 19 bp, Homo sapiens
  siRNA target sequence for PAM (NM_015057.1,9595-9613).
gttcctgtgcagttcttaa

SEQ ID NO: 158903 - DNA, 19 bp, Homo sapiens
  siRNA target sequence for PAM (NM_015057.1,9601-9619).
gtgcagttcttaaaaagaa

SEQ ID NO: 158904 - DNA, 19 bp, Homo sapiens
  siRNA target sequence for PAM (NM_015057.1,9684-9702).
gttaggcccaggggtaatt

SEQ ID NO: 158905 - DNA, 19 bp, Homo sapiens
  siRNA target sequence for PAM (NM_015057.1,9766-9784).
gtggggagtcacatccata

SEQ ID NO: 158906 - DNA, 19 bp, Homo sapiens
  siRNA target sequence for PAM (NM_015057.1,9837-9855).
ggtggacaaggttacaata

SEQ ID NO: 158907 - DNA, 19 bp, Homo sapiens
  siRNA target sequence for PAM (NM_015057.1,9841-9859).
gacaaggttacaatagcat

SEQ ID NO: 158908 - DNA, 19 bp, Homo sapiens
  siRNA target sequence for PAM (NM_015057.1,10115-10133).
gagcattctgtgttaccat

SEQ ID NO: 158909 - DNA, 19 bp, Homo sapiens
  siRNA target sequence for PAM (NM_015057.1,10134-10152).
cctgcaaagccattccaat

SEQ ID NO: 158910 - DNA, 19 bp, Homo sapiens
  siRNA target sequence for PAM (NM_015057.1,10225-10243).
cattagctaggcatcatca

SEQ ID NO: 158911 - DNA, 19 bp, Homo sapiens
  siRNA target sequence for PAM (NM_015057.1,10230-10248).
gctaggcatcatcatgaaa

SEQ ID NO: 158912 - DNA, 19 bp, Homo sapiens
  siRNA target sequence for PAM (NM_015057.1,10231-10249).
ctaggcatcatcatgaaaa

SEQ ID NO: 158913 - DNA, 19 bp, Homo sapiens
  siRNA target sequence for PAM (NM_015057.1,10259-10277).
ctatcaagatgacaatcta

SEQ ID NO: 158914 - DNA, 19 bp, Homo sapiens
  siRNA target sequence for PAM (NM_015057.1,10275-10293).
ctattccaggatgaaatga

SEQ ID NO: 158915 - DNA, 19 bp, Homo sapiens
  siRNA target sequence for PAM (NM_015057.1,10280-10298).
ccaggatgaaatgagatat

SEQ ID NO: 158916 - DNA, 19 bp, Homo sapiens
  siRNA target sequence for PAM (NM_015057.1,10283-10301).
ggatgaaatgagatatcta

SEQ ID NO: 158917 - DNA, 19 bp, Homo sapiens
  siRNA target sequence for PAM (NM_015057.1,10292-10310).
gagatatctacgttcaaca

SEQ ID NO: 158918 - DNA, 19 bp, Homo sapiens
  siRNA target sequence for PAM (NM_015057.1,10312-10330).
ctgtacctgccccgtatat

SEQ ID NO: 158919 - DNA, 19 bp, Homo sapiens
  siRNA target sequence for PAM (NM_015057.1,10314-10332).
gtacctgccccgtatatat

SEQ ID NO: 158920 - DNA, 19 bp, Homo sapiens
  siRNA target sequence for PAM (NM_015057.1,10318-10336).
ctgccccgtatatatcagt

SEQ ID NO: 158921 - DNA, 19 bp, Homo sapiens
  siRNA target sequence for PAM (NM_015057.1,10320-10338).
gccccgtatatatcagtaa

SEQ ID NO: 158922 - DNA, 19 bp, Homo sapiens
  siRNA target sequence for PAM (NM_015057.1,10322-10340).
cccgtatatatcagtaact

SEQ ID NO: 158923 - DNA, 19 bp, Homo sapiens
  siRNA target sequence for PAM (NM_015057.1,10342-10360).
ctgatgcaagtcctaatgt

SEQ ID NO: 158924 - DNA, 19 bp, Homo sapiens
  siRNA target sequence for PAM (NM_015057.1,10344-10362).
gatgcaagtcctaatgtat

SEQ ID NO: 158925 - DNA, 19 bp, Homo sapiens
  siRNA target sequence for PAM (NM_015057.1,10390-10408).
ctatgccaccaagtttaga

SEQ ID NO: 158926 - DNA, 19 bp, Homo sapiens
  siRNA target sequence for PAM (NM_015057.1,10412-10430).
cagtcccataactgatact

SEQ ID NO: 158927 - DNA, 19 bp, Homo sapiens
  siRNA target sequence for PAM (NM_015057.1,10414-10432).
gtcccataactgatactga

SEQ ID NO: 158928 - DNA, 19 bp, Homo sapiens
  siRNA target sequence for PAM (NM_015057.1,10423-10441).
ctgatactgatcttgcaaa

SEQ ID NO: 158929 - DNA, 19 bp, Homo sapiens
  siRNA target sequence for PAM (NM_015057.1,10473-10491).
gttgcttccgaatatgata

SEQ ID NO: 158930 - DNA, 19 bp, Homo sapiens
  siRNA target sequence for PAM (NM_015057.1,10477-10495).
cttccgaatatgataaaca

SEQ ID NO: 158931 - DNA, 19 bp, Homo sapiens
  siRNA target sequence for PAM (NM_015057.1,10480-10498).
ccgaatatgataaacaaca

SEQ ID NO: 158932 - DNA, 19 bp, Homo sapiens
  siRNA target sequence for PAM (NM_015057.1,10510-10528).
ctgcacgagttaaagctat

SEQ ID NO: 158933 - DNA, 19 bp, Homo sapiens
  siRNA target sequence for PAM (NM_015057.1,10515-10533).
cgagttaaagctattccta

SEQ ID NO: 158934 - DNA, 19 bp, Homo sapiens
  siRNA target sequence for PAM (NM_015057.1,10596-10614).
gagctttctcggctaatct

SEQ ID NO: 158935 - DNA, 19 bp, Homo sapiens
  siRNA target sequence for PAM (NM_015057.1,10598-10616).
gctttctcggctaatctca

SEQ ID NO: 158936 - DNA, 19 bp, Homo sapiens
  siRNA target sequence for PAM (NM_015057.1,10737-10755).
gcttgtcgagtttttgcta

SEQ ID NO: 158937 - DNA, 19 bp, Homo sapiens
  siRNA target sequence for PAM (NM_015057.1,10738-10756).
cttgtcgagtttttgctat

SEQ ID NO: 158938 - DNA, 19 bp, Homo sapiens
  siRNA target sequence for PAM (NM_015057.1,10752-10770).
gctatggaggctttcaact

SEQ ID NO: 158939 - DNA, 19 bp, Homo sapiens
  siRNA target sequence for PAM (NM_015057.1,10771-10789).
ggcttctgtgtaatgtcat

SEQ ID NO: 158940 - DNA, 19 bp, Homo sapiens
  siRNA target sequence for PAM (NM_015057.1,10938-10956).
ccactctcagacatagtga

SEQ ID NO: 158941 - DNA, 19 bp, Homo sapiens
  siRNA target sequence for PAM (NM_015057.1,10939-10957).
cactctcagacatagtgat

SEQ ID NO: 158942 - DNA, 19 bp, Homo sapiens
  siRNA target sequence for PAM (NM_015057.1,11034-11052).
ctccccagcggcagttcat

SEQ ID NO: 158943 - DNA, 19 bp, Homo sapiens
  siRNA target sequence for PAM (NM_015057.1,11036-11054).
ccccagcggcagttcatta

SEQ ID NO: 158944 - DNA, 19 bp, Homo sapiens
  siRNA target sequence for PAM (NM_015057.1,11038-11056).
ccagcggcagttcattaca

SEQ ID NO: 158945 - DNA, 19 bp, Homo sapiens
  siRNA target sequence for PAM (NM_015057.1,11122-11140).
gcaacgtctttcatcacat

SEQ ID NO: 158946 - DNA, 19 bp, Homo sapiens
  siRNA target sequence for PAM (NM_015057.1,11144-11162).
caatattttgtcaaagtca

SEQ ID NO: 158947 - DNA, 19 bp, Homo sapiens
  siRNA target sequence for PAM (NM_015057.1,11170-11188).
gcgatagtgaagagagttt

SEQ ID NO: 158948 - DNA, 19 bp, Homo sapiens
  siRNA target sequence for PAM (NM_015057.1,11171-11189).
cgatagtgaagagagtttt

SEQ ID NO: 158949 - DNA, 19 bp, Homo sapiens
  siRNA target sequence for PAM (NM_015057.1,11183-11201).
gagttttagcatcagtata

SEQ ID NO: 158950 - DNA, 19 bp, Homo sapiens
  siRNA target sequence for PAM (NM_015057.1,11222-11240).
gagtcaggaattatgcata

SEQ ID NO: 158951 - DNA, 19 bp, Homo sapiens
  siRNA target sequence for PAM (NM_015057.1,11226-11244).
caggaattatgcatagtaa

SEQ ID NO: 158952 - DNA, 19 bp, Homo sapiens
  siRNA target sequence for PAM (NM_015057.1,11255-11273).
ggacttaaccagcattgtt

SEQ ID NO: 158953 - DNA, 19 bp, Homo sapiens
  siRNA target sequence for PAM (NM_015057.1,11298-11316).
gccatgattggcagtttga

SEQ ID NO: 158954 - DNA, 19 bp, Homo sapiens
  siRNA target sequence for PAM (NM_015057.1,11432-11450).
ggacaattcccgagatctt

SEQ ID NO: 158955 - DNA, 19 bp, Homo sapiens
  siRNA target sequence for PAM (NM_015057.1,11441-11459).
ccgagatcttgggaataaa

SEQ ID NO: 158956 - DNA, 19 bp, Homo sapiens
  siRNA target sequence for PAM (NM_015057.1,11540-11558).
cattggctgggtaacaagt

SEQ ID NO: 158957 - DNA, 19 bp, Homo sapiens
  siRNA target sequence for PAM (NM_015057.1,11565-11583).
ccaggaggggataatcaca

SEQ ID NO: 158958 - DNA, 19 bp, Homo sapiens
  siRNA target sequence for PAM (NM_015057.1,11566-11584).
caggaggggataatcacat

SEQ ID NO: 158959 - DNA, 19 bp, Homo sapiens
  siRNA target sequence for PAM (NM_015057.1,11569-11587).
gaggggataatcacatcat

SEQ ID NO: 158960 - DNA, 19 bp, Homo sapiens
  siRNA target sequence for PAM (NM_015057.1,11572-11590).
gggataatcacatcataaa

SEQ ID NO: 158961 - DNA, 19 bp, Homo sapiens
  siRNA target sequence for PAM (NM_015057.1,11621-11639).
gagagttcgacaagtcaaa

SEQ ID NO: 158962 - DNA, 19 bp, Homo sapiens
  siRNA target sequence for PAM (NM_015057.1,11623-11641).
gagttcgacaagtcaaagt

SEQ ID NO: 158963 - DNA, 19 bp, Homo sapiens
  siRNA target sequence for PAM (NM_015057.1,11722-11740).
ctgagactctgcgagtatt

SEQ ID NO: 158964 - DNA, 19 bp, Homo sapiens
  siRNA target sequence for PAM (NM_015057.1,11726-11744).
gactctgcgagtattcaga

SEQ ID NO: 158965 - DNA, 19 bp, Homo sapiens
  siRNA target sequence for PAM (NM_015057.1,11732-11750).
gcgagtattcagactgatt

SEQ ID NO: 158966 - DNA, 19 bp, Homo sapiens
  siRNA target sequence for PAM (NM_015057.1,11733-11751).
cgagtattcagactgatta

SEQ ID NO: 158967 - DNA, 19 bp, Homo sapiens
  siRNA target sequence for PAM (NM_015057.1,11736-11754).
gtattcagactgattacgt

SEQ ID NO: 158968 - DNA, 19 bp, Homo sapiens
  siRNA target sequence for PAM (NM_015057.1,11745-11763).
ctgattacgtctcaagtat

SEQ ID NO: 158969 - DNA, 19 bp, Homo sapiens
  siRNA target sequence for PAM (NM_015057.1,11747-11765).
gattacgtctcaagtattt

SEQ ID NO: 158970 - DNA, 19 bp, Homo sapiens
  siRNA target sequence for PAM (NM_015057.1,11911-11929).
ggagtaagctgactaactt

SEQ ID NO: 158971 - DNA, 19 bp, Homo sapiens
  siRNA target sequence for PAM (NM_015057.1,11912-11930).
gagtaagctgactaactta

SEQ ID NO: 158972 - DNA, 19 bp, Homo sapiens
  siRNA target sequence for PAM (NM_015057.1,11914-11932).
gtaagctgactaacttaca

SEQ ID NO: 158973 - DNA, 19 bp, Homo sapiens
  siRNA target sequence for PAM (NM_015057.1,11947-11965).
ctcatattgtccaagctat

SEQ ID NO: 158974 - DNA, 19 bp, Homo sapiens
  siRNA target sequence for PAM (NM_015057.1,12202-12220).
gacaggtaacctctttact

SEQ ID NO: 158975 - DNA, 19 bp, Homo sapiens
  siRNA target sequence for PAM (NM_015057.1,12204-12222).
caggtaacctctttactaa

SEQ ID NO: 158976 - DNA, 19 bp, Homo sapiens
  siRNA target sequence for PAM (NM_015057.1,12206-12224).
ggtaacctctttactaaga

SEQ ID NO: 158977 - DNA, 19 bp, Homo sapiens
  siRNA target sequence for PAM (NM_015057.1,12207-12225).
gtaacctctttactaagaa

SEQ ID NO: 158978 - DNA, 19 bp, Homo sapiens
  siRNA target sequence for PAM (NM_015057.1,12214-12232).
ctttactaagaagagtttt

SEQ ID NO: 158979 - DNA, 19 bp, Homo sapiens
  siRNA target sequence for PAM (NM_015057.1,12282-12300).
ctccccccagcagatatca

SEQ ID NO: 158980 - DNA, 19 bp, Homo sapiens
  siRNA target sequence for PAM (NM_015057.1,12288-12306).
ccagcagatatcagtgata

SEQ ID NO: 158981 - DNA, 19 bp, Homo sapiens
  siRNA target sequence for PAM (NM_015057.1,12443-12461).
gggcaaaggagttacaaca

SEQ ID NO: 158982 - DNA, 19 bp, Homo sapiens
  siRNA target sequence for PAM (NM_015057.1,12451-12469).
gagttacaacagttactct

SEQ ID NO: 158983 - DNA, 19 bp, Homo sapiens
  siRNA target sequence for PAM (NM_015057.1,12468-12486).
cttccgatgattttcaatt

SEQ ID NO: 158984 - DNA, 19 bp, Homo sapiens
  siRNA target sequence for PAM (NM_015057.1,12471-12489).
ccgatgattttcaattcca

SEQ ID NO: 158985 - DNA, 19 bp, Homo sapiens
  siRNA target sequence for PAM (NM_015057.1,12497-12515).
ccgacgaggtgaaagtcat

SEQ ID NO: 158986 - DNA, 19 bp, Homo sapiens
  siRNA target sequence for PAM (NM_015057.1,12498-12516).
cgacgaggtgaaagtcatt

SEQ ID NO: 158987 - DNA, 19 bp, Homo sapiens
  siRNA target sequence for PAM (NM_015057.1,12604-12622).
cttggtcccgagtgacaaa

SEQ ID NO: 158988 - DNA, 19 bp, Homo sapiens
  siRNA target sequence for PAM (NM_015057.1,12607-12625).
ggtcccgagtgacaaaaaa

SEQ ID NO: 158989 - DNA, 19 bp, Homo sapiens
  siRNA target sequence for PAM (NM_015057.1,12608-12626).
gtcccgagtgacaaaaaat

SEQ ID NO: 158990 - DNA, 19 bp, Homo sapiens
  siRNA target sequence for PAM (NM_015057.1,12612-12630).
cgagtgacaaaaaatgcta

SEQ ID NO: 158991 - DNA, 19 bp, Homo sapiens
  siRNA target sequence for PAM (NM_015057.1,12681-12699).
ccagtgagatgtattgcaa

SEQ ID NO: 158992 - DNA, 19 bp, Homo sapiens
  siRNA target sequence for PAM (NM_015057.1,12686-12704).
gagatgtattgcaacaact

SEQ ID NO: 158993 - DNA, 19 bp, Homo sapiens
  siRNA target sequence for PAM (NM_015057.1,12718-12736).
ctctcgcatccctatgtgt

SEQ ID NO: 158994 - DNA, 19 bp, Homo sapiens
  siRNA target sequence for PAM (NM_015057.1,12722-12740).
cgcatccctatgtgttctt

SEQ ID NO: 158995 - DNA, 19 bp, Homo sapiens
  siRNA target sequence for PAM (NM_015057.1,12809-12827).
gcctatgtgtgataaccat

SEQ ID NO: 158996 - DNA, 19 bp, Homo sapiens
  siRNA target sequence for PAM (NM_015057.1,12815-12833).
gtgtgataaccatgatgat

SEQ ID NO: 158997 - DNA, 19 bp, Homo sapiens
  siRNA target sequence for PAM (NM_015057.1,12835-12853).
gtgaaactgcagcaatcat

SEQ ID NO: 158998 - DNA, 19 bp, Homo sapiens
  siRNA target sequence for PAM (NM_015057.1,12843-12861).
gcagcaatcattttatgca

SEQ ID NO: 158999 - DNA, 19 bp, Homo sapiens
  siRNA target sequence for PAM (NM_015057.1,12905-12923).
ccttcatcgaagaaccaaa

SEQ ID NO: 159000 - DNA, 19 bp, Homo sapiens
  siRNA target sequence for PAM (NM_015057.1,12990-13008).
ggtagaaccaaattgttct

SEQ ID NO: 159001 - DNA, 19 bp, Homo sapiens
  siRNA target sequence for PAM (NM_015057.1,13020-13038).
ctggcagattctaaaacaa

SEQ ID NO: 159002 - DNA, 19 bp, Homo sapiens
  siRNA target sequence for PAM (NM_015057.1,13118-13136).
caggagtggaacagagtta

SEQ ID NO: 159003 - DNA, 19 bp, Homo sapiens
  siRNA target sequence for PAM (NM_015057.1,13171-13189).
gccaggaatacgctaagat

SEQ ID NO: 159004 - DNA, 19 bp, Homo sapiens
  siRNA target sequence for PAM (NM_015057.1,13182-13200).
gctaagatagcctgtagta

SEQ ID NO: 159005 - DNA, 19 bp, Homo sapiens
  siRNA target sequence for PAM (NM_015057.1,13183-13201).
ctaagatagcctgtagtaa

SEQ ID NO: 159006 - DNA, 19 bp, Homo sapiens
  siRNA target sequence for PAM (NM_015057.1,13307-13325).
cgatgacatgtgcatgata

SEQ ID NO: 159007 - DNA, 19 bp, Homo sapiens
  siRNA target sequence for PAM (NM_015057.1,13308-13326).
gatgacatgtgcatgatat

SEQ ID NO: 159008 - DNA, 19 bp, Homo sapiens
  siRNA target sequence for PAM (NM_015057.1,13356-13374).
gccattcagctggattgta

SEQ ID NO: 159009 - DNA, 19 bp, Homo sapiens
  siRNA target sequence for PAM (NM_015057.1,13364-13382).
gctggattgtagtcacata

SEQ ID NO: 159010 - DNA, 19 bp, Homo sapiens
  siRNA target sequence for PAM (NM_015057.1,13377-13395).
cacatattccacttacagt

SEQ ID NO: 159011 - DNA, 19 bp, Homo sapiens
  siRNA target sequence for PAM (NM_015057.1,13394-13412).
gtgctgtcggcgagtatta

SEQ ID NO: 159012 - DNA, 19 bp, Homo sapiens
  siRNA target sequence for PAM (NM_015057.1,13396-13414).
gctgtcggcgagtattaga

SEQ ID NO: 159013 - DNA, 19 bp, Homo sapiens
  siRNA target sequence for PAM (NM_015057.1,13397-13415).
ctgtcggcgagtattagaa

SEQ ID NO: 159014 - DNA, 19 bp, Homo sapiens
  siRNA target sequence for PAM (NM_015057.1,13399-13417).
gtcggcgagtattagaaaa

SEQ ID NO: 159015 - DNA, 19 bp, Homo sapiens
  siRNA target sequence for PAM (NM_015057.1,13404-13422).
cgagtattagaaaatcgat

SEQ ID NO: 159016 - DNA, 19 bp, Homo sapiens
  siRNA target sequence for PAM (NM_015057.1,13435-13453).
ggataacatttggatttat

SEQ ID NO: 159017 - DNA, 19 bp, Homo sapiens
  siRNA target sequence for PAM (NM_015057.1,13459-13477).
gtcccatttgcaagaacaa

SEQ ID NO: 159018 - DNA, 19 bp, Homo sapiens
  siRNA target sequence for PAM (NM_015057.1,13462-13480).
ccatttgcaagaacaaaat

SEQ ID NO: 159019 - DNA, 19 bp, Homo sapiens
  siRNA target sequence for PAM (NM_015057.1,13463-13481).
catttgcaagaacaaaatt

SEQ ID NO: 159020 - DNA, 19 bp, Homo sapiens
  siRNA target sequence for PAM (NM_015057.1,13500-13518).
gacctacttgatccaataa

SEQ ID NO: 159021 - DNA, 19 bp, Homo sapiens
  siRNA target sequence for PAM (NM_015057.1,13548-13566).
gccttaatgagattggaat

SEQ ID NO: 159022 - DNA, 19 bp, Homo sapiens
  siRNA target sequence for PAM (NM_015057.1,13600-13618).
ctcctggtgtgaggtttta

SEQ ID NO: 159023 - DNA, 19 bp, Homo sapiens
  siRNA target sequence for PAM (NM_015057.1,13602-13620).
cctggtgtgaggttttata

SEQ ID NO: 159024 - DNA, 19 bp, Homo sapiens
  siRNA target sequence for PAM (NM_015057.1,13623-13641).
gacccagctggctatgcaa

SEQ ID NO: 159025 - DNA, 19 bp, Homo sapiens
  siRNA target sequence for PAM (NM_015057.1,13627-13645).
cagctggctatgcaatgaa

SEQ ID NO: 159026 - DNA, 19 bp, Homo sapiens
  siRNA target sequence for PAM (NM_015057.1,13634-13652).
ctatgcaatgaatagatat

SEQ ID NO: 159027 - DNA, 19 bp, Homo sapiens
  siRNA target sequence for PAM (NM_015057.1,13720-13738).
ctggacggggagatgatta

SEQ ID NO: 159028 - DNA, 19 bp, Homo sapiens
  siRNA target sequence for PAM (NM_015057.1,13723-13741).
gacggggagatgattatga

SEQ ID NO: 159029 - DNA, 19 bp, Homo sapiens
  siRNA target sequence for PAM (NM_015057.1,13806-13824).
ggcacagactttttggaat

SEQ ID NO: 159030 - DNA, 19 bp, Homo sapiens
  siRNA target sequence for PAM (NM_015057.1,13807-13825).
gcacagactttttggaata

SEQ ID NO: 159031 - DNA, 19 bp, Homo sapiens
  siRNA target sequence for PAM (NM_015057.1,13885-13903).
gtaatgcttgtcatgatga

SEQ ID NO: 159032 - DNA, 19 bp, Homo sapiens
  siRNA target sequence for PAM (NM_015057.1,13912-13930).
gaatgactagcattcctaa

SEQ ID NO: 159033 - DNA, 19 bp, Homo sapiens
  siRNA target sequence for PAPPA (NM_002581.3,807-825).
caaatgttcttatatctca

SEQ ID NO: 159034 - DNA, 19 bp, Homo sapiens
  siRNA target sequence for PAPPA (NM_002581.3,880-898).
gacccacgctactttttct

SEQ ID NO: 159035 - DNA, 19 bp, Homo sapiens
  siRNA target sequence for PAPPA (NM_002581.3,921-939).
gcaagtgaccaccatcaat

SEQ ID NO: 159036 - DNA, 19 bp, Homo sapiens
  siRNA target sequence for PAPPA (NM_002581.3,959-977).
caggccagtgggtatacct

SEQ ID NO: 159037 - DNA, 19 bp, Homo sapiens
  siRNA target sequence for PAPPA (NM_002581.3,1048-1066).
caagtgggtggcatattca

SEQ ID NO: 159038 - DNA, 19 bp, Homo sapiens
  siRNA target sequence for PAPPA (NM_002581.3,1083-1101).
gtgcaaagtgctcatgtta

SEQ ID NO: 159039 - DNA, 19 bp, Homo sapiens
  siRNA target sequence for PAPPA (NM_002581.3,1103-1121).
ggggcagtgccctgaatca

SEQ ID NO: 159040 - DNA, 19 bp, Homo sapiens
  siRNA target sequence for PAPPA (NM_002581.3,1105-1123).
ggcagtgccctgaatcaca

SEQ ID NO: 159041 - DNA, 19 bp, Homo sapiens
  siRNA target sequence for PAPPA (NM_002581.3,1169-1187).
ggactcagcgggagatact

SEQ ID NO: 159042 - DNA, 19 bp, Homo sapiens
  siRNA target sequence for PAPPA (NM_002581.3,1357-1375).
ctgtgcggacagacattgt

SEQ ID NO: 159043 - DNA, 19 bp, Homo sapiens
  siRNA target sequence for PAPPA (NM_002581.3,1449-1467).
cgtggtcaacctctatgaa

SEQ ID NO: 159044 - DNA, 19 bp, Homo sapiens
  siRNA target sequence for PAPPA (NM_002581.3,1755-1773).
catggactgcaactatgaa

SEQ ID NO: 159045 - DNA, 19 bp, Homo sapiens
  siRNA target sequence for PAPPA (NM_002581.3,1767-1785).
ctatgaacggttcaacttt

SEQ ID NO: 159046 - DNA, 19 bp, Homo sapiens
  siRNA target sequence for PAPPA (NM_002581.3,1807-1825).
cctgaaatcaccaatgtca

SEQ ID NO: 159047 - DNA, 19 bp, Homo sapiens
  siRNA target sequence for PAPPA (NM_002581.3,1881-1899).
gctgaagaacattcttaaa

SEQ ID NO: 159048 - DNA, 19 bp, Homo sapiens
  siRNA target sequence for PAPPA (NM_002581.3,1906-1924).
ggatcaacacatctcaata

SEQ ID NO: 159049 - DNA, 19 bp, Homo sapiens
  siRNA target sequence for PAPPA (NM_002581.3,1907-1925).
gatcaacacatctcaatat

SEQ ID NO: 159050 - DNA, 19 bp, Homo sapiens
  siRNA target sequence for PAPPA (NM_002581.3,1918-1936).
ctcaatattttctttgcaa

SEQ ID NO: 159051 - DNA, 19 bp, Homo sapiens
  siRNA target sequence for PAPPA (NM_002581.3,2249-2267).
gctttcatagcttcttcaa

SEQ ID NO: 159052 - DNA, 19 bp, Homo sapiens
  siRNA target sequence for PAPPA (NM_002581.3,2467-2485).
cctatagatggccatttct

SEQ ID NO: 159053 - DNA, 19 bp, Homo sapiens
  siRNA target sequence for PAPPA (NM_002581.3,2468-2486).
ctatagatggccatttctt

SEQ ID NO: 159054 - DNA, 19 bp, Homo sapiens
  siRNA target sequence for PAPPA (NM_002581.3,2626-2644).
gttgaacagccctgtaagt

SEQ ID NO: 159055 - DNA, 19 bp, Homo sapiens
  siRNA target sequence for PAPPA (NM_002581.3,2653-2671).
cgcacctggagcccaaatt

SEQ ID NO: 159056 - DNA, 19 bp, Homo sapiens
  siRNA target sequence for PAPPA (NM_002581.3,2805-2823).
ctctagtggagctgtcaat

SEQ ID NO: 159057 - DNA, 19 bp, Homo sapiens
  siRNA target sequence for PAPPA (NM_002581.3,2807-2825).
ctagtggagctgtcaatga

SEQ ID NO: 159058 - DNA, 19 bp, Homo sapiens
  siRNA target sequence for PAPPA (NM_002581.3,2818-2836).
gtcaatgacatcaaactgt

SEQ ID NO: 159059 - DNA, 19 bp, Homo sapiens
  siRNA target sequence for PAPPA (NM_002581.3,2840-2858).
ctgtcagtgggaagaacat

SEQ ID NO: 159060 - DNA, 19 bp, Homo sapiens
  siRNA target sequence for PAPPA (NM_002581.3,3008-3026).
cactctgtctacagtgtaa

SEQ ID NO: 159061 - DNA, 19 bp, Homo sapiens
  siRNA target sequence for PAPPA (NM_002581.3,3021-3039).
gtgtaagcccctgaagtat

SEQ ID NO: 159062 - DNA, 19 bp, Homo sapiens
  siRNA target sequence for PAPPA (NM_002581.3,3023-3041).
gtaagcccctgaagtataa

SEQ ID NO: 159063 - DNA, 19 bp, Homo sapiens
  siRNA target sequence for PAPPA (NM_002581.3,3084-3102).
cctacatctcaataggaaa

SEQ ID NO: 159064 - DNA, 19 bp, Homo sapiens
  siRNA target sequence for PAPPA (NM_002581.3,3085-3103).
ctacatctcaataggaaat

SEQ ID NO: 159065 - DNA, 19 bp, Homo sapiens
  siRNA target sequence for PAPPA (NM_002581.3,3105-3123).
cgtagacatggatctaaat

SEQ ID NO: 159066 - DNA, 19 bp, Homo sapiens
  siRNA target sequence for PAPPA (NM_002581.3,3139-3157).
cagtattgggtcataacta

SEQ ID NO: 159067 - DNA, 19 bp, Homo sapiens
  siRNA target sequence for PAPPA (NM_002581.3,3185-3203).
cacctgctgtcacatacat

SEQ ID NO: 159068 - DNA, 19 bp, Homo sapiens
  siRNA target sequence for PAPPA (NM_002581.3,3223-3241).
ggcgatggcattatacaaa

SEQ ID NO: 159069 - DNA, 19 bp, Homo sapiens
  siRNA target sequence for PAPPA (NM_002581.3,3224-3242).
gcgatggcattatacaaaa

SEQ ID NO: 159070 - DNA, 19 bp, Homo sapiens
  siRNA target sequence for PAPPA (NM_002581.3,3225-3243).
cgatggcattatacaaaaa

SEQ ID NO: 159071 - DNA, 19 bp, Homo sapiens
  siRNA target sequence for PAPPA (NM_002581.3,3256-3274).
caatgcgacgacatgaata

SEQ ID NO: 159072 - DNA, 19 bp, Homo sapiens
  siRNA target sequence for PAPPA (NM_002581.3,3264-3282).
cgacatgaataagatcaat

SEQ ID NO: 159073 - DNA, 19 bp, Homo sapiens
  siRNA target sequence for PAPPA (NM_002581.3,3297-3315).
ccttttctgccgacaagaa

SEQ ID NO: 159074 - DNA, 19 bp, Homo sapiens
  siRNA target sequence for PAPPA (NM_002581.3,3313-3331).
gaagtctccttcaattgta

SEQ ID NO: 159075 - DNA, 19 bp, Homo sapiens
  siRNA target sequence for PAPPA (NM_002581.3,3320-3338).
ccttcaattgtattgatga

SEQ ID NO: 159076 - DNA, 19 bp, Homo sapiens
  siRNA target sequence for PAPPA (NM_002581.3,3441-3459).
ggatcagtgggcatccaat

SEQ ID NO: 159077 - DNA, 19 bp, Homo sapiens
  siRNA target sequence for PAPPA (NM_002581.3,3450-3468).
ggcatccaatgcttcagta

SEQ ID NO: 159078 - DNA, 19 bp, Homo sapiens
  siRNA target sequence for PAPPA (NM_002581.3,3451-3469).
gcatccaatgcttcagtat

SEQ ID NO: 159079 - DNA, 19 bp, Homo sapiens
  siRNA target sequence for PAPPA (NM_002581.3,3644-3662).
cgtatttttctcaaccaat

SEQ ID NO: 159080 - DNA, 19 bp, Homo sapiens
  siRNA target sequence for PAPPA (NM_002581.3,3690-3708).
ggtgacggatgggacatat

SEQ ID NO: 159081 - DNA, 19 bp, Homo sapiens
  siRNA target sequence for PAPPA (NM_002581.3,3691-3709).
gtgacggatgggacatatt

SEQ ID NO: 159082 - DNA, 19 bp, Homo sapiens
  siRNA target sequence for PAPPA (NM_002581.3,3693-3711).
gacggatgggacatattat

SEQ ID NO: 159083 - DNA, 19 bp, Homo sapiens
  siRNA target sequence for PAPPA (NM_002581.3,3915-3933).
ccgttccttcgacaacttt

SEQ ID NO: 159084 - DNA, 19 bp, Homo sapiens
  siRNA target sequence for PAPPA (NM_002581.3,3917-3935).
gttccttcgacaactttga

SEQ ID NO: 159085 - DNA, 19 bp, Homo sapiens
  siRNA target sequence for PAPPA (NM_002581.3,4002-4020).
cttcgcatgtgagaaaact

SEQ ID NO: 159086 - DNA, 19 bp, Homo sapiens
  siRNA target sequence for PAPPA (NM_002581.3,4041-4059).
ggagaatgcttctctcaat

SEQ ID NO: 159087 - DNA, 19 bp, Homo sapiens
  siRNA target sequence for PAPPA (NM_002581.3,4042-4060).
gagaatgcttctctcaatt

SEQ ID NO: 159088 - DNA, 19 bp, Homo sapiens
  siRNA target sequence for PAPPA (NM_002581.3,4136-4154).
gggatgatgagctgatcaa

SEQ ID NO: 159089 - DNA, 19 bp, Homo sapiens
  siRNA target sequence for PAPPA (NM_002581.3,4190-4208).
cagagggcaagtggaataa

SEQ ID NO: 159090 - DNA, 19 bp, Homo sapiens
  siRNA target sequence for PAPPA (NM_002581.3,4244-4262).
cagatcaccatcaagtcta

SEQ ID NO: 159091 - DNA, 19 bp, Homo sapiens
  siRNA target sequence for PAPPA (NM_002581.3,4322-4340).
gccgtcaccctgcacaatt

SEQ ID NO: 159092 - DNA, 19 bp, Homo sapiens
  siRNA target sequence for PAPPA (NM_002581.3,4627-4645).
gacccacctccaccaaaat

SEQ ID NO: 159093 - DNA, 19 bp, Homo sapiens
  siRNA target sequence for PAPPA (NM_002581.3,4651-4669).
gggctctaccagtgtacta

SEQ ID NO: 159094 - DNA, 19 bp, Homo sapiens
  siRNA target sequence for PAPPA (NM_002581.3,4653-4671).
gctctaccagtgtactaat

SEQ ID NO: 159095 - DNA, 19 bp, Homo sapiens
  siRNA target sequence for PAPPA (NM_002581.3,4667-4685).
ctaatggcttccagttcaa

SEQ ID NO: 159096 - DNA, 19 bp, Homo sapiens
  siRNA target sequence for PAPPA (NM_002581.3,4730-4748).
gacttgggagcaatgtcat

SEQ ID NO: 159097 - DNA, 19 bp, Homo sapiens
  siRNA target sequence for PAPPA (NM_002581.3,4808-4826).
gccagtgctcggttccaaa

SEQ ID NO: 159098 - DNA, 19 bp, Homo sapiens
  siRNA target sequence for PAPPA (NM_002581.3,5021-5039).
ctcaccctgctctgattca

SEQ ID NO: 159099 - DNA, 19 bp, Homo sapiens
  siRNA target sequence for PAPPA (NM_002581.3,5064-5082).
catgggagacaattattgt

SEQ ID NO: 159100 - DNA, 19 bp, Homo sapiens
  siRNA target sequence for PAPPA (NM_002581.3,5097-5115).
ccgagccttttgcaactat

SEQ ID NO: 159101 - DNA, 19 bp, Homo sapiens
  siRNA target sequence for PAPPA (NM_002581.3,5099-5117).
gagccttttgcaactatga

SEQ ID NO: 159102 - DNA, 19 bp, Homo sapiens
  siRNA target sequence for PEX10 (NM_002617.3,113-131).
cgcagaaggacgagtacta

SEQ ID NO: 159103 - DNA, 19 bp, Homo sapiens
  siRNA target sequence for PLEKHF1 (NM_024310.2,584-602).
ggcgtgctgaccaaagagt

SEQ ID NO: 159104 - DNA, 19 bp, Homo sapiens
  siRNA target sequence for PLEKHF1 (NM_024310.2,816-834).
cggagcgccaggaatggat

SEQ ID NO: 159105 - DNA, 19 bp, Homo sapiens
  siRNA target sequence for PLEKHF1 (NM_024310.2,817-835).
ggagcgccaggaatggatt

SEQ ID NO: 159106 - DNA, 19 bp, Homo sapiens
  siRNA target sequence for PLEKHF1 (NM_024310.2,818-836).
gagcgccaggaatggatta

SEQ ID NO: 159107 - DNA, 19 bp, Homo sapiens
  siRNA target sequence for PLEKHF1 (NM_024310.2,1251-1269).
ccagcagcgtggagttcta

SEQ ID NO: 159108 - DNA, 19 bp, Homo sapiens
  siRNA target sequence for PLEKHF2 (NM_024613.2,253-271).
ggatcgcttggcaaacagt

SEQ ID NO: 159109 - DNA, 19 bp, Homo sapiens
  siRNA target sequence for PLEKHF2 (NM_024613.2,288-306).
gtataagtatagtggaaaa

SEQ ID NO: 159110 - DNA, 19 bp, Homo sapiens
  siRNA target sequence for PLEKHF2 (NM_024613.2,320-338).
gctggtcaacctttaacta

SEQ ID NO: 159111 - DNA, 19 bp, Homo sapiens
  siRNA target sequence for PLEKHF2 (NM_024613.2,321-339).
ctggtcaacctttaactat

SEQ ID NO: 159112 - DNA, 19 bp, Homo sapiens
  siRNA target sequence for PLEKHF2 (NM_024613.2,359-377).
ggagaaggagtattgacta

SEQ ID NO: 159113 - DNA, 19 bp, Homo sapiens
  siRNA target sequence for PLEKHF2 (NM_024613.2,360-378).
gagaaggagtattgactaa

SEQ ID NO: 159114 - DNA, 19 bp, Homo sapiens
  siRNA target sequence for PLEKHF2 (NM_024613.2,362-380).
gaaggagtattgactaagt

SEQ ID NO: 159115 - DNA, 19 bp, Homo sapiens
  siRNA target sequence for PLEKHF2 (NM_024613.2,365-383).
ggagtattgactaagttgt

SEQ ID NO: 159116 - DNA, 19 bp, Homo sapiens
  siRNA target sequence for PLEKHF2 (NM_024613.2,375-393).
ctaagttgtgcaggaaaaa

SEQ ID NO: 159117 - DNA, 19 bp, Homo sapiens
  siRNA target sequence for PLEKHF2 (NM_024613.2,402-420).
caaggcagtttttcttgtt

SEQ ID NO: 159118 - DNA, 19 bp, Homo sapiens
  siRNA target sequence for PLEKHF2 (NM_024613.2,434-452).
gtatatggcaatattgtca

SEQ ID NO: 159119 - DNA, 19 bp, Homo sapiens
  siRNA target sequence for PLEKHF2 (NM_024613.2,527-545).
ggagacttaaggaatggat

SEQ ID NO: 159120 - DNA, 19 bp, Homo sapiens
  siRNA target sequence for PLEKHF2 (NM_024613.2,537-555).
ggaatggatggctaatcaa

SEQ ID NO: 159121 - DNA, 19 bp, Homo sapiens
  siRNA target sequence for PLEKHF2 (NM_024613.2,593-611).
gctacggagaaatcagaat

SEQ ID NO: 159122 - DNA, 19 bp, Homo sapiens
  siRNA target sequence for PLEKHF2 (NM_024613.2,660-678).
ggaagacacccagtaatga

SEQ ID NO: 159123 - DNA, 19 bp, Homo sapiens
  siRNA target sequence for PLEKHF2 (NM_024613.2,703-721).
ctctgaggcaactgtatgt

SEQ ID NO: 159124 - DNA, 19 bp, Homo sapiens
  siRNA target sequence for PLEKHF2 (NM_024613.2,705-723).
ctgaggcaactgtatgtat

SEQ ID NO: 159125 - DNA, 19 bp, Homo sapiens
  siRNA target sequence for PLEKHF2 (NM_024613.2,724-742).
gcgttgtcagaaagcaaaa

SEQ ID NO: 159126 - DNA, 19 bp, Homo sapiens
  siRNA target sequence for PLEKHF2 (NM_024613.2,924-942).
cttacagccagtcattgaa

SEQ ID NO: 159127 - DNA, 19 bp, Homo sapiens
  siRNA target sequence for POLR2H (NM_006232.2,95-113).
gcatcctgtttgaggatat

SEQ ID NO: 159128 - DNA, 19 bp, Homo sapiens
  siRNA target sequence for POLR2H (NM_006232.2,102-120).
gtttgaggatattttcgat

SEQ ID NO: 159129 - DNA, 19 bp, Homo sapiens
  siRNA target sequence for POLR2H (NM_006232.2,171-189).
gcattgtgagagtgaatct

SEQ ID NO: 159130 - DNA, 19 bp, Homo sapiens
  siRNA target sequence for POLR2H (NM_006232.2,172-190).
cattgtgagagtgaatctt

SEQ ID NO: 159131 - DNA, 19 bp, Homo sapiens
  siRNA target sequence for POLR2H (NM_006232.2,176-194).
gtgagagtgaatctttcaa

SEQ ID NO: 159132 - DNA, 19 bp, Homo sapiens
  siRNA target sequence for POLR2H (NM_006232.2,195-213).
gatggatctaatcttagat

SEQ ID NO: 159133 - DNA, 19 bp, Homo sapiens
  siRNA target sequence for POLR2H (NM_006232.2,199-217).
gatctaatcttagatgtaa

SEQ ID NO: 159134 - DNA, 19 bp, Homo sapiens
  siRNA target sequence for POLR2H (NM_006232.2,264-282).
catagctagtaccttgtat

SEQ ID NO: 159135 - DNA, 19 bp, Homo sapiens
  siRNA target sequence for POLR2H (NM_006232.2,269-287).
ctagtaccttgtatgaaga

SEQ ID NO: 159136 - DNA, 19 bp, Homo sapiens
  siRNA target sequence for POLR2H (NM_006232.2,335-353).
ccagggctgaccagtttga

SEQ ID NO: 159137 - DNA, 19 bp, Homo sapiens
  siRNA target sequence for POLR2H (NM_006232.2,341-359).
ctgaccagtttgagtatgt

SEQ ID NO: 159138 - DNA, 19 bp, Homo sapiens
  siRNA target sequence for POLR2H (NM_006232.2,343-361).
gaccagtttgagtatgtaa

SEQ ID NO: 159139 - DNA, 19 bp, Homo sapiens
  siRNA target sequence for POLR2H (NM_006232.2,346-364).
cagtttgagtatgtaatgt

SEQ ID NO: 159140 - DNA, 19 bp, Homo sapiens
  siRNA target sequence for POLR2H (NM_006232.2,354-372).
gtatgtaatgtatggaaaa

SEQ ID NO: 159141 - DNA, 19 bp, Homo sapiens
  siRNA target sequence for POLR2H (NM_006232.2,387-405).
gggagatgaaacttctact

SEQ ID NO: 159142 - DNA, 19 bp, Homo sapiens
  siRNA target sequence for POLR2H (NM_006232.2,473-491).
ccaacaacctgcatggatt

SEQ ID NO: 159143 - DNA, 19 bp, Homo sapiens
  siRNA target sequence for POLR2H (NM_006232.2,495-513).
ggtggactccagagtttat

SEQ ID NO: 159144 - DNA, 19 bp, Homo sapiens
  siRNA target sequence for PTER (NM_030664.2,239-257).
ccgttttgggccttgtaga

SEQ ID NO: 159145 - DNA, 19 bp, Homo sapiens
  siRNA target sequence for PTER (NM_030664.2,332-350).
ccccgtgccaggaagctat

SEQ ID NO: 159146 - DNA, 19 bp, Homo sapiens
  siRNA target sequence for PTER (NM_030664.2,334-352).
ccgtgccaggaagctattt

SEQ ID NO: 159147 - DNA, 19 bp, Homo sapiens
  siRNA target sequence for PTER (NM_030664.2,358-376).
gaacctatcgtgatgaaaa

SEQ ID NO: 159148 - DNA, 19 bp, Homo sapiens
  siRNA target sequence for PTER (NM_030664.2,361-379).
cctatcgtgatgaaaaatt

SEQ ID NO: 159149 - DNA, 19 bp, Homo sapiens
  siRNA target sequence for PTER (NM_030664.2,362-380).
ctatcgtgatgaaaaattt

SEQ ID NO: 159150 - DNA, 19 bp, Homo sapiens
  siRNA target sequence for PTER (NM_030664.2,399-417).
cgcctattcccataaagaa

SEQ ID NO: 159151 - DNA, 19 bp, Homo sapiens
  siRNA target sequence for PTER (NM_030664.2,400-418).
gcctattcccataaagaaa

SEQ ID NO: 159152 - DNA, 19 bp, Homo sapiens
  siRNA target sequence for PTER (NM_030664.2,453-471).
ggaagaactgttgtatttt

SEQ ID NO: 159153 - DNA, 19 bp, Homo sapiens
  siRNA target sequence for PTER (NM_030664.2,465-483).
gtattttaaagctaatggt

SEQ ID NO: 159154 - DNA, 19 bp, Homo sapiens
  siRNA target sequence for PTER (NM_030664.2,558-576).
gactggcgtccatatcata

SEQ ID NO: 159155 - DNA, 19 bp, Homo sapiens
  siRNA target sequence for PTER (NM_030664.2,643-661).
cttaccgatgtccttatga

SEQ ID NO: 159156 - DNA, 19 bp, Homo sapiens
  siRNA target sequence for PTER (NM_030664.2,647-665).
ccgatgtccttatgaatga

SEQ ID NO: 159157 - DNA, 19 bp, Homo sapiens
  siRNA target sequence for PTER (NM_030664.2,648-666).
cgatgtccttatgaatgaa

SEQ ID NO: 159158 - DNA, 19 bp, Homo sapiens
  siRNA target sequence for PTER (NM_030664.2,649-667).
gatgtccttatgaatgaaa

SEQ ID NO: 159159 - DNA, 19 bp, Homo sapiens
  siRNA target sequence for PTER (NM_030664.2,682-700).
gatggaaccagtatcaagt

SEQ ID NO: 159160 - DNA, 19 bp, Homo sapiens
  siRNA target sequence for PTER (NM_030664.2,789-807).
gcttggttgtcctgttatt

SEQ ID NO: 159161 - DNA, 19 bp, Homo sapiens
  siRNA target sequence for PTER (NM_030664.2,794-812).
gttgtcctgttattatcca

SEQ ID NO: 159162 - DNA, 19 bp, Homo sapiens
  siRNA target sequence for PTER (NM_030664.2,830-848).
gggcaccatttcagattat

SEQ ID NO: 159163 - DNA, 19 bp, Homo sapiens
  siRNA target sequence for PTER (NM_030664.2,843-861).
gattatccgaatattgcaa

SEQ ID NO: 159164 - DNA, 19 bp, Homo sapiens
  siRNA target sequence for PTER (NM_030664.2,868-886).
ggcgcagacatctccaaaa

SEQ ID NO: 159165 - DNA, 19 bp, Homo sapiens
  siRNA target sequence for PTER (NM_030664.2,870-888).
cgcagacatctccaaaaca

SEQ ID NO: 159166 - DNA, 19 bp, Homo sapiens
  siRNA target sequence for PTER (NM_030664.2,900-918).
cctggataggactattctt

SEQ ID NO: 159167 - DNA, 19 bp, Homo sapiens
  siRNA target sequence for PTER (NM_030664.2,903-921).
ggataggactattcttgat

SEQ ID NO: 159168 - DNA, 19 bp, Homo sapiens
  siRNA target sequence for PTER (NM_030664.2,904-922).
gataggactattcttgata

SEQ ID NO: 159169 - DNA, 19 bp, Homo sapiens
  siRNA target sequence for PTER (NM_030664.2,909-927).
gactattcttgataagaaa

SEQ ID NO: 159170 - DNA, 19 bp, Homo sapiens
  siRNA target sequence for PTER (NM_030664.2,911-929).
ctattcttgataagaaaga

SEQ ID NO: 159171 - DNA, 19 bp, Homo sapiens
  siRNA target sequence for PTER (NM_030664.2,975-993).
ctttggtactgaactactt

SEQ ID NO: 159172 - DNA, 19 bp, Homo sapiens
  siRNA target sequence for PTER (NM_030664.2,979-997).
ggtactgaactacttcatt

SEQ ID NO: 159173 - DNA, 19 bp, Homo sapiens
  siRNA target sequence for PTER (NM_030664.2,980-998).
gtactgaactacttcatta

SEQ ID NO: 159174 - DNA, 19 bp, Homo sapiens
  siRNA target sequence for PTER (NM_030664.2,1003-1021).
ctcggcccagatattgaca

SEQ ID NO: 159175 - DNA, 19 bp, Homo sapiens
  siRNA target sequence for PTER (NM_030664.2,1020-1038).
catgcctgatgataacaaa

SEQ ID NO: 159176 - DNA, 19 bp, Homo sapiens
  siRNA target sequence for PTER (NM_030664.2,1092-1110).
ggtagcacatgacatacat

SEQ ID NO: 159177 - DNA, 19 bp, Homo sapiens
  siRNA target sequence for PTER (NM_030664.2,1093-1111).
gtagcacatgacatacata

SEQ ID NO: 159178 - DNA, 19 bp, Homo sapiens
  siRNA target sequence for PTER (NM_030664.2,1099-1117).
catgacatacatacgaaaa

SEQ ID NO: 159179 - DNA, 19 bp, Homo sapiens
  siRNA target sequence for PTER (NM_030664.2,1112-1130).
cgaaaacccggctgatgaa

SEQ ID NO: 159180 - DNA, 19 bp, Homo sapiens
  siRNA target sequence for PTER (NM_030664.2,1113-1131).
gaaaacccggctgatgaaa

SEQ ID NO: 159181 - DNA, 19 bp, Homo sapiens
  siRNA target sequence for PTER (NM_030664.2,1119-1137).
ccggctgatgaaatatgga

SEQ ID NO: 159182 - DNA, 19 bp, Homo sapiens
  siRNA target sequence for PTER (NM_030664.2,1136-1154).
gaggtcacggctattctca

SEQ ID NO: 159183 - DNA, 19 bp, Homo sapiens
  siRNA target sequence for PTER (NM_030664.2,1138-1156).
ggtcacggctattctcata

SEQ ID NO: 159184 - DNA, 19 bp, Homo sapiens
  siRNA target sequence for PTER (NM_030664.2,1139-1157).
gtcacggctattctcatat

SEQ ID NO: 159185 - DNA, 19 bp, Homo sapiens
  siRNA target sequence for PTER (NM_030664.2,1161-1179).
caccaatgttgttcctaaa

SEQ ID NO: 159186 - DNA, 19 bp, Homo sapiens
  siRNA target sequence for PTER (NM_030664.2,1190-1208).
gaggcataactgagaatgt

SEQ ID NO: 159187 - DNA, 19 bp, Homo sapiens
  siRNA target sequence for PTER (NM_030664.2,1209-1227).
gcttgataagattctaata

SEQ ID NO: 159188 - DNA, 19 bp, Homo sapiens
  siRNA target sequence for PTER (NM_030664.2,1213-1231).
gataagattctaatagaga

SEQ ID NO: 159189 - DNA, 19 bp, Homo sapiens
  siRNA target sequence for PTER (NM_030664.2,1234-1252).
cctaagcaatggctaactt

SEQ ID NO: 159190 - DNA, 19 bp, Homo sapiens
  siRNA target sequence for PTER (NM_030664.2,1235-1253).
ctaagcaatggctaacttt

SEQ ID NO: 159191 - DNA, 19 bp, Homo sapiens
  siRNA target sequence for PTER (NM_030664.2,1239-1257).
gcaatggctaactttcaaa

SEQ ID NO: 159192 - DNA, 19 bp, Homo sapiens
  siRNA target sequence for PTPRG (NM_002841.2,768-786).
cagttccgtgctccattat

SEQ ID NO: 159193 - DNA, 19 bp, Homo sapiens
  siRNA target sequence for PTPRG (NM_002841.2,770-788).
gttccgtgctccattatgt

SEQ ID NO: 159194 - DNA, 19 bp, Homo sapiens
  siRNA target sequence for PTPRG (NM_002841.2,827-845).
ccctgcacgagaatagaca

SEQ ID NO: 159195 - DNA, 19 bp, Homo sapiens
  siRNA target sequence for PTPRG (NM_002841.2,957-975).
ccgtcaccagtctcctatt

SEQ ID NO: 159196 - DNA, 19 bp, Homo sapiens
  siRNA target sequence for PTPRG (NM_002841.2,961-979).
caccagtctcctattgaca

SEQ ID NO: 159197 - DNA, 19 bp, Homo sapiens
  siRNA target sequence for PTPRG (NM_002841.2,963-981).
ccagtctcctattgacatt

SEQ ID NO: 159198 - DNA, 19 bp, Homo sapiens
  siRNA target sequence for PTPRG (NM_002841.2,994-1012).
gcgcgtgttggggaagaat

SEQ ID NO: 159199 - DNA, 19 bp, Homo sapiens
  siRNA target sequence for PTPRG (NM_002841.2,995-1013).
cgcgtgttggggaagaata

SEQ ID NO: 159200 - DNA, 19 bp, Homo sapiens
  siRNA target sequence for PTPRG (NM_002841.2,1030-1048).
gatggcttcgacaatgagt

SEQ ID NO: 159201 - DNA, 19 bp, Homo sapiens
  siRNA target sequence for PTPRG (NM_002841.2,1039-1057).
gacaatgagtcttctaaca

SEQ ID NO: 159202 - DNA, 19 bp, Homo sapiens
  siRNA target sequence for PTPRG (NM_002841.2,1096-1114).
cttctgaaagacgactatt

SEQ ID NO: 159203 - DNA, 19 bp, Homo sapiens
  siRNA target sequence for PTPRG (NM_002841.2,1130-1148).
gtctacctggcagattcaa

SEQ ID NO: 159204 - DNA, 19 bp, Homo sapiens
  siRNA target sequence for PTPRG (NM_002841.2,1285-1303).
gcaatttctgagaacagaa

SEQ ID NO: 159205 - DNA, 19 bp, Homo sapiens
  siRNA target sequence for PTPRG (NM_002841.2,1308-1326).
cggagccatggccatattt

SEQ ID NO: 159206 - DNA, 19 bp, Homo sapiens
  siRNA target sequence for PTPRG (NM_002841.2,1310-1328).
gagccatggccatattttt

SEQ ID NO: 159207 - DNA, 19 bp, Homo sapiens
  siRNA target sequence for PTPRG (NM_002841.2,1333-1351).
gtcagtccgagggacaatt

SEQ ID NO: 159208 - DNA, 19 bp, Homo sapiens
  siRNA target sequence for PTPRG (NM_002841.2,1352-1370).
ctgcactggatcctattat

SEQ ID NO: 159209 - DNA, 19 bp, Homo sapiens
  siRNA target sequence for PTPRG (NM_002841.2,1380-1398).
gaagggtgtcgtacatcat

SEQ ID NO: 159210 - DNA, 19 bp, Homo sapiens
  siRNA target sequence for PTPRG (NM_002841.2,1385-1403).
gtgtcgtacatcatgagaa

SEQ ID NO: 159211 - DNA, 19 bp, Homo sapiens
  siRNA target sequence for PTPRG (NM_002841.2,1447-1465).
gcatccctgggcagctatt

SEQ ID NO: 159212 - DNA, 19 bp, Homo sapiens
  siRNA target sequence for PTPRG (NM_002841.2,1448-1466).
catccctgggcagctatta

SEQ ID NO: 159213 - DNA, 19 bp, Homo sapiens
  siRNA target sequence for PTPRG (NM_002841.2,1493-1511).
caccgtgtagcgaaatagt

SEQ ID NO: 159214 - DNA, 19 bp, Homo sapiens
  siRNA target sequence for PTPRG (NM_002841.2,1532-1550).
gacccgtccccatctctta

SEQ ID NO: 159215 - DNA, 19 bp, Homo sapiens
  siRNA target sequence for PTPRG (NM_002841.2,1536-1554).
cgtccccatctcttaccat

SEQ ID NO: 159216 - DNA, 19 bp, Homo sapiens
  siRNA target sequence for PTPRG (NM_002841.2,1552-1570).
catcagcttgaggcttttt

SEQ ID NO: 159217 - DNA, 19 bp, Homo sapiens
  siRNA target sequence for PTPRG (NM_002841.2,1610-1628).
cggtggagtatctgagaaa

SEQ ID NO: 159218 - DNA, 19 bp, Homo sapiens
  siRNA target sequence for PTPRG (NM_002841.2,1701-1719).
cgacatgacagacttctta

SEQ ID NO: 159219 - DNA, 19 bp, Homo sapiens
  siRNA target sequence for PTPRG (NM_002841.2,1733-1751).
ggacagaagcctctaaagt

SEQ ID NO: 159220 - DNA, 19 bp, Homo sapiens
  siRNA target sequence for PTPRG (NM_002841.2,1734-1752).
gacagaagcctctaaagtt

SEQ ID NO: 159221 - DNA, 19 bp, Homo sapiens
  siRNA target sequence for PTPRG (NM_002841.2,1760-1778).
ctccacccatccacatgaa

SEQ ID NO: 159222 - DNA, 19 bp, Homo sapiens
  siRNA target sequence for PTPRG (NM_002841.2,1817-1835).
ggagccagccggagactat

SEQ ID NO: 159223 - DNA, 19 bp, Homo sapiens
  siRNA target sequence for PTPRG (NM_002841.2,1820-1838).
gccagccggagactatcta

SEQ ID NO: 159224 - DNA, 19 bp, Homo sapiens
  siRNA target sequence for PTPRG (NM_002841.2,1840-1858).
cacccacccatcatgaact

SEQ ID NO: 159225 - DNA, 19 bp, Homo sapiens
  siRNA target sequence for PTPRG (NM_002841.2,1843-1861).
ccacccatcatgaactaca

SEQ ID NO: 159226 - DNA, 19 bp, Homo sapiens
  siRNA target sequence for PTPRG (NM_002841.2,1844-1862).
cacccatcatgaactacat

SEQ ID NO: 159227 - DNA, 19 bp, Homo sapiens
  siRNA target sequence for PTPRG (NM_002841.2,1847-1865).
ccatcatgaactacatgat

SEQ ID NO: 159228 - DNA, 19 bp, Homo sapiens
  siRNA target sequence for PTPRG (NM_002841.2,2005-2023).
gacatgcgcagcgacttta

SEQ ID NO: 159229 - DNA, 19 bp, Homo sapiens
  siRNA target sequence for PTPRG (NM_002841.2,2024-2042).
gccagacgatgctgtttca

SEQ ID NO: 159230 - DNA, 19 bp, Homo sapiens
  siRNA target sequence for PTPRG (NM_002841.2,2030-2048).
cgatgctgtttcaagctaa

SEQ ID NO: 159231 - DNA, 19 bp, Homo sapiens
  siRNA target sequence for PTPRG (NM_002841.2,2031-2049).
gatgctgtttcaagctaat

SEQ ID NO: 159232 - DNA, 19 bp, Homo sapiens
  siRNA target sequence for PTPRG (NM_002841.2,2044-2062).
gctaataccactcgaatat

SEQ ID NO: 159233 - DNA, 19 bp, Homo sapiens
  siRNA target sequence for PTPRG (NM_002841.2,2560-2578).
gccgaggagcggaatcaga

SEQ ID NO: 159234 - DNA, 19 bp, Homo sapiens
  siRNA target sequence for PTPRG (NM_002841.2,2849-2867).
gcagatttatcactgttaa

SEQ ID NO: 159235 - DNA, 19 bp, Homo sapiens
  siRNA target sequence for PTPRG (NM_002841.2,2863-2881).
gttaatccagcggaaaaaa

SEQ ID NO: 159236 - DNA, 19 bp, Homo sapiens
  siRNA target sequence for PTPRG (NM_002841.2,2925-2943).
gtggatcatccctctgatt

SEQ ID NO: 159237 - DNA, 19 bp, Homo sapiens
  siRNA target sequence for PTPRG (NM_002841.2,2967-2985).
gtgcctcatccttctcatt

SEQ ID NO: 159238 - DNA, 19 bp, Homo sapiens
  siRNA target sequence for PTPRG (NM_002841.2,3003-3021).
gagagggtgtaacaaaata

SEQ ID NO: 159239 - DNA, 19 bp, Homo sapiens
  siRNA target sequence for PTPRG (NM_002841.2,3048-3066).
ccgtgaagtgccttcttct

SEQ ID NO: 159240 - DNA, 19 bp, Homo sapiens
  siRNA target sequence for PTPRG (NM_002841.2,3098-3116).
gttttcagactgctcattt

SEQ ID NO: 159241 - DNA, 19 bp, Homo sapiens
  siRNA target sequence for PTPRG (NM_002841.2,3145-3163).
gtggtccctaatgaaagta

SEQ ID NO: 159242 - DNA, 19 bp, Homo sapiens
  siRNA target sequence for PTPRG (NM_002841.2,3223-3241).
cacatcggtgagctctatt

SEQ ID NO: 159243 - DNA, 19 bp, Homo sapiens
  siRNA target sequence for PTPRG (NM_002841.2,3228-3246).
cggtgagctctattctaat

SEQ ID NO: 159244 - DNA, 19 bp, Homo sapiens
  siRNA target sequence for PTPRG (NM_002841.2,3229-3247).
ggtgagctctattctaata

SEQ ID NO: 159245 - DNA, 19 bp, Homo sapiens
  siRNA target sequence for PTPRG (NM_002841.2,3286-3304).
cgctgtactgctgatatga

SEQ ID NO: 159246 - DNA, 19 bp, Homo sapiens
  siRNA target sequence for PTPRG (NM_002841.2,3379-3397).
cacagtagggtgaagttaa

SEQ ID NO: 159247 - DNA, 19 bp, Homo sapiens
  siRNA target sequence for PTPRG (NM_002841.2,3381-3399).
cagtagggtgaagttaaga

SEQ ID NO: 159248 - DNA, 19 bp, Homo sapiens
  siRNA target sequence for PTPRG (NM_002841.2,3390-3408).
gaagttaagacctttacca

SEQ ID NO: 159249 - DNA, 19 bp, Homo sapiens
  siRNA target sequence for PTPRG (NM_002841.2,3454-3472).
gatggttacaacaaagcaa

SEQ ID NO: 159250 - DNA, 19 bp, Homo sapiens
  siRNA target sequence for PTPRG (NM_002841.2,3651-3669).
cacgctgaagagcacaaaa

SEQ ID NO: 159251 - DNA, 19 bp, Homo sapiens
  siRNA target sequence for PTPRG (NM_002841.2,3657-3675).
gaagagcacaaaaatacat

SEQ ID NO: 159252 - DNA, 19 bp, Homo sapiens
  siRNA target sequence for PTPRG (NM_002841.2,3681-3699).
ctacactgttcgtcgtttt

SEQ ID NO: 159253 - DNA, 19 bp, Homo sapiens
  siRNA target sequence for PTPRG (NM_002841.2,3688-3706).
gttcgtcgtttttcaatca

SEQ ID NO: 159254 - DNA, 19 bp, Homo sapiens
  siRNA target sequence for PTPRG (NM_002841.2,3691-3709).
cgtcgtttttcaatcagaa

SEQ ID NO: 159255 - DNA, 19 bp, Homo sapiens
  siRNA target sequence for PTPRG (NM_002841.2,3743-3761).
ccaagggtcgtcagaatga

SEQ ID NO: 159256 - DNA, 19 bp, Homo sapiens
  siRNA target sequence for PTPRG (NM_002841.2,3744-3762).
caagggtcgtcagaatgaa

SEQ ID NO: 159257 - DNA, 19 bp, Homo sapiens
  siRNA target sequence for PTPRG (NM_002841.2,3764-3782).
gggtagtgatccagtatca

SEQ ID NO: 159258 - DNA, 19 bp, Homo sapiens
  siRNA target sequence for PTPRG (NM_002841.2,3769-3787).
gtgatccagtatcactata

SEQ ID NO: 159259 - DNA, 19 bp, Homo sapiens
  siRNA target sequence for PTPRG (NM_002841.2,3771-3789).
gatccagtatcactataca

SEQ ID NO: 159260 - DNA, 19 bp, Homo sapiens
  siRNA target sequence for PTPRG (NM_002841.2,3917-3935).
caggcacctatattgtaat

SEQ ID NO: 159261 - DNA, 19 bp, Homo sapiens
  siRNA target sequence for PTPRG (NM_002841.2,3920-3938).
gcacctatattgtaataga

SEQ ID NO: 159262 - DNA, 19 bp, Homo sapiens
  siRNA target sequence for PTPRG (NM_002841.2,3942-3960).
catgctgcaacagataaaa

SEQ ID NO: 159263 - DNA, 19 bp, Homo sapiens
  siRNA target sequence for PTPRG (NM_002841.2,3982-4000).
ctgggattcctgaagcata

SEQ ID NO: 159264 - DNA, 19 bp, Homo sapiens
  siRNA target sequence for PTPRG (NM_002841.2,4108-4126).
cagctgcacagctatgtta

SEQ ID NO: 159265 - DNA, 19 bp, Homo sapiens
  siRNA target sequence for PTPRG (NM_002841.2,4158-4176).
gacacgactggaaaagcaa

SEQ ID NO: 159266 - DNA, 19 bp, Homo sapiens
  siRNA target sequence for PTPRG (NM_002841.2,4160-4178).
cacgactggaaaagcaatt

SEQ ID NO: 159267 - DNA, 19 bp, Homo sapiens
  siRNA target sequence for PTPRG (NM_002841.2,4182-4200).
gctggtcacacagtgtaat

SEQ ID NO: 159268 - DNA, 19 bp, Homo sapiens
  siRNA target sequence for PTPRG (NM_002841.2,4225-4243).
gctcagaaagagtgtaaca

SEQ ID NO: 159269 - DNA, 19 bp, Homo sapiens
  siRNA target sequence for PTPRG (NM_002841.2,4356-4374).
ctattataggagcaatgaa

SEQ ID NO: 159270 - DNA, 19 bp, Homo sapiens
  siRNA target sequence for PTPRG (NM_002841.2,4398-4416).
gccacatactacgaaagat

SEQ ID NO: 159271 - DNA, 19 bp, Homo sapiens
  siRNA target sequence for PTPRG (NM_002841.2,4399-4417).
ccacatactacgaaagatt

SEQ ID NO: 159272 - DNA, 19 bp, Homo sapiens
  siRNA target sequence for PTPRG (NM_002841.2,4400-4418).
cacatactacgaaagattt

SEQ ID NO: 159273 - DNA, 19 bp, Homo sapiens
  siRNA target sequence for PTPRG (NM_002841.2,4423-4441).
cgaatgatttgggatcata

SEQ ID NO: 159274 - DNA, 19 bp, Homo sapiens
  siRNA target sequence for PTPRG (NM_002841.2,4478-4496).
gcttggcagaagatgagtt

SEQ ID NO: 159275 - DNA, 19 bp, Homo sapiens
  siRNA target sequence for PTPRG (NM_002841.2,4572-4590).
gtgcctctctaatgaagaa

SEQ ID NO: 159276 - DNA, 19 bp, Homo sapiens
  siRNA target sequence for PTPRG (NM_002841.2,4574-4592).
gcctctctaatgaagaaca

SEQ ID NO: 159277 - DNA, 19 bp, Homo sapiens
  siRNA target sequence for PTPRG (NM_002841.2,4578-4596).
ctctaatgaagaacaaatt

SEQ ID NO: 159278 - DNA, 19 bp, Homo sapiens
  siRNA target sequence for PTPRG (NM_002841.2,4681-4699).
ccagatgcccccataagta

SEQ ID NO: 159279 - DNA, 19 bp, Homo sapiens
  siRNA target sequence for PTPRG (NM_002841.2,4684-4702).
gatgcccccataagtagta

SEQ ID NO: 159280 - DNA, 19 bp, Homo sapiens
  siRNA target sequence for PTPRG (NM_002841.2,4692-4710).
cataagtagtacctttgaa

SEQ ID NO: 159281 - DNA, 19 bp, Homo sapiens
  siRNA target sequence for PTPRG (NM_002841.2,4697-4715).
gtagtacctttgaacttat

SEQ ID NO: 159282 - DNA, 19 bp, Homo sapiens
  siRNA target sequence for PTPRG (NM_002841.2,4746-4764).
ggatggtcccaccattgtt

SEQ ID NO: 159283 - DNA, 19 bp, Homo sapiens
  siRNA target sequence for PTPRG (NM_002841.2,4754-4772).
ccaccattgttcatgatga

SEQ ID NO: 159284 - DNA, 19 bp, Homo sapiens
  siRNA target sequence for PTPRG (NM_002841.2,4860-4878).
ggttgcaaaaatgatcaat

SEQ ID NO: 159285 - DNA, 19 bp, Homo sapiens
  siRNA target sequence for PTPRG (NM_002841.2,4865-4883).
caaaaatgatcaatcttat

SEQ ID NO: 159286 - DNA, 19 bp, Homo sapiens
  siRNA target sequence for PTPRG (NM_002841.2,4884-4902).
gaggcctggagtattcaca

SEQ ID NO: 159287 - DNA, 19 bp, Homo sapiens
  siRNA target sequence for PTPRG (NM_002841.2,4909-4927).
gaacaataccagttcatct

SEQ ID NO: 159288 - DNA, 19 bp, Homo sapiens
  siRNA target sequence for PTPRG (NM_002841.2,4912-4930).
caataccagttcatctata

SEQ ID NO: 159289 - DNA, 19 bp, Homo sapiens
  siRNA target sequence for PTPRG (NM_002841.2,4973-4991).
gtcccatgacagtagacaa

SEQ ID NO: 159290 - DNA, 19 bp, Homo sapiens
  siRNA target sequence for PTPRG (NM_002841.2,4975-4993).
cccatgacagtagacaaaa

SEQ ID NO: 159291 - DNA, 19 bp, Homo sapiens
  siRNA target sequence for PTPRG (NM_002841.2,4980-4998).
gacagtagacaaaaatggt

SEQ ID NO: 159292 - DNA, 19 bp, Homo sapiens
  siRNA target sequence for PTPRG (NM_002841.2,4989-5007).
caaaaatggtgctgttctt

SEQ ID NO: 159293 - DNA, 19 bp, Homo sapiens
  siRNA target sequence for PTPRZ1 (NM_002851.1,250-268).
gagattggctggtcctata

SEQ ID NO: 159294 - DNA, 19 bp, Homo sapiens
  siRNA target sequence for PTPRZ1 (NM_002851.1,300-318).
gaaatatccaacatgtaat

SEQ ID NO: 159295 - DNA, 19 bp, Homo sapiens
  siRNA target sequence for PTPRZ1 (NM_002851.1,311-329).
catgtaatagcccaaaaca

SEQ ID NO: 159296 - DNA, 19 bp, Homo sapiens
  siRNA target sequence for PTPRZ1 (NM_002851.1,332-350).
ctcctatcaatattgatga

SEQ ID NO: 159297 - DNA, 19 bp, Homo sapiens
  siRNA target sequence for PTPRZ1 (NM_002851.1,394-412).
cagggttgggataaaacat

SEQ ID NO: 159298 - DNA, 19 bp, Homo sapiens
  siRNA target sequence for PTPRZ1 (NM_002851.1,396-414).
gggttgggataaaacatca

SEQ ID NO: 159299 - DNA, 19 bp, Homo sapiens
  siRNA target sequence for PTPRZ1 (NM_002851.1,397-415).
ggttgggataaaacatcat

SEQ ID NO: 159300 - DNA, 19 bp, Homo sapiens
  siRNA target sequence for PTPRZ1 (NM_002851.1,398-416).
gttgggataaaacatcatt

SEQ ID NO: 159301 - DNA, 19 bp, Homo sapiens
  siRNA target sequence for PTPRZ1 (NM_002851.1,423-441).
cacattcattcataacact

SEQ ID NO: 159302 - DNA, 19 bp, Homo sapiens
  siRNA target sequence for PTPRZ1 (NM_002851.1,453-471).
ggaaattaatctcactaat

SEQ ID NO: 159303 - DNA, 19 bp, Homo sapiens
  siRNA target sequence for PTPRZ1 (NM_002851.1,485-503).
gcggaggagtttcagaaat

SEQ ID NO: 159304 - DNA, 19 bp, Homo sapiens
  siRNA target sequence for PTPRZ1 (NM_002851.1,515-533).
caagcaagataacttttca

SEQ ID NO: 159305 - DNA, 19 bp, Homo sapiens
  siRNA target sequence for PTPRZ1 (NM_002851.1,537-555).
gggaaaatgcaatatgtca

SEQ ID NO: 159306 - DNA, 19 bp, Homo sapiens
  siRNA target sequence for PTPRZ1 (NM_002851.1,595-613).
ccacttgagatgcaaatct

SEQ ID NO: 159307 - DNA, 19 bp, Homo sapiens
  siRNA target sequence for PTPRZ1 (NM_002851.1,596-614).
cacttgagatgcaaatcta

SEQ ID NO: 159308 - DNA, 19 bp, Homo sapiens
  siRNA target sequence for PTPRZ1 (NM_002851.1,606-624).
gcaaatctactgctttgat

SEQ ID NO: 159309 - DNA, 19 bp, Homo sapiens
  siRNA target sequence for PTPRZ1 (NM_002851.1,622-640).
gatgcggaccgattttcaa

SEQ ID NO: 159310 - DNA, 19 bp, Homo sapiens
  siRNA target sequence for PTPRZ1 (NM_002851.1,625-643).
gcggaccgattttcaagtt

SEQ ID NO: 159311 - DNA, 19 bp, Homo sapiens
  siRNA target sequence for PTPRZ1 (NM_002851.1,626-644).
cggaccgattttcaagttt

SEQ ID NO: 159312 - DNA, 19 bp, Homo sapiens
  siRNA target sequence for PTPRZ1 (NM_002851.1,627-645).
ggaccgattttcaagtttt

SEQ ID NO: 159313 - DNA, 19 bp, Homo sapiens
  siRNA target sequence for PTPRZ1 (NM_002851.1,720-738).
ggatttcaaagcgattatt

SEQ ID NO: 159314 - DNA, 19 bp, Homo sapiens
  siRNA target sequence for PTPRZ1 (NM_002851.1,739-757).
gatggagtcgaaagtgtta

SEQ ID NO: 159315 - DNA, 19 bp, Homo sapiens
  siRNA target sequence for PTPRZ1 (NM_002851.1,747-765).
cgaaagtgttagtcgtttt

SEQ ID NO: 159316 - DNA, 19 bp, Homo sapiens
  siRNA target sequence for PTPRZ1 (NM_002851.1,779-797).
ctttagatccattcatact

SEQ ID NO: 159317 - DNA, 19 bp, Homo sapiens
  siRNA target sequence for PTPRZ1 (NM_002851.1,818-836).
caactgacaagtattacat

SEQ ID NO: 159318 - DNA, 19 bp, Homo sapiens
  siRNA target sequence for PTPRZ1 (NM_002851.1,975-993).
gctgatggactacttacaa

SEQ ID NO: 159319 - DNA, 19 bp, Homo sapiens
  siRNA target sequence for PTPRZ1 (NM_002851.1,976-994).
ctgatggactacttacaaa

SEQ ID NO: 159320 - DNA, 19 bp, Homo sapiens
  siRNA target sequence for PTPRZ1 (NM_002851.1,982-1000).
gactacttacaaaacaatt

SEQ ID NO: 159321 - DNA, 19 bp, Homo sapiens
  siRNA target sequence for PTPRZ1 (NM_002851.1,1148-1166).
gacctcgagtcgtttatga

SEQ ID NO: 159322 - DNA, 19 bp, Homo sapiens
  siRNA target sequence for PTPRZ1 (NM_002851.1,1150-1168).
cctcgagtcgtttatgata

SEQ ID NO: 159323 - DNA, 19 bp, Homo sapiens
  siRNA target sequence for PTPRZ1 (NM_002851.1,1154-1172).
gagtcgtttatgataccat

SEQ ID NO: 159324 - DNA, 19 bp, Homo sapiens
  siRNA target sequence for PTPRZ1 (NM_002851.1,1158-1176).
cgtttatgataccatgatt

SEQ ID NO: 159325 - DNA, 19 bp, Homo sapiens
  siRNA target sequence for PTPRZ1 (NM_002851.1,1218-1236).
ccaaaccaagcatgaattt

SEQ ID NO: 159326 - DNA, 19 bp, Homo sapiens
  siRNA target sequence for PTPRZ1 (NM_002851.1,1241-1259).
cagatggctatcaagactt

SEQ ID NO: 159327 - DNA, 19 bp, Homo sapiens
  siRNA target sequence for PTPRZ1 (NM_002851.1,1265-1283).
ctattctcaataatttgct

SEQ ID NO: 159328 - DNA, 19 bp, Homo sapiens
  siRNA target sequence for PTPRZ1 (NM_002851.1,1281-1299).
gctacccaatatgagttat

SEQ ID NO: 159329 - DNA, 19 bp, Homo sapiens
  siRNA target sequence for PTPRZ1 (NM_002851.1,1286-1304).
ccaatatgagttatgttct

SEQ ID NO: 159330 - DNA, 19 bp, Homo sapiens
  siRNA target sequence for PTPRZ1 (NM_002851.1,1287-1305).
caatatgagttatgttctt

SEQ ID NO: 159331 - DNA, 19 bp, Homo sapiens
  siRNA target sequence for PTPRZ1 (NM_002851.1,1363-1381).
gtcgacatgcctactgata

SEQ ID NO: 159332 - DNA, 19 bp, Homo sapiens
  siRNA target sequence for PTPRZ1 (NM_002851.1,1365-1383).
cgacatgcctactgataat

SEQ ID NO: 159333 - DNA, 19 bp, Homo sapiens
  siRNA target sequence for PTPRZ1 (NM_002851.1,1368-1386).
catgcctactgataatcct

SEQ ID NO: 159334 - DNA, 19 bp, Homo sapiens
  siRNA target sequence for PTPRZ1 (NM_002851.1,1376-1394).
ctgataatcctgaacttga

SEQ ID NO: 159335 - DNA, 19 bp, Homo sapiens
  siRNA target sequence for PTPRZ1 (NM_002851.1,1503-1521).
ccaaatcaggaaaaaggaa

SEQ ID NO: 159336 - DNA, 19 bp, Homo sapiens
  siRNA target sequence for PTPRZ1 (NM_002851.1,1552-1570).
cgcatagggacgaaataca

SEQ ID NO: 159337 - DNA, 19 bp, Homo sapiens
  siRNA target sequence for PTPRZ1 (NM_002851.1,1553-1571).
gcatagggacgaaatacaa

SEQ ID NO: 159338 - DNA, 19 bp, Homo sapiens
  siRNA target sequence for PTPRZ1 (NM_002851.1,1554-1572).
catagggacgaaatacaat

SEQ ID NO: 159339 - DNA, 19 bp, Homo sapiens
  siRNA target sequence for PTPRZ1 (NM_002851.1,1614-1632).
ctctggaaagggtgatgtt

SEQ ID NO: 159340 - DNA, 19 bp, Homo sapiens
  siRNA target sequence for PTPRZ1 (NM_002851.1,1624-1642).
ggtgatgttcccaatacat

SEQ ID NO: 159341 - DNA, 19 bp, Homo sapiens
  siRNA target sequence for PTPRZ1 (NM_002851.1,1630-1648).
gttcccaatacatctttaa

SEQ ID NO: 159342 - DNA, 19 bp, Homo sapiens
  siRNA target sequence for PTPRZ1 (NM_002851.1,1655-1673).
cttcccaaccagtcactaa

SEQ ID NO: 159343 - DNA, 19 bp, Homo sapiens
  siRNA target sequence for PTPRZ1 (NM_002851.1,1659-1677).
ccaaccagtcactaaatta

SEQ ID NO: 159344 - DNA, 19 bp, Homo sapiens
  siRNA target sequence for PTPRZ1 (NM_002851.1,1748-1766).
cttcagcctctttaaatga

SEQ ID NO: 159345 - DNA, 19 bp, Homo sapiens
  siRNA target sequence for PTPRZ1 (NM_002851.1,1808-1826).
cggggactgcagaatcctt

SEQ ID NO: 159346 - DNA, 19 bp, Homo sapiens
  siRNA target sequence for PTPRZ1 (NM_002851.1,1812-1830).
gactgcagaatccttaaat

SEQ ID NO: 159347 - DNA, 19 bp, Homo sapiens
  siRNA target sequence for PTPRZ1 (NM_002851.1,1819-1837).
gaatccttaaatacagttt

SEQ ID NO: 159348 - DNA, 19 bp, Homo sapiens
  siRNA target sequence for PTPRZ1 (NM_002851.1,1953-1971).
catatcccaagggtatata

SEQ ID NO: 159349 - DNA, 19 bp, Homo sapiens
  siRNA target sequence for PTPRZ1 (NM_002851.1,1988-2006).
cagagacaataacatatga

SEQ ID NO: 159350 - DNA, 19 bp, Homo sapiens
  siRNA target sequence for PTPRZ1 (NM_002851.1,2059-2077).
ggttcagaagaatcactaa

SEQ ID NO: 159351 - DNA, 19 bp, Homo sapiens
  siRNA target sequence for PTPRZ1 (NM_002851.1,2110-2128).
cctagctctacagacataa

SEQ ID NO: 159352 - DNA, 19 bp, Homo sapiens
  siRNA target sequence for PTPRZ1 (NM_002851.1,2172-2190).
gactaattacactgagata

SEQ ID NO: 159353 - DNA, 19 bp, Homo sapiens
  siRNA target sequence for PTPRZ1 (NM_002851.1,2181-2199).
cactgagatacgtgttgat

SEQ ID NO: 159354 - DNA, 19 bp, Homo sapiens
  siRNA target sequence for PTPRZ1 (NM_002851.1,2185-2203).
gagatacgtgttgatgaat

SEQ ID NO: 159355 - DNA, 19 bp, Homo sapiens
  siRNA target sequence for PTPRZ1 (NM_002851.1,2187-2205).
gatacgtgttgatgaatct

SEQ ID NO: 159356 - DNA, 19 bp, Homo sapiens
  siRNA target sequence for PTPRZ1 (NM_002851.1,2250-2268).
gggtccctcagttacagat

SEQ ID NO: 159357 - DNA, 19 bp, Homo sapiens
  siRNA target sequence for PTPRZ1 (NM_002851.1,2339-2357).
cctccagacaacaggattt

SEQ ID NO: 159358 - DNA, 19 bp, Homo sapiens
  siRNA target sequence for PTPRZ1 (NM_002851.1,2363-2381).
ccacggtcaacgtggtata

SEQ ID NO: 159359 - DNA, 19 bp, Homo sapiens
  siRNA target sequence for PTPRZ1 (NM_002851.1,2390-2408).
caacccaaccggtatacaa

SEQ ID NO: 159360 - DNA, 19 bp, Homo sapiens
  siRNA target sequence for PTPRZ1 (NM_002851.1,2422-2440).
cttcaaccttcctacagta

SEQ ID NO: 159361 - DNA, 19 bp, Homo sapiens
  siRNA target sequence for PTPRZ1 (NM_002851.1,2453-2471).
ctctagtcacccctttgtt

SEQ ID NO: 159362 - DNA, 19 bp, Homo sapiens
  siRNA target sequence for PTPRZ1 (NM_002851.1,2465-2483).
ctttgttgcttgacaatca

SEQ ID NO: 159363 - DNA, 19 bp, Homo sapiens
  siRNA target sequence for PTPRZ1 (NM_002851.1,2503-2521).
gctgcttcaagtagtgatt

SEQ ID NO: 159364 - DNA, 19 bp, Homo sapiens
  siRNA target sequence for PTPRZ1 (NM_002851.1,2529-2547).
gcatgctacgcctgtattt

SEQ ID NO: 159365 - DNA, 19 bp, Homo sapiens
  siRNA target sequence for PTPRZ1 (NM_002851.1,2550-2568).
cagtgtcgatgtgtcattt

SEQ ID NO: 159366 - DNA, 19 bp, Homo sapiens
  siRNA target sequence for PTPRZ1 (NM_002851.1,2552-2570).
gtgtcgatgtgtcatttga

SEQ ID NO: 159367 - DNA, 19 bp, Homo sapiens
  siRNA target sequence for PTPRZ1 (NM_002851.1,2554-2572).
gtcgatgtgtcatttgaat

SEQ ID NO: 159368 - DNA, 19 bp, Homo sapiens
  siRNA target sequence for PTPRZ1 (NM_002851.1,2594-2612).
gtgcacctttgcttccatt

SEQ ID NO: 159369 - DNA, 19 bp, Homo sapiens
  siRNA target sequence for PTPRZ1 (NM_002851.1,2644-2662).
cgccatctgcatacagttt

SEQ ID NO: 159370 - DNA, 19 bp, Homo sapiens
  siRNA target sequence for PTPRZ1 (NM_002851.1,2646-2664).
ccatctgcatacagtttct

SEQ ID NO: 159371 - DNA, 19 bp, Homo sapiens
  siRNA target sequence for PTPRZ1 (NM_002851.1,2687-2705).
cagctaccgagagtgataa

SEQ ID NO: 159372 - DNA, 19 bp, Homo sapiens
  siRNA target sequence for PTPRZ1 (NM_002851.1,2690-2708).
ctaccgagagtgataaggt

SEQ ID NO: 159373 - DNA, 19 bp, Homo sapiens
  siRNA target sequence for PTPRZ1 (NM_002851.1,2733-2751).
ggctgggggtgatttgcta

SEQ ID NO: 159374 - DNA, 19 bp, Homo sapiens
  siRNA target sequence for PTPRZ1 (NM_002851.1,2734-2752).
gctgggggtgatttgctat

SEQ ID NO: 159375 - DNA, 19 bp, Homo sapiens
  siRNA target sequence for PTPRZ1 (NM_002851.1,2738-2756).
ggggtgatttgctattaga

SEQ ID NO: 159376 - DNA, 19 bp, Homo sapiens
  siRNA target sequence for PTPRZ1 (NM_002851.1,2804-2822).
cttcagagacgctggaatt

SEQ ID NO: 159377 - DNA, 19 bp, Homo sapiens
  siRNA target sequence for PTPRZ1 (NM_002851.1,2809-2827).
gagacgctggaatttggta

SEQ ID NO: 159378 - DNA, 19 bp, Homo sapiens
  siRNA target sequence for PTPRZ1 (NM_002851.1,2814-2832).
gctggaatttggtagtgaa

SEQ ID NO: 159379 - DNA, 19 bp, Homo sapiens
  siRNA target sequence for PTPRZ1 (NM_002851.1,2815-2833).
ctggaatttggtagtgaat

SEQ ID NO: 159380 - DNA, 19 bp, Homo sapiens
  siRNA target sequence for PTPRZ1 (NM_002851.1,2817-2835).
ggaatttggtagtgaatct

SEQ ID NO: 159381 - DNA, 19 bp, Homo sapiens
  siRNA target sequence for PTPRZ1 (NM_002851.1,2830-2848).
gaatctggtgttctttata

SEQ ID NO: 159382 - DNA, 19 bp, Homo sapiens
  siRNA target sequence for PTPRZ1 (NM_002851.1,2842-2860).
ctttataaaacgcttatgt

SEQ ID NO: 159383 - DNA, 19 bp, Homo sapiens
  siRNA target sequence for PTPRZ1 (NM_002851.1,2895-2913).
gatgcatgcacgttcttca

SEQ ID NO: 159384 - DNA, 19 bp, Homo sapiens
  siRNA target sequence for PTPRZ1 (NM_002851.1,2927-2945).
cttatgccttgtctgataa

SEQ ID NO: 159385 - DNA, 19 bp, Homo sapiens
  siRNA target sequence for PTPRZ1 (NM_002851.1,2986-3004).
gcaatacctgtgcatgatt

SEQ ID NO: 159386 - DNA, 19 bp, Homo sapiens
  siRNA target sequence for PTPRZ1 (NM_002851.1,3005-3023).
ctgtgggtgtaacttatca

SEQ ID NO: 159387 - DNA, 19 bp, Homo sapiens
  siRNA target sequence for PTPRZ1 (NM_002851.1,3041-3059).
gccctagccatataccaat

SEQ ID NO: 159388 - DNA, 19 bp, Homo sapiens
  siRNA target sequence for PTPRZ1 (NM_002851.1,3042-3060).
ccctagccatataccaata

SEQ ID NO: 159389 - DNA, 19 bp, Homo sapiens
  siRNA target sequence for PTPRZ1 (NM_002851.1,3047-3065).
gccatataccaatacctaa

SEQ ID NO: 159390 - DNA, 19 bp, Homo sapiens
  siRNA target sequence for PTPRZ1 (NM_002851.1,3061-3079).
cctaagtcttcgttaataa

SEQ ID NO: 159391 - DNA, 19 bp, Homo sapiens
  siRNA target sequence for PTPRZ1 (NM_002851.1,3080-3098).
ccccaactgcatcattact

SEQ ID NO: 159392 - DNA, 19 bp, Homo sapiens
  siRNA target sequence for PTPRZ1 (NM_002851.1,3181-3199).
gggctgacagcccttaaca

SEQ ID NO: 159393 - DNA, 19 bp, Homo sapiens
  siRNA target sequence for PTPRZ1 (NM_002851.1,3183-3201).
gctgacagcccttaacatt

SEQ ID NO: 159394 - DNA, 19 bp, Homo sapiens
  siRNA target sequence for PTPRZ1 (NM_002851.1,3244-3262).
gtgtttggtgatgataata

SEQ ID NO: 159395 - DNA, 19 bp, Homo sapiens
  siRNA target sequence for PTPRZ1 (NM_002851.1,3256-3274).
gataataaggcgctttcta

SEQ ID NO: 159396 - DNA, 19 bp, Homo sapiens
  siRNA target sequence for PTPRZ1 (NM_002851.1,3387-3405).
gttgaatgcgtctttacaa

SEQ ID NO: 159397 - DNA, 19 bp, Homo sapiens
  siRNA target sequence for PTPRZ1 (NM_002851.1,3460-3478).
cataccaccactaaggttt

SEQ ID NO: 159398 - DNA, 19 bp, Homo sapiens
  siRNA target sequence for PTPRZ1 (NM_002851.1,3468-3486).
cactaaggtttttgatcat

SEQ ID NO: 159399 - DNA, 19 bp, Homo sapiens
  siRNA target sequence for PTPRZ1 (NM_002851.1,3470-3488).
ctaaggtttttgatcatga

SEQ ID NO: 159400 - DNA, 19 bp, Homo sapiens
  siRNA target sequence for PTPRZ1 (NM_002851.1,3607-3625).
gaccctgcttctagtgaaa

SEQ ID NO: 159401 - DNA, 19 bp, Homo sapiens
  siRNA target sequence for PTPRZ1 (NM_002851.1,3635-3653).
cttcaactcagctcttatt

SEQ ID NO: 159402 - DNA, 19 bp, Homo sapiens
  siRNA target sequence for PTPRZ1 (NM_002851.1,3660-3678).
gacctcagcttcttttagt

SEQ ID NO: 159403 - DNA, 19 bp, Homo sapiens
  siRNA target sequence for PTPRZ1 (NM_002851.1,3723-3741).
caccttgcttaaaactgtt

SEQ ID NO: 159404 - DNA, 19 bp, Homo sapiens
  siRNA target sequence for PTPRZ1 (NM_002851.1,3755-3773).
ccagtgatccaatattggt

SEQ ID NO: 159405 - DNA, 19 bp, Homo sapiens
  siRNA target sequence for PTPRZ1 (NM_002851.1,3756-3774).
cagtgatccaatattggtt

SEQ ID NO: 159406 - DNA, 19 bp, Homo sapiens
  siRNA target sequence for PTPRZ1 (NM_002851.1,3771-3789).
ggttgaaacccccaaagtt

SEQ ID NO: 159407 - DNA, 19 bp, Homo sapiens
  siRNA target sequence for PTPRZ1 (NM_002851.1,3775-3793).
gaaacccccaaagttgata

SEQ ID NO: 159408 - DNA, 19 bp, Homo sapiens
  siRNA target sequence for PTPRZ1 (NM_002851.1,3783-3801).
caaagttgataaaattagt

SEQ ID NO: 159409 - DNA, 19 bp, Homo sapiens
  siRNA target sequence for PTPRZ1 (NM_002851.1,3803-3821).
ctacaatgttgcatctcat

SEQ ID NO: 159410 - DNA, 19 bp, Homo sapiens
  siRNA target sequence for PTPRZ1 (NM_002851.1,3852-3870).
gctgcactctacatctgta

SEQ ID NO: 159411 - DNA, 19 bp, Homo sapiens
  siRNA target sequence for PTPRZ1 (NM_002851.1,3866-3884).
ctgtaccagtttttgatgt

SEQ ID NO: 159412 - DNA, 19 bp, Homo sapiens
  siRNA target sequence for PTPRZ1 (NM_002851.1,3883-3901).
gtgtcgcctacttctcata

SEQ ID NO: 159413 - DNA, 19 bp, Homo sapiens
  siRNA target sequence for PTPRZ1 (NM_002851.1,3887-3905).
cgcctacttctcatatgca

SEQ ID NO: 159414 - DNA, 19 bp, Homo sapiens
  siRNA target sequence for PTPRZ1 (NM_002851.1,3916-3934).
cttcaaggtttgaccattt

SEQ ID NO: 159415 - DNA, 19 bp, Homo sapiens
  siRNA target sequence for PTPRZ1 (NM_002851.1,3919-3937).
caaggtttgaccatttcct

SEQ ID NO: 159416 - DNA, 19 bp, Homo sapiens
  siRNA target sequence for PTPRZ1 (NM_002851.1,3936-3954).
ctatgcaagtgagaaatat

SEQ ID NO: 159417 - DNA, 19 bp, Homo sapiens
  siRNA target sequence for PTPRZ1 (NM_002851.1,3988-4006).
caagtggtaccttctttgt

SEQ ID NO: 159418 - DNA, 19 bp, Homo sapiens
  siRNA target sequence for PTPRZ1 (NM_002851.1,3994-4012).
gtaccttctttgtacagta

SEQ ID NO: 159419 - DNA, 19 bp, Homo sapiens
  siRNA target sequence for PTPRZ1 (NM_002851.1,4088-4106).
cacctgttttatcaattga

SEQ ID NO: 159420 - DNA, 19 bp, Homo sapiens
  siRNA target sequence for PTPRZ1 (NM_002851.1,4108-4126).
gaaccattaaatacactaa

SEQ ID NO: 159421 - DNA, 19 bp, Homo sapiens
  siRNA target sequence for PTPRZ1 (NM_002851.1,4141-4159).
cattccgatgaaattttaa

SEQ ID NO: 159422 - DNA, 19 bp, Homo sapiens
  siRNA target sequence for PTPRZ1 (NM_002851.1,4164-4182).
caccaaaagttctgttact

SEQ ID NO: 159423 - DNA, 19 bp, Homo sapiens
  siRNA target sequence for PTPRZ1 (NM_002851.1,4175-4193).
ctgttactggtaaggtatt

SEQ ID NO: 159424 - DNA, 19 bp, Homo sapiens
  siRNA target sequence for PTPRZ1 (NM_002851.1,4204-4222).
ccaacagttgcttctgata

SEQ ID NO: 159425 - DNA, 19 bp, Homo sapiens
  siRNA target sequence for PTPRZ1 (NM_002851.1,4235-4253).
ctgatcattctgttcctat

SEQ ID NO: 159426 - DNA, 19 bp, Homo sapiens
  siRNA target sequence for PTPRZ1 (NM_002851.1,4353-4371).
gagtcatagtgccaaatct

SEQ ID NO: 159427 - DNA, 19 bp, Homo sapiens
  siRNA target sequence for PTPRZ1 (NM_002851.1,4355-4373).
gtcatagtgccaaatctga

SEQ ID NO: 159428 - DNA, 19 bp, Homo sapiens
  siRNA target sequence for PTPRZ1 (NM_002851.1,4447-4465).
gatggcttatccattcata

SEQ ID NO: 159429 - DNA, 19 bp, Homo sapiens
  siRNA target sequence for PTPRZ1 (NM_002851.1,4450-4468).
ggcttatccattcataagt

SEQ ID NO: 159430 - DNA, 19 bp, Homo sapiens
  siRNA target sequence for PTPRZ1 (NM_002851.1,4458-4476).
cattcataagtgtatgtca

SEQ ID NO: 159431 - DNA, 19 bp, Homo sapiens
  siRNA target sequence for PTPRZ1 (NM_002851.1,4526-4544).
cccacgaaaacagtcttat

SEQ ID NO: 159432 - DNA, 19 bp, Homo sapiens
  siRNA target sequence for PTPRZ1 (NM_002851.1,4536-4554).
cagtcttatggatcagaat

SEQ ID NO: 159433 - DNA, 19 bp, Homo sapiens
  siRNA target sequence for PTPRZ1 (NM_002851.1,4538-4556).
gtcttatggatcagaataa

SEQ ID NO: 159434 - DNA, 19 bp, Homo sapiens
  siRNA target sequence for PTPRZ1 (NM_002851.1,4558-4576).
ccaatctcatactcactat

SEQ ID NO: 159435 - DNA, 19 bp, Homo sapiens
  siRNA target sequence for PTPRZ1 (NM_002851.1,4569-4587).
ctcactatctgagaattct

SEQ ID NO: 159436 - DNA, 19 bp, Homo sapiens
  siRNA target sequence for PTPRZ1 (NM_002851.1,4738-4756).
cctctcagccctgaatcta

SEQ ID NO: 159437 - DNA, 19 bp, Homo sapiens
  siRNA target sequence for PTPRZ1 (NM_002851.1,4739-4757).
ctctcagccctgaatctaa

SEQ ID NO: 159438 - DNA, 19 bp, Homo sapiens
  siRNA target sequence for PTPRZ1 (NM_002851.1,4764-4782).
ggcagttctgacaagtgat

SEQ ID NO: 159439 - DNA, 19 bp, Homo sapiens
  siRNA target sequence for PTPRZ1 (NM_002851.1,4798-4816).
gggcaaggtacctcagata

SEQ ID NO: 159440 - DNA, 19 bp, Homo sapiens
  siRNA target sequence for PTPRZ1 (NM_002851.1,4811-4829).
cagatagccttaatgagaa

SEQ ID NO: 159441 - DNA, 19 bp, Homo sapiens
  siRNA target sequence for PTPRZ1 (NM_002851.1,4850-4868).
gttttgcagacactaatga

SEQ ID NO: 159442 - DNA, 19 bp, Homo sapiens
  siRNA target sequence for PTPRZ1 (NM_002851.1,4929-4947).
gtccccaacatcatctgtt

SEQ ID NO: 159443 - DNA, 19 bp, Homo sapiens
  siRNA target sequence for PTPRZ1 (NM_002851.1,5004-5022).
ccatgagtctcgtattggt

SEQ ID NO: 159444 - DNA, 19 bp, Homo sapiens
  siRNA target sequence for PTPRZ1 (NM_002851.1,5023-5041).
ctagctgaggggttggaat

SEQ ID NO: 159445 - DNA, 19 bp, Homo sapiens
  siRNA target sequence for PTPRZ1 (NM_002851.1,5033-5051).
ggttggaatccgagaagaa

SEQ ID NO: 159446 - DNA, 19 bp, Homo sapiens
  siRNA target sequence for PTPRZ1 (NM_002851.1,5074-5092).
gtgtcagccctgactttta

SEQ ID NO: 159447 - DNA, 19 bp, Homo sapiens
  siRNA target sequence for PTPRZ1 (NM_002851.1,5143-5161).
cagactgcacacttttact

SEQ ID NO: 159448 - DNA, 19 bp, Homo sapiens
  siRNA target sequence for PTPRZ1 (NM_002851.1,5169-5187).
cagtacatcccctagagtt

SEQ ID NO: 159449 - DNA, 19 bp, Homo sapiens
  siRNA target sequence for PTPRZ1 (NM_002851.1,5171-5189).
gtacatcccctagagttat

SEQ ID NO: 159450 - DNA, 19 bp, Homo sapiens
  siRNA target sequence for PTPRZ1 (NM_002851.1,5200-5218).
ccaacacctatctttccaa

SEQ ID NO: 159451 - DNA, 19 bp, Homo sapiens
  siRNA target sequence for PTPRZ1 (NM_002851.1,5227-5245).
gatgtcggagcaattccaa

SEQ ID NO: 159452 - DNA, 19 bp, Homo sapiens
  siRNA target sequence for PTPRZ1 (NM_002851.1,5282-5300).
caagtagtgggtttactga

SEQ ID NO: 159453 - DNA, 19 bp, Homo sapiens
  siRNA target sequence for PTPRZ1 (NM_002851.1,5400-5418).
caagaatcgatacataaat

SEQ ID NO: 159454 - DNA, 19 bp, Homo sapiens
  siRNA target sequence for PTPRZ1 (NM_002851.1,5464-5482).
gaaaaggatggcaaactga

SEQ ID NO: 159455 - DNA, 19 bp, Homo sapiens
  siRNA target sequence for PTPRZ1 (NM_002851.1,5470-5488).
gatggcaaactgactgatt

SEQ ID NO: 159456 - DNA, 19 bp, Homo sapiens
  siRNA target sequence for PTPRZ1 (NM_002851.1,5493-5511).
caatgccaattatgttgat

SEQ ID NO: 159457 - DNA, 19 bp, Homo sapiens
  siRNA target sequence for PTPRZ1 (NM_002851.1,5520-5538).
cagaccaaaagcttatatt

SEQ ID NO: 159458 - DNA, 19 bp, Homo sapiens
  siRNA target sequence for PTPRZ1 (NM_002851.1,5542-5560).
gcccaaggcccactgaaat

SEQ ID NO: 159459 - DNA, 19 bp, Homo sapiens
  siRNA target sequence for PTPRZ1 (NM_002851.1,5545-5563).
caaggcccactgaaatcca

SEQ ID NO: 159460 - DNA, 19 bp, Homo sapiens
  siRNA target sequence for PTPRZ1 (NM_002851.1,5604-5622).
ggaagttattgtcatgata

SEQ ID NO: 159461 - DNA, 19 bp, Homo sapiens
  siRNA target sequence for PTPRZ1 (NM_002851.1,5721-5739).
gcaagtgcttgcctattat

SEQ ID NO: 159462 - DNA, 19 bp, Homo sapiens
  siRNA target sequence for PTPRZ1 (NM_002851.1,5722-5740).
caagtgcttgcctattata

SEQ ID NO: 159463 - DNA, 19 bp, Homo sapiens
  siRNA target sequence for PTPRZ1 (NM_002851.1,6009-6027).
cgaaggaactgtcaacata

SEQ ID NO: 159464 - DNA, 19 bp, Homo sapiens
  siRNA target sequence for PTPRZ1 (NM_002851.1,6045-6063).
catccgttcacaaagaaat

SEQ ID NO: 159465 - DNA, 19 bp, Homo sapiens
  siRNA target sequence for PTPRZ1 (NM_002851.1,6081-6099).
ggagcaatatgtcttcatt

SEQ ID NO: 159466 - DNA, 19 bp, Homo sapiens
  siRNA target sequence for PTPRZ1 (NM_002851.1,6111-6129).
ggttgaggccatacttagt

SEQ ID NO: 159467 - DNA, 19 bp, Homo sapiens
  siRNA target sequence for PTPRZ1 (NM_002851.1,6112-6130).
gttgaggccatacttagta

SEQ ID NO: 159468 - DNA, 19 bp, Homo sapiens
  siRNA target sequence for PTPRZ1 (NM_002851.1,6117-6135).
ggccatacttagtaaagaa

SEQ ID NO: 159469 - DNA, 19 bp, Homo sapiens
  siRNA target sequence for PTPRZ1 (NM_002851.1,6118-6136).
gccatacttagtaaagaaa

SEQ ID NO: 159470 - DNA, 19 bp, Homo sapiens
  siRNA target sequence for PTPRZ1 (NM_002851.1,6144-6162).
gctggacagtcatattcat

SEQ ID NO: 159471 - DNA, 19 bp, Homo sapiens
  siRNA target sequence for PTPRZ1 (NM_002851.1,6229-6247).
ctcctgagccagtcaaata

SEQ ID NO: 159472 - DNA, 19 bp, Homo sapiens
  siRNA target sequence for PTPRZ1 (NM_002851.1,6291-6309).
ggaaaagaatcgaacttct

SEQ ID NO: 159473 - DNA, 19 bp, Homo sapiens
  siRNA target sequence for PTPRZ1 (NM_002851.1,6292-6310).
gaaaagaatcgaacttctt

SEQ ID NO: 159474 - DNA, 19 bp, Homo sapiens
  siRNA target sequence for PTPRZ1 (NM_002851.1,6399-6417).
ctattaccagagcaatgaa

SEQ ID NO: 159475 - DNA, 19 bp, Homo sapiens
  siRNA target sequence for PTPRZ1 (NM_002851.1,6442-6460).
cttcataccatcaaggatt

SEQ ID NO: 159476 - DNA, 19 bp, Homo sapiens
  siRNA target sequence for PTPRZ1 (NM_002851.1,6488-6506).
cccaactggtggttatgat

SEQ ID NO: 159477 - DNA, 19 bp, Homo sapiens
  siRNA target sequence for PTPRZ1 (NM_002851.1,6489-6507).
ccaactggtggttatgatt

SEQ ID NO: 159478 - DNA, 19 bp, Homo sapiens
  siRNA target sequence for PTPRZ1 (NM_002851.1,6604-6622).
gaagaacacaaatgtctat

SEQ ID NO: 159479 - DNA, 19 bp, Homo sapiens
  siRNA target sequence for PTPRZ1 (NM_002851.1,6607-6625).
gaacacaaatgtctatcta

SEQ ID NO: 159480 - DNA, 19 bp, Homo sapiens
  siRNA target sequence for PTPRZ1 (NM_002851.1,6617-6635).
gtctatctaatgaggaaaa

SEQ ID NO: 159481 - DNA, 19 bp, Homo sapiens
  siRNA target sequence for PTPRZ1 (NM_002851.1,6637-6655).
cttataattcaggacttta

SEQ ID NO: 159482 - DNA, 19 bp, Homo sapiens
  siRNA target sequence for PTPRZ1 (NM_002851.1,6668-6686).
cacaggatgattatgtact

SEQ ID NO: 159483 - DNA, 19 bp, Homo sapiens
  siRNA target sequence for PTPRZ1 (NM_002851.1,6727-6745).
gatagccccattagtaaaa

SEQ ID NO: 159484 - DNA, 19 bp, Homo sapiens
  siRNA target sequence for PTPRZ1 (NM_002851.1,6788-6806).
gggatgggcctatgattgt

SEQ ID NO: 159485 - DNA, 19 bp, Homo sapiens
  siRNA target sequence for PTPRZ1 (NM_002851.1,6789-6807).
ggatgggcctatgattgtt

SEQ ID NO: 159486 - DNA, 19 bp, Homo sapiens
  siRNA target sequence for PTPRZ1 (NM_002851.1,6794-6812).
ggcctatgattgttcatga

SEQ ID NO: 159487 - DNA, 19 bp, Homo sapiens
  siRNA target sequence for PTPRZ1 (NM_002851.1,6795-6813).
gcctatgattgttcatgat

SEQ ID NO: 159488 - DNA, 19 bp, Homo sapiens
  siRNA target sequence for PTPRZ1 (NM_002851.1,6857-6875).
cccttatgcaccaactaga

SEQ ID NO: 159489 - DNA, 19 bp, Homo sapiens
  siRNA target sequence for PTPRZ1 (NM_002851.1,6858-6876).
ccttatgcaccaactagaa

SEQ ID NO: 159490 - DNA, 19 bp, Homo sapiens
  siRNA target sequence for PTPRZ1 (NM_002851.1,6859-6877).
cttatgcaccaactagaaa

SEQ ID NO: 159491 - DNA, 19 bp, Homo sapiens
  siRNA target sequence for PTPRZ1 (NM_002851.1,6903-6921).
ggtagccaagatgatcaat

SEQ ID NO: 159492 - DNA, 19 bp, Homo sapiens
  siRNA target sequence for PTPRZ1 (NM_002851.1,6908-6926).
ccaagatgatcaatctgat

SEQ ID NO: 159493 - DNA, 19 bp, Homo sapiens
  siRNA target sequence for PTPRZ1 (NM_002851.1,6952-6970).
gagcagtatcagtttctct

SEQ ID NO: 159494 - DNA, 19 bp, Homo sapiens
  siRNA target sequence for PTPRZ1 (NM_002851.1,7045-7063).
gcattgcctgatggaaata

SEQ ID NO: 159495 - DNA, 19 bp, Homo sapiens
  siRNA target sequence for PTPRZ1 (NM_002851.1,7050-7068).
gcctgatggaaatatagct

SEQ ID NO: 159496 - DNA, 19 bp, Homo sapiens
  siRNA target sequence for RABIF (NM_002871.3,53-71).
cagccgagcgagttagtgt

SEQ ID NO: 159497 - DNA, 19 bp, Homo sapiens
  siRNA target sequence for RABIF (NM_002871.3,247-265).
ggttgaggacatgttcatt

SEQ ID NO: 159498 - DNA, 19 bp, Homo sapiens
  siRNA target sequence for RABIF (NM_002871.3,290-308).
gacgtgggcaacatcaagt

SEQ ID NO: 159499 - DNA, 19 bp, Homo sapiens
  siRNA target sequence for RABIF (NM_002871.3,314-332).
gtctgcgcagactgtgaaa

SEQ ID NO: 159500 - DNA, 19 bp, Homo sapiens
  siRNA target sequence for RABIF (NM_002871.3,345-363).
gctggcattgcctagatga

SEQ ID NO: 159501 - DNA, 19 bp, Homo sapiens
  siRNA target sequence for RABIF (NM_002871.3,348-366).
ggcattgcctagatgacaa

SEQ ID NO: 159502 - DNA, 19 bp, Homo sapiens
  siRNA target sequence for RABIF (NM_002871.3,356-374).
ctagatgacaagaacagtt

SEQ ID NO: 159503 - DNA, 19 bp, Homo sapiens
  siRNA target sequence for RAI17 (NM_020338.1,499-517).
gggtcgttcccctatgact

SEQ ID NO: 159504 - DNA, 19 bp, Homo sapiens
  siRNA target sequence for RAI17 (NM_020338.1,575-593).
cggtttggggagtaaccaa

SEQ ID NO: 159505 - DNA, 19 bp, Homo sapiens
  siRNA target sequence for RAI17 (NM_020338.1,699-717).
cctcaactccccacagttt

SEQ ID NO: 159506 - DNA, 19 bp, Homo sapiens
  siRNA target sequence for RAI17 (NM_020338.1,1042-1060).
gcgtataacagccaattca

SEQ ID NO: 159507 - DNA, 19 bp, Homo sapiens
  siRNA target sequence for RAI17 (NM_020338.1,1043-1061).
cgtataacagccaattcat

SEQ ID NO: 159508 - DNA, 19 bp, Homo sapiens
  siRNA target sequence for RAI17 (NM_020338.1,1261-1279).
cttcctattcagaacataa

SEQ ID NO: 159509 - DNA, 19 bp, Homo sapiens
  siRNA target sequence for RAI17 (NM_020338.1,1264-1282).
cctattcagaacataaaga

SEQ ID NO: 159510 - DNA, 19 bp, Homo sapiens
  siRNA target sequence for RAI17 (NM_020338.1,1294-1312).
ggagagcccaactatggaa

SEQ ID NO: 159511 - DNA, 19 bp, Homo sapiens
  siRNA target sequence for RAI17 (NM_020338.1,1295-1313).
gagagcccaactatggaaa

SEQ ID NO: 159512 - DNA, 19 bp, Homo sapiens
  siRNA target sequence for RAI17 (NM_020338.1,1517-1535).
cgggaagcagctacagtaa

SEQ ID NO: 159513 - DNA, 19 bp, Homo sapiens
  siRNA target sequence for RAI17 (NM_020338.1,1520-1538).
gaagcagctacagtaacta

SEQ ID NO: 159514 - DNA, 19 bp, Homo sapiens
  siRNA target sequence for RAI17 (NM_020338.1,1571-1589).
cggttcctgtggcaaatta

SEQ ID NO: 159515 - DNA, 19 bp, Homo sapiens
  siRNA target sequence for RAI17 (NM_020338.1,2170-2188).
cccgcagagcactgtatca

SEQ ID NO: 159516 - DNA, 19 bp, Homo sapiens
  siRNA target sequence for RAI17 (NM_020338.1,2179-2197).
cactgtatcacgaaaatca

SEQ ID NO: 159517 - DNA, 19 bp, Homo sapiens
  siRNA target sequence for RAI17 (NM_020338.1,2189-2207).
cgaaaatcaagcggaattt

SEQ ID NO: 159518 - DNA, 19 bp, Homo sapiens
  siRNA target sequence for RAI17 (NM_020338.1,2327-2345).
ctcgaggacacgattgcaa

SEQ ID NO: 159519 - DNA, 19 bp, Homo sapiens
  siRNA target sequence for RAI17 (NM_020338.1,2346-2364).
gcatgtgcagtgctttgat

SEQ ID NO: 159520 - DNA, 19 bp, Homo sapiens
  siRNA target sequence for RAI17 (NM_020338.1,2487-2505).
ccaacactccgagtttgaa

SEQ ID NO: 159521 - DNA, 19 bp, Homo sapiens
  siRNA target sequence for RAI17 (NM_020338.1,2546-2564).
ccatcaagtcggacttaca

SEQ ID NO: 159522 - DNA, 19 bp, Homo sapiens
  siRNA target sequence for RAI17 (NM_020338.1,2748-2766).
ccaaggccatggcaacttt

SEQ ID NO: 159523 - DNA, 19 bp, Homo sapiens
  siRNA target sequence for RAI17 (NM_020338.1,2791-2809).
gggacatccatgaatgact

SEQ ID NO: 159524 - DNA, 19 bp, Homo sapiens
  siRNA target sequence for RAI17 (NM_020338.1,2939-2957).
cctccatacaacaaggttt

SEQ ID NO: 159525 - DNA, 19 bp, Homo sapiens
  siRNA target sequence for RAI17 (NM_020338.1,3076-3094).
cacagcgacctgaccttta

SEQ ID NO: 159526 - DNA, 19 bp, Homo sapiens
  siRNA target sequence for RAI17 (NM_020338.1,3219-3237).
cgacctgccgagcaatagt

SEQ ID NO: 159527 - DNA, 19 bp, Homo sapiens
  siRNA target sequence for RAI17 (NM_020338.1,3220-3238).
gacctgccgagcaatagta

SEQ ID NO: 159528 - DNA, 19 bp, Homo sapiens
  siRNA target sequence for RAI17 (NM_020338.1,3225-3243).
gccgagcaatagtaacgat

SEQ ID NO: 159529 - DNA, 19 bp, Homo sapiens
  siRNA target sequence for RAI17 (NM_020338.1,3247-3265).
ctcctgtctctatttgaga

SEQ ID NO: 159530 - DNA, 19 bp, Homo sapiens
  siRNA target sequence for RFP2 (NM_005798.2,210-228).
cacatgccctatttgttgt

SEQ ID NO: 159531 - DNA, 19 bp, Homo sapiens
  siRNA target sequence for RFP2 (NM_005798.2,224-242).
gttgtagtctgtttgatga

SEQ ID NO: 159532 - DNA, 19 bp, Homo sapiens
  siRNA target sequence for RFP2 (NM_005798.2,284-302).
gcttagaaggtatcttaga

SEQ ID NO: 159533 - DNA, 19 bp, Homo sapiens
  siRNA target sequence for RFP2 (NM_005798.2,349-367).
cctacatgccgtaaggaaa

SEQ ID NO: 159534 - DNA, 19 bp, Homo sapiens
  siRNA target sequence for RFP2 (NM_005798.2,368-386).
cttcagctactggaattaa

SEQ ID NO: 159535 - DNA, 19 bp, Homo sapiens
  siRNA target sequence for RFP2 (NM_005798.2,414-432).
gggtattgtggaaaagtat

SEQ ID NO: 159536 - DNA, 19 bp, Homo sapiens
  siRNA target sequence for RFP2 (NM_005798.2,421-439).
gtggaaaagtataacaaga

SEQ ID NO: 159537 - DNA, 19 bp, Homo sapiens
  siRNA target sequence for RFP2 (NM_005798.2,548-566).
gggagcacaccaaacatgt

SEQ ID NO: 159538 - DNA, 19 bp, Homo sapiens
  siRNA target sequence for RFP2 (NM_005798.2,692-710).
ggaaatccctacagttact

SEQ ID NO: 159539 - DNA, 19 bp, Homo sapiens
  siRNA target sequence for RFP2 (NM_005798.2,705-723).
gttactgactaaagattca

SEQ ID NO: 159540 - DNA, 19 bp, Homo sapiens
  siRNA target sequence for RFP2 (NM_005798.2,709-727).
ctgactaaagattcagata

SEQ ID NO: 159541 - DNA, 19 bp, Homo sapiens
  siRNA target sequence for RFP2 (NM_005798.2,711-729).
gactaaagattcagataaa

SEQ ID NO: 159542 - DNA, 19 bp, Homo sapiens
  siRNA target sequence for RFP2 (NM_005798.2,754-772).
caacacacactggatcaaa

SEQ ID NO: 159543 - DNA, 19 bp, Homo sapiens
  siRNA target sequence for RFP2 (NM_005798.2,803-821).
ccatgaaacttgctgttat

SEQ ID NO: 159544 - DNA, 19 bp, Homo sapiens
  siRNA target sequence for RFP2 (NM_005798.2,807-825).
gaaacttgctgttatgcaa

SEQ ID NO: 159545 - DNA, 19 bp, Homo sapiens
  siRNA target sequence for RFP2 (NM_005798.2,815-833).
ctgttatgcaagcatatga

SEQ ID NO: 159546 - DNA, 19 bp, Homo sapiens
  siRNA target sequence for RFP2 (NM_005798.2,910-928).
gtgtcagaacccattgtat

SEQ ID NO: 159547 - DNA, 19 bp, Homo sapiens
  siRNA target sequence for RFP2 (NM_005798.2,912-930).
gtcagaacccattgtattt

SEQ ID NO: 159548 - DNA, 19 bp, Homo sapiens
  siRNA target sequence for RFP2 (NM_005798.2,1003-1021).
cctgcaagccctttaatga

SEQ ID NO: 159549 - DNA, 19 bp, Homo sapiens
  siRNA target sequence for RFP2 (NM_005798.2,1004-1022).
ctgcaagccctttaatgaa

SEQ ID NO: 159550 - DNA, 19 bp, Homo sapiens
  siRNA target sequence for RFP2 (NM_005798.2,1006-1024).
gcaagccctttaatgaaga

SEQ ID NO: 159551 - DNA, 19 bp, Homo sapiens
  siRNA target sequence for RFP2 (NM_005798.2,1098-1116).
cacattcattagcaagatt

SEQ ID NO: 159552 - DNA, 19 bp, Homo sapiens
  siRNA target sequence for RFP2 (NM_005798.2,1113-1131).
gattccctggagcttttat

SEQ ID NO: 159553 - DNA, 19 bp, Homo sapiens
  siRNA target sequence for RFP2 (NM_005798.2,1117-1135).
ccctggagcttttataagt

SEQ ID NO: 159554 - DNA, 19 bp, Homo sapiens
  siRNA target sequence for RFP2 (NM_005798.2,1118-1136).
cctggagcttttataagtt

SEQ ID NO: 159555 - DNA, 19 bp, Homo sapiens
  siRNA target sequence for RFP2 (NM_005798.2,1180-1198).
cctaccatgttcctagaat

SEQ ID NO: 159556 - DNA, 19 bp, Homo sapiens
  siRNA target sequence for RFP2 (NM_005798.2,1191-1209).
cctagaatggtcattattt

SEQ ID NO: 159557 - DNA, 19 bp, Homo sapiens
  siRNA target sequence for RFP2 (NM_005798.2,1231-1249).
ggctgtctttcaaacttca

SEQ ID NO: 159558 - DNA, 19 bp, Homo sapiens
  siRNA target sequence for RFP2 (NM_005798.2,1268-1286).
cagccgatttcatagaaca

SEQ ID NO: 159559 - DNA, 19 bp, Homo sapiens
  siRNA target sequence for RFP2 (NM_005798.2,1270-1288).
gccgatttcatagaacaat

SEQ ID NO: 159560 - DNA, 19 bp, Homo sapiens
  siRNA target sequence for RFP2 (NM_005798.2,1272-1290).
cgatttcatagaacaatca

SEQ ID NO: 159561 - DNA, 19 bp, Homo sapiens
  siRNA target sequence for RFP2 (NM_005798.2,1278-1296).
catagaacaatcagttttt

SEQ ID NO: 159562 - DNA, 19 bp, Homo sapiens
  siRNA target sequence for RFP2 (NM_005798.2,1378-1396).
gcagaatttgtgtgcaaat

SEQ ID NO: 159563 - DNA, 19 bp, Homo sapiens
  siRNA target sequence for RFP2 (NM_005798.2,1379-1397).
cagaatttgtgtgcaaata

SEQ ID NO: 159564 - DNA, 19 bp, Homo sapiens
  siRNA target sequence for RFP2 (NM_052811.1,1333-1351).
cagttcctatctgactaaa

SEQ ID NO: 159565 - DNA, 19 bp, Homo sapiens
  siRNA target sequence for RFWD1 (NM_032271.1,480-498).
ccgtggacaacgtcaaact

SEQ ID NO: 159566 - DNA, 19 bp, Homo sapiens
  siRNA target sequence for RFWD1 (NM_032271.1,482-500).
gtggacaacgtcaaactga

SEQ ID NO: 159567 - DNA, 19 bp, Homo sapiens
  siRNA target sequence for RFWD1 (NM_032271.1,751-769).
ggagtgcgagcacatcaaa

SEQ ID NO: 159568 - DNA, 19 bp, Homo sapiens
  siRNA target sequence for RFWD1 (NM_032271.1,1061-1079).
cgggacgcatccatgttaa

SEQ ID NO: 159569 - DNA, 19 bp, Homo sapiens
  siRNA target sequence for RFWD1 (NM_032271.1,1062-1080).
gggacgcatccatgttaaa

SEQ ID NO: 159570 - DNA, 19 bp, Homo sapiens
  siRNA target sequence for RFWD1 (NM_032271.1,1063-1081).
ggacgcatccatgttaaat

SEQ ID NO: 159571 - DNA, 19 bp, Homo sapiens
  siRNA target sequence for RFWD1 (NM_032271.1,1365-1383).
cagactgcaccatcattgt

SEQ ID NO: 159572 - DNA, 19 bp, Homo sapiens
  siRNA target sequence for RFWD1 (NM_032271.1,1514-1532).
ggcactgagctgaagttga

SEQ ID NO: 159573 - DNA, 19 bp, Homo sapiens
  siRNA target sequence for RFWD1 (NM_032271.1,1515-1533).
gcactgagctgaagttgaa

SEQ ID NO: 159574 - DNA, 19 bp, Homo sapiens
  siRNA target sequence for RFWD1 (NM_032271.1,1599-1617).
gcggctcctaccagacaat

SEQ ID NO: 159575 - DNA, 19 bp, Homo sapiens
  siRNA target sequence for RFWD1 (NM_032271.1,1684-1702).
ctccattgctgtgacaaat

SEQ ID NO: 159576 - DNA, 19 bp, Homo sapiens
  siRNA target sequence for RFWD1 (NM_032271.1,1739-1757).
cacgtgtgggacattgagt

SEQ ID NO: 159577 - DNA, 19 bp, Homo sapiens
  siRNA target sequence for RFWD1 (NM_032271.1,1878-1896).
ggagtatggacaacatgat

SEQ ID NO: 159578 - DNA, 19 bp, Homo sapiens
  siRNA target sequence for RIMS1 (NM_014989.1,562-580).
caccgagattgcatcaaca

SEQ ID NO: 159579 - DNA, 19 bp, Homo sapiens
  siRNA target sequence for RIMS1 (NM_014989.1,568-586).
gattgcatcaacagtttga

SEQ ID NO: 159580 - DNA, 19 bp, Homo sapiens
  siRNA target sequence for RIMS1 (NM_014989.1,576-594).
caacagtttgaaagctata

SEQ ID NO: 159581 - DNA, 19 bp, Homo sapiens
  siRNA target sequence for RIMS1 (NM_014989.1,718-736).
cctattgtcgcactaagtt

SEQ ID NO: 159582 - DNA, 19 bp, Homo sapiens
  siRNA target sequence for RIMS1 (NM_014989.1,759-777).
gtgtctctacggtcaaaca

SEQ ID NO: 159583 - DNA, 19 bp, Homo sapiens
  siRNA target sequence for RIMS1 (NM_014989.1,792-810).
gttatgtgggtatgcaatt

SEQ ID NO: 159584 - DNA, 19 bp, Homo sapiens
  siRNA target sequence for RIMS1 (NM_014989.1,797-815).
gtgggtatgcaatttatgt

SEQ ID NO: 159585 - DNA, 19 bp, Homo sapiens
  siRNA target sequence for RIMS1 (NM_014989.1,806-824).
caatttatgtcgaaagcaa

SEQ ID NO: 159586 - DNA, 19 bp, Homo sapiens
  siRNA target sequence for RIMS1 (NM_014989.1,925-943).
ctgaggtaccaagagaaaa

SEQ ID NO: 159587 - DNA, 19 bp, Homo sapiens
  siRNA target sequence for RIMS1 (NM_014989.1,927-945).
gaggtaccaagagaaaaga

SEQ ID NO: 159588 - DNA, 19 bp, Homo sapiens
  siRNA target sequence for RIMS1 (NM_014989.1,929-947).
ggtaccaagagaaaagaaa

SEQ ID NO: 159589 - DNA, 19 bp, Homo sapiens
  siRNA target sequence for RIMS1 (NM_014989.1,1239-1257).
gaacgggagcgcaaagaaa

SEQ ID NO: 159590 - DNA, 19 bp, Homo sapiens
  siRNA target sequence for RIMS1 (NM_014989.1,1773-1791).
ctgcggaacgactctttga

SEQ ID NO: 159591 - DNA, 19 bp, Homo sapiens
  siRNA target sequence for RIMS1 (NM_014989.1,1957-1975).
gcgagaaaggtgatttgga

SEQ ID NO: 159592 - DNA, 19 bp, Homo sapiens
  siRNA target sequence for RIMS1 (NM_014989.1,1958-1976).
cgagaaaggtgatttggat

SEQ ID NO: 159593 - DNA, 19 bp, Homo sapiens
  siRNA target sequence for RIMS1 (NM_014989.1,2010-2028).
cgggagacatcacctatta

SEQ ID NO: 159594 - DNA, 19 bp, Homo sapiens
  siRNA target sequence for RIMS1 (NM_014989.1,2013-2031).
gagacatcacctattagtt

SEQ ID NO: 159595 - DNA, 19 bp, Homo sapiens
  siRNA target sequence for RIMS1 (NM_014989.1,2063-2081).
gggggaccgattaattgga

SEQ ID NO: 159596 - DNA, 19 bp, Homo sapiens
  siRNA target sequence for RIMS1 (NM_014989.1,2071-2089).
gattaattggacgtgttat

SEQ ID NO: 159597 - DNA, 19 bp, Homo sapiens
  siRNA target sequence for RIMS1 (NM_014989.1,2079-2097).
ggacgtgttattcttaaca

SEQ ID NO: 159598 - DNA, 19 bp, Homo sapiens
  siRNA target sequence for RIMS1 (NM_014989.1,2080-2098).
gacgtgttattcttaacaa

SEQ ID NO: 159599 - DNA, 19 bp, Homo sapiens
  siRNA target sequence for RIMS1 (NM_014989.1,2082-2100).
cgtgttattcttaacaaga

SEQ ID NO: 159600 - DNA, 19 bp, Homo sapiens
  siRNA target sequence for RIMS1 (NM_014989.1,2173-2191).
gacgacttggtgctttcat

SEQ ID NO: 159601 - DNA, 19 bp, Homo sapiens
  siRNA target sequence for RIMS1 (NM_014989.1,2175-2193).
cgacttggtgctttcatca

SEQ ID NO: 159602 - DNA, 19 bp, Homo sapiens
  siRNA target sequence for RIMS1 (NM_014989.1,2207-2225).
gggtagcctagcagatgta

SEQ ID NO: 159603 - DNA, 19 bp, Homo sapiens
  siRNA target sequence for RIMS1 (NM_014989.1,2244-2262).
ggggatgaagttctagaat

SEQ ID NO: 159604 - DNA, 19 bp, Homo sapiens
  siRNA target sequence for RIMS1 (NM_014989.1,2279-2297).
gccgggagctacaaatgaa

SEQ ID NO: 159605 - DNA, 19 bp, Homo sapiens
  siRNA target sequence for RIMS1 (NM_014989.1,2286-2304).
gctacaaatgaagaagttt

SEQ ID NO: 159606 - DNA, 19 bp, Homo sapiens
  siRNA target sequence for RIMS1 (NM_014989.1,2335-2353).
ctcaagttgaaattattgt

SEQ ID NO: 159607 - DNA, 19 bp, Homo sapiens
  siRNA target sequence for RIMS1 (NM_014989.1,2441-2459).
gatggaaaggccttccatt

SEQ ID NO: 159608 - DNA, 19 bp, Homo sapiens
  siRNA target sequence for RIMS1 (NM_014989.1,2444-2462).
ggaaaggccttccatttct

SEQ ID NO: 159609 - DNA, 19 bp, Homo sapiens
  siRNA target sequence for RIMS1 (NM_014989.1,2476-2494).
caagtcctggagctctaaa

SEQ ID NO: 159610 - DNA, 19 bp, Homo sapiens
  siRNA target sequence for RIMS1 (NM_014989.1,2479-2497).
gtcctggagctctaaaaga

SEQ ID NO: 159611 - DNA, 19 bp, Homo sapiens
  siRNA target sequence for RIMS1 (NM_014989.1,2508-2526).
gtcttaccagggcaacttt

SEQ ID NO: 159612 - DNA, 19 bp, Homo sapiens
  siRNA target sequence for RIMS1 (NM_014989.1,2518-2536).
ggcaactttctgtgaagtt

SEQ ID NO: 159613 - DNA, 19 bp, Homo sapiens
  siRNA target sequence for RIMS1 (NM_014989.1,2520-2538).
caactttctgtgaagttgt

SEQ ID NO: 159614 - DNA, 19 bp, Homo sapiens
  siRNA target sequence for RIMS1 (NM_014989.1,2529-2547).
gtgaagttgtggtatgata

SEQ ID NO: 159615 - DNA, 19 bp, Homo sapiens
  siRNA target sequence for RIMS1 (NM_014989.1,2531-2549).
gaagttgtggtatgataaa

SEQ ID NO: 159616 - DNA, 19 bp, Homo sapiens
  siRNA target sequence for RIMS1 (NM_014989.1,2552-2570).
gggacaccagctgattgta

SEQ ID NO: 159617 - DNA, 19 bp, Homo sapiens
  siRNA target sequence for RIMS1 (NM_014989.1,2616-2634).
cctcgaaatccctatgtaa

SEQ ID NO: 159618 - DNA, 19 bp, Homo sapiens
  siRNA target sequence for RIMS1 (NM_014989.1,2619-2637).
cgaaatccctatgtaaaaa

SEQ ID NO: 159619 - DNA, 19 bp, Homo sapiens
  siRNA target sequence for RIMS1 (NM_014989.1,2620-2638).
gaaatccctatgtaaaaat

SEQ ID NO: 159620 - DNA, 19 bp, Homo sapiens
  siRNA target sequence for RIMS1 (NM_014989.1,2713-2731).
ggaatcaaacttttgtcta

SEQ ID NO: 159621 - DNA, 19 bp, Homo sapiens
  siRNA target sequence for RIMS1 (NM_014989.1,2714-2732).
gaatcaaacttttgtctat

SEQ ID NO: 159622 - DNA, 19 bp, Homo sapiens
  siRNA target sequence for RIMS1 (NM_014989.1,2736-2754).
catgtacatcgtagagatt

SEQ ID NO: 159623 - DNA, 19 bp, Homo sapiens
  siRNA target sequence for RIMS1 (NM_014989.1,2826-2844).
ggagagatcctcatagaat

SEQ ID NO: 159624 - DNA, 19 bp, Homo sapiens
  siRNA target sequence for RIMS1 (NM_014989.1,2827-2845).
gagagatcctcatagaatt

SEQ ID NO: 159625 - DNA, 19 bp, Homo sapiens
  siRNA target sequence for RIMS1 (NM_014989.1,2846-2864).
ggagacagcgcttttagat

SEQ ID NO: 159626 - DNA, 19 bp, Homo sapiens
  siRNA target sequence for RIMS1 (NM_014989.1,2849-2867).
gacagcgcttttagatgat

SEQ ID NO: 159627 - DNA, 19 bp, Homo sapiens
  siRNA target sequence for RIMS1 (NM_014989.1,2865-2883).
gatgaaccgcattggtata

SEQ ID NO: 159628 - DNA, 19 bp, Homo sapiens
  siRNA target sequence for RIMS1 (NM_014989.1,3003-3021).
gatagtgacatctcagatt

SEQ ID NO: 159629 - DNA, 19 bp, Homo sapiens
  siRNA target sequence for RIMS1 (NM_014989.1,3075-3093).
gctagagaaagtaaatcta

SEQ ID NO: 159630 - DNA, 19 bp, Homo sapiens
  siRNA target sequence for RIMS1 (NM_014989.1,3081-3099).
gaaagtaaatctacaacat

SEQ ID NO: 159631 - DNA, 19 bp, Homo sapiens
  siRNA target sequence for RIMS1 (NM_014989.1,3132-3150).
caccgctcacgttcagtat

SEQ ID NO: 159632 - DNA, 19 bp, Homo sapiens
  siRNA target sequence for RIMS1 (NM_014989.1,3134-3152).
ccgctcacgttcagtatct

SEQ ID NO: 159633 - DNA, 19 bp, Homo sapiens
  siRNA target sequence for RIMS1 (NM_014989.1,3179-3197).
gccgcgttcacgtttacca

SEQ ID NO: 159634 - DNA, 19 bp, Homo sapiens
  siRNA target sequence for RIMS1 (NM_014989.1,3180-3198).
ccgcgttcacgtttaccaa

SEQ ID NO: 159635 - DNA, 19 bp, Homo sapiens
  siRNA target sequence for RIMS1 (NM_014989.1,3181-3199).
cgcgttcacgtttaccaaa

SEQ ID NO: 159636 - DNA, 19 bp, Homo sapiens
  siRNA target sequence for RIMS1 (NM_014989.1,3182-3200).
gcgttcacgtttaccaaat

SEQ ID NO: 159637 - DNA, 19 bp, Homo sapiens
  siRNA target sequence for RIMS1 (NM_014989.1,3203-3221).
gccattacagaggagttta

SEQ ID NO: 159638 - DNA, 19 bp, Homo sapiens
  siRNA target sequence for RIMS1 (NM_014989.1,3205-3223).
cattacagaggagtttaga

SEQ ID NO: 159639 - DNA, 19 bp, Homo sapiens
  siRNA target sequence for RIMS1 (NM_014989.1,3225-3243).
gaaattcatccaacaagaa

SEQ ID NO: 159640 - DNA, 19 bp, Homo sapiens
  siRNA target sequence for RIMS1 (NM_014989.1,3277-3295).
cccgaagtccagttgatca

SEQ ID NO: 159641 - DNA, 19 bp, Homo sapiens
  siRNA target sequence for RIMS1 (NM_014989.1,3278-3296).
ccgaagtccagttgatcat

SEQ ID NO: 159642 - DNA, 19 bp, Homo sapiens
  siRNA target sequence for RIMS1 (NM_014989.1,3279-3297).
cgaagtccagttgatcata

SEQ ID NO: 159643 - DNA, 19 bp, Homo sapiens
  siRNA target sequence for RIMS1 (NM_014989.1,3306-3324).
gatgtggatagtcagtatt

SEQ ID NO: 159644 - DNA, 19 bp, Homo sapiens
  siRNA target sequence for RIMS1 (NM_014989.1,3309-3327).
gtggatagtcagtatttat

SEQ ID NO: 159645 - DNA, 19 bp, Homo sapiens
  siRNA target sequence for RING1 (NM_002931.2,104-122).
ctcggtcactgcattcaga

SEQ ID NO: 159646 - DNA, 19 bp, Homo sapiens
  siRNA target sequence for RING1 (NM_002931.2,239-257).
gtcctacctgccgaaagaa

SEQ ID NO: 159647 - DNA, 19 bp, Homo sapiens
  siRNA target sequence for RING1 (NM_002931.2,302-320).
ccctgatctctaagatcta

SEQ ID NO: 159648 - DNA, 19 bp, Homo sapiens
  siRNA target sequence for RING1 (NM_002931.2,303-321).
cctgatctctaagatctat

SEQ ID NO: 159649 - DNA, 19 bp, Homo sapiens
  siRNA target sequence for RING1 (NM_002931.2,323-341).
ctagccgggaggaatacga

SEQ ID NO: 159650 - DNA, 19 bp, Homo sapiens
  siRNA target sequence for RING1 (NM_002931.2,824-842).
gccagacgaggtatgtgaa

SEQ ID NO: 159651 - DNA, 19 bp, Homo sapiens
  siRNA target sequence for RING1 (NM_002931.2,1045-1063).
ctggagggcgtcagtgaaa

SEQ ID NO: 159652 - DNA, 19 bp, Homo sapiens
  siRNA target sequence for RING1 (NM_002931.2,1098-1116).
ggcgttcacgacgttgaat

SEQ ID NO: 159653 - DNA, 19 bp, Homo sapiens
  siRNA target sequence for RNF129 (NM_152620.2,305-323).
ggatctagatgataccttt

SEQ ID NO: 159654 - DNA, 19 bp, Homo sapiens
  siRNA target sequence for RNF129 (NM_152620.2,375-393).
ccccagctccgtaatttga

SEQ ID NO: 159655 - DNA, 19 bp, Homo sapiens
  siRNA target sequence for RNF129 (NM_152620.2,381-399).
ctccgtaatttgactgaaa

SEQ ID NO: 159656 - DNA, 19 bp, Homo sapiens
  siRNA target sequence for RNF129 (NM_152620.2,480-498).
ctgaccctcttctgtgtta

SEQ ID NO: 159657 - DNA, 19 bp, Homo sapiens
  siRNA target sequence for RNF129 (NM_152620.2,482-500).
gaccctcttctgtgttaaa

SEQ ID NO: 159658 - DNA, 19 bp, Homo sapiens
  siRNA target sequence for RNF129 (NM_152620.2,526-544).
gcagtttctccactaaaca

SEQ ID NO: 159659 - DNA, 19 bp, Homo sapiens
  siRNA target sequence for RNF129 (NM_152620.2,612-630).
cttgagcccttgaggaata

SEQ ID NO: 159660 - DNA, 19 bp, Homo sapiens
  siRNA target sequence for RNF129 (NM_152620.2,639-657).
cgagttgaaaaagtgataa

SEQ ID NO: 159661 - DNA, 19 bp, Homo sapiens
  siRNA target sequence for RNF129 (NM_152620.2,770-788).
gattcttaggcagatacaa

SEQ ID NO: 159662 - DNA, 19 bp, Homo sapiens
  siRNA target sequence for RNF129 (NM_152620.2,1116-1134).
gctgtgcgatatgaaagaa

SEQ ID NO: 159663 - DNA, 19 bp, Homo sapiens
  siRNA target sequence for RNF129 (NM_152620.2,1193-1211).
ctctcagagatttagttct

SEQ ID NO: 159664 - DNA, 19 bp, Homo sapiens
  siRNA target sequence for RNF129 (NM_152620.2,1329-1347).
gcaattgggcgatacatga

SEQ ID NO: 159665 - DNA, 19 bp, Homo sapiens
  siRNA target sequence for RNF129 (NM_152620.2,1330-1348).
caattgggcgatacatgaa

SEQ ID NO: 159666 - DNA, 19 bp, Homo sapiens
  siRNA target sequence for RNF137 (NM_018073.5,569-587).
gaggatgtcttgataatgt

SEQ ID NO: 159667 - DNA, 19 bp, Homo sapiens
  siRNA target sequence for RNF137 (NM_018073.5,658-676).
gtacaagtgggaacttcat

SEQ ID NO: 159668 - DNA, 19 bp, Homo sapiens
  siRNA target sequence for RNF137 (NM_018073.5,681-699).
ccctcgaacatctgaagaa

SEQ ID NO: 159669 - DNA, 19 bp, Homo sapiens
  siRNA target sequence for RNF137 (NM_018073.5,682-700).
cctcgaacatctgaagaaa

SEQ ID NO: 159670 - DNA, 19 bp, Homo sapiens
  siRNA target sequence for RNF137 (NM_018073.5,767-785).
gtggaaacccgaaaacaga

SEQ ID NO: 159671 - DNA, 19 bp, Homo sapiens
  siRNA target sequence for RNF137 (NM_018073.5,775-793).
ccgaaaacagagtattgta

SEQ ID NO: 159672 - DNA, 19 bp, Homo sapiens
  siRNA target sequence for RNF137 (NM_018073.5,791-809).
gtatgggagtttgaaaaat

SEQ ID NO: 159673 - DNA, 19 bp, Homo sapiens
  siRNA target sequence for RNF137 (NM_018073.5,795-813).
gggagtttgaaaaatacca

SEQ ID NO: 159674 - DNA, 19 bp, Homo sapiens
  siRNA target sequence for RNF137 (NM_018073.5,900-918).
cggagaccatgcagaaact

SEQ ID NO: 159675 - DNA, 19 bp, Homo sapiens
  siRNA target sequence for RNF137 (NM_018073.5,967-985).
gatgattgcagagttgaaa

SEQ ID NO: 159676 - DNA, 19 bp, Homo sapiens
  siRNA target sequence for RNF137 (NM_018073.5,1008-1026).
gctggatgttgcaggatat

SEQ ID NO: 159677 - DNA, 19 bp, Homo sapiens
  siRNA target sequence for RNF137 (NM_018073.5,1009-1027).
ctggatgttgcaggatatt

SEQ ID NO: 159678 - DNA, 19 bp, Homo sapiens
  siRNA target sequence for RNF137 (NM_018073.5,1011-1029).
ggatgttgcaggatattca

SEQ ID NO: 159679 - DNA, 19 bp, Homo sapiens
  siRNA target sequence for RNF137 (NM_018073.5,1034-1052).
gtgttaaacaggagcaaat

SEQ ID NO: 159680 - DNA, 19 bp, Homo sapiens
  siRNA target sequence for RNF137 (NM_018073.5,1036-1054).
gttaaacaggagcaaatct

SEQ ID NO: 159681 - DNA, 19 bp, Homo sapiens
  siRNA target sequence for RNF137 (NM_018073.5,1077-1095).
caatctccctggagttgaa

SEQ ID NO: 159682 - DNA, 19 bp, Homo sapiens
  siRNA target sequence for RNF137 (NM_018073.5,1107-1125).
gtgtgctggggctaagaga

SEQ ID NO: 159683 - DNA, 19 bp, Homo sapiens
  siRNA target sequence for RNF137 (NM_018073.5,1122-1140).
gagagatcctgaagactta

SEQ ID NO: 159684 - DNA, 19 bp, Homo sapiens
  siRNA target sequence for RNF137 (NM_018073.5,1126-1144).
gatcctgaagacttatgca

SEQ ID NO: 159685 - DNA, 19 bp, Homo sapiens
  siRNA target sequence for RNF137 (NM_018073.5,1189-1207).
cgtgtctgaggacagaaaa

SEQ ID NO: 159686 - DNA, 19 bp, Homo sapiens
  siRNA target sequence for RNF137 (NM_018073.5,1192-1210).
gtctgaggacagaaaacgt

SEQ ID NO: 159687 - DNA, 19 bp, Homo sapiens
  siRNA target sequence for RNF137 (NM_018073.5,1257-1275).
gattttaccgctataatat

SEQ ID NO: 159688 - DNA, 19 bp, Homo sapiens
  siRNA target sequence for RNF137 (NM_018073.5,1347-1365).
ggggcctgggagtatgtaa

SEQ ID NO: 159689 - DNA, 19 bp, Homo sapiens
  siRNA target sequence for RNF137 (NM_018073.5,1452-1470).
gagcaggcaccgatgagta

SEQ ID NO: 159690 - DNA, 19 bp, Homo sapiens
  siRNA target sequence for RNF137 (NM_018073.5,1507-1525).
gggaatcttcgtggattat

SEQ ID NO: 159691 - DNA, 19 bp, Homo sapiens
  siRNA target sequence for RNF137 (NM_018073.5,1607-1625).
cgcctcctgccctatttta

SEQ ID NO: 159692 - DNA, 19 bp, Homo sapiens
  siRNA target sequence for RNF137 (NM_018073.5,1628-1646).
ccttgctacagcattggaa

SEQ ID NO: 159693 - DNA, 19 bp, Homo sapiens
  siRNA target sequence for RNF26 (NM_032015.3,740-758).
cacggtactgactagtctt

SEQ ID NO: 159694 - DNA, 19 bp, Homo sapiens
  siRNA target sequence for RNF26 (NM_032015.3,874-892).
gcctagagagcctaaagct

SEQ ID NO: 159695 - DNA, 19 bp, Homo sapiens
  siRNA target sequence for RNF26 (NM_032015.3,1402-1420).
gtcttcgagaggatgtcat

SEQ ID NO: 159696 - DNA, 19 bp, Homo sapiens
  siRNA target sequence for RNF26 (NM_032015.3,1535-1553).
ccctatgagggtattctca

SEQ ID NO: 159697 - DNA, 19 bp, Homo sapiens
  siRNA target sequence for RNF28 (NM_032588.2,269-287).
cggaagtgtgccaatgaca

SEQ ID NO: 159698 - DNA, 19 bp, Homo sapiens
  siRNA target sequence for RNF28 (NM_032588.2,501-519).
gcaaggagcacgaagatga

SEQ ID NO: 159699 - DNA, 19 bp, Homo sapiens
  siRNA target sequence for RNF28 (NM_032588.2,509-527).
cacgaagatgagaaaatca

SEQ ID NO: 159700 - DNA, 19 bp, Homo sapiens
  siRNA target sequence for RNF28 (NM_032588.2,622-640).
cttccagggacaaaagact

SEQ ID NO: 159701 - DNA, 19 bp, Homo sapiens
  siRNA target sequence for RNF28 (NM_032588.2,632-650).
caaaagactgaactgaata

SEQ ID NO: 159702 - DNA, 19 bp, Homo sapiens
  siRNA target sequence for RNF28 (NM_032588.2,769-787).
gaagtttgacacgttgtat

SEQ ID NO: 159703 - DNA, 19 bp, Homo sapiens
  siRNA target sequence for RNF28 (NM_032588.2,1045-1063).
gaacatggacttctttact

SEQ ID NO: 159704 - DNA, 19 bp, Homo sapiens
  siRNA target sequence for RNF28 (NM_032588.2,1052-1070).
gacttctttactttggatt

SEQ ID NO: 159705 - DNA, 19 bp, Homo sapiens
  siRNA target sequence for RNF29 (NM_033058.2,263-281).
gagcagcagaccatggata

SEQ ID NO: 159706 - DNA, 19 bp, Homo sapiens
  siRNA target sequence for RNF29 (NM_033058.2,327-345).
cgaaacctgtggtgattct

SEQ ID NO: 159707 - DNA, 19 bp, Homo sapiens
  siRNA target sequence for RNF29 (NM_033058.2,369-387).
ggaaatgtgccagtgatat

SEQ ID NO: 159708 - DNA, 19 bp, Homo sapiens
  siRNA target sequence for RNF29 (NM_033058.2,487-505).
ggatagacatggggtatat

SEQ ID NO: 159709 - DNA, 19 bp, Homo sapiens
  siRNA target sequence for RNF29 (NM_033058.2,670-688).
ggtgtttggtgcacacaaa

SEQ ID NO: 159710 - DNA, 19 bp, Homo sapiens
  siRNA target sequence for RNF29 (NM_033058.2,956-974).
gtccgtgctctgatcaaaa

SEQ ID NO: 159711 - DNA, 19 bp, Homo sapiens
  siRNA target sequence for RNF29 (NM_033058.2,959-977).
cgtgctctgatcaaaaagt

SEQ ID NO: 159712 - DNA, 19 bp, Homo sapiens
  siRNA target sequence for RNF29 (NM_033058.2,960-978).
gtgctctgatcaaaaagta

SEQ ID NO: 159713 - DNA, 19 bp, Homo sapiens
  siRNA target sequence for RNF29 (NM_033058.2,962-980).
gctctgatcaaaaagtatt

SEQ ID NO: 159714 - DNA, 19 bp, Homo sapiens
  siRNA target sequence for RNF29 (NM_033058.2,1006-1024).
gttggttgagtcaggaatt

SEQ ID NO: 159715 - DNA, 19 bp, Homo sapiens
  siRNA target sequence for RNF29 (NM_033058.2,1156-1174).
cacagtcaacctcaataga

SEQ ID NO: 159716 - DNA, 19 bp, Homo sapiens
  siRNA target sequence for RNF29 (NM_033058.2,1158-1176).
cagtcaacctcaatagaga

SEQ ID NO: 159717 - DNA, 19 bp, Homo sapiens
  siRNA target sequence for RNF29 (NM_033058.2,1709-1727).
gtgagtggtaaggaaacta

SEQ ID NO: 159718 - DNA, 19 bp, Homo sapiens
  siRNA target sequence for RNF29 (NM_033058.2,1711-1729).
gagtggtaaggaaactagt

SEQ ID NO: 159719 - DNA, 19 bp, Homo sapiens
  siRNA target sequence for RNF29 (NM_033058.2,1740-1758).
ctacttctcaggagttagt

SEQ ID NO: 159720 - DNA, 19 bp, Homo sapiens
  siRNA target sequence for RNF29 (NM_033058.2,1743-1761).
cttctcaggagttagtaat

SEQ ID NO: 159721 - DNA, 19 bp, Homo sapiens
  siRNA target sequence for RNF29 (NM_033058.2,1795-1813).
ctacatctggagtcagatt

SEQ ID NO: 159722 - DNA, 19 bp, Homo sapiens
  siRNA target sequence for RNF29 (NM_184085.1,1820-1838).
gagccagctcgccatatct

SEQ ID NO: 159723 - DNA, 19 bp, Homo sapiens
  siRNA target sequence for RNF29 (NM_184085.1,1823-1841).
ccagctcgccatatcttct

SEQ ID NO: 159724 - DNA, 19 bp, Homo sapiens
  siRNA target sequence for RNF29 (NM_184085.1,1849-1867).
ctggttgaactccctaaat

SEQ ID NO: 159725 - DNA, 19 bp, Homo sapiens
  siRNA target sequence for RNF29 (NM_184085.1,1851-1869).
ggttgaactccctaaatga

SEQ ID NO: 159726 - DNA, 19 bp, Homo sapiens
  siRNA target sequence for RNF29 (NM_184087.1,822-840).
ctatcgagattggatttga

SEQ ID NO: 159727 - DNA, 19 bp, Homo sapiens
  siRNA target sequence for RNF30 (NM_032546.2,394-412).
gagaagatcaatatttact

SEQ ID NO: 159728 - DNA, 19 bp, Homo sapiens
  siRNA target sequence for RNF30 (NM_032546.2,482-500).
ccccactgcccaccattta

SEQ ID NO: 159729 - DNA, 19 bp, Homo sapiens
  siRNA target sequence for RNF30 (NM_032546.2,617-635).
cgcagaacactaagattat

SEQ ID NO: 159730 - DNA, 19 bp, Homo sapiens
  siRNA target sequence for RNF30 (NM_032546.2,618-636).
gcagaacactaagattata

SEQ ID NO: 159731 - DNA, 19 bp, Homo sapiens
  siRNA target sequence for RNF30 (NM_032546.2,624-642).
cactaagattatagatagt

SEQ ID NO: 159732 - DNA, 19 bp, Homo sapiens
  siRNA target sequence for RNF30 (NM_032546.2,626-644).
ctaagattatagatagtga

SEQ ID NO: 159733 - DNA, 19 bp, Homo sapiens
  siRNA target sequence for RNF30 (NM_032546.2,747-765).
gaggcagaagcagttgtta

SEQ ID NO: 159734 - DNA, 19 bp, Homo sapiens
  siRNA target sequence for RNF39 (NM_025236.2,87-105).
ctgagactctggttgaaga

SEQ ID NO: 159735 - DNA, 19 bp, Homo sapiens
  siRNA target sequence for RNF39 (NM_025236.2,128-146).
gcggaaagcggcaaaagtt

SEQ ID NO: 159736 - DNA, 19 bp, Homo sapiens
  siRNA target sequence for RNF39 (NM_025236.2,129-147).
cggaaagcggcaaaagtta

SEQ ID NO: 159737 - DNA, 19 bp, Homo sapiens
  siRNA target sequence for RNF39 (NM_025236.2,482-500).
ccgcagcctgaggtctaat

SEQ ID NO: 159738 - DNA, 19 bp, Homo sapiens
  siRNA target sequence for RNF39 (NM_025236.2,627-645).
gaggatatgaggaagacat

SEQ ID NO: 159739 - DNA, 19 bp, Homo sapiens
  siRNA target sequence for RNF39 (NM_025236.2,643-661).
catggagacgatttgaagt

SEQ ID NO: 159740 - DNA, 19 bp, Homo sapiens
  siRNA target sequence for RNF39 (NM_025236.2,660-678).
gtcccaacatccaagtcat

SEQ ID NO: 159741 - DNA, 19 bp, Homo sapiens
  siRNA target sequence for RNF39 (NM_025236.2,664-682).
caacatccaagtcatctaa

SEQ ID NO: 159742 - DNA, 19 bp, Homo sapiens
  siRNA target sequence for RNF39 (NM_025236.2,1207-1225).
gctcactcgacctgcttta

SEQ ID NO: 159743 - DNA, 19 bp, Homo sapiens
  siRNA target sequence for RNF6 (NM_005977.2,479-497).
gtctagatcgagatcagat

SEQ ID NO: 159744 - DNA, 19 bp, Homo sapiens
  siRNA target sequence for RNF6 (NM_005977.2,514-532).
ccttacctcaagaccataa

SEQ ID NO: 159745 - DNA, 19 bp, Homo sapiens
  siRNA target sequence for RNF6 (NM_005977.2,520-538).
ctcaagaccataatcatca

SEQ ID NO: 159746 - DNA, 19 bp, Homo sapiens
  siRNA target sequence for RNF6 (NM_005977.2,577-595).
gagaagaggcctattatca

SEQ ID NO: 159747 - DNA, 19 bp, Homo sapiens
  siRNA target sequence for RNF6 (NM_005977.2,579-597).
gaagaggcctattatcagt

SEQ ID NO: 159748 - DNA, 19 bp, Homo sapiens
  siRNA target sequence for RNF6 (NM_005977.2,584-602).
ggcctattatcagtttatt

SEQ ID NO: 159749 - DNA, 19 bp, Homo sapiens
  siRNA target sequence for RNF6 (NM_005977.2,585-603).
gcctattatcagtttatta

SEQ ID NO: 159750 - DNA, 19 bp, Homo sapiens
  siRNA target sequence for RNF6 (NM_005977.2,635-653).
gagagaccataatctttta

SEQ ID NO: 159751 - DNA, 19 bp, Homo sapiens
  siRNA target sequence for RNF6 (NM_005977.2,656-674).
cacccctggagaaataaca

SEQ ID NO: 159752 - DNA, 19 bp, Homo sapiens
  siRNA target sequence for RNF6 (NM_005977.2,818-836).
ctttcggcgcacaggaaat

SEQ ID NO: 159753 - DNA, 19 bp, Homo sapiens
  siRNA target sequence for RNF6 (NM_005977.2,822-840).
cggcgcacaggaaatgcaa

SEQ ID NO: 159754 - DNA, 19 bp, Homo sapiens
  siRNA target sequence for RNF6 (NM_005977.2,838-856).
caactcgaagtggacaaaa

SEQ ID NO: 159755 - DNA, 19 bp, Homo sapiens
  siRNA target sequence for RNF6 (NM_005977.2,849-867).
ggacaaaatgggaaccaaa

SEQ ID NO: 159756 - DNA, 19 bp, Homo sapiens
  siRNA target sequence for RNF6 (NM_005977.2,903-921).
ggagagtttcggtttagtt

SEQ ID NO: 159757 - DNA, 19 bp, Homo sapiens
  siRNA target sequence for RNF6 (NM_005977.2,904-922).
gagagtttcggtttagttt

SEQ ID NO: 159758 - DNA, 19 bp, Homo sapiens
  siRNA target sequence for RNF6 (NM_005977.2,908-926).
gtttcggtttagtttggaa

SEQ ID NO: 159759 - DNA, 19 bp, Homo sapiens
  siRNA target sequence for RNF6 (NM_005977.2,919-937).
gtttggaaatccacgtaaa

SEQ ID NO: 159760 - DNA, 19 bp, Homo sapiens
  siRNA target sequence for RNF6 (NM_005977.2,929-947).
ccacgtaaatcatgaaaat

SEQ ID NO: 159761 - DNA, 19 bp, Homo sapiens
  siRNA target sequence for RNF6 (NM_005977.2,932-950).
cgtaaatcatgaaaataga

SEQ ID NO: 159762 - DNA, 19 bp, Homo sapiens
  siRNA target sequence for RNF6 (NM_005977.2,996-1014).
gatagtaacagagatcata

SEQ ID NO: 159763 - DNA, 19 bp, Homo sapiens
  siRNA target sequence for RNF6 (NM_005977.2,1004-1022).
cagagatcatactgcaaat

SEQ ID NO: 159764 - DNA, 19 bp, Homo sapiens
  siRNA target sequence for RNF6 (NM_005977.2,1025-1043).
gcaacaaaggtcaactagt

SEQ ID NO: 159765 - DNA, 19 bp, Homo sapiens
  siRNA target sequence for RNF6 (NM_005977.2,1047-1065).
gtggctaggcgaacaagaa

SEQ ID NO: 159766 - DNA, 19 bp, Homo sapiens
  siRNA target sequence for RNF6 (NM_005977.2,1068-1086).
caaacctcagtgaatttca

SEQ ID NO: 159767 - DNA, 19 bp, Homo sapiens
  siRNA target sequence for RNF6 (NM_005977.2,1079-1097).
gaatttcaatggtagtagt

SEQ ID NO: 159768 - DNA, 19 bp, Homo sapiens
  siRNA target sequence for RNF6 (NM_005977.2,1218-1236).
gcttcacgcactaatttca

SEQ ID NO: 159769 - DNA, 19 bp, Homo sapiens
  siRNA target sequence for RNF6 (NM_005977.2,1320-1338).
ggggctagaagtaatgtta

SEQ ID NO: 159770 - DNA, 19 bp, Homo sapiens
  siRNA target sequence for RNF6 (NM_005977.2,1341-1359).
gtgaggaatacaaaccaaa

SEQ ID NO: 159771 - DNA, 19 bp, Homo sapiens
  siRNA target sequence for RNF6 (NM_005977.2,1356-1374).
caaagattagagccaataa

SEQ ID NO: 159772 - DNA, 19 bp, Homo sapiens
  siRNA target sequence for RNF6 (NM_005977.2,1360-1378).
gattagagccaataagatt

SEQ ID NO: 159773 - DNA, 19 bp, Homo sapiens
  siRNA target sequence for RNF6 (NM_005977.2,1365-1383).
gagccaataagattacgat

SEQ ID NO: 159774 - DNA, 19 bp, Homo sapiens
  siRNA target sequence for RNF6 (NM_005977.2,1399-1417).
gaagccgttcaccaattca

SEQ ID NO: 159775 - DNA, 19 bp, Homo sapiens
  siRNA target sequence for RNF6 (NM_005977.2,1420-1438).
gacagagtggcactgttta

SEQ ID NO: 159776 - DNA, 19 bp, Homo sapiens
  siRNA target sequence for RNF6 (NM_005977.2,1424-1442).
gagtggcactgtttatcat

SEQ ID NO: 159777 - DNA, 19 bp, Homo sapiens
  siRNA target sequence for RNF6 (NM_005977.2,1426-1444).
gtggcactgtttatcataa

SEQ ID NO: 159778 - DNA, 19 bp, Homo sapiens
  siRNA target sequence for RNF6 (NM_005977.2,1428-1446).
ggcactgtttatcataatt

SEQ ID NO: 159779 - DNA, 19 bp, Homo sapiens
  siRNA target sequence for RNF6 (NM_005977.2,1467-1485).
gtacagcaaaccactagaa

SEQ ID NO: 159780 - DNA, 19 bp, Homo sapiens
  siRNA target sequence for RNF6 (NM_005977.2,1472-1490).
gcaaaccactagaagatct

SEQ ID NO: 159781 - DNA, 19 bp, Homo sapiens
  siRNA target sequence for RNF6 (NM_005977.2,1507-1525).
gaactcgagtctttttaga

SEQ ID NO: 159782 - DNA, 19 bp, Homo sapiens
  siRNA target sequence for RNF6 (NM_005977.2,1557-1575).
gcatataccccattctcta

SEQ ID NO: 159783 - DNA, 19 bp, Homo sapiens
  siRNA target sequence for RNF6 (NM_005977.2,1558-1576).
catataccccattctctaa

SEQ ID NO: 159784 - DNA, 19 bp, Homo sapiens
  siRNA target sequence for RNF6 (NM_005977.2,1644-1662).
cgacgacatccaacaatca

SEQ ID NO: 159785 - DNA, 19 bp, Homo sapiens
  siRNA target sequence for RNF6 (NM_005977.2,1707-1725).
gatcgggatagtattgcaa

SEQ ID NO: 159786 - DNA, 19 bp, Homo sapiens
  siRNA target sequence for RNF6 (NM_005977.2,1713-1731).
gatagtattgcaaatagaa

SEQ ID NO: 159787 - DNA, 19 bp, Homo sapiens
  siRNA target sequence for RNF6 (NM_005977.2,1787-1805).
gggctttcgccgaaccatt

SEQ ID NO: 159788 - DNA, 19 bp, Homo sapiens
  siRNA target sequence for RNF6 (NM_005977.2,1788-1806).
ggctttcgccgaaccattt

SEQ ID NO: 159789 - DNA, 19 bp, Homo sapiens
  siRNA target sequence for RNF6 (NM_005977.2,1790-1808).
ctttcgccgaaccatttct

SEQ ID NO: 159790 - DNA, 19 bp, Homo sapiens
  siRNA target sequence for RNF6 (NM_005977.2,1796-1814).
ccgaaccatttctcgttta

SEQ ID NO: 159791 - DNA, 19 bp, Homo sapiens
  siRNA target sequence for RNF6 (NM_005977.2,1815-1833).
gagcggtcaggtattcgaa

SEQ ID NO: 159792 - DNA, 19 bp, Homo sapiens
  siRNA target sequence for RNF6 (NM_005977.2,1820-1838).
gtcaggtattcgaacctat

SEQ ID NO: 159793 - DNA, 19 bp, Homo sapiens
  siRNA target sequence for RNF6 (NM_005977.2,1824-1842).
ggtattcgaacctatgtta

SEQ ID NO: 159794 - DNA, 19 bp, Homo sapiens
  siRNA target sequence for RNF6 (NM_005977.2,1835-1853).
ctatgttagtaccataaca

SEQ ID NO: 159795 - DNA, 19 bp, Homo sapiens
  siRNA target sequence for RNF6 (NM_005977.2,1854-1872).
gttcctcttcgtaggattt

SEQ ID NO: 159796 - DNA, 19 bp, Homo sapiens
  siRNA target sequence for RNF6 (NM_005977.2,1883-1901).
gcttgttgagccatcatca

SEQ ID NO: 159797 - DNA, 19 bp, Homo sapiens
  siRNA target sequence for RNF6 (NM_005977.2,1902-1920).
gtggctcttcggtcaattt

SEQ ID NO: 159798 - DNA, 19 bp, Homo sapiens
  siRNA target sequence for RNF6 (NM_005977.2,1904-1922).
ggctcttcggtcaatttta

SEQ ID NO: 159799 - DNA, 19 bp, Homo sapiens
  siRNA target sequence for RNF6 (NM_005977.2,1905-1923).
gctcttcggtcaattttaa

SEQ ID NO: 159800 - DNA, 19 bp, Homo sapiens
  siRNA target sequence for RNF6 (NM_005977.2,1944-1962).
ggagaactgagttctctaa

SEQ ID NO: 159801 - DNA, 19 bp, Homo sapiens
  siRNA target sequence for RNF6 (NM_005977.2,1945-1963).
gagaactgagttctctaat

SEQ ID NO: 159802 - DNA, 19 bp, Homo sapiens
  siRNA target sequence for RNF6 (NM_005977.2,1970-1988).
cgattctgagtcagaactt

SEQ ID NO: 159803 - DNA, 19 bp, Homo sapiens
  siRNA target sequence for RNF6 (NM_005977.2,2025-2043).
gaactgagtaacttaggta

SEQ ID NO: 159804 - DNA, 19 bp, Homo sapiens
  siRNA target sequence for RNF6 (NM_005977.2,2030-2048).
gagtaacttaggtacagat

SEQ ID NO: 159805 - DNA, 19 bp, Homo sapiens
  siRNA target sequence for RNF6 (NM_005977.2,2032-2050).
gtaacttaggtacagataa

SEQ ID NO: 159806 - DNA, 19 bp, Homo sapiens
  siRNA target sequence for RNF6 (NM_005977.2,2132-2150).
gaccacccagcctcatact

SEQ ID NO: 159807 - DNA, 19 bp, Homo sapiens
  siRNA target sequence for RNF6 (NM_005977.2,2141-2159).
gcctcatactcgaaacagt

SEQ ID NO: 159808 - DNA, 19 bp, Homo sapiens
  siRNA target sequence for RNF6 (NM_005977.2,2174-2192).
caggcagttgcgaaatcca

SEQ ID NO: 159809 - DNA, 19 bp, Homo sapiens
  siRNA target sequence for RNF6 (NM_005977.2,2271-2289).
gatcgaatacgtggtttaa

SEQ ID NO: 159810 - DNA, 19 bp, Homo sapiens
  siRNA target sequence for RNF6 (NM_005977.2,2274-2292).
cgaatacgtggtttaacca

SEQ ID NO: 159811 - DNA, 19 bp, Homo sapiens
  siRNA target sequence for RNF6 (NM_005977.2,2295-2313).
gagcagattgacaatcttt

SEQ ID NO: 159812 - DNA, 19 bp, Homo sapiens
  siRNA target sequence for RNF6 (NM_005977.2,2322-2340).
cactatgagcataacagta

SEQ ID NO: 159813 - DNA, 19 bp, Homo sapiens
  siRNA target sequence for RNF6 (NM_005977.2,2330-2348).
gcataacagtattgatagt

SEQ ID NO: 159814 - DNA, 19 bp, Homo sapiens
  siRNA target sequence for RNF6 (NM_005977.2,2363-2381).
ctgtagtgtttgtattagt

SEQ ID NO: 159815 - DNA, 19 bp, Homo sapiens
  siRNA target sequence for RNF6 (NM_005977.2,2399-2417).
caagctcaggcaattacct

SEQ ID NO: 159816 - DNA, 19 bp, Homo sapiens
  siRNA target sequence for RNF6 (NM_005977.2,2451-2469).
cgatggctctcagagaatt

SEQ ID NO: 159817 - DNA, 19 bp, Homo sapiens
  siRNA target sequence for RNF6 (NM_005977.2,2493-2511).
cctgttttagggtctaaca

SEQ ID NO: 159818 - DNA, 19 bp, Homo sapiens
  siRNA target sequence for RNF6 (NM_005977.2,2503-2521).
ggtctaacatagcaaacaa

SEQ ID NO: 159819 - DNA, 19 bp, Homo sapiens
  siRNA target sequence for RNF6 (NM_005977.2,2504-2522).
gtctaacatagcaaacaat

SEQ ID NO: 159820 - DNA, 19 bp, Homo sapiens
  siRNA target sequence for RNF6 (NM_183045.1,876-894).
gctgctttgccagatacaa

SEQ ID NO: 159821 - DNA, 19 bp, Homo sapiens
  siRNA target sequence for RNF7 (NM_014245.2,204-222).
cgggaggcgacaagatgtt

SEQ ID NO: 159822 - DNA, 19 bp, Homo sapiens
  siRNA target sequence for RNF7 (NM_183063.1,313-331).
gggaattggagttcgtaat

SEQ ID NO: 159823 - DNA, 19 bp, Homo sapiens
  siRNA target sequence for RNF7 (NM_183063.1,314-332).
ggaattggagttcgtaatt

SEQ ID NO: 159824 - DNA, 19 bp, Homo sapiens
  siRNA target sequence for RNF7 (NM_183063.1,340-358).
ggccctgaacctaataaat

SEQ ID NO: 159825 - DNA, 19 bp, Homo sapiens
  siRNA target sequence for RNPEP (NM_020216.3,575-593).
cgacacgcctgctgttaaa

SEQ ID NO: 159826 - DNA, 19 bp, Homo sapiens
  siRNA target sequence for RNPEP (NM_020216.3,576-594).
gacacgcctgctgttaaat

SEQ ID NO: 159827 - DNA, 19 bp, Homo sapiens
  siRNA target sequence for RNPEP (NM_020216.3,708-726).
ccctcctatctgatagctt

SEQ ID NO: 159828 - DNA, 19 bp, Homo sapiens
  siRNA target sequence for RNPEP (NM_020216.3,822-840).
ggggtgatagaagaatttt

SEQ ID NO: 159829 - DNA, 19 bp, Homo sapiens
  siRNA target sequence for RNPEP (NM_020216.3,843-861).
gcaacaggagagaagcttt

SEQ ID NO: 159830 - DNA, 19 bp, Homo sapiens
  siRNA target sequence for RNPEP (NM_020216.3,858-876).
ctttttggaccttatgttt

SEQ ID NO: 159831 - DNA, 19 bp, Homo sapiens
  siRNA target sequence for RNPEP (NM_020216.3,902-920).
gccaccgtcctttccattt

SEQ ID NO: 159832 - DNA, 19 bp, Homo sapiens
  siRNA target sequence for RNPEP (NM_020216.3,979-997).
gctccttggcagatgtcat

SEQ ID NO: 159833 - DNA, 19 bp, Homo sapiens
  siRNA target sequence for RNPEP (NM_020216.3,1054-1072).
gtgaattctggctcaatga

SEQ ID NO: 159834 - DNA, 19 bp, Homo sapiens
  siRNA target sequence for RNPEP (NM_020216.3,1208-1226).
caagctccgcgtgaagatt

SEQ ID NO: 159835 - DNA, 19 bp, Homo sapiens
  siRNA target sequence for RNPEP (NM_020216.3,1211-1229).
gctccgcgtgaagattgaa

SEQ ID NO: 159836 - DNA, 19 bp, Homo sapiens
  siRNA target sequence for RNPEP (NM_020216.3,1239-1257).
gacccggacgacacctata

SEQ ID NO: 159837 - DNA, 19 bp, Homo sapiens
  siRNA target sequence for RNPEP (NM_020216.3,1241-1259).
cccggacgacacctataat

SEQ ID NO: 159838 - DNA, 19 bp, Homo sapiens
  siRNA target sequence for RNPEP (NM_020216.3,1245-1263).
gacgacacctataatgaga

SEQ ID NO: 159839 - DNA, 19 bp, Homo sapiens
  siRNA target sequence for RNPEP (NM_020216.3,1264-1282).
ccccctacgagaaaggttt

SEQ ID NO: 159840 - DNA, 19 bp, Homo sapiens
  siRNA target sequence for RNPEP (NM_020216.3,1313-1331).
gggtgatcaggatcagttt

SEQ ID NO: 159841 - DNA, 19 bp, Homo sapiens
  siRNA target sequence for RNPEP (NM_020216.3,1315-1333).
gtgatcaggatcagtttga

SEQ ID NO: 159842 - DNA, 19 bp, Homo sapiens
  siRNA target sequence for RNPEP (NM_020216.3,1348-1366).
cctatgtgcatgaattcaa

SEQ ID NO: 159843 - DNA, 19 bp, Homo sapiens
  siRNA target sequence for RNPEP (NM_020216.3,1376-1394).
catcttagccgatgacttt

SEQ ID NO: 159844 - DNA, 19 bp, Homo sapiens
  siRNA target sequence for RNPEP (NM_020216.3,1395-1413).
ctggacttctacttggaat

SEQ ID NO: 159845 - DNA, 19 bp, Homo sapiens
  siRNA target sequence for RNPEP (NM_020216.3,1448-1466).
cattccaggttttgagttt

SEQ ID NO: 159846 - DNA, 19 bp, Homo sapiens
  siRNA target sequence for RNPEP (NM_020216.3,1519-1537).
ctggggactcactcatgaa

SEQ ID NO: 159847 - DNA, 19 bp, Homo sapiens
  siRNA target sequence for RNPEP (NM_020216.3,1647-1665).
gataagatcctccagaaat

SEQ ID NO: 159848 - DNA, 19 bp, Homo sapiens
  siRNA target sequence for RNPEP (NM_020216.3,1699-1717).
gagacacatacccaagtat

SEQ ID NO: 159849 - DNA, 19 bp, Homo sapiens
  siRNA target sequence for RNPEP (NM_020216.3,1705-1723).
catacccaagtatctcaaa

SEQ ID NO: 159850 - DNA, 19 bp, Homo sapiens
  siRNA target sequence for RNPEP (NM_020216.3,1753-1771).
ggggccaaatcgtccttaa

SEQ ID NO: 159851 - DNA, 19 bp, Homo sapiens
  siRNA target sequence for RNPEP (NM_020216.3,1846-1864).
cgctgtaccacgcaatgat

SEQ ID NO: 159852 - DNA, 19 bp, Homo sapiens
  siRNA target sequence for RNPEP (NM_020216.3,1892-1910).
cgccaaggagacttttgca

SEQ ID NO: 159853 - DNA, 19 bp, Homo sapiens
  siRNA target sequence for RNPEP (NM_020216.3,1933-1951).
gcaatgttgtcaactatgt

SEQ ID NO: 159854 - DNA, 19 bp, Homo sapiens
  siRNA target sequence for RPH3A (NM_014954.1,567-585).
gtggaccgcctagaaaaca

SEQ ID NO: 159855 - DNA, 19 bp, Homo sapiens
  siRNA target sequence for RPH3A (NM_014954.1,570-588).
gaccgcctagaaaacatga

SEQ ID NO: 159856 - DNA, 19 bp, Homo sapiens
  siRNA target sequence for RPH3A (NM_014954.1,612-630).
gtgaaccgctgcatactgt

SEQ ID NO: 159857 - DNA, 19 bp, Homo sapiens
  siRNA target sequence for RPH3A (NM_014954.1,654-672).
ggctctgcctgtgtagtat

SEQ ID NO: 159858 - DNA, 19 bp, Homo sapiens
  siRNA target sequence for RPH3A (NM_014954.1,658-676).
ctgcctgtgtagtatgtga

SEQ ID NO: 159859 - DNA, 19 bp, Homo sapiens
  siRNA target sequence for RPH3A (NM_014954.1,669-687).
gtatgtgaggactgtaaga

SEQ ID NO: 159860 - DNA, 19 bp, Homo sapiens
  siRNA target sequence for RPH3A (NM_014954.1,787-805).
ctggagcgtggttcttcaa

SEQ ID NO: 159861 - DNA, 19 bp, Homo sapiens
  siRNA target sequence for RPH3A (NM_014954.1,828-846).
ccacagcctatgcctataa

SEQ ID NO: 159862 - DNA, 19 bp, Homo sapiens
  siRNA target sequence for RPH3A (NM_014954.1,829-847).
cacagcctatgcctataaa

SEQ ID NO: 159863 - DNA, 19 bp, Homo sapiens
  siRNA target sequence for RPH3A (NM_014954.1,831-849).
cagcctatgcctataaaga

SEQ ID NO: 159864 - DNA, 19 bp, Homo sapiens
  siRNA target sequence for RPH3A (NM_014954.1,1044-1062).
gcacgaatgagctcatcta

SEQ ID NO: 159865 - DNA, 19 bp, Homo sapiens
  siRNA target sequence for RPH3A (NM_014954.1,1055-1073).
ctcatctagccgagattca

SEQ ID NO: 159866 - DNA, 19 bp, Homo sapiens
  siRNA target sequence for RPH3A (NM_014954.1,1057-1075).
catctagccgagattcaga

SEQ ID NO: 159867 - DNA, 19 bp, Homo sapiens
  siRNA target sequence for RPH3A (NM_014954.1,1252-1270).
gacgctttccagatcagaa

SEQ ID NO: 159868 - DNA, 19 bp, Homo sapiens
  siRNA target sequence for RPH3A (NM_014954.1,1470-1488).
gaagccaacagctacgatt

SEQ ID NO: 159869 - DNA, 19 bp, Homo sapiens
  siRNA target sequence for RPH3A (NM_014954.1,1554-1572).
ctgcagtgcaccatcatta

SEQ ID NO: 159870 - DNA, 19 bp, Homo sapiens
  siRNA target sequence for RPH3A (NM_014954.1,1657-1675).
ccaacaagcttcgtacaaa

SEQ ID NO: 159871 - DNA, 19 bp, Homo sapiens
  siRNA target sequence for RPH3A (NM_014954.1,1822-1840).
gattctccctcaagaaact

SEQ ID NO: 159872 - DNA, 19 bp, Homo sapiens
  siRNA target sequence for RPH3A (NM_014954.1,1871-1889).
ctgcctggagcgagtgatt

SEQ ID NO: 159873 - DNA, 19 bp, Homo sapiens
  siRNA target sequence for RPH3A (NM_014954.1,1875-1893).
ctggagcgagtgattccta

SEQ ID NO: 159874 - DNA, 19 bp, Homo sapiens
  siRNA target sequence for RPH3A (NM_014954.1,1880-1898).
gcgagtgattcctatgaaa

SEQ ID NO: 159875 - DNA, 19 bp, Homo sapiens
  siRNA target sequence for RPH3A (NM_014954.1,1922-1940).
ccgaggcatggccctttat

SEQ ID NO: 159876 - DNA, 19 bp, Homo sapiens
  siRNA target sequence for RPH3A (NM_014954.1,1924-1942).
gaggcatggccctttatga

SEQ ID NO: 159877 - DNA, 19 bp, Homo sapiens
  siRNA target sequence for RPH3A (NM_014954.1,2027-2045).
cctcattgtgggcatcata

SEQ ID NO: 159878 - DNA, 19 bp, Homo sapiens
  siRNA target sequence for RPH3A (NM_014954.1,2164-2182).
ccttgaatcccgaattcaa

SEQ ID NO: 159879 - DNA, 19 bp, Homo sapiens
  siRNA target sequence for RPH3A (NM_014954.1,2165-2183).
cttgaatcccgaattcaat

SEQ ID NO: 159880 - DNA, 19 bp, Homo sapiens
  siRNA target sequence for RPH3A (NM_014954.1,2258-2276).
catcggcaagtccaatgat

SEQ ID NO: 159881 - DNA, 19 bp, Homo sapiens
  siRNA target sequence for RPH3A (NM_014954.1,2262-2280).
ggcaagtccaatgattaca

SEQ ID NO: 159882 - DNA, 19 bp, Homo sapiens
  siRNA target sequence for RPH3A (NM_014954.1,2309-2327).
caagggagagcgcttaaaa

SEQ ID NO: 159883 - DNA, 19 bp, Homo sapiens
  siRNA target sequence for RPH3A (NM_014954.1,2313-2331).
ggagagcgcttaaaacact

SEQ ID NO: 159884 - DNA, 19 bp, Homo sapiens
  siRNA target sequence for RPH3A (NM_014954.1,2333-2351).
gtacgagtgtctgaaaaat

SEQ ID NO: 159885 - DNA, 19 bp, Homo sapiens
  siRNA target sequence for RPH3A (NM_014954.1,2336-2354).
cgagtgtctgaaaaataaa

SEQ ID NO: 159886 - DNA, 19 bp, Homo sapiens
  siRNA target sequence for RPH3A (NM_014954.1,2393-2411).
gaaccacgtgtcaagtgat

SEQ ID NO: 159887 - DNA, 19 bp, Homo sapiens
  siRNA target sequence for RTN4IP1 (NM_032730.2,402-420).
cctgcttgggtgatagata

SEQ ID NO: 159888 - DNA, 19 bp, Homo sapiens
  siRNA target sequence for RTN4IP1 (NM_032730.2,403-421).
ctgcttgggtgatagataa

SEQ ID NO: 159889 - DNA, 19 bp, Homo sapiens
  siRNA target sequence for RTN4IP1 (NM_032730.2,444-462).
cgattcactcagaacatga

SEQ ID NO: 159890 - DNA, 19 bp, Homo sapiens
  siRNA target sequence for RTN4IP1 (NM_032730.2,445-463).
gattcactcagaacatgat

SEQ ID NO: 159891 - DNA, 19 bp, Homo sapiens
  siRNA target sequence for RTN4IP1 (NM_032730.2,458-476).
catgatgatgcctatcata

SEQ ID NO: 159892 - DNA, 19 bp, Homo sapiens
  siRNA target sequence for RTN4IP1 (NM_032730.2,464-482).
gatgcctatcatacactat

SEQ ID NO: 159893 - DNA, 19 bp, Homo sapiens
  siRNA target sequence for RTN4IP1 (NM_032730.2,468-486).
cctatcatacactatccaa

SEQ ID NO: 159894 - DNA, 19 bp, Homo sapiens
  siRNA target sequence for RTN4IP1 (NM_032730.2,473-491).
catacactatccaaatgaa

SEQ ID NO: 159895 - DNA, 19 bp, Homo sapiens
  siRNA target sequence for RTN4IP1 (NM_032730.2,509-527).
cgctgccagtgtaaatcct

SEQ ID NO: 159896 - DNA, 19 bp, Homo sapiens
  siRNA target sequence for RTN4IP1 (NM_032730.2,511-529).
ctgccagtgtaaatcctat

SEQ ID NO: 159897 - DNA, 19 bp, Homo sapiens
  siRNA target sequence for RTN4IP1 (NM_032730.2,514-532).
ccagtgtaaatcctataga

SEQ ID NO: 159898 - DNA, 19 bp, Homo sapiens
  siRNA target sequence for RTN4IP1 (NM_032730.2,525-543).
cctatagacgttaatatga

SEQ ID NO: 159899 - DNA, 19 bp, Homo sapiens
  siRNA target sequence for RTN4IP1 (NM_032730.2,585-603).
cctttacacgtgaaaatca

SEQ ID NO: 159900 - DNA, 19 bp, Homo sapiens
  siRNA target sequence for RTN4IP1 (NM_032730.2,661-679).
gtgggcttgatgtgaaata

SEQ ID NO: 159901 - DNA, 19 bp, Homo sapiens
  siRNA target sequence for RTN4IP1 (NM_032730.2,666-684).
cttgatgtgaaatacttca

SEQ ID NO: 159902 - DNA, 19 bp, Homo sapiens
  siRNA target sequence for RTN4IP1 (NM_032730.2,722-740).
gaaacaaggcactctttca

SEQ ID NO: 159903 - DNA, 19 bp, Homo sapiens
  siRNA target sequence for RTN4IP1 (NM_032730.2,730-748).
gcactctttcagagtttgt

SEQ ID NO: 159904 - DNA, 19 bp, Homo sapiens
  siRNA target sequence for RTN4IP1 (NM_032730.2,772-790).
ctcacaaacccaaatcact

SEQ ID NO: 159905 - DNA, 19 bp, Homo sapiens
  siRNA target sequence for RTN4IP1 (NM_032730.2,805-823).
ctgcctctttgccatatgt

SEQ ID NO: 159906 - DNA, 19 bp, Homo sapiens
  siRNA target sequence for RTN4IP1 (NM_032730.2,881-899).
cacaggaaaacgtgttcta

SEQ ID NO: 159907 - DNA, 19 bp, Homo sapiens
  siRNA target sequence for RTN4IP1 (NM_032730.2,885-903).
ggaaaacgtgttctaatct

SEQ ID NO: 159908 - DNA, 19 bp, Homo sapiens
  siRNA target sequence for RTN4IP1 (NM_032730.2,886-904).
gaaaacgtgttctaatctt

SEQ ID NO: 159909 - DNA, 19 bp, Homo sapiens
  siRNA target sequence for RTN4IP1 (NM_032730.2,913-931).
caggcggagttggtacttt

SEQ ID NO: 159910 - DNA, 19 bp, Homo sapiens
  siRNA target sequence for RTN4IP1 (NM_032730.2,917-935).
cggagttggtacttttgct

SEQ ID NO: 159911 - DNA, 19 bp, Homo sapiens
  siRNA target sequence for RTN4IP1 (NM_032730.2,919-937).
gagttggtacttttgctat

SEQ ID NO: 159912 - DNA, 19 bp, Homo sapiens
  siRNA target sequence for RTN4IP1 (NM_032730.2,1011-1029).
cttggtgcagacgatgtaa

SEQ ID NO: 159913 - DNA, 19 bp, Homo sapiens
  siRNA target sequence for RTN4IP1 (NM_032730.2,1015-1033).
gtgcagacgatgtaattga

SEQ ID NO: 159914 - DNA, 19 bp, Homo sapiens
  siRNA target sequence for RTN4IP1 (NM_032730.2,1017-1035).
gcagacgatgtaattgatt

SEQ ID NO: 159915 - DNA, 19 bp, Homo sapiens
  siRNA target sequence for RTN4IP1 (NM_032730.2,1018-1036).
cagacgatgtaattgatta

SEQ ID NO: 159916 - DNA, 19 bp, Homo sapiens
  siRNA target sequence for RTN4IP1 (NM_032730.2,1020-1038).
gacgatgtaattgattaca

SEQ ID NO: 159917 - DNA, 19 bp, Homo sapiens
  siRNA target sequence for RTN4IP1 (NM_032730.2,1022-1040).
cgatgtaattgattacaaa

SEQ ID NO: 159918 - DNA, 19 bp, Homo sapiens
  siRNA target sequence for RTN4IP1 (NM_032730.2,1101-1119).
gttggcggatccactgaaa

SEQ ID NO: 159919 - DNA, 19 bp, Homo sapiens
  siRNA target sequence for RTN4IP1 (NM_032730.2,1104-1122).
ggcggatccactgaaacat

SEQ ID NO: 159920 - DNA, 19 bp, Homo sapiens
  siRNA target sequence for RTN4IP1 (NM_032730.2,1123-1141).
gggctccagattttctcaa

SEQ ID NO: 159921 - DNA, 19 bp, Homo sapiens
  siRNA target sequence for RTN4IP1 (NM_032730.2,1234-1252).
gagtcactgtaggttcaaa

SEQ ID NO: 159922 - DNA, 19 bp, Homo sapiens
  siRNA target sequence for RTN4IP1 (NM_032730.2,1268-1286).
ctggaaaggagtccattat

SEQ ID NO: 159923 - DNA, 19 bp, Homo sapiens
  siRNA target sequence for RTN4IP1 (NM_032730.2,1281-1299).
cattatcgctgggcatttt

SEQ ID NO: 159924 - DNA, 19 bp, Homo sapiens
  siRNA target sequence for RTN4IP1 (NM_032730.2,1304-1322).
ggccagtggcccatgttta

SEQ ID NO: 159925 - DNA, 19 bp, Homo sapiens
  siRNA target sequence for RTN4IP1 (NM_032730.2,1306-1324).
ccagtggcccatgtttaga

SEQ ID NO: 159926 - DNA, 19 bp, Homo sapiens
  siRNA target sequence for RTN4IP1 (NM_032730.2,1309-1327).
gtggcccatgtttagatga

SEQ ID NO: 159927 - DNA, 19 bp, Homo sapiens
  siRNA target sequence for RTN4IP1 (NM_032730.2,1313-1331).
cccatgtttagatgacatt

SEQ ID NO: 159928 - DNA, 19 bp, Homo sapiens
  siRNA target sequence for RTN4IP1 (NM_032730.2,1351-1369).
gaaagatccggccagttat

SEQ ID NO: 159929 - DNA, 19 bp, Homo sapiens
  siRNA target sequence for RTN4IP1 (NM_032730.2,1355-1373).
gatccggccagttattgaa

SEQ ID NO: 159930 - DNA, 19 bp, Homo sapiens
  siRNA target sequence for RTN4IP1 (NM_032730.2,1358-1376).
ccggccagttattgaacaa

SEQ ID NO: 159931 - DNA, 19 bp, Homo sapiens
  siRNA target sequence for RTN4IP1 (NM_032730.2,1359-1377).
cggccagttattgaacaaa

SEQ ID NO: 159932 - DNA, 19 bp, Homo sapiens
  siRNA target sequence for RTN4IP1 (NM_032730.2,1363-1381).
cagttattgaacaaacctt

SEQ ID NO: 159933 - DNA, 19 bp, Homo sapiens
  siRNA target sequence for RTN4IP1 (NM_032730.2,1431-1449).
gcacgaggaaagactgtaa

SEQ ID NO: 159934 - DNA, 19 bp, Homo sapiens
  siRNA target sequence for RTN4IP1 (NM_032730.2,1432-1450).
cacgaggaaagactgtaat

SEQ ID NO: 159935 - DNA, 19 bp, Homo sapiens
  siRNA target sequence for RTN4IP1 (NM_032730.2,1434-1452).
cgaggaaagactgtaatta

SEQ ID NO: 159936 - DNA, 19 bp, Homo sapiens
  siRNA target sequence for RUFY1 (NM_025158.2,454-472).
catgggctgaaagttaaga

SEQ ID NO: 159937 - DNA, 19 bp, Homo sapiens
  siRNA target sequence for RUFY1 (NM_025158.2,516-534).
gctggtggagaaactttgt

SEQ ID NO: 159938 - DNA, 19 bp, Homo sapiens
  siRNA target sequence for RUFY1 (NM_025158.2,554-572).
cgactagtgtcagaaatct

SEQ ID NO: 159939 - DNA, 19 bp, Homo sapiens
  siRNA target sequence for RUFY1 (NM_025158.2,555-573).
gactagtgtcagaaatctt

SEQ ID NO: 159940 - DNA, 19 bp, Homo sapiens
  siRNA target sequence for RUFY1 (NM_025158.2,619-637).
cttgcactcatgcaaaaga

SEQ ID NO: 159941 - DNA, 19 bp, Homo sapiens
  siRNA target sequence for RUFY1 (NM_025158.2,763-781).
gttctcgatgccaatctct

SEQ ID NO: 159942 - DNA, 19 bp, Homo sapiens
  siRNA target sequence for RUFY1 (NM_025158.2,942-960).
cacagttggggatcttcaa

SEQ ID NO: 159943 - DNA, 19 bp, Homo sapiens
  siRNA target sequence for RUFY1 (NM_025158.2,970-988).
gatggcttggaaaagacta

SEQ ID NO: 159944 - DNA, 19 bp, Homo sapiens
  siRNA target sequence for RUFY1 (NM_025158.2,1015-1033).
gctgcaacagaccgaattt

SEQ ID NO: 159945 - DNA, 19 bp, Homo sapiens
  siRNA target sequence for RUFY1 (NM_025158.2,1018-1036).
gcaacagaccgaatttgct

SEQ ID NO: 159946 - DNA, 19 bp, Homo sapiens
  siRNA target sequence for RUFY1 (NM_025158.2,1026-1044).
ccgaatttgctcacttcaa

SEQ ID NO: 159947 - DNA, 19 bp, Homo sapiens
  siRNA target sequence for RUFY1 (NM_025158.2,1094-1112).
gtgaaaagagtgtagagat

SEQ ID NO: 159948 - DNA, 19 bp, Homo sapiens
  siRNA target sequence for RUFY1 (NM_025158.2,1159-1177).
cggcaaggtctggatgaaa

SEQ ID NO: 159949 - DNA, 19 bp, Homo sapiens
  siRNA target sequence for RUFY1 (NM_025158.2,1268-1286).
ccgaaatggaaattgcaat

SEQ ID NO: 159950 - DNA, 19 bp, Homo sapiens
  siRNA target sequence for RUFY1 (NM_025158.2,1364-1382).
cgattaacttacagatgtt

SEQ ID NO: 159951 - DNA, 19 bp, Homo sapiens
  siRNA target sequence for RUFY1 (NM_025158.2,1448-1466).
gaaaaaccaaccaagttat

SEQ ID NO: 159952 - DNA, 19 bp, Homo sapiens
  siRNA target sequence for RUFY1 (NM_025158.2,1661-1679).
ctcttcagcgcgaattaca

SEQ ID NO: 159953 - DNA, 19 bp, Homo sapiens
  siRNA target sequence for RUFY1 (NM_025158.2,1889-1907).
gccacgcctggctgaaaga

SEQ ID NO: 159954 - DNA, 19 bp, Homo sapiens
  siRNA target sequence for RUFY1 (NM_025158.2,1890-1908).
ccacgcctggctgaaagat

SEQ ID NO: 159955 - DNA, 19 bp, Homo sapiens
  siRNA target sequence for RUFY1 (NM_025158.2,1936-1954).
gagaaggagttctccattt

SEQ ID NO: 159956 - DNA, 19 bp, Homo sapiens
  siRNA target sequence for RUFY2 (NM_017987.2,62-80).
ggctaaactgagtatcaaa

SEQ ID NO: 159957 - DNA, 19 bp, Homo sapiens
  siRNA target sequence for RUFY2 (NM_017987.2,71-89).
gagtatcaaaggactcatt

SEQ ID NO: 159958 - DNA, 19 bp, Homo sapiens
  siRNA target sequence for RUFY2 (NM_017987.2,73-91).
gtatcaaaggactcattga

SEQ ID NO: 159959 - DNA, 19 bp, Homo sapiens
  siRNA target sequence for RUFY2 (NM_017987.2,104-122).
ctttggccgcactttggat

SEQ ID NO: 159960 - DNA, 19 bp, Homo sapiens
  siRNA target sequence for RUFY2 (NM_017987.2,113-131).
cactttggattctgactat

SEQ ID NO: 159961 - DNA, 19 bp, Homo sapiens
  siRNA target sequence for RUFY2 (NM_017987.2,169-187).
gcctgaaacacggtcttaa

SEQ ID NO: 159962 - DNA, 19 bp, Homo sapiens
  siRNA target sequence for RUFY2 (NM_017987.2,177-195).
cacggtcttaaagtaagaa

SEQ ID NO: 159963 - DNA, 19 bp, Homo sapiens
  siRNA target sequence for RUFY2 (NM_017987.2,179-197).
cggtcttaaagtaagaaaa

SEQ ID NO: 159964 - DNA, 19 bp, Homo sapiens
  siRNA target sequence for RUFY2 (NM_017987.2,180-198).
ggtcttaaagtaagaaaat

SEQ ID NO: 159965 - DNA, 19 bp, Homo sapiens
  siRNA target sequence for RUFY2 (NM_017987.2,339-357).
cgattagccctcatgcaaa

SEQ ID NO: 159966 - DNA, 19 bp, Homo sapiens
  siRNA target sequence for RUFY2 (NM_017987.2,340-358).
gattagccctcatgcaaaa

SEQ ID NO: 159967 - DNA, 19 bp, Homo sapiens
  siRNA target sequence for RUFY2 (NM_017987.2,368-386).
cgattacttacgttgctta

SEQ ID NO: 159968 - DNA, 19 bp, Homo sapiens
  siRNA target sequence for RUFY2 (NM_017987.2,369-387).
gattacttacgttgcttaa

SEQ ID NO: 159969 - DNA, 19 bp, Homo sapiens
  siRNA target sequence for RUFY2 (NM_017987.2,374-392).
cttacgttgcttaattatt

SEQ ID NO: 159970 - DNA, 19 bp, Homo sapiens
  siRNA target sequence for RUFY2 (NM_017987.2,398-416).
ggatctcttgagtgagttt

SEQ ID NO: 159971 - DNA, 19 bp, Homo sapiens
  siRNA target sequence for RUFY2 (NM_017987.2,399-417).
gatctcttgagtgagtttt

SEQ ID NO: 159972 - DNA, 19 bp, Homo sapiens
  siRNA target sequence for RUFY2 (NM_017987.2,409-427).
gtgagttttatgagtatca

SEQ ID NO: 159973 - DNA, 19 bp, Homo sapiens
  siRNA target sequence for RUFY2 (NM_017987.2,420-438).
gagtatcacgcactaatga

SEQ ID NO: 159974 - DNA, 19 bp, Homo sapiens
  siRNA target sequence for RUFY2 (NM_017987.2,471-489).
ctggttggcctgaatgtga

SEQ ID NO: 159975 - DNA, 19 bp, Homo sapiens
  siRNA target sequence for RUFY2 (NM_017987.2,482-500).
gaatgtgatcgatgctaat

SEQ ID NO: 159976 - DNA, 19 bp, Homo sapiens
  siRNA target sequence for RUFY2 (NM_017987.2,486-504).
gtgatcgatgctaatctgt

SEQ ID NO: 159977 - DNA, 19 bp, Homo sapiens
  siRNA target sequence for RUFY2 (NM_017987.2,518-536).
ggatttagactcacaagtt

SEQ ID NO: 159978 - DNA, 19 bp, Homo sapiens
  siRNA target sequence for RUFY2 (NM_017987.2,669-687).
gtcagcagcctccattcaa

SEQ ID NO: 159979 - DNA, 19 bp, Homo sapiens
  siRNA target sequence for RUFY2 (NM_017987.2,677-695).
cctccattcaagagttgat

SEQ ID NO: 159980 - DNA, 19 bp, Homo sapiens
  siRNA target sequence for RUFY2 (NM_017987.2,678-696).
ctccattcaagagttgatt

SEQ ID NO: 159981 - DNA, 19 bp, Homo sapiens
  siRNA target sequence for RUFY2 (NM_017987.2,722-740).
gattgaagagttagcaata

SEQ ID NO: 159982 - DNA, 19 bp, Homo sapiens
  siRNA target sequence for RUFY2 (NM_017987.2,726-744).
gaagagttagcaatagcaa

SEQ ID NO: 159983 - DNA, 19 bp, Homo sapiens
  siRNA target sequence for RUFY2 (NM_017987.2,731-749).
gttagcaatagcaaagaat

SEQ ID NO: 159984 - DNA, 19 bp, Homo sapiens
  siRNA target sequence for RUFY2 (NM_017987.2,741-759).
gcaaagaataacatcatta

SEQ ID NO: 159985 - DNA, 19 bp, Homo sapiens
  siRNA target sequence for RUFY2 (NM_017987.2,771-789).
gaaaatcatcaattacgaa

SEQ ID NO: 159986 - DNA, 19 bp, Homo sapiens
  siRNA target sequence for RUFY2 (NM_017987.2,861-879).
cttcaaacatataagcatt

SEQ ID NO: 159987 - DNA, 19 bp, Homo sapiens
  siRNA target sequence for RUFY2 (NM_017987.2,880-898).
ctcgtcaggggctagatga

SEQ ID NO: 159988 - DNA, 19 bp, Homo sapiens
  siRNA target sequence for RUFY2 (NM_017987.2,882-900).
cgtcaggggctagatgaaa

SEQ ID NO: 159989 - DNA, 19 bp, Homo sapiens
  siRNA target sequence for RUFY2 (NM_017987.2,883-901).
gtcaggggctagatgaaat

SEQ ID NO: 159990 - DNA, 19 bp, Homo sapiens
  siRNA target sequence for RUFY2 (NM_017987.2,885-903).
caggggctagatgaaatgt

SEQ ID NO: 159991 - DNA, 19 bp, Homo sapiens
  siRNA target sequence for RUFY2 (NM_017987.2,890-908).
gctagatgaaatgtacaat

SEQ ID NO: 159992 - DNA, 19 bp, Homo sapiens
  siRNA target sequence for RUFY2 (NM_017987.2,959-977).
gaatgagctagcagtacaa

SEQ ID NO: 159993 - DNA, 19 bp, Homo sapiens
  siRNA target sequence for RUFY2 (NM_017987.2,963-981).
gagctagcagtacaagtta

SEQ ID NO: 159994 - DNA, 19 bp, Homo sapiens
  siRNA target sequence for RUFY2 (NM_017987.2,965-983).
gctagcagtacaagttagt

SEQ ID NO: 159995 - DNA, 19 bp, Homo sapiens
  siRNA target sequence for RUFY2 (NM_017987.2,966-984).
ctagcagtacaagttagta

SEQ ID NO: 159996 - DNA, 19 bp, Homo sapiens
  siRNA target sequence for RUFY2 (NM_017987.2,969-987).
gcagtacaagttagtatga

SEQ ID NO: 159997 - DNA, 19 bp, Homo sapiens
  siRNA target sequence for RUFY2 (NM_017987.2,970-988).
cagtacaagttagtatgaa

SEQ ID NO: 159998 - DNA, 19 bp, Homo sapiens
  siRNA target sequence for RUFY2 (NM_017987.2,1031-1049).
ccatgagaaacaagatact

SEQ ID NO: 159999 - DNA, 19 bp, Homo sapiens
  siRNA target sequence for RUFY2 (NM_017987.2,1057-1075).
gccttcgacaacaactaga

SEQ ID NO: 160000 - DNA, 19 bp, Homo sapiens
  siRNA target sequence for RUFY2 (NM_017987.2,1158-1176).
gcccgactagaagaaaaaa

SEQ ID NO: 160001 - DNA, 19 bp, Homo sapiens
  siRNA target sequence for RUFY2 (NM_017987.2,1265-1283).
gaaatatctacaagaatgt

SEQ ID NO: 160002 - DNA, 19 bp, Homo sapiens
  siRNA target sequence for RUFY2 (NM_017987.2,1417-1435).
ccttatctcatcttagaaa

SEQ ID NO: 160003 - DNA, 19 bp, Homo sapiens
  siRNA target sequence for RUFY2 (NM_017987.2,1437-1455).
gagactcaacaaatcatta

SEQ ID NO: 160004 - DNA, 19 bp, Homo sapiens
  siRNA target sequence for RUFY2 (NM_017987.2,1446-1464).
caaatcattagtcttaaaa

SEQ ID NO: 160005 - DNA, 19 bp, Homo sapiens
  siRNA target sequence for RUFY2 (NM_017987.2,1539-1557).
gaactcggcaacaagctta

SEQ ID NO: 160006 - DNA, 19 bp, Homo sapiens
  siRNA target sequence for RUFY2 (NM_017987.2,1550-1568).
caagcttagcgaatcaaaa

SEQ ID NO: 160007 - DNA, 19 bp, Homo sapiens
  siRNA target sequence for RUFY2 (NM_017987.2,1554-1572).
cttagcgaatcaaaactta

SEQ ID NO: 160008 - DNA, 19 bp, Homo sapiens
  siRNA target sequence for RUFY2 (NM_017987.2,1558-1576).
gcgaatcaaaacttaaaat

SEQ ID NO: 160009 - DNA, 19 bp, Homo sapiens
  siRNA target sequence for RUFY2 (NM_017987.2,1732-1750).
ctgacaacgaactaccttt

SEQ ID NO: 160010 - DNA, 19 bp, Homo sapiens
  siRNA target sequence for SORD (NM_003104.3,187-205).
cttgcgcctggagaactat

SEQ ID NO: 160011 - DNA, 19 bp, Homo sapiens
  siRNA target sequence for SORD (NM_003104.3,191-209).
cgcctggagaactatccta

SEQ ID NO: 160012 - DNA, 19 bp, Homo sapiens
  siRNA target sequence for THOP1 (NM_003249.3,810-828).
ctcaagtacccccattact

SEQ ID NO: 160013 - DNA, 19 bp, Homo sapiens
  siRNA target sequence for THOP1 (NM_003249.3,1159-1177).
gggacatgcgctactacat

SEQ ID NO: 160014 - DNA, 19 bp, Homo sapiens
  siRNA target sequence for THOP1 (NM_003249.3,1161-1179).
gacatgcgctactacatga

SEQ ID NO: 160015 - DNA, 19 bp, Homo sapiens
  siRNA target sequence for THOP1 (NM_003249.3,1611-1629).
gcggagttcgccatgttca

SEQ ID NO: 160016 - DNA, 19 bp, Homo sapiens
  siRNA target sequence for THOP1 (NM_003249.3,1789-1807).
ccaacacaggcctcttcaa

SEQ ID NO: 160017 - DNA, 19 bp, Homo sapiens
  siRNA target sequence for THOP1 (NM_003249.3,1966-1984).
gctacgacgcccagtacta

SEQ ID NO: 160018 - DNA, 19 bp, Homo sapiens
  siRNA target sequence for THOP1 (NM_003249.3,1996-2014).
ggagcgaggtgtattccat

SEQ ID NO: 160019 - DNA, 19 bp, Homo sapiens
  siRNA target sequence for TIMM10 (NM_012456.1,184-202).
gccgatatgtacaacagaa

SEQ ID NO: 160020 - DNA, 19 bp, Homo sapiens
  siRNA target sequence for TIMM10 (NM_012456.1,185-203).
ccgatatgtacaacagaat

SEQ ID NO: 160021 - DNA, 19 bp, Homo sapiens
  siRNA target sequence for TIMM10 (NM_012456.1,227-245).
gtgtgcctcctcactacaa

SEQ ID NO: 160022 - DNA, 19 bp, Homo sapiens
  siRNA target sequence for TIMM10 (NM_012456.1,283-301).
gaccgatgtgtctctaagt

SEQ ID NO: 160023 - DNA, 19 bp, Homo sapiens
  siRNA target sequence for TIMM10 (NM_012456.1,319-337).
cggatgggcaaaaagttga

SEQ ID NO: 160024 - DNA, 19 bp, Homo sapiens
  siRNA target sequence for TIMM13 (NM_012458.2,466-484).
ggatgacggacaagtgttt

SEQ ID NO: 160025 - DNA, 19 bp, Homo sapiens
  siRNA target sequence for TIMM13 (NM_012458.2,479-497).
gtgtttccggaagtgtata

SEQ ID NO: 160026 - DNA, 19 bp, Homo sapiens
  siRNA target sequence for TIMM13 (NM_012458.2,582-600).
gtgtctcgcgcctacaact

SEQ ID NO: 160027 - DNA, 19 bp, Homo sapiens
  siRNA target sequence for TIMM13 (NM_012458.2,612-630).
cgggaacgagccaacatgt

SEQ ID NO: 160028 - DNA, 19 bp, Homo sapiens
  siRNA target sequence for TIMM8B (NM_012459.1,72-90).
gcagaaggcgcagtttact

SEQ ID NO: 160029 - DNA, 19 bp, Homo sapiens
  siRNA target sequence for TIMM8B (NM_012459.1,154-172).
ctagactctcgcactgaaa

SEQ ID NO: 160030 - DNA, 19 bp, Homo sapiens
  siRNA target sequence for TIMM8B (NM_012459.1,157-175).
gactctcgcactgaaaatt

SEQ ID NO: 160031 - DNA, 19 bp, Homo sapiens
  siRNA target sequence for TIMM8B (NM_012459.1,159-177).
ctctcgcactgaaaattgt

SEQ ID NO: 160032 - DNA, 19 bp, Homo sapiens
  siRNA target sequence for TIMM8B (NM_012459.1,161-179).
ctcgcactgaaaattgtct

SEQ ID NO: 160033 - DNA, 19 bp, Homo sapiens
  siRNA target sequence for TIMM8B (NM_012459.1,186-204).
ctgtgtagaccgcttcatt

SEQ ID NO: 160034 - DNA, 19 bp, Homo sapiens
  siRNA target sequence for TIMM8B (NM_012459.1,188-206).
gtgtagaccgcttcattga

SEQ ID NO: 160035 - DNA, 19 bp, Homo sapiens
  siRNA target sequence for TIMM8B (NM_012459.1,190-208).
gtagaccgcttcattgaca

SEQ ID NO: 160036 - DNA, 19 bp, Homo sapiens
  siRNA target sequence for TIMM8B (NM_012459.1,230-248).
ggtttgcccagattgtaca

SEQ ID NO: 160037 - DNA, 19 bp, Homo sapiens
  siRNA target sequence for TIMM9 (NM_012460.2,480-498).
ggggacctacaataaactt

SEQ ID NO: 160038 - DNA, 19 bp, Homo sapiens
  siRNA target sequence for TIMM9 (NM_012460.2,531-549).
cttcacaacaagagaagta

SEQ ID NO: 160039 - DNA, 19 bp, Homo sapiens
  siRNA target sequence for TIMM9 (NM_012460.2,581-599).
gcttacagaaatatttaaa

SEQ ID NO: 160040 - DNA, 19 bp, Homo sapiens
  siRNA target sequence for TP53I3 (NM_004881.2,558-576).
cgggaggaccggaaaacct

SEQ ID NO: 160041 - DNA, 19 bp, Homo sapiens
  siRNA target sequence for TP53I3 (NM_004881.2,696-714).
caggagccagcaacatttt

SEQ ID NO: 160042 - DNA, 19 bp, Homo sapiens
  siRNA target sequence for TP53I3 (NM_004881.2,954-972).
gagactatgtgctaatcca

SEQ ID NO: 160043 - DNA, 19 bp, Homo sapiens
  siRNA target sequence for TP53I3 (NM_004881.2,1015-1033).
ccggatggctggagctatt

SEQ ID NO: 160044 - DNA, 19 bp, Homo sapiens
  siRNA target sequence for TP53I3 (NM_004881.2,1092-1110).
ctgctggattcaattacaa

SEQ ID NO: 160045 - DNA, 19 bp, Homo sapiens
  siRNA target sequence for TP53I3 (NM_004881.2,1127-1145).
gaagcaacgctgaaattca

SEQ ID NO: 160046 - DNA, 19 bp, Homo sapiens
  siRNA target sequence for TP53I3 (NM_004881.2,1332-1350).
ggtctagggacaataagta

SEQ ID NO: 160047 - DNA, 19 bp, Homo sapiens
  siRNA target sequence for TP53I3 (NM_004881.2,1427-1445).
ccggttctggacagaatct

SEQ ID NO: 160048 - DNA, 19 bp, Homo sapiens
  siRNA target sequence for TRAF2 (NM_021138.2,279-297).
cgagggcatatatgaagaa

SEQ ID NO: 160049 - DNA, 19 bp, Homo sapiens
  siRNA target sequence for TRAF2 (NM_021138.2,664-682).
caggaccacgtcaagactt

SEQ ID NO: 160050 - DNA, 19 bp, Homo sapiens
  siRNA target sequence for TRAF2 (NM_021138.2,734-752).
cggtagagggtgagaaaca

SEQ ID NO: 160051 - DNA, 19 bp, Homo sapiens
  siRNA target sequence for TRAF2 (NM_021138.2,885-903).
gaagaagacggccactttt

SEQ ID NO: 160052 - DNA, 19 bp, Homo sapiens
  siRNA target sequence for TRAF2 (NM_021138.2,893-911).
cggccacttttgagaacat

SEQ ID NO: 160053 - DNA, 19 bp, Homo sapiens
  siRNA target sequence for TRAF2 (NM_021138.2,980-998).
ggctggaccaagacaagat

SEQ ID NO: 160054 - DNA, 19 bp, Homo sapiens
  siRNA target sequence for TRAF2 (NM_021138.2,981-999).
gctggaccaagacaagatt

SEQ ID NO: 160055 - DNA, 19 bp, Homo sapiens
  siRNA target sequence for TRAF2 (NM_021138.2,1171-1189).
cgcatacccgccatcttct

SEQ ID NO: 160056 - DNA, 19 bp, Homo sapiens
  siRNA target sequence for TRAF2 (NM_021138.2,1208-1226).
gcaggtacggctacaagat

SEQ ID NO: 160057 - DNA, 19 bp, Homo sapiens
  siRNA target sequence for TRAF2 (NM_021138.2,1430-1448).
ggccagtcaacgacatgaa

SEQ ID NO: 160058 - DNA, 19 bp, Homo sapiens
  siRNA target sequence for TRAF2 (NM_021138.2,1432-1450).
ccagtcaacgacatgaaca

SEQ ID NO: 160059 - DNA, 19 bp, Homo sapiens
  siRNA target sequence for TRAF2 (NM_021138.2,1433-1451).
cagtcaacgacatgaacat

SEQ ID NO: 160060 - DNA, 19 bp, Homo sapiens
  siRNA target sequence for TRAF3 (NM_003300.2,315-333).
ctgaacaaggaggttacaa

SEQ ID NO: 160061 - DNA, 19 bp, Homo sapiens
  siRNA target sequence for TRAF3 (NM_003300.2,351-369).
ccgtggaggacaagtacaa

SEQ ID NO: 160062 - DNA, 19 bp, Homo sapiens
  siRNA target sequence for TRAF3 (NM_003300.2,486-504).
gtcaagagagcatcgttaa

SEQ ID NO: 160063 - DNA, 19 bp, Homo sapiens
  siRNA target sequence for TRAF3 (NM_003300.2,491-509).
gagagcatcgttaaagata

SEQ ID NO: 160064 - DNA, 19 bp, Homo sapiens
  siRNA target sequence for TRAF3 (NM_003300.2,512-530).
gtgtttaaggataattgct

SEQ ID NO: 160065 - DNA, 19 bp, Homo sapiens
  siRNA target sequence for TRAF3 (NM_003300.2,545-563).
ctggctcttcagatctatt

SEQ ID NO: 160066 - DNA, 19 bp, Homo sapiens
  siRNA target sequence for TRAF3 (NM_003300.2,547-565).
ggctcttcagatctattgt

SEQ ID NO: 160067 - DNA, 19 bp, Homo sapiens
  siRNA target sequence for TRAF3 (NM_003300.2,585-603).
gtgcagagcagttaatgct

SEQ ID NO: 160068 - DNA, 19 bp, Homo sapiens
  siRNA target sequence for TRAF3 (NM_003300.2,877-895).
cttgtcagagtgtgtcaat

SEQ ID NO: 160069 - DNA, 19 bp, Homo sapiens
  siRNA target sequence for TRAF3 (NM_003300.2,919-937).
gcgctatggctgcgttttt

SEQ ID NO: 160070 - DNA, 19 bp, Homo sapiens
  siRNA target sequence for TRAF3 (NM_003300.2,1011-1029).
ggagcaactcgctcgaaaa

SEQ ID NO: 160071 - DNA, 19 bp, Homo sapiens
  siRNA target sequence for TRAF3 (NM_003300.2,1079-1097).
caaagtttgcacaatcaga

SEQ ID NO: 160072 - DNA, 19 bp, Homo sapiens
  siRNA target sequence for TRAF3 (NM_003300.2,1101-1119).
gtagctttgaaattgaaat

SEQ ID NO: 160073 - DNA, 19 bp, Homo sapiens
  siRNA target sequence for TRAF3 (NM_003300.2,1132-1150).
ggaaatgcttcgaaataat

SEQ ID NO: 160074 - DNA, 19 bp, Homo sapiens
  siRNA target sequence for TRAF3 (NM_003300.2,1441-1459).
ggagaccgccagctacaat

SEQ ID NO: 160075 - DNA, 19 bp, Homo sapiens
  siRNA target sequence for TRAF3 (NM_003300.2,1473-1491).
ggaagattcgcgactacaa

SEQ ID NO: 160076 - DNA, 19 bp, Homo sapiens
  siRNA target sequence for TRAF3 (NM_003300.2,1554-1572).
ctggttactttggctataa

SEQ ID NO: 160077 - DNA, 19 bp, Homo sapiens
  siRNA target sequence for TRAF3 (NM_003300.2,1620-1638).
cgcacttgtcgctgttttt

SEQ ID NO: 160078 - DNA, 19 bp, Homo sapiens
  siRNA target sequence for TRAF3 (NM_003300.2,1621-1639).
gcacttgtcgctgtttttt

SEQ ID NO: 160079 - DNA, 19 bp, Homo sapiens
  siRNA target sequence for TRAF3 (NM_003300.2,1719-1737).
ggtcctctcgacgtcattt

SEQ ID NO: 160080 - DNA, 19 bp, Homo sapiens
  siRNA target sequence for TRAF4 (NM_004295.2,294-312).
cggagctggaagtacaagt

SEQ ID NO: 160081 - DNA, 19 bp, Homo sapiens
  siRNA target sequence for TRAF4 (NM_004295.2,366-384).
ggccactacgtcatctaca

SEQ ID NO: 160082 - DNA, 19 bp, Homo sapiens
  siRNA target sequence for TRAF4 (NM_004295.2,497-515).
cgcctcaagtgcgagtttt

SEQ ID NO: 160083 - DNA, 19 bp, Homo sapiens
  siRNA target sequence for TRAF4 (NM_004295.2,499-517).
cctcaagtgcgagttttgt

SEQ ID NO: 160084 - DNA, 19 bp, Homo sapiens
  siRNA target sequence for TRAF4 (NM_004295.2,574-592).
gagtgtctactgtgagaat

SEQ ID NO: 160085 - DNA, 19 bp, Homo sapiens
  siRNA target sequence for TRAF4 (NM_004295.2,1374-1392).
gttctctgggctttggtta

SEQ ID NO: 160086 - DNA, 19 bp, Homo sapiens
  siRNA target sequence for TRAF4 (NM_004295.2,1388-1406).
ggttatcccaagttcatct

SEQ ID NO: 160087 - DNA, 19 bp, Homo sapiens
  siRNA target sequence for TRAF4 (NM_004295.2,1407-1425).
cccaccaggacattcgaaa

SEQ ID NO: 160088 - DNA, 19 bp, Homo sapiens
  siRNA target sequence for TRAF4 (NM_004295.2,1440-1458).
gggatgatgcagtcttcat

SEQ ID NO: 160089 - DNA, 19 bp, Homo sapiens
  siRNA target sequence for TRAF5 (NM_004619.2,204-222).
cagaagagcataaaggtat

SEQ ID NO: 160090 - DNA, 19 bp, Homo sapiens
  siRNA target sequence for TRAF5 (NM_004619.2,219-237).
gtatgccctgtggtttcat

SEQ ID NO: 160091 - DNA, 19 bp, Homo sapiens
  siRNA target sequence for TRAF5 (NM_004619.2,307-325).
gttggaagagcgctacaaa

SEQ ID NO: 160092 - DNA, 19 bp, Homo sapiens
  siRNA target sequence for TRAF5 (NM_004619.2,336-354).
gccactcggtgcttcacaa

SEQ ID NO: 160093 - DNA, 19 bp, Homo sapiens
  siRNA target sequence for TRAF5 (NM_004619.2,427-445).
gccaatctgccctgtagat

SEQ ID NO: 160094 - DNA, 19 bp, Homo sapiens
  siRNA target sequence for TRAF5 (NM_004619.2,443-461).
gataaagaggtcatcaaat

SEQ ID NO: 160095 - DNA, 19 bp, Homo sapiens
  siRNA target sequence for TRAF5 (NM_004619.2,495-513).
gagaagtcctcaacttata

SEQ ID NO: 160096 - DNA, 19 bp, Homo sapiens
  siRNA target sequence for TRAF5 (NM_004619.2,500-518).
gtcctcaacttatatgtat

SEQ ID NO: 160097 - DNA, 19 bp, Homo sapiens
  siRNA target sequence for TRAF5 (NM_004619.2,525-543).
gcaatgctcctggatgtaa

SEQ ID NO: 160098 - DNA, 19 bp, Homo sapiens
  siRNA target sequence for TRAF5 (NM_004619.2,526-544).
caatgctcctggatgtaat

SEQ ID NO: 160099 - DNA, 19 bp, Homo sapiens
  siRNA target sequence for TRAF5 (NM_004619.2,536-554).
ggatgtaatgccaaggtta

SEQ ID NO: 160100 - DNA, 19 bp, Homo sapiens
  siRNA target sequence for TRAF5 (NM_004619.2,537-555).
gatgtaatgccaaggttat

SEQ ID NO: 160101 - DNA, 19 bp, Homo sapiens
  siRNA target sequence for TRAF5 (NM_004619.2,540-558).
gtaatgccaaggttattct

SEQ ID NO: 160102 - DNA, 19 bp, Homo sapiens
  siRNA target sequence for TRAF5 (NM_004619.2,596-614).
caacctgtgcagtgttcta

SEQ ID NO: 160103 - DNA, 19 bp, Homo sapiens
  siRNA target sequence for TRAF5 (NM_004619.2,668-686).
gcatcctgtcagtttcgaa

SEQ ID NO: 160104 - DNA, 19 bp, Homo sapiens
  siRNA target sequence for TRAF5 (NM_004619.2,669-687).
catcctgtcagtttcgaaa

SEQ ID NO: 160105 - DNA, 19 bp, Homo sapiens
  siRNA target sequence for TRAF5 (NM_004619.2,673-691).
ctgtcagtttcgaaaggaa

SEQ ID NO: 160106 - DNA, 19 bp, Homo sapiens
  siRNA target sequence for TRAF5 (NM_004619.2,756-774).
gtcctgaatacccagtatt

SEQ ID NO: 160107 - DNA, 19 bp, Homo sapiens
  siRNA target sequence for TRAF5 (NM_004619.2,784-802).
caattgtgcgaagattatt

SEQ ID NO: 160108 - DNA, 19 bp, Homo sapiens
  siRNA target sequence for TRAF5 (NM_004619.2,848-866).
gagcaagactgtcctttta

SEQ ID NO: 160109 - DNA, 19 bp, Homo sapiens
  siRNA target sequence for TRAF5 (NM_004619.2,940-958).
catgcgtttggttttagaa

SEQ ID NO: 160110 - DNA, 19 bp, Homo sapiens
  siRNA target sequence for TRAF5 (NM_004619.2,1030-1048).
gcagctagcagaaactata

SEQ ID NO: 160111 - DNA, 19 bp, Homo sapiens
  siRNA target sequence for TRAF5 (NM_004619.2,1034-1052).
ctagcagaaactataaaga

SEQ ID NO: 160112 - DNA, 19 bp, Homo sapiens
  siRNA target sequence for TRAF5 (NM_004619.2,1084-1102).
gttgtttggcaaaaatgga

SEQ ID NO: 160113 - DNA, 19 bp, Homo sapiens
  siRNA target sequence for TRAF5 (NM_004619.2,1111-1129).
cccaaacatccaggttttt

SEQ ID NO: 160114 - DNA, 19 bp, Homo sapiens
  siRNA target sequence for TRAF5 (NM_004619.2,1228-1246).
gatggaagcagttgataca

SEQ ID NO: 160115 - DNA, 19 bp, Homo sapiens
  siRNA target sequence for TRAF5 (NM_004619.2,1263-1281).
ccctgctagaaaacaatga

SEQ ID NO: 160116 - DNA, 19 bp, Homo sapiens
  siRNA target sequence for TRAF5 (NM_004619.2,1287-1305).
gattagccgttttagaaga

SEQ ID NO: 160117 - DNA, 19 bp, Homo sapiens
  siRNA target sequence for TRAF5 (NM_004619.2,1319-1337).
catgatacccacattaata

SEQ ID NO: 160118 - DNA, 19 bp, Homo sapiens
  siRNA target sequence for TRAF5 (NM_004619.2,1381-1399).
gctggagggtacttgctat

SEQ ID NO: 160119 - DNA, 19 bp, Homo sapiens
  siRNA target sequence for TRAF5 (NM_004619.2,1382-1400).
ctggagggtacttgctata

SEQ ID NO: 160120 - DNA, 19 bp, Homo sapiens
  siRNA target sequence for TRAF5 (NM_004619.2,1384-1402).
ggagggtacttgctataat

SEQ ID NO: 160121 - DNA, 19 bp, Homo sapiens
  siRNA target sequence for TRAF5 (NM_004619.2,1387-1405).
gggtacttgctataatgga

SEQ ID NO: 160122 - DNA, 19 bp, Homo sapiens
  siRNA target sequence for TRAF5 (NM_004619.2,1388-1406).
ggtacttgctataatggaa

SEQ ID NO: 160123 - DNA, 19 bp, Homo sapiens
  siRNA target sequence for TRAF5 (NM_004619.2,1463-1481).
cacacagtgtccatcttca

SEQ ID NO: 160124 - DNA, 19 bp, Homo sapiens
  siRNA target sequence for TRAF5 (NM_004619.2,1585-1603).
ggtcatgcgaggagagttt

SEQ ID NO: 160125 - DNA, 19 bp, Homo sapiens
  siRNA target sequence for TRAF5 (NM_004619.2,1722-1740).
gacctgatggggagatgaa

SEQ ID NO: 160126 - DNA, 19 bp, Homo sapiens
  siRNA target sequence for TRAF5 (NM_004619.2,1730-1748).
ggggagatgaacattgcat

SEQ ID NO: 160127 - DNA, 19 bp, Homo sapiens
  siRNA target sequence for TRAF5 (NM_004619.2,1759-1777).
ccgctttgtggctcattct

SEQ ID NO: 160128 - DNA, 19 bp, Homo sapiens
  siRNA target sequence for TRAF5 (NM_004619.2,1790-1808).
gccaagaacgcctacatta

SEQ ID NO: 160129 - DNA, 19 bp, Homo sapiens
  siRNA target sequence for TRAF5 (NM_004619.2,1791-1809).
ccaagaacgcctacattaa

SEQ ID NO: 160130 - DNA, 19 bp, Homo sapiens
  siRNA target sequence for TRAF5 (NM_004619.2,1795-1813).
gaacgcctacattaaagat

SEQ ID NO: 160131 - DNA, 19 bp, Homo sapiens
  siRNA target sequence for TRAF5 (NM_004619.2,1811-1829).
gatgacactctgttcttga

SEQ ID NO: 160132 - DNA, 19 bp, Homo sapiens
  siRNA target sequence for TRHDE (NM_013381.1,191-209).
gccacatcgccgtacacaa

SEQ ID NO: 160133 - DNA, 19 bp, Homo sapiens
  siRNA target sequence for TRHDE (NM_013381.1,531-549).
gaagccgctgcactacaat

SEQ ID NO: 160134 - DNA, 19 bp, Homo sapiens
  siRNA target sequence for TRHDE (NM_013381.1,535-553).
ccgctgcactacaatctga

SEQ ID NO: 160135 - DNA, 19 bp, Homo sapiens
  siRNA target sequence for TRHDE (NM_013381.1,703-721).
gtccctgtagccggttttt

SEQ ID NO: 160136 - DNA, 19 bp, Homo sapiens
  siRNA target sequence for TRHDE (NM_013381.1,707-725).
ctgtagccggttttttcct

SEQ ID NO: 160137 - DNA, 19 bp, Homo sapiens
  siRNA target sequence for TRHDE (NM_013381.1,748-766).
gtggtggtgctgaatagga

SEQ ID NO: 160138 - DNA, 19 bp, Homo sapiens
  siRNA target sequence for TRHDE (NM_013381.1,769-787).
ctggacgcgcagaggaatt

SEQ ID NO: 160139 - DNA, 19 bp, Homo sapiens
  siRNA target sequence for TRHDE (NM_013381.1,774-792).
cgcgcagaggaattacaat

SEQ ID NO: 160140 - DNA, 19 bp, Homo sapiens
  siRNA target sequence for TRHDE (NM_013381.1,776-794).
cgcagaggaattacaatct

SEQ ID NO: 160141 - DNA, 19 bp, Homo sapiens
  siRNA target sequence for TRHDE (NM_013381.1,864-882).
cggggagagaagattcctt

SEQ ID NO: 160142 - DNA, 19 bp, Homo sapiens
  siRNA target sequence for TRHDE (NM_013381.1,929-947).
gttttgatgagccaatcta

SEQ ID NO: 160143 - DNA, 19 bp, Homo sapiens
  siRNA target sequence for TRHDE (NM_013381.1,941-959).
caatctacaaggctacttt

SEQ ID NO: 160144 - DNA, 19 bp, Homo sapiens
  siRNA target sequence for TRHDE (NM_013381.1,975-993).
gcatcaagcaacctattta

SEQ ID NO: 160145 - DNA, 19 bp, Homo sapiens
  siRNA target sequence for TRHDE (NM_013381.1,979-997).
caagcaacctatttatctt

SEQ ID NO: 160146 - DNA, 19 bp, Homo sapiens
  siRNA target sequence for TRHDE (NM_013381.1,982-1000).
gcaacctatttatctttat

SEQ ID NO: 160147 - DNA, 19 bp, Homo sapiens
  siRNA target sequence for TRHDE (NM_013381.1,1040-1058).
gatgggttacggatcactt

SEQ ID NO: 160148 - DNA, 19 bp, Homo sapiens
  siRNA target sequence for TRHDE (NM_013381.1,1044-1062).
ggttacggatcacttttca

SEQ ID NO: 160149 - DNA, 19 bp, Homo sapiens
  siRNA target sequence for TRHDE (NM_013381.1,1068-1086).
ccctctcatgtccacatat

SEQ ID NO: 160150 - DNA, 19 bp, Homo sapiens
  siRNA target sequence for TRHDE (NM_013381.1,1072-1090).
ctcatgtccacatattatt

SEQ ID NO: 160151 - DNA, 19 bp, Homo sapiens
  siRNA target sequence for TRHDE (NM_013381.1,1134-1152).
caagagtggggttgtagta

SEQ ID NO: 160152 - DNA, 19 bp, Homo sapiens
  siRNA target sequence for TRHDE (NM_013381.1,1139-1157).
gtggggttgtagtacgatt

SEQ ID NO: 160153 - DNA, 19 bp, Homo sapiens
  siRNA target sequence for TRHDE (NM_013381.1,1141-1159).
ggggttgtagtacgattat

SEQ ID NO: 160154 - DNA, 19 bp, Homo sapiens
  siRNA target sequence for TRHDE (NM_013381.1,1142-1160).
gggttgtagtacgattata

SEQ ID NO: 160155 - DNA, 19 bp, Homo sapiens
  siRNA target sequence for TRHDE (NM_013381.1,1143-1161).
ggttgtagtacgattatat

SEQ ID NO: 160156 - DNA, 19 bp, Homo sapiens
  siRNA target sequence for TRHDE (NM_013381.1,1193-1211).
gggactatgctctccatat

SEQ ID NO: 160157 - DNA, 19 bp, Homo sapiens
  siRNA target sequence for TRHDE (NM_013381.1,1194-1212).
ggactatgctctccatata

SEQ ID NO: 160158 - DNA, 19 bp, Homo sapiens
  siRNA target sequence for TRHDE (NM_013381.1,1195-1213).
gactatgctctccatataa

SEQ ID NO: 160159 - DNA, 19 bp, Homo sapiens
  siRNA target sequence for TRHDE (NM_013381.1,1197-1215).
ctatgctctccatataaca

SEQ ID NO: 160160 - DNA, 19 bp, Homo sapiens
  siRNA target sequence for TRHDE (NM_013381.1,1204-1222).
ctccatataacaaagagat

SEQ ID NO: 160161 - DNA, 19 bp, Homo sapiens
  siRNA target sequence for TRHDE (NM_013381.1,1206-1224).
ccatataacaaagagatta

SEQ ID NO: 160162 - DNA, 19 bp, Homo sapiens
  siRNA target sequence for TRHDE (NM_013381.1,1207-1225).
catataacaaagagattaa

SEQ ID NO: 160163 - DNA, 19 bp, Homo sapiens
  siRNA target sequence for TRHDE (NM_013381.1,1314-1332).
ggagaactggggactaagt

SEQ ID NO: 160164 - DNA, 19 bp, Homo sapiens
  siRNA target sequence for TRHDE (NM_013381.1,1320-1338).
ctggggactaagtattttt

SEQ ID NO: 160165 - DNA, 19 bp, Homo sapiens
  siRNA target sequence for TRHDE (NM_013381.1,1400-1418).
ccatggtcattgttcatga

SEQ ID NO: 160166 - DNA, 19 bp, Homo sapiens
  siRNA target sequence for TRHDE (NM_013381.1,1404-1422).
ggtcattgttcatgagata

SEQ ID NO: 160167 - DNA, 19 bp, Homo sapiens
  siRNA target sequence for TRHDE (NM_013381.1,1405-1423).
gtcattgttcatgagatat

SEQ ID NO: 160168 - DNA, 19 bp, Homo sapiens
  siRNA target sequence for TRHDE (NM_013381.1,1407-1425).
cattgttcatgagatatgt

SEQ ID NO: 160169 - DNA, 19 bp, Homo sapiens
  siRNA target sequence for TRHDE (NM_013381.1,1487-1505).
ggtttgctcactactttga

SEQ ID NO: 160170 - DNA, 19 bp, Homo sapiens
  siRNA target sequence for TRHDE (NM_013381.1,1546-1564).
gaaaagcagaggtttctga

SEQ ID NO: 160171 - DNA, 19 bp, Homo sapiens
  siRNA target sequence for TRHDE (NM_013381.1,1556-1574).
ggtttctgaccgatgttct

SEQ ID NO: 160172 - DNA, 19 bp, Homo sapiens
  siRNA target sequence for TRHDE (NM_013381.1,1565-1583).
ccgatgttctgcatgaagt

SEQ ID NO: 160173 - DNA, 19 bp, Homo sapiens
  siRNA target sequence for TRHDE (NM_013381.1,1607-1625).
gttcccatccagtatcaca

SEQ ID NO: 160174 - DNA, 19 bp, Homo sapiens
  siRNA target sequence for TRHDE (NM_013381.1,1630-1648).
gtgctgcaggcaacagata

SEQ ID NO: 160175 - DNA, 19 bp, Homo sapiens
  siRNA target sequence for TRHDE (NM_013381.1,1632-1650).
gctgcaggcaacagatatt

SEQ ID NO: 160176 - DNA, 19 bp, Homo sapiens
  siRNA target sequence for TRHDE (NM_013381.1,1663-1681).
gactggatcgcatataaaa

SEQ ID NO: 160177 - DNA, 19 bp, Homo sapiens
  siRNA target sequence for TRHDE (NM_013381.1,1683-1701).
gggtgctgctttaataaga

SEQ ID NO: 160178 - DNA, 19 bp, Homo sapiens
  siRNA target sequence for TRHDE (NM_013381.1,1684-1702).
ggtgctgctttaataagaa

SEQ ID NO: 160179 - DNA, 19 bp, Homo sapiens
  siRNA target sequence for TRHDE (NM_013381.1,1685-1703).
gtgctgctttaataagaat

SEQ ID NO: 160180 - DNA, 19 bp, Homo sapiens
  siRNA target sequence for TRHDE (NM_013381.1,1737-1755).
gaggggtttgcaagattat

SEQ ID NO: 160181 - DNA, 19 bp, Homo sapiens
  siRNA target sequence for TRHDE (NM_013381.1,1741-1759).
ggtttgcaagattatttaa

SEQ ID NO: 160182 - DNA, 19 bp, Homo sapiens
  siRNA target sequence for TRHDE (NM_013381.1,1750-1768).
gattatttaaccattcata

SEQ ID NO: 160183 - DNA, 19 bp, Homo sapiens
  siRNA target sequence for TRHDE (NM_013381.1,1805-1823).
cattatcggaggctttaaa

SEQ ID NO: 160184 - DNA, 19 bp, Homo sapiens
  siRNA target sequence for TRHDE (NM_013381.1,1940-1958).
cccaacagcattttatcta

SEQ ID NO: 160185 - DNA, 19 bp, Homo sapiens
  siRNA target sequence for TRHDE (NM_013381.1,1981-1999).
gcacttaaacttcagaata

SEQ ID NO: 160186 - DNA, 19 bp, Homo sapiens
  siRNA target sequence for TRHDE (NM_013381.1,2008-2026).
ctgtggcagattccattaa

SEQ ID NO: 160187 - DNA, 19 bp, Homo sapiens
  siRNA target sequence for TRHDE (NM_013381.1,2010-2028).
gtggcagattccattaact

SEQ ID NO: 160188 - DNA, 19 bp, Homo sapiens
  siRNA target sequence for TRHDE (NM_013381.1,2012-2030).
ggcagattccattaactat

SEQ ID NO: 160189 - DNA, 19 bp, Homo sapiens
  siRNA target sequence for TRHDE (NM_013381.1,2013-2031).
gcagattccattaactatt

SEQ ID NO: 160190 - DNA, 19 bp, Homo sapiens
  siRNA target sequence for TRHDE (NM_013381.1,2055-2073).
gtcttcagaagcaattatt

SEQ ID NO: 160191 - DNA, 19 bp, Homo sapiens
  siRNA target sequence for TRHDE (NM_013381.1,2092-2110).
gagcaccacagaataactt

SEQ ID NO: 160192 - DNA, 19 bp, Homo sapiens
  siRNA target sequence for TRHDE (NM_013381.1,2094-2112).
gcaccacagaataacttat

SEQ ID NO: 160193 - DNA, 19 bp, Homo sapiens
  siRNA target sequence for TRHDE (NM_013381.1,2136-2154).
ggggaacatcaatcaaact

SEQ ID NO: 160194 - DNA, 19 bp, Homo sapiens
  siRNA target sequence for TRHDE (NM_013381.1,2178-2196).
cctaaggaactggagatta

SEQ ID NO: 160195 - DNA, 19 bp, Homo sapiens
  siRNA target sequence for TRHDE (NM_013381.1,2183-2201).
ggaactggagattattaat

SEQ ID NO: 160196 - DNA, 19 bp, Homo sapiens
  siRNA target sequence for TRHDE (NM_013381.1,2184-2202).
gaactggagattattaatt

SEQ ID NO: 160197 - DNA, 19 bp, Homo sapiens
  siRNA target sequence for TRHDE (NM_013381.1,2189-2207).
ggagattattaattgatca

SEQ ID NO: 160198 - DNA, 19 bp, Homo sapiens
  siRNA target sequence for TRHDE (NM_013381.1,2308-2326).
cctctggagattatcagat

SEQ ID NO: 160199 - DNA, 19 bp, Homo sapiens
  siRNA target sequence for TRHDE (NM_013381.1,2309-2327).
ctctggagattatcagata

SEQ ID NO: 160200 - DNA, 19 bp, Homo sapiens
  siRNA target sequence for TRHDE (NM_013381.1,2406-2424).
catggaaaactacaacatt

SEQ ID NO: 160201 - DNA, 19 bp, Homo sapiens
  siRNA target sequence for TRHDE (NM_013381.1,2473-2491).
gggtggccgaaaaataatt

SEQ ID NO: 160202 - DNA, 19 bp, Homo sapiens
  siRNA target sequence for TRHDE (NM_013381.1,2474-2492).
ggtggccgaaaaataattt

SEQ ID NO: 160203 - DNA, 19 bp, Homo sapiens
  siRNA target sequence for TRHDE (NM_013381.1,2517-2535).
ctaccaacatgaagaacta

SEQ ID NO: 160204 - DNA, 19 bp, Homo sapiens
  siRNA target sequence for TRHDE (NM_013381.1,2530-2548).
gaactacgtagagaagtta

SEQ ID NO: 160205 - DNA, 19 bp, Homo sapiens
  siRNA target sequence for TRHDE (NM_013381.1,2533-2551).
ctacgtagagaagttataa

SEQ ID NO: 160206 - DNA, 19 bp, Homo sapiens
  siRNA target sequence for TRHDE (NM_013381.1,2586-2604).
ccaacaggcatcaacactt

SEQ ID NO: 160207 - DNA, 19 bp, Homo sapiens
  siRNA target sequence for TRHDE (NM_013381.1,2625-2643).
caacaggaacagaatacca

SEQ ID NO: 160208 - DNA, 19 bp, Homo sapiens
  siRNA target sequence for TRHDE (NM_013381.1,2630-2648).
ggaacagaataccactaaa

SEQ ID NO: 160209 - DNA, 19 bp, Homo sapiens
  siRNA target sequence for TRHDE (NM_013381.1,2631-2649).
gaacagaataccactaaat

SEQ ID NO: 160210 - DNA, 19 bp, Homo sapiens
  siRNA target sequence for TRHDE (NM_013381.1,2634-2652).
cagaataccactaaatgtt

SEQ ID NO: 160211 - DNA, 19 bp, Homo sapiens
  siRNA target sequence for TRHDE (NM_013381.1,2650-2668).
gttagagacatcgtatact

SEQ ID NO: 160212 - DNA, 19 bp, Homo sapiens
  siRNA target sequence for TRHDE (NM_013381.1,2692-2710).
gaggatgtctgggaattca

SEQ ID NO: 160213 - DNA, 19 bp, Homo sapiens
  siRNA target sequence for TRHDE (NM_013381.1,2698-2716).
gtctgggaattcatatgga

SEQ ID NO: 160214 - DNA, 19 bp, Homo sapiens
  siRNA target sequence for TRHDE (NM_013381.1,2729-2747).
ccaccacagcagtttctga

SEQ ID NO: 160215 - DNA, 19 bp, Homo sapiens
  siRNA target sequence for TRHDE (NM_013381.1,2838-2856).
gctggatcaagatgcaatt

SEQ ID NO: 160216 - DNA, 19 bp, Homo sapiens
  siRNA target sequence for TRHDE (NM_013381.1,2852-2870).
caattgatgtcataatcca

SEQ ID NO: 160217 - DNA, 19 bp, Homo sapiens
  siRNA target sequence for TRHDE (NM_013381.1,2896-2914).
gaccttgcctggaagtttt

SEQ ID NO: 160218 - DNA, 19 bp, Homo sapiens
  siRNA target sequence for TRHDE (NM_013381.1,2945-2963).
ggtatggagaagcattgtt

SEQ ID NO: 160219 - DNA, 19 bp, Homo sapiens
  siRNA target sequence for TRHDE (NM_013381.1,2982-3000).
cagtggtgtcacagaattt

SEQ ID NO: 160220 - DNA, 19 bp, Homo sapiens
  siRNA target sequence for TRHDE (NM_013381.1,2984-3002).
gtggtgtcacagaatttct

SEQ ID NO: 160221 - DNA, 19 bp, Homo sapiens
  siRNA target sequence for TRHDE (NM_013381.1,2987-3005).
gtgtcacagaatttcttaa

SEQ ID NO: 160222 - DNA, 19 bp, Homo sapiens
  siRNA target sequence for TRHDE (NM_013381.1,3106-3124).
gtgcgctggaaaatgcttt

SEQ ID NO: 160223 - DNA, 19 bp, Homo sapiens
  siRNA target sequence for TRHDE (NM_013381.1,3110-3128).
gctggaaaatgctttacca

SEQ ID NO: 160224 - DNA, 19 bp, Homo sapiens
  siRNA target sequence for TRHDE (NM_013381.1,3111-3129).
ctggaaaatgctttaccaa

SEQ ID NO: 160225 - DNA, 19 bp, Homo sapiens
  siRNA target sequence for TRHDE (NM_013381.1,3126-3144).
ccaagacgagcttttccaa

SEQ ID NO: 160226 - DNA, 19 bp, Homo sapiens
  siRNA target sequence for TRHDE (NM_013381.1,3132-3150).
cgagcttttccaatggtta

SEQ ID NO: 160227 - DNA, 19 bp, Homo sapiens
  siRNA target sequence for TRHDE (NM_013381.1,3136-3154).
cttttccaatggttaggaa

SEQ ID NO: 160228 - DNA, 19 bp, Homo sapiens
  siRNA target sequence for TRHDE (NM_013381.1,3141-3159).
ccaatggttaggaaaagct

SEQ ID NO: 160229 - DNA, 19 bp, Homo sapiens
  siRNA target sequence for TRHDE (NM_013381.1,3147-3165).
gttaggaaaagctctaaga

SEQ ID NO: 160230 - DNA, 19 bp, Homo sapiens
  siRNA target sequence for TRIM10 (NM_006778.2,494-512).
gctccctatagggaacaaa

SEQ ID NO: 160231 - DNA, 19 bp, Homo sapiens
  siRNA target sequence for TRIM10 (NM_006778.2,505-523).
ggaacaaatccataagtgt

SEQ ID NO: 160232 - DNA, 19 bp, Homo sapiens
  siRNA target sequence for TRIM10 (NM_006778.2,509-527).
caaatccataagtgtctta

SEQ ID NO: 160233 - DNA, 19 bp, Homo sapiens
  siRNA target sequence for TRIM10 (NM_006778.2,520-538).
gtgtcttaaatgtctaaga

SEQ ID NO: 160234 - DNA, 19 bp, Homo sapiens
  siRNA target sequence for TRIM10 (NM_006778.2,546-564).
gagaggagattcaagaaat

SEQ ID NO: 160235 - DNA, 19 bp, Homo sapiens
  siRNA target sequence for TRIM10 (NM_006778.2,643-661).
cgcacacctgaggaagttt

SEQ ID NO: 160236 - DNA, 19 bp, Homo sapiens
  siRNA target sequence for TRIM10 (NM_006778.2,723-741).
ggcaacgggatgaatttga

SEQ ID NO: 160237 - DNA, 19 bp, Homo sapiens
  siRNA target sequence for TRIM10 (NM_006778.2,724-742).
gcaacgggatgaatttgat

SEQ ID NO: 160238 - DNA, 19 bp, Homo sapiens
  siRNA target sequence for TRIM10 (NM_006778.2,757-775).
ggagatctgccggtttagt

SEQ ID NO: 160239 - DNA, 19 bp, Homo sapiens
  siRNA target sequence for TRIM10 (NM_006778.2,765-783).
gccggtttagtgctcttat

SEQ ID NO: 160240 - DNA, 19 bp, Homo sapiens
  siRNA target sequence for TRIM10 (NM_006778.2,766-784).
ccggtttagtgctcttatt

SEQ ID NO: 160241 - DNA, 19 bp, Homo sapiens
  siRNA target sequence for TRIM10 (NM_006778.2,774-792).
gtgctcttattgaagaact

SEQ ID NO: 160242 - DNA, 19 bp, Homo sapiens
  siRNA target sequence for TRIM10 (NM_006778.2,844-862).
cactctaataagatgtgaa

SEQ ID NO: 160243 - DNA, 19 bp, Homo sapiens
  siRNA target sequence for TRIM10 (NM_006778.2,981-999).
gctttgagttggactatga

SEQ ID NO: 160244 - DNA, 19 bp, Homo sapiens
  siRNA target sequence for TRIM10 (NM_006778.2,994-1012).
ctatgagccagctcacatt

SEQ ID NO: 160245 - DNA, 19 bp, Homo sapiens
  siRNA target sequence for TRIM10 (NM_006778.2,1171-1189).
cacgtgggtggtgagtata

SEQ ID NO: 160246 - DNA, 19 bp, Homo sapiens
  siRNA target sequence for TRIM10 (NM_006778.2,1173-1191).
cgtgggtggtgagtataga

SEQ ID NO: 160247 - DNA, 19 bp, Homo sapiens
  siRNA target sequence for TRIM10 (NM_052828.1,1237-1255).
cgtgcttggcacagaagta

SEQ ID NO: 160248 - DNA, 19 bp, Homo sapiens
  siRNA target sequence for TRIM11 (NM_145214.2,1396-1414).
gtcttcctggggagctatt

SEQ ID NO: 160249 - DNA, 19 bp, Homo sapiens
  siRNA target sequence for TRIM11 (NM_145214.2,1460-1478).
ggcgcgtggggatctttct

SEQ ID NO: 160250 - DNA, 19 bp, Homo sapiens
  siRNA target sequence for TRIM11 (NM_145214.2,1517-1535).
ccgatgggtcactgctatt

SEQ ID NO: 160251 - DNA, 19 bp, Homo sapiens
  siRNA target sequence for TRIM11 (NM_145214.2,1519-1537).
gatgggtcactgctattca

SEQ ID NO: 160252 - DNA, 19 bp, Homo sapiens
  siRNA target sequence for TRIM11 (NM_145214.2,1598-1616).
gcccgaccccgatgactat

SEQ ID NO: 160253 - DNA, 19 bp, Homo sapiens
  siRNA target sequence for TRIM11 (NM_145214.2,1600-1618).
ccgaccccgatgactatct

SEQ ID NO: 160254 - DNA, 19 bp, Homo sapiens
  siRNA target sequence for TRIM15 (NM_033229.1,722-740).
ccgctgggagaaacttact

SEQ ID NO: 160255 - DNA, 19 bp, Homo sapiens
  siRNA target sequence for TRIM15 (NM_033229.1,922-940).
gattgaggatgtaaagtgt

SEQ ID NO: 160256 - DNA, 19 bp, Homo sapiens
  siRNA target sequence for TRIM15 (NM_033229.1,965-983).
ctgctgactcagatcgaaa

SEQ ID NO: 160257 - DNA, 19 bp, Homo sapiens
  siRNA target sequence for TRIM15 (NM_033229.1,1094-1112).
gagagggatgaatatatca

SEQ ID NO: 160258 - DNA, 19 bp, Homo sapiens
  siRNA target sequence for TRIM15 (NM_033229.1,1096-1114).
gagggatgaatatatcaca

SEQ ID NO: 160259 - DNA, 19 bp, Homo sapiens
  siRNA target sequence for TRIM15 (NM_033229.1,1098-1116).
gggatgaatatatcacaaa

SEQ ID NO: 160260 - DNA, 19 bp, Homo sapiens
  siRNA target sequence for TRIM15 (NM_033229.1,1182-1200).
cagcaagtgagcttctaca

SEQ ID NO: 160261 - DNA, 19 bp, Homo sapiens
  siRNA target sequence for TRIM15 (NM_033229.1,1185-1203).
caagtgagcttctacaaga

SEQ ID NO: 160262 - DNA, 19 bp, Homo sapiens
  siRNA target sequence for TRIM15 (NM_033229.1,1266-1284).
ctgaccttgtcaagaagat

SEQ ID NO: 160263 - DNA, 19 bp, Homo sapiens
  siRNA target sequence for TRIM15 (NM_033229.1,1329-1347).
ggatgttctcagaaaactt

SEQ ID NO: 160264 - DNA, 19 bp, Homo sapiens
  siRNA target sequence for TRIM15 (NM_033229.1,1348-1366).
ggcgcatcatctggaaata

SEQ ID NO: 160265 - DNA, 19 bp, Homo sapiens
  siRNA target sequence for TRIM15 (NM_033229.1,1647-1665).
gcgtctgggccgtgatcat

SEQ ID NO: 160266 - DNA, 19 bp, Homo sapiens
  siRNA target sequence for TRIM17 (NM_016102.1,418-436).
gagcccctcaagcttttct

SEQ ID NO: 160267 - DNA, 19 bp, Homo sapiens
  siRNA target sequence for TRIM17 (NM_016102.1,725-743).
ctctggagacggaagaaga

SEQ ID NO: 160268 - DNA, 19 bp, Homo sapiens
  siRNA target sequence for TRIM17 (NM_016102.1,951-969).
cagagttcccggacagatt

SEQ ID NO: 160269 - DNA, 19 bp, Homo sapiens
  siRNA target sequence for TRIM17 (NM_016102.1,953-971).
gagttcccggacagattga

SEQ ID NO: 160270 - DNA, 19 bp, Homo sapiens
  siRNA target sequence for TRIM17 (NM_016102.1,1025-1043).
cctacctcctcctgtatga

SEQ ID NO: 160271 - DNA, 19 bp, Homo sapiens
  siRNA target sequence for TRIM17 (NM_016102.1,1290-1308).
caaggggaccaagtactta

SEQ ID NO: 160272 - DNA, 19 bp, Homo sapiens
  siRNA target sequence for TRIM31 (NM_007028.2,115-133).
gccagtgggcagtttgtga

SEQ ID NO: 160273 - DNA, 19 bp, Homo sapiens
  siRNA target sequence for TRIM31 (NM_007028.2,364-382).
gaggtgcagtccaaaagga

SEQ ID NO: 160274 - DNA, 19 bp, Homo sapiens
  siRNA target sequence for TRIM31 (NM_007028.2,621-639).
cacggaccaggtagaacat

SEQ ID NO: 160275 - DNA, 19 bp, Homo sapiens
  siRNA target sequence for TRIM31 (NM_007028.2,623-641).
cggaccaggtagaacatga

SEQ ID NO: 160276 - DNA, 19 bp, Homo sapiens
  siRNA target sequence for TRIM31 (NM_007028.2,651-669).
gatcctcacagaatttgaa

SEQ ID NO: 160277 - DNA, 19 bp, Homo sapiens
  siRNA target sequence for TRIM31 (NM_007028.2,706-724).
ctgctatcacggatttact

SEQ ID NO: 160278 - DNA, 19 bp, Homo sapiens
  siRNA target sequence for TRIM31 (NM_007028.2,779-797).
cacagttgaacgatctcaa

SEQ ID NO: 160279 - DNA, 19 bp, Homo sapiens
  siRNA target sequence for TRIM31 (NM_007028.2,867-885).
cgtcttgtgcagaagtgaa

SEQ ID NO: 160280 - DNA, 19 bp, Homo sapiens
  siRNA target sequence for TRIM31 (NM_007028.2,969-987).
cacagggagcctgaaaaaa

SEQ ID NO: 160281 - DNA, 19 bp, Homo sapiens
  siRNA target sequence for TRIM31 (NM_007028.2,1132-1150).
gcaggcggcagaactacat

SEQ ID NO: 160282 - DNA, 19 bp, Homo sapiens
  siRNA target sequence for TRIM31 (NM_007028.2,1235-1253).
gtctcctggcctcttatga

SEQ ID NO: 160283 - DNA, 19 bp, Homo sapiens
  siRNA target sequence for TRIM31 (NM_007028.2,1274-1292).
cgagctctcaggatacgaa

SEQ ID NO: 160284 - DNA, 19 bp, Homo sapiens
  siRNA target sequence for TRIM31 (NM_007028.2,1280-1298).
ctcaggatacgaagacatt

SEQ ID NO: 160285 - DNA, 19 bp, Homo sapiens
  siRNA target sequence for TRIM31 (NM_007028.2,1351-1369).
gcgatccgggcttggtttt

SEQ ID NO: 160286 - DNA, 19 bp, Homo sapiens
  siRNA target sequence for TRIM31 (NM_007028.2,1353-1371).
gatccgggcttggttttgt

SEQ ID NO: 160287 - DNA, 19 bp, Homo sapiens
  siRNA target sequence for TRIM34 (NM_021616.3,293-311).
gtgtgtggtatcagttact

SEQ ID NO: 160288 - DNA, 19 bp, Homo sapiens
  siRNA target sequence for TRIM34 (NM_021616.3,297-315).
gtggtatcagttactcatt

SEQ ID NO: 160289 - DNA, 19 bp, Homo sapiens
  siRNA target sequence for TRIM34 (NM_021616.3,360-378).
gactcaaggaggtcaagtt

SEQ ID NO: 160290 - DNA, 19 bp, Homo sapiens
  siRNA target sequence for TRIM34 (NM_021616.3,686-704).
cagcttagaagcatcctaa

SEQ ID NO: 160291 - DNA, 19 bp, Homo sapiens
  siRNA target sequence for TRIM34 (NM_021616.3,688-706).
gcttagaagcatcctaaat

SEQ ID NO: 160292 - DNA, 19 bp, Homo sapiens
  siRNA target sequence for TRIM34 (NM_021616.3,689-707).
cttagaagcatcctaaata

SEQ ID NO: 160293 - DNA, 19 bp, Homo sapiens
  siRNA target sequence for TRIM34 (NM_021616.3,751-769).
gaagacgctggataagttt

SEQ ID NO: 160294 - DNA, 19 bp, Homo sapiens
  siRNA target sequence for TRIM34 (NM_021616.3,777-795).
ctgaggatgagctagttca

SEQ ID NO: 160295 - DNA, 19 bp, Homo sapiens
  siRNA target sequence for TRIM34 (NM_021616.3,839-857).
cggagtcagtggtcaacaa

SEQ ID NO: 160296 - DNA, 19 bp, Homo sapiens
  siRNA target sequence for TRIM34 (NM_021616.3,1021-1039).
ggtggatgtcacactgaat

SEQ ID NO: 160297 - DNA, 19 bp, Homo sapiens
  siRNA target sequence for TRIM34 (NM_021616.3,1022-1040).
gtggatgtcacactgaatt

SEQ ID NO: 160298 - DNA, 19 bp, Homo sapiens
  siRNA target sequence for TRIM34 (NM_021616.3,1024-1042).
ggatgtcacactgaattca

SEQ ID NO: 160299 - DNA, 19 bp, Homo sapiens
  siRNA target sequence for TRIM34 (NM_021616.3,1100-1118).
ccaatttggccttttcagt

SEQ ID NO: 160300 - DNA, 19 bp, Homo sapiens
  siRNA target sequence for TRIM34 (NM_021616.3,1108-1126).
gccttttcagtgttataat

SEQ ID NO: 160301 - DNA, 19 bp, Homo sapiens
  siRNA target sequence for TRIM34 (NM_021616.3,1208-1226).
ctgggggtatactgtagaa

SEQ ID NO: 160302 - DNA, 19 bp, Homo sapiens
  siRNA target sequence for TRIM34 (NM_021616.3,1210-1228).
gggggtatactgtagaaca

SEQ ID NO: 160303 - DNA, 19 bp, Homo sapiens
  siRNA target sequence for TRIM34 (NM_021616.3,1211-1229).
ggggtatactgtagaacat

SEQ ID NO: 160304 - DNA, 19 bp, Homo sapiens
  siRNA target sequence for TRIM34 (NM_021616.3,1233-1251).
cccgccatatgaagtatgt

SEQ ID NO: 160305 - DNA, 19 bp, Homo sapiens
  siRNA target sequence for TRIM34 (NM_021616.3,1234-1252).
ccgccatatgaagtatgtt

SEQ ID NO: 160306 - DNA, 19 bp, Homo sapiens
  siRNA target sequence for TRIM34 (NM_021616.3,1243-1261).
gaagtatgttgttagaaga

SEQ ID NO: 160307 - DNA, 19 bp, Homo sapiens
  siRNA target sequence for TRIM34 (NM_021616.3,1265-1283).
gcaaatcgtcaaaatcttt

SEQ ID NO: 160308 - DNA, 19 bp, Homo sapiens
  siRNA target sequence for TRIM34 (NM_021616.3,1266-1284).
caaatcgtcaaaatcttta

SEQ ID NO: 160309 - DNA, 19 bp, Homo sapiens
  siRNA target sequence for TRIM34 (NM_021616.3,1287-1305).
ccaaatacagacctctatt

SEQ ID NO: 160310 - DNA, 19 bp, Homo sapiens
  siRNA target sequence for TRIM35 (NM_015066.1,646-664).
gcaggagtttgataagctt

SEQ ID NO: 160311 - DNA, 19 bp, Homo sapiens
  siRNA target sequence for TRIM35 (NM_015066.1,1388-1406).
gagggcgagctgtctttct

SEQ ID NO: 160312 - DNA, 19 bp, Homo sapiens
  siRNA target sequence for TRIM35 (NM_015066.1,1392-1410).
gcgagctgtctttctatga

SEQ ID NO: 160313 - DNA, 19 bp, Homo sapiens
  siRNA target sequence for TRIM36 (NM_018700.2,161-179).
catggaattgatagctaaa

SEQ ID NO: 160314 - DNA, 19 bp, Homo sapiens
  siRNA target sequence for TRIM36 (NM_018700.2,180-198).
ggcaaggttaccattaaga

SEQ ID NO: 160315 - DNA, 19 bp, Homo sapiens
  siRNA target sequence for TRIM36 (NM_018700.2,182-200).
caaggttaccattaagaat

SEQ ID NO: 160316 - DNA, 19 bp, Homo sapiens
  siRNA target sequence for TRIM36 (NM_018700.2,225-243).
gcatgcaaggagctgttta

SEQ ID NO: 160317 - DNA, 19 bp, Homo sapiens
  siRNA target sequence for TRIM36 (NM_018700.2,305-323).
gctgactctcgatgattca

SEQ ID NO: 160318 - DNA, 19 bp, Homo sapiens
  siRNA target sequence for TRIM36 (NM_018700.2,306-324).
ctgactctcgatgattcat

SEQ ID NO: 160319 - DNA, 19 bp, Homo sapiens
  siRNA target sequence for TRIM36 (NM_018700.2,310-328).
ctctcgatgattcattcaa

SEQ ID NO: 160320 - DNA, 19 bp, Homo sapiens
  siRNA target sequence for TRIM36 (NM_018700.2,382-400).
cccctagtatggataaaat

SEQ ID NO: 160321 - DNA, 19 bp, Homo sapiens
  siRNA target sequence for TRIM36 (NM_018700.2,393-411).
gataaaattgaccgaatta

SEQ ID NO: 160322 - DNA, 19 bp, Homo sapiens
  siRNA target sequence for TRIM36 (NM_018700.2,440-458).
gaccccgaggacaactgtt

SEQ ID NO: 160323 - DNA, 19 bp, Homo sapiens
  siRNA target sequence for TRIM36 (NM_018700.2,442-460).
ccccgaggacaactgtttt

SEQ ID NO: 160324 - DNA, 19 bp, Homo sapiens
  siRNA target sequence for TRIM36 (NM_018700.2,537-555).
gaaactattgtggaaagat

SEQ ID NO: 160325 - DNA, 19 bp, Homo sapiens
  siRNA target sequence for TRIM36 (NM_018700.2,571-589).
gggcagccacagccattat

SEQ ID NO: 160326 - DNA, 19 bp, Homo sapiens
  siRNA target sequence for TRIM36 (NM_018700.2,590-608).
gtgtgacctttgtaaacca

SEQ ID NO: 160327 - DNA, 19 bp, Homo sapiens
  siRNA target sequence for TRIM36 (NM_018700.2,639-657).
gactgtagtgcaagttact

SEQ ID NO: 160328 - DNA, 19 bp, Homo sapiens
  siRNA target sequence for TRIM36 (NM_018700.2,648-666).
gcaagttactgcaatgaat

SEQ ID NO: 160329 - DNA, 19 bp, Homo sapiens
  siRNA target sequence for TRIM36 (NM_018700.2,681-699).
cacccttggggtactataa

SEQ ID NO: 160330 - DNA, 19 bp, Homo sapiens
  siRNA target sequence for TRIM36 (NM_018700.2,683-701).
cccttggggtactataaaa

SEQ ID NO: 160331 - DNA, 19 bp, Homo sapiens
  siRNA target sequence for TRIM36 (NM_018700.2,694-712).
ctataaaagctcaacatga

SEQ ID NO: 160332 - DNA, 19 bp, Homo sapiens
  siRNA target sequence for TRIM36 (NM_018700.2,713-731).
gtatgttggtccaactact

SEQ ID NO: 160333 - DNA, 19 bp, Homo sapiens
  siRNA target sequence for TRIM36 (NM_018700.2,717-735).
gttggtccaactactaact

SEQ ID NO: 160334 - DNA, 19 bp, Homo sapiens
  siRNA target sequence for TRIM36 (NM_018700.2,720-738).
ggtccaactactaacttca

SEQ ID NO: 160335 - DNA, 19 bp, Homo sapiens
  siRNA target sequence for TRIM36 (NM_018700.2,824-842).
gtgtaagttgggtggtaat

SEQ ID NO: 160336 - DNA, 19 bp, Homo sapiens
  siRNA target sequence for TRIM36 (NM_018700.2,826-844).
gtaagttgggtggtaatca

SEQ ID NO: 160337 - DNA, 19 bp, Homo sapiens
  siRNA target sequence for TRIM36 (NM_018700.2,852-870).
caccgtgtaaccactatga

SEQ ID NO: 160338 - DNA, 19 bp, Homo sapiens
  siRNA target sequence for TRIM36 (NM_018700.2,893-911).
ggaaaagctttcaaaggat

SEQ ID NO: 160339 - DNA, 19 bp, Homo sapiens
  siRNA target sequence for TRIM36 (NM_018700.2,947-965).
gagtcaaatatctgaacta

SEQ ID NO: 160340 - DNA, 19 bp, Homo sapiens
  siRNA target sequence for TRIM36 (NM_018700.2,951-969).
caaatatctgaactaaact

SEQ ID NO: 160341 - DNA, 19 bp, Homo sapiens
  siRNA target sequence for TRIM36 (NM_018700.2,958-976).
ctgaactaaacttgttaat

SEQ ID NO: 160342 - DNA, 19 bp, Homo sapiens
  siRNA target sequence for TRIM36 (NM_018700.2,1011-1029).
gaagaagcaattacacatt

SEQ ID NO: 160343 - DNA, 19 bp, Homo sapiens
  siRNA target sequence for TRIM36 (NM_018700.2,1081-1099).
caattgactcctctaagaa

SEQ ID NO: 160344 - DNA, 19 bp, Homo sapiens
  siRNA target sequence for TRIM36 (NM_018700.2,1090-1108).
cctctaagaaactaagatt

SEQ ID NO: 160345 - DNA, 19 bp, Homo sapiens
  siRNA target sequence for TRIM36 (NM_018700.2,1142-1160).
gggacttctagagaacaat

SEQ ID NO: 160346 - DNA, 19 bp, Homo sapiens
  siRNA target sequence for TRIM36 (NM_018700.2,1233-1251).
ctccacctcagaatacaga

SEQ ID NO: 160347 - DNA, 19 bp, Homo sapiens
  siRNA target sequence for TRIM36 (NM_018700.2,1333-1351).
cagaacttcttggagaatt

SEQ ID NO: 160348 - DNA, 19 bp, Homo sapiens
  siRNA target sequence for TRIM36 (NM_018700.2,1400-1418).
gagcaaagtttataacaat

SEQ ID NO: 160349 - DNA, 19 bp, Homo sapiens
  siRNA target sequence for TRIM36 (NM_018700.2,1433-1451).
gcaccatccagaaaaggat

SEQ ID NO: 160350 - DNA, 19 bp, Homo sapiens
  siRNA target sequence for TRIM36 (NM_018700.2,1448-1466).
ggataaagctgatagctat

SEQ ID NO: 160351 - DNA, 19 bp, Homo sapiens
  siRNA target sequence for TRIM36 (NM_018700.2,1456-1474).
ctgatagctatgttcttga

SEQ ID NO: 160352 - DNA, 19 bp, Homo sapiens
  siRNA target sequence for TRIM36 (NM_018700.2,1470-1488).
cttgaatatcggaaaatca

SEQ ID NO: 160353 - DNA, 19 bp, Homo sapiens
  siRNA target sequence for TRIM36 (NM_018700.2,1481-1499).
gaaaatcaatagagatgat

SEQ ID NO: 160354 - DNA, 19 bp, Homo sapiens
  siRNA target sequence for TRIM36 (NM_018700.2,1521-1539).
gaagtgtgtggaacaagta

SEQ ID NO: 160355 - DNA, 19 bp, Homo sapiens
  siRNA target sequence for TRIM36 (NM_018700.2,1548-1566).
caagacttggaaaacagta

SEQ ID NO: 160356 - DNA, 19 bp, Homo sapiens
  siRNA target sequence for TRIM36 (NM_018700.2,1571-1589).
ctatgctttcagagtaaga

SEQ ID NO: 160357 - DNA, 19 bp, Homo sapiens
  siRNA target sequence for TRIM36 (NM_018700.2,1588-1606).
gagcttacaagggttcaat

SEQ ID NO: 160358 - DNA, 19 bp, Homo sapiens
  siRNA target sequence for TRIM36 (NM_018700.2,1612-1630).
gtccttgcagcagagaatt

SEQ ID NO: 160359 - DNA, 19 bp, Homo sapiens
  siRNA target sequence for TRIM36 (NM_018700.2,1667-1685).
cctctttgatgaaaaatgt

SEQ ID NO: 160360 - DNA, 19 bp, Homo sapiens
  siRNA target sequence for TRIM36 (NM_018700.2,1734-1752).
gagagtagagctggattta

SEQ ID NO: 160361 - DNA, 19 bp, Homo sapiens
  siRNA target sequence for TRIM36 (NM_018700.2,1738-1756).
gtagagctggatttaatct

SEQ ID NO: 160362 - DNA, 19 bp, Homo sapiens
  siRNA target sequence for TRIM36 (NM_018700.2,1741-1759).
gagctggatttaatcttct

SEQ ID NO: 160363 - DNA, 19 bp, Homo sapiens
  siRNA target sequence for TRIM36 (NM_018700.2,1773-1791).
cgcatccaagtgggttatt

SEQ ID NO: 160364 - DNA, 19 bp, Homo sapiens
  siRNA target sequence for TRIM36 (NM_018700.2,1774-1792).
gcatccaagtgggttatta

SEQ ID NO: 160365 - DNA, 19 bp, Homo sapiens
  siRNA target sequence for TRIM36 (NM_018700.2,1784-1802).
gggttattacacaagctta

SEQ ID NO: 160366 - DNA, 19 bp, Homo sapiens
  siRNA target sequence for TRIM36 (NM_018700.2,1795-1813).
caagcttagactacatcat

SEQ ID NO: 160367 - DNA, 19 bp, Homo sapiens
  siRNA target sequence for TRIM36 (NM_018700.2,1852-1870).
ccttccgtgtggaaccata

SEQ ID NO: 160368 - DNA, 19 bp, Homo sapiens
  siRNA target sequence for TRIM36 (NM_018700.2,1853-1871).
cttccgtgtggaaccatat

SEQ ID NO: 160369 - DNA, 19 bp, Homo sapiens
  siRNA target sequence for TRIM36 (NM_018700.2,1856-1874).
ccgtgtggaaccatattca

SEQ ID NO: 160370 - DNA, 19 bp, Homo sapiens
  siRNA target sequence for TRIM36 (NM_018700.2,1857-1875).
cgtgtggaaccatattcat

SEQ ID NO: 160371 - DNA, 19 bp, Homo sapiens
  siRNA target sequence for TRIM36 (NM_018700.2,1858-1876).
gtgtggaaccatattcata

SEQ ID NO: 160372 - DNA, 19 bp, Homo sapiens
  siRNA target sequence for TRIM36 (NM_018700.2,1897-1915).
cttctagcgataaactaca

SEQ ID NO: 160373 - DNA, 19 bp, Homo sapiens
  siRNA target sequence for TRIM36 (NM_018700.2,1900-1918).
ctagcgataaactacaaga

SEQ ID NO: 160374 - DNA, 19 bp, Homo sapiens
  siRNA target sequence for TRIM36 (NM_018700.2,1942-1960).
cagttagtccaagatatga

SEQ ID NO: 160375 - DNA, 19 bp, Homo sapiens
  siRNA target sequence for TRIM36 (NM_018700.2,1987-2005).
gtgaggatgcctgttttga

SEQ ID NO: 160376 - DNA, 19 bp, Homo sapiens
  siRNA target sequence for TRIM36 (NM_018700.2,1989-2007).
gaggatgcctgttttgatt

SEQ ID NO: 160377 - DNA, 19 bp, Homo sapiens
  siRNA target sequence for TRIM36 (NM_018700.2,2013-2031).
caaccatttaccttagtta

SEQ ID NO: 160378 - DNA, 19 bp, Homo sapiens
  siRNA target sequence for TRIM36 (NM_018700.2,2016-2034).
ccatttaccttagttacta

SEQ ID NO: 160379 - DNA, 19 bp, Homo sapiens
  siRNA target sequence for TRIM36 (NM_018700.2,2017-2035).
catttaccttagttactat

SEQ ID NO: 160380 - DNA, 19 bp, Homo sapiens
  siRNA target sequence for TRIM36 (NM_018700.2,2032-2050).
ctataggcatgcagaaatt

SEQ ID NO: 160381 - DNA, 19 bp, Homo sapiens
  siRNA target sequence for TRIM36 (NM_018700.2,2102-2120).
ccctatgccaacaagtatt

SEQ ID NO: 160382 - DNA, 19 bp, Homo sapiens
  siRNA target sequence for TRIM36 (NM_018700.2,2163-2181).
gatatggatcagatgaaat

SEQ ID NO: 160383 - DNA, 19 bp, Homo sapiens
  siRNA target sequence for TRIM36 (NM_018700.2,2196-2214).
caagtggactgttcacata

SEQ ID NO: 160384 - DNA, 19 bp, Homo sapiens
  siRNA target sequence for TRIM37 (NM_015294.1,74-92).
ctgaggttttccgatgttt

SEQ ID NO: 160385 - DNA, 19 bp, Homo sapiens
  siRNA target sequence for TRIM37 (NM_015294.1,76-94).
gaggttttccgatgtttca

SEQ ID NO: 160386 - DNA, 19 bp, Homo sapiens
  siRNA target sequence for TRIM37 (NM_015294.1,130-148).
cctcattgctccaaactgt

SEQ ID NO: 160387 - DNA, 19 bp, Homo sapiens
  siRNA target sequence for TRIM37 (NM_015294.1,219-237).
ccagctacgagaactagta

SEQ ID NO: 160388 - DNA, 19 bp, Homo sapiens
  siRNA target sequence for TRIM37 (NM_015294.1,220-238).
cagctacgagaactagtaa

SEQ ID NO: 160389 - DNA, 19 bp, Homo sapiens
  siRNA target sequence for TRIM37 (NM_015294.1,222-240).
gctacgagaactagtaaat

SEQ ID NO: 160390 - DNA, 19 bp, Homo sapiens
  siRNA target sequence for TRIM37 (NM_015294.1,223-241).
ctacgagaactagtaaatt

SEQ ID NO: 160391 - DNA, 19 bp, Homo sapiens
  siRNA target sequence for TRIM37 (NM_015294.1,242-260).
gtcgttgggcagaagaagt

SEQ ID NO: 160392 - DNA, 19 bp, Homo sapiens
  siRNA target sequence for TRIM37 (NM_015294.1,244-262).
cgttgggcagaagaagtaa

SEQ ID NO: 160393 - DNA, 19 bp, Homo sapiens
  siRNA target sequence for TRIM37 (NM_015294.1,263-281).
cacaacagcttgatactct

SEQ ID NO: 160394 - DNA, 19 bp, Homo sapiens
  siRNA target sequence for TRIM37 (NM_015294.1,365-383).
ggacttgtaagaagtgtat

SEQ ID NO: 160395 - DNA, 19 bp, Homo sapiens
  siRNA target sequence for TRIM37 (NM_015294.1,415-433).
catggcggacataccttta

SEQ ID NO: 160396 - DNA, 19 bp, Homo sapiens
  siRNA target sequence for TRIM37 (NM_015294.1,421-439).
ggacatacctttaaacctt

SEQ ID NO: 160397 - DNA, 19 bp, Homo sapiens
  siRNA target sequence for TRIM37 (NM_015294.1,457-475).
caacacgtcactaaagtga

SEQ ID NO: 160398 - DNA, 19 bp, Homo sapiens
  siRNA target sequence for TRIM37 (NM_015294.1,462-480).
cgtcactaaagtgaatgaa

SEQ ID NO: 160399 - DNA, 19 bp, Homo sapiens
  siRNA target sequence for TRIM37 (NM_015294.1,543-561).
gaatgtagaagctgtaaga

SEQ ID NO: 160400 - DNA, 19 bp, Homo sapiens
  siRNA target sequence for TRIM37 (NM_015294.1,574-592).
gagcgtgttcgggaaatta

SEQ ID NO: 160401 - DNA, 19 bp, Homo sapiens
  siRNA target sequence for TRIM37 (NM_015294.1,636-654).
gaagaataagcttataaca

SEQ ID NO: 160402 - DNA, 19 bp, Homo sapiens
  siRNA target sequence for TRIM37 (NM_015294.1,724-742).
caccagttgcggtcttgta

SEQ ID NO: 160403 - DNA, 19 bp, Homo sapiens
  siRNA target sequence for TRIM37 (NM_015294.1,726-744).
ccagttgcggtcttgtagt

SEQ ID NO: 160404 - DNA, 19 bp, Homo sapiens
  siRNA target sequence for TRIM37 (NM_015294.1,727-745).
cagttgcggtcttgtagta

SEQ ID NO: 160405 - DNA, 19 bp, Homo sapiens
  siRNA target sequence for TRIM37 (NM_015294.1,732-750).
gcggtcttgtagtaagagt

SEQ ID NO: 160406 - DNA, 19 bp, Homo sapiens
  siRNA target sequence for TRIM37 (NM_015294.1,767-785).
gctcagagatccttatgat

SEQ ID NO: 160407 - DNA, 19 bp, Homo sapiens
  siRNA target sequence for TRIM37 (NM_015294.1,770-788).
cagagatccttatgatgtt

SEQ ID NO: 160408 - DNA, 19 bp, Homo sapiens
  siRNA target sequence for TRIM37 (NM_015294.1,808-826).
cccatggcatcttttgtta

SEQ ID NO: 160409 - DNA, 19 bp, Homo sapiens
  siRNA target sequence for TRIM37 (NM_015294.1,832-850).
cctgttccaccagacttta

SEQ ID NO: 160410 - DNA, 19 bp, Homo sapiens
  siRNA target sequence for TRIM37 (NM_015294.1,835-853).
gttccaccagactttacca

SEQ ID NO: 160411 - DNA, 19 bp, Homo sapiens
  siRNA target sequence for TRIM37 (NM_015294.1,854-872).
gtgaattagtgccatctta

SEQ ID NO: 160412 - DNA, 19 bp, Homo sapiens
  siRNA target sequence for TRIM37 (NM_015294.1,873-891).
cgattcagctacttttgtt

SEQ ID NO: 160413 - DNA, 19 bp, Homo sapiens
  siRNA target sequence for TRIM37 (NM_015294.1,998-1016).
gagttgtgcgaggttacta

SEQ ID NO: 160414 - DNA, 19 bp, Homo sapiens
  siRNA target sequence for TRIM37 (NM_015294.1,1000-1018).
gttgtgcgaggttactact

SEQ ID NO: 160415 - DNA, 19 bp, Homo sapiens
  siRNA target sequence for TRIM37 (NM_015294.1,1003-1021).
gtgcgaggttactacttat

SEQ ID NO: 160416 - DNA, 19 bp, Homo sapiens
  siRNA target sequence for TRIM37 (NM_015294.1,1005-1023).
gcgaggttactacttatct

SEQ ID NO: 160417 - DNA, 19 bp, Homo sapiens
  siRNA target sequence for TRIM37 (NM_015294.1,1007-1025).
gaggttactacttatctgt

SEQ ID NO: 160418 - DNA, 19 bp, Homo sapiens
  siRNA target sequence for TRIM37 (NM_015294.1,1086-1104).
ggttcaccagtcctgtaat

SEQ ID NO: 160419 - DNA, 19 bp, Homo sapiens
  siRNA target sequence for TRIM37 (NM_015294.1,1097-1115).
cctgtaatgatcctacaaa

SEQ ID NO: 160420 - DNA, 19 bp, Homo sapiens
  siRNA target sequence for TRIM37 (NM_015294.1,1098-1116).
ctgtaatgatcctacaaaa

SEQ ID NO: 160421 - DNA, 19 bp, Homo sapiens
  siRNA target sequence for TRIM37 (NM_015294.1,1100-1118).
gtaatgatcctacaaaaaa

SEQ ID NO: 160422 - DNA, 19 bp, Homo sapiens
  siRNA target sequence for TRIM37 (NM_015294.1,1160-1178).
gctggggctataatagatt

SEQ ID NO: 160423 - DNA, 19 bp, Homo sapiens
  siRNA target sequence for TRIM37 (NM_015294.1,1161-1179).
ctggggctataatagattt

SEQ ID NO: 160424 - DNA, 19 bp, Homo sapiens
  siRNA target sequence for TRIM37 (NM_015294.1,1215-1233).
gaatccacaaaatgataca

SEQ ID NO: 160425 - DNA, 19 bp, Homo sapiens
  siRNA target sequence for TRIM37 (NM_015294.1,1252-1270).
gtacgttcaccaactttct

SEQ ID NO: 160426 - DNA, 19 bp, Homo sapiens
  siRNA target sequence for TRIM37 (NM_015294.1,1312-1330).
gaagctgcacagactagtt

SEQ ID NO: 160427 - DNA, 19 bp, Homo sapiens
  siRNA target sequence for TRIM37 (NM_015294.1,1315-1333).
gctgcacagactagttata

SEQ ID NO: 160428 - DNA, 19 bp, Homo sapiens
  siRNA target sequence for TRIM37 (NM_015294.1,1316-1334).
ctgcacagactagttatat

SEQ ID NO: 160429 - DNA, 19 bp, Homo sapiens
  siRNA target sequence for TRIM37 (NM_015294.1,1325-1343).
ctagttatatccaacaaat

SEQ ID NO: 160430 - DNA, 19 bp, Homo sapiens
  siRNA target sequence for TRIM37 (NM_015294.1,1351-1369).
cttaaagagagacttacta

SEQ ID NO: 160431 - DNA, 19 bp, Homo sapiens
  siRNA target sequence for TRIM37 (NM_015294.1,1491-1509).
cgaaggtggtcctactaca

SEQ ID NO: 160432 - DNA, 19 bp, Homo sapiens
  siRNA target sequence for TRIM37 (NM_015294.1,1599-1617).
ggatctggatcttgtttat

SEQ ID NO: 160433 - DNA, 19 bp, Homo sapiens
  siRNA target sequence for TRIM37 (NM_015294.1,1796-1814).
caggtagtagccatggtta

SEQ ID NO: 160434 - DNA, 19 bp, Homo sapiens
  siRNA target sequence for TRIM37 (NM_015294.1,1816-1834).
gtgggttccagtagtagaa

SEQ ID NO: 160435 - DNA, 19 bp, Homo sapiens
  siRNA target sequence for TRIM37 (NM_015294.1,1859-1877).
ccgctgctaccagtagttt

SEQ ID NO: 160436 - DNA, 19 bp, Homo sapiens
  siRNA target sequence for TRIM37 (NM_015294.1,1860-1878).
cgctgctaccagtagttta

SEQ ID NO: 160437 - DNA, 19 bp, Homo sapiens
  siRNA target sequence for TRIM37 (NM_015294.1,1865-1883).
ctaccagtagtttactaga

SEQ ID NO: 160438 - DNA, 19 bp, Homo sapiens
  siRNA target sequence for TRIM37 (NM_015294.1,1868-1886).
ccagtagtttactagacat

SEQ ID NO: 160439 - DNA, 19 bp, Homo sapiens
  siRNA target sequence for TRIM37 (NM_015294.1,1869-1887).
cagtagtttactagacatt

SEQ ID NO: 160440 - DNA, 19 bp, Homo sapiens
  siRNA target sequence for TRIM37 (NM_015294.1,1923-1941).
ggaccggagcagtatagaa

SEQ ID NO: 160441 - DNA, 19 bp, Homo sapiens
  siRNA target sequence for TRIM37 (NM_015294.1,1926-1944).
ccggagcagtatagaaaat

SEQ ID NO: 160442 - DNA, 19 bp, Homo sapiens
  siRNA target sequence for TRIM37 (NM_015294.1,1927-1945).
cggagcagtatagaaaatt

SEQ ID NO: 160443 - DNA, 19 bp, Homo sapiens
  siRNA target sequence for TRIM37 (NM_015294.1,1994-2012).
catcatattctcgaaaaga

SEQ ID NO: 160444 - DNA, 19 bp, Homo sapiens
  siRNA target sequence for TRIM37 (NM_015294.1,2042-2060).
ggcgagtgccctctgattt

SEQ ID NO: 160445 - DNA, 19 bp, Homo sapiens
  siRNA target sequence for TRIM37 (NM_015294.1,2043-2061).
gcgagtgccctctgattta

SEQ ID NO: 160446 - DNA, 19 bp, Homo sapiens
  siRNA target sequence for TRIM37 (NM_015294.1,2044-2062).
cgagtgccctctgatttaa

SEQ ID NO: 160447 - DNA, 19 bp, Homo sapiens
  siRNA target sequence for TRIM37 (NM_015294.1,2092-2110).
gccgaagttcgatgtatga

SEQ ID NO: 160448 - DNA, 19 bp, Homo sapiens
  siRNA target sequence for TRIM37 (NM_015294.1,2094-2112).
cgaagttcgatgtatgaaa

SEQ ID NO: 160449 - DNA, 19 bp, Homo sapiens
  siRNA target sequence for TRIM37 (NM_015294.1,2256-2274).
ggaactcctggcaaagtca

SEQ ID NO: 160450 - DNA, 19 bp, Homo sapiens
  siRNA target sequence for TRIM37 (NM_015294.1,2271-2289).
gtcatcagttgccaattgt

SEQ ID NO: 160451 - DNA, 19 bp, Homo sapiens
  siRNA target sequence for TRIM37 (NM_015294.1,2281-2299).
gccaattgttacatacgaa

SEQ ID NO: 160452 - DNA, 19 bp, Homo sapiens
  siRNA target sequence for TRIM37 (NM_015294.1,2282-2300).
ccaattgttacatacgaaa

SEQ ID NO: 160453 - DNA, 19 bp, Homo sapiens
  siRNA target sequence for TRIM37 (NM_015294.1,2292-2310).
catacgaaactccacaaat

SEQ ID NO: 160454 - DNA, 19 bp, Homo sapiens
  siRNA target sequence for TRIM37 (NM_015294.1,2296-2314).
cgaaactccacaaataaga

SEQ ID NO: 160455 - DNA, 19 bp, Homo sapiens
  siRNA target sequence for TRIM37 (NM_015294.1,2343-2361).
cagtgtagcaggtagtcta

SEQ ID NO: 160456 - DNA, 19 bp, Homo sapiens
  siRNA target sequence for TRIM37 (NM_015294.1,2492-2510).
gcagtatcggtgatattct

SEQ ID NO: 160457 - DNA, 19 bp, Homo sapiens
  siRNA target sequence for TRIM37 (NM_015294.1,2524-2542).
gaccggcagtgtaaagctt

SEQ ID NO: 160458 - DNA, 19 bp, Homo sapiens
  siRNA target sequence for TRIM37 (NM_015294.1,2529-2547).
gcagtgtaaagctttggat

SEQ ID NO: 160459 - DNA, 19 bp, Homo sapiens
  siRNA target sequence for TRIM37 (NM_015294.1,2530-2548).
cagtgtaaagctttggatt

SEQ ID NO: 160460 - DNA, 19 bp, Homo sapiens
  siRNA target sequence for TRIM37 (NM_015294.1,2579-2597).
gcttgcctgcggttgagaa

SEQ ID NO: 160461 - DNA, 19 bp, Homo sapiens
  siRNA target sequence for TRIM37 (NM_015294.1,2580-2598).
cttgcctgcggttgagaaa

SEQ ID NO: 160462 - DNA, 19 bp, Homo sapiens
  siRNA target sequence for TRIM37 (NM_015294.1,2584-2602).
cctgcggttgagaaaagga

SEQ ID NO: 160463 - DNA, 19 bp, Homo sapiens
  siRNA target sequence for TRIM37 (NM_015294.1,2616-2634).
cttgggggctaatgctaaa

SEQ ID NO: 160464 - DNA, 19 bp, Homo sapiens
  siRNA target sequence for TRIM37 (NM_015294.1,2619-2637).
gggggctaatgctaaagga

SEQ ID NO: 160465 - DNA, 19 bp, Homo sapiens
  siRNA target sequence for TRIM37 (NM_015294.1,2650-2668).
ggactgcagatgactgatt

SEQ ID NO: 160466 - DNA, 19 bp, Homo sapiens
  siRNA target sequence for TRIM37 (NM_015294.1,2651-2669).
gactgcagatgactgattt

SEQ ID NO: 160467 - DNA, 19 bp, Homo sapiens
  siRNA target sequence for TRIM37 (NM_015294.1,2745-2763).
gagtagcgacagtgacatt

SEQ ID NO: 160468 - DNA, 19 bp, Homo sapiens
  siRNA target sequence for TRIM37 (NM_015294.1,2907-2925).
cagcttcaatacagatgaa

SEQ ID NO: 160469 - DNA, 19 bp, Homo sapiens
  siRNA target sequence for TRIM37 (NM_015294.1,2909-2927).
gcttcaatacagatgaaaa

SEQ ID NO: 160470 - DNA, 19 bp, Homo sapiens
  siRNA target sequence for TRIM37 (NM_015294.1,2910-2928).
cttcaatacagatgaaaat

SEQ ID NO: 160471 - DNA, 19 bp, Homo sapiens
  siRNA target sequence for TRIM38 (NM_006355.2,549-567).
gtgtataacagacttcttt

SEQ ID NO: 160472 - DNA, 19 bp, Homo sapiens
  siRNA target sequence for TRIM38 (NM_006355.2,615-633).
ccagtgtcgggctccattt

SEQ ID NO: 160473 - DNA, 19 bp, Homo sapiens
  siRNA target sequence for TRIM38 (NM_006355.2,618-636).
gtgtcgggctccatttcat

SEQ ID NO: 160474 - DNA, 19 bp, Homo sapiens
  siRNA target sequence for TRIM38 (NM_006355.2,620-638).
gtcgggctccatttcatat

SEQ ID NO: 160475 - DNA, 19 bp, Homo sapiens
  siRNA target sequence for TRIM38 (NM_006355.2,691-709).
gagacggatcaagaaatgt

SEQ ID NO: 160476 - DNA, 19 bp, Homo sapiens
  siRNA target sequence for TRIM38 (NM_006355.2,693-711).
gacggatcaagaaatgtca

SEQ ID NO: 160477 - DNA, 19 bp, Homo sapiens
  siRNA target sequence for TRIM38 (NM_006355.2,915-933).
cacagcaatgcgaataact

SEQ ID NO: 160478 - DNA, 19 bp, Homo sapiens
  siRNA target sequence for TRIM38 (NM_006355.2,917-935).
cagcaatgcgaataactaa

SEQ ID NO: 160479 - DNA, 19 bp, Homo sapiens
  siRNA target sequence for TRIM38 (NM_006355.2,919-937).
gcaatgcgaataactaaat

SEQ ID NO: 160480 - DNA, 19 bp, Homo sapiens
  siRNA target sequence for TRIM38 (NM_006355.2,924-942).
gcgaataactaaatggaaa

SEQ ID NO: 160481 - DNA, 19 bp, Homo sapiens
  siRNA target sequence for TRIM38 (NM_006355.2,972-990).
ccggtctgactttaagaat

SEQ ID NO: 160482 - DNA, 19 bp, Homo sapiens
  siRNA target sequence for TRIM38 (NM_006355.2,1064-1082).
gtagactgagggactatga

SEQ ID NO: 160483 - DNA, 19 bp, Homo sapiens
  siRNA target sequence for TRIM38 (NM_006355.2,1293-1311).
gttaaggagtcatcaagtt

SEQ ID NO: 160484 - DNA, 19 bp, Homo sapiens
  siRNA target sequence for TRIM38 (NM_006355.2,1298-1316).
ggagtcatcaagttagtgt

SEQ ID NO: 160485 - DNA, 19 bp, Homo sapiens
  siRNA target sequence for TRIM38 (NM_006355.2,1337-1355).
ctcatcacgaactaattct

SEQ ID NO: 160486 - DNA, 19 bp, Homo sapiens
  siRNA target sequence for TRIM38 (NM_006355.2,1339-1357).
catcacgaactaattctct

SEQ ID NO: 160487 - DNA, 19 bp, Homo sapiens
  siRNA target sequence for TRIM38 (NM_006355.2,1385-1403).
gatacacccaggagaatca

SEQ ID NO: 160488 - DNA, 19 bp, Homo sapiens
  siRNA target sequence for TRIM38 (NM_006355.2,1466-1484).
caggaagacgttactttga

SEQ ID NO: 160489 - DNA, 19 bp, Homo sapiens
  siRNA target sequence for TRIM38 (NM_006355.2,1631-1649).
ccccaacttcccttcatct

SEQ ID NO: 160490 - DNA, 19 bp, Homo sapiens
  siRNA target sequence for TRIM38 (NM_006355.2,1660-1678).
cccctgcttgtgggaattt

SEQ ID NO: 160491 - DNA, 19 bp, Homo sapiens
  siRNA target sequence for TRIM38 (NM_006355.2,1661-1679).
ccctgcttgtgggaatttt

SEQ ID NO: 160492 - DNA, 19 bp, Homo sapiens
  siRNA target sequence for TRIM38 (NM_006355.2,1662-1680).
cctgcttgtgggaattttt

SEQ ID NO: 160493 - DNA, 19 bp, Homo sapiens
  siRNA target sequence for TRIM39 (NM_021253.2,596-614).
ggcagagacaagtctgtta

SEQ ID NO: 160494 - DNA, 19 bp, Homo sapiens
  siRNA target sequence for TRIM39 (NM_021253.2,729-747).
cacaacttctgcaaagctt

SEQ ID NO: 160495 - DNA, 19 bp, Homo sapiens
  siRNA target sequence for TRIM39 (NM_021253.2,792-810).
cctgtctgtcgaaagacat

SEQ ID NO: 160496 - DNA, 19 bp, Homo sapiens
  siRNA target sequence for TRIM39 (NM_021253.2,818-836).
ccgcagtctccgacctaat

SEQ ID NO: 160497 - DNA, 19 bp, Homo sapiens
  siRNA target sequence for TRIM39 (NM_021253.2,1156-1174).
gtcgccgacagcagatctt

SEQ ID NO: 160498 - DNA, 19 bp, Homo sapiens
  siRNA target sequence for TRIM39 (NM_021253.2,1158-1176).
cgccgacagcagatcttga

SEQ ID NO: 160499 - DNA, 19 bp, Homo sapiens
  siRNA target sequence for TRIM39 (NM_021253.2,1212-1230).
gagcagcaggtgttgcttt

SEQ ID NO: 160500 - DNA, 19 bp, Homo sapiens
  siRNA target sequence for TRIM39 (NM_021253.2,1354-1372).
caggcttcgagatgcttaa

SEQ ID NO: 160501 - DNA, 19 bp, Homo sapiens
  siRNA target sequence for TRIM39 (NM_021253.2,1454-1472).
ggctctccttggattagta

SEQ ID NO: 160502 - DNA, 19 bp, Homo sapiens
  siRNA target sequence for TRIM39 (NM_021253.2,1455-1473).
gctctccttggattagtaa

SEQ ID NO: 160503 - DNA, 19 bp, Homo sapiens
  siRNA target sequence for TRIM39 (NM_021253.2,1456-1474).
ctctccttggattagtaaa

SEQ ID NO: 160504 - DNA, 19 bp, Homo sapiens
  siRNA target sequence for TRIM39 (NM_021253.2,1511-1529).
ggtgacttcagtatccata

SEQ ID NO: 160505 - DNA, 19 bp, Homo sapiens
  siRNA target sequence for TRIM39 (NM_021253.2,1565-1583).
gtactttgccctaaggaaa

SEQ ID NO: 160506 - DNA, 19 bp, Homo sapiens
  siRNA target sequence for TRIM39 (NM_021253.2,1572-1590).
gccctaaggaaaatcctta

SEQ ID NO: 160507 - DNA, 19 bp, Homo sapiens
  siRNA target sequence for TRIM39 (NM_021253.2,1621-1639).
ctgagacagctcatcctaa

SEQ ID NO: 160508 - DNA, 19 bp, Homo sapiens
  siRNA target sequence for TRIM39 (NM_021253.2,1879-1897).
ggcgggtgcggctatggaa

SEQ ID NO: 160509 - DNA, 19 bp, Homo sapiens
  siRNA target sequence for TRIM39 (NM_021253.2,1880-1898).
gcgggtgcggctatggaat

SEQ ID NO: 160510 - DNA, 19 bp, Homo sapiens
  siRNA target sequence for TRIM39 (NM_021253.2,1957-1975).
ccaagcgggtaggcatatt

SEQ ID NO: 160511 - DNA, 19 bp, Homo sapiens
  siRNA target sequence for TRIM39 (NM_021253.2,1961-1979).
gcgggtaggcatattccta

SEQ ID NO: 160512 - DNA, 19 bp, Homo sapiens
  siRNA target sequence for TRIM39 (NM_021253.2,2017-2035).
cagaccgctctcatatcta

SEQ ID NO: 160513 - DNA, 19 bp, Homo sapiens
  siRNA target sequence for TRIM39 (NM_021253.2,2019-2037).
gaccgctctcatatctaca

SEQ ID NO: 160514 - DNA, 19 bp, Homo sapiens
  siRNA target sequence for TRIM4 (NM_033017.2,536-554).
gacatccacgtggatgaat

SEQ ID NO: 160515 - DNA, 19 bp, Homo sapiens
  siRNA target sequence for TRIM4 (NM_033017.2,643-661).
gaagaaagtcatgcattta

SEQ ID NO: 160516 - DNA, 19 bp, Homo sapiens
  siRNA target sequence for TRIM4 (NM_033017.2,689-707).
cagtggaaggataagataa

SEQ ID NO: 160517 - DNA, 19 bp, Homo sapiens
  siRNA target sequence for TRIM4 (NM_033017.2,824-842).
ctgaatgagaacacgttaa

SEQ ID NO: 160518 - DNA, 19 bp, Homo sapiens
  siRNA target sequence for TRIM4 (NM_033017.2,826-844).
gaatgagaacacgttaaaa

SEQ ID NO: 160519 - DNA, 19 bp, Homo sapiens
  siRNA target sequence for TRIM4 (NM_033017.2,832-850).
gaacacgttaaaactcaat

SEQ ID NO: 160520 - DNA, 19 bp, Homo sapiens
  siRNA target sequence for TRIM4 (NM_033017.2,835-853).
cacgttaaaactcaatcaa

SEQ ID NO: 160521 - DNA, 19 bp, Homo sapiens
  siRNA target sequence for TRIM4 (NM_033017.2,851-869).
caaactatcgcttcattga

SEQ ID NO: 160522 - DNA, 19 bp, Homo sapiens
  siRNA target sequence for TRIM4 (NM_033017.2,919-937).
gctgcttcagaatccaaaa

SEQ ID NO: 160523 - DNA, 19 bp, Homo sapiens
  siRNA target sequence for TRIM4 (NM_033017.2,1103-1121).
gaagggagatacgtgaaaa

SEQ ID NO: 160524 - DNA, 19 bp, Homo sapiens
  siRNA target sequence for TRIM4 (NM_033017.2,1155-1173).
cttcagcatggaactactt

SEQ ID NO: 160525 - DNA, 19 bp, Homo sapiens
  siRNA target sequence for TRIM4 (NM_033017.2,1191-1209).
ctcagaagactgcttttgt

SEQ ID NO: 160526 - DNA, 19 bp, Homo sapiens
  siRNA target sequence for TRIM4 (NM_033017.2,1233-1251).
gtgttctgggaaaaaacgt

SEQ ID NO: 160527 - DNA, 19 bp, Homo sapiens
  siRNA target sequence for TRIM4 (NM_033017.2,1325-1343).
gaggacgtcatgggaatta

SEQ ID NO: 160528 - DNA, 19 bp, Homo sapiens
  siRNA target sequence for TRIM4 (NM_033017.2,1327-1345).
ggacgtcatgggaattact

SEQ ID NO: 160529 - DNA, 19 bp, Homo sapiens
  siRNA target sequence for TRIM4 (NM_033017.2,1338-1356).
gaattactgatcgttcaaa

SEQ ID NO: 160530 - DNA, 19 bp, Homo sapiens
  siRNA target sequence for TRIM4 (NM_033017.2,1529-1547).
cacctgcacaccttttctt

SEQ ID NO: 160531 - DNA, 19 bp, Homo sapiens
  siRNA target sequence for TRIM4 (NM_033017.2,1585-1603).
gagtccattagcatcttta

SEQ ID NO: 160532 - DNA, 19 bp, Homo sapiens
  siRNA target sequence for TRIM4 (NM_033017.2,1587-1605).
gtccattagcatctttagt

SEQ ID NO: 160533 - DNA, 19 bp, Homo sapiens
  siRNA target sequence for TRIM40 (NM_138700.2,497-515).
ctagggacaggctatatct

SEQ ID NO: 160534 - DNA, 19 bp, Homo sapiens
  siRNA target sequence for TRIM40 (NM_138700.2,783-801).
cggccagaatccttgacat

SEQ ID NO: 160535 - DNA, 19 bp, Homo sapiens
  siRNA target sequence for TRIM40 (NM_138700.2,823-841).
cagaagcctggtcattgat

SEQ ID NO: 160536 - DNA, 19 bp, Homo sapiens
  siRNA target sequence for TRIM40 (NM_138700.2,825-843).
gaagcctggtcattgatct

SEQ ID NO: 160537 - DNA, 19 bp, Homo sapiens
  siRNA target sequence for TRIM40 (NM_138700.2,845-863).
gaaaggacggccaaggaat

SEQ ID NO: 160538 - DNA, 19 bp, Homo sapiens
  siRNA target sequence for TRIM40 (NM_138700.2,849-867).
ggacggccaaggaattaga

SEQ ID NO: 160539 - DNA, 19 bp, Homo sapiens
  siRNA target sequence for TRIM40 (NM_138700.2,868-886).
caccaacacactgaagaat

SEQ ID NO: 160540 - DNA, 19 bp, Homo sapiens
  siRNA target sequence for TRIM40 (NM_138700.2,906-924).
ggagtgctccacagaaatt

SEQ ID NO: 160541 - DNA, 19 bp, Homo sapiens
  siRNA target sequence for TRIM40 (NM_138700.2,909-927).
gtgctccacagaaattaga

SEQ ID NO: 160542 - DNA, 19 bp, Homo sapiens
  siRNA target sequence for TRIM41 (NM_033549.2,159-177).
gaagacctggactactact

SEQ ID NO: 160543 - DNA, 19 bp, Homo sapiens
  siRNA target sequence for TRIM41 (NM_033549.2,297-315).
cctcggaggtgcttcacat

SEQ ID NO: 160544 - DNA, 19 bp, Homo sapiens
  siRNA target sequence for TRIM41 (NM_033549.2,1268-1286).
gggtgctgcccgtgaatca

SEQ ID NO: 160545 - DNA, 19 bp, Homo sapiens
  siRNA target sequence for TRIM41 (NM_033549.2,1269-1287).
ggtgctgcccgtgaatcaa

SEQ ID NO: 160546 - DNA, 19 bp, Homo sapiens
  siRNA target sequence for TRIM41 (NM_033549.2,1288-1306).
cccatcataaggaaaaggt

SEQ ID NO: 160547 - DNA, 19 bp, Homo sapiens
  siRNA target sequence for TRIM42 (NM_152616.3,262-280).
gtctgtgctgcaagttcat

SEQ ID NO: 160548 - DNA, 19 bp, Homo sapiens
  siRNA target sequence for TRIM42 (NM_152616.3,402-420).
gccaatgatcccaactgta

SEQ ID NO: 160549 - DNA, 19 bp, Homo sapiens
  siRNA target sequence for TRIM42 (NM_152616.3,403-421).
ccaatgatcccaactgtaa

SEQ ID NO: 160550 - DNA, 19 bp, Homo sapiens
  siRNA target sequence for TRIM42 (NM_152616.3,471-489).
cgctgctgccgcaatacca

SEQ ID NO: 160551 - DNA, 19 bp, Homo sapiens
  siRNA target sequence for TRIM42 (NM_152616.3,472-490).
gctgctgccgcaataccat

SEQ ID NO: 160552 - DNA, 19 bp, Homo sapiens
  siRNA target sequence for TRIM42 (NM_152616.3,572-590).
ggtggatgaagtaaagtca

SEQ ID NO: 160553 - DNA, 19 bp, Homo sapiens
  siRNA target sequence for TRIM42 (NM_152616.3,573-591).
gtggatgaagtaaagtcaa

SEQ ID NO: 160554 - DNA, 19 bp, Homo sapiens
  siRNA target sequence for TRIM42 (NM_152616.3,609-627).
ctggtgaaccacctcaatt

SEQ ID NO: 160555 - DNA, 19 bp, Homo sapiens
  siRNA target sequence for TRIM42 (NM_152616.3,643-661).
ggctgcgcctgcactcatt

SEQ ID NO: 160556 - DNA, 19 bp, Homo sapiens
  siRNA target sequence for TRIM42 (NM_152616.3,645-663).
ctgcgcctgcactcattca

SEQ ID NO: 160557 - DNA, 19 bp, Homo sapiens
  siRNA target sequence for TRIM42 (NM_152616.3,1089-1107).
gagtactgccgcaatgaca

SEQ ID NO: 160558 - DNA, 19 bp, Homo sapiens
  siRNA target sequence for TRIM42 (NM_152616.3,1094-1112).
ctgccgcaatgacaacaaa

SEQ ID NO: 160559 - DNA, 19 bp, Homo sapiens
  siRNA target sequence for TRIM42 (NM_152616.3,1096-1114).
gccgcaatgacaacaaatt

SEQ ID NO: 160560 - DNA, 19 bp, Homo sapiens
  siRNA target sequence for TRIM42 (NM_152616.3,1207-1225).
gcgccatcgccaagttcaa

SEQ ID NO: 160561 - DNA, 19 bp, Homo sapiens
  siRNA target sequence for TRIM42 (NM_152616.3,1223-1241).
caaagcagtccgatatgaa

SEQ ID NO: 160562 - DNA, 19 bp, Homo sapiens
  siRNA target sequence for TRIM42 (NM_152616.3,1228-1246).
cagtccgatatgaaattga

SEQ ID NO: 160563 - DNA, 19 bp, Homo sapiens
  siRNA target sequence for TRIM42 (NM_152616.3,1230-1248).
gtccgatatgaaattgata

SEQ ID NO: 160564 - DNA, 19 bp, Homo sapiens
  siRNA target sequence for TRIM42 (NM_152616.3,1334-1352).
caagttgcgcagcattctt

SEQ ID NO: 160565 - DNA, 19 bp, Homo sapiens
  siRNA target sequence for TRIM42 (NM_152616.3,1376-1394).
ggagcagatagagaatcta

SEQ ID NO: 160566 - DNA, 19 bp, Homo sapiens
  siRNA target sequence for TRIM42 (NM_152616.3,1590-1608).
ctccggctgcactcaataa

SEQ ID NO: 160567 - DNA, 19 bp, Homo sapiens
  siRNA target sequence for TRIM42 (NM_152616.3,1594-1612).
ggctgcactcaataaacta

SEQ ID NO: 160568 - DNA, 19 bp, Homo sapiens
  siRNA target sequence for TRIM42 (NM_152616.3,1613-1631).
cgtgcccttggactttgtt

SEQ ID NO: 160569 - DNA, 19 bp, Homo sapiens
  siRNA target sequence for TRIM42 (NM_152616.3,1721-1739).
gcactcagaaacaatgatt

SEQ ID NO: 160570 - DNA, 19 bp, Homo sapiens
  siRNA target sequence for TRIM42 (NM_152616.3,1794-1812).
cgaagctcctccatgttgt

SEQ ID NO: 160571 - DNA, 19 bp, Homo sapiens
  siRNA target sequence for TRIM42 (NM_152616.3,1962-1980).
cacaactggtactcattca

SEQ ID NO: 160572 - DNA, 19 bp, Homo sapiens
  siRNA target sequence for TRIM42 (NM_152616.3,2002-2020).
caggcccaattgttatcta

SEQ ID NO: 160573 - DNA, 19 bp, Homo sapiens
  siRNA target sequence for TRIM42 (NM_152616.3,2071-2089).
cagaagacgtggactcttt

SEQ ID NO: 160574 - DNA, 19 bp, Homo sapiens
  siRNA target sequence for TRIM42 (NM_152616.3,2096-2114).
ggaattctatgaagtcatt

SEQ ID NO: 160575 - DNA, 19 bp, Homo sapiens
  siRNA target sequence for TRIM42 (NM_152616.3,2097-2115).
gaattctatgaagtcatta

SEQ ID NO: 160576 - DNA, 19 bp, Homo sapiens
  siRNA target sequence for TRIM42 (NM_152616.3,2121-2139).
cctcctaacaacgtacaaa

SEQ ID NO: 160577 - DNA, 19 bp, Homo sapiens
  siRNA target sequence for TRIM42 (NM_152616.3,2122-2140).
ctcctaacaacgtacaaat

SEQ ID NO: 160578 - DNA, 19 bp, Homo sapiens
  siRNA target sequence for TRIM42 (NM_152616.3,2141-2159).
ggagctctgtggacaaatt

SEQ ID NO: 160579 - DNA, 19 bp, Homo sapiens
  siRNA target sequence for TRIM42 (NM_152616.3,2151-2169).
ggacaaattcgggacataa

SEQ ID NO: 160580 - DNA, 19 bp, Homo sapiens
  siRNA target sequence for TRIM42 (NM_152616.3,2152-2170).
gacaaattcgggacataat

SEQ ID NO: 160581 - DNA, 19 bp, Homo sapiens
  siRNA target sequence for TRIM42 (NM_152616.3,2162-2180).
ggacataatgcagcaaaat

SEQ ID NO: 160582 - DNA, 19 bp, Homo sapiens
  siRNA target sequence for TRIM42 (NM_152616.3,2211-2229).
gaatacgtgtttaaagtta

SEQ ID NO: 160583 - DNA, 19 bp, Homo sapiens
  siRNA target sequence for TRIM42 (NM_152616.3,2226-2244).
gttagagccatcaatgata

SEQ ID NO: 160584 - DNA, 19 bp, Homo sapiens
  siRNA target sequence for TRIM44 (NM_017583.3,789-807).
gtgaatttgacccagaaat

SEQ ID NO: 160585 - DNA, 19 bp, Homo sapiens
  siRNA target sequence for TRIM44 (NM_017583.3,850-868).
ccatgggcttgatttgagt

SEQ ID NO: 160586 - DNA, 19 bp, Homo sapiens
  siRNA target sequence for TRIM44 (NM_017583.3,851-869).
catgggcttgatttgagta

SEQ ID NO: 160587 - DNA, 19 bp, Homo sapiens
  siRNA target sequence for TRIM44 (NM_017583.3,856-874).
gcttgatttgagtacctat

SEQ ID NO: 160588 - DNA, 19 bp, Homo sapiens
  siRNA target sequence for TRIM44 (NM_017583.3,1002-1020).
ccgctatgatcgaattggt

SEQ ID NO: 160589 - DNA, 19 bp, Homo sapiens
  siRNA target sequence for TRIM44 (NM_017583.3,1039-1057).
gagctcagaccctaaagta

SEQ ID NO: 160590 - DNA, 19 bp, Homo sapiens
  siRNA target sequence for TRIM44 (NM_017583.3,1061-1079).
cgggaccaaatgaagatgt

SEQ ID NO: 160591 - DNA, 19 bp, Homo sapiens
  siRNA target sequence for TRIM44 (NM_017583.3,1129-1147).
gcagaaggcccttcatcta

SEQ ID NO: 160592 - DNA, 19 bp, Homo sapiens
  siRNA target sequence for TRIM44 (NM_017583.3,1211-1229).
cacatggataggttgatga

SEQ ID NO: 160593 - DNA, 19 bp, Homo sapiens
  siRNA target sequence for TRIM44 (NM_017583.3,1256-1274).
cttgatacctctaatgaat

SEQ ID NO: 160594 - DNA, 19 bp, Homo sapiens
  siRNA target sequence for TRIM45 (NM_025188.1,620-638).
gtgcttggggcttttcaaa

SEQ ID NO: 160595 - DNA, 19 bp, Homo sapiens
  siRNA target sequence for TRIM45 (NM_025188.1,745-763).
ctgaggggtcaatattcca

SEQ ID NO: 160596 - DNA, 19 bp, Homo sapiens
  siRNA target sequence for TRIM45 (NM_025188.1,803-821).
cctttgtcctgtatgtgat

SEQ ID NO: 160597 - DNA, 19 bp, Homo sapiens
  siRNA target sequence for TRIM45 (NM_025188.1,843-861).
ggtggagtgaaggctttaa

SEQ ID NO: 160598 - DNA, 19 bp, Homo sapiens
  siRNA target sequence for TRIM45 (NM_025188.1,847-865).
gagtgaaggctttaaccat

SEQ ID NO: 160599 - DNA, 19 bp, Homo sapiens
  siRNA target sequence for TRIM45 (NM_025188.1,940-958).
gcaacgacagggaagtaga

SEQ ID NO: 160600 - DNA, 19 bp, Homo sapiens
  siRNA target sequence for TRIM45 (NM_025188.1,1049-1067).
ggacctaaaagacttgaaa

SEQ ID NO: 160601 - DNA, 19 bp, Homo sapiens
  siRNA target sequence for TRIM45 (NM_025188.1,1295-1313).
ggctcagatccacataata

SEQ ID NO: 160602 - DNA, 19 bp, Homo sapiens
  siRNA target sequence for TRIM45 (NM_025188.1,1296-1314).
gctcagatccacataataa

SEQ ID NO: 160603 - DNA, 19 bp, Homo sapiens
  siRNA target sequence for TRIM45 (NM_025188.1,1301-1319).
gatccacataataaacagt

SEQ ID NO: 160604 - DNA, 19 bp, Homo sapiens
  siRNA target sequence for TRIM45 (NM_025188.1,1585-1603).
ggctcaggaagctgaacaa

SEQ ID NO: 160605 - DNA, 19 bp, Homo sapiens
  siRNA target sequence for TRIM45 (NM_025188.1,1586-1604).
gctcaggaagctgaacaaa

SEQ ID NO: 160606 - DNA, 19 bp, Homo sapiens
  siRNA target sequence for TRIM45 (NM_025188.1,1591-1609).
ggaagctgaacaaagttca

SEQ ID NO: 160607 - DNA, 19 bp, Homo sapiens
  siRNA target sequence for TRIM45 (NM_025188.1,1595-1613).
gctgaacaaagttcaatat

SEQ ID NO: 160608 - DNA, 19 bp, Homo sapiens
  siRNA target sequence for TRIM45 (NM_025188.1,1615-1633).
gcacccgtcctggagtaaa

SEQ ID NO: 160609 - DNA, 19 bp, Homo sapiens
  siRNA target sequence for TRIM45 (NM_025188.1,1616-1634).
cacccgtcctggagtaaat

SEQ ID NO: 160610 - DNA, 19 bp, Homo sapiens
  siRNA target sequence for TRIM45 (NM_025188.1,1618-1636).
cccgtcctggagtaaatga

SEQ ID NO: 160611 - DNA, 19 bp, Homo sapiens
  siRNA target sequence for TRIM45 (NM_025188.1,1619-1637).
ccgtcctggagtaaatgat

SEQ ID NO: 160612 - DNA, 19 bp, Homo sapiens
  siRNA target sequence for TRIM45 (NM_025188.1,1620-1638).
cgtcctggagtaaatgata

SEQ ID NO: 160613 - DNA, 19 bp, Homo sapiens
  siRNA target sequence for TRIM45 (NM_025188.1,1623-1641).
cctggagtaaatgataaga

SEQ ID NO: 160614 - DNA, 19 bp, Homo sapiens
  siRNA target sequence for TRIM45 (NM_025188.1,1670-1688).
ccagtgccgtggctatgaa

SEQ ID NO: 160615 - DNA, 19 bp, Homo sapiens
  siRNA target sequence for TRIM45 (NM_025188.1,1680-1698).
ggctatgaaatttatggta

SEQ ID NO: 160616 - DNA, 19 bp, Homo sapiens
  siRNA target sequence for TRIM45 (NM_025188.1,1686-1704).
gaaatttatggtacgatta

SEQ ID NO: 160617 - DNA, 19 bp, Homo sapiens
  siRNA target sequence for TRIM45 (NM_025188.1,1787-1805).
caccctgctttgtaaggat

SEQ ID NO: 160618 - DNA, 19 bp, Homo sapiens
  siRNA target sequence for TRIM45 (NM_025188.1,1891-1909).
caatggtccaggataacaa

SEQ ID NO: 160619 - DNA, 19 bp, Homo sapiens
  siRNA target sequence for TRIM45 (NM_025188.1,1910-1928).
ggatgggacatactacatt

SEQ ID NO: 160620 - DNA, 19 bp, Homo sapiens
  siRNA target sequence for TRIM45 (NM_025188.1,1914-1932).
gggacatactacatttcct

SEQ ID NO: 160621 - DNA, 19 bp, Homo sapiens
  siRNA target sequence for TRIM45 (NM_025188.1,1915-1933).
ggacatactacatttccta

SEQ ID NO: 160622 - DNA, 19 bp, Homo sapiens
  siRNA target sequence for TRIM45 (NM_025188.1,1943-1961).
ggaacctggcgtctatact

SEQ ID NO: 160623 - DNA, 19 bp, Homo sapiens
  siRNA target sequence for TRIM45 (NM_025188.1,1966-1984).
gggtctgcatcaaagaaca

SEQ ID NO: 160624 - DNA, 19 bp, Homo sapiens
  siRNA target sequence for TRIM45 (NM_025188.1,1991-2009).
gcagggctcgccattcact

SEQ ID NO: 160625 - DNA, 19 bp, Homo sapiens
  siRNA target sequence for TRIM45 (NM_025188.1,2035-2053).
cacactcaggcgtgtttca

SEQ ID NO: 160626 - DNA, 19 bp, Homo sapiens
  siRNA target sequence for TRIM45 (NM_025188.1,2234-2252).
cgcaccgaggagtctactt

SEQ ID NO: 160627 - DNA, 19 bp, Homo sapiens
  siRNA target sequence for TRIM45 (NM_025188.1,2235-2253).
gcaccgaggagtctactta

SEQ ID NO: 160628 - DNA, 19 bp, Homo sapiens
  siRNA target sequence for TRIM46 (NM_025058.1,96-114).
cagagggtgaggatatgca

SEQ ID NO: 160629 - DNA, 19 bp, Homo sapiens
  siRNA target sequence for TRIM46 (NM_025058.1,137-155).
gcactggtccgcatcagta

SEQ ID NO: 160630 - DNA, 19 bp, Homo sapiens
  siRNA target sequence for TRIM46 (NM_025058.1,274-292).
gggccagcagggctacata

SEQ ID NO: 160631 - DNA, 19 bp, Homo sapiens
  siRNA target sequence for TRIM46 (NM_025058.1,397-415).
ggaccggctgcttaagtca

SEQ ID NO: 160632 - DNA, 19 bp, Homo sapiens
  siRNA target sequence for TRIM46 (NM_025058.1,752-770).
cgacccaagggccttatgt

SEQ ID NO: 160633 - DNA, 19 bp, Homo sapiens
  siRNA target sequence for TRIM46 (NM_025058.1,813-831).
gccaacgcctggtatgtca

SEQ ID NO: 160634 - DNA, 19 bp, Homo sapiens
  siRNA target sequence for TRIM46 (NM_025058.1,814-832).
ccaacgcctggtatgtcaa

SEQ ID NO: 160635 - DNA, 19 bp, Homo sapiens
  siRNA target sequence for TRIM46 (NM_025058.1,852-870).
cccacagcgggcacaagat

SEQ ID NO: 160636 - DNA, 19 bp, Homo sapiens
  siRNA target sequence for TRIM46 (NM_025058.1,1182-1200).
gctatgcccaggaagtact

SEQ ID NO: 160637 - DNA, 19 bp, Homo sapiens
  siRNA target sequence for TRIM46 (NM_025058.1,1349-1367).
ctgctgacagagcttaact

SEQ ID NO: 160638 - DNA, 19 bp, Homo sapiens
  siRNA target sequence for TRIM46 (NM_025058.1,1405-1423).
gcgcacctttgcctatgat

SEQ ID NO: 160639 - DNA, 19 bp, Homo sapiens
  siRNA target sequence for TRIM46 (NM_025058.1,1407-1425).
gcacctttgcctatgatca

SEQ ID NO: 160640 - DNA, 19 bp, Homo sapiens
  siRNA target sequence for TRIM46 (NM_025058.1,1460-1478).
ccacctgcctggcactata

SEQ ID NO: 160641 - DNA, 19 bp, Homo sapiens
  siRNA target sequence for TRIM46 (NM_025058.1,1470-1488).
ggcactataccgttgagtt

SEQ ID NO: 160642 - DNA, 19 bp, Homo sapiens
  siRNA target sequence for TRIM46 (NM_025058.1,1579-1597).
cgacacgggctctgtgtat

SEQ ID NO: 160643 - DNA, 19 bp, Homo sapiens
  siRNA target sequence for TRIM46 (NM_025058.1,1627-1645).
cggctacggcgaatacagt

SEQ ID NO: 160644 - DNA, 19 bp, Homo sapiens
  siRNA target sequence for TRIM46 (NM_025058.1,1633-1651).
cggcgaatacagtgaagat

SEQ ID NO: 160645 - DNA, 19 bp, Homo sapiens
  siRNA target sequence for TRIM46 (NM_025058.1,1635-1653).
gcgaatacagtgaagatgt

SEQ ID NO: 160646 - DNA, 19 bp, Homo sapiens
  siRNA target sequence for TRIM47 (NM_033452.1,780-798).
gcacagtggccctcatcaa

SEQ ID NO: 160647 - DNA, 19 bp, Homo sapiens
  siRNA target sequence for TRIM47 (NM_033452.1,1297-1315).
cctcaagtttgcctatatt

SEQ ID NO: 160648 - DNA, 19 bp, Homo sapiens
  siRNA target sequence for TRIM47 (NM_033452.1,1308-1326).
cctatattgtggatttgga

SEQ ID NO: 160649 - DNA, 19 bp, Homo sapiens
  siRNA target sequence for TRIM47 (NM_033452.1,1351-1369).
gcagctgtttggaaccaaa

SEQ ID NO: 160650 - DNA, 19 bp, Homo sapiens
  siRNA target sequence for TRIM47 (NM_033452.1,1382-1400).
gtgctgtgtcctatcaact

SEQ ID NO: 160651 - DNA, 19 bp, Homo sapiens
  siRNA target sequence for TRIM47 (NM_033452.1,1460-1478).
gaccgaggcacctactact

SEQ ID NO: 160652 - DNA, 19 bp, Homo sapiens
  siRNA target sequence for TRIM47 (NM_033452.1,1612-1630).
cttctccgtctggtttcat

SEQ ID NO: 160653 - DNA, 19 bp, Homo sapiens
  siRNA target sequence for TRIM47 (NM_033452.1,1718-1736).
gtacgggacggcaagatga

SEQ ID NO: 160654 - DNA, 19 bp, Homo sapiens
  siRNA target sequence for TRIM5 (NM_033034.1,265-283).
ctggaatcctggttaatgt

SEQ ID NO: 160655 - DNA, 19 bp, Homo sapiens
  siRNA target sequence for TRIM5 (NM_033034.1,267-285).
ggaatcctggttaatgtaa

SEQ ID NO: 160656 - DNA, 19 bp, Homo sapiens
  siRNA target sequence for TRIM5 (NM_033034.1,389-407).
gaagtccatgctagacaaa

SEQ ID NO: 160657 - DNA, 19 bp, Homo sapiens
  siRNA target sequence for TRIM5 (NM_033034.1,766-784).
ggaagactcaaatacagta

SEQ ID NO: 160658 - DNA, 19 bp, Homo sapiens
  siRNA target sequence for TRIM5 (NM_033034.1,896-914).
ccttacgaactctgaaact

SEQ ID NO: 160659 - DNA, 19 bp, Homo sapiens
  siRNA target sequence for TRIM5 (NM_033034.1,1008-1026).
gatggcgtcataaaaagga

SEQ ID NO: 160660 - DNA, 19 bp, Homo sapiens
  siRNA target sequence for TRIM5 (NM_033034.1,1141-1159).
gacgctactgggttgatgt

SEQ ID NO: 160661 - DNA, 19 bp, Homo sapiens
  siRNA target sequence for TRIM5 (NM_033034.1,1162-1180).
cagtggctccaaacaacat

SEQ ID NO: 160662 - DNA, 19 bp, Homo sapiens
  siRNA target sequence for TRIM5 (NM_033034.1,1220-1238).
ctctccgaaaccacagata

SEQ ID NO: 160663 - DNA, 19 bp, Homo sapiens
  siRNA target sequence for TRIM5 (NM_033034.1,1222-1240).
ctccgaaaccacagataat

SEQ ID NO: 160664 - DNA, 19 bp, Homo sapiens
  siRNA target sequence for TRIM5 (NM_033034.1,1224-1242).
ccgaaaccacagataatat

SEQ ID NO: 160665 - DNA, 19 bp, Homo sapiens
  siRNA target sequence for TRIM5 (NM_033034.1,1225-1243).
cgaaaccacagataatata

SEQ ID NO: 160666 - DNA, 19 bp, Homo sapiens
  siRNA target sequence for TRIM5 (NM_033034.1,1226-1244).
gaaaccacagataatatat

SEQ ID NO: 160667 - DNA, 19 bp, Homo sapiens
  siRNA target sequence for TRIM5 (NM_033034.1,1246-1264).
gggcacgagggacaagata

SEQ ID NO: 160668 - DNA, 19 bp, Homo sapiens
  siRNA target sequence for TRIM5 (NM_033034.1,1394-1412).
ccaacctgatgcaatgtgt

SEQ ID NO: 160669 - DNA, 19 bp, Homo sapiens
  siRNA target sequence for TRIM5 (NM_033034.1,1395-1413).
caacctgatgcaatgtgta

SEQ ID NO: 160670 - DNA, 19 bp, Homo sapiens
  siRNA target sequence for TRIM5 (NM_033034.1,1398-1416).
cctgatgcaatgtgtaata

SEQ ID NO: 160671 - DNA, 19 bp, Homo sapiens
  siRNA target sequence for TRIM5 (NM_033034.1,1399-1417).
ctgatgcaatgtgtaatat

SEQ ID NO: 160672 - DNA, 19 bp, Homo sapiens
  siRNA target sequence for TRIM5 (NM_033092.1,1153-1171).
gtaaggagaagtcacatta

SEQ ID NO: 160673 - DNA, 19 bp, Homo sapiens
  siRNA target sequence for TRIM5 (NM_033092.1,1180-1198).
caccctgcggcttatcatt

SEQ ID NO: 160674 - DNA, 19 bp, Homo sapiens
  siRNA target sequence for TRIM5 (NM_033092.1,1183-1201).
cctgcggcttatcattatt

SEQ ID NO: 160675 - DNA, 19 bp, Homo sapiens
  siRNA target sequence for TRIM5 (NM_033092.1,1184-1202).
ctgcggcttatcattatta

SEQ ID NO: 160676 - DNA, 19 bp, Homo sapiens
  siRNA target sequence for TRIM5 (NM_033092.1,1186-1204).
gcggcttatcattattatt

SEQ ID NO: 160677 - DNA, 19 bp, Homo sapiens
  siRNA target sequence for TRIM5 (NM_033092.1,1187-1205).
cggcttatcattattatta

SEQ ID NO: 160678 - DNA, 19 bp, Homo sapiens
  siRNA target sequence for TRIM5 (NM_033092.1,1243-1261).
catgttttaagatttatga

SEQ ID NO: 160679 - DNA, 19 bp, Homo sapiens
  siRNA target sequence for TRIM50A (NM_178125.2,1445-1463).
ggctctacctgcactatga

SEQ ID NO: 160680 - DNA, 19 bp, Homo sapiens
  siRNA target sequence for TRIM52 (NM_032765.2,548-566).
cattcgagaggtgttgtat

SEQ ID NO: 160681 - DNA, 19 bp, Homo sapiens
  siRNA target sequence for TRIM52 (NM_032765.2,623-641).
cggtgacagtggtataact

SEQ ID NO: 160682 - DNA, 19 bp, Homo sapiens
  siRNA target sequence for TRIM52 (NM_032765.2,624-642).
ggtgacagtggtataacta

SEQ ID NO: 160683 - DNA, 19 bp, Homo sapiens
  siRNA target sequence for TRIM52 (NM_032765.2,625-643).
gtgacagtggtataactaa

SEQ ID NO: 160684 - DNA, 19 bp, Homo sapiens
  siRNA target sequence for TRIM52 (NM_032765.2,627-645).
gacagtggtataactaatt

SEQ ID NO: 160685 - DNA, 19 bp, Homo sapiens
  siRNA target sequence for TRIM52 (NM_032765.2,646-664).
gggacaacgtagactatat

SEQ ID NO: 160686 - DNA, 19 bp, Homo sapiens
  siRNA target sequence for TRIM52 (NM_032765.2,648-666).
gacaacgtagactatatgt

SEQ ID NO: 160687 - DNA, 19 bp, Homo sapiens
  siRNA target sequence for TRIM52 (NM_032765.2,724-742).
gacctgacctgagaattga

SEQ ID NO: 160688 - DNA, 19 bp, Homo sapiens
  siRNA target sequence for TRIM52 (NM_032765.2,909-927).
gccaacatggtccagataa

SEQ ID NO: 160689 - DNA, 19 bp, Homo sapiens
  siRNA target sequence for TRIM52 (NM_032765.2,910-928).
ccaacatggtccagataat

SEQ ID NO: 160690 - DNA, 19 bp, Homo sapiens
  siRNA target sequence for TRIM52 (NM_032765.2,935-953).
gatgtgccccactccttat

SEQ ID NO: 160691 - DNA, 19 bp, Homo sapiens
  siRNA target sequence for TRIM52 (NM_032765.2,956-974).
gggaaaccggagtaatgat

SEQ ID NO: 160692 - DNA, 19 bp, Homo sapiens
  siRNA target sequence for TRIM52 (NM_032765.2,958-976).
gaaaccggagtaatgatca

SEQ ID NO: 160693 - DNA, 19 bp, Homo sapiens
  siRNA target sequence for TRIM52 (NM_032765.2,1135-1153).
caactctggtgggaatact

SEQ ID NO: 160694 - DNA, 19 bp, Homo sapiens
  siRNA target sequence for TRIM52 (NM_032765.2,1157-1175).
gatagagcaagaaagcatt

SEQ ID NO: 160695 - DNA, 19 bp, Homo sapiens
  siRNA target sequence for TRIM6 (NM_058166.2,668-686).
ggatccagacagagtttaa

SEQ ID NO: 160696 - DNA, 19 bp, Homo sapiens
  siRNA target sequence for TRIM6 (NM_058166.2,715-733).
gagcaacgggagctgaaaa

SEQ ID NO: 160697 - DNA, 19 bp, Homo sapiens
  siRNA target sequence for TRIM6 (NM_058166.2,750-768).
gaagaaggggctacgaatt

SEQ ID NO: 160698 - DNA, 19 bp, Homo sapiens
  siRNA target sequence for TRIM6 (NM_058166.2,753-771).
gaaggggctacgaattata

SEQ ID NO: 160699 - DNA, 19 bp, Homo sapiens
  siRNA target sequence for TRIM6 (NM_058166.2,756-774).
ggggctacgaattatagaa

SEQ ID NO: 160700 - DNA, 19 bp, Homo sapiens
  siRNA target sequence for TRIM6 (NM_058166.2,758-776).
ggctacgaattatagaaga

SEQ ID NO: 160701 - DNA, 19 bp, Homo sapiens
  siRNA target sequence for TRIM6 (NM_058166.2,841-859).
cgatgtcaggggtcaacaa

SEQ ID NO: 160702 - DNA, 19 bp, Homo sapiens
  siRNA target sequence for TRIM6 (NM_058166.2,934-952).
cctacaaagctgagaagta

SEQ ID NO: 160703 - DNA, 19 bp, Homo sapiens
  siRNA target sequence for TRIM6 (NM_058166.2,1092-1110).
gaggtttgtgggagctaaa

SEQ ID NO: 160704 - DNA, 19 bp, Homo sapiens
  siRNA target sequence for TRIM6 (NM_058166.2,1094-1112).
ggtttgtgggagctaaagt

SEQ ID NO: 160705 - DNA, 19 bp, Homo sapiens
  siRNA target sequence for TRIM6 (NM_058166.2,1121-1139).
cttcctgtctggaaaagca

SEQ ID NO: 160706 - DNA, 19 bp, Homo sapiens
  siRNA target sequence for TRIM6 (NM_058166.2,1124-1142).
cctgtctggaaaagcatta

SEQ ID NO: 160707 - DNA, 19 bp, Homo sapiens
  siRNA target sequence for TRIM6 (NM_058166.2,1125-1143).
ctgtctggaaaagcattat

SEQ ID NO: 160708 - DNA, 19 bp, Homo sapiens
  siRNA target sequence for TRIM6 (NM_058166.2,1232-1250).
gggtatgcagcaattcact

SEQ ID NO: 160709 - DNA, 19 bp, Homo sapiens
  siRNA target sequence for TRIM6 (NM_058166.2,1252-1270).
ggacctacattctctttca

SEQ ID NO: 160710 - DNA, 19 bp, Homo sapiens
  siRNA target sequence for TRIM6 (NM_058166.2,1253-1271).
gacctacattctctttcaa

SEQ ID NO: 160711 - DNA, 19 bp, Homo sapiens
  siRNA target sequence for TRIM6 (NM_058166.2,1263-1281).
ctctttcaaccattttgct

SEQ ID NO: 160712 - DNA, 19 bp, Homo sapiens
  siRNA target sequence for TRIM6 (NM_058166.2,1491-1509).
ctacactttctctaaatat

SEQ ID NO: 160713 - DNA, 19 bp, Homo sapiens
  siRNA target sequence for TRIM6 (NM_058166.2,1512-1530).
ctttcccactactctttgt

SEQ ID NO: 160714 - DNA, 19 bp, Homo sapiens
  siRNA target sequence for TRIM6 (NM_058166.2,1547-1565).
gcaactgtgtaattcctat

SEQ ID NO: 160715 - DNA, 19 bp, Homo sapiens
  siRNA target sequence for TRIM8 (NM_030912.1,13-31).
gcggagaattggaagaact

SEQ ID NO: 160716 - DNA, 19 bp, Homo sapiens
  siRNA target sequence for TRIM8 (NM_030912.1,56-74).
ctatctgcctgcacgtttt

SEQ ID NO: 160717 - DNA, 19 bp, Homo sapiens
  siRNA target sequence for TRIM8 (NM_030912.1,1412-1430).
gttctgtggacaactgtta

SEQ ID NO: 160718 - DNA, 19 bp, Homo sapiens
  siRNA target sequence for TRIM8 (NM_030912.1,1417-1435).
gtggacaactgttactgtt

SEQ ID NO: 160719 - DNA, 19 bp, Homo sapiens
  siRNA target sequence for TRIM8 (NM_030912.1,1633-1651).
cagccgtccaccaaacact

SEQ ID NO: 160720 - DNA, 19 bp, Homo sapiens
  siRNA target sequence for TRIM9 (NM_015163.3,196-214).
cgtgtgcggctccttctat

SEQ ID NO: 160721 - DNA, 19 bp, Homo sapiens
  siRNA target sequence for TRIM9 (NM_015163.3,235-253).
ctgctctcacaatttgtgt

SEQ ID NO: 160722 - DNA, 19 bp, Homo sapiens
  siRNA target sequence for TRIM9 (NM_015163.3,329-347).
ggggtctccgactatgact

SEQ ID NO: 160723 - DNA, 19 bp, Homo sapiens
  siRNA target sequence for TRIM9 (NM_015163.3,330-348).
gggtctccgactatgacta

SEQ ID NO: 160724 - DNA, 19 bp, Homo sapiens
  siRNA target sequence for TRIM9 (NM_015163.3,331-349).
ggtctccgactatgactat

SEQ ID NO: 160725 - DNA, 19 bp, Homo sapiens
  siRNA target sequence for TRIM9 (NM_015163.3,610-628).
cgtactggaaggggtaatt

SEQ ID NO: 160726 - DNA, 19 bp, Homo sapiens
  siRNA target sequence for TRIM9 (NM_015163.3,708-726).
gcgaacagtgcgatgtctt

SEQ ID NO: 160727 - DNA, 19 bp, Homo sapiens
  siRNA target sequence for TRIM9 (NM_015163.3,1107-1125).
gtctggtggcccaatgtga

SEQ ID NO: 160728 - DNA, 19 bp, Homo sapiens
  siRNA target sequence for TRIM9 (NM_015163.3,1279-1297).
ggtgattaaggaaaatgat

SEQ ID NO: 160729 - DNA, 19 bp, Homo sapiens
  siRNA target sequence for TRIM9 (NM_015163.3,1794-1812).
cggcgcactcggacatcat

SEQ ID NO: 160730 - DNA, 19 bp, Homo sapiens
  siRNA target sequence for TRIM9 (NM_015163.3,1829-1847).
ctgacagtgacctgtagta

SEQ ID NO: 160731 - DNA, 19 bp, Homo sapiens
  siRNA target sequence for TRIM9 (NM_015163.3,1837-1855).
gacctgtagtagctatgat

SEQ ID NO: 160732 - DNA, 19 bp, Homo sapiens
  siRNA target sequence for TRIM9 (NM_015163.3,1914-1932).
cggtagatcgctatgacaa

SEQ ID NO: 160733 - DNA, 19 bp, Homo sapiens
  siRNA target sequence for TRIM9 (NM_015163.3,1959-1977).
ctcgcatggacgtgatgaa

SEQ ID NO: 160734 - DNA, 19 bp, Homo sapiens
  siRNA target sequence for TRIM9 (NM_015163.3,2073-2091).
ctgagggagggatcacaaa

SEQ ID NO: 160735 - DNA, 19 bp, Homo sapiens
  siRNA target sequence for TRIM9 (NM_015163.3,2106-2124).
gggtcctcctcgacttaaa

SEQ ID NO: 160736 - DNA, 19 bp, Homo sapiens
  siRNA target sequence for TRIM9 (NM_015163.3,2107-2125).
ggtcctcctcgacttaaat

SEQ ID NO: 160737 - DNA, 19 bp, Homo sapiens
  siRNA target sequence for TRIM9 (NM_015163.3,2108-2126).
gtcctcctcgacttaaata

SEQ ID NO: 160738 - DNA, 19 bp, Homo sapiens
  siRNA target sequence for TRIM9 (NM_015163.3,2159-2177).
caacaaggtcccatagcat

SEQ ID NO: 160739 - DNA, 19 bp, Homo sapiens
  siRNA target sequence for TRIM9 (NM_015163.3,2165-2183).
ggtcccatagcatttgata

SEQ ID NO: 160740 - DNA, 19 bp, Homo sapiens
  siRNA target sequence for TSBF1 (NM_173084.1,201-219).
caattttgaggaagagtta

SEQ ID NO: 160741 - DNA, 19 bp, Homo sapiens
  siRNA target sequence for TSBF1 (NM_173084.1,216-234).
gttaacttgtcccatatgt

SEQ ID NO: 160742 - DNA, 19 bp, Homo sapiens
  siRNA target sequence for TSBF1 (NM_173084.1,224-242).
gtcccatatgttatagtat

SEQ ID NO: 160743 - DNA, 19 bp, Homo sapiens
  siRNA target sequence for TSBF1 (NM_173084.1,262-280).
ctgccatgctctcatacat

SEQ ID NO: 160744 - DNA, 19 bp, Homo sapiens
  siRNA target sequence for TSBF1 (NM_173084.1,313-331).
gcatctggtaacttttata

SEQ ID NO: 160745 - DNA, 19 bp, Homo sapiens
  siRNA target sequence for TSBF1 (NM_173084.1,314-332).
catctggtaacttttatat

SEQ ID NO: 160746 - DNA, 19 bp, Homo sapiens
  siRNA target sequence for TSBF1 (NM_173084.1,352-370).
ccactcaagtgccctaatt

SEQ ID NO: 160747 - DNA, 19 bp, Homo sapiens
  siRNA target sequence for TSBF1 (NM_173084.1,362-380).
gccctaattgcagaagtat

SEQ ID NO: 160748 - DNA, 19 bp, Homo sapiens
  siRNA target sequence for TSBF1 (NM_173084.1,391-409).
gctccaactggcattgaat

SEQ ID NO: 160749 - DNA, 19 bp, Homo sapiens
  siRNA target sequence for TSBF1 (NM_173084.1,428-446).
cactaagggctattattga

SEQ ID NO: 160750 - DNA, 19 bp, Homo sapiens
  siRNA target sequence for TSBF1 (NM_173084.1,430-448).
ctaagggctattattgaaa

SEQ ID NO: 160751 - DNA, 19 bp, Homo sapiens
  siRNA target sequence for TSBF1 (NM_173084.1,493-511).
cattacaggcaaccattaa

SEQ ID NO: 160752 - DNA, 19 bp, Homo sapiens
  siRNA target sequence for TSBF1 (NM_173084.1,545-563).
gtggtcattgccttaccat

SEQ ID NO: 160753 - DNA, 19 bp, Homo sapiens
  siRNA target sequence for TSBF1 (NM_173084.1,555-573).
ccttaccataggtcaacat

SEQ ID NO: 160754 - DNA, 19 bp, Homo sapiens
  siRNA target sequence for TSBF1 (NM_173084.1,595-613).
cttcaaagtgcctatttga

SEQ ID NO: 160755 - DNA, 19 bp, Homo sapiens
  siRNA target sequence for TSBF1 (NM_173084.1,726-744).
gatccaaggcgataaggaa

SEQ ID NO: 160756 - DNA, 19 bp, Homo sapiens
  siRNA target sequence for TSBF1 (NM_173084.1,820-838).
gatgttggcaatctaatta

SEQ ID NO: 160757 - DNA, 19 bp, Homo sapiens
  siRNA target sequence for TSBF1 (NM_173084.1,832-850).
ctaattaatcaagaatata

SEQ ID NO: 160758 - DNA, 19 bp, Homo sapiens
  siRNA target sequence for TSBF1 (NM_173084.1,880-898).
cgagagcagcagcttgaat

SEQ ID NO: 160759 - DNA, 19 bp, Homo sapiens
  siRNA target sequence for TSBF1 (NM_173084.1,903-921).
ggcactgacaatatcttta

SEQ ID NO: 160760 - DNA, 19 bp, Homo sapiens
  siRNA target sequence for TSBF1 (NM_173084.1,905-923).
cactgacaatatctttaca

SEQ ID NO: 160761 - DNA, 19 bp, Homo sapiens
  siRNA target sequence for TSBF1 (NM_173084.1,930-948).
gtctccacttaaatttctt

SEQ ID NO: 160762 - DNA, 19 bp, Homo sapiens
  siRNA target sequence for TSBF1 (NM_173084.1,972-990).
gcatgtacagatcttgaaa

SEQ ID NO: 160763 - DNA, 19 bp, Homo sapiens
  siRNA target sequence for TSBF1 (NM_173084.1,976-994).
gtacagatcttgaaacaaa

SEQ ID NO: 160764 - DNA, 19 bp, Homo sapiens
  siRNA target sequence for TSBF1 (NM_173084.1,1006-1024).
gaggttcaacccgttgaaa

SEQ ID NO: 160765 - DNA, 19 bp, Homo sapiens
  siRNA target sequence for TSBF1 (NM_173084.1,1008-1026).
ggttcaacccgttgaaatt

SEQ ID NO: 160766 - DNA, 19 bp, Homo sapiens
  siRNA target sequence for TSBF1 (NM_173084.1,1030-1048).
cctcgagtaagcaaaatat

SEQ ID NO: 160767 - DNA, 19 bp, Homo sapiens
  siRNA target sequence for TSBF1 (NM_173084.1,1033-1051).
cgagtaagcaaaatattga

SEQ ID NO: 160768 - DNA, 19 bp, Homo sapiens
  siRNA target sequence for TSBF1 (NM_173084.1,1242-1260).
ccaacacatcataaccttt

SEQ ID NO: 160769 - DNA, 19 bp, Homo sapiens
  siRNA target sequence for TSBF1 (NM_173084.1,1243-1261).
caacacatcataacctttt

SEQ ID NO: 160770 - DNA, 19 bp, Homo sapiens
  siRNA target sequence for TSBF1 (NM_173084.1,1248-1266).
catcataacctttttaagt

SEQ ID NO: 160771 - DNA, 19 bp, Homo sapiens
  siRNA target sequence for TSBF1 (NM_173084.1,1272-1290).
cactttaatatggttttct

SEQ ID NO: 160772 - DNA, 19 bp, Homo sapiens
  siRNA target sequence for TSBF1 (NM_173084.1,1306-1324).
gtttaccaaagtttatcta

SEQ ID NO: 160773 - DNA, 19 bp, Homo sapiens
  siRNA target sequence for TSBF1 (NM_173084.1,1322-1340).
ctaacagtctgcataaggt

SEQ ID NO: 160774 - DNA, 19 bp, Homo sapiens
  siRNA target sequence for TSBF1 (NM_173084.1,1332-1350).
gcataaggtaaagaatata

SEQ ID NO: 160775 - DNA, 19 bp, Homo sapiens
  siRNA target sequence for WDFY1 (NM_020830.2,189-207).
ccgggtatggctgaaaaga

SEQ ID NO: 160776 - DNA, 19 bp, Homo sapiens
  siRNA target sequence for WDFY1 (NM_020830.2,217-235).
caatactggcccagcattt

SEQ ID NO: 160777 - DNA, 19 bp, Homo sapiens
  siRNA target sequence for WDFY1 (NM_020830.2,258-276).
ctctgctatggcttaccat

SEQ ID NO: 160778 - DNA, 19 bp, Homo sapiens
  siRNA target sequence for WDFY1 (NM_020830.2,324-342).
ggaatttcacgtttctgaa

SEQ ID NO: 160779 - DNA, 19 bp, Homo sapiens
  siRNA target sequence for WDFY1 (NM_020830.2,391-409).
cgggtgtctgcgattatct

SEQ ID NO: 160780 - DNA, 19 bp, Homo sapiens
  siRNA target sequence for WDFY1 (NM_020830.2,392-410).
gggtgtctgcgattatctt

SEQ ID NO: 160781 - DNA, 19 bp, Homo sapiens
  siRNA target sequence for WDFY1 (NM_020830.2,394-412).
gtgtctgcgattatcttca

SEQ ID NO: 160782 - DNA, 19 bp, Homo sapiens
  siRNA target sequence for WDFY1 (NM_020830.2,515-533).
gggcttcgtgtctgcaata

SEQ ID NO: 160783 - DNA, 19 bp, Homo sapiens
  siRNA target sequence for WDFY1 (NM_020830.2,516-534).
ggcttcgtgtctgcaatat

SEQ ID NO: 160784 - DNA, 19 bp, Homo sapiens
  siRNA target sequence for WDFY1 (NM_020830.2,518-536).
cttcgtgtctgcaatatga

SEQ ID NO: 160785 - DNA, 19 bp, Homo sapiens
  siRNA target sequence for WDFY1 (NM_020830.2,521-539).
cgtgtctgcaatatgactt

SEQ ID NO: 160786 - DNA, 19 bp, Homo sapiens
  siRNA target sequence for WDFY1 (NM_020830.2,543-561).
cactcagtatgctttcgtt

SEQ ID NO: 160787 - DNA, 19 bp, Homo sapiens
  siRNA target sequence for WDFY1 (NM_020830.2,670-688).
cctattcagcggttactct

SEQ ID NO: 160788 - DNA, 19 bp, Homo sapiens
  siRNA target sequence for WDFY1 (NM_020830.2,743-761).
gccggacgctgttacttca

SEQ ID NO: 160789 - DNA, 19 bp, Homo sapiens
  siRNA target sequence for WDFY1 (NM_020830.2,828-846).
ctcggacggcggaattgca

SEQ ID NO: 160790 - DNA, 19 bp, Homo sapiens
  siRNA target sequence for WDFY1 (NM_020830.2,847-865).
gtgtggaacatggatgtta

SEQ ID NO: 160791 - DNA, 19 bp, Homo sapiens
  siRNA target sequence for WDFY1 (NM_020830.2,921-939).
gccatttttctggaacata

SEQ ID NO: 160792 - DNA, 19 bp, Homo sapiens
  siRNA target sequence for WDFY1 (NM_020830.2,922-940).
ccatttttctggaacataa

SEQ ID NO: 160793 - DNA, 19 bp, Homo sapiens
  siRNA target sequence for WDFY1 (NM_020830.2,960-978).
gacgctggggctaagacaa

SEQ ID NO: 160794 - DNA, 19 bp, Homo sapiens
  siRNA target sequence for WDFY1 (NM_020830.2,1062-1080).
ccaagtccgggtttgtgat

SEQ ID NO: 160795 - DNA, 19 bp, Homo sapiens
  siRNA target sequence for WDFY1 (NM_020830.2,1085-1103).
gttacgactccatcaaaga

SEQ ID NO: 160796 - DNA, 19 bp, Homo sapiens
  siRNA target sequence for WDFY1 (NM_020830.2,1089-1107).
cgactccatcaaagatgaa

SEQ ID NO: 160797 - DNA, 19 bp, Homo sapiens
  siRNA target sequence for WDFY1 (NM_020830.2,1198-1216).
gggaccgaccgcattgtaa

SEQ ID NO: 160798 - DNA, 19 bp, Homo sapiens
  siRNA target sequence for WDFY1 (NM_020830.2,1199-1217).
ggaccgaccgcattgtaaa

SEQ ID NO: 160799 - DNA, 19 bp, Homo sapiens
  siRNA target sequence for WDFY1 (NM_020830.2,1202-1220).
ccgaccgcattgtaaagat

SEQ ID NO: 160800 - DNA, 19 bp, Homo sapiens
  siRNA target sequence for WDFY1 (NM_020830.2,1204-1222).
gaccgcattgtaaagatct

SEQ ID NO: 160801 - DNA, 19 bp, Homo sapiens
  siRNA target sequence for WDFY1 (NM_178350.1,165-183).
cacggccagccaggataat

SEQ ID NO: 160802 - DNA, 19 bp, Homo sapiens
  siRNA target sequence for WDFY2 (NM_052950.2,317-335).
ggacagttcgtgtttggtt

SEQ ID NO: 160803 - DNA, 19 bp, Homo sapiens
  siRNA target sequence for WDFY2 (NM_052950.2,318-336).
gacagttcgtgtttggtta

SEQ ID NO: 160804 - DNA, 19 bp, Homo sapiens
  siRNA target sequence for WDFY2 (NM_052950.2,320-338).
cagttcgtgtttggttaaa

SEQ ID NO: 160805 - DNA, 19 bp, Homo sapiens
  siRNA target sequence for WDFY2 (NM_052950.2,322-340).
gttcgtgtttggttaaaga

SEQ ID NO: 160806 - DNA, 19 bp, Homo sapiens
  siRNA target sequence for WDFY2 (NM_052950.2,362-380).
caagcgtataccatgcaat

SEQ ID NO: 160807 - DNA, 19 bp, Homo sapiens
  siRNA target sequence for WDFY2 (NM_052950.2,437-455).
gtctagacaatggtacaat

SEQ ID NO: 160808 - DNA, 19 bp, Homo sapiens
  siRNA target sequence for WDFY2 (NM_052950.2,439-457).
ctagacaatggtacaatct

SEQ ID NO: 160809 - DNA, 19 bp, Homo sapiens
  siRNA target sequence for WDFY2 (NM_052950.2,462-480).
gtttatattgtcagaagat

SEQ ID NO: 160810 - DNA, 19 bp, Homo sapiens
  siRNA target sequence for WDFY2 (NM_052950.2,575-593).
caggacaggacaagcaatt

SEQ ID NO: 160811 - DNA, 19 bp, Homo sapiens
  siRNA target sequence for WDFY2 (NM_052950.2,651-669).
ggcctcaggcctgcaattt

SEQ ID NO: 160812 - DNA, 19 bp, Homo sapiens
  siRNA target sequence for WDFY2 (NM_052950.2,654-672).
ctcaggcctgcaatttgat

SEQ ID NO: 160813 - DNA, 19 bp, Homo sapiens
  siRNA target sequence for WDFY2 (NM_052950.2,656-674).
caggcctgcaatttgatgt

SEQ ID NO: 160814 - DNA, 19 bp, Homo sapiens
  siRNA target sequence for WDFY2 (NM_052950.2,702-720).
ccactcaggccaagtaaca

SEQ ID NO: 160815 - DNA, 19 bp, Homo sapiens
  siRNA target sequence for WDFY2 (NM_052950.2,703-721).
cactcaggccaagtaacaa

SEQ ID NO: 160816 - DNA, 19 bp, Homo sapiens
  siRNA target sequence for WDFY2 (NM_052950.2,806-824).
cagtccagcgggtgttgtt

SEQ ID NO: 160817 - DNA, 19 bp, Homo sapiens
  siRNA target sequence for WDFY2 (NM_052950.2,838-856).
gatcactctgtcatcatgt

SEQ ID NO: 160818 - DNA, 19 bp, Homo sapiens
  siRNA target sequence for WDFY2 (NM_052950.2,861-879).
catcggtgggagaaaagga

SEQ ID NO: 160819 - DNA, 19 bp, Homo sapiens
  siRNA target sequence for WDFY2 (NM_052950.2,932-950).
cacagcacacgcgacaatt

SEQ ID NO: 160820 - DNA, 19 bp, Homo sapiens
  siRNA target sequence for WDFY2 (NM_052950.2,934-952).
cagcacacgcgacaattga

SEQ ID NO: 160821 - DNA, 19 bp, Homo sapiens
  siRNA target sequence for WDFY2 (NM_052950.2,937-955).
cacacgcgacaattgatct

SEQ ID NO: 160822 - DNA, 19 bp, Homo sapiens
  siRNA target sequence for WDFY2 (NM_052950.2,1182-1200).
gatgggcttcgagtttgaa

SEQ ID NO: 160823 - DNA, 19 bp, Homo sapiens
  siRNA target sequence for WDFY2 (NM_052950.2,1331-1349).
ctggaactgacaaggttat

SEQ ID NO: 160824 - DNA, 19 bp, Homo sapiens
  siRNA target sequence for WDFY3 (NM_014991.3,601-619).
gctccgccgaatacaatga

SEQ ID NO: 160825 - DNA, 19 bp, Homo sapiens
  siRNA target sequence for WDFY3 (NM_014991.3,607-625).
ccgaatacaatgacagaaa

SEQ ID NO: 160826 - DNA, 19 bp, Homo sapiens
  siRNA target sequence for WDFY3 (NM_014991.3,618-636).
gacagaaaaattttctgat

SEQ ID NO: 160827 - DNA, 19 bp, Homo sapiens
  siRNA target sequence for WDFY3 (NM_014991.3,653-671).
cacaagtctcacgactaat

SEQ ID NO: 160828 - DNA, 19 bp, Homo sapiens
  siRNA target sequence for WDFY3 (NM_014991.3,664-682).
cgactaatggtgacagaaa

SEQ ID NO: 160829 - DNA, 19 bp, Homo sapiens
  siRNA target sequence for WDFY3 (NM_014991.3,665-683).
gactaatggtgacagaaat

SEQ ID NO: 160830 - DNA, 19 bp, Homo sapiens
  siRNA target sequence for WDFY3 (NM_014991.3,685-703).
cgaaggagagcatcaaaca

SEQ ID NO: 160831 - DNA, 19 bp, Homo sapiens
  siRNA target sequence for WDFY3 (NM_014991.3,719-737).
caagtcgggccatagttca

SEQ ID NO: 160832 - DNA, 19 bp, Homo sapiens
  siRNA target sequence for WDFY3 (NM_014991.3,722-740).
gtcgggccatagttcagtt

SEQ ID NO: 160833 - DNA, 19 bp, Homo sapiens
  siRNA target sequence for WDFY3 (NM_014991.3,733-751).
gttcagttcctagagatta

SEQ ID NO: 160834 - DNA, 19 bp, Homo sapiens
  siRNA target sequence for WDFY3 (NM_014991.3,780-798).
gatgcttctaacgacaatt

SEQ ID NO: 160835 - DNA, 19 bp, Homo sapiens
  siRNA target sequence for WDFY3 (NM_014991.3,783-801).
gcttctaacgacaattaat

SEQ ID NO: 160836 - DNA, 19 bp, Homo sapiens
  siRNA target sequence for WDFY3 (NM_014991.3,784-802).
cttctaacgacaattaatt

SEQ ID NO: 160837 - DNA, 19 bp, Homo sapiens
  siRNA target sequence for WDFY3 (NM_014991.3,787-805).
ctaacgacaattaatttgt

SEQ ID NO: 160838 - DNA, 19 bp, Homo sapiens
  siRNA target sequence for WDFY3 (NM_014991.3,832-850).
gactgcatgacaacaatgt

SEQ ID NO: 160839 - DNA, 19 bp, Homo sapiens
  siRNA target sequence for WDFY3 (NM_014991.3,856-874).
ccttccaccctggttaaat

SEQ ID NO: 160840 - DNA, 19 bp, Homo sapiens
  siRNA target sequence for WDFY3 (NM_014991.3,861-879).
caccctggttaaatgttta

SEQ ID NO: 160841 - DNA, 19 bp, Homo sapiens
  siRNA target sequence for WDFY3 (NM_014991.3,956-974).
gaggactactccagaaagt

SEQ ID NO: 160842 - DNA, 19 bp, Homo sapiens
  siRNA target sequence for WDFY3 (NM_014991.3,959-977).
gactactccagaaagtttt

SEQ ID NO: 160843 - DNA, 19 bp, Homo sapiens
  siRNA target sequence for WDFY3 (NM_014991.3,1054-1072).
ctattcagtgcaataacct

SEQ ID NO: 160844 - DNA, 19 bp, Homo sapiens
  siRNA target sequence for WDFY3 (NM_014991.3,1117-1135).
gaagtcctcatgaccatat

SEQ ID NO: 160845 - DNA, 19 bp, Homo sapiens
  siRNA target sequence for WDFY3 (NM_014991.3,1136-1154).
ctcgtcatggtcttagtgt

SEQ ID NO: 160846 - DNA, 19 bp, Homo sapiens
  siRNA target sequence for WDFY3 (NM_014991.3,1145-1163).
gtcttagtgtcaatgtagt

SEQ ID NO: 160847 - DNA, 19 bp, Homo sapiens
  siRNA target sequence for WDFY3 (NM_014991.3,1153-1171).
gtcaatgtagtgaagtata

SEQ ID NO: 160848 - DNA, 19 bp, Homo sapiens
  siRNA target sequence for WDFY3 (NM_014991.3,1225-1243).
gacctgtctcccctagaaa

SEQ ID NO: 160849 - DNA, 19 bp, Homo sapiens
  siRNA target sequence for WDFY3 (NM_014991.3,1235-1253).
ccctagaaattgtcgaaat

SEQ ID NO: 160850 - DNA, 19 bp, Homo sapiens
  siRNA target sequence for WDFY3 (NM_014991.3,1237-1255).
ctagaaattgtcgaaatgt

SEQ ID NO: 160851 - DNA, 19 bp, Homo sapiens
  siRNA target sequence for WDFY3 (NM_014991.3,1254-1272).
gtttgctgggctttcttgt

SEQ ID NO: 160852 - DNA, 19 bp, Homo sapiens
  siRNA target sequence for WDFY3 (NM_014991.3,1289-1307).
gcgatgtttcccaaacact

SEQ ID NO: 160853 - DNA, 19 bp, Homo sapiens
  siRNA target sequence for WDFY3 (NM_014991.3,1290-1308).
cgatgtttcccaaacactt

SEQ ID NO: 160854 - DNA, 19 bp, Homo sapiens
  siRNA target sequence for WDFY3 (NM_014991.3,1349-1367).
gtgatctcttgcttagatt

SEQ ID NO: 160855 - DNA, 19 bp, Homo sapiens
  siRNA target sequence for WDFY3 (NM_014991.3,1400-1418).
ccttgaaagatctggttaa

SEQ ID NO: 160856 - DNA, 19 bp, Homo sapiens
  siRNA target sequence for WDFY3 (NM_014991.3,1456-1474).
ctaaaaccagctggtatta

SEQ ID NO: 160857 - DNA, 19 bp, Homo sapiens
  siRNA target sequence for WDFY3 (NM_014991.3,1617-1635).
ccttgatgctatcacaaat

SEQ ID NO: 160858 - DNA, 19 bp, Homo sapiens
  siRNA target sequence for WDFY3 (NM_014991.3,1621-1639).
gatgctatcacaaatattt

SEQ ID NO: 160859 - DNA, 19 bp, Homo sapiens
  siRNA target sequence for WDFY3 (NM_014991.3,1648-1666).
gacaatgccaattacttca

SEQ ID NO: 160860 - DNA, 19 bp, Homo sapiens
  siRNA target sequence for WDFY3 (NM_014991.3,1680-1698).
gcacacattgtcacagttt

SEQ ID NO: 160861 - DNA, 19 bp, Homo sapiens
  siRNA target sequence for WDFY3 (NM_014991.3,1712-1730).
ctaaactcccagaagtaca

SEQ ID NO: 160862 - DNA, 19 bp, Homo sapiens
  siRNA target sequence for WDFY3 (NM_014991.3,1759-1777).
gttgtttttagcttaaatt

SEQ ID NO: 160863 - DNA, 19 bp, Homo sapiens
  siRNA target sequence for WDFY3 (NM_014991.3,1783-1801).
ccttgtaaagaacttatta

SEQ ID NO: 160864 - DNA, 19 bp, Homo sapiens
  siRNA target sequence for WDFY3 (NM_014991.3,1802-1820).
gtgtcagtatcctcttaaa

SEQ ID NO: 160865 - DNA, 19 bp, Homo sapiens
  siRNA target sequence for WDFY3 (NM_014991.3,1804-1822).
gtcagtatcctcttaaaat

SEQ ID NO: 160866 - DNA, 19 bp, Homo sapiens
  siRNA target sequence for WDFY3 (NM_014991.3,1832-1850).
cttatcactgtagcattat

SEQ ID NO: 160867 - DNA, 19 bp, Homo sapiens
  siRNA target sequence for WDFY3 (NM_014991.3,1837-1855).
cactgtagcattattgcaa

SEQ ID NO: 160868 - DNA, 19 bp, Homo sapiens
  siRNA target sequence for WDFY3 (NM_014991.3,1877-1895).
caagacatgactacatatt

SEQ ID NO: 160869 - DNA, 19 bp, Homo sapiens
  siRNA target sequence for WDFY3 (NM_014991.3,1926-1944).
ggaggtcatggtaaacctt

SEQ ID NO: 160870 - DNA, 19 bp, Homo sapiens
  siRNA target sequence for WDFY3 (NM_014991.3,1927-1945).
gaggtcatggtaaaccttt

SEQ ID NO: 160871 - DNA, 19 bp, Homo sapiens
  siRNA target sequence for WDFY3 (NM_014991.3,1941-1959).
ccttttgcataaatatgct

SEQ ID NO: 160872 - DNA, 19 bp, Homo sapiens
  siRNA target sequence for WDFY3 (NM_014991.3,1979-1997).
ctcaggcactaaatgaaca

SEQ ID NO: 160873 - DNA, 19 bp, Homo sapiens
  siRNA target sequence for WDFY3 (NM_014991.3,1996-2014).
caaggggactcaagaaata

SEQ ID NO: 160874 - DNA, 19 bp, Homo sapiens
  siRNA target sequence for WDFY3 (NM_014991.3,2077-2095).
cttcaaggatcaaacacaa

SEQ ID NO: 160875 - DNA, 19 bp, Homo sapiens
  siRNA target sequence for WDFY3 (NM_014991.3,2129-2147).
gatgtgcacataatatagt

SEQ ID NO: 160876 - DNA, 19 bp, Homo sapiens
  siRNA target sequence for WDFY3 (NM_014991.3,2132-2150).
gtgcacataatatagtaaa

SEQ ID NO: 160877 - DNA, 19 bp, Homo sapiens
  siRNA target sequence for WDFY3 (NM_014991.3,2164-2182).
cggcagcatgccttgatga

SEQ ID NO: 160878 - DNA, 19 bp, Homo sapiens
  siRNA target sequence for WDFY3 (NM_014991.3,2255-2273).
ccccaccgacggaattgca

SEQ ID NO: 160879 - DNA, 19 bp, Homo sapiens
  siRNA target sequence for WDFY3 (NM_014991.3,2261-2279).
cgacggaattgcagttgaa

SEQ ID NO: 160880 - DNA, 19 bp, Homo sapiens
  siRNA target sequence for WDFY3 (NM_014991.3,2323-2341).
catcgttcaagaacagttt

SEQ ID NO: 160881 - DNA, 19 bp, Homo sapiens
  siRNA target sequence for WDFY3 (NM_014991.3,2326-2344).
cgttcaagaacagttttta

SEQ ID NO: 160882 - DNA, 19 bp, Homo sapiens
  siRNA target sequence for WDFY3 (NM_014991.3,2372-2390).
catccttgctcgttgctat

SEQ ID NO: 160883 - DNA, 19 bp, Homo sapiens
  siRNA target sequence for WDFY3 (NM_014991.3,2376-2394).
cttgctcgttgctatggaa

SEQ ID NO: 160884 - DNA, 19 bp, Homo sapiens
  siRNA target sequence for WDFY3 (NM_014991.3,2380-2398).
ctcgttgctatggaaagat

SEQ ID NO: 160885 - DNA, 19 bp, Homo sapiens
  siRNA target sequence for WDFY3 (NM_014991.3,2382-2400).
cgttgctatggaaagatct

SEQ ID NO: 160886 - DNA, 19 bp, Homo sapiens
  siRNA target sequence for WDFY3 (NM_014991.3,2386-2404).
gctatggaaagatctttga

SEQ ID NO: 160887 - DNA, 19 bp, Homo sapiens
  siRNA target sequence for WDFY3 (NM_014991.3,2403-2421).
gagctgtccacccaagaat

SEQ ID NO: 160888 - DNA, 19 bp, Homo sapiens
  siRNA target sequence for WDFY3 (NM_014991.3,2509-2527).
gccaactctcatttcttca

SEQ ID NO: 160889 - DNA, 19 bp, Homo sapiens
  siRNA target sequence for WDFY3 (NM_014991.3,2553-2571).
ggcagatgctgttcgattt

SEQ ID NO: 160890 - DNA, 19 bp, Homo sapiens
  siRNA target sequence for WDFY3 (NM_014991.3,2659-2677).
gatgtaatctcaatagaat

SEQ ID NO: 160891 - DNA, 19 bp, Homo sapiens
  siRNA target sequence for WDFY3 (NM_014991.3,2691-2709).
gttacggcactgcagtaaa

SEQ ID NO: 160892 - DNA, 19 bp, Homo sapiens
  siRNA target sequence for WDFY3 (NM_014991.3,2695-2713).
cggcactgcagtaaacttt

SEQ ID NO: 160893 - DNA, 19 bp, Homo sapiens
  siRNA target sequence for WDFY3 (NM_014991.3,2696-2714).
ggcactgcagtaaactttt

SEQ ID NO: 160894 - DNA, 19 bp, Homo sapiens
  siRNA target sequence for WDFY3 (NM_014991.3,2837-2855).
ggcatgcatatcattctgt

SEQ ID NO: 160895 - DNA, 19 bp, Homo sapiens
  siRNA target sequence for WDFY3 (NM_014991.3,2865-2883).
ccctgtttaccctcctaaa

SEQ ID NO: 160896 - DNA, 19 bp, Homo sapiens
  siRNA target sequence for WDFY3 (NM_014991.3,2891-2909).
ccgacctgaaactacatgt

SEQ ID NO: 160897 - DNA, 19 bp, Homo sapiens
  siRNA target sequence for WDFY3 (NM_014991.3,2930-2948).
gttctgatgcagtcatcat

SEQ ID NO: 160898 - DNA, 19 bp, Homo sapiens
  siRNA target sequence for WDFY3 (NM_014991.3,3009-3027).
gccagaacatgctttggat

SEQ ID NO: 160899 - DNA, 19 bp, Homo sapiens
  siRNA target sequence for WDFY3 (NM_014991.3,3034-3052).
cttgccgtggcaaatattt

SEQ ID NO: 160900 - DNA, 19 bp, Homo sapiens
  siRNA target sequence for WDFY3 (NM_014991.3,3038-3056).
ccgtggcaaatattttaca

SEQ ID NO: 160901 - DNA, 19 bp, Homo sapiens
  siRNA target sequence for WDFY3 (NM_014991.3,3093-3111).
gtgtgaagctggtcttcat

SEQ ID NO: 160902 - DNA, 19 bp, Homo sapiens
  siRNA target sequence for WDFY3 (NM_014991.3,3180-3198).
gcggatgtttgaacgatta

SEQ ID NO: 160903 - DNA, 19 bp, Homo sapiens
  siRNA target sequence for WDFY3 (NM_014991.3,3222-3240).
ggtgttgagggagttttta

SEQ ID NO: 160904 - DNA, 19 bp, Homo sapiens
  siRNA target sequence for WDFY3 (NM_014991.3,3263-3281).
gtggtgcctgggacaaaaa

SEQ ID NO: 160905 - DNA, 19 bp, Homo sapiens
  siRNA target sequence for WDFY3 (NM_014991.3,3266-3284).
gtgcctgggacaaaaaact

SEQ ID NO: 160906 - DNA, 19 bp, Homo sapiens
  siRNA target sequence for WDFY3 (NM_014991.3,3311-3329).
caagttcactgagttatga

SEQ ID NO: 160907 - DNA, 19 bp, Homo sapiens
  siRNA target sequence for WDFY3 (NM_014991.3,3364-3382).
gaaggtctgggtactgata

SEQ ID NO: 160908 - DNA, 19 bp, Homo sapiens
  siRNA target sequence for WDFY3 (NM_014991.3,3370-3388).
ctgggtactgataatgttt

SEQ ID NO: 160909 - DNA, 19 bp, Homo sapiens
  siRNA target sequence for WDFY3 (NM_014991.3,3533-3551).
ctccagcttttgttgaatt

SEQ ID NO: 160910 - DNA, 19 bp, Homo sapiens
  siRNA target sequence for WDFY3 (NM_014991.3,3591-3609).
cagtttggcccctcataat

SEQ ID NO: 160911 - DNA, 19 bp, Homo sapiens
  siRNA target sequence for WDFY3 (NM_014991.3,3602-3620).
ctcataatgctcctacaaa

SEQ ID NO: 160912 - DNA, 19 bp, Homo sapiens
  siRNA target sequence for WDFY3 (NM_014991.3,3604-3622).
cataatgctcctacaaata

SEQ ID NO: 160913 - DNA, 19 bp, Homo sapiens
  siRNA target sequence for WDFY3 (NM_014991.3,3626-3644).
ccgtcacaacaggtcttat

SEQ ID NO: 160914 - DNA, 19 bp, Homo sapiens
  siRNA target sequence for WDFY3 (NM_014991.3,3627-3645).
cgtcacaacaggtcttatt

SEQ ID NO: 160915 - DNA, 19 bp, Homo sapiens
  siRNA target sequence for WDFY3 (NM_014991.3,3630-3648).
cacaacaggtcttattgat

SEQ ID NO: 160916 - DNA, 19 bp, Homo sapiens
  siRNA target sequence for WDFY3 (NM_014991.3,3671-3689).
gttctggtgaaagattctt

SEQ ID NO: 160917 - DNA, 19 bp, Homo sapiens
  siRNA target sequence for WDFY3 (NM_014991.3,3695-3713).
ctccctccggcttaagtta

SEQ ID NO: 160918 - DNA, 19 bp, Homo sapiens
  siRNA target sequence for WDFY3 (NM_014991.3,3697-3715).
ccctccggcttaagttact

SEQ ID NO: 160919 - DNA, 19 bp, Homo sapiens
  siRNA target sequence for WDFY3 (NM_014991.3,3699-3717).
ctccggcttaagttactct

SEQ ID NO: 160920 - DNA, 19 bp, Homo sapiens
  siRNA target sequence for WDFY3 (NM_014991.3,3743-3761).
gttctcctccaaataacca

SEQ ID NO: 160921 - DNA, 19 bp, Homo sapiens
  siRNA target sequence for WDFY3 (NM_014991.3,3781-3799).
gttgtgcgccgagcaaatt

SEQ ID NO: 160922 - DNA, 19 bp, Homo sapiens
  siRNA target sequence for WDFY3 (NM_014991.3,3784-3802).
gtgcgccgagcaaattctt

SEQ ID NO: 160923 - DNA, 19 bp, Homo sapiens
  siRNA target sequence for WDFY3 (NM_014991.3,3786-3804).
gcgccgagcaaattcttct

SEQ ID NO: 160924 - DNA, 19 bp, Homo sapiens
  siRNA target sequence for WDFY3 (NM_014991.3,3800-3818).
cttctgagcaacattacgt

SEQ ID NO: 160925 - DNA, 19 bp, Homo sapiens
  siRNA target sequence for WDFY3 (NM_014991.3,3847-3865).
gaccgatctctgattgttt

SEQ ID NO: 160926 - DNA, 19 bp, Homo sapiens
  siRNA target sequence for WDFY3 (NM_014991.3,3913-3931).
gagtcctcattttatgaaa

SEQ ID NO: 160927 - DNA, 19 bp, Homo sapiens
  siRNA target sequence for WDFY3 (NM_014991.3,3955-3973).
cgatgtggagagcttatca

SEQ ID NO: 160928 - DNA, 19 bp, Homo sapiens
  siRNA target sequence for WDFY3 (NM_014991.3,3956-3974).
gatgtggagagcttatcat

SEQ ID NO: 160929 - DNA, 19 bp, Homo sapiens
  siRNA target sequence for WDFY3 (NM_014991.3,4015-4033).
ggcatgttgaaaaacagta

SEQ ID NO: 160930 - DNA, 19 bp, Homo sapiens
  siRNA target sequence for WDFY3 (NM_014991.3,4051-4069).
gatggacagcttgttaaca

SEQ ID NO: 160931 - DNA, 19 bp, Homo sapiens
  siRNA target sequence for WDFY3 (NM_014991.3,4137-4155).
cacggtctatgcctacatt

SEQ ID NO: 160932 - DNA, 19 bp, Homo sapiens
  siRNA target sequence for WDFY3 (NM_014991.3,4177-4195).
caaattgcctcattggttt

SEQ ID NO: 160933 - DNA, 19 bp, Homo sapiens
  siRNA target sequence for WDFY3 (NM_014991.3,4203-4221).
gggacccacacattttcta

SEQ ID NO: 160934 - DNA, 19 bp, Homo sapiens
  siRNA target sequence for WDFY3 (NM_014991.3,4305-4323).
gccatgtaaagatgcaaaa

SEQ ID NO: 160935 - DNA, 19 bp, Homo sapiens
  siRNA target sequence for WDFY3 (NM_014991.3,4306-4324).
ccatgtaaagatgcaaaat

SEQ ID NO: 160936 - DNA, 19 bp, Homo sapiens
  siRNA target sequence for WDFY3 (NM_014991.3,4340-4358).
catcccctgtgtcattagt

SEQ ID NO: 160937 - DNA, 19 bp, Homo sapiens
  siRNA target sequence for WDFY3 (NM_014991.3,4357-4375).
gtaccagaggagaaagtgt

SEQ ID NO: 160938 - DNA, 19 bp, Homo sapiens
  siRNA target sequence for WDFY3 (NM_014991.3,4393-4411).
ctctctgtgtcgtctctaa

SEQ ID NO: 160939 - DNA, 19 bp, Homo sapiens
  siRNA target sequence for WDFY3 (NM_014991.3,4397-4415).
ctgtgtcgtctctaacagt

SEQ ID NO: 160940 - DNA, 19 bp, Homo sapiens
  siRNA target sequence for WDFY3 (NM_014991.3,4417-4435).
gcaagaatccggaaagtgt

SEQ ID NO: 160941 - DNA, 19 bp, Homo sapiens
  siRNA target sequence for WDFY3 (NM_014991.3,4421-4439).
gaatccggaaagtgtataa

SEQ ID NO: 160942 - DNA, 19 bp, Homo sapiens
  siRNA target sequence for WDFY3 (NM_014991.3,4447-4465).
gatagcaaagccattgcta

SEQ ID NO: 160943 - DNA, 19 bp, Homo sapiens
  siRNA target sequence for WDFY3 (NM_014991.3,4476-4494).
catttcctcacatgagaat

SEQ ID NO: 160944 - DNA, 19 bp, Homo sapiens
  siRNA target sequence for WDFY3 (NM_014991.3,4499-4517).
ctcctgtgaagttgataca

SEQ ID NO: 160945 - DNA, 19 bp, Homo sapiens
  siRNA target sequence for WDFY3 (NM_014991.3,4501-4519).
cctgtgaagttgatacaca

SEQ ID NO: 160946 - DNA, 19 bp, Homo sapiens
  siRNA target sequence for WDFY3 (NM_014991.3,4504-4522).
gtgaagttgatacacaatt

SEQ ID NO: 160947 - DNA, 19 bp, Homo sapiens
  siRNA target sequence for WDFY3 (NM_014991.3,4506-4524).
gaagttgatacacaattca

SEQ ID NO: 160948 - DNA, 19 bp, Homo sapiens
  siRNA target sequence for WDFY3 (NM_014991.3,4518-4536).
caattcagcaggacatctt

SEQ ID NO: 160949 - DNA, 19 bp, Homo sapiens
  siRNA target sequence for WDFY3 (NM_014991.3,4525-4543).
gcaggacatcttaatggat

SEQ ID NO: 160950 - DNA, 19 bp, Homo sapiens
  siRNA target sequence for WDFY3 (NM_014991.3,4711-4729).
gtttgtgtggtcaagagta

SEQ ID NO: 160951 - DNA, 19 bp, Homo sapiens
  siRNA target sequence for WDFY3 (NM_014991.3,4732-4750).
ccactagccagcaaagaaa

SEQ ID NO: 160952 - DNA, 19 bp, Homo sapiens
  siRNA target sequence for WDFY3 (NM_014991.3,4777-4795).
ctggcaatgttgcttaaga

SEQ ID NO: 160953 - DNA, 19 bp, Homo sapiens
  siRNA target sequence for WDFY3 (NM_014991.3,4872-4890).
gacctccattattccaaat

SEQ ID NO: 160954 - DNA, 19 bp, Homo sapiens
  siRNA target sequence for WDFY3 (NM_014991.3,4875-4893).
ctccattattccaaattca

SEQ ID NO: 160955 - DNA, 19 bp, Homo sapiens
  siRNA target sequence for WDFY3 (NM_014991.3,4931-4949).
ggctccatgcaccatatga

SEQ ID NO: 160956 - DNA, 19 bp, Homo sapiens
  siRNA target sequence for WDFY3 (NM_014991.3,4932-4950).
gctccatgcaccatatgaa

SEQ ID NO: 160957 - DNA, 19 bp, Homo sapiens
  siRNA target sequence for WDFY3 (NM_014991.3,4935-4953).
ccatgcaccatatgaactt

SEQ ID NO: 160958 - DNA, 19 bp, Homo sapiens
  siRNA target sequence for WDFY3 (NM_014991.3,4961-4979).
ccttatttgaacactttat

SEQ ID NO: 160959 - DNA, 19 bp, Homo sapiens
  siRNA target sequence for WDFY3 (NM_014991.3,4997-5015).
ccagtgaagcctcaaagaa

SEQ ID NO: 160960 - DNA, 19 bp, Homo sapiens
  siRNA target sequence for WDFY3 (NM_014991.3,5013-5031).
gaatgccaaattaatgaga

SEQ ID NO: 160961 - DNA, 19 bp, Homo sapiens
  siRNA target sequence for WDFY3 (NM_014991.3,5061-5079).
gactcttcgagatatgtct

SEQ ID NO: 160962 - DNA, 19 bp, Homo sapiens
  siRNA target sequence for WDFY3 (NM_014991.3,5063-5081).
ctcttcgagatatgtcttt

SEQ ID NO: 160963 - DNA, 19 bp, Homo sapiens
  siRNA target sequence for WDFY3 (NM_014991.3,5065-5083).
cttcgagatatgtctttat

SEQ ID NO: 160964 - DNA, 19 bp, Homo sapiens
  siRNA target sequence for WDFY3 (NM_014991.3,5089-5107).
cctactattgctgctatta

SEQ ID NO: 160965 - DNA, 19 bp, Homo sapiens
  siRNA target sequence for WDFY3 (NM_014991.3,5147-5165).
gcaatgatctgctcagatt

SEQ ID NO: 160966 - DNA, 19 bp, Homo sapiens
  siRNA target sequence for WDFY3 (NM_014991.3,5160-5178).
cagatttgggcagtttatt

SEQ ID NO: 160967 - DNA, 19 bp, Homo sapiens
  siRNA target sequence for WDFY3 (NM_014991.3,5211-5229).
gaaatttgtagtaatggaa

SEQ ID NO: 160968 - DNA, 19 bp, Homo sapiens
  siRNA target sequence for WDFY3 (NM_014991.3,5268-5286).
ggagtttggaggtcttgta

SEQ ID NO: 160969 - DNA, 19 bp, Homo sapiens
  siRNA target sequence for WDFY3 (NM_014991.3,5269-5287).
gagtttggaggtcttgtat

SEQ ID NO: 160970 - DNA, 19 bp, Homo sapiens
  siRNA target sequence for WDFY3 (NM_014991.3,5271-5289).
gtttggaggtcttgtatca

SEQ ID NO: 160971 - DNA, 19 bp, Homo sapiens
  siRNA target sequence for WDFY3 (NM_014991.3,5279-5297).
gtcttgtatcagctaatct

SEQ ID NO: 160972 - DNA, 19 bp, Homo sapiens
  siRNA target sequence for WDFY3 (NM_014991.3,5322-5340).
ggatatcttgctaaaacta

SEQ ID NO: 160973 - DNA, 19 bp, Homo sapiens
  siRNA target sequence for WDFY3 (NM_014991.3,5407-5425).
ggttttgactggatcatga

SEQ ID NO: 160974 - DNA, 19 bp, Homo sapiens
  siRNA target sequence for WDFY3 (NM_014991.3,5408-5426).
gttttgactggatcatgat

SEQ ID NO: 160975 - DNA, 19 bp, Homo sapiens
  siRNA target sequence for WDFY3 (NM_014991.3,5417-5435).
ggatcatgatgtttatgga

SEQ ID NO: 160976 - DNA, 19 bp, Homo sapiens
  siRNA target sequence for WDFY3 (NM_014991.3,5479-5497).
cttgttgtcctactaagta

SEQ ID NO: 160977 - DNA, 19 bp, Homo sapiens
  siRNA target sequence for WDFY3 (NM_014991.3,5502-5520).
gtctattctcatcaagttt

SEQ ID NO: 160978 - DNA, 19 bp, Homo sapiens
  siRNA target sequence for WDFY3 (NM_014991.3,5564-5582).
ctgtcttaactaataagat

SEQ ID NO: 160979 - DNA, 19 bp, Homo sapiens
  siRNA target sequence for WDFY3 (NM_014991.3,5580-5598).
gattggaactgtattagga

SEQ ID NO: 160980 - DNA, 19 bp, Homo sapiens
  siRNA target sequence for WDFY3 (NM_014991.3,5585-5603).
gaactgtattaggattcaa

SEQ ID NO: 160981 - DNA, 19 bp, Homo sapiens
  siRNA target sequence for WDFY3 (NM_014991.3,5630-5648).
cgacggtcagggagattaa

SEQ ID NO: 160982 - DNA, 19 bp, Homo sapiens
  siRNA target sequence for WDFY3 (NM_014991.3,5649-5667).
ccgagatgcttgtcatttt

SEQ ID NO: 160983 - DNA, 19 bp, Homo sapiens
  siRNA target sequence for WDFY3 (NM_014991.3,5820-5838).
gcagggttgccagtttgat

SEQ ID NO: 160984 - DNA, 19 bp, Homo sapiens
  siRNA target sequence for WDFY3 (NM_014991.3,5821-5839).
cagggttgccagtttgatt

SEQ ID NO: 160985 - DNA, 19 bp, Homo sapiens
  siRNA target sequence for WDFY3 (NM_014991.3,5890-5908).
gtggtctcttctatccata

SEQ ID NO: 160986 - DNA, 19 bp, Homo sapiens
  siRNA target sequence for WDFY3 (NM_014991.3,5895-5913).
ctcttctatccataacgta

SEQ ID NO: 160987 - DNA, 19 bp, Homo sapiens
  siRNA target sequence for WDFY3 (NM_014991.3,5990-6008).
gatcttggctccgagaata

SEQ ID NO: 160988 - DNA, 19 bp, Homo sapiens
  siRNA target sequence for WDFY3 (NM_014991.3,6087-6105).
cttcctgtgtgcattagca

SEQ ID NO: 160989 - DNA, 19 bp, Homo sapiens
  siRNA target sequence for WDFY3 (NM_014991.3,6108-6126).
caccgtcttccccttcaat

SEQ ID NO: 160990 - DNA, 19 bp, Homo sapiens
  siRNA target sequence for WDFY3 (NM_014991.3,6123-6141).
caatattcgcccttactca

SEQ ID NO: 160991 - DNA, 19 bp, Homo sapiens
  siRNA target sequence for WDFY3 (NM_014991.3,6150-6168).
gactgaccttgatgatgaa

SEQ ID NO: 160992 - DNA, 19 bp, Homo sapiens
  siRNA target sequence for WDFY3 (NM_014991.3,6173-6191).
gatctccagcagaagagtt

SEQ ID NO: 160993 - DNA, 19 bp, Homo sapiens
  siRNA target sequence for WDFY3 (NM_014991.3,6250-6268).
ggcaccaagacatatctga

SEQ ID NO: 160994 - DNA, 19 bp, Homo sapiens
  siRNA target sequence for WDFY3 (NM_014991.3,6277-6295).
ccggctaaaaagttcgttt

SEQ ID NO: 160995 - DNA, 19 bp, Homo sapiens
  siRNA target sequence for WDFY3 (NM_014991.3,6278-6296).
cggctaaaaagttcgtttt

SEQ ID NO: 160996 - DNA, 19 bp, Homo sapiens
  siRNA target sequence for WDFY3 (NM_014991.3,6298-6316).
gacttcatgcgggtcttaa

SEQ ID NO: 160997 - DNA, 19 bp, Homo sapiens
  siRNA target sequence for WDFY3 (NM_014991.3,6308-6326).
gggtcttaatcatagacaa

SEQ ID NO: 160998 - DNA, 19 bp, Homo sapiens
  siRNA target sequence for WDFY3 (NM_014991.3,6347-6365).
gcaagcaaactccactaat

SEQ ID NO: 160999 - DNA, 19 bp, Homo sapiens
  siRNA target sequence for WDFY3 (NM_014991.3,6358-6376).
ccactaattgatcttttgt

SEQ ID NO: 161000 - DNA, 19 bp, Homo sapiens
  siRNA target sequence for WDFY3 (NM_014991.3,6424-6442).
caaacttacattttggata

SEQ ID NO: 161001 - DNA, 19 bp, Homo sapiens
  siRNA target sequence for WDFY3 (NM_014991.3,6443-6461).
gcgtgatggaccatttgct

SEQ ID NO: 161002 - DNA, 19 bp, Homo sapiens
  siRNA target sequence for WDFY3 (NM_014991.3,6444-6462).
cgtgatggaccatttgctt

SEQ ID NO: 161003 - DNA, 19 bp, Homo sapiens
  siRNA target sequence for WDFY3 (NM_014991.3,6515-6533).
gaagctaccaggtattggt

SEQ ID NO: 161004 - DNA, 19 bp, Homo sapiens
  siRNA target sequence for WDFY3 (NM_014991.3,6522-6540).
ccaggtattggtgaacaat

SEQ ID NO: 161005 - DNA, 19 bp, Homo sapiens
  siRNA target sequence for WDFY3 (NM_014991.3,6578-6596).
ggcaaggcatgttcaacaa

SEQ ID NO: 161006 - DNA, 19 bp, Homo sapiens
  siRNA target sequence for WDFY3 (NM_014991.3,6579-6597).
gcaaggcatgttcaacaaa

SEQ ID NO: 161007 - DNA, 19 bp, Homo sapiens
  siRNA target sequence for WDFY3 (NM_014991.3,6588-6606).
gttcaacaaagaatctaaa

SEQ ID NO: 161008 - DNA, 19 bp, Homo sapiens
  siRNA target sequence for WDFY3 (NM_014991.3,6631-6649).
ctaattgcacagtcaaaga

SEQ ID NO: 161009 - DNA, 19 bp, Homo sapiens
  siRNA target sequence for WDFY3 (NM_014991.3,6679-6697).
gtgtatcattgcctcaata

SEQ ID NO: 161010 - DNA, 19 bp, Homo sapiens
  siRNA target sequence for WDFY3 (NM_014991.3,6714-6732).
gttctcacgggcacacaaa

SEQ ID NO: 161011 - DNA, 19 bp, Homo sapiens
  siRNA target sequence for WDFY3 (NM_014991.3,6766-6784).
ctcagggtcctcactgtaa

SEQ ID NO: 161012 - DNA, 19 bp, Homo sapiens
  siRNA target sequence for WDFY3 (NM_014991.3,6779-6797).
ctgtaaacagaaacttgat

SEQ ID NO: 161013 - DNA, 19 bp, Homo sapiens
  siRNA target sequence for WDFY3 (NM_014991.3,6814-6832).
catgaccaagaattcatta

SEQ ID NO: 161014 - DNA, 19 bp, Homo sapiens
  siRNA target sequence for WDFY3 (NM_014991.3,6817-6835).
gaccaagaattcattagct

SEQ ID NO: 161015 - DNA, 19 bp, Homo sapiens
  siRNA target sequence for WDFY3 (NM_014991.3,6838-6856).
ctggcccactgcttgataa

SEQ ID NO: 161016 - DNA, 19 bp, Homo sapiens
  siRNA target sequence for WDFY3 (NM_014991.3,6842-6860).
cccactgcttgataaatct

SEQ ID NO: 161017 - DNA, 19 bp, Homo sapiens
  siRNA target sequence for WDFY3 (NM_014991.3,6846-6864).
ctgcttgataaatctacat

SEQ ID NO: 161018 - DNA, 19 bp, Homo sapiens
  siRNA target sequence for WDFY3 (NM_014991.3,6848-6866).
gcttgataaatctacatgt

SEQ ID NO: 161019 - DNA, 19 bp, Homo sapiens
  siRNA target sequence for WDFY3 (NM_014991.3,6849-6867).
cttgataaatctacatgtt

SEQ ID NO: 161020 - DNA, 19 bp, Homo sapiens
  siRNA target sequence for WDFY3 (NM_014991.3,6869-6887).
gaagcaacgtggatggatt

SEQ ID NO: 161021 - DNA, 19 bp, Homo sapiens
  siRNA target sequence for WDFY3 (NM_014991.3,6914-6932).
ccacatggcacattatgat

SEQ ID NO: 161022 - DNA, 19 bp, Homo sapiens
  siRNA target sequence for WDFY3 (NM_014991.3,6930-6948).
gatcccctcggacattgaa

SEQ ID NO: 161023 - DNA, 19 bp, Homo sapiens
  siRNA target sequence for WDFY3 (NM_014991.3,6982-7000).
gggcgtcagcttctcataa

SEQ ID NO: 161024 - DNA, 19 bp, Homo sapiens
  siRNA target sequence for WDFY3 (NM_014991.3,6983-7001).
ggcgtcagcttctcataaa

SEQ ID NO: 161025 - DNA, 19 bp, Homo sapiens
  siRNA target sequence for WDFY3 (NM_014991.3,6984-7002).
gcgtcagcttctcataaaa

SEQ ID NO: 161026 - DNA, 19 bp, Homo sapiens
  siRNA target sequence for WDFY3 (NM_014991.3,7022-7040).
ctgaactgatacatagtaa

SEQ ID NO: 161027 - DNA, 19 bp, Homo sapiens
  siRNA target sequence for WDFY3 (NM_014991.3,7037-7055).
gtaagaaacaagtcttaga

SEQ ID NO: 161028 - DNA, 19 bp, Homo sapiens
  siRNA target sequence for WDFY3 (NM_014991.3,7093-7111).
ggccacgtggacatagcta

SEQ ID NO: 161029 - DNA, 19 bp, Homo sapiens
  siRNA target sequence for WDFY3 (NM_014991.3,7112-7130).
cagcaaggccactcattga

SEQ ID NO: 161030 - DNA, 19 bp, Homo sapiens
  siRNA target sequence for WDFY3 (NM_014991.3,7208-7226).
ccaccacacagtccaaatt

SEQ ID NO: 161031 - DNA, 19 bp, Homo sapiens
  siRNA target sequence for WDFY3 (NM_014991.3,7245-7263).
ctttggtctttccaagtta

SEQ ID NO: 161032 - DNA, 19 bp, Homo sapiens
  siRNA target sequence for WDFY3 (NM_014991.3,7355-7373).
ctgttgttcgtgacttagt

SEQ ID NO: 161033 - DNA, 19 bp, Homo sapiens
  siRNA target sequence for WDFY3 (NM_014991.3,7364-7382).
gtgacttagtagatacaca

SEQ ID NO: 161034 - DNA, 19 bp, Homo sapiens
  siRNA target sequence for WDFY3 (NM_014991.3,7366-7384).
gacttagtagatacacaat

SEQ ID NO: 161035 - DNA, 19 bp, Homo sapiens
  siRNA target sequence for WDFY3 (NM_014991.3,7560-7578).
ggtgcgaaatgatatgttt

SEQ ID NO: 161036 - DNA, 19 bp, Homo sapiens
  siRNA target sequence for WDFY3 (NM_014991.3,7563-7581).
gcgaaatgatatgttttat

SEQ ID NO: 161037 - DNA, 19 bp, Homo sapiens
  siRNA target sequence for WDFY3 (NM_014991.3,7564-7582).
cgaaatgatatgttttata

SEQ ID NO: 161038 - DNA, 19 bp, Homo sapiens
  siRNA target sequence for WDFY3 (NM_014991.3,7592-7610).
cttacgtgccagaaactga

SEQ ID NO: 161039 - DNA, 19 bp, Homo sapiens
  siRNA target sequence for WDFY3 (NM_014991.3,7628-7646).
cgtctgagatcccaagtaa

SEQ ID NO: 161040 - DNA, 19 bp, Homo sapiens
  siRNA target sequence for WDFY3 (NM_014991.3,7629-7647).
gtctgagatcccaagtaaa

SEQ ID NO: 161041 - DNA, 19 bp, Homo sapiens
  siRNA target sequence for WDFY3 (NM_014991.3,7631-7649).
ctgagatcccaagtaaaca

SEQ ID NO: 161042 - DNA, 19 bp, Homo sapiens
  siRNA target sequence for WDFY3 (NM_014991.3,7651-7669).
cctgagacacccgatgata

SEQ ID NO: 161043 - DNA, 19 bp, Homo sapiens
  siRNA target sequence for WDFY3 (NM_014991.3,7652-7670).
ctgagacacccgatgatat

SEQ ID NO: 161044 - DNA, 19 bp, Homo sapiens
  siRNA target sequence for WDFY3 (NM_014991.3,7656-7674).
gacacccgatgatattcct

SEQ ID NO: 161045 - DNA, 19 bp, Homo sapiens
  siRNA target sequence for WDFY3 (NM_014991.3,7661-7679).
ccgatgatattcctcaaaa

SEQ ID NO: 161046 - DNA, 19 bp, Homo sapiens
  siRNA target sequence for WDFY3 (NM_014991.3,7680-7698).
gaaacctgctcgatataga

SEQ ID NO: 161047 - DNA, 19 bp, Homo sapiens
  siRNA target sequence for WDFY3 (NM_014991.3,7697-7715).
gaagagccgtaagttatga

SEQ ID NO: 161048 - DNA, 19 bp, Homo sapiens
  siRNA target sequence for WDFY3 (NM_014991.3,7703-7721).
ccgtaagttatgacagtaa

SEQ ID NO: 161049 - DNA, 19 bp, Homo sapiens
  siRNA target sequence for WDFY3 (NM_014991.3,7822-7840).
ggggaagacactattgcta

SEQ ID NO: 161050 - DNA, 19 bp, Homo sapiens
  siRNA target sequence for WDFY3 (NM_014991.3,7823-7841).
gggaagacactattgctaa

SEQ ID NO: 161051 - DNA, 19 bp, Homo sapiens
  siRNA target sequence for WDFY3 (NM_014991.3,7824-7842).
ggaagacactattgctaaa

SEQ ID NO: 161052 - DNA, 19 bp, Homo sapiens
  siRNA target sequence for WDFY3 (NM_014991.3,7982-8000).
ccttactgcgcctgttaga

SEQ ID NO: 161053 - DNA, 19 bp, Homo sapiens
  siRNA target sequence for WDFY3 (NM_014991.3,8006-8024).
gagaaaagatccaacacat

SEQ ID NO: 161054 - DNA, 19 bp, Homo sapiens
  siRNA target sequence for WDFY3 (NM_014991.3,8038-8056).
cgagtccagggcctagata

SEQ ID NO: 161055 - DNA, 19 bp, Homo sapiens
  siRNA target sequence for WDFY3 (NM_014991.3,8123-8141).
caaccagggaaataagaga

SEQ ID NO: 161056 - DNA, 19 bp, Homo sapiens
  siRNA target sequence for WDFY3 (NM_014991.3,8166-8184).
gcatgagcctattattcct

SEQ ID NO: 161057 - DNA, 19 bp, Homo sapiens
  siRNA target sequence for WDFY3 (NM_014991.3,8193-8211).
caggcaaggccctagtcaa

SEQ ID NO: 161058 - DNA, 19 bp, Homo sapiens
  siRNA target sequence for WDFY3 (NM_014991.3,8222-8240).
catgcagcatttttgcata

SEQ ID NO: 161059 - DNA, 19 bp, Homo sapiens
  siRNA target sequence for WDFY3 (NM_014991.3,8306-8324).
ctggagatggacggaatta

SEQ ID NO: 161060 - DNA, 19 bp, Homo sapiens
  siRNA target sequence for WDFY3 (NM_014991.3,8309-8327).
gagatggacggaattacct

SEQ ID NO: 161061 - DNA, 19 bp, Homo sapiens
  siRNA target sequence for WDFY3 (NM_014991.3,8376-8394).
ggctgtagtgccatctcta

SEQ ID NO: 161062 - DNA, 19 bp, Homo sapiens
  siRNA target sequence for WDFY3 (NM_014991.3,8377-8395).
gctgtagtgccatctctaa

SEQ ID NO: 161063 - DNA, 19 bp, Homo sapiens
  siRNA target sequence for WDFY3 (NM_014991.3,8392-8410).
ctaacggacagttcagaat

SEQ ID NO: 161064 - DNA, 19 bp, Homo sapiens
  siRNA target sequence for WDFY3 (NM_014991.3,8396-8414).
cggacagttcagaatctgt

SEQ ID NO: 161065 - DNA, 19 bp, Homo sapiens
  siRNA target sequence for WDFY3 (NM_014991.3,8397-8415).
ggacagttcagaatctgta

SEQ ID NO: 161066 - DNA, 19 bp, Homo sapiens
  siRNA target sequence for WDFY3 (NM_014991.3,8446-8464).
cagggatctgggttactta

SEQ ID NO: 161067 - DNA, 19 bp, Homo sapiens
  siRNA target sequence for WDFY3 (NM_014991.3,8512-8530).
gaaatcagcaacttccaat

SEQ ID NO: 161068 - DNA, 19 bp, Homo sapiens
  siRNA target sequence for WDFY3 (NM_014991.3,8553-8571).
ggctggcagatcatataat

SEQ ID NO: 161069 - DNA, 19 bp, Homo sapiens
  siRNA target sequence for WDFY3 (NM_014991.3,8558-8576).
gcagatcatataatgatct

SEQ ID NO: 161070 - DNA, 19 bp, Homo sapiens
  siRNA target sequence for WDFY3 (NM_014991.3,8561-8579).
gatcatataatgatctcat

SEQ ID NO: 161071 - DNA, 19 bp, Homo sapiens
  siRNA target sequence for WDFY3 (NM_014991.3,8598-8616).
ctggatccttgcagattat

SEQ ID NO: 161072 - DNA, 19 bp, Homo sapiens
  siRNA target sequence for WDFY3 (NM_014991.3,8623-8641).
gaggaggtggatcttacta

SEQ ID NO: 161073 - DNA, 19 bp, Homo sapiens
  siRNA target sequence for WDFY3 (NM_014991.3,8625-8643).
ggaggtggatcttactaat

SEQ ID NO: 161074 - DNA, 19 bp, Homo sapiens
  siRNA target sequence for WDFY3 (NM_014991.3,8672-8690).
caatgggagcacaaacaga

SEQ ID NO: 161075 - DNA, 19 bp, Homo sapiens
  siRNA target sequence for WDFY3 (NM_014991.3,8681-8699).
cacaaacagatgaacgatt

SEQ ID NO: 161076 - DNA, 19 bp, Homo sapiens
  siRNA target sequence for WDFY3 (NM_014991.3,8692-8710).
gaacgattagctcagtata

SEQ ID NO: 161077 - DNA, 19 bp, Homo sapiens
  siRNA target sequence for WDFY3 (NM_014991.3,8695-8713).
cgattagctcagtataaga

SEQ ID NO: 161078 - DNA, 19 bp, Homo sapiens
  siRNA target sequence for WDFY3 (NM_014991.3,8696-8714).
gattagctcagtataagaa

SEQ ID NO: 161079 - DNA, 19 bp, Homo sapiens
  siRNA target sequence for WDFY3 (NM_014991.3,8706-8724).
gtataagaagcggtataaa

SEQ ID NO: 161080 - DNA, 19 bp, Homo sapiens
  siRNA target sequence for WDFY3 (NM_014991.3,8798-8816).
cctcataccttgtaaggat

SEQ ID NO: 161081 - DNA, 19 bp, Homo sapiens
  siRNA target sequence for WDFY3 (NM_014991.3,8817-8835).
ggagcctttcacacagata

SEQ ID NO: 161082 - DNA, 19 bp, Homo sapiens
  siRNA target sequence for WDFY3 (NM_014991.3,8919-8937).
gcacaatatggcagatgta

SEQ ID NO: 161083 - DNA, 19 bp, Homo sapiens
  siRNA target sequence for WDFY3 (NM_014991.3,8922-8940).
caatatggcagatgtaaaa

SEQ ID NO: 161084 - DNA, 19 bp, Homo sapiens
  siRNA target sequence for WDFY3 (NM_014991.3,8968-8986).
ccagaattcctgttcaatt

SEQ ID NO: 161085 - DNA, 19 bp, Homo sapiens
  siRNA target sequence for WDFY3 (NM_014991.3,8979-8997).
gttcaattccaacaacttt

SEQ ID NO: 161086 - DNA, 19 bp, Homo sapiens
  siRNA target sequence for WDFY3 (NM_014991.3,8994-9012).
ctttgatctaggctgtaaa

SEQ ID NO: 161087 - DNA, 19 bp, Homo sapiens
  siRNA target sequence for WDFY3 (NM_014991.3,8998-9016).
gatctaggctgtaaacaaa

SEQ ID NO: 161088 - DNA, 19 bp, Homo sapiens
  siRNA target sequence for WDFY3 (NM_014991.3,9023-9041).
ccaagcttggagatgttat

SEQ ID NO: 161089 - DNA, 19 bp, Homo sapiens
  siRNA target sequence for WDFY3 (NM_014991.3,9064-9082).
gacccacgagaattcatca

SEQ ID NO: 161090 - DNA, 19 bp, Homo sapiens
  siRNA target sequence for WDFY3 (NM_014991.3,9098-9116).
ctttggagtgtgattacgt

SEQ ID NO: 161091 - DNA, 19 bp, Homo sapiens
  siRNA target sequence for WDFY3 (NM_014991.3,9127-9145).
ctacatgagtggattgact

SEQ ID NO: 161092 - DNA, 19 bp, Homo sapiens
  siRNA target sequence for WDFY3 (NM_014991.3,9130-9148).
catgagtggattgacttaa

SEQ ID NO: 161093 - DNA, 19 bp, Homo sapiens
  siRNA target sequence for WDFY3 (NM_014991.3,9142-9160).
gacttaatcttcggttata

SEQ ID NO: 161094 - DNA, 19 bp, Homo sapiens
  siRNA target sequence for WDFY3 (NM_014991.3,9144-9162).
cttaatcttcggttataaa

SEQ ID NO: 161095 - DNA, 19 bp, Homo sapiens
  siRNA target sequence for WDFY3 (NM_014991.3,9196-9214).
gtcttccatcatctttttt

SEQ ID NO: 161096 - DNA, 19 bp, Homo sapiens
  siRNA target sequence for WDFY3 (NM_014991.3,9223-9241).
caagtggatatctacaaca

SEQ ID NO: 161097 - DNA, 19 bp, Homo sapiens
  siRNA target sequence for WDFY3 (NM_014991.3,9265-9283).
gccacaattgggttcatta

SEQ ID NO: 161098 - DNA, 19 bp, Homo sapiens
  siRNA target sequence for WDFY3 (NM_014991.3,9267-9285).
cacaattgggttcattaat

SEQ ID NO: 161099 - DNA, 19 bp, Homo sapiens
  siRNA target sequence for WDFY3 (NM_014991.3,9269-9287).
caattgggttcattaataa

SEQ ID NO: 161100 - DNA, 19 bp, Homo sapiens
  siRNA target sequence for WDFY3 (NM_014991.3,9293-9311).
gtcagatccctaaacagtt

SEQ ID NO: 161101 - DNA, 19 bp, Homo sapiens
  siRNA target sequence for WDFY3 (NM_014991.3,9415-9433).
catcatctagacaacttga

SEQ ID NO: 161102 - DNA, 19 bp, Homo sapiens
  siRNA target sequence for WDFY3 (NM_014991.3,9469-9487).
cctgtaggacaaatcgtat

SEQ ID NO: 161103 - DNA, 19 bp, Homo sapiens
  siRNA target sequence for WDFY3 (NM_014991.3,9509-9527).
cggtggaacagaataaggt

SEQ ID NO: 161104 - DNA, 19 bp, Homo sapiens
  siRNA target sequence for WDFY3 (NM_014991.3,9510-9528).
ggtggaacagaataaggtt

SEQ ID NO: 161105 - DNA, 19 bp, Homo sapiens
  siRNA target sequence for WDFY3 (NM_014991.3,9535-9553).
ccaccaacctggaataaaa

SEQ ID NO: 161106 - DNA, 19 bp, Homo sapiens
  siRNA target sequence for WDFY3 (NM_014991.3,9612-9630).
ggccatgactgtttatgaa

SEQ ID NO: 161107 - DNA, 19 bp, Homo sapiens
  siRNA target sequence for WDFY3 (NM_014991.3,9613-9631).
gccatgactgtttatgaat

SEQ ID NO: 161108 - DNA, 19 bp, Homo sapiens
  siRNA target sequence for WDFY3 (NM_014991.3,9812-9830).
catcattagcctatcacat

SEQ ID NO: 161109 - DNA, 19 bp, Homo sapiens
  siRNA target sequence for WDFY3 (NM_014991.3,9847-9865).
cgtgatcgaacctgtatca

SEQ ID NO: 161110 - DNA, 19 bp, Homo sapiens
  siRNA target sequence for WDFY3 (NM_014991.3,9848-9866).
gtgatcgaacctgtatcat

SEQ ID NO: 161111 - DNA, 19 bp, Homo sapiens
  siRNA target sequence for WDFY3 (NM_014991.3,9850-9868).
gatcgaacctgtatcattt

SEQ ID NO: 161112 - DNA, 19 bp, Homo sapiens
  siRNA target sequence for WDFY3 (NM_014991.3,9876-9894).
gaacaaactgtcatttcta

SEQ ID NO: 161113 - DNA, 19 bp, Homo sapiens
  siRNA target sequence for WDFY3 (NM_014991.3,9909-9927).
gcatcgagctccagtttct

SEQ ID NO: 161114 - DNA, 19 bp, Homo sapiens
  siRNA target sequence for WDFY3 (NM_014991.3,9928-9946).
gctctttgtatcaatgaat

SEQ ID NO: 161115 - DNA, 19 bp, Homo sapiens
  siRNA target sequence for WDFY3 (NM_014991.3,9929-9947).
ctctttgtatcaatgaatt

SEQ ID NO: 161116 - DNA, 19 bp, Homo sapiens
  siRNA target sequence for WDFY3 (NM_014991.3,9965-9983).
cctgcgctggcacatatat

SEQ ID NO: 161117 - DNA, 19 bp, Homo sapiens
  siRNA target sequence for WDFY3 (NM_014991.3,9968-9986).
gcgctggcacatatatcca

SEQ ID NO: 161118 - DNA, 19 bp, Homo sapiens
  siRNA target sequence for WDFY3 (NM_014991.3,9969-9987).
cgctggcacatatatccat

SEQ ID NO: 161119 - DNA, 19 bp, Homo sapiens
  siRNA target sequence for WDFY3 (NM_014991.3,9984-10002).
ccatgtgtggagcatcaat

SEQ ID NO: 161120 - DNA, 19 bp, Homo sapiens
  siRNA target sequence for WDFY3 (NM_014991.3,10037-10055).
gtaggagccagcagatcat

SEQ ID NO: 161121 - DNA, 19 bp, Homo sapiens
  siRNA target sequence for WDFY3 (NM_014991.3,10061-10079).
gctgcatgtcggagatgaa

SEQ ID NO: 161122 - DNA, 19 bp, Homo sapiens
  siRNA target sequence for WDFY3 (NM_014991.3,10123-10141).
ggagtggttcggttttgga

SEQ ID NO: 161123 - DNA, 19 bp, Homo sapiens
  siRNA target sequence for WDFY3 (NM_014991.3,10212-10230).
ctgtccagaagcacaaata

SEQ ID NO: 161124 - DNA, 19 bp, Homo sapiens
  siRNA target sequence for WDFY3 (NM_014991.3,10419-10437).
gctcagtctagatgagaaa

SEQ ID NO: 161125 - DNA, 19 bp, Homo sapiens
  siRNA target sequence for WDFY3 (NM_014991.3,10432-10450).
gagaaagacggcttcatat

SEQ ID NO: 161126 - DNA, 19 bp, Homo sapiens
  siRNA target sequence for WDFY3 (NM_014991.3,10434-10452).
gaaagacggcttcatattt

SEQ ID NO: 161127 - DNA, 19 bp, Homo sapiens
  siRNA target sequence for WDFY3 (NM_014991.3,10438-10456).
gacggcttcatatttgtga

SEQ ID NO: 161128 - DNA, 19 bp, Homo sapiens
  siRNA target sequence for WDFY3 (NM_014991.3,10531-10549).
cggaattacagcagattga

SEQ ID NO: 161129 - DNA, 19 bp, Homo sapiens
  siRNA target sequence for WDFY3 (NM_014991.3,10794-10812).
ctgctcggtgaggttttca

SEQ ID NO: 161130 - DNA, 19 bp, Homo sapiens
  siRNA target sequence for WDFY3 (NM_014991.3,10796-10814).
gctcggtgaggttttcact

SEQ ID NO: 161131 - DNA, 19 bp, Homo sapiens
  siRNA target sequence for WDFY3 (NM_014991.3,10866-10884).
gtgcagtcgctttcaatct

SEQ ID NO: 161132 - DNA, 19 bp, Homo sapiens
  siRNA target sequence for WDFY3 (NM_014991.3,10868-10886).
gcagtcgctttcaatctga

SEQ ID NO: 161133 - DNA, 19 bp, Homo sapiens
  siRNA target sequence for WDFY3 (NM_014991.3,10871-10889).
gtcgctttcaatctgaaat

SEQ ID NO: 161134 - DNA, 19 bp, Homo sapiens
  siRNA target sequence for WDFY3 (NM_014991.3,10910-10928).
ccccggtgcgtgtttgtca

SEQ ID NO: 161135 - DNA, 19 bp, Homo sapiens
  siRNA target sequence for WDFY3 (NM_014991.3,10925-10943).
gtcagaactgttattataa

SEQ ID NO: 161136 - DNA, 19 bp, Homo sapiens
  siRNA target sequence for WDFY3 (NM_014991.3,10927-10945).
cagaactgttattataact

SEQ ID NO: 161137 - DNA, 19 bp, Homo sapiens
  siRNA target sequence for WDFY3 (NM_014991.3,10950-10968).
gcatgagagaggttcagaa

SEQ ID NO: 161138 - DNA, 19 bp, Homo sapiens
  siRNA target sequence for WDFY3 (NM_178583.1,2488-2506).
gctctgtcctctgaattaa

SEQ ID NO: 161139 - DNA, 19 bp, Homo sapiens
  siRNA target sequence for WDFY3 (NM_178583.1,2500-2518).
gaattaaagggtgtatact

SEQ ID NO: 161140 - DNA, 19 bp, Homo sapiens
  siRNA target sequence for ZADH1 (NM_152444.1,207-225).
gttcaaagagtggtattga

SEQ ID NO: 161141 - DNA, 19 bp, Homo sapiens
  siRNA target sequence for ZADH1 (NM_152444.1,271-289).
gaatggaagaagtctattt

SEQ ID NO: 161142 - DNA, 19 bp, Homo sapiens
  siRNA target sequence for ZADH1 (NM_152444.1,275-293).
ggaagaagtctatttacca

SEQ ID NO: 161143 - DNA, 19 bp, Homo sapiens
  siRNA target sequence for ZADH1 (NM_152444.1,282-300).
gtctatttaccagataata

SEQ ID NO: 161144 - DNA, 19 bp, Homo sapiens
  siRNA target sequence for ZADH1 (NM_152444.1,306-324).
gaaggacaagtacaagtta

SEQ ID NO: 161145 - DNA, 19 bp, Homo sapiens
  siRNA target sequence for ZADH1 (NM_152444.1,377-395).
cactggcactgattatata

SEQ ID NO: 161146 - DNA, 19 bp, Homo sapiens
  siRNA target sequence for ZADH1 (NM_152444.1,430-448).
gaggtattggaattataga

SEQ ID NO: 161147 - DNA, 19 bp, Homo sapiens
  siRNA target sequence for ZADH1 (NM_152444.1,433-451).
gtattggaattatagaaga

SEQ ID NO: 161148 - DNA, 19 bp, Homo sapiens
  siRNA target sequence for ZADH1 (NM_152444.1,455-473).
caaacacacaaatttgact

SEQ ID NO: 161149 - DNA, 19 bp, Homo sapiens
  siRNA target sequence for ZADH1 (NM_152444.1,477-495).
ggcgattttgtgacttctt

SEQ ID NO: 161150 - DNA, 19 bp, Homo sapiens
  siRNA target sequence for ZADH1 (NM_152444.1,508-526).
ggcaaaccaaggttattct

SEQ ID NO: 161151 - DNA, 19 bp, Homo sapiens
  siRNA target sequence for ZADH1 (NM_152444.1,564-582).
gtggatggacacctttcat

SEQ ID NO: 161152 - DNA, 19 bp, Homo sapiens
  siRNA target sequence for ZADH1 (NM_152444.1,635-653).
ggaaaaaggtcatataact

SEQ ID NO: 161153 - DNA, 19 bp, Homo sapiens
  siRNA target sequence for ZADH1 (NM_152444.1,654-672).
gctggatctaataagacaa

SEQ ID NO: 161154 - DNA, 19 bp, Homo sapiens
  siRNA target sequence for ZADH1 (NM_152444.1,843-861).
gaacagctccgtgaatcat

SEQ ID NO: 161155 - DNA, 19 bp, Homo sapiens
  siRNA target sequence for ZADH1 (NM_152444.1,864-882).
ccagctggagtggatgttt

SEQ ID NO: 161156 - DNA, 19 bp, Homo sapiens
  siRNA target sequence for ZADH1 (NM_152444.1,901-919).
gtaacatcagtgatacagt

SEQ ID NO: 161157 - DNA, 19 bp, Homo sapiens
  siRNA target sequence for ZADH1 (NM_152444.1,905-923).
catcagtgatacagtgata

SEQ ID NO: 161158 - DNA, 19 bp, Homo sapiens
  siRNA target sequence for ZADH1 (NM_152444.1,908-926).
cagtgatacagtgataagt

SEQ ID NO: 161159 - DNA, 19 bp, Homo sapiens
  siRNA target sequence for ZADH1 (NM_152444.1,910-928).
gtgatacagtgataagtca

SEQ ID NO: 161160 - DNA, 19 bp, Homo sapiens
  siRNA target sequence for ZADH1 (NM_152444.1,950-968).
catcctgtgtggtcaaatt

SEQ ID NO: 161161 - DNA, 19 bp, Homo sapiens
  siRNA target sequence for ZADH1 (NM_152444.1,953-971).
cctgtgtggtcaaatttct

SEQ ID NO: 161162 - DNA, 19 bp, Homo sapiens
  siRNA target sequence for ZADH1 (NM_152444.1,961-979).
gtcaaatttctcagtacaa

SEQ ID NO: 161163 - DNA, 19 bp, Homo sapiens
  siRNA target sequence for ZADH1 (NM_152444.1,963-981).
caaatttctcagtacaaca

SEQ ID NO: 161164 - DNA, 19 bp, Homo sapiens
  siRNA target sequence for ZADH1 (NM_152444.1,1003-1021).
cgctatcccctgctataga

SEQ ID NO: 161165 - DNA, 19 bp, Homo sapiens
  siRNA target sequence for ZADH1 (NM_152444.1,1022-1040).
ggcaatccagaaagaaaga

SEQ ID NO: 161166 - DNA, 19 bp, Homo sapiens
  siRNA target sequence for ZADH1 (NM_152444.1,1104-1122).
cagctgagtcagtggttta

SEQ ID NO: 161167 - DNA, 19 bp, Homo sapiens
  siRNA target sequence for ZADH1 (NM_152444.1,1152-1170).
gtaataaatgggttggaaa

SEQ ID NO: 161168 - DNA, 19 bp, Homo sapiens
  siRNA target sequence for ZADH1 (NM_152444.1,1220-1238).
gcagatagtttgcatttca

SEQ ID NO: 161169 - DNA, 19 bp, Homo sapiens
  siRNA target sequence for ZFPL1 (NM_006782.2,352-370).
gccttgtctgctatgatct

SEQ ID NO: 161170 - DNA, 19 bp, Homo sapiens
  siRNA target sequence for ZFPL1 (NM_006782.2,377-395).
ctgggcctgcctcaatgaa

SEQ ID NO: 161171 - DNA, 19 bp, Homo sapiens
  siRNA target sequence for ZFPL1 (NM_006782.2,423-441).
gcacctgccggctatcagt

SEQ ID NO: 161172 - DNA, 19 bp, Homo sapiens
  siRNA target sequence for ZFPL1 (NM_006782.2,613-631).
ctgactggtctagttttaa

SEQ ID NO: 161173 - DNA, 19 bp, Homo sapiens
  siRNA target sequence for ZFPL1 (NM_006782.2,675-693).
gctgccccagccttctaca

SEQ ID NO: 161174 - DNA, 19 bp, Homo sapiens
  siRNA target sequence for ZFPL1 (NM_006782.2,781-799).
cccctaggaaggtgtatga

SEQ ID NO: 161175 - DNA, 19 bp, Homo sapiens
  siRNA target sequence for ZFPL1 (NM_006782.2,835-853).
gagactgtgacgatgacaa

SEQ ID NO: 161176 - DNA, 19 bp, Homo sapiens
  siRNA target sequence for ZFYVE1 (NM_021260.1,714-732).
gcgggactgatgaagctat

SEQ ID NO: 161177 - DNA, 19 bp, Homo sapiens
  siRNA target sequence for ZFYVE1 (NM_021260.1,796-814).
ggagcgcctgagaaaccat

SEQ ID NO: 161178 - DNA, 19 bp, Homo sapiens
  siRNA target sequence for ZFYVE1 (NM_021260.1,912-930).
ggtgccagacctgcaaaat

SEQ ID NO: 161179 - DNA, 19 bp, Homo sapiens
  siRNA target sequence for ZFYVE1 (NM_021260.1,913-931).
gtgccagacctgcaaaatt

SEQ ID NO: 161180 - DNA, 19 bp, Homo sapiens
  siRNA target sequence for ZFYVE1 (NM_021260.1,917-935).
cagacctgcaaaattaact

SEQ ID NO: 161181 - DNA, 19 bp, Homo sapiens
  siRNA target sequence for ZFYVE1 (NM_021260.1,981-999).
ggagacaccctgttactgt

SEQ ID NO: 161182 - DNA, 19 bp, Homo sapiens
  siRNA target sequence for ZFYVE1 (NM_021260.1,992-1010).
gttactgtgtacaatgtca

SEQ ID NO: 161183 - DNA, 19 bp, Homo sapiens
  siRNA target sequence for ZFYVE1 (NM_021260.1,1093-1111).
cctcctagtagacgaaaat

SEQ ID NO: 161184 - DNA, 19 bp, Homo sapiens
  siRNA target sequence for ZFYVE1 (NM_021260.1,1096-1114).
cctagtagacgaaaatgaa

SEQ ID NO: 161185 - DNA, 19 bp, Homo sapiens
  siRNA target sequence for ZFYVE1 (NM_021260.1,1253-1271).
cgtgaagtctttaaaacct

SEQ ID NO: 161186 - DNA, 19 bp, Homo sapiens
  siRNA target sequence for ZFYVE1 (NM_021260.1,1311-1329).
cctatgacccagttcacaa

SEQ ID NO: 161187 - DNA, 19 bp, Homo sapiens
  siRNA target sequence for ZFYVE1 (NM_021260.1,1312-1330).
ctatgacccagttcacaaa

SEQ ID NO: 161188 - DNA, 19 bp, Homo sapiens
  siRNA target sequence for ZFYVE1 (NM_021260.1,1386-1404).
gaacacggctgctgcttaa

SEQ ID NO: 161189 - DNA, 19 bp, Homo sapiens
  siRNA target sequence for ZFYVE1 (NM_021260.1,1421-1439).
gacctcgtcatctatcgaa

SEQ ID NO: 161190 - DNA, 19 bp, Homo sapiens
  siRNA target sequence for ZFYVE1 (NM_021260.1,1426-1444).
cgtcatctatcgaactcat

SEQ ID NO: 161191 - DNA, 19 bp, Homo sapiens
  siRNA target sequence for ZFYVE1 (NM_021260.1,1446-1464).
cagaccggctgcataacga

SEQ ID NO: 161192 - DNA, 19 bp, Homo sapiens
  siRNA target sequence for ZFYVE1 (NM_021260.1,1456-1474).
gcataacgacctcttcaaa

SEQ ID NO: 161193 - DNA, 19 bp, Homo sapiens
  siRNA target sequence for ZFYVE1 (NM_021260.1,1457-1475).
cataacgacctcttcaaat

SEQ ID NO: 161194 - DNA, 19 bp, Homo sapiens
  siRNA target sequence for ZFYVE1 (NM_021260.1,1482-1500).
gggatgcctcagaagctta

SEQ ID NO: 161195 - DNA, 19 bp, Homo sapiens
  siRNA target sequence for ZFYVE1 (NM_021260.1,1487-1505).
gcctcagaagcttatctga

SEQ ID NO: 161196 - DNA, 19 bp, Homo sapiens
  siRNA target sequence for ZFYVE1 (NM_021260.1,1615-1633).
gctactgggctctgatcat

SEQ ID NO: 161197 - DNA, 19 bp, Homo sapiens
  siRNA target sequence for ZFYVE1 (NM_021260.1,1738-1756).
ccctcccacggacttttct

SEQ ID NO: 161198 - DNA, 19 bp, Homo sapiens
  siRNA target sequence for ZFYVE1 (NM_021260.1,1775-1793).
gagcagctactagagaata

SEQ ID NO: 161199 - DNA, 19 bp, Homo sapiens
  siRNA target sequence for ZFYVE1 (NM_021260.1,1814-1832).
cacccgggagtcatcttca

SEQ ID NO: 161200 - DNA, 19 bp, Homo sapiens
  siRNA target sequence for ZFYVE1 (NM_021260.1,1816-1834).
cccgggagtcatcttcaaa

SEQ ID NO: 161201 - DNA, 19 bp, Homo sapiens
  siRNA target sequence for ZFYVE1 (NM_021260.1,1888-1906).
ggcgcacagctcctttttt

SEQ ID NO: 161202 - DNA, 19 bp, Homo sapiens
  siRNA target sequence for ZFYVE1 (NM_021260.1,1944-1962).
gctgtggggttggatgtaa

SEQ ID NO: 161203 - DNA, 19 bp, Homo sapiens
  siRNA target sequence for ZFYVE1 (NM_021260.1,2032-2050).
gtatgacaaccgagtgtat

SEQ ID NO: 161204 - DNA, 19 bp, Homo sapiens
  siRNA target sequence for ZFYVE1 (NM_021260.1,2086-2104).
cagtgtagtgcccaaaaca

SEQ ID NO: 161205 - DNA, 19 bp, Homo sapiens
  siRNA target sequence for ZFYVE1 (NM_021260.1,2128-2146).
gatgggtctcgcaaaatat

SEQ ID NO: 161206 - DNA, 19 bp, Homo sapiens
  siRNA target sequence for ZFYVE1 (NM_021260.1,2201-2219).
cggcagtactggtttggaa

SEQ ID NO: 161207 - DNA, 19 bp, Homo sapiens
  siRNA target sequence for ZFYVE1 (NM_021260.1,2202-2220).
ggcagtactggtttggaaa

SEQ ID NO: 161208 - DNA, 19 bp, Homo sapiens
  siRNA target sequence for ZFYVE1 (NM_021260.1,2273-2291).
ggaactgatgggtttctga

SEQ ID NO: 161209 - DNA, 19 bp, Homo sapiens
  siRNA target sequence for ZFYVE1 (NM_021260.1,2458-2476).
gtgtgcgacgtcctttaaa

SEQ ID NO: 161210 - DNA, 19 bp, Homo sapiens
  siRNA target sequence for ZFYVE1 (NM_021260.1,2460-2478).
gtgcgacgtcctttaaaga

SEQ ID NO: 161211 - DNA, 19 bp, Homo sapiens
  siRNA target sequence for ZFYVE1 (NM_021260.1,2462-2480).
gcgacgtcctttaaagata

SEQ ID NO: 161212 - DNA, 19 bp, Homo sapiens
  siRNA target sequence for ZFYVE1 (NM_021260.1,2463-2481).
cgacgtcctttaaagataa

SEQ ID NO: 161213 - DNA, 19 bp, Homo sapiens
  siRNA target sequence for ZFYVE1 (NM_021260.1,2521-2539).
ctgtgacagctgttcatca

SEQ ID NO: 161214 - DNA, 19 bp, Homo sapiens
  siRNA target sequence for ZFYVE1 (NM_021260.1,2525-2543).
gacagctgttcatcaaaga

SEQ ID NO: 161215 - DNA, 19 bp, Homo sapiens
  siRNA target sequence for ZFYVE1 (NM_021260.1,2736-2754).
cactaggtctggtaaagga

SEQ ID NO: 161216 - DNA, 19 bp, Homo sapiens
  siRNA target sequence for ZFYVE16 (NM_014733.1,284-302).
ggacaaactccttgatgat

SEQ ID NO: 161217 - DNA, 19 bp, Homo sapiens
  siRNA target sequence for ZFYVE16 (NM_014733.1,287-305).
caaactccttgatgatttt

SEQ ID NO: 161218 - DNA, 19 bp, Homo sapiens
  siRNA target sequence for ZFYVE16 (NM_014733.1,423-441).
gaccaagagtgcgttaata

SEQ ID NO: 161219 - DNA, 19 bp, Homo sapiens
  siRNA target sequence for ZFYVE16 (NM_014733.1,425-443).
ccaagagtgcgttaatagt

SEQ ID NO: 161220 - DNA, 19 bp, Homo sapiens
  siRNA target sequence for ZFYVE16 (NM_014733.1,426-444).
caagagtgcgttaatagtt

SEQ ID NO: 161221 - DNA, 19 bp, Homo sapiens
  siRNA target sequence for ZFYVE16 (NM_014733.1,501-519).
ctcaagggacttacttcta

SEQ ID NO: 161222 - DNA, 19 bp, Homo sapiens
  siRNA target sequence for ZFYVE16 (NM_014733.1,585-603).
gaaatccagccgttatata

SEQ ID NO: 161223 - DNA, 19 bp, Homo sapiens
  siRNA target sequence for ZFYVE16 (NM_014733.1,605-623).
gggacgatgtagtaaacct

SEQ ID NO: 161224 - DNA, 19 bp, Homo sapiens
  siRNA target sequence for ZFYVE16 (NM_014733.1,606-624).
ggacgatgtagtaaaccta

SEQ ID NO: 161225 - DNA, 19 bp, Homo sapiens
  siRNA target sequence for ZFYVE16 (NM_014733.1,607-625).
gacgatgtagtaaacctat

SEQ ID NO: 161226 - DNA, 19 bp, Homo sapiens
  siRNA target sequence for ZFYVE16 (NM_014733.1,640-658).
gtgacatgggtaacttagt

SEQ ID NO: 161227 - DNA, 19 bp, Homo sapiens
  siRNA target sequence for ZFYVE16 (NM_014733.1,644-662).
catgggtaacttagttcat

SEQ ID NO: 161228 - DNA, 19 bp, Homo sapiens
  siRNA target sequence for ZFYVE16 (NM_014733.1,653-671).
cttagttcatgcaaccaat

SEQ ID NO: 161229 - DNA, 19 bp, Homo sapiens
  siRNA target sequence for ZFYVE16 (NM_014733.1,664-682).
caaccaatagtgaagaaga

SEQ ID NO: 161230 - DNA, 19 bp, Homo sapiens
  siRNA target sequence for ZFYVE16 (NM_014733.1,720-738).
gcagattccttgattggat

SEQ ID NO: 161231 - DNA, 19 bp, Homo sapiens
  siRNA target sequence for ZFYVE16 (NM_014733.1,759-777).
gatactccctgtgtttctt

SEQ ID NO: 161232 - DNA, 19 bp, Homo sapiens
  siRNA target sequence for ZFYVE16 (NM_014733.1,860-878).
caaagaattgggtataaaa

SEQ ID NO: 161233 - DNA, 19 bp, Homo sapiens
  siRNA target sequence for ZFYVE16 (NM_014733.1,869-887).
gggtataaaagtagataca

SEQ ID NO: 161234 - DNA, 19 bp, Homo sapiens
  siRNA target sequence for ZFYVE16 (NM_014733.1,882-900).
gatacaacactttcagatt

SEQ ID NO: 161235 - DNA, 19 bp, Homo sapiens
  siRNA target sequence for ZFYVE16 (NM_014733.1,941-959).
gatctttaatcagttagaa

SEQ ID NO: 161236 - DNA, 19 bp, Homo sapiens
  siRNA target sequence for ZFYVE16 (NM_014733.1,944-962).
ctttaatcagttagaatca

SEQ ID NO: 161237 - DNA, 19 bp, Homo sapiens
  siRNA target sequence for ZFYVE16 (NM_014733.1,953-971).
gttagaatcaattgttgat

SEQ ID NO: 161238 - DNA, 19 bp, Homo sapiens
  siRNA target sequence for ZFYVE16 (NM_014733.1,987-1005).
gctttgactcgacaaagtt

SEQ ID NO: 161239 - DNA, 19 bp, Homo sapiens
  siRNA target sequence for ZFYVE16 (NM_014733.1,994-1012).
ctcgacaaagttccaaaat

SEQ ID NO: 161240 - DNA, 19 bp, Homo sapiens
  siRNA target sequence for ZFYVE16 (NM_014733.1,1047-1065).
cagccatgtggattactaa

SEQ ID NO: 161241 - DNA, 19 bp, Homo sapiens
  siRNA target sequence for ZFYVE16 (NM_014733.1,1054-1072).
gtggattactaaaagatgt

SEQ ID NO: 161242 - DNA, 19 bp, Homo sapiens
  siRNA target sequence for ZFYVE16 (NM_014733.1,1092-1110).
gtagatgtggcagtcataa

SEQ ID NO: 161243 - DNA, 19 bp, Homo sapiens
  siRNA target sequence for ZFYVE16 (NM_014733.1,1106-1124).
cataactgccgcagaatgt

SEQ ID NO: 161244 - DNA, 19 bp, Homo sapiens
  siRNA target sequence for ZFYVE16 (NM_014733.1,1159-1177).
gcagccttccgaaaaatga

SEQ ID NO: 161245 - DNA, 19 bp, Homo sapiens
  siRNA target sequence for ZFYVE16 (NM_014733.1,1160-1178).
cagccttccgaaaaatgaa

SEQ ID NO: 161246 - DNA, 19 bp, Homo sapiens
  siRNA target sequence for ZFYVE16 (NM_014733.1,1162-1180).
gccttccgaaaaatgaaga

SEQ ID NO: 161247 - DNA, 19 bp, Homo sapiens
  siRNA target sequence for ZFYVE16 (NM_014733.1,1163-1181).
ccttccgaaaaatgaagat

SEQ ID NO: 161248 - DNA, 19 bp, Homo sapiens
  siRNA target sequence for ZFYVE16 (NM_014733.1,1244-1262).
ggaagataagactgttata

SEQ ID NO: 161249 - DNA, 19 bp, Homo sapiens
  siRNA target sequence for ZFYVE16 (NM_014733.1,1245-1263).
gaagataagactgttataa

SEQ ID NO: 161250 - DNA, 19 bp, Homo sapiens
  siRNA target sequence for ZFYVE16 (NM_014733.1,1298-1316).
ccttaaggataatgatgta

SEQ ID NO: 161251 - DNA, 19 bp, Homo sapiens
  siRNA target sequence for ZFYVE16 (NM_014733.1,1356-1374).
gatgtgccgtcctcattgt

SEQ ID NO: 161252 - DNA, 19 bp, Homo sapiens
  siRNA target sequence for ZFYVE16 (NM_014733.1,1383-1401).
cctgcgtctgggtctatgt

SEQ ID NO: 161253 - DNA, 19 bp, Homo sapiens
  siRNA target sequence for ZFYVE16 (NM_014733.1,1393-1411).
ggtctatgtgtggatcatt

SEQ ID NO: 161254 - DNA, 19 bp, Homo sapiens
  siRNA target sequence for ZFYVE16 (NM_014733.1,1394-1412).
gtctatgtgtggatcatta

SEQ ID NO: 161255 - DNA, 19 bp, Homo sapiens
  siRNA target sequence for ZFYVE16 (NM_014733.1,1420-1438).
gtaaagcacggggtgattt

SEQ ID NO: 161256 - DNA, 19 bp, Homo sapiens
  siRNA target sequence for ZFYVE16 (NM_014733.1,1444-1462).
ctcagcatgaacataaaga

SEQ ID NO: 161257 - DNA, 19 bp, Homo sapiens
  siRNA target sequence for ZFYVE16 (NM_014733.1,1446-1464).
cagcatgaacataaagata

SEQ ID NO: 161258 - DNA, 19 bp, Homo sapiens
  siRNA target sequence for ZFYVE16 (NM_014733.1,1522-1540).
gggaaccattcaaagagaa

SEQ ID NO: 161259 - DNA, 19 bp, Homo sapiens
  siRNA target sequence for ZFYVE16 (NM_014733.1,1617-1635).
gatcctgaccagacagtaa

SEQ ID NO: 161260 - DNA, 19 bp, Homo sapiens
  siRNA target sequence for ZFYVE16 (NM_014733.1,1664-1682).
caccagttctacagttgta

SEQ ID NO: 161261 - DNA, 19 bp, Homo sapiens
  siRNA target sequence for ZFYVE16 (NM_014733.1,1666-1684).
ccagttctacagttgtaga

SEQ ID NO: 161262 - DNA, 19 bp, Homo sapiens
  siRNA target sequence for ZFYVE16 (NM_014733.1,1773-1791).
gatgggcaagacttagatt

SEQ ID NO: 161263 - DNA, 19 bp, Homo sapiens
  siRNA target sequence for ZFYVE16 (NM_014733.1,1776-1794).
gggcaagacttagattact

SEQ ID NO: 161264 - DNA, 19 bp, Homo sapiens
  siRNA target sequence for ZFYVE16 (NM_014733.1,1777-1795).
ggcaagacttagattactt

SEQ ID NO: 161265 - DNA, 19 bp, Homo sapiens
  siRNA target sequence for ZFYVE16 (NM_014733.1,1782-1800).
gacttagattactttaata

SEQ ID NO: 161266 - DNA, 19 bp, Homo sapiens
  siRNA target sequence for ZFYVE16 (NM_014733.1,1813-1831).
caaaaagtggcccactaat

SEQ ID NO: 161267 - DNA, 19 bp, Homo sapiens
  siRNA target sequence for ZFYVE16 (NM_014733.1,1872-1890).
cttcagaccactaacataa

SEQ ID NO: 161268 - DNA, 19 bp, Homo sapiens
  siRNA target sequence for ZFYVE16 (NM_014733.1,1875-1893).
cagaccactaacataaagt

SEQ ID NO: 161269 - DNA, 19 bp, Homo sapiens
  siRNA target sequence for ZFYVE16 (NM_014733.1,1877-1895).
gaccactaacataaagtct

SEQ ID NO: 161270 - DNA, 19 bp, Homo sapiens
  siRNA target sequence for ZFYVE16 (NM_014733.1,1879-1897).
ccactaacataaagtcttt

SEQ ID NO: 161271 - DNA, 19 bp, Homo sapiens
  siRNA target sequence for ZFYVE16 (NM_014733.1,1880-1898).
cactaacataaagtctttt

SEQ ID NO: 161272 - DNA, 19 bp, Homo sapiens
  siRNA target sequence for ZFYVE16 (NM_014733.1,1882-1900).
ctaacataaagtcttttga

SEQ ID NO: 161273 - DNA, 19 bp, Homo sapiens
  siRNA target sequence for ZFYVE16 (NM_014733.1,1914-1932).
gactctaaatcgcaaatga

SEQ ID NO: 161274 - DNA, 19 bp, Homo sapiens
  siRNA target sequence for ZFYVE16 (NM_014733.1,1916-1934).
ctctaaatcgcaaatgaat

SEQ ID NO: 161275 - DNA, 19 bp, Homo sapiens
  siRNA target sequence for ZFYVE16 (NM_014733.1,1918-1936).
ctaaatcgcaaatgaatca

SEQ ID NO: 161276 - DNA, 19 bp, Homo sapiens
  siRNA target sequence for ZFYVE16 (NM_014733.1,1924-1942).
cgcaaatgaatcagataga

SEQ ID NO: 161277 - DNA, 19 bp, Homo sapiens
  siRNA target sequence for ZFYVE16 (NM_014733.1,2009-2027).
ggaaagtcatggtattaat

SEQ ID NO: 161278 - DNA, 19 bp, Homo sapiens
  siRNA target sequence for ZFYVE16 (NM_014733.1,2014-2032).
gtcatggtattaatataat

SEQ ID NO: 161279 - DNA, 19 bp, Homo sapiens
  siRNA target sequence for ZFYVE16 (NM_014733.1,2092-2110).
gcactattccagttcaaca

SEQ ID NO: 161280 - DNA, 19 bp, Homo sapiens
  siRNA target sequence for ZFYVE16 (NM_014733.1,2093-2111).
cactattccagttcaacaa

SEQ ID NO: 161281 - DNA, 19 bp, Homo sapiens
  siRNA target sequence for ZFYVE16 (NM_014733.1,2103-2121).
gttcaacaagggttaccta

SEQ ID NO: 161282 - DNA, 19 bp, Homo sapiens
  siRNA target sequence for ZFYVE16 (NM_014733.1,2125-2143).
gtaagtctgagattacaaa

SEQ ID NO: 161283 - DNA, 19 bp, Homo sapiens
  siRNA target sequence for ZFYVE16 (NM_014733.1,2129-2147).
gtctgagattacaaatcaa

SEQ ID NO: 161284 - DNA, 19 bp, Homo sapiens
  siRNA target sequence for ZFYVE16 (NM_014733.1,2184-2202).
ggggccagacctaagcaat

SEQ ID NO: 161285 - DNA, 19 bp, Homo sapiens
  siRNA target sequence for ZFYVE16 (NM_014733.1,2185-2203).
gggccagacctaagcaatt

SEQ ID NO: 161286 - DNA, 19 bp, Homo sapiens
  siRNA target sequence for ZFYVE16 (NM_014733.1,2204-2222).
gtttagccttccatcaaga

SEQ ID NO: 161287 - DNA, 19 bp, Homo sapiens
  siRNA target sequence for ZFYVE16 (NM_014733.1,2240-2258).
cctgaataagccagatgtt

SEQ ID NO: 161288 - DNA, 19 bp, Homo sapiens
  siRNA target sequence for ZFYVE16 (NM_014733.1,2249-2267).
gccagatgttccagataca

SEQ ID NO: 161289 - DNA, 19 bp, Homo sapiens
  siRNA target sequence for ZFYVE16 (NM_014733.1,2260-2278).
cagatacaatagaaagtga

SEQ ID NO: 161290 - DNA, 19 bp, Homo sapiens
  siRNA target sequence for ZFYVE16 (NM_014733.1,2290-2308).
cagataccgttgttccaat

SEQ ID NO: 161291 - DNA, 19 bp, Homo sapiens
  siRNA target sequence for ZFYVE16 (NM_014733.1,2309-2327).
cacttgtgctatagattct

SEQ ID NO: 161292 - DNA, 19 bp, Homo sapiens
  siRNA target sequence for ZFYVE16 (NM_014733.1,2332-2350).
ctgatccacaggttagctt

SEQ ID NO: 161293 - DNA, 19 bp, Homo sapiens
  siRNA target sequence for ZFYVE16 (NM_014733.1,2337-2355).
ccacaggttagcttcaact

SEQ ID NO: 161294 - DNA, 19 bp, Homo sapiens
  siRNA target sequence for ZFYVE16 (NM_014733.1,2342-2360).
ggttagcttcaactctaat

SEQ ID NO: 161295 - DNA, 19 bp, Homo sapiens
  siRNA target sequence for ZFYVE16 (NM_014733.1,2348-2366).
cttcaactctaattacatt

SEQ ID NO: 161296 - DNA, 19 bp, Homo sapiens
  siRNA target sequence for ZFYVE16 (NM_014733.1,2356-2374).
ctaattacattgatataga

SEQ ID NO: 161297 - DNA, 19 bp, Homo sapiens
  siRNA target sequence for ZFYVE16 (NM_014733.1,2388-2406).
ggtggatctagtttcgtaa

SEQ ID NO: 161298 - DNA, 19 bp, Homo sapiens
  siRNA target sequence for ZFYVE16 (NM_014733.1,2506-2524).
gtatgaactgccaagtcaa

SEQ ID NO: 161299 - DNA, 19 bp, Homo sapiens
  siRNA target sequence for ZFYVE16 (NM_014733.1,2513-2531).
ctgccaagtcaaatttact

SEQ ID NO: 161300 - DNA, 19 bp, Homo sapiens
  siRNA target sequence for ZFYVE16 (NM_014733.1,2556-2574).
cgagcatgtgggaaagtat

SEQ ID NO: 161301 - DNA, 19 bp, Homo sapiens
  siRNA target sequence for ZFYVE16 (NM_014733.1,2590-2608).
gtaataggaagtgtaaact

SEQ ID NO: 161302 - DNA, 19 bp, Homo sapiens
  siRNA target sequence for ZFYVE16 (NM_014733.1,2602-2620).
gtaaactgcaatatctaga

SEQ ID NO: 161303 - DNA, 19 bp, Homo sapiens
  siRNA target sequence for ZFYVE16 (NM_014733.1,2647-2665).
gctatgaaactattagtaa

SEQ ID NO: 161304 - DNA, 19 bp, Homo sapiens
  siRNA target sequence for ZFYVE16 (NM_014733.1,2690-2708).
gagtccaactggttctaat

SEQ ID NO: 161305 - DNA, 19 bp, Homo sapiens
  siRNA target sequence for ZFYVE16 (NM_014733.1,2692-2710).
gtccaactggttctaatct

SEQ ID NO: 161306 - DNA, 19 bp, Homo sapiens
  siRNA target sequence for ZFYVE16 (NM_014733.1,2700-2718).
ggttctaatcttaagtcta

SEQ ID NO: 161307 - DNA, 19 bp, Homo sapiens
  siRNA target sequence for ZFYVE16 (NM_014733.1,2701-2719).
gttctaatcttaagtctaa

SEQ ID NO: 161308 - DNA, 19 bp, Homo sapiens
  siRNA target sequence for ZFYVE16 (NM_014733.1,2759-2777).
gaaccaaacatccagtata

SEQ ID NO: 161309 - DNA, 19 bp, Homo sapiens
  siRNA target sequence for ZFYVE16 (NM_014733.1,2961-2979).
gatgtgcctatgacagtaa

SEQ ID NO: 161310 - DNA, 19 bp, Homo sapiens
  siRNA target sequence for ZFYVE16 (NM_014733.1,2987-3005).
ggatcattcccattctact

SEQ ID NO: 161311 - DNA, 19 bp, Homo sapiens
  siRNA target sequence for ZFYVE16 (NM_014733.1,2988-3006).
gatcattcccattctacta

SEQ ID NO: 161312 - DNA, 19 bp, Homo sapiens
  siRNA target sequence for ZFYVE16 (NM_014733.1,3098-3116).
gtctatgaacacaggaaat

SEQ ID NO: 161313 - DNA, 19 bp, Homo sapiens
  siRNA target sequence for ZFYVE16 (NM_014733.1,3111-3129).
ggaaatgaggggttaccta

SEQ ID NO: 161314 - DNA, 19 bp, Homo sapiens
  siRNA target sequence for ZFYVE16 (NM_014733.1,3126-3144).
cctacttctggttcattta

SEQ ID NO: 161315 - DNA, 19 bp, Homo sapiens
  siRNA target sequence for ZFYVE16 (NM_014733.1,3136-3154).
gttcatttacactagatga

SEQ ID NO: 161316 - DNA, 19 bp, Homo sapiens
  siRNA target sequence for ZFYVE16 (NM_014733.1,3139-3157).
catttacactagatgatga

SEQ ID NO: 161317 - DNA, 19 bp, Homo sapiens
  siRNA target sequence for ZFYVE16 (NM_014733.1,3189-3207).
cctactggtgtcttagtta

SEQ ID NO: 161318 - DNA, 19 bp, Homo sapiens
  siRNA target sequence for ZFYVE16 (NM_014733.1,3204-3222).
gttaacagcaatttaccta

SEQ ID NO: 161319 - DNA, 19 bp, Homo sapiens
  siRNA target sequence for ZFYVE16 (NM_014733.1,3209-3227).
cagcaatttacctattgct

SEQ ID NO: 161320 - DNA, 19 bp, Homo sapiens
  siRNA target sequence for ZFYVE16 (NM_014733.1,3251-3269).
gtgtgatattaacaagtat

SEQ ID NO: 161321 - DNA, 19 bp, Homo sapiens
  siRNA target sequence for ZFYVE16 (NM_014733.1,3266-3284).
gtatgtctgcaataagatt

SEQ ID NO: 161322 - DNA, 19 bp, Homo sapiens
  siRNA target sequence for ZFYVE16 (NM_014733.1,3272-3290).
ctgcaataagattagtctt

SEQ ID NO: 161323 - DNA, 19 bp, Homo sapiens
  siRNA target sequence for ZFYVE16 (NM_014733.1,3275-3293).
caataagattagtcttcta

SEQ ID NO: 161324 - DNA, 19 bp, Homo sapiens
  siRNA target sequence for ZFYVE16 (NM_014733.1,3281-3299).
gattagtcttctacctaat

SEQ ID NO: 161325 - DNA, 19 bp, Homo sapiens
  siRNA target sequence for ZFYVE16 (NM_014733.1,3295-3313).
ctaatgatgaggacagttt

SEQ ID NO: 161326 - DNA, 19 bp, Homo sapiens
  siRNA target sequence for ZFYVE16 (NM_014733.1,3442-3460).
ctaatctactcgtgaatgt

SEQ ID NO: 161327 - DNA, 19 bp, Homo sapiens
  siRNA target sequence for ZFYVE16 (NM_014733.1,3447-3465).
ctactcgtgaatgtcaaat

SEQ ID NO: 161328 - DNA, 19 bp, Homo sapiens
  siRNA target sequence for ZFYVE16 (NM_014733.1,3450-3468).
ctcgtgaatgtcaaattca

SEQ ID NO: 161329 - DNA, 19 bp, Homo sapiens
  siRNA target sequence for ZFYVE16 (NM_014733.1,3485-3503).
caaatattggtacttttca

SEQ ID NO: 161330 - DNA, 19 bp, Homo sapiens
  siRNA target sequence for ZFYVE16 (NM_014733.1,3520-3538).
gcttgggacaggcagaaat

SEQ ID NO: 161331 - DNA, 19 bp, Homo sapiens
  siRNA target sequence for ZFYVE16 (NM_014733.1,3521-3539).
cttgggacaggcagaaatt

SEQ ID NO: 161332 - DNA, 19 bp, Homo sapiens
  siRNA target sequence for ZFYVE16 (NM_014733.1,3560-3578).
gccaaatgaagatactatt

SEQ ID NO: 161333 - DNA, 19 bp, Homo sapiens
  siRNA target sequence for ZFYVE16 (NM_014733.1,3584-3602).
ggacatcttcagactattt

SEQ ID NO: 161334 - DNA, 19 bp, Homo sapiens
  siRNA target sequence for ZFYVE16 (NM_014733.1,3585-3603).
gacatcttcagactattta

SEQ ID NO: 161335 - DNA, 19 bp, Homo sapiens
  siRNA target sequence for ZFYVE16 (NM_014733.1,3647-3665).
cttggacaatattaccttt

SEQ ID NO: 161336 - DNA, 19 bp, Homo sapiens
  siRNA target sequence for ZFYVE16 (NM_014733.1,3650-3668).
ggacaatattacctttact

SEQ ID NO: 161337 - DNA, 19 bp, Homo sapiens
  siRNA target sequence for ZFYVE16 (NM_014733.1,3695-3713).
cggaggattcctgtttatt

SEQ ID NO: 161338 - DNA, 19 bp, Homo sapiens
  siRNA target sequence for ZFYVE16 (NM_014733.1,3743-3761).
ctcattaccaagtaatcct

SEQ ID NO: 161339 - DNA, 19 bp, Homo sapiens
  siRNA target sequence for ZFYVE16 (NM_014733.1,3800-3818).
ctgggcaaaggtttttcct

SEQ ID NO: 161340 - DNA, 19 bp, Homo sapiens
  siRNA target sequence for ZFYVE16 (NM_014733.1,3802-3820).
gggcaaaggtttttcctat

SEQ ID NO: 161341 - DNA, 19 bp, Homo sapiens
  siRNA target sequence for ZFYVE16 (NM_014733.1,3810-3828).
gtttttcctatgcgtttaa

SEQ ID NO: 161342 - DNA, 19 bp, Homo sapiens
  siRNA target sequence for ZFYVE16 (NM_014733.1,3816-3834).
cctatgcgtttaatgttga

SEQ ID NO: 161343 - DNA, 19 bp, Homo sapiens
  siRNA target sequence for ZFYVE16 (NM_014733.1,3835-3853).
gattgggtgcagaatataa

SEQ ID NO: 161344 - DNA, 19 bp, Homo sapiens
  siRNA target sequence for ZFYVE16 (NM_014733.1,3883-3901).
gaggccgaaaacctctttt

SEQ ID NO: 161345 - DNA, 19 bp, Homo sapiens
  siRNA target sequence for ZFYVE16 (NM_014733.1,3913-3931).
gacacactattatgaactt

SEQ ID NO: 161346 - DNA, 19 bp, Homo sapiens
  siRNA target sequence for ZFYVE16 (NM_014733.1,3917-3935).
cactattatgaacttactt

SEQ ID NO: 161347 - DNA, 19 bp, Homo sapiens
  siRNA target sequence for ZFYVE16 (NM_014733.1,3933-3951).
cttgttgaccttcgaaatt

SEQ ID NO: 161348 - DNA, 19 bp, Homo sapiens
  siRNA target sequence for ZFYVE16 (NM_014733.1,3942-3960).
cttcgaaattaccagtata

SEQ ID NO: 161349 - DNA, 19 bp, Homo sapiens
  siRNA target sequence for ZFYVE16 (NM_014733.1,3954-3972).
cagtataccttgcataata

SEQ ID NO: 161350 - DNA, 19 bp, Homo sapiens
  siRNA target sequence for ZFYVE16 (NM_014733.1,3961-3979).
ccttgcataatatagatca

SEQ ID NO: 161351 - DNA, 19 bp, Homo sapiens
  siRNA target sequence for ZFYVE16 (NM_014733.1,3975-3993).
gatcaactgttgattcata

SEQ ID NO: 161352 - DNA, 19 bp, Homo sapiens
  siRNA target sequence for ZFYVE16 (NM_014733.1,4119-4137).
catctagtctgtatacaga

SEQ ID NO: 161353 - DNA, 19 bp, Homo sapiens
  siRNA target sequence for ZFYVE16 (NM_014733.1,4136-4154).
gaatgatggaatttatgaa

SEQ ID NO: 161354 - DNA, 19 bp, Homo sapiens
  siRNA target sequence for ZFYVE16 (NM_014733.1,4201-4219).
caagttttgtggtattcaa

SEQ ID NO: 161355 - DNA, 19 bp, Homo sapiens
  siRNA target sequence for ZFYVE16 (NM_014733.1,4252-4270).
ctaagtccagcatagttga

SEQ ID NO: 161356 - DNA, 19 bp, Homo sapiens
  siRNA target sequence for ZFYVE16 (NM_014733.1,4313-4331).
cttgcggctagctttacga

SEQ ID NO: 161357 - DNA, 19 bp, Homo sapiens
  siRNA target sequence for ZFYVE16 (NM_014733.1,4372-4390).
cagtagacctgagagaata

SEQ ID NO: 161358 - DNA, 19 bp, Homo sapiens
  siRNA target sequence for ZFYVE16 (NM_014733.1,4456-4474).
gaatatcattacaaggatt

SEQ ID NO: 161359 - DNA, 19 bp, Homo sapiens
  siRNA target sequence for ZFYVE16 (NM_014733.1,4539-4557).
gaggtgttctactttctaa

SEQ ID NO: 161360 - DNA, 19 bp, Homo sapiens
  siRNA target sequence for ZFYVE16 (NM_014733.1,4634-4652).
gtgccctcacctgaaaact

SEQ ID NO: 161361 - DNA, 19 bp, Homo sapiens
  siRNA target sequence for ZFYVE16 (NM_014733.1,4698-4716).
gacactgatatggttgaat

SEQ ID NO: 161362 - DNA, 19 bp, Homo sapiens
  siRNA target sequence for ZFYVE16 (NM_014733.1,4751-4769).
gcattatctaaatgatctt

SEQ ID NO: 161363 - DNA, 19 bp, Homo sapiens
  siRNA target sequence for ZFYVE16 (NM_014733.1,4797-4815).
ggtgggacctccaactcta

SEQ ID NO: 161364 - DNA, 19 bp, Homo sapiens
  siRNA target sequence for ZFYVE16 (NM_014733.1,4800-4818).
gggacctccaactctagtt

SEQ ID NO: 161365 - DNA, 19 bp, Homo sapiens
  siRNA target sequence for ZFYVE16 (NM_014733.1,4801-4819).
ggacctccaactctagttt

SEQ ID NO: 161366 - DNA, 19 bp, Homo sapiens
  siRNA target sequence for ZFYVE16 (NM_014733.1,4802-4820).
gacctccaactctagttta

SEQ ID NO: 161367 - DNA, 19 bp, Homo sapiens
  siRNA target sequence for ZFYVE19 (NM_032850.3,92-110).
ccgccagacctctcaagat

SEQ ID NO: 161368 - DNA, 19 bp, Homo sapiens
  siRNA target sequence for ZFYVE19 (NM_032850.3,94-112).
gccagacctctcaagatca

SEQ ID NO: 161369 - DNA, 19 bp, Homo sapiens
  siRNA target sequence for ZFYVE19 (NM_032850.3,195-213).
ggtcgctggagttagatta

SEQ ID NO: 161370 - DNA, 19 bp, Homo sapiens
  siRNA target sequence for ZFYVE19 (NM_032850.3,198-216).
cgctggagttagattacca

SEQ ID NO: 161371 - DNA, 19 bp, Homo sapiens
  siRNA target sequence for ZFYVE19 (NM_032850.3,299-317).
ctgcagtacggctgtaaga

SEQ ID NO: 161372 - DNA, 19 bp, Homo sapiens
  siRNA target sequence for ZFYVE19 (NM_032850.3,301-319).
gcagtacggctgtaagaat

SEQ ID NO: 161373 - DNA, 19 bp, Homo sapiens
  siRNA target sequence for ZFYVE19 (NM_032850.3,302-320).
cagtacggctgtaagaatt

SEQ ID NO: 161374 - DNA, 19 bp, Homo sapiens
  siRNA target sequence for ZFYVE19 (NM_032850.3,453-471).
ggtcaccacctcagaacta

SEQ ID NO: 161375 - DNA, 19 bp, Homo sapiens
  siRNA target sequence for ZFYVE19 (NM_032850.3,458-476).
ccacctcagaactataaga

SEQ ID NO: 161376 - DNA, 19 bp, Homo sapiens
  siRNA target sequence for ZFYVE19 (NM_032850.3,537-555).
cacgacaagaccagatgat

SEQ ID NO: 161377 - DNA, 19 bp, Homo sapiens
  siRNA target sequence for ZFYVE19 (NM_032850.3,573-591).
gactccgccaggagaacaa

SEQ ID NO: 161378 - DNA, 19 bp, Homo sapiens
  siRNA target sequence for ZFYVE19 (NM_032850.3,604-622).
cccctcacaggcagagata

SEQ ID NO: 161379 - DNA, 19 bp, Homo sapiens
  siRNA target sequence for ZFYVE19 (NM_032850.3,1160-1178).
gaggcaagtggctttaaca

SEQ ID NO: 161380 - DNA, 19 bp, Homo sapiens
  siRNA target sequence for ZFYVE20 (NM_022340.1,63-81).
ggatctgcagtctttctat

SEQ ID NO: 161381 - DNA, 19 bp, Homo sapiens
  siRNA target sequence for ZFYVE20 (NM_022340.1,226-244).
caaggatatgagtctttca

SEQ ID NO: 161382 - DNA, 19 bp, Homo sapiens
  siRNA target sequence for ZFYVE20 (NM_022340.1,251-269).
gaggggttgatccttacat

SEQ ID NO: 161383 - DNA, 19 bp, Homo sapiens
  siRNA target sequence for ZFYVE20 (NM_022340.1,253-271).
ggggttgatccttacatgt

SEQ ID NO: 161384 - DNA, 19 bp, Homo sapiens
  siRNA target sequence for ZFYVE20 (NM_022340.1,338-356).
gaattgaccactatgttgt

SEQ ID NO: 161385 - DNA, 19 bp, Homo sapiens
  siRNA target sequence for ZFYVE20 (NM_022340.1,348-366).
ctatgttgtggaagtcaat

SEQ ID NO: 161386 - DNA, 19 bp, Homo sapiens
  siRNA target sequence for ZFYVE20 (NM_022340.1,357-375).
ggaagtcaataaactaata

SEQ ID NO: 161387 - DNA, 19 bp, Homo sapiens
  siRNA target sequence for ZFYVE20 (NM_022340.1,358-376).
gaagtcaataaactaataa

SEQ ID NO: 161388 - DNA, 19 bp, Homo sapiens
  siRNA target sequence for ZFYVE20 (NM_022340.1,397-415).
gcatttgacagaacaaata

SEQ ID NO: 161389 - DNA, 19 bp, Homo sapiens
  siRNA target sequence for ZFYVE20 (NM_022340.1,425-443).
caaagattcgagcaataga

SEQ ID NO: 161390 - DNA, 19 bp, Homo sapiens
  siRNA target sequence for ZFYVE20 (NM_022340.1,471-489).
ccaggatgtccctttctgt

SEQ ID NO: 161391 - DNA, 19 bp, Homo sapiens
  siRNA target sequence for ZFYVE20 (NM_022340.1,537-555).
ccgcctctgcgggtctatt

SEQ ID NO: 161392 - DNA, 19 bp, Homo sapiens
  siRNA target sequence for ZFYVE20 (NM_022340.1,538-556).
cgcctctgcgggtctatta

SEQ ID NO: 161393 - DNA, 19 bp, Homo sapiens
  siRNA target sequence for ZFYVE20 (NM_022340.1,541-559).
ctctgcgggtctattatgt

SEQ ID NO: 161394 - DNA, 19 bp, Homo sapiens
  siRNA target sequence for ZFYVE20 (NM_022340.1,713-731).
gctcggtcctggatgagaa

SEQ ID NO: 161395 - DNA, 19 bp, Homo sapiens
  siRNA target sequence for ZFYVE20 (NM_022340.1,783-801).
gagagagcagcagattgat

SEQ ID NO: 161396 - DNA, 19 bp, Homo sapiens
  siRNA target sequence for ZFYVE20 (NM_022340.1,826-844).
gtgaagctctacgagaaat

SEQ ID NO: 161397 - DNA, 19 bp, Homo sapiens
  siRNA target sequence for ZFYVE20 (NM_022340.1,828-846).
gaagctctacgagaaatta

SEQ ID NO: 161398 - DNA, 19 bp, Homo sapiens
  siRNA target sequence for ZFYVE20 (NM_022340.1,831-849).
gctctacgagaaattacga

SEQ ID NO: 161399 - DNA, 19 bp, Homo sapiens
  siRNA target sequence for ZFYVE20 (NM_022340.1,979-997).
gagctgatagacgctttaa

SEQ ID NO: 161400 - DNA, 19 bp, Homo sapiens
  siRNA target sequence for ZFYVE20 (NM_022340.1,981-999).
gctgatagacgctttaagt

SEQ ID NO: 161401 - DNA, 19 bp, Homo sapiens
  siRNA target sequence for ZFYVE20 (NM_022340.1,982-1000).
ctgatagacgctttaagta

SEQ ID NO: 161402 - DNA, 19 bp, Homo sapiens
  siRNA target sequence for ZFYVE20 (NM_022340.1,988-1006).
gacgctttaagtaagaaga

SEQ ID NO: 161403 - DNA, 19 bp, Homo sapiens
  siRNA target sequence for ZFYVE20 (NM_022340.1,991-1009).
gctttaagtaagaagatct

SEQ ID NO: 161404 - DNA, 19 bp, Homo sapiens
  siRNA target sequence for ZFYVE20 (NM_022340.1,998-1016).
gtaagaagatcttaacctt

SEQ ID NO: 161405 - DNA, 19 bp, Homo sapiens
  siRNA target sequence for ZFYVE20 (NM_022340.1,1065-1083).
gagaatgatcagatactca

SEQ ID NO: 161406 - DNA, 19 bp, Homo sapiens
  siRNA target sequence for ZFYVE20 (NM_022340.1,1384-1402).
cagatccacaacatcacat

SEQ ID NO: 161407 - DNA, 19 bp, Homo sapiens
  siRNA target sequence for ZFYVE20 (NM_022340.1,1655-1673).
gagaaatcggcccttttca

SEQ ID NO: 161408 - DNA, 19 bp, Homo sapiens
  siRNA target sequence for ZFYVE20 (NM_022340.1,1694-1712).
ctcgcacccaccttgctta

SEQ ID NO: 161409 - DNA, 19 bp, Homo sapiens
  siRNA target sequence for ZFYVE20 (NM_022340.1,1756-1774).
cccaagaccccttcactta

SEQ ID NO: 161410 - DNA, 19 bp, Homo sapiens
  siRNA target sequence for ZFYVE20 (NM_022340.1,1844-1862).
gcatgccacagcaacatga

SEQ ID NO: 161411 - DNA, 19 bp, Homo sapiens
  siRNA target sequence for ZFYVE20 (NM_022340.1,1869-1887).
ctccttaaacccctttgat

SEQ ID NO: 161412 - DNA, 19 bp, Homo sapiens
  siRNA target sequence for ZFYVE21 (NM_024071.2,187-205).
gcagtgtgacgccaagttt

SEQ ID NO: 161413 - DNA, 19 bp, Homo sapiens
  siRNA target sequence for ZFYVE21 (NM_024071.2,406-424).
cgtcacgtttggaaactca

SEQ ID NO: 161414 - DNA, 19 bp, Homo sapiens
  siRNA target sequence for ZFYVE21 (NM_024071.2,421-439).
ctcagagaaacctgaaact

SEQ ID NO: 161415 - DNA, 19 bp, Homo sapiens
  siRNA target sequence for ZFYVE21 (NM_024071.2,427-445).
gaaacctgaaactatgact

SEQ ID NO: 161416 - DNA, 19 bp, Homo sapiens
  siRNA target sequence for ZFYVE21 (NM_024071.2,442-460).
gacttgtcgtctttccaat

SEQ ID NO: 161417 - DNA, 19 bp, Homo sapiens
  siRNA target sequence for ZFYVE21 (NM_024071.2,444-462).
cttgtcgtctttccaataa

SEQ ID NO: 161418 - DNA, 19 bp, Homo sapiens
  siRNA target sequence for ZFYVE21 (NM_024071.2,447-465).
gtcgtctttccaataacca

SEQ ID NO: 161419 - DNA, 19 bp, Homo sapiens
  siRNA target sequence for ZFYVE21 (NM_024071.2,456-474).
ccaataaccagagatactt

SEQ ID NO: 161420 - DNA, 19 bp, Homo sapiens
  siRNA target sequence for ZFYVE21 (NM_024071.2,486-504).
gagacagccactatgaaat

SEQ ID NO: 161421 - DNA, 19 bp, Homo sapiens
  siRNA target sequence for ZFYVE21 (NM_024071.2,492-510).
gccactatgaaatcgaaat

SEQ ID NO: 161422 - DNA, 19 bp, Homo sapiens
  siRNA target sequence for ZFYVE21 (NM_024071.2,493-511).
ccactatgaaatcgaaatt

SEQ ID NO: 161423 - DNA, 19 bp, Homo sapiens
  siRNA target sequence for ZFYVE21 (NM_024071.2,496-514).
ctatgaaatcgaaattgta

SEQ ID NO: 161424 - DNA, 19 bp, Homo sapiens
  siRNA target sequence for ZFYVE21 (NM_024071.2,707-725).
gccaagctcctctatgaat

SEQ ID NO: 161425 - DNA, 19 bp, Homo sapiens
  siRNA target sequence for ZFYVE26 (NM_015346.2,279-297).
gagggtagaagacatactt

SEQ ID NO: 161426 - DNA, 19 bp, Homo sapiens
  siRNA target sequence for ZFYVE26 (NM_015346.2,281-299).
gggtagaagacatacttca

SEQ ID NO: 161427 - DNA, 19 bp, Homo sapiens
  siRNA target sequence for ZFYVE26 (NM_015346.2,342-360).
catcaaccctcaaagagta

SEQ ID NO: 161428 - DNA, 19 bp, Homo sapiens
  siRNA target sequence for ZFYVE26 (NM_015346.2,429-447).
ccggagaaagcttgagttt

SEQ ID NO: 161429 - DNA, 19 bp, Homo sapiens
  siRNA target sequence for ZFYVE26 (NM_015346.2,432-450).
gagaaagcttgagtttctt

SEQ ID NO: 161430 - DNA, 19 bp, Homo sapiens
  siRNA target sequence for ZFYVE26 (NM_015346.2,538-556).
gtgcctgacggaaatccaa

SEQ ID NO: 161431 - DNA, 19 bp, Homo sapiens
  siRNA target sequence for ZFYVE26 (NM_015346.2,774-792).
ggtagtcgatgccatctat

SEQ ID NO: 161432 - DNA, 19 bp, Homo sapiens
  siRNA target sequence for ZFYVE26 (NM_015346.2,849-867).
cctgtgtgaggaactacta

SEQ ID NO: 161433 - DNA, 19 bp, Homo sapiens
  siRNA target sequence for ZFYVE26 (NM_015346.2,953-971).
ccctgtatggccataccta

SEQ ID NO: 161434 - DNA, 19 bp, Homo sapiens
  siRNA target sequence for ZFYVE26 (NM_015346.2,973-991).
gcagagaaggtcacagaaa

SEQ ID NO: 161435 - DNA, 19 bp, Homo sapiens
  siRNA target sequence for ZFYVE26 (NM_015346.2,1023-1041).
ctcaccggatcatctagat

SEQ ID NO: 161436 - DNA, 19 bp, Homo sapiens
  siRNA target sequence for ZFYVE26 (NM_015346.2,1195-1213).
cttggctgcctacttgata

SEQ ID NO: 161437 - DNA, 19 bp, Homo sapiens
  siRNA target sequence for ZFYVE26 (NM_015346.2,1202-1220).
gcctacttgatagagaatt

SEQ ID NO: 161438 - DNA, 19 bp, Homo sapiens
  siRNA target sequence for ZFYVE26 (NM_015346.2,1634-1652).
gcttctgtgccatgaagta

SEQ ID NO: 161439 - DNA, 19 bp, Homo sapiens
  siRNA target sequence for ZFYVE26 (NM_015346.2,1805-1823).
ccaggtgtcaacagtatct

SEQ ID NO: 161440 - DNA, 19 bp, Homo sapiens
  siRNA target sequence for ZFYVE26 (NM_015346.2,1818-1836).
gtatctgtgcagtattcct

SEQ ID NO: 161441 - DNA, 19 bp, Homo sapiens
  siRNA target sequence for ZFYVE26 (NM_015346.2,1852-1870).
gagcttctggaaaacatct

SEQ ID NO: 161442 - DNA, 19 bp, Homo sapiens
  siRNA target sequence for ZFYVE26 (NM_015346.2,2046-2064).
cccaaagacccttgcttat

SEQ ID NO: 161443 - DNA, 19 bp, Homo sapiens
  siRNA target sequence for ZFYVE26 (NM_015346.2,2047-2065).
ccaaagacccttgcttata

SEQ ID NO: 161444 - DNA, 19 bp, Homo sapiens
  siRNA target sequence for ZFYVE26 (NM_015346.2,2122-2140).
cacagctttttggacttaa

SEQ ID NO: 161445 - DNA, 19 bp, Homo sapiens
  siRNA target sequence for ZFYVE26 (NM_015346.2,2133-2151).
ggacttaaaacactttact

SEQ ID NO: 161446 - DNA, 19 bp, Homo sapiens
  siRNA target sequence for ZFYVE26 (NM_015346.2,2134-2152).
gacttaaaacactttacta

SEQ ID NO: 161447 - DNA, 19 bp, Homo sapiens
  siRNA target sequence for ZFYVE26 (NM_015346.2,2136-2154).
cttaaaacactttactagt

SEQ ID NO: 161448 - DNA, 19 bp, Homo sapiens
  siRNA target sequence for ZFYVE26 (NM_015346.2,2145-2163).
ctttactagtggtatcagt

SEQ ID NO: 161449 - DNA, 19 bp, Homo sapiens
  siRNA target sequence for ZFYVE26 (NM_015346.2,2153-2171).
gtggtatcagtggatttct

SEQ ID NO: 161450 - DNA, 19 bp, Homo sapiens
  siRNA target sequence for ZFYVE26 (NM_015346.2,2165-2183).
gatttctggctgatgaatt

SEQ ID NO: 161451 - DNA, 19 bp, Homo sapiens
  siRNA target sequence for ZFYVE26 (NM_015346.2,2490-2508).
cccatccctggaaagtaca

SEQ ID NO: 161452 - DNA, 19 bp, Homo sapiens
  siRNA target sequence for ZFYVE26 (NM_015346.2,2491-2509).
ccatccctggaaagtacaa

SEQ ID NO: 161453 - DNA, 19 bp, Homo sapiens
  siRNA target sequence for ZFYVE26 (NM_015346.2,2496-2514).
cctggaaagtacaagtagt

SEQ ID NO: 161454 - DNA, 19 bp, Homo sapiens
  siRNA target sequence for ZFYVE26 (NM_015346.2,2589-2607).
cccccatcctcaaagttca

SEQ ID NO: 161455 - DNA, 19 bp, Homo sapiens
  siRNA target sequence for ZFYVE26 (NM_015346.2,2726-2744).
caggggaactgatgttcat

SEQ ID NO: 161456 - DNA, 19 bp, Homo sapiens
  siRNA target sequence for ZFYVE26 (NM_015346.2,2844-2862).
cagtggccgctcaactcta

SEQ ID NO: 161457 - DNA, 19 bp, Homo sapiens
  siRNA target sequence for ZFYVE26 (NM_015346.2,2885-2903).
cagcaggaatggtgtttta

SEQ ID NO: 161458 - DNA, 19 bp, Homo sapiens
  siRNA target sequence for ZFYVE26 (NM_015346.2,2965-2983).
caggaggacttttggataa

SEQ ID NO: 161459 - DNA, 19 bp, Homo sapiens
  siRNA target sequence for ZFYVE26 (NM_015346.2,3116-3134).
cagccgaacggcgtttgaa

SEQ ID NO: 161460 - DNA, 19 bp, Homo sapiens
  siRNA target sequence for ZFYVE26 (NM_015346.2,3118-3136).
gccgaacggcgtttgaata

SEQ ID NO: 161461 - DNA, 19 bp, Homo sapiens
  siRNA target sequence for ZFYVE26 (NM_015346.2,3120-3138).
cgaacggcgtttgaatagt

SEQ ID NO: 161462 - DNA, 19 bp, Homo sapiens
  siRNA target sequence for ZFYVE26 (NM_015346.2,3121-3139).
gaacggcgtttgaatagta

SEQ ID NO: 161463 - DNA, 19 bp, Homo sapiens
  siRNA target sequence for ZFYVE26 (NM_015346.2,3168-3186).
ccacgtactcctaaatgct

SEQ ID NO: 161464 - DNA, 19 bp, Homo sapiens
  siRNA target sequence for ZFYVE26 (NM_015346.2,3208-3226).
gttgttcttcagcaaatca

SEQ ID NO: 161465 - DNA, 19 bp, Homo sapiens
  siRNA target sequence for ZFYVE26 (NM_015346.2,3233-3251).
gtctcaattatctgcttat

SEQ ID NO: 161466 - DNA, 19 bp, Homo sapiens
  siRNA target sequence for ZFYVE26 (NM_015346.2,3235-3253).
ctcaattatctgcttatgt

SEQ ID NO: 161467 - DNA, 19 bp, Homo sapiens
  siRNA target sequence for ZFYVE26 (NM_015346.2,3247-3265).
cttatgtcagccagtcaaa

SEQ ID NO: 161468 - DNA, 19 bp, Homo sapiens
  siRNA target sequence for ZFYVE26 (NM_015346.2,3628-3646).
gttctccttcaaagtttga

SEQ ID NO: 161469 - DNA, 19 bp, Homo sapiens
  siRNA target sequence for ZFYVE26 (NM_015346.2,3645-3663).
gagctctgagcctgatcat

SEQ ID NO: 161470 - DNA, 19 bp, Homo sapiens
  siRNA target sequence for ZFYVE26 (NM_015346.2,3775-3793).
ctggcccaagagaatctca

SEQ ID NO: 161471 - DNA, 19 bp, Homo sapiens
  siRNA target sequence for ZFYVE26 (NM_015346.2,3931-3949).
gatgacctcccactttcta

SEQ ID NO: 161472 - DNA, 19 bp, Homo sapiens
  siRNA target sequence for ZFYVE26 (NM_015346.2,3968-3986).
caactgagaaccctacatt

SEQ ID NO: 161473 - DNA, 19 bp, Homo sapiens
  siRNA target sequence for ZFYVE26 (NM_015346.2,3973-3991).
gagaaccctacattggaaa

SEQ ID NO: 161474 - DNA, 19 bp, Homo sapiens
  siRNA target sequence for ZFYVE26 (NM_015346.2,4100-4118).
gggcttccccgaggttaaa

SEQ ID NO: 161475 - DNA, 19 bp, Homo sapiens
  siRNA target sequence for ZFYVE26 (NM_015346.2,4103-4121).
cttccccgaggttaaaggt

SEQ ID NO: 161476 - DNA, 19 bp, Homo sapiens
  siRNA target sequence for ZFYVE26 (NM_015346.2,4204-4222).
gagcgccttctggaacaat

SEQ ID NO: 161477 - DNA, 19 bp, Homo sapiens
  siRNA target sequence for ZFYVE26 (NM_015346.2,4287-4305).
gcagagtctggcagtgaat

SEQ ID NO: 161478 - DNA, 19 bp, Homo sapiens
  siRNA target sequence for ZFYVE26 (NM_015346.2,4312-4330).
ggttgggccagtctttcta

SEQ ID NO: 161479 - DNA, 19 bp, Homo sapiens
  siRNA target sequence for ZFYVE26 (NM_015346.2,4352-4370).
ctcccattgccctagatgt

SEQ ID NO: 161480 - DNA, 19 bp, Homo sapiens
  siRNA target sequence for ZFYVE26 (NM_015346.2,4355-4373).
ccattgccctagatgtact

SEQ ID NO: 161481 - DNA, 19 bp, Homo sapiens
  siRNA target sequence for ZFYVE26 (NM_015346.2,4445-4463).
ggcgagatgtggacgattt

SEQ ID NO: 161482 - DNA, 19 bp, Homo sapiens
  siRNA target sequence for ZFYVE26 (NM_015346.2,4447-4465).
cgagatgtggacgatttga

SEQ ID NO: 161483 - DNA, 19 bp, Homo sapiens
  siRNA target sequence for ZFYVE26 (NM_015346.2,4456-4474).
gacgatttgagcagcataa

SEQ ID NO: 161484 - DNA, 19 bp, Homo sapiens
  siRNA target sequence for ZFYVE26 (NM_015346.2,4559-4577).
gtcggctggccctacagtt

SEQ ID NO: 161485 - DNA, 19 bp, Homo sapiens
  siRNA target sequence for ZFYVE26 (NM_015346.2,4562-4580).
ggctggccctacagtttgt

SEQ ID NO: 161486 - DNA, 19 bp, Homo sapiens
  siRNA target sequence for ZFYVE26 (NM_015346.2,4640-4658).
ctgtccaagaaggactaaa

SEQ ID NO: 161487 - DNA, 19 bp, Homo sapiens
  siRNA target sequence for ZFYVE26 (NM_015346.2,4842-4860).
gtaccccattccaagagaa

SEQ ID NO: 161488 - DNA, 19 bp, Homo sapiens
  siRNA target sequence for ZFYVE26 (NM_015346.2,4848-4866).
cattccaagagaacattta

SEQ ID NO: 161489 - DNA, 19 bp, Homo sapiens
  siRNA target sequence for ZFYVE26 (NM_015346.2,5066-5084).
ctgtccgacaccgtgaaat

SEQ ID NO: 161490 - DNA, 19 bp, Homo sapiens
  siRNA target sequence for ZFYVE26 (NM_015346.2,5182-5200).
gagcagctgcttatgaaca

SEQ ID NO: 161491 - DNA, 19 bp, Homo sapiens
  siRNA target sequence for ZFYVE26 (NM_015346.2,5257-5275).
caggagattggcttcacta

SEQ ID NO: 161492 - DNA, 19 bp, Homo sapiens
  siRNA target sequence for ZFYVE26 (NM_015346.2,5362-5380).
gtgattcacctccaagaaa

SEQ ID NO: 161493 - DNA, 19 bp, Homo sapiens
  siRNA target sequence for ZFYVE26 (NM_015346.2,5403-5421).
cgagaccctccctagatca

SEQ ID NO: 161494 - DNA, 19 bp, Homo sapiens
  siRNA target sequence for ZFYVE26 (NM_015346.2,5455-5473).
ggtatctccagtatacatt

SEQ ID NO: 161495 - DNA, 19 bp, Homo sapiens
  siRNA target sequence for ZFYVE26 (NM_015346.2,5567-5585).
cggatgagactgagagtat

SEQ ID NO: 161496 - DNA, 19 bp, Homo sapiens
  siRNA target sequence for ZFYVE26 (NM_015346.2,5605-5623).
gagcacttcaccatgttta

SEQ ID NO: 161497 - DNA, 19 bp, Homo sapiens
  siRNA target sequence for ZFYVE26 (NM_015346.2,5619-5637).
gtttaacaggcgtcatcat

SEQ ID NO: 161498 - DNA, 19 bp, Homo sapiens
  siRNA target sequence for ZFYVE26 (NM_015346.2,5672-5690).
gctccactaagaaaatggt

SEQ ID NO: 161499 - DNA, 19 bp, Homo sapiens
  siRNA target sequence for ZFYVE26 (NM_015346.2,5728-5746).
gatcagtgctatagttact

SEQ ID NO: 161500 - DNA, 19 bp, Homo sapiens
  siRNA target sequence for ZFYVE26 (NM_015346.2,5851-5869).
gatgaggtggaatggattt

SEQ ID NO: 161501 - DNA, 19 bp, Homo sapiens
  siRNA target sequence for ZFYVE26 (NM_015346.2,5896-5914).
ctggtgcggagtgaatttt

SEQ ID NO: 161502 - DNA, 19 bp, Homo sapiens
  siRNA target sequence for ZFYVE26 (NM_015346.2,5901-5919).
gcggagtgaattttactat

SEQ ID NO: 161503 - DNA, 19 bp, Homo sapiens
  siRNA target sequence for ZFYVE26 (NM_015346.2,6198-6216).
ccacgtgccatctttggat

SEQ ID NO: 161504 - DNA, 19 bp, Homo sapiens
  siRNA target sequence for ZFYVE26 (NM_015346.2,6289-6307).
gttgaggtctccacaaaga

SEQ ID NO: 161505 - DNA, 19 bp, Homo sapiens
  siRNA target sequence for ZFYVE26 (NM_015346.2,6420-6438).
cctcaatcagctgaatcat

SEQ ID NO: 161506 - DNA, 19 bp, Homo sapiens
  siRNA target sequence for ZFYVE26 (NM_015346.2,6554-6572).
ggacgcagagcctttctct

SEQ ID NO: 161507 - DNA, 19 bp, Homo sapiens
  siRNA target sequence for ZFYVE26 (NM_015346.2,6583-6601).
cctgaagggaaaatcatga

SEQ ID NO: 161508 - DNA, 19 bp, Homo sapiens
  siRNA target sequence for ZFYVE26 (NM_015346.2,6724-6742).
gagagtcctccagaagttt

SEQ ID NO: 161509 - DNA, 19 bp, Homo sapiens
  siRNA target sequence for ZFYVE26 (NM_015346.2,6776-6794).
gtgggaagctacacacttt

SEQ ID NO: 161510 - DNA, 19 bp, Homo sapiens
  siRNA target sequence for ZFYVE26 (NM_015346.2,7035-7053).
gatctacctccaagaaaca

SEQ ID NO: 161511 - DNA, 19 bp, Homo sapiens
  siRNA target sequence for ZFYVE26 (NM_015346.2,7181-7199).
gtgctgggacctctcaaat

SEQ ID NO: 161512 - DNA, 19 bp, Homo sapiens
  siRNA target sequence for ZFYVE26 (NM_015346.2,7213-7231).
ctgccaaccctgtttggaa

SEQ ID NO: 161513 - DNA, 19 bp, Homo sapiens
  siRNA target sequence for ZFYVE26 (NM_015346.2,7215-7233).
gccaaccctgtttggaaat

SEQ ID NO: 161514 - DNA, 19 bp, Homo sapiens
  siRNA target sequence for ZFYVE26 (NM_015346.2,7367-7385).
gccagttggtggagaaaga

SEQ ID NO: 161515 - DNA, 19 bp, Homo sapiens
  siRNA target sequence for ZFYVE26 (NM_015346.2,7401-7419).
ccagcaactgctcaaatgt

SEQ ID NO: 161516 - DNA, 19 bp, Homo sapiens
  siRNA target sequence for ZFYVE26 (NM_015346.2,7479-7497).
ggaagcgttcaagagaatt

SEQ ID NO: 161517 - DNA, 19 bp, Homo sapiens
  siRNA target sequence for ZFYVE26 (NM_015346.2,7517-7535).
gcctgatccaggcaataca

SEQ ID NO: 161518 - DNA, 19 bp, Homo sapiens
  siRNA target sequence for ZFYVE26 (NM_015346.2,7519-7537).
ctgatccaggcaatacaca

SEQ ID NO: 161519 - DNA, 19 bp, Homo sapiens
  siRNA target sequence for ZFYVE26 (NM_015346.2,7521-7539).
gatccaggcaatacacaat

SEQ ID NO: 161520 - DNA, 19 bp, Homo sapiens
  siRNA target sequence for ZFYVE26 (NM_015346.2,7524-7542).
ccaggcaatacacaatgat

SEQ ID NO: 161521 - DNA, 19 bp, Homo sapiens
  siRNA target sequence for ZFYVE26 (NM_015346.2,7552-7570).
gttcgggcctacctgatat

SEQ ID NO: 161522 - DNA, 19 bp, Homo sapiens
  siRNA target sequence for ZFYVE26 (NM_015346.2,7555-7573).
cgggcctacctgatatgtt

SEQ ID NO: 161523 - DNA, 19 bp, Homo sapiens
  siRNA target sequence for ZFYVE26 (NM_015346.2,7560-7578).
ctacctgatatgttgcaaa

SEQ ID NO: 161524 - DNA, 19 bp, Homo sapiens
  siRNA target sequence for ZNF185 (NM_007150.1,47-65).
cgccaggcaccctacaata

SEQ ID NO: 161525 - DNA, 19 bp, Homo sapiens
  siRNA target sequence for ZNF185 (NM_007150.1,48-66).
gccaggcaccctacaatat

SEQ ID NO: 161526 - DNA, 19 bp, Homo sapiens
  siRNA target sequence for ZNF185 (NM_007150.1,67-85).
caggcgcagctctacatca

SEQ ID NO: 161527 - DNA, 19 bp, Homo sapiens
  siRNA target sequence for ZNF185 (NM_007150.1,121-139).
gccattctcctcagatgaa

SEQ ID NO: 161528 - DNA, 19 bp, Homo sapiens
  siRNA target sequence for ZNF185 (NM_007150.1,209-227).
ctgtcagcggccaagaaga

SEQ ID NO: 161529 - DNA, 19 bp, Homo sapiens
  siRNA target sequence for ZNF185 (NM_007150.1,471-489).
ctgtccctgctgataggaa

SEQ ID NO: 161530 - DNA, 19 bp, Homo sapiens
  siRNA target sequence for ZNF185 (NM_007150.1,735-753).
gcgtgttgactgattttga

SEQ ID NO: 161531 - DNA, 19 bp, Homo sapiens
  siRNA target sequence for ZNF185 (NM_007150.1,986-1004).
gagcagcctcacatttata

SEQ ID NO: 161532 - DNA, 19 bp, Homo sapiens
  siRNA target sequence for ZNF185 (NM_007150.1,1069-1087).
gtacgtgaatgctagtgaa

SEQ ID NO: 161533 - DNA, 19 bp, Homo sapiens
  siRNA target sequence for ZNF185 (NM_007150.1,1106-1124).
gtatctgcacgctatagca

SEQ ID NO: 161534 - DNA, 19 bp, Homo sapiens
  siRNA target sequence for ZNF185 (NM_007150.1,1146-1164).
cattcgccatggagaagaa

SEQ ID NO: 161535 - DNA, 19 bp, Homo sapiens
  siRNA target sequence for ZNF185 (NM_007150.1,1205-1223).
ggagggatctgtacttact

SEQ ID NO: 161536 - DNA, 19 bp, Homo sapiens
  siRNA target sequence for ZNF185 (NM_007150.1,1237-1255).
ccgagactgtccaaagatt

SEQ ID NO: 161537 - DNA, 19 bp, Homo sapiens
  siRNA target sequence for ZNF185 (NM_007150.1,1238-1256).
cgagactgtccaaagatta

SEQ ID NO: 161538 - DNA, 19 bp, Homo sapiens
  siRNA target sequence for ZNF185 (NM_007150.1,1252-1270).
gattaccctagaacatctt

SEQ ID NO: 161539 - DNA, 19 bp, Homo sapiens
  siRNA target sequence for ZNF185 (NM_007150.1,1271-1289).
ggtatctgctgccatgaat

SEQ ID NO: 161540 - DNA, 19 bp, Homo sapiens
  siRNA target sequence for ZNF198 (NM_003453.2,382-400).
cacgaatgtaggaaactca

SEQ ID NO: 161541 - DNA, 19 bp, Homo sapiens
  siRNA target sequence for ZNF198 (NM_003453.2,405-423).
gtggtccagctaatccttt

SEQ ID NO: 161542 - DNA, 19 bp, Homo sapiens
  siRNA target sequence for ZNF198 (NM_003453.2,425-443).
gtgtctagatctaataagt

SEQ ID NO: 161543 - DNA, 19 bp, Homo sapiens
  siRNA target sequence for ZNF198 (NM_003453.2,427-445).
gtctagatctaataagttt

SEQ ID NO: 161544 - DNA, 19 bp, Homo sapiens
  siRNA target sequence for ZNF198 (NM_003453.2,432-450).
gatctaataagtttcagaa

SEQ ID NO: 161545 - DNA, 19 bp, Homo sapiens
  siRNA target sequence for ZNF198 (NM_003453.2,518-536).
ccagtggtagctgatcaaa

SEQ ID NO: 161546 - DNA, 19 bp, Homo sapiens
  siRNA target sequence for ZNF198 (NM_003453.2,527-545).
gctgatcaaagaaccataa

SEQ ID NO: 161547 - DNA, 19 bp, Homo sapiens
  siRNA target sequence for ZNF198 (NM_003453.2,530-548).
gatcaaagaaccataacat

SEQ ID NO: 161548 - DNA, 19 bp, Homo sapiens
  siRNA target sequence for ZNF198 (NM_003453.2,725-743).
cctcctgagactaaaaaca

SEQ ID NO: 161549 - DNA, 19 bp, Homo sapiens
  siRNA target sequence for ZNF198 (NM_003453.2,889-907).
gaatgatggccaattagaa

SEQ ID NO: 161550 - DNA, 19 bp, Homo sapiens
  siRNA target sequence for ZNF198 (NM_003453.2,893-911).
gatggccaattagaaaata

SEQ ID NO: 161551 - DNA, 19 bp, Homo sapiens
  siRNA target sequence for ZNF198 (NM_003453.2,912-930).
ctgacgggcgagatatgaa

SEQ ID NO: 161552 - DNA, 19 bp, Homo sapiens
  siRNA target sequence for ZNF198 (NM_003453.2,914-932).
gacgggcgagatatgaact

SEQ ID NO: 161553 - DNA, 19 bp, Homo sapiens
  siRNA target sequence for ZNF198 (NM_003453.2,916-934).
cgggcgagatatgaactta

SEQ ID NO: 161554 - DNA, 19 bp, Homo sapiens
  siRNA target sequence for ZNF198 (NM_003453.2,917-935).
gggcgagatatgaacttaa

SEQ ID NO: 161555 - DNA, 19 bp, Homo sapiens
  siRNA target sequence for ZNF198 (NM_003453.2,918-936).
ggcgagatatgaacttaat

SEQ ID NO: 161556 - DNA, 19 bp, Homo sapiens
  siRNA target sequence for ZNF198 (NM_003453.2,920-938).
cgagatatgaacttaatga

SEQ ID NO: 161557 - DNA, 19 bp, Homo sapiens
  siRNA target sequence for ZNF198 (NM_003453.2,921-939).
gagatatgaacttaatgat

SEQ ID NO: 161558 - DNA, 19 bp, Homo sapiens
  siRNA target sequence for ZNF198 (NM_003453.2,923-941).
gatatgaacttaatgatta

SEQ ID NO: 161559 - DNA, 19 bp, Homo sapiens
  siRNA target sequence for ZNF198 (NM_003453.2,928-946).
gaacttaatgattacacat

SEQ ID NO: 161560 - DNA, 19 bp, Homo sapiens
  siRNA target sequence for ZNF198 (NM_003453.2,931-949).
cttaatgattacacatgta

SEQ ID NO: 161561 - DNA, 19 bp, Homo sapiens
  siRNA target sequence for ZNF198 (NM_003453.2,937-955).
gattacacatgtaacatca

SEQ ID NO: 161562 - DNA, 19 bp, Homo sapiens
  siRNA target sequence for ZNF198 (NM_003453.2,1255-1273).
ccaacagcagcctactaaa

SEQ ID NO: 161563 - DNA, 19 bp, Homo sapiens
  siRNA target sequence for ZNF198 (NM_003453.2,1264-1282).
gcctactaaaccagttaaa

SEQ ID NO: 161564 - DNA, 19 bp, Homo sapiens
  siRNA target sequence for ZNF198 (NM_003453.2,1479-1497).
gtgagtccttccaggaatt

SEQ ID NO: 161565 - DNA, 19 bp, Homo sapiens
  siRNA target sequence for ZNF198 (NM_003453.2,1492-1510).
ggaattctgtagtacatct

SEQ ID NO: 161566 - DNA, 19 bp, Homo sapiens
  siRNA target sequence for ZNF198 (NM_003453.2,1531-1549).
caaacagaatcctactaaa

SEQ ID NO: 161567 - DNA, 19 bp, Homo sapiens
  siRNA target sequence for ZNF198 (NM_003453.2,1601-1619).
cgccatgaagtcagcttta

SEQ ID NO: 161568 - DNA, 19 bp, Homo sapiens
  siRNA target sequence for ZNF198 (NM_003453.2,1753-1771).
gattgatggtcaacagaaa

SEQ ID NO: 161569 - DNA, 19 bp, Homo sapiens
  siRNA target sequence for ZNF198 (NM_003453.2,1889-1907).
ggaaaactgacaacttgta

SEQ ID NO: 161570 - DNA, 19 bp, Homo sapiens
  siRNA target sequence for ZNF198 (NM_003453.2,1948-1966).
gtgtataggtcctaatgga

SEQ ID NO: 161571 - DNA, 19 bp, Homo sapiens
  siRNA target sequence for ZNF198 (NM_003453.2,1950-1968).
gtataggtcctaatggata

SEQ ID NO: 161572 - DNA, 19 bp, Homo sapiens
  siRNA target sequence for ZNF198 (NM_003453.2,1964-1982).
ggatatatggagccatatt

SEQ ID NO: 161573 - DNA, 19 bp, Homo sapiens
  siRNA target sequence for ZNF198 (NM_003453.2,2088-2106).
ccacaatgcctgatggaaa

SEQ ID NO: 161574 - DNA, 19 bp, Homo sapiens
  siRNA target sequence for ZNF198 (NM_003453.2,2169-2187).
ctccaaatggccagtttgt

SEQ ID NO: 161575 - DNA, 19 bp, Homo sapiens
  siRNA target sequence for ZNF198 (NM_003453.2,2182-2200).
gtttgtagcgccaagtgat

SEQ ID NO: 161576 - DNA, 19 bp, Homo sapiens
  siRNA target sequence for ZNF198 (NM_003453.2,2198-2216).
gatattcagttgaaatgca

SEQ ID NO: 161577 - DNA, 19 bp, Homo sapiens
  siRNA target sequence for ZNF198 (NM_003453.2,2284-2302).
ctgcagcaaaacttgttca

SEQ ID NO: 161578 - DNA, 19 bp, Homo sapiens
  siRNA target sequence for ZNF198 (NM_003453.2,2295-2313).
cttgttcagatgactataa

SEQ ID NO: 161579 - DNA, 19 bp, Homo sapiens
  siRNA target sequence for ZNF198 (NM_003453.2,2314-2332).
gaagttgcattgcatagtt

SEQ ID NO: 161580 - DNA, 19 bp, Homo sapiens
  siRNA target sequence for ZNF198 (NM_003453.2,2317-2335).
gttgcattgcatagttaca

SEQ ID NO: 161581 - DNA, 19 bp, Homo sapiens
  siRNA target sequence for ZNF198 (NM_003453.2,2440-2458).
ggattttgccagacgttta

SEQ ID NO: 161582 - DNA, 19 bp, Homo sapiens
  siRNA target sequence for ZNF198 (NM_003453.2,2449-2467).
cagacgtttaggattgaga

SEQ ID NO: 161583 - DNA, 19 bp, Homo sapiens
  siRNA target sequence for ZNF198 (NM_003453.2,2459-2477).
ggattgagatgtgttactt

SEQ ID NO: 161584 - DNA, 19 bp, Homo sapiens
  siRNA target sequence for ZNF198 (NM_003453.2,2471-2489).
gttacttgcaactattgtt

SEQ ID NO: 161585 - DNA, 19 bp, Homo sapiens
  siRNA target sequence for ZNF198 (NM_003453.2,2487-2505).
gttctcagctatgtaagaa

SEQ ID NO: 161586 - DNA, 19 bp, Homo sapiens
  siRNA target sequence for ZNF198 (NM_003453.2,2499-2517).
gtaagaagggagcaactaa

SEQ ID NO: 161587 - DNA, 19 bp, Homo sapiens
  siRNA target sequence for ZNF198 (NM_003453.2,2599-2617).
gtgtgactgttgtaaatct

SEQ ID NO: 161588 - DNA, 19 bp, Homo sapiens
  siRNA target sequence for ZNF198 (NM_003453.2,2601-2619).
gtgactgttgtaaatctca

SEQ ID NO: 161589 - DNA, 19 bp, Homo sapiens
  siRNA target sequence for ZNF198 (NM_003453.2,2642-2660).
cagtggcgtggggaaatga

SEQ ID NO: 161590 - DNA, 19 bp, Homo sapiens
  siRNA target sequence for ZNF198 (NM_003453.2,2689-2707).
gcgtttctactgtcaacaa

SEQ ID NO: 161591 - DNA, 19 bp, Homo sapiens
  siRNA target sequence for ZNF198 (NM_003453.2,2690-2708).
cgtttctactgtcaacaaa

SEQ ID NO: 161592 - DNA, 19 bp, Homo sapiens
  siRNA target sequence for ZNF198 (NM_003453.2,2705-2723).
caaaatgagcccaacatga

SEQ ID NO: 161593 - DNA, 19 bp, Homo sapiens
  siRNA target sequence for ZNF198 (NM_003453.2,2729-2747).
cagaaaggacctgaaaact

SEQ ID NO: 161594 - DNA, 19 bp, Homo sapiens
  siRNA target sequence for ZNF198 (NM_003453.2,2736-2754).
gacctgaaaacttacatta

SEQ ID NO: 161595 - DNA, 19 bp, Homo sapiens
  siRNA target sequence for ZNF198 (NM_003453.2,2739-2757).
ctgaaaacttacattatga

SEQ ID NO: 161596 - DNA, 19 bp, Homo sapiens
  siRNA target sequence for ZNF198 (NM_003453.2,2768-2786).
cagacatctcgaaccaaaa

SEQ ID NO: 161597 - DNA, 19 bp, Homo sapiens
  siRNA target sequence for ZNF198 (NM_003453.2,2844-2862).
cagttctttgcaaaccttt

SEQ ID NO: 161598 - DNA, 19 bp, Homo sapiens
  siRNA target sequence for ZNF198 (NM_003453.2,2849-2867).
ctttgcaaacctttaacaa

SEQ ID NO: 161599 - DNA, 19 bp, Homo sapiens
  siRNA target sequence for ZNF198 (NM_003453.2,2854-2872).
caaacctttaacaatgaca

SEQ ID NO: 161600 - DNA, 19 bp, Homo sapiens
  siRNA target sequence for ZNF198 (NM_003453.2,2865-2883).
caatgacaaaagctactta

SEQ ID NO: 161601 - DNA, 19 bp, Homo sapiens
  siRNA target sequence for ZNF198 (NM_003453.2,2896-2914).
catgcagaccaaatcttgt

SEQ ID NO: 161602 - DNA, 19 bp, Homo sapiens
  siRNA target sequence for ZNF198 (NM_003453.2,2928-2946).
cttggaggacagaatatgt

SEQ ID NO: 161603 - DNA, 19 bp, Homo sapiens
  siRNA target sequence for ZNF198 (NM_003453.2,2995-3013).
gtacagtcagaatattcct

SEQ ID NO: 161604 - DNA, 19 bp, Homo sapiens
  siRNA target sequence for ZNF198 (NM_003453.2,3134-3152).
cttgatacagagttgctta

SEQ ID NO: 161605 - DNA, 19 bp, Homo sapiens
  siRNA target sequence for ZNF198 (NM_003453.2,3149-3167).
cttacaatgacggatatga

SEQ ID NO: 161606 - DNA, 19 bp, Homo sapiens
  siRNA target sequence for ZNF198 (NM_003453.2,3221-3239).
gaaacagatataattggtt

SEQ ID NO: 161607 - DNA, 19 bp, Homo sapiens
  siRNA target sequence for ZNF198 (NM_003453.2,3279-3297).
gcatgcctgatgtaccata

SEQ ID NO: 161608 - DNA, 19 bp, Homo sapiens
  siRNA target sequence for ZNF198 (NM_003453.2,3280-3298).
catgcctgatgtaccatat

SEQ ID NO: 161609 - DNA, 19 bp, Homo sapiens
  siRNA target sequence for ZNF198 (NM_003453.2,3302-3320).
ccagatttggatatcgaaa

SEQ ID NO: 161610 - DNA, 19 bp, Homo sapiens
  siRNA target sequence for ZNF198 (NM_003453.2,3303-3321).
cagatttggatatcgaaat

SEQ ID NO: 161611 - DNA, 19 bp, Homo sapiens
  siRNA target sequence for ZNF198 (NM_003453.2,3335-3353).
gctgctgaggagcttgata

SEQ ID NO: 161612 - DNA, 19 bp, Homo sapiens
  siRNA target sequence for ZNF198 (NM_003453.2,3336-3354).
ctgctgaggagcttgatat

SEQ ID NO: 161613 - DNA, 19 bp, Homo sapiens
  siRNA target sequence for ZNF198 (NM_003453.2,3343-3361).
ggagcttgatatggaaaat

SEQ ID NO: 161614 - DNA, 19 bp, Homo sapiens
  siRNA target sequence for ZNF198 (NM_003453.2,3378-3396).
ctgtttttggcgaagaata

SEQ ID NO: 161615 - DNA, 19 bp, Homo sapiens
  siRNA target sequence for ZNF198 (NM_003453.2,3406-3424).
gcccagacctcgatctaaa

SEQ ID NO: 161616 - DNA, 19 bp, Homo sapiens
  siRNA target sequence for ZNF198 (NM_003453.2,3456-3474).
gataccagtctcatgatga

SEQ ID NO: 161617 - DNA, 19 bp, Homo sapiens
  siRNA target sequence for ZNF198 (NM_003453.2,3524-3542).
gtaaatgcatggaaacact

SEQ ID NO: 161618 - DNA, 19 bp, Homo sapiens
  siRNA target sequence for ZNF198 (NM_003453.2,3535-3553).
gaaacactgggtcaaaact

SEQ ID NO: 161619 - DNA, 19 bp, Homo sapiens
  siRNA target sequence for ZNF198 (NM_003453.2,3547-3565).
caaaactaggcaacttgat

SEQ ID NO: 161620 - DNA, 19 bp, Homo sapiens
  siRNA target sequence for ZNF198 (NM_003453.2,3640-3658).
cacagctgagcttaactat

SEQ ID NO: 161621 - DNA, 19 bp, Homo sapiens
  siRNA target sequence for ZNF198 (NM_003453.2,3655-3673).
ctatgggttagctcatttt

SEQ ID NO: 161622 - DNA, 19 bp, Homo sapiens
  siRNA target sequence for ZNF198 (NM_003453.2,3659-3677).
gggttagctcattttgtca

SEQ ID NO: 161623 - DNA, 19 bp, Homo sapiens
  siRNA target sequence for ZNF198 (NM_003453.2,3660-3678).
ggttagctcattttgtcaa

SEQ ID NO: 161624 - DNA, 19 bp, Homo sapiens
  siRNA target sequence for ZNF198 (NM_003453.2,3661-3679).
gttagctcattttgtcaat

SEQ ID NO: 161625 - DNA, 19 bp, Homo sapiens
  siRNA target sequence for ZNF198 (NM_003453.2,3682-3700).
gatccgacggccaaatgga

SEQ ID NO: 161626 - DNA, 19 bp, Homo sapiens
  siRNA target sequence for ZNF198 (NM_003453.2,3711-3729).
cacctgacagcatctatta

SEQ ID NO: 161627 - DNA, 19 bp, Homo sapiens
  siRNA target sequence for ZNF198 (NM_003453.2,3761-3779).
ggaagtaatcgaaaagaca

SEQ ID NO: 161628 - DNA, 19 bp, Homo sapiens
  siRNA target sequence for ZNF198 (NM_003453.2,3765-3783).
gtaatcgaaaagacaacat

SEQ ID NO: 161629 - DNA, 19 bp, Homo sapiens
  siRNA target sequence for ZNF198 (NM_003453.2,3860-3878).
ccagatgggtcaatattct

SEQ ID NO: 161630 - DNA, 19 bp, Homo sapiens
  siRNA target sequence for ZNF198 (NM_003453.2,3879-3897).
ctcgagttgaagaagacta

SEQ ID NO: 161631 - DNA, 19 bp, Homo sapiens
  siRNA target sequence for ZNF198 (NM_003453.2,3882-3900).
gagttgaagaagactatct

SEQ ID NO: 161632 - DNA, 19 bp, Homo sapiens
  siRNA target sequence for ZNF198 (NM_003453.2,3893-3911).
gactatctctggaggataa

SEQ ID NO: 161633 - DNA, 19 bp, Homo sapiens
  siRNA target sequence for ZNF198 (NM_003453.2,3895-3913).
ctatctctggaggataaaa

SEQ ID NO: 161634 - DNA, 19 bp, Homo sapiens
  siRNA target sequence for ZNF198 (NM_003453.2,3901-3919).
ctggaggataaaacaacta

SEQ ID NO: 161635 - DNA, 19 bp, Homo sapiens
  siRNA target sequence for ZNF198 (NM_003453.2,3930-3948).
ctccagtagctcttctgaa

SEQ ID NO: 161636 - DNA, 19 bp, Homo sapiens
  siRNA target sequence for ZNF198 (NM_003453.2,3944-3962).
ctgaatacactgttctact

SEQ ID NO: 161637 - DNA, 19 bp, Homo sapiens
  siRNA target sequence for ZNF198 (NM_003453.2,3953-3971).
ctgttctactttaacacta

SEQ ID NO: 161638 - DNA, 19 bp, Homo sapiens
  siRNA target sequence for ZNF198 (NM_003453.2,3994-4012).
ggaacaacacttaagactt

SEQ ID NO: 161639 - DNA, 19 bp, Homo sapiens
  siRNA target sequence for ZNF198 (NM_003453.2,3995-4013).
gaacaacacttaagacttt

SEQ ID NO: 161640 - DNA, 19 bp, Homo sapiens
  siRNA target sequence for ZNF198 (NM_003453.2,4025-4043).
gtgtttaggcattggaaaa

SEQ ID NO: 161641 - DNA, 19 bp, Homo sapiens
  siRNA target sequence for ZNF198 (NM_003453.2,4050-4068).
ctttaacgatggaaaacaa

SEQ ID NO: 161642 - DNA, 19 bp, Homo sapiens
  siRNA target sequence for ZNF198 (NM_003453.2,4178-4196).
gaaaacacagccaatcctt

SEQ ID NO: 161643 - DNA, 19 bp, Homo sapiens
  siRNA target sequence for ZNF198 (NM_003453.2,4220-4238).
gaatgctacttgtctaaaa

SEQ ID NO: 161644 - DNA, 19 bp, Homo sapiens
  siRNA target sequence for ZNF198 (NM_003453.2,4239-4257).
gtccacagaatcttaatca

SEQ ID NO: 161645 - DNA, 19 bp, Homo sapiens
  siRNA target sequence for ZNF198 (NM_003453.2,4258-4276).
gaggatggatgttttttat

SEQ ID NO: 161646 - DNA, 19 bp, Homo sapiens
  siRNA target sequence for ZNF198 (NM_003453.2,4280-4298).
caaccagaatgctctagtt

SEQ ID NO: 161647 - DNA, 19 bp, Homo sapiens
  siRNA target sequence for ZNF198 (NM_003453.2,4283-4301).
ccagaatgctctagttcta

SEQ ID NO: 161648 - DNA, 19 bp, Homo sapiens
  siRNA target sequence for ZNF198 (NM_003453.2,4304-4322).
gatagccctgtctggtata

SEQ ID NO: 161649 - DNA, 19 bp, Homo sapiens
  siRNA target sequence for ZNF198 (NM_003453.2,4313-4331).
gtctggtatacgtctactt

SEQ ID NO: 161650 - DNA, 19 bp, Homo sapiens
  siRNA target sequence for ZNF198 (NM_003453.2,4315-4333).
ctggtatacgtctacttca

SEQ ID NO: 161651 - DNA, 19 bp, Homo sapiens
  siRNA target sequence for ZNF198 (NM_003453.2,4337-4355).
gaccgaaacaccttggaaa

SEQ ID NO: 161652 - DNA, 19 bp, Homo sapiens
  siRNA target sequence for ZNF198 (NM_003453.2,4364-4382).
gtacgggttcttctagtaa

SEQ ID NO: 161653 - DNA, 19 bp, Homo sapiens
  siRNA target sequence for ZNF198 (NM_003453.2,4369-4387).
ggttcttctagtaaaagat

SEQ ID NO: 161654 - DNA, 19 bp, Homo sapiens
  siRNA target sequence for ZNF198 (NM_003453.2,4370-4388).
gttcttctagtaaaagata

SEQ ID NO: 161655 - DNA, 19 bp, Homo sapiens
  siRNA target sequence for ZNF198 (NM_003453.2,4385-4403).
gatatttatgataaagaca

SEQ ID NO: 161656 - DNA, 19 bp, Homo sapiens
  siRNA target sequence for ZNF505 (NM_031218.2,327-345).
caacccctcagttatatgt

SEQ ID NO: 161657 - DNA, 19 bp, Homo sapiens
  siRNA target sequence for ZNF505 (NM_031218.2,330-348).
cccctcagttatatgttct

SEQ ID NO: 161658 - DNA, 19 bp, Homo sapiens
  siRNA target sequence for ZNF505 (NM_031218.2,505-523).
ggacttaaccagtgtagta

SEQ ID NO: 161659 - DNA, 19 bp, Homo sapiens
  siRNA target sequence for ZNF505 (NM_031218.2,508-526).
cttaaccagtgtagtacaa

SEQ ID NO: 161660 - DNA, 19 bp, Homo sapiens
  siRNA target sequence for AGMAT (NM_024758.3,205-223).
ctgccgcagggctctttca

SEQ ID NO: 161661 - DNA, 19 bp, Homo sapiens
  siRNA target sequence for AGMAT (NM_024758.3,453-471).
cttgggacagtcaatccta

SEQ ID NO: 161662 - DNA, 19 bp, Homo sapiens
  siRNA target sequence for AGMAT (NM_024758.3,517-535).
gcgatgtgaatgtcaatct

SEQ ID NO: 161663 - DNA, 19 bp, Homo sapiens
  siRNA target sequence for AGMAT (NM_024758.3,518-536).
cgatgtgaatgtcaatctt

SEQ ID NO: 161664 - DNA, 19 bp, Homo sapiens
  siRNA target sequence for AGMAT (NM_024758.3,572-590).
ggcctatgagaaaattgta

SEQ ID NO: 161665 - DNA, 19 bp, Homo sapiens
  siRNA target sequence for AGMAT (NM_024758.3,621-639).
ggagatcacacaatcacat

SEQ ID NO: 161666 - DNA, 19 bp, Homo sapiens
  siRNA target sequence for AGMAT (NM_024758.3,885-903).
gaagactgctggatgaagt

SEQ ID NO: 161667 - DNA, 19 bp, Homo sapiens
  siRNA target sequence for AGMAT (NM_024758.3,945-963).
ggcaaacccatttatatca

SEQ ID NO: 161668 - DNA, 19 bp, Homo sapiens
  siRNA target sequence for AGMAT (NM_024758.3,1003-1021).
ggacagggacacctgaaat

SEQ ID NO: 161669 - DNA, 19 bp, Homo sapiens
  siRNA target sequence for AGMAT (NM_024758.3,1004-1022).
gacagggacacctgaaatt

SEQ ID NO: 161670 - DNA, 19 bp, Homo sapiens
  siRNA target sequence for AGMAT (NM_024758.3,1041-1059).
caggctctggagatcatca

SEQ ID NO: 161671 - DNA, 19 bp, Homo sapiens
  siRNA target sequence for AGMAT (NM_024758.3,1079-1097).
cgtgatgggctgtgatctt

SEQ ID NO: 161672 - DNA, 19 bp, Homo sapiens
  siRNA target sequence for AGMAT (NM_024758.3,1149-1167).
gctaacctgctgtttgaga

SEQ ID NO: 161673 - DNA, 19 bp, Homo sapiens
  siRNA target sequence for AGMAT (NM_024758.3,1150-1168).
ctaacctgctgtttgagat

SEQ ID NO: 161674 - DNA, 19 bp, Homo sapiens
  siRNA target sequence for ARG1 (NM_000045.2,72-90).
ccagaaccatagggattat

SEQ ID NO: 161675 - DNA, 19 bp, Homo sapiens
  siRNA target sequence for ARG1 (NM_000045.2,137-155).
ggccctacagtattgagaa

SEQ ID NO: 161676 - DNA, 19 bp, Homo sapiens
  siRNA target sequence for ARG1 (NM_000045.2,138-156).
gccctacagtattgagaaa

SEQ ID NO: 161677 - DNA, 19 bp, Homo sapiens
  siRNA target sequence for ARG1 (NM_000045.2,159-177).
ctggtctgcttgagaaact

SEQ ID NO: 161678 - DNA, 19 bp, Homo sapiens
  siRNA target sequence for ARG1 (NM_000045.2,161-179).
ggtctgcttgagaaactta

SEQ ID NO: 161679 - DNA, 19 bp, Homo sapiens
  siRNA target sequence for ARG1 (NM_000045.2,162-180).
gtctgcttgagaaacttaa

SEQ ID NO: 161680 - DNA, 19 bp, Homo sapiens
  siRNA target sequence for ARG1 (NM_000045.2,358-376).
ccacagtttggcaattgga

SEQ ID NO: 161681 - DNA, 19 bp, Homo sapiens
  siRNA target sequence for ARG1 (NM_000045.2,359-377).
cacagtttggcaattggaa

SEQ ID NO: 161682 - DNA, 19 bp, Homo sapiens
  siRNA target sequence for ARG1 (NM_000045.2,394-412).
cagggtccaccctgatctt

SEQ ID NO: 161683 - DNA, 19 bp, Homo sapiens
  siRNA target sequence for ARG1 (NM_000045.2,428-446).
gatgctcacactgatatca

SEQ ID NO: 161684 - DNA, 19 bp, Homo sapiens
  siRNA target sequence for ARG1 (NM_000045.2,478-496).
gcatggacaacctgtatct

SEQ ID NO: 161685 - DNA, 19 bp, Homo sapiens
  siRNA target sequence for ARG1 (NM_000045.2,479-497).
catggacaacctgtatctt

SEQ ID NO: 161686 - DNA, 19 bp, Homo sapiens
  siRNA target sequence for ARG1 (NM_000045.2,607-625).
ccctggggaacactacatt

SEQ ID NO: 161687 - DNA, 19 bp, Homo sapiens
  siRNA target sequence for ARG1 (NM_000045.2,611-629).
ggggaacactacattttga

SEQ ID NO: 161688 - DNA, 19 bp, Homo sapiens
  siRNA target sequence for ARG1 (NM_000045.2,612-630).
gggaacactacattttgaa

SEQ ID NO: 161689 - DNA, 19 bp, Homo sapiens
  siRNA target sequence for ARG1 (NM_000045.2,628-646).
gaaaactctaggcattaaa

SEQ ID NO: 161690 - DNA, 19 bp, Homo sapiens
  siRNA target sequence for ARG1 (NM_000045.2,633-651).
ctctaggcattaaatactt

SEQ ID NO: 161691 - DNA, 19 bp, Homo sapiens
  siRNA target sequence for ARG1 (NM_000045.2,638-656).
ggcattaaatacttttcaa

SEQ ID NO: 161692 - DNA, 19 bp, Homo sapiens
  siRNA target sequence for ARG1 (NM_000045.2,732-750).
ggccaattcatctaagttt

SEQ ID NO: 161693 - DNA, 19 bp, Homo sapiens
  siRNA target sequence for ARG1 (NM_000045.2,861-879).
ggctactctcaggattaga

SEQ ID NO: 161694 - DNA, 19 bp, Homo sapiens
  siRNA target sequence for ARG1 (NM_000045.2,862-880).
gctactctcaggattagat

SEQ ID NO: 161695 - DNA, 19 bp, Homo sapiens
  siRNA target sequence for ARG1 (NM_000045.2,937-955).
gaacacagcagttgcaata

SEQ ID NO: 161696 - DNA, 19 bp, Homo sapiens
  siRNA target sequence for ARG1 (NM_000045.2,951-969).
caataaccttggcttgttt

SEQ ID NO: 161697 - DNA, 19 bp, Homo sapiens
  siRNA target sequence for ARG2 (NM_001172.2,84-102).
cattccatcctgaagaaat

SEQ ID NO: 161698 - DNA, 19 bp, Homo sapiens
  siRNA target sequence for ARG2 (NM_001172.2,107-125).
ccactccgtggctgtgata

SEQ ID NO: 161699 - DNA, 19 bp, Homo sapiens
  siRNA target sequence for ARG2 (NM_001172.2,172-190).
gtcccgctgccataagaga

SEQ ID NO: 161700 - DNA, 19 bp, Homo sapiens
  siRNA target sequence for ARG2 (NM_001172.2,187-205).
gagaagctggcttgatgaa

SEQ ID NO: 161701 - DNA, 19 bp, Homo sapiens
  siRNA target sequence for ARG2 (NM_001172.2,217-235).
gtttgggctgccacctaaa

SEQ ID NO: 161702 - DNA, 19 bp, Homo sapiens
  siRNA target sequence for ARG2 (NM_001172.2,222-240).
ggctgccacctaaaagact

SEQ ID NO: 161703 - DNA, 19 bp, Homo sapiens
  siRNA target sequence for ARG2 (NM_001172.2,284-302).
caacaacctgatagtgaat

SEQ ID NO: 161704 - DNA, 19 bp, Homo sapiens
  siRNA target sequence for ARG2 (NM_001172.2,401-419).
cctggcaatcggtaccatt

SEQ ID NO: 161705 - DNA, 19 bp, Homo sapiens
  siRNA target sequence for ARG2 (NM_001172.2,402-420).
ctggcaatcggtaccatta

SEQ ID NO: 161706 - DNA, 19 bp, Homo sapiens
  siRNA target sequence for ARG2 (NM_001172.2,404-422).
ggcaatcggtaccattagt

SEQ ID NO: 161707 - DNA, 19 bp, Homo sapiens
  siRNA target sequence for ARG2 (NM_001172.2,496-514).
ccacttcatcaggaaatct

SEQ ID NO: 161708 - DNA, 19 bp, Homo sapiens
  siRNA target sequence for ARG2 (NM_001172.2,544-562).
gagaactacaggataaggt

SEQ ID NO: 161709 - DNA, 19 bp, Homo sapiens
  siRNA target sequence for ARG2 (NM_001172.2,583-601).
cctggatcaaaccttgtat

SEQ ID NO: 161710 - DNA, 19 bp, Homo sapiens
  siRNA target sequence for ARG2 (NM_001172.2,587-605).
gatcaaaccttgtatctct

SEQ ID NO: 161711 - DNA, 19 bp, Homo sapiens
  siRNA target sequence for ARG2 (NM_001172.2,598-616).
gtatctcttctgcaagtat

SEQ ID NO: 161712 - DNA, 19 bp, Homo sapiens
  siRNA target sequence for ARG2 (NM_001172.2,607-625).
ctgcaagtattgtgtatat

SEQ ID NO: 161713 - DNA, 19 bp, Homo sapiens
  siRNA target sequence for ARG2 (NM_001172.2,641-659).
ggaccctcctgaacatttt

SEQ ID NO: 161714 - DNA, 19 bp, Homo sapiens
  siRNA target sequence for ARG2 (NM_001172.2,728-746).
catggaacgaacatttgat

SEQ ID NO: 161715 - DNA, 19 bp, Homo sapiens
  siRNA target sequence for ARG2 (NM_001172.2,763-781).
gacaaagaccaatccattt

SEQ ID NO: 161716 - DNA, 19 bp, Homo sapiens
  siRNA target sequence for ARG2 (NM_001172.2,854-872).
ctatcgagaaggcatgtat

SEQ ID NO: 161717 - DNA, 19 bp, Homo sapiens
  siRNA target sequence for ARG2 (NM_001172.2,910-928).
cactggatcttgttgaagt

SEQ ID NO: 161718 - DNA, 19 bp, Homo sapiens
  siRNA target sequence for ARG2 (NM_001172.2,914-932).
ggatcttgttgaagtcaat

SEQ ID NO: 161719 - DNA, 19 bp, Homo sapiens
  siRNA target sequence for ARG2 (NM_001172.2,1018-1036).
gagaaggagggcatattgt

SEQ ID NO: 161720 - DNA, 19 bp, Homo sapiens
  siRNA target sequence for ARG2 (NM_001172.2,1083-1101).
caagcacgtgtgagaattt

SEQ ID NO: 161721 - DNA, 19 bp, Homo sapiens
  siRNA target sequence for B3GAT1 (NM_018644.2,352-370).
cccctgctcgcggtacata

SEQ ID NO: 161722 - DNA, 19 bp, Homo sapiens
  siRNA target sequence for B3GAT1 (NM_018644.2,353-371).
ccctgctcgcggtacataa

SEQ ID NO: 161723 - DNA, 19 bp, Homo sapiens
  siRNA target sequence for B3GAT1 (NM_018644.2,357-375).
gctcgcggtacataaggat

SEQ ID NO: 161724 - DNA, 19 bp, Homo sapiens
  siRNA target sequence for B3GAT1 (NM_018644.2,665-683).
gcgacaccggcctcaacta

SEQ ID NO: 161725 - DNA, 19 bp, Homo sapiens
  siRNA target sequence for B3GAT1 (NM_018644.2,667-685).
gacaccggcctcaactaca

SEQ ID NO: 161726 - DNA, 19 bp, Homo sapiens
  siRNA target sequence for B3GAT1 (NM_018644.2,980-998).
gctggaagacggtgtttga

SEQ ID NO: 161727 - DNA, 19 bp, Homo sapiens
  siRNA target sequence for B3GAT1 (NM_018644.2,1002-1020).
ccaccggccatttgcaata

SEQ ID NO: 161728 - DNA, 19 bp, Homo sapiens
  siRNA target sequence for B3GAT1 (NM_018644.2,1006-1024).
cggccatttgcaatagaca

SEQ ID NO: 161729 - DNA, 19 bp, Homo sapiens
  siRNA target sequence for B3GAT1 (NM_018644.2,1063-1081).
cgaagccaggcctacttca

SEQ ID NO: 161730 - DNA, 19 bp, Homo sapiens
  siRNA target sequence for B3GAT1 (NM_018644.2,1064-1082).
gaagccaggcctacttcaa

SEQ ID NO: 161731 - DNA, 19 bp, Homo sapiens
  siRNA target sequence for B3GAT2 (NM_080742.1,40-58).
ccctggatcctaattgtca

SEQ ID NO: 161732 - DNA, 19 bp, Homo sapiens
  siRNA target sequence for B3GAT2 (NM_080742.1,41-59).
cctggatcctaattgtcat

SEQ ID NO: 161733 - DNA, 19 bp, Homo sapiens
  siRNA target sequence for B3GAT2 (NM_080742.1,663-681).
ggtggaaaacggcaaagtt

SEQ ID NO: 161734 - DNA, 19 bp, Homo sapiens
  siRNA target sequence for B3GAT2 (NM_080742.1,723-741).
catcgacatggcaggattt

SEQ ID NO: 161735 - DNA, 19 bp, Homo sapiens
  siRNA target sequence for B3GAT2 (NM_080742.1,743-761).
ctgtaagtcttcaagtcat

SEQ ID NO: 161736 - DNA, 19 bp, Homo sapiens
  siRNA target sequence for B3GAT2 (NM_080742.1,767-785).
ccaatccaaaagctgtatt

SEQ ID NO: 161737 - DNA, 19 bp, Homo sapiens
  siRNA target sequence for B3GAT2 (NM_080742.1,802-820).
cagccagggatgcaagaat

SEQ ID NO: 161738 - DNA, 19 bp, Homo sapiens
  siRNA target sequence for B3GAT2 (NM_080742.1,804-822).
gccagggatgcaagaatct

SEQ ID NO: 161739 - DNA, 19 bp, Homo sapiens
  siRNA target sequence for B3GAT2 (NM_080742.1,810-828).
gatgcaagaatctgacttt

SEQ ID NO: 161740 - DNA, 19 bp, Homo sapiens
  siRNA target sequence for B3GAT2 (NM_080742.1,814-832).
caagaatctgactttctca

SEQ ID NO: 161741 - DNA, 19 bp, Homo sapiens
  siRNA target sequence for B3GAT2 (NM_080742.1,902-920).
ctcggacagagaaggttaa

SEQ ID NO: 161742 - DNA, 19 bp, Homo sapiens
  siRNA target sequence for B3GAT3 (NM_012200.2,241-259).
ccgaggccctgcctactat

SEQ ID NO: 161743 - DNA, 19 bp, Homo sapiens
  siRNA target sequence for B3GAT3 (NM_012200.2,243-261).
gaggccctgcctactatct

SEQ ID NO: 161744 - DNA, 19 bp, Homo sapiens
  siRNA target sequence for B3GAT3 (NM_012200.2,245-263).
ggccctgcctactatctat

SEQ ID NO: 161745 - DNA, 19 bp, Homo sapiens
  siRNA target sequence for B3GAT3 (NM_012200.2,247-265).
ccctgcctactatctatgt

SEQ ID NO: 161746 - DNA, 19 bp, Homo sapiens
  siRNA target sequence for B3GAT3 (NM_012200.2,248-266).
cctgcctactatctatgtt

SEQ ID NO: 161747 - DNA, 19 bp, Homo sapiens
  siRNA target sequence for B3GAT3 (NM_012200.2,251-269).
gcctactatctatgttgtt

SEQ ID NO: 161748 - DNA, 19 bp, Homo sapiens
  siRNA target sequence for B3GAT3 (NM_012200.2,252-270).
cctactatctatgttgtta

SEQ ID NO: 161749 - DNA, 19 bp, Homo sapiens
  siRNA target sequence for B3GAT3 (NM_012200.2,586-604).
cccaaggagtcgtctactt

SEQ ID NO: 161750 - DNA, 19 bp, Homo sapiens
  siRNA target sequence for B3GAT3 (NM_012200.2,587-605).
ccaaggagtcgtctacttt

SEQ ID NO: 161751 - DNA, 19 bp, Homo sapiens
  siRNA target sequence for B3GAT3 (NM_012200.2,805-823).
ccctgcccttgctgttaga

SEQ ID NO: 161752 - DNA, 19 bp, Homo sapiens
  siRNA target sequence for B3GAT3 (NM_012200.2,806-824).
cctgcccttgctgttagat

SEQ ID NO: 161753 - DNA, 19 bp, Homo sapiens
  siRNA target sequence for B3GAT3 (NM_012200.2,827-845).
gcccaatgcccaatttgat

SEQ ID NO: 161754 - DNA, 19 bp, Homo sapiens
  siRNA target sequence for B3GAT3 (NM_012200.2,828-846).
cccaatgcccaatttgatt

SEQ ID NO: 161755 - DNA, 19 bp, Homo sapiens
  siRNA target sequence for B3GAT3 (NM_012200.2,1012-1030).
gctcagacccagcaattga

SEQ ID NO: 161756 - DNA, 19 bp, Homo sapiens
  siRNA target sequence for B4GALT6 (NM_004775.2,256-274).
ggatgatgcgggtttccaa

SEQ ID NO: 161757 - DNA, 19 bp, Homo sapiens
  siRNA target sequence for B4GALT6 (NM_004775.2,257-275).
gatgatgcgggtttccaat

SEQ ID NO: 161758 - DNA, 19 bp, Homo sapiens
  siRNA target sequence for B4GALT6 (NM_004775.2,313-331).
cttcgtcctgtctgtactt

SEQ ID NO: 161759 - DNA, 19 bp, Homo sapiens
  siRNA target sequence for B4GALT6 (NM_004775.2,345-363).
ccaggcatcgccaacacat

SEQ ID NO: 161760 - DNA, 19 bp, Homo sapiens
  siRNA target sequence for B4GALT6 (NM_004775.2,346-364).
caggcatcgccaacacata

SEQ ID NO: 161761 - DNA, 19 bp, Homo sapiens
  siRNA target sequence for B4GALT6 (NM_004775.2,349-367).
gcatcgccaacacatatct

SEQ ID NO: 161762 - DNA, 19 bp, Homo sapiens
  siRNA target sequence for B4GALT6 (NM_004775.2,353-371).
cgccaacacatatctcttt

SEQ ID NO: 161763 - DNA, 19 bp, Homo sapiens
  siRNA target sequence for B4GALT6 (NM_004775.2,374-392).
ggtacaagctcgaggtata

SEQ ID NO: 161764 - DNA, 19 bp, Homo sapiens
  siRNA target sequence for B4GALT6 (NM_004775.2,375-393).
gtacaagctcgaggtataa

SEQ ID NO: 161765 - DNA, 19 bp, Homo sapiens
  siRNA target sequence for B4GALT6 (NM_004775.2,378-396).
caagctcgaggtataatgt

SEQ ID NO: 161766 - DNA, 19 bp, Homo sapiens
  siRNA target sequence for B4GALT6 (NM_004775.2,381-399).
gctcgaggtataatgttga

SEQ ID NO: 161767 - DNA, 19 bp, Homo sapiens
  siRNA target sequence for B4GALT6 (NM_004775.2,387-405).
ggtataatgttgagagaaa

SEQ ID NO: 161768 - DNA, 19 bp, Homo sapiens
  siRNA target sequence for B4GALT6 (NM_004775.2,457-475).
cgctcaacggtacagatta

SEQ ID NO: 161769 - DNA, 19 bp, Homo sapiens
  siRNA target sequence for B4GALT6 (NM_004775.2,458-476).
gctcaacggtacagattat

SEQ ID NO: 161770 - DNA, 19 bp, Homo sapiens
  siRNA target sequence for B4GALT6 (NM_004775.2,477-495).
cccgaaggcaataattcaa

SEQ ID NO: 161771 - DNA, 19 bp, Homo sapiens
  siRNA target sequence for B4GALT6 (NM_004775.2,479-497).
cgaaggcaataattcaagt

SEQ ID NO: 161772 - DNA, 19 bp, Homo sapiens
  siRNA target sequence for B4GALT6 (NM_004775.2,483-501).
ggcaataattcaagtgatt

SEQ ID NO: 161773 - DNA, 19 bp, Homo sapiens
  siRNA target sequence for B4GALT6 (NM_004775.2,484-502).
gcaataattcaagtgatta

SEQ ID NO: 161774 - DNA, 19 bp, Homo sapiens
  siRNA target sequence for B4GALT6 (NM_004775.2,485-503).
caataattcaagtgattat

SEQ ID NO: 161775 - DNA, 19 bp, Homo sapiens
  siRNA target sequence for B4GALT6 (NM_004775.2,520-538).
cgtatctcccggaaaactt

SEQ ID NO: 161776 - DNA, 19 bp, Homo sapiens
  siRNA target sequence for B4GALT6 (NM_004775.2,528-546).
ccggaaaacttcacatact

SEQ ID NO: 161777 - DNA, 19 bp, Homo sapiens
  siRNA target sequence for B4GALT6 (NM_004775.2,564-582).
ccagaaaagctgccttata

SEQ ID NO: 161778 - DNA, 19 bp, Homo sapiens
  siRNA target sequence for B4GALT6 (NM_004775.2,586-604).
gaggattcctcaatgtcaa

SEQ ID NO: 161779 - DNA, 19 bp, Homo sapiens
  siRNA target sequence for B4GALT6 (NM_004775.2,610-628).
gcgaagtcagttttgatga

SEQ ID NO: 161780 - DNA, 19 bp, Homo sapiens
  siRNA target sequence for B4GALT6 (NM_004775.2,641-659).
cttctccaaggatttagat

SEQ ID NO: 161781 - DNA, 19 bp, Homo sapiens
  siRNA target sequence for B4GALT6 (NM_004775.2,731-749).
ccgtaatcgccatgaacat

SEQ ID NO: 161782 - DNA, 19 bp, Homo sapiens
  siRNA target sequence for B4GALT6 (NM_004775.2,733-751).
gtaatcgccatgaacatct

SEQ ID NO: 161783 - DNA, 19 bp, Homo sapiens
  siRNA target sequence for B4GALT6 (NM_004775.2,827-845).
gactggcacacaacctttt

SEQ ID NO: 161784 - DNA, 19 bp, Homo sapiens
  siRNA target sequence for B4GALT6 (NM_004775.2,848-866).
ccgtgcgatgcttttcaat

SEQ ID NO: 161785 - DNA, 19 bp, Homo sapiens
  siRNA target sequence for B4GALT6 (NM_004775.2,850-868).
gtgcgatgcttttcaatgt

SEQ ID NO: 161786 - DNA, 19 bp, Homo sapiens
  siRNA target sequence for B4GALT6 (NM_004775.2,897-915).
gtctgggactgtgtaatct

SEQ ID NO: 161787 - DNA, 19 bp, Homo sapiens
  siRNA target sequence for B4GALT6 (NM_004775.2,917-935).
ccacgatgtggatcatcta

SEQ ID NO: 161788 - DNA, 19 bp, Homo sapiens
  siRNA target sequence for B4GALT6 (NM_004775.2,939-957).
gaaaatgaccggaactatt

SEQ ID NO: 161789 - DNA, 19 bp, Homo sapiens
  siRNA target sequence for B4GALT6 (NM_004775.2,967-985).
gagaaatgccacgtcattt

SEQ ID NO: 161790 - DNA, 19 bp, Homo sapiens
  siRNA target sequence for B4GALT6 (NM_004775.2,1140-1158).
gttcactatgctggatata

SEQ ID NO: 161791 - DNA, 19 bp, Homo sapiens
  siRNA target sequence for B4GALT6 (NM_004775.2,1173-1191).
gagggagacttaggaaaat

SEQ ID NO: 161792 - DNA, 19 bp, Homo sapiens
  siRNA target sequence for B4GALT6 (NM_004775.2,1176-1194).
ggagacttaggaaaataca

SEQ ID NO: 161793 - DNA, 19 bp, Homo sapiens
  siRNA target sequence for B4GALT6 (NM_004775.2,1236-1254).
ggacggtataaattactaa

SEQ ID NO: 161794 - DNA, 19 bp, Homo sapiens
  siRNA target sequence for B4GALT6 (NM_004775.2,1240-1258).
ggtataaattactaaggta

SEQ ID NO: 161795 - DNA, 19 bp, Homo sapiens
  siRNA target sequence for B4GALT6 (NM_004775.2,1261-1279).
ccaaggagcgtcagtacat

SEQ ID NO: 161796 - DNA, 19 bp, Homo sapiens
  siRNA target sequence for B4GALT6 (NM_004775.2,1277-1295).
catcgatggactgaacaat

SEQ ID NO: 161797 - DNA, 19 bp, Homo sapiens
  siRNA target sequence for B4GALT6 (NM_004775.2,1280-1298).
cgatggactgaacaattta

SEQ ID NO: 161798 - DNA, 19 bp, Homo sapiens
  siRNA target sequence for B4GALT6 (NM_004775.2,1317-1335).
ctggttgataggttgtata

SEQ ID NO: 161799 - DNA, 19 bp, Homo sapiens
  siRNA target sequence for B4GALT6 (NM_004775.2,1319-1337).
ggttgataggttgtataca

SEQ ID NO: 161800 - DNA, 19 bp, Homo sapiens
  siRNA target sequence for B4GALT6 (NM_004775.2,1320-1338).
gttgataggttgtatacaa

SEQ ID NO: 161801 - DNA, 19 bp, Homo sapiens
  siRNA target sequence for B4GALT6 (NM_004775.2,1323-1341).
gataggttgtatacaaaca

SEQ ID NO: 161802 - DNA, 19 bp, Homo sapiens
  siRNA target sequence for CDIPT (NM_006319.2,376-394).
ggttatgcccggattgtct

SEQ ID NO: 161803 - DNA, 19 bp, Homo sapiens
  siRNA target sequence for CDIPT (NM_006319.2,377-395).
gttatgcccggattgtctt

SEQ ID NO: 161804 - DNA, 19 bp, Homo sapiens
  siRNA target sequence for CDIPT (NM_006319.2,391-409).
gtcttcgccatcatttctt

SEQ ID NO: 161805 - DNA, 19 bp, Homo sapiens
  siRNA target sequence for CDIPT (NM_006319.2,718-736).
ccggtgcttcggatctact

SEQ ID NO: 161806 - DNA, 19 bp, Homo sapiens
  siRNA target sequence for CDIPT (NM_006319.2,719-737).
cggtgcttcggatctacta

SEQ ID NO: 161807 - DNA, 19 bp, Homo sapiens
  siRNA target sequence for CDIPT (NM_006319.2,721-739).
gtgcttcggatctactaca

SEQ ID NO: 161808 - DNA, 19 bp, Homo sapiens
  siRNA target sequence for CDIPT (NM_006319.2,772-790).
gggaatgagctcttctact

SEQ ID NO: 161809 - DNA, 19 bp, Homo sapiens
  siRNA target sequence for DCD (NM_053283.1,265-283).
ggcctagacggagcaaaaa

SEQ ID NO: 161810 - DNA, 19 bp, Homo sapiens
  siRNA target sequence for DCD (NM_053283.1,291-309).
ggggggactcggaaaacta

SEQ ID NO: 161811 - DNA, 19 bp, Homo sapiens
  siRNA target sequence for DCD (NM_053283.1,296-314).
gactcggaaaactaggaaa

SEQ ID NO: 161812 - DNA, 19 bp, Homo sapiens
  siRNA target sequence for DCD (NM_053283.1,350-368).
gagccgtccatgacgttaa

SEQ ID NO: 161813 - DNA, 19 bp, Homo sapiens
  siRNA target sequence for DCD (NM_053283.1,353-371).
ccgtccatgacgttaaaga

SEQ ID NO: 161814 - DNA, 19 bp, Homo sapiens
  siRNA target sequence for DCD (NM_053283.1,372-390).
cgtccttgactcagtacta

SEQ ID NO: 161815 - DNA, 19 bp, Homo sapiens
  siRNA target sequence for DKFZP566E144 (NM_015523.1,229-247).
caggattggacattgagaa

SEQ ID NO: 161816 - DNA, 19 bp, Homo sapiens
  siRNA target sequence for DKFZP566E144 (NM_015523.1,261-279).
gagatggcctgtctgataa

SEQ ID NO: 161817 - DNA, 19 bp, Homo sapiens
  siRNA target sequence for DKFZP566E144 (NM_015523.1,280-298).
ctgactctgatctcaacat

SEQ ID NO: 161818 - DNA, 19 bp, Homo sapiens
  siRNA target sequence for DKFZP566E144 (NM_015523.1,282-300).
gactctgatctcaacattt

SEQ ID NO: 161819 - DNA, 19 bp, Homo sapiens
  siRNA target sequence for DKFZP566E144 (NM_015523.1,306-324).
gaaggtcctaacctgatta

SEQ ID NO: 161820 - DNA, 19 bp, Homo sapiens
  siRNA target sequence for DKFZP566E144 (NM_015523.1,309-327).
ggtcctaacctgattataa

SEQ ID NO: 161821 - DNA, 19 bp, Homo sapiens
  siRNA target sequence for DKFZP566E144 (NM_015523.1,310-328).
gtcctaacctgattataaa

SEQ ID NO: 161822 - DNA, 19 bp, Homo sapiens
  siRNA target sequence for DKFZP566E144 (NM_015523.1,313-331).
ctaacctgattataaaaca

SEQ ID NO: 161823 - DNA, 19 bp, Homo sapiens
  siRNA target sequence for DKFZP566E144 (NM_015523.1,345-363).
ctggacagcatgtcagatt

SEQ ID NO: 161824 - DNA, 19 bp, Homo sapiens
  siRNA target sequence for DKFZP566E144 (NM_015523.1,402-420).
gcagtgaaggagagtacaa

SEQ ID NO: 161825 - DNA, 19 bp, Homo sapiens
  siRNA target sequence for DKFZP566E144 (NM_015523.1,407-425).
gaaggagagtacaattaca

SEQ ID NO: 161826 - DNA, 19 bp, Homo sapiens
  siRNA target sequence for DKFZP566E144 (NM_015523.1,431-449).
gcaggcagagtatgaattt

SEQ ID NO: 161827 - DNA, 19 bp, Homo sapiens
  siRNA target sequence for DKFZP566E144 (NM_015523.1,609-627).
cgctggtatccagaagaat

SEQ ID NO: 161828 - DNA, 19 bp, Homo sapiens
  siRNA target sequence for DKFZP566E144 (NM_015523.1,664-682).
cacttgatgacattagtga

SEQ ID NO: 161829 - DNA, 19 bp, Homo sapiens
  siRNA target sequence for DKFZP566E144 (NM_015523.1,708-726).
cgaaataacatcttcaaga

SEQ ID NO: 161830 - DNA, 19 bp, Homo sapiens
  siRNA target sequence for GALNT1 (NM_020474.2,61-79).
cctagccacctccttgatt

SEQ ID NO: 161831 - DNA, 19 bp, Homo sapiens
  siRNA target sequence for GALNT1 (NM_020474.2,62-80).
ctagccacctccttgattt

SEQ ID NO: 161832 - DNA, 19 bp, Homo sapiens
  siRNA target sequence for GALNT1 (NM_020474.2,170-188).
gttctagagccagtacaaa

SEQ ID NO: 161833 - DNA, 19 bp, Homo sapiens
  siRNA target sequence for GALNT1 (NM_020474.2,222-240).
cagtcgtcattcctaaaga

SEQ ID NO: 161834 - DNA, 19 bp, Homo sapiens
  siRNA target sequence for GALNT1 (NM_020474.2,316-334).
cagatctttaccagatgtt

SEQ ID NO: 161835 - DNA, 19 bp, Homo sapiens
  siRNA target sequence for GALNT1 (NM_020474.2,358-376).
ggtgtatccagataatctt

SEQ ID NO: 161836 - DNA, 19 bp, Homo sapiens
  siRNA target sequence for GALNT1 (NM_020474.2,384-402).
caagtgtggtgattgtttt

SEQ ID NO: 161837 - DNA, 19 bp, Homo sapiens
  siRNA target sequence for GALNT1 (NM_020474.2,435-453).
ctgtccatagtgtcattaa

SEQ ID NO: 161838 - DNA, 19 bp, Homo sapiens
  siRNA target sequence for GALNT1 (NM_020474.2,525-543).
ggcctttagagagttatgt

SEQ ID NO: 161839 - DNA, 19 bp, Homo sapiens
  siRNA target sequence for GALNT1 (NM_020474.2,560-578).
ccagttcatgtaattcgaa

SEQ ID NO: 161840 - DNA, 19 bp, Homo sapiens
  siRNA target sequence for GALNT1 (NM_020474.2,598-616).
gatcagagctagattaaaa

SEQ ID NO: 161841 - DNA, 19 bp, Homo sapiens
  siRNA target sequence for GALNT1 (NM_020474.2,697-715).
cttggccaggatcaaacat

SEQ ID NO: 161842 - DNA, 19 bp, Homo sapiens
  siRNA target sequence for GALNT1 (NM_020474.2,901-919).
catggcaggaggccttttt

SEQ ID NO: 161843 - DNA, 19 bp, Homo sapiens
  siRNA target sequence for GALNT1 (NM_020474.2,943-961).
ggaaattggaacatatgat

SEQ ID NO: 161844 - DNA, 19 bp, Homo sapiens
  siRNA target sequence for GALNT1 (NM_020474.2,1191-1209).
gtgttacaaaggtagatta

SEQ ID NO: 161845 - DNA, 19 bp, Homo sapiens
  siRNA target sequence for GALNT1 (NM_020474.2,1201-1219).
ggtagattatggagatata

SEQ ID NO: 161846 - DNA, 19 bp, Homo sapiens
  siRNA target sequence for GALNT1 (NM_020474.2,1205-1223).
gattatggagatatatcgt

SEQ ID NO: 161847 - DNA, 19 bp, Homo sapiens
  siRNA target sequence for GALNT1 (NM_020474.2,1222-1240).
gtcaagagttggtctaaga

SEQ ID NO: 161848 - DNA, 19 bp, Homo sapiens
  siRNA target sequence for GALNT1 (NM_020474.2,1233-1251).
gtctaagacacaaactaca

SEQ ID NO: 161849 - DNA, 19 bp, Homo sapiens
  siRNA target sequence for GALNT1 (NM_020474.2,1250-1268).
caatgcaaacctttttcct

SEQ ID NO: 161850 - DNA, 19 bp, Homo sapiens
  siRNA target sequence for GALNT1 (NM_020474.2,1270-1288).
gtacctagagaatatatat

SEQ ID NO: 161851 - DNA, 19 bp, Homo sapiens
  siRNA target sequence for GALNT1 (NM_020474.2,1298-1316).
caaattccacgtcactatt

SEQ ID NO: 161852 - DNA, 19 bp, Homo sapiens
  siRNA target sequence for GALNT1 (NM_020474.2,1304-1322).
ccacgtcactatttctcat

SEQ ID NO: 161853 - DNA, 19 bp, Homo sapiens
  siRNA target sequence for GALNT1 (NM_020474.2,1305-1323).
cacgtcactatttctcatt

SEQ ID NO: 161854 - DNA, 19 bp, Homo sapiens
  siRNA target sequence for GALNT1 (NM_020474.2,1320-1338).
cattgggagagatacgaaa

SEQ ID NO: 161855 - DNA, 19 bp, Homo sapiens
  siRNA target sequence for GALNT1 (NM_020474.2,1347-1365).
cgaatcagtgtctagataa

SEQ ID NO: 161856 - DNA, 19 bp, Homo sapiens
  siRNA target sequence for GALNT1 (NM_020474.2,1366-1384).
catggctagaaaagagaat

SEQ ID NO: 161857 - DNA, 19 bp, Homo sapiens
  siRNA target sequence for GALNT1 (NM_020474.2,1418-1436).
gggggtaatcaggttttct

SEQ ID NO: 161858 - DNA, 19 bp, Homo sapiens
  siRNA target sequence for GALNT1 (NM_020474.2,1422-1440).
gtaatcaggttttctctta

SEQ ID NO: 161859 - DNA, 19 bp, Homo sapiens
  siRNA target sequence for GALNT1 (NM_020474.2,1445-1463).
gccaacaaagaaattagaa

SEQ ID NO: 161860 - DNA, 19 bp, Homo sapiens
  siRNA target sequence for GALNT1 (NM_020474.2,1493-1511).
cttaatggcccagttacaa

SEQ ID NO: 161861 - DNA, 19 bp, Homo sapiens
  siRNA target sequence for GALNT1 (NM_020474.2,1580-1598).
catgtgaacagtaatcagt

SEQ ID NO: 161862 - DNA, 19 bp, Homo sapiens
  siRNA target sequence for GALNT1 (NM_020474.2,1687-1705).
cgtcaccctgccagaaata

SEQ ID NO: 161863 - DNA, 19 bp, Homo sapiens
  siRNA target sequence for GALNT1 (NM_020474.2,1688-1706).
gtcaccctgccagaaatat

SEQ ID NO: 161864 - DNA, 19 bp, Homo sapiens
  siRNA target sequence for NPEPL1 (NM_024663.2,617-635).
gacacaccctgcaatgaga

SEQ ID NO: 161865 - DNA, 19 bp, Homo sapiens
  siRNA target sequence for NPEPL1 (NM_024663.2,729-747).
gaggatttggaggaatcta

SEQ ID NO: 161866 - DNA, 19 bp, Homo sapiens
  siRNA target sequence for NPEPL1 (NM_024663.2,837-855).
gcaaaggcatcgtctatga

SEQ ID NO: 161867 - DNA, 19 bp, Homo sapiens
  siRNA target sequence for NPEPL1 (NM_024663.2,951-969).
caatcaagcagggtttcaa

SEQ ID NO: 161868 - DNA, 19 bp, Homo sapiens
  siRNA target sequence for NPEPL1 (NM_024663.2,1023-1041).
cgacaaggccagatgacat

SEQ ID NO: 161869 - DNA, 19 bp, Homo sapiens
  siRNA target sequence for NPEPL1 (NM_024663.2,1112-1130).
gatggcgtgtcctatgctt

SEQ ID NO: 161870 - DNA, 19 bp, Homo sapiens
  siRNA target sequence for NPEPL1 (NM_024663.2,1337-1355).
gtggcggacatgaagaact

SEQ ID NO: 161871 - DNA, 19 bp, Homo sapiens
  siRNA target sequence for PDE8A (NM_002605.1,192-210).
gccccgagcatccacattt

SEQ ID NO: 161872 - DNA, 19 bp, Homo sapiens
  siRNA target sequence for PDE8A (NM_002605.1,389-407).
gtttggccccatgagattt

SEQ ID NO: 161873 - DNA, 19 bp, Homo sapiens
  siRNA target sequence for PDE8A (NM_002605.1,394-412).
gccccatgagatttcatca

SEQ ID NO: 161874 - DNA, 19 bp, Homo sapiens
  siRNA target sequence for PDE8A (NM_002605.1,395-413).
ccccatgagatttcatcaa

SEQ ID NO: 161875 - DNA, 19 bp, Homo sapiens
  siRNA target sequence for PDE8A (NM_002605.1,414-432).
gatcaacttcaggtacttt

SEQ ID NO: 161876 - DNA, 19 bp, Homo sapiens
  siRNA target sequence for PDE8A (NM_002605.1,423-441).
caggtacttttagtgttta

SEQ ID NO: 161877 - DNA, 19 bp, Homo sapiens
  siRNA target sequence for PDE8A (NM_002605.1,450-468).
gataaccaatgtaatggat

SEQ ID NO: 161878 - DNA, 19 bp, Homo sapiens
  siRNA target sequence for PDE8A (NM_002605.1,483-501).
gaaaaagcagggtttaagt

SEQ ID NO: 161879 - DNA, 19 bp, Homo sapiens
  siRNA target sequence for PDE8A (NM_002605.1,492-510).
gggtttaagtgtacagtta

SEQ ID NO: 161880 - DNA, 19 bp, Homo sapiens
  siRNA target sequence for PDE8A (NM_002605.1,545-563).
ggacaaacatcatgacatt

SEQ ID NO: 161881 - DNA, 19 bp, Homo sapiens
  siRNA target sequence for PDE8A (NM_002605.1,566-584).
catcatagaccacagaaat

SEQ ID NO: 161882 - DNA, 19 bp, Homo sapiens
  siRNA target sequence for PDE8A (NM_002605.1,606-624).
gcactgtgcaggtctatca

SEQ ID NO: 161883 - DNA, 19 bp, Homo sapiens
  siRNA target sequence for PDE8A (NM_002605.1,609-627).
ctgtgcaggtctatcagat

SEQ ID NO: 161884 - DNA, 19 bp, Homo sapiens
  siRNA target sequence for PDE8A (NM_002605.1,614-632).
caggtctatcagatcatca

SEQ ID NO: 161885 - DNA, 19 bp, Homo sapiens
  siRNA target sequence for PDE8A (NM_002605.1,695-713).
cgtaatgcctttcatttct

SEQ ID NO: 161886 - DNA, 19 bp, Homo sapiens
  siRNA target sequence for PDE8A (NM_002605.1,794-812).
ggtgcgatcacaactgaaa

SEQ ID NO: 161887 - DNA, 19 bp, Homo sapiens
  siRNA target sequence for PDE8A (NM_002605.1,798-816).
cgatcacaactgaaactca

SEQ ID NO: 161888 - DNA, 19 bp, Homo sapiens
  siRNA target sequence for PDE8A (NM_002605.1,817-835).
gggcttgtaactcagtatt

SEQ ID NO: 161889 - DNA, 19 bp, Homo sapiens
  siRNA target sequence for PDE8A (NM_002605.1,874-892).
caagcgaagaccgttttat

SEQ ID NO: 161890 - DNA, 19 bp, Homo sapiens
  siRNA target sequence for PDE8A (NM_002605.1,877-895).
gcgaagaccgttttataca

SEQ ID NO: 161891 - DNA, 19 bp, Homo sapiens
  siRNA target sequence for PDE8A (NM_002605.1,879-897).
gaagaccgttttatacagt

SEQ ID NO: 161892 - DNA, 19 bp, Homo sapiens
  siRNA target sequence for PDE8A (NM_002605.1,885-903).
cgttttatacagtatgcaa

SEQ ID NO: 161893 - DNA, 19 bp, Homo sapiens
  siRNA target sequence for PDE8A (NM_002605.1,896-914).
gtatgcaaatcctgcattt

SEQ ID NO: 161894 - DNA, 19 bp, Homo sapiens
  siRNA target sequence for PDE8A (NM_002605.1,929-947).
ctatcagtcaggtgaatta

SEQ ID NO: 161895 - DNA, 19 bp, Homo sapiens
  siRNA target sequence for PDE8A (NM_002605.1,964-982).
gagaagtgcctataaatga

SEQ ID NO: 161896 - DNA, 19 bp, Homo sapiens
  siRNA target sequence for PDE8A (NM_002605.1,990-1008).
gctgacttgctcgatacta

SEQ ID NO: 161897 - DNA, 19 bp, Homo sapiens
  siRNA target sequence for PDE8A (NM_002605.1,991-1009).
ctgacttgctcgatactat

SEQ ID NO: 161898 - DNA, 19 bp, Homo sapiens
  siRNA target sequence for PDE8A (NM_002605.1,995-1013).
cttgctcgatactataaat

SEQ ID NO: 161899 - DNA, 19 bp, Homo sapiens
  siRNA target sequence for PDE8A (NM_002605.1,998-1016).
gctcgatactataaattca

SEQ ID NO: 161900 - DNA, 19 bp, Homo sapiens
  siRNA target sequence for PDE8A (NM_002605.1,999-1017).
ctcgatactataaattcat

SEQ ID NO: 161901 - DNA, 19 bp, Homo sapiens
  siRNA target sequence for PDE8A (NM_002605.1,1031-1049).
caaggagtggcaaggaatt

SEQ ID NO: 161902 - DNA, 19 bp, Homo sapiens
  siRNA target sequence for PDE8A (NM_002605.1,1132-1150).
gacactatgtgtccattat

SEQ ID NO: 161903 - DNA, 19 bp, Homo sapiens
  siRNA target sequence for PDE8A (NM_002605.1,1136-1154).
ctatgtgtccattatcaga

SEQ ID NO: 161904 - DNA, 19 bp, Homo sapiens
  siRNA target sequence for PDE8A (NM_002605.1,1204-1222).
ctgacactcatacagataa

SEQ ID NO: 161905 - DNA, 19 bp, Homo sapiens
  siRNA target sequence for PDE8A (NM_002605.1,1331-1349).
gatacattccatgacaatt

SEQ ID NO: 161906 - DNA, 19 bp, Homo sapiens
  siRNA target sequence for PDE8A (NM_002605.1,1356-1374).
cccatcaccaaggtaatca

SEQ ID NO: 161907 - DNA, 19 bp, Homo sapiens
  siRNA target sequence for PDE8A (NM_002605.1,1363-1381).
ccaaggtaatcaatattat

SEQ ID NO: 161908 - DNA, 19 bp, Homo sapiens
  siRNA target sequence for PDE8A (NM_002605.1,1367-1385).
ggtaatcaatattatcaat

SEQ ID NO: 161909 - DNA, 19 bp, Homo sapiens
  siRNA target sequence for PDE8A (NM_002605.1,1512-1530).
cttgttgggggcttaatgt

SEQ ID NO: 161910 - DNA, 19 bp, Homo sapiens
  siRNA target sequence for PDE8A (NM_002605.1,1533-1551).
gatggtttgcgaagactat

SEQ ID NO: 161911 - DNA, 19 bp, Homo sapiens
  siRNA target sequence for PDE8A (NM_002605.1,1546-1564).
gactatcagggaatgaata

SEQ ID NO: 161912 - DNA, 19 bp, Homo sapiens
  siRNA target sequence for PDE8A (NM_002605.1,1556-1574).
gaatgaatatgttctttca

SEQ ID NO: 161913 - DNA, 19 bp, Homo sapiens
  siRNA target sequence for PDE8A (NM_002605.1,1587-1605).
caaatggtttcaagcaata

SEQ ID NO: 161914 - DNA, 19 bp, Homo sapiens
  siRNA target sequence for PDE8A (NM_002605.1,1698-1716).
gaggctgccacccacaata

SEQ ID NO: 161915 - DNA, 19 bp, Homo sapiens
  siRNA target sequence for PDE8A (NM_002605.1,1724-1742).
gatttatcttggtctcaaa

SEQ ID NO: 161916 - DNA, 19 bp, Homo sapiens
  siRNA target sequence for PDE8A (NM_002605.1,1784-1802).
cgagtcaacgctaagatca

SEQ ID NO: 161917 - DNA, 19 bp, Homo sapiens
  siRNA target sequence for PDE8A (NM_002605.1,1798-1816).
gatcatggttacaaattat

SEQ ID NO: 161918 - DNA, 19 bp, Homo sapiens
  siRNA target sequence for PDE8A (NM_002605.1,1838-1856).
caatccctaccacaattct

SEQ ID NO: 161919 - DNA, 19 bp, Homo sapiens
  siRNA target sequence for PDE8A (NM_002605.1,1881-1899).
gccactgcctattttctct

SEQ ID NO: 161920 - DNA, 19 bp, Homo sapiens
  siRNA target sequence for PDE8A (NM_002605.1,1994-2012).
caactccttcctgtgtaat

SEQ ID NO: 161921 - DNA, 19 bp, Homo sapiens
  siRNA target sequence for PDE8A (NM_002605.1,2126-2144).
catggagaggaatgattat

SEQ ID NO: 161922 - DNA, 19 bp, Homo sapiens
  siRNA target sequence for PDE8A (NM_002605.1,2149-2167).
cactgcgccaggggattat

SEQ ID NO: 161923 - DNA, 19 bp, Homo sapiens
  siRNA target sequence for PDE8A (NM_002605.1,2237-2255).
caaacccttggcaacacta

SEQ ID NO: 161924 - DNA, 19 bp, Homo sapiens
  siRNA target sequence for PDE8A (NM_002605.1,2318-2336).
gaaccggaccctaatcaaa

SEQ ID NO: 161925 - DNA, 19 bp, Homo sapiens
  siRNA target sequence for PDE8A (NM_002605.1,2322-2340).
cggaccctaatcaaacgaa

SEQ ID NO: 161926 - DNA, 19 bp, Homo sapiens
  siRNA target sequence for PDE8A (NM_002605.1,2323-2341).
ggaccctaatcaaacgaat

SEQ ID NO: 161927 - DNA, 19 bp, Homo sapiens
  siRNA target sequence for PDE8A (NM_002605.1,2407-2425).
cacgcatttcggaagaata

SEQ ID NO: 161928 - DNA, 19 bp, Homo sapiens
  siRNA target sequence for PDE8A (NM_002605.1,2416-2434).
cggaagaatatttttctca

SEQ ID NO: 161929 - DNA, 19 bp, Homo sapiens
  siRNA target sequence for PDE8A (NM_002605.1,2571-2589).
gtagacctgcctgatttaa

SEQ ID NO: 161930 - DNA, 19 bp, Homo sapiens
  siRNA target sequence for PDE8A (NM_002605.1,2592-2610).
cagcatcttgacaacaact

SEQ ID NO: 161931 - DNA, 19 bp, Homo sapiens
  siRNA target sequence for PDE8A (NM_002605.1,2620-2638).
ggaaaggactggacgaaat

SEQ ID NO: 161932 - DNA, 19 bp, Homo sapiens
  siRNA target sequence for PDE8B (NM_003719.1,74-92).
cgcagagcggcgtgatcta

SEQ ID NO: 161933 - DNA, 19 bp, Homo sapiens
  siRNA target sequence for PDE8B (NM_003719.1,76-94).
cagagcggcgtgatctact

SEQ ID NO: 161934 - DNA, 19 bp, Homo sapiens
  siRNA target sequence for PDE8B (NM_003719.1,498-516).
ctgcgacagagctggttat

SEQ ID NO: 161935 - DNA, 19 bp, Homo sapiens
  siRNA target sequence for PDE8B (NM_003719.1,501-519).
cgacagagctggttataga

SEQ ID NO: 161936 - DNA, 19 bp, Homo sapiens
  siRNA target sequence for PDE8B (NM_003719.1,502-520).
gacagagctggttatagat

SEQ ID NO: 161937 - DNA, 19 bp, Homo sapiens
  siRNA target sequence for PDE8B (NM_003719.1,508-526).
gctggttatagatgcaata

SEQ ID NO: 161938 - DNA, 19 bp, Homo sapiens
  siRNA target sequence for PDE8B (NM_003719.1,548-566).
cccttgaatgctttcttga

SEQ ID NO: 161939 - DNA, 19 bp, Homo sapiens
  siRNA target sequence for PDE8B (NM_003719.1,586-604).
gtaattgatcatagacaaa

SEQ ID NO: 161940 - DNA, 19 bp, Homo sapiens
  siRNA target sequence for PDE8B (NM_003719.1,773-791).
gcataattgcttgctataa

SEQ ID NO: 161941 - DNA, 19 bp, Homo sapiens
  siRNA target sequence for PDE8B (NM_003719.1,782-800).
cttgctataatgaactgat

SEQ ID NO: 161942 - DNA, 19 bp, Homo sapiens
  siRNA target sequence for PDE8B (NM_003719.1,785-803).
gctataatgaactgattca

SEQ ID NO: 161943 - DNA, 19 bp, Homo sapiens
  siRNA target sequence for PDE8B (NM_003719.1,820-838).
gttcgctcccagttcaaat

SEQ ID NO: 161944 - DNA, 19 bp, Homo sapiens
  siRNA target sequence for PDE8B (NM_003719.1,834-852).
caaattacgggcctgtaat

SEQ ID NO: 161945 - DNA, 19 bp, Homo sapiens
  siRNA target sequence for PDE8B (NM_003719.1,854-872).
cagtgtttacagcattaga

SEQ ID NO: 161946 - DNA, 19 bp, Homo sapiens
  siRNA target sequence for PDE8B (NM_003719.1,904-922).
gatgaccacgtgattcagt

SEQ ID NO: 161947 - DNA, 19 bp, Homo sapiens
  siRNA target sequence for PDE8B (NM_003719.1,910-928).
cacgtgattcagtatgtca

SEQ ID NO: 161948 - DNA, 19 bp, Homo sapiens
  siRNA target sequence for PDE8B (NM_003719.1,994-1012).
ctgcccaaaagcgataaga

SEQ ID NO: 161949 - DNA, 19 bp, Homo sapiens
  siRNA target sequence for PDE8B (NM_003719.1,1023-1041).
ccttctcgacaccatcaat

SEQ ID NO: 161950 - DNA, 19 bp, Homo sapiens
  siRNA target sequence for PDE8B (NM_003719.1,1024-1042).
cttctcgacaccatcaata

SEQ ID NO: 161951 - DNA, 19 bp, Homo sapiens
  siRNA target sequence for PDE8B (NM_003719.1,1027-1045).
ctcgacaccatcaatacat

SEQ ID NO: 161952 - DNA, 19 bp, Homo sapiens
  siRNA target sequence for PDE8B (NM_003719.1,1065-1083).
gtggcagggggtttactat

SEQ ID NO: 161953 - DNA, 19 bp, Homo sapiens
  siRNA target sequence for PDE8B (NM_003719.1,1122-1140).
gaagatcaccccagtgatt

SEQ ID NO: 161954 - DNA, 19 bp, Homo sapiens
  siRNA target sequence for PDE8B (NM_003719.1,1168-1186).
gtctcgctcaagaaactgt

SEQ ID NO: 161955 - DNA, 19 bp, Homo sapiens
  siRNA target sequence for PDE8B (NM_003719.1,1174-1192).
ctcaagaaactgtgttgta

SEQ ID NO: 161956 - DNA, 19 bp, Homo sapiens
  siRNA target sequence for PDE8B (NM_003719.1,1193-1211).
ccactgacaataataagca

SEQ ID NO: 161957 - DNA, 19 bp, Homo sapiens
  siRNA target sequence for PDE8B (NM_003719.1,1218-1236).
caagattcatcgtgattca

SEQ ID NO: 161958 - DNA, 19 bp, Homo sapiens
  siRNA target sequence for PDE8B (NM_003719.1,1258-1276).
cctcattcattcagatata

SEQ ID NO: 161959 - DNA, 19 bp, Homo sapiens
  siRNA target sequence for PDE8B (NM_003719.1,1259-1277).
ctcattcattcagatataa

SEQ ID NO: 161960 - DNA, 19 bp, Homo sapiens
  siRNA target sequence for PDE8B (NM_003719.1,1291-1309).
gagtccattgacgtgaaat

SEQ ID NO: 161961 - DNA, 19 bp, Homo sapiens
  siRNA target sequence for PDE8B (NM_003719.1,1295-1313).
ccattgacgtgaaatcgat

SEQ ID NO: 161962 - DNA, 19 bp, Homo sapiens
  siRNA target sequence for PDE8B (NM_003719.1,1296-1314).
cattgacgtgaaatcgata

SEQ ID NO: 161963 - DNA, 19 bp, Homo sapiens
  siRNA target sequence for PDE8B (NM_003719.1,1300-1318).
gacgtgaaatcgatatcat

SEQ ID NO: 161964 - DNA, 19 bp, Homo sapiens
  siRNA target sequence for PDE8B (NM_003719.1,1302-1320).
cgtgaaatcgatatcatct

SEQ ID NO: 161965 - DNA, 19 bp, Homo sapiens
  siRNA target sequence for PDE8B (NM_003719.1,1399-1417).
cccatcacaaaggttataa

SEQ ID NO: 161966 - DNA, 19 bp, Homo sapiens
  siRNA target sequence for PDE8B (NM_003719.1,1400-1418).
ccatcacaaaggttataaa

SEQ ID NO: 161967 - DNA, 19 bp, Homo sapiens
  siRNA target sequence for PDE8B (NM_003719.1,1512-1530).
ccctcagctgggtaccaaa

SEQ ID NO: 161968 - DNA, 19 bp, Homo sapiens
  siRNA target sequence for PDE8B (NM_003719.1,1645-1663).
cttgcaatgccaataacca

SEQ ID NO: 161969 - DNA, 19 bp, Homo sapiens
  siRNA target sequence for PDE8B (NM_003719.1,1653-1671).
gccaataaccatcaatgat

SEQ ID NO: 161970 - DNA, 19 bp, Homo sapiens
  siRNA target sequence for PDE8B (NM_003719.1,1679-1697).
cttgtatctctcaattact

SEQ ID NO: 161971 - DNA, 19 bp, Homo sapiens
  siRNA target sequence for PDE8B (NM_003719.1,1722-1740).
caacatctttgaattggaa

SEQ ID NO: 161972 - DNA, 19 bp, Homo sapiens
  siRNA target sequence for PDE8B (NM_003719.1,1737-1755).
ggaagccattacgcataaa

SEQ ID NO: 161973 - DNA, 19 bp, Homo sapiens
  siRNA target sequence for PDE8B (NM_003719.1,1738-1756).
gaagccattacgcataaaa

SEQ ID NO: 161974 - DNA, 19 bp, Homo sapiens
  siRNA target sequence for PDE8B (NM_003719.1,1749-1767).
gcataaaaggccattggtt

SEQ ID NO: 161975 - DNA, 19 bp, Homo sapiens
  siRNA target sequence for PDE8B (NM_003719.1,1788-1806).
ctctcggtttggagtatgt

SEQ ID NO: 161976 - DNA, 19 bp, Homo sapiens
  siRNA target sequence for PDE8B (NM_003719.1,1790-1808).
ctcggtttggagtatgtga

SEQ ID NO: 161977 - DNA, 19 bp, Homo sapiens
  siRNA target sequence for PDE8B (NM_003719.1,2023-2041).
ccgggaaggaccaactctt

SEQ ID NO: 161978 - DNA, 19 bp, Homo sapiens
  siRNA target sequence for PDE8B (NM_003719.1,2024-2042).
cgggaaggaccaactcttt

SEQ ID NO: 161979 - DNA, 19 bp, Homo sapiens
  siRNA target sequence for PDE8B (NM_003719.1,2170-2188).
gacaggaaccattatcgaa

SEQ ID NO: 161980 - DNA, 19 bp, Homo sapiens
  siRNA target sequence for PDE8B (NM_003719.1,2189-2207).
cgctgcgccaggctattat

SEQ ID NO: 161981 - DNA, 19 bp, Homo sapiens
  siRNA target sequence for PDE8B (NM_003719.1,2190-2208).
gctgcgccaggctattatt

SEQ ID NO: 161982 - DNA, 19 bp, Homo sapiens
  siRNA target sequence for PDE8B (NM_003719.1,2194-2212).
cgccaggctattattgaca

SEQ ID NO: 161983 - DNA, 19 bp, Homo sapiens
  siRNA target sequence for PDE8B (NM_003719.1,2195-2213).
gccaggctattattgacat

SEQ ID NO: 161984 - DNA, 19 bp, Homo sapiens
  siRNA target sequence for PDE8B (NM_003719.1,2200-2218).
gctattattgacatggttt

SEQ ID NO: 161985 - DNA, 19 bp, Homo sapiens
  siRNA target sequence for PDE8B (NM_003719.1,2229-2247).
gatgacaaaacactttgaa

SEQ ID NO: 161986 - DNA, 19 bp, Homo sapiens
  siRNA target sequence for PDE8B (NM_003719.1,2358-2376).
gatcaaacgcatgatgatt

SEQ ID NO: 161987 - DNA, 19 bp, Homo sapiens
  siRNA target sequence for PDE8B (NM_003719.1,2608-2626).
ccagccctgatgcaacatt

SEQ ID NO: 161988 - DNA, 19 bp, Homo sapiens
  siRNA target sequence for PDE8B (NM_003719.1,2629-2647).
gctgacaactacaaacact

SEQ ID NO: 161989 - DNA, 19 bp, Homo sapiens
  siRNA target sequence for PDE8B (NM_003719.1,2659-2677).
gatgacctaaagtgcaaaa

SEQ ID NO: 161990 - DNA, 19 bp, Homo sapiens
  siRNA target sequence for PDE9A (NM_002606.1,115-133).
ggacgcattcagaaggtaa

SEQ ID NO: 161991 - DNA, 19 bp, Homo sapiens
  siRNA target sequence for PDE9A (NM_002606.1,118-136).
cgcattcagaaggtaatct

SEQ ID NO: 161992 - DNA, 19 bp, Homo sapiens
  siRNA target sequence for PDE9A (NM_002606.1,119-137).
gcattcagaaggtaatctt

SEQ ID NO: 161993 - DNA, 19 bp, Homo sapiens
  siRNA target sequence for PDE9A (NM_002606.1,130-148).
gtaatcttcagcaagtact

SEQ ID NO: 161994 - DNA, 19 bp, Homo sapiens
  siRNA target sequence for PDE9A (NM_002606.1,149-167).
gcaactccagcgacatcat

SEQ ID NO: 161995 - DNA, 19 bp, Homo sapiens
  siRNA target sequence for PDE9A (NM_002606.1,277-295).
cgcactccgtacaaagtga

SEQ ID NO: 161996 - DNA, 19 bp, Homo sapiens
  siRNA target sequence for PDE9A (NM_002606.1,325-343).
ggtgtcgaggacaagagaa

SEQ ID NO: 161997 - DNA, 19 bp, Homo sapiens
  siRNA target sequence for PDE9A (NM_002606.1,411-429).
ccggagggaaggagcattt

SEQ ID NO: 161998 - DNA, 19 bp, Homo sapiens
  siRNA target sequence for PDE9A (NM_002606.1,538-556).
gttgcagagcagttctcaa

SEQ ID NO: 161999 - DNA, 19 bp, Homo sapiens
  siRNA target sequence for PDE9A (NM_002606.1,579-597).
gaaagctgaagttgcaaat

SEQ ID NO: 162000 - DNA, 19 bp, Homo sapiens
  siRNA target sequence for PDE9A (NM_002606.1,584-602).
ctgaagttgcaaatcactt

SEQ ID NO: 162001 - DNA, 19 bp, Homo sapiens
  siRNA target sequence for PDE9A (NM_002606.1,615-633).
gaaacgcgtggaattggaa

SEQ ID NO: 162002 - DNA, 19 bp, Homo sapiens
  siRNA target sequence for PDE9A (NM_002606.1,716-734).
ccaactgcccctgtaagta

SEQ ID NO: 162003 - DNA, 19 bp, Homo sapiens
  siRNA target sequence for PDE9A (NM_002606.1,723-741).
cccctgtaagtacagtttt

SEQ ID NO: 162004 - DNA, 19 bp, Homo sapiens
  siRNA target sequence for PDE9A (NM_002606.1,1079-1097).
cggatatcctgatcctaat

SEQ ID NO: 162005 - DNA, 19 bp, Homo sapiens
  siRNA target sequence for PDE9A (NM_002606.1,1081-1099).
gatatcctgatcctaatga

SEQ ID NO: 162006 - DNA, 19 bp, Homo sapiens
  siRNA target sequence for PDE9A (NM_002606.1,1140-1158).
caacacgtaccagatcaat

SEQ ID NO: 162007 - DNA, 19 bp, Homo sapiens
  siRNA target sequence for PDE9A (NM_002606.1,1170-1188).
gctggcggtccgctacaat

SEQ ID NO: 162008 - DNA, 19 bp, Homo sapiens
  siRNA target sequence for PDE9A (NM_002606.1,1175-1193).
cggtccgctacaatgacat

SEQ ID NO: 162009 - DNA, 19 bp, Homo sapiens
  siRNA target sequence for PDE9A (NM_002606.1,1297-1315).
cgacagggaatgatcacat

SEQ ID NO: 162010 - DNA, 19 bp, Homo sapiens
  siRNA target sequence for PDE9A (NM_002606.1,1300-1318).
cagggaatgatcacattaa

SEQ ID NO: 162011 - DNA, 19 bp, Homo sapiens
  siRNA target sequence for PDE9A (NM_002606.1,1303-1321).
ggaatgatcacattaatct

SEQ ID NO: 162012 - DNA, 19 bp, Homo sapiens
  siRNA target sequence for PDE9A (NM_002606.1,1455-1473).
cgaggtccgtccaatggaa

SEQ ID NO: 162013 - DNA, 19 bp, Homo sapiens
  siRNA target sequence for PDE9A (NM_002606.1,1482-1500).
gccttgggtggactgttta

SEQ ID NO: 162014 - DNA, 19 bp, Homo sapiens
  siRNA target sequence for PDE9A (NM_002606.1,1494-1512).
ctgtttattagaggaatat

SEQ ID NO: 162015 - DNA, 19 bp, Homo sapiens
  siRNA target sequence for PDE9A (NM_002606.1,1597-1615).
cagattgggttcatcaagt

SEQ ID NO: 162016 - DNA, 19 bp, Homo sapiens
  siRNA target sequence for PDE9A (NM_002606.1,1729-1747).
gatgacgccatgaaagagt

SEQ ID NO: 162017 - DNA, 19 bp, Homo sapiens
  siRNA target sequence for PEPD (NM_000285.1,215-233).
caggagtccttctttcact

SEQ ID NO: 162018 - DNA, 19 bp, Homo sapiens
  siRNA target sequence for PEPD (NM_000285.1,394-412).
ccagtacgtagatgagatt

SEQ ID NO: 162019 - DNA, 19 bp, Homo sapiens
  siRNA target sequence for PEPD (NM_000285.1,629-647).
gcccaccgtgaggtaatga

SEQ ID NO: 162020 - DNA, 19 bp, Homo sapiens
  siRNA target sequence for PEPD (NM_000285.1,630-648).
cccaccgtgaggtaatgaa

SEQ ID NO: 162021 - DNA, 19 bp, Homo sapiens
  siRNA target sequence for PEPD (NM_000285.1,841-859).
cgacatgggcggtgagtat

SEQ ID NO: 162022 - DNA, 19 bp, Homo sapiens
  siRNA target sequence for PEPD (NM_000285.1,842-860).
gacatgggcggtgagtatt

SEQ ID NO: 162023 - DNA, 19 bp, Homo sapiens
  siRNA target sequence for POFUT1 (NM_015352.1,205-223).
gggctctctggcatttgca

SEQ ID NO: 162024 - DNA, 19 bp, Homo sapiens
  siRNA target sequence for POFUT1 (NM_015352.1,207-225).
gctctctggcatttgcaaa

SEQ ID NO: 162025 - DNA, 19 bp, Homo sapiens
  siRNA target sequence for POFUT1 (NM_015352.1,244-262).
ggctgtccctccttggatt

SEQ ID NO: 162026 - DNA, 19 bp, Homo sapiens
  siRNA target sequence for POFUT1 (NM_015352.1,441-459).
cccagcgaagcccagataa

SEQ ID NO: 162027 - DNA, 19 bp, Homo sapiens
  siRNA target sequence for POFUT1 (NM_015352.1,443-461).
cagcgaagcccagataaga

SEQ ID NO: 162028 - DNA, 19 bp, Homo sapiens
  siRNA target sequence for POFUT1 (NM_015352.1,495-513).
gcccattctgggatcagtt

SEQ ID NO: 162029 - DNA, 19 bp, Homo sapiens
  siRNA target sequence for POFUT1 (NM_015352.1,498-516).
cattctgggatcagtttca

SEQ ID NO: 162030 - DNA, 19 bp, Homo sapiens
  siRNA target sequence for POFUT1 (NM_015352.1,526-544).
caacaagtcggagcttttt

SEQ ID NO: 162031 - DNA, 19 bp, Homo sapiens
  siRNA target sequence for POFUT1 (NM_015352.1,666-684).
ggccactacagaagtacat

SEQ ID NO: 162032 - DNA, 19 bp, Homo sapiens
  siRNA target sequence for POFUT1 (NM_015352.1,712-730).
gggagaggcccagattcat

SEQ ID NO: 162033 - DNA, 19 bp, Homo sapiens
  siRNA target sequence for POFUT1 (NM_015352.1,745-763).
gccctatgtgggcattcat

SEQ ID NO: 162034 - DNA, 19 bp, Homo sapiens
  siRNA target sequence for POFUT1 (NM_015352.1,816-834).
ctgcaggctcgcacttcat

SEQ ID NO: 162035 - DNA, 19 bp, Homo sapiens
  siRNA target sequence for POFUT1 (NM_015352.1,878-896).
cccctcacgatgactatgt

SEQ ID NO: 162036 - DNA, 19 bp, Homo sapiens
  siRNA target sequence for POFUT1 (NM_015352.1,964-982).
ggtctacgttgctactgat

SEQ ID NO: 162037 - DNA, 19 bp, Homo sapiens
  siRNA target sequence for POFUT1 (NM_015352.1,965-983).
gtctacgttgctactgatt

SEQ ID NO: 162038 - DNA, 19 bp, Homo sapiens
  siRNA target sequence for POFUT1 (NM_015352.1,975-993).
ctactgattccgagagtta

SEQ ID NO: 162039 - DNA, 19 bp, Homo sapiens
  siRNA target sequence for POFUT1 (NM_015352.1,978-996).
ctgattccgagagttatgt

SEQ ID NO: 162040 - DNA, 19 bp, Homo sapiens
  siRNA target sequence for POFUT1 (NM_015352.1,1082-1100).
ggccaagccgaccacttta

SEQ ID NO: 162041 - DNA, 19 bp, Homo sapiens
  siRNA target sequence for POFUT1 (NM_015352.1,1083-1101).
gccaagccgaccactttat

SEQ ID NO: 162042 - DNA, 19 bp, Homo sapiens
  siRNA target sequence for POFUT1 (NM_015352.1,1084-1102).
ccaagccgaccactttatt

SEQ ID NO: 162043 - DNA, 19 bp, Homo sapiens
  siRNA target sequence for POFUT1 (NM_015352.1,1157-1175).
gggaggccgtcttctttct

SEQ ID NO: 162044 - DNA, 19 bp, Homo sapiens
  siRNA target sequence for POFUT1 (NM_015352.1,1158-1176).
ggaggccgtcttctttctt

SEQ ID NO: 162045 - DNA, 19 bp, Homo sapiens
  siRNA target sequence for POFUT1 (NM_172236.1,596-614).
gagaatcactcctgtgtta

SEQ ID NO: 162046 - DNA, 19 bp, Homo sapiens
  siRNA target sequence for PPM1A (NM_021003.2,438-456).
gcaaggctggcgtgttgaa

SEQ ID NO: 162047 - DNA, 19 bp, Homo sapiens
  siRNA target sequence for PPM1A (NM_021003.2,439-457).
caaggctggcgtgttgaaa

SEQ ID NO: 162048 - DNA, 19 bp, Homo sapiens
  siRNA target sequence for PPM1A (NM_021003.2,443-461).
gctggcgtgttgaaatgga

SEQ ID NO: 162049 - DNA, 19 bp, Homo sapiens
  siRNA target sequence for PPM1A (NM_021003.2,499-517).
cttgaatcgtggtcattct

SEQ ID NO: 162050 - DNA, 19 bp, Homo sapiens
  siRNA target sequence for PPM1A (NM_021003.2,566-584).
gtgagcatttgttagatca

SEQ ID NO: 162051 - DNA, 19 bp, Homo sapiens
  siRNA target sequence for PPM1A (NM_021003.2,620-638).
gagcaccttctgtggaaaa

SEQ ID NO: 162052 - DNA, 19 bp, Homo sapiens
  siRNA target sequence for PPM1A (NM_021003.2,679-697).
gaacacatgagagttatgt

SEQ ID NO: 162053 - DNA, 19 bp, Homo sapiens
  siRNA target sequence for PPM1A (NM_021003.2,734-752).
cagctgtaggtgtcttaat

SEQ ID NO: 162054 - DNA, 19 bp, Homo sapiens
  siRNA target sequence for PPM1A (NM_021003.2,757-775).
ccccaacatacttatttca

SEQ ID NO: 162055 - DNA, 19 bp, Homo sapiens
  siRNA target sequence for PPM1A (NM_021003.2,787-805).
gactcaagaggtttacttt

SEQ ID NO: 162056 - DNA, 19 bp, Homo sapiens
  siRNA target sequence for PPM1A (NM_021003.2,789-807).
ctcaagaggtttactttgt

SEQ ID NO: 162057 - DNA, 19 bp, Homo sapiens
  siRNA target sequence for PPM1A (NM_021003.2,806-824).
gtaggaacaggaaagttca

SEQ ID NO: 162058 - DNA, 19 bp, Homo sapiens
  siRNA target sequence for PPM1A (NM_021003.2,851-869).
gtaatccgctggagaaaga

SEQ ID NO: 162059 - DNA, 19 bp, Homo sapiens
  siRNA target sequence for PPM1A (NM_021003.2,857-875).
cgctggagaaagaacgaat

SEQ ID NO: 162060 - DNA, 19 bp, Homo sapiens
  siRNA target sequence for PPM1A (NM_021003.2,884-902).
caggtggctctgtaatgat

SEQ ID NO: 162061 - DNA, 19 bp, Homo sapiens
  siRNA target sequence for PPM1A (NM_021003.2,933-951).
gagggcccttggggatttt

SEQ ID NO: 162062 - DNA, 19 bp, Homo sapiens
  siRNA target sequence for PPM1A (NM_021003.2,937-955).
gcccttggggattttgatt

SEQ ID NO: 162063 - DNA, 19 bp, Homo sapiens
  siRNA target sequence for PPM1A (NM_021003.2,1005-1023).
gcctgaagtccatgatatt

SEQ ID NO: 162064 - DNA, 19 bp, Homo sapiens
  siRNA target sequence for PPM1A (NM_021003.2,1014-1032).
ccatgatattgaaagatct

SEQ ID NO: 162065 - DNA, 19 bp, Homo sapiens
  siRNA target sequence for PPM1A (NM_021003.2,1133-1151).
ctgatgaccttgagaaagt

SEQ ID NO: 162066 - DNA, 19 bp, Homo sapiens
  siRNA target sequence for PPM1A (NM_021003.2,1162-1180).
gtagtcgacacctgtttgt

SEQ ID NO: 162067 - DNA, 19 bp, Homo sapiens
  siRNA target sequence for PPM1A (NM_021003.2,1165-1183).
gtcgacacctgtttgtata

SEQ ID NO: 162068 - DNA, 19 bp, Homo sapiens
  siRNA target sequence for PPM1A (NM_021003.2,1195-1213).
gacaacatgagtgtgattt

SEQ ID NO: 162069 - DNA, 19 bp, Homo sapiens
  siRNA target sequence for PPM1A (NM_021003.2,1344-1362).
ccatgtgatgcgcacatta

SEQ ID NO: 162070 - DNA, 19 bp, Homo sapiens
  siRNA target sequence for PPM1A (NM_021003.2,1406-1424).
caagcaagaggaatgttat

SEQ ID NO: 162071 - DNA, 19 bp, Homo sapiens
  siRNA target sequence for PPM1A (NM_021003.2,1431-1449).
cgtttacaatagactgaat

SEQ ID NO: 162072 - DNA, 19 bp, Homo sapiens
  siRNA target sequence for PPM1A (NM_021003.2,1462-1480).
gacgacactgactctacat

SEQ ID NO: 162073 - DNA, 19 bp, Homo sapiens
  siRNA target sequence for PPM1A (NM_021003.2,1464-1482).
cgacactgactctacatca

SEQ ID NO: 162074 - DNA, 19 bp, Homo sapiens
  siRNA target sequence for PPM1A (NM_021003.2,1473-1491).
ctctacatcaacagatgat

SEQ ID NO: 162075 - DNA, 19 bp, Homo sapiens
  siRNA target sequence for PPM1A (NM_177951.1,1399-1417).
gtagaaggtggatcattta

SEQ ID NO: 162076 - DNA, 19 bp, Homo sapiens
  siRNA target sequence for PPM1B (NM_002706.3,415-433).
gggtgcatttttggataaa

SEQ ID NO: 162077 - DNA, 19 bp, Homo sapiens
  siRNA target sequence for PPM1B (NM_002706.3,465-483).
ctgggaatggtttacgtta

SEQ ID NO: 162078 - DNA, 19 bp, Homo sapiens
  siRNA target sequence for PPM1B (NM_002706.3,504-522).
gatggagagtggaaatgga

SEQ ID NO: 162079 - DNA, 19 bp, Homo sapiens
  siRNA target sequence for PPM1B (NM_002706.3,532-550).
cacagctgttgtaggtatt

SEQ ID NO: 162080 - DNA, 19 bp, Homo sapiens
  siRNA target sequence for PPM1B (NM_002706.3,602-620).
ggatcccgagtggcaaatt

SEQ ID NO: 162081 - DNA, 19 bp, Homo sapiens
  siRNA target sequence for PPM1B (NM_002706.3,603-621).
gatcccgagtggcaaatta

SEQ ID NO: 162082 - DNA, 19 bp, Homo sapiens
  siRNA target sequence for PPM1B (NM_002706.3,624-642).
gctcaacacatttattaga

SEQ ID NO: 162083 - DNA, 19 bp, Homo sapiens
  siRNA target sequence for PPM1B (NM_002706.3,755-773).
gaatacatgcgtaactttt

SEQ ID NO: 162084 - DNA, 19 bp, Homo sapiens
  siRNA target sequence for PPM1B (NM_002706.3,793-811).
ggacaggagtggttcaact

SEQ ID NO: 162085 - DNA, 19 bp, Homo sapiens
  siRNA target sequence for PPM1B (NM_002706.3,807-825).
caactgcagtgggagttat

SEQ ID NO: 162086 - DNA, 19 bp, Homo sapiens
  siRNA target sequence for PPM1B (NM_002706.3,812-830).
gcagtgggagttatgattt

SEQ ID NO: 162087 - DNA, 19 bp, Homo sapiens
  siRNA target sequence for PPM1B (NM_002706.3,831-849).
cacctaagcatatctactt

SEQ ID NO: 162088 - DNA, 19 bp, Homo sapiens
  siRNA target sequence for PPM1B (NM_002706.3,833-851).
cctaagcatatctacttta

SEQ ID NO: 162089 - DNA, 19 bp, Homo sapiens
  siRNA target sequence for PPM1B (NM_002706.3,890-908).
ggacaagtctgcttttcta

SEQ ID NO: 162090 - DNA, 19 bp, Homo sapiens
  siRNA target sequence for PPM1B (NM_002706.3,913-931).
ggatcacaaaccttgcaat

SEQ ID NO: 162091 - DNA, 19 bp, Homo sapiens
  siRNA target sequence for PPM1B (NM_002706.3,917-935).
cacaaaccttgcaatccaa

SEQ ID NO: 162092 - DNA, 19 bp, Homo sapiens
  siRNA target sequence for PPM1B (NM_002706.3,937-955).
ggaaaaggagcgaatccaa

SEQ ID NO: 162093 - DNA, 19 bp, Homo sapiens
  siRNA target sequence for PPM1B (NM_002706.3,960-978).
caggaggcagcgtgatgat

SEQ ID NO: 162094 - DNA, 19 bp, Homo sapiens
  siRNA target sequence for PPM1B (NM_002706.3,963-981).
gaggcagcgtgatgataca

SEQ ID NO: 162095 - DNA, 19 bp, Homo sapiens
  siRNA target sequence for PPM1B (NM_002706.3,973-991).
gatgatacaacgtgttaat

SEQ ID NO: 162096 - DNA, 19 bp, Homo sapiens
  siRNA target sequence for PPM1B (NM_002706.3,976-994).
gatacaacgtgttaatggt

SEQ ID NO: 162097 - DNA, 19 bp, Homo sapiens
  siRNA target sequence for PPM1B (NM_002706.3,1011-1029).
gtgctctgggggactatga

SEQ ID NO: 162098 - DNA, 19 bp, Homo sapiens
  siRNA target sequence for PPM1B (NM_002706.3,1053-1071).
gcccaacagaacaacttgt

SEQ ID NO: 162099 - DNA, 19 bp, Homo sapiens
  siRNA target sequence for PPM1B (NM_002706.3,1054-1072).
cccaacagaacaacttgtt

SEQ ID NO: 162100 - DNA, 19 bp, Homo sapiens
  siRNA target sequence for PPM1B (NM_002706.3,1055-1073).
ccaacagaacaacttgttt

SEQ ID NO: 162101 - DNA, 19 bp, Homo sapiens
  siRNA target sequence for PPM1B (NM_002706.3,1144-1162).
gatctgggatgttatgagt

SEQ ID NO: 162102 - DNA, 19 bp, Homo sapiens
  siRNA target sequence for PPM1B (NM_002706.3,1174-1192).
ctgtgaatatgttaaatct

SEQ ID NO: 162103 - DNA, 19 bp, Homo sapiens
  siRNA target sequence for PPM1B (NM_002706.3,1266-1284).
gagataacatgagtattgt

SEQ ID NO: 162104 - DNA, 19 bp, Homo sapiens
  siRNA target sequence for PPM1B (NM_002706.3,1322-1340).
gaagcggtgaaaaaagatt

SEQ ID NO: 162105 - DNA, 19 bp, Homo sapiens
  siRNA target sequence for PPM1B (NM_002706.3,1365-1383).
cacgggttgaagagattat

SEQ ID NO: 162106 - DNA, 19 bp, Homo sapiens
  siRNA target sequence for PPM1B (NM_002706.3,1421-1439).
catgtcatgcgcatcttgt

SEQ ID NO: 162107 - DNA, 19 bp, Homo sapiens
  siRNA target sequence for PPM1B (NM_002706.3,1481-1499).
gctggcaagcgtaatgtta

SEQ ID NO: 162108 - DNA, 19 bp, Homo sapiens
  siRNA target sequence for PPM1B (NM_002706.3,1624-1642).
gggaaactaccgacaactt

SEQ ID NO: 162109 - DNA, 19 bp, Homo sapiens
  siRNA target sequence for PPM1B (NM_002706.3,1626-1644).
gaaactaccgacaacttct

SEQ ID NO: 162110 - DNA, 19 bp, Homo sapiens
  siRNA target sequence for PPM1B (NM_002706.3,1659-1677).
ctagttacaggctagctaa

SEQ ID NO: 162111 - DNA, 19 bp, Homo sapiens
  siRNA target sequence for PPM1B (NM_002706.3,1662-1680).
gttacaggctagctaaagt

SEQ ID NO: 162112 - DNA, 19 bp, Homo sapiens
  siRNA target sequence for PPM1B (NM_002706.3,1787-1805).
ggtcttgctgaattagaca

SEQ ID NO: 162113 - DNA, 19 bp, Homo sapiens
  siRNA target sequence for PPM1B (NM_177968.1,1545-1563).
ggggtgctggagatctaga

SEQ ID NO: 162114 - DNA, 19 bp, Homo sapiens
  siRNA target sequence for PPM1D (NM_003620.2,282-300).
catggaggacgttactcaa

SEQ ID NO: 162115 - DNA, 19 bp, Homo sapiens
  siRNA target sequence for PPM1D (NM_003620.2,288-306).
ggacgttactcaaatcgtt

SEQ ID NO: 162116 - DNA, 19 bp, Homo sapiens
  siRNA target sequence for PPM1D (NM_003620.2,315-333).
cgaaccgacggctgaagaa

SEQ ID NO: 162117 - DNA, 19 bp, Homo sapiens
  siRNA target sequence for PPM1D (NM_003620.2,506-524).
gttcctccgtggccttttt

SEQ ID NO: 162118 - DNA, 19 bp, Homo sapiens
  siRNA target sequence for PPM1D (NM_003620.2,577-595).
cacttgtggggtttcatca

SEQ ID NO: 162119 - DNA, 19 bp, Homo sapiens
  siRNA target sequence for PPM1D (NM_003620.2,618-636).
gtccgagccggctaaggtt

SEQ ID NO: 162120 - DNA, 19 bp, Homo sapiens
  siRNA target sequence for PPM1D (NM_003620.2,693-711).
ggcggaatggccaaagact

SEQ ID NO: 162121 - DNA, 19 bp, Homo sapiens
  siRNA target sequence for PPM1D (NM_003620.2,694-712).
gcggaatggccaaagacta

SEQ ID NO: 162122 - DNA, 19 bp, Homo sapiens
  siRNA target sequence for PPM1D (NM_003620.2,695-713).
cggaatggccaaagactat

SEQ ID NO: 162123 - DNA, 19 bp, Homo sapiens
  siRNA target sequence for PPM1D (NM_003620.2,764-782).
ggggcatgaagatgtatgt

SEQ ID NO: 162124 - DNA, 19 bp, Homo sapiens
  siRNA target sequence for PPM1D (NM_003620.2,867-885).
ggaccataagccagaactt

SEQ ID NO: 162125 - DNA, 19 bp, Homo sapiens
  siRNA target sequence for PPM1D (NM_003620.2,891-909).
ggaaagagaacgaatcgaa

SEQ ID NO: 162126 - DNA, 19 bp, Homo sapiens
  siRNA target sequence for PPM1D (NM_003620.2,910-928).
ggacttggtgggagtgtaa

SEQ ID NO: 162127 - DNA, 19 bp, Homo sapiens
  siRNA target sequence for PPM1D (NM_003620.2,911-929).
gacttggtgggagtgtaat

SEQ ID NO: 162128 - DNA, 19 bp, Homo sapiens
  siRNA target sequence for PPM1D (NM_003620.2,913-931).
cttggtgggagtgtaatga

SEQ ID NO: 162129 - DNA, 19 bp, Homo sapiens
  siRNA target sequence for PPM1D (NM_003620.2,917-935).
gtgggagtgtaatgaacaa

SEQ ID NO: 162130 - DNA, 19 bp, Homo sapiens
  siRNA target sequence for PPM1D (NM_003620.2,940-958).
ggggtgaatcgtgtagttt

SEQ ID NO: 162131 - DNA, 19 bp, Homo sapiens
  siRNA target sequence for PPM1D (NM_003620.2,945-963).
gaatcgtgtagtttggaaa

SEQ ID NO: 162132 - DNA, 19 bp, Homo sapiens
  siRNA target sequence for PPM1D (NM_003620.2,979-997).
cacaatggacctgttagaa

SEQ ID NO: 162133 - DNA, 19 bp, Homo sapiens
  siRNA target sequence for PPM1D (NM_003620.2,1006-1024).
gttattgaccagattcctt

SEQ ID NO: 162134 - DNA, 19 bp, Homo sapiens
  siRNA target sequence for PPM1D (NM_003620.2,1130-1148).
ctcagaagcacaagtatat

SEQ ID NO: 162135 - DNA, 19 bp, Homo sapiens
  siRNA target sequence for PPM1D (NM_003620.2,1158-1176).
gagtgatggactttggaat

SEQ ID NO: 162136 - DNA, 19 bp, Homo sapiens
  siRNA target sequence for PPM1D (NM_003620.2,1250-1268).
gacaatcttgtgccaaaat

SEQ ID NO: 162137 - DNA, 19 bp, Homo sapiens
  siRNA target sequence for PPM1D (NM_003620.2,1309-1327).
ctccgagcagataacacta

SEQ ID NO: 162138 - DNA, 19 bp, Homo sapiens
  siRNA target sequence for PPM1D (NM_003620.2,1349-1367).
ctccagaagtggacaatca

SEQ ID NO: 162139 - DNA, 19 bp, Homo sapiens
  siRNA target sequence for PPM1D (NM_003620.2,1407-1425).
gactgacagcccttcctat

SEQ ID NO: 162140 - DNA, 19 bp, Homo sapiens
  siRNA target sequence for PPM1D (NM_003620.2,1498-1516).
ccatggccaagggtgaatt

SEQ ID NO: 162141 - DNA, 19 bp, Homo sapiens
  siRNA target sequence for PPM1D (NM_003620.2,1502-1520).
ggccaagggtgaattctaa

SEQ ID NO: 162142 - DNA, 19 bp, Homo sapiens
  siRNA target sequence for PPM1D (NM_003620.2,1656-1674).
cgctaaagccctgacttta

SEQ ID NO: 162143 - DNA, 19 bp, Homo sapiens
  siRNA target sequence for PPM1D (NM_003620.2,1665-1683).
cctgactttaaggatacat

SEQ ID NO: 162144 - DNA, 19 bp, Homo sapiens
  siRNA target sequence for PPM1D (NM_003620.2,1676-1694).
ggatacatgattctttgaa

SEQ ID NO: 162145 - DNA, 19 bp, Homo sapiens
  siRNA target sequence for PPM1D (NM_003620.2,1717-1735).
gtgcctactaattcaacaa

SEQ ID NO: 162146 - DNA, 19 bp, Homo sapiens
  siRNA target sequence for PPM1D (NM_003620.2,1780-1798).
caaatgaaagcccaagaaa

SEQ ID NO: 162147 - DNA, 19 bp, Homo sapiens
  siRNA target sequence for PPM1D (NM_003620.2,1805-1823).
gaacccctccaacaaactt

SEQ ID NO: 162148 - DNA, 19 bp, Homo sapiens
  siRNA target sequence for PPM1D (NM_003620.2,1809-1827).
ccctccaacaaactttaaa

SEQ ID NO: 162149 - DNA, 19 bp, Homo sapiens
  siRNA target sequence for PPM1D (NM_003620.2,1813-1831).
ccaacaaactttaaaagga

SEQ ID NO: 162150 - DNA, 19 bp, Homo sapiens
  siRNA target sequence for PPM1D (NM_003620.2,1863-1881).
gaagaagcatagacgaaat

SEQ ID NO: 162151 - DNA, 19 bp, Homo sapiens
  siRNA target sequence for PPM1D (NM_003620.2,1933-1951).
cagcgaaagaactctgtta

SEQ ID NO: 162152 - DNA, 19 bp, Homo sapiens
  siRNA target sequence for PPM1F (NM_014634.2,487-505).
ctggcacagagtttcttta

SEQ ID NO: 162153 - DNA, 19 bp, Homo sapiens
  siRNA target sequence for PPM1F (NM_014634.2,687-705).
cgcctactttgctgtgttt

SEQ ID NO: 162154 - DNA, 19 bp, Homo sapiens
  siRNA target sequence for PPM1F (NM_014634.2,1027-1045).
gcattgggtggctttgtgt

SEQ ID NO: 162155 - DNA, 19 bp, Homo sapiens
  siRNA target sequence for PPM1F (NM_014634.2,1091-1109).
gagccatcggggatgtctt

SEQ ID NO: 162156 - DNA, 19 bp, Homo sapiens
  siRNA target sequence for PPM1G (NM_002707.3,227-245).
ggatgctcacaactgtatt

SEQ ID NO: 162157 - DNA, 19 bp, Homo sapiens
  siRNA target sequence for PPM1G (NM_002707.3,257-275).
cagtgagacagccatgttt

SEQ ID NO: 162158 - DNA, 19 bp, Homo sapiens
  siRNA target sequence for PPM1G (NM_002707.3,310-328).
ccttgtactgtgccaaata

SEQ ID NO: 162159 - DNA, 19 bp, Homo sapiens
  siRNA target sequence for PPM1G (NM_002707.3,405-423).
gctattgacgccaaattga

SEQ ID NO: 162160 - DNA, 19 bp, Homo sapiens
  siRNA target sequence for PPM1G (NM_002707.3,551-569).
ggctaccatgactattgaa

SEQ ID NO: 162161 - DNA, 19 bp, Homo sapiens
  siRNA target sequence for PPM1G (NM_002707.3,735-753).
gcctacacaggcttttcct

SEQ ID NO: 162162 - DNA, 19 bp, Homo sapiens
  siRNA target sequence for PPM1G (NM_002707.3,1079-1097).
ctctgacagtggtacaaca

SEQ ID NO: 162163 - DNA, 19 bp, Homo sapiens
  siRNA target sequence for PPM1G (NM_002707.3,1153-1171).
ctcgctgtgtggtatctga

SEQ ID NO: 162164 - DNA, 19 bp, Homo sapiens
  siRNA target sequence for PPM1G (NM_002707.3,1174-1192).
ctggcaaagctttagacat

SEQ ID NO: 162165 - DNA, 19 bp, Homo sapiens
  siRNA target sequence for PPM1G (NM_002707.3,1190-1208).
catgtcctatgatcacaaa

SEQ ID NO: 162166 - DNA, 19 bp, Homo sapiens
  siRNA target sequence for PPM1G (NM_002707.3,1224-1242).
gaactagcacgcatcaaga

SEQ ID NO: 162167 - DNA, 19 bp, Homo sapiens
  siRNA target sequence for PPM1G (NM_002707.3,1582-1600).
gtacagggtgtgacaacat

SEQ ID NO: 162168 - DNA, 19 bp, Homo sapiens
  siRNA target sequence for PPM1G (NM_002707.3,1655-1673).
gagtggcaagcgaaaacta

SEQ ID NO: 162169 - DNA, 19 bp, Homo sapiens
  siRNA target sequence for PPM1G (NM_002707.3,1657-1675).
gtggcaagcgaaaactaga

SEQ ID NO: 162170 - DNA, 19 bp, Homo sapiens
  siRNA target sequence for PPP1CA (NM_002708.2,241-259).
caagatctgcggtgacata

SEQ ID NO: 162171 - DNA, 19 bp, Homo sapiens
  siRNA target sequence for PPP1CA (NM_002708.2,274-292).
cgaccttctgcgactattt

SEQ ID NO: 162172 - DNA, 19 bp, Homo sapiens
  siRNA target sequence for PPP1CA (NM_002708.2,278-296).
cttctgcgactatttgagt

SEQ ID NO: 162173 - DNA, 19 bp, Homo sapiens
  siRNA target sequence for PPP1CA (NM_002708.2,483-501).
gcaagagacgctacaacat

SEQ ID NO: 162174 - DNA, 19 bp, Homo sapiens
  siRNA target sequence for PPP1CA (NM_002708.2,487-505).
gagacgctacaacatcaaa

SEQ ID NO: 162175 - DNA, 19 bp, Homo sapiens
  siRNA target sequence for PPP1CA (NM_002708.2,489-507).
gacgctacaacatcaaact

SEQ ID NO: 162176 - DNA, 19 bp, Homo sapiens
  siRNA target sequence for PPP1CA (NM_002708.2,491-509).
cgctacaacatcaaactgt

SEQ ID NO: 162177 - DNA, 19 bp, Homo sapiens
  siRNA target sequence for PPP1CA (NM_002708.2,551-569).
gccatagtggacgaaaaga

SEQ ID NO: 162178 - DNA, 19 bp, Homo sapiens
  siRNA target sequence for PPP1CA (NM_002708.2,552-570).
ccatagtggacgaaaagat

SEQ ID NO: 162179 - DNA, 19 bp, Homo sapiens
  siRNA target sequence for PPP1CA (NM_002708.2,721-739).
cgaccgtggcgtctctttt

SEQ ID NO: 162180 - DNA, 19 bp, Homo sapiens
  siRNA target sequence for PPP1CA (NM_002708.2,722-740).
gaccgtggcgtctctttta

SEQ ID NO: 162181 - DNA, 19 bp, Homo sapiens
  siRNA target sequence for PPP1CA (NM_002708.2,726-744).
gtggcgtctcttttacctt

SEQ ID NO: 162182 - DNA, 19 bp, Homo sapiens
  siRNA target sequence for PPP1CA (NM_002708.2,804-822).
cacaccaggtggtagaaga

SEQ ID NO: 162183 - DNA, 19 bp, Homo sapiens
  siRNA target sequence for PPP1CA (NM_002708.2,845-863).
cggcagctggtgacacttt

SEQ ID NO: 162184 - DNA, 19 bp, Homo sapiens
  siRNA target sequence for PPP1CA (NM_002708.2,848-866).
cagctggtgacacttttct

SEQ ID NO: 162185 - DNA, 19 bp, Homo sapiens
  siRNA target sequence for PPP1CA (NM_002708.2,850-868).
gctggtgacacttttctca

SEQ ID NO: 162186 - DNA, 19 bp, Homo sapiens
  siRNA target sequence for PPP1CB (NM_002709.1,361-379).
cgaggcttatgtatcaagt

SEQ ID NO: 162187 - DNA, 19 bp, Homo sapiens
  siRNA target sequence for PPP1CB (NM_002709.1,375-393).
caagtctcgggagatcttt

SEQ ID NO: 162188 - DNA, 19 bp, Homo sapiens
  siRNA target sequence for PPP1CB (NM_002709.1,399-417).
ccagcctattcttttggaa

SEQ ID NO: 162189 - DNA, 19 bp, Homo sapiens
  siRNA target sequence for PPP1CB (NM_002709.1,400-418).
cagcctattcttttggaat

SEQ ID NO: 162190 - DNA, 19 bp, Homo sapiens
  siRNA target sequence for PPP1CB (NM_002709.1,421-439).
gaagcaccgctgaaaattt

SEQ ID NO: 162191 - DNA, 19 bp, Homo sapiens
  siRNA target sequence for PPP1CB (NM_002709.1,445-463).
gatattcatggacaatata

SEQ ID NO: 162192 - DNA, 19 bp, Homo sapiens
  siRNA target sequence for PPP1CB (NM_002709.1,451-469).
catggacaatatacagatt

SEQ ID NO: 162193 - DNA, 19 bp, Homo sapiens
  siRNA target sequence for PPP1CB (NM_002709.1,457-475).
caatatacagatttactga

SEQ ID NO: 162194 - DNA, 19 bp, Homo sapiens
  siRNA target sequence for PPP1CB (NM_002709.1,502-520).
ccagaagccaactatcttt

SEQ ID NO: 162195 - DNA, 19 bp, Homo sapiens
  siRNA target sequence for PPP1CB (NM_002709.1,552-570).
gtctttggaaaccatttgt

SEQ ID NO: 162196 - DNA, 19 bp, Homo sapiens
  siRNA target sequence for PPP1CB (NM_002709.1,670-688).
gaatgcaaacgaagattta

SEQ ID NO: 162197 - DNA, 19 bp, Homo sapiens
  siRNA target sequence for PPP1CB (NM_002709.1,674-692).
gcaaacgaagatttaatat

SEQ ID NO: 162198 - DNA, 19 bp, Homo sapiens
  siRNA target sequence for PPP1CB (NM_002709.1,675-693).
caaacgaagatttaatatt

SEQ ID NO: 162199 - DNA, 19 bp, Homo sapiens
  siRNA target sequence for PPP1CB (NM_002709.1,702-720).
gaagaccttcactgattgt

SEQ ID NO: 162200 - DNA, 19 bp, Homo sapiens
  siRNA target sequence for PPP1CB (NM_002709.1,872-890).
ggtctgatccagataagga

SEQ ID NO: 162201 - DNA, 19 bp, Homo sapiens
  siRNA target sequence for PPP1CB (NM_002709.1,873-891).
gtctgatccagataaggat

SEQ ID NO: 162202 - DNA, 19 bp, Homo sapiens
  siRNA target sequence for PPP1CB (NM_002709.1,963-981).
gaatcgtcatgatttagat

SEQ ID NO: 162203 - DNA, 19 bp, Homo sapiens
  siRNA target sequence for PPP1CB (NM_002709.1,967-985).
cgtcatgatttagatttga

SEQ ID NO: 162204 - DNA, 19 bp, Homo sapiens
  siRNA target sequence for PPP1CB (NM_002709.1,1030-1048).
gctaaacgacagttggtaa

SEQ ID NO: 162205 - DNA, 19 bp, Homo sapiens
  siRNA target sequence for PPP1CB (NM_002709.1,1036-1054).
cgacagttggtaaccttat

SEQ ID NO: 162206 - DNA, 19 bp, Homo sapiens
  siRNA target sequence for PPP1CB (NM_002709.1,1037-1055).
gacagttggtaaccttatt

SEQ ID NO: 162207 - DNA, 19 bp, Homo sapiens
  siRNA target sequence for PPP1CB (NM_002709.1,1106-1124).
gtgtggatgaaactttgat

SEQ ID NO: 162208 - DNA, 19 bp, Homo sapiens
  siRNA target sequence for PPP1CB (NM_002709.1,1171-1189).
cagtatggtggactgaatt

SEQ ID NO: 162209 - DNA, 19 bp, Homo sapiens
  siRNA target sequence for PPP1CB (NM_002709.1,1173-1191).
gtatggtggactgaattct

SEQ ID NO: 162210 - DNA, 19 bp, Homo sapiens
  siRNA target sequence for PPP1CB (NM_002709.1,1219-1237).
gctaatccgccgaagaaaa

SEQ ID NO: 162211 - DNA, 19 bp, Homo sapiens
  siRNA target sequence for PPP1CC (NM_002710.1,158-176).
gcggatttagataaactca

SEQ ID NO: 162212 - DNA, 19 bp, Homo sapiens
  siRNA target sequence for PPP1CC (NM_002710.1,159-177).
cggatttagataaactcaa

SEQ ID NO: 162213 - DNA, 19 bp, Homo sapiens
  siRNA target sequence for PPP1CC (NM_002710.1,173-191).
ctcaacatcgacagcatta

SEQ ID NO: 162214 - DNA, 19 bp, Homo sapiens
  siRNA target sequence for PPP1CC (NM_002710.1,270-288).
gcttaaagtctcgtgaaat

SEQ ID NO: 162215 - DNA, 19 bp, Homo sapiens
  siRNA target sequence for PPP1CC (NM_002710.1,297-315).
gtcagcctatcctactaga

SEQ ID NO: 162216 - DNA, 19 bp, Homo sapiens
  siRNA target sequence for PPP1CC (NM_002710.1,303-321).
ctatcctactagaacttga

SEQ ID NO: 162217 - DNA, 19 bp, Homo sapiens
  siRNA target sequence for PPP1CC (NM_002710.1,354-372).
gacaatactatgatttgct

SEQ ID NO: 162218 - DNA, 19 bp, Homo sapiens
  siRNA target sequence for PPP1CC (NM_002710.1,541-559).
catcaacagaatttatgga

SEQ ID NO: 162219 - DNA, 19 bp, Homo sapiens
  siRNA target sequence for PPP1CC (NM_002710.1,579-597).
gaagatacaacattaaact

SEQ ID NO: 162220 - DNA, 19 bp, Homo sapiens
  siRNA target sequence for PPP1CC (NM_002710.1,606-624).
ctttcacagactgttttaa

SEQ ID NO: 162221 - DNA, 19 bp, Homo sapiens
  siRNA target sequence for PPP1CC (NM_002710.1,664-682).
ctgctgtcatggaggttta

SEQ ID NO: 162222 - DNA, 19 bp, Homo sapiens
  siRNA target sequence for PPP1CC (NM_002710.1,769-787).
gtggtctgaccccgataaa

SEQ ID NO: 162223 - DNA, 19 bp, Homo sapiens
  siRNA target sequence for PPP1CC (NM_002710.1,772-790).
gtctgaccccgataaagat

SEQ ID NO: 162224 - DNA, 19 bp, Homo sapiens
  siRNA target sequence for PPP1CC (NM_002710.1,774-792).
ctgaccccgataaagatgt

SEQ ID NO: 162225 - DNA, 19 bp, Homo sapiens
  siRNA target sequence for PPP1CC (NM_002710.1,816-834).
gaggagtgtccttcacatt

SEQ ID NO: 162226 - DNA, 19 bp, Homo sapiens
  siRNA target sequence for PPP1CC (NM_002710.1,862-880).
ccataagcatgatttggat

SEQ ID NO: 162227 - DNA, 19 bp, Homo sapiens
  siRNA target sequence for PPP1CC (NM_002710.1,868-886).
gcatgatttggatcttata

SEQ ID NO: 162228 - DNA, 19 bp, Homo sapiens
  siRNA target sequence for PPP1CC (NM_002710.1,869-887).
catgatttggatcttatat

SEQ ID NO: 162229 - DNA, 19 bp, Homo sapiens
  siRNA target sequence for PPP1CC (NM_002710.1,872-890).
gatttggatcttatatgta

SEQ ID NO: 162230 - DNA, 19 bp, Homo sapiens
  siRNA target sequence for PPP1CC (NM_002710.1,937-955).
gcagttggtcactctgttt

SEQ ID NO: 162231 - DNA, 19 bp, Homo sapiens
  siRNA target sequence for PPP1CC (NM_002710.1,952-970).
gttttctgcgcccaattat

SEQ ID NO: 162232 - DNA, 19 bp, Homo sapiens
  siRNA target sequence for PPP1CC (NM_002710.1,964-982).
caattattgcggagagttt

SEQ ID NO: 162233 - DNA, 19 bp, Homo sapiens
  siRNA target sequence for PPP1CC (NM_002710.1,1005-1023).
gtgtggatgaaacactaat

SEQ ID NO: 162234 - DNA, 19 bp, Homo sapiens
  siRNA target sequence for PPP1CC (NM_002710.1,1086-1104).
cgcctccaaggggtatgat

SEQ ID NO: 162235 - DNA, 19 bp, Homo sapiens
  siRNA target sequence for PPP1CC (NM_002710.1,1088-1106).
cctccaaggggtatgatca

SEQ ID NO: 162236 - DNA, 19 bp, Homo sapiens
  siRNA target sequence for PPP1CC (NM_002710.1,1091-1109).
ccaaggggtatgatcacaa

SEQ ID NO: 162237 - DNA, 19 bp, Homo sapiens
  siRNA target sequence for PPP1CC (NM_002710.1,1092-1110).
caaggggtatgatcacaaa

SEQ ID NO: 162238 - DNA, 19 bp, Homo sapiens
  siRNA target sequence for PPP2CA (NM_002715.1,302-320).
ctgcgagaaggctaaagaa

SEQ ID NO: 162239 - DNA, 19 bp, Homo sapiens
  siRNA target sequence for PPP2CA (NM_002715.1,350-368).
ggttcgatgtccagttact

SEQ ID NO: 162240 - DNA, 19 bp, Homo sapiens
  siRNA target sequence for PPP2CA (NM_002715.1,506-524).
gcttgtagctcttaaggtt

SEQ ID NO: 162241 - DNA, 19 bp, Homo sapiens
  siRNA target sequence for PPP2CA (NM_002715.1,545-563).
cattcttcgagggaatcat

SEQ ID NO: 162242 - DNA, 19 bp, Homo sapiens
  siRNA target sequence for PPP2CA (NM_002715.1,571-589).
gacagatcacacaagttta

SEQ ID NO: 162243 - DNA, 19 bp, Homo sapiens
  siRNA target sequence for PPP2CA (NM_002715.1,575-593).
gatcacacaagtttatggt

SEQ ID NO: 162244 - DNA, 19 bp, Homo sapiens
  siRNA target sequence for PPP2CA (NM_002715.1,580-598).
cacaagtttatggtttcta

SEQ ID NO: 162245 - DNA, 19 bp, Homo sapiens
  siRNA target sequence for PPP2CA (NM_002715.1,715-733).
gtctctcgccatctataga

SEQ ID NO: 162246 - DNA, 19 bp, Homo sapiens
  siRNA target sequence for PPP2CA (NM_002715.1,719-737).
ctcgccatctatagataca

SEQ ID NO: 162247 - DNA, 19 bp, Homo sapiens
  siRNA target sequence for PPP2CA (NM_002715.1,721-739).
cgccatctatagatacact

SEQ ID NO: 162248 - DNA, 19 bp, Homo sapiens
  siRNA target sequence for PPP2CA (NM_002715.1,925-943).
gagctcaccagctagtgat

SEQ ID NO: 162249 - DNA, 19 bp, Homo sapiens
  siRNA target sequence for PPP2CA (NM_002715.1,936-954).
ctagtgatggagggatata

SEQ ID NO: 162250 - DNA, 19 bp, Homo sapiens
  siRNA target sequence for PPP2CA (NM_002715.1,939-957).
gtgatggagggatataact

SEQ ID NO: 162251 - DNA, 19 bp, Homo sapiens
  siRNA target sequence for PPP2CA (NM_002715.1,959-977).
gtgccatgaccggaatgta

SEQ ID NO: 162252 - DNA, 19 bp, Homo sapiens
  siRNA target sequence for PPP2CA (NM_002715.1,963-981).
catgaccggaatgtagtaa

SEQ ID NO: 162253 - DNA, 19 bp, Homo sapiens
  siRNA target sequence for PPP2CA (NM_002715.1,968-986).
ccggaatgtagtaacgatt

SEQ ID NO: 162254 - DNA, 19 bp, Homo sapiens
  siRNA target sequence for PPP2CA (NM_002715.1,969-987).
cggaatgtagtaacgattt

SEQ ID NO: 162255 - DNA, 19 bp, Homo sapiens
  siRNA target sequence for PPP2CA (NM_002715.1,970-988).
ggaatgtagtaacgatttt

SEQ ID NO: 162256 - DNA, 19 bp, Homo sapiens
  siRNA target sequence for PPP2CA (NM_002715.1,989-1007).
cagtgctccaaactattgt

SEQ ID NO: 162257 - DNA, 19 bp, Homo sapiens
  siRNA target sequence for PPP2CA (NM_002715.1,991-1009).
gtgctccaaactattgtta

SEQ ID NO: 162258 - DNA, 19 bp, Homo sapiens
  siRNA target sequence for PPP2CA (NM_002715.1,996-1014).
ccaaactattgttatcgtt

SEQ ID NO: 162259 - DNA, 19 bp, Homo sapiens
  siRNA target sequence for PPP2CA (NM_002715.1,1018-1036).
gtaaccaagctgcaatcat

SEQ ID NO: 162260 - DNA, 19 bp, Homo sapiens
  siRNA target sequence for PPP2CA (NM_002715.1,1027-1045).
ctgcaatcatggaacttga

SEQ ID NO: 162261 - DNA, 19 bp, Homo sapiens
  siRNA target sequence for PPP2CA (NM_002715.1,1037-1055).
ggaacttgacgatactcta

SEQ ID NO: 162262 - DNA, 19 bp, Homo sapiens
  siRNA target sequence for PPP2CA (NM_002715.1,1038-1056).
gaacttgacgatactctaa

SEQ ID NO: 162263 - DNA, 19 bp, Homo sapiens
  siRNA target sequence for PPP2CA (NM_002715.1,1041-1059).
cttgacgatactctaaaat

SEQ ID NO: 162264 - DNA, 19 bp, Homo sapiens
  siRNA target sequence for PPP2CA (NM_002715.1,1046-1064).
cgatactctaaaatactct

SEQ ID NO: 162265 - DNA, 19 bp, Homo sapiens
  siRNA target sequence for PPP2CB (NM_004156.1,162-180).
ggttcgttgccctgttact

SEQ ID NO: 162266 - DNA, 19 bp, Homo sapiens
  siRNA target sequence for PPP2CB (NM_004156.1,247-265).
ccggatacaaactacttat

SEQ ID NO: 162267 - DNA, 19 bp, Homo sapiens
  siRNA target sequence for PPP2CB (NM_004156.1,261-279).
cttattcatgggtgactat

SEQ ID NO: 162268 - DNA, 19 bp, Homo sapiens
  siRNA target sequence for PPP2CB (NM_004156.1,306-324).
gactgtgactcttcttgta

SEQ ID NO: 162269 - DNA, 19 bp, Homo sapiens
  siRNA target sequence for PPP2CB (NM_004156.1,312-330).
gactcttcttgtagcatta

SEQ ID NO: 162270 - DNA, 19 bp, Homo sapiens
  siRNA target sequence for PPP2CB (NM_004156.1,343-361).
ccagaacgcattacaatat

SEQ ID NO: 162271 - DNA, 19 bp, Homo sapiens
  siRNA target sequence for PPP2CB (NM_004156.1,344-362).
cagaacgcattacaatatt

SEQ ID NO: 162272 - DNA, 19 bp, Homo sapiens
  siRNA target sequence for PPP2CB (NM_004156.1,346-364).
gaacgcattacaatattga

SEQ ID NO: 162273 - DNA, 19 bp, Homo sapiens
  siRNA target sequence for PPP2CB (NM_004156.1,373-391).
cacgaaagccgacaaatta

SEQ ID NO: 162274 - DNA, 19 bp, Homo sapiens
  siRNA target sequence for PPP2CB (NM_004156.1,382-400).
cgacaaattacccaagtat

SEQ ID NO: 162275 - DNA, 19 bp, Homo sapiens
  siRNA target sequence for PPP2CB (NM_004156.1,392-410).
cccaagtatatggctttta

SEQ ID NO: 162276 - DNA, 19 bp, Homo sapiens
  siRNA target sequence for PPP2CB (NM_004156.1,393-411).
ccaagtatatggcttttat

SEQ ID NO: 162277 - DNA, 19 bp, Homo sapiens
  siRNA target sequence for PPP2CB (NM_004156.1,482-500).
cacttacagctttagtaga

SEQ ID NO: 162278 - DNA, 19 bp, Homo sapiens
  siRNA target sequence for PPP2CB (NM_004156.1,736-754).
cgtgcccaccagcttgtaa

SEQ ID NO: 162279 - DNA, 19 bp, Homo sapiens
  siRNA target sequence for PPP2CB (NM_004156.1,737-755).
gtgcccaccagcttgtaat

SEQ ID NO: 162280 - DNA, 19 bp, Homo sapiens
  siRNA target sequence for PPP2CB (NM_004156.1,740-758).
cccaccagcttgtaatgga

SEQ ID NO: 162281 - DNA, 19 bp, Homo sapiens
  siRNA target sequence for PPP2CB (NM_004156.1,781-799).
cggaatgtggttaccattt

SEQ ID NO: 162282 - DNA, 19 bp, Homo sapiens
  siRNA target sequence for PPP2CB (NM_004156.1,801-819).
cagtgcacccaattactgt

SEQ ID NO: 162283 - DNA, 19 bp, Homo sapiens
  siRNA target sequence for PPP2CB (NM_004156.1,803-821).
gtgcacccaattactgtta

SEQ ID NO: 162284 - DNA, 19 bp, Homo sapiens
  siRNA target sequence for PPP2CB (NM_004156.1,850-868).
gaattagatgacactttaa

SEQ ID NO: 162285 - DNA, 19 bp, Homo sapiens
  siRNA target sequence for PPP2CB (NM_004156.1,859-877).
gacactttaaaatattcct

SEQ ID NO: 162286 - DNA, 19 bp, Homo sapiens
  siRNA target sequence for PPP2CB (NM_004156.1,904-922).
cgtggtgagcctcatgtta

SEQ ID NO: 162287 - DNA, 19 bp, Homo sapiens
  siRNA target sequence for PPP4C (NM_002720.1,354-372).
gtggaccgtggcttctata

SEQ ID NO: 162288 - DNA, 19 bp, Homo sapiens
  siRNA target sequence for PPP4C (NM_002720.1,526-544).
gctactgcactgagatctt

SEQ ID NO: 162289 - DNA, 19 bp, Homo sapiens
  siRNA target sequence for PPP4C (NM_002720.1,532-550).
gcactgagatctttgacta

SEQ ID NO: 162290 - DNA, 19 bp, Homo sapiens
  siRNA target sequence for PPP4C (NM_002720.1,638-656).
gacaatcgaccgaaagcaa

SEQ ID NO: 162291 - DNA, 19 bp, Homo sapiens
  siRNA target sequence for PPP4C (NM_002720.1,653-671).
gcaagaggtgcctcatgat

SEQ ID NO: 162292 - DNA, 19 bp, Homo sapiens
  siRNA target sequence for PPP4C (NM_002720.1,735-753).
cgaggagccggctacctat

SEQ ID NO: 162293 - DNA, 19 bp, Homo sapiens
  siRNA target sequence for PPP4C (NM_002720.1,736-754).
gaggagccggctacctatt

SEQ ID NO: 162294 - DNA, 19 bp, Homo sapiens
  siRNA target sequence for PPP4C (NM_002720.1,779-797).
caacgcagccaatgacatt

SEQ ID NO: 162295 - DNA, 19 bp, Homo sapiens
  siRNA target sequence for PPP4C (NM_002720.1,784-802).
cagccaatgacattgacat

SEQ ID NO: 162296 - DNA, 19 bp, Homo sapiens
  siRNA target sequence for PPP4C (NM_002720.1,835-853).
gttacaagtggcacttcaa

SEQ ID NO: 162297 - DNA, 19 bp, Homo sapiens
  siRNA target sequence for PPP4C (NM_002720.1,932-950).
cgagcatctccagaaagat

SEQ ID NO: 162298 - DNA, 19 bp, Homo sapiens
  siRNA target sequence for PPP5C (NM_006247.2,609-627).
cggcaaagtgacaatcagt

SEQ ID NO: 162299 - DNA, 19 bp, Homo sapiens
  siRNA target sequence for PPP5C (NM_006247.2,738-756).
cgtggaaaccacactcaaa

SEQ ID NO: 162300 - DNA, 19 bp, Homo sapiens
  siRNA target sequence for PPP5C (NM_006247.2,742-760).
gaaaccacactcaaagaga

SEQ ID NO: 162301 - DNA, 19 bp, Homo sapiens
  siRNA target sequence for PPP5C (NM_006247.2,801-819).
ctatgacctcctcaacata

SEQ ID NO: 162302 - DNA, 19 bp, Homo sapiens
  siRNA target sequence for PPP5C (NM_006247.2,842-860).
cggagaccaacccctatat

SEQ ID NO: 162303 - DNA, 19 bp, Homo sapiens
  siRNA target sequence for PPP5C (NM_006247.2,843-861).
ggagaccaacccctatata

SEQ ID NO: 162304 - DNA, 19 bp, Homo sapiens
  siRNA target sequence for PPP5C (NM_006247.2,852-870).
cccctatatatttaatggt

SEQ ID NO: 162305 - DNA, 19 bp, Homo sapiens
  siRNA target sequence for PPP5C (NM_006247.2,1309-1327).
gagaacaacctggactata

SEQ ID NO: 162306 - DNA, 19 bp, Homo sapiens
  siRNA target sequence for PPP6C (NM_002721.3,76-94).
cgctagacctggacaagta

SEQ ID NO: 162307 - DNA, 19 bp, Homo sapiens
  siRNA target sequence for PPP6C (NM_002721.3,86-104).
ggacaagtatgtggaaata

SEQ ID NO: 162308 - DNA, 19 bp, Homo sapiens
  siRNA target sequence for PPP6C (NM_002721.3,144-162).
cggctatgtgactacgttt

SEQ ID NO: 162309 - DNA, 19 bp, Homo sapiens
  siRNA target sequence for PPP6C (NM_002721.3,274-292).
gtcaggttcctgacacaaa

SEQ ID NO: 162310 - DNA, 19 bp, Homo sapiens
  siRNA target sequence for PPP6C (NM_002721.3,282-300).
cctgacacaaactacatat

SEQ ID NO: 162311 - DNA, 19 bp, Homo sapiens
  siRNA target sequence for PPP6C (NM_002721.3,318-336).
gacagaggttactatagtt

SEQ ID NO: 162312 - DNA, 19 bp, Homo sapiens
  siRNA target sequence for PPP6C (NM_002721.3,334-352).
gtttggagaccttcactta

SEQ ID NO: 162313 - DNA, 19 bp, Homo sapiens
  siRNA target sequence for PPP6C (NM_002721.3,357-375).
cttgcattaaaggctaaat

SEQ ID NO: 162314 - DNA, 19 bp, Homo sapiens
  siRNA target sequence for PPP6C (NM_002721.3,370-388).
ctaaatggcctgatcgtat

SEQ ID NO: 162315 - DNA, 19 bp, Homo sapiens
  siRNA target sequence for PPP6C (NM_002721.3,376-394).
ggcctgatcgtattacact

SEQ ID NO: 162316 - DNA, 19 bp, Homo sapiens
  siRNA target sequence for PPP6C (NM_002721.3,377-395).
gcctgatcgtattacactt

SEQ ID NO: 162317 - DNA, 19 bp, Homo sapiens
  siRNA target sequence for PPP6C (NM_002721.3,379-397).
ctgatcgtattacactttt

SEQ ID NO: 162318 - DNA, 19 bp, Homo sapiens
  siRNA target sequence for PPP6C (NM_002721.3,431-449).
ggtctatggattttatgat

SEQ ID NO: 162319 - DNA, 19 bp, Homo sapiens
  siRNA target sequence for PPP6C (NM_002721.3,474-492).
gctaatgcctggagatact

SEQ ID NO: 162320 - DNA, 19 bp, Homo sapiens
  siRNA target sequence for PPP6C (NM_002721.3,517-535).
cagtagcagctttaataga

SEQ ID NO: 162321 - DNA, 19 bp, Homo sapiens
  siRNA target sequence for PPP6C (NM_002721.3,605-623).
cgaacggaatcaggaaatt

SEQ ID NO: 162322 - DNA, 19 bp, Homo sapiens
  siRNA target sequence for PPP6C (NM_002721.3,624-642).
cctcataaaggagcatttt

SEQ ID NO: 162323 - DNA, 19 bp, Homo sapiens
  siRNA target sequence for PPP6C (NM_002721.3,674-692).
ggatacctgggctatcagt

SEQ ID NO: 162324 - DNA, 19 bp, Homo sapiens
  siRNA target sequence for PPP6C (NM_002721.3,725-743).
ggtcacaaatgagtttgtt

SEQ ID NO: 162325 - DNA, 19 bp, Homo sapiens
  siRNA target sequence for PPP6C (NM_002721.3,764-782).
catctgcagagcacatcaa

SEQ ID NO: 162326 - DNA, 19 bp, Homo sapiens
  siRNA target sequence for PPP6C (NM_002721.3,786-804).
gtgcacgaaggctataaat

SEQ ID NO: 162327 - DNA, 19 bp, Homo sapiens
  siRNA target sequence for PPP6C (NM_002721.3,792-810).
gaaggctataaatttatgt

SEQ ID NO: 162328 - DNA, 19 bp, Homo sapiens
  siRNA target sequence for PPP6C (NM_002721.3,831-849).
gtatggtctgctcctaatt

SEQ ID NO: 162329 - DNA, 19 bp, Homo sapiens
  siRNA target sequence for PPP6C (NM_002721.3,851-869).
ctgctatcgttgtggaaat

SEQ ID NO: 162330 - DNA, 19 bp, Homo sapiens
  siRNA target sequence for PPP6C (NM_002721.3,853-871).
gctatcgttgtggaaatat

SEQ ID NO: 162331 - DNA, 19 bp, Homo sapiens
  siRNA target sequence for PPP6C (NM_002721.3,877-895).
cgatcatggtcttcaaaga

SEQ ID NO: 162332 - DNA, 19 bp, Homo sapiens
  siRNA target sequence for PPP6C (NM_002721.3,961-979).
gaacgacaacgccatattt

SEQ ID NO: 162333 - DNA, 19 bp, Homo sapiens
  siRNA target sequence for PPP6C (NM_002721.3,964-982).
cgacaacgccatatttcct

SEQ ID NO: 162334 - DNA, 19 bp, Homo sapiens
  siRNA target sequence for SOD2 (NM_000636.1,220-238).
gttggccaagggagatgtt

SEQ ID NO: 162335 - DNA, 19 bp, Homo sapiens
  siRNA target sequence for SOD2 (NM_000636.1,259-277).
gcctgcactgaagttcaat

SEQ ID NO: 162336 - DNA, 19 bp, Homo sapiens
  siRNA target sequence for SOD2 (NM_000636.1,279-297).
gtggtggtcatatcaatca

SEQ ID NO: 162337 - DNA, 19 bp, Homo sapiens
  siRNA target sequence for SOD2 (NM_000636.1,285-303).
gtcatatcaatcatagcat

SEQ ID NO: 162338 - DNA, 19 bp, Homo sapiens
  siRNA target sequence for SOD2 (NM_000636.1,287-305).
catatcaatcatagcattt

SEQ ID NO: 162339 - DNA, 19 bp, Homo sapiens
  siRNA target sequence for SOD2 (NM_000636.1,381-399).
gttcctttgacaagtttaa

SEQ ID NO: 162340 - DNA, 19 bp, Homo sapiens
  siRNA target sequence for SOD2 (NM_000636.1,444-462).
ggggttggcttggtttcaa

SEQ ID NO: 162341 - DNA, 19 bp, Homo sapiens
  siRNA target sequence for SOD2 (NM_000636.1,446-464).
ggttggcttggtttcaata

SEQ ID NO: 162342 - DNA, 19 bp, Homo sapiens
  siRNA target sequence for SOD2 (NM_000636.1,450-468).
ggcttggtttcaataagga

SEQ ID NO: 162343 - DNA, 19 bp, Homo sapiens
  siRNA target sequence for SOD2 (NM_000636.1,467-485).
gaacggggacacttacaaa

SEQ ID NO: 162344 - DNA, 19 bp, Homo sapiens
  siRNA target sequence for SOD2 (NM_000636.1,472-490).
gggacacttacaaattgct

SEQ ID NO: 162345 - DNA, 19 bp, Homo sapiens
  siRNA target sequence for SOD2 (NM_000636.1,565-583).
cgcttactaccttcagtat

SEQ ID NO: 162346 - DNA, 19 bp, Homo sapiens
  siRNA target sequence for SOD2 (NM_000636.1,566-584).
gcttactaccttcagtata

SEQ ID NO: 162347 - DNA, 19 bp, Homo sapiens
  siRNA target sequence for SOD2 (NM_000636.1,590-608).
gtcaggcctgattatctaa

SEQ ID NO: 162348 - DNA, 19 bp, Homo sapiens
  siRNA target sequence for SOD2 (NM_000636.1,596-614).
cctgattatctaaaagcta

SEQ ID NO: 162349 - DNA, 19 bp, Homo sapiens
  siRNA target sequence for SOD2 (NM_000636.1,597-615).
ctgattatctaaaagctat

SEQ ID NO: 162350 - DNA, 19 bp, Homo sapiens
  siRNA target sequence for SOD2 (NM_000636.1,628-646).
caactgggagaatgtaact

SEQ ID NO: 162351 - DNA, 19 bp, Homo sapiens
  siRNA target sequence for SOD2 (NM_000636.1,631-649).
ctgggagaatgtaactgaa

SEQ ID NO: 162352 - DNA, 19 bp, Homo sapiens
  siRNA target sequence for ABP1 (NM_001091.1,361-379).
cccgtgccgtcatcttctt

SEQ ID NO: 162353 - DNA, 19 bp, Homo sapiens
  siRNA target sequence for ABP1 (NM_001091.1,362-380).
ccgtgccgtcatcttcttt

SEQ ID NO: 162354 - DNA, 19 bp, Homo sapiens
  siRNA target sequence for ABP1 (NM_001091.1,547-565).
ccaagcccctgcatcagtt

SEQ ID NO: 162355 - DNA, 19 bp, Homo sapiens
  siRNA target sequence for ABP1 (NM_001091.1,662-680).
ccgcagttggcttatcata

SEQ ID NO: 162356 - DNA, 19 bp, Homo sapiens
  siRNA target sequence for ABP1 (NM_001091.1,664-682).
gcagttggcttatcataca

SEQ ID NO: 162357 - DNA, 19 bp, Homo sapiens
  siRNA target sequence for ABP1 (NM_001091.1,677-695).
catacagcgctatgtagaa

SEQ ID NO: 162358 - DNA, 19 bp, Homo sapiens
  siRNA target sequence for ABP1 (NM_001091.1,781-799).
ggtacaacgggaagttcta

SEQ ID NO: 162359 - DNA, 19 bp, Homo sapiens
  siRNA target sequence for ABP1 (NM_001091.1,812-830).
ggaactggctcggaagtat

SEQ ID NO: 162360 - DNA, 19 bp, Homo sapiens
  siRNA target sequence for ABP1 (NM_001091.1,1288-1306).
ccgatgacccggtccatta

SEQ ID NO: 162361 - DNA, 19 bp, Homo sapiens
  siRNA target sequence for ABP1 (NM_001091.1,1289-1307).
cgatgacccggtccattat

SEQ ID NO: 162362 - DNA, 19 bp, Homo sapiens
  siRNA target sequence for ABP1 (NM_001091.1,1314-1332).
gccctctgcctctttgaaa

SEQ ID NO: 162363 - DNA, 19 bp, Homo sapiens
  siRNA target sequence for ABP1 (NM_001091.1,1419-1437).
ctggtgctgcggacaactt

SEQ ID NO: 162364 - DNA, 19 bp, Homo sapiens
  siRNA target sequence for ABP1 (NM_001091.1,1422-1440).
gtgctgcggacaacttcaa

SEQ ID NO: 162365 - DNA, 19 bp, Homo sapiens
  siRNA target sequence for ABP1 (NM_001091.1,1424-1442).
gctgcggacaacttcaact

SEQ ID NO: 162366 - DNA, 19 bp, Homo sapiens
  siRNA target sequence for ABP1 (NM_001091.1,1441-1459).
ctgtctacaattatgatta

SEQ ID NO: 162367 - DNA, 19 bp, Homo sapiens
  siRNA target sequence for AOC2 (NM_001158.2,90-108).
ccctggcctatgttttgct

SEQ ID NO: 162368 - DNA, 19 bp, Homo sapiens
  siRNA target sequence for AOC2 (NM_001158.2,533-551).
gtgctgagagctgagttta

SEQ ID NO: 162369 - DNA, 19 bp, Homo sapiens
  siRNA target sequence for AOC2 (NM_001158.2,811-829).
ctaccttgggcactactat

SEQ ID NO: 162370 - DNA, 19 bp, Homo sapiens
  siRNA target sequence for AOC2 (NM_001158.2,842-860).
cagttggaacgggagttta

SEQ ID NO: 162371 - DNA, 19 bp, Homo sapiens
  siRNA target sequence for AOC2 (NM_001158.2,1014-1032).
ccctctggtcatttacctt

SEQ ID NO: 162372 - DNA, 19 bp, Homo sapiens
  siRNA target sequence for AOC2 (NM_001158.2,1048-1066).
cagcggcctgaggattttt

SEQ ID NO: 162373 - DNA, 19 bp, Homo sapiens
  siRNA target sequence for AOC2 (NM_001158.2,1050-1068).
gcggcctgaggatttttga

SEQ ID NO: 162374 - DNA, 19 bp, Homo sapiens
  siRNA target sequence for AOC2 (NM_001158.2,1051-1069).
cggcctgaggatttttgat

SEQ ID NO: 162375 - DNA, 19 bp, Homo sapiens
  siRNA target sequence for AOC2 (NM_001158.2,1053-1071).
gcctgaggatttttgatgt

SEQ ID NO: 162376 - DNA, 19 bp, Homo sapiens
  siRNA target sequence for AOC2 (NM_001158.2,1109-1127).
gtccaggagtgtgtatcta

SEQ ID NO: 162377 - DNA, 19 bp, Homo sapiens
  siRNA target sequence for AOC2 (NM_001158.2,1112-1130).
caggagtgtgtatctatct

SEQ ID NO: 162378 - DNA, 19 bp, Homo sapiens
  siRNA target sequence for AOC2 (NM_001158.2,1152-1170).
cgatgctgactcgctattt

SEQ ID NO: 162379 - DNA, 19 bp, Homo sapiens
  siRNA target sequence for AOC2 (NM_001158.2,1156-1174).
gctgactcgctatttggat

SEQ ID NO: 162380 - DNA, 19 bp, Homo sapiens
  siRNA target sequence for AOC2 (NM_001158.2,1246-1264).
ggtggacatccatatatta

SEQ ID NO: 162381 - DNA, 19 bp, Homo sapiens
  siRNA target sequence for AOC2 (NM_001158.2,1334-1352).
cttcgaaggcaccacaatt

SEQ ID NO: 162382 - DNA, 19 bp, Homo sapiens
  siRNA target sequence for AOC2 (NM_001158.2,1343-1361).
caccacaattaccttcaaa

SEQ ID NO: 162383 - DNA, 19 bp, Homo sapiens
  siRNA target sequence for AOC2 (NM_001158.2,1411-1429).
gtcatctgtgggcaactat

SEQ ID NO: 162384 - DNA, 19 bp, Homo sapiens
  siRNA target sequence for AOC2 (NM_001158.2,1416-1434).
ctgtgggcaactatgacta

SEQ ID NO: 162385 - DNA, 19 bp, Homo sapiens
  siRNA target sequence for AOC2 (NM_001158.2,1421-1439).
ggcaactatgactacattt

SEQ ID NO: 162386 - DNA, 19 bp, Homo sapiens
  siRNA target sequence for AOC2 (NM_001158.2,1456-1474).
cccaaatggggcacttgaa

SEQ ID NO: 162387 - DNA, 19 bp, Homo sapiens
  siRNA target sequence for AOC2 (NM_001158.2,1481-1499).
gtccatgccacgggttata

SEQ ID NO: 162388 - DNA, 19 bp, Homo sapiens
  siRNA target sequence for AOC2 (NM_001158.2,1484-1502).
catgccacgggttatatca

SEQ ID NO: 162389 - DNA, 19 bp, Homo sapiens
  siRNA target sequence for AOC2 (NM_001158.2,1487-1505).
gccacgggttatatcaaca

SEQ ID NO: 162390 - DNA, 19 bp, Homo sapiens
  siRNA target sequence for AOC2 (NM_001158.2,1643-1661).
gctgaagacgtggtgttta

SEQ ID NO: 162391 - DNA, 19 bp, Homo sapiens
  siRNA target sequence for AOC2 (NM_001158.2,1735-1753).
ggaggacctgacagctttt

SEQ ID NO: 162392 - DNA, 19 bp, Homo sapiens
  siRNA target sequence for AOC2 (NM_001158.2,1736-1754).
gaggacctgacagcttttt

SEQ ID NO: 162393 - DNA, 19 bp, Homo sapiens
  siRNA target sequence for AOC2 (NM_001158.2,1739-1757).
gacctgacagctttttcct

SEQ ID NO: 162394 - DNA, 19 bp, Homo sapiens
  siRNA target sequence for AOC2 (NM_001158.2,1789-1807).
ggctagcaaccagactaat

SEQ ID NO: 162395 - DNA, 19 bp, Homo sapiens
  siRNA target sequence for AOC2 (NM_001158.2,1917-1935).
cctttgctgacttcatcaa

SEQ ID NO: 162396 - DNA, 19 bp, Homo sapiens
  siRNA target sequence for AOC2 (NM_009590.1,698-716).
gccctctaccataacatct

SEQ ID NO: 162397 - DNA, 19 bp, Homo sapiens
  siRNA target sequence for AOC3 (NM_003734.2,196-214).
ggccgtcatcaccatcttt

SEQ ID NO: 162398 - DNA, 19 bp, Homo sapiens
  siRNA target sequence for AOC3 (NM_003734.2,774-792).
gacggaacctggtgacaat

SEQ ID NO: 162399 - DNA, 19 bp, Homo sapiens
  siRNA target sequence for AOC3 (NM_003734.2,776-794).
cggaacctggtgacaatga

SEQ ID NO: 162400 - DNA, 19 bp, Homo sapiens
  siRNA target sequence for AOC3 (NM_003734.2,939-957).
ctatccagaaggtgttcta

SEQ ID NO: 162401 - DNA, 19 bp, Homo sapiens
  siRNA target sequence for AOC3 (NM_003734.2,1565-1583).
ctcaactatgactatgtgt

SEQ ID NO: 162402 - DNA, 19 bp, Homo sapiens
  siRNA target sequence for AOC3 (NM_003734.2,2088-2106).
gtagcagcagcgttttcaa

SEQ ID NO: 162403 - DNA, 19 bp, Homo sapiens
  siRNA target sequence for AOC3 (NM_003734.2,2094-2112).
gcagcgttttcaatcagaa

SEQ ID NO: 162404 - DNA, 19 bp, Homo sapiens
  siRNA target sequence for AOC3 (NM_003734.2,2097-2115).
gcgttttcaatcagaatga

SEQ ID NO: 162405 - DNA, 19 bp, Homo sapiens
  siRNA target sequence for ATOX1 (NM_004045.2,283-301).
gtctctcgggtcctcaata

SEQ ID NO: 162406 - DNA, 19 bp, Homo sapiens
  siRNA target sequence for ATOX1 (NM_004045.2,287-305).
ctcgggtcctcaataagct

SEQ ID NO: 162407 - DNA, 19 bp, Homo sapiens
  siRNA target sequence for ATOX1 (NM_004045.2,381-399).
gcttgcaaccctgaagaaa

SEQ ID NO: 162408 - DNA, 19 bp, Homo sapiens
  siRNA target sequence for CCS (NM_005125.1,381-399).
gcctcatcgagggaactat

SEQ ID NO: 162409 - DNA, 19 bp, Homo sapiens
  siRNA target sequence for CCS (NM_005125.1,382-400).
cctcatcgagggaactatt

SEQ ID NO: 162410 - DNA, 19 bp, Homo sapiens
  siRNA target sequence for CCS (NM_005125.1,426-444).
gactccacgtccatcagta

SEQ ID NO: 162411 - DNA, 19 bp, Homo sapiens
  siRNA target sequence for CCS (NM_005125.1,440-458).
cagtacggggaccttacaa

SEQ ID NO: 162412 - DNA, 19 bp, Homo sapiens
  siRNA target sequence for CCS (NM_005125.1,627-645).
gccgcagcctgattattga

SEQ ID NO: 162413 - DNA, 19 bp, Homo sapiens
  siRNA target sequence for CCS (NM_005125.1,630-648).
gcagcctgattattgatga

SEQ ID NO: 162414 - DNA, 19 bp, Homo sapiens
  siRNA target sequence for CCS (NM_005125.1,671-689).
ggaggccatcccttatcca

SEQ ID NO: 162415 - DNA, 19 bp, Homo sapiens
  siRNA target sequence for CCS (NM_005125.1,672-690).
gaggccatcccttatccaa

SEQ ID NO: 162416 - DNA, 19 bp, Homo sapiens
  siRNA target sequence for CCS (NM_005125.1,738-756).
gctccgctggccttttcca

SEQ ID NO: 162417 - DNA, 19 bp, Homo sapiens
  siRNA target sequence for CP (NM_000096.1,53-71).
gggcgaaagaaaagcatta

SEQ ID NO: 162418 - DNA, 19 bp, Homo sapiens
  siRNA target sequence for CP (NM_000096.1,54-72).
ggcgaaagaaaagcattat

SEQ ID NO: 162419 - DNA, 19 bp, Homo sapiens
  siRNA target sequence for CP (NM_000096.1,142-160).
gacacggaacattccaata

SEQ ID NO: 162420 - DNA, 19 bp, Homo sapiens
  siRNA target sequence for CP (NM_000096.1,146-164).
cggaacattccaatatcta

SEQ ID NO: 162421 - DNA, 19 bp, Homo sapiens
  siRNA target sequence for CP (NM_000096.1,155-173).
ccaatatctatcttcaaaa

SEQ ID NO: 162422 - DNA, 19 bp, Homo sapiens
  siRNA target sequence for CP (NM_000096.1,156-174).
caatatctatcttcaaaat

SEQ ID NO: 162423 - DNA, 19 bp, Homo sapiens
  siRNA target sequence for CP (NM_000096.1,169-187).
caaaatggcccagatagaa

SEQ ID NO: 162424 - DNA, 19 bp, Homo sapiens
  siRNA target sequence for CP (NM_000096.1,181-199).
gatagaattgggagactat

SEQ ID NO: 162425 - DNA, 19 bp, Homo sapiens
  siRNA target sequence for CP (NM_000096.1,185-203).
gaattgggagactatataa

SEQ ID NO: 162426 - DNA, 19 bp, Homo sapiens
  siRNA target sequence for CP (NM_000096.1,232-250).
gaaacctttaggacaacta

SEQ ID NO: 162427 - DNA, 19 bp, Homo sapiens
  siRNA target sequence for CP (NM_000096.1,260-278).
cggtctggcttgggttttt

SEQ ID NO: 162428 - DNA, 19 bp, Homo sapiens
  siRNA target sequence for CP (NM_000096.1,261-279).
ggtctggcttgggttttta

SEQ ID NO: 162429 - DNA, 19 bp, Homo sapiens
  siRNA target sequence for CP (NM_000096.1,271-289).
gggtttttaggccctatta

SEQ ID NO: 162430 - DNA, 19 bp, Homo sapiens
  siRNA target sequence for CP (NM_000096.1,272-290).
ggtttttaggccctattat

SEQ ID NO: 162431 - DNA, 19 bp, Homo sapiens
  siRNA target sequence for CP (NM_000096.1,348-366).
ctacacctttcattcacat

SEQ ID NO: 162432 - DNA, 19 bp, Homo sapiens
  siRNA target sequence for CP (NM_000096.1,364-382).
catggaataacttactata

SEQ ID NO: 162433 - DNA, 19 bp, Homo sapiens
  siRNA target sequence for CP (NM_000096.1,374-392).
cttactataaggaacatga

SEQ ID NO: 162434 - DNA, 19 bp, Homo sapiens
  siRNA target sequence for CP (NM_000096.1,397-415).
gccatctaccctgataaca

SEQ ID NO: 162435 - DNA, 19 bp, Homo sapiens
  siRNA target sequence for CP (NM_000096.1,406-424).
cctgataacaccacagatt

SEQ ID NO: 162436 - DNA, 19 bp, Homo sapiens
  siRNA target sequence for CP (NM_000096.1,451-469).
ccaggagagcagtatacat

SEQ ID NO: 162437 - DNA, 19 bp, Homo sapiens
  siRNA target sequence for CP (NM_000096.1,452-470).
caggagagcagtatacata

SEQ ID NO: 162438 - DNA, 19 bp, Homo sapiens
  siRNA target sequence for CP (NM_000096.1,455-473).
gagagcagtatacatacat

SEQ ID NO: 162439 - DNA, 19 bp, Homo sapiens
  siRNA target sequence for CP (NM_000096.1,457-475).
gagcagtatacatacatgt

SEQ ID NO: 162440 - DNA, 19 bp, Homo sapiens
  siRNA target sequence for CP (NM_000096.1,477-495).
gcttgccactgaagaacaa

SEQ ID NO: 162441 - DNA, 19 bp, Homo sapiens
  siRNA target sequence for CP (NM_000096.1,478-496).
cttgccactgaagaacaaa

SEQ ID NO: 162442 - DNA, 19 bp, Homo sapiens
  siRNA target sequence for CP (NM_000096.1,504-522).
ggaaggagatggcaattgt

SEQ ID NO: 162443 - DNA, 19 bp, Homo sapiens
  siRNA target sequence for CP (NM_000096.1,516-534).
caattgtgtgactaggatt

SEQ ID NO: 162444 - DNA, 19 bp, Homo sapiens
  siRNA target sequence for CP (NM_000096.1,521-539).
gtgtgactaggatttacca

SEQ ID NO: 162445 - DNA, 19 bp, Homo sapiens
  siRNA target sequence for CP (NM_000096.1,523-541).
gtgactaggatttaccatt

SEQ ID NO: 162446 - DNA, 19 bp, Homo sapiens
  siRNA target sequence for CP (NM_000096.1,543-561).
ccacattgatgctccaaaa

SEQ ID NO: 162447 - DNA, 19 bp, Homo sapiens
  siRNA target sequence for CP (NM_000096.1,574-592).
ggactcatcggacctttaa

SEQ ID NO: 162448 - DNA, 19 bp, Homo sapiens
  siRNA target sequence for CP (NM_000096.1,575-593).
gactcatcggacctttaat

SEQ ID NO: 162449 - DNA, 19 bp, Homo sapiens
  siRNA target sequence for CP (NM_000096.1,577-595).
ctcatcggacctttaataa

SEQ ID NO: 162450 - DNA, 19 bp, Homo sapiens
  siRNA target sequence for CP (NM_000096.1,582-600).
cggacctttaataatctgt

SEQ ID NO: 162451 - DNA, 19 bp, Homo sapiens
  siRNA target sequence for CP (NM_000096.1,644-662).
gagaatttgtggtgatgtt

SEQ ID NO: 162452 - DNA, 19 bp, Homo sapiens
  siRNA target sequence for CP (NM_000096.1,754-772).
gacttccaggagagtaaca

SEQ ID NO: 162453 - DNA, 19 bp, Homo sapiens
  siRNA target sequence for CP (NM_000096.1,765-783).
gagtaacagaatgtattct

SEQ ID NO: 162454 - DNA, 19 bp, Homo sapiens
  siRNA target sequence for CP (NM_000096.1,767-785).
gtaacagaatgtattctgt

SEQ ID NO: 162455 - DNA, 19 bp, Homo sapiens
  siRNA target sequence for CP (NM_000096.1,901-919).
gggcaagcactgactaaca

SEQ ID NO: 162456 - DNA, 19 bp, Homo sapiens
  siRNA target sequence for CP (NM_000096.1,904-922).
caagcactgactaacaaga

SEQ ID NO: 162457 - DNA, 19 bp, Homo sapiens
  siRNA target sequence for CP (NM_000096.1,907-925).
gcactgactaacaagaact

SEQ ID NO: 162458 - DNA, 19 bp, Homo sapiens
  siRNA target sequence for CP (NM_000096.1,956-974).
ctaccctgtttgatgctta

SEQ ID NO: 162459 - DNA, 19 bp, Homo sapiens
  siRNA target sequence for CP (NM_000096.1,959-977).
ccctgtttgatgcttatat

SEQ ID NO: 162460 - DNA, 19 bp, Homo sapiens
  siRNA target sequence for CP (NM_000096.1,1010-1028).
gctgtcagaatctaaacca

SEQ ID NO: 162461 - DNA, 19 bp, Homo sapiens
  siRNA target sequence for CP (NM_000096.1,1037-1055).
ccggtttgcaagccttttt

SEQ ID NO: 162462 - DNA, 19 bp, Homo sapiens
  siRNA target sequence for CP (NM_000096.1,1057-1075).
caggtccaggagtgtaaca

SEQ ID NO: 162463 - DNA, 19 bp, Homo sapiens
  siRNA target sequence for CP (NM_000096.1,1066-1084).
gagtgtaacaagtcttcat

SEQ ID NO: 162464 - DNA, 19 bp, Homo sapiens
  siRNA target sequence for CP (NM_000096.1,1068-1086).
gtgtaacaagtcttcatca

SEQ ID NO: 162465 - DNA, 19 bp, Homo sapiens
  siRNA target sequence for CP (NM_000096.1,1070-1088).
gtaacaagtcttcatcaaa

SEQ ID NO: 162466 - DNA, 19 bp, Homo sapiens
  siRNA target sequence for CP (NM_000096.1,1098-1116).
ccgtgggaagcatgttaga

SEQ ID NO: 162467 - DNA, 19 bp, Homo sapiens
  siRNA target sequence for CP (NM_000096.1,1129-1147).
gccgctgaggaaatcatct

SEQ ID NO: 162468 - DNA, 19 bp, Homo sapiens
  siRNA target sequence for CP (NM_000096.1,1165-1183).
ggtatagacatcttcacta

SEQ ID NO: 162469 - DNA, 19 bp, Homo sapiens
  siRNA target sequence for CP (NM_000096.1,1166-1184).
gtatagacatcttcactaa

SEQ ID NO: 162470 - DNA, 19 bp, Homo sapiens
  siRNA target sequence for CP (NM_000096.1,1228-1246).
gaacaaggtaccacaagaa

SEQ ID NO: 162471 - DNA, 19 bp, Homo sapiens
  siRNA target sequence for CP (NM_000096.1,1291-1309).
gcctccttcacaaatcgaa

SEQ ID NO: 162472 - DNA, 19 bp, Homo sapiens
  siRNA target sequence for CP (NM_000096.1,1292-1310).
cctccttcacaaatcgaaa

SEQ ID NO: 162473 - DNA, 19 bp, Homo sapiens
  siRNA target sequence for CP (NM_000096.1,1372-1390).
ggagacaccatcagagtaa

SEQ ID NO: 162474 - DNA, 19 bp, Homo sapiens
  siRNA target sequence for CP (NM_000096.1,1385-1403).
gagtaaccttccataacaa

SEQ ID NO: 162475 - DNA, 19 bp, Homo sapiens
  siRNA target sequence for CP (NM_000096.1,1406-1424).
gagcatatcccctcagtat

SEQ ID NO: 162476 - DNA, 19 bp, Homo sapiens
  siRNA target sequence for CP (NM_000096.1,1429-1447).
ccgattggggtgagattca

SEQ ID NO: 162477 - DNA, 19 bp, Homo sapiens
  siRNA target sequence for CP (NM_000096.1,1430-1448).
cgattggggtgagattcaa

SEQ ID NO: 162478 - DNA, 19 bp, Homo sapiens
  siRNA target sequence for CP (NM_000096.1,1431-1449).
gattggggtgagattcaat

SEQ ID NO: 162479 - DNA, 19 bp, Homo sapiens
  siRNA target sequence for CP (NM_000096.1,1435-1453).
ggggtgagattcaataaga

SEQ ID NO: 162480 - DNA, 19 bp, Homo sapiens
  siRNA target sequence for CP (NM_000096.1,1455-1473).
caacgagggcacatactat

SEQ ID NO: 162481 - DNA, 19 bp, Homo sapiens
  siRNA target sequence for CP (NM_000096.1,1466-1484).
catactattccccaaatta

SEQ ID NO: 162482 - DNA, 19 bp, Homo sapiens
  siRNA target sequence for CP (NM_000096.1,1597-1615).
gtgtgtctagctaagatgt

SEQ ID NO: 162483 - DNA, 19 bp, Homo sapiens
  siRNA target sequence for CP (NM_000096.1,1601-1619).
gtctagctaagatgtatta

SEQ ID NO: 162484 - DNA, 19 bp, Homo sapiens
  siRNA target sequence for CP (NM_000096.1,1603-1621).
ctagctaagatgtattatt

SEQ ID NO: 162485 - DNA, 19 bp, Homo sapiens
  siRNA target sequence for CP (NM_000096.1,1635-1653).
cactaaagatatattcact

SEQ ID NO: 162486 - DNA, 19 bp, Homo sapiens
  siRNA target sequence for CP (NM_000096.1,1706-1724).
ggagacagaaagatgtaga

SEQ ID NO: 162487 - DNA, 19 bp, Homo sapiens
  siRNA target sequence for CP (NM_000096.1,1740-1758).
gtttcctacagtatttgat

SEQ ID NO: 162488 - DNA, 19 bp, Homo sapiens
  siRNA target sequence for CP (NM_000096.1,1769-1787).
gtttactcctggaagataa

SEQ ID NO: 162489 - DNA, 19 bp, Homo sapiens
  siRNA target sequence for CP (NM_000096.1,1780-1798).
gaagataatattagaatgt

SEQ ID NO: 162490 - DNA, 19 bp, Homo sapiens
  siRNA target sequence for CP (NM_000096.1,1811-1829).
ctgatcaggtggataagga

SEQ ID NO: 162491 - DNA, 19 bp, Homo sapiens
  siRNA target sequence for CP (NM_000096.1,1922-1940).
cggtcgtgtggtacttatt

SEQ ID NO: 162492 - DNA, 19 bp, Homo sapiens
  siRNA target sequence for CP (NM_000096.1,1949-1967).
gaaatgaggccgatgtaca

SEQ ID NO: 162493 - DNA, 19 bp, Homo sapiens
  siRNA target sequence for CP (NM_000096.1,1956-1974).
ggccgatgtacatggaata

SEQ ID NO: 162494 - DNA, 19 bp, Homo sapiens
  siRNA target sequence for CP (NM_000096.1,1958-1976).
ccgatgtacatggaatata

SEQ ID NO: 162495 - DNA, 19 bp, Homo sapiens
  siRNA target sequence for CP (NM_000096.1,1960-1978).
gatgtacatggaatatact

SEQ ID NO: 162496 - DNA, 19 bp, Homo sapiens
  siRNA target sequence for CP (NM_000096.1,2821-2839).
caccccgagaaagtaaaca

SEQ ID NO: 162497 - DNA, 19 bp, Homo sapiens
  siRNA target sequence for CP (NM_000096.1,2823-2841).
ccccgagaaagtaaacaaa

SEQ ID NO: 162498 - DNA, 19 bp, Homo sapiens
  siRNA target sequence for CP (NM_000096.1,2826-2844).
cgagaaagtaaacaaagat

SEQ ID NO: 162499 - DNA, 19 bp, Homo sapiens
  siRNA target sequence for CP (NM_000096.1,2850-2868).
ggaattcatagaaagcaat

SEQ ID NO: 162500 - DNA, 19 bp, Homo sapiens
  siRNA target sequence for CP (NM_000096.1,2995-3013).
cacggccatagcttccaat

SEQ ID NO: 162501 - DNA, 19 bp, Homo sapiens
  siRNA target sequence for CP (NM_000096.1,3019-3037).
cacaggggagtttatagtt

SEQ ID NO: 162502 - DNA, 19 bp, Homo sapiens
  siRNA target sequence for CP (NM_000096.1,3069-3087).
ccaaaccctagaaatgttt

SEQ ID NO: 162503 - DNA, 19 bp, Homo sapiens
  siRNA target sequence for CP (NM_000096.1,3092-3110).
gaacacctggaatttggtt

SEQ ID NO: 162504 - DNA, 19 bp, Homo sapiens
  siRNA target sequence for CP (NM_000096.1,3155-3173).
ccacttacaccgttctaca

SEQ ID NO: 162505 - DNA, 19 bp, Homo sapiens
  siRNA target sequence for CP (NM_000096.1,3156-3174).
cacttacaccgttctacaa

SEQ ID NO: 162506 - DNA, 19 bp, Homo sapiens
  siRNA target sequence for CP (NM_000096.1,3164-3182).
ccgttctacaaaatgaaga

SEQ ID NO: 162507 - DNA, 19 bp, Homo sapiens
  siRNA target sequence for DBH (NM_000787.2,58-76).
gaggcagccttcatgtaca

SEQ ID NO: 162508 - DNA, 19 bp, Homo sapiens
  siRNA target sequence for DBH (NM_000787.2,187-205).
gagctctcatggaatgtca

SEQ ID NO: 162509 - DNA, 19 bp, Homo sapiens
  siRNA target sequence for DBH (NM_000787.2,212-230).
cccaggaggccatccattt

SEQ ID NO: 162510 - DNA, 19 bp, Homo sapiens
  siRNA target sequence for DBH (NM_000787.2,434-452).
gcctgaccctgcttttcaa

SEQ ID NO: 162511 - DNA, 19 bp, Homo sapiens
  siRNA target sequence for DBH (NM_000787.2,734-752).
ctcggcaccacattatcaa

SEQ ID NO: 162512 - DNA, 19 bp, Homo sapiens
  siRNA target sequence for DBH (NM_000787.2,874-892).
cccgaccgcctcaactact

SEQ ID NO: 162513 - DNA, 19 bp, Homo sapiens
  siRNA target sequence for DBH (NM_000787.2,922-940).
ggtgccaaggcattttact

SEQ ID NO: 162514 - DNA, 19 bp, Homo sapiens
  siRNA target sequence for DBH (NM_000787.2,923-941).
gtgccaaggcattttacta

SEQ ID NO: 162515 - DNA, 19 bp, Homo sapiens
  siRNA target sequence for DBH (NM_000787.2,974-992).
cagggtcctccagatatct

SEQ ID NO: 162516 - DNA, 19 bp, Homo sapiens
  siRNA target sequence for DBH (NM_000787.2,1014-1032).
caacccactggtgatagaa

SEQ ID NO: 162517 - DNA, 19 bp, Homo sapiens
  siRNA target sequence for DBH (NM_000787.2,1049-1067).
caggcatccgcttgtacta

SEQ ID NO: 162518 - DNA, 19 bp, Homo sapiens
  siRNA target sequence for DBH (NM_000787.2,1051-1069).
ggcatccgcttgtactaca

SEQ ID NO: 162519 - DNA, 19 bp, Homo sapiens
  siRNA target sequence for DBH (NM_000787.2,1309-1327).
gtgaaccaggacaatcact

SEQ ID NO: 162520 - DNA, 19 bp, Homo sapiens
  siRNA target sequence for DBH (NM_000787.2,1345-1363).
gagatccgcatgttgaaga

SEQ ID NO: 162521 - DNA, 19 bp, Homo sapiens
  siRNA target sequence for DBH (NM_000787.2,1561-1579).
ctcatcaacaggttcaaca

SEQ ID NO: 162522 - DNA, 19 bp, Homo sapiens
  siRNA target sequence for DCT (NM_001922.2,446-464).
gttgcttgggctgcaaaat

SEQ ID NO: 162523 - DNA, 19 bp, Homo sapiens
  siRNA target sequence for DCT (NM_001922.2,506-524).
cggtggacagcctagtgaa

SEQ ID NO: 162524 - DNA, 19 bp, Homo sapiens
  siRNA target sequence for DCT (NM_001922.2,632-650).
gtccctacatcctacgaaa

SEQ ID NO: 162525 - DNA, 19 bp, Homo sapiens
  siRNA target sequence for DCT (NM_001922.2,710-728).
gaaactttgccggctataa

SEQ ID NO: 162526 - DNA, 19 bp, Homo sapiens
  siRNA target sequence for DCT (NM_001922.2,714-732).
ctttgccggctataattgt

SEQ ID NO: 162527 - DNA, 19 bp, Homo sapiens
  siRNA target sequence for DCT (NM_001922.2,785-803).
cagtgattcggcagaacat

SEQ ID NO: 162528 - DNA, 19 bp, Homo sapiens
  siRNA target sequence for DCT (NM_001922.2,910-928).
ctgcttgggcccaatggaa

SEQ ID NO: 162529 - DNA, 19 bp, Homo sapiens
  siRNA target sequence for DCT (NM_001922.2,972-990).
gtggctccattattattct

SEQ ID NO: 162530 - DNA, 19 bp, Homo sapiens
  siRNA target sequence for DCT (NM_001922.2,975-993).
gctccattattattctgtt

SEQ ID NO: 162531 - DNA, 19 bp, Homo sapiens
  siRNA target sequence for DCT (NM_001922.2,1020-1038).
cccctacagggccatagat

SEQ ID NO: 162532 - DNA, 19 bp, Homo sapiens
  siRNA target sequence for DCT (NM_001922.2,1026-1044).
cagggccatagatttctca

SEQ ID NO: 162533 - DNA, 19 bp, Homo sapiens
  siRNA target sequence for DCT (NM_001922.2,1032-1050).
catagatttctcacatcaa

SEQ ID NO: 162534 - DNA, 19 bp, Homo sapiens
  siRNA target sequence for DCT (NM_001922.2,1048-1066).
caaggacctgcatttgtta

SEQ ID NO: 162535 - DNA, 19 bp, Homo sapiens
  siRNA target sequence for DCT (NM_001922.2,1111-1129).
cgactcattggcaatgagt

SEQ ID NO: 162536 - DNA, 19 bp, Homo sapiens
  siRNA target sequence for DCT (NM_001922.2,1216-1234).
gacgatccgactctgatta

SEQ ID NO: 162537 - DNA, 19 bp, Homo sapiens
  siRNA target sequence for DCT (NM_001922.2,1218-1236).
cgatccgactctgattagt

SEQ ID NO: 162538 - DNA, 19 bp, Homo sapiens
  siRNA target sequence for DCT (NM_001922.2,1228-1246).
ctgattagtcggaactcaa

SEQ ID NO: 162539 - DNA, 19 bp, Homo sapiens
  siRNA target sequence for DCT (NM_001922.2,1271-1289).
gtgatagcttggatgacta

SEQ ID NO: 162540 - DNA, 19 bp, Homo sapiens
  siRNA target sequence for DCT (NM_001922.2,1300-1318).
gtcaccttgtgcaatggaa

SEQ ID NO: 162541 - DNA, 19 bp, Homo sapiens
  siRNA target sequence for DCT (NM_001922.2,1305-1323).
cttgtgcaatggaacctat

SEQ ID NO: 162542 - DNA, 19 bp, Homo sapiens
  siRNA target sequence for DCT (NM_001922.2,1308-1326).
gtgcaatggaacctatgaa

SEQ ID NO: 162543 - DNA, 19 bp, Homo sapiens
  siRNA target sequence for DCT (NM_001922.2,1362-1380).
catgaaattgccaacctta

SEQ ID NO: 162544 - DNA, 19 bp, Homo sapiens
  siRNA target sequence for DCT (NM_001922.2,1504-1522).
caagtgatgagccttcata

SEQ ID NO: 162545 - DNA, 19 bp, Homo sapiens
  siRNA target sequence for DCT (NM_001922.2,1507-1525).
gtgatgagccttcataatt

SEQ ID NO: 162546 - DNA, 19 bp, Homo sapiens
  siRNA target sequence for DCT (NM_001922.2,1571-1589).
ccgccaatgatcccatttt

SEQ ID NO: 162547 - DNA, 19 bp, Homo sapiens
  siRNA target sequence for DCT (NM_001922.2,1572-1590).
cgccaatgatcccattttt

SEQ ID NO: 162548 - DNA, 19 bp, Homo sapiens
  siRNA target sequence for DCT (NM_001922.2,1677-1695).
ggcccctattggtcacaat

SEQ ID NO: 162549 - DNA, 19 bp, Homo sapiens
  siRNA target sequence for DCT (NM_001922.2,1687-1705).
ggtcacaatcggatgtaca

SEQ ID NO: 162550 - DNA, 19 bp, Homo sapiens
  siRNA target sequence for DCT (NM_001922.2,1688-1706).
gtcacaatcggatgtacaa

SEQ ID NO: 162551 - DNA, 19 bp, Homo sapiens
  siRNA target sequence for DCT (NM_001922.2,1690-1708).
cacaatcggatgtacaaca

SEQ ID NO: 162552 - DNA, 19 bp, Homo sapiens
  siRNA target sequence for DCT (NM_001922.2,1724-1742).
ctccagtgactaatgaaga

SEQ ID NO: 162553 - DNA, 19 bp, Homo sapiens
  siRNA target sequence for DCT (NM_001922.2,1782-1800).
catcgatctgccagtttca

SEQ ID NO: 162554 - DNA, 19 bp, Homo sapiens
  siRNA target sequence for DCT (NM_001922.2,1785-1803).
cgatctgccagtttcagtt

SEQ ID NO: 162555 - DNA, 19 bp, Homo sapiens
  siRNA target sequence for DCT (NM_001922.2,1820-1838).
ggcccacaactctcttagt

SEQ ID NO: 162556 - DNA, 19 bp, Homo sapiens
  siRNA target sequence for DCT (NM_001922.2,1821-1839).
gcccacaactctcttagta

SEQ ID NO: 162557 - DNA, 19 bp, Homo sapiens
  siRNA target sequence for DCT (NM_001922.2,1823-1841).
ccacaactctcttagtagt

SEQ ID NO: 162558 - DNA, 19 bp, Homo sapiens
  siRNA target sequence for DCT (NM_001922.2,1826-1844).
caactctcttagtagtcat

SEQ ID NO: 162559 - DNA, 19 bp, Homo sapiens
  siRNA target sequence for DCT (NM_001922.2,1878-1896).
gctgttggcttttcttcaa

SEQ ID NO: 162560 - DNA, 19 bp, Homo sapiens
  siRNA target sequence for DCT (NM_001922.2,1916-1934).
gatatacacccctaatgga

SEQ ID NO: 162561 - DNA, 19 bp, Homo sapiens
  siRNA target sequence for DCT (NM_001922.2,1924-1942).
cccctaatggagacacatt

SEQ ID NO: 162562 - DNA, 19 bp, Homo sapiens
  siRNA target sequence for DCT (NM_001922.2,1925-1943).
ccctaatggagacacattt

SEQ ID NO: 162563 - DNA, 19 bp, Homo sapiens
  siRNA target sequence for DCT (NM_001922.2,1926-1944).
cctaatggagacacattta

SEQ ID NO: 162564 - DNA, 19 bp, Homo sapiens
  siRNA target sequence for F5 (NM_000130.2,233-251).
cgacctgagcccacaaact

SEQ ID NO: 162565 - DNA, 19 bp, Homo sapiens
  siRNA target sequence for F5 (NM_000130.2,239-257).
gagcccacaaactcaagtt

SEQ ID NO: 162566 - DNA, 19 bp, Homo sapiens
  siRNA target sequence for F5 (NM_000130.2,243-261).
ccacaaactcaagtttgaa

SEQ ID NO: 162567 - DNA, 19 bp, Homo sapiens
  siRNA target sequence for F5 (NM_000130.2,295-313).
cagagagtatgaaccatat

SEQ ID NO: 162568 - DNA, 19 bp, Homo sapiens
  siRNA target sequence for F5 (NM_000130.2,297-315).
gagagtatgaaccatattt

SEQ ID NO: 162569 - DNA, 19 bp, Homo sapiens
  siRNA target sequence for F5 (NM_000130.2,374-392).
gaagtcggagacatcataa

SEQ ID NO: 162570 - DNA, 19 bp, Homo sapiens
  siRNA target sequence for F5 (NM_000130.2,434-452).
catcctcaaggaattaggt

SEQ ID NO: 162571 - DNA, 19 bp, Homo sapiens
  siRNA target sequence for F5 (NM_000130.2,440-458).
caaggaattaggtacagta

SEQ ID NO: 162572 - DNA, 19 bp, Homo sapiens
  siRNA target sequence for F5 (NM_000130.2,443-461).
ggaattaggtacagtaaat

SEQ ID NO: 162573 - DNA, 19 bp, Homo sapiens
  siRNA target sequence for F5 (NM_000130.2,444-462).
gaattaggtacagtaaatt

SEQ ID NO: 162574 - DNA, 19 bp, Homo sapiens
  siRNA target sequence for F5 (NM_000130.2,524-542).
gctccaggccgagaataca

SEQ ID NO: 162575 - DNA, 19 bp, Homo sapiens
  siRNA target sequence for F5 (NM_000130.2,532-550).
ccgagaatacacctatgaa

SEQ ID NO: 162576 - DNA, 19 bp, Homo sapiens
  siRNA target sequence for F5 (NM_000130.2,533-551).
cgagaatacacctatgaat

SEQ ID NO: 162577 - DNA, 19 bp, Homo sapiens
  siRNA target sequence for F5 (NM_000130.2,599-617).
ctcacacacatctattact

SEQ ID NO: 162578 - DNA, 19 bp, Homo sapiens
  siRNA target sequence for F5 (NM_000130.2,610-628).
ctattactcccatgaaaat

SEQ ID NO: 162579 - DNA, 19 bp, Homo sapiens
  siRNA target sequence for F5 (NM_000130.2,629-647).
ctgatcgaggatttcaact

SEQ ID NO: 162580 - DNA, 19 bp, Homo sapiens
  siRNA target sequence for F5 (NM_000130.2,705-723).
cacagaagacgtttgacaa

SEQ ID NO: 162581 - DNA, 19 bp, Homo sapiens
  siRNA target sequence for F5 (NM_000130.2,714-732).
cgtttgacaagcaaatcgt

SEQ ID NO: 162582 - DNA, 19 bp, Homo sapiens
  siRNA target sequence for F5 (NM_000130.2,724-742).
gcaaatcgtgctactattt

SEQ ID NO: 162583 - DNA, 19 bp, Homo sapiens
  siRNA target sequence for F5 (NM_000130.2,773-791).
cagtcatcatccctaatgt

SEQ ID NO: 162584 - DNA, 19 bp, Homo sapiens
  siRNA target sequence for F5 (NM_000130.2,815-833).
gggacaatgccagatataa

SEQ ID NO: 162585 - DNA, 19 bp, Homo sapiens
  siRNA target sequence for F5 (NM_000130.2,819-837).
caatgccagatataacagt

SEQ ID NO: 162586 - DNA, 19 bp, Homo sapiens
  siRNA target sequence for F5 (NM_000130.2,823-841).
gccagatataacagtttgt

SEQ ID NO: 162587 - DNA, 19 bp, Homo sapiens
  siRNA target sequence for F5 (NM_000130.2,923-941).
ctggagcagaaccatcata

SEQ ID NO: 162588 - DNA, 19 bp, Homo sapiens
  siRNA target sequence for F5 (NM_000130.2,972-990).
catccactaccgcaaatat

SEQ ID NO: 162589 - DNA, 19 bp, Homo sapiens
  siRNA target sequence for F5 (NM_000130.2,1026-1044).
ctctcaccccaaaacattt

SEQ ID NO: 162590 - DNA, 19 bp, Homo sapiens
  siRNA target sequence for F5 (NM_000130.2,1050-1068).
ctgggatgcaggcttacat

SEQ ID NO: 162591 - DNA, 19 bp, Homo sapiens
  siRNA target sequence for F5 (NM_000130.2,1057-1075).
gcaggcttacattgacatt

SEQ ID NO: 162592 - DNA, 19 bp, Homo sapiens
  siRNA target sequence for F5 (NM_000130.2,1058-1076).
caggcttacattgacatta

SEQ ID NO: 162593 - DNA, 19 bp, Homo sapiens
  siRNA target sequence for F5 (NM_000130.2,1141-1159).
gaggtgggaatacttcatt

SEQ ID NO: 162594 - DNA, 19 bp, Homo sapiens
  siRNA target sequence for F5 (NM_000130.2,1179-1197).
gggactatgcacctgtaat

SEQ ID NO: 162595 - DNA, 19 bp, Homo sapiens
  siRNA target sequence for F5 (NM_000130.2,1180-1198).
ggactatgcacctgtaata

SEQ ID NO: 162596 - DNA, 19 bp, Homo sapiens
  siRNA target sequence for F5 (NM_000130.2,1225-1243).
gtctcagcatttggataat

SEQ ID NO: 162597 - DNA, 19 bp, Homo sapiens
  siRNA target sequence for F5 (NM_000130.2,1305-1323).
ccttcaccaaacatacagt

SEQ ID NO: 162598 - DNA, 19 bp, Homo sapiens
  siRNA target sequence for F5 (NM_000130.2,1346-1364).
gggattttgggtcctatta

SEQ ID NO: 162599 - DNA, 19 bp, Homo sapiens
  siRNA target sequence for F5 (NM_000130.2,1347-1365).
ggattttgggtcctattat

SEQ ID NO: 162600 - DNA, 19 bp, Homo sapiens
  siRNA target sequence for F5 (NM_000130.2,1386-1404).
cactcaaaatcgtgttcaa

SEQ ID NO: 162601 - DNA, 19 bp, Homo sapiens
  siRNA target sequence for F5 (NM_000130.2,1447-1465).
gaccttctcgccttatgaa

SEQ ID NO: 162602 - DNA, 19 bp, Homo sapiens
  siRNA target sequence for F5 (NM_000130.2,1450-1468).
cttctcgccttatgaagat

SEQ ID NO: 162603 - DNA, 19 bp, Homo sapiens
  siRNA target sequence for F5 (NM_000130.2,1455-1473).
cgccttatgaagatgaagt

SEQ ID NO: 162604 - DNA, 19 bp, Homo sapiens
  siRNA target sequence for F5 (NM_000130.2,1469-1487).
gaagtcaactcttctttca

SEQ ID NO: 162605 - DNA, 19 bp, Homo sapiens
  siRNA target sequence for F5 (NM_000130.2,1523-1541).
caaccaggggaaacctata

SEQ ID NO: 162606 - DNA, 19 bp, Homo sapiens
  siRNA target sequence for F5 (NM_000130.2,1526-1544).
ccaggggaaacctatactt

SEQ ID NO: 162607 - DNA, 19 bp, Homo sapiens
  siRNA target sequence for F5 (NM_000130.2,1529-1547).
ggggaaacctatacttata

SEQ ID NO: 162608 - DNA, 19 bp, Homo sapiens
  siRNA target sequence for F5 (NM_000130.2,1530-1548).
gggaaacctatacttataa

SEQ ID NO: 162609 - DNA, 19 bp, Homo sapiens
  siRNA target sequence for F5 (NM_000130.2,1596-1614).
gcttaacaagaccatacta

SEQ ID NO: 162610 - DNA, 19 bp, Homo sapiens
  siRNA target sequence for F5 (NM_000130.2,1639-1657).
catcgcctctgggctaata

SEQ ID NO: 162611 - DNA, 19 bp, Homo sapiens
  siRNA target sequence for F5 (NM_000130.2,1642-1660).
cgcctctgggctaatagga

SEQ ID NO: 162612 - DNA, 19 bp, Homo sapiens
  siRNA target sequence for F5 (NM_000130.2,1650-1668).
ggctaataggactacttct

SEQ ID NO: 162613 - DNA, 19 bp, Homo sapiens
  siRNA target sequence for F5 (NM_000130.2,1651-1669).
gctaataggactacttcta

SEQ ID NO: 162614 - DNA, 19 bp, Homo sapiens
  siRNA target sequence for F5 (NM_000130.2,1658-1676).
ggactacttctaatctgta

SEQ ID NO: 162615 - DNA, 19 bp, Homo sapiens
  siRNA target sequence for F5 (NM_000130.2,1659-1677).
gactacttctaatctgtaa

SEQ ID NO: 162616 - DNA, 19 bp, Homo sapiens
  siRNA target sequence for F5 (NM_000130.2,1821-1839).
gtgatgaccccaagtttta

SEQ ID NO: 162617 - DNA, 19 bp, Homo sapiens
  siRNA target sequence for F5 (NM_000130.2,1826-1844).
gaccccaagttttatgaat

SEQ ID NO: 162618 - DNA, 19 bp, Homo sapiens
  siRNA target sequence for F5 (NM_000130.2,1828-1846).
ccccaagttttatgaatca

SEQ ID NO: 162619 - DNA, 19 bp, Homo sapiens
  siRNA target sequence for F5 (NM_000130.2,1849-1867).
catcatgagcactatcaat

SEQ ID NO: 162620 - DNA, 19 bp, Homo sapiens
  siRNA target sequence for F5 (NM_000130.2,1874-1892).
gtgcctgagagcataacta

SEQ ID NO: 162621 - DNA, 19 bp, Homo sapiens
  siRNA target sequence for F5 (NM_000130.2,1884-1902).
gcataactactcttggatt

SEQ ID NO: 162622 - DNA, 19 bp, Homo sapiens
  siRNA target sequence for F5 (NM_000130.2,1919-1937).
gtccagtggcacttctgta

SEQ ID NO: 162623 - DNA, 19 bp, Homo sapiens
  siRNA target sequence for F5 (NM_000130.2,1943-1961).
gggacccagaatgaaattt

SEQ ID NO: 162624 - DNA, 19 bp, Homo sapiens
  siRNA target sequence for F5 (NM_000130.2,1944-1962).
ggacccagaatgaaatttt

SEQ ID NO: 162625 - DNA, 19 bp, Homo sapiens
  siRNA target sequence for F5 (NM_000130.2,2031-2049).
ccatgcgtggagaatctgt

SEQ ID NO: 162626 - DNA, 19 bp, Homo sapiens
  siRNA target sequence for F5 (NM_000130.2,2048-2066).
gtgacggtcacaatggata

SEQ ID NO: 162627 - DNA, 19 bp, Homo sapiens
  siRNA target sequence for F5 (NM_000130.2,2050-2068).
gacggtcacaatggataat

SEQ ID NO: 162628 - DNA, 19 bp, Homo sapiens
  siRNA target sequence for F5 (NM_000130.2,2072-2090).
ggaacttggatgttaactt

SEQ ID NO: 162629 - DNA, 19 bp, Homo sapiens
  siRNA target sequence for F5 (NM_000130.2,2217-2235).
ggaaaatgcatgatcgttt

SEQ ID NO: 162630 - DNA, 19 bp, Homo sapiens
  siRNA target sequence for F5 (NM_000130.2,2369-2387).
ctggagaatggcactgaat

SEQ ID NO: 162631 - DNA, 19 bp, Homo sapiens
  siRNA target sequence for F5 (NM_000130.2,2414-2432).
gttggttcaaattattctt

SEQ ID NO: 162632 - DNA, 19 bp, Homo sapiens
  siRNA target sequence for F5 (NM_000130.2,2448-2466).
gtaagttcactgtcaataa

SEQ ID NO: 162633 - DNA, 19 bp, Homo sapiens
  siRNA target sequence for F5 (NM_000130.2,2452-2470).
gttcactgtcaataacctt

SEQ ID NO: 162634 - DNA, 19 bp, Homo sapiens
  siRNA target sequence for F5 (NM_000130.2,2629-2647).
cacagggatacgtctactt

SEQ ID NO: 162635 - DNA, 19 bp, Homo sapiens
  siRNA target sequence for F5 (NM_000130.2,2634-2652).
ggatacgtctactttcact

SEQ ID NO: 162636 - DNA, 19 bp, Homo sapiens
  siRNA target sequence for F5 (NM_000130.2,2635-2653).
gatacgtctactttcactt

SEQ ID NO: 162637 - DNA, 19 bp, Homo sapiens
  siRNA target sequence for F5 (NM_000130.2,2697-2715).
gacccaaggtagaaagaga

SEQ ID NO: 162638 - DNA, 19 bp, Homo sapiens
  siRNA target sequence for F5 (NM_000130.2,2734-2752).
gttctcctggatgaaatta

SEQ ID NO: 162639 - DNA, 19 bp, Homo sapiens
  siRNA target sequence for F5 (NM_000130.2,2880-2898).
ctagtgatctgttactctt

SEQ ID NO: 162640 - DNA, 19 bp, Homo sapiens
  siRNA target sequence for F5 (NM_000130.2,2907-2925).
gtaactcatctaagatttt

SEQ ID NO: 162641 - DNA, 19 bp, Homo sapiens
  siRNA target sequence for F5 (NM_000130.2,3082-3100).
gagtggccacccaaagttt

SEQ ID NO: 162642 - DNA, 19 bp, Homo sapiens
  siRNA target sequence for F5 (NM_000130.2,3091-3109).
cccaaagtttcctagagtt

SEQ ID NO: 162643 - DNA, 19 bp, Homo sapiens
  siRNA target sequence for F5 (NM_000130.2,3092-3110).
ccaaagtttcctagagtta

SEQ ID NO: 162644 - DNA, 19 bp, Homo sapiens
  siRNA target sequence for F5 (NM_000130.2,3105-3123).
gagttagacataaatctct

SEQ ID NO: 162645 - DNA, 19 bp, Homo sapiens
  siRNA target sequence for F5 (NM_000130.2,3113-3131).
cataaatctctacaagtaa

SEQ ID NO: 162646 - DNA, 19 bp, Homo sapiens
  siRNA target sequence for F5 (NM_000130.2,3173-3191).
ctcattaagacacgaaaaa

SEQ ID NO: 162647 - DNA, 19 bp, Homo sapiens
  siRNA target sequence for F5 (NM_000130.2,3238-3256).
ctttcaccctctaagaagt

SEQ ID NO: 162648 - DNA, 19 bp, Homo sapiens
  siRNA target sequence for F5 (NM_000130.2,3255-3273).
gtgaagcctacaacacatt

SEQ ID NO: 162649 - DNA, 19 bp, Homo sapiens
  siRNA target sequence for F5 (NM_000130.2,3282-3300).
gaagacttaagcattcgtt

SEQ ID NO: 162650 - DNA, 19 bp, Homo sapiens
  siRNA target sequence for F5 (NM_000130.2,3351-3369).
cattgccctctatggattt

SEQ ID NO: 162651 - DNA, 19 bp, Homo sapiens
  siRNA target sequence for F5 (NM_000130.2,3381-3399).
cctcacttcctgaccataa

SEQ ID NO: 162652 - DNA, 19 bp, Homo sapiens
  siRNA target sequence for F5 (NM_000130.2,3382-3400).
ctcacttcctgaccataat

SEQ ID NO: 162653 - DNA, 19 bp, Homo sapiens
  siRNA target sequence for F5 (NM_000130.2,3432-3450).
gctgtcctccaggtcttta

SEQ ID NO: 162654 - DNA, 19 bp, Homo sapiens
  siRNA target sequence for F5 (NM_000130.2,3437-3455).
cctccaggtctttatcaga

SEQ ID NO: 162655 - DNA, 19 bp, Homo sapiens
  siRNA target sequence for F5 (NM_000130.2,3460-3478).
gcccccagaggaacactat

SEQ ID NO: 162656 - DNA, 19 bp, Homo sapiens
  siRNA target sequence for F5 (NM_000130.2,3463-3481).
cccagaggaacactatcaa

SEQ ID NO: 162657 - DNA, 19 bp, Homo sapiens
  siRNA target sequence for F5 (NM_000130.2,3503-3521).
gatcaaatgcactctactt

SEQ ID NO: 162658 - DNA, 19 bp, Homo sapiens
  siRNA target sequence for F5 (NM_000130.2,3596-3614).
cccacagatataagtcaaa

SEQ ID NO: 162659 - DNA, 19 bp, Homo sapiens
  siRNA target sequence for F5 (NM_000130.2,3983-4001).
ccagaactcagccatatga

SEQ ID NO: 162660 - DNA, 19 bp, Homo sapiens
  siRNA target sequence for F5 (NM_000130.2,4313-4331).
ctcgaccagatgacacttt

SEQ ID NO: 162661 - DNA, 19 bp, Homo sapiens
  siRNA target sequence for F5 (NM_000130.2,4315-4333).
cgaccagatgacactttct

SEQ ID NO: 162662 - DNA, 19 bp, Homo sapiens
  siRNA target sequence for F5 (NM_000130.2,4339-4357).
ccttggtgagacagatctt

SEQ ID NO: 162663 - DNA, 19 bp, Homo sapiens
  siRNA target sequence for F5 (NM_000130.2,4442-4460).
ccggatctcagccagatat

SEQ ID NO: 162664 - DNA, 19 bp, Homo sapiens
  siRNA target sequence for F5 (NM_000130.2,4469-4487).
ccagaccttgatcagatat

SEQ ID NO: 162665 - DNA, 19 bp, Homo sapiens
  siRNA target sequence for F5 (NM_000130.2,4489-4507).
ctacccttctgaatctagt

SEQ ID NO: 162666 - DNA, 19 bp, Homo sapiens
  siRNA target sequence for F5 (NM_000130.2,4497-4515).
ctgaatctagtcagtcatt

SEQ ID NO: 162667 - DNA, 19 bp, Homo sapiens
  siRNA target sequence for F5 (NM_000130.2,4583-4601).
cctactctcaatgatactt

SEQ ID NO: 162668 - DNA, 19 bp, Homo sapiens
  siRNA target sequence for F5 (NM_000130.2,4584-4602).
ctactctcaatgatacttt

SEQ ID NO: 162669 - DNA, 19 bp, Homo sapiens
  siRNA target sequence for F5 (NM_000130.2,4732-4750).
ctatgatgacccctacaaa

SEQ ID NO: 162670 - DNA, 19 bp, Homo sapiens
  siRNA target sequence for F5 (NM_000130.2,4742-4760).
ccctacaaaactgatgtta

SEQ ID NO: 162671 - DNA, 19 bp, Homo sapiens
  siRNA target sequence for F5 (NM_000130.2,4757-4775).
gttaggacaaacatcaact

SEQ ID NO: 162672 - DNA, 19 bp, Homo sapiens
  siRNA target sequence for F5 (NM_000130.2,4831-4849).
cagaagaaattattacatt

SEQ ID NO: 162673 - DNA, 19 bp, Homo sapiens
  siRNA target sequence for F5 (NM_000130.2,5020-5038).
cggaattcttggtcctatt

SEQ ID NO: 162674 - DNA, 19 bp, Homo sapiens
  siRNA target sequence for F5 (NM_000130.2,5043-5061).
gagctgaagtggatgatgt

SEQ ID NO: 162675 - DNA, 19 bp, Homo sapiens
  siRNA target sequence for F5 (NM_000130.2,5088-5106).
catccagaccgtattctct

SEQ ID NO: 162676 - DNA, 19 bp, Homo sapiens
  siRNA target sequence for F5 (NM_000130.2,5198-5216).
cagccaaatagcagttata

SEQ ID NO: 162677 - DNA, 19 bp, Homo sapiens
  siRNA target sequence for F5 (NM_000130.2,5202-5220).
caaatagcagttataccta

SEQ ID NO: 162678 - DNA, 19 bp, Homo sapiens
  siRNA target sequence for F5 (NM_000130.2,5239-5257).
gcgatcagggccagaaagt

SEQ ID NO: 162679 - DNA, 19 bp, Homo sapiens
  siRNA target sequence for F5 (NM_000130.2,5273-5291).
cgggcttgggcctactact

SEQ ID NO: 162680 - DNA, 19 bp, Homo sapiens
  siRNA target sequence for F5 (NM_000130.2,5297-5315).
gtgaacccagaaaaagata

SEQ ID NO: 162681 - DNA, 19 bp, Homo sapiens
  siRNA target sequence for F5 (NM_000130.2,5341-5359).
cctaatctgccaaaaagga

SEQ ID NO: 162682 - DNA, 19 bp, Homo sapiens
  siRNA target sequence for F5 (NM_000130.2,5390-5408).
gacatgagagaatttgtct

SEQ ID NO: 162683 - DNA, 19 bp, Homo sapiens
  siRNA target sequence for F5 (NM_000130.2,5392-5410).
catgagagaatttgtctta

SEQ ID NO: 162684 - DNA, 19 bp, Homo sapiens
  siRNA target sequence for F5 (NM_000130.2,5397-5415).
gagaatttgtcttactatt

SEQ ID NO: 162685 - DNA, 19 bp, Homo sapiens
  siRNA target sequence for F5 (NM_000130.2,5577-5595).
ggttacacctgctgaacat

SEQ ID NO: 162686 - DNA, 19 bp, Homo sapiens
  siRNA target sequence for F5 (NM_000130.2,5578-5596).
gttacacctgctgaacata

SEQ ID NO: 162687 - DNA, 19 bp, Homo sapiens
  siRNA target sequence for F5 (NM_000130.2,5598-5616).
gcggctcccaagacattca

SEQ ID NO: 162688 - DNA, 19 bp, Homo sapiens
  siRNA target sequence for F5 (NM_000130.2,5733-5751).
ctggctggtggctcctaaa

SEQ ID NO: 162689 - DNA, 19 bp, Homo sapiens
  siRNA target sequence for F5 (NM_000130.2,5737-5755).
ctggtggctcctaaacaca

SEQ ID NO: 162690 - DNA, 19 bp, Homo sapiens
  siRNA target sequence for F5 (NM_000130.2,5781-5799).
ggatgcaaacgccatttct

SEQ ID NO: 162691 - DNA, 19 bp, Homo sapiens
  siRNA target sequence for F5 (NM_000130.2,5786-5804).
caaacgccatttcttatca

SEQ ID NO: 162692 - DNA, 19 bp, Homo sapiens
  siRNA target sequence for F5 (NM_000130.2,5832-5850).
gactaagcactggtatcat

SEQ ID NO: 162693 - DNA, 19 bp, Homo sapiens
  siRNA target sequence for F5 (NM_000130.2,5844-5862).
gtatcatatctgattcaca

SEQ ID NO: 162694 - DNA, 19 bp, Homo sapiens
  siRNA target sequence for F5 (NM_000130.2,5901-5919).
gattagcaagattaaacaa

SEQ ID NO: 162695 - DNA, 19 bp, Homo sapiens
  siRNA target sequence for F5 (NM_000130.2,5921-5939).
ggtggatcttataatgctt

SEQ ID NO: 162696 - DNA, 19 bp, Homo sapiens
  siRNA target sequence for F5 (NM_000130.2,6030-6048).
cccaaggtgccaaacacta

SEQ ID NO: 162697 - DNA, 19 bp, Homo sapiens
  siRNA target sequence for F5 (NM_000130.2,6069-6087).
cagagttctatgtagctta

SEQ ID NO: 162698 - DNA, 19 bp, Homo sapiens
  siRNA target sequence for F5 (NM_000130.2,6129-6147).
gcacaaggaatgtgatgta

SEQ ID NO: 162699 - DNA, 19 bp, Homo sapiens
  siRNA target sequence for F5 (NM_000130.2,6132-6150).
caaggaatgtgatgtattt

SEQ ID NO: 162700 - DNA, 19 bp, Homo sapiens
  siRNA target sequence for F5 (NM_000130.2,6145-6163).
gtattttaatggcaattca

SEQ ID NO: 162701 - DNA, 19 bp, Homo sapiens
  siRNA target sequence for F5 (NM_000130.2,6200-6218).
cctattgtggctagatata

SEQ ID NO: 162702 - DNA, 19 bp, Homo sapiens
  siRNA target sequence for F5 (NM_000130.2,6206-6224).
gtggctagatatattagga

SEQ ID NO: 162703 - DNA, 19 bp, Homo sapiens
  siRNA target sequence for F5 (NM_000130.2,6230-6248).
ccaactcgagcctataaca

SEQ ID NO: 162704 - DNA, 19 bp, Homo sapiens
  siRNA target sequence for F5 (NM_000130.2,6275-6293).
ggttgtgaggtaaatggat

SEQ ID NO: 162705 - DNA, 19 bp, Homo sapiens
  siRNA target sequence for F5 (NM_000130.2,6298-6316).
cacacccctgggtatggaa

SEQ ID NO: 162706 - DNA, 19 bp, Homo sapiens
  siRNA target sequence for F5 (NM_000130.2,6347-6365).
gcttcttcgtttaagaaat

SEQ ID NO: 162707 - DNA, 19 bp, Homo sapiens
  siRNA target sequence for F5 (NM_000130.2,6391-6409).
cttccgtgcccgtctgaat

SEQ ID NO: 162708 - DNA, 19 bp, Homo sapiens
  siRNA target sequence for F5 (NM_000130.2,6434-6452).
caagccaaggcaaacaaca

SEQ ID NO: 162709 - DNA, 19 bp, Homo sapiens
  siRNA target sequence for F5 (NM_000130.2,6457-6475).
gcagtggctagaaattgat

SEQ ID NO: 162710 - DNA, 19 bp, Homo sapiens
  siRNA target sequence for F5 (NM_000130.2,6460-6478).
gtggctagaaattgatcta

SEQ ID NO: 162711 - DNA, 19 bp, Homo sapiens
  siRNA target sequence for F5 (NM_000130.2,6493-6511).
gataacggcaattataaca

SEQ ID NO: 162712 - DNA, 19 bp, Homo sapiens
  siRNA target sequence for F5 (NM_000130.2,6593-6611).
ccatacaggctgaaatcct

SEQ ID NO: 162713 - DNA, 19 bp, Homo sapiens
  siRNA target sequence for F5 (NM_000130.2,6691-6709).
caggtttatccgtgtcatt

SEQ ID NO: 162714 - DNA, 19 bp, Homo sapiens
  siRNA target sequence for F5 (NM_000130.2,6700-6718).
ccgtgtcattcctaaaaca

SEQ ID NO: 162715 - DNA, 19 bp, Homo sapiens
  siRNA target sequence for F5 (NM_000130.2,6701-6719).
cgtgtcattcctaaaacat

SEQ ID NO: 162716 - DNA, 19 bp, Homo sapiens
  siRNA target sequence for F5 (NM_000130.2,6735-6753).
cacttcgcctggaactctt

SEQ ID NO: 162717 - DNA, 19 bp, Homo sapiens
  siRNA target sequence for F8 (NM_000132.2,208-226).
cttttgcgattctgcttta

SEQ ID NO: 162718 - DNA, 19 bp, Homo sapiens
  siRNA target sequence for F8 (NM_000132.2,227-245).
gtgccaccagaagatacta

SEQ ID NO: 162719 - DNA, 19 bp, Homo sapiens
  siRNA target sequence for F8 (NM_000132.2,269-287).
gggactatatgcaaagtga

SEQ ID NO: 162720 - DNA, 19 bp, Homo sapiens
  siRNA target sequence for F8 (NM_000132.2,322-340).
cctagagtgccaaaatctt

SEQ ID NO: 162721 - DNA, 19 bp, Homo sapiens
  siRNA target sequence for F8 (NM_000132.2,323-341).
ctagagtgccaaaatcttt

SEQ ID NO: 162722 - DNA, 19 bp, Homo sapiens
  siRNA target sequence for F8 (NM_000132.2,351-369).
cacctcagtcgtgtacaaa

SEQ ID NO: 162723 - DNA, 19 bp, Homo sapiens
  siRNA target sequence for F8 (NM_000132.2,353-371).
cctcagtcgtgtacaaaaa

SEQ ID NO: 162724 - DNA, 19 bp, Homo sapiens
  siRNA target sequence for F8 (NM_000132.2,456-474).
ccaggctgaggtttatgat

SEQ ID NO: 162725 - DNA, 19 bp, Homo sapiens
  siRNA target sequence for F8 (NM_000132.2,457-475).
caggctgaggtttatgata

SEQ ID NO: 162726 - DNA, 19 bp, Homo sapiens
  siRNA target sequence for F8 (NM_000132.2,476-494).
cagtggtcattacacttaa

SEQ ID NO: 162727 - DNA, 19 bp, Homo sapiens
  siRNA target sequence for F8 (NM_000132.2,535-553).
gtatcctactggaaagctt

SEQ ID NO: 162728 - DNA, 19 bp, Homo sapiens
  siRNA target sequence for F8 (NM_000132.2,616-634).
cctggtggaagccatacat

SEQ ID NO: 162729 - DNA, 19 bp, Homo sapiens
  siRNA target sequence for F8 (NM_000132.2,641-659).
ggcaggtcctgaaagagaa

SEQ ID NO: 162730 - DNA, 19 bp, Homo sapiens
  siRNA target sequence for F8 (NM_000132.2,682-700).
ctgtgccttacctactcat

SEQ ID NO: 162731 - DNA, 19 bp, Homo sapiens
  siRNA target sequence for F8 (NM_000132.2,684-702).
gtgccttacctactcatat

SEQ ID NO: 162732 - DNA, 19 bp, Homo sapiens
  siRNA target sequence for F8 (NM_000132.2,686-704).
gccttacctactcatatct

SEQ ID NO: 162733 - DNA, 19 bp, Homo sapiens
  siRNA target sequence for F8 (NM_000132.2,687-705).
ccttacctactcatatctt

SEQ ID NO: 162734 - DNA, 19 bp, Homo sapiens
  siRNA target sequence for F8 (NM_000132.2,688-706).
cttacctactcatatcttt

SEQ ID NO: 162735 - DNA, 19 bp, Homo sapiens
  siRNA target sequence for F8 (NM_000132.2,720-738).
ggtaaaagacttgaattca

SEQ ID NO: 162736 - DNA, 19 bp, Homo sapiens
  siRNA target sequence for F8 (NM_000132.2,744-762).
cattggagccctactagta

SEQ ID NO: 162737 - DNA, 19 bp, Homo sapiens
  siRNA target sequence for F8 (NM_000132.2,748-766).
ggagccctactagtatgta

SEQ ID NO: 162738 - DNA, 19 bp, Homo sapiens
  siRNA target sequence for F8 (NM_000132.2,753-771).
cctactagtatgtagagaa

SEQ ID NO: 162739 - DNA, 19 bp, Homo sapiens
  siRNA target sequence for F8 (NM_000132.2,801-819).
cttgcacaaatttatacta

SEQ ID NO: 162740 - DNA, 19 bp, Homo sapiens
  siRNA target sequence for F8 (NM_000132.2,805-823).
cacaaatttatactacttt

SEQ ID NO: 162741 - DNA, 19 bp, Homo sapiens
  siRNA target sequence for F8 (NM_000132.2,928-946).
gtcaatggttatgtaaaca

SEQ ID NO: 162742 - DNA, 19 bp, Homo sapiens
  siRNA target sequence for F8 (NM_000132.2,972-990).
ccacaggaaatcagtctat

SEQ ID NO: 162743 - DNA, 19 bp, Homo sapiens
  siRNA target sequence for F8 (NM_000132.2,983-1001).
cagtctattggcatgtgat

SEQ ID NO: 162744 - DNA, 19 bp, Homo sapiens
  siRNA target sequence for F8 (NM_000132.2,1016-1034).
ctcctgaagtgcactcaat

SEQ ID NO: 162745 - DNA, 19 bp, Homo sapiens
  siRNA target sequence for F8 (NM_000132.2,1038-1056).
cctcgaaggtcacacattt

SEQ ID NO: 162746 - DNA, 19 bp, Homo sapiens
  siRNA target sequence for F8 (NM_000132.2,1041-1059).
cgaaggtcacacatttctt

SEQ ID NO: 162747 - DNA, 19 bp, Homo sapiens
  siRNA target sequence for F8 (NM_000132.2,1072-1090).
cgccaggcgtccttggaaa

SEQ ID NO: 162748 - DNA, 19 bp, Homo sapiens
  siRNA target sequence for F8 (NM_000132.2,1086-1104).
ggaaatctcgccaataact

SEQ ID NO: 162749 - DNA, 19 bp, Homo sapiens
  siRNA target sequence for F8 (NM_000132.2,1092-1110).
ctcgccaataactttcctt

SEQ ID NO: 162750 - DNA, 19 bp, Homo sapiens
  siRNA target sequence for F8 (NM_000132.2,1185-1203).
catggaagcttatgtcaaa

SEQ ID NO: 162751 - DNA, 19 bp, Homo sapiens
  siRNA target sequence for F8 (NM_000132.2,1188-1206).
ggaagcttatgtcaaagta

SEQ ID NO: 162752 - DNA, 19 bp, Homo sapiens
  siRNA target sequence for F8 (NM_000132.2,1225-1243).
ccccaactacgaatgaaaa

SEQ ID NO: 162753 - DNA, 19 bp, Homo sapiens
  siRNA target sequence for F8 (NM_000132.2,1226-1244).
cccaactacgaatgaaaaa

SEQ ID NO: 162754 - DNA, 19 bp, Homo sapiens
  siRNA target sequence for F8 (NM_000132.2,1263-1281).
ctatgatgatgatcttact

SEQ ID NO: 162755 - DNA, 19 bp, Homo sapiens
  siRNA target sequence for F8 (NM_000132.2,1364-1382).
ctaaaacttgggtacatta

SEQ ID NO: 162756 - DNA, 19 bp, Homo sapiens
  siRNA target sequence for F8 (NM_000132.2,1432-1450).
cccgatgacagaagttata

SEQ ID NO: 162757 - DNA, 19 bp, Homo sapiens
  siRNA target sequence for F8 (NM_000132.2,1433-1451).
ccgatgacagaagttataa

SEQ ID NO: 162758 - DNA, 19 bp, Homo sapiens
  siRNA target sequence for F8 (NM_000132.2,1471-1489).
ggccctcagcggattggta

SEQ ID NO: 162759 - DNA, 19 bp, Homo sapiens
  siRNA target sequence for F8 (NM_000132.2,1480-1498).
cggattggtaggaagtaca

SEQ ID NO: 162760 - DNA, 19 bp, Homo sapiens
  siRNA target sequence for F8 (NM_000132.2,1481-1499).
ggattggtaggaagtacaa

SEQ ID NO: 162761 - DNA, 19 bp, Homo sapiens
  siRNA target sequence for F8 (NM_000132.2,1506-1524).
ccgatttatggcatacaca

SEQ ID NO: 162762 - DNA, 19 bp, Homo sapiens
  siRNA target sequence for F8 (NM_000132.2,1546-1564).
gaagctattcagcatgaat

SEQ ID NO: 162763 - DNA, 19 bp, Homo sapiens
  siRNA target sequence for F8 (NM_000132.2,1603-1621).
gacacactgttgattatat

SEQ ID NO: 162764 - DNA, 19 bp, Homo sapiens
  siRNA target sequence for F8 (NM_000132.2,1633-1651).
gcaagcagaccatataaca

SEQ ID NO: 162765 - DNA, 19 bp, Homo sapiens
  siRNA target sequence for F8 (NM_000132.2,1653-1671).
ctaccctcacggaatcact

SEQ ID NO: 162766 - DNA, 19 bp, Homo sapiens
  siRNA target sequence for F8 (NM_000132.2,1670-1688).
ctgatgtccgtcctttgta

SEQ ID NO: 162767 - DNA, 19 bp, Homo sapiens
  siRNA target sequence for F8 (NM_000132.2,1672-1690).
gatgtccgtcctttgtatt

SEQ ID NO: 162768 - DNA, 19 bp, Homo sapiens
  siRNA target sequence for F8 (NM_000132.2,1675-1693).
gtccgtcctttgtattcaa

SEQ ID NO: 162769 - DNA, 19 bp, Homo sapiens
  siRNA target sequence for F8 (NM_000132.2,1697-1715).
gattaccaaaaggtgtaaa

SEQ ID NO: 162770 - DNA, 19 bp, Homo sapiens
  siRNA target sequence for F8 (NM_000132.2,1808-1826).
ggtgcctgacccgctatta

SEQ ID NO: 162771 - DNA, 19 bp, Homo sapiens
  siRNA target sequence for F8 (NM_000132.2,1812-1830).
cctgacccgctattactct

SEQ ID NO: 162772 - DNA, 19 bp, Homo sapiens
  siRNA target sequence for F8 (NM_000132.2,1813-1831).
ctgacccgctattactcta

SEQ ID NO: 162773 - DNA, 19 bp, Homo sapiens
  siRNA target sequence for F8 (NM_000132.2,1817-1835).
cccgctattactctagttt

SEQ ID NO: 162774 - DNA, 19 bp, Homo sapiens
  siRNA target sequence for F8 (NM_000132.2,1821-1839).
ctattactctagtttcgtt

SEQ ID NO: 162775 - DNA, 19 bp, Homo sapiens
  siRNA target sequence for F8 (NM_000132.2,1982-2000).
ggtacctcacagagaatat

SEQ ID NO: 162776 - DNA, 19 bp, Homo sapiens
  siRNA target sequence for F8 (NM_000132.2,2075-2093).
gcatcaatggctatgtttt

SEQ ID NO: 162777 - DNA, 19 bp, Homo sapiens
  siRNA target sequence for F8 (NM_000132.2,2131-2149).
gcatactggtacattctaa

SEQ ID NO: 162778 - DNA, 19 bp, Homo sapiens
  siRNA target sequence for F8 (NM_000132.2,2179-2197).
gtcttcttctctggatata

SEQ ID NO: 162779 - DNA, 19 bp, Homo sapiens
  siRNA target sequence for F8 (NM_000132.2,2187-2205).
ctctggatataccttcaaa

SEQ ID NO: 162780 - DNA, 19 bp, Homo sapiens
  siRNA target sequence for F8 (NM_000132.2,2191-2209).
ggatataccttcaaacaca

SEQ ID NO: 162781 - DNA, 19 bp, Homo sapiens
  siRNA target sequence for F8 (NM_000132.2,2192-2210).
gatataccttcaaacacaa

SEQ ID NO: 162782 - DNA, 19 bp, Homo sapiens
  siRNA target sequence for F8 (NM_000132.2,2198-2216).
ccttcaaacacaaaatggt

SEQ ID NO: 162783 - DNA, 19 bp, Homo sapiens
  siRNA target sequence for F8 (NM_000132.2,2241-2259).
cccattctcaggagaaact

SEQ ID NO: 162784 - DNA, 19 bp, Homo sapiens
  siRNA target sequence for F8 (NM_000132.2,2260-2278).
gtcttcatgtcgatggaaa

SEQ ID NO: 162785 - DNA, 19 bp, Homo sapiens
  siRNA target sequence for F8 (NM_000132.2,2329-2347).
ggcatgaccgccttactga

SEQ ID NO: 162786 - DNA, 19 bp, Homo sapiens
  siRNA target sequence for F8 (NM_000132.2,2330-2348).
gcatgaccgccttactgaa

SEQ ID NO: 162787 - DNA, 19 bp, Homo sapiens
  siRNA target sequence for F8 (NM_000132.2,2451-2469).
cttctcccagaattcaaga

SEQ ID NO: 162788 - DNA, 19 bp, Homo sapiens
  siRNA target sequence for F8 (NM_000132.2,2478-2496).
cactaggcaaaagcaattt

SEQ ID NO: 162789 - DNA, 19 bp, Homo sapiens
  siRNA target sequence for F8 (NM_000132.2,2480-2498).
ctaggcaaaagcaatttaa

SEQ ID NO: 162790 - DNA, 19 bp, Homo sapiens
  siRNA target sequence for F8 (NM_000132.2,2529-2547).
gaagactgacccttggttt

SEQ ID NO: 162791 - DNA, 19 bp, Homo sapiens
  siRNA target sequence for F8 (NM_000132.2,2555-2573).
gaacacctatgcctaaaat

SEQ ID NO: 162792 - DNA, 19 bp, Homo sapiens
  siRNA target sequence for F8 (NM_000132.2,2626-2644).
ccacatgggctatccttat

SEQ ID NO: 162793 - DNA, 19 bp, Homo sapiens
  siRNA target sequence for F8 (NM_000132.2,2687-2705).
catcacctggagcaataga

SEQ ID NO: 162794 - DNA, 19 bp, Homo sapiens
  siRNA target sequence for F8 (NM_000132.2,2698-2716).
gcaatagacagtaataaca

SEQ ID NO: 162795 - DNA, 19 bp, Homo sapiens
  siRNA target sequence for F8 (NM_000132.2,2755-2773).
cacagtggggacatggtat

SEQ ID NO: 162796 - DNA, 19 bp, Homo sapiens
  siRNA target sequence for F8 (NM_000132.2,2757-2775).
cagtggggacatggtattt

SEQ ID NO: 162797 - DNA, 19 bp, Homo sapiens
  siRNA target sequence for F8 (NM_000132.2,2784-2802).
gtcaggcctccaattaaga

SEQ ID NO: 162798 - DNA, 19 bp, Homo sapiens
  siRNA target sequence for F8 (NM_000132.2,2786-2804).
caggcctccaattaagatt

SEQ ID NO: 162799 - DNA, 19 bp, Homo sapiens
  siRNA target sequence for F8 (NM_000132.2,2788-2806).
ggcctccaattaagattaa

SEQ ID NO: 162800 - DNA, 19 bp, Homo sapiens
  siRNA target sequence for F8 (NM_000132.2,2789-2807).
gcctccaattaagattaaa

SEQ ID NO: 162801 - DNA, 19 bp, Homo sapiens
  siRNA target sequence for F8 (NM_000132.2,2790-2808).
cctccaattaagattaaat

SEQ ID NO: 162802 - DNA, 19 bp, Homo sapiens
  siRNA target sequence for F8 (NM_000132.2,2860-2878).
gtttctagtacatcaaata

SEQ ID NO: 162803 - DNA, 19 bp, Homo sapiens
  siRNA target sequence for F8 (NM_000132.2,2864-2882).
ctagtacatcaaataatct

SEQ ID NO: 162804 - DNA, 19 bp, Homo sapiens
  siRNA target sequence for F8 (NM_000132.2,2867-2885).
gtacatcaaataatctgat

SEQ ID NO: 162805 - DNA, 19 bp, Homo sapiens
  siRNA target sequence for F8 (NM_000132.2,2914-2932).
gcaggtactgataatacaa

SEQ ID NO: 162806 - DNA, 19 bp, Homo sapiens
  siRNA target sequence for F8 (NM_000132.2,2951-2969).
gtatgccagttcattatga

SEQ ID NO: 162807 - DNA, 19 bp, Homo sapiens
  siRNA target sequence for F8 (NM_000132.2,2955-2973).
gccagttcattatgatagt

SEQ ID NO: 162808 - DNA, 19 bp, Homo sapiens
  siRNA target sequence for F8 (NM_000132.2,2984-3002).
ccactctatttggcaaaaa

SEQ ID NO: 162809 - DNA, 19 bp, Homo sapiens
  siRNA target sequence for F8 (NM_000132.2,3066-3084).
gttgttagaatcaggttta

SEQ ID NO: 162810 - DNA, 19 bp, Homo sapiens
  siRNA target sequence for F8 (NM_000132.2,3087-3105).
gaatagccaagaaagttca

SEQ ID NO: 162811 - DNA, 19 bp, Homo sapiens
  siRNA target sequence for F8 (NM_000132.2,3130-3148).
gagagtggtaggttattta

SEQ ID NO: 162812 - DNA, 19 bp, Homo sapiens
  siRNA target sequence for F8 (NM_000132.2,3166-3184).
ggacctgctttgttgacta

SEQ ID NO: 162813 - DNA, 19 bp, Homo sapiens
  siRNA target sequence for F8 (NM_000132.2,3172-3190).
gctttgttgactaaagata

SEQ ID NO: 162814 - DNA, 19 bp, Homo sapiens
  siRNA target sequence for F8 (NM_000132.2,3173-3191).
ctttgttgactaaagataa

SEQ ID NO: 162815 - DNA, 19 bp, Homo sapiens
  siRNA target sequence for F8 (NM_000132.2,3194-3212).
ccttattcaaagttagcat

SEQ ID NO: 162816 - DNA, 19 bp, Homo sapiens
  siRNA target sequence for F8 (NM_000132.2,3231-3249).
caaaacttccaataattca

SEQ ID NO: 162817 - DNA, 19 bp, Homo sapiens
  siRNA target sequence for F8 (NM_000132.2,3239-3257).
ccaataattcagcaactaa

SEQ ID NO: 162818 - DNA, 19 bp, Homo sapiens
  siRNA target sequence for F8 (NM_000132.2,3270-3288).
cattgatggcccatcatta

SEQ ID NO: 162819 - DNA, 19 bp, Homo sapiens
  siRNA target sequence for F8 (NM_000132.2,3304-3322).
ccatcagtctggcaaaata

SEQ ID NO: 162820 - DNA, 19 bp, Homo sapiens
  siRNA target sequence for F8 (NM_000132.2,3400-3418).
gctttgaggctaaatcata

SEQ ID NO: 162821 - DNA, 19 bp, Homo sapiens
  siRNA target sequence for F8 (NM_000132.2,3505-3523).
gatatgtcgttctttaaga

SEQ ID NO: 162822 - DNA, 19 bp, Homo sapiens
  siRNA target sequence for F8 (NM_000132.2,3512-3530).
cgttctttaagatgctatt

SEQ ID NO: 162823 - DNA, 19 bp, Homo sapiens
  siRNA target sequence for F8 (NM_000132.2,3595-3613).
ggccccagtccaaagcaat

SEQ ID NO: 162824 - DNA, 19 bp, Homo sapiens
  siRNA target sequence for F8 (NM_000132.2,3599-3617).
ccagtccaaagcaattagt

SEQ ID NO: 162825 - DNA, 19 bp, Homo sapiens
  siRNA target sequence for F8 (NM_000132.2,3600-3618).
cagtccaaagcaattagta

SEQ ID NO: 162826 - DNA, 19 bp, Homo sapiens
  siRNA target sequence for F8 (NM_000132.2,3706-3724).
gacgtaggactcaaagaga

SEQ ID NO: 162827 - DNA, 19 bp, Homo sapiens
  siRNA target sequence for F8 (NM_000132.2,3743-3761).
gaaacctatttcttactaa

SEQ ID NO: 162828 - DNA, 19 bp, Homo sapiens
  siRNA target sequence for F8 (NM_000132.2,3754-3772).
cttactaacttggataatt

SEQ ID NO: 162829 - DNA, 19 bp, Homo sapiens
  siRNA target sequence for F8 (NM_000132.2,3856-3874).
gttttgcctcagatacata

SEQ ID NO: 162830 - DNA, 19 bp, Homo sapiens
  siRNA target sequence for F8 (NM_000132.2,3881-3899).
ctggcactaagaatttcat

SEQ ID NO: 162831 - DNA, 19 bp, Homo sapiens
  siRNA target sequence for F8 (NM_000132.2,3883-3901).
ggcactaagaatttcatga

SEQ ID NO: 162832 - DNA, 19 bp, Homo sapiens
  siRNA target sequence for F8 (NM_000132.2,3918-3936).
gagcactaggcaaaatgta

SEQ ID NO: 162833 - DNA, 19 bp, Homo sapiens
  siRNA target sequence for F8 (NM_000132.2,3920-3938).
gcactaggcaaaatgtaga

SEQ ID NO: 162834 - DNA, 19 bp, Homo sapiens
  siRNA target sequence for F8 (NM_000132.2,3956-3974).
catatgctccagtacttca

SEQ ID NO: 162835 - DNA, 19 bp, Homo sapiens
  siRNA target sequence for F8 (NM_000132.2,3967-3985).
gtacttcaagattttaggt

SEQ ID NO: 162836 - DNA, 19 bp, Homo sapiens
  siRNA target sequence for F8 (NM_000132.2,3994-4012).
gattcaacaaatagaacaa

SEQ ID NO: 162837 - DNA, 19 bp, Homo sapiens
  siRNA target sequence for F8 (NM_000132.2,4060-4078).
gaaggcttgggaaatcaaa

SEQ ID NO: 162838 - DNA, 19 bp, Homo sapiens
  siRNA target sequence for F8 (NM_000132.2,4102-4120).
gcatgcaccacaaggatat

SEQ ID NO: 162839 - DNA, 19 bp, Homo sapiens
  siRNA target sequence for F8 (NM_000132.2,4110-4128).
cacaaggatatctcctaat

SEQ ID NO: 162840 - DNA, 19 bp, Homo sapiens
  siRNA target sequence for F8 (NM_000132.2,4147-4165).
gtcacgcaacgtagtaaga

SEQ ID NO: 162841 - DNA, 19 bp, Homo sapiens
  siRNA target sequence for F8 (NM_000132.2,4149-4167).
cacgcaacgtagtaagaga

SEQ ID NO: 162842 - DNA, 19 bp, Homo sapiens
  siRNA target sequence for F8 (NM_000132.2,4157-4175).
gtagtaagagagctttgaa

SEQ ID NO: 162843 - DNA, 19 bp, Homo sapiens
  siRNA target sequence for F8 (NM_000132.2,4160-4178).
gtaagagagctttgaaaca

SEQ ID NO: 162844 - DNA, 19 bp, Homo sapiens
  siRNA target sequence for F8 (NM_000132.2,4182-4200).
cagactcccactagaagaa

SEQ ID NO: 162845 - DNA, 19 bp, Homo sapiens
  siRNA target sequence for F8 (NM_000132.2,4202-4220).
cagaacttgaaaaaaggat

SEQ ID NO: 162846 - DNA, 19 bp, Homo sapiens
  siRNA target sequence for F8 (NM_000132.2,4280-4298).
ccctcacacagatagacta

SEQ ID NO: 162847 - DNA, 19 bp, Homo sapiens
  siRNA target sequence for F8 (NM_000132.2,4325-4343).
ctcagtctcccttatcaga

SEQ ID NO: 162848 - DNA, 19 bp, Homo sapiens
  siRNA target sequence for F8 (NM_000132.2,4327-4345).
cagtctcccttatcagatt

SEQ ID NO: 162849 - DNA, 19 bp, Homo sapiens
  siRNA target sequence for F8 (NM_000132.2,4385-4403).
ctccattacccattgcaaa

SEQ ID NO: 162850 - DNA, 19 bp, Homo sapiens
  siRNA target sequence for F8 (NM_000132.2,4417-4435).
ccatctattagacctatat

SEQ ID NO: 162851 - DNA, 19 bp, Homo sapiens
  siRNA target sequence for F8 (NM_000132.2,4418-4436).
catctattagacctatata

SEQ ID NO: 162852 - DNA, 19 bp, Homo sapiens
  siRNA target sequence for F8 (NM_000132.2,4450-4468).
ctattccaagacaactctt

SEQ ID NO: 162853 - DNA, 19 bp, Homo sapiens
  siRNA target sequence for F8 (NM_000132.2,4510-4528).
gtccaagaaagcagtcatt

SEQ ID NO: 162854 - DNA, 19 bp, Homo sapiens
  siRNA target sequence for F8 (NM_000132.2,4554-4572).
cctttctttagccattcta

SEQ ID NO: 162855 - DNA, 19 bp, Homo sapiens
  siRNA target sequence for F8 (NM_000132.2,4559-4577).
ctttagccattctaacctt

SEQ ID NO: 162856 - DNA, 19 bp, Homo sapiens
  siRNA target sequence for F8 (NM_000132.2,4579-4597).
gagatgactggtgatcaaa

SEQ ID NO: 162857 - DNA, 19 bp, Homo sapiens
  siRNA target sequence for F8 (NM_000132.2,4581-4599).
gatgactggtgatcaaaga

SEQ ID NO: 162858 - DNA, 19 bp, Homo sapiens
  siRNA target sequence for F8 (NM_000132.2,4615-4633).
gggacaagtgccacaaatt

SEQ ID NO: 162859 - DNA, 19 bp, Homo sapiens
  siRNA target sequence for F8 (NM_000132.2,4617-4635).
gacaagtgccacaaattca

SEQ ID NO: 162860 - DNA, 19 bp, Homo sapiens
  siRNA target sequence for F8 (NM_000132.2,4741-4759).
ctattccctacggaaacta

SEQ ID NO: 162861 - DNA, 19 bp, Homo sapiens
  siRNA target sequence for F8 (NM_000132.2,4746-4764).
ccctacggaaactagcaat

SEQ ID NO: 162862 - DNA, 19 bp, Homo sapiens
  siRNA target sequence for F8 (NM_000132.2,5025-5043).
gtccctgaacgcttgtgaa

SEQ ID NO: 162863 - DNA, 19 bp, Homo sapiens
  siRNA target sequence for F8 (NM_000132.2,5034-5052).
cgcttgtgaaagcaatcat

SEQ ID NO: 162864 - DNA, 19 bp, Homo sapiens
  siRNA target sequence for F8 (NM_000132.2,5063-5081).
caataaatgagggacaaaa

SEQ ID NO: 162865 - DNA, 19 bp, Homo sapiens
  siRNA target sequence for F8 (NM_000132.2,5161-5179).
cgccatcaacgggaaataa

SEQ ID NO: 162866 - DNA, 19 bp, Homo sapiens
  siRNA target sequence for F8 (NM_000132.2,5163-5181).
ccatcaacgggaaataact

SEQ ID NO: 162867 - DNA, 19 bp, Homo sapiens
  siRNA target sequence for F8 (NM_000132.2,5172-5190).
ggaaataactcgtactact

SEQ ID NO: 162868 - DNA, 19 bp, Homo sapiens
  siRNA target sequence for F8 (NM_000132.2,5215-5233).
gactatgatgataccatat

SEQ ID NO: 162869 - DNA, 19 bp, Homo sapiens
  siRNA target sequence for F8 (NM_000132.2,5361-5379).
gagtagctccccacatgtt

SEQ ID NO: 162870 - DNA, 19 bp, Homo sapiens
  siRNA target sequence for F8 (NM_000132.2,5363-5381).
gtagctccccacatgttct

SEQ ID NO: 162871 - DNA, 19 bp, Homo sapiens
  siRNA target sequence for F8 (NM_000132.2,5369-5387).
ccccacatgttctaagaaa

SEQ ID NO: 162872 - DNA, 19 bp, Homo sapiens
  siRNA target sequence for F8 (NM_000132.2,5402-5420).
gcagtgtccctcagttcaa

SEQ ID NO: 162873 - DNA, 19 bp, Homo sapiens
  siRNA target sequence for F8 (NM_000132.2,5409-5427).
ccctcagttcaagaaagtt

SEQ ID NO: 162874 - DNA, 19 bp, Homo sapiens
  siRNA target sequence for F8 (NM_000132.2,5411-5429).
ctcagttcaagaaagttgt

SEQ ID NO: 162875 - DNA, 19 bp, Homo sapiens
  siRNA target sequence for F8 (NM_000132.2,5466-5484).
cttataccgtggagaacta

SEQ ID NO: 162876 - DNA, 19 bp, Homo sapiens
  siRNA target sequence for F8 (NM_000132.2,5497-5515).
ggactcctggggccatata

SEQ ID NO: 162877 - DNA, 19 bp, Homo sapiens
  siRNA target sequence for F8 (NM_000132.2,5498-5516).
gactcctggggccatatat

SEQ ID NO: 162878 - DNA, 19 bp, Homo sapiens
  siRNA target sequence for F8 (NM_000132.2,5500-5518).
ctcctggggccatatataa

SEQ ID NO: 162879 - DNA, 19 bp, Homo sapiens
  siRNA target sequence for F8 (NM_000132.2,5533-5551).
gataatatcatggtaactt

SEQ ID NO: 162880 - DNA, 19 bp, Homo sapiens
  siRNA target sequence for F8 (NM_000132.2,5563-5581).
gcctctcgtccctattcct

SEQ ID NO: 162881 - DNA, 19 bp, Homo sapiens
  siRNA target sequence for F8 (NM_000132.2,5583-5601).
ctattctagccttatttct

SEQ ID NO: 162882 - DNA, 19 bp, Homo sapiens
  siRNA target sequence for F8 (NM_000132.2,5632-5650).
cctagaaaaaactttgtca

SEQ ID NO: 162883 - DNA, 19 bp, Homo sapiens
  siRNA target sequence for F8 (NM_000132.2,5663-5681).
ccaaaacttacttttggaa

SEQ ID NO: 162884 - DNA, 19 bp, Homo sapiens
  siRNA target sequence for F8 (NM_000132.2,5723-5741).
gcaaagcctgggcttattt

SEQ ID NO: 162885 - DNA, 19 bp, Homo sapiens
  siRNA target sequence for F8 (NM_000132.2,5735-5753).
cttatttctctgatgttga

SEQ ID NO: 162886 - DNA, 19 bp, Homo sapiens
  siRNA target sequence for F8 (NM_000132.2,5796-5814).
ggtctgccacactaacaca

SEQ ID NO: 162887 - DNA, 19 bp, Homo sapiens
  siRNA target sequence for F8 (NM_000132.2,5946-5964).
gatggaagatcccactttt

SEQ ID NO: 162888 - DNA, 19 bp, Homo sapiens
  siRNA target sequence for F8 (NM_000132.2,5986-6004).
gcaatcaatggctacataa

SEQ ID NO: 162889 - DNA, 19 bp, Homo sapiens
  siRNA target sequence for F8 (NM_000132.2,5991-6009).
caatggctacataatggat

SEQ ID NO: 162890 - DNA, 19 bp, Homo sapiens
  siRNA target sequence for F8 (NM_000132.2,5997-6015).
ctacataatggatacacta

SEQ ID NO: 162891 - DNA, 19 bp, Homo sapiens
  siRNA target sequence for F8 (NM_000132.2,6011-6029).
cactacctggcttagtaat

SEQ ID NO: 162892 - DNA, 19 bp, Homo sapiens
  siRNA target sequence for F8 (NM_000132.2,6025-6043).
gtaatggctcaggatcaaa

SEQ ID NO: 162893 - DNA, 19 bp, Homo sapiens
  siRNA target sequence for F8 (NM_000132.2,6112-6130).
gtgttcactgtacgaaaaa

SEQ ID NO: 162894 - DNA, 19 bp, Homo sapiens
  siRNA target sequence for F8 (NM_000132.2,6124-6142).
cgaaaaaaagaggagtata

SEQ ID NO: 162895 - DNA, 19 bp, Homo sapiens
  siRNA target sequence for F8 (NM_000132.2,6196-6214).
ccatccaaagctggaattt

SEQ ID NO: 162896 - DNA, 19 bp, Homo sapiens
  siRNA target sequence for F8 (NM_000132.2,6273-6291).
ggtgtacagcaataagtgt

SEQ ID NO: 162897 - DNA, 19 bp, Homo sapiens
  siRNA target sequence for F8 (NM_000132.2,6309-6327).
ggcttctggacacattaga

SEQ ID NO: 162898 - DNA, 19 bp, Homo sapiens
  siRNA target sequence for F8 (NM_000132.2,6375-6393).
gctggccagacttcattat

SEQ ID NO: 162899 - DNA, 19 bp, Homo sapiens
  siRNA target sequence for F8 (NM_000132.2,6388-6406).
cattattccggatcaatca

SEQ ID NO: 162900 - DNA, 19 bp, Homo sapiens
  siRNA target sequence for F8 (NM_000132.2,6451-6469).
ctgttggcaccaatgatta

SEQ ID NO: 162901 - DNA, 19 bp, Homo sapiens
  siRNA target sequence for F8 (NM_000132.2,6453-6471).
gttggcaccaatgattatt

SEQ ID NO: 162902 - DNA, 19 bp, Homo sapiens
  siRNA target sequence for F8 (NM_000132.2,6524-6542).
ctcagtttatcatcatgta

SEQ ID NO: 162903 - DNA, 19 bp, Homo sapiens
  siRNA target sequence for F8 (NM_000132.2,6534-6552).
catcatgtatagtcttgat

SEQ ID NO: 162904 - DNA, 19 bp, Homo sapiens
  siRNA target sequence for F8 (NM_000132.2,6565-6583).
cagacttatcgaggaaatt

SEQ ID NO: 162905 - DNA, 19 bp, Homo sapiens
  siRNA target sequence for F8 (NM_000132.2,6590-6608).
gaaccttaatggtcttctt

SEQ ID NO: 162906 - DNA, 19 bp, Homo sapiens
  siRNA target sequence for F8 (NM_000132.2,6771-6789).
gagtaaagcaatatcagat

SEQ ID NO: 162907 - DNA, 19 bp, Homo sapiens
  siRNA target sequence for F8 (NM_000132.2,6802-6820).
gcttcatcctactttacca

SEQ ID NO: 162908 - DNA, 19 bp, Homo sapiens
  siRNA target sequence for F8 (NM_000132.2,6861-6879).
cctccaagggaggagtaat

SEQ ID NO: 162909 - DNA, 19 bp, Homo sapiens
  siRNA target sequence for F8 (NM_000132.2,6884-6902).
ggagacctcaggtgaataa

SEQ ID NO: 162910 - DNA, 19 bp, Homo sapiens
  siRNA target sequence for F8 (NM_000132.2,7011-7029).
catctccagcagtcaagat

SEQ ID NO: 162911 - DNA, 19 bp, Homo sapiens
  siRNA target sequence for F8 (NM_000132.2,7032-7050).
ccatcagtggactctcttt

SEQ ID NO: 162912 - DNA, 19 bp, Homo sapiens
  siRNA target sequence for F8 (NM_000132.2,7033-7051).
catcagtggactctctttt

SEQ ID NO: 162913 - DNA, 19 bp, Homo sapiens
  siRNA target sequence for F8 (NM_000132.2,7041-7059).
gactctcttttttcagaat

SEQ ID NO: 162914 - DNA, 19 bp, Homo sapiens
  siRNA target sequence for F8 (NM_000132.2,7117-7135).
ctagacccaccgttactga

SEQ ID NO: 162915 - DNA, 19 bp, Homo sapiens
  siRNA target sequence for F8 (NM_000132.2,7134-7152).
gactcgctaccttcgaatt

SEQ ID NO: 162916 - DNA, 19 bp, Homo sapiens
  siRNA target sequence for F8 (NM_000132.2,7136-7154).
ctcgctaccttcgaattca

SEQ ID NO: 162917 - DNA, 19 bp, Homo sapiens
  siRNA target sequence for FLJ12892 (NM_022757.3,4508-4526).
gaaacagatacctaatgaa

SEQ ID NO: 162918 - DNA, 19 bp, Homo sapiens
  siRNA target sequence for FLJ12892 (NM_022757.3,4573-4591).
ggtcattgcaagatcatta

SEQ ID NO: 162919 - DNA, 19 bp, Homo sapiens
  siRNA target sequence for FLJ12892 (NM_022757.3,4574-4592).
gtcattgcaagatcattat

SEQ ID NO: 162920 - DNA, 19 bp, Homo sapiens
  siRNA target sequence for FLJ12892 (NM_022757.3,4734-4752).
caggcaactcctcattcta

SEQ ID NO: 162921 - DNA, 19 bp, Homo sapiens
  siRNA target sequence for FLJ12892 (NM_022757.3,4736-4754).
ggcaactcctcattctagt

SEQ ID NO: 162922 - DNA, 19 bp, Homo sapiens
  siRNA target sequence for FLJ12892 (NM_022757.3,4839-4857).
ggcaacagtcagtttgcat

SEQ ID NO: 162923 - DNA, 19 bp, Homo sapiens
  siRNA target sequence for FLJ12892 (NM_022757.3,4850-4868).
gtttgcatcacaaggtaaa

SEQ ID NO: 162924 - DNA, 19 bp, Homo sapiens
  siRNA target sequence for FLJ12892 (NM_022757.3,4855-4873).
catcacaaggtaaaacagt

SEQ ID NO: 162925 - DNA, 19 bp, Homo sapiens
  siRNA target sequence for FLJ12892 (NM_022757.3,4879-4897).
caacctgtactgatgttct

SEQ ID NO: 162926 - DNA, 19 bp, Homo sapiens
  siRNA target sequence for FLJ12892 (NM_022757.3,4896-4914).
ctacggaattcatttaata

SEQ ID NO: 162927 - DNA, 19 bp, Homo sapiens
  siRNA target sequence for FLJ12892 (NM_022757.3,4933-4951).
gtagcctgcccaaaactga

SEQ ID NO: 162928 - DNA, 19 bp, Homo sapiens
  siRNA target sequence for FLJ12892 (NM_022757.3,4937-4955).
cctgcccaaaactgacata

SEQ ID NO: 162929 - DNA, 19 bp, Homo sapiens
  siRNA target sequence for FLJ12892 (NM_022757.3,4940-4958).
gcccaaaactgacatatca

SEQ ID NO: 162930 - DNA, 19 bp, Homo sapiens
  siRNA target sequence for FLJ12892 (NM_022757.3,4950-4968).
gacatatcagctattccaa

SEQ ID NO: 162931 - DNA, 19 bp, Homo sapiens
  siRNA target sequence for FLJ12892 (NM_022757.3,4976-4994).
gcaactgggccttgttaat

SEQ ID NO: 162932 - DNA, 19 bp, Homo sapiens
  siRNA target sequence for FLJ12892 (NM_022757.3,4980-4998).
ctgggccttgttaatggaa

SEQ ID NO: 162933 - DNA, 19 bp, Homo sapiens
  siRNA target sequence for FLJ12892 (NM_022757.3,4982-5000).
gggccttgttaatggaatt

SEQ ID NO: 162934 - DNA, 19 bp, Homo sapiens
  siRNA target sequence for FLJ12892 (NM_022757.3,4984-5002).
gccttgttaatggaattct

SEQ ID NO: 162935 - DNA, 19 bp, Homo sapiens
  siRNA target sequence for FLJ12892 (NM_022757.3,5003-5021).
gccacaacaaggaattcat

SEQ ID NO: 162936 - DNA, 19 bp, Homo sapiens
  siRNA target sequence for FLJ12892 (NM_022757.3,5010-5028).
caaggaattcataaggaaa

SEQ ID NO: 162937 - DNA, 19 bp, Homo sapiens
  siRNA target sequence for FLJ12892 (NM_022757.3,5029-5047).
cagacctactaaaatgtat

SEQ ID NO: 162938 - DNA, 19 bp, Homo sapiens
  siRNA target sequence for FLJ12892 (NM_022757.3,5060-5078).
gtctctttttcgatctcat

SEQ ID NO: 162939 - DNA, 19 bp, Homo sapiens
  siRNA target sequence for FLJ12892 (NM_022757.3,5137-5155).
ctttcttggccactaatga

SEQ ID NO: 162940 - DNA, 19 bp, Homo sapiens
  siRNA target sequence for FLJ12892 (NM_022757.3,5141-5159).
cttggccactaatgaagaa

SEQ ID NO: 162941 - DNA, 19 bp, Homo sapiens
  siRNA target sequence for FLJ12892 (NM_022757.3,5144-5162).
ggccactaatgaagaaaaa

SEQ ID NO: 162942 - DNA, 19 bp, Homo sapiens
  siRNA target sequence for FLJ12892 (NM_022757.3,5349-5367).
gaaattcagaggttgatta

SEQ ID NO: 162943 - DNA, 19 bp, Homo sapiens
  siRNA target sequence for FLJ12892 (NM_022757.3,5359-5377).
ggttgattacagaaatgga

SEQ ID NO: 162944 - DNA, 19 bp, Homo sapiens
  siRNA target sequence for FLJ12892 (NM_022757.3,5375-5393).
ggaggcatgtatatctgta

SEQ ID NO: 162945 - DNA, 19 bp, Homo sapiens
  siRNA target sequence for FLJ12892 (NM_022757.3,5416-5434).
cagatattcaagttgagat

SEQ ID NO: 162946 - DNA, 19 bp, Homo sapiens
  siRNA target sequence for FLJ12892 (NM_022757.3,5439-5457).
ctggccatgcaaccattaa

SEQ ID NO: 162947 - DNA, 19 bp, Homo sapiens
  siRNA target sequence for FLJ12892 (NM_022757.3,5441-5459).
ggccatgcaaccattaaga

SEQ ID NO: 162948 - DNA, 19 bp, Homo sapiens
  siRNA target sequence for FLJ12892 (NM_022757.3,5444-5462).
catgcaaccattaagaagt

SEQ ID NO: 162949 - DNA, 19 bp, Homo sapiens
  siRNA target sequence for FLJ12892 (NM_022757.3,5550-5568).
gattgcaaccttgaattgt

SEQ ID NO: 162950 - DNA, 19 bp, Homo sapiens
  siRNA target sequence for FLJ12892 (NM_022757.3,5574-5592).
cttcagtcattgaatatgt

SEQ ID NO: 162951 - DNA, 19 bp, Homo sapiens
  siRNA target sequence for FLJ12892 (NM_022757.3,5604-5622).
caattggaggagtcactaa

SEQ ID NO: 162952 - DNA, 19 bp, Homo sapiens
  siRNA target sequence for FLJ12892 (NM_022757.3,5617-5635).
cactaaagagccaggaatt

SEQ ID NO: 162953 - DNA, 19 bp, Homo sapiens
  siRNA target sequence for FLJ12892 (NM_022757.3,5693-5711).
caaaaaatttagtagtata

SEQ ID NO: 162954 - DNA, 19 bp, Homo sapiens
  siRNA target sequence for FLJ12892 (NM_022757.3,5720-5738).
caaagatcaaactatactt

SEQ ID NO: 162955 - DNA, 19 bp, Homo sapiens
  siRNA target sequence for FLJ12892 (NM_022757.3,5724-5742).
gatcaaactatacttgaaa

SEQ ID NO: 162956 - DNA, 19 bp, Homo sapiens
  siRNA target sequence for FLJ12892 (NM_022757.3,5750-5768).
gcaatatgatattgagata

SEQ ID NO: 162957 - DNA, 19 bp, Homo sapiens
  siRNA target sequence for FLJ12892 (NM_022757.3,5793-5811).
gaagccctagtcaatgtga

SEQ ID NO: 162958 - DNA, 19 bp, Homo sapiens
  siRNA target sequence for FLJ12892 (NM_022757.3,5796-5814).
gccctagtcaatgtgaaaa

SEQ ID NO: 162959 - DNA, 19 bp, Homo sapiens
  siRNA target sequence for FLJ12892 (NM_022757.3,5819-5837).
ccagtttaagttagaaact

SEQ ID NO: 162960 - DNA, 19 bp, Homo sapiens
  siRNA target sequence for FLJ12892 (NM_022757.3,5891-5909).
ggtgactcgactaagagaa

SEQ ID NO: 162961 - DNA, 19 bp, Homo sapiens
  siRNA target sequence for FLJ12892 (NM_022757.3,5892-5910).
gtgactcgactaagagaat

SEQ ID NO: 162962 - DNA, 19 bp, Homo sapiens
  siRNA target sequence for FLJ12892 (NM_022757.3,5894-5912).
gactcgactaagagaatta

SEQ ID NO: 162963 - DNA, 19 bp, Homo sapiens
  siRNA target sequence for FLJ12892 (NM_022757.3,5898-5916).
cgactaagagaattaacca

SEQ ID NO: 162964 - DNA, 19 bp, Homo sapiens
  siRNA target sequence for FLJ12892 (NM_022757.3,5905-5923).
gagaattaaccagaacttt

SEQ ID NO: 162965 - DNA, 19 bp, Homo sapiens
  siRNA target sequence for FLJ12892 (NM_022757.3,5942-5960).
gcttctctccgatcttagt

SEQ ID NO: 162966 - DNA, 19 bp, Homo sapiens
  siRNA target sequence for FLJ12892 (NM_022757.3,5978-5996).
caagcctgggaataacctt

SEQ ID NO: 162967 - DNA, 19 bp, Homo sapiens
  siRNA target sequence for FLJ12892 (NM_022757.3,5983-6001).
ctgggaataaccttaccaa

SEQ ID NO: 162968 - DNA, 19 bp, Homo sapiens
  siRNA target sequence for FLJ12892 (NM_022757.3,5985-6003).
gggaataaccttaccaaat

SEQ ID NO: 162969 - DNA, 19 bp, Homo sapiens
  siRNA target sequence for FLJ12892 (NM_022757.3,6051-6069).
gctcacacttccataatga

SEQ ID NO: 162970 - DNA, 19 bp, Homo sapiens
  siRNA target sequence for FLJ12892 (NM_022757.3,6061-6079).
ccataatgagctatctaaa

SEQ ID NO: 162971 - DNA, 19 bp, Homo sapiens
  siRNA target sequence for FLJ12892 (NM_022757.3,6070-6088).
gctatctaaataagttaga

SEQ ID NO: 162972 - DNA, 19 bp, Homo sapiens
  siRNA target sequence for FLJ12892 (NM_022757.3,6116-6134).
gccactttctacaattaaa

SEQ ID NO: 162973 - DNA, 19 bp, Homo sapiens
  siRNA target sequence for FLJ12892 (NM_022757.3,6189-6207).
ggccctcaaaatagtaaca

SEQ ID NO: 162974 - DNA, 19 bp, Homo sapiens
  siRNA target sequence for FLJ12892 (NM_022757.3,6191-6209).
ccctcaaaatagtaacact

SEQ ID NO: 162975 - DNA, 19 bp, Homo sapiens
  siRNA target sequence for FLJ12892 (NM_022757.3,6192-6210).
cctcaaaatagtaacacta

SEQ ID NO: 162976 - DNA, 19 bp, Homo sapiens
  siRNA target sequence for FLJ12892 (NM_022757.3,6303-6321).
gatgagcataatttggata

SEQ ID NO: 162977 - DNA, 19 bp, Homo sapiens
  siRNA target sequence for FLJ12892 (NM_022757.3,6306-6324).
gagcataatttggataata

SEQ ID NO: 162978 - DNA, 19 bp, Homo sapiens
  siRNA target sequence for FLJ12892 (NM_022757.3,6343-6361).
ctagaagcactcctgaaaa

SEQ ID NO: 162979 - DNA, 19 bp, Homo sapiens
  siRNA target sequence for FLJ12892 (NM_022757.3,6369-6387).
ccactttctaagagactat

SEQ ID NO: 162980 - DNA, 19 bp, Homo sapiens
  siRNA target sequence for FLJ12892 (NM_022757.3,6639-6657).
ggcccatcaggttgtctta

SEQ ID NO: 162981 - DNA, 19 bp, Homo sapiens
  siRNA target sequence for FLJ12892 (NM_022757.3,6659-6677).
caacagccttcaagtgaaa

SEQ ID NO: 162982 - DNA, 19 bp, Homo sapiens
  siRNA target sequence for FLJ12892 (NM_022757.3,6731-6749).
gagcatctcttcgttttca

SEQ ID NO: 162983 - DNA, 19 bp, Homo sapiens
  siRNA target sequence for FLJ12892 (NM_022757.3,6752-6770).
gttcacttctcgtgatgaa

SEQ ID NO: 162984 - DNA, 19 bp, Homo sapiens
  siRNA target sequence for FLJ12892 (NM_022757.3,6755-6773).
cacttctcgtgatgaacaa

SEQ ID NO: 162985 - DNA, 19 bp, Homo sapiens
  siRNA target sequence for FLJ12892 (NM_022757.3,6757-6775).
cttctcgtgatgaacaaga

SEQ ID NO: 162986 - DNA, 19 bp, Homo sapiens
  siRNA target sequence for FLJ12892 (NM_022757.3,6794-6812).
ggcattagatgccaacata

SEQ ID NO: 162987 - DNA, 19 bp, Homo sapiens
  siRNA target sequence for FLJ12892 (NM_022757.3,6813-6831).
gctagactccagaagtctt

SEQ ID NO: 162988 - DNA, 19 bp, Homo sapiens
  siRNA target sequence for HEPH (NM_014799.2,946-964).
ccacacagcatttttccat

SEQ ID NO: 162989 - DNA, 19 bp, Homo sapiens
  siRNA target sequence for HEPH (NM_014799.2,1052-1070).
gaacctggtacctggttaa

SEQ ID NO: 162990 - DNA, 19 bp, Homo sapiens
  siRNA target sequence for HEPH (NM_014799.2,1115-1133).
ctctacaaggtcaagtctt

SEQ ID NO: 162991 - DNA, 19 bp, Homo sapiens
  siRNA target sequence for HEPH (NM_014799.2,1167-1185).
gcaaagttcgacagtactt

SEQ ID NO: 162992 - DNA, 19 bp, Homo sapiens
  siRNA target sequence for HEPH (NM_014799.2,1262-1280).
ccaggcagtatctcagata

SEQ ID NO: 162993 - DNA, 19 bp, Homo sapiens
  siRNA target sequence for HEPH (NM_014799.2,1266-1284).
gcagtatctcagataagtt

SEQ ID NO: 162994 - DNA, 19 bp, Homo sapiens
  siRNA target sequence for HEPH (NM_014799.2,1269-1287).
gtatctcagataagttttt

SEQ ID NO: 162995 - DNA, 19 bp, Homo sapiens
  siRNA target sequence for HEPH (NM_014799.2,1321-1339).
ctggaaagtgcgatatgaa

SEQ ID NO: 162996 - DNA, 19 bp, Homo sapiens
  siRNA target sequence for HEPH (NM_014799.2,1341-1359).
cctttcaagatgagacatt

SEQ ID NO: 162997 - DNA, 19 bp, Homo sapiens
  siRNA target sequence for HEPH (NM_014799.2,1437-1455).
ccattcaggtggtcttcta

SEQ ID NO: 162998 - DNA, 19 bp, Homo sapiens
  siRNA target sequence for HEPH (NM_014799.2,1486-1504).
gccccatggggtcttttat

SEQ ID NO: 162999 - DNA, 19 bp, Homo sapiens
  siRNA target sequence for HEPH (NM_014799.2,1494-1512).
gggtcttttatgagaaaga

SEQ ID NO: 163000 - DNA, 19 bp, Homo sapiens
  siRNA target sequence for HEPH (NM_014799.2,1559-1577).
gttgccaagccctttgaga

SEQ ID NO: 163001 - DNA, 19 bp, Homo sapiens
  siRNA target sequence for HEPH (NM_014799.2,1564-1582).
caagccctttgagaaagta

SEQ ID NO: 163002 - DNA, 19 bp, Homo sapiens
  siRNA target sequence for HEPH (NM_014799.2,1638-1656).
gtctcacttggatgtactt

SEQ ID NO: 163003 - DNA, 19 bp, Homo sapiens
  siRNA target sequence for HEPH (NM_014799.2,1640-1658).
ctcacttggatgtacttct

SEQ ID NO: 163004 - DNA, 19 bp, Homo sapiens
  siRNA target sequence for HEPH (NM_014799.2,1754-1772).
ggggtggataaagaattct

SEQ ID NO: 163005 - DNA, 19 bp, Homo sapiens
  siRNA target sequence for HEPH (NM_014799.2,2161-2179).
gatgagggcaatctataat

SEQ ID NO: 163006 - DNA, 19 bp, Homo sapiens
  siRNA target sequence for HEPH (NM_014799.2,2220-2238).
gctaccaagctgcaagaat

SEQ ID NO: 163007 - DNA, 19 bp, Homo sapiens
  siRNA target sequence for HEPH (NM_014799.2,2228-2246).
gctgcaagaatctactata

SEQ ID NO: 163008 - DNA, 19 bp, Homo sapiens
  siRNA target sequence for HEPH (NM_014799.2,2231-2249).
gcaagaatctactatatca

SEQ ID NO: 163009 - DNA, 19 bp, Homo sapiens
  siRNA target sequence for HEPH (NM_014799.2,2232-2250).
caagaatctactatatcat

SEQ ID NO: 163010 - DNA, 19 bp, Homo sapiens
  siRNA target sequence for HEPH (NM_014799.2,2242-2260).
ctatatcatggcagaagaa

SEQ ID NO: 163011 - DNA, 19 bp, Homo sapiens
  siRNA target sequence for HEPH (NM_014799.2,2258-2276).
gaagtagagtgggactatt

SEQ ID NO: 163012 - DNA, 19 bp, Homo sapiens
  siRNA target sequence for HEPH (NM_014799.2,2318-2336).
gagaaggacagttatggtt

SEQ ID NO: 163013 - DNA, 19 bp, Homo sapiens
  siRNA target sequence for HEPH (NM_014799.2,2387-2405).
gctgtattcagggaataca

SEQ ID NO: 163014 - DNA, 19 bp, Homo sapiens
  siRNA target sequence for HEPH (NM_014799.2,2464-2482).
cttgggtccacttatcaaa

SEQ ID NO: 163015 - DNA, 19 bp, Homo sapiens
  siRNA target sequence for HEPH (NM_014799.2,2501-2519).
ctgactgtggtattcaaga

SEQ ID NO: 163016 - DNA, 19 bp, Homo sapiens
  siRNA target sequence for HEPH (NM_014799.2,2549-2567).
gctcatggagtgctagaat

SEQ ID NO: 163017 - DNA, 19 bp, Homo sapiens
  siRNA target sequence for HEPH (NM_014799.2,2552-2570).
catggagtgctagaatcta

SEQ ID NO: 163018 - DNA, 19 bp, Homo sapiens
  siRNA target sequence for HEPH (NM_014799.2,2555-2573).
ggagtgctagaatctacta

SEQ ID NO: 163019 - DNA, 19 bp, Homo sapiens
  siRNA target sequence for HEPH (NM_014799.2,2598-2616).
ctggtgaggtggtcactta

SEQ ID NO: 163020 - DNA, 19 bp, Homo sapiens
  siRNA target sequence for HEPH (NM_014799.2,2601-2619).
gtgaggtggtcacttatca

SEQ ID NO: 163021 - DNA, 19 bp, Homo sapiens
  siRNA target sequence for HEPH (NM_014799.2,2642-2660).
ggccctgggcccaatgact

SEQ ID NO: 163022 - DNA, 19 bp, Homo sapiens
  siRNA target sequence for HEPH (NM_014799.2,2699-2717).
cccatcaaggacatgtata

SEQ ID NO: 163023 - DNA, 19 bp, Homo sapiens
  siRNA target sequence for HEPH (NM_014799.2,2785-2803).
catggatcgggaatttgca

SEQ ID NO: 163024 - DNA, 19 bp, Homo sapiens
  siRNA target sequence for HEPH (NM_014799.2,2934-2952).
caatcaatgggaaactcta

SEQ ID NO: 163025 - DNA, 19 bp, Homo sapiens
  siRNA target sequence for HEPH (NM_014799.2,3486-3504).
gcttcaagcttctgtcttt

SEQ ID NO: 163026 - DNA, 19 bp, Homo sapiens
  siRNA target sequence for HEPH (NM_138737.1,137-155).
gagccactcgagtctacta

SEQ ID NO: 163027 - DNA, 19 bp, Homo sapiens
  siRNA target sequence for HEPH (NM_138737.1,168-186).
ggatgtgcagtggaactat

SEQ ID NO: 163028 - DNA, 19 bp, Homo sapiens
  siRNA target sequence for HEPH (NM_138737.1,219-237).
gcctctggacagtgacata

SEQ ID NO: 163029 - DNA, 19 bp, Homo sapiens
  siRNA target sequence for HEPH (NM_138737.1,221-239).
ctctggacagtgacatagt

SEQ ID NO: 163030 - DNA, 19 bp, Homo sapiens
  siRNA target sequence for HEPH (NM_138737.1,238-256).
gtggcttccagcttcttaa

SEQ ID NO: 163031 - DNA, 19 bp, Homo sapiens
  siRNA target sequence for HEPH (NM_138737.1,388-406).
gtgggggatgtcattctta

SEQ ID NO: 163032 - DNA, 19 bp, Homo sapiens
  siRNA target sequence for HEPH (NM_138737.1,390-408).
gggggatgtcattcttatt

SEQ ID NO: 163033 - DNA, 19 bp, Homo sapiens
  siRNA target sequence for HEPH (NM_138737.1,424-442).
gccactcgtccctatacca

SEQ ID NO: 163034 - DNA, 19 bp, Homo sapiens
  siRNA target sequence for HEPH (NM_138737.1,425-443).
ccactcgtccctataccat

SEQ ID NO: 163035 - DNA, 19 bp, Homo sapiens
  siRNA target sequence for HEPH (NM_138737.1,615-633).
ctggatctaccattctcat

SEQ ID NO: 163036 - DNA, 19 bp, Homo sapiens
  siRNA target sequence for HEPH (NM_138737.1,621-639).
ctaccattctcatgtagat

SEQ ID NO: 163037 - DNA, 19 bp, Homo sapiens
  siRNA target sequence for HEPH (NM_138737.1,727-745).
caggatgtagaccatgatt

SEQ ID NO: 163038 - DNA, 19 bp, Homo sapiens
  siRNA target sequence for HEPH (NM_138737.1,777-795).
cctcagctggcatctcaat

SEQ ID NO: 163039 - DNA, 19 bp, Homo sapiens
  siRNA target sequence for HEPH (NM_138737.1,782-800).
gctggcatctcaatgagaa

SEQ ID NO: 163040 - DNA, 19 bp, Homo sapiens
  siRNA target sequence for HEPH (NM_138737.1,785-803).
ggcatctcaatgagaacat

SEQ ID NO: 163041 - DNA, 19 bp, Homo sapiens
  siRNA target sequence for HEPH (NM_138737.1,786-804).
gcatctcaatgagaacatt

SEQ ID NO: 163042 - DNA, 19 bp, Homo sapiens
  siRNA target sequence for HYAL4 (NM_012269.1,698-716).
cacttcatggctccttata

SEQ ID NO: 163043 - DNA, 19 bp, Homo sapiens
  siRNA target sequence for HYAL4 (NM_012269.1,700-718).
cttcatggctccttatatt

SEQ ID NO: 163044 - DNA, 19 bp, Homo sapiens
  siRNA target sequence for HYAL4 (NM_012269.1,750-768).
cctgctcgacttccaattt

SEQ ID NO: 163045 - DNA, 19 bp, Homo sapiens
  siRNA target sequence for HYAL4 (NM_012269.1,751-769).
ctgctcgacttccaattta

SEQ ID NO: 163046 - DNA, 19 bp, Homo sapiens
  siRNA target sequence for HYAL4 (NM_012269.1,754-772).
ctcgacttccaatttatca

SEQ ID NO: 163047 - DNA, 19 bp, Homo sapiens
  siRNA target sequence for HYAL4 (NM_012269.1,756-774).
cgacttccaatttatcaaa

SEQ ID NO: 163048 - DNA, 19 bp, Homo sapiens
  siRNA target sequence for HYAL4 (NM_012269.1,889-907).
gggggcaaaatgtcactat

SEQ ID NO: 163049 - DNA, 19 bp, Homo sapiens
  siRNA target sequence for HYAL4 (NM_012269.1,932-950).
ctatccgtggtatacatca

SEQ ID NO: 163050 - DNA, 19 bp, Homo sapiens
  siRNA target sequence for HYAL4 (NM_012269.1,970-988).
gaggtctcccacagaacat

SEQ ID NO: 163051 - DNA, 19 bp, Homo sapiens
  siRNA target sequence for HYAL4 (NM_012269.1,975-993).
ctcccacagaacataagtt

SEQ ID NO: 163052 - DNA, 19 bp, Homo sapiens
  siRNA target sequence for HYAL4 (NM_012269.1,986-1004).
cataagtttacaagtacat

SEQ ID NO: 163053 - DNA, 19 bp, Homo sapiens
  siRNA target sequence for HYAL4 (NM_012269.1,1008-1026).
gaaaaagctgaccaagata

SEQ ID NO: 163054 - DNA, 19 bp, Homo sapiens
  siRNA target sequence for HYAL4 (NM_012269.1,1020-1038).
caagatattaattattaca

SEQ ID NO: 163055 - DNA, 19 bp, Homo sapiens
  siRNA target sequence for HYAL4 (NM_012269.1,1055-1073).
cagtggacttgctgttata

SEQ ID NO: 163056 - DNA, 19 bp, Homo sapiens
  siRNA target sequence for HYAL4 (NM_012269.1,1059-1077).
ggacttgctgttatagatt

SEQ ID NO: 163057 - DNA, 19 bp, Homo sapiens
  siRNA target sequence for HYAL4 (NM_012269.1,1068-1086).
gttatagattgggaatatt

SEQ ID NO: 163058 - DNA, 19 bp, Homo sapiens
  siRNA target sequence for HYAL4 (NM_012269.1,1109-1127).
ctggaactcaaaagatgtt

SEQ ID NO: 163059 - DNA, 19 bp, Homo sapiens
  siRNA target sequence for HYAL4 (NM_012269.1,1157-1175).
cgatatgggaaagaatgta

SEQ ID NO: 163060 - DNA, 19 bp, Homo sapiens
  siRNA target sequence for HYAL4 (NM_012269.1,1177-1195).
cagctaccgatattgaata

SEQ ID NO: 163061 - DNA, 19 bp, Homo sapiens
  siRNA target sequence for HYAL4 (NM_012269.1,1179-1197).
gctaccgatattgaatatt

SEQ ID NO: 163062 - DNA, 19 bp, Homo sapiens
  siRNA target sequence for HYAL4 (NM_012269.1,1180-1198).
ctaccgatattgaatattt

SEQ ID NO: 163063 - DNA, 19 bp, Homo sapiens
  siRNA target sequence for HYAL4 (NM_012269.1,1278-1296).
ggcctttggggttattatt

SEQ ID NO: 163064 - DNA, 19 bp, Homo sapiens
  siRNA target sequence for HYAL4 (NM_012269.1,1303-1321).
ctgattgccacaattataa

SEQ ID NO: 163065 - DNA, 19 bp, Homo sapiens
  siRNA target sequence for HYAL4 (NM_012269.1,1310-1328).
ccacaattataacgtttat

SEQ ID NO: 163066 - DNA, 19 bp, Homo sapiens
  siRNA target sequence for HYAL4 (NM_012269.1,1514-1532).
gacatctcatgattatgct

SEQ ID NO: 163067 - DNA, 19 bp, Homo sapiens
  siRNA target sequence for HYAL4 (NM_012269.1,1536-1554).
cctgtatttgtctacacaa

SEQ ID NO: 163068 - DNA, 19 bp, Homo sapiens
  siRNA target sequence for HYAL4 (NM_012269.1,1586-1604).
cctttctaagcaagatcta

SEQ ID NO: 163069 - DNA, 19 bp, Homo sapiens
  siRNA target sequence for HYAL4 (NM_012269.1,1635-1653).
ggagctgcaggcattgtta

SEQ ID NO: 163070 - DNA, 19 bp, Homo sapiens
  siRNA target sequence for HYAL4 (NM_012269.1,1877-1895).
cggggagtttactgtgaaa

SEQ ID NO: 163071 - DNA, 19 bp, Homo sapiens
  siRNA target sequence for HYAL4 (NM_012269.1,1921-1939).
cagtgatggcagatacatt

SEQ ID NO: 163072 - DNA, 19 bp, Homo sapiens
  siRNA target sequence for HYAL4 (NM_012269.1,2065-2083).
gttatcgaagcattcagtt

SEQ ID NO: 163073 - DNA, 19 bp, Homo sapiens
  siRNA target sequence for LOX (NM_002317.3,652-670).
gctggctactcgacatcta

SEQ ID NO: 163074 - DNA, 19 bp, Homo sapiens
  siRNA target sequence for LOX (NM_002317.3,784-802).
ccttacaacccctacaagt

SEQ ID NO: 163075 - DNA, 19 bp, Homo sapiens
  siRNA target sequence for LOX (NM_002317.3,785-803).
cttacaacccctacaagta

SEQ ID NO: 163076 - DNA, 19 bp, Homo sapiens
  siRNA target sequence for LOX (NM_002317.3,806-824).
ctgacgacaacccttatta

SEQ ID NO: 163077 - DNA, 19 bp, Homo sapiens
  siRNA target sequence for LOX (NM_002317.3,808-826).
gacgacaacccttattaca

SEQ ID NO: 163078 - DNA, 19 bp, Homo sapiens
  siRNA target sequence for LOX (NM_002317.3,811-829).
gacaacccttattacaact

SEQ ID NO: 163079 - DNA, 19 bp, Homo sapiens
  siRNA target sequence for LOX (NM_002317.3,828-846).
ctactacgatacttatgaa

SEQ ID NO: 163080 - DNA, 19 bp, Homo sapiens
  siRNA target sequence for LOX (NM_002317.3,1028-1046).
cagatgtcagagattatga

SEQ ID NO: 163081 - DNA, 19 bp, Homo sapiens
  siRNA target sequence for LOX (NM_002317.3,1108-1126).
cccagccgaccaagatatt

SEQ ID NO: 163082 - DNA, 19 bp, Homo sapiens
  siRNA target sequence for LOX (NM_002317.3,1136-1154).
ggcacagttgtcatcaaca

SEQ ID NO: 163083 - DNA, 19 bp, Homo sapiens
  siRNA target sequence for LOX (NM_002317.3,1138-1156).
cacagttgtcatcaacatt

SEQ ID NO: 163084 - DNA, 19 bp, Homo sapiens
  siRNA target sequence for LOX (NM_002317.3,1142-1160).
gttgtcatcaacattacca

SEQ ID NO: 163085 - DNA, 19 bp, Homo sapiens
  siRNA target sequence for LOX (NM_002317.3,1272-1290).
ctaccacaggcgatttgca

SEQ ID NO: 163086 - DNA, 19 bp, Homo sapiens
  siRNA target sequence for LOX (NM_002317.3,1319-1337).
ctggctgttatgataccta

SEQ ID NO: 163087 - DNA, 19 bp, Homo sapiens
  siRNA target sequence for LOX (NM_002317.3,1356-1374).
ccagtggattgatattaca

SEQ ID NO: 163088 - DNA, 19 bp, Homo sapiens
  siRNA target sequence for LOX (NM_002317.3,1428-1446).
ggttcctgaatctgactat

SEQ ID NO: 163089 - DNA, 19 bp, Homo sapiens
  siRNA target sequence for LOX (NM_002317.3,1429-1447).
gttcctgaatctgactata

SEQ ID NO: 163090 - DNA, 19 bp, Homo sapiens
  siRNA target sequence for LOX (NM_002317.3,1432-1450).
cctgaatctgactatacca

SEQ ID NO: 163091 - DNA, 19 bp, Homo sapiens
  siRNA target sequence for LOX (NM_002317.3,1433-1451).
ctgaatctgactataccaa

SEQ ID NO: 163092 - DNA, 19 bp, Homo sapiens
  siRNA target sequence for LOX (NM_002317.3,1439-1457).
ctgactataccaacaatgt

SEQ ID NO: 163093 - DNA, 19 bp, Homo sapiens
  siRNA target sequence for LOXL1 (NM_005576.1,1421-1439).
ggtcccagaccccaactat

SEQ ID NO: 163094 - DNA, 19 bp, Homo sapiens
  siRNA target sequence for LOXL1 (NM_005576.1,1826-1844).
ctgctatgacacctacaat

SEQ ID NO: 163095 - DNA, 19 bp, Homo sapiens
  siRNA target sequence for LOXL1 (NM_005576.1,1913-1931).
cgtgaacccaaagtatatt

SEQ ID NO: 163096 - DNA, 19 bp, Homo sapiens
  siRNA target sequence for LOXL1 (NM_005576.1,1916-1934).
gaacccaaagtatattgtt

SEQ ID NO: 163097 - DNA, 19 bp, Homo sapiens
  siRNA target sequence for LOXL1 (NM_005576.1,1958-1976).
cgtggtgagatgcaacatt

SEQ ID NO: 163098 - DNA, 19 bp, Homo sapiens
  siRNA target sequence for LOXL2 (NM_002318.1,339-357).
cccattaccccgagtactt

SEQ ID NO: 163099 - DNA, 19 bp, Homo sapiens
  siRNA target sequence for LOXL2 (NM_002318.1,361-379).
gcaaccggctcctgagtat

SEQ ID NO: 163100 - DNA, 19 bp, Homo sapiens
  siRNA target sequence for LOXL2 (NM_002318.1,397-415).
cgccaacgtggccaagatt

SEQ ID NO: 163101 - DNA, 19 bp, Homo sapiens
  siRNA target sequence for LOXL2 (NM_002318.1,399-417).
ccaacgtggccaagattca

SEQ ID NO: 163102 - DNA, 19 bp, Homo sapiens
  siRNA target sequence for LOXL2 (NM_002318.1,459-477).
gggtggaggtgtactatga

SEQ ID NO: 163103 - DNA, 19 bp, Homo sapiens
  siRNA target sequence for LOXL2 (NM_002318.1,460-478).
ggtggaggtgtactatgat

SEQ ID NO: 163104 - DNA, 19 bp, Homo sapiens
  siRNA target sequence for LOXL2 (NM_002318.1,713-731).
gtggtgtgcagcgacaaaa

SEQ ID NO: 163105 - DNA, 19 bp, Homo sapiens
  siRNA target sequence for LOXL2 (NM_002318.1,716-734).
gtgtgcagcgacaaaagga

SEQ ID NO: 163106 - DNA, 19 bp, Homo sapiens
  siRNA target sequence for LOXL2 (NM_002318.1,718-736).
gtgcagcgacaaaaggatt

SEQ ID NO: 163107 - DNA, 19 bp, Homo sapiens
  siRNA target sequence for LOXL2 (NM_002318.1,738-756).
ctgggttcaaatttgacaa

SEQ ID NO: 163108 - DNA, 19 bp, Homo sapiens
  siRNA target sequence for LOXL2 (NM_002318.1,740-758).
gggttcaaatttgacaatt

SEQ ID NO: 163109 - DNA, 19 bp, Homo sapiens
  siRNA target sequence for LOXL2 (NM_002318.1,759-777).
cgttgatcaaccagataga

SEQ ID NO: 163110 - DNA, 19 bp, Homo sapiens
  siRNA target sequence for LOXL2 (NM_002318.1,907-925).
gcactggacggccaagaat

SEQ ID NO: 163111 - DNA, 19 bp, Homo sapiens
  siRNA target sequence for LOXL2 (NM_002318.1,908-926).
cactggacggccaagaatt

SEQ ID NO: 163112 - DNA, 19 bp, Homo sapiens
  siRNA target sequence for LOXL2 (NM_002318.1,931-949).
cgtggtctgcggcatgttt

SEQ ID NO: 163113 - DNA, 19 bp, Homo sapiens
  siRNA target sequence for LOXL2 (NM_002318.1,962-980).
gagaggacatacaatacca

SEQ ID NO: 163114 - DNA, 19 bp, Homo sapiens
  siRNA target sequence for LOXL2 (NM_002318.1,1097-1115).
gaccccatgaagaatgtca

SEQ ID NO: 163115 - DNA, 19 bp, Homo sapiens
  siRNA target sequence for LOXL2 (NM_002318.1,1436-1454).
ggcaatgagaagtccatta

SEQ ID NO: 163116 - DNA, 19 bp, Homo sapiens
  siRNA target sequence for LOXL2 (NM_002318.1,1442-1460).
gagaagtccattatagact

SEQ ID NO: 163117 - DNA, 19 bp, Homo sapiens
  siRNA target sequence for LOXL2 (NM_002318.1,2240-2258).
ggagacatccagaagaatt

SEQ ID NO: 163118 - DNA, 19 bp, Homo sapiens
  siRNA target sequence for LOXL2 (NM_002318.1,2372-2390).
ctgttccaggttgttatta

SEQ ID NO: 163119 - DNA, 19 bp, Homo sapiens
  siRNA target sequence for LOXL2 (NM_002318.1,2405-2423).
gttgcagaatccgattact

SEQ ID NO: 163120 - DNA, 19 bp, Homo sapiens
  siRNA target sequence for LOXL2 (NM_002318.1,2462-2480).
caccgcatctggatgtaca

SEQ ID NO: 163121 - DNA, 19 bp, Homo sapiens
  siRNA target sequence for LOXL2 (NM_002318.1,2531-2549).
cacttcagcgggctcttaa

SEQ ID NO: 163122 - DNA, 19 bp, Homo sapiens
  siRNA target sequence for LOXL3 (NM_032603.2,272-290).
gcaccatctgcgatgatga

SEQ ID NO: 163123 - DNA, 19 bp, Homo sapiens
  siRNA target sequence for LOXL3 (NM_032603.2,354-372).
gacccacagtgccaaatat

SEQ ID NO: 163124 - DNA, 19 bp, Homo sapiens
  siRNA target sequence for LOXL3 (NM_032603.2,389-407).
gcatctggctggacaactt

SEQ ID NO: 163125 - DNA, 19 bp, Homo sapiens
  siRNA target sequence for LOXL3 (NM_032603.2,424-442).
gagcagagtgtgactgaat

SEQ ID NO: 163126 - DNA, 19 bp, Homo sapiens
  siRNA target sequence for LOXL3 (NM_032603.2,426-444).
gcagagtgtgactgaatgt

SEQ ID NO: 163127 - DNA, 19 bp, Homo sapiens
  siRNA target sequence for LOXL3 (NM_032603.2,570-588).
ggaggaggtgcgaattcga

SEQ ID NO: 163128 - DNA, 19 bp, Homo sapiens
  siRNA target sequence for LOXL3 (NM_032603.2,843-861).
ctgttccctggagttctat

SEQ ID NO: 163129 - DNA, 19 bp, Homo sapiens
  siRNA target sequence for LOXL3 (NM_032603.2,1223-1241).
ggaagtgcccccacaagaa

SEQ ID NO: 163130 - DNA, 19 bp, Homo sapiens
  siRNA target sequence for LOXL3 (NM_032603.2,1287-1305).
gtgcaacctaccttacact

SEQ ID NO: 163131 - DNA, 19 bp, Homo sapiens
  siRNA target sequence for LOXL3 (NM_032603.2,1355-1373).
ggcgagtcgaggtgcaaat

SEQ ID NO: 163132 - DNA, 19 bp, Homo sapiens
  siRNA target sequence for LOXL3 (NM_032603.2,1356-1374).
gcgagtcgaggtgcaaata

SEQ ID NO: 163133 - DNA, 19 bp, Homo sapiens
  siRNA target sequence for LOXL3 (NM_032603.2,1911-1929).
ggacatcttcactcactat

SEQ ID NO: 163134 - DNA, 19 bp, Homo sapiens
  siRNA target sequence for LOXL3 (NM_032603.2,1914-1932).
catcttcactcactatgat

SEQ ID NO: 163135 - DNA, 19 bp, Homo sapiens
  siRNA target sequence for LOXL3 (NM_032603.2,2014-2032).
gtctccaagcggtatgagt

SEQ ID NO: 163136 - DNA, 19 bp, Homo sapiens
  siRNA target sequence for LOXL3 (NM_032603.2,2122-2140).
gtgaagccaggaaactaca

SEQ ID NO: 163137 - DNA, 19 bp, Homo sapiens
  siRNA target sequence for LOXL3 (NM_032603.2,2124-2142).
gaagccaggaaactacatt

SEQ ID NO: 163138 - DNA, 19 bp, Homo sapiens
  siRNA target sequence for LOXL3 (NM_032603.2,2173-2191).
gtagcagagagtgacttta

SEQ ID NO: 163139 - DNA, 19 bp, Homo sapiens
  siRNA target sequence for LOXL3 (NM_032603.2,2185-2203).
gactttaccaacaatgcaa

SEQ ID NO: 163140 - DNA, 19 bp, Homo sapiens
  siRNA target sequence for LOXL3 (NM_032603.2,2193-2211).
caacaatgcaatgaaatgt

SEQ ID NO: 163141 - DNA, 19 bp, Homo sapiens
  siRNA target sequence for LOXL3 (NM_032603.2,2280-2298).
ggccaacaggaggtttgaa

SEQ ID NO: 163142 - DNA, 19 bp, Homo sapiens
  siRNA target sequence for LOXL3 (NM_032603.2,2311-2329).
cagaccagcaaccagatta

SEQ ID NO: 163143 - DNA, 19 bp, Homo sapiens
  siRNA target sequence for LOXL4 (NM_032211.5,478-496).
ggaccagtgcgggtctaat

SEQ ID NO: 163144 - DNA, 19 bp, Homo sapiens
  siRNA target sequence for LOXL4 (NM_032211.5,792-810).
ctgtcgacagccactacta

SEQ ID NO: 163145 - DNA, 19 bp, Homo sapiens
  siRNA target sequence for LOXL4 (NM_032211.5,832-850).
gatgagggaccctaagtct

SEQ ID NO: 163146 - DNA, 19 bp, Homo sapiens
  siRNA target sequence for LOXL4 (NM_032211.5,1377-1395).
ggtgcaatgtccctaacat

SEQ ID NO: 163147 - DNA, 19 bp, Homo sapiens
  siRNA target sequence for LOXL4 (NM_032211.5,1490-1508).
gggagcgtgtgcagtgaaa

SEQ ID NO: 163148 - DNA, 19 bp, Homo sapiens
  siRNA target sequence for LOXL4 (NM_032211.5,1746-1764).
caccagacctggtgatgaa

SEQ ID NO: 163149 - DNA, 19 bp, Homo sapiens
  siRNA target sequence for LOXL4 (NM_032211.5,2167-2185).
cacctaccggcatgacatt

SEQ ID NO: 163150 - DNA, 19 bp, Homo sapiens
  siRNA target sequence for LOXL4 (NM_032211.5,2274-2292).
cagatttctccaacaatat

SEQ ID NO: 163151 - DNA, 19 bp, Homo sapiens
  siRNA target sequence for LOXL4 (NM_032211.5,2296-2314).
gcagtgccgctgcaagtat

SEQ ID NO: 163152 - DNA, 19 bp, Homo sapiens
  siRNA target sequence for LOXL4 (NM_032211.5,2299-2317).
gtgccgctgcaagtatgat

SEQ ID NO: 163153 - DNA, 19 bp, Homo sapiens
  siRNA target sequence for LOXL4 (NM_032211.5,2343-2361).
gccacacagggaattcata

SEQ ID NO: 163154 - DNA, 19 bp, Homo sapiens
  siRNA target sequence for MASS1 (NM_032119.1,125-143).
cctctgcatctttattagt

SEQ ID NO: 163155 - DNA, 19 bp, Homo sapiens
  siRNA target sequence for MASS1 (NM_032119.1,203-221).
ctggacaaactgaatttgt

SEQ ID NO: 163156 - DNA, 19 bp, Homo sapiens
  siRNA target sequence for MASS1 (NM_032119.1,242-260).
cagttattcgtcttatcat

SEQ ID NO: 163157 - DNA, 19 bp, Homo sapiens
  siRNA target sequence for MASS1 (NM_032119.1,271-289).
ggagagccagcaaatgtta

SEQ ID NO: 163158 - DNA, 19 bp, Homo sapiens
  siRNA target sequence for MASS1 (NM_032119.1,281-299).
caaatgttactgcaattgt

SEQ ID NO: 163159 - DNA, 19 bp, Homo sapiens
  siRNA target sequence for MASS1 (NM_032119.1,319-337).
gctggtgacttttttgaca

SEQ ID NO: 163160 - DNA, 19 bp, Homo sapiens
  siRNA target sequence for MASS1 (NM_032119.1,323-341).
gtgacttttttgacacata

SEQ ID NO: 163161 - DNA, 19 bp, Homo sapiens
  siRNA target sequence for MASS1 (NM_032119.1,361-379).
gccggagaaacaaacagaa

SEQ ID NO: 163162 - DNA, 19 bp, Homo sapiens
  siRNA target sequence for MASS1 (NM_032119.1,384-402).
gtacatagcagtatgtgat

SEQ ID NO: 163163 - DNA, 19 bp, Homo sapiens
  siRNA target sequence for MASS1 (NM_032119.1,478-496).
ggatggccaaggactgtta

SEQ ID NO: 163164 - DNA, 19 bp, Homo sapiens
  siRNA target sequence for MASS1 (NM_032119.1,482-500).
ggccaaggactgttactgt

SEQ ID NO: 163165 - DNA, 19 bp, Homo sapiens
  siRNA target sequence for MASS1 (NM_032119.1,612-630).
cagggaaaagggaacctat

SEQ ID NO: 163166 - DNA, 19 bp, Homo sapiens
  siRNA target sequence for MASS1 (NM_032119.1,632-650).
gaatggtcatggtgacttt

SEQ ID NO: 163167 - DNA, 19 bp, Homo sapiens
  siRNA target sequence for MASS1 (NM_032119.1,692-710).
gtccagttaaaggaaatat

SEQ ID NO: 163168 - DNA, 19 bp, Homo sapiens
  siRNA target sequence for MASS1 (NM_032119.1,694-712).
ccagttaaaggaaatatca

SEQ ID NO: 163169 - DNA, 19 bp, Homo sapiens
  siRNA target sequence for MASS1 (NM_032119.1,731-749).
caacagtaatttataactt

SEQ ID NO: 163170 - DNA, 19 bp, Homo sapiens
  siRNA target sequence for MASS1 (NM_032119.1,834-852).
cacctctaggaattccatt

SEQ ID NO: 163171 - DNA, 19 bp, Homo sapiens
  siRNA target sequence for MASS1 (NM_032119.1,885-903).
gagattccttcagagtatt

SEQ ID NO: 163172 - DNA, 19 bp, Homo sapiens
  siRNA target sequence for MASS1 (NM_032119.1,887-905).
gattccttcagagtattta

SEQ ID NO: 163173 - DNA, 19 bp, Homo sapiens
  siRNA target sequence for MASS1 (NM_032119.1,919-937).
gaagaccacatactcataa

SEQ ID NO: 163174 - DNA, 19 bp, Homo sapiens
  siRNA target sequence for MASS1 (NM_032119.1,960-978).
caacaatggaaatctgatt

SEQ ID NO: 163175 - DNA, 19 bp, Homo sapiens
  siRNA target sequence for MASS1 (NM_032119.1,985-1003).
gatgaatatgaggtttcaa

SEQ ID NO: 163176 - DNA, 19 bp, Homo sapiens
  siRNA target sequence for MASS1 (NM_032119.1,988-1006).
gaatatgaggtttcaatca

SEQ ID NO: 163177 - DNA, 19 bp, Homo sapiens
  siRNA target sequence for MASS1 (NM_032119.1,1080-1098).
cacaactgttgtttttcca

SEQ ID NO: 163178 - DNA, 19 bp, Homo sapiens
  siRNA target sequence for MASS1 (NM_032119.1,1096-1114).
ccaccttttattcatgaat

SEQ ID NO: 163179 - DNA, 19 bp, Homo sapiens
  siRNA target sequence for MASS1 (NM_032119.1,1122-1140).
gaaatttcaaatagttgat

SEQ ID NO: 163180 - DNA, 19 bp, Homo sapiens
  siRNA target sequence for MASS1 (NM_032119.1,1151-1169).
cggagattgctgaatcgtt

SEQ ID NO: 163181 - DNA, 19 bp, Homo sapiens
  siRNA target sequence for MASS1 (NM_032119.1,1159-1177).
gctgaatcgtttcacatta

SEQ ID NO: 163182 - DNA, 19 bp, Homo sapiens
  siRNA target sequence for MASS1 (NM_032119.1,1162-1180).
gaatcgtttcacattatgt

SEQ ID NO: 163183 - DNA, 19 bp, Homo sapiens
  siRNA target sequence for MASS1 (NM_032119.1,1228-1246).
gttgtacaagtcaccatta

SEQ ID NO: 163184 - DNA, 19 bp, Homo sapiens
  siRNA target sequence for MASS1 (NM_032119.1,1239-1257).
caccattaagccaaatgat

SEQ ID NO: 163185 - DNA, 19 bp, Homo sapiens
  siRNA target sequence for MASS1 (NM_032119.1,1241-1259).
ccattaagccaaatgataa

SEQ ID NO: 163186 - DNA, 19 bp, Homo sapiens
  siRNA target sequence for MASS1 (NM_032119.1,1248-1266).
gccaaatgataaaccttat

SEQ ID NO: 163187 - DNA, 19 bp, Homo sapiens
  siRNA target sequence for MASS1 (NM_032119.1,1261-1279).
ccttatggagtcctttcat

SEQ ID NO: 163188 - DNA, 19 bp, Homo sapiens
  siRNA target sequence for MASS1 (NM_032119.1,1302-1320).
gacagttataattgatgaa

SEQ ID NO: 163189 - DNA, 19 bp, Homo sapiens
  siRNA target sequence for MASS1 (NM_032119.1,1306-1324).
gttataattgatgaagata

SEQ ID NO: 163190 - DNA, 19 bp, Homo sapiens
  siRNA target sequence for MASS1 (NM_032119.1,1478-1496).
ggcagatgttggcaacaat

SEQ ID NO: 163191 - DNA, 19 bp, Homo sapiens
  siRNA target sequence for MASS1 (NM_032119.1,1479-1497).
gcagatgttggcaacaatt

SEQ ID NO: 163192 - DNA, 19 bp, Homo sapiens
  siRNA target sequence for MASS1 (NM_032119.1,1535-1553).
cagaagcttatctacttca

SEQ ID NO: 163193 - DNA, 19 bp, Homo sapiens
  siRNA target sequence for MASS1 (NM_032119.1,1541-1559).
cttatctacttcaaattct

SEQ ID NO: 163194 - DNA, 19 bp, Homo sapiens
  siRNA target sequence for MASS1 (NM_032119.1,1592-1610).
gcgagccagcggagctttt

SEQ ID NO: 163195 - DNA, 19 bp, Homo sapiens
  siRNA target sequence for MASS1 (NM_032119.1,1594-1612).
gagccagcggagcttttgt

SEQ ID NO: 163196 - DNA, 19 bp, Homo sapiens
  siRNA target sequence for MASS1 (NM_032119.1,1597-1615).
ccagcggagcttttgttct

SEQ ID NO: 163197 - DNA, 19 bp, Homo sapiens
  siRNA target sequence for MASS1 (NM_032119.1,1598-1616).
cagcggagcttttgttcta

SEQ ID NO: 163198 - DNA, 19 bp, Homo sapiens
  siRNA target sequence for MASS1 (NM_032119.1,1600-1618).
gcggagcttttgttctaca

SEQ ID NO: 163199 - DNA, 19 bp, Homo sapiens
  siRNA target sequence for MASS1 (NM_032119.1,1614-1632).
ctacattcaggatagtgat

SEQ ID NO: 163200 - DNA, 19 bp, Homo sapiens
  siRNA target sequence for MASS1 (NM_032119.1,1633-1651).
gatgtctatggcctaataa

SEQ ID NO: 163201 - DNA, 19 bp, Homo sapiens
  siRNA target sequence for MASS1 (NM_032119.1,1636-1654).
gtctatggcctaataacat

SEQ ID NO: 163202 - DNA, 19 bp, Homo sapiens
  siRNA target sequence for MASS1 (NM_032119.1,1661-1679).
ctatggaaaaccagaagat

SEQ ID NO: 163203 - DNA, 19 bp, Homo sapiens
  siRNA target sequence for MASS1 (NM_032119.1,1699-1717).
cgatacttatccttgagtt

SEQ ID NO: 163204 - DNA, 19 bp, Homo sapiens
  siRNA target sequence for MASS1 (NM_032119.1,1700-1718).
gatacttatccttgagttt

SEQ ID NO: 163205 - DNA, 19 bp, Homo sapiens
  siRNA target sequence for MASS1 (NM_032119.1,1704-1722).
cttatccttgagttttaca

SEQ ID NO: 163206 - DNA, 19 bp, Homo sapiens
  siRNA target sequence for MASS1 (NM_032119.1,1744-1762).
gatgtgaggttgctttatt

SEQ ID NO: 163207 - DNA, 19 bp, Homo sapiens
  siRNA target sequence for MASS1 (NM_032119.1,1749-1767).
gaggttgctttattctgta

SEQ ID NO: 163208 - DNA, 19 bp, Homo sapiens
  siRNA target sequence for MASS1 (NM_032119.1,1752-1770).
gttgctttattctgtactt

SEQ ID NO: 163209 - DNA, 19 bp, Homo sapiens
  siRNA target sequence for MASS1 (NM_032119.1,1872-1890).
cactacaaaattaccaata

SEQ ID NO: 163210 - DNA, 19 bp, Homo sapiens
  siRNA target sequence for MASS1 (NM_032119.1,1939-1957).
gaaactgtggagttgttaa

SEQ ID NO: 163211 - DNA, 19 bp, Homo sapiens
  siRNA target sequence for MASS1 (NM_032119.1,1945-1963).
gtggagttgttaaacataa

SEQ ID NO: 163212 - DNA, 19 bp, Homo sapiens
  siRNA target sequence for MASS1 (NM_032119.1,1947-1965).
ggagttgttaaacataatt

SEQ ID NO: 163213 - DNA, 19 bp, Homo sapiens
  siRNA target sequence for MASS1 (NM_032119.1,1950-1968).
gttgttaaacataattcct

SEQ ID NO: 163214 - DNA, 19 bp, Homo sapiens
  siRNA target sequence for MASS1 (NM_032119.1,2101-2119).
gctgctgaagtggtataca

SEQ ID NO: 163215 - DNA, 19 bp, Homo sapiens
  siRNA target sequence for MASS1 (NM_032119.1,2102-2120).
ctgctgaagtggtatacat

SEQ ID NO: 163216 - DNA, 19 bp, Homo sapiens
  siRNA target sequence for MASS1 (NM_032119.1,2112-2130).
ggtatacattcccttacat

SEQ ID NO: 163217 - DNA, 19 bp, Homo sapiens
  siRNA target sequence for MASS1 (NM_032119.1,2172-2190).
gaagccctctggctttaat

SEQ ID NO: 163218 - DNA, 19 bp, Homo sapiens
  siRNA target sequence for MASS1 (NM_032119.1,2175-2193).
gccctctggctttaattca

SEQ ID NO: 163219 - DNA, 19 bp, Homo sapiens
  siRNA target sequence for MASS1 (NM_032119.1,2176-2194).
ccctctggctttaattcaa

SEQ ID NO: 163220 - DNA, 19 bp, Homo sapiens
  siRNA target sequence for MASS1 (NM_032119.1,2198-2216).
cagtgaccccggatgatat

SEQ ID NO: 163221 - DNA, 19 bp, Homo sapiens
  siRNA target sequence for MASS1 (NM_032119.1,2264-2282).
caacaatcaacattactat

SEQ ID NO: 163222 - DNA, 19 bp, Homo sapiens
  siRNA target sequence for MASS1 (NM_032119.1,2356-2374).
gtgctgaaatctggatata

SEQ ID NO: 163223 - DNA, 19 bp, Homo sapiens
  siRNA target sequence for MASS1 (NM_032119.1,2375-2393).
ctagccgtgacctaattat

SEQ ID NO: 163224 - DNA, 19 bp, Homo sapiens
  siRNA target sequence for MASS1 (NM_032119.1,2378-2396).
gccgtgacctaattatttt

SEQ ID NO: 163225 - DNA, 19 bp, Homo sapiens
  siRNA target sequence for MASS1 (NM_032119.1,2415-2433).
gggagtttttgaattttct

SEQ ID NO: 163226 - DNA, 19 bp, Homo sapiens
  siRNA target sequence for MASS1 (NM_032119.1,2441-2459).
ccagaggaccctatgttat

SEQ ID NO: 163227 - DNA, 19 bp, Homo sapiens
  siRNA target sequence for MASS1 (NM_032119.1,2442-2460).
cagaggaccctatgttata

SEQ ID NO: 163228 - DNA, 19 bp, Homo sapiens
  siRNA target sequence for MASS1 (NM_032119.1,2501-2519).
gggggtcccttgttaagca

SEQ ID NO: 163229 - DNA, 19 bp, Homo sapiens
  siRNA target sequence for MASS1 (NM_032119.1,2507-2525).
cccttgttaagcagtttct

SEQ ID NO: 163230 - DNA, 19 bp, Homo sapiens
  siRNA target sequence for MASS1 (NM_032119.1,2508-2526).
ccttgttaagcagtttcta

SEQ ID NO: 163231 - DNA, 19 bp, Homo sapiens
  siRNA target sequence for MASS1 (NM_032119.1,2532-2550).
ccgagtagagccaagagat

SEQ ID NO: 163232 - DNA, 19 bp, Homo sapiens
  siRNA target sequence for MASS1 (NM_032119.1,2546-2564).
gagatagcaatgaattcta

SEQ ID NO: 163233 - DNA, 19 bp, Homo sapiens
  siRNA target sequence for MASS1 (NM_032119.1,2567-2585).
gaaacacgggagtactaga

SEQ ID NO: 163234 - DNA, 19 bp, Homo sapiens
  siRNA target sequence for MASS1 (NM_032119.1,2571-2589).
cacgggagtactagaattt

SEQ ID NO: 163235 - DNA, 19 bp, Homo sapiens
  siRNA target sequence for MASS1 (NM_032119.1,2594-2612).
ctggagaaagggagatagt

SEQ ID NO: 163236 - DNA, 19 bp, Homo sapiens
  siRNA target sequence for MASS1 (NM_032119.1,2645-2663).
cagagttggatgaacacta

SEQ ID NO: 163237 - DNA, 19 bp, Homo sapiens
  siRNA target sequence for MASS1 (NM_032119.1,2711-2729).
gtgccaccattgtcaatat

SEQ ID NO: 163238 - DNA, 19 bp, Homo sapiens
  siRNA target sequence for MASS1 (NM_032119.1,2722-2740).
gtcaatataacgattctga

SEQ ID NO: 163239 - DNA, 19 bp, Homo sapiens
  siRNA target sequence for MASS1 (NM_032119.1,2758-2776).
ggcattatagaatttgttt

SEQ ID NO: 163240 - DNA, 19 bp, Homo sapiens
  siRNA target sequence for MASS1 (NM_032119.1,2857-2875).
ggcaactttggtgatgtta

SEQ ID NO: 163241 - DNA, 19 bp, Homo sapiens
  siRNA target sequence for MASS1 (NM_032119.1,2859-2877).
caactttggtgatgttagt

SEQ ID NO: 163242 - DNA, 19 bp, Homo sapiens
  siRNA target sequence for MASS1 (NM_032119.1,2866-2884).
ggtgatgttagtgtatcat

SEQ ID NO: 163243 - DNA, 19 bp, Homo sapiens
  siRNA target sequence for MASS1 (NM_032119.1,2886-2904).
ggtggttagtccagacttt

SEQ ID NO: 163244 - DNA, 19 bp, Homo sapiens
  siRNA target sequence for MASS1 (NM_032119.1,2887-2905).
gtggttagtccagacttta

SEQ ID NO: 163245 - DNA, 19 bp, Homo sapiens
  siRNA target sequence for MASS1 (NM_032119.1,2889-2907).
ggttagtccagactttaca

SEQ ID NO: 163246 - DNA, 19 bp, Homo sapiens
  siRNA target sequence for MASS1 (NM_032119.1,3150-3168).
gactgccaactttacagtt

SEQ ID NO: 163247 - DNA, 19 bp, Homo sapiens
  siRNA target sequence for MASS1 (NM_032119.1,3171-3189).
cagaaatggatctgttgat

SEQ ID NO: 163248 - DNA, 19 bp, Homo sapiens
  siRNA target sequence for MASS1 (NM_032119.1,3269-3287).
gagaaacgctcatttttga

SEQ ID NO: 163249 - DNA, 19 bp, Homo sapiens
  siRNA target sequence for MASS1 (NM_032119.1,3347-3365).
cagatgagcccttttatat

SEQ ID NO: 163250 - DNA, 19 bp, Homo sapiens
  siRNA target sequence for MASS1 (NM_032119.1,3349-3367).
gatgagcccttttatataa

SEQ ID NO: 163251 - DNA, 19 bp, Homo sapiens
  siRNA target sequence for MASS1 (NM_032119.1,3410-3428).
gagtagctacagtaataat

SEQ ID NO: 163252 - DNA, 19 bp, Homo sapiens
  siRNA target sequence for MASS1 (NM_032119.1,3519-3537).
gaggcaccgaggatacttt

SEQ ID NO: 163253 - DNA, 19 bp, Homo sapiens
  siRNA target sequence for MASS1 (NM_032119.1,3529-3547).
ggatactttggtagtgttt

SEQ ID NO: 163254 - DNA, 19 bp, Homo sapiens
  siRNA target sequence for MASS1 (NM_032119.1,3538-3556).
ggtagtgtttctgtatctt

SEQ ID NO: 163255 - DNA, 19 bp, Homo sapiens
  siRNA target sequence for MASS1 (NM_032119.1,3561-3579).
gctctttcagaatgattct

SEQ ID NO: 163256 - DNA, 19 bp, Homo sapiens
  siRNA target sequence for MASS1 (NM_032119.1,3592-3610).
gggcaggagttctatgaaa

SEQ ID NO: 163257 - DNA, 19 bp, Homo sapiens
  siRNA target sequence for MASS1 (NM_032119.1,3597-3615).
ggagttctatgaaacttca

SEQ ID NO: 163258 - DNA, 19 bp, Homo sapiens
  siRNA target sequence for MASS1 (NM_032119.1,3653-3671).
caatcattctccatgcttt

SEQ ID NO: 163259 - DNA, 19 bp, Homo sapiens
  siRNA target sequence for MASS1 (NM_032119.1,3657-3675).
cattctccatgcttttcca

SEQ ID NO: 163260 - DNA, 19 bp, Homo sapiens
  siRNA target sequence for MASS1 (NM_032119.1,3676-3694).
gataaaattcctgaattca

SEQ ID NO: 163261 - DNA, 19 bp, Homo sapiens
  siRNA target sequence for MASS1 (NM_032119.1,3685-3703).
cctgaattcaatgaatttt

SEQ ID NO: 163262 - DNA, 19 bp, Homo sapiens
  siRNA target sequence for MASS1 (NM_032119.1,3825-3843).
cttggatccagagtgttta

SEQ ID NO: 163263 - DNA, 19 bp, Homo sapiens
  siRNA target sequence for MASS1 (NM_032119.1,3877-3895).
gatgatatgtcttatatta

SEQ ID NO: 163264 - DNA, 19 bp, Homo sapiens
  siRNA target sequence for MASS1 (NM_032119.1,3880-3898).
gatatgtcttatattacca

SEQ ID NO: 163265 - DNA, 19 bp, Homo sapiens
  siRNA target sequence for MASS1 (NM_032119.1,3921-3939).
gggtgtgtttggtgatgta

SEQ ID NO: 163266 - DNA, 19 bp, Homo sapiens
  siRNA target sequence for MASS1 (NM_032119.1,3984-4002).
gccaccaatgatagatttt

SEQ ID NO: 163267 - DNA, 19 bp, Homo sapiens
  siRNA target sequence for MASS1 (NM_032119.1,4020-4038).
ccccaccaccgtgcattta

SEQ ID NO: 163268 - DNA, 19 bp, Homo sapiens
  siRNA target sequence for MASS1 (NM_032119.1,4022-4040).
ccaccaccgtgcatttaca

SEQ ID NO: 163269 - DNA, 19 bp, Homo sapiens
  siRNA target sequence for MASS1 (NM_032119.1,4025-4043).
ccaccgtgcatttacaaca

SEQ ID NO: 163270 - DNA, 19 bp, Homo sapiens
  siRNA target sequence for MASS1 (NM_032119.1,4066-4084).
ggaacggatgctttgtact

SEQ ID NO: 163271 - DNA, 19 bp, Homo sapiens
  siRNA target sequence for MASS1 (NM_032119.1,4067-4085).
gaacggatgctttgtactt

SEQ ID NO: 163272 - DNA, 19 bp, Homo sapiens
  siRNA target sequence for MASS1 (NM_032119.1,4148-4166).
caattgccaactttacatt

SEQ ID NO: 163273 - DNA, 19 bp, Homo sapiens
  siRNA target sequence for MASS1 (NM_032119.1,4182-4200).
gcccaatgccaatacgaat

SEQ ID NO: 163274 - DNA, 19 bp, Homo sapiens
  siRNA target sequence for MASS1 (NM_032119.1,4190-4208).
ccaatacgaatggattcat

SEQ ID NO: 163275 - DNA, 19 bp, Homo sapiens
  siRNA target sequence for MASS1 (NM_032119.1,4236-4254).
catctactacggggtaaaa

SEQ ID NO: 163276 - DNA, 19 bp, Homo sapiens
  siRNA target sequence for MASS1 (NM_032119.1,4239-4257).
ctactacggggtaaaaata

SEQ ID NO: 163277 - DNA, 19 bp, Homo sapiens
  siRNA target sequence for MASS1 (NM_032119.1,4242-4260).
ctacggggtaaaaatacaa

SEQ ID NO: 163278 - DNA, 19 bp, Homo sapiens
  siRNA target sequence for MASS1 (NM_032119.1,4276-4294).
gtgacactttcccttcatt

SEQ ID NO: 163279 - DNA, 19 bp, Homo sapiens
  siRNA target sequence for MASS1 (NM_032119.1,4306-4324).
ggttccaatgctacataca

SEQ ID NO: 163280 - DNA, 19 bp, Homo sapiens
  siRNA target sequence for MASS1 (NM_032119.1,4328-4346).
ccaagacaacagtcatgaa

SEQ ID NO: 163281 - DNA, 19 bp, Homo sapiens
  siRNA target sequence for MASS1 (NM_032119.1,4389-4407).
ggaggatggtataatcgaa

SEQ ID NO: 163282 - DNA, 19 bp, Homo sapiens
  siRNA target sequence for MASS1 (NM_032119.1,4390-4408).
gaggatggtataatcgaat

SEQ ID NO: 163283 - DNA, 19 bp, Homo sapiens
  siRNA target sequence for MASS1 (NM_032119.1,4393-4411).
gatggtataatcgaattct

SEQ ID NO: 163284 - DNA, 19 bp, Homo sapiens
  siRNA target sequence for MASS1 (NM_032119.1,4410-4428).
ctacctggatggaaatgca

SEQ ID NO: 163285 - DNA, 19 bp, Homo sapiens
  siRNA target sequence for MASS1 (NM_032119.1,4427-4445).
caatgcccaggggaatcaa

SEQ ID NO: 163286 - DNA, 19 bp, Homo sapiens
  siRNA target sequence for MASS1 (NM_032119.1,4452-4470).
gaaaggagaagccattact

SEQ ID NO: 163287 - DNA, 19 bp, Homo sapiens
  siRNA target sequence for MASS1 (NM_032119.1,4471-4489).
gacggtcctgggatactga

SEQ ID NO: 163288 - DNA, 19 bp, Homo sapiens
  siRNA target sequence for MASS1 (NM_032119.1,4564-4582).
ctgacgcttgaagaaattt

SEQ ID NO: 163289 - DNA, 19 bp, Homo sapiens
  siRNA target sequence for MASS1 (NM_032119.1,4566-4584).
gacgcttgaagaaatttat

SEQ ID NO: 163290 - DNA, 19 bp, Homo sapiens
  siRNA target sequence for MASS1 (NM_032119.1,4591-4609).
catgccatgcccgcaaaaa

SEQ ID NO: 163291 - DNA, 19 bp, Homo sapiens
  siRNA target sequence for MASS1 (NM_032119.1,4595-4613).
ccatgcccgcaaaaagtga

SEQ ID NO: 163292 - DNA, 19 bp, Homo sapiens
  siRNA target sequence for MASS1 (NM_032119.1,4596-4614).
catgcccgcaaaaagtgat

SEQ ID NO: 163293 - DNA, 19 bp, Homo sapiens
  siRNA target sequence for MASS1 (NM_032119.1,4599-4617).
gcccgcaaaaagtgattta

SEQ ID NO: 163294 - DNA, 19 bp, Homo sapiens
  siRNA target sequence for MASS1 (NM_032119.1,4601-4619).
ccgcaaaaagtgatttaca

SEQ ID NO: 163295 - DNA, 19 bp, Homo sapiens
  siRNA target sequence for MASS1 (NM_032119.1,4750-4768).
gctcgtatttcggaagaaa

SEQ ID NO: 163296 - DNA, 19 bp, Homo sapiens
  siRNA target sequence for MASS1 (NM_032119.1,4751-4769).
ctcgtatttcggaagaaaa

SEQ ID NO: 163297 - DNA, 19 bp, Homo sapiens
  siRNA target sequence for MASS1 (NM_032119.1,4753-4771).
cgtatttcggaagaaaata

SEQ ID NO: 163298 - DNA, 19 bp, Homo sapiens
  siRNA target sequence for MASS1 (NM_032119.1,4823-4841).
gtttcacaggagcttgtat

SEQ ID NO: 163299 - DNA, 19 bp, Homo sapiens
  siRNA target sequence for MASS1 (NM_032119.1,4827-4845).
cacaggagcttgtatacca

SEQ ID NO: 163300 - DNA, 19 bp, Homo sapiens
  siRNA target sequence for MASS1 (NM_032119.1,4860-4878).
gggatcaaccatttcttgt

SEQ ID NO: 163301 - DNA, 19 bp, Homo sapiens
  siRNA target sequence for MASS1 (NM_032119.1,4893-4911).
cagaggagctctggattat

SEQ ID NO: 163302 - DNA, 19 bp, Homo sapiens
  siRNA target sequence for MASS1 (NM_032119.1,4895-4913).
gaggagctctggattatgt

SEQ ID NO: 163303 - DNA, 19 bp, Homo sapiens
  siRNA target sequence for MASS1 (NM_032119.1,4963-4981).
cttgttgatgactttgcta

SEQ ID NO: 163304 - DNA, 19 bp, Homo sapiens
  siRNA target sequence for MASS1 (NM_032119.1,4979-4997).
ctaatgccagtggaactat

SEQ ID NO: 163305 - DNA, 19 bp, Homo sapiens
  siRNA target sequence for MASS1 (NM_032119.1,4984-5002).
gccagtggaactattacat

SEQ ID NO: 163306 - DNA, 19 bp, Homo sapiens
  siRNA target sequence for MASS1 (NM_032119.1,5018-5036).
gatcagaggttctgaatat

SEQ ID NO: 163307 - DNA, 19 bp, Homo sapiens
  siRNA target sequence for MASS1 (NM_032119.1,5031-5049).
gaatatatatgttcttgat

SEQ ID NO: 163308 - DNA, 19 bp, Homo sapiens
  siRNA target sequence for MASS1 (NM_032119.1,5085-5103).
gacattggtttctgcaatt

SEQ ID NO: 163309 - DNA, 19 bp, Homo sapiens
  siRNA target sequence for MASS1 (NM_032119.1,5147-5165).
gcatagatcctgaaaagga

SEQ ID NO: 163310 - DNA, 19 bp, Homo sapiens
  siRNA target sequence for MASS1 (NM_032119.1,5169-5187).
gactgatatcaccatcaaa

SEQ ID NO: 163311 - DNA, 19 bp, Homo sapiens
  siRNA target sequence for MASS1 (NM_032119.1,5173-5191).
gatatcaccatcaaagcta

SEQ ID NO: 163312 - DNA, 19 bp, Homo sapiens
  siRNA target sequence for MASS1 (NM_032119.1,5178-5196).
caccatcaaagctagtgat

SEQ ID NO: 163313 - DNA, 19 bp, Homo sapiens
  siRNA target sequence for MASS1 (NM_032119.1,5181-5199).
catcaaagctagtgatcat

SEQ ID NO: 163314 - DNA, 19 bp, Homo sapiens
  siRNA target sequence for MASS1 (NM_032119.1,5271-5289).
cagcgttccacatatcact

SEQ ID NO: 163315 - DNA, 19 bp, Homo sapiens
  siRNA target sequence for MASS1 (NM_032119.1,5306-5324).
gagaaatcaggttattggt

SEQ ID NO: 163316 - DNA, 19 bp, Homo sapiens
  siRNA target sequence for MASS1 (NM_032119.1,5352-5370).
ggtgactgcggaatttaga

SEQ ID NO: 163317 - DNA, 19 bp, Homo sapiens
  siRNA target sequence for MASS1 (NM_032119.1,5355-5373).
gactgcggaatttagaaca

SEQ ID NO: 163318 - DNA, 19 bp, Homo sapiens
  siRNA target sequence for MASS1 (NM_032119.1,5376-5394).
gtccttgacagcattcagt

SEQ ID NO: 163319 - DNA, 19 bp, Homo sapiens
  siRNA target sequence for MASS1 (NM_032119.1,5483-5501).
ctattcctgaactggaaaa

SEQ ID NO: 163320 - DNA, 19 bp, Homo sapiens
  siRNA target sequence for MASS1 (NM_032119.1,5536-5554).
ggagtagctgaactcttta

SEQ ID NO: 163321 - DNA, 19 bp, Homo sapiens
  siRNA target sequence for MASS1 (NM_032119.1,5598-5616).
ccttccaactattcacaaa

SEQ ID NO: 163322 - DNA, 19 bp, Homo sapiens
  siRNA target sequence for MASS1 (NM_032119.1,5640-5658).
ccaaattctagtgacaatt

SEQ ID NO: 163323 - DNA, 19 bp, Homo sapiens
  siRNA target sequence for MASS1 (NM_032119.1,5670-5688).
ccacgctcatggcgtattt

SEQ ID NO: 163324 - DNA, 19 bp, Homo sapiens
  siRNA target sequence for MASS1 (NM_032119.1,5673-5691).
cgctcatggcgtatttgaa

SEQ ID NO: 163325 - DNA, 19 bp, Homo sapiens
  siRNA target sequence for MASS1 (NM_032119.1,5674-5692).
gctcatggcgtatttgaat

SEQ ID NO: 163326 - DNA, 19 bp, Homo sapiens
  siRNA target sequence for MASS1 (NM_032119.1,5677-5695).
catggcgtatttgaattta

SEQ ID NO: 163327 - DNA, 19 bp, Homo sapiens
  siRNA target sequence for MASS1 (NM_032119.1,5696-5714).
gccctgagtcactctttgt

SEQ ID NO: 163328 - DNA, 19 bp, Homo sapiens
  siRNA target sequence for MASS1 (NM_032119.1,5728-5746).
ccagaagatgggtatagca

SEQ ID NO: 163329 - DNA, 19 bp, Homo sapiens
  siRNA target sequence for MASS1 (NM_032119.1,5737-5755).
gggtatagcactgttacat

SEQ ID NO: 163330 - DNA, 19 bp, Homo sapiens
  siRNA target sequence for MASS1 (NM_032119.1,5738-5756).
ggtatagcactgttacatt

SEQ ID NO: 163331 - DNA, 19 bp, Homo sapiens
  siRNA target sequence for MASS1 (NM_032119.1,5739-5757).
gtatagcactgttacatta

SEQ ID NO: 163332 - DNA, 19 bp, Homo sapiens
  siRNA target sequence for MASS1 (NM_032119.1,5745-5763).
cactgttacattaaatgtt

SEQ ID NO: 163333 - DNA, 19 bp, Homo sapiens
  siRNA target sequence for MASS1 (NM_032119.1,5795-5813).
ctttgcattggaacataga

SEQ ID NO: 163334 - DNA, 19 bp, Homo sapiens
  siRNA target sequence for MASS1 (NM_032119.1,5870-5888).
ggcagacgagcgccaatat

SEQ ID NO: 163335 - DNA, 19 bp, Homo sapiens
  siRNA target sequence for MASS1 (NM_032119.1,5872-5890).
cagacgagcgccaatatca

SEQ ID NO: 163336 - DNA, 19 bp, Homo sapiens
  siRNA target sequence for MASS1 (NM_032119.1,5874-5892).
gacgagcgccaatatcact

SEQ ID NO: 163337 - DNA, 19 bp, Homo sapiens
  siRNA target sequence for MASS1 (NM_032119.1,5966-5984).
gttctttgggagctcatat

SEQ ID NO: 163338 - DNA, 19 bp, Homo sapiens
  siRNA target sequence for MASS1 (NM_032119.1,5969-5987).
ctttgggagctcatattaa

SEQ ID NO: 163339 - DNA, 19 bp, Homo sapiens
  siRNA target sequence for MASS1 (NM_032119.1,5980-5998).
catattaatgccacgttaa

SEQ ID NO: 163340 - DNA, 19 bp, Homo sapiens
  siRNA target sequence for MASS1 (NM_032119.1,6016-6034).
gatccatatgggatattca

SEQ ID NO: 163341 - DNA, 19 bp, Homo sapiens
  siRNA target sequence for MASS1 (NM_032119.1,6079-6097).
cagaacatcacactatcaa

SEQ ID NO: 163342 - DNA, 19 bp, Homo sapiens
  siRNA target sequence for MASS1 (NM_032119.1,6089-6107).
cactatcaataataaggtt

SEQ ID NO: 163343 - DNA, 19 bp, Homo sapiens
  siRNA target sequence for MASS1 (NM_032119.1,6137-6155).
catatgcaacactagatga

SEQ ID NO: 163344 - DNA, 19 bp, Homo sapiens
  siRNA target sequence for MASS1 (NM_032119.1,6143-6161).
caacactagatgatatgga

SEQ ID NO: 163345 - DNA, 19 bp, Homo sapiens
  siRNA target sequence for MASS1 (NM_032119.1,6236-6254).
ctctttttggagctaatca

SEQ ID NO: 163346 - DNA, 19 bp, Homo sapiens
  siRNA target sequence for MASS1 (NM_032119.1,6257-6275).
gtgaggcaacaatagctat

SEQ ID NO: 163347 - DNA, 19 bp, Homo sapiens
  siRNA target sequence for MASS1 (NM_032119.1,6262-6280).
gcaacaatagctatttcaa

SEQ ID NO: 163348 - DNA, 19 bp, Homo sapiens
  siRNA target sequence for MASS1 (NM_032119.1,6305-6323).
ggtccgaatctgtctttat

SEQ ID NO: 163349 - DNA, 19 bp, Homo sapiens
  siRNA target sequence for MASS1 (NM_032119.1,6308-6326).
ccgaatctgtctttatcga

SEQ ID NO: 163350 - DNA, 19 bp, Homo sapiens
  siRNA target sequence for MASS1 (NM_032119.1,6314-6332).
ctgtctttatcgaactact

SEQ ID NO: 163351 - DNA, 19 bp, Homo sapiens
  siRNA target sequence for MASS1 (NM_032119.1,6325-6343).
gaactactcaactctactt

SEQ ID NO: 163352 - DNA, 19 bp, Homo sapiens
  siRNA target sequence for MASS1 (NM_032119.1,6358-6376).
cagagtcgttcaattccaa

SEQ ID NO: 163353 - DNA, 19 bp, Homo sapiens
  siRNA target sequence for MASS1 (NM_032119.1,6360-6378).
gagtcgttcaattccaaat

SEQ ID NO: 163354 - DNA, 19 bp, Homo sapiens
  siRNA target sequence for MASS1 (NM_032119.1,6388-6406).
cttgggcctaaggtagaaa

SEQ ID NO: 163355 - DNA, 19 bp, Homo sapiens
  siRNA target sequence for MASS1 (NM_032119.1,6403-6421).
gaaactattgcgcaactaa

SEQ ID NO: 163356 - DNA, 19 bp, Homo sapiens
  siRNA target sequence for MASS1 (NM_032119.1,6407-6425).
ctattgcgcaactaattat

SEQ ID NO: 163357 - DNA, 19 bp, Homo sapiens
  siRNA target sequence for MASS1 (NM_032119.1,6477-6495).
ccgagtggcagaaaatcat

SEQ ID NO: 163358 - DNA, 19 bp, Homo sapiens
  siRNA target sequence for MASS1 (NM_032119.1,6589-6607).
gaagattatagtatagctt

SEQ ID NO: 163359 - DNA, 19 bp, Homo sapiens
  siRNA target sequence for MASS1 (NM_032119.1,6646-6664).
gccgtgccaatatatgtca

SEQ ID NO: 163360 - DNA, 19 bp, Homo sapiens
  siRNA target sequence for MASS1 (NM_032119.1,6647-6665).
ccgtgccaatatatgtcat

SEQ ID NO: 163361 - DNA, 19 bp, Homo sapiens
  siRNA target sequence for MASS1 (NM_032119.1,6648-6666).
cgtgccaatatatgtcatt

SEQ ID NO: 163362 - DNA, 19 bp, Homo sapiens
  siRNA target sequence for MASS1 (NM_032119.1,6649-6667).
gtgccaatatatgtcatta

SEQ ID NO: 163363 - DNA, 19 bp, Homo sapiens
  siRNA target sequence for MASS1 (NM_032119.1,6651-6669).
gccaatatatgtcattaat

SEQ ID NO: 163364 - DNA, 19 bp, Homo sapiens
  siRNA target sequence for MASS1 (NM_032119.1,6703-6721).
gtgcaactgatgaatgaaa

SEQ ID NO: 163365 - DNA, 19 bp, Homo sapiens
  siRNA target sequence for MASS1 (NM_032119.1,6733-6751).
gccagactaggggctttaa

SEQ ID NO: 163366 - DNA, 19 bp, Homo sapiens
  siRNA target sequence for MASS1 (NM_032119.1,6737-6755).
gactaggggctttaacaga

SEQ ID NO: 163367 - DNA, 19 bp, Homo sapiens
  siRNA target sequence for MASS1 (NM_032119.1,6826-6844).
gtagaggaacctgagttta

SEQ ID NO: 163368 - DNA, 19 bp, Homo sapiens
  siRNA target sequence for MASS1 (NM_032119.1,6829-6847).
gaggaacctgagtttaact

SEQ ID NO: 163369 - DNA, 19 bp, Homo sapiens
  siRNA target sequence for MASS1 (NM_032119.1,6862-6880).
ctgccaataattcgaaatt

SEQ ID NO: 163370 - DNA, 19 bp, Homo sapiens
  siRNA target sequence for MASS1 (NM_032119.1,6883-6901).
gggacactcggcaatgtta

SEQ ID NO: 163371 - DNA, 19 bp, Homo sapiens
  siRNA target sequence for MASS1 (NM_032119.1,6907-6925).
cagtgggttgccaccatta

SEQ ID NO: 163372 - DNA, 19 bp, Homo sapiens
  siRNA target sequence for MASS1 (NM_032119.1,6909-6927).
gtgggttgccaccattaat

SEQ ID NO: 163373 - DNA, 19 bp, Homo sapiens
  siRNA target sequence for MASS1 (NM_032119.1,6951-6969).
gcgagttgtctcaggtaat

SEQ ID NO: 163374 - DNA, 19 bp, Homo sapiens
  siRNA target sequence for MASS1 (NM_032119.1,6953-6971).
gagttgtctcaggtaatgt

SEQ ID NO: 163375 - DNA, 19 bp, Homo sapiens
  siRNA target sequence for MASS1 (NM_032119.1,6955-6973).
gttgtctcaggtaatgtga

SEQ ID NO: 163376 - DNA, 19 bp, Homo sapiens
  siRNA target sequence for MASS1 (NM_032119.1,7026-7044).
cgacgttccggagattgaa

SEQ ID NO: 163377 - DNA, 19 bp, Homo sapiens
  siRNA target sequence for MASS1 (NM_032119.1,7088-7106).
ctattgggttagatcgaat

SEQ ID NO: 163378 - DNA, 19 bp, Homo sapiens
  siRNA target sequence for MASS1 (NM_032119.1,7093-7111).
gggttagatcgaattgcaa

SEQ ID NO: 163379 - DNA, 19 bp, Homo sapiens
  siRNA target sequence for MASS1 (NM_032119.1,7094-7112).
ggttagatcgaattgcaaa

SEQ ID NO: 163380 - DNA, 19 bp, Homo sapiens
  siRNA target sequence for MASS1 (NM_032119.1,7095-7113).
gttagatcgaattgcaaat

SEQ ID NO: 163381 - DNA, 19 bp, Homo sapiens
  siRNA target sequence for MASS1 (NM_032119.1,7099-7117).
gatcgaattgcaaatatta

SEQ ID NO: 163382 - DNA, 19 bp, Homo sapiens
  siRNA target sequence for MASS1 (NM_032119.1,7128-7146).
caatgatgatccttatggt

SEQ ID NO: 163383 - DNA, 19 bp, Homo sapiens
  siRNA target sequence for MASS1 (NM_032119.1,7153-7171).
gcctttgctcagatggttt

SEQ ID NO: 163384 - DNA, 19 bp, Homo sapiens
  siRNA target sequence for MASS1 (NM_032119.1,7164-7182).
gatggtttatcgtgttcaa

SEQ ID NO: 163385 - DNA, 19 bp, Homo sapiens
  siRNA target sequence for MASS1 (NM_032119.1,7202-7220).
cctgtgctaatataactgt

SEQ ID NO: 163386 - DNA, 19 bp, Homo sapiens
  siRNA target sequence for MASS1 (NM_032119.1,7243-7261).
ggtcggctgttgttgttct

SEQ ID NO: 163387 - DNA, 19 bp, Homo sapiens
  siRNA target sequence for MASS1 (NM_032119.1,7263-7281).
cagtacttccgacattgat

SEQ ID NO: 163388 - DNA, 19 bp, Homo sapiens
  siRNA target sequence for MASS1 (NM_032119.1,7265-7283).
gtacttccgacattgatgt

SEQ ID NO: 163389 - DNA, 19 bp, Homo sapiens
  siRNA target sequence for MASS1 (NM_032119.1,7268-7286).
cttccgacattgatgtagt

SEQ ID NO: 163390 - DNA, 19 bp, Homo sapiens
  siRNA target sequence for MASS1 (NM_032119.1,7390-7408).
gtgggggagcccctgtata

SEQ ID NO: 163391 - DNA, 19 bp, Homo sapiens
  siRNA target sequence for MASS1 (NM_032119.1,7393-7411).
ggggagcccctgtatacct

SEQ ID NO: 163392 - DNA, 19 bp, Homo sapiens
  siRNA target sequence for MASS1 (NM_032119.1,7439-7457).
cttgctcagcgttttcatt

SEQ ID NO: 163393 - DNA, 19 bp, Homo sapiens
  siRNA target sequence for MASS1 (NM_032119.1,7554-7572).
gaccagggtagcatctctt

SEQ ID NO: 163394 - DNA, 19 bp, Homo sapiens
  siRNA target sequence for MASS1 (NM_032119.1,7619-7637).
ggcaatgggccataatgca

SEQ ID NO: 163395 - DNA, 19 bp, Homo sapiens
  siRNA target sequence for MASS1 (NM_032119.1,7643-7661).
gtgatgaattcgcaaatct

SEQ ID NO: 163396 - DNA, 19 bp, Homo sapiens
  siRNA target sequence for MASS1 (NM_032119.1,7655-7673).
caaatctcacagtgtctat

SEQ ID NO: 163397 - DNA, 19 bp, Homo sapiens
  siRNA target sequence for MASS1 (NM_032119.1,7698-7716).
ggatgagagttttctaatt

SEQ ID NO: 163398 - DNA, 19 bp, Homo sapiens
  siRNA target sequence for MASS1 (NM_032119.1,7699-7717).
gatgagagttttctaattt

SEQ ID NO: 163399 - DNA, 19 bp, Homo sapiens
  siRNA target sequence for MASS1 (NM_032119.1,7726-7744).
gaagttcacctcatgaaca

SEQ ID NO: 163400 - DNA, 19 bp, Homo sapiens
  siRNA target sequence for MASS1 (NM_032119.1,7729-7747).
gttcacctcatgaacattt

SEQ ID NO: 163401 - DNA, 19 bp, Homo sapiens
  siRNA target sequence for MASS1 (NM_032119.1,7772-7790).
ccataggacagccaaatat

SEQ ID NO: 163402 - DNA, 19 bp, Homo sapiens
  siRNA target sequence for MASS1 (NM_032119.1,7773-7791).
cataggacagccaaatatt

SEQ ID NO: 163403 - DNA, 19 bp, Homo sapiens
  siRNA target sequence for MASS1 (NM_032119.1,7782-7800).
gccaaatatttctacagtt

SEQ ID NO: 163404 - DNA, 19 bp, Homo sapiens
  siRNA target sequence for MASS1 (NM_032119.1,7796-7814).
cagttgtcatagcactaaa

SEQ ID NO: 163405 - DNA, 19 bp, Homo sapiens
  siRNA target sequence for MASS1 (NM_032119.1,7828-7846).
ggagtgtttgtgatctaca

SEQ ID NO: 163406 - DNA, 19 bp, Homo sapiens
  siRNA target sequence for MASS1 (NM_032119.1,7829-7847).
gagtgtttgtgatctacaa

SEQ ID NO: 163407 - DNA, 19 bp, Homo sapiens
  siRNA target sequence for MASS1 (NM_032119.1,7831-7849).
gtgtttgtgatctacaata

SEQ ID NO: 163408 - DNA, 19 bp, Homo sapiens
  siRNA target sequence for MASS1 (NM_032119.1,7833-7851).
gtttgtgatctacaatatt

SEQ ID NO: 163409 - DNA, 19 bp, Homo sapiens
  siRNA target sequence for MASS1 (NM_032119.1,7845-7863).
caatattagtcccaatact

SEQ ID NO: 163410 - DNA, 19 bp, Homo sapiens
  siRNA target sequence for MASS1 (NM_032119.1,7908-7926).
cttggtggagctgatgata

SEQ ID NO: 163411 - DNA, 19 bp, Homo sapiens
  siRNA target sequence for MASS1 (NM_032119.1,7912-7930).
gtggagctgatgatacaca

SEQ ID NO: 163412 - DNA, 19 bp, Homo sapiens
  siRNA target sequence for MASS1 (NM_032119.1,7982-8000).
gaacagctactgaaggttt

SEQ ID NO: 163413 - DNA, 19 bp, Homo sapiens
  siRNA target sequence for MASS1 (NM_032119.1,7987-8005).
gctactgaaggtttagatt

SEQ ID NO: 163414 - DNA, 19 bp, Homo sapiens
  siRNA target sequence for MASS1 (NM_032119.1,7988-8006).
ctactgaaggtttagattt

SEQ ID NO: 163415 - DNA, 19 bp, Homo sapiens
  siRNA target sequence for MASS1 (NM_032119.1,8090-8108).
cagaggatgacgaaagtat

SEQ ID NO: 163416 - DNA, 19 bp, Homo sapiens
  siRNA target sequence for MASS1 (NM_032119.1,8092-8110).
gaggatgacgaaagtatca

SEQ ID NO: 163417 - DNA, 19 bp, Homo sapiens
  siRNA target sequence for MASS1 (NM_032119.1,8094-8112).
ggatgacgaaagtatcata

SEQ ID NO: 163418 - DNA, 19 bp, Homo sapiens
  siRNA target sequence for MASS1 (NM_032119.1,8098-8116).
gacgaaagtatcatagtta

SEQ ID NO: 163419 - DNA, 19 bp, Homo sapiens
  siRNA target sequence for MASS1 (NM_032119.1,8100-8118).
cgaaagtatcatagttagt

SEQ ID NO: 163420 - DNA, 19 bp, Homo sapiens
  siRNA target sequence for MASS1 (NM_032119.1,8163-8181).
cactgttagagtgaacatt

SEQ ID NO: 163421 - DNA, 19 bp, Homo sapiens
  siRNA target sequence for MASS1 (NM_032119.1,8286-8304).
ccctggtcgaggaaatgtt

SEQ ID NO: 163422 - DNA, 19 bp, Homo sapiens
  siRNA target sequence for MASS1 (NM_032119.1,8291-8309).
gtcgaggaaatgttactgt

SEQ ID NO: 163423 - DNA, 19 bp, Homo sapiens
  siRNA target sequence for MASS1 (NM_032119.1,8327-8345).
ggcaaaatctagaactcaa

SEQ ID NO: 163424 - DNA, 19 bp, Homo sapiens
  siRNA target sequence for MASS1 (NM_032119.1,8382-8400).
ggggtcgttgaatacaaca

SEQ ID NO: 163425 - DNA, 19 bp, Homo sapiens
  siRNA target sequence for MASS1 (NM_032119.1,8383-8401).
gggtcgttgaatacaacat

SEQ ID NO: 163426 - DNA, 19 bp, Homo sapiens
  siRNA target sequence for MASS1 (NM_032119.1,8384-8402).
ggtcgttgaatacaacatt

SEQ ID NO: 163427 - DNA, 19 bp, Homo sapiens
  siRNA target sequence for MASS1 (NM_032119.1,8594-8612).
gatttgtgttactacaaga

SEQ ID NO: 163428 - DNA, 19 bp, Homo sapiens
  siRNA target sequence for MASS1 (NM_032119.1,8608-8626).
caagaggctaacataacaa

SEQ ID NO: 163429 - DNA, 19 bp, Homo sapiens
  siRNA target sequence for MASS1 (NM_032119.1,8657-8675).
ctctaggagctatcaatgt

SEQ ID NO: 163430 - DNA, 19 bp, Homo sapiens
  siRNA target sequence for MASS1 (NM_032119.1,8663-8681).
gagctatcaatgtcacata

SEQ ID NO: 163431 - DNA, 19 bp, Homo sapiens
  siRNA target sequence for MASS1 (NM_032119.1,8665-8683).
gctatcaatgtcacatata

SEQ ID NO: 163432 - DNA, 19 bp, Homo sapiens
  siRNA target sequence for MASS1 (NM_032119.1,8758-8776).
cctatcattggctttctga

SEQ ID NO: 163433 - DNA, 19 bp, Homo sapiens
  siRNA target sequence for MASS1 (NM_032119.1,8759-8777).
ctatcattggctttctgat

SEQ ID NO: 163434 - DNA, 19 bp, Homo sapiens
  siRNA target sequence for MASS1 (NM_032119.1,8889-8907).
ggctgcttcaacttcattt

SEQ ID NO: 163435 - DNA, 19 bp, Homo sapiens
  siRNA target sequence for MASS1 (NM_032119.1,8915-8933).
gactagattcagaaggttt

SEQ ID NO: 163436 - DNA, 19 bp, Homo sapiens
  siRNA target sequence for MASS1 (NM_032119.1,8929-8947).
ggtttgactgcacaagtta

SEQ ID NO: 163437 - DNA, 19 bp, Homo sapiens
  siRNA target sequence for MASS1 (NM_032119.1,8988-9006).
gcaacaaagcaggtttgaa

SEQ ID NO: 163438 - DNA, 19 bp, Homo sapiens
  siRNA target sequence for MASS1 (NM_032119.1,9017-9035).
cccatggaagtttaacatt

SEQ ID NO: 163439 - DNA, 19 bp, Homo sapiens
  siRNA target sequence for MASS1 (NM_032119.1,9065-9083).
gccatgtttccttatttgt

SEQ ID NO: 163440 - DNA, 19 bp, Homo sapiens
  siRNA target sequence for MASS1 (NM_032119.1,9112-9130).
gggctggattatatcttca

SEQ ID NO: 163441 - DNA, 19 bp, Homo sapiens
  siRNA target sequence for MASS1 (NM_032119.1,9164-9182).
ggtataaaaatgtcaatat

SEQ ID NO: 163442 - DNA, 19 bp, Homo sapiens
  siRNA target sequence for MASS1 (NM_032119.1,9275-9293).
caatagccttaattattgt

SEQ ID NO: 163443 - DNA, 19 bp, Homo sapiens
  siRNA target sequence for MASS1 (NM_032119.1,9311-9329).
gccctggagttctatcatt

SEQ ID NO: 163444 - DNA, 19 bp, Homo sapiens
  siRNA target sequence for MASS1 (NM_032119.1,9313-9331).
cctggagttctatcattta

SEQ ID NO: 163445 - DNA, 19 bp, Homo sapiens
  siRNA target sequence for MASS1 (NM_032119.1,9319-9337).
gttctatcatttaacaaca

SEQ ID NO: 163446 - DNA, 19 bp, Homo sapiens
  siRNA target sequence for MASS1 (NM_032119.1,9386-9404).
gtgttgcagtattgtacat

SEQ ID NO: 163447 - DNA, 19 bp, Homo sapiens
  siRNA target sequence for MASS1 (NM_032119.1,9474-9492).
ctcaaatgaatctaaagat

SEQ ID NO: 163448 - DNA, 19 bp, Homo sapiens
  siRNA target sequence for MASS1 (NM_032119.1,9500-9518).
cttccaaaggctatattgt

SEQ ID NO: 163449 - DNA, 19 bp, Homo sapiens
  siRNA target sequence for MASS1 (NM_032119.1,9535-9553).
cgattcaaggccctacaaa

SEQ ID NO: 163450 - DNA, 19 bp, Homo sapiens
  siRNA target sequence for MASS1 (NM_032119.1,9536-9554).
gattcaaggccctacaaat

SEQ ID NO: 163451 - DNA, 19 bp, Homo sapiens
  siRNA target sequence for MASS1 (NM_032119.1,9540-9558).
caaggccctacaaatatct

SEQ ID NO: 163452 - DNA, 19 bp, Homo sapiens
  siRNA target sequence for MASS1 (NM_032119.1,9570-9588).
cacggaaccagaaatggat

SEQ ID NO: 163453 - DNA, 19 bp, Homo sapiens
  siRNA target sequence for MASS1 (NM_032119.1,9577-9595).
ccagaaatggatgagtatt

SEQ ID NO: 163454 - DNA, 19 bp, Homo sapiens
  siRNA target sequence for MASS1 (NM_032119.1,9632-9650).
gactaggggtgcatgttca

SEQ ID NO: 163455 - DNA, 19 bp, Homo sapiens
  siRNA target sequence for MASS1 (NM_032119.1,9634-9652).
ctaggggtgcatgttcaaa

SEQ ID NO: 163456 - DNA, 19 bp, Homo sapiens
  siRNA target sequence for MASS1 (NM_032119.1,9649-9667).
caaaccctgataacagttt

SEQ ID NO: 163457 - DNA, 19 bp, Homo sapiens
  siRNA target sequence for MASS1 (NM_032119.1,9653-9671).
ccctgataacagttttgca

SEQ ID NO: 163458 - DNA, 19 bp, Homo sapiens
  siRNA target sequence for MASS1 (NM_032119.1,9654-9672).
cctgataacagttttgcaa

SEQ ID NO: 163459 - DNA, 19 bp, Homo sapiens
  siRNA target sequence for MASS1 (NM_032119.1,9679-9697).
gcccctttggggctattca

SEQ ID NO: 163460 - DNA, 19 bp, Homo sapiens
  siRNA target sequence for MASS1 (NM_032119.1,9745-9763).
gccaataggaccgtgtatt

SEQ ID NO: 163461 - DNA, 19 bp, Homo sapiens
  siRNA target sequence for MASS1 (NM_032119.1,9752-9770).
ggaccgtgtatttaaatgt

SEQ ID NO: 163462 - DNA, 19 bp, Homo sapiens
  siRNA target sequence for MASS1 (NM_032119.1,9753-9771).
gaccgtgtatttaaatgta

SEQ ID NO: 163463 - DNA, 19 bp, Homo sapiens
  siRNA target sequence for MASS1 (NM_032119.1,9861-9879).
gttttccgtatttcaaagt

SEQ ID NO: 163464 - DNA, 19 bp, Homo sapiens
  siRNA target sequence for MASS1 (NM_032119.1,9950-9968).
gaaaatcatctgttactgt

SEQ ID NO: 163465 - DNA, 19 bp, Homo sapiens
  siRNA target sequence for MASS1 (NM_032119.1,9972-9990).
ccgatggcaggggattttt

SEQ ID NO: 163466 - DNA, 19 bp, Homo sapiens
  siRNA target sequence for MASS1 (NM_032119.1,9973-9991).
cgatggcaggggattttta

SEQ ID NO: 163467 - DNA, 19 bp, Homo sapiens
  siRNA target sequence for MASS1 (NM_032119.1,9978-9996).
gcaggggatttttattcca

SEQ ID NO: 163468 - DNA, 19 bp, Homo sapiens
  siRNA target sequence for MASS1 (NM_032119.1,10028-10046).
cttgtgaggcctttaatat

SEQ ID NO: 163469 - DNA, 19 bp, Homo sapiens
  siRNA target sequence for MASS1 (NM_032119.1,10058-10076).
cctactttgtgattactca

SEQ ID NO: 163470 - DNA, 19 bp, Homo sapiens
  siRNA target sequence for MASS1 (NM_032119.1,10059-10077).
ctactttgtgattactcat

SEQ ID NO: 163471 - DNA, 19 bp, Homo sapiens
  siRNA target sequence for MASS1 (NM_032119.1,10068-10086).
gattactcatgaagaaaga

SEQ ID NO: 163472 - DNA, 19 bp, Homo sapiens
  siRNA target sequence for MASS1 (NM_032119.1,10093-10111).
gaaaagccttctcttaaca

SEQ ID NO: 163473 - DNA, 19 bp, Homo sapiens
  siRNA target sequence for MASS1 (NM_032119.1,10171-10189).
gaaagttctcaagtaagat

SEQ ID NO: 163474 - DNA, 19 bp, Homo sapiens
  siRNA target sequence for MASS1 (NM_032119.1,10225-10243).
gcaagtcaaagagatgatt

SEQ ID NO: 163475 - DNA, 19 bp, Homo sapiens
  siRNA target sequence for MASS1 (NM_032119.1,10280-10298).
gcttcgtgttgcatcaaaa

SEQ ID NO: 163476 - DNA, 19 bp, Homo sapiens
  siRNA target sequence for MASS1 (NM_032119.1,10281-10299).
cttcgtgttgcatcaaaaa

SEQ ID NO: 163477 - DNA, 19 bp, Homo sapiens
  siRNA target sequence for MASS1 (NM_032119.1,10322-10340).
ccgtggccttgttcaacaa

SEQ ID NO: 163478 - DNA, 19 bp, Homo sapiens
  siRNA target sequence for MASS1 (NM_032119.1,10372-10390).
gctaatgccaggctaaact

SEQ ID NO: 163479 - DNA, 19 bp, Homo sapiens
  siRNA target sequence for MASS1 (NM_032119.1,10382-10400).
ggctaaactcccttttatt

SEQ ID NO: 163480 - DNA, 19 bp, Homo sapiens
  siRNA target sequence for MASS1 (NM_032119.1,10407-10425).
gtctggcagtgggtttatt

SEQ ID NO: 163481 - DNA, 19 bp, Homo sapiens
  siRNA target sequence for MASS1 (NM_032119.1,10411-10429).
ggcagtgggtttattaact

SEQ ID NO: 163482 - DNA, 19 bp, Homo sapiens
  siRNA target sequence for MASS1 (NM_032119.1,10475-10493).
cttcagccaatgatattta

SEQ ID NO: 163483 - DNA, 19 bp, Homo sapiens
  siRNA target sequence for MASS1 (NM_032119.1,10481-10499).
ccaatgatatttacctaat

SEQ ID NO: 163484 - DNA, 19 bp, Homo sapiens
  siRNA target sequence for MASS1 (NM_032119.1,10482-10500).
caatgatatttacctaata

SEQ ID NO: 163485 - DNA, 19 bp, Homo sapiens
  siRNA target sequence for MASS1 (NM_032119.1,10519-10537).
ctaggagatcagaattcaa

SEQ ID NO: 163486 - DNA, 19 bp, Homo sapiens
  siRNA target sequence for MASS1 (NM_032119.1,10578-10596).
gtattttcagtctgtagat

SEQ ID NO: 163487 - DNA, 19 bp, Homo sapiens
  siRNA target sequence for MASS1 (NM_032119.1,10640-10658).
gaatagcccacatacttct

SEQ ID NO: 163488 - DNA, 19 bp, Homo sapiens
  siRNA target sequence for MASS1 (NM_032119.1,10701-10719).
ggagcgtaatcaattctct

SEQ ID NO: 163489 - DNA, 19 bp, Homo sapiens
  siRNA target sequence for MASS1 (NM_032119.1,10704-10722).
gcgtaatcaattctctttt

SEQ ID NO: 163490 - DNA, 19 bp, Homo sapiens
  siRNA target sequence for MASS1 (NM_032119.1,10706-10724).
gtaatcaattctcttttgt

SEQ ID NO: 163491 - DNA, 19 bp, Homo sapiens
  siRNA target sequence for MASS1 (NM_032119.1,10773-10791).
ccttaattcaagcaagaat

SEQ ID NO: 163492 - DNA, 19 bp, Homo sapiens
  siRNA target sequence for MASS1 (NM_032119.1,10804-10822).
gtgggagctcattcacata

SEQ ID NO: 163493 - DNA, 19 bp, Homo sapiens
  siRNA target sequence for MASS1 (NM_032119.1,10806-10824).
gggagctcattcacatata

SEQ ID NO: 163494 - DNA, 19 bp, Homo sapiens
  siRNA target sequence for MASS1 (NM_032119.1,10807-10825).
ggagctcattcacatatat

SEQ ID NO: 163495 - DNA, 19 bp, Homo sapiens
  siRNA target sequence for MASS1 (NM_032119.1,10849-10867).
cattctgactttattccta

SEQ ID NO: 163496 - DNA, 19 bp, Homo sapiens
  siRNA target sequence for MASS1 (NM_032119.1,10907-10925).
ctacaatagcagtaaatat

SEQ ID NO: 163497 - DNA, 19 bp, Homo sapiens
  siRNA target sequence for MASS1 (NM_032119.1,10916-10934).
cagtaaatatccttgatga

SEQ ID NO: 163498 - DNA, 19 bp, Homo sapiens
  siRNA target sequence for MASS1 (NM_032119.1,10996-11014).
gagattggcattaatgatt

SEQ ID NO: 163499 - DNA, 19 bp, Homo sapiens
  siRNA target sequence for MASS1 (NM_032119.1,11021-11039).
caataaccattctgtctaa

SEQ ID NO: 163500 - DNA, 19 bp, Homo sapiens
  siRNA target sequence for MASS1 (NM_032119.1,11059-11077).
gttgcatttgctcagaatt

SEQ ID NO: 163501 - DNA, 19 bp, Homo sapiens
  siRNA target sequence for MASS1 (NM_032119.1,11104-11122).
gagcaagatagcctagtaa

SEQ ID NO: 163502 - DNA, 19 bp, Homo sapiens
  siRNA target sequence for MASS1 (NM_032119.1,11127-11145).
gaacgttgaacgcttaaaa

SEQ ID NO: 163503 - DNA, 19 bp, Homo sapiens
  siRNA target sequence for MASS1 (NM_032119.1,11146-11164).
ggaacatatggccgtataa

SEQ ID NO: 163504 - DNA, 19 bp, Homo sapiens
  siRNA target sequence for MASS1 (NM_032119.1,11150-11168).
catatggccgtataaccat

SEQ ID NO: 163505 - DNA, 19 bp, Homo sapiens
  siRNA target sequence for MASS1 (NM_032119.1,11206-11224).
cctacctcaggagtgattt

SEQ ID NO: 163506 - DNA, 19 bp, Homo sapiens
  siRNA target sequence for MASS1 (NM_032119.1,11207-11225).
ctacctcaggagtgatttt

SEQ ID NO: 163507 - DNA, 19 bp, Homo sapiens
  siRNA target sequence for MASS1 (NM_032119.1,11249-11267).
caacaatcactctaactat

SEQ ID NO: 163508 - DNA, 19 bp, Homo sapiens
  siRNA target sequence for MASS1 (NM_032119.1,11252-11270).
caatcactctaactattct

SEQ ID NO: 163509 - DNA, 19 bp, Homo sapiens
  siRNA target sequence for MASS1 (NM_032119.1,11275-11293).
gataatataccagagttat

SEQ ID NO: 163510 - DNA, 19 bp, Homo sapiens
  siRNA target sequence for MASS1 (NM_032119.1,11335-11353).
ggggttgaggactcataca

SEQ ID NO: 163511 - DNA, 19 bp, Homo sapiens
  siRNA target sequence for MASS1 (NM_032119.1,11337-11355).
ggttgaggactcatacaaa

SEQ ID NO: 163512 - DNA, 19 bp, Homo sapiens
  siRNA target sequence for MASS1 (NM_032119.1,11348-11366).
catacaaaggtgctactat

SEQ ID NO: 163513 - DNA, 19 bp, Homo sapiens
  siRNA target sequence for MASS1 (NM_032119.1,11374-11392).
gacagaagcaagtctgtta

SEQ ID NO: 163514 - DNA, 19 bp, Homo sapiens
  siRNA target sequence for MASS1 (NM_032119.1,11376-11394).
cagaagcaagtctgttata

SEQ ID NO: 163515 - DNA, 19 bp, Homo sapiens
  siRNA target sequence for MASS1 (NM_032119.1,11382-11400).
caagtctgttataacaact

SEQ ID NO: 163516 - DNA, 19 bp, Homo sapiens
  siRNA target sequence for MASS1 (NM_032119.1,11403-11421).
gcccaatgactcacctttt

SEQ ID NO: 163517 - DNA, 19 bp, Homo sapiens
  siRNA target sequence for MASS1 (NM_032119.1,11438-11456).
gtgctgcgtctgtcttcat

SEQ ID NO: 163518 - DNA, 19 bp, Homo sapiens
  siRNA target sequence for MASS1 (NM_032119.1,11444-11462).
cgtctgtcttcattagagt

SEQ ID NO: 163519 - DNA, 19 bp, Homo sapiens
  siRNA target sequence for MASS1 (NM_032119.1,11484-11502).
caccactcttcagttacaa

SEQ ID NO: 163520 - DNA, 19 bp, Homo sapiens
  siRNA target sequence for MASS1 (NM_032119.1,11487-11505).
cactcttcagttacaaata

SEQ ID NO: 163521 - DNA, 19 bp, Homo sapiens
  siRNA target sequence for MASS1 (NM_032119.1,11527-11545).
ggggatattgccattcact

SEQ ID NO: 163522 - DNA, 19 bp, Homo sapiens
  siRNA target sequence for MASS1 (NM_032119.1,11549-11567).
gagctcaacccaatttctt

SEQ ID NO: 163523 - DNA, 19 bp, Homo sapiens
  siRNA target sequence for MASS1 (NM_032119.1,11552-11570).
ctcaacccaatttcttact

SEQ ID NO: 163524 - DNA, 19 bp, Homo sapiens
  siRNA target sequence for MASS1 (NM_032119.1,11565-11583).
cttactgcatgtcgataat

SEQ ID NO: 163525 - DNA, 19 bp, Homo sapiens
  siRNA target sequence for MASS1 (NM_032119.1,11656-11674).
catgccgaagtttccattt

SEQ ID NO: 163526 - DNA, 19 bp, Homo sapiens
  siRNA target sequence for MASS1 (NM_032119.1,11704-11722).
ggatttattgtcactatca

SEQ ID NO: 163527 - DNA, 19 bp, Homo sapiens
  siRNA target sequence for MASS1 (NM_032119.1,11855-11873).
gaggcgctggggaagttat

SEQ ID NO: 163528 - DNA, 19 bp, Homo sapiens
  siRNA target sequence for MASS1 (NM_032119.1,11925-11943).
ccggctggctggaagcttt

SEQ ID NO: 163529 - DNA, 19 bp, Homo sapiens
  siRNA target sequence for MASS1 (NM_032119.1,11939-11957).
gctttggggcagtaaatgt

SEQ ID NO: 163530 - DNA, 19 bp, Homo sapiens
  siRNA target sequence for MASS1 (NM_032119.1,12090-12108).
gacagagacgttcaatatt

SEQ ID NO: 163531 - DNA, 19 bp, Homo sapiens
  siRNA target sequence for MASS1 (NM_032119.1,12094-12112).
gagacgttcaatatttcct

SEQ ID NO: 163532 - DNA, 19 bp, Homo sapiens
  siRNA target sequence for MASS1 (NM_032119.1,12187-12205).
ccatttggagtatttggat

SEQ ID NO: 163533 - DNA, 19 bp, Homo sapiens
  siRNA target sequence for MASS1 (NM_032119.1,12245-12263).
ccgatgaccctgattcata

SEQ ID NO: 163534 - DNA, 19 bp, Homo sapiens
  siRNA target sequence for MASS1 (NM_032119.1,12246-12264).
cgatgaccctgattcatat

SEQ ID NO: 163535 - DNA, 19 bp, Homo sapiens
  siRNA target sequence for MASS1 (NM_032119.1,12250-12268).
gaccctgattcatatgtga

SEQ ID NO: 163536 - DNA, 19 bp, Homo sapiens
  siRNA target sequence for MASS1 (NM_032119.1,12254-12272).
ctgattcatatgtgacatt

SEQ ID NO: 163537 - DNA, 19 bp, Homo sapiens
  siRNA target sequence for MASS1 (NM_032119.1,12333-12351).
gaaggctaaacataacctt

SEQ ID NO: 163538 - DNA, 19 bp, Homo sapiens
  siRNA target sequence for MASS1 (NM_032119.1,12453-12471).
caccattcagctgatatca

SEQ ID NO: 163539 - DNA, 19 bp, Homo sapiens
  siRNA target sequence for MASS1 (NM_032119.1,12455-12473).
ccattcagctgatatcaat

SEQ ID NO: 163540 - DNA, 19 bp, Homo sapiens
  siRNA target sequence for MASS1 (NM_032119.1,12502-12520).
ggtagtgcatcaataatta

SEQ ID NO: 163541 - DNA, 19 bp, Homo sapiens
  siRNA target sequence for MASS1 (NM_032119.1,12594-12612).
ctcagcaaaatataatggt

SEQ ID NO: 163542 - DNA, 19 bp, Homo sapiens
  siRNA target sequence for MASS1 (NM_032119.1,12735-12753).
cgaacagtctgcagtcatt

SEQ ID NO: 163543 - DNA, 19 bp, Homo sapiens
  siRNA target sequence for MASS1 (NM_032119.1,12746-12764).
cagtcattgtagtaataca

SEQ ID NO: 163544 - DNA, 19 bp, Homo sapiens
  siRNA target sequence for MASS1 (NM_032119.1,12765-12783).
ggctttgaacgatgacatt

SEQ ID NO: 163545 - DNA, 19 bp, Homo sapiens
  siRNA target sequence for MASS1 (NM_032119.1,12786-12804).
cgaggaaaaaagcttctat

SEQ ID NO: 163546 - DNA, 19 bp, Homo sapiens
  siRNA target sequence for MASS1 (NM_032119.1,12832-12850).
ggaggagttctgagtgaat

SEQ ID NO: 163547 - DNA, 19 bp, Homo sapiens
  siRNA target sequence for MASS1 (NM_032119.1,12899-12917).
gccgatttgccttttcaca

SEQ ID NO: 163548 - DNA, 19 bp, Homo sapiens
  siRNA target sequence for MASS1 (NM_032119.1,12900-12918).
ccgatttgccttttcacat

SEQ ID NO: 163549 - DNA, 19 bp, Homo sapiens
  siRNA target sequence for MASS1 (NM_032119.1,12940-12958).
gcacagagggttaacatca

SEQ ID NO: 163550 - DNA, 19 bp, Homo sapiens
  siRNA target sequence for MASS1 (NM_032119.1,12947-12965).
gggttaacatcacaatcat

SEQ ID NO: 163551 - DNA, 19 bp, Homo sapiens
  siRNA target sequence for MASS1 (NM_032119.1,12966-12984).
ccgttccagtggagatttt

SEQ ID NO: 163552 - DNA, 19 bp, Homo sapiens
  siRNA target sequence for MASS1 (NM_032119.1,12991-13009).
gtgcgactctggtacaaga

SEQ ID NO: 163553 - DNA, 19 bp, Homo sapiens
  siRNA target sequence for MASS1 (NM_032119.1,13024-13042).
gcggaagcaggcttggatt

SEQ ID NO: 163554 - DNA, 19 bp, Homo sapiens
  siRNA target sequence for MASS1 (NM_032119.1,13127-13145).
ctgaaggcccagaggaatt

SEQ ID NO: 163555 - DNA, 19 bp, Homo sapiens
  siRNA target sequence for MASS1 (NM_032119.1,13181-13199).
gagggtatgattttaccat

SEQ ID NO: 163556 - DNA, 19 bp, Homo sapiens
  siRNA target sequence for MASS1 (NM_032119.1,13185-13203).
gtatgattttaccattcaa

SEQ ID NO: 163557 - DNA, 19 bp, Homo sapiens
  siRNA target sequence for MASS1 (NM_032119.1,13225-13243).
caacctcctgaaataggaa

SEQ ID NO: 163558 - DNA, 19 bp, Homo sapiens
  siRNA target sequence for MASS1 (NM_032119.1,13248-13266).
ctccattgttcgcatcata

SEQ ID NO: 163559 - DNA, 19 bp, Homo sapiens
  siRNA target sequence for MASS1 (NM_032119.1,13250-13268).
ccattgttcgcatcataat

SEQ ID NO: 163560 - DNA, 19 bp, Homo sapiens
  siRNA target sequence for MASS1 (NM_032119.1,13251-13269).
cattgttcgcatcataata

SEQ ID NO: 163561 - DNA, 19 bp, Homo sapiens
  siRNA target sequence for MASS1 (NM_032119.1,13255-13273).
gttcgcatcataataatga

SEQ ID NO: 163562 - DNA, 19 bp, Homo sapiens
  siRNA target sequence for MASS1 (NM_032119.1,13258-13276).
cgcatcataataatgaaaa

SEQ ID NO: 163563 - DNA, 19 bp, Homo sapiens
  siRNA target sequence for MASS1 (NM_032119.1,13300-13318).
gaatttgacccaaagtata

SEQ ID NO: 163564 - DNA, 19 bp, Homo sapiens
  siRNA target sequence for MASS1 (NM_032119.1,13339-13357).
gatgttgggctgatcatga

SEQ ID NO: 163565 - DNA, 19 bp, Homo sapiens
  siRNA target sequence for MASS1 (NM_032119.1,13368-13386).
gaggctacatggaacttat

SEQ ID NO: 163566 - DNA, 19 bp, Homo sapiens
  siRNA target sequence for MASS1 (NM_032119.1,13378-13396).
ggaacttatggctatgtga

SEQ ID NO: 163567 - DNA, 19 bp, Homo sapiens
  siRNA target sequence for MASS1 (NM_032119.1,13430-13448).
gtcccggaggtgttgatta

SEQ ID NO: 163568 - DNA, 19 bp, Homo sapiens
  siRNA target sequence for MASS1 (NM_032119.1,13432-13450).
cccggaggtgttgattaca

SEQ ID NO: 163569 - DNA, 19 bp, Homo sapiens
  siRNA target sequence for MASS1 (NM_032119.1,13433-13451).
ccggaggtgttgattacat

SEQ ID NO: 163570 - DNA, 19 bp, Homo sapiens
  siRNA target sequence for MASS1 (NM_032119.1,13479-13497).
gcatgggcaaaacttaagt

SEQ ID NO: 163571 - DNA, 19 bp, Homo sapiens
  siRNA target sequence for MASS1 (NM_032119.1,13480-13498).
catgggcaaaacttaagtt

SEQ ID NO: 163572 - DNA, 19 bp, Homo sapiens
  siRNA target sequence for MASS1 (NM_032119.1,13542-13560).
ggagcccattgaaattcta

SEQ ID NO: 163573 - DNA, 19 bp, Homo sapiens
  siRNA target sequence for MASS1 (NM_032119.1,13607-13625).
gcagaatcataatagctaa

SEQ ID NO: 163574 - DNA, 19 bp, Homo sapiens
  siRNA target sequence for MASS1 (NM_032119.1,13636-13654).
ccctttggagttataaggt

SEQ ID NO: 163575 - DNA, 19 bp, Homo sapiens
  siRNA target sequence for MASS1 (NM_032119.1,13638-13656).
ctttggagttataaggttt

SEQ ID NO: 163576 - DNA, 19 bp, Homo sapiens
  siRNA target sequence for MASS1 (NM_032119.1,13642-13660).
ggagttataaggtttctca

SEQ ID NO: 163577 - DNA, 19 bp, Homo sapiens
  siRNA target sequence for MASS1 (NM_032119.1,13652-13670).
ggtttctcaatcaaagcaa

SEQ ID NO: 163578 - DNA, 19 bp, Homo sapiens
  siRNA target sequence for MASS1 (NM_032119.1,13668-13686).
caaaatttctattgctaat

SEQ ID NO: 163579 - DNA, 19 bp, Homo sapiens
  siRNA target sequence for MASS1 (NM_032119.1,13789-13807).
gccttactgccacagaata

SEQ ID NO: 163580 - DNA, 19 bp, Homo sapiens
  siRNA target sequence for MASS1 (NM_032119.1,13822-13840).
ccagtgagcgggttgttct

SEQ ID NO: 163581 - DNA, 19 bp, Homo sapiens
  siRNA target sequence for MASS1 (NM_032119.1,13823-13841).
cagtgagcgggttgttcta

SEQ ID NO: 163582 - DNA, 19 bp, Homo sapiens
  siRNA target sequence for MASS1 (NM_032119.1,13825-13843).
gtgagcgggttgttctatt

SEQ ID NO: 163583 - DNA, 19 bp, Homo sapiens
  siRNA target sequence for MASS1 (NM_032119.1,13830-13848).
cgggttgttctattttgga

SEQ ID NO: 163584 - DNA, 19 bp, Homo sapiens
  siRNA target sequence for MASS1 (NM_032119.1,13868-13886).
gaaccataattctgacaat

SEQ ID NO: 163585 - DNA, 19 bp, Homo sapiens
  siRNA target sequence for MASS1 (NM_032119.1,13883-13901).
caatctatcctcatgaaga

SEQ ID NO: 163586 - DNA, 19 bp, Homo sapiens
  siRNA target sequence for MASS1 (NM_032119.1,13917-13935).
gacattcattattaaactt

SEQ ID NO: 163587 - DNA, 19 bp, Homo sapiens
  siRNA target sequence for MASS1 (NM_032119.1,13942-13960).
gtgaaaggagaagctaaat

SEQ ID NO: 163588 - DNA, 19 bp, Homo sapiens
  siRNA target sequence for MASS1 (NM_032119.1,13985-14003).
cattaaccatacaagagtt

SEQ ID NO: 163589 - DNA, 19 bp, Homo sapiens
  siRNA target sequence for MASS1 (NM_032119.1,14001-14019).
gtttggtgacccaaatgga

SEQ ID NO: 163590 - DNA, 19 bp, Homo sapiens
  siRNA target sequence for MASS1 (NM_032119.1,14032-14050).
gctcctgaaactttgtcta

SEQ ID NO: 163591 - DNA, 19 bp, Homo sapiens
  siRNA target sequence for MASS1 (NM_032119.1,14092-14110).
ctcattaccttctttgtca

SEQ ID NO: 163592 - DNA, 19 bp, Homo sapiens
  siRNA target sequence for MASS1 (NM_032119.1,14162-14180).
gtgagtttgacattactga

SEQ ID NO: 163593 - DNA, 19 bp, Homo sapiens
  siRNA target sequence for MASS1 (NM_032119.1,14226-14244).
gagtgaagctagctttgat

SEQ ID NO: 163594 - DNA, 19 bp, Homo sapiens
  siRNA target sequence for MASS1 (NM_032119.1,14228-14246).
gtgaagctagctttgatgt

SEQ ID NO: 163595 - DNA, 19 bp, Homo sapiens
  siRNA target sequence for MASS1 (NM_032119.1,14292-14310).
gatccagcttgtttctgta

SEQ ID NO: 163596 - DNA, 19 bp, Homo sapiens
  siRNA target sequence for MASS1 (NM_032119.1,14346-14364).
cacatggttctctgtttat

SEQ ID NO: 163597 - DNA, 19 bp, Homo sapiens
  siRNA target sequence for MASS1 (NM_032119.1,14383-14401).
ggagtatttgccctgtatt

SEQ ID NO: 163598 - DNA, 19 bp, Homo sapiens
  siRNA target sequence for MASS1 (NM_032119.1,14402-14420).
cggatcgccagtcaatact

SEQ ID NO: 163599 - DNA, 19 bp, Homo sapiens
  siRNA target sequence for MASS1 (NM_032119.1,14403-14421).
ggatcgccagtcaatactt

SEQ ID NO: 163600 - DNA, 19 bp, Homo sapiens
  siRNA target sequence for MASS1 (NM_032119.1,14404-14422).
gatcgccagtcaatactta

SEQ ID NO: 163601 - DNA, 19 bp, Homo sapiens
  siRNA target sequence for MASS1 (NM_032119.1,14419-14437).
cttattgggcagaacctta

SEQ ID NO: 163602 - DNA, 19 bp, Homo sapiens
  siRNA target sequence for MASS1 (NM_032119.1,14441-14459).
gatccatccaaattaacat

SEQ ID NO: 163603 - DNA, 19 bp, Homo sapiens
  siRNA target sequence for MASS1 (NM_032119.1,14490-14508).
ggctgttgggcttcgaata

SEQ ID NO: 163604 - DNA, 19 bp, Homo sapiens
  siRNA target sequence for MASS1 (NM_032119.1,14491-14509).
gctgttgggcttcgaatat

SEQ ID NO: 163605 - DNA, 19 bp, Homo sapiens
  siRNA target sequence for MASS1 (NM_032119.1,14494-14512).
gttgggcttcgaatatcat

SEQ ID NO: 163606 - DNA, 19 bp, Homo sapiens
  siRNA target sequence for MASS1 (NM_032119.1,14503-14521).
cgaatatcatcggatcata

SEQ ID NO: 163607 - DNA, 19 bp, Homo sapiens
  siRNA target sequence for MASS1 (NM_032119.1,14504-14522).
gaatatcatcggatcataa

SEQ ID NO: 163608 - DNA, 19 bp, Homo sapiens
  siRNA target sequence for MASS1 (NM_032119.1,14510-14528).
catcggatcataaagaaca

SEQ ID NO: 163609 - DNA, 19 bp, Homo sapiens
  siRNA target sequence for MASS1 (NM_032119.1,14529-14547).
gccgattgttaccgaaaat

SEQ ID NO: 163610 - DNA, 19 bp, Homo sapiens
  siRNA target sequence for MASS1 (NM_032119.1,14532-14550).
gattgttaccgaaaatgca

SEQ ID NO: 163611 - DNA, 19 bp, Homo sapiens
  siRNA target sequence for MASS1 (NM_032119.1,14595-14613).
cgtggtgccaataaagaat

SEQ ID NO: 163612 - DNA, 19 bp, Homo sapiens
  siRNA target sequence for MASS1 (NM_032119.1,14622-14640).
cctatcactgggctctaat

SEQ ID NO: 163613 - DNA, 19 bp, Homo sapiens
  siRNA target sequence for MASS1 (NM_032119.1,14623-14641).
ctatcactgggctctaatt

SEQ ID NO: 163614 - DNA, 19 bp, Homo sapiens
  siRNA target sequence for MASS1 (NM_032119.1,14634-14652).
ctctaatttcactttgcaa

SEQ ID NO: 163615 - DNA, 19 bp, Homo sapiens
  siRNA target sequence for MASS1 (NM_032119.1,14674-14692).
ggtggacgtttctatggaa

SEQ ID NO: 163616 - DNA, 19 bp, Homo sapiens
  siRNA target sequence for MASS1 (NM_032119.1,14675-14693).
gtggacgtttctatggaat

SEQ ID NO: 163617 - DNA, 19 bp, Homo sapiens
  siRNA target sequence for MASS1 (NM_032119.1,14685-14703).
ctatggaatgccaacaatt

SEQ ID NO: 163618 - DNA, 19 bp, Homo sapiens
  siRNA target sequence for MASS1 (NM_032119.1,14690-14708).
gaatgccaacaattcttca

SEQ ID NO: 163619 - DNA, 19 bp, Homo sapiens
  siRNA target sequence for MASS1 (NM_032119.1,14804-14822).
ctggcacaagccacgttat

SEQ ID NO: 163620 - DNA, 19 bp, Homo sapiens
  siRNA target sequence for MASS1 (NM_032119.1,14806-14824).
ggcacaagccacgttatga

SEQ ID NO: 163621 - DNA, 19 bp, Homo sapiens
  siRNA target sequence for MASS1 (NM_032119.1,14807-14825).
gcacaagccacgttatgat

SEQ ID NO: 163622 - DNA, 19 bp, Homo sapiens
  siRNA target sequence for MASS1 (NM_032119.1,14808-14826).
cacaagccacgttatgatt

SEQ ID NO: 163623 - DNA, 19 bp, Homo sapiens
  siRNA target sequence for MASS1 (NM_032119.1,14952-14970).
ccacggtgaacaaaggaaa

SEQ ID NO: 163624 - DNA, 19 bp, Homo sapiens
  siRNA target sequence for MASS1 (NM_032119.1,15101-15119).
caatgggcgtcttccaatt

SEQ ID NO: 163625 - DNA, 19 bp, Homo sapiens
  siRNA target sequence for MASS1 (NM_032119.1,15106-15124).
ggcgtcttccaattttcca

SEQ ID NO: 163626 - DNA, 19 bp, Homo sapiens
  siRNA target sequence for MASS1 (NM_032119.1,15141-15159).
catagtgtcagaagataca

SEQ ID NO: 163627 - DNA, 19 bp, Homo sapiens
  siRNA target sequence for MASS1 (NM_032119.1,15193-15211).
gggttccacagcgatctta

SEQ ID NO: 163628 - DNA, 19 bp, Homo sapiens
  siRNA target sequence for MASS1 (NM_032119.1,15194-15212).
ggttccacagcgatcttat

SEQ ID NO: 163629 - DNA, 19 bp, Homo sapiens
  siRNA target sequence for MASS1 (NM_032119.1,15195-15213).
gttccacagcgatcttatt

SEQ ID NO: 163630 - DNA, 19 bp, Homo sapiens
  siRNA target sequence for MASS1 (NM_032119.1,15201-15219).
cagcgatcttattaaagtt

SEQ ID NO: 163631 - DNA, 19 bp, Homo sapiens
  siRNA target sequence for MASS1 (NM_032119.1,15244-15262).
gccaagccactggaagatt

SEQ ID NO: 163632 - DNA, 19 bp, Homo sapiens
  siRNA target sequence for MASS1 (NM_032119.1,15245-15263).
ccaagccactggaagattt

SEQ ID NO: 163633 - DNA, 19 bp, Homo sapiens
  siRNA target sequence for MASS1 (NM_032119.1,15372-15390).
cattaaccttacttcagta

SEQ ID NO: 163634 - DNA, 19 bp, Homo sapiens
  siRNA target sequence for MASS1 (NM_032119.1,15398-15416).
ggggattacaaaagtttga

SEQ ID NO: 163635 - DNA, 19 bp, Homo sapiens
  siRNA target sequence for MASS1 (NM_032119.1,15401-15419).
gattacaaaagtttgatgt

SEQ ID NO: 163636 - DNA, 19 bp, Homo sapiens
  siRNA target sequence for MASS1 (NM_032119.1,15425-15443).
ggagcccacgcctgaatct

SEQ ID NO: 163637 - DNA, 19 bp, Homo sapiens
  siRNA target sequence for MASS1 (NM_032119.1,15426-15444).
gagcccacgcctgaatcta

SEQ ID NO: 163638 - DNA, 19 bp, Homo sapiens
  siRNA target sequence for MASS1 (NM_032119.1,15428-15446).
gcccacgcctgaatctaga

SEQ ID NO: 163639 - DNA, 19 bp, Homo sapiens
  siRNA target sequence for MASS1 (NM_032119.1,15429-15447).
cccacgcctgaatctagat

SEQ ID NO: 163640 - DNA, 19 bp, Homo sapiens
  siRNA target sequence for MASS1 (NM_032119.1,15430-15448).
ccacgcctgaatctagatt

SEQ ID NO: 163641 - DNA, 19 bp, Homo sapiens
  siRNA target sequence for MASS1 (NM_032119.1,15431-15449).
cacgcctgaatctagattt

SEQ ID NO: 163642 - DNA, 19 bp, Homo sapiens
  siRNA target sequence for MASS1 (NM_032119.1,15433-15451).
cgcctgaatctagatttca

SEQ ID NO: 163643 - DNA, 19 bp, Homo sapiens
  siRNA target sequence for MASS1 (NM_032119.1,15452-15470).
gtgttgcagtgattacaat

SEQ ID NO: 163644 - DNA, 19 bp, Homo sapiens
  siRNA target sequence for MASS1 (NM_032119.1,15462-15480).
gattacaatattggataat

SEQ ID NO: 163645 - DNA, 19 bp, Homo sapiens
  siRNA target sequence for MASS1 (NM_032119.1,15490-15508).
gcaggaatggatatttcct

SEQ ID NO: 163646 - DNA, 19 bp, Homo sapiens
  siRNA target sequence for MASS1 (NM_032119.1,15621-15639).
cgtggttgccattgttact

SEQ ID NO: 163647 - DNA, 19 bp, Homo sapiens
  siRNA target sequence for MASS1 (NM_032119.1,15659-15677).
ccatccctgagaaacttgt

SEQ ID NO: 163648 - DNA, 19 bp, Homo sapiens
  siRNA target sequence for MASS1 (NM_032119.1,15759-15777).
cagccttgggccatccatt

SEQ ID NO: 163649 - DNA, 19 bp, Homo sapiens
  siRNA target sequence for MASS1 (NM_032119.1,15763-15781).
cttgggccatccattgttt

SEQ ID NO: 163650 - DNA, 19 bp, Homo sapiens
  siRNA target sequence for MASS1 (NM_032119.1,15766-15784).
gggccatccattgtttata

SEQ ID NO: 163651 - DNA, 19 bp, Homo sapiens
  siRNA target sequence for MASS1 (NM_032119.1,15767-15785).
ggccatccattgtttatat

SEQ ID NO: 163652 - DNA, 19 bp, Homo sapiens
  siRNA target sequence for MASS1 (NM_032119.1,15770-15788).
catccattgtttatattga

SEQ ID NO: 163653 - DNA, 19 bp, Homo sapiens
  siRNA target sequence for MASS1 (NM_032119.1,15813-15831).
caacactgcagaagttctt

SEQ ID NO: 163654 - DNA, 19 bp, Homo sapiens
  siRNA target sequence for MASS1 (NM_032119.1,15921-15939).
gccctttcgtggtatctat

SEQ ID NO: 163655 - DNA, 19 bp, Homo sapiens
  siRNA target sequence for MASS1 (NM_032119.1,15988-16006).
caaactcttacccttatat

SEQ ID NO: 163656 - DNA, 19 bp, Homo sapiens
  siRNA target sequence for MASS1 (NM_032119.1,16028-16046).
gtaaagtatcagttcaaat

SEQ ID NO: 163657 - DNA, 19 bp, Homo sapiens
  siRNA target sequence for MASS1 (NM_032119.1,16131-16149).
gaaggatgatactggattt

SEQ ID NO: 163658 - DNA, 19 bp, Homo sapiens
  siRNA target sequence for MASS1 (NM_032119.1,16175-16193).
cagggagtgaccttcacaa

SEQ ID NO: 163659 - DNA, 19 bp, Homo sapiens
  siRNA target sequence for MASS1 (NM_032119.1,16189-16207).
cacaatggcatcataggat

SEQ ID NO: 163660 - DNA, 19 bp, Homo sapiens
  siRNA target sequence for MASS1 (NM_032119.1,16243-16261).
gaaggagctgttatgagaa

SEQ ID NO: 163661 - DNA, 19 bp, Homo sapiens
  siRNA target sequence for MASS1 (NM_032119.1,16259-16277).
gaagattgcaccttattgt

SEQ ID NO: 163662 - DNA, 19 bp, Homo sapiens
  siRNA target sequence for MASS1 (NM_032119.1,16295-16313).
gggcctttgaagatgtcaa

SEQ ID NO: 163663 - DNA, 19 bp, Homo sapiens
  siRNA target sequence for MASS1 (NM_032119.1,16303-16321).
gaagatgtcaaggtctttt

SEQ ID NO: 163664 - DNA, 19 bp, Homo sapiens
  siRNA target sequence for MASS1 (NM_032119.1,16322-16340).
ggcgagtcacacttaacaa

SEQ ID NO: 163665 - DNA, 19 bp, Homo sapiens
  siRNA target sequence for MASS1 (NM_032119.1,16323-16341).
gcgagtcacacttaacaaa

SEQ ID NO: 163666 - DNA, 19 bp, Homo sapiens
  siRNA target sequence for MASS1 (NM_032119.1,16324-16342).
cgagtcacacttaacaaaa

SEQ ID NO: 163667 - DNA, 19 bp, Homo sapiens
  siRNA target sequence for MASS1 (NM_032119.1,16422-16440).
gggtcaaacaaaatgcttt

SEQ ID NO: 163668 - DNA, 19 bp, Homo sapiens
  siRNA target sequence for MASS1 (NM_032119.1,16436-16454).
gctttatcagcattgaact

SEQ ID NO: 163669 - DNA, 19 bp, Homo sapiens
  siRNA target sequence for MASS1 (NM_032119.1,16544-16562).
gattcgcacagattaaaat

SEQ ID NO: 163670 - DNA, 19 bp, Homo sapiens
  siRNA target sequence for MASS1 (NM_032119.1,16548-16566).
cgcacagattaaaatctta

SEQ ID NO: 163671 - DNA, 19 bp, Homo sapiens
  siRNA target sequence for MASS1 (NM_032119.1,16580-16598).
ctcaaagccttgtgtattt

SEQ ID NO: 163672 - DNA, 19 bp, Homo sapiens
  siRNA target sequence for MASS1 (NM_032119.1,16653-16671).
gcaggtggccagagattct

SEQ ID NO: 163673 - DNA, 19 bp, Homo sapiens
  siRNA target sequence for MASS1 (NM_032119.1,16670-16688).
ctgggacaggactaatgat

SEQ ID NO: 163674 - DNA, 19 bp, Homo sapiens
  siRNA target sequence for MASS1 (NM_032119.1,16681-16699).
ctaatgatgtctgttaact

SEQ ID NO: 163675 - DNA, 19 bp, Homo sapiens
  siRNA target sequence for MASS1 (NM_032119.1,16716-16734).
gaggagtgctgaaacaatt

SEQ ID NO: 163676 - DNA, 19 bp, Homo sapiens
  siRNA target sequence for MASS1 (NM_032119.1,16756-16774).
gctatttctggaaaggatt

SEQ ID NO: 163677 - DNA, 19 bp, Homo sapiens
  siRNA target sequence for MASS1 (NM_032119.1,16765-16783).
ggaaaggattttgtgataa

SEQ ID NO: 163678 - DNA, 19 bp, Homo sapiens
  siRNA target sequence for MASS1 (NM_032119.1,16810-16828).
ggccagagaagcactgtat

SEQ ID NO: 163679 - DNA, 19 bp, Homo sapiens
  siRNA target sequence for MASS1 (NM_032119.1,16811-16829).
gccagagaagcactgtatt

SEQ ID NO: 163680 - DNA, 19 bp, Homo sapiens
  siRNA target sequence for MASS1 (NM_032119.1,16820-16838).
gcactgtattggatgtcat

SEQ ID NO: 163681 - DNA, 19 bp, Homo sapiens
  siRNA target sequence for MASS1 (NM_032119.1,16825-16843).
gtattggatgtcatcctaa

SEQ ID NO: 163682 - DNA, 19 bp, Homo sapiens
  siRNA target sequence for MASS1 (NM_032119.1,16845-16863).
gccagagacaggatcttta

SEQ ID NO: 163683 - DNA, 19 bp, Homo sapiens
  siRNA target sequence for MASS1 (NM_032119.1,16846-16864).
ccagagacaggatctttaa

SEQ ID NO: 163684 - DNA, 19 bp, Homo sapiens
  siRNA target sequence for MASS1 (NM_032119.1,16910-16928).
gtggtgccagaattgataa

SEQ ID NO: 163685 - DNA, 19 bp, Homo sapiens
  siRNA target sequence for MASS1 (NM_032119.1,16913-16931).
gtgccagaattgataaagt

SEQ ID NO: 163686 - DNA, 19 bp, Homo sapiens
  siRNA target sequence for MASS1 (NM_032119.1,16915-16933).
gccagaattgataaagtgt

SEQ ID NO: 163687 - DNA, 19 bp, Homo sapiens
  siRNA target sequence for MASS1 (NM_032119.1,16916-16934).
ccagaattgataaagtgta

SEQ ID NO: 163688 - DNA, 19 bp, Homo sapiens
  siRNA target sequence for MASS1 (NM_032119.1,17001-17019).
gctacatcagcctgtgaat

SEQ ID NO: 163689 - DNA, 19 bp, Homo sapiens
  siRNA target sequence for MASS1 (NM_032119.1,17043-17061).
ccataccatcagcatgaaa

SEQ ID NO: 163690 - DNA, 19 bp, Homo sapiens
  siRNA target sequence for MASS1 (NM_032119.1,17118-17136).
gataactactgaaggaaaa

SEQ ID NO: 163691 - DNA, 19 bp, Homo sapiens
  siRNA target sequence for MASS1 (NM_032119.1,17156-17174).
ccagccgaactcttttcta

SEQ ID NO: 163692 - DNA, 19 bp, Homo sapiens
  siRNA target sequence for MASS1 (NM_032119.1,17157-17175).
cagccgaactcttttctat

SEQ ID NO: 163693 - DNA, 19 bp, Homo sapiens
  siRNA target sequence for MASS1 (NM_032119.1,17165-17183).
ctcttttctatgagattct

SEQ ID NO: 163694 - DNA, 19 bp, Homo sapiens
  siRNA target sequence for MASS1 (NM_032119.1,17176-17194).
gagattctttgttctctta

SEQ ID NO: 163695 - DNA, 19 bp, Homo sapiens
  siRNA target sequence for MASS1 (NM_032119.1,17285-17303).
gcggctctcctggtgaaaa

SEQ ID NO: 163696 - DNA, 19 bp, Homo sapiens
  siRNA target sequence for MASS1 (NM_032119.1,17317-17335).
cttgatagttgcccatatt

SEQ ID NO: 163697 - DNA, 19 bp, Homo sapiens
  siRNA target sequence for MASS1 (NM_032119.1,17324-17342).
gttgcccatatttgtcaat

SEQ ID NO: 163698 - DNA, 19 bp, Homo sapiens
  siRNA target sequence for MASS1 (NM_032119.1,17357-17375).
ggtatcctcagcaaatcaa

SEQ ID NO: 163699 - DNA, 19 bp, Homo sapiens
  siRNA target sequence for MASS1 (NM_032119.1,17398-17416).
gaaggagattacattcgaa

SEQ ID NO: 163700 - DNA, 19 bp, Homo sapiens
  siRNA target sequence for MASS1 (NM_032119.1,17457-17475).
ggctgggaaaagtacatgt

SEQ ID NO: 163701 - DNA, 19 bp, Homo sapiens
  siRNA target sequence for MASS1 (NM_032119.1,17482-17500).
gtccagtttacagagtata

SEQ ID NO: 163702 - DNA, 19 bp, Homo sapiens
  siRNA target sequence for MASS1 (NM_032119.1,17505-17523).
ccaacagtggtttataagt

SEQ ID NO: 163703 - DNA, 19 bp, Homo sapiens
  siRNA target sequence for MASS1 (NM_032119.1,17529-17547).
caatcttcctaccctaaaa

SEQ ID NO: 163704 - DNA, 19 bp, Homo sapiens
  siRNA target sequence for MASS1 (NM_032119.1,17542-17560).
ctaaaaaataaggtattat

SEQ ID NO: 163705 - DNA, 19 bp, Homo sapiens
  siRNA target sequence for MASS1 (NM_032119.1,17585-17603).
cacaactcctgactaatga

SEQ ID NO: 163706 - DNA, 19 bp, Homo sapiens
  siRNA target sequence for MASS1 (NM_032119.1,17587-17605).
caactcctgactaatgaca

SEQ ID NO: 163707 - DNA, 19 bp, Homo sapiens
  siRNA target sequence for MASS1 (NM_032119.1,17629-17647).
gctgctgagcctagaatta

SEQ ID NO: 163708 - DNA, 19 bp, Homo sapiens
  siRNA target sequence for MASS1 (NM_032119.1,17769-17787).
gtctgtgtatgctgtctat

SEQ ID NO: 163709 - DNA, 19 bp, Homo sapiens
  siRNA target sequence for MASS1 (NM_032119.1,17788-17806).
gctcggactgacaacttgt

SEQ ID NO: 163710 - DNA, 19 bp, Homo sapiens
  siRNA target sequence for MASS1 (NM_032119.1,17791-17809).
cggactgacaacttgtctt

SEQ ID NO: 163711 - DNA, 19 bp, Homo sapiens
  siRNA target sequence for MASS1 (NM_032119.1,17795-17813).
ctgacaacttgtcttcata

SEQ ID NO: 163712 - DNA, 19 bp, Homo sapiens
  siRNA target sequence for MASS1 (NM_032119.1,17797-17815).
gacaacttgtcttcataca

SEQ ID NO: 163713 - DNA, 19 bp, Homo sapiens
  siRNA target sequence for MASS1 (NM_032119.1,17802-17820).
cttgtcttcatacaatgaa

SEQ ID NO: 163714 - DNA, 19 bp, Homo sapiens
  siRNA target sequence for MASS1 (NM_032119.1,17846-17864).
gtatctcaggtctttgctt

SEQ ID NO: 163715 - DNA, 19 bp, Homo sapiens
  siRNA target sequence for MASS1 (NM_032119.1,17901-17919).
catgtttgcagctaaactt

SEQ ID NO: 163716 - DNA, 19 bp, Homo sapiens
  siRNA target sequence for MASS1 (NM_032119.1,17942-17960).
gcttaggtacacagattct

SEQ ID NO: 163717 - DNA, 19 bp, Homo sapiens
  siRNA target sequence for MASS1 (NM_032119.1,18027-18045).
cacacattacctgtatctt

SEQ ID NO: 163718 - DNA, 19 bp, Homo sapiens
  siRNA target sequence for MASS1 (NM_032119.1,18037-18055).
ctgtatctttgccagttta

SEQ ID NO: 163719 - DNA, 19 bp, Homo sapiens
  siRNA target sequence for MASS1 (NM_032119.1,18122-18140).
ggcgatatctgctgttttt

SEQ ID NO: 163720 - DNA, 19 bp, Homo sapiens
  siRNA target sequence for MASS1 (NM_032119.1,18171-18189).
ggtgattctcctcatagtt

SEQ ID NO: 163721 - DNA, 19 bp, Homo sapiens
  siRNA target sequence for MASS1 (NM_032119.1,18172-18190).
gtgattctcctcatagtta

SEQ ID NO: 163722 - DNA, 19 bp, Homo sapiens
  siRNA target sequence for MASS1 (NM_032119.1,18174-18192).
gattctcctcatagttatt

SEQ ID NO: 163723 - DNA, 19 bp, Homo sapiens
  siRNA target sequence for MASS1 (NM_032119.1,18213-18231).
gagcatgtcacagatctat

SEQ ID NO: 163724 - DNA, 19 bp, Homo sapiens
  siRNA target sequence for MASS1 (NM_032119.1,18268-18286).
gtctatgctgctttgttca

SEQ ID NO: 163725 - DNA, 19 bp, Homo sapiens
  siRNA target sequence for MASS1 (NM_032119.1,18409-18427).
gaaattccactgattttat

SEQ ID NO: 163726 - DNA, 19 bp, Homo sapiens
  siRNA target sequence for MASS1 (NM_032119.1,18522-18540).
cagtctgcagggactttat

SEQ ID NO: 163727 - DNA, 19 bp, Homo sapiens
  siRNA target sequence for MASS1 (NM_032119.1,18524-18542).
gtctgcagggactttatgt

SEQ ID NO: 163728 - DNA, 19 bp, Homo sapiens
  siRNA target sequence for MASS1 (NM_032119.1,18786-18804).
gccaagtccacaaaatgga

SEQ ID NO: 163729 - DNA, 19 bp, Homo sapiens
  siRNA target sequence for MASS1 (NM_032119.1,18813-18831).
cccgtcctctggaggatat

SEQ ID NO: 163730 - DNA, 19 bp, Homo sapiens
  siRNA target sequence for MOXD1 (NM_015529.1,371-389).
cacacacaataattgaatt

SEQ ID NO: 163731 - DNA, 19 bp, Homo sapiens
  siRNA target sequence for MOXD1 (NM_015529.1,373-391).
cacacaataattgaattta

SEQ ID NO: 163732 - DNA, 19 bp, Homo sapiens
  siRNA target sequence for MOXD1 (NM_015529.1,412-430).
gacataaatgacaagagta

SEQ ID NO: 163733 - DNA, 19 bp, Homo sapiens
  siRNA target sequence for MOXD1 (NM_015529.1,414-432).
cataaatgacaagagtata

SEQ ID NO: 163734 - DNA, 19 bp, Homo sapiens
  siRNA target sequence for MOXD1 (NM_015529.1,459-477).
ggcctaccaccatgaagat

SEQ ID NO: 163735 - DNA, 19 bp, Homo sapiens
  siRNA target sequence for MOXD1 (NM_015529.1,521-539).
ccaagagtttgcggttatt

SEQ ID NO: 163736 - DNA, 19 bp, Homo sapiens
  siRNA target sequence for MOXD1 (NM_015529.1,534-552).
gttattgaatcctgagaaa

SEQ ID NO: 163737 - DNA, 19 bp, Homo sapiens
  siRNA target sequence for MOXD1 (NM_015529.1,562-580).
ctatctacagccttaccat

SEQ ID NO: 163738 - DNA, 19 bp, Homo sapiens
  siRNA target sequence for MOXD1 (NM_015529.1,566-584).
ctacagccttaccatactt

SEQ ID NO: 163739 - DNA, 19 bp, Homo sapiens
  siRNA target sequence for MOXD1 (NM_015529.1,607-625).
cccatcccaaacaaagata

SEQ ID NO: 163740 - DNA, 19 bp, Homo sapiens
  siRNA target sequence for MOXD1 (NM_015529.1,636-654).
gtgccaaatgtttaagatt

SEQ ID NO: 163741 - DNA, 19 bp, Homo sapiens
  siRNA target sequence for MOXD1 (NM_015529.1,730-748).
cacatcctgctctatcagt

SEQ ID NO: 163742 - DNA, 19 bp, Homo sapiens
  siRNA target sequence for MOXD1 (NM_015529.1,749-767).
gcagcaacaactttaacga

SEQ ID NO: 163743 - DNA, 19 bp, Homo sapiens
  siRNA target sequence for MOXD1 (NM_015529.1,803-821).
ccaacatgcccgatgcatt

SEQ ID NO: 163744 - DNA, 19 bp, Homo sapiens
  siRNA target sequence for MOXD1 (NM_015529.1,859-877).
ggtggagagggcttttctt

SEQ ID NO: 163745 - DNA, 19 bp, Homo sapiens
  siRNA target sequence for MOXD1 (NM_015529.1,911-929).
cattagatccgcattatgt

SEQ ID NO: 163746 - DNA, 19 bp, Homo sapiens
  siRNA target sequence for MOXD1 (NM_015529.1,933-951).
cctagaagtccattatgat

SEQ ID NO: 163747 - DNA, 19 bp, Homo sapiens
  siRNA target sequence for MOXD1 (NM_015529.1,959-977).
cttatgaggaaggcttaat

SEQ ID NO: 163748 - DNA, 19 bp, Homo sapiens
  siRNA target sequence for MOXD1 (NM_015529.1,964-982).
gaggaaggcttaatagata

SEQ ID NO: 163749 - DNA, 19 bp, Homo sapiens
  siRNA target sequence for MOXD1 (NM_015529.1,996-1014).
gttattttacacaatggat

SEQ ID NO: 163750 - DNA, 19 bp, Homo sapiens
  siRNA target sequence for MOXD1 (NM_015529.1,1211-1229).
gcatcaggctgcgtcattt

SEQ ID NO: 163751 - DNA, 19 bp, Homo sapiens
  siRNA target sequence for MOXD1 (NM_015529.1,1215-1233).
caggctgcgtcattttcga

SEQ ID NO: 163752 - DNA, 19 bp, Homo sapiens
  siRNA target sequence for MOXD1 (NM_015529.1,1255-1273).
cttgcctatgatgatgatt

SEQ ID NO: 163753 - DNA, 19 bp, Homo sapiens
  siRNA target sequence for MOXD1 (NM_015529.1,1319-1337).
caatcttaccaggagataa

SEQ ID NO: 163754 - DNA, 19 bp, Homo sapiens
  siRNA target sequence for MOXD1 (NM_015529.1,1323-1341).
cttaccaggagataaccta

SEQ ID NO: 163755 - DNA, 19 bp, Homo sapiens
  siRNA target sequence for MOXD1 (NM_015529.1,1354-1372).
cgctacaacacgaaagata

SEQ ID NO: 163756 - DNA, 19 bp, Homo sapiens
  siRNA target sequence for MOXD1 (NM_015529.1,1356-1374).
ctacaacacgaaagataga

SEQ ID NO: 163757 - DNA, 19 bp, Homo sapiens
  siRNA target sequence for MOXD1 (NM_015529.1,1504-1522).
ggggttaaggagatctaca

SEQ ID NO: 163758 - DNA, 19 bp, Homo sapiens
  siRNA target sequence for MOXD1 (NM_015529.1,1530-1548).
cacgacctggcctttcatt

SEQ ID NO: 163759 - DNA, 19 bp, Homo sapiens
  siRNA target sequence for MOXD1 (NM_015529.1,1698-1716).
gtcgattcaaggaatgaca

SEQ ID NO: 163760 - DNA, 19 bp, Homo sapiens
  siRNA target sequence for MOXD1 (NM_015529.1,1715-1733).
cagcattacctccagatat

SEQ ID NO: 163761 - DNA, 19 bp, Homo sapiens
  siRNA target sequence for MOXD1 (NM_015529.1,1718-1736).
cattacctccagatataga

SEQ ID NO: 163762 - DNA, 19 bp, Homo sapiens
  siRNA target sequence for PAM (NM_000919.2,401-419).
gttctccttgtttttccaa

SEQ ID NO: 163763 - DNA, 19 bp, Homo sapiens
  siRNA target sequence for PAM (NM_000919.2,510-528).
ccagacccgtagttcctat

SEQ ID NO: 163764 - DNA, 19 bp, Homo sapiens
  siRNA target sequence for PAM (NM_000919.2,511-529).
cagacccgtagttcctatt

SEQ ID NO: 163765 - DNA, 19 bp, Homo sapiens
  siRNA target sequence for PAM (NM_000919.2,513-531).
gacccgtagttcctattga

SEQ ID NO: 163766 - DNA, 19 bp, Homo sapiens
  siRNA target sequence for PAM (NM_000919.2,515-533).
cccgtagttcctattgatt

SEQ ID NO: 163767 - DNA, 19 bp, Homo sapiens
  siRNA target sequence for PAM (NM_000919.2,517-535).
cgtagttcctattgattca

SEQ ID NO: 163768 - DNA, 19 bp, Homo sapiens
  siRNA target sequence for PAM (NM_000919.2,562-580).
gcctggggttacacctaaa

SEQ ID NO: 163769 - DNA, 19 bp, Homo sapiens
  siRNA target sequence for PAM (NM_000919.2,564-582).
ctggggttacacctaaaca

SEQ ID NO: 163770 - DNA, 19 bp, Homo sapiens
  siRNA target sequence for PAM (NM_000919.2,566-584).
ggggttacacctaaacagt

SEQ ID NO: 163771 - DNA, 19 bp, Homo sapiens
  siRNA target sequence for PAM (NM_000919.2,575-593).
cctaaacagtccgatacat

SEQ ID NO: 163772 - DNA, 19 bp, Homo sapiens
  siRNA target sequence for PAM (NM_000919.2,576-594).
ctaaacagtccgatacata

SEQ ID NO: 163773 - DNA, 19 bp, Homo sapiens
  siRNA target sequence for PAM (NM_000919.2,581-599).
cagtccgatacatacttct

SEQ ID NO: 163774 - DNA, 19 bp, Homo sapiens
  siRNA target sequence for PAM (NM_000919.2,591-609).
catacttctgcatgtctat

SEQ ID NO: 163775 - DNA, 19 bp, Homo sapiens
  siRNA target sequence for PAM (NM_000919.2,601-619).
catgtctatgcgaatacca

SEQ ID NO: 163776 - DNA, 19 bp, Homo sapiens
  siRNA target sequence for PAM (NM_000919.2,633-651).
ccttcgtgattgacttcaa

SEQ ID NO: 163777 - DNA, 19 bp, Homo sapiens
  siRNA target sequence for PAM (NM_000919.2,653-671).
cctcgagccagcatggata

SEQ ID NO: 163778 - DNA, 19 bp, Homo sapiens
  siRNA target sequence for PAM (NM_000919.2,680-698).
cacatgttactttttggat

SEQ ID NO: 163779 - DNA, 19 bp, Homo sapiens
  siRNA target sequence for PAM (NM_000919.2,708-726).
cttcatccactggaagtta

SEQ ID NO: 163780 - DNA, 19 bp, Homo sapiens
  siRNA target sequence for PAM (NM_000919.2,846-864).
gaagtaaatactttgtact

SEQ ID NO: 163781 - DNA, 19 bp, Homo sapiens
  siRNA target sequence for PAM (NM_000919.2,849-867).
gtaaatactttgtactaca

SEQ ID NO: 163782 - DNA, 19 bp, Homo sapiens
  siRNA target sequence for PAM (NM_000919.2,868-886).
ggtacactatggggatatt

SEQ ID NO: 163783 - DNA, 19 bp, Homo sapiens
  siRNA target sequence for PAM (NM_000919.2,878-896).
ggggatattagtgctttta

SEQ ID NO: 163784 - DNA, 19 bp, Homo sapiens
  siRNA target sequence for PAM (NM_000919.2,880-898).
ggatattagtgcttttaga

SEQ ID NO: 163785 - DNA, 19 bp, Homo sapiens
  siRNA target sequence for PAM (NM_000919.2,942-960).
gtctgccacagcctttaat

SEQ ID NO: 163786 - DNA, 19 bp, Homo sapiens
  siRNA target sequence for PAM (NM_000919.2,965-983).
ggcatgtaccttatgatgt

SEQ ID NO: 163787 - DNA, 19 bp, Homo sapiens
  siRNA target sequence for PAM (NM_000919.2,1018-1036).
ggtgaattctgacatttca

SEQ ID NO: 163788 - DNA, 19 bp, Homo sapiens
  siRNA target sequence for PAM (NM_000919.2,1019-1037).
gtgaattctgacatttcat

SEQ ID NO: 163789 - DNA, 19 bp, Homo sapiens
  siRNA target sequence for PAM (NM_000919.2,1028-1046).
gacatttcatgccattata

SEQ ID NO: 163790 - DNA, 19 bp, Homo sapiens
  siRNA target sequence for PAM (NM_000919.2,1030-1048).
catttcatgccattataaa

SEQ ID NO: 163791 - DNA, 19 bp, Homo sapiens
  siRNA target sequence for PAM (NM_000919.2,1077-1095).
gagttcacactcaccattt

SEQ ID NO: 163792 - DNA, 19 bp, Homo sapiens
  siRNA target sequence for PAM (NM_000919.2,1091-1109).
catttaggtaaggtagtaa

SEQ ID NO: 163793 - DNA, 19 bp, Homo sapiens
  siRNA target sequence for PAM (NM_000919.2,1102-1120).
ggtagtaagtggatacaga

SEQ ID NO: 163794 - DNA, 19 bp, Homo sapiens
  siRNA target sequence for PAM (NM_000919.2,1106-1124).
gtaagtggatacagagtaa

SEQ ID NO: 163795 - DNA, 19 bp, Homo sapiens
  siRNA target sequence for PAM (NM_000919.2,1189-1207).
ggggcatccagttgatgta

SEQ ID NO: 163796 - DNA, 19 bp, Homo sapiens
  siRNA target sequence for PAM (NM_000919.2,1280-1298).
ggcacgtctagtgatgaaa

SEQ ID NO: 163797 - DNA, 19 bp, Homo sapiens
  siRNA target sequence for PAM (NM_000919.2,1295-1313).
gaaatgtgcaacttataca

SEQ ID NO: 163798 - DNA, 19 bp, Homo sapiens
  siRNA target sequence for PAM (NM_000919.2,1354-1372).
gacctgtacccagaatgta

SEQ ID NO: 163799 - DNA, 19 bp, Homo sapiens
  siRNA target sequence for PAM (NM_000919.2,1370-1388).
gtagctccagatatgttca

SEQ ID NO: 163800 - DNA, 19 bp, Homo sapiens
  siRNA target sequence for PAM (NM_000919.2,1400-1418).
ccagaggccaacattccaa

SEQ ID NO: 163801 - DNA, 19 bp, Homo sapiens
  siRNA target sequence for PAM (NM_000919.2,1401-1419).
cagaggccaacattccaat

SEQ ID NO: 163802 - DNA, 19 bp, Homo sapiens
  siRNA target sequence for PAM (NM_000919.2,1424-1442).
gtgaagtctgatatggtta

SEQ ID NO: 163803 - DNA, 19 bp, Homo sapiens
  siRNA target sequence for PAM (NM_000919.2,1444-1462).
gatgcatgaacatcataaa

SEQ ID NO: 163804 - DNA, 19 bp, Homo sapiens
  siRNA target sequence for PAM (NM_000919.2,1575-1593).
gggaagatgttgttcatgt

SEQ ID NO: 163805 - DNA, 19 bp, Homo sapiens
  siRNA target sequence for PAM (NM_000919.2,1586-1604).
gttcatgtgcacaaatata

SEQ ID NO: 163806 - DNA, 19 bp, Homo sapiens
  siRNA target sequence for PAM (NM_000919.2,1639-1657).
ggtagctgagattgcaaat

SEQ ID NO: 163807 - DNA, 19 bp, Homo sapiens
  siRNA target sequence for PAM (NM_000919.2,1652-1670).
gcaaatgtagtccaaaaaa

SEQ ID NO: 163808 - DNA, 19 bp, Homo sapiens
  siRNA target sequence for PAM (NM_000919.2,1672-1690).
ggatcttggtcgatctgat

SEQ ID NO: 163809 - DNA, 19 bp, Homo sapiens
  siRNA target sequence for PAM (NM_000919.2,1709-1727).
catgagaggggtaatgcta

SEQ ID NO: 163810 - DNA, 19 bp, Homo sapiens
  siRNA target sequence for PAM (NM_000919.2,1781-1799).
ccaccagagagcagagttt

SEQ ID NO: 163811 - DNA, 19 bp, Homo sapiens
  siRNA target sequence for PAM (NM_000919.2,1884-1902).
ggcctggagtatacttgtt

SEQ ID NO: 163812 - DNA, 19 bp, Homo sapiens
  siRNA target sequence for PAM (NM_000919.2,1885-1903).
gcctggagtatacttgtta

SEQ ID NO: 163813 - DNA, 19 bp, Homo sapiens
  siRNA target sequence for PAM (NM_000919.2,1924-1942).
ggctctagaccctaagaat

SEQ ID NO: 163814 - DNA, 19 bp, Homo sapiens
  siRNA target sequence for PAM (NM_000919.2,1925-1943).
gctctagaccctaagaata

SEQ ID NO: 163815 - DNA, 19 bp, Homo sapiens
  siRNA target sequence for PAM (NM_000919.2,2022-2040).
gactcggaccaattgaaga

SEQ ID NO: 163816 - DNA, 19 bp, Homo sapiens
  siRNA target sequence for PAM (NM_000919.2,2081-2099).
ctccagtccagtggaaaaa

SEQ ID NO: 163817 - DNA, 19 bp, Homo sapiens
  siRNA target sequence for PAM (NM_000919.2,2113-2131).
gccacatggcttgagtata

SEQ ID NO: 163818 - DNA, 19 bp, Homo sapiens
  siRNA target sequence for PAM (NM_000919.2,2166-2184).
ctctccatcaggtgttcaa

SEQ ID NO: 163819 - DNA, 19 bp, Homo sapiens
  siRNA target sequence for PAM (NM_000919.2,2243-2261).
ggcagtgaccagaatcact

SEQ ID NO: 163820 - DNA, 19 bp, Homo sapiens
  siRNA target sequence for PAM (NM_000919.2,2244-2262).
gcagtgaccagaatcactt

SEQ ID NO: 163821 - DNA, 19 bp, Homo sapiens
  siRNA target sequence for PAM (NM_000919.2,2292-2310).
caggcactggagccattta

SEQ ID NO: 163822 - DNA, 19 bp, Homo sapiens
  siRNA target sequence for PAM (NM_000919.2,2354-2372).
ccaagtggaaagttcatca

SEQ ID NO: 163823 - DNA, 19 bp, Homo sapiens
  siRNA target sequence for PAM (NM_000919.2,2449-2467).
gcctcttttgggccaatta

SEQ ID NO: 163824 - DNA, 19 bp, Homo sapiens
  siRNA target sequence for PAM (NM_000919.2,2450-2468).
cctcttttgggccaattat

SEQ ID NO: 163825 - DNA, 19 bp, Homo sapiens
  siRNA target sequence for PAM (NM_000919.2,2489-2507).
ggtcggatccagtgtttta

SEQ ID NO: 163826 - DNA, 19 bp, Homo sapiens
  siRNA target sequence for PAM (NM_000919.2,2490-2508).
gtcggatccagtgttttaa

SEQ ID NO: 163827 - DNA, 19 bp, Homo sapiens
  siRNA target sequence for PAM (NM_000919.2,2670-2688).
gggaaattatagacatctt

SEQ ID NO: 163828 - DNA, 19 bp, Homo sapiens
  siRNA target sequence for PAM (NM_000919.2,2672-2690).
gaaattatagacatcttca

SEQ ID NO: 163829 - DNA, 19 bp, Homo sapiens
  siRNA target sequence for PAM (NM_000919.2,2694-2712).
cagtgcgcaagcactttga

SEQ ID NO: 163830 - DNA, 19 bp, Homo sapiens
  siRNA target sequence for PAM (NM_000919.2,2809-2827).
ggaacatcgatcagttaaa

SEQ ID NO: 163831 - DNA, 19 bp, Homo sapiens
  siRNA target sequence for PAM (NM_000919.2,2810-2828).
gaacatcgatcagttaaaa

SEQ ID NO: 163832 - DNA, 19 bp, Homo sapiens
  siRNA target sequence for PAM (NM_000919.2,2835-2853).
gcattgaggtccaggaaat

SEQ ID NO: 163833 - DNA, 19 bp, Homo sapiens
  siRNA target sequence for PAM (NM_000919.2,2861-2879).
gccgaggcagttgttgaaa

SEQ ID NO: 163834 - DNA, 19 bp, Homo sapiens
  siRNA target sequence for PAM (NM_000919.2,2866-2884).
ggcagttgttgaaaccaaa

SEQ ID NO: 163835 - DNA, 19 bp, Homo sapiens
  siRNA target sequence for PAM (NM_000919.2,2958-2976).
cgggagtgcctgttgttct

SEQ ID NO: 163836 - DNA, 19 bp, Homo sapiens
  siRNA target sequence for PAM (NM_000919.2,2963-2981).
gtgcctgttgttctcatta

SEQ ID NO: 163837 - DNA, 19 bp, Homo sapiens
  siRNA target sequence for PAM (NM_000919.2,2965-2983).
gcctgttgttctcattaca

SEQ ID NO: 163838 - DNA, 19 bp, Homo sapiens
  siRNA target sequence for PAM (NM_000919.2,3085-3103).
gacgagttcaggaagagta

SEQ ID NO: 163839 - DNA, 19 bp, Homo sapiens
  siRNA target sequence for PAM (NM_000919.2,3134-3152).
ggcttaaaccttggtaatt

SEQ ID NO: 163840 - DNA, 19 bp, Homo sapiens
  siRNA target sequence for PAM (NM_000919.2,3135-3153).
gcttaaaccttggtaattt

SEQ ID NO: 163841 - DNA, 19 bp, Homo sapiens
  siRNA target sequence for SCO2 (NM_005138.1,681-699).
cccaggctagtcacagtta

SEQ ID NO: 163842 - DNA, 19 bp, Homo sapiens
  siRNA target sequence for SCO2 (NM_005138.1,696-714).
gttaccgcgtgtactacaa

SEQ ID NO: 163843 - DNA, 19 bp, Homo sapiens
  siRNA target sequence for SCO2 (NM_005138.1,788-806).
ggcctcttcacggattact

SEQ ID NO: 163844 - DNA, 19 bp, Homo sapiens
  siRNA target sequence for SCO2 (NM_005138.1,789-807).
gcctcttcacggattacta

SEQ ID NO: 163845 - DNA, 19 bp, Homo sapiens
  siRNA target sequence for SLC14A2 (NM_007163.2,911-929).
cgacatccccggatactca

SEQ ID NO: 163846 - DNA, 19 bp, Homo sapiens
  siRNA target sequence for SLC14A2 (NM_007163.2,966-984).
ggatctccggtcttccaat

SEQ ID NO: 163847 - DNA, 19 bp, Homo sapiens
  siRNA target sequence for SLC14A2 (NM_007163.2,1005-1023).
gatcgaaaagctcaatgaa

SEQ ID NO: 163848 - DNA, 19 bp, Homo sapiens
  siRNA target sequence for SLC14A2 (NM_007163.2,1190-1208).
ggaccgctcaggtgatgtt

SEQ ID NO: 163849 - DNA, 19 bp, Homo sapiens
  siRNA target sequence for SLC14A2 (NM_007163.2,1406-1424).
cggagaagttagactacta

SEQ ID NO: 163850 - DNA, 19 bp, Homo sapiens
  siRNA target sequence for SLC14A2 (NM_007163.2,1408-1426).
gagaagttagactactact

SEQ ID NO: 163851 - DNA, 19 bp, Homo sapiens
  siRNA target sequence for SLC14A2 (NM_007163.2,1692-1710).
ggtgtatggctgtgacaat

SEQ ID NO: 163852 - DNA, 19 bp, Homo sapiens
  siRNA target sequence for SLC14A2 (NM_007163.2,2239-2257).
cacaggagtgtatttcaca

SEQ ID NO: 163853 - DNA, 19 bp, Homo sapiens
  siRNA target sequence for SLC14A2 (NM_007163.2,2516-2534).
gtggagagggacttaaaga

SEQ ID NO: 163854 - DNA, 19 bp, Homo sapiens
  siRNA target sequence for SLC14A2 (NM_007163.2,2518-2536).
ggagagggacttaaagaca

SEQ ID NO: 163855 - DNA, 19 bp, Homo sapiens
  siRNA target sequence for SLC14A2 (NM_007163.2,2519-2537).
gagagggacttaaagacaa

SEQ ID NO: 163856 - DNA, 19 bp, Homo sapiens
  siRNA target sequence for SLC14A2 (NM_007163.2,2568-2586).
cctccgaggcacatctcaa

SEQ ID NO: 163857 - DNA, 19 bp, Homo sapiens
  siRNA target sequence for SLC14A2 (NM_007163.2,2576-2594).
gcacatctcaagtgatgtt

SEQ ID NO: 163858 - DNA, 19 bp, Homo sapiens
  siRNA target sequence for SLC14A2 (NM_007163.2,2727-2745).
ggccatcgctgcaggattt

SEQ ID NO: 163859 - DNA, 19 bp, Homo sapiens
  siRNA target sequence for SLC14A2 (NM_007163.2,2824-2842).
ctacccgtcatcatcatgt

SEQ ID NO: 163860 - DNA, 19 bp, Homo sapiens
  siRNA target sequence for SLC14A2 (NM_007163.2,3053-3071).
gagccatccccgttggaat

SEQ ID NO: 163861 - DNA, 19 bp, Homo sapiens
  siRNA target sequence for SLC14A2 (NM_007163.2,3076-3094).
caagtgtacggctgtgata

SEQ ID NO: 163862 - DNA, 19 bp, Homo sapiens
  siRNA target sequence for SLC14A2 (NM_007163.2,3249-3267).
cagcaccctcgcatgcata

SEQ ID NO: 163863 - DNA, 19 bp, Homo sapiens
  siRNA target sequence for SLC14A2 (NM_007163.2,3318-3336).
catcgcctgcgcactgttt

SEQ ID NO: 163864 - DNA, 19 bp, Homo sapiens
  siRNA target sequence for SLC14A2 (NM_007163.2,3352-3370).
gctgccctggctaacatgt

SEQ ID NO: 163865 - DNA, 19 bp, Homo sapiens
  siRNA target sequence for SLC14A2 (NM_007163.2,3355-3373).
gccctggctaacatgttat

SEQ ID NO: 163866 - DNA, 19 bp, Homo sapiens
  siRNA target sequence for SLC14A2 (NM_007163.2,3357-3375).
cctggctaacatgttatct

SEQ ID NO: 163867 - DNA, 19 bp, Homo sapiens
  siRNA target sequence for SLC14A2 (NM_007163.2,3531-3549).
cagaagggcatcaatcata

SEQ ID NO: 163868 - DNA, 19 bp, Homo sapiens
  siRNA target sequence for SLC14A2 (NM_007163.2,3536-3554).
gggcatcaatcataacaaa

SEQ ID NO: 163869 - DNA, 19 bp, Homo sapiens
  siRNA target sequence for SLC14A2 (NM_007163.2,3538-3556).
gcatcaatcataacaaagt

SEQ ID NO: 163870 - DNA, 19 bp, Homo sapiens
  siRNA target sequence for SLC15A4 (NM_145648.1,222-240).
cgtccaacctggtgctatt

SEQ ID NO: 163871 - DNA, 19 bp, Homo sapiens
  siRNA target sequence for SLC15A4 (NM_145648.1,225-243).
ccaacctggtgctattcct

SEQ ID NO: 163872 - DNA, 19 bp, Homo sapiens
  siRNA target sequence for SLC15A4 (NM_145648.1,690-708).
gtggcattgcctatattca

SEQ ID NO: 163873 - DNA, 19 bp, Homo sapiens
  siRNA target sequence for SLC15A4 (NM_145648.1,751-769).
ctgcgtcggccttgctttt

SEQ ID NO: 163874 - DNA, 19 bp, Homo sapiens
  siRNA target sequence for SLC15A4 (NM_145648.1,753-771).
gcgtcggccttgcttttgt

SEQ ID NO: 163875 - DNA, 19 bp, Homo sapiens
  siRNA target sequence for SLC15A4 (NM_145648.1,783-801).
gtggccagagcgttttcat

SEQ ID NO: 163876 - DNA, 19 bp, Homo sapiens
  siRNA target sequence for SLC15A4 (NM_145648.1,785-803).
ggccagagcgttttcatca

SEQ ID NO: 163877 - DNA, 19 bp, Homo sapiens
  siRNA target sequence for SLC15A4 (NM_145648.1,822-840).
gtgccttcaccgacatgtt

SEQ ID NO: 163878 - DNA, 19 bp, Homo sapiens
  siRNA target sequence for SLC15A4 (NM_145648.1,824-842).
gccttcaccgacatgttca

SEQ ID NO: 163879 - DNA, 19 bp, Homo sapiens
  siRNA target sequence for SLC15A4 (NM_145648.1,825-843).
ccttcaccgacatgttcaa

SEQ ID NO: 163880 - DNA, 19 bp, Homo sapiens
  siRNA target sequence for SLC15A4 (NM_145648.1,879-897).
gtggagagcgccagagtaa

SEQ ID NO: 163881 - DNA, 19 bp, Homo sapiens
  siRNA target sequence for SLC15A4 (NM_145648.1,911-929).
ggagtctttcagcaatctt

SEQ ID NO: 163882 - DNA, 19 bp, Homo sapiens
  siRNA target sequence for SLC15A4 (NM_145648.1,920-938).
cagcaatcttctaaacaaa

SEQ ID NO: 163883 - DNA, 19 bp, Homo sapiens
  siRNA target sequence for SLC15A4 (NM_145648.1,1046-1064).
ccttactggacagtgtatt

SEQ ID NO: 163884 - DNA, 19 bp, Homo sapiens
  siRNA target sequence for SLC15A4 (NM_145648.1,1051-1069).
ctggacagtgtatttccaa

SEQ ID NO: 163885 - DNA, 19 bp, Homo sapiens
  siRNA target sequence for SLC15A4 (NM_145648.1,1066-1084).
ccaaatgcagacaacatat

SEQ ID NO: 163886 - DNA, 19 bp, Homo sapiens
  siRNA target sequence for SLC15A4 (NM_145648.1,1072-1090).
gcagacaacatatgtttta

SEQ ID NO: 163887 - DNA, 19 bp, Homo sapiens
  siRNA target sequence for SLC15A4 (NM_145648.1,1105-1123).
gaggattccagaaatttca

SEQ ID NO: 163888 - DNA, 19 bp, Homo sapiens
  siRNA target sequence for SLC15A4 (NM_145648.1,1159-1177).
ctggctgaccatgtttgat

SEQ ID NO: 163889 - DNA, 19 bp, Homo sapiens
  siRNA target sequence for SLC15A4 (NM_145648.1,1217-1235).
ctggtcgatcccattttga

SEQ ID NO: 163890 - DNA, 19 bp, Homo sapiens
  siRNA target sequence for SLC15A4 (NM_145648.1,1219-1237).
ggtcgatcccattttgaga

SEQ ID NO: 163891 - DNA, 19 bp, Homo sapiens
  siRNA target sequence for SLC15A4 (NM_145648.1,1220-1238).
gtcgatcccattttgagaa

SEQ ID NO: 163892 - DNA, 19 bp, Homo sapiens
  siRNA target sequence for SLC15A4 (NM_145648.1,1273-1291).
cgccgtgggcatgttcttt

SEQ ID NO: 163893 - DNA, 19 bp, Homo sapiens
  siRNA target sequence for SLC15A4 (NM_145648.1,1303-1321).
ggcctttgctgcaggaatt

SEQ ID NO: 163894 - DNA, 19 bp, Homo sapiens
  siRNA target sequence for SLC15A4 (NM_145648.1,1314-1332).
caggaattttggagagtaa

SEQ ID NO: 163895 - DNA, 19 bp, Homo sapiens
  siRNA target sequence for SLC15A4 (NM_145648.1,1464-1482).
gtatcgcaggcctggaatt

SEQ ID NO: 163896 - DNA, 19 bp, Homo sapiens
  siRNA target sequence for SLC15A4 (NM_145648.1,1517-1535).
gccataatgggcttgttct

SEQ ID NO: 163897 - DNA, 19 bp, Homo sapiens
  siRNA target sequence for SLC15A4 (NM_145648.1,1577-1595).
ctggcactggtgtctatca

SEQ ID NO: 163898 - DNA, 19 bp, Homo sapiens
  siRNA target sequence for SLC15A4 (NM_145648.1,1619-1637).
cacacagactttggtaata

SEQ ID NO: 163899 - DNA, 19 bp, Homo sapiens
  siRNA target sequence for SLC15A4 (NM_145648.1,1623-1641).
cagactttggtaatattaa

SEQ ID NO: 163900 - DNA, 19 bp, Homo sapiens
  siRNA target sequence for SLC35B2 (NM_178148.1,260-278).
ctatgccagctttatggta

SEQ ID NO: 163901 - DNA, 19 bp, Homo sapiens
  siRNA target sequence for SLC35B2 (NM_178148.1,288-306).
ctcctggtgcagtacttca

SEQ ID NO: 163902 - DNA, 19 bp, Homo sapiens
  siRNA target sequence for SLC35B2 (NM_178148.1,480-498).
ctccaggtgtcttatctga

SEQ ID NO: 163903 - DNA, 19 bp, Homo sapiens
  siRNA target sequence for SLC35B2 (NM_178148.1,723-741).
caatacgaagctcttaagt

SEQ ID NO: 163904 - DNA, 19 bp, Homo sapiens
  siRNA target sequence for SLC35B2 (NM_178148.1,944-962).
cttactggcaggttatatt

SEQ ID NO: 163905 - DNA, 19 bp, Homo sapiens
  siRNA target sequence for SLC35B2 (NM_178148.1,948-966).
ctggcaggttatattgctt

SEQ ID NO: 163906 - DNA, 19 bp, Homo sapiens
  siRNA target sequence for SLC35B2 (NM_178148.1,996-1014).
gccctgtttgcctataaga

SEQ ID NO: 163907 - DNA, 19 bp, Homo sapiens
  siRNA target sequence for SLC35B2 (NM_178148.1,997-1015).
ccctgtttgcctataagat

SEQ ID NO: 163908 - DNA, 19 bp, Homo sapiens
  siRNA target sequence for SLC35B2 (NM_178148.1,999-1017).
ctgtttgcctataagatgt

SEQ ID NO: 163909 - DNA, 19 bp, Homo sapiens
  siRNA target sequence for TRRAP (NM_003496.1,243-261).
gttgaccagaccactttga

SEQ ID NO: 163910 - DNA, 19 bp, Homo sapiens
  siRNA target sequence for TRRAP (NM_003496.1,288-306).
gctctcacagatgtgaata

SEQ ID NO: 163911 - DNA, 19 bp, Homo sapiens
  siRNA target sequence for TRRAP (NM_003496.1,309-327).
cctgatgaaacaaagttga

SEQ ID NO: 163912 - DNA, 19 bp, Homo sapiens
  siRNA target sequence for TRRAP (NM_003496.1,365-383).
cacgtcatctcctcagtat

SEQ ID NO: 163913 - DNA, 19 bp, Homo sapiens
  siRNA target sequence for TRRAP (NM_003496.1,388-406).
cattcctagaacatatcat

SEQ ID NO: 163914 - DNA, 19 bp, Homo sapiens
  siRNA target sequence for TRRAP (NM_003496.1,407-425).
ccctcgattccttacattt

SEQ ID NO: 163915 - DNA, 19 bp, Homo sapiens
  siRNA target sequence for TRRAP (NM_003496.1,476-494).
gcggaagctcgtacttgaa

SEQ ID NO: 163916 - DNA, 19 bp, Homo sapiens
  siRNA target sequence for TRRAP (NM_003496.1,477-495).
cggaagctcgtacttgaaa

SEQ ID NO: 163917 - DNA, 19 bp, Homo sapiens
  siRNA target sequence for TRRAP (NM_003496.1,478-496).
ggaagctcgtacttgaaat

SEQ ID NO: 163918 - DNA, 19 bp, Homo sapiens
  siRNA target sequence for TRRAP (NM_003496.1,479-497).
gaagctcgtacttgaaata

SEQ ID NO: 163919 - DNA, 19 bp, Homo sapiens
  siRNA target sequence for TRRAP (NM_003496.1,525-543).
cttcgtcctcacacaaaaa

SEQ ID NO: 163920 - DNA, 19 bp, Homo sapiens
  siRNA target sequence for TRRAP (NM_003496.1,566-584).
ctttttagagacggaaaat

SEQ ID NO: 163921 - DNA, 19 bp, Homo sapiens
  siRNA target sequence for TRRAP (NM_003496.1,642-660).
ccaccgatcacacaagaaa

SEQ ID NO: 163922 - DNA, 19 bp, Homo sapiens
  siRNA target sequence for TRRAP (NM_003496.1,643-661).
caccgatcacacaagaaat

SEQ ID NO: 163923 - DNA, 19 bp, Homo sapiens
  siRNA target sequence for TRRAP (NM_003496.1,646-664).
cgatcacacaagaaattca

SEQ ID NO: 163924 - DNA, 19 bp, Homo sapiens
  siRNA target sequence for TRRAP (NM_003496.1,695-713).
caaggagcttccaaaagta

SEQ ID NO: 163925 - DNA, 19 bp, Homo sapiens
  siRNA target sequence for TRRAP (NM_003496.1,761-779).
gcctcccccagaaatggtt

SEQ ID NO: 163926 - DNA, 19 bp, Homo sapiens
  siRNA target sequence for TRRAP (NM_003496.1,769-787).
cagaaatggttggtatgat

SEQ ID NO: 163927 - DNA, 19 bp, Homo sapiens
  siRNA target sequence for TRRAP (NM_003496.1,827-845).
cagtgagactcgaacacat

SEQ ID NO: 163928 - DNA, 19 bp, Homo sapiens
  siRNA target sequence for TRRAP (NM_003496.1,893-911).
gcccattattgttgtttta

SEQ ID NO: 163929 - DNA, 19 bp, Homo sapiens
  siRNA target sequence for TRRAP (NM_003496.1,954-972).
gagtttgtgcccttgatca

SEQ ID NO: 163930 - DNA, 19 bp, Homo sapiens
  siRNA target sequence for TRRAP (NM_003496.1,999-1017).
gcacaagcgaggcaacata

SEQ ID NO: 163931 - DNA, 19 bp, Homo sapiens
  siRNA target sequence for TRRAP (NM_003496.1,1000-1018).
cacaagcgaggcaacataa

SEQ ID NO: 163932 - DNA, 19 bp, Homo sapiens
  siRNA target sequence for TRRAP (NM_003496.1,1005-1023).
gcgaggcaacataagcttt

SEQ ID NO: 163933 - DNA, 19 bp, Homo sapiens
  siRNA target sequence for TRRAP (NM_003496.1,1006-1024).
cgaggcaacataagcttta

SEQ ID NO: 163934 - DNA, 19 bp, Homo sapiens
  siRNA target sequence for TRRAP (NM_003496.1,1034-1052).
gttgtatgctgacttcatt

SEQ ID NO: 163935 - DNA, 19 bp, Homo sapiens
  siRNA target sequence for TRRAP (NM_003496.1,1053-1071).
gctgctcagattaaaacat

SEQ ID NO: 163936 - DNA, 19 bp, Homo sapiens
  siRNA target sequence for TRRAP (NM_003496.1,1083-1101).
gcttacattatcaggattt

SEQ ID NO: 163937 - DNA, 19 bp, Homo sapiens
  siRNA target sequence for TRRAP (NM_003496.1,1084-1102).
cttacattatcaggattta

SEQ ID NO: 163938 - DNA, 19 bp, Homo sapiens
  siRNA target sequence for TRRAP (NM_003496.1,1107-1125).
gagttggtgactaagtatt

SEQ ID NO: 163939 - DNA, 19 bp, Homo sapiens
  siRNA target sequence for TRRAP (NM_003496.1,1109-1127).
gttggtgactaagtattct

SEQ ID NO: 163940 - DNA, 19 bp, Homo sapiens
  siRNA target sequence for TRRAP (NM_003496.1,1203-1221).
ctgattgctgccaaacaca

SEQ ID NO: 163941 - DNA, 19 bp, Homo sapiens
  siRNA target sequence for TRRAP (NM_003496.1,1271-1289).
gtttgatgaatccatacta

SEQ ID NO: 163942 - DNA, 19 bp, Homo sapiens
  siRNA target sequence for TRRAP (NM_003496.1,1287-1305).
ctaattggctcaggatata

SEQ ID NO: 163943 - DNA, 19 bp, Homo sapiens
  siRNA target sequence for TRRAP (NM_003496.1,1407-1425).
cagctcttcgccaagaaca

SEQ ID NO: 163944 - DNA, 19 bp, Homo sapiens
  siRNA target sequence for TRRAP (NM_003496.1,1889-1907).
cacgtggggcataacatca

SEQ ID NO: 163945 - DNA, 19 bp, Homo sapiens
  siRNA target sequence for TRRAP (NM_003496.1,1895-1913).
gggcataacatcatgcaaa

SEQ ID NO: 163946 - DNA, 19 bp, Homo sapiens
  siRNA target sequence for TRRAP (NM_003496.1,1918-1936).
ctggtgaagctcagttcat

SEQ ID NO: 163947 - DNA, 19 bp, Homo sapiens
  siRNA target sequence for TRRAP (NM_003496.1,1964-1982).
gacacagatttacatcaaa

SEQ ID NO: 163948 - DNA, 19 bp, Homo sapiens
  siRNA target sequence for TRRAP (NM_003496.1,2021-2039).
ggtccagatagcaggaaat

SEQ ID NO: 163949 - DNA, 19 bp, Homo sapiens
  siRNA target sequence for TRRAP (NM_003496.1,2116-2134).
ctggtgtgttcacaatgat

SEQ ID NO: 163950 - DNA, 19 bp, Homo sapiens
  siRNA target sequence for TRRAP (NM_003496.1,2135-2153).
gaaccccttaacgttcaaa

SEQ ID NO: 163951 - DNA, 19 bp, Homo sapiens
  siRNA target sequence for TRRAP (NM_003496.1,2138-2156).
ccccttaacgttcaaagaa

SEQ ID NO: 163952 - DNA, 19 bp, Homo sapiens
  siRNA target sequence for TRRAP (NM_003496.1,2139-2157).
cccttaacgttcaaagaaa

SEQ ID NO: 163953 - DNA, 19 bp, Homo sapiens
  siRNA target sequence for TRRAP (NM_003496.1,2140-2158).
ccttaacgttcaaagaaat

SEQ ID NO: 163954 - DNA, 19 bp, Homo sapiens
  siRNA target sequence for TRRAP (NM_003496.1,2163-2181).
caaactacggtcccttata

SEQ ID NO: 163955 - DNA, 19 bp, Homo sapiens
  siRNA target sequence for TRRAP (NM_003496.1,2167-2185).
ctacggtcccttatatggt

SEQ ID NO: 163956 - DNA, 19 bp, Homo sapiens
  siRNA target sequence for TRRAP (NM_003496.1,2266-2284).
ctacgattctggtggaata

SEQ ID NO: 163957 - DNA, 19 bp, Homo sapiens
  siRNA target sequence for TRRAP (NM_003496.1,2463-2481).
gaaccctacaactacttct

SEQ ID NO: 163958 - DNA, 19 bp, Homo sapiens
  siRNA target sequence for TRRAP (NM_003496.1,2495-2513).
gctgtttcgctctattggt

SEQ ID NO: 163959 - DNA, 19 bp, Homo sapiens
  siRNA target sequence for TRRAP (NM_003496.1,2515-2533).
gaggtagccacgatctctt

SEQ ID NO: 163960 - DNA, 19 bp, Homo sapiens
  siRNA target sequence for TRRAP (NM_003496.1,2521-2539).
gccacgatctcttgtatca

SEQ ID NO: 163961 - DNA, 19 bp, Homo sapiens
  siRNA target sequence for TRRAP (NM_003496.1,2673-2691).
ccgtacctgcccatgctta

SEQ ID NO: 163962 - DNA, 19 bp, Homo sapiens
  siRNA target sequence for TRRAP (NM_003496.1,2674-2692).
cgtacctgcccatgcttat

SEQ ID NO: 163963 - DNA, 19 bp, Homo sapiens
  siRNA target sequence for TRRAP (NM_003496.1,2885-2903).
ccgtgtgctcggtaagttt

SEQ ID NO: 163964 - DNA, 19 bp, Homo sapiens
  siRNA target sequence for TRRAP (NM_003496.1,3096-3114).
gcgtgggaagtgatcaaat

SEQ ID NO: 163965 - DNA, 19 bp, Homo sapiens
  siRNA target sequence for TRRAP (NM_003496.1,3100-3118).
gggaagtgatcaaatgctt

SEQ ID NO: 163966 - DNA, 19 bp, Homo sapiens
  siRNA target sequence for TRRAP (NM_003496.1,3173-3191).
ggcacaccccaactttaca

SEQ ID NO: 163967 - DNA, 19 bp, Homo sapiens
  siRNA target sequence for TRRAP (NM_003496.1,3215-3233).
catctcacatcgctacaaa

SEQ ID NO: 163968 - DNA, 19 bp, Homo sapiens
  siRNA target sequence for TRRAP (NM_003496.1,3424-3442).
ccagcacagccatgtttca

SEQ ID NO: 163969 - DNA, 19 bp, Homo sapiens
  siRNA target sequence for TRRAP (NM_003496.1,3470-3488).
ggatcctttggttctcatt

SEQ ID NO: 163970 - DNA, 19 bp, Homo sapiens
  siRNA target sequence for TRRAP (NM_003496.1,3479-3497).
ggttctcattgatgcaatt

SEQ ID NO: 163971 - DNA, 19 bp, Homo sapiens
  siRNA target sequence for TRRAP (NM_003496.1,3483-3501).
ctcattgatgcaattgcta

SEQ ID NO: 163972 - DNA, 19 bp, Homo sapiens
  siRNA target sequence for TRRAP (NM_003496.1,3489-3507).
gatgcaattgctatttgta

SEQ ID NO: 163973 - DNA, 19 bp, Homo sapiens
  siRNA target sequence for TRRAP (NM_003496.1,3551-3569).
cctagctgtgatatttgat

SEQ ID NO: 163974 - DNA, 19 bp, Homo sapiens
  siRNA target sequence for TRRAP (NM_003496.1,3646-3664).
gtgcatgttgttatgaaca

SEQ ID NO: 163975 - DNA, 19 bp, Homo sapiens
  siRNA target sequence for TRRAP (NM_003496.1,3684-3702).
gggggtgtggtgtctatta

SEQ ID NO: 163976 - DNA, 19 bp, Homo sapiens
  siRNA target sequence for TRRAP (NM_003496.1,3685-3703).
ggggtgtggtgtctattaa

SEQ ID NO: 163977 - DNA, 19 bp, Homo sapiens
  siRNA target sequence for TRRAP (NM_003496.1,3687-3705).
ggtgtggtgtctattaagt

SEQ ID NO: 163978 - DNA, 19 bp, Homo sapiens
  siRNA target sequence for TRRAP (NM_003496.1,3688-3706).
gtgtggtgtctattaagtt

SEQ ID NO: 163979 - DNA, 19 bp, Homo sapiens
  siRNA target sequence for TRRAP (NM_003496.1,3855-3873).
cggtgcgcaacgcctttaa

SEQ ID NO: 163980 - DNA, 19 bp, Homo sapiens
  siRNA target sequence for TRRAP (NM_003496.1,3856-3874).
ggtgcgcaacgcctttaaa

SEQ ID NO: 163981 - DNA, 19 bp, Homo sapiens
  siRNA target sequence for TRRAP (NM_003496.1,3857-3875).
gtgcgcaacgcctttaaaa

SEQ ID NO: 163982 - DNA, 19 bp, Homo sapiens
  siRNA target sequence for TRRAP (NM_003496.1,3859-3877).
gcgcaacgcctttaaaaga

SEQ ID NO: 163983 - DNA, 19 bp, Homo sapiens
  siRNA target sequence for TRRAP (NM_003496.1,4137-4155).
gaggggaacacgttctgta

SEQ ID NO: 163984 - DNA, 19 bp, Homo sapiens
  siRNA target sequence for TRRAP (NM_003496.1,4200-4218).
gagcataaggtgttctaca

SEQ ID NO: 163985 - DNA, 19 bp, Homo sapiens
  siRNA target sequence for TRRAP (NM_003496.1,4245-4263).
gaagattcagctttaacaa

SEQ ID NO: 163986 - DNA, 19 bp, Homo sapiens
  siRNA target sequence for TRRAP (NM_003496.1,4261-4279).
caaagctgccctgttataa

SEQ ID NO: 163987 - DNA, 19 bp, Homo sapiens
  siRNA target sequence for TRRAP (NM_003496.1,4289-4307).
gtcactcgtacctttacga

SEQ ID NO: 163988 - DNA, 19 bp, Homo sapiens
  siRNA target sequence for TRRAP (NM_003496.1,4291-4309).
cactcgtacctttacgaat

SEQ ID NO: 163989 - DNA, 19 bp, Homo sapiens
  siRNA target sequence for TRRAP (NM_003496.1,4324-4342).
cacttgctgcctgcaatta

SEQ ID NO: 163990 - DNA, 19 bp, Homo sapiens
  siRNA target sequence for TRRAP (NM_003496.1,4348-4366).
ctcagtccagggagaaaat

SEQ ID NO: 163991 - DNA, 19 bp, Homo sapiens
  siRNA target sequence for TRRAP (NM_003496.1,4386-4404).
gccctgaattccaccaata

SEQ ID NO: 163992 - DNA, 19 bp, Homo sapiens
  siRNA target sequence for TRRAP (NM_003496.1,4388-4406).
cctgaattccaccaatagt

SEQ ID NO: 163993 - DNA, 19 bp, Homo sapiens
  siRNA target sequence for TRRAP (NM_003496.1,4421-4439).
cggagaagcctgtatgaga

SEQ ID NO: 163994 - DNA, 19 bp, Homo sapiens
  siRNA target sequence for TRRAP (NM_003496.1,4423-4441).
gagaagcctgtatgagaaa

SEQ ID NO: 163995 - DNA, 19 bp, Homo sapiens
  siRNA target sequence for TRRAP (NM_003496.1,4428-4446).
gcctgtatgagaaagtttt

SEQ ID NO: 163996 - DNA, 19 bp, Homo sapiens
  siRNA target sequence for TRRAP (NM_003496.1,4459-4477).
ccatagaagtcgatcaaat

SEQ ID NO: 163997 - DNA, 19 bp, Homo sapiens
  siRNA target sequence for TRRAP (NM_003496.1,4470-4488).
gatcaaatccacacacata

SEQ ID NO: 163998 - DNA, 19 bp, Homo sapiens
  siRNA target sequence for TRRAP (NM_003496.1,4522-4540).
ggagcttgacgctgaatgt

SEQ ID NO: 163999 - DNA, 19 bp, Homo sapiens
  siRNA target sequence for TRRAP (NM_003496.1,4523-4541).
gagcttgacgctgaatgtt

SEQ ID NO: 164000 - DNA, 19 bp, Homo sapiens
  siRNA target sequence for TRRAP (NM_003496.1,4525-4543).
gcttgacgctgaatgttgt

SEQ ID NO: 164001 - DNA, 19 bp, Homo sapiens
  siRNA target sequence for TRRAP (NM_003496.1,4529-4547).
gacgctgaatgttgtgaat

SEQ ID NO: 164002 - DNA, 19 bp, Homo sapiens
  siRNA target sequence for TRRAP (NM_003496.1,4669-4687).
ggagcgacggaaacgaaat

SEQ ID NO: 164003 - DNA, 19 bp, Homo sapiens
  siRNA target sequence for TRRAP (NM_003496.1,4672-4690).
gcgacggaaacgaaatgaa

SEQ ID NO: 164004 - DNA, 19 bp, Homo sapiens
  siRNA target sequence for TRRAP (NM_003496.1,4818-4836).
cgagagcccctgatcaagt

SEQ ID NO: 164005 - DNA, 19 bp, Homo sapiens
  siRNA target sequence for TRRAP (NM_003496.1,4819-4837).
gagagcccctgatcaagtt

SEQ ID NO: 164006 - DNA, 19 bp, Homo sapiens
  siRNA target sequence for TRRAP (NM_003496.1,4861-4879).
cagtggagctgttcatgat

SEQ ID NO: 164007 - DNA, 19 bp, Homo sapiens
  siRNA target sequence for TRRAP (NM_003496.1,4899-4917).
ccccagtggagcagaatgt

SEQ ID NO: 164008 - DNA, 19 bp, Homo sapiens
  siRNA target sequence for TRRAP (NM_003496.1,4902-4920).
cagtggagcagaatgttta

SEQ ID NO: 164009 - DNA, 19 bp, Homo sapiens
  siRNA target sequence for TRRAP (NM_003496.1,4907-4925).
gagcagaatgtttatgagt

SEQ ID NO: 164010 - DNA, 19 bp, Homo sapiens
  siRNA target sequence for TRRAP (NM_003496.1,4909-4927).
gcagaatgtttatgagttt

SEQ ID NO: 164011 - DNA, 19 bp, Homo sapiens
  siRNA target sequence for TRRAP (NM_003496.1,5081-5099).
catcaagatcataagcatt

SEQ ID NO: 164012 - DNA, 19 bp, Homo sapiens
  siRNA target sequence for TRRAP (NM_003496.1,5090-5108).
cataagcattatagtgaaa

SEQ ID NO: 164013 - DNA, 19 bp, Homo sapiens
  siRNA target sequence for TRRAP (NM_003496.1,5095-5113).
gcattatagtgaaaaacga

SEQ ID NO: 164014 - DNA, 19 bp, Homo sapiens
  siRNA target sequence for TRRAP (NM_003496.1,5096-5114).
cattatagtgaaaaacgat

SEQ ID NO: 164015 - DNA, 19 bp, Homo sapiens
  siRNA target sequence for TRRAP (NM_003496.1,5314-5332).
cctttactggtcgttttct

SEQ ID NO: 164016 - DNA, 19 bp, Homo sapiens
  siRNA target sequence for TRRAP (NM_003496.1,5335-5353).
gcaacatgacattcttaaa

SEQ ID NO: 164017 - DNA, 19 bp, Homo sapiens
  siRNA target sequence for TRRAP (NM_003496.1,5336-5354).
caacatgacattcttaaaa

SEQ ID NO: 164018 - DNA, 19 bp, Homo sapiens
  siRNA target sequence for TRRAP (NM_003496.1,5408-5426).
cctgttctttcgctttgta

SEQ ID NO: 164019 - DNA, 19 bp, Homo sapiens
  siRNA target sequence for TRRAP (NM_003496.1,5438-5456).
ccccaacttcggagatgaa

SEQ ID NO: 164020 - DNA, 19 bp, Homo sapiens
  siRNA target sequence for TRRAP (NM_003496.1,5444-5462).
cttcggagatgaattaaaa

SEQ ID NO: 164021 - DNA, 19 bp, Homo sapiens
  siRNA target sequence for TRRAP (NM_003496.1,5449-5467).
gagatgaattaaaagctaa

SEQ ID NO: 164022 - DNA, 19 bp, Homo sapiens
  siRNA target sequence for TRRAP (NM_003496.1,5469-5487).
gttctgcagcatatcttga

SEQ ID NO: 164023 - DNA, 19 bp, Homo sapiens
  siRNA target sequence for TRRAP (NM_003496.1,5686-5704).
cccaccacatccatgacaa

SEQ ID NO: 164024 - DNA, 19 bp, Homo sapiens
  siRNA target sequence for TRRAP (NM_003496.1,5818-5836).
cgcacattatcgccaaatt

SEQ ID NO: 164025 - DNA, 19 bp, Homo sapiens
  siRNA target sequence for TRRAP (NM_003496.1,5829-5847).
gccaaattcgccatacaca

SEQ ID NO: 164026 - DNA, 19 bp, Homo sapiens
  siRNA target sequence for TRRAP (NM_003496.1,5830-5848).
ccaaattcgccatacacaa

SEQ ID NO: 164027 - DNA, 19 bp, Homo sapiens
  siRNA target sequence for TRRAP (NM_003496.1,5852-5870).
gatcgtcctgcaggttttt

SEQ ID NO: 164028 - DNA, 19 bp, Homo sapiens
  siRNA target sequence for TRRAP (NM_003496.1,6225-6243).
cagcagccggattcagata

SEQ ID NO: 164029 - DNA, 19 bp, Homo sapiens
  siRNA target sequence for TRRAP (NM_003496.1,6277-6295).
ctgtctcatcctccattaa

SEQ ID NO: 164030 - DNA, 19 bp, Homo sapiens
  siRNA target sequence for TRRAP (NM_003496.1,6324-6342).
gaagtgaaacgctttagga

SEQ ID NO: 164031 - DNA, 19 bp, Homo sapiens
  siRNA target sequence for TRRAP (NM_003496.1,6408-6426).
ctcgccaagcccattgaca

SEQ ID NO: 164032 - DNA, 19 bp, Homo sapiens
  siRNA target sequence for TRRAP (NM_003496.1,6463-6481).
gcgtggcctgtcaggttaa

SEQ ID NO: 164033 - DNA, 19 bp, Homo sapiens
  siRNA target sequence for TRRAP (NM_003496.1,6464-6482).
cgtggcctgtcaggttaat

SEQ ID NO: 164034 - DNA, 19 bp, Homo sapiens
  siRNA target sequence for TRRAP (NM_003496.1,6468-6486).
gcctgtcaggttaatgaca

SEQ ID NO: 164035 - DNA, 19 bp, Homo sapiens
  siRNA target sequence for TRRAP (NM_003496.1,6469-6487).
cctgtcaggttaatgacaa

SEQ ID NO: 164036 - DNA, 19 bp, Homo sapiens
  siRNA target sequence for TRRAP (NM_003496.1,6529-6547).
ggtgtgtgaaccttctgaa

SEQ ID NO: 164037 - DNA, 19 bp, Homo sapiens
  siRNA target sequence for TRRAP (NM_003496.1,6571-6589).
ggcccaagtccgaactcaa

SEQ ID NO: 164038 - DNA, 19 bp, Homo sapiens
  siRNA target sequence for TRRAP (NM_003496.1,6825-6843).
ccaacagagccgagtactt

SEQ ID NO: 164039 - DNA, 19 bp, Homo sapiens
  siRNA target sequence for TRRAP (NM_003496.1,6890-6908).
cgtcggaaaggtcatctat

SEQ ID NO: 164040 - DNA, 19 bp, Homo sapiens
  siRNA target sequence for TRRAP (NM_003496.1,6893-6911).
cggaaaggtcatctatgaa

SEQ ID NO: 164041 - DNA, 19 bp, Homo sapiens
  siRNA target sequence for TRRAP (NM_003496.1,6957-6975).
ctcttcgggacccttatga

SEQ ID NO: 164042 - DNA, 19 bp, Homo sapiens
  siRNA target sequence for TRRAP (NM_003496.1,6995-7013).
caacaaccccagctacata

SEQ ID NO: 164043 - DNA, 19 bp, Homo sapiens
  siRNA target sequence for TRRAP (NM_003496.1,7052-7070).
gatggtccgggagcattta

SEQ ID NO: 164044 - DNA, 19 bp, Homo sapiens
  siRNA target sequence for TRRAP (NM_003496.1,7208-7226).
gacatccctcatcgaaaaa

SEQ ID NO: 164045 - DNA, 19 bp, Homo sapiens
  siRNA target sequence for TRRAP (NM_003496.1,7257-7275).
gtcaaaatcgtggaagaat

SEQ ID NO: 164046 - DNA, 19 bp, Homo sapiens
  siRNA target sequence for TRRAP (NM_003496.1,7320-7338).
ctccgggagaagtccattt

SEQ ID NO: 164047 - DNA, 19 bp, Homo sapiens
  siRNA target sequence for TRRAP (NM_003496.1,7324-7342).
gggagaagtccattttgct

SEQ ID NO: 164048 - DNA, 19 bp, Homo sapiens
  siRNA target sequence for TRRAP (NM_003496.1,7346-7364).
gaagatgatgacttacata

SEQ ID NO: 164049 - DNA, 19 bp, Homo sapiens
  siRNA target sequence for TRRAP (NM_003496.1,7377-7395).
ccggaagaccttgaattaa

SEQ ID NO: 164050 - DNA, 19 bp, Homo sapiens
  siRNA target sequence for TRRAP (NM_003496.1,7378-7396).
cggaagaccttgaattaaa

SEQ ID NO: 164051 - DNA, 19 bp, Homo sapiens
  siRNA target sequence for TRRAP (NM_003496.1,7379-7397).
ggaagaccttgaattaaat

SEQ ID NO: 164052 - DNA, 19 bp, Homo sapiens
  siRNA target sequence for TRRAP (NM_003496.1,7454-7472).
cgagctgacggcgaaactt

SEQ ID NO: 164053 - DNA, 19 bp, Homo sapiens
  siRNA target sequence for TRRAP (NM_003496.1,7510-7528).
cactcatcagggcaaagtt

SEQ ID NO: 164054 - DNA, 19 bp, Homo sapiens
  siRNA target sequence for TRRAP (NM_003496.1,7569-7587).
gagcgcttgctctatgtga

SEQ ID NO: 164055 - DNA, 19 bp, Homo sapiens
  siRNA target sequence for TRRAP (NM_003496.1,7765-7783).
ccatggtcacacatgtcaa

SEQ ID NO: 164056 - DNA, 19 bp, Homo sapiens
  siRNA target sequence for TRRAP (NM_003496.1,7824-7842).
gaggatgtagagatagaca

SEQ ID NO: 164057 - DNA, 19 bp, Homo sapiens
  siRNA target sequence for TRRAP (NM_003496.1,7868-7886).
cagcacgcccaaaaccaaa

SEQ ID NO: 164058 - DNA, 19 bp, Homo sapiens
  siRNA target sequence for TRRAP (NM_003496.1,7871-7889).
cacgcccaaaaccaaagaa

SEQ ID NO: 164059 - DNA, 19 bp, Homo sapiens
  siRNA target sequence for TRRAP (NM_003496.1,7874-7892).
gcccaaaaccaaagaactt

SEQ ID NO: 164060 - DNA, 19 bp, Homo sapiens
  siRNA target sequence for TRRAP (NM_003496.1,7875-7893).
cccaaaaccaaagaacttt

SEQ ID NO: 164061 - DNA, 19 bp, Homo sapiens
  siRNA target sequence for TRRAP (NM_003496.1,7930-7948).
ccaacaggcacgacaagtt

SEQ ID NO: 164062 - DNA, 19 bp, Homo sapiens
  siRNA target sequence for TRRAP (NM_003496.1,8046-8064).
cagcttttccccagattgt

SEQ ID NO: 164063 - DNA, 19 bp, Homo sapiens
  siRNA target sequence for TRRAP (NM_003496.1,8094-8112).
gcactcgcgggtgagataa

SEQ ID NO: 164064 - DNA, 19 bp, Homo sapiens
  siRNA target sequence for TRRAP (NM_003496.1,8306-8324).
gggtctgagtcttcagatt

SEQ ID NO: 164065 - DNA, 19 bp, Homo sapiens
  siRNA target sequence for TRRAP (NM_003496.1,8307-8325).
ggtctgagtcttcagatta

SEQ ID NO: 164066 - DNA, 19 bp, Homo sapiens
  siRNA target sequence for TRRAP (NM_003496.1,8319-8337).
cagattaagccgaagcaaa

SEQ ID NO: 164067 - DNA, 19 bp, Homo sapiens
  siRNA target sequence for TRRAP (NM_003496.1,8333-8351).
gcaaacaacggagttttat

SEQ ID NO: 164068 - DNA, 19 bp, Homo sapiens
  siRNA target sequence for TRRAP (NM_003496.1,8405-8423).
gctttactccctgttacaa

SEQ ID NO: 164069 - DNA, 19 bp, Homo sapiens
  siRNA target sequence for TRRAP (NM_003496.1,8476-8494).
cagcgactgcgattgctta

SEQ ID NO: 164070 - DNA, 19 bp, Homo sapiens
  siRNA target sequence for TRRAP (NM_003496.1,8495-8513).
cgagcagcacgggttcttt

SEQ ID NO: 164071 - DNA, 19 bp, Homo sapiens
  siRNA target sequence for TRRAP (NM_003496.1,8631-8649).
cgatgctccaaggaattga

SEQ ID NO: 164072 - DNA, 19 bp, Homo sapiens
  siRNA target sequence for TRRAP (NM_003496.1,9147-9165).
cattaccaggcgattgtaa

SEQ ID NO: 164073 - DNA, 19 bp, Homo sapiens
  siRNA target sequence for TRRAP (NM_003496.1,9240-9258).
gcgatcatccagtatggaa

SEQ ID NO: 164074 - DNA, 19 bp, Homo sapiens
  siRNA target sequence for TRRAP (NM_003496.1,9241-9259).
cgatcatccagtatggaaa

SEQ ID NO: 164075 - DNA, 19 bp, Homo sapiens
  siRNA target sequence for TRRAP (NM_003496.1,9284-9302).
caatgtagctctggatata

SEQ ID NO: 164076 - DNA, 19 bp, Homo sapiens
  siRNA target sequence for TRRAP (NM_003496.1,9309-9327).
cggattcatactattccaa

SEQ ID NO: 164077 - DNA, 19 bp, Homo sapiens
  siRNA target sequence for TRRAP (NM_003496.1,9360-9378).
cgacagcaagttaaatgct

SEQ ID NO: 164078 - DNA, 19 bp, Homo sapiens
  siRNA target sequence for TRRAP (NM_003496.1,9361-9379).
gacagcaagttaaatgcta

SEQ ID NO: 164079 - DNA, 19 bp, Homo sapiens
  siRNA target sequence for TRRAP (NM_003496.1,9422-9440).
gggccttgaagttattgaa

SEQ ID NO: 164080 - DNA, 19 bp, Homo sapiens
  siRNA target sequence for TRRAP (NM_003496.1,9423-9441).
ggccttgaagttattgaat

SEQ ID NO: 164081 - DNA, 19 bp, Homo sapiens
  siRNA target sequence for TRRAP (NM_003496.1,9468-9486).
gagatgacagccgaatttt

SEQ ID NO: 164082 - DNA, 19 bp, Homo sapiens
  siRNA target sequence for TRRAP (NM_003496.1,9470-9488).
gatgacagccgaattttat

SEQ ID NO: 164083 - DNA, 19 bp, Homo sapiens
  siRNA target sequence for TRRAP (NM_003496.1,9473-9491).
gacagccgaattttatgca

SEQ ID NO: 164084 - DNA, 19 bp, Homo sapiens
  siRNA target sequence for TRRAP (NM_003496.1,9489-9507).
gcactgaagggaatgttct

SEQ ID NO: 164085 - DNA, 19 bp, Homo sapiens
  siRNA target sequence for TRRAP (NM_003496.1,9524-9542).
gtccgaggaggcaaacaaa

SEQ ID NO: 164086 - DNA, 19 bp, Homo sapiens
  siRNA target sequence for TRRAP (NM_003496.1,9601-9619).
gcgactacctggagaacat

SEQ ID NO: 164087 - DNA, 19 bp, Homo sapiens
  siRNA target sequence for TRRAP (NM_003496.1,9690-9708).
cagaacgagagcaaatcga

SEQ ID NO: 164088 - DNA, 19 bp, Homo sapiens
  siRNA target sequence for TRRAP (NM_003496.1,9700-9718).
gcaaatcgaggaaatactt

SEQ ID NO: 164089 - DNA, 19 bp, Homo sapiens
  siRNA target sequence for TRRAP (NM_003496.1,9701-9719).
caaatcgaggaaatactta

SEQ ID NO: 164090 - DNA, 19 bp, Homo sapiens
  siRNA target sequence for TRRAP (NM_003496.1,9938-9956).
gtacctgaccctgaaaata

SEQ ID NO: 164091 - DNA, 19 bp, Homo sapiens
  siRNA target sequence for TRRAP (NM_003496.1,9960-9978).
cagcgggaacgctacaaga

SEQ ID NO: 164092 - DNA, 19 bp, Homo sapiens
  siRNA target sequence for TRRAP (NM_003496.1,9980-9998).
cgatccagggcccataaga

SEQ ID NO: 164093 - DNA, 19 bp, Homo sapiens
  siRNA target sequence for TRRAP (NM_003496.1,10015-10033).
ggcgctgcagccgaatcat

SEQ ID NO: 164094 - DNA, 19 bp, Homo sapiens
  siRNA target sequence for TRRAP (NM_003496.1,10098-10116).
gtctggttcagagaaaatt

SEQ ID NO: 164095 - DNA, 19 bp, Homo sapiens
  siRNA target sequence for TRRAP (NM_003496.1,10149-10167).
ggcctggcgaaatgttact

SEQ ID NO: 164096 - DNA, 19 bp, Homo sapiens
  siRNA target sequence for TRRAP (NM_003496.1,10166-10184).
ctccgtggcgtttgagaaa

SEQ ID NO: 164097 - DNA, 19 bp, Homo sapiens
  siRNA target sequence for TRRAP (NM_003496.1,10169-10187).
cgtggcgtttgagaaaagt

SEQ ID NO: 164098 - DNA, 19 bp, Homo sapiens
  siRNA target sequence for TRRAP (NM_003496.1,10189-10207).
gagcggtgtccgatgctaa

SEQ ID NO: 164099 - DNA, 19 bp, Homo sapiens
  siRNA target sequence for TRRAP (NM_003496.1,10191-10209).
gcggtgtccgatgctaaaa

SEQ ID NO: 164100 - DNA, 19 bp, Homo sapiens
  siRNA target sequence for TRRAP (NM_003496.1,10192-10210).
cggtgtccgatgctaaaat

SEQ ID NO: 164101 - DNA, 19 bp, Homo sapiens
  siRNA target sequence for TRRAP (NM_003496.1,10216-10234).
cccacactctcaattttgt

SEQ ID NO: 164102 - DNA, 19 bp, Homo sapiens
  siRNA target sequence for TRRAP (NM_003496.1,10410-10428).
ggatccatgaagcttcata

SEQ ID NO: 164103 - DNA, 19 bp, Homo sapiens
  siRNA target sequence for TRRAP (NM_003496.1,10418-10436).
gaagcttcataatcttatt

SEQ ID NO: 164104 - DNA, 19 bp, Homo sapiens
  siRNA target sequence for TRRAP (NM_003496.1,10516-10534).
gccggttcttgagcaattt

SEQ ID NO: 164105 - DNA, 19 bp, Homo sapiens
  siRNA target sequence for TRRAP (NM_003496.1,10587-10605).
ccaacgcattattacatca

SEQ ID NO: 164106 - DNA, 19 bp, Homo sapiens
  siRNA target sequence for TRRAP (NM_003496.1,10588-10606).
caacgcattattacatcaa

SEQ ID NO: 164107 - DNA, 19 bp, Homo sapiens
  siRNA target sequence for TRRAP (NM_003496.1,10670-10688).
gtacatccggggacacaat

SEQ ID NO: 164108 - DNA, 19 bp, Homo sapiens
  siRNA target sequence for TRRAP (NM_003496.1,10878-10896).
gacaacccctcttcacttt

SEQ ID NO: 164109 - DNA, 19 bp, Homo sapiens
  siRNA target sequence for TRRAP (NM_003496.1,10952-10970).
ccccatctcccgttactat

SEQ ID NO: 164110 - DNA, 19 bp, Homo sapiens
  siRNA target sequence for TRRAP (NM_003496.1,10954-10972).
ccatctcccgttactatga

SEQ ID NO: 164111 - DNA, 19 bp, Homo sapiens
  siRNA target sequence for TRRAP (NM_003496.1,11119-11137).
ggacgttccggaagatgtt

SEQ ID NO: 164112 - DNA, 19 bp, Homo sapiens
  siRNA target sequence for TRRAP (NM_003496.1,11141-11159).
catccagctggctctgata

SEQ ID NO: 164113 - DNA, 19 bp, Homo sapiens
  siRNA target sequence for TRRAP (NM_003496.1,11167-11185).
cggaattcgtcctgcattt

SEQ ID NO: 164114 - DNA, 19 bp, Homo sapiens
  siRNA target sequence for TRRAP (NM_003496.1,11168-11186).
ggaattcgtcctgcattta

SEQ ID NO: 164115 - DNA, 19 bp, Homo sapiens
  siRNA target sequence for TRRAP (NM_003496.1,11169-11187).
gaattcgtcctgcatttaa

SEQ ID NO: 164116 - DNA, 19 bp, Homo sapiens
  siRNA target sequence for TRRAP (NM_003496.1,11244-11262).
gcctactttcgatttgaca

SEQ ID NO: 164117 - DNA, 19 bp, Homo sapiens
  siRNA target sequence for TRRAP (NM_003496.1,11245-11263).
cctactttcgatttgacat

SEQ ID NO: 164118 - DNA, 19 bp, Homo sapiens
  siRNA target sequence for TRRAP (NM_003496.1,11246-11264).
ctactttcgatttgacata

SEQ ID NO: 164119 - DNA, 19 bp, Homo sapiens
  siRNA target sequence for TRRAP (NM_003496.1,11294-11312).
ccgtcctgtcccatttcga

SEQ ID NO: 164120 - DNA, 19 bp, Homo sapiens
  siRNA target sequence for TRRAP (NM_003496.1,11310-11328).
cgactcacgcccaacattt

SEQ ID NO: 164121 - DNA, 19 bp, Homo sapiens
  siRNA target sequence for TRRAP (NM_003496.1,11318-11336).
gcccaacatttctgagttt

SEQ ID NO: 164122 - DNA, 19 bp, Homo sapiens
  siRNA target sequence for TRRAP (NM_003496.1,11363-11381).
gttgacagcgtccatgatt

SEQ ID NO: 164123 - DNA, 19 bp, Homo sapiens
  siRNA target sequence for TRRAP (NM_003496.1,11401-11419).
cccagccaaactttaaggt

SEQ ID NO: 164124 - DNA, 19 bp, Homo sapiens
  siRNA target sequence for TRRAP (NM_003496.1,11445-11463).
cgggacgagatcattgctt

SEQ ID NO: 164125 - DNA, 19 bp, Homo sapiens
  siRNA target sequence for TRRAP (NM_003496.1,11543-11561).
ggtgtccctggttcagaaa

SEQ ID NO: 164126 - DNA, 19 bp, Homo sapiens
  siRNA target sequence for TRRAP (NM_003496.1,11647-11665).
caaacagcctggacaatct

SEQ ID NO: 164127 - DNA, 19 bp, Homo sapiens
  siRNA target sequence for FTHL17 (NM_031894.1,198-216).
cctacctgtacctgtctat

SEQ ID NO: 164128 - DNA, 19 bp, Homo sapiens
  siRNA target sequence for FTHL17 (NM_031894.1,275-293).
cgcctgtcggacgacaaaa

SEQ ID NO: 164129 - DNA, 19 bp, Homo sapiens
  siRNA target sequence for LTF (NM_002343.1,394-412).
cccgaggccacaaaatgct

SEQ ID NO: 164130 - DNA, 19 bp, Homo sapiens
  siRNA target sequence for LTF (NM_002343.1,395-413).
ccgaggccacaaaatgctt

SEQ ID NO: 164131 - DNA, 19 bp, Homo sapiens
  siRNA target sequence for LTF (NM_002343.1,400-418).
gccacaaaatgcttccaat

SEQ ID NO: 164132 - DNA, 19 bp, Homo sapiens
  siRNA target sequence for LTF (NM_002343.1,528-546).
ccttgatggtggtttcata

SEQ ID NO: 164133 - DNA, 19 bp, Homo sapiens
  siRNA target sequence for LTF (NM_002343.1,613-631).
cagccacgaactcactatt

SEQ ID NO: 164134 - DNA, 19 bp, Homo sapiens
  siRNA target sequence for LTF (NM_002343.1,615-633).
gccacgaactcactattat

SEQ ID NO: 164135 - DNA, 19 bp, Homo sapiens
  siRNA target sequence for LTF (NM_002343.1,746-764).
cacttcgtccattcttgaa

SEQ ID NO: 164136 - DNA, 19 bp, Homo sapiens
  siRNA target sequence for LTF (NM_002343.1,748-766).
cttcgtccattcttgaatt

SEQ ID NO: 164137 - DNA, 19 bp, Homo sapiens
  siRNA target sequence for LTF (NM_002343.1,751-769).
cgtccattcttgaattgga

SEQ ID NO: 164138 - DNA, 19 bp, Homo sapiens
  siRNA target sequence for LTF (NM_002343.1,962-980).
ctggagacgtggcttttat

SEQ ID NO: 164139 - DNA, 19 bp, Homo sapiens
  siRNA target sequence for LTF (NM_002343.1,964-982).
ggagacgtggcttttatca

SEQ ID NO: 164140 - DNA, 19 bp, Homo sapiens
  siRNA target sequence for LTF (NM_002343.1,1021-1039).
gaaagggacgagtatgagt

SEQ ID NO: 164141 - DNA, 19 bp, Homo sapiens
  siRNA target sequence for LTF (NM_002343.1,1025-1043).
gggacgagtatgagttact

SEQ ID NO: 164142 - DNA, 19 bp, Homo sapiens
  siRNA target sequence for LTF (NM_002343.1,1027-1045).
gacgagtatgagttactct

SEQ ID NO: 164143 - DNA, 19 bp, Homo sapiens
  siRNA target sequence for LTF (NM_002343.1,1146-1164).
ggatgccatctggaatctt

SEQ ID NO: 164144 - DNA, 19 bp, Homo sapiens
  siRNA target sequence for LTF (NM_002343.1,1168-1186).
cgccaggcacaggaaaagt

SEQ ID NO: 164145 - DNA, 19 bp, Homo sapiens
  siRNA target sequence for LTF (NM_002343.1,1411-1429).
caggagctgcgcaagtgta

SEQ ID NO: 164146 - DNA, 19 bp, Homo sapiens
  siRNA target sequence for LTF (NM_002343.1,1530-1548).
gagtttggatggaggatat

SEQ ID NO: 164147 - DNA, 19 bp, Homo sapiens
  siRNA target sequence for LTF (NM_002343.1,1585-1603).
ctggcagagaactacaaat

SEQ ID NO: 164148 - DNA, 19 bp, Homo sapiens
  siRNA target sequence for MFI2 (NM_005929.3,169-187).
cacaagtgcggcaacatga

SEQ ID NO: 164149 - DNA, 19 bp, Homo sapiens
  siRNA target sequence for MFI2 (NM_005929.3,300-318).
ggatggaggagccatctat

SEQ ID NO: 164150 - DNA, 19 bp, Homo sapiens
  siRNA target sequence for MFI2 (NM_005929.3,347-365).
cggtggtgggcgaagtgta

SEQ ID NO: 164151 - DNA, 19 bp, Homo sapiens
  siRNA target sequence for MFI2 (NM_005929.3,356-374).
gcgaagtgtacgatcaaga

SEQ ID NO: 164152 - DNA, 19 bp, Homo sapiens
  siRNA target sequence for MFI2 (NM_005929.3,373-391).
gaggtcggtacctcctatt

SEQ ID NO: 164153 - DNA, 19 bp, Homo sapiens
  siRNA target sequence for MFI2 (NM_005929.3,456-474).
ctgccacacgggcatcaat

SEQ ID NO: 164154 - DNA, 19 bp, Homo sapiens
  siRNA target sequence for MFI2 (NM_005929.3,537-555).
gggctgcgatgtactcaaa

SEQ ID NO: 164155 - DNA, 19 bp, Homo sapiens
  siRNA target sequence for MFI2 (NM_005929.3,595-613).
gcaggagagaccagttact

SEQ ID NO: 164156 - DNA, 19 bp, Homo sapiens
  siRNA target sequence for MFI2 (NM_005929.3,674-692).
gccccctggagagatacta

SEQ ID NO: 164157 - DNA, 19 bp, Homo sapiens
  siRNA target sequence for MFI2 (NM_005929.3,1025-1043).
gccagaaggatctactctt

SEQ ID NO: 164158 - DNA, 19 bp, Homo sapiens
  siRNA target sequence for MFI2 (NM_005929.3,1029-1047).
gaaggatctactcttcaaa

SEQ ID NO: 164159 - DNA, 19 bp, Homo sapiens
  siRNA target sequence for MFI2 (NM_005929.3,1533-1551).
ccccgtgggtgcccttatt

SEQ ID NO: 164160 - DNA, 19 bp, Homo sapiens
  siRNA target sequence for MFI2 (NM_005929.3,1535-1553).
ccgtgggtgcccttattca

SEQ ID NO: 164161 - DNA, 19 bp, Homo sapiens
  siRNA target sequence for MFI2 (NM_005929.3,1595-1613).
cagtgagcgagttcttcaa

SEQ ID NO: 164162 - DNA, 19 bp, Homo sapiens
  siRNA target sequence for MFI2 (NM_005929.3,1619-1637).
gctgcgtgcccgtgaacaa

SEQ ID NO: 164163 - DNA, 19 bp, Homo sapiens
  siRNA target sequence for MFI2 (NM_005929.3,1790-1808).
ggcacacaaccgtctttga

SEQ ID NO: 164164 - DNA, 19 bp, Homo sapiens
  siRNA target sequence for MFI2 (NM_005929.3,1792-1810).
cacacaaccgtctttgaca

SEQ ID NO: 164165 - DNA, 19 bp, Homo sapiens
  siRNA target sequence for MFI2 (NM_005929.3,1851-1869).
caggtcagaggactatgaa

SEQ ID NO: 164166 - DNA, 19 bp, Homo sapiens
  siRNA target sequence for MFI2 (NM_005929.3,1917-1935).
ctgcaacctggcacagata

SEQ ID NO: 164167 - DNA, 19 bp, Homo sapiens
  siRNA target sequence for MFI2 (NM_005929.3,2018-2036).
gagacgaccacaataagaa

SEQ ID NO: 164168 - DNA, 19 bp, Homo sapiens
  siRNA target sequence for MFI2 (NM_005929.3,2028-2046).
caataagaacgggttcaaa

SEQ ID NO: 164169 - DNA, 19 bp, Homo sapiens
  siRNA target sequence for MFI2 (NM_005929.3,2113-2131).
cctgtcggagagaaaacca

SEQ ID NO: 164170 - DNA, 19 bp, Homo sapiens
  siRNA target sequence for MFI2 (NM_033316.2,787-805).
ccatcacgaaggcaaacat

SEQ ID NO: 164171 - DNA, 19 bp, Homo sapiens
  siRNA target sequence for MFI2 (NM_033316.2,943-961).
ggaaaacgggcaaagagta

SEQ ID NO: 164172 - DNA, 19 bp, Homo sapiens
  siRNA target sequence for MFI2 (NM_033316.2,952-970).
gcaaagagtagggatatgt

SEQ ID NO: 164173 - DNA, 19 bp, Homo sapiens
  siRNA target sequence for MTF (NM_177478.1,206-224).
ctcgggtgcgccagaactt

SEQ ID NO: 164174 - DNA, 19 bp, Homo sapiens
  siRNA target sequence for MTF (NM_177478.1,277-295).
gcgtcctacgtgtacttgt

SEQ ID NO: 164175 - DNA, 19 bp, Homo sapiens
  siRNA target sequence for MTF (NM_177478.1,322-340).
gacgtggccttgaacaact

SEQ ID NO: 164176 - DNA, 19 bp, Homo sapiens
  siRNA target sequence for MTF (NM_177478.1,541-559).
cacgctctagcctcagata

SEQ ID NO: 164177 - DNA, 19 bp, Homo sapiens
  siRNA target sequence for MTF (NM_177478.1,543-561).
cgctctagcctcagataaa

SEQ ID NO: 164178 - DNA, 19 bp, Homo sapiens
  siRNA target sequence for MTF (NM_177478.1,569-587).
cccatttgtgcgatttcct

SEQ ID NO: 164179 - DNA, 19 bp, Homo sapiens
  siRNA target sequence for MTF (NM_177478.1,612-630).
ggtgaagtctatcaaagaa

SEQ ID NO: 164180 - DNA, 19 bp, Homo sapiens
  siRNA target sequence for MTF (NM_177478.1,685-703).
gcggagtacctttttgaca

SEQ ID NO: 164181 - DNA, 19 bp, Homo sapiens
  siRNA target sequence for RSHL1 (NM_030785.1,625-643).
cccagcacgggccttacat

SEQ ID NO: 164182 - DNA, 19 bp, Homo sapiens
  siRNA target sequence for RSHL1 (NM_030785.1,626-644).
ccagcacgggccttacata

SEQ ID NO: 164183 - DNA, 19 bp, Homo sapiens
  siRNA target sequence for RSHL1 (NM_030785.1,627-645).
cagcacgggccttacataa

SEQ ID NO: 164184 - DNA, 19 bp, Homo sapiens
  siRNA target sequence for RSHL1 (NM_030785.1,1401-1419).
cgctcaggcgccaacaagt

SEQ ID NO: 164185 - DNA, 19 bp, Homo sapiens
  siRNA target sequence for RSHL1 (NM_030785.1,1402-1420).
gctcaggcgccaacaagta

SEQ ID NO: 164186 - DNA, 19 bp, Homo sapiens
  siRNA target sequence for RSHL1 (NM_030785.1,1491-1509).
gtgaacgcccgaaagatca

SEQ ID NO: 164187 - DNA, 19 bp, Homo sapiens
  siRNA target sequence for RSHL1 (NM_030785.1,1498-1516).
cccgaaagatcaagaagtt

SEQ ID NO: 164188 - DNA, 19 bp, Homo sapiens
  siRNA target sequence for RSHL1 (NM_030785.1,1500-1518).
cgaaagatcaagaagttct

SEQ ID NO: 164189 - DNA, 19 bp, Homo sapiens
  siRNA target sequence for RSHL1 (NM_030785.1,1634-1652).
gggcttctaccagtttagt

SEQ ID NO: 164190 - DNA, 19 bp, Homo sapiens
  siRNA target sequence for RSHL1 (NM_030785.1,1916-1934).
gctaacgccactttcagaa

SEQ ID NO: 164191 - DNA, 19 bp, Homo sapiens
  siRNA target sequence for RSHL1 (NM_030785.1,2131-2149).
cccccattcaacaagagta

SEQ ID NO: 164192 - DNA, 19 bp, Homo sapiens
  siRNA target sequence for TF (NM_001063.2,100-118).
gtctggctgtccctgataa

SEQ ID NO: 164193 - DNA, 19 bp, Homo sapiens
  siRNA target sequence for TF (NM_001063.2,144-162).
gagcatgaggccactaagt

SEQ ID NO: 164194 - DNA, 19 bp, Homo sapiens
  siRNA target sequence for TF (NM_001063.2,169-187).
gtttccgcgaccatatgaa

SEQ ID NO: 164195 - DNA, 19 bp, Homo sapiens
  siRNA target sequence for TF (NM_001063.2,235-253).
cctcctaccttgattgcat

SEQ ID NO: 164196 - DNA, 19 bp, Homo sapiens
  siRNA target sequence for TF (NM_001063.2,301-319).
gtttggtgtatgatgctta

SEQ ID NO: 164197 - DNA, 19 bp, Homo sapiens
  siRNA target sequence for TF (NM_001063.2,372-390).
gaggatccacagactttct

SEQ ID NO: 164198 - DNA, 19 bp, Homo sapiens
  siRNA target sequence for TF (NM_001063.2,438-456).
cagcttcgaggcaagaagt

SEQ ID NO: 164199 - DNA, 19 bp, Homo sapiens
  siRNA target sequence for TF (NM_001063.2,494-512).
catccccataggcttactt

SEQ ID NO: 164200 - DNA, 19 bp, Homo sapiens
  siRNA target sequence for TF (NM_001063.2,498-516).
cccataggcttactttact

SEQ ID NO: 164201 - DNA, 19 bp, Homo sapiens
  siRNA target sequence for TF (NM_001063.2,500-518).
cataggcttactttactgt

SEQ ID NO: 164202 - DNA, 19 bp, Homo sapiens
  siRNA target sequence for TF (NM_001063.2,521-539).
cttacctgagccacgtaaa

SEQ ID NO: 164203 - DNA, 19 bp, Homo sapiens
  siRNA target sequence for TF (NM_001063.2,532-550).
cacgtaaacctcttgagaa

SEQ ID NO: 164204 - DNA, 19 bp, Homo sapiens
  siRNA target sequence for TF (NM_001063.2,640-658).
gctgctccacccttaacca

SEQ ID NO: 164205 - DNA, 19 bp, Homo sapiens
  siRNA target sequence for TF (NM_001063.2,641-659).
ctgctccacccttaaccaa

SEQ ID NO: 164206 - DNA, 19 bp, Homo sapiens
  siRNA target sequence for TF (NM_001063.2,643-661).
gctccacccttaaccaata

SEQ ID NO: 164207 - DNA, 19 bp, Homo sapiens
  siRNA target sequence for TF (NM_001063.2,646-664).
ccacccttaaccaatactt

SEQ ID NO: 164208 - DNA, 19 bp, Homo sapiens
  siRNA target sequence for TF (NM_001063.2,726-744).
cactcgactatatttgaga

SEQ ID NO: 164209 - DNA, 19 bp, Homo sapiens
  siRNA target sequence for TF (NM_001063.2,730-748).
cgactatatttgagaactt

SEQ ID NO: 164210 - DNA, 19 bp, Homo sapiens
  siRNA target sequence for TF (NM_001063.2,799-817).
cccggaagccggtagatga

SEQ ID NO: 164211 - DNA, 19 bp, Homo sapiens
  siRNA target sequence for TF (NM_001063.2,800-818).
ccggaagccggtagatgaa

SEQ ID NO: 164212 - DNA, 19 bp, Homo sapiens
  siRNA target sequence for TF (NM_001063.2,801-819).
cggaagccggtagatgaat

SEQ ID NO: 164213 - DNA, 19 bp, Homo sapiens
  siRNA target sequence for TF (NM_001063.2,802-820).
ggaagccggtagatgaata

SEQ ID NO: 164214 - DNA, 19 bp, Homo sapiens
  siRNA target sequence for TF (NM_001063.2,856-874).
ccgtcgtggcccgaagtat

SEQ ID NO: 164215 - DNA, 19 bp, Homo sapiens
  siRNA target sequence for TF (NM_001063.2,998-1016).
ctctgcccacgggttttta

SEQ ID NO: 164216 - DNA, 19 bp, Homo sapiens
  siRNA target sequence for TF (NM_001063.2,1000-1018).
ctgcccacgggtttttaaa

SEQ ID NO: 164217 - DNA, 19 bp, Homo sapiens
  siRNA target sequence for TF (NM_001063.2,1046-1064).
gtacctgggctatgagtat

SEQ ID NO: 164218 - DNA, 19 bp, Homo sapiens
  siRNA target sequence for TF (NM_001063.2,1328-1346).
cttggcagaaaactacaat

SEQ ID NO: 164219 - DNA, 19 bp, Homo sapiens
  siRNA target sequence for TF (NM_001063.2,1340-1358).
ctacaataagagcgataat

SEQ ID NO: 164220 - DNA, 19 bp, Homo sapiens
  siRNA target sequence for TF (NM_001063.2,1343-1361).
caataagagcgataattgt

SEQ ID NO: 164221 - DNA, 19 bp, Homo sapiens
  siRNA target sequence for TF (NM_001063.2,1500-1518).
ggcctgctctacaataaga

SEQ ID NO: 164222 - DNA, 19 bp, Homo sapiens
  siRNA target sequence for TF (NM_001063.2,1501-1519).
gcctgctctacaataagat

SEQ ID NO: 164223 - DNA, 19 bp, Homo sapiens
  siRNA target sequence for TF (NM_001063.2,1503-1521).
ctgctctacaataagatca

SEQ ID NO: 164224 - DNA, 19 bp, Homo sapiens
  siRNA target sequence for TF (NM_001063.2,1517-1535).
gatcaaccactgcagattt

SEQ ID NO: 164225 - DNA, 19 bp, Homo sapiens
  siRNA target sequence for TF (NM_001063.2,1520-1538).
caaccactgcagatttgat

SEQ ID NO: 164226 - DNA, 19 bp, Homo sapiens
  siRNA target sequence for TF (NM_001063.2,1622-1640).
gtgtgaacccaacaacaaa

SEQ ID NO: 164227 - DNA, 19 bp, Homo sapiens
  siRNA target sequence for TF (NM_001063.2,1747-1765).
ctgatccatgggctaagaa

SEQ ID NO: 164228 - DNA, 19 bp, Homo sapiens
  siRNA target sequence for TF (NM_001063.2,1752-1770).
ccatgggctaagaatctga

SEQ ID NO: 164229 - DNA, 19 bp, Homo sapiens
  siRNA target sequence for TF (NM_001063.2,1866-1884).
gtggtcacacggaaagata

SEQ ID NO: 164230 - DNA, 19 bp, Homo sapiens
  siRNA target sequence for TF (NM_001063.2,1890-1908).
gcttgcgtccacaagatat

SEQ ID NO: 164231 - DNA, 19 bp, Homo sapiens
  siRNA target sequence for TF (NM_001063.2,1891-1909).
cttgcgtccacaagatatt

SEQ ID NO: 164232 - DNA, 19 bp, Homo sapiens
  siRNA target sequence for TF (NM_001063.2,1895-1913).
cgtccacaagatattacgt

SEQ ID NO: 164233 - DNA, 19 bp, Homo sapiens
  siRNA target sequence for TF (NM_001063.2,1926-1944).
ctatttggaagcaacgtaa

SEQ ID NO: 164234 - DNA, 19 bp, Homo sapiens
  siRNA target sequence for TF (NM_001063.2,1947-1965).
gactgctcgggcaactttt

SEQ ID NO: 164235 - DNA, 19 bp, Homo sapiens
  siRNA target sequence for TF (NM_001063.2,1949-1967).
ctgctcgggcaacttttgt

SEQ ID NO: 164236 - DNA, 19 bp, Homo sapiens
  siRNA target sequence for TF (NM_001063.2,2017-2035).
gtttggccaaacttcatga

SEQ ID NO: 164237 - DNA, 19 bp, Homo sapiens
  siRNA target sequence for TF (NM_001063.2,2080-2098).
ctgttggtaacctgagaaa

SEQ ID NO: 164238 - DNA, 19 bp, Homo sapiens
  siRNA target sequence for FECH (NM_000140.1,34-52).
gttcactcggcgcaaacat

SEQ ID NO: 164239 - DNA, 19 bp, Homo sapiens
  siRNA target sequence for FECH (NM_000140.1,224-242).
gaagccgaaaactggaata

SEQ ID NO: 164240 - DNA, 19 bp, Homo sapiens
  siRNA target sequence for FECH (NM_000140.1,235-253).
ctggaatattaatgctaaa

SEQ ID NO: 164241 - DNA, 19 bp, Homo sapiens
  siRNA target sequence for FECH (NM_000140.1,237-255).
ggaatattaatgctaaaca

SEQ ID NO: 164242 - DNA, 19 bp, Homo sapiens
  siRNA target sequence for FECH (NM_000140.1,238-256).
gaatattaatgctaaacat

SEQ ID NO: 164243 - DNA, 19 bp, Homo sapiens
  siRNA target sequence for FECH (NM_000140.1,326-344).
gacacttcctattcagaat

SEQ ID NO: 164244 - DNA, 19 bp, Homo sapiens
  siRNA target sequence for FECH (NM_000140.1,370-388).
gccgaacccccaagattca

SEQ ID NO: 164245 - DNA, 19 bp, Homo sapiens
  siRNA target sequence for FECH (NM_000140.1,371-389).
ccgaacccccaagattcaa

SEQ ID NO: 164246 - DNA, 19 bp, Homo sapiens
  siRNA target sequence for FECH (NM_000140.1,412-430).
gcggatcccccatcaagat

SEQ ID NO: 164247 - DNA, 19 bp, Homo sapiens
  siRNA target sequence for FECH (NM_000140.1,413-431).
cggatcccccatcaagata

SEQ ID NO: 164248 - DNA, 19 bp, Homo sapiens
  siRNA target sequence for FECH (NM_000140.1,414-432).
ggatcccccatcaagatat

SEQ ID NO: 164249 - DNA, 19 bp, Homo sapiens
  siRNA target sequence for FECH (NM_000140.1,494-512).
ccctcacaaatactatatt

SEQ ID NO: 164250 - DNA, 19 bp, Homo sapiens
  siRNA target sequence for FECH (NM_000140.1,524-542).
cgtccatcctttaacagaa

SEQ ID NO: 164251 - DNA, 19 bp, Homo sapiens
  siRNA target sequence for FECH (NM_000140.1,527-545).
ccatcctttaacagaagaa

SEQ ID NO: 164252 - DNA, 19 bp, Homo sapiens
  siRNA target sequence for FECH (NM_000140.1,622-640).
ccacaggcagcagcttaaa

SEQ ID NO: 164253 - DNA, 19 bp, Homo sapiens
  siRNA target sequence for FECH (NM_000140.1,642-660).
gccatttacagatactata

SEQ ID NO: 164254 - DNA, 19 bp, Homo sapiens
  siRNA target sequence for FECH (NM_000140.1,643-661).
ccatttacagatactataa

SEQ ID NO: 164255 - DNA, 19 bp, Homo sapiens
  siRNA target sequence for FECH (NM_000140.1,672-690).
cggaagcccacgatgaagt

SEQ ID NO: 164256 - DNA, 19 bp, Homo sapiens
  siRNA target sequence for FECH (NM_000140.1,683-701).
gatgaagtggagcactatt

SEQ ID NO: 164257 - DNA, 19 bp, Homo sapiens
  siRNA target sequence for FECH (NM_000140.1,731-749).
ccagtgctttgcagatcat

SEQ ID NO: 164258 - DNA, 19 bp, Homo sapiens
  siRNA target sequence for FECH (NM_000140.1,737-755).
ctttgcagatcatattcta

SEQ ID NO: 164259 - DNA, 19 bp, Homo sapiens
  siRNA target sequence for FECH (NM_000140.1,787-805).
gaagcgaggtggtcattct

SEQ ID NO: 164260 - DNA, 19 bp, Homo sapiens
  siRNA target sequence for FECH (NM_000140.1,790-808).
gcgaggtggtcattctgtt

SEQ ID NO: 164261 - DNA, 19 bp, Homo sapiens
  siRNA target sequence for FECH (NM_000140.1,791-809).
cgaggtggtcattctgttt

SEQ ID NO: 164262 - DNA, 19 bp, Homo sapiens
  siRNA target sequence for FECH (NM_000140.1,792-810).
gaggtggtcattctgtttt

SEQ ID NO: 164263 - DNA, 19 bp, Homo sapiens
  siRNA target sequence for FECH (NM_000140.1,842-860).
cagaggcgacccatatcct

SEQ ID NO: 164264 - DNA, 19 bp, Homo sapiens
  siRNA target sequence for FECH (NM_000140.1,873-891).
gccactgtccaaaaagtca

SEQ ID NO: 164265 - DNA, 19 bp, Homo sapiens
  siRNA target sequence for FECH (NM_000140.1,922-940).
gactggtgtggcaatccaa

SEQ ID NO: 164266 - DNA, 19 bp, Homo sapiens
  siRNA target sequence for FECH (NM_000140.1,958-976).
ggttgggtcctcaaacaga

SEQ ID NO: 164267 - DNA, 19 bp, Homo sapiens
  siRNA target sequence for FECH (NM_000140.1,967-985).
ctcaaacagacgaatctat

SEQ ID NO: 164268 - DNA, 19 bp, Homo sapiens
  siRNA target sequence for FECH (NM_000140.1,969-987).
caaacagacgaatctatca

SEQ ID NO: 164269 - DNA, 19 bp, Homo sapiens
  siRNA target sequence for FECH (NM_000140.1,1003-1021).
gggggaggaagaatatcct

SEQ ID NO: 164270 - DNA, 19 bp, Homo sapiens
  siRNA target sequence for FECH (NM_000140.1,1020-1038).
ctcttggttccgatagcat

SEQ ID NO: 164271 - DNA, 19 bp, Homo sapiens
  siRNA target sequence for FECH (NM_000140.1,1026-1044).
gttccgatagcatttacca

SEQ ID NO: 164272 - DNA, 19 bp, Homo sapiens
  siRNA target sequence for FECH (NM_000140.1,1076-1094).
catcgagtactctcaagtt

SEQ ID NO: 164273 - DNA, 19 bp, Homo sapiens
  siRNA target sequence for FECH (NM_000140.1,1079-1097).
cgagtactctcaagtttta

SEQ ID NO: 164274 - DNA, 19 bp, Homo sapiens
  siRNA target sequence for FECH (NM_000140.1,1146-1164).
ggaaatccattgttctcta

SEQ ID NO: 164275 - DNA, 19 bp, Homo sapiens
  siRNA target sequence for FECH (NM_000140.1,1174-1192).
ccgacttggtgcattcaca

SEQ ID NO: 164276 - DNA, 19 bp, Homo sapiens
  siRNA target sequence for FECH (NM_000140.1,1255-1273).
ctgtctgcagggagactaa

SEQ ID NO: 164277 - DNA, 19 bp, Homo sapiens
  siRNA target sequence for FECH (NM_000140.1,1257-1275).
gtctgcagggagactaaat

SEQ ID NO: 164278 - DNA, 19 bp, Homo sapiens
  siRNA target sequence for FECH (NM_000140.1,1261-1279).
gcagggagactaaatcctt

SEQ ID NO: 164279 - DNA, 19 bp, Homo sapiens
  siRNA target sequence for ACO2 (NM_001098.1,135-153).
cccaacgagtacatccatt

SEQ ID NO: 164280 - DNA, 19 bp, Homo sapiens
  siRNA target sequence for ACO2 (NM_001098.1,136-154).
ccaacgagtacatccatta

SEQ ID NO: 164281 - DNA, 19 bp, Homo sapiens
  siRNA target sequence for ACO2 (NM_001098.1,162-180).
ctagagaagaacattaaca

SEQ ID NO: 164282 - DNA, 19 bp, Homo sapiens
  siRNA target sequence for ACO2 (NM_001098.1,209-227).
gacactctcggagaagatt

SEQ ID NO: 164283 - DNA, 19 bp, Homo sapiens
  siRNA target sequence for ACO2 (NM_001098.1,211-229).
cactctcggagaagattgt

SEQ ID NO: 164284 - DNA, 19 bp, Homo sapiens
  siRNA target sequence for ACO2 (NM_001098.1,215-233).
ctcggagaagattgtgtat

SEQ ID NO: 164285 - DNA, 19 bp, Homo sapiens
  siRNA target sequence for ACO2 (NM_001098.1,455-473).
catcaaccaggaagtttat

SEQ ID NO: 164286 - DNA, 19 bp, Homo sapiens
  siRNA target sequence for ACO2 (NM_001098.1,521-539).
gcctggatctggaatcatt

SEQ ID NO: 164287 - DNA, 19 bp, Homo sapiens
  siRNA target sequence for ACO2 (NM_001098.1,523-541).
ctggatctggaatcattca

SEQ ID NO: 164288 - DNA, 19 bp, Homo sapiens
  siRNA target sequence for ACO2 (NM_001098.1,901-919).
cttccgtgttcccttacaa

SEQ ID NO: 164289 - DNA, 19 bp, Homo sapiens
  siRNA target sequence for ACO2 (NM_001098.1,966-984).
gccaatctagctgatgaat

SEQ ID NO: 164290 - DNA, 19 bp, Homo sapiens
  siRNA target sequence for ACO2 (NM_001098.1,1023-1041).
gaccaactaattgaaatta

SEQ ID NO: 164291 - DNA, 19 bp, Homo sapiens
  siRNA target sequence for ACO2 (NM_001098.1,1148-1166).
catccgagtgggtctaatt

SEQ ID NO: 164292 - DNA, 19 bp, Homo sapiens
  siRNA target sequence for ACO2 (NM_001098.1,1151-1169).
ccgagtgggtctaattggt

SEQ ID NO: 164293 - DNA, 19 bp, Homo sapiens
  siRNA target sequence for ACO2 (NM_001098.1,1152-1170).
cgagtgggtctaattggta

SEQ ID NO: 164294 - DNA, 19 bp, Homo sapiens
  siRNA target sequence for ACO2 (NM_001098.1,1178-1196).
caattcaagctatgaagat

SEQ ID NO: 164295 - DNA, 19 bp, Homo sapiens
  siRNA target sequence for ACO2 (NM_001098.1,1311-1329).
ggctatgcacagatcttga

SEQ ID NO: 164296 - DNA, 19 bp, Homo sapiens
  siRNA target sequence for ACO2 (NM_001098.1,1524-1542).
gcgggaaccctcaagttca

SEQ ID NO: 164297 - DNA, 19 bp, Homo sapiens
  siRNA target sequence for ACO2 (NM_001098.1,1525-1543).
cgggaaccctcaagttcaa

SEQ ID NO: 164298 - DNA, 19 bp, Homo sapiens
  siRNA target sequence for ACO2 (NM_001098.1,1567-1585).
gcacggatggcaagaagtt

SEQ ID NO: 164299 - DNA, 19 bp, Homo sapiens
  siRNA target sequence for ACO2 (NM_001098.1,2151-2169).
gacccggctgactacaaca

SEQ ID NO: 164300 - DNA, 19 bp, Homo sapiens
  siRNA target sequence for ACO2 (NM_001098.1,2325-2343).
ggcagtgccctcaacagaa

SEQ ID NO: 164301 - DNA, 19 bp, Homo sapiens
  siRNA target sequence for ADHFE1 (NM_144650.1,239-257).
gtgcaagtagctatggatt

SEQ ID NO: 164302 - DNA, 19 bp, Homo sapiens
  siRNA target sequence for ADHFE1 (NM_144650.1,274-292).
catcccctttacggtttat

SEQ ID NO: 164303 - DNA, 19 bp, Homo sapiens
  siRNA target sequence for ADHFE1 (NM_144650.1,277-295).
cccctttacggtttatgat

SEQ ID NO: 164304 - DNA, 19 bp, Homo sapiens
  siRNA target sequence for ADHFE1 (NM_144650.1,278-296).
ccctttacggtttatgata

SEQ ID NO: 164305 - DNA, 19 bp, Homo sapiens
  siRNA target sequence for ADHFE1 (NM_144650.1,279-297).
cctttacggtttatgataa

SEQ ID NO: 164306 - DNA, 19 bp, Homo sapiens
  siRNA target sequence for ADHFE1 (NM_144650.1,305-323).
gtggaaccaacggattcaa

SEQ ID NO: 164307 - DNA, 19 bp, Homo sapiens
  siRNA target sequence for ADHFE1 (NM_144650.1,403-421).
cacctgtaaggctgctaat

SEQ ID NO: 164308 - DNA, 19 bp, Homo sapiens
  siRNA target sequence for ADHFE1 (NM_144650.1,405-423).
cctgtaaggctgctaatct

SEQ ID NO: 164309 - DNA, 19 bp, Homo sapiens
  siRNA target sequence for ADHFE1 (NM_144650.1,413-431).
gctgctaatctgtatgcat

SEQ ID NO: 164310 - DNA, 19 bp, Homo sapiens
  siRNA target sequence for ADHFE1 (NM_144650.1,536-554).
ggaaccgggagtgaaacta

SEQ ID NO: 164311 - DNA, 19 bp, Homo sapiens
  siRNA target sequence for ADHFE1 (NM_144650.1,679-697).
cgccaacagtggctttgat

SEQ ID NO: 164312 - DNA, 19 bp, Homo sapiens
  siRNA target sequence for ADHFE1 (NM_144650.1,790-808).
gggcagcaacccaatcagt

SEQ ID NO: 164313 - DNA, 19 bp, Homo sapiens
  siRNA target sequence for ADHFE1 (NM_144650.1,832-850).
gcggatcgtggctaagtat

SEQ ID NO: 164314 - DNA, 19 bp, Homo sapiens
  siRNA target sequence for ADHFE1 (NM_144650.1,834-852).
ggatcgtggctaagtatct

SEQ ID NO: 164315 - DNA, 19 bp, Homo sapiens
  siRNA target sequence for ADHFE1 (NM_144650.1,867-885).
gaaatcccgatgatcttga

SEQ ID NO: 164316 - DNA, 19 bp, Homo sapiens
  siRNA target sequence for ADHFE1 (NM_144650.1,920-938).
gctggcatcggctttggaa

SEQ ID NO: 164317 - DNA, 19 bp, Homo sapiens
  siRNA target sequence for ADHFE1 (NM_144650.1,925-943).
catcggctttggaaatgct

SEQ ID NO: 164318 - DNA, 19 bp, Homo sapiens
  siRNA target sequence for ADHFE1 (NM_144650.1,974-992).
ccaatttcaggtttagtga

SEQ ID NO: 164319 - DNA, 19 bp, Homo sapiens
  siRNA target sequence for ADHFE1 (NM_144650.1,981-999).
caggtttagtgaagatgta

SEQ ID NO: 164320 - DNA, 19 bp, Homo sapiens
  siRNA target sequence for ADHFE1 (NM_144650.1,983-1001).
ggtttagtgaagatgtata

SEQ ID NO: 164321 - DNA, 19 bp, Homo sapiens
  siRNA target sequence for ADHFE1 (NM_144650.1,1065-1083).
ccccagcggtgttcacttt

SEQ ID NO: 164322 - DNA, 19 bp, Homo sapiens
  siRNA target sequence for ADHFE1 (NM_144650.1,1067-1085).
ccagcggtgttcactttca

SEQ ID NO: 164323 - DNA, 19 bp, Homo sapiens
  siRNA target sequence for ADHFE1 (NM_144650.1,1182-1200).
cagacacgctccggaaatt

SEQ ID NO: 164324 - DNA, 19 bp, Homo sapiens
  siRNA target sequence for ADHFE1 (NM_144650.1,1184-1202).
gacacgctccggaaattct

SEQ ID NO: 164325 - DNA, 19 bp, Homo sapiens
  siRNA target sequence for ADHFE1 (NM_144650.1,1186-1204).
cacgctccggaaattctta

SEQ ID NO: 164326 - DNA, 19 bp, Homo sapiens
  siRNA target sequence for ADHFE1 (NM_144650.1,1188-1206).
cgctccggaaattcttatt

SEQ ID NO: 164327 - DNA, 19 bp, Homo sapiens
  siRNA target sequence for ADHFE1 (NM_144650.1,1192-1210).
ccggaaattcttattcgat

SEQ ID NO: 164328 - DNA, 19 bp, Homo sapiens
  siRNA target sequence for ADHFE1 (NM_144650.1,1242-1260).
gttactccaaagctgatat

SEQ ID NO: 164329 - DNA, 19 bp, Homo sapiens
  siRNA target sequence for ADHFE1 (NM_144650.1,1262-1280).
cccgcactagtgaaaggaa

SEQ ID NO: 164330 - DNA, 19 bp, Homo sapiens
  siRNA target sequence for ADHFE1 (NM_144650.1,1344-1362).
ctctgtttgaagcttcaat

SEQ ID NO: 164331 - DNA, 19 bp, Homo sapiens
  siRNA target sequence for ADHFE1 (NM_144650.1,1346-1364).
ctgtttgaagcttcaatga

SEQ ID NO: 164332 - DNA, 19 bp, Homo sapiens
  siRNA target sequence for ADHFE1 (NM_144650.1,1348-1366).
gtttgaagcttcaatgaaa

SEQ ID NO: 164333 - DNA, 19 bp, Homo sapiens
  siRNA target sequence for ALOX12 (NM_000697.1,489-507).
cgctgcagaccgtaaggat

SEQ ID NO: 164334 - DNA, 19 bp, Homo sapiens
  siRNA target sequence for ALOX12 (NM_000697.1,494-512).
cagaccgtaaggatgatct

SEQ ID NO: 164335 - DNA, 19 bp, Homo sapiens
  siRNA target sequence for ALOX12 (NM_000697.1,505-523).
gatgatctacctccaaata

SEQ ID NO: 164336 - DNA, 19 bp, Homo sapiens
  siRNA target sequence for ALOX12 (NM_000697.1,620-638).
cctggaactgcctagaaga

SEQ ID NO: 164337 - DNA, 19 bp, Homo sapiens
  siRNA target sequence for ALOX12 (NM_000697.1,623-641).
ggaactgcctagaagactt

SEQ ID NO: 164338 - DNA, 19 bp, Homo sapiens
  siRNA target sequence for ALOX12 (NM_000697.1,629-647).
gcctagaagactttgatca

SEQ ID NO: 164339 - DNA, 19 bp, Homo sapiens
  siRNA target sequence for ALOX12 (NM_000697.1,695-713).
gctggcaggatgatgagtt

SEQ ID NO: 164340 - DNA, 19 bp, Homo sapiens
  siRNA target sequence for ALOX12 (NM_000697.1,929-947).
ccctcgttatgctgaagat

SEQ ID NO: 164341 - DNA, 19 bp, Homo sapiens
  siRNA target sequence for ALOX12 (NM_000697.1,1065-1083).
gtcctgggtccgaaattca

SEQ ID NO: 164342 - DNA, 19 bp, Homo sapiens
  siRNA target sequence for ALOX12 (NM_000697.1,1067-1085).
cctgggtccgaaattcaga

SEQ ID NO: 164343 - DNA, 19 bp, Homo sapiens
  siRNA target sequence for ALOX12 (NM_000697.1,1068-1086).
ctgggtccgaaattcagat

SEQ ID NO: 164344 - DNA, 19 bp, Homo sapiens
  siRNA target sequence for ALOX12 (NM_000697.1,1070-1088).
gggtccgaaattcagattt

SEQ ID NO: 164345 - DNA, 19 bp, Homo sapiens
  siRNA target sequence for ALOX12 (NM_000697.1,1479-1497).
ctaccaaagggatgacata

SEQ ID NO: 164346 - DNA, 19 bp, Homo sapiens
  siRNA target sequence for ALOX12 (NM_000697.1,1483-1501).
caaagggatgacatagtga

SEQ ID NO: 164347 - DNA, 19 bp, Homo sapiens
  siRNA target sequence for ALOX12 (NM_000697.1,1785-1803).
ccggcaggcctgtcttcaa

SEQ ID NO: 164348 - DNA, 19 bp, Homo sapiens
  siRNA target sequence for ALOX12 (NM_000697.1,1786-1804).
cggcaggcctgtcttcaaa

SEQ ID NO: 164349 - DNA, 19 bp, Homo sapiens
  siRNA target sequence for ALOX12 (NM_000697.1,1855-1873).
gggcaccacaaagaaaaat

SEQ ID NO: 164350 - DNA, 19 bp, Homo sapiens
  siRNA target sequence for ALOX12 (NM_000697.1,1892-1910).
ccaaagctgtgctaaacca

SEQ ID NO: 164351 - DNA, 19 bp, Homo sapiens
  siRNA target sequence for ALOX12 (NM_000697.1,1893-1911).
caaagctgtgctaaaccaa

SEQ ID NO: 164352 - DNA, 19 bp, Homo sapiens
  siRNA target sequence for ALOX12 (NM_000697.1,1952-1970).
cccggaatgagcaacttga

SEQ ID NO: 164353 - DNA, 19 bp, Homo sapiens
  siRNA target sequence for ALOX12 (NM_000697.1,1966-1984).
cttgactggccctatgaat

SEQ ID NO: 164354 - DNA, 19 bp, Homo sapiens
  siRNA target sequence for ALOX12B (NM_001139.1,501-519).
cttggtactgcaactatgt

SEQ ID NO: 164355 - DNA, 19 bp, Homo sapiens
  siRNA target sequence for ALOX12B (NM_001139.1,531-549).
cccccaacggccgtatcta

SEQ ID NO: 164356 - DNA, 19 bp, Homo sapiens
  siRNA target sequence for ALOX12B (NM_001139.1,688-706).
ctaccactggcgagtcttt

SEQ ID NO: 164357 - DNA, 19 bp, Homo sapiens
  siRNA target sequence for ALOX12B (NM_001139.1,691-709).
ccactggcgagtctttctt

SEQ ID NO: 164358 - DNA, 19 bp, Homo sapiens
  siRNA target sequence for ALOX12B (NM_001139.1,804-822).
cgggattcccaattctcat

SEQ ID NO: 164359 - DNA, 19 bp, Homo sapiens
  siRNA target sequence for ALOX12B (NM_001139.1,807-825).
gattcccaattctcatcaa

SEQ ID NO: 164360 - DNA, 19 bp, Homo sapiens
  siRNA target sequence for ALOX12B (NM_001139.1,1101-1119).
cgcggatcccagacaagtt

SEQ ID NO: 164361 - DNA, 19 bp, Homo sapiens
  siRNA target sequence for ALOX12B (NM_001139.1,1296-1314).
gacccgagggcaagatgat

SEQ ID NO: 164362 - DNA, 19 bp, Homo sapiens
  siRNA target sequence for ALOX12B (NM_001139.1,1554-1572).
gatacaccgtccagatcaa

SEQ ID NO: 164363 - DNA, 19 bp, Homo sapiens
  siRNA target sequence for ALOX12B (NM_001139.1,1776-1794).
ggaatgcactggagaagta

SEQ ID NO: 164364 - DNA, 19 bp, Homo sapiens
  siRNA target sequence for ALOX12B (NM_001139.1,1800-1818).
cggagatcatcacctatta

SEQ ID NO: 164365 - DNA, 19 bp, Homo sapiens
  siRNA target sequence for ALOX12B (NM_001139.1,1801-1819).
ggagatcatcacctattat

SEQ ID NO: 164366 - DNA, 19 bp, Homo sapiens
  siRNA target sequence for ALOX12B (NM_001139.1,1802-1820).
gagatcatcacctattatt

SEQ ID NO: 164367 - DNA, 19 bp, Homo sapiens
  siRNA target sequence for ALOX12B (NM_001139.1,1863-1881).
cttgggtgcaggaaatatt

SEQ ID NO: 164368 - DNA, 19 bp, Homo sapiens
  siRNA target sequence for ALOX12B (NM_001139.1,1941-1959).
ctgagctgatccgatatgt

SEQ ID NO: 164369 - DNA, 19 bp, Homo sapiens
  siRNA target sequence for ALOX12B (NM_001139.1,1948-1966).
gatccgatatgtcactata

SEQ ID NO: 164370 - DNA, 19 bp, Homo sapiens
  siRNA target sequence for ALOX12B (NM_001139.1,1952-1970).
cgatatgtcactatagtca

SEQ ID NO: 164371 - DNA, 19 bp, Homo sapiens
  siRNA target sequence for ALOX12B (NM_001139.1,1958-1976).
gtcactatagtcatctaca

SEQ ID NO: 164372 - DNA, 19 bp, Homo sapiens
  siRNA target sequence for ALOX12B (NM_001139.1,2057-2075).
cggaatccaccgattcaga

SEQ ID NO: 164373 - DNA, 19 bp, Homo sapiens
  siRNA target sequence for ALOX12B (NM_001139.1,2198-2216).
cacttcccggacattcact

SEQ ID NO: 164374 - DNA, 19 bp, Homo sapiens
  siRNA target sequence for ALOX12B (NM_001139.1,2306-2324).
cttcccatcccctactact

SEQ ID NO: 164375 - DNA, 19 bp, Homo sapiens
  siRNA target sequence for ALOX12B (NM_001139.1,2330-2348).
gacccggtgctgattgaga

SEQ ID NO: 164376 - DNA, 19 bp, Homo sapiens
  siRNA target sequence for ALOX15 (NM_001140.3,571-589).
ctatcaaagactctctaaa

SEQ ID NO: 164377 - DNA, 19 bp, Homo sapiens
  siRNA target sequence for ALOX15 (NM_001140.3,618-636).
gacttcaaccggattttct

SEQ ID NO: 164378 - DNA, 19 bp, Homo sapiens
  siRNA target sequence for ALOX15 (NM_001140.3,680-698).
gaaggaagatgccttattt

SEQ ID NO: 164379 - DNA, 19 bp, Homo sapiens
  siRNA target sequence for ALOX15 (NM_001140.3,1112-1130).
gatggctgaggtcattgtt

SEQ ID NO: 164380 - DNA, 19 bp, Homo sapiens
  siRNA target sequence for ALOX15 (NM_001140.3,1145-1163).
gtgcctgccgtcgatacat

SEQ ID NO: 164381 - DNA, 19 bp, Homo sapiens
  siRNA target sequence for ALOX15 (NM_001140.3,1153-1171).
cgtcgatacatcctatctt

SEQ ID NO: 164382 - DNA, 19 bp, Homo sapiens
  siRNA target sequence for ALOX15 (NM_001140.3,1156-1174).
cgatacatcctatcttcaa

SEQ ID NO: 164383 - DNA, 19 bp, Homo sapiens
  siRNA target sequence for ALOX15 (NM_001140.3,1161-1179).
catcctatcttcaagctta

SEQ ID NO: 164384 - DNA, 19 bp, Homo sapiens
  siRNA target sequence for ALOX15 (NM_001140.3,1193-1211).
gcgatacaccctggaaatt

SEQ ID NO: 164385 - DNA, 19 bp, Homo sapiens
  siRNA target sequence for ALOX15 (NM_001140.3,1194-1212).
cgatacaccctggaaatta

SEQ ID NO: 164386 - DNA, 19 bp, Homo sapiens
  siRNA target sequence for ALOX15 (NM_001140.3,1236-1254).
gtctctgacatgggaattt

SEQ ID NO: 164387 - DNA, 19 bp, Homo sapiens
  siRNA target sequence for ALOX15 (NM_001140.3,1368-1386).
ctcctgggagtgaagtctt

SEQ ID NO: 164388 - DNA, 19 bp, Homo sapiens
  siRNA target sequence for ALOX15 (NM_001140.3,1449-1467).
gtgagtctccactataaga

SEQ ID NO: 164389 - DNA, 19 bp, Homo sapiens
  siRNA target sequence for ALOX15 (NM_001140.3,1451-1469).
gagtctccactataagaca

SEQ ID NO: 164390 - DNA, 19 bp, Homo sapiens
  siRNA target sequence for ALOX15 (NM_001140.3,1971-1989).
cccagcgtggtggaaaaca

SEQ ID NO: 164391 - DNA, 19 bp, Homo sapiens
  siRNA target sequence for ALOX15B (NM_001141.1,549-567).
cactgcctggatgaaaaga

SEQ ID NO: 164392 - DNA, 19 bp, Homo sapiens
  siRNA target sequence for ALOX15B (NM_001141.1,582-600).
gagctcaatatcaaatact

SEQ ID NO: 164393 - DNA, 19 bp, Homo sapiens
  siRNA target sequence for ALOX15B (NM_001141.1,1009-1027).
caatgaccctgctatacca

SEQ ID NO: 164394 - DNA, 19 bp, Homo sapiens
  siRNA target sequence for ALOX15B (NM_001141.1,1453-1471).
ggacccgaggagttgaaga

SEQ ID NO: 164395 - DNA, 19 bp, Homo sapiens
  siRNA target sequence for ALOX15B (NM_001141.1,1481-1499).
ctactactaccgtgatgat

SEQ ID NO: 164396 - DNA, 19 bp, Homo sapiens
  siRNA target sequence for ALOX15B (NM_001141.1,1600-1618).
cctgggtcagagagatctt

SEQ ID NO: 164397 - DNA, 19 bp, Homo sapiens
  siRNA target sequence for ALOX15B (NM_001141.1,1847-1865).
caccctcccacctgtcaat

SEQ ID NO: 164398 - DNA, 19 bp, Homo sapiens
  siRNA target sequence for ALOX5 (NM_000698.1,94-112).
gcactgacgactacatcta

SEQ ID NO: 164399 - DNA, 19 bp, Homo sapiens
  siRNA target sequence for ALOX5 (NM_000698.1,382-400).
gggatggacgcgcaaagtt

SEQ ID NO: 164400 - DNA, 19 bp, Homo sapiens
  siRNA target sequence for ALOX5 (NM_000698.1,401-419).
ggcccgagatgaccaaatt

SEQ ID NO: 164401 - DNA, 19 bp, Homo sapiens
  siRNA target sequence for ALOX5 (NM_000698.1,405-423).
cgagatgaccaaattcaca

SEQ ID NO: 164402 - DNA, 19 bp, Homo sapiens
  siRNA target sequence for ALOX5 (NM_000698.1,428-446).
caagcaacaccgacgtaaa

SEQ ID NO: 164403 - DNA, 19 bp, Homo sapiens
  siRNA target sequence for ALOX5 (NM_000698.1,431-449).
gcaacaccgacgtaaagaa

SEQ ID NO: 164404 - DNA, 19 bp, Homo sapiens
  siRNA target sequence for ALOX5 (NM_000698.1,539-557).
ccgtgatatccagtttgat

SEQ ID NO: 164405 - DNA, 19 bp, Homo sapiens
  siRNA target sequence for ALOX5 (NM_000698.1,540-558).
cgtgatatccagtttgata

SEQ ID NO: 164406 - DNA, 19 bp, Homo sapiens
  siRNA target sequence for ALOX5 (NM_000698.1,654-672).
gacttcgccgactttgaga

SEQ ID NO: 164407 - DNA, 19 bp, Homo sapiens
  siRNA target sequence for ALOX5 (NM_000698.1,656-674).
cttcgccgactttgagaaa

SEQ ID NO: 164408 - DNA, 19 bp, Homo sapiens
  siRNA target sequence for ALOX5 (NM_000698.1,660-678).
gccgactttgagaaaatct

SEQ ID NO: 164409 - DNA, 19 bp, Homo sapiens
  siRNA target sequence for ALOX5 (NM_000698.1,681-699).
gtcaagatcagcaacacta

SEQ ID NO: 164410 - DNA, 19 bp, Homo sapiens
  siRNA target sequence for ALOX5 (NM_000698.1,686-704).
gatcagcaacactatttct

SEQ ID NO: 164411 - DNA, 19 bp, Homo sapiens
  siRNA target sequence for ALOX5 (NM_000698.1,703-721).
ctgagcgggtcatgaatca

SEQ ID NO: 164412 - DNA, 19 bp, Homo sapiens
  siRNA target sequence for ALOX5 (NM_000698.1,705-723).
gagcgggtcatgaatcact

SEQ ID NO: 164413 - DNA, 19 bp, Homo sapiens
  siRNA target sequence for ALOX5 (NM_000698.1,872-890).
ggtccagcaagggaacatt

SEQ ID NO: 164414 - DNA, 19 bp, Homo sapiens
  siRNA target sequence for ALOX5 (NM_000698.1,873-891).
gtccagcaagggaacattt

SEQ ID NO: 164415 - DNA, 19 bp, Homo sapiens
  siRNA target sequence for ALOX5 (NM_000698.1,920-938).
catcgatgccaacaaaaca

SEQ ID NO: 164416 - DNA, 19 bp, Homo sapiens
  siRNA target sequence for ALOX5 (NM_000698.1,969-987).
cccatctgcttgctgtata

SEQ ID NO: 164417 - DNA, 19 bp, Homo sapiens
  siRNA target sequence for ALOX5 (NM_000698.1,989-1007).
gaacctggccaacaagatt

SEQ ID NO: 164418 - DNA, 19 bp, Homo sapiens
  siRNA target sequence for ALOX5 (NM_000698.1,1018-1036).
ccatccagctcaaccaaat

SEQ ID NO: 164419 - DNA, 19 bp, Homo sapiens
  siRNA target sequence for ALOX5 (NM_000698.1,1041-1059).
ggagatgagaaccctattt

SEQ ID NO: 164420 - DNA, 19 bp, Homo sapiens
  siRNA target sequence for ALOX5 (NM_000698.1,1042-1060).
gagatgagaaccctatttt

SEQ ID NO: 164421 - DNA, 19 bp, Homo sapiens
  siRNA target sequence for ALOX5 (NM_000698.1,1061-1079).
cctcccttcggatgcaaaa

SEQ ID NO: 164422 - DNA, 19 bp, Homo sapiens
  siRNA target sequence for ALOX5 (NM_000698.1,1066-1084).
cttcggatgcaaaatacga

SEQ ID NO: 164423 - DNA, 19 bp, Homo sapiens
  siRNA target sequence for ALOX5 (NM_000698.1,1207-1225).
ctgctgtgcaccccatttt

SEQ ID NO: 164424 - DNA, 19 bp, Homo sapiens
  siRNA target sequence for ALOX5 (NM_000698.1,1210-1228).
ctgtgcaccccattttcaa

SEQ ID NO: 164425 - DNA, 19 bp, Homo sapiens
  siRNA target sequence for ALOX5 (NM_000698.1,1236-1254).
gtggcacacgtgagattca

SEQ ID NO: 164426 - DNA, 19 bp, Homo sapiens
  siRNA target sequence for ALOX5 (NM_000698.1,1245-1263).
gtgagattcaccattgcaa

SEQ ID NO: 164427 - DNA, 19 bp, Homo sapiens
  siRNA target sequence for ALOX5 (NM_000698.1,1249-1267).
gattcaccattgcaatcaa

SEQ ID NO: 164428 - DNA, 19 bp, Homo sapiens
  siRNA target sequence for ALOX5 (NM_000698.1,1434-1452).
gaagacatcccctactact

SEQ ID NO: 164429 - DNA, 19 bp, Homo sapiens
  siRNA target sequence for ALOX5 (NM_000698.1,1504-1522).
ccgaggtggtagacatcta

SEQ ID NO: 164430 - DNA, 19 bp, Homo sapiens
  siRNA target sequence for ALOX5 (NM_000698.1,2016-2034).
ctgccatattactacttgt

SEQ ID NO: 164431 - DNA, 19 bp, Homo sapiens
  siRNA target sequence for ALOXE3 (NM_021628.1,636-654).
cccctggatcggtacagaa

SEQ ID NO: 164432 - DNA, 19 bp, Homo sapiens
  siRNA target sequence for ALOXE3 (NM_021628.1,639-657).
ctggatcggtacagaagta

SEQ ID NO: 164433 - DNA, 19 bp, Homo sapiens
  siRNA target sequence for ALOXE3 (NM_021628.1,641-659).
ggatcggtacagaagtaca

SEQ ID NO: 164434 - DNA, 19 bp, Homo sapiens
  siRNA target sequence for ALOXE3 (NM_021628.1,642-660).
gatcggtacagaagtacaa

SEQ ID NO: 164435 - DNA, 19 bp, Homo sapiens
  siRNA target sequence for ALOXE3 (NM_021628.1,769-787).
cgaaccggatggtagtgta

SEQ ID NO: 164436 - DNA, 19 bp, Homo sapiens
  siRNA target sequence for ALOXE3 (NM_021628.1,770-788).
gaaccggatggtagtgtat

SEQ ID NO: 164437 - DNA, 19 bp, Homo sapiens
  siRNA target sequence for ALOXE3 (NM_021628.1,799-817).
ctgctatcagtggattgaa

SEQ ID NO: 164438 - DNA, 19 bp, Homo sapiens
  siRNA target sequence for ALOXE3 (NM_021628.1,928-946).
ctaccgctggaagatctat

SEQ ID NO: 164439 - DNA, 19 bp, Homo sapiens
  siRNA target sequence for ALOXE3 (NM_021628.1,1075-1093).
cggcttccccatgaaaatt

SEQ ID NO: 164440 - DNA, 19 bp, Homo sapiens
  siRNA target sequence for ALOXE3 (NM_021628.1,1120-1138).
gcccaatgttcgatactca

SEQ ID NO: 164441 - DNA, 19 bp, Homo sapiens
  siRNA target sequence for ALOXE3 (NM_021628.1,1149-1167).
cgatctcgctgctcttcaa

SEQ ID NO: 164442 - DNA, 19 bp, Homo sapiens
  siRNA target sequence for ALOXE3 (NM_021628.1,1176-1194).
ctgcgtccttgggaatgaa

SEQ ID NO: 164443 - DNA, 19 bp, Homo sapiens
  siRNA target sequence for ALOXE3 (NM_021628.1,1272-1290).
ccttcacgacaaagtatgt

SEQ ID NO: 164444 - DNA, 19 bp, Homo sapiens
  siRNA target sequence for ALOXE3 (NM_021628.1,2025-2043).
gagacgacggcctgaagat

SEQ ID NO: 164445 - DNA, 19 bp, Homo sapiens
  siRNA target sequence for ALOXE3 (NM_021628.1,2072-2090).
gaaatcgtgggctactatt

SEQ ID NO: 164446 - DNA, 19 bp, Homo sapiens
  siRNA target sequence for ALOXE3 (NM_021628.1,2132-2150).
gcctggactggcgagattt

SEQ ID NO: 164447 - DNA, 19 bp, Homo sapiens
  siRNA target sequence for ALOXE3 (NM_021628.1,2137-2155).
gactggcgagatttttgct

SEQ ID NO: 164448 - DNA, 19 bp, Homo sapiens
  siRNA target sequence for ALOXE3 (NM_021628.1,2230-2248).
cactgcaatcatcttcaat

SEQ ID NO: 164449 - DNA, 19 bp, Homo sapiens
  siRNA target sequence for ALOXE3 (NM_021628.1,2384-2402).
ctccctgaagtgaacatca

SEQ ID NO: 164450 - DNA, 19 bp, Homo sapiens
  siRNA target sequence for FDX1 (NM_004109.3,471-489).
cgtgatggtgaaacattaa

SEQ ID NO: 164451 - DNA, 19 bp, Homo sapiens
  siRNA target sequence for FDX1 (NM_004109.3,772-790).
ccagacaatccattgatgt

SEQ ID NO: 164452 - DNA, 19 bp, Homo sapiens
  siRNA target sequence for NIFU (NM_014301.1,223-241).
ctcaggttgttgatcatta

SEQ ID NO: 164453 - DNA, 19 bp, Homo sapiens
  siRNA target sequence for NIFU (NM_014301.1,234-252).
gatcattatgaaaatccta

SEQ ID NO: 164454 - DNA, 19 bp, Homo sapiens
  siRNA target sequence for NIFU (NM_014301.1,265-283).
cccttgacaagacatctaa

SEQ ID NO: 164455 - DNA, 19 bp, Homo sapiens
  siRNA target sequence for NIFU (NM_014301.1,315-333).
gcatgtggtgacgtaatga

SEQ ID NO: 164456 - DNA, 19 bp, Homo sapiens
  siRNA target sequence for NIFU (NM_014301.1,319-337).
gtggtgacgtaatgaaatt

SEQ ID NO: 164457 - DNA, 19 bp, Homo sapiens
  siRNA target sequence for NIFU (NM_014301.1,326-344).
cgtaatgaaattacagatt

SEQ ID NO: 164458 - DNA, 19 bp, Homo sapiens
  siRNA target sequence for NIFU (NM_014301.1,365-383).
gattgtggatgctaggttt

SEQ ID NO: 164459 - DNA, 19 bp, Homo sapiens
  siRNA target sequence for NIFU (NM_014301.1,369-387).
gtggatgctaggtttaaaa

SEQ ID NO: 164460 - DNA, 19 bp, Homo sapiens
  siRNA target sequence for NIFU (NM_014301.1,527-545).
ctccatgctggctgaagat

SEQ ID NO: 164461 - DNA, 19 bp, Homo sapiens
  siRNA target sequence for NIFU (NM_014301.1,563-581).
ggctgattacaaattgaaa

SEQ ID NO: 164462 - DNA, 19 bp, Homo sapiens
  siRNA target sequence for PAH (NM_000277.1,589-607).
ctcactcaaagaagaagtt

SEQ ID NO: 164463 - DNA, 19 bp, Homo sapiens
  siRNA target sequence for PAH (NM_000277.1,618-636).
ccaaagtattgcgcttatt

SEQ ID NO: 164464 - DNA, 19 bp, Homo sapiens
  siRNA target sequence for PAH (NM_000277.1,619-637).
caaagtattgcgcttattt

SEQ ID NO: 164465 - DNA, 19 bp, Homo sapiens
  siRNA target sequence for PAH (NM_000277.1,861-879).
gatttgccaatcagattct

SEQ ID NO: 164466 - DNA, 19 bp, Homo sapiens
  siRNA target sequence for PAH (NM_000277.1,1048-1066).
gactctgaagtccttgtat

SEQ ID NO: 164467 - DNA, 19 bp, Homo sapiens
  siRNA target sequence for PAH (NM_000277.1,1077-1095).
cttgctatgagtacaatca

SEQ ID NO: 164468 - DNA, 19 bp, Homo sapiens
  siRNA target sequence for PAH (NM_000277.1,1080-1098).
gctatgagtacaatcacat

SEQ ID NO: 164469 - DNA, 19 bp, Homo sapiens
  siRNA target sequence for PAH (NM_000277.1,1081-1099).
ctatgagtacaatcacatt

SEQ ID NO: 164470 - DNA, 19 bp, Homo sapiens
  siRNA target sequence for PAH (NM_000277.1,1217-1235).
ctttcctctcgggatttct

SEQ ID NO: 164471 - DNA, 19 bp, Homo sapiens
  siRNA target sequence for PAH (NM_000277.1,1286-1304).
ggatccaagcccatgtata

SEQ ID NO: 164472 - DNA, 19 bp, Homo sapiens
  siRNA target sequence for PAH (NM_000277.1,1336-1354).
gggacatgtgcccttgttt

SEQ ID NO: 164473 - DNA, 19 bp, Homo sapiens
  siRNA target sequence for PAH (NM_000277.1,1361-1379).
cgcagctttgcccagtttt

SEQ ID NO: 164474 - DNA, 19 bp, Homo sapiens
  siRNA target sequence for PAH (NM_000277.1,1407-1425).
gtgcacctgatgaatacat

SEQ ID NO: 164475 - DNA, 19 bp, Homo sapiens
  siRNA target sequence for PAH (NM_000277.1,1427-1445).
gaaaagctcgccacaattt

SEQ ID NO: 164476 - DNA, 19 bp, Homo sapiens
  siRNA target sequence for PAH (NM_000277.1,1521-1539).
cctttggtgaattacagta

SEQ ID NO: 164477 - DNA, 19 bp, Homo sapiens
  siRNA target sequence for PAH (NM_000277.1,1529-1547).
gaattacagtactgcttat

SEQ ID NO: 164478 - DNA, 19 bp, Homo sapiens
  siRNA target sequence for PAH (NM_000277.1,1636-1654).
ggcagagagttttaatgat

SEQ ID NO: 164479 - DNA, 19 bp, Homo sapiens
  siRNA target sequence for PAH (NM_000277.1,1672-1690).
gaactttgctgccacaata

SEQ ID NO: 164480 - DNA, 19 bp, Homo sapiens
  siRNA target sequence for PAH (NM_000277.1,1675-1693).
ctttgctgccacaatacct

SEQ ID NO: 164481 - DNA, 19 bp, Homo sapiens
  siRNA target sequence for PAH (NM_000277.1,1806-1824).
gcagtgccctccagaaaat

SEQ ID NO: 164482 - DNA, 19 bp, Homo sapiens
  siRNA target sequence for SCD (NM_005063.3,777-795).
cccctacggctctttctga

SEQ ID NO: 164483 - DNA, 19 bp, Homo sapiens
  siRNA target sequence for SCD4 (NM_024906.1,276-294).
gcgacgccaaggaagaaat

SEQ ID NO: 164484 - DNA, 19 bp, Homo sapiens
  siRNA target sequence for SCD4 (NM_024906.1,629-647).
cgagcccaccacaagtact

SEQ ID NO: 164485 - DNA, 19 bp, Homo sapiens
  siRNA target sequence for SCD4 (NM_024906.1,719-737).
cgcaagcatcgagatgtta

SEQ ID NO: 164486 - DNA, 19 bp, Homo sapiens
  siRNA target sequence for SCD4 (NM_024906.1,720-738).
gcaagcatcgagatgttat

SEQ ID NO: 164487 - DNA, 19 bp, Homo sapiens
  siRNA target sequence for SCD4 (NM_024906.1,721-739).
caagcatcgagatgttatt

SEQ ID NO: 164488 - DNA, 19 bp, Homo sapiens
  siRNA target sequence for SCD4 (NM_024906.1,787-805).
ggtccggatccagagaaat

SEQ ID NO: 164489 - DNA, 19 bp, Homo sapiens
  siRNA target sequence for SCD4 (NM_024906.1,788-806).
gtccggatccagagaaata

SEQ ID NO: 164490 - DNA, 19 bp, Homo sapiens
  siRNA target sequence for SCD4 (NM_024906.1,873-891).
ggcatcaagggcatatatt

SEQ ID NO: 164491 - DNA, 19 bp, Homo sapiens
  siRNA target sequence for SCD4 (NM_024906.1,875-893).
catcaagggcatatattga

SEQ ID NO: 164492 - DNA, 19 bp, Homo sapiens
  siRNA target sequence for SCD4 (NM_024906.1,881-899).
gggcatatattgaaagtca

SEQ ID NO: 164493 - DNA, 19 bp, Homo sapiens
  siRNA target sequence for SCD4 (NM_024906.1,900-918).
cccttcccggattacacat

SEQ ID NO: 164494 - DNA, 19 bp, Homo sapiens
  siRNA target sequence for SCD4 (NM_024906.1,901-919).
ccttcccggattacacatt

SEQ ID NO: 164495 - DNA, 19 bp, Homo sapiens
  siRNA target sequence for SCD4 (NM_024906.1,986-1004).
gtgtccctggaggtattct

SEQ ID NO: 164496 - DNA, 19 bp, Homo sapiens
  siRNA target sequence for TH (NM_000360.2,252-270).
ggaaggccgtgctaaacct

SEQ ID NO: 164497 - DNA, 19 bp, Homo sapiens
  siRNA target sequence for TH (NM_000360.2,333-351).
cgtttgaagccaaaatcca

SEQ ID NO: 164498 - DNA, 19 bp, Homo sapiens
  siRNA target sequence for TH (NM_000360.2,804-822).
gcggctaccgggaagacaa

SEQ ID NO: 164499 - DNA, 19 bp, Homo sapiens
  siRNA target sequence for TH (NM_000360.2,805-823).
cggctaccgggaagacaat

SEQ ID NO: 164500 - DNA, 19 bp, Homo sapiens
  siRNA target sequence for TH (NM_000360.2,806-824).
ggctaccgggaagacaata

SEQ ID NO: 164501 - DNA, 19 bp, Homo sapiens
  siRNA target sequence for TH (NM_000360.2,807-825).
gctaccgggaagacaatat

SEQ ID NO: 164502 - DNA, 19 bp, Homo sapiens
  siRNA target sequence for TH (NM_000360.2,1296-1314).
cgtaccagtcagtctactt

SEQ ID NO: 164503 - DNA, 19 bp, Homo sapiens
  siRNA target sequence for TPH1 (NM_004179.1,79-97).
gaagttggaggacttataa

SEQ ID NO: 164504 - DNA, 19 bp, Homo sapiens
  siRNA target sequence for TPH1 (NM_004179.1,139-157).
catatcgagtcccgaaaat

SEQ ID NO: 164505 - DNA, 19 bp, Homo sapiens
  siRNA target sequence for TPH1 (NM_004179.1,144-162).
cgagtcccgaaaatcaaaa

SEQ ID NO: 164506 - DNA, 19 bp, Homo sapiens
  siRNA target sequence for TPH1 (NM_004179.1,145-163).
gagtcccgaaaatcaaaaa

SEQ ID NO: 164507 - DNA, 19 bp, Homo sapiens
  siRNA target sequence for TPH1 (NM_004179.1,147-165).
gtcccgaaaatcaaaaaga

SEQ ID NO: 164508 - DNA, 19 bp, Homo sapiens
  siRNA target sequence for TPH1 (NM_004179.1,237-255).
gctgaagtctcataccaat

SEQ ID NO: 164509 - DNA, 19 bp, Homo sapiens
  siRNA target sequence for TPH1 (NM_004179.1,263-281).
ctgtgaatctaccagataa

SEQ ID NO: 164510 - DNA, 19 bp, Homo sapiens
  siRNA target sequence for TPH1 (NM_004179.1,267-285).
gaatctaccagataatttt

SEQ ID NO: 164511 - DNA, 19 bp, Homo sapiens
  siRNA target sequence for TPH1 (NM_004179.1,369-387).
gatgtatggatctgaacta

SEQ ID NO: 164512 - DNA, 19 bp, Homo sapiens
  siRNA target sequence for TPH1 (NM_004179.1,372-390).
gtatggatctgaactagat

SEQ ID NO: 164513 - DNA, 19 bp, Homo sapiens
  siRNA target sequence for TPH1 (NM_004179.1,414-432).
caatgtctaccgtaaacgt

SEQ ID NO: 164514 - DNA, 19 bp, Homo sapiens
  siRNA target sequence for TPH1 (NM_004179.1,423-441).
ccgtaaacgtcgaaagtat

SEQ ID NO: 164515 - DNA, 19 bp, Homo sapiens
  siRNA target sequence for TPH1 (NM_004179.1,424-442).
cgtaaacgtcgaaagtatt

SEQ ID NO: 164516 - DNA, 19 bp, Homo sapiens
  siRNA target sequence for TPH1 (NM_004179.1,425-443).
gtaaacgtcgaaagtattt

SEQ ID NO: 164517 - DNA, 19 bp, Homo sapiens
  siRNA target sequence for TPH1 (NM_004179.1,450-468).
cttggctatgaactataaa

SEQ ID NO: 164518 - DNA, 19 bp, Homo sapiens
  siRNA target sequence for TPH1 (NM_004179.1,565-583).
gcttgcagagagtatctca

SEQ ID NO: 164519 - DNA, 19 bp, Homo sapiens
  siRNA target sequence for TPH1 (NM_004179.1,569-587).
gcagagagtatctcaaaaa

SEQ ID NO: 164520 - DNA, 19 bp, Homo sapiens
  siRNA target sequence for TPH1 (NM_004179.1,611-629).
gtggatatcgggaggataa

SEQ ID NO: 164521 - DNA, 19 bp, Homo sapiens
  siRNA target sequence for TPH1 (NM_004179.1,613-631).
ggatatcgggaggataata

SEQ ID NO: 164522 - DNA, 19 bp, Homo sapiens
  siRNA target sequence for TPH1 (NM_004179.1,614-632).
gatatcgggaggataatat

SEQ ID NO: 164523 - DNA, 19 bp, Homo sapiens
  siRNA target sequence for TPH1 (NM_004179.1,667-685).
gagcgtacaggtttttcca

SEQ ID NO: 164524 - DNA, 19 bp, Homo sapiens
  siRNA target sequence for TPH1 (NM_004179.1,731-749).
gtttagcctttcgagtttt

SEQ ID NO: 164525 - DNA, 19 bp, Homo sapiens
  siRNA target sequence for TPH1 (NM_004179.1,745-763).
gtttttcactgcactcaat

SEQ ID NO: 164526 - DNA, 19 bp, Homo sapiens
  siRNA target sequence for TPH1 (NM_004179.1,751-769).
cactgcactcaatatgtga

SEQ ID NO: 164527 - DNA, 19 bp, Homo sapiens
  siRNA target sequence for TPH1 (NM_004179.1,902-920).
cagaggaggctgttcaaaa

SEQ ID NO: 164528 - DNA, 19 bp, Homo sapiens
  siRNA target sequence for TPH1 (NM_004179.1,925-943).
gcaacgtgctactttttca

SEQ ID NO: 164529 - DNA, 19 bp, Homo sapiens
  siRNA target sequence for TPH1 (NM_004179.1,948-966).
ggagtttggtctatgtaaa

SEQ ID NO: 164530 - DNA, 19 bp, Homo sapiens
  siRNA target sequence for TPH1 (NM_004179.1,991-1009).
ggtgctggcttactttctt

SEQ ID NO: 164531 - DNA, 19 bp, Homo sapiens
  siRNA target sequence for TPH1 (NM_004179.1,995-1013).
ctggcttactttcttctat

SEQ ID NO: 164532 - DNA, 19 bp, Homo sapiens
  siRNA target sequence for TPH1 (NM_004179.1,1057-1075).
ccctttgatcccaagatta

SEQ ID NO: 164533 - DNA, 19 bp, Homo sapiens
  siRNA target sequence for TPH1 (NM_004179.1,1100-1118).
caacttttcaagatgtcta

SEQ ID NO: 164534 - DNA, 19 bp, Homo sapiens
  siRNA target sequence for TPH1 (NM_004179.1,1162-1180).
gaatttaccaaaacaatta

SEQ ID NO: 164535 - DNA, 19 bp, Homo sapiens
  siRNA target sequence for TPH1 (NM_004179.1,1184-1202).
gtccatttggagtgaagta

SEQ ID NO: 164536 - DNA, 19 bp, Homo sapiens
  siRNA target sequence for TPH1 (NM_004179.1,1186-1204).
ccatttggagtgaagtata

SEQ ID NO: 164537 - DNA, 19 bp, Homo sapiens
  siRNA target sequence for TPH1 (NM_004179.1,1193-1211).
gagtgaagtataatccata

SEQ ID NO: 164538 - DNA, 19 bp, Homo sapiens
  siRNA target sequence for TPH2 (NM_173353.2,235-253).
ggcagctcaacactaaata

SEQ ID NO: 164539 - DNA, 19 bp, Homo sapiens
  siRNA target sequence for TPH2 (NM_173353.2,236-254).
gcagctcaacactaaataa

SEQ ID NO: 164540 - DNA, 19 bp, Homo sapiens
  siRNA target sequence for TPH2 (NM_173353.2,237-255).
cagctcaacactaaataaa

SEQ ID NO: 164541 - DNA, 19 bp, Homo sapiens
  siRNA target sequence for TPH2 (NM_173353.2,337-355).
gttgttttctccttgaaga

SEQ ID NO: 164542 - DNA, 19 bp, Homo sapiens
  siRNA target sequence for TPH2 (NM_173353.2,432-450).
gaaatctcggcgaagaagt

SEQ ID NO: 164543 - DNA, 19 bp, Homo sapiens
  siRNA target sequence for TPH2 (NM_173353.2,449-467).
gttctgaggttgaaatctt

SEQ ID NO: 164544 - DNA, 19 bp, Homo sapiens
  siRNA target sequence for TPH2 (NM_173353.2,632-650).
gctctcacagagttctcat

SEQ ID NO: 164545 - DNA, 19 bp, Homo sapiens
  siRNA target sequence for TPH2 (NM_173353.2,683-701).
gatttaaggacaatgtcta

SEQ ID NO: 164546 - DNA, 19 bp, Homo sapiens
  siRNA target sequence for TPH2 (NM_173353.2,730-748).
gtggccatgggttataaat

SEQ ID NO: 164547 - DNA, 19 bp, Homo sapiens
  siRNA target sequence for TPH2 (NM_173353.2,732-750).
ggccatgggttataaatat

SEQ ID NO: 164548 - DNA, 19 bp, Homo sapiens
  siRNA target sequence for TPH2 (NM_173353.2,764-782).
ccagggtggagtatactga

SEQ ID NO: 164549 - DNA, 19 bp, Homo sapiens
  siRNA target sequence for TPH2 (NM_173353.2,814-832).
cgggagctctccaaactct

SEQ ID NO: 164550 - DNA, 19 bp, Homo sapiens
  siRNA target sequence for TPH2 (NM_173353.2,815-833).
gggagctctccaaactcta

SEQ ID NO: 164551 - DNA, 19 bp, Homo sapiens
  siRNA target sequence for TPH2 (NM_173353.2,816-834).
ggagctctccaaactctat

SEQ ID NO: 164552 - DNA, 19 bp, Homo sapiens
  siRNA target sequence for TPH2 (NM_173353.2,844-862).
gcttgccgagagtatttga

SEQ ID NO: 164553 - DNA, 19 bp, Homo sapiens
  siRNA target sequence for TPH2 (NM_173353.2,845-863).
cttgccgagagtatttgaa

SEQ ID NO: 164554 - DNA, 19 bp, Homo sapiens
  siRNA target sequence for TPH2 (NM_173353.2,848-866).
gccgagagtatttgaaaaa

SEQ ID NO: 164555 - DNA, 19 bp, Homo sapiens
  siRNA target sequence for TPH2 (NM_173353.2,850-868).
cgagagtatttgaaaaact

SEQ ID NO: 164556 - DNA, 19 bp, Homo sapiens
  siRNA target sequence for TPH2 (NM_173353.2,893-911).
gctacagagaggacaatgt

SEQ ID NO: 164557 - DNA, 19 bp, Homo sapiens
  siRNA target sequence for TPH2 (NM_173353.2,925-943).
gatgtctccatgtttctga

SEQ ID NO: 164558 - DNA, 19 bp, Homo sapiens
  siRNA target sequence for TPH2 (NM_173353.2,984-1002).
cctgagcccacgagacttt

SEQ ID NO: 164559 - DNA, 19 bp, Homo sapiens
  siRNA target sequence for TPH2 (NM_173353.2,1104-1122).
gggacatgttccactactt

SEQ ID NO: 164560 - DNA, 19 bp, Homo sapiens
  siRNA target sequence for TPH2 (NM_173353.2,1115-1133).
cactacttgcggatcctaa

SEQ ID NO: 164561 - DNA, 19 bp, Homo sapiens
  siRNA target sequence for TPH2 (NM_173353.2,1129-1147).
cctaagtttgctcagtttt

SEQ ID NO: 164562 - DNA, 19 bp, Homo sapiens
  siRNA target sequence for TPH2 (NM_173353.2,1167-1185).
gtctctgggagcatcagat

SEQ ID NO: 164563 - DNA, 19 bp, Homo sapiens
  siRNA target sequence for TPH2 (NM_173353.2,1201-1219).
ctagccacgtgctatttct

SEQ ID NO: 164564 - DNA, 19 bp, Homo sapiens
  siRNA target sequence for TPH2 (NM_173353.2,1208-1226).
cgtgctatttcttcacaat

SEQ ID NO: 164565 - DNA, 19 bp, Homo sapiens
  siRNA target sequence for TPH2 (NM_173353.2,1286-1304).
cctccattggagaattaaa

SEQ ID NO: 164566 - DNA, 19 bp, Homo sapiens
  siRNA target sequence for TPH2 (NM_173353.2,1344-1362).
cccaaagacaacttgctta

SEQ ID NO: 164567 - DNA, 19 bp, Homo sapiens
  siRNA target sequence for TPH2 (NM_173353.2,1389-1407).
ggaagcctactttgtttca

SEQ ID NO: 164568 - DNA, 19 bp, Homo sapiens
  siRNA target sequence for TPH2 (NM_173353.2,1437-1455).
gagggactttgcaaagtca

SEQ ID NO: 164569 - DNA, 19 bp, Homo sapiens
  siRNA target sequence for TPH2 (NM_173353.2,1439-1457).
gggactttgcaaagtcaat

SEQ ID NO: 164570 - DNA, 19 bp, Homo sapiens
  siRNA target sequence for TPH2 (NM_173353.2,1440-1458).
ggactttgcaaagtcaatt

SEQ ID NO: 164571 - DNA, 19 bp, Homo sapiens
  siRNA target sequence for TPH2 (NM_173353.2,1441-1459).
gactttgcaaagtcaatta

SEQ ID NO: 164572 - DNA, 19 bp, Homo sapiens
  siRNA target sequence for TPH2 (NM_173353.2,1460-1478).
cccgtcccttctcagtata

SEQ ID NO: 164573 - DNA, 19 bp, Homo sapiens
  siRNA target sequence for TPH2 (NM_173353.2,1462-1480).
cgtcccttctcagtatact

SEQ ID NO: 164574 - DNA, 19 bp, Homo sapiens
  siRNA target sequence for TPH2 (NM_173353.2,1487-1505).
cctacacacagagtattga

SEQ ID NO: 164575 - DNA, 19 bp, Homo sapiens
  siRNA target sequence for TPH2 (NM_173353.2,1488-1506).
ctacacacagagtattgaa

SEQ ID NO: 164576 - DNA, 19 bp, Homo sapiens
  siRNA target sequence for TPH2 (NM_173353.2,1548-1566).
ccttcgcagcgacttgaat

SEQ ID NO: 164577 - DNA, 19 bp, Homo sapiens
  siRNA target sequence for TPH2 (NM_173353.2,1549-1567).
cttcgcagcgacttgaata

SEQ ID NO: 164578 - DNA, 19 bp, Homo sapiens
  siRNA target sequence for TPH2 (NM_173353.2,1568-1586).
cagtgtgtgatgctttaaa

SEQ ID NO: 164579 - DNA, 19 bp, Homo sapiens
  siRNA target sequence for AOX1 (NM_001159.2,309-327).
cgtccgagctgctcttcta

SEQ ID NO: 164580 - DNA, 19 bp, Homo sapiens
  siRNA target sequence for AOX1 (NM_001159.2,337-355).
ccgcaaggtgatagaaaaa

SEQ ID NO: 164581 - DNA, 19 bp, Homo sapiens
  siRNA target sequence for AOX1 (NM_001159.2,338-356).
cgcaaggtgatagaaaaaa

SEQ ID NO: 164582 - DNA, 19 bp, Homo sapiens
  siRNA target sequence for AOX1 (NM_001159.2,447-465).
gtgcttgtacagtgatgat

SEQ ID NO: 164583 - DNA, 19 bp, Homo sapiens
  siRNA target sequence for AOX1 (NM_001159.2,449-467).
gcttgtacagtgatgatat

SEQ ID NO: 164584 - DNA, 19 bp, Homo sapiens
  siRNA target sequence for AOX1 (NM_001159.2,579-597).
gcacccacaccagaattca

SEQ ID NO: 164585 - DNA, 19 bp, Homo sapiens
  siRNA target sequence for AOX1 (NM_001159.2,580-598).
cacccacaccagaattcat

SEQ ID NO: 164586 - DNA, 19 bp, Homo sapiens
  siRNA target sequence for AOX1 (NM_001159.2,705-723).
ctctggatcagttaactga

SEQ ID NO: 164587 - DNA, 19 bp, Homo sapiens
  siRNA target sequence for AOX1 (NM_001159.2,776-794).
gcatgcaagactttctgta

SEQ ID NO: 164588 - DNA, 19 bp, Homo sapiens
  siRNA target sequence for AOX1 (NM_001159.2,882-900).
gtaagacaagtccaaaact

SEQ ID NO: 164589 - DNA, 19 bp, Homo sapiens
  siRNA target sequence for AOX1 (NM_001159.2,932-950).
ccaacccaggaactgatat

SEQ ID NO: 164590 - DNA, 19 bp, Homo sapiens
  siRNA target sequence for AOX1 (NM_001159.2,1077-1095).
cccaggctcctgttatcat

SEQ ID NO: 164591 - DNA, 19 bp, Homo sapiens
  siRNA target sequence for AOX1 (NM_001159.2,1111-1129).
ggggcctgaagtgaaattt

SEQ ID NO: 164592 - DNA, 19 bp, Homo sapiens
  siRNA target sequence for AOX1 (NM_001159.2,1112-1130).
gggcctgaagtgaaattta

SEQ ID NO: 164593 - DNA, 19 bp, Homo sapiens
  siRNA target sequence for AOX1 (NM_001159.2,1113-1131).
ggcctgaagtgaaatttaa

SEQ ID NO: 164594 - DNA, 19 bp, Homo sapiens
  siRNA target sequence for AOX1 (NM_001159.2,1158-1176).
ctcctgatagaattgaaga

SEQ ID NO: 164595 - DNA, 19 bp, Homo sapiens
  siRNA target sequence for AOX1 (NM_001159.2,1183-1201).
gtgttgtaaaccatgcata

SEQ ID NO: 164596 - DNA, 19 bp, Homo sapiens
  siRNA target sequence for AOX1 (NM_001159.2,1185-1203).
gttgtaaaccatgcatata

SEQ ID NO: 164597 - DNA, 19 bp, Homo sapiens
  siRNA target sequence for AOX1 (NM_001159.2,1380-1398).
gcaggcatccagattcaga

SEQ ID NO: 164598 - DNA, 19 bp, Homo sapiens
  siRNA target sequence for AOX1 (NM_001159.2,1381-1399).
caggcatccagattcagat

SEQ ID NO: 164599 - DNA, 19 bp, Homo sapiens
  siRNA target sequence for AOX1 (NM_001159.2,1411-1429).
cctggctgtgggtaactgt

SEQ ID NO: 164600 - DNA, 19 bp, Homo sapiens
  siRNA target sequence for AOX1 (NM_001159.2,1412-1430).
ctggctgtgggtaactgta

SEQ ID NO: 164601 - DNA, 19 bp, Homo sapiens
  siRNA target sequence for AOX1 (NM_001159.2,1431-1449).
ccctcaacttgctatcaaa

SEQ ID NO: 164602 - DNA, 19 bp, Homo sapiens
  siRNA target sequence for AOX1 (NM_001159.2,1454-1472).
ggaaaacgacagattcctt

SEQ ID NO: 164603 - DNA, 19 bp, Homo sapiens
  siRNA target sequence for AOX1 (NM_001159.2,1461-1479).
gacagattcctttaaatga

SEQ ID NO: 164604 - DNA, 19 bp, Homo sapiens
  siRNA target sequence for AOX1 (NM_001159.2,1470-1488).
ctttaaatgagcaattcct

SEQ ID NO: 164605 - DNA, 19 bp, Homo sapiens
  siRNA target sequence for AOX1 (NM_001159.2,1495-1513).
gtgccctaatgcagatctt

SEQ ID NO: 164606 - DNA, 19 bp, Homo sapiens
  siRNA target sequence for AOX1 (NM_001159.2,1607-1625).
gcgctagcgatagtcaatt

SEQ ID NO: 164607 - DNA, 19 bp, Homo sapiens
  siRNA target sequence for AOX1 (NM_001159.2,1609-1627).
gctagcgatagtcaattca

SEQ ID NO: 164608 - DNA, 19 bp, Homo sapiens
  siRNA target sequence for AOX1 (NM_001159.2,1658-1676).
ggcattattagagagttat

SEQ ID NO: 164609 - DNA, 19 bp, Homo sapiens
  siRNA target sequence for AOX1 (NM_001159.2,1668-1686).
gagagttatgcatctcata

SEQ ID NO: 164610 - DNA, 19 bp, Homo sapiens
  siRNA target sequence for AOX1 (NM_001159.2,1672-1690).
gttatgcatctcatatgga

SEQ ID NO: 164611 - DNA, 19 bp, Homo sapiens
  siRNA target sequence for AOX1 (NM_001159.2,1746-1764).
ggcactggaacgaacagat

SEQ ID NO: 164612 - DNA, 19 bp, Homo sapiens
  siRNA target sequence for AOX1 (NM_001159.2,1780-1798).
caggcttattctgaatgaa

SEQ ID NO: 164613 - DNA, 19 bp, Homo sapiens
  siRNA target sequence for AOX1 (NM_001159.2,1906-1924).
gatggatccagttcactat

SEQ ID NO: 164614 - DNA, 19 bp, Homo sapiens
  siRNA target sequence for AOX1 (NM_001159.2,1910-1928).
gatccagttcactatccta

SEQ ID NO: 164615 - DNA, 19 bp, Homo sapiens
  siRNA target sequence for AOX1 (NM_001159.2,1952-1970).
gctttagaagatcttcatt

SEQ ID NO: 164616 - DNA, 19 bp, Homo sapiens
  siRNA target sequence for AOX1 (NM_001159.2,1976-1994).
catcactgcagtacattaa

SEQ ID NO: 164617 - DNA, 19 bp, Homo sapiens
  siRNA target sequence for AOX1 (NM_001159.2,1989-2007).
cattaaagtaccagaatat

SEQ ID NO: 164618 - DNA, 19 bp, Homo sapiens
  siRNA target sequence for AOX1 (NM_001159.2,2111-2129).
ctggtggaccaggaacttt

SEQ ID NO: 164619 - DNA, 19 bp, Homo sapiens
  siRNA target sequence for AOX1 (NM_001159.2,2114-2132).
gtggaccaggaacttttct

SEQ ID NO: 164620 - DNA, 19 bp, Homo sapiens
  siRNA target sequence for AOX1 (NM_001159.2,2148-2166).
gttcaagagctcatgctaa

SEQ ID NO: 164621 - DNA, 19 bp, Homo sapiens
  siRNA target sequence for AOX1 (NM_001159.2,2151-2169).
caagagctcatgctaagat

SEQ ID NO: 164622 - DNA, 19 bp, Homo sapiens
  siRNA target sequence for AOX1 (NM_001159.2,2154-2172).
gagctcatgctaagattgt

SEQ ID NO: 164623 - DNA, 19 bp, Homo sapiens
  siRNA target sequence for AOX1 (NM_001159.2,2224-2242).
gacagcagaacatcttagt

SEQ ID NO: 164624 - DNA, 19 bp, Homo sapiens
  siRNA target sequence for AOX1 (NM_001159.2,2253-2271).
ccttctgcttttttactga

SEQ ID NO: 164625 - DNA, 19 bp, Homo sapiens
  siRNA target sequence for AOX1 (NM_001159.2,2364-2382).
ctgctaagcgagtgaagat

SEQ ID NO: 164626 - DNA, 19 bp, Homo sapiens
  siRNA target sequence for AOX1 (NM_001159.2,2367-2385).
ctaagcgagtgaagattgt

SEQ ID NO: 164627 - DNA, 19 bp, Homo sapiens
  siRNA target sequence for AOX1 (NM_001159.2,2371-2389).
gcgagtgaagattgtctat

SEQ ID NO: 164628 - DNA, 19 bp, Homo sapiens
  siRNA target sequence for AOX1 (NM_001159.2,2373-2391).
gagtgaagattgtctatca

SEQ ID NO: 164629 - DNA, 19 bp, Homo sapiens
  siRNA target sequence for AOX1 (NM_001159.2,2399-2417).
gagccgctgatactaacaa

SEQ ID NO: 164630 - DNA, 19 bp, Homo sapiens
  siRNA target sequence for AOX1 (NM_001159.2,2401-2419).
gccgctgatactaacaatt

SEQ ID NO: 164631 - DNA, 19 bp, Homo sapiens
  siRNA target sequence for AOX1 (NM_001159.2,2535-2553).
gaggtcaagaacattttta

SEQ ID NO: 164632 - DNA, 19 bp, Homo sapiens
  siRNA target sequence for AOX1 (NM_001159.2,2763-2781).
catttgccgcaaacaaaca

SEQ ID NO: 164633 - DNA, 19 bp, Homo sapiens
  siRNA target sequence for AOX1 (NM_001159.2,2927-2945).
ggcgcctccttggatgaat

SEQ ID NO: 164634 - DNA, 19 bp, Homo sapiens
  siRNA target sequence for AOX1 (NM_001159.2,2929-2947).
cgcctccttggatgaatca

SEQ ID NO: 164635 - DNA, 19 bp, Homo sapiens
  siRNA target sequence for AOX1 (NM_001159.2,2930-2948).
gcctccttggatgaatcat

SEQ ID NO: 164636 - DNA, 19 bp, Homo sapiens
  siRNA target sequence for AOX1 (NM_001159.2,2972-2990).
ctgaaaatggacaatgctt

SEQ ID NO: 164637 - DNA, 19 bp, Homo sapiens
  siRNA target sequence for AOX1 (NM_001159.2,3085-3103).
gctgatcaccgaatcttgt

SEQ ID NO: 164638 - DNA, 19 bp, Homo sapiens
  siRNA target sequence for AOX1 (NM_001159.2,3146-3164).
gtgcgaatcataaacatgt

SEQ ID NO: 164639 - DNA, 19 bp, Homo sapiens
  siRNA target sequence for AOX1 (NM_001159.2,3150-3168).
gaatcataaacatgtacaa

SEQ ID NO: 164640 - DNA, 19 bp, Homo sapiens
  siRNA target sequence for AOX1 (NM_001159.2,3183-3201).
caccctacaaacaagagat

SEQ ID NO: 164641 - DNA, 19 bp, Homo sapiens
  siRNA target sequence for AOX1 (NM_001159.2,3233-3251).
gaatgtatggccatgtctt

SEQ ID NO: 164642 - DNA, 19 bp, Homo sapiens
  siRNA target sequence for AOX1 (NM_001159.2,3253-3271).
ctactccttgaggaaagtt

SEQ ID NO: 164643 - DNA, 19 bp, Homo sapiens
  siRNA target sequence for AOX1 (NM_001159.2,3283-3301).
gttcaatgcagagaattat

SEQ ID NO: 164644 - DNA, 19 bp, Homo sapiens
  siRNA target sequence for AOX1 (NM_001159.2,3443-3461).
cagggggtccacactaaaa

SEQ ID NO: 164645 - DNA, 19 bp, Homo sapiens
  siRNA target sequence for AOX1 (NM_001159.2,3446-3464).
ggggtccacactaaaatga

SEQ ID NO: 164646 - DNA, 19 bp, Homo sapiens
  siRNA target sequence for AOX1 (NM_001159.2,3447-3465).
gggtccacactaaaatgat

SEQ ID NO: 164647 - DNA, 19 bp, Homo sapiens
  siRNA target sequence for AOX1 (NM_001159.2,3623-3641).
cgcctcgaacccatcatca

SEQ ID NO: 164648 - DNA, 19 bp, Homo sapiens
  siRNA target sequence for AOX1 (NM_001159.2,3670-3688).
ctgggcacagactgctttt

SEQ ID NO: 164649 - DNA, 19 bp, Homo sapiens
  siRNA target sequence for AOX1 (NM_001159.2,3761-3779).
gaaggccagcccttcgaat

SEQ ID NO: 164650 - DNA, 19 bp, Homo sapiens
  siRNA target sequence for AOX1 (NM_001159.2,3764-3782).
ggccagcccttcgaatact

SEQ ID NO: 164651 - DNA, 19 bp, Homo sapiens
  siRNA target sequence for AOX1 (NM_001159.2,3765-3783).
gccagcccttcgaatactt

SEQ ID NO: 164652 - DNA, 19 bp, Homo sapiens
  siRNA target sequence for AOX1 (NM_001159.2,3769-3787).
gcccttcgaatactttgtt

SEQ ID NO: 164653 - DNA, 19 bp, Homo sapiens
  siRNA target sequence for AOX1 (NM_001159.2,3775-3793).
cgaatactttgtttatgga

SEQ ID NO: 164654 - DNA, 19 bp, Homo sapiens
  siRNA target sequence for AOX1 (NM_001159.2,3822-3840).
gcctgacgggggatcataa

SEQ ID NO: 164655 - DNA, 19 bp, Homo sapiens
  siRNA target sequence for AOX1 (NM_001159.2,3824-3842).
ctgacgggggatcataaga

SEQ ID NO: 164656 - DNA, 19 bp, Homo sapiens
  siRNA target sequence for AOX1 (NM_001159.2,3828-3846).
cgggggatcataagaacat

SEQ ID NO: 164657 - DNA, 19 bp, Homo sapiens
  siRNA target sequence for AOX1 (NM_001159.2,3833-3851).
gatcataagaacatcagaa

SEQ ID NO: 164658 - DNA, 19 bp, Homo sapiens
  siRNA target sequence for AOX1 (NM_001159.2,3905-3923).
cagattgaaggtgcattta

SEQ ID NO: 164659 - DNA, 19 bp, Homo sapiens
  siRNA target sequence for AOX1 (NM_001159.2,3926-3944).
caaggcatgggactttata

SEQ ID NO: 164660 - DNA, 19 bp, Homo sapiens
  siRNA target sequence for AOX1 (NM_001159.2,3929-3947).
ggcatgggactttatacaa

SEQ ID NO: 164661 - DNA, 19 bp, Homo sapiens
  siRNA target sequence for AOX1 (NM_001159.2,3930-3948).
gcatgggactttatacaat

SEQ ID NO: 164662 - DNA, 19 bp, Homo sapiens
  siRNA target sequence for AOX1 (NM_001159.2,3931-3949).
catgggactttatacaata

SEQ ID NO: 164663 - DNA, 19 bp, Homo sapiens
  siRNA target sequence for AOX1 (NM_001159.2,3945-3963).
caatagaggaactgaatta

SEQ ID NO: 164664 - DNA, 19 bp, Homo sapiens
  siRNA target sequence for AOX1 (NM_001159.2,3987-4005).
ctcgtggtccagaccaata

SEQ ID NO: 164665 - DNA, 19 bp, Homo sapiens
  siRNA target sequence for AOX1 (NM_001159.2,3989-4007).
cgtggtccagaccaatata

SEQ ID NO: 164666 - DNA, 19 bp, Homo sapiens
  siRNA target sequence for AOX1 (NM_001159.2,3990-4008).
gtggtccagaccaatataa

SEQ ID NO: 164667 - DNA, 19 bp, Homo sapiens
  siRNA target sequence for AOX1 (NM_001159.2,3992-4010).
ggtccagaccaatataaaa

SEQ ID NO: 164668 - DNA, 19 bp, Homo sapiens
  siRNA target sequence for AOX1 (NM_001159.2,4035-4053).
cggagttgcacattgcttt

SEQ ID NO: 164669 - DNA, 19 bp, Homo sapiens
  siRNA target sequence for AOX1 (NM_001159.2,4061-4079).
ccttctcaaaactcaaata

SEQ ID NO: 164670 - DNA, 19 bp, Homo sapiens
  siRNA target sequence for AOX1 (NM_001159.2,4065-4083).
ctcaaaactcaaatactct

SEQ ID NO: 164671 - DNA, 19 bp, Homo sapiens
  siRNA target sequence for AOX1 (NM_001159.2,4072-4090).
ctcaaatactctttattca

SEQ ID NO: 164672 - DNA, 19 bp, Homo sapiens
  siRNA target sequence for AOX1 (NM_001159.2,4190-4208).
ggacccttgacccttaata

SEQ ID NO: 164673 - DNA, 19 bp, Homo sapiens
  siRNA target sequence for AOX1 (NM_001159.2,4218-4236).
ccccggagaagattaggat

SEQ ID NO: 164674 - DNA, 19 bp, Homo sapiens
  siRNA target sequence for AOX1 (NM_001159.2,4247-4265).
gacaagttcacaaaaatga

SEQ ID NO: 164675 - DNA, 19 bp, Homo sapiens
  siRNA target sequence for AOX1 (NM_001159.2,4288-4306).
ctacgttccttggaatgta

SEQ ID NO: 164676 - DNA, 19 bp, Homo sapiens
  siRNA target sequence for SUOX (NM_000456.1,967-985).
caggagtcaacacacatat

SEQ ID NO: 164677 - DNA, 19 bp, Homo sapiens
  siRNA target sequence for SUOX (NM_000456.1,1044-1062).
gggctctgaggtctttgat

SEQ ID NO: 164678 - DNA, 19 bp, Homo sapiens
  siRNA target sequence for SUOX (NM_000456.1,1169-1187).
cccatgtgcgtgagttact

SEQ ID NO: 164679 - DNA, 19 bp, Homo sapiens
  siRNA target sequence for SUOX (NM_000456.1,1473-1491).
ggatgacttgcacaacttt

SEQ ID NO: 164680 - DNA, 19 bp, Homo sapiens
  siRNA target sequence for SUOX (NM_000456.1,1648-1666).
ggccaccaactctgtgaaa

SEQ ID NO: 164681 - DNA, 19 bp, Homo sapiens
  siRNA target sequence for SUOX (NM_000456.1,1768-1786).
gtcctgctggcatatgaga

SEQ ID NO: 164682 - DNA, 19 bp, Homo sapiens
  siRNA target sequence for SUOX (NM_000456.1,1773-1791).
gctggcatatgagatgaat

SEQ ID NO: 164683 - DNA, 19 bp, Homo sapiens
  siRNA target sequence for SUOX (NM_000456.1,1888-1906).
gtgcagccagaggaaagtt

SEQ ID NO: 164684 - DNA, 19 bp, Homo sapiens
  siRNA target sequence for SUOX (NM_000456.1,1953-1971).
ggactgggagactgtagat

SEQ ID NO: 164685 - DNA, 19 bp, Homo sapiens
  siRNA target sequence for SUOX (NM_000456.1,2195-2213).
ggcgtctgtggcagttgaa

SEQ ID NO: 164686 - DNA, 19 bp, Homo sapiens
  siRNA target sequence for XDH (NM_000379.2,164-182).
cctacctgagaagaaagtt

SEQ ID NO: 164687 - DNA, 19 bp, Homo sapiens
  siRNA target sequence for XDH (NM_000379.2,240-258).
gatgctctccaagtatgat

SEQ ID NO: 164688 - DNA, 19 bp, Homo sapiens
  siRNA target sequence for XDH (NM_000379.2,256-274).
gatcgtctgcagaacaaga

SEQ ID NO: 164689 - DNA, 19 bp, Homo sapiens
  siRNA target sequence for XDH (NM_000379.2,270-288).
caagatcgtccacttttct

SEQ ID NO: 164690 - DNA, 19 bp, Homo sapiens
  siRNA target sequence for XDH (NM_000379.2,436-454).
ggcatcgtcatgagtatgt

SEQ ID NO: 164691 - DNA, 19 bp, Homo sapiens
  siRNA target sequence for XDH (NM_000379.2,437-455).
gcatcgtcatgagtatgta

SEQ ID NO: 164692 - DNA, 19 bp, Homo sapiens
  siRNA target sequence for XDH (NM_000379.2,620-638).
gcatgaaccagaagaaaga

SEQ ID NO: 164693 - DNA, 19 bp, Homo sapiens
  siRNA target sequence for XDH (NM_000379.2,866-884).
cggagattggcattgagat

SEQ ID NO: 164694 - DNA, 19 bp, Homo sapiens
  siRNA target sequence for XDH (NM_000379.2,901-919).
ctgtttcctatgattgtct

SEQ ID NO: 164695 - DNA, 19 bp, Homo sapiens
  siRNA target sequence for XDH (NM_000379.2,1121-1139).
ccgttggagggaacatcat

SEQ ID NO: 164696 - DNA, 19 bp, Homo sapiens
  siRNA target sequence for XDH (NM_000379.2,1320-1338).
ggagggggagtatttctca

SEQ ID NO: 164697 - DNA, 19 bp, Homo sapiens
  siRNA target sequence for XDH (NM_000379.2,1388-1406).
gtggcatgagagttttatt

SEQ ID NO: 164698 - DNA, 19 bp, Homo sapiens
  siRNA target sequence for XDH (NM_000379.2,1390-1408).
ggcatgagagttttattca

SEQ ID NO: 164699 - DNA, 19 bp, Homo sapiens
  siRNA target sequence for XDH (NM_000379.2,1490-1508).
ctcagaggcagctttccaa

SEQ ID NO: 164700 - DNA, 19 bp, Homo sapiens
  siRNA target sequence for XDH (NM_000379.2,1706-1724).
ctttcgccagtgcaacttt

SEQ ID NO: 164701 - DNA, 19 bp, Homo sapiens
  siRNA target sequence for XDH (NM_000379.2,1711-1729).
gccagtgcaactttactgt

SEQ ID NO: 164702 - DNA, 19 bp, Homo sapiens
  siRNA target sequence for XDH (NM_000379.2,1712-1730).
ccagtgcaactttactgtt

SEQ ID NO: 164703 - DNA, 19 bp, Homo sapiens
  siRNA target sequence for XDH (NM_000379.2,1921-1939).
gcccacgccaagatcaagt

SEQ ID NO: 164704 - DNA, 19 bp, Homo sapiens
  siRNA target sequence for XDH (NM_000379.2,1929-1947).
caagatcaagtccatagat

SEQ ID NO: 164705 - DNA, 19 bp, Homo sapiens
  siRNA target sequence for XDH (NM_000379.2,1935-1953).
caagtccatagatacatca

SEQ ID NO: 164706 - DNA, 19 bp, Homo sapiens
  siRNA target sequence for XDH (NM_000379.2,1938-1956).
gtccatagatacatcagaa

SEQ ID NO: 164707 - DNA, 19 bp, Homo sapiens
  siRNA target sequence for XDH (NM_000379.2,1986-2004).
catttccgctgatgatgtt

SEQ ID NO: 164708 - DNA, 19 bp, Homo sapiens
  siRNA target sequence for XDH (NM_000379.2,2042-2060).
cagtctttgcgaaggataa

SEQ ID NO: 164709 - DNA, 19 bp, Homo sapiens
  siRNA target sequence for XDH (NM_000379.2,2046-2064).
ctttgcgaaggataaggtt

SEQ ID NO: 164710 - DNA, 19 bp, Homo sapiens
  siRNA target sequence for XDH (NM_000379.2,2050-2068).
gcgaaggataaggttactt

SEQ ID NO: 164711 - DNA, 19 bp, Homo sapiens
  siRNA target sequence for XDH (NM_000379.2,2052-2070).
gaaggataaggttacttgt

SEQ ID NO: 164712 - DNA, 19 bp, Homo sapiens
  siRNA target sequence for XDH (NM_000379.2,2055-2073).
ggataaggttacttgtgtt

SEQ ID NO: 164713 - DNA, 19 bp, Homo sapiens
  siRNA target sequence for XDH (NM_000379.2,2066-2084).
cttgtgttgggcatatcat

SEQ ID NO: 164714 - DNA, 19 bp, Homo sapiens
  siRNA target sequence for XDH (NM_000379.2,2125-2143).
gctgcccaaggggtgaaaa

SEQ ID NO: 164715 - DNA, 19 bp, Homo sapiens
  siRNA target sequence for XDH (NM_000379.2,2126-2144).
ctgcccaaggggtgaaaat

SEQ ID NO: 164716 - DNA, 19 bp, Homo sapiens
  siRNA target sequence for XDH (NM_000379.2,2128-2146).
gcccaaggggtgaaaatca

SEQ ID NO: 164717 - DNA, 19 bp, Homo sapiens
  siRNA target sequence for XDH (NM_000379.2,2158-2176).
ctaccagccattatcacaa

SEQ ID NO: 164718 - DNA, 19 bp, Homo sapiens
  siRNA target sequence for XDH (NM_000379.2,2162-2180).
cagccattatcacaattga

SEQ ID NO: 164719 - DNA, 19 bp, Homo sapiens
  siRNA target sequence for XDH (NM_000379.2,2172-2190).
cacaattgaggatgctata

SEQ ID NO: 164720 - DNA, 19 bp, Homo sapiens
  siRNA target sequence for XDH (NM_000379.2,2255-2273).
ccgaagcagataatgttgt

SEQ ID NO: 164721 - DNA, 19 bp, Homo sapiens
  siRNA target sequence for XDH (NM_000379.2,2272-2290).
gtgtcaggggagatataca

SEQ ID NO: 164722 - DNA, 19 bp, Homo sapiens
  siRNA target sequence for XDH (NM_000379.2,2327-2345).
gcaccattgctgttccaaa

SEQ ID NO: 164723 - DNA, 19 bp, Homo sapiens
  siRNA target sequence for XDH (NM_000379.2,2394-2412).
gaagacccagagctttgtt

SEQ ID NO: 164724 - DNA, 19 bp, Homo sapiens
  siRNA target sequence for XDH (NM_000379.2,2518-2536).
gtggccctggctgcatata

SEQ ID NO: 164725 - DNA, 19 bp, Homo sapiens
  siRNA target sequence for XDH (NM_000379.2,2521-2539).
gccctggctgcatataaga

SEQ ID NO: 164726 - DNA, 19 bp, Homo sapiens
  siRNA target sequence for XDH (NM_000379.2,2605-2623).
cccttcctggccagataca

SEQ ID NO: 164727 - DNA, 19 bp, Homo sapiens
  siRNA target sequence for XDH (NM_000379.2,2697-2715).
ggatctctctcagagtatt

SEQ ID NO: 164728 - DNA, 19 bp, Homo sapiens
  siRNA target sequence for XDH (NM_000379.2,2698-2716).
gatctctctcagagtatta

SEQ ID NO: 164729 - DNA, 19 bp, Homo sapiens
  siRNA target sequence for XDH (NM_000379.2,2734-2752).
cacatggacaactgctata

SEQ ID NO: 164730 - DNA, 19 bp, Homo sapiens
  siRNA target sequence for XDH (NM_000379.2,2933-2951).
gggacctgacacacttcaa

SEQ ID NO: 164731 - DNA, 19 bp, Homo sapiens
  siRNA target sequence for XDH (NM_000379.2,2997-3015).
cctagcaagctctcagtat

SEQ ID NO: 164732 - DNA, 19 bp, Homo sapiens
  siRNA target sequence for XDH (NM_000379.2,3029-3047).
gtgaggttgacaagttcaa

SEQ ID NO: 164733 - DNA, 19 bp, Homo sapiens
  siRNA target sequence for XDH (NM_000379.2,3031-3049).
gaggttgacaagttcaaca

SEQ ID NO: 164734 - DNA, 19 bp, Homo sapiens
  siRNA target sequence for XDH (NM_000379.2,3042-3060).
gttcaacaaggagaattgt

SEQ ID NO: 164735 - DNA, 19 bp, Homo sapiens
  siRNA target sequence for XDH (NM_000379.2,3069-3087).
gagaggattgtgcataatt

SEQ ID NO: 164736 - DNA, 19 bp, Homo sapiens
  siRNA target sequence for XDH (NM_000379.2,3231-3249).
ggccagtagagctctgaaa

SEQ ID NO: 164737 - DNA, 19 bp, Homo sapiens
  siRNA target sequence for XDH (NM_000379.2,3233-3251).
ccagtagagctctgaaaat

SEQ ID NO: 164738 - DNA, 19 bp, Homo sapiens
  siRNA target sequence for XDH (NM_000379.2,3252-3270).
ccccacctctaagatttat

SEQ ID NO: 164739 - DNA, 19 bp, Homo sapiens
  siRNA target sequence for XDH (NM_000379.2,3253-3271).
cccacctctaagatttata

SEQ ID NO: 164740 - DNA, 19 bp, Homo sapiens
  siRNA target sequence for XDH (NM_000379.2,3254-3272).
ccacctctaagatttatat

SEQ ID NO: 164741 - DNA, 19 bp, Homo sapiens
  siRNA target sequence for XDH (NM_000379.2,3276-3294).
cgagacaagcactaacact

SEQ ID NO: 164742 - DNA, 19 bp, Homo sapiens
  siRNA target sequence for XDH (NM_000379.2,3361-3379).
gcttgtcagaccatcttga

SEQ ID NO: 164743 - DNA, 19 bp, Homo sapiens
  siRNA target sequence for XDH (NM_000379.2,3471-3489).
cactgggttttatagaaca

SEQ ID NO: 164744 - DNA, 19 bp, Homo sapiens
  siRNA target sequence for XDH (NM_000379.2,3560-3578).
gctctgaagtagaaatcga

SEQ ID NO: 164745 - DNA, 19 bp, Homo sapiens
  siRNA target sequence for XDH (NM_000379.2,3583-3601).
ctaacaggagatcataaga

SEQ ID NO: 164746 - DNA, 19 bp, Homo sapiens
  siRNA target sequence for XDH (NM_000379.2,3600-3618).
gaacctccgcacagatatt

SEQ ID NO: 164747 - DNA, 19 bp, Homo sapiens
  siRNA target sequence for XDH (NM_000379.2,3604-3622).
ctccgcacagatattgtca

SEQ ID NO: 164748 - DNA, 19 bp, Homo sapiens
  siRNA target sequence for XDH (NM_000379.2,3706-3724).
ctagaggagctacactatt

SEQ ID NO: 164749 - DNA, 19 bp, Homo sapiens
  siRNA target sequence for XDH (NM_000379.2,3817-3835).
cgcgactgccccaacaaga

SEQ ID NO: 164750 - DNA, 19 bp, Homo sapiens
  siRNA target sequence for XDH (NM_000379.2,3818-3836).
gcgactgccccaacaagaa

SEQ ID NO: 164751 - DNA, 19 bp, Homo sapiens
  siRNA target sequence for XDH (NM_000379.2,3931-3949).
gctcagcacacaggtaata

SEQ ID NO: 164752 - DNA, 19 bp, Homo sapiens
  siRNA target sequence for AFP (NM_001134.1,50-68).
gaagtgggtggaatcaatt

SEQ ID NO: 164753 - DNA, 19 bp, Homo sapiens
  siRNA target sequence for AFP (NM_001134.1,100-118).
ccagaacactgcatagaaa

SEQ ID NO: 164754 - DNA, 19 bp, Homo sapiens
  siRNA target sequence for AFP (NM_001134.1,143-161).
ggattcttaccaatgtact

SEQ ID NO: 164755 - DNA, 19 bp, Homo sapiens
  siRNA target sequence for AFP (NM_001134.1,177-195).
gctgacctggctaccatat

SEQ ID NO: 164756 - DNA, 19 bp, Homo sapiens
  siRNA target sequence for AFP (NM_001134.1,178-196).
ctgacctggctaccatatt

SEQ ID NO: 164757 - DNA, 19 bp, Homo sapiens
  siRNA target sequence for AFP (NM_001134.1,298-316).
cagggtgtttagaaaacca

SEQ ID NO: 164758 - DNA, 19 bp, Homo sapiens
  siRNA target sequence for AFP (NM_001134.1,445-463).
cagcatcgatcccactttt

SEQ ID NO: 164759 - DNA, 19 bp, Homo sapiens
  siRNA target sequence for AFP (NM_001134.1,484-502).
caagctgtgaagcatatga

SEQ ID NO: 164760 - DNA, 19 bp, Homo sapiens
  siRNA target sequence for AFP (NM_001134.1,504-522).
gaagacagggagacattca

SEQ ID NO: 164761 - DNA, 19 bp, Homo sapiens
  siRNA target sequence for AFP (NM_001134.1,563-581).
cctgtatgcacctacaatt

SEQ ID NO: 164762 - DNA, 19 bp, Homo sapiens
  siRNA target sequence for AFP (NM_001134.1,566-584).
gtatgcacctacaattctt

SEQ ID NO: 164763 - DNA, 19 bp, Homo sapiens
  siRNA target sequence for AFP (NM_001134.1,570-588).
gcacctacaattcttcttt

SEQ ID NO: 164764 - DNA, 19 bp, Homo sapiens
  siRNA target sequence for AFP (NM_001134.1,589-607).
gggctgctcgctatgacaa

SEQ ID NO: 164765 - DNA, 19 bp, Homo sapiens
  siRNA target sequence for AFP (NM_001134.1,590-608).
ggctgctcgctatgacaaa

SEQ ID NO: 164766 - DNA, 19 bp, Homo sapiens
  siRNA target sequence for AFP (NM_001134.1,591-609).
gctgctcgctatgacaaaa

SEQ ID NO: 164767 - DNA, 19 bp, Homo sapiens
  siRNA target sequence for AFP (NM_001134.1,695-713).
cagcttgttaaatcaacat

SEQ ID NO: 164768 - DNA, 19 bp, Homo sapiens
  siRNA target sequence for AFP (NM_001134.1,769-787).
ctaaactgagtcagaagtt

SEQ ID NO: 164769 - DNA, 19 bp, Homo sapiens
  siRNA target sequence for AFP (NM_001134.1,902-920).
gtcctacatatgttctcaa

SEQ ID NO: 164770 - DNA, 19 bp, Homo sapiens
  siRNA target sequence for AFP (NM_001134.1,921-939).
caagacactctgtcaaaca

SEQ ID NO: 164771 - DNA, 19 bp, Homo sapiens
  siRNA target sequence for AFP (NM_001134.1,926-944).
cactctgtcaaacaaaata

SEQ ID NO: 164772 - DNA, 19 bp, Homo sapiens
  siRNA target sequence for AFP (NM_001134.1,968-986).
gctggaacgtggtcaatgt

SEQ ID NO: 164773 - DNA, 19 bp, Homo sapiens
  siRNA target sequence for AFP (NM_001134.1,969-987).
ctggaacgtggtcaatgta

SEQ ID NO: 164774 - DNA, 19 bp, Homo sapiens
  siRNA target sequence for AFP (NM_001134.1,971-989).
ggaacgtggtcaatgtata

SEQ ID NO: 164775 - DNA, 19 bp, Homo sapiens
  siRNA target sequence for AFP (NM_001134.1,972-990).
gaacgtggtcaatgtataa

SEQ ID NO: 164776 - DNA, 19 bp, Homo sapiens
  siRNA target sequence for AFP (NM_001134.1,985-1003).
gtataattcatgcagaaaa

SEQ ID NO: 164777 - DNA, 19 bp, Homo sapiens
  siRNA target sequence for AFP (NM_001134.1,1020-1038).
ggtctatctccaaatctaa

SEQ ID NO: 164778 - DNA, 19 bp, Homo sapiens
  siRNA target sequence for AFP (NM_001134.1,1040-1058).
caggtttttaggagataga

SEQ ID NO: 164779 - DNA, 19 bp, Homo sapiens
  siRNA target sequence for AFP (NM_001134.1,1042-1060).
ggtttttaggagatagaga

SEQ ID NO: 164780 - DNA, 19 bp, Homo sapiens
  siRNA target sequence for AFP (NM_001134.1,1043-1061).
gtttttaggagatagagat

SEQ ID NO: 164781 - DNA, 19 bp, Homo sapiens
  siRNA target sequence for AFP (NM_001134.1,1100-1118).
ggcaagttttgttcatgaa

SEQ ID NO: 164782 - DNA, 19 bp, Homo sapiens
  siRNA target sequence for AFP (NM_001134.1,1143-1161).
gctgtctcagtaattctaa

SEQ ID NO: 164783 - DNA, 19 bp, Homo sapiens
  siRNA target sequence for AFP (NM_001134.1,1148-1166).
ctcagtaattctaagagtt

SEQ ID NO: 164784 - DNA, 19 bp, Homo sapiens
  siRNA target sequence for AFP (NM_001134.1,1158-1176).
ctaagagttgctaaaggat

SEQ ID NO: 164785 - DNA, 19 bp, Homo sapiens
  siRNA target sequence for AFP (NM_001134.1,1174-1192).
gataccaggagttattgga

SEQ ID NO: 164786 - DNA, 19 bp, Homo sapiens
  siRNA target sequence for AFP (NM_001134.1,1295-1313).
cggcctcttccagaaacta

SEQ ID NO: 164787 - DNA, 19 bp, Homo sapiens
  siRNA target sequence for AFP (NM_001134.1,1304-1322).
ccagaaactaggagaatat

SEQ ID NO: 164788 - DNA, 19 bp, Homo sapiens
  siRNA target sequence for AFP (NM_001134.1,1337-1355).
gtttctcgttgcttacaca

SEQ ID NO: 164789 - DNA, 19 bp, Homo sapiens
  siRNA target sequence for AFP (NM_001134.1,1343-1361).
cgttgcttacacaaagaaa

SEQ ID NO: 164790 - DNA, 19 bp, Homo sapiens
  siRNA target sequence for AFP (NM_001134.1,1437-1455).
ctcagtgaggacaaactat

SEQ ID NO: 164791 - DNA, 19 bp, Homo sapiens
  siRNA target sequence for AFP (NM_001134.1,1466-1484).
cgagggagcggctgacatt

SEQ ID NO: 164792 - DNA, 19 bp, Homo sapiens
  siRNA target sequence for AFP (NM_001134.1,1467-1485).
gagggagcggctgacatta

SEQ ID NO: 164793 - DNA, 19 bp, Homo sapiens
  siRNA target sequence for AFP (NM_001134.1,1469-1487).
gggagcggctgacattatt

SEQ ID NO: 164794 - DNA, 19 bp, Homo sapiens
  siRNA target sequence for AFP (NM_001134.1,1470-1488).
ggagcggctgacattatta

SEQ ID NO: 164795 - DNA, 19 bp, Homo sapiens
  siRNA target sequence for AFP (NM_001134.1,1471-1489).
gagcggctgacattattat

SEQ ID NO: 164796 - DNA, 19 bp, Homo sapiens
  siRNA target sequence for AFP (NM_001134.1,1490-1508).
cggacacttatgtatcaga

SEQ ID NO: 164797 - DNA, 19 bp, Homo sapiens
  siRNA target sequence for AFP (NM_001134.1,1542-1560).
cagtgctgcacttcttcat

SEQ ID NO: 164798 - DNA, 19 bp, Homo sapiens
  siRNA target sequence for AFP (NM_001134.1,1544-1562).
gtgctgcacttcttcatat

SEQ ID NO: 164799 - DNA, 19 bp, Homo sapiens
  siRNA target sequence for AFP (NM_001134.1,1621-1639).
cattctctgatgacaagtt

SEQ ID NO: 164800 - DNA, 19 bp, Homo sapiens
  siRNA target sequence for AFP (NM_001134.1,1627-1645).
ctgatgacaagttcatttt

SEQ ID NO: 164801 - DNA, 19 bp, Homo sapiens
  siRNA target sequence for AFP (NM_001134.1,1637-1655).
gttcattttccataaggat

SEQ ID NO: 164802 - DNA, 19 bp, Homo sapiens
  siRNA target sequence for AFP (NM_001134.1,1755-1773).
gctgtcattgcagatttct

SEQ ID NO: 164803 - DNA, 19 bp, Homo sapiens
  siRNA target sequence for AFP (NM_001134.1,1832-1850).
gggacaaaaactgatttca

SEQ ID NO: 164804 - DNA, 19 bp, Homo sapiens
  siRNA target sequence for AFP (NM_001134.1,1833-1851).
ggacaaaaactgatttcaa

SEQ ID NO: 164805 - DNA, 19 bp, Homo sapiens
  siRNA target sequence for ADCY2 (NM_020546.1,162-180).
ctctacgagtcctactact

SEQ ID NO: 164806 - DNA, 19 bp, Homo sapiens
  siRNA target sequence for ADCY2 (NM_020546.1,266-284).
gctcgggctggaagttgaa

SEQ ID NO: 164807 - DNA, 19 bp, Homo sapiens
  siRNA target sequence for ADCY2 (NM_020546.1,287-305).
ccatgtggcgtttctaata

SEQ ID NO: 164808 - DNA, 19 bp, Homo sapiens
  siRNA target sequence for ADCY2 (NM_020546.1,288-306).
catgtggcgtttctaataa

SEQ ID NO: 164809 - DNA, 19 bp, Homo sapiens
  siRNA target sequence for ADCY2 (NM_020546.1,293-311).
ggcgtttctaataacagtt

SEQ ID NO: 164810 - DNA, 19 bp, Homo sapiens
  siRNA target sequence for ADCY2 (NM_020546.1,313-331).
caactgccctggcgatttt

SEQ ID NO: 164811 - DNA, 19 bp, Homo sapiens
  siRNA target sequence for ADCY2 (NM_020546.1,316-334).
ctgccctggcgattttctt

SEQ ID NO: 164812 - DNA, 19 bp, Homo sapiens
  siRNA target sequence for ADCY2 (NM_020546.1,325-343).
cgattttctttgcgatatt

SEQ ID NO: 164813 - DNA, 19 bp, Homo sapiens
  siRNA target sequence for ADCY2 (NM_020546.1,326-344).
gattttctttgcgatattt

SEQ ID NO: 164814 - DNA, 19 bp, Homo sapiens
  siRNA target sequence for ADCY2 (NM_020546.1,387-405).
ctcttctcgttggtgatat

SEQ ID NO: 164815 - DNA, 19 bp, Homo sapiens
  siRNA target sequence for ADCY2 (NM_020546.1,392-410).
ctcgttggtgatatggata

SEQ ID NO: 164816 - DNA, 19 bp, Homo sapiens
  siRNA target sequence for ADCY2 (NM_020546.1,421-439).
ccatgggatacctgttcat

SEQ ID NO: 164817 - DNA, 19 bp, Homo sapiens
  siRNA target sequence for ADCY2 (NM_020546.1,426-444).
ggatacctgttcatgtgtt

SEQ ID NO: 164818 - DNA, 19 bp, Homo sapiens
  siRNA target sequence for ADCY2 (NM_020546.1,527-545).
catgcgagacgccatcatt

SEQ ID NO: 164819 - DNA, 19 bp, Homo sapiens
  siRNA target sequence for ADCY2 (NM_020546.1,639-657).
ctggccaatgtgatcattt

SEQ ID NO: 164820 - DNA, 19 bp, Homo sapiens
  siRNA target sequence for ADCY2 (NM_020546.1,643-661).
ccaatgtgatcattttcat

SEQ ID NO: 164821 - DNA, 19 bp, Homo sapiens
  siRNA target sequence for ADCY2 (NM_020546.1,672-690).
ctggcgggagcctaccata

SEQ ID NO: 164822 - DNA, 19 bp, Homo sapiens
  siRNA target sequence for ADCY2 (NM_020546.1,676-694).
cgggagcctaccataagca

SEQ ID NO: 164823 - DNA, 19 bp, Homo sapiens
  siRNA target sequence for ADCY2 (NM_020546.1,705-723).
ctcgctcttcagcaaacat

SEQ ID NO: 164824 - DNA, 19 bp, Homo sapiens
  siRNA target sequence for ADCY2 (NM_020546.1,707-725).
cgctcttcagcaaacatat

SEQ ID NO: 164825 - DNA, 19 bp, Homo sapiens
  siRNA target sequence for ADCY2 (NM_020546.1,751-769).
cgcggatcaagttggaatt

SEQ ID NO: 164826 - DNA, 19 bp, Homo sapiens
  siRNA target sequence for ADCY2 (NM_020546.1,925-943).
caaacgtgagcatcttata

SEQ ID NO: 164827 - DNA, 19 bp, Homo sapiens
  siRNA target sequence for ADCY2 (NM_020546.1,1019-1037).
ctttggaaagtttgatcaa

SEQ ID NO: 164828 - DNA, 19 bp, Homo sapiens
  siRNA target sequence for ADCY2 (NM_020546.1,1095-1113).
gtatctggactccctatat

SEQ ID NO: 164829 - DNA, 19 bp, Homo sapiens
  siRNA target sequence for ADCY2 (NM_020546.1,1099-1117).
ctggactccctatatctct

SEQ ID NO: 164830 - DNA, 19 bp, Homo sapiens
  siRNA target sequence for ADCY2 (NM_020546.1,1119-1137).
cctaaccatgccaagaact

SEQ ID NO: 164831 - DNA, 19 bp, Homo sapiens
  siRNA target sequence for ADCY2 (NM_020546.1,1188-1206).
gctactggagttgatatca

SEQ ID NO: 164832 - DNA, 19 bp, Homo sapiens
  siRNA target sequence for ADCY2 (NM_020546.1,1328-1346).
ccctggacgtgttcacatt

SEQ ID NO: 164833 - DNA, 19 bp, Homo sapiens
  siRNA target sequence for ADCY2 (NM_020546.1,1329-1347).
cctggacgtgttcacattt

SEQ ID NO: 164834 - DNA, 19 bp, Homo sapiens
  siRNA target sequence for ADCY2 (NM_020546.1,1365-1383).
cacttgaatggcgcttata

SEQ ID NO: 164835 - DNA, 19 bp, Homo sapiens
  siRNA target sequence for ADCY2 (NM_020546.1,1367-1385).
cttgaatggcgcttataaa

SEQ ID NO: 164836 - DNA, 19 bp, Homo sapiens
  siRNA target sequence for ADCY2 (NM_020546.1,1404-1422).
gacattagggacccatatt

SEQ ID NO: 164837 - DNA, 19 bp, Homo sapiens
  siRNA target sequence for ADCY2 (NM_020546.1,1433-1451).
cctggtgaaaacctacttt

SEQ ID NO: 164838 - DNA, 19 bp, Homo sapiens
  siRNA target sequence for ADCY2 (NM_020546.1,1437-1455).
gtgaaaacctactttgtga

SEQ ID NO: 164839 - DNA, 19 bp, Homo sapiens
  siRNA target sequence for ADCY2 (NM_020546.1,1655-1673).
gggtcagcataattttcaa

SEQ ID NO: 164840 - DNA, 19 bp, Homo sapiens
  siRNA target sequence for ADCY2 (NM_020546.1,1671-1689).
caaaatcgcaccttaagaa

SEQ ID NO: 164841 - DNA, 19 bp, Homo sapiens
  siRNA target sequence for ADCY2 (NM_020546.1,1732-1750).
ggatgattcaagcaattga

SEQ ID NO: 164842 - DNA, 19 bp, Homo sapiens
  siRNA target sequence for ADCY2 (NM_020546.1,1804-1822).
cactgcttttctataacaa

SEQ ID NO: 164843 - DNA, 19 bp, Homo sapiens
  siRNA target sequence for ADCY2 (NM_020546.1,1851-1869).
gcactgccagcgttcaagt

SEQ ID NO: 164844 - DNA, 19 bp, Homo sapiens
  siRNA target sequence for ADCY2 (NM_020546.1,1852-1870).
cactgccagcgttcaagta

SEQ ID NO: 164845 - DNA, 19 bp, Homo sapiens
  siRNA target sequence for ADCY2 (NM_020546.1,1856-1874).
gccagcgttcaagtattat

SEQ ID NO: 164846 - DNA, 19 bp, Homo sapiens
  siRNA target sequence for ADCY2 (NM_020546.1,1858-1876).
cagcgttcaagtattatgt

SEQ ID NO: 164847 - DNA, 19 bp, Homo sapiens
  siRNA target sequence for ADCY2 (NM_020546.1,1860-1878).
gcgttcaagtattatgtga

SEQ ID NO: 164848 - DNA, 19 bp, Homo sapiens
  siRNA target sequence for ADCY2 (NM_020546.1,1923-1941).
ctcgtgctgccaaaaacgt

SEQ ID NO: 164849 - DNA, 19 bp, Homo sapiens
  siRNA target sequence for ADCY2 (NM_020546.1,2063-2081).
gaagtcctcgggcatcatt

SEQ ID NO: 164850 - DNA, 19 bp, Homo sapiens
  siRNA target sequence for ADCY2 (NM_020546.1,2144-2162).
ggccgtgttcaacatgttt

SEQ ID NO: 164851 - DNA, 19 bp, Homo sapiens
  siRNA target sequence for ADCY2 (NM_020546.1,2145-2163).
gccgtgttcaacatgtttt

SEQ ID NO: 164852 - DNA, 19 bp, Homo sapiens
  siRNA target sequence for ADCY2 (NM_020546.1,2170-2188).
gtgactcagaggaaacaat

SEQ ID NO: 164853 - DNA, 19 bp, Homo sapiens
  siRNA target sequence for ADCY2 (NM_020546.1,2218-2236).
gcttttcagcctcaaataa

SEQ ID NO: 164854 - DNA, 19 bp, Homo sapiens
  siRNA target sequence for ADCY2 (NM_020546.1,2250-2268).
ctgcgtgcgcagaatttat

SEQ ID NO: 164855 - DNA, 19 bp, Homo sapiens
  siRNA target sequence for ADCY2 (NM_020546.1,2252-2270).
gcgtgcgcagaatttattt

SEQ ID NO: 164856 - DNA, 19 bp, Homo sapiens
  siRNA target sequence for ADCY2 (NM_020546.1,2253-2271).
cgtgcgcagaatttatttt

SEQ ID NO: 164857 - DNA, 19 bp, Homo sapiens
  siRNA target sequence for ADCY2 (NM_020546.1,2254-2272).
gtgcgcagaatttattttt

SEQ ID NO: 164858 - DNA, 19 bp, Homo sapiens
  siRNA target sequence for ADCY2 (NM_020546.1,2274-2292).
ctcccgtactttatctaca

SEQ ID NO: 164859 - DNA, 19 bp, Homo sapiens
  siRNA target sequence for ADCY2 (NM_020546.1,2294-2312).
ctgcattctgggactgata

SEQ ID NO: 164860 - DNA, 19 bp, Homo sapiens
  siRNA target sequence for ADCY2 (NM_020546.1,2322-2340).
gtgttcctgcgggtaaact

SEQ ID NO: 164861 - DNA, 19 bp, Homo sapiens
  siRNA target sequence for ADCY2 (NM_020546.1,2324-2342).
gttcctgcgggtaaactat

SEQ ID NO: 164862 - DNA, 19 bp, Homo sapiens
  siRNA target sequence for ADCY2 (NM_020546.1,2491-2509).
ctctctctatattcttcat

SEQ ID NO: 164863 - DNA, 19 bp, Homo sapiens
  siRNA target sequence for ADCY2 (NM_020546.1,2493-2511).
ctctctatattcttcatca

SEQ ID NO: 164864 - DNA, 19 bp, Homo sapiens
  siRNA target sequence for ADCY2 (NM_020546.1,2525-2543).
gggtagacagaatgaatat

SEQ ID NO: 164865 - DNA, 19 bp, Homo sapiens
  siRNA target sequence for ADCY2 (NM_020546.1,2556-2574).
gacttcttatggaagaaca

SEQ ID NO: 164866 - DNA, 19 bp, Homo sapiens
  siRNA target sequence for ADCY2 (NM_020546.1,2736-2754).
gcctccattccggatttca

SEQ ID NO: 164867 - DNA, 19 bp, Homo sapiens
  siRNA target sequence for ADCY2 (NM_020546.1,2737-2755).
cctccattccggatttcaa

SEQ ID NO: 164868 - DNA, 19 bp, Homo sapiens
  siRNA target sequence for ADCY2 (NM_020546.1,2738-2756).
ctccattccggatttcaaa

SEQ ID NO: 164869 - DNA, 19 bp, Homo sapiens
  siRNA target sequence for ADCY2 (NM_020546.1,2767-2785).
cagaatccgacgtgaacaa

SEQ ID NO: 164870 - DNA, 19 bp, Homo sapiens
  siRNA target sequence for ADCY2 (NM_020546.1,3056-3074).
gcgagtgggtattaaccat

SEQ ID NO: 164871 - DNA, 19 bp, Homo sapiens
  siRNA target sequence for ADCY2 (NM_020546.1,3167-3185).
cggagtcctggacaaaata

SEQ ID NO: 164872 - DNA, 19 bp, Homo sapiens
  siRNA target sequence for ADCY2 (NM_020546.1,3169-3187).
gagtcctggacaaaataca

SEQ ID NO: 164873 - DNA, 19 bp, Homo sapiens
  siRNA target sequence for ADCY2 (NM_020546.1,3233-3251).
gtgcacctgtcgaggaata

SEQ ID NO: 164874 - DNA, 19 bp, Homo sapiens
  siRNA target sequence for ADCY2 (NM_020546.1,3235-3253).
gcacctgtcgaggaataat

SEQ ID NO: 164875 - DNA, 19 bp, Homo sapiens
  siRNA target sequence for ADCY2 (NM_020546.1,3238-3256).
cctgtcgaggaataatcaa

SEQ ID NO: 164876 - DNA, 19 bp, Homo sapiens
  siRNA target sequence for ADCY2 (NM_020546.1,3275-3293).
cctgaagacgtactttgta

SEQ ID NO: 164877 - DNA, 19 bp, Homo sapiens
  siRNA target sequence for ADCY3 (NM_004036.2,1222-1240).
caccagctgcggattaaga

SEQ ID NO: 164878 - DNA, 19 bp, Homo sapiens
  siRNA target sequence for ADCY3 (NM_004036.2,1535-1553).
gcctgaaaggggagtttga

SEQ ID NO: 164879 - DNA, 19 bp, Homo sapiens
  siRNA target sequence for ADCY3 (NM_004036.2,1571-1589).
ggggcagccgctgtgatta

SEQ ID NO: 164880 - DNA, 19 bp, Homo sapiens
  siRNA target sequence for ADCY3 (NM_004036.2,1937-1955).
gagagtccgcccaagtagt

SEQ ID NO: 164881 - DNA, 19 bp, Homo sapiens
  siRNA target sequence for ADCY3 (NM_004036.2,1939-1957).
gagtccgcccaagtagtaa

SEQ ID NO: 164882 - DNA, 19 bp, Homo sapiens
  siRNA target sequence for ADCY3 (NM_004036.2,1943-1961).
ccgcccaagtagtaaagaa

SEQ ID NO: 164883 - DNA, 19 bp, Homo sapiens
  siRNA target sequence for ADCY3 (NM_004036.2,2086-2104).
gccctggtcgagatactca

SEQ ID NO: 164884 - DNA, 19 bp, Homo sapiens
  siRNA target sequence for ADCY3 (NM_004036.2,2087-2105).
ccctggtcgagatactcat

SEQ ID NO: 164885 - DNA, 19 bp, Homo sapiens
  siRNA target sequence for ADCY3 (NM_004036.2,2106-2124).
cgacccctggctaatgaca

SEQ ID NO: 164886 - DNA, 19 bp, Homo sapiens
  siRNA target sequence for ADCY3 (NM_004036.2,2107-2125).
gacccctggctaatgacaa

SEQ ID NO: 164887 - DNA, 19 bp, Homo sapiens
  siRNA target sequence for ADCY3 (NM_004036.2,2111-2129).
cctggctaatgacaaacta

SEQ ID NO: 164888 - DNA, 19 bp, Homo sapiens
  siRNA target sequence for ADCY3 (NM_004036.2,2112-2130).
ctggctaatgacaaactat

SEQ ID NO: 164889 - DNA, 19 bp, Homo sapiens
  siRNA target sequence for ADCY3 (NM_004036.2,2114-2132).
ggctaatgacaaactatgt

SEQ ID NO: 164890 - DNA, 19 bp, Homo sapiens
  siRNA target sequence for ADCY3 (NM_004036.2,2223-2241).
ggccttctcaacttggatt

SEQ ID NO: 164891 - DNA, 19 bp, Homo sapiens
  siRNA target sequence for ADCY3 (NM_004036.2,2528-2546).
cctggcgtcccgtctttga

SEQ ID NO: 164892 - DNA, 19 bp, Homo sapiens
  siRNA target sequence for ADCY3 (NM_004036.2,2529-2547).
ctggcgtcccgtctttgat

SEQ ID NO: 164893 - DNA, 19 bp, Homo sapiens
  siRNA target sequence for ADCY3 (NM_004036.2,2531-2549).
ggcgtcccgtctttgatga

SEQ ID NO: 164894 - DNA, 19 bp, Homo sapiens
  siRNA target sequence for ADCY3 (NM_004036.2,2533-2551).
cgtcccgtctttgatgaat

SEQ ID NO: 164895 - DNA, 19 bp, Homo sapiens
  siRNA target sequence for ADCY3 (NM_004036.2,2534-2552).
gtcccgtctttgatgaata

SEQ ID NO: 164896 - DNA, 19 bp, Homo sapiens
  siRNA target sequence for ADCY3 (NM_004036.2,2537-2555).
ccgtctttgatgaatacga

SEQ ID NO: 164897 - DNA, 19 bp, Homo sapiens
  siRNA target sequence for ADCY3 (NM_004036.2,2569-2587).
cgggagcacgacttaccta

SEQ ID NO: 164898 - DNA, 19 bp, Homo sapiens
  siRNA target sequence for ADCY3 (NM_004036.2,2570-2588).
gggagcacgacttacctat

SEQ ID NO: 164899 - DNA, 19 bp, Homo sapiens
  siRNA target sequence for ADCY3 (NM_004036.2,2653-2671).
gtgccttccaagtactcta

SEQ ID NO: 164900 - DNA, 19 bp, Homo sapiens
  siRNA target sequence for ADCY3 (NM_004036.2,2715-2733).
ctcccgccacgtagaaaaa

SEQ ID NO: 164901 - DNA, 19 bp, Homo sapiens
  siRNA target sequence for ADCY3 (NM_004036.2,2717-2735).
cccgccacgtagaaaaact

SEQ ID NO: 164902 - DNA, 19 bp, Homo sapiens
  siRNA target sequence for ADCY3 (NM_004036.2,2734-2752).
ctggcacggacacttttct

SEQ ID NO: 164903 - DNA, 19 bp, Homo sapiens
  siRNA target sequence for ADCY3 (NM_004036.2,2737-2755).
gcacggacacttttcttgt

SEQ ID NO: 164904 - DNA, 19 bp, Homo sapiens
  siRNA target sequence for ADCY3 (NM_004036.2,2815-2833).
gccttggtcaccaacatgt

SEQ ID NO: 164905 - DNA, 19 bp, Homo sapiens
  siRNA target sequence for ADCY3 (NM_004036.2,2816-2834).
ccttggtcaccaacatgtt

SEQ ID NO: 164906 - DNA, 19 bp, Homo sapiens
  siRNA target sequence for ADCY3 (NM_004036.2,2889-2907).
gtatagccagacgtatgat

SEQ ID NO: 164907 - DNA, 19 bp, Homo sapiens
  siRNA target sequence for ADCY3 (NM_004036.2,2895-2913).
ccagacgtatgatgagatt

SEQ ID NO: 164908 - DNA, 19 bp, Homo sapiens
  siRNA target sequence for ADCY3 (NM_004036.2,2990-3008).
gtctgcgtttcctcaatga

SEQ ID NO: 164909 - DNA, 19 bp, Homo sapiens
  siRNA target sequence for ADCY3 (NM_004036.2,2992-3010).
ctgcgtttcctcaatgaaa

SEQ ID NO: 164910 - DNA, 19 bp, Homo sapiens
  siRNA target sequence for ADCY3 (NM_004036.2,3055-3073).
gtgatcaccaagatcaaaa

SEQ ID NO: 164911 - DNA, 19 bp, Homo sapiens
  siRNA target sequence for ADCY3 (NM_004036.2,3205-3223).
gcgctggccatgaaggata

SEQ ID NO: 164912 - DNA, 19 bp, Homo sapiens
  siRNA target sequence for ADCY3 (NM_004036.2,3265-3283).
ctgcgcataggcatgaaca

SEQ ID NO: 164913 - DNA, 19 bp, Homo sapiens
  siRNA target sequence for ADCY3 (NM_004036.2,3378-3396).
gggggtcatgggcaacatt

SEQ ID NO: 164914 - DNA, 19 bp, Homo sapiens
  siRNA target sequence for ADCY3 (NM_004036.2,3450-3468).
gaggcgaggccccatcttt

SEQ ID NO: 164915 - DNA, 19 bp, Homo sapiens
  siRNA target sequence for ADCY3 (NM_004036.2,3452-3470).
ggcgaggccccatctttgt

SEQ ID NO: 164916 - DNA, 19 bp, Homo sapiens
  siRNA target sequence for ADCY3 (NM_004036.2,3454-3472).
cgaggccccatctttgtga

SEQ ID NO: 164917 - DNA, 19 bp, Homo sapiens
  siRNA target sequence for ADCY4 (NM_139247.2,356-374).
gggaccaggtgtcctattt

SEQ ID NO: 164918 - DNA, 19 bp, Homo sapiens
  siRNA target sequence for ADCY4 (NM_139247.2,361-379).
caggtgtcctattttctct

SEQ ID NO: 164919 - DNA, 19 bp, Homo sapiens
  siRNA target sequence for ADCY4 (NM_139247.2,468-486).
ggtcctcgggctgtatctt

SEQ ID NO: 164920 - DNA, 19 bp, Homo sapiens
  siRNA target sequence for ADCY4 (NM_139247.2,766-784).
cggccagagagcactaaca

SEQ ID NO: 164921 - DNA, 19 bp, Homo sapiens
  siRNA target sequence for ADCY4 (NM_139247.2,767-785).
ggccagagagcactaacaa

SEQ ID NO: 164922 - DNA, 19 bp, Homo sapiens
  siRNA target sequence for ADCY4 (NM_139247.2,768-786).
gccagagagcactaacaat

SEQ ID NO: 164923 - DNA, 19 bp, Homo sapiens
  siRNA target sequence for ADCY4 (NM_139247.2,1009-1027).
ccagaccatgccatcaact

SEQ ID NO: 164924 - DNA, 19 bp, Homo sapiens
  siRNA target sequence for ADCY4 (NM_139247.2,1164-1182).
cgacgtttggtcacatgat

SEQ ID NO: 164925 - DNA, 19 bp, Homo sapiens
  siRNA target sequence for ADCY4 (NM_139247.2,1320-1338).
gctaggggagcctacctat

SEQ ID NO: 164926 - DNA, 19 bp, Homo sapiens
  siRNA target sequence for ADCY4 (NM_139247.2,1589-1607).
ggggactagatgatgaact

SEQ ID NO: 164927 - DNA, 19 bp, Homo sapiens
  siRNA target sequence for ADCY4 (NM_139247.2,1613-1631).
ccggggatgccaagttctt

SEQ ID NO: 164928 - DNA, 19 bp, Homo sapiens
  siRNA target sequence for ADCY4 (NM_139247.2,1752-1770).
cgccttcaaatactatgaa

SEQ ID NO: 164929 - DNA, 19 bp, Homo sapiens
  siRNA target sequence for ADCY4 (NM_139247.2,1786-1804).
gtttttctctccaacttca

SEQ ID NO: 164930 - DNA, 19 bp, Homo sapiens
  siRNA target sequence for ADCY4 (NM_139247.2,1837-1855).
gctctggccatcacgtata

SEQ ID NO: 164931 - DNA, 19 bp, Homo sapiens
  siRNA target sequence for ADCY4 (NM_139247.2,2052-2070).
gttcttcttcccaacatca

SEQ ID NO: 164932 - DNA, 19 bp, Homo sapiens
  siRNA target sequence for ADCY4 (NM_139247.2,2094-2112).
caatgtgtcctccatgatt

SEQ ID NO: 164933 - DNA, 19 bp, Homo sapiens
  siRNA target sequence for ADCY4 (NM_139247.2,2422-2440).
ctggctcgccagaatgagt

SEQ ID NO: 164934 - DNA, 19 bp, Homo sapiens
  siRNA target sequence for ADCY4 (NM_139247.2,2426-2444).
ctcgccagaatgagtacta

SEQ ID NO: 164935 - DNA, 19 bp, Homo sapiens
  siRNA target sequence for ADCY4 (NM_139247.2,2664-2682).
ctctgaatccaacatcaat

SEQ ID NO: 164936 - DNA, 19 bp, Homo sapiens
  siRNA target sequence for ADCY4 (NM_139247.2,2917-2935).
gacgtcatcaacaagcatt

SEQ ID NO: 164937 - DNA, 19 bp, Homo sapiens
  siRNA target sequence for ADCY4 (NM_139247.2,2978-2996).
ccgtagtagctggagttat

SEQ ID NO: 164938 - DNA, 19 bp, Homo sapiens
  siRNA target sequence for ADCY4 (NM_139247.2,2979-2997).
cgtagtagctggagttatt

SEQ ID NO: 164939 - DNA, 19 bp, Homo sapiens
  siRNA target sequence for ADCY4 (NM_139247.2,3068-3086).
gagtccttggcaaaatcca

SEQ ID NO: 164940 - DNA, 19 bp, Homo sapiens
  siRNA target sequence for ADCY5 (NM_183357.1,628-646).
ctggcgttgctgcagatat

SEQ ID NO: 164941 - DNA, 19 bp, Homo sapiens
  siRNA target sequence for ADCY5 (NM_183357.1,989-1007).
ggtggaccgtgttcttcat

SEQ ID NO: 164942 - DNA, 19 bp, Homo sapiens
  siRNA target sequence for ADCY5 (NM_183357.1,992-1010).
ggaccgtgttcttcatcta

SEQ ID NO: 164943 - DNA, 19 bp, Homo sapiens
  siRNA target sequence for ADCY5 (NM_183357.1,1357-1375).
gaggatatgatgttccata

SEQ ID NO: 164944 - DNA, 19 bp, Homo sapiens
  siRNA target sequence for ADCY5 (NM_183357.1,1514-1532).
ccgcagagaatcactgttt

SEQ ID NO: 164945 - DNA, 19 bp, Homo sapiens
  siRNA target sequence for ADCY5 (NM_183357.1,1515-1533).
cgcagagaatcactgttta

SEQ ID NO: 164946 - DNA, 19 bp, Homo sapiens
  siRNA target sequence for ADCY5 (NM_183357.1,1519-1537).
gagaatcactgtttacgta

SEQ ID NO: 164947 - DNA, 19 bp, Homo sapiens
  siRNA target sequence for ADCY5 (NM_183357.1,1521-1539).
gaatcactgtttacgtatt

SEQ ID NO: 164948 - DNA, 19 bp, Homo sapiens
  siRNA target sequence for ADCY5 (NM_183357.1,1746-1764).
cgacgtctggtctaacgat

SEQ ID NO: 164949 - DNA, 19 bp, Homo sapiens
  siRNA target sequence for ADCY5 (NM_183357.1,2173-2191).
gacgccaggagcattgata

SEQ ID NO: 164950 - DNA, 19 bp, Homo sapiens
  siRNA target sequence for ADCY5 (NM_183357.1,2268-2286).
ggtagacgaccgatttggt

SEQ ID NO: 164951 - DNA, 19 bp, Homo sapiens
  siRNA target sequence for ADCY5 (NM_183357.1,2645-2663).
cggagtcggccgtcaacta

SEQ ID NO: 164952 - DNA, 19 bp, Homo sapiens
  siRNA target sequence for ADCY5 (NM_183357.1,2888-2906).
ccgccaacgccatagactt

SEQ ID NO: 164953 - DNA, 19 bp, Homo sapiens
  siRNA target sequence for ADCY5 (NM_183357.1,2896-2914).
gccatagacttcttcaaca

SEQ ID NO: 164954 - DNA, 19 bp, Homo sapiens
  siRNA target sequence for ADCY5 (NM_183357.1,2897-2915).
ccatagacttcttcaacaa

SEQ ID NO: 164955 - DNA, 19 bp, Homo sapiens
  siRNA target sequence for ADCY5 (NM_183357.1,2973-2991).
catcatcatctcagtcttt

SEQ ID NO: 164956 - DNA, 19 bp, Homo sapiens
  siRNA target sequence for ADCY5 (NM_183357.1,3472-3490).
ctgatggaccagatgaagt

SEQ ID NO: 164957 - DNA, 19 bp, Homo sapiens
  siRNA target sequence for ADCY6 (NM_015270.2,711-729).
gcctcctggtccctaaagt

SEQ ID NO: 164958 - DNA, 19 bp, Homo sapiens
  siRNA target sequence for ADCY6 (NM_015270.2,1272-1290).
ggctcatggtggtgtgtaa

SEQ ID NO: 164959 - DNA, 19 bp, Homo sapiens
  siRNA target sequence for ADCY6 (NM_015270.2,1419-1437).
ctgtgttctttgtctacat

SEQ ID NO: 164960 - DNA, 19 bp, Homo sapiens
  siRNA target sequence for ADCY6 (NM_015270.2,2491-2509).
ccgccagatgggcattgat

SEQ ID NO: 164961 - DNA, 19 bp, Homo sapiens
  siRNA target sequence for ADCY6 (NM_015270.2,2590-2608).
cgatgcccgcagcattgat

SEQ ID NO: 164962 - DNA, 19 bp, Homo sapiens
  siRNA target sequence for ADCY6 (NM_015270.2,2660-2678).
gatcttgagaagaagtact

SEQ ID NO: 164963 - DNA, 19 bp, Homo sapiens
  siRNA target sequence for ADCY6 (NM_015270.2,2941-2959).
cgtcctgcttgtgtttact

SEQ ID NO: 164964 - DNA, 19 bp, Homo sapiens
  siRNA target sequence for ADCY6 (NM_015270.2,3014-3032).
gcccggatgctgaatttaa

SEQ ID NO: 164965 - DNA, 19 bp, Homo sapiens
  siRNA target sequence for ADCY6 (NM_015270.2,3016-3034).
ccggatgctgaatttaaca

SEQ ID NO: 164966 - DNA, 19 bp, Homo sapiens
  siRNA target sequence for ADCY6 (NM_015270.2,3362-3380).
gggagggtggccctcaaat

SEQ ID NO: 164967 - DNA, 19 bp, Homo sapiens
  siRNA target sequence for ADCY6 (NM_015270.2,3363-3381).
ggagggtggccctcaaata

SEQ ID NO: 164968 - DNA, 19 bp, Homo sapiens
  siRNA target sequence for ADCY6 (NM_015270.2,3364-3382).
gagggtggccctcaaatat

SEQ ID NO: 164969 - DNA, 19 bp, Homo sapiens
  siRNA target sequence for ADCY6 (NM_015270.2,3366-3384).
gggtggccctcaaatatat

SEQ ID NO: 164970 - DNA, 19 bp, Homo sapiens
  siRNA target sequence for ADCY6 (NM_015270.2,3529-3547).
gaggctgctgcataacatt

SEQ ID NO: 164971 - DNA, 19 bp, Homo sapiens
  siRNA target sequence for ADCY6 (NM_015270.2,3988-4006).
ggctcggaagccacagtat

SEQ ID NO: 164972 - DNA, 19 bp, Homo sapiens
  siRNA target sequence for ADCY7 (NM_001114.1,498-516).
ccctctctgtgctgatgta

SEQ ID NO: 164973 - DNA, 19 bp, Homo sapiens
  siRNA target sequence for ADCY7 (NM_001114.1,1515-1533).
cggaggccacgctaaagca

SEQ ID NO: 164974 - DNA, 19 bp, Homo sapiens
  siRNA target sequence for ADCY7 (NM_001114.1,2219-2237).
gggacgctctgcactatct

SEQ ID NO: 164975 - DNA, 19 bp, Homo sapiens
  siRNA target sequence for ADCY7 (NM_001114.1,2221-2239).
gacgctctgcactatctct

SEQ ID NO: 164976 - DNA, 19 bp, Homo sapiens
  siRNA target sequence for ADCY7 (NM_001114.1,2414-2432).
gagcccctcccgtactaca

SEQ ID NO: 164977 - DNA, 19 bp, Homo sapiens
  siRNA target sequence for ADCY7 (NM_001114.1,2704-2722).
ctccagacagattgactat

SEQ ID NO: 164978 - DNA, 19 bp, Homo sapiens
  siRNA target sequence for ADCY7 (NM_001114.1,2730-2748).
gcttggactgcctatggaa

SEQ ID NO: 164979 - DNA, 19 bp, Homo sapiens
  siRNA target sequence for ADCY7 (NM_001114.1,2845-2863).
ctttatcggtgacaagtta

SEQ ID NO: 164980 - DNA, 19 bp, Homo sapiens
  siRNA target sequence for ADCY7 (NM_001114.1,2913-2931).
cctccgtgccggacttcaa

SEQ ID NO: 164981 - DNA, 19 bp, Homo sapiens
  siRNA target sequence for ADCY7 (NM_001114.1,2914-2932).
ctccgtgccggacttcaaa

SEQ ID NO: 164982 - DNA, 19 bp, Homo sapiens
  siRNA target sequence for ADCY7 (NM_001114.1,2916-2934).
ccgtgccggacttcaaagt

SEQ ID NO: 164983 - DNA, 19 bp, Homo sapiens
  siRNA target sequence for ADCY7 (NM_001114.1,2918-2936).
gtgccggacttcaaagtgt

SEQ ID NO: 164984 - DNA, 19 bp, Homo sapiens
  siRNA target sequence for ADCY7 (NM_001114.1,2922-2940).
cggacttcaaagtgttcta

SEQ ID NO: 164985 - DNA, 19 bp, Homo sapiens
  siRNA target sequence for ADCY7 (NM_001114.1,2947-2965).
gtgcgatgtcaacaaagaa

SEQ ID NO: 164986 - DNA, 19 bp, Homo sapiens
  siRNA target sequence for ADCY7 (NM_001114.1,3225-3243).
gcctccgcgtcggcataaa

SEQ ID NO: 164987 - DNA, 19 bp, Homo sapiens
  siRNA target sequence for ADCY7 (NM_001114.1,3276-3294).
cccgaaaacctcagtatga

SEQ ID NO: 164988 - DNA, 19 bp, Homo sapiens
  siRNA target sequence for ADCY7 (NM_001114.1,3449-3467).
ctgaggacttactttgtct

SEQ ID NO: 164989 - DNA, 19 bp, Homo sapiens
  siRNA target sequence for ADCY7 (NM_001114.1,3471-3489).
cggacactgccaagtttca

SEQ ID NO: 164990 - DNA, 19 bp, Homo sapiens
  siRNA target sequence for ADCY8 (NM_001115.1,2123-2141).
caggcagcgaggaactcta

SEQ ID NO: 164991 - DNA, 19 bp, Homo sapiens
  siRNA target sequence for ADCY8 (NM_001115.1,2229-2247).
cacggagcagcgcttcatt

SEQ ID NO: 164992 - DNA, 19 bp, Homo sapiens
  siRNA target sequence for ADCY8 (NM_001115.1,2505-2523).
caactcggatttctttctt

SEQ ID NO: 164993 - DNA, 19 bp, Homo sapiens
  siRNA target sequence for ADCY8 (NM_001115.1,2521-2539).
cttaatgggggctatagct

SEQ ID NO: 164994 - DNA, 19 bp, Homo sapiens
  siRNA target sequence for ADCY8 (NM_001115.1,2562-2580).
cctgcgcaactccttcaaa

SEQ ID NO: 164995 - DNA, 19 bp, Homo sapiens
  siRNA target sequence for ADCY8 (NM_001115.1,2563-2581).
ctgcgcaactccttcaaat

SEQ ID NO: 164996 - DNA, 19 bp, Homo sapiens
  siRNA target sequence for ADCY8 (NM_001115.1,2565-2583).
gcgcaactccttcaaatct

SEQ ID NO: 164997 - DNA, 19 bp, Homo sapiens
  siRNA target sequence for ADCY8 (NM_001115.1,2597-2615).
gcctctaccagcgctattt

SEQ ID NO: 164998 - DNA, 19 bp, Homo sapiens
  siRNA target sequence for ADCY8 (NM_001115.1,3061-3079).
gcccaggcagtgctattca

SEQ ID NO: 164999 - DNA, 19 bp, Homo sapiens
  siRNA target sequence for ADCY8 (NM_001115.1,3062-3080).
cccaggcagtgctattcat

SEQ ID NO: 165000 - DNA, 19 bp, Homo sapiens
  siRNA target sequence for ADCY8 (NM_001115.1,3067-3085).
gcagtgctattcatgtgta

SEQ ID NO: 165001 - DNA, 19 bp, Homo sapiens
  siRNA target sequence for ADCY8 (NM_001115.1,3070-3088).
gtgctattcatgtgtatga

SEQ ID NO: 165002 - DNA, 19 bp, Homo sapiens
  siRNA target sequence for ADCY8 (NM_001115.1,3233-3251).
ggtttgttgtcctggaaat

SEQ ID NO: 165003 - DNA, 19 bp, Homo sapiens
  siRNA target sequence for ADCY8 (NM_001115.1,3238-3256).
gttgtcctggaaatgatca

SEQ ID NO: 165004 - DNA, 19 bp, Homo sapiens
  siRNA target sequence for ADCY8 (NM_001115.1,3295-3313).
cagttccatcggatctaca

SEQ ID NO: 165005 - DNA, 19 bp, Homo sapiens
  siRNA target sequence for ADCY8 (NM_001115.1,3320-3338).
gctatgagaacgtcagtat

SEQ ID NO: 165006 - DNA, 19 bp, Homo sapiens
  siRNA target sequence for ADCY8 (NM_001115.1,3330-3348).
cgtcagtattctttttgca

SEQ ID NO: 165007 - DNA, 19 bp, Homo sapiens
  siRNA target sequence for ADCY8 (NM_001115.1,3450-3468).
gcatcactgccttcgtatt

SEQ ID NO: 165008 - DNA, 19 bp, Homo sapiens
  siRNA target sequence for ADCY8 (NM_001115.1,3451-3469).
catcactgccttcgtatta

SEQ ID NO: 165009 - DNA, 19 bp, Homo sapiens
  siRNA target sequence for ADCY8 (NM_001115.1,3549-3567).
gggtctcagcatgatcaaa

SEQ ID NO: 165010 - DNA, 19 bp, Homo sapiens
  siRNA target sequence for ADCY8 (NM_001115.1,3593-3611).
caaaacacgatgttgacat

SEQ ID NO: 165011 - DNA, 19 bp, Homo sapiens
  siRNA target sequence for ADCY8 (NM_001115.1,3635-3653).
cggtgctgtgcggtgtttt

SEQ ID NO: 165012 - DNA, 19 bp, Homo sapiens
  siRNA target sequence for ADCY8 (NM_001115.1,3689-3707).
gggatgtggatattgcaaa

SEQ ID NO: 165013 - DNA, 19 bp, Homo sapiens
  siRNA target sequence for ADCY8 (NM_001115.1,3767-3785).
gtctcaacggtgactataa

SEQ ID NO: 165014 - DNA, 19 bp, Homo sapiens
  siRNA target sequence for ADCY8 (NM_001115.1,3802-3820).
ggtaaagagaggaatgaat

SEQ ID NO: 165015 - DNA, 19 bp, Homo sapiens
  siRNA target sequence for ADCY8 (NM_001115.1,3832-3850).
cataatatcgaaacttact

SEQ ID NO: 165016 - DNA, 19 bp, Homo sapiens
  siRNA target sequence for ADCY8 (NM_001115.1,3881-3899).
ccttgcctgaagatatcgt

SEQ ID NO: 165017 - DNA, 19 bp, Homo sapiens
  siRNA target sequence for ADCY8 (NM_001115.1,4081-4099).
gggcctgaggaaattaaca

SEQ ID NO: 165018 - DNA, 19 bp, Homo sapiens
  siRNA target sequence for ADCY8 (NM_001115.1,4084-4102).
cctgaggaaattaacaaga

SEQ ID NO: 165019 - DNA, 19 bp, Homo sapiens
  siRNA target sequence for ADCY8 (NM_001115.1,4122-4140).
cttgcggagtggcgataaa

SEQ ID NO: 165020 - DNA, 19 bp, Homo sapiens
  siRNA target sequence for ADCY8 (NM_001115.1,4126-4144).
cggagtggcgataaattga

SEQ ID NO: 165021 - DNA, 19 bp, Homo sapiens
  siRNA target sequence for ADCY8 (NM_001115.1,4194-4212).
ggagcacaagtattctcaa

SEQ ID NO: 165022 - DNA, 19 bp, Homo sapiens
  siRNA target sequence for ADCY8 (NM_001115.1,4195-4213).
gagcacaagtattctcaaa

SEQ ID NO: 165023 - DNA, 19 bp, Homo sapiens
  siRNA target sequence for ADCY8 (NM_001115.1,4247-4265).
gtgcatttatcgttcttct

SEQ ID NO: 165024 - DNA, 19 bp, Homo sapiens
  siRNA target sequence for ADCY8 (NM_001115.1,4249-4267).
gcatttatcgttcttctat

SEQ ID NO: 165025 - DNA, 19 bp, Homo sapiens
  siRNA target sequence for ADCY8 (NM_001115.1,4250-4268).
catttatcgttcttctatt

SEQ ID NO: 165026 - DNA, 19 bp, Homo sapiens
  siRNA target sequence for ADCY8 (NM_001115.1,4275-4293).
ggcaatacaaagtttgctt

SEQ ID NO: 165027 - DNA, 19 bp, Homo sapiens
  siRNA target sequence for ADCY8 (NM_001115.1,4371-4389).
cacagcagaggattataaa

SEQ ID NO: 165028 - DNA, 19 bp, Homo sapiens
  siRNA target sequence for ADCY8 (NM_001115.1,4376-4394).
cagaggattataaatgttt

SEQ ID NO: 165029 - DNA, 19 bp, Homo sapiens
  siRNA target sequence for ADCY8 (NM_001115.1,4399-4417).
ctcatcctccggaaaactt

SEQ ID NO: 165030 - DNA, 19 bp, Homo sapiens
  siRNA target sequence for ADCY8 (NM_001115.1,4415-4433).
cttgctgttggattaatga

SEQ ID NO: 165031 - DNA, 19 bp, Homo sapiens
  siRNA target sequence for ADCY8 (NM_001115.1,4424-4442).
ggattaatgagacctattt

SEQ ID NO: 165032 - DNA, 19 bp, Homo sapiens
  siRNA target sequence for ADCY8 (NM_001115.1,4490-4508).
gtgccatcttaaatatcct

SEQ ID NO: 165033 - DNA, 19 bp, Homo sapiens
  siRNA target sequence for ADCY8 (NM_001115.1,4559-4577).
cctcagctgtgtttacaga

SEQ ID NO: 165034 - DNA, 19 bp, Homo sapiens
  siRNA target sequence for ADCY8 (NM_001115.1,4560-4578).
ctcagctgtgtttacagat

SEQ ID NO: 165035 - DNA, 19 bp, Homo sapiens
  siRNA target sequence for ADCY8 (NM_001115.1,4730-4748).
gcctctttctgcgttatga

SEQ ID NO: 165036 - DNA, 19 bp, Homo sapiens
  siRNA target sequence for ADCY8 (NM_001115.1,4925-4943).
gggaacacaatgagaacat

SEQ ID NO: 165037 - DNA, 19 bp, Homo sapiens
  siRNA target sequence for ADCY8 (NM_001115.1,5013-5031).
gtattctcaatcctatgat

SEQ ID NO: 165038 - DNA, 19 bp, Homo sapiens
  siRNA target sequence for ADCY8 (NM_001115.1,5059-5077).
ccaggatttgcggactttt

SEQ ID NO: 165039 - DNA, 19 bp, Homo sapiens
  siRNA target sequence for ADCY8 (NM_001115.1,5062-5080).
ggatttgcggacttttact

SEQ ID NO: 165040 - DNA, 19 bp, Homo sapiens
  siRNA target sequence for ADCY8 (NM_001115.1,5257-5275).
gacaagtggggacatttgt

SEQ ID NO: 165041 - DNA, 19 bp, Homo sapiens
  siRNA target sequence for ADCY8 (NM_001115.1,5298-5316).
cgccctgacagaaagcata

SEQ ID NO: 165042 - DNA, 19 bp, Homo sapiens
  siRNA target sequence for ADCY8 (NM_001115.1,5390-5408).
gcgttatcggcgctaagaa

SEQ ID NO: 165043 - DNA, 19 bp, Homo sapiens
  siRNA target sequence for ADCY8 (NM_001115.1,5391-5409).
cgttatcggcgctaagaaa

SEQ ID NO: 165044 - DNA, 19 bp, Homo sapiens
  siRNA target sequence for ADCY8 (NM_001115.1,5400-5418).
cgctaagaaaccacagtat

SEQ ID NO: 165045 - DNA, 19 bp, Homo sapiens
  siRNA target sequence for ADCY8 (NM_001115.1,5492-5510).
cagaggagacctatctcat

SEQ ID NO: 165046 - DNA, 19 bp, Homo sapiens
  siRNA target sequence for ADCY8 (NM_001115.1,5543-5561).
gaggggagatctatgtgaa

SEQ ID NO: 165047 - DNA, 19 bp, Homo sapiens
  siRNA target sequence for ADCY8 (NM_001115.1,5631-5649).
catcttgcccccaagaaga

SEQ ID NO: 165048 - DNA, 19 bp, Homo sapiens
  siRNA target sequence for ADCY8 (NM_001115.1,5818-5836).
gctgaaggcaccgacaaat

SEQ ID NO: 165049 - DNA, 19 bp, Homo sapiens
  siRNA target sequence for ADCY8 (NM_001115.1,5824-5842).
ggcaccgacaaatctgatt

SEQ ID NO: 165050 - DNA, 19 bp, Homo sapiens
  siRNA target sequence for ADCY8 (NM_001115.1,5825-5843).
gcaccgacaaatctgattt

SEQ ID NO: 165051 - DNA, 19 bp, Homo sapiens
  siRNA target sequence for ADCY9 (NM_001116.1,140-158).
caccccaagcactgcaaat

SEQ ID NO: 165052 - DNA, 19 bp, Homo sapiens
  siRNA target sequence for ADCY9 (NM_001116.1,365-383).
cggtatgcgctcttctaca

SEQ ID NO: 165053 - DNA, 19 bp, Homo sapiens
  siRNA target sequence for ADCY9 (NM_001116.1,366-384).
ggtatgcgctcttctacat

SEQ ID NO: 165054 - DNA, 19 bp, Homo sapiens
  siRNA target sequence for ADCY9 (NM_001116.1,398-416).
cttctgtggagcatctatt

SEQ ID NO: 165055 - DNA, 19 bp, Homo sapiens
  siRNA target sequence for ADCY9 (NM_001116.1,620-638).
ggcgacagctccaacctta

SEQ ID NO: 165056 - DNA, 19 bp, Homo sapiens
  siRNA target sequence for ADCY9 (NM_001116.1,652-670).
gcccacagatacttgctta

SEQ ID NO: 165057 - DNA, 19 bp, Homo sapiens
  siRNA target sequence for ADCY9 (NM_001116.1,653-671).
cccacagatacttgcttat

SEQ ID NO: 165058 - DNA, 19 bp, Homo sapiens
  siRNA target sequence for ADCY9 (NM_001116.1,655-673).
cacagatacttgcttatct

SEQ ID NO: 165059 - DNA, 19 bp, Homo sapiens
  siRNA target sequence for ADCY9 (NM_001116.1,1023-1041).
ccgtgatgccaagaatcat

SEQ ID NO: 165060 - DNA, 19 bp, Homo sapiens
  siRNA target sequence for ADCY9 (NM_001116.1,1024-1042).
cgtgatgccaagaatcata

SEQ ID NO: 165061 - DNA, 19 bp, Homo sapiens
  siRNA target sequence for ADCY9 (NM_001116.1,1132-1150).
gtcttccatccaaaaagct

SEQ ID NO: 165062 - DNA, 19 bp, Homo sapiens
  siRNA target sequence for ADCY9 (NM_001116.1,1157-1175).
gccttccgcccttttaaga

SEQ ID NO: 165063 - DNA, 19 bp, Homo sapiens
  siRNA target sequence for ADCY9 (NM_001116.1,1183-1201).
gatcgaagaagtcagtatt

SEQ ID NO: 165064 - DNA, 19 bp, Homo sapiens
  siRNA target sequence for ADCY9 (NM_001116.1,1516-1534).
gggcatgaggaggtttaaa

SEQ ID NO: 165065 - DNA, 19 bp, Homo sapiens
  siRNA target sequence for ADCY9 (NM_001116.1,1517-1535).
ggcatgaggaggtttaaat

SEQ ID NO: 165066 - DNA, 19 bp, Homo sapiens
  siRNA target sequence for ADCY9 (NM_001116.1,1613-1631).
gaggccaccgcaaaatact

SEQ ID NO: 165067 - DNA, 19 bp, Homo sapiens
  siRNA target sequence for ADCY9 (NM_001116.1,1615-1633).
ggccaccgcaaaatactta

SEQ ID NO: 165068 - DNA, 19 bp, Homo sapiens
  siRNA target sequence for ADCY9 (NM_001116.1,1617-1635).
ccaccgcaaaatacttaga

SEQ ID NO: 165069 - DNA, 19 bp, Homo sapiens
  siRNA target sequence for ADCY9 (NM_001116.1,1618-1636).
caccgcaaaatacttagat

SEQ ID NO: 165070 - DNA, 19 bp, Homo sapiens
  siRNA target sequence for ADCY9 (NM_001116.1,1690-1708).
ggttgctgaccagttgaaa

SEQ ID NO: 165071 - DNA, 19 bp, Homo sapiens
  siRNA target sequence for ADCY9 (NM_001116.1,1841-1859).
gcgtcatcagggaatgtca

SEQ ID NO: 165072 - DNA, 19 bp, Homo sapiens
  siRNA target sequence for ADCY9 (NM_001116.1,1864-1882).
cttggcgcagactgtcaaa

SEQ ID NO: 165073 - DNA, 19 bp, Homo sapiens
  siRNA target sequence for ADCY9 (NM_001116.1,1868-1886).
gcgcagactgtcaaaacct

SEQ ID NO: 165074 - DNA, 19 bp, Homo sapiens
  siRNA target sequence for ADCY9 (NM_001116.1,1869-1887).
cgcagactgtcaaaacctt

SEQ ID NO: 165075 - DNA, 19 bp, Homo sapiens
  siRNA target sequence for ADCY9 (NM_001116.1,1907-1925).
ccttcgtgcggaatcacat

SEQ ID NO: 165076 - DNA, 19 bp, Homo sapiens
  siRNA target sequence for ADCY9 (NM_001116.1,1912-1930).
gtgcggaatcacatttgct

SEQ ID NO: 165077 - DNA, 19 bp, Homo sapiens
  siRNA target sequence for ADCY9 (NM_001116.1,1974-1992).
gctgccaagacgagcataa

SEQ ID NO: 165078 - DNA, 19 bp, Homo sapiens
  siRNA target sequence for ADCY9 (NM_001116.1,1979-1997).
caagacgagcataaaaaca

SEQ ID NO: 165079 - DNA, 19 bp, Homo sapiens
  siRNA target sequence for ADCY9 (NM_001116.1,2016-2034).
gacctaatcccaaaactca

SEQ ID NO: 165080 - DNA, 19 bp, Homo sapiens
  siRNA target sequence for ADCY9 (NM_001116.1,2085-2103).
cttctctgtgtgagatctt

SEQ ID NO: 165081 - DNA, 19 bp, Homo sapiens
  siRNA target sequence for ADCY9 (NM_001116.1,2197-2215).
ctttgtggacgttatcaaa

SEQ ID NO: 165082 - DNA, 19 bp, Homo sapiens
  siRNA target sequence for ADCY9 (NM_001116.1,2219-2237).
gacagcctgatgaaagatt

SEQ ID NO: 165083 - DNA, 19 bp, Homo sapiens
  siRNA target sequence for ADCY9 (NM_001116.1,2223-2241).
gcctgatgaaagattactt

SEQ ID NO: 165084 - DNA, 19 bp, Homo sapiens
  siRNA target sequence for ADCY9 (NM_001116.1,2224-2242).
cctgatgaaagattacttt

SEQ ID NO: 165085 - DNA, 19 bp, Homo sapiens
  siRNA target sequence for ADCY9 (NM_001116.1,2342-2360).
cccgtgaagacgtttgcta

SEQ ID NO: 165086 - DNA, 19 bp, Homo sapiens
  siRNA target sequence for ADCY9 (NM_001116.1,2666-2684).
gtcacctccgaatatgaga

SEQ ID NO: 165087 - DNA, 19 bp, Homo sapiens
  siRNA target sequence for ADCY9 (NM_001116.1,2729-2747).
gccgtcgtgcactactgta

SEQ ID NO: 165088 - DNA, 19 bp, Homo sapiens
  siRNA target sequence for ADCY9 (NM_001116.1,2730-2748).
ccgtcgtgcactactgtaa

SEQ ID NO: 165089 - DNA, 19 bp, Homo sapiens
  siRNA target sequence for ADCY9 (NM_001116.1,2732-2750).
gtcgtgcactactgtaact

SEQ ID NO: 165090 - DNA, 19 bp, Homo sapiens
  siRNA target sequence for ADCY9 (NM_001116.1,2735-2753).
gtgcactactgtaacttct

SEQ ID NO: 165091 - DNA, 19 bp, Homo sapiens
  siRNA target sequence for ADCY9 (NM_001116.1,2836-2854).
cccagacagttctgtatta

SEQ ID NO: 165092 - DNA, 19 bp, Homo sapiens
  siRNA target sequence for ADCY9 (NM_001116.1,2837-2855).
ccagacagttctgtattaa

SEQ ID NO: 165093 - DNA, 19 bp, Homo sapiens
  siRNA target sequence for ADCY9 (NM_001116.1,2862-2880).
cccttgacgcagtacagaa

SEQ ID NO: 165094 - DNA, 19 bp, Homo sapiens
  siRNA target sequence for ADCY9 (NM_001116.1,2863-2881).
ccttgacgcagtacagaat

SEQ ID NO: 165095 - DNA, 19 bp, Homo sapiens
  siRNA target sequence for ADCY9 (NM_001116.1,2864-2882).
cttgacgcagtacagaatt

SEQ ID NO: 165096 - DNA, 19 bp, Homo sapiens
  siRNA target sequence for ADCY9 (NM_001116.1,2867-2885).
gacgcagtacagaatttca

SEQ ID NO: 165097 - DNA, 19 bp, Homo sapiens
  siRNA target sequence for ADCY9 (NM_001116.1,2893-2911).
gaggaacccgtgcaatagt

SEQ ID NO: 165098 - DNA, 19 bp, Homo sapiens
  siRNA target sequence for ADCY9 (NM_001116.1,2998-3016).
gttcctgaatcgcgaattt

SEQ ID NO: 165099 - DNA, 19 bp, Homo sapiens
  siRNA target sequence for ADCY9 (NM_001116.1,3001-3019).
cctgaatcgcgaatttgaa

SEQ ID NO: 165100 - DNA, 19 bp, Homo sapiens
  siRNA target sequence for ADCY9 (NM_001116.1,3576-3594).
ggggagacaccgtcaacat

SEQ ID NO: 165101 - DNA, 19 bp, Homo sapiens
  siRNA target sequence for ADCY9 (NM_001116.1,3693-3711).
gagggaccgtgaatgtcaa

SEQ ID NO: 165102 - DNA, 19 bp, Homo sapiens
  siRNA target sequence for ADK (NM_001123.2,249-267).
ctgtagtggacaaagattt

SEQ ID NO: 165103 - DNA, 19 bp, Homo sapiens
  siRNA target sequence for ADK (NM_001123.2,322-340).
caaggaactgtttgatgaa

SEQ ID NO: 165104 - DNA, 19 bp, Homo sapiens
  siRNA target sequence for ADK (NM_001123.2,377-395).
ggctctacccagaattcaa

SEQ ID NO: 165105 - DNA, 19 bp, Homo sapiens
  siRNA target sequence for ADK (NM_001123.2,403-421).
ggctcagtggatgattcaa

SEQ ID NO: 165106 - DNA, 19 bp, Homo sapiens
  siRNA target sequence for ADK (NM_001123.2,415-433).
gattcaacagccacacaaa

SEQ ID NO: 165107 - DNA, 19 bp, Homo sapiens
  siRNA target sequence for ADK (NM_001123.2,434-452).
gcagcaacattttttggat

SEQ ID NO: 165108 - DNA, 19 bp, Homo sapiens
  siRNA target sequence for ADK (NM_001123.2,450-468).
gatgcattgggatagataa

SEQ ID NO: 165109 - DNA, 19 bp, Homo sapiens
  siRNA target sequence for ADK (NM_001123.2,453-471).
gcattgggatagataaatt

SEQ ID NO: 165110 - DNA, 19 bp, Homo sapiens
  siRNA target sequence for ADK (NM_001123.2,454-472).
cattgggatagataaattt

SEQ ID NO: 165111 - DNA, 19 bp, Homo sapiens
  siRNA target sequence for ADK (NM_001123.2,538-556).
gcagccaacaggaacttgt

SEQ ID NO: 165112 - DNA, 19 bp, Homo sapiens
  siRNA target sequence for ADK (NM_001123.2,580-598).
caggtccctcatagctaat

SEQ ID NO: 165113 - DNA, 19 bp, Homo sapiens
  siRNA target sequence for ADK (NM_001123.2,582-600).
ggtccctcatagctaatct

SEQ ID NO: 165114 - DNA, 19 bp, Homo sapiens
  siRNA target sequence for ADK (NM_001123.2,602-620).
gctgctgccaattgttata

SEQ ID NO: 165115 - DNA, 19 bp, Homo sapiens
  siRNA target sequence for ADK (NM_001123.2,603-621).
ctgctgccaattgttataa

SEQ ID NO: 165116 - DNA, 19 bp, Homo sapiens
  siRNA target sequence for ADK (NM_001123.2,605-623).
gctgccaattgttataaaa

SEQ ID NO: 165117 - DNA, 19 bp, Homo sapiens
  siRNA target sequence for ADK (NM_001123.2,609-627).
ccaattgttataaaaagga

SEQ ID NO: 165118 - DNA, 19 bp, Homo sapiens
  siRNA target sequence for ADK (NM_001123.2,733-751).
ggctcaccatgcttctgaa

SEQ ID NO: 165119 - DNA, 19 bp, Homo sapiens
  siRNA target sequence for ADK (NM_001123.2,734-752).
gctcaccatgcttctgaaa

SEQ ID NO: 165120 - DNA, 19 bp, Homo sapiens
  siRNA target sequence for ADK (NM_001123.2,735-753).
ctcaccatgcttctgaaaa

SEQ ID NO: 165121 - DNA, 19 bp, Homo sapiens
  siRNA target sequence for ADK (NM_001123.2,776-794).
ctatctgcaccgtttatta

SEQ ID NO: 165122 - DNA, 19 bp, Homo sapiens
  siRNA target sequence for ADK (NM_001123.2,786-804).
cgtttattagccagttcta

SEQ ID NO: 165123 - DNA, 19 bp, Homo sapiens
  siRNA target sequence for ADK (NM_001123.2,797-815).
cagttctacaaggaatcat

SEQ ID NO: 165124 - DNA, 19 bp, Homo sapiens
  siRNA target sequence for ADK (NM_001123.2,824-842).
gttatgccttatgttgata

SEQ ID NO: 165125 - DNA, 19 bp, Homo sapiens
  siRNA target sequence for ADK (NM_001123.2,830-848).
ccttatgttgatatacttt

SEQ ID NO: 165126 - DNA, 19 bp, Homo sapiens
  siRNA target sequence for ADK (NM_001123.2,886-904).
gcaaggctttgagactaaa

SEQ ID NO: 165127 - DNA, 19 bp, Homo sapiens
  siRNA target sequence for ADK (NM_001123.2,960-978).
ggcagcgaatcgtgatctt

SEQ ID NO: 165128 - DNA, 19 bp, Homo sapiens
  siRNA target sequence for ADK (NM_001123.2,987-1005).
ggagagatgacactataat

SEQ ID NO: 165129 - DNA, 19 bp, Homo sapiens
  siRNA target sequence for ADK (NM_001123.2,1124-1142).
gacaagcctctgactgaat

SEQ ID NO: 165130 - DNA, 19 bp, Homo sapiens
  siRNA target sequence for ADK (NM_006721.2,124-142).
ccgcaagcgctgagagaaa

SEQ ID NO: 165131 - DNA, 19 bp, Homo sapiens
  siRNA target sequence for ADK (NM_006721.2,125-143).
cgcaagcgctgagagaaaa

SEQ ID NO: 165132 - DNA, 19 bp, Homo sapiens
  siRNA target sequence for ADK (NM_006721.2,126-144).
gcaagcgctgagagaaaat

SEQ ID NO: 165133 - DNA, 19 bp, Homo sapiens
  siRNA target sequence for ADPRH (NM_001125.2,341-359).
gatgccctggggtactaca

SEQ ID NO: 165134 - DNA, 19 bp, Homo sapiens
  siRNA target sequence for ADPRH (NM_001125.2,442-460).
gggaaggtggagagttagt

SEQ ID NO: 165135 - DNA, 19 bp, Homo sapiens
  siRNA target sequence for ADPRH (NM_001125.2,444-462).
gaaggtggagagttagtga

SEQ ID NO: 165136 - DNA, 19 bp, Homo sapiens
  siRNA target sequence for ADPRH (NM_001125.2,509-527).
gggaaagcccctaagttga

SEQ ID NO: 165137 - DNA, 19 bp, Homo sapiens
  siRNA target sequence for ADPRH (NM_001125.2,815-833).
cttgcgtctgctcttttta

SEQ ID NO: 165138 - DNA, 19 bp, Homo sapiens
  siRNA target sequence for ADPRH (NM_001125.2,889-907).
gctgctaccagaagctaaa

SEQ ID NO: 165139 - DNA, 19 bp, Homo sapiens
  siRNA target sequence for ADPRH (NM_001125.2,893-911).
ctaccagaagctaaaaagt

SEQ ID NO: 165140 - DNA, 19 bp, Homo sapiens
  siRNA target sequence for ADPRH (NM_001125.2,927-945).
gctactttgtagaggaaaa

SEQ ID NO: 165141 - DNA, 19 bp, Homo sapiens
  siRNA target sequence for ADPRH (NM_001125.2,958-976).
gtcctacttccaaaccaaa

SEQ ID NO: 165142 - DNA, 19 bp, Homo sapiens
  siRNA target sequence for ADPRH (NM_001125.2,979-997).
ggaaaattacctaaaactt

SEQ ID NO: 165143 - DNA, 19 bp, Homo sapiens
  siRNA target sequence for ADPRH (NM_001125.2,1176-1194).
cccaccgagcctttttcca

SEQ ID NO: 165144 - DNA, 19 bp, Homo sapiens
  siRNA target sequence for ADPRH (NM_001125.2,1177-1195).
ccaccgagcctttttccat

SEQ ID NO: 165145 - DNA, 19 bp, Homo sapiens
  siRNA target sequence for ADPRH (NM_001125.2,1193-1211).
catggtggagacagtgatt

SEQ ID NO: 165146 - DNA, 19 bp, Homo sapiens
  siRNA target sequence for ADPRH (NM_001125.2,1239-1257).
ggggagttatgtatggttt

SEQ ID NO: 165147 - DNA, 19 bp, Homo sapiens
  siRNA target sequence for ADPRH (NM_001125.2,1240-1258).
gggagttatgtatggtttt

SEQ ID NO: 165148 - DNA, 19 bp, Homo sapiens
  siRNA target sequence for ADPRH (NM_001125.2,1269-1287).
gtccctccaactatgagaa

SEQ ID NO: 165149 - DNA, 19 bp, Homo sapiens
  siRNA target sequence for ADPRH (NM_001125.2,1273-1291).
ctccaactatgagaaacta

SEQ ID NO: 165150 - DNA, 19 bp, Homo sapiens
  siRNA target sequence for ADPRH (NM_001125.2,1283-1301).
gagaaactagaatacagaa

SEQ ID NO: 165151 - DNA, 19 bp, Homo sapiens
  siRNA target sequence for ADPRH (NM_001125.2,1313-1331).
gagacagctagggctttat

SEQ ID NO: 165152 - DNA, 19 bp, Homo sapiens
  siRNA target sequence for ADPRH (NM_001125.2,1320-1338).
ctagggctttatattctct

SEQ ID NO: 165153 - DNA, 19 bp, Homo sapiens
  siRNA target sequence for ALPI (NM_001631.2,912-930).
gcccggagacacgaaatat

SEQ ID NO: 165154 - DNA, 19 bp, Homo sapiens
  siRNA target sequence for ALPI (NM_001631.2,914-932).
ccggagacacgaaatatga

SEQ ID NO: 165155 - DNA, 19 bp, Homo sapiens
  siRNA target sequence for ALPI (NM_001631.2,1318-1336).
cgaccagacgtgaatgaga

SEQ ID NO: 165156 - DNA, 19 bp, Homo sapiens
  siRNA target sequence for ALPI (NM_001631.2,1343-1361).
gcgggagccccgattacca

SEQ ID NO: 165157 - DNA, 19 bp, Homo sapiens
  siRNA target sequence for ALPI (NM_001631.2,1469-1487).
gcttcgtagcgcatgtcat

SEQ ID NO: 165158 - DNA, 19 bp, Homo sapiens
  siRNA target sequence for ALPL (NM_000478.2,249-267).
gatttcaccattcttagta

SEQ ID NO: 165159 - DNA, 19 bp, Homo sapiens
  siRNA target sequence for ALPL (NM_000478.2,277-295).
ggcacctgccttactaact

SEQ ID NO: 165160 - DNA, 19 bp, Homo sapiens
  siRNA target sequence for ALPL (NM_000478.2,343-361).
gcgcaagagacactgaaat

SEQ ID NO: 165161 - DNA, 19 bp, Homo sapiens
  siRNA target sequence for ALPL (NM_000478.2,344-362).
cgcaagagacactgaaata

SEQ ID NO: 165162 - DNA, 19 bp, Homo sapiens
  siRNA target sequence for ALPL (NM_000478.2,387-405).
caccaacgtggctaagaat

SEQ ID NO: 165163 - DNA, 19 bp, Homo sapiens
  siRNA target sequence for ALPL (NM_000478.2,397-415).
gctaagaatgtcatcatgt

SEQ ID NO: 165164 - DNA, 19 bp, Homo sapiens
  siRNA target sequence for ALPL (NM_000478.2,535-553).
ctctccaagacgtacaaca

SEQ ID NO: 165165 - DNA, 19 bp, Homo sapiens
  siRNA target sequence for ALPL (NM_000478.2,708-726).
caaggacgctgggaaatct

SEQ ID NO: 165166 - DNA, 19 bp, Homo sapiens
  siRNA target sequence for ALPL (NM_000478.2,865-883).
cagctcatgcataacatca

SEQ ID NO: 165167 - DNA, 19 bp, Homo sapiens
  siRNA target sequence for ALPL (NM_000478.2,904-922).
gggggtggccggaaataca

SEQ ID NO: 165168 - DNA, 19 bp, Homo sapiens
  siRNA target sequence for ALPL (NM_000478.2,921-939).
catgtaccccaagaataaa

SEQ ID NO: 165169 - DNA, 19 bp, Homo sapiens
  siRNA target sequence for ALPL (NM_000478.2,1087-1105).
cacaatgtggactacctat

SEQ ID NO: 165170 - DNA, 19 bp, Homo sapiens
  siRNA target sequence for ALPL (NM_000478.2,1260-1278).
cgggcaccatgaaggaaaa

SEQ ID NO: 165171 - DNA, 19 bp, Homo sapiens
  siRNA target sequence for ALPL (NM_000478.2,1381-1399).
cattcccacgtcttcacat

SEQ ID NO: 165172 - DNA, 19 bp, Homo sapiens
  siRNA target sequence for ALPL (NM_000478.2,1518-1536).
gggcggtgaacgagagaat

SEQ ID NO: 165173 - DNA, 19 bp, Homo sapiens
  siRNA target sequence for ALPL (NM_000478.2,1664-1682).
gcgtccacgagcagaacta

SEQ ID NO: 165174 - DNA, 19 bp, Homo sapiens
  siRNA target sequence for B3GALT3 (NM_003781.2,544-562).
ggatgtacttctatgagta

SEQ ID NO: 165175 - DNA, 19 bp, Homo sapiens
  siRNA target sequence for B3GALT3 (NM_003781.2,558-576).
gagtatgagccgatttaca

SEQ ID NO: 165176 - DNA, 19 bp, Homo sapiens
  siRNA target sequence for B3GALT3 (NM_003781.2,597-615).
cttcgagagcattcaaact

SEQ ID NO: 165177 - DNA, 19 bp, Homo sapiens
  siRNA target sequence for B3GALT3 (NM_003781.2,656-674).
ccacccttcagatgtgaaa

SEQ ID NO: 165178 - DNA, 19 bp, Homo sapiens
  siRNA target sequence for B3GALT3 (NM_003781.2,680-698).
gcaggccattagagttact

SEQ ID NO: 165179 - DNA, 19 bp, Homo sapiens
  siRNA target sequence for B3GALT3 (NM_003781.2,681-699).
caggccattagagttactt

SEQ ID NO: 165180 - DNA, 19 bp, Homo sapiens
  siRNA target sequence for B3GALT3 (NM_003781.2,722-740).
gggatatgaggttcttaca

SEQ ID NO: 165181 - DNA, 19 bp, Homo sapiens
  siRNA target sequence for B3GALT3 (NM_003781.2,723-741).
ggatatgaggttcttacat

SEQ ID NO: 165182 - DNA, 19 bp, Homo sapiens
  siRNA target sequence for B3GALT3 (NM_003781.2,800-818).
ggatgaacaccttctttat

SEQ ID NO: 165183 - DNA, 19 bp, Homo sapiens
  siRNA target sequence for B3GALT3 (NM_003781.2,809-827).
ccttctttatggtgacata

SEQ ID NO: 165184 - DNA, 19 bp, Homo sapiens
  siRNA target sequence for B3GALT3 (NM_003781.2,822-840).
gacataatccgacaagatt

SEQ ID NO: 165185 - DNA, 19 bp, Homo sapiens
  siRNA target sequence for B3GALT3 (NM_003781.2,824-842).
cataatccgacaagatttt

SEQ ID NO: 165186 - DNA, 19 bp, Homo sapiens
  siRNA target sequence for B3GALT3 (NM_003781.2,831-849).
cgacaagattttttagaca

SEQ ID NO: 165187 - DNA, 19 bp, Homo sapiens
  siRNA target sequence for B3GALT3 (NM_003781.2,883-901).
cattcaggtgggtaactga

SEQ ID NO: 165188 - DNA, 19 bp, Homo sapiens
  siRNA target sequence for B3GALT3 (NM_003781.2,887-905).
caggtgggtaactgagttt

SEQ ID NO: 165189 - DNA, 19 bp, Homo sapiens
  siRNA target sequence for B3GALT3 (NM_003781.2,909-927).
cccaatgccaagtacgtaa

SEQ ID NO: 165190 - DNA, 19 bp, Homo sapiens
  siRNA target sequence for B3GALT3 (NM_003781.2,915-933).
gccaagtacgtaatgaaga

SEQ ID NO: 165191 - DNA, 19 bp, Homo sapiens
  siRNA target sequence for B3GALT3 (NM_003781.2,950-968).
catcaatactggcaattta

SEQ ID NO: 165192 - DNA, 19 bp, Homo sapiens
  siRNA target sequence for B3GALT3 (NM_003781.2,958-976).
ctggcaatttagtgaagta

SEQ ID NO: 165193 - DNA, 19 bp, Homo sapiens
  siRNA target sequence for B3GALT3 (NM_003781.2,1010-1028).
cacaggttatcctctaatt

SEQ ID NO: 165194 - DNA, 19 bp, Homo sapiens
  siRNA target sequence for B3GALT3 (NM_003781.2,1012-1030).
caggttatcctctaattga

SEQ ID NO: 165195 - DNA, 19 bp, Homo sapiens
  siRNA target sequence for B3GALT3 (NM_003781.2,1014-1032).
ggttatcctctaattgata

SEQ ID NO: 165196 - DNA, 19 bp, Homo sapiens
  siRNA target sequence for B3GALT3 (NM_003781.2,1015-1033).
gttatcctctaattgataa

SEQ ID NO: 165197 - DNA, 19 bp, Homo sapiens
  siRNA target sequence for B3GALT3 (NM_003781.2,1039-1057).
cctatagaggattttacca

SEQ ID NO: 165198 - DNA, 19 bp, Homo sapiens
  siRNA target sequence for B3GALT3 (NM_003781.2,1040-1058).
ctatagaggattttaccaa

SEQ ID NO: 165199 - DNA, 19 bp, Homo sapiens
  siRNA target sequence for B3GALT3 (NM_003781.2,1111-1129).
gcagtgggttgggttatat

SEQ ID NO: 165200 - DNA, 19 bp, Homo sapiens
  siRNA target sequence for B3GALT3 (NM_003781.2,1114-1132).
gtgggttgggttatataat

SEQ ID NO: 165201 - DNA, 19 bp, Homo sapiens
  siRNA target sequence for B3GALT3 (NM_003781.2,1145-1163).
ggtgccaaggatctatgaa

SEQ ID NO: 165202 - DNA, 19 bp, Homo sapiens
  siRNA target sequence for B3GALT3 (NM_003781.2,1173-1191).
cacgtaaaacccatcaagt

SEQ ID NO: 165203 - DNA, 19 bp, Homo sapiens
  siRNA target sequence for B3GALT3 (NM_003781.2,1200-1218).
gtttatgtcgggatctgtt

SEQ ID NO: 165204 - DNA, 19 bp, Homo sapiens
  siRNA target sequence for B3GALT3 (NM_003781.2,1206-1224).
gtcgggatctgtttgaatt

SEQ ID NO: 165205 - DNA, 19 bp, Homo sapiens
  siRNA target sequence for B3GALT3 (NM_003781.2,1208-1226).
cgggatctgtttgaattta

SEQ ID NO: 165206 - DNA, 19 bp, Homo sapiens
  siRNA target sequence for B3GALT3 (NM_003781.2,1258-1276).
caaatcttttctttctata

SEQ ID NO: 165207 - DNA, 19 bp, Homo sapiens
  siRNA target sequence for CDS1 (NM_001263.2,595-613).
gcgacaaagaaacagatat

SEQ ID NO: 165208 - DNA, 19 bp, Homo sapiens
  siRNA target sequence for CDS1 (NM_001263.2,685-703).
gaacccctgagattctcaa

SEQ ID NO: 165209 - DNA, 19 bp, Homo sapiens
  siRNA target sequence for CDS1 (NM_001263.2,688-706).
cccctgagattctcaaaaa

SEQ ID NO: 165210 - DNA, 19 bp, Homo sapiens
  siRNA target sequence for CDS1 (NM_001263.2,740-758).
ctggtggatacgtggaatt

SEQ ID NO: 165211 - DNA, 19 bp, Homo sapiens
  siRNA target sequence for CDS1 (NM_001263.2,742-760).
ggtggatacgtggaattct

SEQ ID NO: 165212 - DNA, 19 bp, Homo sapiens
  siRNA target sequence for CDS1 (NM_001263.2,750-768).
cgtggaattctcactctaa

SEQ ID NO: 165213 - DNA, 19 bp, Homo sapiens
  siRNA target sequence for CDS1 (NM_001263.2,759-777).
ctcactctaactatgatct

SEQ ID NO: 165214 - DNA, 19 bp, Homo sapiens
  siRNA target sequence for CDS1 (NM_001263.2,782-800).
gtttttcctgatcatctat

SEQ ID NO: 165215 - DNA, 19 bp, Homo sapiens
  siRNA target sequence for CDS1 (NM_001263.2,812-830).
catgctgatgcttcttgtt

SEQ ID NO: 165216 - DNA, 19 bp, Homo sapiens
  siRNA target sequence for CDS1 (NM_001263.2,873-891).
ggttatagagtctatcatt

SEQ ID NO: 165217 - DNA, 19 bp, Homo sapiens
  siRNA target sequence for CDS1 (NM_001263.2,880-898).
gagtctatcattcttatga

SEQ ID NO: 165218 - DNA, 19 bp, Homo sapiens
  siRNA target sequence for CDS1 (NM_001263.2,897-915).
gatctaccatggtttagaa

SEQ ID NO: 165219 - DNA, 19 bp, Homo sapiens
  siRNA target sequence for CDS1 (NM_001263.2,918-936).
ctaagttggtactttctat

SEQ ID NO: 165220 - DNA, 19 bp, Homo sapiens
  siRNA target sequence for CDS1 (NM_001263.2,961-979).
gagagactgtagctgatta

SEQ ID NO: 165221 - DNA, 19 bp, Homo sapiens
  siRNA target sequence for CDS1 (NM_001263.2,1020-1038).
ctcattcgctaccatagat

SEQ ID NO: 165222 - DNA, 19 bp, Homo sapiens
  siRNA target sequence for CDS1 (NM_001263.2,1026-1044).
cgctaccatagatttatat

SEQ ID NO: 165223 - DNA, 19 bp, Homo sapiens
  siRNA target sequence for CDS1 (NM_001263.2,1028-1046).
ctaccatagatttatatca

SEQ ID NO: 165224 - DNA, 19 bp, Homo sapiens
  siRNA target sequence for CDS1 (NM_001263.2,1031-1049).
ccatagatttatatcattt

SEQ ID NO: 165225 - DNA, 19 bp, Homo sapiens
  siRNA target sequence for CDS1 (NM_001263.2,1135-1153).
ctcatgtcactttactgat

SEQ ID NO: 165226 - DNA, 19 bp, Homo sapiens
  siRNA target sequence for CDS1 (NM_001263.2,1162-1180).
ctcagtcacaccttgtcat

SEQ ID NO: 165227 - DNA, 19 bp, Homo sapiens
  siRNA target sequence for CDS1 (NM_001263.2,1173-1191).
cttgtcatccaaaatctgt

SEQ ID NO: 165228 - DNA, 19 bp, Homo sapiens
  siRNA target sequence for CDS1 (NM_001263.2,1178-1196).
catccaaaatctgtttgaa

SEQ ID NO: 165229 - DNA, 19 bp, Homo sapiens
  siRNA target sequence for CDS1 (NM_001263.2,1188-1206).
ctgtttgaaggcatgatat

SEQ ID NO: 165230 - DNA, 19 bp, Homo sapiens
  siRNA target sequence for CDS1 (NM_001263.2,1211-1229).
ccttgttccaatatcaagt

SEQ ID NO: 165231 - DNA, 19 bp, Homo sapiens
  siRNA target sequence for CDS1 (NM_001263.2,1215-1233).
gttccaatatcaagtgtta

SEQ ID NO: 165232 - DNA, 19 bp, Homo sapiens
  siRNA target sequence for CDS1 (NM_001263.2,1218-1236).
ccaatatcaagtgttatct

SEQ ID NO: 165233 - DNA, 19 bp, Homo sapiens
  siRNA target sequence for CDS1 (NM_001263.2,1249-1267).
ctgcttacctttttggatt

SEQ ID NO: 165234 - DNA, 19 bp, Homo sapiens
  siRNA target sequence for CDS1 (NM_001263.2,1368-1386).
gcctatgtgttatccaaat

SEQ ID NO: 165235 - DNA, 19 bp, Homo sapiens
  siRNA target sequence for CDS1 (NM_001263.2,1369-1387).
cctatgtgttatccaaata

SEQ ID NO: 165236 - DNA, 19 bp, Homo sapiens
  siRNA target sequence for CDS1 (NM_001263.2,1430-1448).
ctccttcgtgacagaatgt

SEQ ID NO: 165237 - DNA, 19 bp, Homo sapiens
  siRNA target sequence for CDS1 (NM_001263.2,1553-1571).
cattgcactgtcaaccttt

SEQ ID NO: 165238 - DNA, 19 bp, Homo sapiens
  siRNA target sequence for CDS1 (NM_001263.2,1562-1580).
gtcaacctttgcatcttta

SEQ ID NO: 165239 - DNA, 19 bp, Homo sapiens
  siRNA target sequence for CDS1 (NM_001263.2,1586-1604).
cccatttggaggcttcttt

SEQ ID NO: 165240 - DNA, 19 bp, Homo sapiens
  siRNA target sequence for CDS1 (NM_001263.2,1637-1655).
ggattttgcaaataccatt

SEQ ID NO: 165241 - DNA, 19 bp, Homo sapiens
  siRNA target sequence for CDS1 (NM_001263.2,1657-1675).
ctggacatggtgggataat

SEQ ID NO: 165242 - DNA, 19 bp, Homo sapiens
  siRNA target sequence for CDS1 (NM_001263.2,1679-1697).
cagatttgattgtcagtat

SEQ ID NO: 165243 - DNA, 19 bp, Homo sapiens
  siRNA target sequence for CDS1 (NM_001263.2,1713-1731).
gtacatgtgtacatcacaa

SEQ ID NO: 165244 - DNA, 19 bp, Homo sapiens
  siRNA target sequence for CDS1 (NM_001263.2,1716-1734).
catgtgtacatcacaagtt

SEQ ID NO: 165245 - DNA, 19 bp, Homo sapiens
  siRNA target sequence for CDS1 (NM_001263.2,1788-1806).
cctgaacagcagttaaata

SEQ ID NO: 165246 - DNA, 19 bp, Homo sapiens
  siRNA target sequence for CDS1 (NM_001263.2,1789-1807).
ctgaacagcagttaaatat

SEQ ID NO: 165247 - DNA, 19 bp, Homo sapiens
  siRNA target sequence for CDS1 (NM_001263.2,1823-1841).
gactcatctcattgagaaa

SEQ ID NO: 165248 - DNA, 19 bp, Homo sapiens
  siRNA target sequence for CDS1 (NM_001263.2,1832-1850).
cattgagaaaggaatccta

SEQ ID NO: 165249 - DNA, 19 bp, Homo sapiens
  siRNA target sequence for CDS1 (NM_001263.2,1851-1869).
caacccaccttgaaggtat

SEQ ID NO: 165250 - DNA, 19 bp, Homo sapiens
  siRNA target sequence for CERK (NM_022766.4,299-317).
cgttcacgggaaacatcaa

SEQ ID NO: 165251 - DNA, 19 bp, Homo sapiens
  siRNA target sequence for CERK (NM_022766.4,312-330).
catcaaggcagtggaaaat

SEQ ID NO: 165252 - DNA, 19 bp, Homo sapiens
  siRNA target sequence for CERK (NM_022766.4,485-503).
gacgtccagaccaaagcat

SEQ ID NO: 165253 - DNA, 19 bp, Homo sapiens
  siRNA target sequence for CERK (NM_022766.4,487-505).
cgtccagaccaaagcattt

SEQ ID NO: 165254 - DNA, 19 bp, Homo sapiens
  siRNA target sequence for CERK (NM_022766.4,488-506).
gtccagaccaaagcattta

SEQ ID NO: 165255 - DNA, 19 bp, Homo sapiens
  siRNA target sequence for CERK (NM_022766.4,496-514).
caaagcatttactggtatt

SEQ ID NO: 165256 - DNA, 19 bp, Homo sapiens
  siRNA target sequence for CERK (NM_022766.4,518-536).
caacccgtttggaggaaaa

SEQ ID NO: 165257 - DNA, 19 bp, Homo sapiens
  siRNA target sequence for CERK (NM_022766.4,545-563).
caagcggatatatgaaaga

SEQ ID NO: 165258 - DNA, 19 bp, Homo sapiens
  siRNA target sequence for CERK (NM_022766.4,605-623).
catcatcgttactgaacat

SEQ ID NO: 165259 - DNA, 19 bp, Homo sapiens
  siRNA target sequence for CERK (NM_022766.4,632-650).
ggccaaggagactctgtat

SEQ ID NO: 165260 - DNA, 19 bp, Homo sapiens
  siRNA target sequence for CERK (NM_022766.4,634-652).
ccaaggagactctgtatga

SEQ ID NO: 165261 - DNA, 19 bp, Homo sapiens
  siRNA target sequence for CERK (NM_022766.4,638-656).
ggagactctgtatgagatt

SEQ ID NO: 165262 - DNA, 19 bp, Homo sapiens
  siRNA target sequence for CERK (NM_022766.4,639-657).
gagactctgtatgagatta

SEQ ID NO: 165263 - DNA, 19 bp, Homo sapiens
  siRNA target sequence for CERK (NM_022766.4,685-703).
gtgtcggcggagatggtat

SEQ ID NO: 165264 - DNA, 19 bp, Homo sapiens
  siRNA target sequence for CERK (NM_022766.4,796-814).
gcctccggattggaatcat

SEQ ID NO: 165265 - DNA, 19 bp, Homo sapiens
  siRNA target sequence for CERK (NM_022766.4,797-815).
cctccggattggaatcatt

SEQ ID NO: 165266 - DNA, 19 bp, Homo sapiens
  siRNA target sequence for CERK (NM_022766.4,826-844).
caacggactgcgtgtgtta

SEQ ID NO: 165267 - DNA, 19 bp, Homo sapiens
  siRNA target sequence for CERK (NM_022766.4,874-892).
cctcggcgctgcatatcgt

SEQ ID NO: 165268 - DNA, 19 bp, Homo sapiens
  siRNA target sequence for CERK (NM_022766.4,875-893).
ctcggcgctgcatatcgtt

SEQ ID NO: 165269 - DNA, 19 bp, Homo sapiens
  siRNA target sequence for CERK (NM_022766.4,1029-1047).
cttgccagatacgactttt

SEQ ID NO: 165270 - DNA, 19 bp, Homo sapiens
  siRNA target sequence for CERK (NM_022766.4,1275-1293).
gccatcaatgccacaaaca

SEQ ID NO: 165271 - DNA, 19 bp, Homo sapiens
  siRNA target sequence for CERK (NM_022766.4,1276-1294).
ccatcaatgccacaaacat

SEQ ID NO: 165272 - DNA, 19 bp, Homo sapiens
  siRNA target sequence for CERK (NM_022766.4,1390-1408).
ggttcaattttctgagatt

SEQ ID NO: 165273 - DNA, 19 bp, Homo sapiens
  siRNA target sequence for CERK (NM_022766.4,1461-1479).
gtttatcgcgtcaagaaat

SEQ ID NO: 165274 - DNA, 19 bp, Homo sapiens
  siRNA target sequence for CERK (NM_022766.4,1542-1560).
cgctttgggcacatttgca

SEQ ID NO: 165275 - DNA, 19 bp, Homo sapiens
  siRNA target sequence for CERK (NM_182661.1,1013-1031).
gtaaagcactggcaagttt

SEQ ID NO: 165276 - DNA, 19 bp, Homo sapiens
  siRNA target sequence for CERK (NM_182661.1,1023-1041).
ggcaagtttgttactgtta

SEQ ID NO: 165277 - DNA, 19 bp, Homo sapiens
  siRNA target sequence for CERK (NM_182661.1,1038-1056).
gttaaaatgtcaaatacca

SEQ ID NO: 165278 - DNA, 19 bp, Homo sapiens
  siRNA target sequence for CERK (NM_182661.1,1048-1066).
caaataccaatgctttata

SEQ ID NO: 165279 - DNA, 19 bp, Homo sapiens
  siRNA target sequence for CERK (NM_182661.1,1068-1086).
cgacgcgaagtgcttaaca

SEQ ID NO: 165280 - DNA, 19 bp, Homo sapiens
  siRNA target sequence for CERK (NM_182661.1,1187-1205).
gtacacgtggtccagattt

SEQ ID NO: 165281 - DNA, 19 bp, Homo sapiens
  siRNA target sequence for CERK (NM_182661.1,1219-1237).
cttcacactgagttctcta

SEQ ID NO: 165282 - DNA, 19 bp, Homo sapiens
  siRNA target sequence for CERK (NM_182661.1,1222-1240).
cacactgagttctctatat

SEQ ID NO: 165283 - DNA, 19 bp, Homo sapiens
  siRNA target sequence for CERK (NM_182661.1,1285-1303).
gtctcggatgtctgtcttt

SEQ ID NO: 165284 - DNA, 19 bp, Homo sapiens
  siRNA target sequence for CERK (NM_182661.1,1354-1372).
cggcgaccagaggattctt

SEQ ID NO: 165285 - DNA, 19 bp, Homo sapiens
  siRNA target sequence for CERK (NM_182661.1,1402-1420).
gggcacccctcaattgtgt

SEQ ID NO: 165286 - DNA, 19 bp, Homo sapiens
  siRNA target sequence for CERK (NM_182661.1,1403-1421).
ggcacccctcaattgtgta

SEQ ID NO: 165287 - DNA, 19 bp, Homo sapiens
  siRNA target sequence for CERK (NM_182661.1,1417-1435).
gtgtactacgtccttgttt

SEQ ID NO: 165288 - DNA, 19 bp, Homo sapiens
  siRNA target sequence for CLDN16 (NM_006580.2,92-110).
ggttacagcctgtttgtat

SEQ ID NO: 165289 - DNA, 19 bp, Homo sapiens
  siRNA target sequence for CLDN16 (NM_006580.2,93-111).
gttacagcctgtttgtatt

SEQ ID NO: 165290 - DNA, 19 bp, Homo sapiens
  siRNA target sequence for CLDN16 (NM_006580.2,143-161).
gggcgtgagaaaaagtaaa

SEQ ID NO: 165291 - DNA, 19 bp, Homo sapiens
  siRNA target sequence for CLDN16 (NM_006580.2,144-162).
ggcgtgagaaaaagtaaaa

SEQ ID NO: 165292 - DNA, 19 bp, Homo sapiens
  siRNA target sequence for CLDN16 (NM_006580.2,283-301).
gggatcttcttcaatacat

SEQ ID NO: 165293 - DNA, 19 bp, Homo sapiens
  siRNA target sequence for CLDN16 (NM_006580.2,325-343).
ctgctgggtttttgattgt

SEQ ID NO: 165294 - DNA, 19 bp, Homo sapiens
  siRNA target sequence for CLDN16 (NM_006580.2,419-437).
gtgggaatgcgtcacaaat

SEQ ID NO: 165295 - DNA, 19 bp, Homo sapiens
  siRNA target sequence for CLDN16 (NM_006580.2,423-441).
gaatgcgtcacaaatgctt

SEQ ID NO: 165296 - DNA, 19 bp, Homo sapiens
  siRNA target sequence for CLDN16 (NM_006580.2,427-445).
gcgtcacaaatgcttttga

SEQ ID NO: 165297 - DNA, 19 bp, Homo sapiens
  siRNA target sequence for CLDN16 (NM_006580.2,428-446).
cgtcacaaatgcttttgat

SEQ ID NO: 165298 - DNA, 19 bp, Homo sapiens
  siRNA target sequence for CLDN16 (NM_006580.2,460-478).
gtgatgagtacgattccat

SEQ ID NO: 165299 - DNA, 19 bp, Homo sapiens
  siRNA target sequence for CLDN16 (NM_006580.2,507-525).
gtaactcgagcgttgatga

SEQ ID NO: 165300 - DNA, 19 bp, Homo sapiens
  siRNA target sequence for CLDN16 (NM_006580.2,573-591).
ggtcttgactgcgtgaaat

SEQ ID NO: 165301 - DNA, 19 bp, Homo sapiens
  siRNA target sequence for CLDN16 (NM_006580.2,574-592).
gtcttgactgcgtgaaatt

SEQ ID NO: 165302 - DNA, 19 bp, Homo sapiens
  siRNA target sequence for CLDN16 (NM_006580.2,597-615).
cctgatgagccgtacatta

SEQ ID NO: 165303 - DNA, 19 bp, Homo sapiens
  siRNA target sequence for CLDN16 (NM_006580.2,598-616).
ctgatgagccgtacattaa

SEQ ID NO: 165304 - DNA, 19 bp, Homo sapiens
  siRNA target sequence for CLDN16 (NM_006580.2,637-655).
ctggagccacgttactaat

SEQ ID NO: 165305 - DNA, 19 bp, Homo sapiens
  siRNA target sequence for CLDN16 (NM_006580.2,689-707).
gtatgctgttgatgtgtat

SEQ ID NO: 165306 - DNA, 19 bp, Homo sapiens
  siRNA target sequence for CLDN16 (NM_006580.2,704-722).
gtatgtggaacgttctact

SEQ ID NO: 165307 - DNA, 19 bp, Homo sapiens
  siRNA target sequence for CLDN16 (NM_006580.2,721-739).
ctttggttttgcacaatat

SEQ ID NO: 165308 - DNA, 19 bp, Homo sapiens
  siRNA target sequence for CLDN16 (NM_006580.2,793-811).
ggtctctgggttgcttttt

SEQ ID NO: 165309 - DNA, 19 bp, Homo sapiens
  siRNA target sequence for CLDN16 (NM_006580.2,855-873).
gttggacctgagagaaact

SEQ ID NO: 165310 - DNA, 19 bp, Homo sapiens
  siRNA target sequence for CLDN16 (NM_006580.2,862-880).
ctgagagaaactatcctta

SEQ ID NO: 165311 - DNA, 19 bp, Homo sapiens
  siRNA target sequence for CLDN16 (NM_006580.2,868-886).
gaaactatccttattcctt

SEQ ID NO: 165312 - DNA, 19 bp, Homo sapiens
  siRNA target sequence for CLDN16 (NM_006580.2,884-902).
cttgaggaaagcctattca

SEQ ID NO: 165313 - DNA, 19 bp, Homo sapiens
  siRNA target sequence for CLDN16 (NM_006580.2,917-935).
catggccaagtcatactca

SEQ ID NO: 165314 - DNA, 19 bp, Homo sapiens
  siRNA target sequence for CLDN16 (NM_006580.2,943-961).
gcacagagacggccaaaat

SEQ ID NO: 165315 - DNA, 19 bp, Homo sapiens
  siRNA target sequence for CLDN16 (NM_006580.2,946-964).
cagagacggccaaaatgta

SEQ ID NO: 165316 - DNA, 19 bp, Homo sapiens
  siRNA target sequence for COMT (NM_000754.2,702-720).
gagcgtcccaggacatcat

SEQ ID NO: 165317 - DNA, 19 bp, Homo sapiens
  siRNA target sequence for COMT (NM_000754.2,920-938).
gagtgcacacactaccaat

SEQ ID NO: 165318 - DNA, 19 bp, Homo sapiens
  siRNA target sequence for COMT (NM_000754.2,924-942).
gcacacactaccaatcgtt

SEQ ID NO: 165319 - DNA, 19 bp, Homo sapiens
  siRNA target sequence for DKFZp761G058 (NM_152542.2,252-270).
gtcaacagctgccttaatt

SEQ ID NO: 165320 - DNA, 19 bp, Homo sapiens
  siRNA target sequence for DKFZp761G058 (NM_152542.2,422-440).
cagctacctgggacaattt

SEQ ID NO: 165321 - DNA, 19 bp, Homo sapiens
  siRNA target sequence for DKFZp761G058 (NM_152542.2,475-493).
ctgctgccacccagcatta

SEQ ID NO: 165322 - DNA, 19 bp, Homo sapiens
  siRNA target sequence for DKFZp761G058 (NM_152542.2,480-498).
gccacccagcattaagtat

SEQ ID NO: 165323 - DNA, 19 bp, Homo sapiens
  siRNA target sequence for DKFZp761G058 (NM_152542.2,534-552).
ggggtgcgcctcacagatt

SEQ ID NO: 165324 - DNA, 19 bp, Homo sapiens
  siRNA target sequence for DKFZp761G058 (NM_152542.2,675-693).
ggagaaatgtattatggat

SEQ ID NO: 165325 - DNA, 19 bp, Homo sapiens
  siRNA target sequence for DKFZp761G058 (NM_152542.2,780-798).
gtctgctgatgcaactctt

SEQ ID NO: 165326 - DNA, 19 bp, Homo sapiens
  siRNA target sequence for DKFZp761G058 (NM_152542.2,827-845).
ccctattgcgagatggtat

SEQ ID NO: 165327 - DNA, 19 bp, Homo sapiens
  siRNA target sequence for DKFZp761G058 (NM_152542.2,828-846).
cctattgcgagatggtatt

SEQ ID NO: 165328 - DNA, 19 bp, Homo sapiens
  siRNA target sequence for DKFZp761G058 (NM_152542.2,996-1014).
ggggcagcctcacgtaaat

SEQ ID NO: 165329 - DNA, 19 bp, Homo sapiens
  siRNA target sequence for DKFZp761G058 (NM_152542.2,1042-1060).
ggagatttggaccttaaga

SEQ ID NO: 165330 - DNA, 19 bp, Homo sapiens
  siRNA target sequence for DKFZp761G058 (NM_152542.2,1071-1089).
catagcagaacctgaaact

SEQ ID NO: 165331 - DNA, 19 bp, Homo sapiens
  siRNA target sequence for DKFZp761G058 (NM_152542.2,1081-1099).
cctgaaactaagaggatta

SEQ ID NO: 165332 - DNA, 19 bp, Homo sapiens
  siRNA target sequence for DKFZp761G058 (NM_152542.2,1082-1100).
ctgaaactaagaggattaa

SEQ ID NO: 165333 - DNA, 19 bp, Homo sapiens
  siRNA target sequence for DKFZp761G058 (NM_152542.2,1088-1106).
ctaagaggattaagttaca

SEQ ID NO: 165334 - DNA, 19 bp, Homo sapiens
  siRNA target sequence for DKFZp761G058 (NM_152542.2,1092-1110).
gaggattaagttacatcat

SEQ ID NO: 165335 - DNA, 19 bp, Homo sapiens
  siRNA target sequence for DKFZp761G058 (NM_152542.2,1132-1150).
ctcaccacagatggaatta

SEQ ID NO: 165336 - DNA, 19 bp, Homo sapiens
  siRNA target sequence for DKFZp761G058 (NM_152542.2,1136-1154).
ccacagatggaattaactt

SEQ ID NO: 165337 - DNA, 19 bp, Homo sapiens
  siRNA target sequence for DKFZp761G058 (NM_152542.2,1159-1177).
gtgaatagtcaagagattt

SEQ ID NO: 165338 - DNA, 19 bp, Homo sapiens
  siRNA target sequence for DUT (NM_001948.2,421-439).
cgaacggattttttatcca

SEQ ID NO: 165339 - DNA, 19 bp, Homo sapiens
  siRNA target sequence for DUT (NM_001948.2,426-444).
ggattttttatccagaaat

SEQ ID NO: 165340 - DNA, 19 bp, Homo sapiens
  siRNA target sequence for ENO2 (NM_001975.2,338-356).
cctctacgggcatctatga

SEQ ID NO: 165341 - DNA, 19 bp, Homo sapiens
  siRNA target sequence for ENO2 (NM_001975.2,377-395).
gagacaaacagcgttactt

SEQ ID NO: 165342 - DNA, 19 bp, Homo sapiens
  siRNA target sequence for ENO2 (NM_001975.2,666-684).
ggccttcaacgtgatcaat

SEQ ID NO: 165343 - DNA, 19 bp, Homo sapiens
  siRNA target sequence for ENO2 (NM_001975.2,775-793).
ggtgcagaggtctaccata

SEQ ID NO: 165344 - DNA, 19 bp, Homo sapiens
  siRNA target sequence for ENO2 (NM_001975.2,779-797).
cagaggtctaccatacact

SEQ ID NO: 165345 - DNA, 19 bp, Homo sapiens
  siRNA target sequence for ENO2 (NM_001975.2,794-812).
cactcaagggagtcatcaa

SEQ ID NO: 165346 - DNA, 19 bp, Homo sapiens
  siRNA target sequence for ENO2 (NM_001975.2,802-820).
ggagtcatcaaggacaaat

SEQ ID NO: 165347 - DNA, 19 bp, Homo sapiens
  siRNA target sequence for ENO2 (NM_001975.2,803-821).
gagtcatcaaggacaaata

SEQ ID NO: 165348 - DNA, 19 bp, Homo sapiens
  siRNA target sequence for ENO2 (NM_001975.2,930-948).
cacggaaaagatcgttatt

SEQ ID NO: 165349 - DNA, 19 bp, Homo sapiens
  siRNA target sequence for ENO2 (NM_001975.2,958-976).
gttgctgcctcagagtttt

SEQ ID NO: 165350 - DNA, 19 bp, Homo sapiens
  siRNA target sequence for ENO2 (NM_001975.2,979-997).
cgtgatggcaaatatgact

SEQ ID NO: 165351 - DNA, 19 bp, Homo sapiens
  siRNA target sequence for ENO2 (NM_001975.2,1016-1034).
ctgatccttcccgatacat

SEQ ID NO: 165352 - DNA, 19 bp, Homo sapiens
  siRNA target sequence for ENO2 (NM_001975.2,1055-1073).
cactctaccaggactttgt

SEQ ID NO: 165353 - DNA, 19 bp, Homo sapiens
  siRNA target sequence for ENO2 (NM_001975.2,1126-1144).
gctgcctggtccaagttca

SEQ ID NO: 165354 - DNA, 19 bp, Homo sapiens
  siRNA target sequence for ENO2 (NM_001975.2,1186-1204).
gtgaccaacccaaaacgta

SEQ ID NO: 165355 - DNA, 19 bp, Homo sapiens
  siRNA target sequence for ENO2 (NM_001975.2,1188-1206).
gaccaacccaaaacgtatt

SEQ ID NO: 165356 - DNA, 19 bp, Homo sapiens
  siRNA target sequence for ENO2 (NM_001975.2,1190-1208).
ccaacccaaaacgtattga

SEQ ID NO: 165357 - DNA, 19 bp, Homo sapiens
  siRNA target sequence for ENO2 (NM_001975.2,1424-1442).
ctgaacgtctggctaaata

SEQ ID NO: 165358 - DNA, 19 bp, Homo sapiens
  siRNA target sequence for ENO3 (NM_001976.2,222-240).
ggcttccacgggtatctat

SEQ ID NO: 165359 - DNA, 19 bp, Homo sapiens
  siRNA target sequence for ENO3 (NM_001976.2,357-375).
cgttgcggatcaagaaaaa

SEQ ID NO: 165360 - DNA, 19 bp, Homo sapiens
  siRNA target sequence for ENO3 (NM_001976.2,362-380).
cggatcaagaaaaagttga

SEQ ID NO: 165361 - DNA, 19 bp, Homo sapiens
  siRNA target sequence for ENO3 (NM_001976.2,397-415).
ctagatgggaccgagaata

SEQ ID NO: 165362 - DNA, 19 bp, Homo sapiens
  siRNA target sequence for ENO3 (NM_001976.2,400-418).
gatgggaccgagaataagt

SEQ ID NO: 165363 - DNA, 19 bp, Homo sapiens
  siRNA target sequence for ENO3 (NM_001976.2,543-561).
cccagtgccagccttcaat

SEQ ID NO: 165364 - DNA, 19 bp, Homo sapiens
  siRNA target sequence for ENO3 (NM_001976.2,872-890).
ggaagtacgatcttgactt

SEQ ID NO: 165365 - DNA, 19 bp, Homo sapiens
  siRNA target sequence for ENO3 (NM_001976.2,888-906).
cttcaagtcgcctgatgat

SEQ ID NO: 165366 - DNA, 19 bp, Homo sapiens
  siRNA target sequence for ENO3 (NM_001976.2,934-952).
ctcggagagctgtataaga

SEQ ID NO: 165367 - DNA, 19 bp, Homo sapiens
  siRNA target sequence for ENO3 (NM_001976.2,940-958).
gagctgtataagagcttta

SEQ ID NO: 165368 - DNA, 19 bp, Homo sapiens
  siRNA target sequence for ENO3 (NM_001976.2,943-961).
ctgtataagagctttatca

SEQ ID NO: 165369 - DNA, 19 bp, Homo sapiens
  siRNA target sequence for ENO3 (NM_001976.2,1151-1169).
gctcggtgaccgaatcgat

SEQ ID NO: 165370 - DNA, 19 bp, Homo sapiens
  siRNA target sequence for ENO3 (NM_001976.2,1179-1197).
caaactggctcagtctaat

SEQ ID NO: 165371 - DNA, 19 bp, Homo sapiens
  siRNA target sequence for ENO3 (NM_001976.2,1310-1328).
cggagcgtctggccaaata

SEQ ID NO: 165372 - DNA, 19 bp, Homo sapiens
  siRNA target sequence for ENTPD1 (NM_001776.2,220-238).
gagtctaacgtgaagacat

SEQ ID NO: 165373 - DNA, 19 bp, Homo sapiens
  siRNA target sequence for ENTPD1 (NM_001776.2,222-240).
gtctaacgtgaagacattt

SEQ ID NO: 165374 - DNA, 19 bp, Homo sapiens
  siRNA target sequence for ENTPD1 (NM_001776.2,265-283).
cttggcttctcctctatca

SEQ ID NO: 165375 - DNA, 19 bp, Homo sapiens
  siRNA target sequence for ENTPD1 (NM_001776.2,276-294).
ctctatcatagctgtgata

SEQ ID NO: 165376 - DNA, 19 bp, Homo sapiens
  siRNA target sequence for ENTPD1 (NM_001776.2,329-347).
cattgccagaaaacgttaa

SEQ ID NO: 165377 - DNA, 19 bp, Homo sapiens
  siRNA target sequence for ENTPD1 (NM_001776.2,333-351).
gccagaaaacgttaagtat

SEQ ID NO: 165378 - DNA, 19 bp, Homo sapiens
  siRNA target sequence for ENTPD1 (NM_001776.2,370-388).
ggttcttctcacacaagtt

SEQ ID NO: 165379 - DNA, 19 bp, Homo sapiens
  siRNA target sequence for ENTPD1 (NM_001776.2,374-392).
cttctcacacaagtttata

SEQ ID NO: 165380 - DNA, 19 bp, Homo sapiens
  siRNA target sequence for ENTPD1 (NM_001776.2,377-395).
ctcacacaagtttatacat

SEQ ID NO: 165381 - DNA, 19 bp, Homo sapiens
  siRNA target sequence for ENTPD1 (NM_001776.2,381-399).
cacaagtttatacatctat

SEQ ID NO: 165382 - DNA, 19 bp, Homo sapiens
  siRNA target sequence for ENTPD1 (NM_001776.2,428-446).
caggcgtggtgcatcaagt

SEQ ID NO: 165383 - DNA, 19 bp, Homo sapiens
  siRNA target sequence for ENTPD1 (NM_001776.2,431-449).
gcgtggtgcatcaagtaga

SEQ ID NO: 165384 - DNA, 19 bp, Homo sapiens
  siRNA target sequence for ENTPD1 (NM_001776.2,466-484).
ggtcctggaatctcaaaat

SEQ ID NO: 165385 - DNA, 19 bp, Homo sapiens
  siRNA target sequence for ENTPD1 (NM_001776.2,467-485).
gtcctggaatctcaaaatt

SEQ ID NO: 165386 - DNA, 19 bp, Homo sapiens
  siRNA target sequence for ENTPD1 (NM_001776.2,607-625).
cggttgctcaggatggaaa

SEQ ID NO: 165387 - DNA, 19 bp, Homo sapiens
  siRNA target sequence for ENTPD1 (NM_001776.2,694-712).
cagggtgccaggatcatta

SEQ ID NO: 165388 - DNA, 19 bp, Homo sapiens
  siRNA target sequence for ENTPD1 (NM_001776.2,696-714).
gggtgccaggatcattact

SEQ ID NO: 165389 - DNA, 19 bp, Homo sapiens
  siRNA target sequence for ENTPD1 (NM_001776.2,731-749).
cctatggctggattactat

SEQ ID NO: 165390 - DNA, 19 bp, Homo sapiens
  siRNA target sequence for ENTPD1 (NM_001776.2,740-758).
ggattactatcaactatct

SEQ ID NO: 165391 - DNA, 19 bp, Homo sapiens
  siRNA target sequence for ENTPD1 (NM_001776.2,792-810).
cagcatagtcccatatgaa

SEQ ID NO: 165392 - DNA, 19 bp, Homo sapiens
  siRNA target sequence for ENTPD1 (NM_001776.2,812-830).
ccaataatcaggaaacctt

SEQ ID NO: 165393 - DNA, 19 bp, Homo sapiens
  siRNA target sequence for ENTPD1 (NM_001776.2,854-872).
cctctacacaagtcacttt

SEQ ID NO: 165394 - DNA, 19 bp, Homo sapiens
  siRNA target sequence for ENTPD1 (NM_001776.2,890-908).
ctatcgagtccccagataa

SEQ ID NO: 165395 - DNA, 19 bp, Homo sapiens
  siRNA target sequence for ENTPD1 (NM_001776.2,894-912).
cgagtccccagataatgct

SEQ ID NO: 165396 - DNA, 19 bp, Homo sapiens
  siRNA target sequence for ENTPD1 (NM_001776.2,931-949).
ggcaaggactacaatgtct

SEQ ID NO: 165397 - DNA, 19 bp, Homo sapiens
  siRNA target sequence for ENTPD1 (NM_001776.2,1011-1029).
cattcaggttgcaagtaat

SEQ ID NO: 165398 - DNA, 19 bp, Homo sapiens
  siRNA target sequence for ENTPD1 (NM_001776.2,1061-1079).
gatataagaaggtagtgaa

SEQ ID NO: 165399 - DNA, 19 bp, Homo sapiens
  siRNA target sequence for ENTPD1 (NM_001776.2,1100-1118).
ccccctgcaccaagagatt

SEQ ID NO: 165400 - DNA, 19 bp, Homo sapiens
  siRNA target sequence for ENTPD1 (NM_001776.2,1103-1121).
cctgcaccaagagatttga

SEQ ID NO: 165401 - DNA, 19 bp, Homo sapiens
  siRNA target sequence for ENTPD1 (NM_001776.2,1152-1170).
ccagggtattggaaactat

SEQ ID NO: 165402 - DNA, 19 bp, Homo sapiens
  siRNA target sequence for ENTPD1 (NM_001776.2,1232-1250).
gtgccttcaatgggatttt

SEQ ID NO: 165403 - DNA, 19 bp, Homo sapiens
  siRNA target sequence for ENTPD1 (NM_001776.2,1347-1365).
ggtgactgagatgatgaaa

SEQ ID NO: 165404 - DNA, 19 bp, Homo sapiens
  siRNA target sequence for ENTPD1 (NM_001776.2,1381-1399).
ccttgggaggagataaaaa

SEQ ID NO: 165405 - DNA, 19 bp, Homo sapiens
  siRNA target sequence for ENTPD1 (NM_001776.2,1400-1418).
catcttacgctggagtaaa

SEQ ID NO: 165406 - DNA, 19 bp, Homo sapiens
  siRNA target sequence for ENTPD1 (NM_001776.2,1443-1461).
cttttctggtacctacatt

SEQ ID NO: 165407 - DNA, 19 bp, Homo sapiens
  siRNA target sequence for ENTPD1 (NM_001776.2,1470-1488).
ccttctgcaaggctatcat

SEQ ID NO: 165408 - DNA, 19 bp, Homo sapiens
  siRNA target sequence for ENTPD1 (NM_001776.2,1471-1489).
cttctgcaaggctatcatt

SEQ ID NO: 165409 - DNA, 19 bp, Homo sapiens
  siRNA target sequence for ENTPD1 (NM_001776.2,1474-1492).
ctgcaaggctatcatttca

SEQ ID NO: 165410 - DNA, 19 bp, Homo sapiens
  siRNA target sequence for ENTPD1 (NM_001776.2,1476-1494).
gcaaggctatcatttcaca

SEQ ID NO: 165411 - DNA, 19 bp, Homo sapiens
  siRNA target sequence for ENTPD1 (NM_001776.2,1505-1523).
gggagcacatccatttcat

SEQ ID NO: 165412 - DNA, 19 bp, Homo sapiens
  siRNA target sequence for ENTPD2 (NM_001246.1,173-191).
cgtccatgtttatctacaa

SEQ ID NO: 165413 - DNA, 19 bp, Homo sapiens
  siRNA target sequence for ENTPD2 (NM_001246.1,638-656).
ctacccagatcacttttga

SEQ ID NO: 165414 - DNA, 19 bp, Homo sapiens
  siRNA target sequence for ENTPD2 (NM_001246.1,996-1014).
ctcccgatgctctttcaat

SEQ ID NO: 165415 - DNA, 19 bp, Homo sapiens
  siRNA target sequence for ENTPD3 (NM_001248.1,166-184).
ggtcttgcttgtgagtatt

SEQ ID NO: 165416 - DNA, 19 bp, Homo sapiens
  siRNA target sequence for ENTPD3 (NM_001248.1,185-203).
gtggtacttgtgagtatca

SEQ ID NO: 165417 - DNA, 19 bp, Homo sapiens
  siRNA target sequence for ENTPD3 (NM_001248.1,235-253).
ccctccaggactgaagtat

SEQ ID NO: 165418 - DNA, 19 bp, Homo sapiens
  siRNA target sequence for ENTPD3 (NM_001248.1,243-261).
gactgaagtatggtattgt

SEQ ID NO: 165419 - DNA, 19 bp, Homo sapiens
  siRNA target sequence for ENTPD3 (NM_001248.1,263-281).
ctggatgccgggtcttcaa

SEQ ID NO: 165420 - DNA, 19 bp, Homo sapiens
  siRNA target sequence for ENTPD3 (NM_001248.1,285-303).
ccacagtctacgtgtatca

SEQ ID NO: 165421 - DNA, 19 bp, Homo sapiens
  siRNA target sequence for ENTPD3 (NM_001248.1,286-304).
cacagtctacgtgtatcaa

SEQ ID NO: 165422 - DNA, 19 bp, Homo sapiens
  siRNA target sequence for ENTPD3 (NM_001248.1,338-356).
gtcagtcaaaccttcaaat

SEQ ID NO: 165423 - DNA, 19 bp, Homo sapiens
  siRNA target sequence for ENTPD3 (NM_001248.1,374-392).
ggaatctccagctatggaa

SEQ ID NO: 165424 - DNA, 19 bp, Homo sapiens
  siRNA target sequence for ENTPD3 (NM_001248.1,375-393).
gaatctccagctatggaaa

SEQ ID NO: 165425 - DNA, 19 bp, Homo sapiens
  siRNA target sequence for ENTPD3 (NM_001248.1,418-436).
ctttgaggagtgtatgcaa

SEQ ID NO: 165426 - DNA, 19 bp, Homo sapiens
  siRNA target sequence for ENTPD3 (NM_001248.1,425-443).
gagtgtatgcaaaaagtca

SEQ ID NO: 165427 - DNA, 19 bp, Homo sapiens
  siRNA target sequence for ENTPD3 (NM_001248.1,511-529).
cttgctgaggttgcaaaat

SEQ ID NO: 165428 - DNA, 19 bp, Homo sapiens
  siRNA target sequence for ENTPD3 (NM_001248.1,548-566).
gtccttgaaagcatccaaa

SEQ ID NO: 165429 - DNA, 19 bp, Homo sapiens
  siRNA target sequence for ENTPD3 (NM_001248.1,623-641).
gaagaaggggtatatggat

SEQ ID NO: 165430 - DNA, 19 bp, Homo sapiens
  siRNA target sequence for ENTPD3 (NM_001248.1,629-647).
ggggtatatggatggatta

SEQ ID NO: 165431 - DNA, 19 bp, Homo sapiens
  siRNA target sequence for ENTPD3 (NM_001248.1,643-661).
gattacagccaactattta

SEQ ID NO: 165432 - DNA, 19 bp, Homo sapiens
  siRNA target sequence for ENTPD3 (NM_001248.1,821-839).
ctgtatggctacgtataca

SEQ ID NO: 165433 - DNA, 19 bp, Homo sapiens
  siRNA target sequence for ENTPD3 (NM_001248.1,976-994).
caccatgggccatgtattt

SEQ ID NO: 165434 - DNA, 19 bp, Homo sapiens
  siRNA target sequence for ENTPD3 (NM_001248.1,978-996).
ccatgggccatgtatttga

SEQ ID NO: 165435 - DNA, 19 bp, Homo sapiens
  siRNA target sequence for ENTPD3 (NM_001248.1,1187-1205).
gcttttgcaggattctact

SEQ ID NO: 165436 - DNA, 19 bp, Homo sapiens
  siRNA target sequence for ENTPD3 (NM_001248.1,1328-1346).
gtatatgcccgctcttact

SEQ ID NO: 165437 - DNA, 19 bp, Homo sapiens
  siRNA target sequence for ENTPD3 (NM_001248.1,1375-1393).
gtttgtgaacggttacaaa

SEQ ID NO: 165438 - DNA, 19 bp, Homo sapiens
  siRNA target sequence for ENTPD3 (NM_001248.1,1410-1428).
ggccccaaatacactttga

SEQ ID NO: 165439 - DNA, 19 bp, Homo sapiens
  siRNA target sequence for ENTPD3 (NM_001248.1,1411-1429).
gccccaaatacactttgaa

SEQ ID NO: 165440 - DNA, 19 bp, Homo sapiens
  siRNA target sequence for ENTPD3 (NM_001248.1,1513-1531).
gatccgtctgcccatagaa

SEQ ID NO: 165441 - DNA, 19 bp, Homo sapiens
  siRNA target sequence for ENTPD3 (NM_001248.1,1547-1565).
ggcaccctcgctttcttca

SEQ ID NO: 165442 - DNA, 19 bp, Homo sapiens
  siRNA target sequence for ENTPD5 (NM_001249.1,375-393).
cagcgccagcaccttgtat

SEQ ID NO: 165443 - DNA, 19 bp, Homo sapiens
  siRNA target sequence for ENTPD5 (NM_001249.1,383-401).
gcaccttgtatggaattat

SEQ ID NO: 165444 - DNA, 19 bp, Homo sapiens
  siRNA target sequence for ENTPD5 (NM_001249.1,414-432).
gagcactggaactcgaatt

SEQ ID NO: 165445 - DNA, 19 bp, Homo sapiens
  siRNA target sequence for ENTPD5 (NM_001249.1,417-435).
cactggaactcgaattcat

SEQ ID NO: 165446 - DNA, 19 bp, Homo sapiens
  siRNA target sequence for ENTPD5 (NM_001249.1,419-437).
ctggaactcgaattcatgt

SEQ ID NO: 165447 - DNA, 19 bp, Homo sapiens
  siRNA target sequence for ENTPD5 (NM_001249.1,421-439).
ggaactcgaattcatgttt

SEQ ID NO: 165448 - DNA, 19 bp, Homo sapiens
  siRNA target sequence for ENTPD5 (NM_001249.1,422-440).
gaactcgaattcatgttta

SEQ ID NO: 165449 - DNA, 19 bp, Homo sapiens
  siRNA target sequence for ENTPD5 (NM_001249.1,464-482).
gacagcttccaattctaga

SEQ ID NO: 165450 - DNA, 19 bp, Homo sapiens
  siRNA target sequence for ENTPD5 (NM_001249.1,521-539).
cttttgtagatcaacctaa

SEQ ID NO: 165451 - DNA, 19 bp, Homo sapiens
  siRNA target sequence for ENTPD5 (NM_001249.1,554-572).
ccgttcaagggctcttaga

SEQ ID NO: 165452 - DNA, 19 bp, Homo sapiens
  siRNA target sequence for ENTPD5 (NM_001249.1,647-665).
gcttactgccagaacacaa

SEQ ID NO: 165453 - DNA, 19 bp, Homo sapiens
  siRNA target sequence for ENTPD5 (NM_001249.1,721-739).
gtaccaaagggcagtgtta

SEQ ID NO: 165454 - DNA, 19 bp, Homo sapiens
  siRNA target sequence for ENTPD5 (NM_001249.1,752-770).
gatccgacgaaggcatatt

SEQ ID NO: 165455 - DNA, 19 bp, Homo sapiens
  siRNA target sequence for ENTPD5 (NM_001249.1,756-774).
cgacgaaggcatattagct

SEQ ID NO: 165456 - DNA, 19 bp, Homo sapiens
  siRNA target sequence for ENTPD5 (NM_001249.1,757-775).
gacgaaggcatattagctt

SEQ ID NO: 165457 - DNA, 19 bp, Homo sapiens
  siRNA target sequence for ENTPD5 (NM_001249.1,772-790).
gcttgggttactgtgaatt

SEQ ID NO: 165458 - DNA, 19 bp, Homo sapiens
  siRNA target sequence for ENTPD5 (NM_001249.1,869-887).
cgttcctgccccagtttga

SEQ ID NO: 165459 - DNA, 19 bp, Homo sapiens
  siRNA target sequence for ENTPD5 (NM_001249.1,947-965).
cttataagctctatacaca

SEQ ID NO: 165460 - DNA, 19 bp, Homo sapiens
  siRNA target sequence for ENTPD5 (NM_001249.1,1173-1191).
ggtggtacgaggaaaactt

SEQ ID NO: 165461 - DNA, 19 bp, Homo sapiens
  siRNA target sequence for ENTPD5 (NM_001249.1,1214-1232).
gaggttccttctatgcttt

SEQ ID NO: 165462 - DNA, 19 bp, Homo sapiens
  siRNA target sequence for ENTPD5 (NM_001249.1,1264-1282).
gacatgattgattatgaaa

SEQ ID NO: 165463 - DNA, 19 bp, Homo sapiens
  siRNA target sequence for ENTPD5 (NM_001249.1,1286-1304).
ggggtattttaaaagttga

SEQ ID NO: 165464 - DNA, 19 bp, Homo sapiens
  siRNA target sequence for ENTPD5 (NM_001249.1,1395-1413).
cacagccctgttaaaggat

SEQ ID NO: 165465 - DNA, 19 bp, Homo sapiens
  siRNA target sequence for ENTPD5 (NM_001249.1,1436-1454).
cagtcttacagctcacaaa

SEQ ID NO: 165466 - DNA, 19 bp, Homo sapiens
  siRNA target sequence for ENTPD5 (NM_001249.1,1438-1456).
gtcttacagctcacaaaga

SEQ ID NO: 165467 - DNA, 19 bp, Homo sapiens
  siRNA target sequence for ENTPD6 (NM_001247.1,169-187).
gaaacttccagaaaaacga

SEQ ID NO: 165468 - DNA, 19 bp, Homo sapiens
  siRNA target sequence for ENTPD6 (NM_001247.1,211-229).
cacggtccttggcaaacaa

SEQ ID NO: 165469 - DNA, 19 bp, Homo sapiens
  siRNA target sequence for ENTPD6 (NM_001247.1,300-318).
gggcgtgttcatctatgtt

SEQ ID NO: 165470 - DNA, 19 bp, Homo sapiens
  siRNA target sequence for ENTPD6 (NM_001247.1,445-463).
gtcttctacgggatcatgt

SEQ ID NO: 165471 - DNA, 19 bp, Homo sapiens
  siRNA target sequence for ENTPD6 (NM_001247.1,447-465).
cttctacgggatcatgttt

SEQ ID NO: 165472 - DNA, 19 bp, Homo sapiens
  siRNA target sequence for ENTPD6 (NM_001247.1,533-551).
cgttaacccacgaaacctt

SEQ ID NO: 165473 - DNA, 19 bp, Homo sapiens
  siRNA target sequence for ENTPD6 (NM_001247.1,704-722).
gcctgttacctggagaaaa

SEQ ID NO: 165474 - DNA, 19 bp, Homo sapiens
  siRNA target sequence for ENTPD6 (NM_001247.1,798-816).
catcatgaacggaacagat

SEQ ID NO: 165475 - DNA, 19 bp, Homo sapiens
  siRNA target sequence for ENTPD6 (NM_001247.1,849-867).
cctgacaggcagcttgaaa

SEQ ID NO: 165476 - DNA, 19 bp, Homo sapiens
  siRNA target sequence for ENTPD6 (NM_001247.1,980-998).
cggcactgcggatgtttaa

SEQ ID NO: 165477 - DNA, 19 bp, Homo sapiens
  siRNA target sequence for ENTPD6 (NM_001247.1,982-1000).
gcactgcggatgtttaaca

SEQ ID NO: 165478 - DNA, 19 bp, Homo sapiens
  siRNA target sequence for ENTPD6 (NM_001247.1,1004-1022).
cctacaagctctattccta

SEQ ID NO: 165479 - DNA, 19 bp, Homo sapiens
  siRNA target sequence for ENTPD6 (NM_001247.1,1269-1287).
gaagcatgtggacttctat

SEQ ID NO: 165480 - DNA, 19 bp, Homo sapiens
  siRNA target sequence for ENTPD6 (NM_001247.1,1316-1334).
ctggtgtgggcctcataga

SEQ ID NO: 165481 - DNA, 19 bp, Homo sapiens
  siRNA target sequence for ENTPD6 (NM_001247.1,1500-1518).
gaagctcactcggaaaatt

SEQ ID NO: 165482 - DNA, 19 bp, Homo sapiens
  siRNA target sequence for ENTPD6 (NM_001247.1,1504-1522).
ctcactcggaaaattgaca

SEQ ID NO: 165483 - DNA, 19 bp, Homo sapiens
  siRNA target sequence for ENTPD6 (NM_001247.1,1506-1524).
cactcggaaaattgacaat

SEQ ID NO: 165484 - DNA, 19 bp, Homo sapiens
  siRNA target sequence for ENTPD6 (NM_001247.1,1508-1526).
ctcggaaaattgacaatgt

SEQ ID NO: 165485 - DNA, 19 bp, Homo sapiens
  siRNA target sequence for FACL2 (NM_001995.2,193-211).
gctgttccggtattttcga

SEQ ID NO: 165486 - DNA, 19 bp, Homo sapiens
  siRNA target sequence for FACL2 (NM_001995.2,194-212).
ctgttccggtattttcgaa

SEQ ID NO: 165487 - DNA, 19 bp, Homo sapiens
  siRNA target sequence for FACL2 (NM_001995.2,390-408).
gaagatccgcactacttga

SEQ ID NO: 165488 - DNA, 19 bp, Homo sapiens
  siRNA target sequence for FACL2 (NM_001995.2,413-431).
gacgagcccttggtgtatt

SEQ ID NO: 165489 - DNA, 19 bp, Homo sapiens
  siRNA target sequence for FACL2 (NM_001995.2,421-439).
cttggtgtatttctatgat

SEQ ID NO: 165490 - DNA, 19 bp, Homo sapiens
  siRNA target sequence for FACL2 (NM_001995.2,437-455).
gatgatgtcacaacattat

SEQ ID NO: 165491 - DNA, 19 bp, Homo sapiens
  siRNA target sequence for FACL2 (NM_001995.2,447-465).
caacattatacgaaggttt

SEQ ID NO: 165492 - DNA, 19 bp, Homo sapiens
  siRNA target sequence for FACL2 (NM_001995.2,462-480).
gtttccagaggggaataca

SEQ ID NO: 165493 - DNA, 19 bp, Homo sapiens
  siRNA target sequence for FACL2 (NM_001995.2,471-489).
ggggaatacaggtgtcaaa

SEQ ID NO: 165494 - DNA, 19 bp, Homo sapiens
  siRNA target sequence for FACL2 (NM_001995.2,473-491).
ggaatacaggtgtcaaata

SEQ ID NO: 165495 - DNA, 19 bp, Homo sapiens
  siRNA target sequence for FACL2 (NM_001995.2,518-536).
ccagaccaaccctatgaat

SEQ ID NO: 165496 - DNA, 19 bp, Homo sapiens
  siRNA target sequence for FACL2 (NM_001995.2,527-545).
ccctatgaatggctttcat

SEQ ID NO: 165497 - DNA, 19 bp, Homo sapiens
  siRNA target sequence for FACL2 (NM_001995.2,648-666).
gacctgagtgggtgattat

SEQ ID NO: 165498 - DNA, 19 bp, Homo sapiens
  siRNA target sequence for FACL2 (NM_001995.2,651-669).
ctgagtgggtgattattga

SEQ ID NO: 165499 - DNA, 19 bp, Homo sapiens
  siRNA target sequence for FACL2 (NM_001995.2,655-673).
gtgggtgattattgaacaa

SEQ ID NO: 165500 - DNA, 19 bp, Homo sapiens
  siRNA target sequence for FACL2 (NM_001995.2,765-783).
ctctggtttttgttgacaa

SEQ ID NO: 165501 - DNA, 19 bp, Homo sapiens
  siRNA target sequence for FACL2 (NM_001995.2,790-808).
gaaggccaaactcttatta

SEQ ID NO: 165502 - DNA, 19 bp, Homo sapiens
  siRNA target sequence for FACL2 (NM_001995.2,802-820).
cttattagagggtgtagaa

SEQ ID NO: 165503 - DNA, 19 bp, Homo sapiens
  siRNA target sequence for FACL2 (NM_001995.2,809-827).
gagggtgtagaaaataagt

SEQ ID NO: 165504 - DNA, 19 bp, Homo sapiens
  siRNA target sequence for FACL2 (NM_001995.2,826-844).
gttaataccaggccttaaa

SEQ ID NO: 165505 - DNA, 19 bp, Homo sapiens
  siRNA target sequence for FACL2 (NM_001995.2,980-998).
gaagatcttgcagtaattt

SEQ ID NO: 165506 - DNA, 19 bp, Homo sapiens
  siRNA target sequence for FACL2 (NM_001995.2,989-1007).
gcagtaatttgtttcacaa

SEQ ID NO: 165507 - DNA, 19 bp, Homo sapiens
  siRNA target sequence for FACL2 (NM_001995.2,1039-1057).
ggtcactcaccgaaacata

SEQ ID NO: 165508 - DNA, 19 bp, Homo sapiens
  siRNA target sequence for FACL2 (NM_001995.2,1054-1072).
catagtgagcgattgttca

SEQ ID NO: 165509 - DNA, 19 bp, Homo sapiens
  siRNA target sequence for FACL2 (NM_001995.2,1060-1078).
gagcgattgttcagctttt

SEQ ID NO: 165510 - DNA, 19 bp, Homo sapiens
  siRNA target sequence for FACL2 (NM_001995.2,1062-1080).
gcgattgttcagcttttgt

SEQ ID NO: 165511 - DNA, 19 bp, Homo sapiens
  siRNA target sequence for FACL2 (NM_001995.2,1106-1124).
ccttgcccagatgatactt

SEQ ID NO: 165512 - DNA, 19 bp, Homo sapiens
  siRNA target sequence for FACL2 (NM_001995.2,1107-1125).
cttgcccagatgatacttt

SEQ ID NO: 165513 - DNA, 19 bp, Homo sapiens
  siRNA target sequence for FACL2 (NM_001995.2,1112-1130).
ccagatgatactttgatat

SEQ ID NO: 165514 - DNA, 19 bp, Homo sapiens
  siRNA target sequence for FACL2 (NM_001995.2,1138-1156).
gcctctcgcccatatgttt

SEQ ID NO: 165515 - DNA, 19 bp, Homo sapiens
  siRNA target sequence for FACL2 (NM_001995.2,1180-1198).
gctgtgtcatggagctaaa

SEQ ID NO: 165516 - DNA, 19 bp, Homo sapiens
  siRNA target sequence for FACL2 (NM_001995.2,1190-1208).
ggagctaaaatcggatttt

SEQ ID NO: 165517 - DNA, 19 bp, Homo sapiens
  siRNA target sequence for FACL2 (NM_001995.2,1191-1209).
gagctaaaatcggattttt

SEQ ID NO: 165518 - DNA, 19 bp, Homo sapiens
  siRNA target sequence for FACL2 (NM_001995.2,1292-1310).
cggatgtttgaccgaattt

SEQ ID NO: 165519 - DNA, 19 bp, Homo sapiens
  siRNA target sequence for FACL2 (NM_001995.2,1293-1311).
ggatgtttgaccgaatttt

SEQ ID NO: 165520 - DNA, 19 bp, Homo sapiens
  siRNA target sequence for FACL2 (NM_001995.2,1386-1404).
gcggcatcatcagaaacaa

SEQ ID NO: 165521 - DNA, 19 bp, Homo sapiens
  siRNA target sequence for FACL2 (NM_001995.2,1533-1551).
gtcagttttatgaaggata

SEQ ID NO: 165522 - DNA, 19 bp, Homo sapiens
  siRNA target sequence for FACL2 (NM_001995.2,1625-1643).
ccgatgccgtgcaatttga

SEQ ID NO: 165523 - DNA, 19 bp, Homo sapiens
  siRNA target sequence for FACL2 (NM_001995.2,1626-1644).
cgatgccgtgcaatttgat

SEQ ID NO: 165524 - DNA, 19 bp, Homo sapiens
  siRNA target sequence for FACL2 (NM_001995.2,1632-1650).
cgtgcaatttgataaaact

SEQ ID NO: 165525 - DNA, 19 bp, Homo sapiens
  siRNA target sequence for FACL2 (NM_001995.2,1635-1653).
gcaatttgataaaacttgt

SEQ ID NO: 165526 - DNA, 19 bp, Homo sapiens
  siRNA target sequence for FACL2 (NM_001995.2,1693-1711).
gggcgaggtgtgtgtgaaa

SEQ ID NO: 165527 - DNA, 19 bp, Homo sapiens
  siRNA target sequence for FACL2 (NM_001995.2,1821-1839).
gcaccttgaaaattatcga

SEQ ID NO: 165528 - DNA, 19 bp, Homo sapiens
  siRNA target sequence for FACL2 (NM_001995.2,2076-2094).
ctatcctcgaagatatggt

SEQ ID NO: 165529 - DNA, 19 bp, Homo sapiens
  siRNA target sequence for FACL2 (NM_001995.2,2146-2164).
cacattgcaccctgaatta

SEQ ID NO: 165530 - DNA, 19 bp, Homo sapiens
  siRNA target sequence for FACL2 (NM_001995.2,2181-2199).
gccttctgactccaacaat

SEQ ID NO: 165531 - DNA, 19 bp, Homo sapiens
  siRNA target sequence for FACL2 (NM_001995.2,2240-2258).
cagatagatgacctctatt

SEQ ID NO: 165532 - DNA, 19 bp, Homo sapiens
  siRNA target sequence for FACL3 (NM_004457.2,151-169).
ccacgtgtcttcaaaacca

SEQ ID NO: 165533 - DNA, 19 bp, Homo sapiens
  siRNA target sequence for FACL3 (NM_004457.2,152-170).
cacgtgtcttcaaaaccat

SEQ ID NO: 165534 - DNA, 19 bp, Homo sapiens
  siRNA target sequence for FACL3 (NM_004457.2,193-211).
catcaaccctattctttta

SEQ ID NO: 165535 - DNA, 19 bp, Homo sapiens
  siRNA target sequence for FACL3 (NM_004457.2,274-292).
ctccgagtcaagacaagaa

SEQ ID NO: 165536 - DNA, 19 bp, Homo sapiens
  siRNA target sequence for FACL3 (NM_004457.2,316-334).
gcctgtaaattcaaaacct

SEQ ID NO: 165537 - DNA, 19 bp, Homo sapiens
  siRNA target sequence for FACL3 (NM_004457.2,332-350).
cctgattctgcatacagat

SEQ ID NO: 165538 - DNA, 19 bp, Homo sapiens
  siRNA target sequence for FACL3 (NM_004457.2,341-359).
gcatacagatctgttaata

SEQ ID NO: 165539 - DNA, 19 bp, Homo sapiens
  siRNA target sequence for FACL3 (NM_004457.2,390-408).
ctggatgtgatactttaga

SEQ ID NO: 165540 - DNA, 19 bp, Homo sapiens
  siRNA target sequence for FACL3 (NM_004457.2,392-410).
ggatgtgatactttagata

SEQ ID NO: 165541 - DNA, 19 bp, Homo sapiens
  siRNA target sequence for FACL3 (NM_004457.2,393-411).
gatgtgatactttagataa

SEQ ID NO: 165542 - DNA, 19 bp, Homo sapiens
  siRNA target sequence for FACL3 (NM_004457.2,398-416).
gatactttagataaagttt

SEQ ID NO: 165543 - DNA, 19 bp, Homo sapiens
  siRNA target sequence for FACL3 (NM_004457.2,454-472).
cttgggaacacgtgaagtt

SEQ ID NO: 165544 - DNA, 19 bp, Homo sapiens
  siRNA target sequence for FACL3 (NM_004457.2,521-539).
gttattcttggacagtata

SEQ ID NO: 165545 - DNA, 19 bp, Homo sapiens
  siRNA target sequence for FACL3 (NM_004457.2,562-580).
ctttgttcgagcctttaat

SEQ ID NO: 165546 - DNA, 19 bp, Homo sapiens
  siRNA target sequence for FACL3 (NM_004457.2,569-587).
cgagcctttaattttggaa

SEQ ID NO: 165547 - DNA, 19 bp, Homo sapiens
  siRNA target sequence for FACL3 (NM_004457.2,665-683).
gctgcacaggcgtgtttta

SEQ ID NO: 165548 - DNA, 19 bp, Homo sapiens
  siRNA target sequence for FACL3 (NM_004457.2,668-686).
gcacaggcgtgttttatgt

SEQ ID NO: 165549 - DNA, 19 bp, Homo sapiens
  siRNA target sequence for FACL3 (NM_004457.2,761-779).
gtgaccaacatcattacta

SEQ ID NO: 165550 - DNA, 19 bp, Homo sapiens
  siRNA target sequence for FACL3 (NM_004457.2,763-781).
gaccaacatcattactagt

SEQ ID NO: 165551 - DNA, 19 bp, Homo sapiens
  siRNA target sequence for FACL3 (NM_004457.2,765-783).
ccaacatcattactagtaa

SEQ ID NO: 165552 - DNA, 19 bp, Homo sapiens
  siRNA target sequence for FACL3 (NM_004457.2,769-787).
catcattactagtaaagaa

SEQ ID NO: 165553 - DNA, 19 bp, Homo sapiens
  siRNA target sequence for FACL3 (NM_004457.2,777-795).
ctagtaaagaactcttaca

SEQ ID NO: 165554 - DNA, 19 bp, Homo sapiens
  siRNA target sequence for FACL3 (NM_004457.2,785-803).
gaactcttacaaacaaagt

SEQ ID NO: 165555 - DNA, 19 bp, Homo sapiens
  siRNA target sequence for FACL3 (NM_004457.2,798-816).
caaagttgaaggatatagt

SEQ ID NO: 165556 - DNA, 19 bp, Homo sapiens
  siRNA target sequence for FACL3 (NM_004457.2,986-1004).
gcagtaatcatgtacacaa

SEQ ID NO: 165557 - DNA, 19 bp, Homo sapiens
  siRNA target sequence for FACL3 (NM_004457.2,1031-1049).
gtcatgatctcacatagta

SEQ ID NO: 165558 - DNA, 19 bp, Homo sapiens
  siRNA target sequence for FACL3 (NM_004457.2,1103-1121).
gaagatgtctacattggat

SEQ ID NO: 165559 - DNA, 19 bp, Homo sapiens
  siRNA target sequence for FACL3 (NM_004457.2,1128-1146).
ctctggcccatgttctaga

SEQ ID NO: 165560 - DNA, 19 bp, Homo sapiens
  siRNA target sequence for FACL3 (NM_004457.2,1130-1148).
ctggcccatgttctagaat

SEQ ID NO: 165561 - DNA, 19 bp, Homo sapiens
  siRNA target sequence for FACL3 (NM_004457.2,1133-1151).
gcccatgttctagaattaa

SEQ ID NO: 165562 - DNA, 19 bp, Homo sapiens
  siRNA target sequence for FACL3 (NM_004457.2,1135-1153).
ccatgttctagaattaagt

SEQ ID NO: 165563 - DNA, 19 bp, Homo sapiens
  siRNA target sequence for FACL3 (NM_004457.2,1175-1193).
cacggatgccgcattggtt

SEQ ID NO: 165564 - DNA, 19 bp, Homo sapiens
  siRNA target sequence for FACL3 (NM_004457.2,1217-1235).
gatcagtcttcaaaaatta

SEQ ID NO: 165565 - DNA, 19 bp, Homo sapiens
  siRNA target sequence for FACL3 (NM_004457.2,1250-1268).
ggggatacatccatgttga

SEQ ID NO: 165566 - DNA, 19 bp, Homo sapiens
  siRNA target sequence for FACL3 (NM_004457.2,1251-1269).
gggatacatccatgttgaa

SEQ ID NO: 165567 - DNA, 19 bp, Homo sapiens
  siRNA target sequence for FACL3 (NM_004457.2,1252-1270).
ggatacatccatgttgaaa

SEQ ID NO: 165568 - DNA, 19 bp, Homo sapiens
  siRNA target sequence for FACL3 (NM_004457.2,1300-1318).
catggatcggatctacaaa

SEQ ID NO: 165569 - DNA, 19 bp, Homo sapiens
  siRNA target sequence for FACL3 (NM_004457.2,1307-1325).
cggatctacaaaaatgtca

SEQ ID NO: 165570 - DNA, 19 bp, Homo sapiens
  siRNA target sequence for FACL3 (NM_004457.2,1308-1326).
ggatctacaaaaatgtcat

SEQ ID NO: 165571 - DNA, 19 bp, Homo sapiens
  siRNA target sequence for FACL3 (NM_004457.2,1334-1352).
gtcagtgaaatgagtagtt

SEQ ID NO: 165572 - DNA, 19 bp, Homo sapiens
  siRNA target sequence for FACL3 (NM_004457.2,1345-1363).
gagtagttttcaacgtaat

SEQ ID NO: 165573 - DNA, 19 bp, Homo sapiens
  siRNA target sequence for FACL3 (NM_004457.2,1347-1365).
gtagttttcaacgtaatct

SEQ ID NO: 165574 - DNA, 19 bp, Homo sapiens
  siRNA target sequence for FACL3 (NM_004457.2,1350-1368).
gttttcaacgtaatctgtt

SEQ ID NO: 165575 - DNA, 19 bp, Homo sapiens
  siRNA target sequence for FACL3 (NM_004457.2,1366-1384).
gtttattctggcctataat

SEQ ID NO: 165576 - DNA, 19 bp, Homo sapiens
  siRNA target sequence for FACL3 (NM_004457.2,1373-1391).
ctggcctataattacaaaa

SEQ ID NO: 165577 - DNA, 19 bp, Homo sapiens
  siRNA target sequence for FACL3 (NM_004457.2,1399-1417).
gatttcaaaaggacgtaat

SEQ ID NO: 165578 - DNA, 19 bp, Homo sapiens
  siRNA target sequence for FACL3 (NM_004457.2,1424-1442).
ctgtgcgacagctttgttt

SEQ ID NO: 165579 - DNA, 19 bp, Homo sapiens
  siRNA target sequence for FACL3 (NM_004457.2,1458-1476).
gcttgctagggggaaatat

SEQ ID NO: 165580 - DNA, 19 bp, Homo sapiens
  siRNA target sequence for FACL3 (NM_004457.2,1459-1477).
cttgctagggggaaatatt

SEQ ID NO: 165581 - DNA, 19 bp, Homo sapiens
  siRNA target sequence for FACL3 (NM_004457.2,1462-1480).
gctagggggaaatattcgt

SEQ ID NO: 165582 - DNA, 19 bp, Homo sapiens
  siRNA target sequence for FACL3 (NM_004457.2,1512-1530).
caaccacgcagcgattcat

SEQ ID NO: 165583 - DNA, 19 bp, Homo sapiens
  siRNA target sequence for FACL3 (NM_004457.2,1515-1533).
ccacgcagcgattcatgaa

SEQ ID NO: 165584 - DNA, 19 bp, Homo sapiens
  siRNA target sequence for FACL3 (NM_004457.2,1518-1536).
cgcagcgattcatgaacat

SEQ ID NO: 165585 - DNA, 19 bp, Homo sapiens
  siRNA target sequence for FACL3 (NM_004457.2,1520-1538).
cagcgattcatgaacatct

SEQ ID NO: 165586 - DNA, 19 bp, Homo sapiens
  siRNA target sequence for FACL3 (NM_004457.2,1523-1541).
cgattcatgaacatctgtt

SEQ ID NO: 165587 - DNA, 19 bp, Homo sapiens
  siRNA target sequence for FACL3 (NM_004457.2,1562-1580).
ggatacgggctcactgaat

SEQ ID NO: 165588 - DNA, 19 bp, Homo sapiens
  siRNA target sequence for FACL3 (NM_004457.2,1603-1621).
cgaagtgtgggactacaat

SEQ ID NO: 165589 - DNA, 19 bp, Homo sapiens
  siRNA target sequence for FACL3 (NM_004457.2,1604-1622).
gaagtgtgggactacaata

SEQ ID NO: 165590 - DNA, 19 bp, Homo sapiens
  siRNA target sequence for FACL3 (NM_004457.2,1678-1696).
ggaaggtggatactttaat

SEQ ID NO: 165591 - DNA, 19 bp, Homo sapiens
  siRNA target sequence for FACL3 (NM_004457.2,1679-1697).
gaaggtggatactttaata

SEQ ID NO: 165592 - DNA, 19 bp, Homo sapiens
  siRNA target sequence for FACL3 (NM_004457.2,1683-1701).
gtggatactttaatactga

SEQ ID NO: 165593 - DNA, 19 bp, Homo sapiens
  siRNA target sequence for FACL3 (NM_004457.2,1685-1703).
ggatactttaatactgata

SEQ ID NO: 165594 - DNA, 19 bp, Homo sapiens
  siRNA target sequence for FACL3 (NM_004457.2,1713-1731).
ccaggggtgaaattcttat

SEQ ID NO: 165595 - DNA, 19 bp, Homo sapiens
  siRNA target sequence for FACL3 (NM_004457.2,1747-1765).
gacaatggggtactacaaa

SEQ ID NO: 165596 - DNA, 19 bp, Homo sapiens
  siRNA target sequence for FACL3 (NM_004457.2,1749-1767).
caatggggtactacaaaaa

SEQ ID NO: 165597 - DNA, 19 bp, Homo sapiens
  siRNA target sequence for FACL3 (NM_004457.2,1819-1837).
gctctgtactggggatatt

SEQ ID NO: 165598 - DNA, 19 bp, Homo sapiens
  siRNA target sequence for FACL3 (NM_004457.2,1822-1840).
ctgtactggggatattgga

SEQ ID NO: 165599 - DNA, 19 bp, Homo sapiens
  siRNA target sequence for FACL3 (NM_004457.2,1830-1848).
gggatattggagagtttga

SEQ ID NO: 165600 - DNA, 19 bp, Homo sapiens
  siRNA target sequence for FACL3 (NM_004457.2,1847-1865).
gaacccgatggatgcttaa

SEQ ID NO: 165601 - DNA, 19 bp, Homo sapiens
  siRNA target sequence for FACL3 (NM_004457.2,1857-1875).
gatgcttaaagattattga

SEQ ID NO: 165602 - DNA, 19 bp, Homo sapiens
  siRNA target sequence for FACL3 (NM_004457.2,1877-1895).
cgtaaaaaggaccttgtaa

SEQ ID NO: 165603 - DNA, 19 bp, Homo sapiens
  siRNA target sequence for FACL3 (NM_004457.2,1945-1963).
gaagaatcttccactagta

SEQ ID NO: 165604 - DNA, 19 bp, Homo sapiens
  siRNA target sequence for FACL3 (NM_004457.2,1948-1966).
gaatcttccactagtagat

SEQ ID NO: 165605 - DNA, 19 bp, Homo sapiens
  siRNA target sequence for FACL3 (NM_004457.2,1952-1970).
cttccactagtagataaca

SEQ ID NO: 165606 - DNA, 19 bp, Homo sapiens
  siRNA target sequence for FACL3 (NM_004457.2,1955-1973).
ccactagtagataacattt

SEQ ID NO: 165607 - DNA, 19 bp, Homo sapiens
  siRNA target sequence for FACL3 (NM_004457.2,1974-1992).
gtgcatatgcaaacagtta

SEQ ID NO: 165608 - DNA, 19 bp, Homo sapiens
  siRNA target sequence for FACL3 (NM_004457.2,1977-1995).
catatgcaaacagttatca

SEQ ID NO: 165609 - DNA, 19 bp, Homo sapiens
  siRNA target sequence for FACL3 (NM_004457.2,2040-2058).
ctgaactagctcgaaagaa

SEQ ID NO: 165610 - DNA, 19 bp, Homo sapiens
  siRNA target sequence for FACL3 (NM_004457.2,2274-2292).
cggacattgagcgaatgta

SEQ ID NO: 165611 - DNA, 19 bp, Homo sapiens
  siRNA target sequence for FACL4 (NM_004458.1,389-407).
cgactcactagctgtaata

SEQ ID NO: 165612 - DNA, 19 bp, Homo sapiens
  siRNA target sequence for FACL4 (NM_004458.1,394-412).
cactagctgtaatagacat

SEQ ID NO: 165613 - DNA, 19 bp, Homo sapiens
  siRNA target sequence for FACL4 (NM_004458.1,446-464).
ccatgctgtatccaagttt

SEQ ID NO: 165614 - DNA, 19 bp, Homo sapiens
  siRNA target sequence for FACL4 (NM_004458.1,483-501).
gggaccagggaaatcctaa

SEQ ID NO: 165615 - DNA, 19 bp, Homo sapiens
  siRNA target sequence for FACL4 (NM_004458.1,487-505).
ccagggaaatcctaagtga

SEQ ID NO: 165616 - DNA, 19 bp, Homo sapiens
  siRNA target sequence for FACL4 (NM_004458.1,488-506).
cagggaaatcctaagtgaa

SEQ ID NO: 165617 - DNA, 19 bp, Homo sapiens
  siRNA target sequence for FACL4 (NM_004458.1,545-563).
gttaattcttgggaattat

SEQ ID NO: 165618 - DNA, 19 bp, Homo sapiens
  siRNA target sequence for FACL4 (NM_004458.1,585-603).
gtgaatcgcagagtgaata

SEQ ID NO: 165619 - DNA, 19 bp, Homo sapiens
  siRNA target sequence for FACL4 (NM_004458.1,691-709).
cagcacagacctgctttaa

SEQ ID NO: 165620 - DNA, 19 bp, Homo sapiens
  siRNA target sequence for FACL4 (NM_004458.1,694-712).
cacagacctgctttaagta

SEQ ID NO: 165621 - DNA, 19 bp, Homo sapiens
  siRNA target sequence for FACL4 (NM_004458.1,700-718).
cctgctttaagtacaactt

SEQ ID NO: 165622 - DNA, 19 bp, Homo sapiens
  siRNA target sequence for FACL4 (NM_004458.1,701-719).
ctgctttaagtacaacttt

SEQ ID NO: 165623 - DNA, 19 bp, Homo sapiens
  siRNA target sequence for FACL4 (NM_004458.1,781-799).
ctgaggcttcctatctgat

SEQ ID NO: 165624 - DNA, 19 bp, Homo sapiens
  siRNA target sequence for FACL4 (NM_004458.1,783-801).
gaggcttcctatctgatta

SEQ ID NO: 165625 - DNA, 19 bp, Homo sapiens
  siRNA target sequence for FACL4 (NM_004458.1,786-804).
gcttcctatctgattacca

SEQ ID NO: 165626 - DNA, 19 bp, Homo sapiens
  siRNA target sequence for FACL4 (NM_004458.1,816-834).
ctggaaagtaaacttaaga

SEQ ID NO: 165627 - DNA, 19 bp, Homo sapiens
  siRNA target sequence for FACL4 (NM_004458.1,908-926).
ccctgaaggatttgagatt

SEQ ID NO: 165628 - DNA, 19 bp, Homo sapiens
  siRNA target sequence for FACL4 (NM_004458.1,921-939).
gagattcacagcatgcaat

SEQ ID NO: 165629 - DNA, 19 bp, Homo sapiens
  siRNA target sequence for FACL4 (NM_004458.1,929-947).
cagcatgcaatcagtagaa

SEQ ID NO: 165630 - DNA, 19 bp, Homo sapiens
  siRNA target sequence for FACL4 (NM_004458.1,955-973).
gatctaacccagaaaactt

SEQ ID NO: 165631 - DNA, 19 bp, Homo sapiens
  siRNA target sequence for FACL4 (NM_004458.1,974-992).
gggcattcctccaagtaga

SEQ ID NO: 165632 - DNA, 19 bp, Homo sapiens
  siRNA target sequence for FACL4 (NM_004458.1,1005-1023).
gacatggccattgttatgt

SEQ ID NO: 165633 - DNA, 19 bp, Homo sapiens
  siRNA target sequence for FACL4 (NM_004458.1,1011-1029).
gccattgttatgtatacta

SEQ ID NO: 165634 - DNA, 19 bp, Homo sapiens
  siRNA target sequence for FACL4 (NM_004458.1,1013-1031).
cattgttatgtatactagt

SEQ ID NO: 165635 - DNA, 19 bp, Homo sapiens
  siRNA target sequence for FACL4 (NM_004458.1,1022-1040).
gtatactagtggttctact

SEQ ID NO: 165636 - DNA, 19 bp, Homo sapiens
  siRNA target sequence for FACL4 (NM_004458.1,1045-1063).
gacctaagggagtgatgat

SEQ ID NO: 165637 - DNA, 19 bp, Homo sapiens
  siRNA target sequence for FACL4 (NM_004458.1,1053-1071).
ggagtgatgatgcatcata

SEQ ID NO: 165638 - DNA, 19 bp, Homo sapiens
  siRNA target sequence for FACL4 (NM_004458.1,1058-1076).
gatgatgcatcatagcaat

SEQ ID NO: 165639 - DNA, 19 bp, Homo sapiens
  siRNA target sequence for FACL4 (NM_004458.1,1064-1082).
gcatcatagcaatttgata

SEQ ID NO: 165640 - DNA, 19 bp, Homo sapiens
  siRNA target sequence for FACL4 (NM_004458.1,1121-1139).
gggaccgaaggacacatat

SEQ ID NO: 165641 - DNA, 19 bp, Homo sapiens
  siRNA target sequence for FACL4 (NM_004458.1,1123-1141).
gaccgaaggacacatatat

SEQ ID NO: 165642 - DNA, 19 bp, Homo sapiens
  siRNA target sequence for FACL4 (NM_004458.1,1170-1188).
gaactgacagcagagatat

SEQ ID NO: 165643 - DNA, 19 bp, Homo sapiens
  siRNA target sequence for FACL4 (NM_004458.1,1184-1202).
gatatcttgctttacctat

SEQ ID NO: 165644 - DNA, 19 bp, Homo sapiens
  siRNA target sequence for FACL4 (NM_004458.1,1205-1223).
ctgcaggattggatattct

SEQ ID NO: 165645 - DNA, 19 bp, Homo sapiens
  siRNA target sequence for FACL4 (NM_004458.1,1242-1260).
gaccagtccagcaaaatta

SEQ ID NO: 165646 - DNA, 19 bp, Homo sapiens
  siRNA target sequence for FACL4 (NM_004458.1,1276-1294).
gagactgtactgtactgaa

SEQ ID NO: 165647 - DNA, 19 bp, Homo sapiens
  siRNA target sequence for FACL4 (NM_004458.1,1287-1305).
gtactgaagcccacactta

SEQ ID NO: 165648 - DNA, 19 bp, Homo sapiens
  siRNA target sequence for FACL4 (NM_004458.1,1355-1373).
caaagtccaagagatgaat

SEQ ID NO: 165649 - DNA, 19 bp, Homo sapiens
  siRNA target sequence for FACL4 (NM_004458.1,1370-1388).
gaattatattcagaaaact

SEQ ID NO: 165650 - DNA, 19 bp, Homo sapiens
  siRNA target sequence for FACL4 (NM_004458.1,1391-1409).
gttcaagatagggtatgat

SEQ ID NO: 165651 - DNA, 19 bp, Homo sapiens
  siRNA target sequence for FACL4 (NM_004458.1,1397-1415).
gatagggtatgattacaaa

SEQ ID NO: 165652 - DNA, 19 bp, Homo sapiens
  siRNA target sequence for FACL4 (NM_004458.1,1402-1420).
ggtatgattacaaattgga

SEQ ID NO: 165653 - DNA, 19 bp, Homo sapiens
  siRNA target sequence for FACL4 (NM_004458.1,1443-1461).
gcacctctttgcaatctgt

SEQ ID NO: 165654 - DNA, 19 bp, Homo sapiens
  siRNA target sequence for FACL4 (NM_004458.1,1537-1555).
ctcagacacaccgattcat

SEQ ID NO: 165655 - DNA, 19 bp, Homo sapiens
  siRNA target sequence for FACL4 (NM_004458.1,1539-1557).
cagacacaccgattcatga

SEQ ID NO: 165656 - DNA, 19 bp, Homo sapiens
  siRNA target sequence for FACL4 (NM_004458.1,1541-1559).
gacacaccgattcatgaat

SEQ ID NO: 165657 - DNA, 19 bp, Homo sapiens
  siRNA target sequence for FACL4 (NM_004458.1,1543-1561).
cacaccgattcatgaatgt

SEQ ID NO: 165658 - DNA, 19 bp, Homo sapiens
  siRNA target sequence for FACL4 (NM_004458.1,1545-1563).
caccgattcatgaatgtct

SEQ ID NO: 165659 - DNA, 19 bp, Homo sapiens
  siRNA target sequence for FACL4 (NM_004458.1,1617-1635).
gggacagttactgaagtaa

SEQ ID NO: 165660 - DNA, 19 bp, Homo sapiens
  siRNA target sequence for FACL4 (NM_004458.1,1654-1672).
gagttggagcacctcttat

SEQ ID NO: 165661 - DNA, 19 bp, Homo sapiens
  siRNA target sequence for FACL4 (NM_004458.1,1656-1674).
gttggagcacctcttattt

SEQ ID NO: 165662 - DNA, 19 bp, Homo sapiens
  siRNA target sequence for FACL4 (NM_004458.1,1665-1683).
cctcttatttgctgtgaaa

SEQ ID NO: 165663 - DNA, 19 bp, Homo sapiens
  siRNA target sequence for FACL4 (NM_004458.1,1704-1722).
gaaggcggttatacaatta

SEQ ID NO: 165664 - DNA, 19 bp, Homo sapiens
  siRNA target sequence for FACL4 (NM_004458.1,1708-1726).
gcggttatacaattaatga

SEQ ID NO: 165665 - DNA, 19 bp, Homo sapiens
  siRNA target sequence for FACL4 (NM_004458.1,1710-1728).
ggttatacaattaatgaca

SEQ ID NO: 165666 - DNA, 19 bp, Homo sapiens
  siRNA target sequence for FACL4 (NM_004458.1,1736-1754).
ccccagaggtgaaatcgta

SEQ ID NO: 165667 - DNA, 19 bp, Homo sapiens
  siRNA target sequence for FACL4 (NM_004458.1,1737-1755).
cccagaggtgaaatcgtaa

SEQ ID NO: 165668 - DNA, 19 bp, Homo sapiens
  siRNA target sequence for FACL4 (NM_004458.1,1739-1757).
cagaggtgaaatcgtaatt

SEQ ID NO: 165669 - DNA, 19 bp, Homo sapiens
  siRNA target sequence for FACL4 (NM_004458.1,1843-1861).
ggttttgcactggtgatat

SEQ ID NO: 165670 - DNA, 19 bp, Homo sapiens
  siRNA target sequence for FACL4 (NM_004458.1,1871-1889).
ccatcccgatggatgttta

SEQ ID NO: 165671 - DNA, 19 bp, Homo sapiens
  siRNA target sequence for FACL4 (NM_004458.1,1892-1910).
gattatagatcgtaagaaa

SEQ ID NO: 165672 - DNA, 19 bp, Homo sapiens
  siRNA target sequence for FACL4 (NM_004458.1,1907-1925).
gaaagatctagtgaagtta

SEQ ID NO: 165673 - DNA, 19 bp, Homo sapiens
  siRNA target sequence for FACL4 (NM_004458.1,1922-1940).
gttacaagcaggagagtat

SEQ ID NO: 165674 - DNA, 19 bp, Homo sapiens
  siRNA target sequence for FACL4 (NM_004458.1,1970-1988).
gaagaattgtccacttatt

SEQ ID NO: 165675 - DNA, 19 bp, Homo sapiens
  siRNA target sequence for FACL4 (NM_004458.1,1978-1996).
gtccacttattgacaacat

SEQ ID NO: 165676 - DNA, 19 bp, Homo sapiens
  siRNA target sequence for FACL4 (NM_004458.1,2023-2041).
cctatgtgatcagttttgt

SEQ ID NO: 165677 - DNA, 19 bp, Homo sapiens
  siRNA target sequence for FACL4 (NM_004458.1,2094-2112).
ggaacttgggttgatatct

SEQ ID NO: 165678 - DNA, 19 bp, Homo sapiens
  siRNA target sequence for FACL4 (NM_004458.1,2102-2120).
ggttgatatctgcaataat

SEQ ID NO: 165679 - DNA, 19 bp, Homo sapiens
  siRNA target sequence for FACL4 (NM_004458.1,2180-2198).
ggagcgatttgaaattcca

SEQ ID NO: 165680 - DNA, 19 bp, Homo sapiens
  siRNA target sequence for FACL4 (NM_004458.1,2181-2199).
gagcgatttgaaattccaa

SEQ ID NO: 165681 - DNA, 19 bp, Homo sapiens
  siRNA target sequence for FACL4 (NM_004458.1,2196-2214).
ccaatcaaggttcgattaa

SEQ ID NO: 165682 - DNA, 19 bp, Homo sapiens
  siRNA target sequence for FACL4 (NM_004458.1,2284-2302).
ggaaccattacctcaaaga

SEQ ID NO: 165683 - DNA, 19 bp, Homo sapiens
  siRNA target sequence for FACL4 (NM_022977.1,546-564).
cctgtccacttgttaataa

SEQ ID NO: 165684 - DNA, 19 bp, Homo sapiens
  siRNA target sequence for FACL4 (NM_022977.1,549-567).
gtccacttgttaataacaa

SEQ ID NO: 165685 - DNA, 19 bp, Homo sapiens
  siRNA target sequence for FACL4 (NM_022977.1,551-569).
ccacttgttaataacaata

SEQ ID NO: 165686 - DNA, 19 bp, Homo sapiens
  siRNA target sequence for FACL4 (NM_022977.1,572-590).
cagtgcccttatatttatt

SEQ ID NO: 165687 - DNA, 19 bp, Homo sapiens
  siRNA target sequence for FACL4 (NM_022977.1,576-594).
gcccttatatttattccat

SEQ ID NO: 165688 - DNA, 19 bp, Homo sapiens
  siRNA target sequence for FACL4 (NM_022977.1,626-644).
cgctatggcaaagagaata

SEQ ID NO: 165689 - DNA, 19 bp, Homo sapiens
  siRNA target sequence for FACL5 (NM_016234.2,496-514).
cagatgccaagactatgta

SEQ ID NO: 165690 - DNA, 19 bp, Homo sapiens
  siRNA target sequence for FACL5 (NM_016234.2,552-570).
gggccctgcttgggatata

SEQ ID NO: 165691 - DNA, 19 bp, Homo sapiens
  siRNA target sequence for FACL5 (NM_016234.2,560-578).
cttgggatatagaaaacca

SEQ ID NO: 165692 - DNA, 19 bp, Homo sapiens
  siRNA target sequence for FACL5 (NM_016234.2,641-659).
ctgtctcttgcataaaggt

SEQ ID NO: 165693 - DNA, 19 bp, Homo sapiens
  siRNA target sequence for FACL5 (NM_016234.2,645-663).
ctcttgcataaaggttata

SEQ ID NO: 165694 - DNA, 19 bp, Homo sapiens
  siRNA target sequence for FACL5 (NM_016234.2,732-750).
gcttgttacacgtactcta

SEQ ID NO: 165695 - DNA, 19 bp, Homo sapiens
  siRNA target sequence for FACL5 (NM_016234.2,733-751).
cttgttacacgtactctat

SEQ ID NO: 165696 - DNA, 19 bp, Homo sapiens
  siRNA target sequence for FACL5 (NM_016234.2,752-770).
ggtagctgtacctctgtat

SEQ ID NO: 165697 - DNA, 19 bp, Homo sapiens
  siRNA target sequence for FACL5 (NM_016234.2,756-774).
gctgtacctctgtatgaca

SEQ ID NO: 165698 - DNA, 19 bp, Homo sapiens
  siRNA target sequence for FACL5 (NM_016234.2,783-801).
ccagaagccatcgtacata

SEQ ID NO: 165699 - DNA, 19 bp, Homo sapiens
  siRNA target sequence for FACL5 (NM_016234.2,789-807).
gccatcgtacatattgtca

SEQ ID NO: 165700 - DNA, 19 bp, Homo sapiens
  siRNA target sequence for FACL5 (NM_016234.2,857-875).
ggtgctgatagggaatgta

SEQ ID NO: 165701 - DNA, 19 bp, Homo sapiens
  siRNA target sequence for FACL5 (NM_016234.2,892-910).
cgagcctgaaggtgatcat

SEQ ID NO: 165702 - DNA, 19 bp, Homo sapiens
  siRNA target sequence for FACL5 (NM_016234.2,897-915).
ctgaaggtgatcatcctta

SEQ ID NO: 165703 - DNA, 19 bp, Homo sapiens
  siRNA target sequence for FACL5 (NM_016234.2,911-929).
ccttatggacccctttgat

SEQ ID NO: 165704 - DNA, 19 bp, Homo sapiens
  siRNA target sequence for FACL5 (NM_016234.2,956-974).
gagtggaattgagatctta

SEQ ID NO: 165705 - DNA, 19 bp, Homo sapiens
  siRNA target sequence for FACL5 (NM_016234.2,968-986).
gatcttatccctatatgat

SEQ ID NO: 165706 - DNA, 19 bp, Homo sapiens
  siRNA target sequence for FACL5 (NM_016234.2,1092-1110).
gccatgataacccatcaaa

SEQ ID NO: 165707 - DNA, 19 bp, Homo sapiens
  siRNA target sequence for FACL5 (NM_016234.2,1196-1214).
ccctctggctcatatgttt

SEQ ID NO: 165708 - DNA, 19 bp, Homo sapiens
  siRNA target sequence for FACL5 (NM_016234.2,1246-1264).
gtggagccagagttggatt

SEQ ID NO: 165709 - DNA, 19 bp, Homo sapiens
  siRNA target sequence for FACL5 (NM_016234.2,1249-1267).
gagccagagttggattctt

SEQ ID NO: 165710 - DNA, 19 bp, Homo sapiens
  siRNA target sequence for FACL5 (NM_016234.2,1330-1348).
cggtgcctcgactccttaa

SEQ ID NO: 165711 - DNA, 19 bp, Homo sapiens
  siRNA target sequence for FACL5 (NM_016234.2,1332-1350).
gtgcctcgactccttaaca

SEQ ID NO: 165712 - DNA, 19 bp, Homo sapiens
  siRNA target sequence for FACL5 (NM_016234.2,1344-1362).
cttaacaggatctacgata

SEQ ID NO: 165713 - DNA, 19 bp, Homo sapiens
  siRNA target sequence for FACL5 (NM_016234.2,1349-1367).
caggatctacgataaggta

SEQ ID NO: 165714 - DNA, 19 bp, Homo sapiens
  siRNA target sequence for FACL5 (NM_016234.2,1355-1373).
ctacgataaggtacaaaat

SEQ ID NO: 165715 - DNA, 19 bp, Homo sapiens
  siRNA target sequence for FACL5 (NM_016234.2,1437-1455).
cttcaaaagggtatcatca

SEQ ID NO: 165716 - DNA, 19 bp, Homo sapiens
  siRNA target sequence for FACL5 (NM_016234.2,1510-1528).
gcggaagggttcgtgtaat

SEQ ID NO: 165717 - DNA, 19 bp, Homo sapiens
  siRNA target sequence for FACL5 (NM_016234.2,1511-1529).
cggaagggttcgtgtaatt

SEQ ID NO: 165718 - DNA, 19 bp, Homo sapiens
  siRNA target sequence for FACL5 (NM_016234.2,1591-1609).
gtcaggtgtatgaagctta

SEQ ID NO: 165719 - DNA, 19 bp, Homo sapiens
  siRNA target sequence for FACL5 (NM_016234.2,1605-1623).
gcttatggtcaaacagaat

SEQ ID NO: 165720 - DNA, 19 bp, Homo sapiens
  siRNA target sequence for FACL5 (NM_016234.2,1680-1698).
gtgcccctggcttgcaatt

SEQ ID NO: 165721 - DNA, 19 bp, Homo sapiens
  siRNA target sequence for FACL5 (NM_016234.2,1718-1736).
ggctgacatgaactacttt

SEQ ID NO: 165722 - DNA, 19 bp, Homo sapiens
  siRNA target sequence for FACL5 (NM_016234.2,1895-1913).
cgaccgtaaaaagaacatt

SEQ ID NO: 165723 - DNA, 19 bp, Homo sapiens
  siRNA target sequence for FACL5 (NM_016234.2,2009-2027).
gagcttacggtcatcctta

SEQ ID NO: 165724 - DNA, 19 bp, Homo sapiens
  siRNA target sequence for FACL5 (NM_016234.2,2012-2030).
cttacggtcatccttagta

SEQ ID NO: 165725 - DNA, 19 bp, Homo sapiens
  siRNA target sequence for FACL5 (NM_016234.2,2272-2290).
gagagctttccaaatactt

SEQ ID NO: 165726 - DNA, 19 bp, Homo sapiens
  siRNA target sequence for FACL6 (NM_015256.1,161-179).
gtgacttggaacagttttt

SEQ ID NO: 165727 - DNA, 19 bp, Homo sapiens
  siRNA target sequence for FACL6 (NM_015256.1,354-372).
gctacttacccactactat

SEQ ID NO: 165728 - DNA, 19 bp, Homo sapiens
  siRNA target sequence for FACL6 (NM_015256.1,492-510).
ggccgacagggctgaattt

SEQ ID NO: 165729 - DNA, 19 bp, Homo sapiens
  siRNA target sequence for FACL6 (NM_015256.1,528-546).
ccagcacaattgtaaagca

SEQ ID NO: 165730 - DNA, 19 bp, Homo sapiens
  siRNA target sequence for FACL6 (NM_015256.1,529-547).
cagcacaattgtaaagcat

SEQ ID NO: 165731 - DNA, 19 bp, Homo sapiens
  siRNA target sequence for FACL6 (NM_015256.1,544-562).
gcatgcactgatcagttta

SEQ ID NO: 165732 - DNA, 19 bp, Homo sapiens
  siRNA target sequence for FACL6 (NM_015256.1,549-567).
cactgatcagtttattggt

SEQ ID NO: 165733 - DNA, 19 bp, Homo sapiens
  siRNA target sequence for FACL6 (NM_015256.1,610-628).
gcctgctacacatattcca

SEQ ID NO: 165734 - DNA, 19 bp, Homo sapiens
  siRNA target sequence for FACL6 (NM_015256.1,634-652).
gtggtcccgctctatgaca

SEQ ID NO: 165735 - DNA, 19 bp, Homo sapiens
  siRNA target sequence for FACL6 (NM_015256.1,664-682).
ggggctatccgctacatca

SEQ ID NO: 165736 - DNA, 19 bp, Homo sapiens
  siRNA target sequence for FACL6 (NM_015256.1,665-683).
gggctatccgctacatcat

SEQ ID NO: 165737 - DNA, 19 bp, Homo sapiens
  siRNA target sequence for FACL6 (NM_015256.1,668-686).
ctatccgctacatcatcaa

SEQ ID NO: 165738 - DNA, 19 bp, Homo sapiens
  siRNA target sequence for FACL6 (NM_015256.1,672-690).
ccgctacatcatcaataca

SEQ ID NO: 165739 - DNA, 19 bp, Homo sapiens
  siRNA target sequence for FACL6 (NM_015256.1,870-888).
ggactgtggccaagagaat

SEQ ID NO: 165740 - DNA, 19 bp, Homo sapiens
  siRNA target sequence for FACL6 (NM_015256.1,951-969).
gacagggaacccaaaaggt

SEQ ID NO: 165741 - DNA, 19 bp, Homo sapiens
  siRNA target sequence for FACL6 (NM_015256.1,1053-1071).
ggatgtgcacatttcctat

SEQ ID NO: 165742 - DNA, 19 bp, Homo sapiens
  siRNA target sequence for FACL6 (NM_015256.1,1054-1072).
gatgtgcacatttcctatt

SEQ ID NO: 165743 - DNA, 19 bp, Homo sapiens
  siRNA target sequence for FACL6 (NM_015256.1,1102-1120).
gtgcagtctgtcgtctatt

SEQ ID NO: 165744 - DNA, 19 bp, Homo sapiens
  siRNA target sequence for FACL6 (NM_015256.1,1245-1263).
cttcagccaggcaaacaca

SEQ ID NO: 165745 - DNA, 19 bp, Homo sapiens
  siRNA target sequence for FACL6 (NM_015256.1,1391-1409).
ggtgtgtgcggatgattgt

SEQ ID NO: 165746 - DNA, 19 bp, Homo sapiens
  siRNA target sequence for FACL6 (NM_015256.1,1460-1478).
ctctagggtgccaggttta

SEQ ID NO: 165747 - DNA, 19 bp, Homo sapiens
  siRNA target sequence for FACL6 (NM_015256.1,1469-1487).
gccaggtttatgaaggtta

SEQ ID NO: 165748 - DNA, 19 bp, Homo sapiens
  siRNA target sequence for FACL6 (NM_015256.1,1746-1764).
gctgccggcaggaactctt

SEQ ID NO: 165749 - DNA, 19 bp, Homo sapiens
  siRNA target sequence for FACL6 (NM_015256.1,1747-1765).
ctgccggcaggaactctta

SEQ ID NO: 165750 - DNA, 19 bp, Homo sapiens
  siRNA target sequence for FACL6 (NM_015256.1,1749-1767).
gccggcaggaactcttaaa

SEQ ID NO: 165751 - DNA, 19 bp, Homo sapiens
  siRNA target sequence for FACL6 (NM_015256.1,1750-1768).
ccggcaggaactcttaaaa

SEQ ID NO: 165752 - DNA, 19 bp, Homo sapiens
  siRNA target sequence for FACL6 (NM_015256.1,1751-1769).
cggcaggaactcttaaaat

SEQ ID NO: 165753 - DNA, 19 bp, Homo sapiens
  siRNA target sequence for FACL6 (NM_015256.1,1819-1837).
gcacccgagaagattgaga

SEQ ID NO: 165754 - DNA, 19 bp, Homo sapiens
  siRNA target sequence for FACL6 (NM_015256.1,1820-1838).
cacccgagaagattgagaa

SEQ ID NO: 165755 - DNA, 19 bp, Homo sapiens
  siRNA target sequence for FACL6 (NM_015256.1,1859-1877).
ctgtggcgcaaatctatgt

SEQ ID NO: 165756 - DNA, 19 bp, Homo sapiens
  siRNA target sequence for FACL6 (NM_015256.1,1876-1894).
gtccatggggacagcttaa

SEQ ID NO: 165757 - DNA, 19 bp, Homo sapiens
  siRNA target sequence for FACL6 (NM_015256.1,1889-1907).
gcttaaaggcctttttggt

SEQ ID NO: 165758 - DNA, 19 bp, Homo sapiens
  siRNA target sequence for FACL6 (NM_015256.1,1958-1976).
gaggaattgaaggaacata

SEQ ID NO: 165759 - DNA, 19 bp, Homo sapiens
  siRNA target sequence for FDFT1 (NM_004462.2,114-132).
gccaccccgaagagttcta

SEQ ID NO: 165760 - DNA, 19 bp, Homo sapiens
  siRNA target sequence for FDFT1 (NM_004462.2,116-134).
caccccgaagagttctaca

SEQ ID NO: 165761 - DNA, 19 bp, Homo sapiens
  siRNA target sequence for FDFT1 (NM_004462.2,209-227).
ctgaaaacttgctacaagt

SEQ ID NO: 165762 - DNA, 19 bp, Homo sapiens
  siRNA target sequence for FDFT1 (NM_004462.2,216-234).
cttgctacaagtatctcaa

SEQ ID NO: 165763 - DNA, 19 bp, Homo sapiens
  siRNA target sequence for FDFT1 (NM_004462.2,219-237).
gctacaagtatctcaatca

SEQ ID NO: 165764 - DNA, 19 bp, Homo sapiens
  siRNA target sequence for FDFT1 (NM_004462.2,246-264).
gcagtttcgcagctgttat

SEQ ID NO: 165765 - DNA, 19 bp, Homo sapiens
  siRNA target sequence for FDFT1 (NM_004462.2,287-305).
cgcaacgcagtgtgcatat

SEQ ID NO: 165766 - DNA, 19 bp, Homo sapiens
  siRNA target sequence for FDFT1 (NM_004462.2,288-306).
gcaacgcagtgtgcatatt

SEQ ID NO: 165767 - DNA, 19 bp, Homo sapiens
  siRNA target sequence for FDFT1 (NM_004462.2,289-307).
caacgcagtgtgcatattt

SEQ ID NO: 165768 - DNA, 19 bp, Homo sapiens
  siRNA target sequence for FDFT1 (NM_004462.2,373-391).
cccgctgttacacaacttt

SEQ ID NO: 165769 - DNA, 19 bp, Homo sapiens
  siRNA target sequence for FDFT1 (NM_004462.2,375-393).
cgctgttacacaactttca

SEQ ID NO: 165770 - DNA, 19 bp, Homo sapiens
  siRNA target sequence for FDFT1 (NM_004462.2,468-486).
caacgatctcccttgagtt

SEQ ID NO: 165771 - DNA, 19 bp, Homo sapiens
  siRNA target sequence for FDFT1 (NM_004462.2,472-490).
gatctcccttgagtttaga

SEQ ID NO: 165772 - DNA, 19 bp, Homo sapiens
  siRNA target sequence for FDFT1 (NM_004462.2,477-495).
cccttgagtttagaaatct

SEQ ID NO: 165773 - DNA, 19 bp, Homo sapiens
  siRNA target sequence for FDFT1 (NM_004462.2,489-507).
gaaatctggctgagaaata

SEQ ID NO: 165774 - DNA, 19 bp, Homo sapiens
  siRNA target sequence for FDFT1 (NM_004462.2,598-616).
caagtactgccactatgtt

SEQ ID NO: 165775 - DNA, 19 bp, Homo sapiens
  siRNA target sequence for FDFT1 (NM_004462.2,673-691).
ccccttagttggtgaagat

SEQ ID NO: 165776 - DNA, 19 bp, Homo sapiens
  siRNA target sequence for FDFT1 (NM_004462.2,693-711).
cagaacgtgccaactctat

SEQ ID NO: 165777 - DNA, 19 bp, Homo sapiens
  siRNA target sequence for FDFT1 (NM_004462.2,798-816).
ggagcaggtatgttaagaa

SEQ ID NO: 165778 - DNA, 19 bp, Homo sapiens
  siRNA target sequence for FDFT1 (NM_004462.2,814-832).
gaagttaggggattttgct

SEQ ID NO: 165779 - DNA, 19 bp, Homo sapiens
  siRNA target sequence for FDFT1 (NM_004462.2,831-849).
ctaagccggagaatattga

SEQ ID NO: 165780 - DNA, 19 bp, Homo sapiens
  siRNA target sequence for FDFT1 (NM_004462.2,868-886).
gaatgaacttataaccaat

SEQ ID NO: 165781 - DNA, 19 bp, Homo sapiens
  siRNA target sequence for FDFT1 (NM_004462.2,1021-1039).
caaaggggcagtgaagatt

SEQ ID NO: 165782 - DNA, 19 bp, Homo sapiens
  siRNA target sequence for FDFT1 (NM_004462.2,1097-1115).
gccatcatatatcagtata

SEQ ID NO: 165783 - DNA, 19 bp, Homo sapiens
  siRNA target sequence for FDFT1 (NM_004462.2,1098-1116).
ccatcatatatcagtatat

SEQ ID NO: 165784 - DNA, 19 bp, Homo sapiens
  siRNA target sequence for FDFT1 (NM_004462.2,1102-1120).
catatatcagtatatggaa

SEQ ID NO: 165785 - DNA, 19 bp, Homo sapiens
  siRNA target sequence for FDFT1 (NM_004462.2,1109-1127).
cagtatatggaagagattt

SEQ ID NO: 165786 - DNA, 19 bp, Homo sapiens
  siRNA target sequence for FDFT1 (NM_004462.2,1111-1129).
gtatatggaagagatttat

SEQ ID NO: 165787 - DNA, 19 bp, Homo sapiens
  siRNA target sequence for FDFT1 (NM_004462.2,1141-1159).
cgactcagacccatcttct

SEQ ID NO: 165788 - DNA, 19 bp, Homo sapiens
  siRNA target sequence for FDFT1 (NM_004462.2,1186-1204).
catccggacgcagaatctt

SEQ ID NO: 165789 - DNA, 19 bp, Homo sapiens
  siRNA target sequence for FDFT1 (NM_004462.2,1205-1223).
cccaactgtcagctgattt

SEQ ID NO: 165790 - DNA, 19 bp, Homo sapiens
  siRNA target sequence for FDFT1 (NM_004462.2,1250-1268).
ctgtcgtttgtcatgcttt

SEQ ID NO: 165791 - DNA, 19 bp, Homo sapiens
  siRNA target sequence for FMO2 (NM_001460.1,156-174).
gagaactgaagatattgga

SEQ ID NO: 165792 - DNA, 19 bp, Homo sapiens
  siRNA target sequence for FMO2 (NM_001460.1,182-200).
ggaggttcaaagagaatgt

SEQ ID NO: 165793 - DNA, 19 bp, Homo sapiens
  siRNA target sequence for FMO2 (NM_001460.1,209-227).
gccgagcaagtatctatca

SEQ ID NO: 165794 - DNA, 19 bp, Homo sapiens
  siRNA target sequence for FMO2 (NM_001460.1,211-229).
cgagcaagtatctatcaat

SEQ ID NO: 165795 - DNA, 19 bp, Homo sapiens
  siRNA target sequence for FMO2 (NM_001460.1,258-276).
gtcctgtttcagtgacttt

SEQ ID NO: 165796 - DNA, 19 bp, Homo sapiens
  siRNA target sequence for FMO2 (NM_001460.1,303-321).
cctgcataattctaaactt

SEQ ID NO: 165797 - DNA, 19 bp, Homo sapiens
  siRNA target sequence for FMO2 (NM_001460.1,520-538).
catatcccactgaagtcat

SEQ ID NO: 165798 - DNA, 19 bp, Homo sapiens
  siRNA target sequence for FMO2 (NM_001460.1,552-570).
gaggttcaaaggccaatat

SEQ ID NO: 165799 - DNA, 19 bp, Homo sapiens
  siRNA target sequence for FMO2 (NM_001460.1,558-576).
caaaggccaatatttccat

SEQ ID NO: 165800 - DNA, 19 bp, Homo sapiens
  siRNA target sequence for FMO2 (NM_001460.1,616-634).
cgcatcctggtgattggaa

SEQ ID NO: 165801 - DNA, 19 bp, Homo sapiens
  siRNA target sequence for FMO2 (NM_001460.1,658-676).
gctgttgagctgagtaaga

SEQ ID NO: 165802 - DNA, 19 bp, Homo sapiens
  siRNA target sequence for FMO2 (NM_001460.1,679-697).
gctgctcaggtttttatca

SEQ ID NO: 165803 - DNA, 19 bp, Homo sapiens
  siRNA target sequence for FMO2 (NM_001460.1,717-735).
ggtcatgagccgtatctct

SEQ ID NO: 165804 - DNA, 19 bp, Homo sapiens
  siRNA target sequence for FMO2 (NM_001460.1,723-741).
gagccgtatctctgaagat

SEQ ID NO: 165805 - DNA, 19 bp, Homo sapiens
  siRNA target sequence for FMO2 (NM_001460.1,782-800).
ctatgctccgcaatgtact

SEQ ID NO: 165806 - DNA, 19 bp, Homo sapiens
  siRNA target sequence for FMO2 (NM_001460.1,801-819).
gccacgaacagctgtaaaa

SEQ ID NO: 165807 - DNA, 19 bp, Homo sapiens
  siRNA target sequence for FMO2 (NM_001460.1,805-823).
cgaacagctgtaaaatgga

SEQ ID NO: 165808 - DNA, 19 bp, Homo sapiens
  siRNA target sequence for FMO2 (NM_001460.1,844-862).
cggtggttcaaccatgaaa

SEQ ID NO: 165809 - DNA, 19 bp, Homo sapiens
  siRNA target sequence for FMO2 (NM_001460.1,845-863).
ggtggttcaaccatgaaaa

SEQ ID NO: 165810 - DNA, 19 bp, Homo sapiens
  siRNA target sequence for FMO2 (NM_001460.1,897-915).
gaaggaacctgtactaaat

SEQ ID NO: 165811 - DNA, 19 bp, Homo sapiens
  siRNA target sequence for FMO2 (NM_001460.1,946-964).
gccatcaaggtgaaatcta

SEQ ID NO: 165812 - DNA, 19 bp, Homo sapiens
  siRNA target sequence for FMO2 (NM_001460.1,954-972).
ggtgaaatctacagtgaaa

SEQ ID NO: 165813 - DNA, 19 bp, Homo sapiens
  siRNA target sequence for FMO2 (NM_001460.1,1082-1100).
cactcgttaaagtagagaa

SEQ ID NO: 165814 - DNA, 19 bp, Homo sapiens
  siRNA target sequence for FMO2 (NM_001460.1,1219-1237).
cgttgggtgacaagagttt

SEQ ID NO: 165815 - DNA, 19 bp, Homo sapiens
  siRNA target sequence for FMO2 (NM_001460.1,1234-1252).
gttttcaaaggcttgtgta

SEQ ID NO: 165816 - DNA, 19 bp, Homo sapiens
  siRNA target sequence for FMO2 (NM_001460.1,1255-1273).
ctgccctcagagagaacta

SEQ ID NO: 165817 - DNA, 19 bp, Homo sapiens
  siRNA target sequence for FMO2 (NM_001460.1,1271-1289).
ctatgatgatggacattat

SEQ ID NO: 165818 - DNA, 19 bp, Homo sapiens
  siRNA target sequence for FMO2 (NM_001460.1,1336-1354).
cagacgttgcagaccaatt

SEQ ID NO: 165819 - DNA, 19 bp, Homo sapiens
  siRNA target sequence for FMO2 (NM_001460.1,1338-1356).
gacgttgcagaccaattat

SEQ ID NO: 165820 - DNA, 19 bp, Homo sapiens
  siRNA target sequence for FMO2 (NM_001460.1,1340-1358).
cgttgcagaccaattatgt

SEQ ID NO: 165821 - DNA, 19 bp, Homo sapiens
  siRNA target sequence for FMO2 (NM_001460.1,1371-1389).
cgagctcgccttagagata

SEQ ID NO: 165822 - DNA, 19 bp, Homo sapiens
  siRNA target sequence for FMO2 (NM_001460.1,1390-1408).
ggtgcgaagccagatttct

SEQ ID NO: 165823 - DNA, 19 bp, Homo sapiens
  siRNA target sequence for FMO2 (NM_001460.1,1435-1453).
ctggctgtgagactctatt

SEQ ID NO: 165824 - DNA, 19 bp, Homo sapiens
  siRNA target sequence for FMO2 (NM_001460.1,1456-1474).
ggaccctgcaactcctatt

SEQ ID NO: 165825 - DNA, 19 bp, Homo sapiens
  siRNA target sequence for GRIN1 (NM_000832.4,1162-1180).
ccccaagatcgtcaacatt

SEQ ID NO: 165826 - DNA, 19 bp, Homo sapiens
  siRNA target sequence for GRIN1 (NM_000832.4,1539-1557).
gcgtgtggtttgagatgat

SEQ ID NO: 165827 - DNA, 19 bp, Homo sapiens
  siRNA target sequence for GRIN1 (NM_000832.4,1769-1787).
gacgatgctgccactgtat

SEQ ID NO: 165828 - DNA, 19 bp, Homo sapiens
  siRNA target sequence for GRIN1 (NM_000832.4,2097-2115).
ctggtcgcgtggagttcaa

SEQ ID NO: 165829 - DNA, 19 bp, Homo sapiens
  siRNA target sequence for GRIN1 (NM_000832.4,2179-2197).
gcaagtgggcatctacaat

SEQ ID NO: 165830 - DNA, 19 bp, Homo sapiens
  siRNA target sequence for GRIN1 (NM_000832.4,2213-2231).
cctaatgacaggaagatca

SEQ ID NO: 165831 - DNA, 19 bp, Homo sapiens
  siRNA target sequence for GRIN1 (NM_000832.4,2275-2293).
gtccaccagactgaagatt

SEQ ID NO: 165832 - DNA, 19 bp, Homo sapiens
  siRNA target sequence for GRIN1 (NM_000832.4,2277-2295).
ccaccagactgaagattgt

SEQ ID NO: 165833 - DNA, 19 bp, Homo sapiens
  siRNA target sequence for GRIN1 (NM_000832.4,2613-2631).
gcgggcaggcagacatgat

SEQ ID NO: 165834 - DNA, 19 bp, Homo sapiens
  siRNA target sequence for GRIN1 (NM_000832.4,2663-2681).
gcgcagtacatcgagtttt

SEQ ID NO: 165835 - DNA, 19 bp, Homo sapiens
  siRNA target sequence for GRIN1 (NM_000832.4,2666-2684).
cagtacatcgagttttcca

SEQ ID NO: 165836 - DNA, 19 bp, Homo sapiens
  siRNA target sequence for GRIN1 (NM_000832.4,3111-3129).
ggaacccctcggacaagtt

SEQ ID NO: 165837 - DNA, 19 bp, Homo sapiens
  siRNA target sequence for GRIN1 (NM_000832.4,3116-3134).
ccctcggacaagtttatct

SEQ ID NO: 165838 - DNA, 19 bp, Homo sapiens
  siRNA target sequence for GRIN1 (NM_000832.4,3117-3135).
cctcggacaagtttatcta

SEQ ID NO: 165839 - DNA, 19 bp, Homo sapiens
  siRNA target sequence for GRIN1 (NM_000832.4,3153-3171).
gctccgtggatatctactt

SEQ ID NO: 165840 - DNA, 19 bp, Homo sapiens
  siRNA target sequence for GRIN1 (NM_000832.4,3195-3213).
ccatgtaccggcatatgga

SEQ ID NO: 165841 - DNA, 19 bp, Homo sapiens
  siRNA target sequence for GRIN1 (NM_000832.4,3336-3354).
cgactggagagctgttttt

SEQ ID NO: 165842 - DNA, 19 bp, Homo sapiens
  siRNA target sequence for GRIN1 (NM_000832.4,3504-3522).
cccctgcgacccttacttt

SEQ ID NO: 165843 - DNA, 19 bp, Homo sapiens
  siRNA target sequence for GRIN1 (NM_000832.4,3505-3523).
ccctgcgacccttactttt

SEQ ID NO: 165844 - DNA, 19 bp, Homo sapiens
  siRNA target sequence for GRIN1 (NM_000832.4,3507-3525).
ctgcgacccttacttttga

SEQ ID NO: 165845 - DNA, 19 bp, Homo sapiens
  siRNA target sequence for GRIN1 (NM_000832.4,3509-3527).
gcgacccttacttttgaga

SEQ ID NO: 165846 - DNA, 19 bp, Homo sapiens
  siRNA target sequence for GRIN1 (NM_000832.4,3510-3528).
cgacccttacttttgagaa

SEQ ID NO: 165847 - DNA, 19 bp, Homo sapiens
  siRNA target sequence for GRIN1 (NM_000832.4,3683-3701).
cagtaccatcccactgata

SEQ ID NO: 165848 - DNA, 19 bp, Homo sapiens
  siRNA target sequence for GRIN1 (NM_007327.1,3773-3791).
cgtaggtcctccaaagaca

SEQ ID NO: 165849 - DNA, 19 bp, Homo sapiens
  siRNA target sequence for GRIN1 (NM_007327.1,3813-3831).
gcgctttgcaaaaccaaaa

SEQ ID NO: 165850 - DNA, 19 bp, Homo sapiens
  siRNA target sequence for GRIN1 (NM_007327.1,3845-3863).
ccgcgacgcgctattgaga

SEQ ID NO: 165851 - DNA, 19 bp, Homo sapiens
  siRNA target sequence for GRIN2A (NM_000833.2,638-656).
gcccagatgctggatttta

SEQ ID NO: 165852 - DNA, 19 bp, Homo sapiens
  siRNA target sequence for GRIN2A (NM_000833.2,777-795).
cggtcatgctgaagatcat

SEQ ID NO: 165853 - DNA, 19 bp, Homo sapiens
  siRNA target sequence for GRIN2A (NM_000833.2,787-805).
gaagatcatgcaggattat

SEQ ID NO: 165854 - DNA, 19 bp, Homo sapiens
  siRNA target sequence for GRIN2A (NM_000833.2,845-863).
ggctacagggaattcatca

SEQ ID NO: 165855 - DNA, 19 bp, Homo sapiens
  siRNA target sequence for GRIN2A (NM_000833.2,903-921).
gggacatgcagaatgtgat

SEQ ID NO: 165856 - DNA, 19 bp, Homo sapiens
  siRNA target sequence for GRIN2A (NM_000833.2,991-1009).
cttgctctactgttccaaa

SEQ ID NO: 165857 - DNA, 19 bp, Homo sapiens
  siRNA target sequence for GRIN2A (NM_000833.2,1049-1067).
ggcctcaccgggtatgatt

SEQ ID NO: 165858 - DNA, 19 bp, Homo sapiens
  siRNA target sequence for GRIN2A (NM_000833.2,1050-1068).
gcctcaccgggtatgattt

SEQ ID NO: 165859 - DNA, 19 bp, Homo sapiens
  siRNA target sequence for GRIN2A (NM_000833.2,1104-1122).
cggagctcatcccaaaaga

SEQ ID NO: 165860 - DNA, 19 bp, Homo sapiens
  siRNA target sequence for GRIN2A (NM_000833.2,1123-1141).
gtttccatcgggactcatt

SEQ ID NO: 165861 - DNA, 19 bp, Homo sapiens
  siRNA target sequence for GRIN2A (NM_000833.2,1209-1227).
ccaccgctgcatcttctat

SEQ ID NO: 165862 - DNA, 19 bp, Homo sapiens
  siRNA target sequence for GRIN2A (NM_000833.2,1308-1326).
ccttgcacccatttatggt

SEQ ID NO: 165863 - DNA, 19 bp, Homo sapiens
  siRNA target sequence for GRIN2A (NM_000833.2,1316-1334).
ccatttatggtcaatgtta

SEQ ID NO: 165864 - DNA, 19 bp, Homo sapiens
  siRNA target sequence for GRIN2A (NM_000833.2,1558-1576).
cgtcatcgtggaagacata

SEQ ID NO: 165865 - DNA, 19 bp, Homo sapiens
  siRNA target sequence for GRIN2A (NM_000833.2,1617-1635).
gtcggaagttcgtcaaaat

SEQ ID NO: 165866 - DNA, 19 bp, Homo sapiens
  siRNA target sequence for GRIN2A (NM_000833.2,1619-1637).
cggaagttcgtcaaaatca

SEQ ID NO: 165867 - DNA, 19 bp, Homo sapiens
  siRNA target sequence for GRIN2A (NM_000833.2,1620-1638).
ggaagttcgtcaaaatcaa

SEQ ID NO: 165868 - DNA, 19 bp, Homo sapiens
  siRNA target sequence for GRIN2A (NM_000833.2,1624-1642).
gttcgtcaaaatcaacaat

SEQ ID NO: 165869 - DNA, 19 bp, Homo sapiens
  siRNA target sequence for GRIN2A (NM_000833.2,1627-1645).
cgtcaaaatcaacaattca

SEQ ID NO: 165870 - DNA, 19 bp, Homo sapiens
  siRNA target sequence for GRIN2A (NM_000833.2,1628-1646).
gtcaaaatcaacaattcaa

SEQ ID NO: 165871 - DNA, 19 bp, Homo sapiens
  siRNA target sequence for GRIN2A (NM_000833.2,1647-1665).
ccaatgaggggatgaatgt

SEQ ID NO: 165872 - DNA, 19 bp, Homo sapiens
  siRNA target sequence for GRIN2A (NM_000833.2,1681-1699).
ggggttctgcattgatatt

SEQ ID NO: 165873 - DNA, 19 bp, Homo sapiens
  siRNA target sequence for GRIN2A (NM_000833.2,1689-1707).
gcattgatattctgaagaa

SEQ ID NO: 165874 - DNA, 19 bp, Homo sapiens
  siRNA target sequence for GRIN2A (NM_000833.2,1694-1712).
gatattctgaagaagcttt

SEQ ID NO: 165875 - DNA, 19 bp, Homo sapiens
  siRNA target sequence for GRIN2A (NM_000833.2,1758-1776).
ggaagcatggcaagaaagt

SEQ ID NO: 165876 - DNA, 19 bp, Homo sapiens
  siRNA target sequence for GRIN2A (NM_000833.2,1801-1819).
cggtgaagtggtctatcaa

SEQ ID NO: 165877 - DNA, 19 bp, Homo sapiens
  siRNA target sequence for GRIN2A (NM_000833.2,1909-1927).
cagtgtcatggtttcaaga

SEQ ID NO: 165878 - DNA, 19 bp, Homo sapiens
  siRNA target sequence for GRIN2A (NM_000833.2,1939-1957).
cgtctcaccttctgctttt

SEQ ID NO: 165879 - DNA, 19 bp, Homo sapiens
  siRNA target sequence for GRIN2A (NM_000833.2,1950-1968).
ctgcttttctagaaccatt

SEQ ID NO: 165880 - DNA, 19 bp, Homo sapiens
  siRNA target sequence for GRIN2A (NM_000833.2,2051-2069).
cctgttggatacaacagaa

SEQ ID NO: 165881 - DNA, 19 bp, Homo sapiens
  siRNA target sequence for GRIN2A (NM_000833.2,2088-2106).
caccccatgggccttcttt

SEQ ID NO: 165882 - DNA, 19 bp, Homo sapiens
  siRNA target sequence for GRIN2A (NM_000833.2,2159-2177).
gtgcctgtccagaatccta

SEQ ID NO: 165883 - DNA, 19 bp, Homo sapiens
  siRNA target sequence for GRIN2A (NM_000833.2,2296-2314).
gaccggcctcagtgacaaa

SEQ ID NO: 165884 - DNA, 19 bp, Homo sapiens
  siRNA target sequence for GRIN2A (NM_000833.2,2357-2375).
gggacagtgcctaatggaa

SEQ ID NO: 165885 - DNA, 19 bp, Homo sapiens
  siRNA target sequence for GRIN2A (NM_000833.2,2372-2390).
ggaagcacggagagaaaca

SEQ ID NO: 165886 - DNA, 19 bp, Homo sapiens
  siRNA target sequence for GRIN2A (NM_000833.2,2373-2391).
gaagcacggagagaaacat

SEQ ID NO: 165887 - DNA, 19 bp, Homo sapiens
  siRNA target sequence for GRIN2A (NM_000833.2,2414-2432).
catcagtacatgaccaaat

SEQ ID NO: 165888 - DNA, 19 bp, Homo sapiens
  siRNA target sequence for GRIN2A (NM_000833.2,2425-2443).
gaccaaatttaatcagaaa

SEQ ID NO: 165889 - DNA, 19 bp, Homo sapiens
  siRNA target sequence for GRIN2A (NM_000833.2,2500-2518).
cgatgccgcagtcttgaat

SEQ ID NO: 165890 - DNA, 19 bp, Homo sapiens
  siRNA target sequence for GRIN2A (NM_000833.2,2501-2519).
gatgccgcagtcttgaatt

SEQ ID NO: 165891 - DNA, 19 bp, Homo sapiens
  siRNA target sequence for GRIN2A (NM_000833.2,2504-2522).
gccgcagtcttgaattaca

SEQ ID NO: 165892 - DNA, 19 bp, Homo sapiens
  siRNA target sequence for GRIN2A (NM_000833.2,2560-2578).
cgggagtgggtacatcttt

SEQ ID NO: 165893 - DNA, 19 bp, Homo sapiens
  siRNA target sequence for GRIN2A (NM_000833.2,2579-2597).
gccaccaccggttatggaa

SEQ ID NO: 165894 - DNA, 19 bp, Homo sapiens
  siRNA target sequence for GRIN2A (NM_000833.2,2580-2598).
ccaccaccggttatggaat

SEQ ID NO: 165895 - DNA, 19 bp, Homo sapiens
  siRNA target sequence for GRIN2A (NM_000833.2,2581-2599).
caccaccggttatggaatt

SEQ ID NO: 165896 - DNA, 19 bp, Homo sapiens
  siRNA target sequence for GRIN2A (NM_000833.2,2838-2856).
ggaagctgcgcttctgttt

SEQ ID NO: 165897 - DNA, 19 bp, Homo sapiens
  siRNA target sequence for GRIN2A (NM_000833.2,2927-2945).
ggagtgcacattgaagaaa

SEQ ID NO: 165898 - DNA, 19 bp, Homo sapiens
  siRNA target sequence for GRIN2A (NM_000833.2,3002-3020).
ctccggtcagccaaaaaca

SEQ ID NO: 165899 - DNA, 19 bp, Homo sapiens
  siRNA target sequence for GRIN2A (NM_000833.2,3004-3022).
ccggtcagccaaaaacatt

SEQ ID NO: 165900 - DNA, 19 bp, Homo sapiens
  siRNA target sequence for GRIN2A (NM_000833.2,3005-3023).
cggtcagccaaaaacattt

SEQ ID NO: 165901 - DNA, 19 bp, Homo sapiens
  siRNA target sequence for GRIN2A (NM_000833.2,3103-3121).
catggacatggtttcagat

SEQ ID NO: 165902 - DNA, 19 bp, Homo sapiens
  siRNA target sequence for GRIN2A (NM_000833.2,3255-3273).
gacaacatcctcttactct

SEQ ID NO: 165903 - DNA, 19 bp, Homo sapiens
  siRNA target sequence for GRIN2A (NM_000833.2,3263-3281).
cctcttactctcaatgagt

SEQ ID NO: 165904 - DNA, 19 bp, Homo sapiens
  siRNA target sequence for GRIN2A (NM_000833.2,3302-3320).
gtggccgtgagcacagaat

SEQ ID NO: 165905 - DNA, 19 bp, Homo sapiens
  siRNA target sequence for GRIN2A (NM_000833.2,3317-3335).
gaatccaaagcgaactcta

SEQ ID NO: 165906 - DNA, 19 bp, Homo sapiens
  siRNA target sequence for GRIN2A (NM_000833.2,3369-3387).
ccatacgccaggattcact

SEQ ID NO: 165907 - DNA, 19 bp, Homo sapiens
  siRNA target sequence for GRIN2A (NM_000833.2,3370-3388).
catacgccaggattcacta

SEQ ID NO: 165908 - DNA, 19 bp, Homo sapiens
  siRNA target sequence for GRIN2A (NM_000833.2,3445-3463).
cctaaagagccctaggtat

SEQ ID NO: 165909 - DNA, 19 bp, Homo sapiens
  siRNA target sequence for GRIN2A (NM_000833.2,3525-3543).
gggaacctgacaacagtaa

SEQ ID NO: 165910 - DNA, 19 bp, Homo sapiens
  siRNA target sequence for GRIN2A (NM_000833.2,3573-3591).
ggtcagtggcctccaaata

SEQ ID NO: 165911 - DNA, 19 bp, Homo sapiens
  siRNA target sequence for GRIN2A (NM_000833.2,3655-3673).
caagatctacactatagat

SEQ ID NO: 165912 - DNA, 19 bp, Homo sapiens
  siRNA target sequence for GRIN2A (NM_000833.2,3685-3703).
gcctggtttccacttagat

SEQ ID NO: 165913 - DNA, 19 bp, Homo sapiens
  siRNA target sequence for GRIN2A (NM_000833.2,3814-3832).
ccggaaccccttgcataat

SEQ ID NO: 165914 - DNA, 19 bp, Homo sapiens
  siRNA target sequence for GRIN2A (NM_000833.2,4032-4050).
ggatggggaacctctatga

SEQ ID NO: 165915 - DNA, 19 bp, Homo sapiens
  siRNA target sequence for GRIN2A (NM_000833.2,4427-4445).
gatgaccaacgcttggtta

SEQ ID NO: 165916 - DNA, 19 bp, Homo sapiens
  siRNA target sequence for GRIN2A (NM_000833.2,4458-4476).
cctcggacccttacaaaca

SEQ ID NO: 165917 - DNA, 19 bp, Homo sapiens
  siRNA target sequence for GRIN2A (NM_000833.2,4485-4503).
catcccaggcggtgaatga

SEQ ID NO: 165918 - DNA, 19 bp, Homo sapiens
  siRNA target sequence for GRIN2A (NM_000833.2,4495-4513).
ggtgaatgacagctatctt

SEQ ID NO: 165919 - DNA, 19 bp, Homo sapiens
  siRNA target sequence for GRIN2A (NM_000833.2,4562-4580).
ggccacaatgatgtgtata

SEQ ID NO: 165920 - DNA, 19 bp, Homo sapiens
  siRNA target sequence for GRIN2A (NM_000833.2,4563-4581).
gccacaatgatgtgtatat

SEQ ID NO: 165921 - DNA, 19 bp, Homo sapiens
  siRNA target sequence for GRIN2A (NM_000833.2,4656-4674).
gcaatagacgcgtgtacaa

SEQ ID NO: 165922 - DNA, 19 bp, Homo sapiens
  siRNA target sequence for GRIN2A (NM_000833.2,4681-4699).
gcctagtatcgaatctgat

SEQ ID NO: 165923 - DNA, 19 bp, Homo sapiens
  siRNA target sequence for GRIN2B (NM_000834.2,457-475).
cccgcatctgtgatctcat

SEQ ID NO: 165924 - DNA, 19 bp, Homo sapiens
  siRNA target sequence for GRIN2B (NM_000834.2,536-554).
ccagatcctcgatttcatt

SEQ ID NO: 165925 - DNA, 19 bp, Homo sapiens
  siRNA target sequence for GRIN2B (NM_000834.2,537-555).
cagatcctcgatttcattt

SEQ ID NO: 165926 - DNA, 19 bp, Homo sapiens
  siRNA target sequence for GRIN2B (NM_000834.2,539-557).
gatcctcgatttcatttca

SEQ ID NO: 165927 - DNA, 19 bp, Homo sapiens
  siRNA target sequence for GRIN2B (NM_000834.2,601-619).
ctatgataatggcagataa

SEQ ID NO: 165928 - DNA, 19 bp, Homo sapiens
  siRNA target sequence for GRIN2B (NM_000834.2,670-688).
cttccgtaatgctcaacat

SEQ ID NO: 165929 - DNA, 19 bp, Homo sapiens
  siRNA target sequence for GRIN2B (NM_000834.2,673-691).
ccgtaatgctcaacatcat

SEQ ID NO: 165930 - DNA, 19 bp, Homo sapiens
  siRNA target sequence for GRIN2B (NM_000834.2,718-736).
ctatcgtcaccacctattt

SEQ ID NO: 165931 - DNA, 19 bp, Homo sapiens
  siRNA target sequence for GRIN2B (NM_000834.2,767-785).
ccgcagcaccattgagaat

SEQ ID NO: 165932 - DNA, 19 bp, Homo sapiens
  siRNA target sequence for GRIN2B (NM_000834.2,772-790).
gcaccattgagaatagctt

SEQ ID NO: 165933 - DNA, 19 bp, Homo sapiens
  siRNA target sequence for GRIN2B (NM_000834.2,833-851).
cctggacgatggagattct

SEQ ID NO: 165934 - DNA, 19 bp, Homo sapiens
  siRNA target sequence for GRIN2B (NM_000834.2,834-852).
ctggacgatggagattcta

SEQ ID NO: 165935 - DNA, 19 bp, Homo sapiens
  siRNA target sequence for GRIN2B (NM_000834.2,883-901).
gccccatcattcttcttta

SEQ ID NO: 165936 - DNA, 19 bp, Homo sapiens
  siRNA target sequence for GRIN2B (NM_000834.2,1040-1058).
catctctgtatcatatgat

SEQ ID NO: 165937 - DNA, 19 bp, Homo sapiens
  siRNA target sequence for GRIN2B (NM_000834.2,1180-1198).
cccacgagaagagaatcta

SEQ ID NO: 165938 - DNA, 19 bp, Homo sapiens
  siRNA target sequence for GRIN2B (NM_000834.2,1192-1210).
gaatctaccagtccaatat

SEQ ID NO: 165939 - DNA, 19 bp, Homo sapiens
  siRNA target sequence for GRIN2B (NM_000834.2,1199-1217).
ccagtccaatatgctaaat

SEQ ID NO: 165940 - DNA, 19 bp, Homo sapiens
  siRNA target sequence for GRIN2B (NM_000834.2,1200-1218).
cagtccaatatgctaaata

SEQ ID NO: 165941 - DNA, 19 bp, Homo sapiens
  siRNA target sequence for GRIN2B (NM_000834.2,1286-1304).
cccgaaactggtgataatt

SEQ ID NO: 165942 - DNA, 19 bp, Homo sapiens
  siRNA target sequence for GRIN2B (NM_000834.2,1357-1375).
ccctgcagatgaagtacta

SEQ ID NO: 165943 - DNA, 19 bp, Homo sapiens
  siRNA target sequence for GRIN2B (NM_000834.2,1358-1376).
cctgcagatgaagtactat

SEQ ID NO: 165944 - DNA, 19 bp, Homo sapiens
  siRNA target sequence for GRIN2B (NM_000834.2,1419-1437).
gaccatctgagcattgtga

SEQ ID NO: 165945 - DNA, 19 bp, Homo sapiens
  siRNA target sequence for GRIN2B (NM_000834.2,1445-1463).
ggaggcaccatttgtcatt

SEQ ID NO: 165946 - DNA, 19 bp, Homo sapiens
  siRNA target sequence for GRIN2B (NM_000834.2,1524-1542).
cgcatagtcactgagaata

SEQ ID NO: 165947 - DNA, 19 bp, Homo sapiens
  siRNA target sequence for GRIN2B (NM_000834.2,1551-1569).
gaggagccgggttacatca

SEQ ID NO: 165948 - DNA, 19 bp, Homo sapiens
  siRNA target sequence for GRIN2B (NM_000834.2,1556-1574).
gccgggttacatcaaaaaa

SEQ ID NO: 165949 - DNA, 19 bp, Homo sapiens
  siRNA target sequence for GRIN2B (NM_000834.2,1557-1575).
ccgggttacatcaaaaaat

SEQ ID NO: 165950 - DNA, 19 bp, Homo sapiens
  siRNA target sequence for GRIN2B (NM_000834.2,1591-1609).
gtattgacatccttaagaa

SEQ ID NO: 165951 - DNA, 19 bp, Homo sapiens
  siRNA target sequence for GRIN2B (NM_000834.2,1704-1722).
ggagaggtggtcatgaaga

SEQ ID NO: 165952 - DNA, 19 bp, Homo sapiens
  siRNA target sequence for GRIN2B (NM_000834.2,1876-1894).
ctgacgtatgggtgatgat

SEQ ID NO: 165953 - DNA, 19 bp, Homo sapiens
  siRNA target sequence for GRIN2B (NM_000834.2,1918-1936).
cagccgtggctgtctttgt

SEQ ID NO: 165954 - DNA, 19 bp, Homo sapiens
  siRNA target sequence for GRIN2B (NM_000834.2,1992-2010).
cctggtggaccctctttca

SEQ ID NO: 165955 - DNA, 19 bp, Homo sapiens
  siRNA target sequence for GRIN2B (NM_000834.2,2040-2058).
ggtctggtgtttaacaact

SEQ ID NO: 165956 - DNA, 19 bp, Homo sapiens
  siRNA target sequence for GRIN2B (NM_000834.2,2141-2159).
cagctacactgccaactta

SEQ ID NO: 165957 - DNA, 19 bp, Homo sapiens
  siRNA target sequence for GRIN2B (NM_000834.2,2275-2293).
gcagcacagagagaaatat

SEQ ID NO: 165958 - DNA, 19 bp, Homo sapiens
  siRNA target sequence for GRIN2B (NM_000834.2,2319-2337).
gcctacatgggaaagttca

SEQ ID NO: 165959 - DNA, 19 bp, Homo sapiens
  siRNA target sequence for GRIN2B (NM_000834.2,2320-2338).
cctacatgggaaagttcaa

SEQ ID NO: 165960 - DNA, 19 bp, Homo sapiens
  siRNA target sequence for GRIN2B (NM_000834.2,2336-2354).
caaccagaggggtgtagat

SEQ ID NO: 165961 - DNA, 19 bp, Homo sapiens
  siRNA target sequence for GRIN2B (NM_000834.2,2339-2357).
ccagaggggtgtagatgat

SEQ ID NO: 165962 - DNA, 19 bp, Homo sapiens
  siRNA target sequence for GRIN2B (NM_000834.2,2406-2424).
gcagcagtgctgaactata

SEQ ID NO: 165963 - DNA, 19 bp, Homo sapiens
  siRNA target sequence for GRIN2B (NM_000834.2,2530-2548).
gccaggtggaccttgctat

SEQ ID NO: 165964 - DNA, 19 bp, Homo sapiens
  siRNA target sequence for GRIN2B (NM_000834.2,2720-2738).
ctgcgaacaccttttctat

SEQ ID NO: 165965 - DNA, 19 bp, Homo sapiens
  siRNA target sequence for GRIN2B (NM_000834.2,2740-2758).
ggcagttccgacattgctt

SEQ ID NO: 165966 - DNA, 19 bp, Homo sapiens
  siRNA target sequence for GRIN2B (NM_000834.2,2741-2759).
gcagttccgacattgcttt

SEQ ID NO: 165967 - DNA, 19 bp, Homo sapiens
  siRNA target sequence for GRIN2B (NM_000834.2,2742-2760).
cagttccgacattgcttta

SEQ ID NO: 165968 - DNA, 19 bp, Homo sapiens
  siRNA target sequence for GRIN2B (NM_000834.2,2847-2865).
cgccagtctgtaatgaact

SEQ ID NO: 165969 - DNA, 19 bp, Homo sapiens
  siRNA target sequence for GRIN2B (NM_000834.2,2989-3007).
gggagtcatccgtctatga

SEQ ID NO: 165970 - DNA, 19 bp, Homo sapiens
  siRNA target sequence for GRIN2B (NM_000834.2,3142-3160).
gcaacgtgtaccaagatca

SEQ ID NO: 165971 - DNA, 19 bp, Homo sapiens
  siRNA target sequence for GRIN2B (NM_000834.2,3316-3334).
gtgacctgtacggcaaatt

SEQ ID NO: 165972 - DNA, 19 bp, Homo sapiens
  siRNA target sequence for GRIN2B (NM_000834.2,3318-3336).
gacctgtacggcaaattct

SEQ ID NO: 165973 - DNA, 19 bp, Homo sapiens
  siRNA target sequence for GRIN2B (NM_000834.2,3358-3376).
gtggccacgacgacttgat

SEQ ID NO: 165974 - DNA, 19 bp, Homo sapiens
  siRNA target sequence for GRIN2B (NM_000834.2,3384-3402).
gatgtctctgacatctcaa

SEQ ID NO: 165975 - DNA, 19 bp, Homo sapiens
  siRNA target sequence for GRIN2B (NM_000834.2,3446-3464).
gaggcgtaagcagcaatat

SEQ ID NO: 165976 - DNA, 19 bp, Homo sapiens
  siRNA target sequence for GRIN2B (NM_000834.2,3451-3469).
gtaagcagcaatataagga

SEQ ID NO: 165977 - DNA, 19 bp, Homo sapiens
  siRNA target sequence for GRIN2B (NM_000834.2,3730-3748).
ccaacaggtctcacatcaa

SEQ ID NO: 165978 - DNA, 19 bp, Homo sapiens
  siRNA target sequence for GRIN2B (NM_000834.2,3952-3970).
caggcaacctgtatgacat

SEQ ID NO: 165979 - DNA, 19 bp, Homo sapiens
  siRNA target sequence for GRIN2B (NM_000834.2,4052-4070).
ccctcagagcccgactaat

SEQ ID NO: 165980 - DNA, 19 bp, Homo sapiens
  siRNA target sequence for GRIN2B (NM_000834.2,4053-4071).
cctcagagcccgactaatt

SEQ ID NO: 165981 - DNA, 19 bp, Homo sapiens
  siRNA target sequence for GRIN2B (NM_000834.2,4056-4074).
cagagcccgactaattcca

SEQ ID NO: 165982 - DNA, 19 bp, Homo sapiens
  siRNA target sequence for GRIN2B (NM_000834.2,4168-4186).
gcagcgtaagcctgaaaga

SEQ ID NO: 165983 - DNA, 19 bp, Homo sapiens
  siRNA target sequence for GRIN2B (NM_000834.2,4210-4228).
gcccctacgcccacatgtt

SEQ ID NO: 165984 - DNA, 19 bp, Homo sapiens
  siRNA target sequence for GRIN2B (NM_000834.2,4213-4231).
cctacgcccacatgtttga

SEQ ID NO: 165985 - DNA, 19 bp, Homo sapiens
  siRNA target sequence for GRIN2B (NM_000834.2,4249-4267).
gcacctttgccaacaacaa

SEQ ID NO: 165986 - DNA, 19 bp, Homo sapiens
  siRNA target sequence for GRIN2B (NM_000834.2,4401-4419).
ctccatggcagcaaatcct

SEQ ID NO: 165987 - DNA, 19 bp, Homo sapiens
  siRNA target sequence for GRIN2C (NM_000835.2,453-471).
cacgtccacggcattgtct

SEQ ID NO: 165988 - DNA, 19 bp, Homo sapiens
  siRNA target sequence for GRIN2C (NM_000835.2,455-473).
cgtccacggcattgtcttt

SEQ ID NO: 165989 - DNA, 19 bp, Homo sapiens
  siRNA target sequence for GRIN2C (NM_000835.2,1181-1199).
ctacaggcacctactgaat

SEQ ID NO: 165990 - DNA, 19 bp, Homo sapiens
  siRNA target sequence for GRIN2C (NM_000835.2,1312-1330).
gggagcatggcgtcctata

SEQ ID NO: 165991 - DNA, 19 bp, Homo sapiens
  siRNA target sequence for GRIN2C (NM_000835.2,1314-1332).
gagcatggcgtcctataca

SEQ ID NO: 165992 - DNA, 19 bp, Homo sapiens
  siRNA target sequence for GRIN2C (NM_000835.2,1320-1338).
ggcgtcctatacatgaagt

SEQ ID NO: 165993 - DNA, 19 bp, Homo sapiens
  siRNA target sequence for GRIN2C (NM_000835.2,1584-1602).
gccagagtggtcaaattct

SEQ ID NO: 165994 - DNA, 19 bp, Homo sapiens
  siRNA target sequence for GRIN2C (NM_000835.2,1824-1842).
gccttcttggagccatata

SEQ ID NO: 165995 - DNA, 19 bp, Homo sapiens
  siRNA target sequence for GRIN2C (NM_000835.2,2010-2028).
gcgctggtcttcaacaact

SEQ ID NO: 165996 - DNA, 19 bp, Homo sapiens
  siRNA target sequence for GRIN2C (NM_000835.2,2189-2207).
gtttcagcggcctcaagat

SEQ ID NO: 165997 - DNA, 19 bp, Homo sapiens
  siRNA target sequence for GRIN2C (NM_000835.2,2256-2274).
cggaacatccgcagtaact

SEQ ID NO: 165998 - DNA, 19 bp, Homo sapiens
  siRNA target sequence for GRIN2C (NM_000835.2,2290-2308).
cccacatggtcaagttcaa

SEQ ID NO: 165999 - DNA, 19 bp, Homo sapiens
  siRNA target sequence for GRIN2C (NM_000835.2,3657-3675).
cacgcccacctgccatttt

SEQ ID NO: 166000 - DNA, 19 bp, Homo sapiens
  siRNA target sequence for GRIN2D (NM_000836.1,1087-1105).
cctgctgcgtgattatggt

SEQ ID NO: 166001 - DNA, 19 bp, Homo sapiens
  siRNA target sequence for GRIN2D (NM_000836.1,1088-1106).
ctgctgcgtgattatggtt

SEQ ID NO: 166002 - DNA, 19 bp, Homo sapiens
  siRNA target sequence for GRIN2D (NM_000836.1,1093-1111).
gcgtgattatggtttcctt

SEQ ID NO: 166003 - DNA, 19 bp, Homo sapiens
  siRNA target sequence for GRIN2D (NM_000836.1,1158-1176).
gcgagagtctgcataggta

SEQ ID NO: 166004 - DNA, 19 bp, Homo sapiens
  siRNA target sequence for GRIN2D (NM_000836.1,1203-1221).
gggattactccttcaatga

SEQ ID NO: 166005 - DNA, 19 bp, Homo sapiens
  siRNA target sequence for GRIN2D (NM_000836.1,1400-1418).
gaggaaaggccgtttgtca

SEQ ID NO: 166006 - DNA, 19 bp, Homo sapiens
  siRNA target sequence for GRIN2D (NM_000836.1,1874-1892).
gtggtcgccgtcactgttt

SEQ ID NO: 166007 - DNA, 19 bp, Homo sapiens
  siRNA target sequence for GRIN2D (NM_000836.1,1877-1895).
gtcgccgtcactgttttca

SEQ ID NO: 166008 - DNA, 19 bp, Homo sapiens
  siRNA target sequence for GRIN2D (NM_000836.1,1880-1898).
gccgtcactgttttcatct

SEQ ID NO: 166009 - DNA, 19 bp, Homo sapiens
  siRNA target sequence for GRIN2D (NM_000836.1,2366-2384).
gctgcagtgctcaattaca

SEQ ID NO: 166010 - DNA, 19 bp, Homo sapiens
  siRNA target sequence for GRIN2D (NM_000836.1,2367-2385).
ctgcagtgctcaattacat

SEQ ID NO: 166011 - DNA, 19 bp, Homo sapiens
  siRNA target sequence for GRIN2D (NM_000836.1,2566-2584).
gatctgccacaatgacaaa

SEQ ID NO: 166012 - DNA, 19 bp, Homo sapiens
  siRNA target sequence for GRIN2D (NM_000836.1,2571-2589).
gccacaatgacaaaatcga

SEQ ID NO: 166013 - DNA, 19 bp, Homo sapiens
  siRNA target sequence for GRIN2D (NM_000836.1,4061-4079).
ggctcggcgcacttctcta

SEQ ID NO: 166014 - DNA, 19 bp, Homo sapiens
  siRNA target sequence for HPCL2 (NM_012260.1,176-194).
cgcaagatgtggagtacat

SEQ ID NO: 166015 - DNA, 19 bp, Homo sapiens
  siRNA target sequence for HPCL2 (NM_012260.1,177-195).
gcaagatgtggagtacata

SEQ ID NO: 166016 - DNA, 19 bp, Homo sapiens
  siRNA target sequence for HPCL2 (NM_012260.1,178-196).
caagatgtggagtacatat

SEQ ID NO: 166017 - DNA, 19 bp, Homo sapiens
  siRNA target sequence for HPCL2 (NM_012260.1,241-259).
cagcagctaggcatcaagt

SEQ ID NO: 166018 - DNA, 19 bp, Homo sapiens
  siRNA target sequence for HPCL2 (NM_012260.1,244-262).
cagctaggcatcaagtaca

SEQ ID NO: 166019 - DNA, 19 bp, Homo sapiens
  siRNA target sequence for HPCL2 (NM_012260.1,279-297).
gcaagcggcttgttatgct

SEQ ID NO: 166020 - DNA, 19 bp, Homo sapiens
  siRNA target sequence for HPCL2 (NM_012260.1,295-313).
gctgcctccgcgattggat

SEQ ID NO: 166021 - DNA, 19 bp, Homo sapiens
  siRNA target sequence for HPCL2 (NM_012260.1,296-314).
ctgcctccgcgattggata

SEQ ID NO: 166022 - DNA, 19 bp, Homo sapiens
  siRNA target sequence for HPCL2 (NM_012260.1,299-317).
cctccgcgattggatatct

SEQ ID NO: 166023 - DNA, 19 bp, Homo sapiens
  siRNA target sequence for HPCL2 (NM_012260.1,329-347).
caggagtctgccttgttgt

SEQ ID NO: 166024 - DNA, 19 bp, Homo sapiens
  siRNA target sequence for HPCL2 (NM_012260.1,375-393).
gggcggtatggcaaatgca

SEQ ID NO: 166025 - DNA, 19 bp, Homo sapiens
  siRNA target sequence for HPCL2 (NM_012260.1,376-394).
ggcggtatggcaaatgcaa

SEQ ID NO: 166026 - DNA, 19 bp, Homo sapiens
  siRNA target sequence for HPCL2 (NM_012260.1,377-395).
gcggtatggcaaatgcaaa

SEQ ID NO: 166027 - DNA, 19 bp, Homo sapiens
  siRNA target sequence for HPCL2 (NM_012260.1,380-398).
gtatggcaaatgcaaacat

SEQ ID NO: 166028 - DNA, 19 bp, Homo sapiens
  siRNA target sequence for HPCL2 (NM_012260.1,404-422).
gctggcccttgcttgtgat

SEQ ID NO: 166029 - DNA, 19 bp, Homo sapiens
  siRNA target sequence for HPCL2 (NM_012260.1,480-498).
ggttgaagcttgtagatta

SEQ ID NO: 166030 - DNA, 19 bp, Homo sapiens
  siRNA target sequence for HPCL2 (NM_012260.1,481-499).
gttgaagcttgtagattat

SEQ ID NO: 166031 - DNA, 19 bp, Homo sapiens
  siRNA target sequence for HPCL2 (NM_012260.1,484-502).
gaagcttgtagattatata

SEQ ID NO: 166032 - DNA, 19 bp, Homo sapiens
  siRNA target sequence for HPCL2 (NM_012260.1,487-505).
gcttgtagattatatacca

SEQ ID NO: 166033 - DNA, 19 bp, Homo sapiens
  siRNA target sequence for HPCL2 (NM_012260.1,488-506).
cttgtagattatataccaa

SEQ ID NO: 166034 - DNA, 19 bp, Homo sapiens
  siRNA target sequence for HPCL2 (NM_012260.1,525-543).
cagcatagaagctattcct

SEQ ID NO: 166035 - DNA, 19 bp, Homo sapiens
  siRNA target sequence for HPCL2 (NM_012260.1,527-545).
gcatagaagctattccttt

SEQ ID NO: 166036 - DNA, 19 bp, Homo sapiens
  siRNA target sequence for HPCL2 (NM_012260.1,640-658).
gtgaattctataaagtaca

SEQ ID NO: 166037 - DNA, 19 bp, Homo sapiens
  siRNA target sequence for HPCL2 (NM_012260.1,716-734).
cggcttctgttattaggaa

SEQ ID NO: 166038 - DNA, 19 bp, Homo sapiens
  siRNA target sequence for HPCL2 (NM_012260.1,736-754).
gccaaacaaccccttctta

SEQ ID NO: 166039 - DNA, 19 bp, Homo sapiens
  siRNA target sequence for HPCL2 (NM_012260.1,737-755).
ccaaacaaccccttcttat

SEQ ID NO: 166040 - DNA, 19 bp, Homo sapiens
  siRNA target sequence for HPCL2 (NM_012260.1,916-934).
gctgatgtaattgtgttat

SEQ ID NO: 166041 - DNA, 19 bp, Homo sapiens
  siRNA target sequence for HPCL2 (NM_012260.1,917-935).
ctgatgtaattgtgttatt

SEQ ID NO: 166042 - DNA, 19 bp, Homo sapiens
  siRNA target sequence for HPCL2 (NM_012260.1,940-958).
gccagactaaattggattt

SEQ ID NO: 166043 - DNA, 19 bp, Homo sapiens
  siRNA target sequence for HPCL2 (NM_012260.1,941-959).
ccagactaaattggatttt

SEQ ID NO: 166044 - DNA, 19 bp, Homo sapiens
  siRNA target sequence for HPCL2 (NM_012260.1,1047-1065).
gcccgctgttactttgcta

SEQ ID NO: 166045 - DNA, 19 bp, Homo sapiens
  siRNA target sequence for HPCL2 (NM_012260.1,1052-1070).
ctgttactttgctaggaaa

SEQ ID NO: 166046 - DNA, 19 bp, Homo sapiens
  siRNA target sequence for HPCL2 (NM_012260.1,1079-1097).
ctgtcactaagcagctttt

SEQ ID NO: 166047 - DNA, 19 bp, Homo sapiens
  siRNA target sequence for HPCL2 (NM_012260.1,1139-1157).
gcaagtggtggaaaactct

SEQ ID NO: 166048 - DNA, 19 bp, Homo sapiens
  siRNA target sequence for HPCL2 (NM_012260.1,1191-1209).
caaggaactagcttctaaa

SEQ ID NO: 166049 - DNA, 19 bp, Homo sapiens
  siRNA target sequence for HPCL2 (NM_012260.1,1194-1212).
ggaactagcttctaaaaaa

SEQ ID NO: 166050 - DNA, 19 bp, Homo sapiens
  siRNA target sequence for HPCL2 (NM_012260.1,1214-1232).
ccctgcctatgaattatta

SEQ ID NO: 166051 - DNA, 19 bp, Homo sapiens
  siRNA target sequence for HPCL2 (NM_012260.1,1216-1234).
ctgcctatgaattattaca

SEQ ID NO: 166052 - DNA, 19 bp, Homo sapiens
  siRNA target sequence for HPCL2 (NM_012260.1,1218-1236).
gcctatgaattattacaca

SEQ ID NO: 166053 - DNA, 19 bp, Homo sapiens
  siRNA target sequence for HPCL2 (NM_012260.1,1282-1300).
gtaagtgaaggagcaaata

SEQ ID NO: 166054 - DNA, 19 bp, Homo sapiens
  siRNA target sequence for HPCL2 (NM_012260.1,1349-1367).
ggcttgatgctggtacttt

SEQ ID NO: 166055 - DNA, 19 bp, Homo sapiens
  siRNA target sequence for HPCL2 (NM_012260.1,1358-1376).
ctggtactttcggaacaat

SEQ ID NO: 166056 - DNA, 19 bp, Homo sapiens
  siRNA target sequence for HPCL2 (NM_012260.1,1381-1399).
gttggtttgggatttgcta

SEQ ID NO: 166057 - DNA, 19 bp, Homo sapiens
  siRNA target sequence for HPCL2 (NM_012260.1,1410-1428).
cgtggtggctaaagataga

SEQ ID NO: 166058 - DNA, 19 bp, Homo sapiens
  siRNA target sequence for HPCL2 (NM_012260.1,1411-1429).
gtggtggctaaagatagaa

SEQ ID NO: 166059 - DNA, 19 bp, Homo sapiens
  siRNA target sequence for HPCL2 (NM_012260.1,1530-1548).
gttggtagtgaataacaat

SEQ ID NO: 166060 - DNA, 19 bp, Homo sapiens
  siRNA target sequence for HPCL2 (NM_012260.1,1629-1647).
gtgtttgctgccaaattca

SEQ ID NO: 166061 - DNA, 19 bp, Homo sapiens
  siRNA target sequence for HPCL2 (NM_012260.1,1635-1653).
gctgccaaattcacattat

SEQ ID NO: 166062 - DNA, 19 bp, Homo sapiens
  siRNA target sequence for HPCL2 (NM_012260.1,1733-1751).
gcctagcagacacaactaa

SEQ ID NO: 166063 - DNA, 19 bp, Homo sapiens
  siRNA target sequence for HPCL2 (NM_012260.1,1743-1761).
cacaactaaaccttctctt

SEQ ID NO: 166064 - DNA, 19 bp, Homo sapiens
  siRNA target sequence for HPCL2 (NM_012260.1,1745-1763).
caactaaaccttctcttat

SEQ ID NO: 166065 - DNA, 19 bp, Homo sapiens
  siRNA target sequence for HPCL2 (NM_012260.1,1748-1766).
ctaaaccttctcttatcaa

SEQ ID NO: 166066 - DNA, 19 bp, Homo sapiens
  siRNA target sequence for HPCL2 (NM_012260.1,1794-1812).
gaaggcccaggattttcat

SEQ ID NO: 166067 - DNA, 19 bp, Homo sapiens
  siRNA target sequence for HPCL2 (NM_012260.1,1814-1832).
ggctgacccgctctaatat

SEQ ID NO: 166068 - DNA, 19 bp, Homo sapiens
  siRNA target sequence for HPCL2 (NM_012260.1,1816-1834).
ctgacccgctctaatatgt

SEQ ID NO: 166069 - DNA, 19 bp, Homo sapiens
  siRNA target sequence for HPRT1 (NM_000194.1,100-118).
ccctggcgtcgtgattagt

SEQ ID NO: 166070 - DNA, 19 bp, Homo sapiens
  siRNA target sequence for HPRT1 (NM_000194.1,102-120).
ctggcgtcgtgattagtga

SEQ ID NO: 166071 - DNA, 19 bp, Homo sapiens
  siRNA target sequence for HPRT1 (NM_000194.1,137-155).
gaccttgatttattttgca

SEQ ID NO: 166072 - DNA, 19 bp, Homo sapiens
  siRNA target sequence for HPRT1 (NM_000194.1,143-161).
gatttattttgcataccta

SEQ ID NO: 166073 - DNA, 19 bp, Homo sapiens
  siRNA target sequence for HPRT1 (NM_000194.1,198-216).
ctcatggactaattatgga

SEQ ID NO: 166074 - DNA, 19 bp, Homo sapiens
  siRNA target sequence for HPRT1 (NM_000194.1,228-246).
gtcttgctcgagatgtgat

SEQ ID NO: 166075 - DNA, 19 bp, Homo sapiens
  siRNA target sequence for HPRT1 (NM_000194.1,361-379).
cattcctatgactgtagat

SEQ ID NO: 166076 - DNA, 19 bp, Homo sapiens
  siRNA target sequence for HPRT1 (NM_000194.1,365-383).
cctatgactgtagatttta

SEQ ID NO: 166077 - DNA, 19 bp, Homo sapiens
  siRNA target sequence for HPRT1 (NM_000194.1,387-405).
gactgaagagctattgtaa

SEQ ID NO: 166078 - DNA, 19 bp, Homo sapiens
  siRNA target sequence for HPRT1 (NM_000194.1,410-428).
cagtcaacaggggacataa

SEQ ID NO: 166079 - DNA, 19 bp, Homo sapiens
  siRNA target sequence for HPRT1 (NM_000194.1,417-435).
caggggacataaaagtaat

SEQ ID NO: 166080 - DNA, 19 bp, Homo sapiens
  siRNA target sequence for HPRT1 (NM_000194.1,421-439).
ggacataaaagtaattggt

SEQ ID NO: 166081 - DNA, 19 bp, Homo sapiens
  siRNA target sequence for HPRT1 (NM_000194.1,528-546).
ccttggtcaggcagtataa

SEQ ID NO: 166082 - DNA, 19 bp, Homo sapiens
  siRNA target sequence for HPRT1 (NM_000194.1,529-547).
cttggtcaggcagtataat

SEQ ID NO: 166083 - DNA, 19 bp, Homo sapiens
  siRNA target sequence for HPRT1 (NM_000194.1,532-550).
ggtcaggcagtataatcca

SEQ ID NO: 166084 - DNA, 19 bp, Homo sapiens
  siRNA target sequence for HPRT1 (NM_000194.1,533-551).
gtcaggcagtataatccaa

SEQ ID NO: 166085 - DNA, 19 bp, Homo sapiens
  siRNA target sequence for HPRT1 (NM_000194.1,588-606).
ccccacgaagtgttggata

SEQ ID NO: 166086 - DNA, 19 bp, Homo sapiens
  siRNA target sequence for HPRT1 (NM_000194.1,610-628).
gccagactttgttggattt

SEQ ID NO: 166087 - DNA, 19 bp, Homo sapiens
  siRNA target sequence for HPRT1 (NM_000194.1,653-671).
ggatatgcccttgactata

SEQ ID NO: 166088 - DNA, 19 bp, Homo sapiens
  siRNA target sequence for HPRT1 (NM_000194.1,654-672).
gatatgcccttgactataa

SEQ ID NO: 166089 - DNA, 19 bp, Homo sapiens
  siRNA target sequence for HPRT1 (NM_000194.1,659-677).
gcccttgactataatgaat

SEQ ID NO: 166090 - DNA, 19 bp, Homo sapiens
  siRNA target sequence for HPRT1 (NM_000194.1,660-678).
cccttgactataatgaata

SEQ ID NO: 166091 - DNA, 19 bp, Homo sapiens
  siRNA target sequence for HPRT1 (NM_000194.1,698-716).
gtttgtgtcattagtgaaa

SEQ ID NO: 166092 - DNA, 19 bp, Homo sapiens
  siRNA target sequence for IDI1 (NM_004508.2,340-358).
ggcagagatgtgtatcctt

SEQ ID NO: 166093 - DNA, 19 bp, Homo sapiens
  siRNA target sequence for IDI1 (NM_004508.2,341-359).
gcagagatgtgtatcctta

SEQ ID NO: 166094 - DNA, 19 bp, Homo sapiens
  siRNA target sequence for IDI1 (NM_004508.2,342-360).
cagagatgtgtatccttat

SEQ ID NO: 166095 - DNA, 19 bp, Homo sapiens
  siRNA target sequence for IDI1 (NM_004508.2,466-484).
caacaccgaaaataagctt

SEQ ID NO: 166096 - DNA, 19 bp, Homo sapiens
  siRNA target sequence for IDI1 (NM_004508.2,521-539).
ccaggttgttttacgaata

SEQ ID NO: 166097 - DNA, 19 bp, Homo sapiens
  siRNA target sequence for IDI1 (NM_004508.2,535-553).
gaatacgtgttgtagtcat

SEQ ID NO: 166098 - DNA, 19 bp, Homo sapiens
  siRNA target sequence for IDI1 (NM_004508.2,540-558).
cgtgttgtagtcatccatt

SEQ ID NO: 166099 - DNA, 19 bp, Homo sapiens
  siRNA target sequence for IDI1 (NM_004508.2,541-559).
gtgttgtagtcatccatta

SEQ ID NO: 166100 - DNA, 19 bp, Homo sapiens
  siRNA target sequence for IDI1 (NM_004508.2,546-564).
gtagtcatccattaagcaa

SEQ ID NO: 166101 - DNA, 19 bp, Homo sapiens
  siRNA target sequence for IDI1 (NM_004508.2,720-738).
ggggtgaacatgaaattga

SEQ ID NO: 166102 - DNA, 19 bp, Homo sapiens
  siRNA target sequence for IDI1 (NM_004508.2,721-739).
gggtgaacatgaaattgat

SEQ ID NO: 166103 - DNA, 19 bp, Homo sapiens
  siRNA target sequence for IDI1 (NM_004508.2,722-740).
ggtgaacatgaaattgatt

SEQ ID NO: 166104 - DNA, 19 bp, Homo sapiens
  siRNA target sequence for IDI1 (NM_004508.2,723-741).
gtgaacatgaaattgatta

SEQ ID NO: 166105 - DNA, 19 bp, Homo sapiens
  siRNA target sequence for IDI1 (NM_004508.2,790-808).
gattaaaagctattgttat

SEQ ID NO: 166106 - DNA, 19 bp, Homo sapiens
  siRNA target sequence for IDI1 (NM_004508.2,798-816).
gctattgttatgtgtcaaa

SEQ ID NO: 166107 - DNA, 19 bp, Homo sapiens
  siRNA target sequence for IDI1 (NM_004508.2,849-867).
ccagtggtgaaattaagat

SEQ ID NO: 166108 - DNA, 19 bp, Homo sapiens
  siRNA target sequence for IDI1 (NM_004508.2,850-868).
cagtggtgaaattaagata

SEQ ID NO: 166109 - DNA, 19 bp, Homo sapiens
  siRNA target sequence for IDI1 (NM_004508.2,865-883).
gataacgccatggtttaaa

SEQ ID NO: 166110 - DNA, 19 bp, Homo sapiens
  siRNA target sequence for IDI1 (NM_004508.2,870-888).
cgccatggtttaaaattat

SEQ ID NO: 166111 - DNA, 19 bp, Homo sapiens
  siRNA target sequence for IDI1 (NM_004508.2,912-930).
ggtgggataacttaaatca

SEQ ID NO: 166112 - DNA, 19 bp, Homo sapiens
  siRNA target sequence for IDI1 (NM_004508.2,913-931).
gtgggataacttaaatcat

SEQ ID NO: 166113 - DNA, 19 bp, Homo sapiens
  siRNA target sequence for IDI1 (NM_004508.2,915-933).
gggataacttaaatcattt

SEQ ID NO: 166114 - DNA, 19 bp, Homo sapiens
  siRNA target sequence for IDI2 (NM_033261.2,162-180).
gccgacaccaagaggaatt

SEQ ID NO: 166115 - DNA, 19 bp, Homo sapiens
  siRNA target sequence for IDI2 (NM_033261.2,181-199).
gccatctgaacgaaaacat

SEQ ID NO: 166116 - DNA, 19 bp, Homo sapiens
  siRNA target sequence for IDI2 (NM_033261.2,182-200).
ccatctgaacgaaaacatt

SEQ ID NO: 166117 - DNA, 19 bp, Homo sapiens
  siRNA target sequence for IDI2 (NM_033261.2,220-238).
gagccttcagcgttgtctt

SEQ ID NO: 166118 - DNA, 19 bp, Homo sapiens
  siRNA target sequence for IDI2 (NM_033261.2,236-254).
cttgtttaacaccaagaat

SEQ ID NO: 166119 - DNA, 19 bp, Homo sapiens
  siRNA target sequence for IDI2 (NM_033261.2,290-308).
cacgtttcctgggtatttt

SEQ ID NO: 166120 - DNA, 19 bp, Homo sapiens
  siRNA target sequence for IDI2 (NM_033261.2,319-337).
gtagtagccacccattata

SEQ ID NO: 166121 - DNA, 19 bp, Homo sapiens
  siRNA target sequence for IDI2 (NM_033261.2,322-340).
gtagccacccattatacaa

SEQ ID NO: 166122 - DNA, 19 bp, Homo sapiens
  siRNA target sequence for IDI2 (NM_033261.2,553-571).
cggatcccagtgaaacgaa

SEQ ID NO: 166123 - DNA, 19 bp, Homo sapiens
  siRNA target sequence for IDI2 (NM_033261.2,554-572).
ggatcccagtgaaacgaaa

SEQ ID NO: 166124 - DNA, 19 bp, Homo sapiens
  siRNA target sequence for IDI2 (NM_033261.2,555-573).
gatcccagtgaaacgaaaa

SEQ ID NO: 166125 - DNA, 19 bp, Homo sapiens
  siRNA target sequence for IDI2 (NM_033261.2,623-641).
ggcgaggggtgaagtcaaa

SEQ ID NO: 166126 - DNA, 19 bp, Homo sapiens
  siRNA target sequence for IDI2 (NM_033261.2,625-643).
cgaggggtgaagtcaaagt

SEQ ID NO: 166127 - DNA, 19 bp, Homo sapiens
  siRNA target sequence for IDI2 (NM_033261.2,642-660).
gtcaccccctggctaagaa

SEQ ID NO: 166128 - DNA, 19 bp, Homo sapiens
  siRNA target sequence for IDI2 (NM_033261.2,715-733).
cgtttgtggagcttcacaa

SEQ ID NO: 166129 - DNA, 19 bp, Homo sapiens
  siRNA target sequence for ILKAP (NM_030768.2,204-222).
gacccctgctctttgatga

SEQ ID NO: 166130 - DNA, 19 bp, Homo sapiens
  siRNA target sequence for ILKAP (NM_030768.2,308-326).
ggttctcttgccacatcaa

SEQ ID NO: 166131 - DNA, 19 bp, Homo sapiens
  siRNA target sequence for ILKAP (NM_030768.2,309-327).
gttctcttgccacatcaat

SEQ ID NO: 166132 - DNA, 19 bp, Homo sapiens
  siRNA target sequence for ILKAP (NM_030768.2,541-559).
cccatcgtccctcattact

SEQ ID NO: 166133 - DNA, 19 bp, Homo sapiens
  siRNA target sequence for ILKAP (NM_030768.2,551-569).
ctcattactcgggtttcat

SEQ ID NO: 166134 - DNA, 19 bp, Homo sapiens
  siRNA target sequence for ILKAP (NM_030768.2,553-571).
cattactcgggtttcatat

SEQ ID NO: 166135 - DNA, 19 bp, Homo sapiens
  siRNA target sequence for ILKAP (NM_030768.2,699-717).
gccttttggacactttcaa

SEQ ID NO: 166136 - DNA, 19 bp, Homo sapiens
  siRNA target sequence for ILKAP (NM_030768.2,709-727).
cactttcaagcatactgat

SEQ ID NO: 166137 - DNA, 19 bp, Homo sapiens
  siRNA target sequence for ILKAP (NM_030768.2,723-741).
ctgatgaagagttccttaa

SEQ ID NO: 166138 - DNA, 19 bp, Homo sapiens
  siRNA target sequence for ILKAP (NM_030768.2,799-817).
ggctgtagacaacattctt

SEQ ID NO: 166139 - DNA, 19 bp, Homo sapiens
  siRNA target sequence for ILKAP (NM_030768.2,803-821).
gtagacaacattctttata

SEQ ID NO: 166140 - DNA, 19 bp, Homo sapiens
  siRNA target sequence for ILKAP (NM_030768.2,834-852).
gagatagtcgggcaatctt

SEQ ID NO: 166141 - DNA, 19 bp, Homo sapiens
  siRNA target sequence for ILKAP (NM_030768.2,836-854).
gatagtcgggcaatcttgt

SEQ ID NO: 166142 - DNA, 19 bp, Homo sapiens
  siRNA target sequence for ILKAP (NM_030768.2,844-862).
ggcaatcttgtgtcgttat

SEQ ID NO: 166143 - DNA, 19 bp, Homo sapiens
  siRNA target sequence for ILKAP (NM_030768.2,845-863).
gcaatcttgtgtcgttata

SEQ ID NO: 166144 - DNA, 19 bp, Homo sapiens
  siRNA target sequence for ILKAP (NM_030768.2,846-864).
caatcttgtgtcgttataa

SEQ ID NO: 166145 - DNA, 19 bp, Homo sapiens
  siRNA target sequence for ILKAP (NM_030768.2,894-912).
gcctcagcaaagagcataa

SEQ ID NO: 166146 - DNA, 19 bp, Homo sapiens
  siRNA target sequence for ILKAP (NM_030768.2,895-913).
cctcagcaaagagcataat

SEQ ID NO: 166147 - DNA, 19 bp, Homo sapiens
  siRNA target sequence for ILKAP (NM_030768.2,898-916).
cagcaaagagcataatcca

SEQ ID NO: 166148 - DNA, 19 bp, Homo sapiens
  siRNA target sequence for ILKAP (NM_030768.2,1067-1085).
cagctgacccccaatgaca

SEQ ID NO: 166149 - DNA, 19 bp, Homo sapiens
  siRNA target sequence for ILKAP (NM_030768.2,1161-1179).
gtctcgaggatgaaaagat

SEQ ID NO: 166150 - DNA, 19 bp, Homo sapiens
  siRNA target sequence for IMPA1 (NM_005536.2,318-336).
gcagctggggaaaaaagta

SEQ ID NO: 166151 - DNA, 19 bp, Homo sapiens
  siRNA target sequence for IMPA1 (NM_005536.2,379-397).
gaacaactaactttgtaca

SEQ ID NO: 166152 - DNA, 19 bp, Homo sapiens
  siRNA target sequence for IMPA1 (NM_005536.2,525-543).
ggtcaaaaactacaagttt

SEQ ID NO: 166153 - DNA, 19 bp, Homo sapiens
  siRNA target sequence for IMPA1 (NM_005536.2,616-634).
gaatggttctttctaatat

SEQ ID NO: 166154 - DNA, 19 bp, Homo sapiens
  siRNA target sequence for IMPA1 (NM_005536.2,620-638).
ggttctttctaatatggaa

SEQ ID NO: 166155 - DNA, 19 bp, Homo sapiens
  siRNA target sequence for IMPA1 (NM_005536.2,714-732).
ggcggagcagatgcatatt

SEQ ID NO: 166156 - DNA, 19 bp, Homo sapiens
  siRNA target sequence for IMPA1 (NM_005536.2,715-733).
gcggagcagatgcatatta

SEQ ID NO: 166157 - DNA, 19 bp, Homo sapiens
  siRNA target sequence for IMPA1 (NM_005536.2,716-734).
cggagcagatgcatattat

SEQ ID NO: 166158 - DNA, 19 bp, Homo sapiens
  siRNA target sequence for IMPA1 (NM_005536.2,718-736).
gagcagatgcatattatga

SEQ ID NO: 166159 - DNA, 19 bp, Homo sapiens
  siRNA target sequence for IMPA1 (NM_005536.2,763-781).
caggagctggcattattgt

SEQ ID NO: 166160 - DNA, 19 bp, Homo sapiens
  siRNA target sequence for IMPA1 (NM_005536.2,790-808).
ctggtggcgtgctaatgga

SEQ ID NO: 166161 - DNA, 19 bp, Homo sapiens
  siRNA target sequence for IMPA1 (NM_005536.2,795-813).
ggcgtgctaatggatgtta

SEQ ID NO: 166162 - DNA, 19 bp, Homo sapiens
  siRNA target sequence for IMPA1 (NM_005536.2,797-815).
cgtgctaatggatgttaca

SEQ ID NO: 166163 - DNA, 19 bp, Homo sapiens
  siRNA target sequence for IMPA1 (NM_005536.2,814-832).
caggtggaccatttgattt

SEQ ID NO: 166164 - DNA, 19 bp, Homo sapiens
  siRNA target sequence for IMPA1 (NM_005536.2,836-854).
gtcacgaagagtaattgct

SEQ ID NO: 166165 - DNA, 19 bp, Homo sapiens
  siRNA target sequence for IMPA1 (NM_005536.2,880-898).
ggatagctaaagaaattca

SEQ ID NO: 166166 - DNA, 19 bp, Homo sapiens
  siRNA target sequence for IMPA1 (NM_005536.2,912-930).
caacgagacgacgaagatt

SEQ ID NO: 166167 - DNA, 19 bp, Homo sapiens
  siRNA target sequence for ITGAE (NM_002208.3,166-184).
ccctgctggccgctttcaa

SEQ ID NO: 166168 - DNA, 19 bp, Homo sapiens
  siRNA target sequence for ITGAE (NM_002208.3,337-355).
cccttgtccaggatgaaat

SEQ ID NO: 166169 - DNA, 19 bp, Homo sapiens
  siRNA target sequence for ITGAE (NM_002208.3,421-439).
ggagccaccacggtgtttt

SEQ ID NO: 166170 - DNA, 19 bp, Homo sapiens
  siRNA target sequence for ITGAE (NM_002208.3,746-764).
ggatggctcaggaagcatt

SEQ ID NO: 166171 - DNA, 19 bp, Homo sapiens
  siRNA target sequence for ITGAE (NM_002208.3,765-783).
gatcccccagactttcaga

SEQ ID NO: 166172 - DNA, 19 bp, Homo sapiens
  siRNA target sequence for ITGAE (NM_002208.3,976-994).
ccatgcaacacgtcttaga

SEQ ID NO: 166173 - DNA, 19 bp, Homo sapiens
  siRNA target sequence for ITGAE (NM_002208.3,1057-1075).
ccgatggtggcatattcga

SEQ ID NO: 166174 - DNA, 19 bp, Homo sapiens
  siRNA target sequence for ITGAE (NM_002208.3,1089-1107).
cttacgacagtcatcaact

SEQ ID NO: 166175 - DNA, 19 bp, Homo sapiens
  siRNA target sequence for ITGAE (NM_002208.3,1264-1282).
gcaaactgcggtacaacat

SEQ ID NO: 166176 - DNA, 19 bp, Homo sapiens
  siRNA target sequence for ITGAE (NM_002208.3,1319-1337).
ctaccagctggcacagatt

SEQ ID NO: 166177 - DNA, 19 bp, Homo sapiens
  siRNA target sequence for ITGAE (NM_002208.3,1786-1804).
gcgagcaggatggttcttt

SEQ ID NO: 166178 - DNA, 19 bp, Homo sapiens
  siRNA target sequence for ITGAE (NM_002208.3,1879-1897).
gggatctcagtcaggataa

SEQ ID NO: 166179 - DNA, 19 bp, Homo sapiens
  siRNA target sequence for ITGAE (NM_002208.3,1962-1980).
ggcagtgtgtatatctaca

SEQ ID NO: 166180 - DNA, 19 bp, Homo sapiens
  siRNA target sequence for ITGAE (NM_002208.3,1963-1981).
gcagtgtgtatatctacaa

SEQ ID NO: 166181 - DNA, 19 bp, Homo sapiens
  siRNA target sequence for ITGAE (NM_002208.3,2041-2059).
ccccaggactccagtactt

SEQ ID NO: 166182 - DNA, 19 bp, Homo sapiens
  siRNA target sequence for ITGAE (NM_002208.3,2072-2090).
ggctggtggctttgatatt

SEQ ID NO: 166183 - DNA, 19 bp, Homo sapiens
  siRNA target sequence for ITGAE (NM_002208.3,2223-2241).
gtcgtgaatgtccgtttat

SEQ ID NO: 166184 - DNA, 19 bp, Homo sapiens
  siRNA target sequence for ITGAE (NM_002208.3,2232-2250).
gtccgtttatgttttgaaa

SEQ ID NO: 166185 - DNA, 19 bp, Homo sapiens
  siRNA target sequence for ITGAE (NM_002208.3,2289-2307).
gaggcacttctcaacttca

SEQ ID NO: 166186 - DNA, 19 bp, Homo sapiens
  siRNA target sequence for ITGAE (NM_002208.3,2611-2629).
gtgtcgcagaattacagtt

SEQ ID NO: 166187 - DNA, 19 bp, Homo sapiens
  siRNA target sequence for ITGAE (NM_002208.3,2676-2694).
gagctgaccctgaacatta

SEQ ID NO: 166188 - DNA, 19 bp, Homo sapiens
  siRNA target sequence for ITGAE (NM_002208.3,2681-2699).
gaccctgaacattaaccta

SEQ ID NO: 166189 - DNA, 19 bp, Homo sapiens
  siRNA target sequence for ITGAE (NM_002208.3,2685-2703).
ctgaacattaacctaacta

SEQ ID NO: 166190 - DNA, 19 bp, Homo sapiens
  siRNA target sequence for ITGAE (NM_002208.3,2709-2727).
ggggaagattcctacatga

SEQ ID NO: 166191 - DNA, 19 bp, Homo sapiens
  siRNA target sequence for ITGAE (NM_002208.3,2712-2730).
gaagattcctacatgacaa

SEQ ID NO: 166192 - DNA, 19 bp, Homo sapiens
  siRNA target sequence for ITGAE (NM_002208.3,2782-2800).
ctccctctccaaacattca

SEQ ID NO: 166193 - DNA, 19 bp, Homo sapiens
  siRNA target sequence for ITGAE (NM_002208.3,3030-3048).
ctgtccaaaccatccataa

SEQ ID NO: 166194 - DNA, 19 bp, Homo sapiens
  siRNA target sequence for ITGAE (NM_002208.3,3034-3052).
ccaaaccatccataatgta

SEQ ID NO: 166195 - DNA, 19 bp, Homo sapiens
  siRNA target sequence for ITGAE (NM_002208.3,3149-3167).
cgtcccaaccaaattacga

SEQ ID NO: 166196 - DNA, 19 bp, Homo sapiens
  siRNA target sequence for ITGAE (NM_002208.3,3240-3258).
cgcgcttgtgcgtacagtt

SEQ ID NO: 166197 - DNA, 19 bp, Homo sapiens
  siRNA target sequence for ITGAE (NM_002208.3,3295-3313).
gtgtcatcgcttcagataa

SEQ ID NO: 166198 - DNA, 19 bp, Homo sapiens
  siRNA target sequence for ITGAE (NM_002208.3,3302-3320).
cgcttcagataaagaaaat

SEQ ID NO: 166199 - DNA, 19 bp, Homo sapiens
  siRNA target sequence for ITGAE (NM_002208.3,3406-3424).
ctttcaacaaatctctata

SEQ ID NO: 166200 - DNA, 19 bp, Homo sapiens
  siRNA target sequence for ITGAE (NM_002208.3,3480-3498).
gatgagaagtaccattctt

SEQ ID NO: 166201 - DNA, 19 bp, Homo sapiens
  siRNA target sequence for ITGAE (NM_002208.3,3496-3514).
ctttgcctatcatcattaa

SEQ ID NO: 166202 - DNA, 19 bp, Homo sapiens
  siRNA target sequence for ITGAE (NM_002208.3,3526-3544).
gtggacttctggtgttgat

SEQ ID NO: 166203 - DNA, 19 bp, Homo sapiens
  siRNA target sequence for ITGAE (NM_002208.3,3563-3581).
gttcaagtgtggctttttt

SEQ ID NO: 166204 - DNA, 19 bp, Homo sapiens
  siRNA target sequence for ITGAL (NM_002209.1,341-359).
ctgagaggttccaactata

SEQ ID NO: 166205 - DNA, 19 bp, Homo sapiens
  siRNA target sequence for ITGAL (NM_002209.1,394-412).
ccccacagatggaagcatt

SEQ ID NO: 166206 - DNA, 19 bp, Homo sapiens
  siRNA target sequence for ITGAL (NM_002209.1,395-413).
cccacagatggaagcattt

SEQ ID NO: 166207 - DNA, 19 bp, Homo sapiens
  siRNA target sequence for ITGAL (NM_002209.1,546-564).
gcaacgtagacctggtatt

SEQ ID NO: 166208 - DNA, 19 bp, Homo sapiens
  siRNA target sequence for ITGAL (NM_002209.1,547-565).
caacgtagacctggtattt

SEQ ID NO: 166209 - DNA, 19 bp, Homo sapiens
  siRNA target sequence for ITGAL (NM_002209.1,585-603).
gcttgcagccagatgaatt

SEQ ID NO: 166210 - DNA, 19 bp, Homo sapiens
  siRNA target sequence for ITGAL (NM_002209.1,586-604).
cttgcagccagatgaattt

SEQ ID NO: 166211 - DNA, 19 bp, Homo sapiens
  siRNA target sequence for ITGAL (NM_002209.1,937-955).
catcgggattggaaagcat

SEQ ID NO: 166212 - DNA, 19 bp, Homo sapiens
  siRNA target sequence for ITGAL (NM_002209.1,976-994).
ggagaccctccacaaattt

SEQ ID NO: 166213 - DNA, 19 bp, Homo sapiens
  siRNA target sequence for ITGAL (NM_002209.1,1004-1022).
cccgcgagcgagtttgtga

SEQ ID NO: 166214 - DNA, 19 bp, Homo sapiens
  siRNA target sequence for ITGAL (NM_002209.1,1005-1023).
ccgcgagcgagtttgtgaa

SEQ ID NO: 166215 - DNA, 19 bp, Homo sapiens
  siRNA target sequence for ITGAL (NM_002209.1,1006-1024).
cgcgagcgagtttgtgaaa

SEQ ID NO: 166216 - DNA, 19 bp, Homo sapiens
  siRNA target sequence for ITGAL (NM_002209.1,1008-1026).
cgagcgagtttgtgaaaat

SEQ ID NO: 166217 - DNA, 19 bp, Homo sapiens
  siRNA target sequence for ITGAL (NM_002209.1,1011-1029).
gcgagtttgtgaaaattct

SEQ ID NO: 166218 - DNA, 19 bp, Homo sapiens
  siRNA target sequence for ITGAL (NM_002209.1,1040-1058).
gagaagctgaaagatctat

SEQ ID NO: 166219 - DNA, 19 bp, Homo sapiens
  siRNA target sequence for ITGAL (NM_002209.1,1087-1105).
cattgagggcacaagcaaa

SEQ ID NO: 166220 - DNA, 19 bp, Homo sapiens
  siRNA target sequence for ITGAL (NM_002209.1,1238-1256).
ctgcaggatgacacattta

SEQ ID NO: 166221 - DNA, 19 bp, Homo sapiens
  siRNA target sequence for ITGAL (NM_002209.1,1321-1339).
gccctcccggcaaaagact

SEQ ID NO: 166222 - DNA, 19 bp, Homo sapiens
  siRNA target sequence for ITGAL (NM_002209.1,1322-1340).
ccctcccggcaaaagactt

SEQ ID NO: 166223 - DNA, 19 bp, Homo sapiens
  siRNA target sequence for ITGAL (NM_002209.1,1422-1440).
ggagccaggtccagacaat

SEQ ID NO: 166224 - DNA, 19 bp, Homo sapiens
  siRNA target sequence for ITGAL (NM_002209.1,1447-1465).
gacccagattggctcttat

SEQ ID NO: 166225 - DNA, 19 bp, Homo sapiens
  siRNA target sequence for ITGAL (NM_002209.1,1587-1605).
gacagttggggtttgaaga

SEQ ID NO: 166226 - DNA, 19 bp, Homo sapiens
  siRNA target sequence for ITGAL (NM_002209.1,1733-1751).
ggggctgtgtacatcttca

SEQ ID NO: 166227 - DNA, 19 bp, Homo sapiens
  siRNA target sequence for ITGAL (NM_002209.1,1734-1752).
gggctgtgtacatcttcaa

SEQ ID NO: 166228 - DNA, 19 bp, Homo sapiens
  siRNA target sequence for ITGAL (NM_002209.1,1735-1753).
ggctgtgtacatcttcaat

SEQ ID NO: 166229 - DNA, 19 bp, Homo sapiens
  siRNA target sequence for ITGAL (NM_002209.1,1780-1798).
gccaagtcagcggatagaa

SEQ ID NO: 166230 - DNA, 19 bp, Homo sapiens
  siRNA target sequence for ITGAL (NM_002209.1,1804-1822).
ccaagtgctctcaggaatt

SEQ ID NO: 166231 - DNA, 19 bp, Homo sapiens
  siRNA target sequence for ITGAL (NM_002209.1,1808-1826).
gtgctctcaggaattcagt

SEQ ID NO: 166232 - DNA, 19 bp, Homo sapiens
  siRNA target sequence for ITGAL (NM_002209.1,1985-2003).
gaagtggagtgctcctatt

SEQ ID NO: 166233 - DNA, 19 bp, Homo sapiens
  siRNA target sequence for ITGAL (NM_002209.1,1998-2016).
cctattcaaccagtaacaa

SEQ ID NO: 166234 - DNA, 19 bp, Homo sapiens
  siRNA target sequence for ITGAL (NM_002209.1,2027-2045).
ggagttaatatcacaatct

SEQ ID NO: 166235 - DNA, 19 bp, Homo sapiens
  siRNA target sequence for ITGAL (NM_002209.1,2084-2102).
cgcctggttgccaatctca

SEQ ID NO: 166236 - DNA, 19 bp, Homo sapiens
  siRNA target sequence for ITGAL (NM_002209.1,2251-2269).
catctcccccatcaatgtt

SEQ ID NO: 166237 - DNA, 19 bp, Homo sapiens
  siRNA target sequence for ITGAL (NM_002209.1,2373-2391).
cctgggagatcccttttga

SEQ ID NO: 166238 - DNA, 19 bp, Homo sapiens
  siRNA target sequence for ITGAL (NM_002209.1,2376-2394).
gggagatcccttttgagaa

SEQ ID NO: 166239 - DNA, 19 bp, Homo sapiens
  siRNA target sequence for ITGAL (NM_002209.1,2458-2476).
cagagccctgcgtctaact

SEQ ID NO: 166240 - DNA, 19 bp, Homo sapiens
  siRNA target sequence for ITGAL (NM_002209.1,2656-2674).
cagggcattatcttgcaat

SEQ ID NO: 166241 - DNA, 19 bp, Homo sapiens
  siRNA target sequence for ITGAL (NM_002209.1,2706-2724).
cggttgctctgcagatgat

SEQ ID NO: 166242 - DNA, 19 bp, Homo sapiens
  siRNA target sequence for ITGAL (NM_002209.1,2751-2769).
ggggggactcggttgaatt

SEQ ID NO: 166243 - DNA, 19 bp, Homo sapiens
  siRNA target sequence for ITGAL (NM_002209.1,2754-2772).
gggactcggttgaattgca

SEQ ID NO: 166244 - DNA, 19 bp, Homo sapiens
  siRNA target sequence for ITGAL (NM_002209.1,2886-2904).
ccacactctatgtcagttt

SEQ ID NO: 166245 - DNA, 19 bp, Homo sapiens
  siRNA target sequence for ITGAL (NM_002209.1,2967-2985).
ccatccacgaccacaacat

SEQ ID NO: 166246 - DNA, 19 bp, Homo sapiens
  siRNA target sequence for ITGAL (NM_002209.1,3329-3347).
gttgacgtggtgtatgaga

SEQ ID NO: 166247 - DNA, 19 bp, Homo sapiens
  siRNA target sequence for ITGAM (NM_000632.2,82-100).
ctcagagtccttctgttaa

SEQ ID NO: 166248 - DNA, 19 bp, Homo sapiens
  siRNA target sequence for ITGAM (NM_000632.2,101-119).
cagccttgaccttatgtca

SEQ ID NO: 166249 - DNA, 19 bp, Homo sapiens
  siRNA target sequence for ITGAM (NM_000632.2,506-524).
gtcctcaagaggatagtga

SEQ ID NO: 166250 - DNA, 19 bp, Homo sapiens
  siRNA target sequence for ITGAM (NM_000632.2,577-595).
cggatgaaggagtttgtct

SEQ ID NO: 166251 - DNA, 19 bp, Homo sapiens
  siRNA target sequence for ITGAM (NM_000632.2,642-660).
gatgcagtactctgaagaa

SEQ ID NO: 166252 - DNA, 19 bp, Homo sapiens
  siRNA target sequence for ITGAM (NM_000632.2,658-676).
gaattccggattcacttta

SEQ ID NO: 166253 - DNA, 19 bp, Homo sapiens
  siRNA target sequence for ITGAM (NM_000632.2,696-714).
caaccctaacccaagatca

SEQ ID NO: 166254 - DNA, 19 bp, Homo sapiens
  siRNA target sequence for ITGAM (NM_000632.2,775-793).
gtggtacgagagctgttta

SEQ ID NO: 166255 - DNA, 19 bp, Homo sapiens
  siRNA target sequence for ITGAM (NM_000632.2,778-796).
gtacgagagctgtttaaca

SEQ ID NO: 166256 - DNA, 19 bp, Homo sapiens
  siRNA target sequence for ITGAM (NM_000632.2,809-827).
cccgaaagaatgcctttaa

SEQ ID NO: 166257 - DNA, 19 bp, Homo sapiens
  siRNA target sequence for ITGAM (NM_000632.2,843-861).
cacggatggagaaaagttt

SEQ ID NO: 166258 - DNA, 19 bp, Homo sapiens
  siRNA target sequence for ITGAM (NM_000632.2,863-881).
gcgatcccttgggatatga

SEQ ID NO: 166259 - DNA, 19 bp, Homo sapiens
  siRNA target sequence for ITGAM (NM_000632.2,943-961).
gccttccgcagtgagaaat

SEQ ID NO: 166260 - DNA, 19 bp, Homo sapiens
  siRNA target sequence for ITGAM (NM_000632.2,964-982).
cgccaagagcttaatacca

SEQ ID NO: 166261 - DNA, 19 bp, Homo sapiens
  siRNA target sequence for ITGAM (NM_000632.2,1143-1161).
cgctgccatcacctctaat

SEQ ID NO: 166262 - DNA, 19 bp, Homo sapiens
  siRNA target sequence for ITGAM (NM_000632.2,1201-1219).
ggtggagtctttctatata

SEQ ID NO: 166263 - DNA, 19 bp, Homo sapiens
  siRNA target sequence for ITGAM (NM_000632.2,1204-1222).
ggagtctttctatatacat

SEQ ID NO: 166264 - DNA, 19 bp, Homo sapiens
  siRNA target sequence for ITGAM (NM_000632.2,1363-1381).
ggcctggtagcgatgttca

SEQ ID NO: 166265 - DNA, 19 bp, Homo sapiens
  siRNA target sequence for ITGAM (NM_000632.2,1845-1863).
ccaggacctcacaatggat

SEQ ID NO: 166266 - DNA, 19 bp, Homo sapiens
  siRNA target sequence for ITGAM (NM_000632.2,1969-1987).
gcaaggaatgtatttgagt

SEQ ID NO: 166267 - DNA, 19 bp, Homo sapiens
  siRNA target sequence for ITGAM (NM_000632.2,2085-2103).
ccagagtgttgtgacttat

SEQ ID NO: 166268 - DNA, 19 bp, Homo sapiens
  siRNA target sequence for ITGAM (NM_000632.2,2141-2159).
ccgtcttcaatgagacaaa

SEQ ID NO: 166269 - DNA, 19 bp, Homo sapiens
  siRNA target sequence for ITGAM (NM_000632.2,2204-2222).
cttgtgagaccctgaaact

SEQ ID NO: 166270 - DNA, 19 bp, Homo sapiens
  siRNA target sequence for ITGAM (NM_000632.2,2221-2239).
ctacagttgccgaattgca

SEQ ID NO: 166271 - DNA, 19 bp, Homo sapiens
  siRNA target sequence for ITGAM (NM_000632.2,2286-2304).
ggtgggaacgccattgtct

SEQ ID NO: 166272 - DNA, 19 bp, Homo sapiens
  siRNA target sequence for ITGAM (NM_000632.2,2359-2377).
gccttgtttccctttgaga

SEQ ID NO: 166273 - DNA, 19 bp, Homo sapiens
  siRNA target sequence for ITGAM (NM_000632.2,2360-2378).
ccttgtttccctttgagaa

SEQ ID NO: 166274 - DNA, 19 bp, Homo sapiens
  siRNA target sequence for ITGAM (NM_000632.2,2697-2715).
ctcagaggtcacctttaat

SEQ ID NO: 166275 - DNA, 19 bp, Homo sapiens
  siRNA target sequence for ITGAM (NM_000632.2,2699-2717).
cagaggtcacctttaatat

SEQ ID NO: 166276 - DNA, 19 bp, Homo sapiens
  siRNA target sequence for ITGAM (NM_000632.2,2709-2727).
ctttaatatcacgtttgat

SEQ ID NO: 166277 - DNA, 19 bp, Homo sapiens
  siRNA target sequence for ITGAM (NM_000632.2,2735-2753).
ctaaggcttcccttggaaa

SEQ ID NO: 166278 - DNA, 19 bp, Homo sapiens
  siRNA target sequence for ITGAM (NM_000632.2,2804-2822).
ccaacaaaaccgaattcca

SEQ ID NO: 166279 - DNA, 19 bp, Homo sapiens
  siRNA target sequence for ITGAM (NM_000632.2,2805-2823).
caacaaaaccgaattccaa

SEQ ID NO: 166280 - DNA, 19 bp, Homo sapiens
  siRNA target sequence for ITGAM (NM_000632.2,2868-2886).
ccatggggtctccactaaa

SEQ ID NO: 166281 - DNA, 19 bp, Homo sapiens
  siRNA target sequence for ITGAM (NM_000632.2,2869-2887).
catggggtctccactaaat

SEQ ID NO: 166282 - DNA, 19 bp, Homo sapiens
  siRNA target sequence for ITGAM (NM_000632.2,2875-2893).
gtctccactaaatatctca

SEQ ID NO: 166283 - DNA, 19 bp, Homo sapiens
  siRNA target sequence for ITGAM (NM_000632.2,2879-2897).
ccactaaatatctcaactt

SEQ ID NO: 166284 - DNA, 19 bp, Homo sapiens
  siRNA target sequence for ITGAM (NM_000632.2,2920-2938).
cgggtcatgcagcatcaat

SEQ ID NO: 166285 - DNA, 19 bp, Homo sapiens
  siRNA target sequence for ITGAM (NM_000632.2,2922-2940).
ggtcatgcagcatcaatat

SEQ ID NO: 166286 - DNA, 19 bp, Homo sapiens
  siRNA target sequence for ITGAM (NM_000632.2,3003-3021).
gctgaaccagactgtcata

SEQ ID NO: 166287 - DNA, 19 bp, Homo sapiens
  siRNA target sequence for ITGAM (NM_000632.2,3004-3022).
ctgaaccagactgtcatat

SEQ ID NO: 166288 - DNA, 19 bp, Homo sapiens
  siRNA target sequence for ITGAM (NM_000632.2,3284-3302).
ctgagatcttgtttaacga

SEQ ID NO: 166289 - DNA, 19 bp, Homo sapiens
  siRNA target sequence for ITGAM (NM_000632.2,3286-3304).
gagatcttgtttaacgatt

SEQ ID NO: 166290 - DNA, 19 bp, Homo sapiens
  siRNA target sequence for ITGAX (NM_000887.3,111-129).
caacttctctaggtttcaa

SEQ ID NO: 166291 - DNA, 19 bp, Homo sapiens
  siRNA target sequence for ITGAX (NM_000887.3,114-132).
cttctctaggtttcaactt

SEQ ID NO: 166292 - DNA, 19 bp, Homo sapiens
  siRNA target sequence for ITGAX (NM_000887.3,648-666).
ccaacaaattccaaacaca

SEQ ID NO: 166293 - DNA, 19 bp, Homo sapiens
  siRNA target sequence for ITGAX (NM_000887.3,727-745).
ccagctgcaagggtttaca

SEQ ID NO: 166294 - DNA, 19 bp, Homo sapiens
  siRNA target sequence for ITGAX (NM_000887.3,728-746).
cagctgcaagggtttacat

SEQ ID NO: 166295 - DNA, 19 bp, Homo sapiens
  siRNA target sequence for ITGAX (NM_000887.3,731-749).
ctgcaagggtttacataca

SEQ ID NO: 166296 - DNA, 19 bp, Homo sapiens
  siRNA target sequence for ITGAX (NM_000887.3,751-769).
ggccaccgccatccaaaat

SEQ ID NO: 166297 - DNA, 19 bp, Homo sapiens
  siRNA target sequence for ITGAX (NM_000887.3,753-771).
ccaccgccatccaaaatgt

SEQ ID NO: 166298 - DNA, 19 bp, Homo sapiens
  siRNA target sequence for ITGAX (NM_000887.3,807-825).
gtagggatgccgccaaaat

SEQ ID NO: 166299 - DNA, 19 bp, Homo sapiens
  siRNA target sequence for ITGAX (NM_000887.3,810-828).
gggatgccgccaaaattct

SEQ ID NO: 166300 - DNA, 19 bp, Homo sapiens
  siRNA target sequence for ITGAX (NM_000887.3,812-830).
gatgccgccaaaattctca

SEQ ID NO: 166301 - DNA, 19 bp, Homo sapiens
  siRNA target sequence for ITGAX (NM_000887.3,816-834).
ccgccaaaattctcattgt

SEQ ID NO: 166302 - DNA, 19 bp, Homo sapiens
  siRNA target sequence for ITGAX (NM_000887.3,858-876).
gcgacagcctggattataa

SEQ ID NO: 166303 - DNA, 19 bp, Homo sapiens
  siRNA target sequence for ITGAX (NM_000887.3,907-925).
catcatccgctatgcaatt

SEQ ID NO: 166304 - DNA, 19 bp, Homo sapiens
  siRNA target sequence for ITGAX (NM_000887.3,928-946).
ggttggattagcttttcaa

SEQ ID NO: 166305 - DNA, 19 bp, Homo sapiens
  siRNA target sequence for ITGAX (NM_000887.3,988-1006).
gccctcccaggaacacata

SEQ ID NO: 166306 - DNA, 19 bp, Homo sapiens
  siRNA target sequence for ITGAX (NM_000887.3,1018-1036).
ggactttgatgctctgaaa

SEQ ID NO: 166307 - DNA, 19 bp, Homo sapiens
  siRNA target sequence for ITGAX (NM_000887.3,1098-1116).
gtagctccttcgaattgga

SEQ ID NO: 166308 - DNA, 19 bp, Homo sapiens
  siRNA target sequence for ITGAX (NM_000887.3,1933-1951).
ggtgagcatgcagttcata

SEQ ID NO: 166309 - DNA, 19 bp, Homo sapiens
  siRNA target sequence for ITGAX (NM_000887.3,1964-1982).
cccaggtctgcgtttgagt

SEQ ID NO: 166310 - DNA, 19 bp, Homo sapiens
  siRNA target sequence for ITGAX (NM_000887.3,2012-2030).
ctggtacagtccaacatct

SEQ ID NO: 166311 - DNA, 19 bp, Homo sapiens
  siRNA target sequence for ITGAX (NM_000887.3,2033-2051).
ctttacattgacaaacgtt

SEQ ID NO: 166312 - DNA, 19 bp, Homo sapiens
  siRNA target sequence for ITGAX (NM_000887.3,2330-2348).
gccgatgctcagagatact

SEQ ID NO: 166313 - DNA, 19 bp, Homo sapiens
  siRNA target sequence for ITGAX (NM_000887.3,2858-2876).
cacgaacaattcaccaaat

SEQ ID NO: 166314 - DNA, 19 bp, Homo sapiens
  siRNA target sequence for ITGAX (NM_000887.3,2924-2942).
cacagataccaggtcaata

SEQ ID NO: 166315 - DNA, 19 bp, Homo sapiens
  siRNA target sequence for ITGAX (NM_000887.3,2928-2946).
gataccaggtcaataacct

SEQ ID NO: 166316 - DNA, 19 bp, Homo sapiens
  siRNA target sequence for ITGAX (NM_000887.3,3436-3454).
cacagcggtactgtacaaa

SEQ ID NO: 166317 - DNA, 19 bp, Homo sapiens
  siRNA target sequence for ITGAX (NM_000887.3,3470-3488).
cgtcagtacaaggaaatga

SEQ ID NO: 166318 - DNA, 19 bp, Homo sapiens
  siRNA target sequence for LYSAL1 (NM_004901.1,233-251).
gggtgtcctcgaattctga

SEQ ID NO: 166319 - DNA, 19 bp, Homo sapiens
  siRNA target sequence for LYSAL1 (NM_004901.1,239-257).
cctcgaattctgaatacca

SEQ ID NO: 166320 - DNA, 19 bp, Homo sapiens
  siRNA target sequence for LYSAL1 (NM_004901.1,240-258).
ctcgaattctgaataccaa

SEQ ID NO: 166321 - DNA, 19 bp, Homo sapiens
  siRNA target sequence for LYSAL1 (NM_004901.1,242-260).
cgaattctgaataccaatt

SEQ ID NO: 166322 - DNA, 19 bp, Homo sapiens
  siRNA target sequence for LYSAL1 (NM_004901.1,255-273).
ccaatttacgccaaattat

SEQ ID NO: 166323 - DNA, 19 bp, Homo sapiens
  siRNA target sequence for LYSAL1 (NM_004901.1,263-281).
cgccaaattatggtcatta

SEQ ID NO: 166324 - DNA, 19 bp, Homo sapiens
  siRNA target sequence for LYSAL1 (NM_004901.1,320-338).
gttgtcataatccgaaata

SEQ ID NO: 166325 - DNA, 19 bp, Homo sapiens
  siRNA target sequence for LYSAL1 (NM_004901.1,323-341).
gtcataatccgaaataagt

SEQ ID NO: 166326 - DNA, 19 bp, Homo sapiens
  siRNA target sequence for LYSAL1 (NM_004901.1,325-343).
cataatccgaaataagtat

SEQ ID NO: 166327 - DNA, 19 bp, Homo sapiens
  siRNA target sequence for LYSAL1 (NM_004901.1,350-368).
ctaaccagagacaagaaat

SEQ ID NO: 166328 - DNA, 19 bp, Homo sapiens
  siRNA target sequence for LYSAL1 (NM_004901.1,384-402).
cacgagttaccgacattga

SEQ ID NO: 166329 - DNA, 19 bp, Homo sapiens
  siRNA target sequence for LYSAL1 (NM_004901.1,414-432).
ccaataaccccaatgtgaa

SEQ ID NO: 166330 - DNA, 19 bp, Homo sapiens
  siRNA target sequence for LYSAL1 (NM_004901.1,460-478).
cagtgggtctcgagtattt

SEQ ID NO: 166331 - DNA, 19 bp, Homo sapiens
  siRNA target sequence for LYSAL1 (NM_004901.1,465-483).
ggtctcgagtatttgttta

SEQ ID NO: 166332 - DNA, 19 bp, Homo sapiens
  siRNA target sequence for LYSAL1 (NM_004901.1,504-522).
gcaatccacatgatctgtt

SEQ ID NO: 166333 - DNA, 19 bp, Homo sapiens
  siRNA target sequence for LYSAL1 (NM_004901.1,529-547).
caggcaaatgagggataaa

SEQ ID NO: 166334 - DNA, 19 bp, Homo sapiens
  siRNA target sequence for LYSAL1 (NM_004901.1,552-570).
gaaagccagtggtcatgaa

SEQ ID NO: 166335 - DNA, 19 bp, Homo sapiens
  siRNA target sequence for LYSAL1 (NM_004901.1,580-598).
gggcatttcagaatttgct

SEQ ID NO: 166336 - DNA, 19 bp, Homo sapiens
  siRNA target sequence for LYSAL1 (NM_004901.1,581-599).
ggcatttcagaatttgcta

SEQ ID NO: 166337 - DNA, 19 bp, Homo sapiens
  siRNA target sequence for LYSAL1 (NM_004901.1,659-677).
gtgccacgggcaaaacaca

SEQ ID NO: 166338 - DNA, 19 bp, Homo sapiens
  siRNA target sequence for LYSAL1 (NM_004901.1,661-679).
gccacgggcaaaacacaaa

SEQ ID NO: 166339 - DNA, 19 bp, Homo sapiens
  siRNA target sequence for LYSAL1 (NM_004901.1,702-720).
gcacggctggaatgagaat

SEQ ID NO: 166340 - DNA, 19 bp, Homo sapiens
  siRNA target sequence for LYSAL1 (NM_004901.1,772-790).
ccccgtgcactttgacttt

SEQ ID NO: 166341 - DNA, 19 bp, Homo sapiens
  siRNA target sequence for LYSAL1 (NM_004901.1,800-818).
gactctcatgcagaagtaa

SEQ ID NO: 166342 - DNA, 19 bp, Homo sapiens
  siRNA target sequence for LYSAL1 (NM_004901.1,802-820).
ctctcatgcagaagtaatt

SEQ ID NO: 166343 - DNA, 19 bp, Homo sapiens
  siRNA target sequence for LYSAL1 (NM_004901.1,846-864).
cttggattggcattaattt

SEQ ID NO: 166344 - DNA, 19 bp, Homo sapiens
  siRNA target sequence for LYSAL1 (NM_004901.1,873-891).
gacgatttgagcatattga

SEQ ID NO: 166345 - DNA, 19 bp, Homo sapiens
  siRNA target sequence for LYSAL1 (NM_004901.1,906-924).
ccgttgtggaagttaacat

SEQ ID NO: 166346 - DNA, 19 bp, Homo sapiens
  siRNA target sequence for LYSAL1 (NM_004901.1,907-925).
cgttgtggaagttaacatt

SEQ ID NO: 166347 - DNA, 19 bp, Homo sapiens
  siRNA target sequence for LYSAL1 (NM_004901.1,947-965).
gccattgtccgtaaaagga

SEQ ID NO: 166348 - DNA, 19 bp, Homo sapiens
  siRNA target sequence for LYSAL1 (NM_004901.1,1012-1030).
cgaagtccccaaaactgta

SEQ ID NO: 166349 - DNA, 19 bp, Homo sapiens
  siRNA target sequence for LYSAL1 (NM_004901.1,1048-1066).
gcaggaagaagtagctaaa

SEQ ID NO: 166350 - DNA, 19 bp, Homo sapiens
  siRNA target sequence for LYSAL1 (NM_004901.1,1052-1070).
gaagaagtagctaaaaact

SEQ ID NO: 166351 - DNA, 19 bp, Homo sapiens
  siRNA target sequence for LYSAL1 (NM_004901.1,1055-1073).
gaagtagctaaaaacttgt

SEQ ID NO: 166352 - DNA, 19 bp, Homo sapiens
  siRNA target sequence for LYSAL1 (NM_004901.1,1114-1132).
gcatgtgtatcgagtctat

SEQ ID NO: 166353 - DNA, 19 bp, Homo sapiens
  siRNA target sequence for LYSAL1 (NM_004901.1,1196-1214).
gccaacaccattcaaaaga

SEQ ID NO: 166354 - DNA, 19 bp, Homo sapiens
  siRNA target sequence for LYSAL1 (NM_004901.1,1303-1321).
gcaaaatggacaaaccata

SEQ ID NO: 166355 - DNA, 19 bp, Homo sapiens
  siRNA target sequence for LYSAL1 (NM_004901.1,1304-1322).
caaaatggacaaaccatat

SEQ ID NO: 166356 - DNA, 19 bp, Homo sapiens
  siRNA target sequence for LYSAL1 (NM_004901.1,1433-1451).
cacttccagaacagtgaat

SEQ ID NO: 166357 - DNA, 19 bp, Homo sapiens
  siRNA target sequence for LYSAL1 (NM_004901.1,1477-1495).
ctgcaccgaggatgtgtta

SEQ ID NO: 166358 - DNA, 19 bp, Homo sapiens
  siRNA target sequence for LYSAL1 (NM_004901.1,1482-1500).
ccgaggatgtgttacgaat

SEQ ID NO: 166359 - DNA, 19 bp, Homo sapiens
  siRNA target sequence for LYSAL1 (NM_004901.1,1497-1515).
gaatggggggagactacaa

SEQ ID NO: 166360 - DNA, 19 bp, Homo sapiens
  siRNA target sequence for LYSAL1 (NM_004901.1,1510-1528).
ctacaatgctgctaaattt

SEQ ID NO: 166361 - DNA, 19 bp, Homo sapiens
  siRNA target sequence for LYSAL1 (NM_004901.1,1513-1531).
caatgctgctaaatttact

SEQ ID NO: 166362 - DNA, 19 bp, Homo sapiens
  siRNA target sequence for LYSAL1 (NM_004901.1,1553-1571).
gcaacaaagtggtccattt

SEQ ID NO: 166363 - DNA, 19 bp, Homo sapiens
  siRNA target sequence for LYSAL1 (NM_004901.1,1554-1572).
caacaaagtggtccatttt

SEQ ID NO: 166364 - DNA, 19 bp, Homo sapiens
  siRNA target sequence for LYSAL1 (NM_004901.1,1619-1637).
cacaggcttaagtatcagt

SEQ ID NO: 166365 - DNA, 19 bp, Homo sapiens
  siRNA target sequence for LYSAL1 (NM_004901.1,1642-1660).
caaatcggcctggatgttt

SEQ ID NO: 166366 - DNA, 19 bp, Homo sapiens
  siRNA target sequence for LYSAL1 (NM_004901.1,1683-1701).
cgtttcctgtcaactataa

SEQ ID NO: 166367 - DNA, 19 bp, Homo sapiens
  siRNA target sequence for LYSAL1 (NM_004901.1,1684-1702).
gtttcctgtcaactataaa

SEQ ID NO: 166368 - DNA, 19 bp, Homo sapiens
  siRNA target sequence for LYSAL1 (NM_004901.1,1688-1706).
cctgtcaactataaaagct

SEQ ID NO: 166369 - DNA, 19 bp, Homo sapiens
  siRNA target sequence for LYSAL1 (NM_004901.1,1839-1857).
gcgtttcctttgtctacaa

SEQ ID NO: 166370 - DNA, 19 bp, Homo sapiens
  siRNA target sequence for MTHFD2 (NM_006636.2,789-807).
caattcttgcagatattgt

SEQ ID NO: 166371 - DNA, 19 bp, Homo sapiens
  siRNA target sequence for MTHFD2 (NM_006636.2,871-889).
cattgatgtgggaataaat

SEQ ID NO: 166372 - DNA, 19 bp, Homo sapiens
  siRNA target sequence for MTHFD2 (NM_006636.2,1067-1085).
cgagaagtgctgaagtcta

SEQ ID NO: 166373 - DNA, 19 bp, Homo sapiens
  siRNA target sequence for MTHFD2 (NM_006636.2,1068-1086).
gagaagtgctgaagtctaa

SEQ ID NO: 166374 - DNA, 19 bp, Homo sapiens
  siRNA target sequence for MTHFS (NM_006441.1,140-158).
cacagtgagtatcaaaagt

SEQ ID NO: 166375 - DNA, 19 bp, Homo sapiens
  siRNA target sequence for MTHFS (NM_006441.1,181-199).
gagcatgcaagatgaaatt

SEQ ID NO: 166376 - DNA, 19 bp, Homo sapiens
  siRNA target sequence for MTHFS (NM_006441.1,263-281).
cggttccagagcaatcaca

SEQ ID NO: 166377 - DNA, 19 bp, Homo sapiens
  siRNA target sequence for MTHFS (NM_006441.1,280-298).
catggatatggtgagaata

SEQ ID NO: 166378 - DNA, 19 bp, Homo sapiens
  siRNA target sequence for MTHFS (NM_006441.1,385-403).
gtccacagggggacttgat

SEQ ID NO: 166379 - DNA, 19 bp, Homo sapiens
  siRNA target sequence for MTHFS (NM_006441.1,454-472).
gaggggcaagggctactat

SEQ ID NO: 166380 - DNA, 19 bp, Homo sapiens
  siRNA target sequence for MTHFS (NM_006441.1,522-540).
ccctggcgttggctttcaa

SEQ ID NO: 166381 - DNA, 19 bp, Homo sapiens
  siRNA target sequence for MTHFS (NM_006441.1,553-571).
cctccaggtcccagtgaat

SEQ ID NO: 166382 - DNA, 19 bp, Homo sapiens
  siRNA target sequence for PFKL (NM_002626.2,468-486).
ccgctgggacagactgttt

SEQ ID NO: 166383 - DNA, 19 bp, Homo sapiens
  siRNA target sequence for PFKL (NM_002626.2,551-569).
ggtggcaccagcatcatgt

SEQ ID NO: 166384 - DNA, 19 bp, Homo sapiens
  siRNA target sequence for PFKL (NM_002626.2,607-625).
gacgcgcatgggcatttat

SEQ ID NO: 166385 - DNA, 19 bp, Homo sapiens
  siRNA target sequence for PFKL (NM_002626.2,609-627).
cgcgcatgggcatttatgt

SEQ ID NO: 166386 - DNA, 19 bp, Homo sapiens
  siRNA target sequence for PFKL (NM_002626.2,914-932).
gtggcggaaggtaagatct

SEQ ID NO: 166387 - DNA, 19 bp, Homo sapiens
  siRNA target sequence for PFKL (NM_002626.2,977-995).
ctagtgggctccatcgata

SEQ ID NO: 166388 - DNA, 19 bp, Homo sapiens
  siRNA target sequence for PFKL (NM_002626.2,1254-1272).
gtgggtcccgactgaacat

SEQ ID NO: 166389 - DNA, 19 bp, Homo sapiens
  siRNA target sequence for PFKL (NM_002626.2,1256-1274).
gggtcccgactgaacatca

SEQ ID NO: 166390 - DNA, 19 bp, Homo sapiens
  siRNA target sequence for PFKL (NM_002626.2,1257-1275).
ggtcccgactgaacatcat

SEQ ID NO: 166391 - DNA, 19 bp, Homo sapiens
  siRNA target sequence for PFKL (NM_002626.2,1260-1278).
cccgactgaacatcatcat

SEQ ID NO: 166392 - DNA, 19 bp, Homo sapiens
  siRNA target sequence for PFKL (NM_002626.2,1262-1280).
cgactgaacatcatcatca

SEQ ID NO: 166393 - DNA, 19 bp, Homo sapiens
  siRNA target sequence for PFKL (NM_002626.2,1360-1378).
cttcgacacccgtgtaact

SEQ ID NO: 166394 - DNA, 19 bp, Homo sapiens
  siRNA target sequence for PFKL (NM_002626.2,1622-1640).
gggagcttcgagaacaact

SEQ ID NO: 166395 - DNA, 19 bp, Homo sapiens
  siRNA target sequence for PFKL (NM_002626.2,2115-2133).
gctccgacactgctgtaaa

SEQ ID NO: 166396 - DNA, 19 bp, Homo sapiens
  siRNA target sequence for PFKL (NM_002626.2,2116-2134).
ctccgacactgctgtaaat

SEQ ID NO: 166397 - DNA, 19 bp, Homo sapiens
  siRNA target sequence for PFKL (NM_002626.2,2658-2676).
ccgtcactgagctcaagaa

SEQ ID NO: 166398 - DNA, 19 bp, Homo sapiens
  siRNA target sequence for PFKL (NM_002626.2,2659-2677).
cgtcactgagctcaagaaa

SEQ ID NO: 166399 - DNA, 19 bp, Homo sapiens
  siRNA target sequence for PFKM (NM_000289.3,60-78).
caaagccattgctgtctta

SEQ ID NO: 166400 - DNA, 19 bp, Homo sapiens
  siRNA target sequence for PFKM (NM_000289.3,64-82).
gccattgctgtcttaacct

SEQ ID NO: 166401 - DNA, 19 bp, Homo sapiens
  siRNA target sequence for PFKM (NM_000289.3,86-104).
gtggagatgcccaaggtat

SEQ ID NO: 166402 - DNA, 19 bp, Homo sapiens
  siRNA target sequence for PFKM (NM_000289.3,127-145).
gttcgagttggtatcttca

SEQ ID NO: 166403 - DNA, 19 bp, Homo sapiens
  siRNA target sequence for PFKM (NM_000289.3,146-164).
ccggtgcccgtgtcttctt

SEQ ID NO: 166404 - DNA, 19 bp, Homo sapiens
  siRNA target sequence for PFKM (NM_000289.3,147-165).
cggtgcccgtgtcttcttt

SEQ ID NO: 166405 - DNA, 19 bp, Homo sapiens
  siRNA target sequence for PFKM (NM_000289.3,221-239).
cctgggagagcgtttcgat

SEQ ID NO: 166406 - DNA, 19 bp, Homo sapiens
  siRNA target sequence for PFKM (NM_000289.3,253-271).
ggaggcacggtgattggaa

SEQ ID NO: 166407 - DNA, 19 bp, Homo sapiens
  siRNA target sequence for PFKM (NM_000289.3,337-355).
cgtgggatcaccaatctct

SEQ ID NO: 166408 - DNA, 19 bp, Homo sapiens
  siRNA target sequence for PFKM (NM_000289.3,406-424).
gagtggagtgacttgttga

SEQ ID NO: 166409 - DNA, 19 bp, Homo sapiens
  siRNA target sequence for PFKM (NM_000289.3,492-510).
gggcctggttgggtcaatt

SEQ ID NO: 166410 - DNA, 19 bp, Homo sapiens
  siRNA target sequence for PFKM (NM_000289.3,494-512).
gcctggttgggtcaattga

SEQ ID NO: 166411 - DNA, 19 bp, Homo sapiens
  siRNA target sequence for PFKM (NM_000289.3,496-514).
ctggttgggtcaattgaca

SEQ ID NO: 166412 - DNA, 19 bp, Homo sapiens
  siRNA target sequence for PFKM (NM_000289.3,498-516).
ggttgggtcaattgacaat

SEQ ID NO: 166413 - DNA, 19 bp, Homo sapiens
  siRNA target sequence for PFKM (NM_000289.3,559-577).
ctgcatcggatcatggaaa

SEQ ID NO: 166414 - DNA, 19 bp, Homo sapiens
  siRNA target sequence for PFKM (NM_000289.3,610-628).
caccagaggacatttgtgt

SEQ ID NO: 166415 - DNA, 19 bp, Homo sapiens
  siRNA target sequence for PFKM (NM_000289.3,775-793).
ggttctcgtctcaacatca

SEQ ID NO: 166416 - DNA, 19 bp, Homo sapiens
  siRNA target sequence for PFKM (NM_000289.3,776-794).
gttctcgtctcaacatcat

SEQ ID NO: 166417 - DNA, 19 bp, Homo sapiens
  siRNA target sequence for PFKM (NM_000289.3,779-797).
ctcgtctcaacatcatcat

SEQ ID NO: 166418 - DNA, 19 bp, Homo sapiens
  siRNA target sequence for PFKM (NM_000289.3,782-800).
gtctcaacatcatcattgt

SEQ ID NO: 166419 - DNA, 19 bp, Homo sapiens
  siRNA target sequence for PFKM (NM_000289.3,803-821).
ctgagggtgcaattgacaa

SEQ ID NO: 166420 - DNA, 19 bp, Homo sapiens
  siRNA target sequence for PFKM (NM_000289.3,842-860).
cagaagacatcaagaatct

SEQ ID NO: 166421 - DNA, 19 bp, Homo sapiens
  siRNA target sequence for PFKM (NM_000289.3,1139-1157).
gccggagcttcatgaacaa

SEQ ID NO: 166422 - DNA, 19 bp, Homo sapiens
  siRNA target sequence for PFKM (NM_000289.3,1141-1159).
cggagcttcatgaacaact

SEQ ID NO: 166423 - DNA, 19 bp, Homo sapiens
  siRNA target sequence for PFKM (NM_000289.3,1398-1416).
ccaaggtggctctaaactt

SEQ ID NO: 166424 - DNA, 19 bp, Homo sapiens
  siRNA target sequence for PFKM (NM_000289.3,1407-1425).
ctctaaacttgggactaaa

SEQ ID NO: 166425 - DNA, 19 bp, Homo sapiens
  siRNA target sequence for PFKM (NM_000289.3,1506-1524).
gggctttgaggcttacaca

SEQ ID NO: 166426 - DNA, 19 bp, Homo sapiens
  siRNA target sequence for PFKM (NM_000289.3,1642-1660).
gacacagcactcaatacta

SEQ ID NO: 166427 - DNA, 19 bp, Homo sapiens
  siRNA target sequence for PFKM (NM_000289.3,1707-1725).
gcgtcgggtgtttatcatt

SEQ ID NO: 166428 - DNA, 19 bp, Homo sapiens
  siRNA target sequence for PFKM (NM_000289.3,1709-1727).
gtcgggtgtttatcattga

SEQ ID NO: 166429 - DNA, 19 bp, Homo sapiens
  siRNA target sequence for PFKM (NM_000289.3,1783-1801).
gccgatgctgcctacattt

SEQ ID NO: 166430 - DNA, 19 bp, Homo sapiens
  siRNA target sequence for PFKM (NM_000289.3,1784-1802).
ccgatgctgcctacatttt

SEQ ID NO: 166431 - DNA, 19 bp, Homo sapiens
  siRNA target sequence for PFKM (NM_000289.3,1785-1803).
cgatgctgcctacattttt

SEQ ID NO: 166432 - DNA, 19 bp, Homo sapiens
  siRNA target sequence for PFKM (NM_000289.3,1830-1848).
gcaggcaaatgttgaacat

SEQ ID NO: 166433 - DNA, 19 bp, Homo sapiens
  siRNA target sequence for PFKM (NM_000289.3,1846-1864).
catctggtgcaaaagatga

SEQ ID NO: 166434 - DNA, 19 bp, Homo sapiens
  siRNA target sequence for PFKM (NM_000289.3,1884-1902).
cttggtgttaaggaatgaa

SEQ ID NO: 166435 - DNA, 19 bp, Homo sapiens
  siRNA target sequence for PFKM (NM_000289.3,2013-2031).
gagcccaaccccatttgat

SEQ ID NO: 166436 - DNA, 19 bp, Homo sapiens
  siRNA target sequence for PFKM (NM_000289.3,2022-2040).
cccatttgataggaatttt

SEQ ID NO: 166437 - DNA, 19 bp, Homo sapiens
  siRNA target sequence for PFKM (NM_000289.3,2033-2051).
ggaattttgccactaagat

SEQ ID NO: 166438 - DNA, 19 bp, Homo sapiens
  siRNA target sequence for PFKM (NM_000289.3,2072-2090).
ggatgtctgggaaaatcaa

SEQ ID NO: 166439 - DNA, 19 bp, Homo sapiens
  siRNA target sequence for PFKM (NM_000289.3,2073-2091).
gatgtctgggaaaatcaaa

SEQ ID NO: 166440 - DNA, 19 bp, Homo sapiens
  siRNA target sequence for PFKM (NM_000289.3,2109-2127).
gcggatctttgccaatact

SEQ ID NO: 166441 - DNA, 19 bp, Homo sapiens
  siRNA target sequence for PFKM (NM_000289.3,2253-2271).
gcccatcctcaaaatccta

SEQ ID NO: 166442 - DNA, 19 bp, Homo sapiens
  siRNA target sequence for PFKM (NM_000289.3,2273-2291).
ccaagtacgagattgactt

SEQ ID NO: 166443 - DNA, 19 bp, Homo sapiens
  siRNA target sequence for PFKP (NM_002627.2,278-296).
gtggacggaggctcaaaca

SEQ ID NO: 166444 - DNA, 19 bp, Homo sapiens
  siRNA target sequence for PFKP (NM_002627.2,525-543).
ggaacggccagatcgataa

SEQ ID NO: 166445 - DNA, 19 bp, Homo sapiens
  siRNA target sequence for PFKP (NM_002627.2,784-802).
ggtgttccttccagaatct

SEQ ID NO: 166446 - DNA, 19 bp, Homo sapiens
  siRNA target sequence for PFKP (NM_002627.2,889-907).
ggctgaaggagcaattgat

SEQ ID NO: 166447 - DNA, 19 bp, Homo sapiens
  siRNA target sequence for PFKP (NM_002627.2,1189-1207).
ggacgagaggagatttcaa

SEQ ID NO: 166448 - DNA, 19 bp, Homo sapiens
  siRNA target sequence for PFKP (NM_002627.2,1308-1326).
gcaacgtagctgtcatcaa

SEQ ID NO: 166449 - DNA, 19 bp, Homo sapiens
  siRNA target sequence for PFKP (NM_002627.2,1399-1417).
caggatgctcgccatctat

SEQ ID NO: 166450 - DNA, 19 bp, Homo sapiens
  siRNA target sequence for PFKP (NM_002627.2,1401-1419).
ggatgctcgccatctatga

SEQ ID NO: 166451 - DNA, 19 bp, Homo sapiens
  siRNA target sequence for PFKP (NM_002627.2,1402-1420).
gatgctcgccatctatgat

SEQ ID NO: 166452 - DNA, 19 bp, Homo sapiens
  siRNA target sequence for PFKP (NM_002627.2,1684-1702).
cgctactgtgtccaacaat

SEQ ID NO: 166453 - DNA, 19 bp, Homo sapiens
  siRNA target sequence for PFKP (NM_002627.2,1703-1721).
gtgccgggttccgatttca

SEQ ID NO: 166454 - DNA, 19 bp, Homo sapiens
  siRNA target sequence for PFKP (NM_002627.2,1733-1751).
gacaccgccctgaacacta

SEQ ID NO: 166455 - DNA, 19 bp, Homo sapiens
  siRNA target sequence for PFKP (NM_002627.2,1872-1890).
gagctgatgccgcatacat

SEQ ID NO: 166456 - DNA, 19 bp, Homo sapiens
  siRNA target sequence for PFKP (NM_002627.2,1874-1892).
gctgatgccgcatacattt

SEQ ID NO: 166457 - DNA, 19 bp, Homo sapiens
  siRNA target sequence for PFKP (NM_002627.2,1875-1893).
ctgatgccgcatacatttt

SEQ ID NO: 166458 - DNA, 19 bp, Homo sapiens
  siRNA target sequence for PFKP (NM_002627.2,2023-2041).
catttaccagctgtattca

SEQ ID NO: 166459 - DNA, 19 bp, Homo sapiens
  siRNA target sequence for PFKP (NM_002627.2,2048-2066).
ggcaaaggcgtgtttgact

SEQ ID NO: 166460 - DNA, 19 bp, Homo sapiens
  siRNA target sequence for PFKP (NM_002627.2,2103-2121).
gggcaccctctccatttga

SEQ ID NO: 166461 - DNA, 19 bp, Homo sapiens
  siRNA target sequence for PFKP (NM_002627.2,2104-2122).
ggcaccctctccatttgat

SEQ ID NO: 166462 - DNA, 19 bp, Homo sapiens
  siRNA target sequence for PFKP (NM_002627.2,2105-2123).
gcaccctctccatttgata

SEQ ID NO: 166463 - DNA, 19 bp, Homo sapiens
  siRNA target sequence for PFKP (NM_002627.2,2163-2181).
ggatcactgcaaaactcaa

SEQ ID NO: 166464 - DNA, 19 bp, Homo sapiens
  siRNA target sequence for PFKP (NM_002627.2,2212-2230).
caccgatgattccatttgt

SEQ ID NO: 166465 - DNA, 19 bp, Homo sapiens
  siRNA target sequence for PFKP (NM_002627.2,2214-2232).
ccgatgattccatttgtgt

SEQ ID NO: 166466 - DNA, 19 bp, Homo sapiens
  siRNA target sequence for PGM1 (NM_002633.2,217-235).
gtgaagatcgtgacagtta

SEQ ID NO: 166467 - DNA, 19 bp, Homo sapiens
  siRNA target sequence for PGM1 (NM_002633.2,311-329).
ccaactacgcggagaactt

SEQ ID NO: 166468 - DNA, 19 bp, Homo sapiens
  siRNA target sequence for PGM1 (NM_002633.2,457-475).
gggatcggtcgcttggtta

SEQ ID NO: 166469 - DNA, 19 bp, Homo sapiens
  siRNA target sequence for PGM1 (NM_002633.2,458-476).
ggatcggtcgcttggttat

SEQ ID NO: 166470 - DNA, 19 bp, Homo sapiens
  siRNA target sequence for PGM1 (NM_002633.2,468-486).
cttggttatcggacagaat

SEQ ID NO: 166471 - DNA, 19 bp, Homo sapiens
  siRNA target sequence for PGM1 (NM_002633.2,472-490).
gttatcggacagaatggaa

SEQ ID NO: 166472 - DNA, 19 bp, Homo sapiens
  siRNA target sequence for PGM1 (NM_002633.2,536-554).
ccattggtgggatcattct

SEQ ID NO: 166473 - DNA, 19 bp, Homo sapiens
  siRNA target sequence for PGM1 (NM_002633.2,579-597).
ccccaatggagattttgga

SEQ ID NO: 166474 - DNA, 19 bp, Homo sapiens
  siRNA target sequence for PGM1 (NM_002633.2,586-604).
ggagattttggaatcaaat

SEQ ID NO: 166475 - DNA, 19 bp, Homo sapiens
  siRNA target sequence for PGM1 (NM_002633.2,623-641).
gtcctgctccagaagcaat

SEQ ID NO: 166476 - DNA, 19 bp, Homo sapiens
  siRNA target sequence for PGM1 (NM_002633.2,631-649).
ccagaagcaataactgata

SEQ ID NO: 166477 - DNA, 19 bp, Homo sapiens
  siRNA target sequence for PGM1 (NM_002633.2,780-798).
ggattcggtagaagcttat

SEQ ID NO: 166478 - DNA, 19 bp, Homo sapiens
  siRNA target sequence for PGM1 (NM_002633.2,830-848).
gtgcactgaaagaactact

SEQ ID NO: 166479 - DNA, 19 bp, Homo sapiens
  siRNA target sequence for PGM1 (NM_002633.2,854-872).
ggccaaaccgactgaagat

SEQ ID NO: 166480 - DNA, 19 bp, Homo sapiens
  siRNA target sequence for PGM1 (NM_002633.2,863-881).
gactgaagatccgtattga

SEQ ID NO: 166481 - DNA, 19 bp, Homo sapiens
  siRNA target sequence for PGM1 (NM_002633.2,895-913).
gttgtgggaccgtatgtaa

SEQ ID NO: 166482 - DNA, 19 bp, Homo sapiens
  siRNA target sequence for PGM1 (NM_002633.2,898-916).
gtgggaccgtatgtaaaga

SEQ ID NO: 166483 - DNA, 19 bp, Homo sapiens
  siRNA target sequence for PGM1 (NM_002633.2,901-919).
ggaccgtatgtaaagaaga

SEQ ID NO: 166484 - DNA, 19 bp, Homo sapiens
  siRNA target sequence for PGM1 (NM_002633.2,902-920).
gaccgtatgtaaagaagat

SEQ ID NO: 166485 - DNA, 19 bp, Homo sapiens
  siRNA target sequence for PGM1 (NM_002633.2,946-964).
gcgaactcggcagttaact

SEQ ID NO: 166486 - DNA, 19 bp, Homo sapiens
  siRNA target sequence for PGM1 (NM_002633.2,1044-1062).
gtcaggagagcatgatttt

SEQ ID NO: 166487 - DNA, 19 bp, Homo sapiens
  siRNA target sequence for PGM1 (NM_002633.2,1079-1097).
gagatggggatcgaaacat

SEQ ID NO: 166488 - DNA, 19 bp, Homo sapiens
  siRNA target sequence for PGM1 (NM_002633.2,1081-1099).
gatggggatcgaaacatga

SEQ ID NO: 166489 - DNA, 19 bp, Homo sapiens
  siRNA target sequence for PGM1 (NM_002633.2,1085-1103).
gggatcgaaacatgattct

SEQ ID NO: 166490 - DNA, 19 bp, Homo sapiens
  siRNA target sequence for PGM1 (NM_002633.2,1250-1268).
gtgctacaaagattgcttt

SEQ ID NO: 166491 - DNA, 19 bp, Homo sapiens
  siRNA target sequence for PGM1 (NM_002633.2,1278-1296).
cccaactggctggaagttt

SEQ ID NO: 166492 - DNA, 19 bp, Homo sapiens
  siRNA target sequence for PGM1 (NM_002633.2,1365-1383).
ccacatccgtgagaaagat

SEQ ID NO: 166493 - DNA, 19 bp, Homo sapiens
  siRNA target sequence for PGM1 (NM_002633.2,1517-1535).
ctgagggcgcaaacaaaat

SEQ ID NO: 166494 - DNA, 19 bp, Homo sapiens
  siRNA target sequence for PGM1 (NM_002633.2,1519-1537).
gagggcgcaaacaaaatga

SEQ ID NO: 166495 - DNA, 19 bp, Homo sapiens
  siRNA target sequence for PGM1 (NM_002633.2,1523-1541).
gcgcaaacaaaatgatgaa

SEQ ID NO: 166496 - DNA, 19 bp, Homo sapiens
  siRNA target sequence for PGM1 (NM_002633.2,1615-1633).
gtggagaaggccgataact

SEQ ID NO: 166497 - DNA, 19 bp, Homo sapiens
  siRNA target sequence for PGM1 (NM_002633.2,1617-1635).
ggagaaggccgataacttt

SEQ ID NO: 166498 - DNA, 19 bp, Homo sapiens
  siRNA target sequence for PGM1 (NM_002633.2,1620-1638).
gaaggccgataactttgaa

SEQ ID NO: 166499 - DNA, 19 bp, Homo sapiens
  siRNA target sequence for PGM1 (NM_002633.2,1624-1642).
gccgataactttgaataca

SEQ ID NO: 166500 - DNA, 19 bp, Homo sapiens
  siRNA target sequence for PGM1 (NM_002633.2,1675-1693).
cagggcttgcgcctcattt

SEQ ID NO: 166501 - DNA, 19 bp, Homo sapiens
  siRNA target sequence for PGM1 (NM_002633.2,1748-1766).
ccaccattcggctgtacat

SEQ ID NO: 166502 - DNA, 19 bp, Homo sapiens
  siRNA target sequence for PGM1 (NM_002633.2,1757-1775).
ggctgtacatcgatagcta

SEQ ID NO: 166503 - DNA, 19 bp, Homo sapiens
  siRNA target sequence for PGM1 (NM_002633.2,1758-1776).
gctgtacatcgatagctat

SEQ ID NO: 166504 - DNA, 19 bp, Homo sapiens
  siRNA target sequence for PKLR (NM_000298.3,42-60).
gtcgatccaggagaacata

SEQ ID NO: 166505 - DNA, 19 bp, Homo sapiens
  siRNA target sequence for PKLR (NM_000298.3,95-113).
cccaaagagacttagcaaa

SEQ ID NO: 166506 - DNA, 19 bp, Homo sapiens
  siRNA target sequence for PKLR (NM_000298.3,641-659).
gggtggactaccccaatat

SEQ ID NO: 166507 - DNA, 19 bp, Homo sapiens
  siRNA target sequence for PKLR (NM_000298.3,642-660).
ggtggactaccccaatatt

SEQ ID NO: 166508 - DNA, 19 bp, Homo sapiens
  siRNA target sequence for PKLR (NM_000298.3,713-731).
ccctagtggtccagaaaat

SEQ ID NO: 166509 - DNA, 19 bp, Homo sapiens
  siRNA target sequence for PKLR (NM_000298.3,782-800).
gccggaagggcgtgaactt

SEQ ID NO: 166510 - DNA, 19 bp, Homo sapiens
  siRNA target sequence for PKLR (NM_000298.3,949-967).
gaaggacacggcatcaaga

SEQ ID NO: 166511 - DNA, 19 bp, Homo sapiens
  siRNA target sequence for PKLR (NM_000298.3,952-970).
ggacacggcatcaagatca

SEQ ID NO: 166512 - DNA, 19 bp, Homo sapiens
  siRNA target sequence for PKLR (NM_000298.3,995-1013).
gcgtgaagaggtttgatga

SEQ ID NO: 166513 - DNA, 19 bp, Homo sapiens
  siRNA target sequence for PKLR (NM_000298.3,996-1014).
cgtgaagaggtttgatgaa

SEQ ID NO: 166514 - DNA, 19 bp, Homo sapiens
  siRNA target sequence for PKLR (NM_000298.3,1159-1177).
ctggagagcatgattacca

SEQ ID NO: 166515 - DNA, 19 bp, Homo sapiens
  siRNA target sequence for PKLR (NM_000298.3,1607-1625).
ccatctgggcagatgatgt

SEQ ID NO: 166516 - DNA, 19 bp, Homo sapiens
  siRNA target sequence for PKLR (NM_000298.3,1608-1626).
catctgggcagatgatgta

SEQ ID NO: 166517 - DNA, 19 bp, Homo sapiens
  siRNA target sequence for PKLR (NM_000298.3,1635-1653).
ggtgcaatttggcattgaa

SEQ ID NO: 166518 - DNA, 19 bp, Homo sapiens
  siRNA target sequence for PKLR (NM_000298.3,1740-1758).
catgcgggtgctaagcata

SEQ ID NO: 166519 - DNA, 19 bp, Homo sapiens
  siRNA target sequence for PKM2 (NM_002654.3,567-585).
ctgtggctctagacactaa

SEQ ID NO: 166520 - DNA, 19 bp, Homo sapiens
  siRNA target sequence for PKM2 (NM_002654.3,1404-1422).
ccatctaccacttgcaatt

SEQ ID NO: 166521 - DNA, 19 bp, Homo sapiens
  siRNA target sequence for PKM2 (NM_002654.3,1512-1530).
gcagtggggccataatcgt

SEQ ID NO: 166522 - DNA, 19 bp, Homo sapiens
  siRNA target sequence for PP (NM_021129.2,206-224).
gataaggatgtgtttcaca

SEQ ID NO: 166523 - DNA, 19 bp, Homo sapiens
  siRNA target sequence for PP (NM_021129.2,239-257).
ccacgctggtctaatgcaa

SEQ ID NO: 166524 - DNA, 19 bp, Homo sapiens
  siRNA target sequence for PP (NM_021129.2,240-258).
cacgctggtctaatgcaaa

SEQ ID NO: 166525 - DNA, 19 bp, Homo sapiens
  siRNA target sequence for PP (NM_021129.2,242-260).
cgctggtctaatgcaaaaa

SEQ ID NO: 166526 - DNA, 19 bp, Homo sapiens
  siRNA target sequence for PP (NM_021129.2,243-261).
gctggtctaatgcaaaaat

SEQ ID NO: 166527 - DNA, 19 bp, Homo sapiens
  siRNA target sequence for PP (NM_021129.2,246-264).
ggtctaatgcaaaaatgga

SEQ ID NO: 166528 - DNA, 19 bp, Homo sapiens
  siRNA target sequence for PP (NM_021129.2,278-296).
gaccctttaaaccctatta

SEQ ID NO: 166529 - DNA, 19 bp, Homo sapiens
  siRNA target sequence for PP (NM_021129.2,323-341).
cgctatgttgcgaatttgt

SEQ ID NO: 166530 - DNA, 19 bp, Homo sapiens
  siRNA target sequence for PP (NM_021129.2,324-342).
gctatgttgcgaatttgtt

SEQ ID NO: 166531 - DNA, 19 bp, Homo sapiens
  siRNA target sequence for PP (NM_021129.2,333-351).
cgaatttgttcccgtataa

SEQ ID NO: 166532 - DNA, 19 bp, Homo sapiens
  siRNA target sequence for PP (NM_021129.2,340-358).
gttcccgtataaaggatat

SEQ ID NO: 166533 - DNA, 19 bp, Homo sapiens
  siRNA target sequence for PP (NM_021129.2,344-362).
ccgtataaaggatatatct

SEQ ID NO: 166534 - DNA, 19 bp, Homo sapiens
  siRNA target sequence for PP (NM_021129.2,395-413).
gacccagggcacaatgata

SEQ ID NO: 166535 - DNA, 19 bp, Homo sapiens
  siRNA target sequence for PP (NM_021129.2,403-421).
gcacaatgataaacatact

SEQ ID NO: 166536 - DNA, 19 bp, Homo sapiens
  siRNA target sequence for PP (NM_021129.2,443-461).
ccaattgatgtgtgtgaaa

SEQ ID NO: 166537 - DNA, 19 bp, Homo sapiens
  siRNA target sequence for PP (NM_021129.2,513-531).
gcatattggctatgattga

SEQ ID NO: 166538 - DNA, 19 bp, Homo sapiens
  siRNA target sequence for PP (NM_021129.2,549-567).
ggaaagtcattgccattaa

SEQ ID NO: 166539 - DNA, 19 bp, Homo sapiens
  siRNA target sequence for PP (NM_021129.2,579-597).
ctgatgcagccaattataa

SEQ ID NO: 166540 - DNA, 19 bp, Homo sapiens
  siRNA target sequence for PP (NM_021129.2,584-602).
gcagccaattataatgata

SEQ ID NO: 166541 - DNA, 19 bp, Homo sapiens
  siRNA target sequence for PP (NM_021129.2,587-605).
gccaattataatgatatca

SEQ ID NO: 166542 - DNA, 19 bp, Homo sapiens
  siRNA target sequence for PP (NM_021129.2,619-637).
gctgaaacctggctactta

SEQ ID NO: 166543 - DNA, 19 bp, Homo sapiens
  siRNA target sequence for PP (NM_021129.2,649-667).
ggactggtttagaaggtat

SEQ ID NO: 166544 - DNA, 19 bp, Homo sapiens
  siRNA target sequence for PP (NM_021129.2,701-719).
gcgtttaatgcagaattta

SEQ ID NO: 166545 - DNA, 19 bp, Homo sapiens
  siRNA target sequence for PP (NM_021129.2,702-720).
cgtttaatgcagaatttaa

SEQ ID NO: 166546 - DNA, 19 bp, Homo sapiens
  siRNA target sequence for PP (NM_021129.2,803-821).
ggaatcagttgcatgaata

SEQ ID NO: 166547 - DNA, 19 bp, Homo sapiens
  siRNA target sequence for PP (NM_021129.2,808-826).
cagttgcatgaatacaact

SEQ ID NO: 166548 - DNA, 19 bp, Homo sapiens
  siRNA target sequence for PP (NM_021129.2,917-935).
ccaacagacgtggataagt

SEQ ID NO: 166549 - DNA, 19 bp, Homo sapiens
  siRNA target sequence for PPA2 (NM_006903.3,156-174).
gaattaccgcctcttcttt

SEQ ID NO: 166550 - DNA, 19 bp, Homo sapiens
  siRNA target sequence for PPA2 (NM_006903.3,165-183).
cctcttctttaagaatgta

SEQ ID NO: 166551 - DNA, 19 bp, Homo sapiens
  siRNA target sequence for PPA2 (NM_006903.3,201-219).
cccctttcatgatattcct

SEQ ID NO: 166552 - DNA, 19 bp, Homo sapiens
  siRNA target sequence for PPA2 (NM_006903.3,217-235).
cctctgaaggtgaactcta

SEQ ID NO: 166553 - DNA, 19 bp, Homo sapiens
  siRNA target sequence for PPA2 (NM_006903.3,258-276).
gaagaaagcacgaaatgat

SEQ ID NO: 166554 - DNA, 19 bp, Homo sapiens
  siRNA target sequence for PPA2 (NM_006903.3,268-286).
cgaaatgatgaatatgaga

SEQ ID NO: 166555 - DNA, 19 bp, Homo sapiens
  siRNA target sequence for PPA2 (NM_006903.3,277-295).
gaatatgagaatctgttta

SEQ ID NO: 166556 - DNA, 19 bp, Homo sapiens
  siRNA target sequence for PPA2 (NM_006903.3,345-363).
caccaaggagccaatgaat

SEQ ID NO: 166557 - DNA, 19 bp, Homo sapiens
  siRNA target sequence for PPA2 (NM_006903.3,356-374).
caatgaatcccattaaaca

SEQ ID NO: 166558 - DNA, 19 bp, Homo sapiens
  siRNA target sequence for PPA2 (NM_006903.3,397-415).
cgctatgtggcgaatatct

SEQ ID NO: 166559 - DNA, 19 bp, Homo sapiens
  siRNA target sequence for PPA2 (NM_006903.3,398-416).
gctatgtggcgaatatctt

SEQ ID NO: 166560 - DNA, 19 bp, Homo sapiens
  siRNA target sequence for PPA2 (NM_006903.3,407-425).
cgaatatcttcccttacaa

SEQ ID NO: 166561 - DNA, 19 bp, Homo sapiens
  siRNA target sequence for PPA2 (NM_006903.3,426-444).
gggttatatatggaattat

SEQ ID NO: 166562 - DNA, 19 bp, Homo sapiens
  siRNA target sequence for PPA2 (NM_006903.3,487-505).
gtgaagatccttggaattt

SEQ ID NO: 166563 - DNA, 19 bp, Homo sapiens
  siRNA target sequence for PPA2 (NM_006903.3,517-535).
gatgaaggtgaaacagatt

SEQ ID NO: 166564 - DNA, 19 bp, Homo sapiens
  siRNA target sequence for PPA2 (NM_006903.3,536-554).
ggaaattaattgctatcaa

SEQ ID NO: 166565 - DNA, 19 bp, Homo sapiens
  siRNA target sequence for PPA2 (NM_006903.3,537-555).
gaaattaattgctatcaat

SEQ ID NO: 166566 - DNA, 19 bp, Homo sapiens
  siRNA target sequence for PPA2 (NM_006903.3,566-584).
ctgaagcctcaaagtttca

SEQ ID NO: 166567 - DNA, 19 bp, Homo sapiens
  siRNA target sequence for PPA2 (NM_006903.3,622-640).
ctggaagctactcttaatt

SEQ ID NO: 166568 - DNA, 19 bp, Homo sapiens
  siRNA target sequence for PPA2 (NM_006903.3,625-643).
gaagctactcttaattggt

SEQ ID NO: 166569 - DNA, 19 bp, Homo sapiens
  siRNA target sequence for PPA2 (NM_006903.3,632-650).
ctcttaattggtttagatt

SEQ ID NO: 166570 - DNA, 19 bp, Homo sapiens
  siRNA target sequence for PPA2 (NM_006903.3,777-795).
gtgtaatggaggagctata

SEQ ID NO: 166571 - DNA, 19 bp, Homo sapiens
  siRNA target sequence for PPA2 (NM_006903.3,779-797).
gtaatggaggagctataaa

SEQ ID NO: 166572 - DNA, 19 bp, Homo sapiens
  siRNA target sequence for PPA2 (NM_006903.3,803-821).
caaacgtgcagatatctga

SEQ ID NO: 166573 - DNA, 19 bp, Homo sapiens
  siRNA target sequence for PPA2 (NM_006903.3,870-888).
ggtatcatcttcaccaaat

SEQ ID NO: 166574 - DNA, 19 bp, Homo sapiens
  siRNA target sequence for PPA2 (NM_006903.3,871-889).
gtatcatcttcaccaaata

SEQ ID NO: 166575 - DNA, 19 bp, Homo sapiens
  siRNA target sequence for PPA2 (NM_176869.1,494-512).
cgaactgctttggagataa

SEQ ID NO: 166576 - DNA, 19 bp, Homo sapiens
  siRNA target sequence for PPA2 (NM_176869.1,530-548).
gcgaaataggctcaaagat

SEQ ID NO: 166577 - DNA, 19 bp, Homo sapiens
  siRNA target sequence for PPA2 (NM_176869.1,531-549).
cgaaataggctcaaagatt

SEQ ID NO: 166578 - DNA, 19 bp, Homo sapiens
  siRNA target sequence for PPAT (NM_002703.3,366-384).
ggagttcggtgccaacatt

SEQ ID NO: 166579 - DNA, 19 bp, Homo sapiens
  siRNA target sequence for PPAT (NM_002703.3,369-387).
gttcggtgccaacattcaa

SEQ ID NO: 166580 - DNA, 19 bp, Homo sapiens
  siRNA target sequence for PPAT (NM_002703.3,373-391).
ggtgccaacattcaaatca

SEQ ID NO: 166581 - DNA, 19 bp, Homo sapiens
  siRNA target sequence for PPAT (NM_002703.3,394-412).
caagggaatgggtcttgta

SEQ ID NO: 166582 - DNA, 19 bp, Homo sapiens
  siRNA target sequence for PPAT (NM_002703.3,418-436).
cgtctttactgaagacaat

SEQ ID NO: 166583 - DNA, 19 bp, Homo sapiens
  siRNA target sequence for PPAT (NM_002703.3,501-519).
gtgaactagaaaattgtca

SEQ ID NO: 166584 - DNA, 19 bp, Homo sapiens
  siRNA target sequence for PPAT (NM_002703.3,522-540).
ccttcgttgttgaaacact

SEQ ID NO: 166585 - DNA, 19 bp, Homo sapiens
  siRNA target sequence for PPAT (NM_002703.3,561-579).
cacataatggcgaattggt

SEQ ID NO: 166586 - DNA, 19 bp, Homo sapiens
  siRNA target sequence for PPAT (NM_002703.3,577-595).
ggtaaatgctgctcgatta

SEQ ID NO: 166587 - DNA, 19 bp, Homo sapiens
  siRNA target sequence for PPAT (NM_002703.3,578-596).
gtaaatgctgctcgattaa

SEQ ID NO: 166588 - DNA, 19 bp, Homo sapiens
  siRNA target sequence for PPAT (NM_002703.3,584-602).
gctgctcgattaaggaaaa

SEQ ID NO: 166589 - DNA, 19 bp, Homo sapiens
  siRNA target sequence for PPAT (NM_002703.3,585-603).
ctgctcgattaaggaaaaa

SEQ ID NO: 166590 - DNA, 19 bp, Homo sapiens
  siRNA target sequence for PPAT (NM_002703.3,628-646).
gtctacaagttctgatagt

SEQ ID NO: 166591 - DNA, 19 bp, Homo sapiens
  siRNA target sequence for PPAT (NM_002703.3,630-648).
ctacaagttctgatagtga

SEQ ID NO: 166592 - DNA, 19 bp, Homo sapiens
  siRNA target sequence for PPAT (NM_002703.3,633-651).
caagttctgatagtgaaat

SEQ ID NO: 166593 - DNA, 19 bp, Homo sapiens
  siRNA target sequence for PPAT (NM_002703.3,636-654).
gttctgatagtgaaatgat

SEQ ID NO: 166594 - DNA, 19 bp, Homo sapiens
  siRNA target sequence for PPAT (NM_002703.3,676-694).
ccctcctcaggaacaagat

SEQ ID NO: 166595 - DNA, 19 bp, Homo sapiens
  siRNA target sequence for PPAT (NM_002703.3,708-726).
gggtagccaggattaaaaa

SEQ ID NO: 166596 - DNA, 19 bp, Homo sapiens
  siRNA target sequence for PPAT (NM_002703.3,747-765).
cagcatactccctgcttat

SEQ ID NO: 166597 - DNA, 19 bp, Homo sapiens
  siRNA target sequence for PPAT (NM_002703.3,749-767).
gcatactccctgcttataa

SEQ ID NO: 166598 - DNA, 19 bp, Homo sapiens
  siRNA target sequence for PPAT (NM_002703.3,750-768).
catactccctgcttataat

SEQ ID NO: 166599 - DNA, 19 bp, Homo sapiens
  siRNA target sequence for PPAT (NM_002703.3,772-790).
cagagatgttatttatgca

SEQ ID NO: 166600 - DNA, 19 bp, Homo sapiens
  siRNA target sequence for PPAT (NM_002703.3,791-809).
gtacgagatccttatggaa

SEQ ID NO: 166601 - DNA, 19 bp, Homo sapiens
  siRNA target sequence for PPAT (NM_002703.3,806-824).
ggaaatcgtcccttatgca

SEQ ID NO: 166602 - DNA, 19 bp, Homo sapiens
  siRNA target sequence for PPAT (NM_002703.3,807-825).
gaaatcgtcccttatgcat

SEQ ID NO: 166603 - DNA, 19 bp, Homo sapiens
  siRNA target sequence for PPAT (NM_002703.3,823-841).
cattggtcgtcttattcca

SEQ ID NO: 166604 - DNA, 19 bp, Homo sapiens
  siRNA target sequence for PPAT (NM_002703.3,896-914).
gtgtcttcagaatcttgta

SEQ ID NO: 166605 - DNA, 19 bp, Homo sapiens
  siRNA target sequence for PPAT (NM_002703.3,909-927).
cttgtagcttcttatctat

SEQ ID NO: 166606 - DNA, 19 bp, Homo sapiens
  siRNA target sequence for PPAT (NM_002703.3,924-942).
ctattggtgcaagatatta

SEQ ID NO: 166607 - DNA, 19 bp, Homo sapiens
  siRNA target sequence for PPAT (NM_002703.3,1077-1095).
gtatgttcgaagaccaaat

SEQ ID NO: 166608 - DNA, 19 bp, Homo sapiens
  siRNA target sequence for PPAT (NM_002703.3,1081-1099).
gttcgaagaccaaatggtt

SEQ ID NO: 166609 - DNA, 19 bp, Homo sapiens
  siRNA target sequence for PPAT (NM_002703.3,1148-1166).
gtggatgcagatttggtta

SEQ ID NO: 166610 - DNA, 19 bp, Homo sapiens
  siRNA target sequence for PPAT (NM_002703.3,1212-1230).
gaaagtgtggacttccata

SEQ ID NO: 166611 - DNA, 19 bp, Homo sapiens
  siRNA target sequence for PPAT (NM_002703.3,1243-1261).
gtgtaaaaaccggtatgta

SEQ ID NO: 166612 - DNA, 19 bp, Homo sapiens
  siRNA target sequence for PPAT (NM_002703.3,1269-1287).
ccttcattcagccaaacat

SEQ ID NO: 166613 - DNA, 19 bp, Homo sapiens
  siRNA target sequence for PPAT (NM_002703.3,1281-1299).
caaacatgaggttaagaca

SEQ ID NO: 166614 - DNA, 19 bp, Homo sapiens
  siRNA target sequence for PPAT (NM_002703.3,1285-1303).
catgaggttaagacaactt

SEQ ID NO: 166615 - DNA, 19 bp, Homo sapiens
  siRNA target sequence for PPAT (NM_002703.3,1296-1314).
gacaacttggtgttgcaaa

SEQ ID NO: 166616 - DNA, 19 bp, Homo sapiens
  siRNA target sequence for PPAT (NM_002703.3,1323-1341).
gagtattgtcagacaactt

SEQ ID NO: 166617 - DNA, 19 bp, Homo sapiens
  siRNA target sequence for PPAT (NM_002703.3,1347-1365).
gcaaaagaattgttcttgt

SEQ ID NO: 166618 - DNA, 19 bp, Homo sapiens
  siRNA target sequence for PPAT (NM_002703.3,1358-1376).
gttcttgtagatgattcaa

SEQ ID NO: 166619 - DNA, 19 bp, Homo sapiens
  siRNA target sequence for PPAT (NM_002703.3,1392-1410).
ccatctcacctataataaa

SEQ ID NO: 166620 - DNA, 19 bp, Homo sapiens
  siRNA target sequence for PPAT (NM_002703.3,1417-1435).
caaagaatctggtgcaaaa

SEQ ID NO: 166621 - DNA, 19 bp, Homo sapiens
  siRNA target sequence for PPAT (NM_002703.3,1451-1469).
gtagcttcaccaccaatta

SEQ ID NO: 166622 - DNA, 19 bp, Homo sapiens
  siRNA target sequence for PPAT (NM_002703.3,1479-1497).
gcttcatgggaataaacat

SEQ ID NO: 166623 - DNA, 19 bp, Homo sapiens
  siRNA target sequence for PPAT (NM_002703.3,1605-1623).
ctgtacaagaagggataaa

SEQ ID NO: 166624 - DNA, 19 bp, Homo sapiens
  siRNA target sequence for PPAT (NM_002703.3,1607-1625).
gtacaagaagggataaagt

SEQ ID NO: 166625 - DNA, 19 bp, Homo sapiens
  siRNA target sequence for PPAT (NM_002703.3,1640-1658).
gagaaaaagcacgatatta

SEQ ID NO: 166626 - DNA, 19 bp, Homo sapiens
  siRNA target sequence for PPAT (NM_002703.3,1694-1712).
gaaaagagtggtcattgta

SEQ ID NO: 166627 - DNA, 19 bp, Homo sapiens
  siRNA target sequence for PPM1E (NM_014906.3,795-813).
gcaggagaccccagcttta

SEQ ID NO: 166628 - DNA, 19 bp, Homo sapiens
  siRNA target sequence for PPM1E (NM_014906.3,876-894).
gcattcctgactttaatat

SEQ ID NO: 166629 - DNA, 19 bp, Homo sapiens
  siRNA target sequence for PPM1E (NM_014906.3,981-999).
ccattcacctccacgttaa

SEQ ID NO: 166630 - DNA, 19 bp, Homo sapiens
  siRNA target sequence for PPM1E (NM_014906.3,1088-1106).
gcagccagggagagcttaa

SEQ ID NO: 166631 - DNA, 19 bp, Homo sapiens
  siRNA target sequence for PPM1E (NM_014906.3,1091-1109).
gccagggagagcttaagat

SEQ ID NO: 166632 - DNA, 19 bp, Homo sapiens
  siRNA target sequence for PPM1E (NM_014906.3,1119-1137).
caggagtggtgactttcat

SEQ ID NO: 166633 - DNA, 19 bp, Homo sapiens
  siRNA target sequence for PPM1E (NM_014906.3,1121-1139).
ggagtggtgactttcatca

SEQ ID NO: 166634 - DNA, 19 bp, Homo sapiens
  siRNA target sequence for PPM1E (NM_014906.3,1140-1158).
gaggcaacatgctacatgt

SEQ ID NO: 166635 - DNA, 19 bp, Homo sapiens
  siRNA target sequence for PPM1E (NM_014906.3,1318-1336).
gtcggtttccagagctatt

SEQ ID NO: 166636 - DNA, 19 bp, Homo sapiens
  siRNA target sequence for PPM1E (NM_014906.3,1572-1590).
cggttattgtggtattcct

SEQ ID NO: 166637 - DNA, 19 bp, Homo sapiens
  siRNA target sequence for PPM1E (NM_014906.3,1588-1606).
cctgagggacatgaacaaa

SEQ ID NO: 166638 - DNA, 19 bp, Homo sapiens
  siRNA target sequence for PPM1E (NM_014906.3,1674-1692).
gggatgataaggagaatca

SEQ ID NO: 166639 - DNA, 19 bp, Homo sapiens
  siRNA target sequence for PPM1E (NM_014906.3,1754-1772).
gatgggcgtgtggattcat

SEQ ID NO: 166640 - DNA, 19 bp, Homo sapiens
  siRNA target sequence for PPM1E (NM_014906.3,1757-1775).
gggcgtgtggattcattca

SEQ ID NO: 166641 - DNA, 19 bp, Homo sapiens
  siRNA target sequence for PPM1E (NM_014906.3,1763-1781).
gtggattcattcactgata

SEQ ID NO: 166642 - DNA, 19 bp, Homo sapiens
  siRNA target sequence for PPM1E (NM_014906.3,1794-1812).
gcccagggtcccaaatcaa

SEQ ID NO: 166643 - DNA, 19 bp, Homo sapiens
  siRNA target sequence for PPM1E (NM_014906.3,1865-1883).
cctcacagtgcccagtttt

SEQ ID NO: 166644 - DNA, 19 bp, Homo sapiens
  siRNA target sequence for PPM1E (NM_014906.3,1885-1903).
gctaccagttgagatgttt

SEQ ID NO: 166645 - DNA, 19 bp, Homo sapiens
  siRNA target sequence for PPM1E (NM_014906.3,1905-1923).
gtcctggtgcaccaaagaa

SEQ ID NO: 166646 - DNA, 19 bp, Homo sapiens
  siRNA target sequence for PPM1E (NM_014906.3,1910-1928).
ggtgcaccaaagaaagcaa

SEQ ID NO: 166647 - DNA, 19 bp, Homo sapiens
  siRNA target sequence for PPM1E (NM_014906.3,1931-1949).
cttattaatgagttaatga

SEQ ID NO: 166648 - DNA, 19 bp, Homo sapiens
  siRNA target sequence for PPM1E (NM_014906.3,2028-2046).
caacaggggagcagatata

SEQ ID NO: 166649 - DNA, 19 bp, Homo sapiens
  siRNA target sequence for PPM1E (NM_014906.3,2033-2051).
ggggagcagatatacagaa

SEQ ID NO: 166650 - DNA, 19 bp, Homo sapiens
  siRNA target sequence for PPM1E (NM_014906.3,2034-2052).
gggagcagatatacagaat

SEQ ID NO: 166651 - DNA, 19 bp, Homo sapiens
  siRNA target sequence for PPM1E (NM_014906.3,2113-2131).
cagagtttctagattgtct

SEQ ID NO: 166652 - DNA, 19 bp, Homo sapiens
  siRNA target sequence for PPM1E (NM_014906.3,2138-2156).
cgccaccactactcaaaga

SEQ ID NO: 166653 - DNA, 19 bp, Homo sapiens
  siRNA target sequence for PPM1E (NM_014906.3,2160-2178).
ggcacagattcaggtttaa

SEQ ID NO: 166654 - DNA, 19 bp, Homo sapiens
  siRNA target sequence for PPM1E (NM_014906.3,2170-2188).
caggtttaatccaaagttt

SEQ ID NO: 166655 - DNA, 19 bp, Homo sapiens
  siRNA target sequence for PPM1E (NM_014906.3,2207-2225).
caagagccttcccacaaaa

SEQ ID NO: 166656 - DNA, 19 bp, Homo sapiens
  siRNA target sequence for PPM1E (NM_014906.3,2335-2353).
gctcagaaagactcatgat

SEQ ID NO: 166657 - DNA, 19 bp, Homo sapiens
  siRNA target sequence for PPM1E (NM_014906.3,2338-2356).
cagaaagactcatgatatt

SEQ ID NO: 166658 - DNA, 19 bp, Homo sapiens
  siRNA target sequence for PPM1E (NM_014906.3,2366-2384).
gatcttccttggagctata

SEQ ID NO: 166659 - DNA, 19 bp, Homo sapiens
  siRNA target sequence for PPM1E (NM_014906.3,2369-2387).
cttccttggagctataaaa

SEQ ID NO: 166660 - DNA, 19 bp, Homo sapiens
  siRNA target sequence for PPM1E (NM_014906.3,2373-2391).
cttggagctataaaataga

SEQ ID NO: 166661 - DNA, 19 bp, Homo sapiens
  siRNA target sequence for PRPS1 (NM_002764.2,281-299).
ggcgaaatcaatgacaatt

SEQ ID NO: 166662 - DNA, 19 bp, Homo sapiens
  siRNA target sequence for PRPS1 (NM_002764.2,282-300).
gcgaaatcaatgacaattt

SEQ ID NO: 166663 - DNA, 19 bp, Homo sapiens
  siRNA target sequence for PRPS1 (NM_002764.2,540-558).
cagagccggctgtcctaaa

SEQ ID NO: 166664 - DNA, 19 bp, Homo sapiens
  siRNA target sequence for PRPS1 (NM_002764.2,542-560).
gagccggctgtcctaaagt

SEQ ID NO: 166665 - DNA, 19 bp, Homo sapiens
  siRNA target sequence for PRPS1 (NM_002764.2,856-874).
cttctccggtcctgctatt

SEQ ID NO: 166666 - DNA, 19 bp, Homo sapiens
  siRNA target sequence for PRPS1 (NM_002764.2,859-877).
ctccggtcctgctatttct

SEQ ID NO: 166667 - DNA, 19 bp, Homo sapiens
  siRNA target sequence for PRPS1 (NM_002764.2,1019-1037).
gaatccgtttcttacctat

SEQ ID NO: 166668 - DNA, 19 bp, Homo sapiens
  siRNA target sequence for PRPS1L1 (NM_175886.2,387-405).
gagccggtccccaatctct

SEQ ID NO: 166669 - DNA, 19 bp, Homo sapiens
  siRNA target sequence for PRPS1L1 (NM_175886.2,932-950).
gctccaaaatacgagtaat

SEQ ID NO: 166670 - DNA, 19 bp, Homo sapiens
  siRNA target sequence for PRPS1L1 (NM_175886.2,933-951).
ctccaaaatacgagtaatt

SEQ ID NO: 166671 - DNA, 19 bp, Homo sapiens
  siRNA target sequence for PRPS1L1 (NM_175886.2,935-953).
ccaaaatacgagtaattga

SEQ ID NO: 166672 - DNA, 19 bp, Homo sapiens
  siRNA target sequence for PRPS1L1 (NM_175886.2,989-1007).
ctcataatggggaatctgt

SEQ ID NO: 166673 - DNA, 19 bp, Homo sapiens
  siRNA target sequence for PRPS2 (NM_002765.2,234-252).
ggggaagatgtctacatca

SEQ ID NO: 166674 - DNA, 19 bp, Homo sapiens
  siRNA target sequence for PRPS2 (NM_002765.2,259-277).
gcggctgcggggaaattaa

SEQ ID NO: 166675 - DNA, 19 bp, Homo sapiens
  siRNA target sequence for PRPS2 (NM_002765.2,262-280).
gctgcggggaaattaacga

SEQ ID NO: 166676 - DNA, 19 bp, Homo sapiens
  siRNA target sequence for PRPS2 (NM_002765.2,291-309).
gaactcctcatcatgatca

SEQ ID NO: 166677 - DNA, 19 bp, Homo sapiens
  siRNA target sequence for PRPS2 (NM_002765.2,324-342).
gcgtcatcatccagagtaa

SEQ ID NO: 166678 - DNA, 19 bp, Homo sapiens
  siRNA target sequence for PRPS2 (NM_002765.2,326-344).
gtcatcatccagagtaact

SEQ ID NO: 166679 - DNA, 19 bp, Homo sapiens
  siRNA target sequence for PRPS2 (NM_002765.2,362-380).
cccatacgcccgacaagat

SEQ ID NO: 166680 - DNA, 19 bp, Homo sapiens
  siRNA target sequence for PRPS2 (NM_002765.2,363-381).
ccatacgcccgacaagata

SEQ ID NO: 166681 - DNA, 19 bp, Homo sapiens
  siRNA target sequence for PRPS2 (NM_002765.2,364-382).
catacgcccgacaagataa

SEQ ID NO: 166682 - DNA, 19 bp, Homo sapiens
  siRNA target sequence for PRPS2 (NM_002765.2,543-561).
cagtggattcgggaaaaca

SEQ ID NO: 166683 - DNA, 19 bp, Homo sapiens
  siRNA target sequence for PRPS2 (NM_002765.2,545-563).
gtggattcgggaaaacatt

SEQ ID NO: 166684 - DNA, 19 bp, Homo sapiens
  siRNA target sequence for PRPS2 (NM_002765.2,564-582).
gccgagtggaagaactgta

SEQ ID NO: 166685 - DNA, 19 bp, Homo sapiens
  siRNA target sequence for PRPS2 (NM_002765.2,572-590).
gaagaactgtatcattgtt

SEQ ID NO: 166686 - DNA, 19 bp, Homo sapiens
  siRNA target sequence for PRPS2 (NM_002765.2,606-624).
ggagccaaaagggttacat

SEQ ID NO: 166687 - DNA, 19 bp, Homo sapiens
  siRNA target sequence for PRPS2 (NM_002765.2,609-627).
gccaaaagggttacatcaa

SEQ ID NO: 166688 - DNA, 19 bp, Homo sapiens
  siRNA target sequence for PRPS2 (NM_002765.2,610-628).
ccaaaagggttacatcaat

SEQ ID NO: 166689 - DNA, 19 bp, Homo sapiens
  siRNA target sequence for PRPS2 (NM_002765.2,611-629).
caaaagggttacatcaatt

SEQ ID NO: 166690 - DNA, 19 bp, Homo sapiens
  siRNA target sequence for PRPS2 (NM_002765.2,802-820).
ctggagccaccaaagtgta

SEQ ID NO: 166691 - DNA, 19 bp, Homo sapiens
  siRNA target sequence for PRPS2 (NM_002765.2,812-830).
caaagtgtatgctatcctt

SEQ ID NO: 166692 - DNA, 19 bp, Homo sapiens
  siRNA target sequence for PRPS2 (NM_002765.2,828-846).
cttacccatgggatcttct

SEQ ID NO: 166693 - DNA, 19 bp, Homo sapiens
  siRNA target sequence for PRPS2 (NM_002765.2,852-870).
ccagctatttccagaataa

SEQ ID NO: 166694 - DNA, 19 bp, Homo sapiens
  siRNA target sequence for PRPS2 (NM_002765.2,888-906).
gctgttgtcgtcacaaaca

SEQ ID NO: 166695 - DNA, 19 bp, Homo sapiens
  siRNA target sequence for PRPS2 (NM_002765.2,891-909).
gttgtcgtcacaaacacaa

SEQ ID NO: 166696 - DNA, 19 bp, Homo sapiens
  siRNA target sequence for PRPS2 (NM_002765.2,912-930).
ccgcaagaggacaaaatga

SEQ ID NO: 166697 - DNA, 19 bp, Homo sapiens
  siRNA target sequence for PRPS2 (NM_002765.2,913-931).
cgcaagaggacaaaatgaa

SEQ ID NO: 166698 - DNA, 19 bp, Homo sapiens
  siRNA target sequence for PRPS2 (NM_002765.2,944-962).
gattcaggtcattgacatt

SEQ ID NO: 166699 - DNA, 19 bp, Homo sapiens
  siRNA target sequence for PSPH (NM_004577.2,113-131).
gatgagctagccaaaatct

SEQ ID NO: 166700 - DNA, 19 bp, Homo sapiens
  siRNA target sequence for PSPH (NM_004577.2,143-161).
gacgcggtgtcagaaatga

SEQ ID NO: 166701 - DNA, 19 bp, Homo sapiens
  siRNA target sequence for PSPH (NM_004577.2,145-163).
cgcggtgtcagaaatgaca

SEQ ID NO: 166702 - DNA, 19 bp, Homo sapiens
  siRNA target sequence for PSPH (NM_004577.2,309-327).
gcctacaggagcgaaatgt

SEQ ID NO: 166703 - DNA, 19 bp, Homo sapiens
  siRNA target sequence for PSPH (NM_004577.2,348-366).
gtggctttaggagtattgt

SEQ ID NO: 166704 - DNA, 19 bp, Homo sapiens
  siRNA target sequence for PSPH (NM_004577.2,374-392).
gttgcttcaaagctcaata

SEQ ID NO: 166705 - DNA, 19 bp, Homo sapiens
  siRNA target sequence for PSPH (NM_004577.2,413-431).
gccaataggctgaaattct

SEQ ID NO: 166706 - DNA, 19 bp, Homo sapiens
  siRNA target sequence for PSPH (NM_004577.2,414-432).
ccaataggctgaaattcta

SEQ ID NO: 166707 - DNA, 19 bp, Homo sapiens
  siRNA target sequence for PSPH (NM_004577.2,430-448).
ctactttaacggtgaatat

SEQ ID NO: 166708 - DNA, 19 bp, Homo sapiens
  siRNA target sequence for PSPH (NM_004577.2,439-457).
cggtgaatatgcaggtttt

SEQ ID NO: 166709 - DNA, 19 bp, Homo sapiens
  siRNA target sequence for PSPH (NM_004577.2,441-459).
gtgaatatgcaggttttga

SEQ ID NO: 166710 - DNA, 19 bp, Homo sapiens
  siRNA target sequence for PSPH (NM_004577.2,637-655).
ggataacgccaaatggtat

SEQ ID NO: 166711 - DNA, 19 bp, Homo sapiens
  siRNA target sequence for PSPH (NM_004577.2,638-656).
gataacgccaaatggtata

SEQ ID NO: 166712 - DNA, 19 bp, Homo sapiens
  siRNA target sequence for SMPD2 (NM_003080.1,378-396).
ctgcgactgcggatcttca

SEQ ID NO: 166713 - DNA, 19 bp, Homo sapiens
  siRNA target sequence for SMPD2 (NM_003080.1,451-469).
ggcgcctgggagactttct

SEQ ID NO: 166714 - DNA, 19 bp, Homo sapiens
  siRNA target sequence for SMPD2 (NM_003080.1,575-593).
cttccggagcggaatcatt

SEQ ID NO: 166715 - DNA, 19 bp, Homo sapiens
  siRNA target sequence for SMPD2 (NM_003080.1,644-662).
gcacatctacactctcaat

SEQ ID NO: 166716 - DNA, 19 bp, Homo sapiens
  siRNA target sequence for SMPD2 (NM_003080.1,744-762).
gtgctcaacgcctatgtga

SEQ ID NO: 166717 - DNA, 19 bp, Homo sapiens
  siRNA target sequence for SMPD2 (NM_003080.1,765-783).
catctccatgccgaataca

SEQ ID NO: 166718 - DNA, 19 bp, Homo sapiens
  siRNA target sequence for SMPD2 (NM_003080.1,947-965).
gcttcatgatgcctatctt

SEQ ID NO: 166719 - DNA, 19 bp, Homo sapiens
  siRNA target sequence for SMPD2 (NM_003080.1,1066-1084).
gcattgactacgtgcttta

SEQ ID NO: 166720 - DNA, 19 bp, Homo sapiens
  siRNA target sequence for SMPD2 (NM_003080.1,1079-1097).
gctttacaaggcagtttct

SEQ ID NO: 166721 - DNA, 19 bp, Homo sapiens
  siRNA target sequence for SMPD2 (NM_003080.1,1106-1124).
catctcctgtaagagtttt

SEQ ID NO: 166722 - DNA, 19 bp, Homo sapiens
  siRNA target sequence for SMPD2 (NM_003080.1,1181-1199).
cctgatggctactctgttt

SEQ ID NO: 166723 - DNA, 19 bp, Homo sapiens
  siRNA target sequence for SMPD2 (NM_003080.1,1251-1269).
gagaggtcgccgttgatgt

SEQ ID NO: 166724 - DNA, 19 bp, Homo sapiens
  siRNA target sequence for SMPD2 (NM_003080.1,1261-1279).
cgttgatgtgtgtgctaaa

SEQ ID NO: 166725 - DNA, 19 bp, Homo sapiens
  siRNA target sequence for SMPD2 (NM_003080.1,1328-1346).
ggccaccttcgctagctat

SEQ ID NO: 166726 - DNA, 19 bp, Homo sapiens
  siRNA target sequence for SMPD2 (NM_003080.1,1334-1352).
cttcgctagctatgtgatt

SEQ ID NO: 166727 - DNA, 19 bp, Homo sapiens
  siRNA target sequence for SMPD2 (NM_003080.1,1491-1509).
gaggtcaatggcttatata

SEQ ID NO: 166728 - DNA, 19 bp, Homo sapiens
  siRNA target sequence for SMPD2 (NM_003080.1,1602-1620).
caggagggggacagaacta

SEQ ID NO: 166729 - DNA, 19 bp, Homo sapiens
  siRNA target sequence for SMPD2 (NM_003080.1,1609-1627).
gggacagaactaaagaaca

SEQ ID NO: 166730 - DNA, 19 bp, Homo sapiens
  siRNA target sequence for BSN (NM_003458.1,618-636).
cgctgtgtcccatatgcaa

SEQ ID NO: 166731 - DNA, 19 bp, Homo sapiens
  siRNA target sequence for BSN (NM_003458.1,1254-1272).
gcaaggggacacctaagat

SEQ ID NO: 166732 - DNA, 19 bp, Homo sapiens
  siRNA target sequence for BSN (NM_003458.1,1263-1281).
cacctaagatcgtcttcaa

SEQ ID NO: 166733 - DNA, 19 bp, Homo sapiens
  siRNA target sequence for BSN (NM_003458.1,1549-1567).
cccagccaactataacaca

SEQ ID NO: 166734 - DNA, 19 bp, Homo sapiens
  siRNA target sequence for BSN (NM_003458.1,1942-1960).
gacccgagtccccactaaa

SEQ ID NO: 166735 - DNA, 19 bp, Homo sapiens
  siRNA target sequence for BSN (NM_003458.1,2002-2020).
ccctgcgactcctaaagta

SEQ ID NO: 166736 - DNA, 19 bp, Homo sapiens
  siRNA target sequence for BSN (NM_003458.1,2003-2021).
cctgcgactcctaaagtaa

SEQ ID NO: 166737 - DNA, 19 bp, Homo sapiens
  siRNA target sequence for BSN (NM_003458.1,2004-2022).
ctgcgactcctaaagtaaa

SEQ ID NO: 166738 - DNA, 19 bp, Homo sapiens
  siRNA target sequence for BSN (NM_003458.1,2006-2024).
gcgactcctaaagtaaaga

SEQ ID NO: 166739 - DNA, 19 bp, Homo sapiens
  siRNA target sequence for BSN (NM_003458.1,2008-2026).
gactcctaaagtaaagagt

SEQ ID NO: 166740 - DNA, 19 bp, Homo sapiens
  siRNA target sequence for BSN (NM_003458.1,2528-2546).
gactttggcagccaattga

SEQ ID NO: 166741 - DNA, 19 bp, Homo sapiens
  siRNA target sequence for BSN (NM_003458.1,2713-2731).
gcgtggcctggccaaacat

SEQ ID NO: 166742 - DNA, 19 bp, Homo sapiens
  siRNA target sequence for BSN (NM_003458.1,2894-2912).
gggctccgtcgcttcaaga

SEQ ID NO: 166743 - DNA, 19 bp, Homo sapiens
  siRNA target sequence for BSN (NM_003458.1,2926-2944).
cagcacgggaagttatggt

SEQ ID NO: 166744 - DNA, 19 bp, Homo sapiens
  siRNA target sequence for BSN (NM_003458.1,3044-3062).
ggtgagcactcctctacat

SEQ ID NO: 166745 - DNA, 19 bp, Homo sapiens
  siRNA target sequence for BSN (NM_003458.1,3045-3063).
gtgagcactcctctacatt

SEQ ID NO: 166746 - DNA, 19 bp, Homo sapiens
  siRNA target sequence for BSN (NM_003458.1,3539-3557).
ggccctagccggctttaca

SEQ ID NO: 166747 - DNA, 19 bp, Homo sapiens
  siRNA target sequence for BSN (NM_003458.1,3540-3558).
gccctagccggctttacaa

SEQ ID NO: 166748 - DNA, 19 bp, Homo sapiens
  siRNA target sequence for BSN (NM_003458.1,3542-3560).
cctagccggctttacaagt

SEQ ID NO: 166749 - DNA, 19 bp, Homo sapiens
  siRNA target sequence for BSN (NM_003458.1,3663-3681).
gcgctgaggaggcttatga

SEQ ID NO: 166750 - DNA, 19 bp, Homo sapiens
  siRNA target sequence for BSN (NM_003458.1,3782-3800).
ggcctgggctccttcgaat

SEQ ID NO: 166751 - DNA, 19 bp, Homo sapiens
  siRNA target sequence for BSN (NM_003458.1,3783-3801).
gcctgggctccttcgaata

SEQ ID NO: 166752 - DNA, 19 bp, Homo sapiens
  siRNA target sequence for BSN (NM_003458.1,3808-3826).
cactacagaccgtgagtat

SEQ ID NO: 166753 - DNA, 19 bp, Homo sapiens
  siRNA target sequence for BSN (NM_003458.1,3875-3893).
gcagccgtgtacgaagaaa

SEQ ID NO: 166754 - DNA, 19 bp, Homo sapiens
  siRNA target sequence for BSN (NM_003458.1,3876-3894).
cagccgtgtacgaagaaat

SEQ ID NO: 166755 - DNA, 19 bp, Homo sapiens
  siRNA target sequence for BSN (NM_003458.1,3879-3897).
ccgtgtacgaagaaatcct

SEQ ID NO: 166756 - DNA, 19 bp, Homo sapiens
  siRNA target sequence for BSN (NM_003458.1,3880-3898).
cgtgtacgaagaaatcctt

SEQ ID NO: 166757 - DNA, 19 bp, Homo sapiens
  siRNA target sequence for BSN (NM_003458.1,4002-4020).
catacatggacccaatgaa

SEQ ID NO: 166758 - DNA, 19 bp, Homo sapiens
  siRNA target sequence for BSN (NM_003458.1,4289-4307).
gggctgccacgaggatata

SEQ ID NO: 166759 - DNA, 19 bp, Homo sapiens
  siRNA target sequence for BSN (NM_003458.1,4290-4308).
ggctgccacgaggatatat

SEQ ID NO: 166760 - DNA, 19 bp, Homo sapiens
  siRNA target sequence for BSN (NM_003458.1,4292-4310).
ctgccacgaggatatatga

SEQ ID NO: 166761 - DNA, 19 bp, Homo sapiens
  siRNA target sequence for BSN (NM_003458.1,4294-4312).
gccacgaggatatatgact

SEQ ID NO: 166762 - DNA, 19 bp, Homo sapiens
  siRNA target sequence for BSN (NM_003458.1,4702-4720).
ggtagcccagggtacacaa

SEQ ID NO: 166763 - DNA, 19 bp, Homo sapiens
  siRNA target sequence for BSN (NM_003458.1,4703-4721).
gtagcccagggtacacaaa

SEQ ID NO: 166764 - DNA, 19 bp, Homo sapiens
  siRNA target sequence for BSN (NM_003458.1,5205-5223).
gtcttgccctggatccaat

SEQ ID NO: 166765 - DNA, 19 bp, Homo sapiens
  siRNA target sequence for BSN (NM_003458.1,5243-5261).
gccgtgcagcccttggtta

SEQ ID NO: 166766 - DNA, 19 bp, Homo sapiens
  siRNA target sequence for BSN (NM_003458.1,5333-5351).
gtgttcatggctcaacaaa

SEQ ID NO: 166767 - DNA, 19 bp, Homo sapiens
  siRNA target sequence for BSN (NM_003458.1,5380-5398).
ccagagccgccttgacttt

SEQ ID NO: 166768 - DNA, 19 bp, Homo sapiens
  siRNA target sequence for BSN (NM_003458.1,5425-5443).
cctggcccaggtcaaacaa

SEQ ID NO: 166769 - DNA, 19 bp, Homo sapiens
  siRNA target sequence for BSN (NM_003458.1,5504-5522).
gccaagtttgccagatata

SEQ ID NO: 166770 - DNA, 19 bp, Homo sapiens
  siRNA target sequence for BSN (NM_003458.1,5509-5527).
gtttgccagatataaccta

SEQ ID NO: 166771 - DNA, 19 bp, Homo sapiens
  siRNA target sequence for BSN (NM_003458.1,5550-5568).
ccagaagagacgttttgat

SEQ ID NO: 166772 - DNA, 19 bp, Homo sapiens
  siRNA target sequence for BSN (NM_003458.1,6084-6102).
ctgaggctggcctcaacta

SEQ ID NO: 166773 - DNA, 19 bp, Homo sapiens
  siRNA target sequence for BSN (NM_003458.1,6252-6270).
gtcatcctacagacctttt

SEQ ID NO: 166774 - DNA, 19 bp, Homo sapiens
  siRNA target sequence for BSN (NM_003458.1,6300-6318).
gctcagtgtcgaacatcta

SEQ ID NO: 166775 - DNA, 19 bp, Homo sapiens
  siRNA target sequence for BSN (NM_003458.1,6680-6698).
gcagctgatggcatgatct

SEQ ID NO: 166776 - DNA, 19 bp, Homo sapiens
  siRNA target sequence for BSN (NM_003458.1,6681-6699).
cagctgatggcatgatcta

SEQ ID NO: 166777 - DNA, 19 bp, Homo sapiens
  siRNA target sequence for BSN (NM_003458.1,6694-6712).
gatctactcgactatcaat

SEQ ID NO: 166778 - DNA, 19 bp, Homo sapiens
  siRNA target sequence for BSN (NM_003458.1,6895-6913).
ctatcctgcaccaagtaga

SEQ ID NO: 166779 - DNA, 19 bp, Homo sapiens
  siRNA target sequence for BSN (NM_003458.1,7411-7429).
ggaacgccaggctcaattt

SEQ ID NO: 166780 - DNA, 19 bp, Homo sapiens
  siRNA target sequence for BSN (NM_003458.1,7761-7779).
gccgtagtggcatcaagaa

SEQ ID NO: 166781 - DNA, 19 bp, Homo sapiens
  siRNA target sequence for BSN (NM_003458.1,8209-8227).
ggagatcgtcaggtacata

SEQ ID NO: 166782 - DNA, 19 bp, Homo sapiens
  siRNA target sequence for BSN (NM_003458.1,8210-8228).
gagatcgtcaggtacatat

SEQ ID NO: 166783 - DNA, 19 bp, Homo sapiens
  siRNA target sequence for BSN (NM_003458.1,9066-9084).
cacaacgcaaagagtcttt

SEQ ID NO: 166784 - DNA, 19 bp, Homo sapiens
  siRNA target sequence for BSN (NM_003458.1,9134-9152).
gagcatcgtgactacctat

SEQ ID NO: 166785 - DNA, 19 bp, Homo sapiens
  siRNA target sequence for BSN (NM_003458.1,9580-9598).
gaaggtgcccaccaactat

SEQ ID NO: 166786 - DNA, 19 bp, Homo sapiens
  siRNA target sequence for BSN (NM_003458.1,9614-9632).
cccgttgtgcccatgtctt

SEQ ID NO: 166787 - DNA, 19 bp, Homo sapiens
  siRNA target sequence for BSN (NM_003458.1,9794-9812).
gttcctcgaaactacgtaa

SEQ ID NO: 166788 - DNA, 19 bp, Homo sapiens
  siRNA target sequence for BSN (NM_003458.1,9797-9815).
cctcgaaactacgtaatga

SEQ ID NO: 166789 - DNA, 19 bp, Homo sapiens
  siRNA target sequence for BSN (NM_003458.1,9798-9816).
ctcgaaactacgtaatgat

SEQ ID NO: 166790 - DNA, 19 bp, Homo sapiens
  siRNA target sequence for BSN (NM_003458.1,9801-9819).
gaaactacgtaatgattga

SEQ ID NO: 166791 - DNA, 19 bp, Homo sapiens
  siRNA target sequence for BSN (NM_003458.1,10056-10074).
cagccagtacccactacta

SEQ ID NO: 166792 - DNA, 19 bp, Homo sapiens
  siRNA target sequence for BSN (NM_003458.1,10224-10242).
ccaagttctcgcctattga

SEQ ID NO: 166793 - DNA, 19 bp, Homo sapiens
  siRNA target sequence for BSN (NM_003458.1,10408-10426).
ggaggacgaccgcatttat

SEQ ID NO: 166794 - DNA, 19 bp, Homo sapiens
  siRNA target sequence for BSN (NM_003458.1,10529-10547).
gctgtggagcgacttcaaa

SEQ ID NO: 166795 - DNA, 19 bp, Homo sapiens
  siRNA target sequence for BSN (NM_003458.1,11310-11328).
ccgctgcactgcagtcaaa

SEQ ID NO: 166796 - DNA, 19 bp, Homo sapiens
  siRNA target sequence for DLD (NM_000108.2,125-143).
ggccatttcaatcgaatat

SEQ ID NO: 166797 - DNA, 19 bp, Homo sapiens
  siRNA target sequence for DLD (NM_000108.2,127-145).
ccatttcaatcgaatatct

SEQ ID NO: 166798 - DNA, 19 bp, Homo sapiens
  siRNA target sequence for DLD (NM_000108.2,187-205).
cgcagatcagccgattgat

SEQ ID NO: 166799 - DNA, 19 bp, Homo sapiens
  siRNA target sequence for DLD (NM_000108.2,196-214).
gccgattgatgctgatgta

SEQ ID NO: 166800 - DNA, 19 bp, Homo sapiens
  siRNA target sequence for DLD (NM_000108.2,197-215).
ccgattgatgctgatgtaa

SEQ ID NO: 166801 - DNA, 19 bp, Homo sapiens
  siRNA target sequence for DLD (NM_000108.2,209-227).
gatgtaacagttataggtt

SEQ ID NO: 166802 - DNA, 19 bp, Homo sapiens
  siRNA target sequence for DLD (NM_000108.2,239-257).
ggatatgttgctgctatta

SEQ ID NO: 166803 - DNA, 19 bp, Homo sapiens
  siRNA target sequence for DLD (NM_000108.2,280-298).
gacagtctgcattgagaaa

SEQ ID NO: 166804 - DNA, 19 bp, Homo sapiens
  siRNA target sequence for DLD (NM_000108.2,341-359).
ccttctaaggctttattga

SEQ ID NO: 166805 - DNA, 19 bp, Homo sapiens
  siRNA target sequence for DLD (NM_000108.2,342-360).
cttctaaggctttattgaa

SEQ ID NO: 166806 - DNA, 19 bp, Homo sapiens
  siRNA target sequence for DLD (NM_000108.2,421-439).
gtccgaagttcgcttgaat

SEQ ID NO: 166807 - DNA, 19 bp, Homo sapiens
  siRNA target sequence for DLD (NM_000108.2,423-441).
ccgaagttcgcttgaattt

SEQ ID NO: 166808 - DNA, 19 bp, Homo sapiens
  siRNA target sequence for DLD (NM_000108.2,424-442).
cgaagttcgcttgaattta

SEQ ID NO: 166809 - DNA, 19 bp, Homo sapiens
  siRNA target sequence for DLD (NM_000108.2,432-450).
gcttgaatttagacaagat

SEQ ID NO: 166810 - DNA, 19 bp, Homo sapiens
  siRNA target sequence for DLD (NM_000108.2,463-481).
gagtactgcagtaaaagct

SEQ ID NO: 166811 - DNA, 19 bp, Homo sapiens
  siRNA target sequence for DLD (NM_000108.2,465-483).
gtactgcagtaaaagcttt

SEQ ID NO: 166812 - DNA, 19 bp, Homo sapiens
  siRNA target sequence for DLD (NM_000108.2,491-509).
ggaattgcccacttattca

SEQ ID NO: 166813 - DNA, 19 bp, Homo sapiens
  siRNA target sequence for DLD (NM_000108.2,497-515).
gcccacttattcaaacaga

SEQ ID NO: 166814 - DNA, 19 bp, Homo sapiens
  siRNA target sequence for DLD (NM_000108.2,498-516).
cccacttattcaaacagaa

SEQ ID NO: 166815 - DNA, 19 bp, Homo sapiens
  siRNA target sequence for DLD (NM_000108.2,499-517).
ccacttattcaaacagaat

SEQ ID NO: 166816 - DNA, 19 bp, Homo sapiens
  siRNA target sequence for DLD (NM_000108.2,500-518).
cacttattcaaacagaata

SEQ ID NO: 166817 - DNA, 19 bp, Homo sapiens
  siRNA target sequence for DLD (NM_000108.2,532-550).
caatggatatggaaagata

SEQ ID NO: 166818 - DNA, 19 bp, Homo sapiens
  siRNA target sequence for DLD (NM_000108.2,588-606).
gcggcactcaggttattga

SEQ ID NO: 166819 - DNA, 19 bp, Homo sapiens
  siRNA target sequence for DLD (NM_000108.2,589-607).
cggcactcaggttattgat

SEQ ID NO: 166820 - DNA, 19 bp, Homo sapiens
  siRNA target sequence for DLD (NM_000108.2,594-612).
ctcaggttattgatacaaa

SEQ ID NO: 166821 - DNA, 19 bp, Homo sapiens
  siRNA target sequence for DLD (NM_000108.2,626-644).
gccacgggttcagaagtta

SEQ ID NO: 166822 - DNA, 19 bp, Homo sapiens
  siRNA target sequence for DLD (NM_000108.2,628-646).
cacgggttcagaagttact

SEQ ID NO: 166823 - DNA, 19 bp, Homo sapiens
  siRNA target sequence for DLD (NM_000108.2,654-672).
ctggaatcacgatagatga

SEQ ID NO: 166824 - DNA, 19 bp, Homo sapiens
  siRNA target sequence for DLD (NM_000108.2,657-675).
gaatcacgatagatgaaga

SEQ ID NO: 166825 - DNA, 19 bp, Homo sapiens
  siRNA target sequence for DLD (NM_000108.2,663-681).
cgatagatgaagatacaat

SEQ ID NO: 166826 - DNA, 19 bp, Homo sapiens
  siRNA target sequence for DLD (NM_000108.2,664-682).
gatagatgaagatacaata

SEQ ID NO: 166827 - DNA, 19 bp, Homo sapiens
  siRNA target sequence for DLD (NM_000108.2,674-692).
gatacaatagtgtcatcta

SEQ ID NO: 166828 - DNA, 19 bp, Homo sapiens
  siRNA target sequence for DLD (NM_000108.2,746-764).
ggagtaataggtgtagaat

SEQ ID NO: 166829 - DNA, 19 bp, Homo sapiens
  siRNA target sequence for DLD (NM_000108.2,768-786).
gttcagtttggcaaagact

SEQ ID NO: 166830 - DNA, 19 bp, Homo sapiens
  siRNA target sequence for DLD (NM_000108.2,831-849).
gagttggaattgatatgga

SEQ ID NO: 166831 - DNA, 19 bp, Homo sapiens
  siRNA target sequence for DLD (NM_000108.2,847-865).
ggagatatctaaaaacttt

SEQ ID NO: 166832 - DNA, 19 bp, Homo sapiens
  siRNA target sequence for DLD (NM_000108.2,878-896).
caaaaacaggggtttaaat

SEQ ID NO: 166833 - DNA, 19 bp, Homo sapiens
  siRNA target sequence for DLD (NM_000108.2,887-905).
gggtttaaatttaaattga

SEQ ID NO: 166834 - DNA, 19 bp, Homo sapiens
  siRNA target sequence for DLD (NM_000108.2,974-992).
ggtggtaaagctgaagtta

SEQ ID NO: 166835 - DNA, 19 bp, Homo sapiens
  siRNA target sequence for DLD (NM_000108.2,1022-1040).
ggccgacgaccctttacta

SEQ ID NO: 166836 - DNA, 19 bp, Homo sapiens
  siRNA target sequence for DLD (NM_000108.2,1023-1041).
gccgacgaccctttactaa

SEQ ID NO: 166837 - DNA, 19 bp, Homo sapiens
  siRNA target sequence for DLD (NM_000108.2,1025-1043).
cgacgaccctttactaaga

SEQ ID NO: 166838 - DNA, 19 bp, Homo sapiens
  siRNA target sequence for DLD (NM_000108.2,1026-1044).
gacgaccctttactaagaa

SEQ ID NO: 166839 - DNA, 19 bp, Homo sapiens
  siRNA target sequence for DLD (NM_000108.2,1028-1046).
cgaccctttactaagaatt

SEQ ID NO: 166840 - DNA, 19 bp, Homo sapiens
  siRNA target sequence for DLD (NM_000108.2,1029-1047).
gaccctttactaagaattt

SEQ ID NO: 166841 - DNA, 19 bp, Homo sapiens
  siRNA target sequence for DLD (NM_000108.2,1183-1201).
ggatgaaggcattatctgt

SEQ ID NO: 166842 - DNA, 19 bp, Homo sapiens
  siRNA target sequence for DLD (NM_000108.2,1224-1242).
ctgtgcacattgactacaa

SEQ ID NO: 166843 - DNA, 19 bp, Homo sapiens
  siRNA target sequence for DLD (NM_000108.2,1228-1246).
gcacattgactacaattgt

SEQ ID NO: 166844 - DNA, 19 bp, Homo sapiens
  siRNA target sequence for FLJ10511 (NM_018120.3,272-290).
gacgctctatcggtagtta

SEQ ID NO: 166845 - DNA, 19 bp, Homo sapiens
  siRNA target sequence for FLJ10511 (NM_018120.3,276-294).
ctctatcggtagttaacca

SEQ ID NO: 166846 - DNA, 19 bp, Homo sapiens
  siRNA target sequence for FLJ10511 (NM_018120.3,308-326).
gcagcagatccgttaaaca

SEQ ID NO: 166847 - DNA, 19 bp, Homo sapiens
  siRNA target sequence for FLJ10511 (NM_018120.3,441-459).
gccgtgcaaacagagaaaa

SEQ ID NO: 166848 - DNA, 19 bp, Homo sapiens
  siRNA target sequence for FLJ10511 (NM_018120.3,443-461).
cgtgcaaacagagaaaaga

SEQ ID NO: 166849 - DNA, 19 bp, Homo sapiens
  siRNA target sequence for FLJ10511 (NM_018120.3,468-486).
gagaactgggtatgatgtt

SEQ ID NO: 166850 - DNA, 19 bp, Homo sapiens
  siRNA target sequence for FLJ10511 (NM_018120.3,470-488).
gaactgggtatgatgttga

SEQ ID NO: 166851 - DNA, 19 bp, Homo sapiens
  siRNA target sequence for FLJ10511 (NM_018120.3,484-502).
gttgagcttacaaaatgtt

SEQ ID NO: 166852 - DNA, 19 bp, Homo sapiens
  siRNA target sequence for FLJ10511 (NM_018120.3,489-507).
gcttacaaaatgttataca

SEQ ID NO: 166853 - DNA, 19 bp, Homo sapiens
  siRNA target sequence for FLJ10511 (NM_018120.3,500-518).
gttatacagaaaactacaa

SEQ ID NO: 166854 - DNA, 19 bp, Homo sapiens
  siRNA target sequence for FLJ10511 (NM_018120.3,542-560).
gcctctgaaatctatgaca

SEQ ID NO: 166855 - DNA, 19 bp, Homo sapiens
  siRNA target sequence for FLJ10511 (NM_018120.3,543-561).
cctctgaaatctatgacat

SEQ ID NO: 166856 - DNA, 19 bp, Homo sapiens
  siRNA target sequence for FLJ10511 (NM_018120.3,546-564).
ctgaaatctatgacattct

SEQ ID NO: 166857 - DNA, 19 bp, Homo sapiens
  siRNA target sequence for FLJ10511 (NM_018120.3,607-625).
gaattcacgtcgaaggaaa

SEQ ID NO: 166858 - DNA, 19 bp, Homo sapiens
  siRNA target sequence for FLJ10511 (NM_018120.3,615-633).
gtcgaaggaaagctcaatt

SEQ ID NO: 166859 - DNA, 19 bp, Homo sapiens
  siRNA target sequence for FLJ10511 (NM_018120.3,617-635).
cgaaggaaagctcaatttt

SEQ ID NO: 166860 - DNA, 19 bp, Homo sapiens
  siRNA target sequence for FLJ10511 (NM_018120.3,660-678).
ccaaaacagtggttttgca

SEQ ID NO: 166861 - DNA, 19 bp, Homo sapiens
  siRNA target sequence for FLJ10511 (NM_018120.3,666-684).
cagtggttttgcatataga

SEQ ID NO: 166862 - DNA, 19 bp, Homo sapiens
  siRNA target sequence for FLJ10511 (NM_018120.3,700-718).
gtctcggagaaatctatgt

SEQ ID NO: 166863 - DNA, 19 bp, Homo sapiens
  siRNA target sequence for FLJ10511 (NM_018120.3,743-761).
ggtgttattagctttactt

SEQ ID NO: 166864 - DNA, 19 bp, Homo sapiens
  siRNA target sequence for FLJ10511 (NM_018120.3,744-762).
gtgttattagctttacttt

SEQ ID NO: 166865 - DNA, 19 bp, Homo sapiens
  siRNA target sequence for FLJ10511 (NM_018120.3,787-805).
ggtgcgaatccgttcagat

SEQ ID NO: 166866 - DNA, 19 bp, Homo sapiens
  siRNA target sequence for FLJ10511 (NM_018120.3,788-806).
gtgcgaatccgttcagatt

SEQ ID NO: 166867 - DNA, 19 bp, Homo sapiens
  siRNA target sequence for FLJ10511 (NM_018120.3,791-809).
cgaatccgttcagatttga

SEQ ID NO: 166868 - DNA, 19 bp, Homo sapiens
  siRNA target sequence for FLJ10511 (NM_018120.3,792-810).
gaatccgttcagatttgaa

SEQ ID NO: 166869 - DNA, 19 bp, Homo sapiens
  siRNA target sequence for FLJ10511 (NM_018120.3,836-854).
gcatcaaccaaggttatga

SEQ ID NO: 166870 - DNA, 19 bp, Homo sapiens
  siRNA target sequence for FLJ10511 (NM_018120.3,1044-1062).
gcacagctgcaaacttttt

SEQ ID NO: 166871 - DNA, 19 bp, Homo sapiens
  siRNA target sequence for GSR (NM_000637.1,292-310).
gatgtgtacccaaaaaggt

SEQ ID NO: 166872 - DNA, 19 bp, Homo sapiens
  siRNA target sequence for GSR (NM_000637.1,295-313).
gtgtacccaaaaaggtaat

SEQ ID NO: 166873 - DNA, 19 bp, Homo sapiens
  siRNA target sequence for GSR (NM_000637.1,297-315).
gtacccaaaaaggtaatgt

SEQ ID NO: 166874 - DNA, 19 bp, Homo sapiens
  siRNA target sequence for GSR (NM_000637.1,325-343).
ctgtccactctgaattcat

SEQ ID NO: 166875 - DNA, 19 bp, Homo sapiens
  siRNA target sequence for GSR (NM_000637.1,431-449).
ccgcctgaatgccatctat

SEQ ID NO: 166876 - DNA, 19 bp, Homo sapiens
  siRNA target sequence for GSR (NM_000637.1,434-452).
cctgaatgccatctatcaa

SEQ ID NO: 166877 - DNA, 19 bp, Homo sapiens
  siRNA target sequence for GSR (NM_000637.1,435-453).
ctgaatgccatctatcaaa

SEQ ID NO: 166878 - DNA, 19 bp, Homo sapiens
  siRNA target sequence for GSR (NM_000637.1,463-481).
ccaagtcccatatagaaat

SEQ ID NO: 166879 - DNA, 19 bp, Homo sapiens
  siRNA target sequence for GSR (NM_000637.1,528-546).
gaggtcagtgggaaaaagt

SEQ ID NO: 166880 - DNA, 19 bp, Homo sapiens
  siRNA target sequence for GSR (NM_000637.1,613-631).
ccggtgccagcttaggaat

SEQ ID NO: 166881 - DNA, 19 bp, Homo sapiens
  siRNA target sequence for GSR (NM_000637.1,618-636).
gccagcttaggaataacca

SEQ ID NO: 166882 - DNA, 19 bp, Homo sapiens
  siRNA target sequence for GSR (NM_000637.1,628-646).
gaataaccagcgatggatt

SEQ ID NO: 166883 - DNA, 19 bp, Homo sapiens
  siRNA target sequence for GSR (NM_000637.1,729-747).
gccctgggttctaagacat

SEQ ID NO: 166884 - DNA, 19 bp, Homo sapiens
  siRNA target sequence for GSR (NM_000637.1,750-768).
ctgatgatacggcatgata

SEQ ID NO: 166885 - DNA, 19 bp, Homo sapiens
  siRNA target sequence for GSR (NM_000637.1,755-773).
gatacggcatgataaggta

SEQ ID NO: 166886 - DNA, 19 bp, Homo sapiens
  siRNA target sequence for GSR (NM_000637.1,759-777).
cggcatgataaggtactta

SEQ ID NO: 166887 - DNA, 19 bp, Homo sapiens
  siRNA target sequence for GSR (NM_000637.1,761-779).
gcatgataaggtacttaga

SEQ ID NO: 166888 - DNA, 19 bp, Homo sapiens
  siRNA target sequence for GSR (NM_000637.1,762-780).
catgataaggtacttagaa

SEQ ID NO: 166889 - DNA, 19 bp, Homo sapiens
  siRNA target sequence for GSR (NM_000637.1,765-783).
gataaggtacttagaagtt

SEQ ID NO: 166890 - DNA, 19 bp, Homo sapiens
  siRNA target sequence for GSR (NM_000637.1,855-873).
caggtcaaggaggttaaaa

SEQ ID NO: 166891 - DNA, 19 bp, Homo sapiens
  siRNA target sequence for GSR (NM_000637.1,1018-1036).
ggattcaaaccgatgacaa

SEQ ID NO: 166892 - DNA, 19 bp, Homo sapiens
  siRNA target sequence for GSR (NM_000637.1,1027-1045).
ccgatgacaagggtcatat

SEQ ID NO: 166893 - DNA, 19 bp, Homo sapiens
  siRNA target sequence for GSR (NM_000637.1,1029-1047).
gatgacaagggtcatatca

SEQ ID NO: 166894 - DNA, 19 bp, Homo sapiens
  siRNA target sequence for GSR (NM_000637.1,1050-1068).
gtagacgaattccagaata

SEQ ID NO: 166895 - DNA, 19 bp, Homo sapiens
  siRNA target sequence for GSR (NM_000637.1,1070-1088).
caacgtcaaaggcatctat

SEQ ID NO: 166896 - DNA, 19 bp, Homo sapiens
  siRNA target sequence for GSR (NM_000637.1,1155-1173).
gcccatcgactttttgaat

SEQ ID NO: 166897 - DNA, 19 bp, Homo sapiens
  siRNA target sequence for GSR (NM_000637.1,1156-1174).
cccatcgactttttgaata

SEQ ID NO: 166898 - DNA, 19 bp, Homo sapiens
  siRNA target sequence for GSR (NM_000637.1,1157-1175).
ccatcgactttttgaatat

SEQ ID NO: 166899 - DNA, 19 bp, Homo sapiens
  siRNA target sequence for GSR (NM_000637.1,1158-1176).
catcgactttttgaatata

SEQ ID NO: 166900 - DNA, 19 bp, Homo sapiens
  siRNA target sequence for GSR (NM_000637.1,1257-1275).
gaagatgaagccattcata

SEQ ID NO: 166901 - DNA, 19 bp, Homo sapiens
  siRNA target sequence for GSR (NM_000637.1,1260-1278).
gatgaagccattcataaat

SEQ ID NO: 166902 - DNA, 19 bp, Homo sapiens
  siRNA target sequence for GSR (NM_000637.1,1310-1328).
gagctttaccccgatgtat

SEQ ID NO: 166903 - DNA, 19 bp, Homo sapiens
  siRNA target sequence for GSR (NM_000637.1,1312-1330).
gctttaccccgatgtatca

SEQ ID NO: 166904 - DNA, 19 bp, Homo sapiens
  siRNA target sequence for GSR (NM_000637.1,1325-1343).
gtatcacgcagttaccaaa

SEQ ID NO: 166905 - DNA, 19 bp, Homo sapiens
  siRNA target sequence for GSR (NM_000637.1,1329-1347).
cacgcagttaccaaaagga

SEQ ID NO: 166906 - DNA, 19 bp, Homo sapiens
  siRNA target sequence for GSR (NM_000637.1,1378-1396).
ctaacaaggaagaaaaggt

SEQ ID NO: 166907 - DNA, 19 bp, Homo sapiens
  siRNA target sequence for GSR (NM_000637.1,1415-1433).
gggacttgggtgtgatgaa

SEQ ID NO: 166908 - DNA, 19 bp, Homo sapiens
  siRNA target sequence for GSR (NM_000637.1,1416-1434).
ggacttgggtgtgatgaaa

SEQ ID NO: 166909 - DNA, 19 bp, Homo sapiens
  siRNA target sequence for GSR (NM_000637.1,1417-1435).
gacttgggtgtgatgaaat

SEQ ID NO: 166910 - DNA, 19 bp, Homo sapiens
  siRNA target sequence for GSR (NM_000637.1,1471-1489).
caacgaaggcagactttga

SEQ ID NO: 166911 - DNA, 19 bp, Homo sapiens
  siRNA target sequence for GSR (NM_000637.1,1474-1492).
cgaaggcagactttgacaa

SEQ ID NO: 166912 - DNA, 19 bp, Homo sapiens
  siRNA target sequence for KIAA0467 (NM_015284.1,285-303).
ccgggagagccgtgaatca

SEQ ID NO: 166913 - DNA, 19 bp, Homo sapiens
  siRNA target sequence for KIAA0467 (NM_015284.1,287-305).
gggagagccgtgaatcaga

SEQ ID NO: 166914 - DNA, 19 bp, Homo sapiens
  siRNA target sequence for KIAA0467 (NM_015284.1,410-428).
ctgagagcttccttcatga

SEQ ID NO: 166915 - DNA, 19 bp, Homo sapiens
  siRNA target sequence for KIAA0467 (NM_015284.1,652-670).
cagcaccaccggtcaacat

SEQ ID NO: 166916 - DNA, 19 bp, Homo sapiens
  siRNA target sequence for KIAA0467 (NM_015284.1,654-672).
gcaccaccggtcaacatct

SEQ ID NO: 166917 - DNA, 19 bp, Homo sapiens
  siRNA target sequence for KIAA0467 (NM_015284.1,658-676).
caccggtcaacatctgaaa

SEQ ID NO: 166918 - DNA, 19 bp, Homo sapiens
  siRNA target sequence for KIAA0467 (NM_015284.1,703-721).
gggcagccatcatctttaa

SEQ ID NO: 166919 - DNA, 19 bp, Homo sapiens
  siRNA target sequence for KIAA0467 (NM_015284.1,839-857).
gctggttgttggaagatga

SEQ ID NO: 166920 - DNA, 19 bp, Homo sapiens
  siRNA target sequence for KIAA0467 (NM_015284.1,842-860).
ggttgttggaagatgagat

SEQ ID NO: 166921 - DNA, 19 bp, Homo sapiens
  siRNA target sequence for KIAA0467 (NM_015284.1,911-929).
gcgcagctgcccatatcca

SEQ ID NO: 166922 - DNA, 19 bp, Homo sapiens
  siRNA target sequence for KIAA0467 (NM_015284.1,912-930).
cgcagctgcccatatccat

SEQ ID NO: 166923 - DNA, 19 bp, Homo sapiens
  siRNA target sequence for KIAA0467 (NM_015284.1,913-931).
gcagctgcccatatccata

SEQ ID NO: 166924 - DNA, 19 bp, Homo sapiens
  siRNA target sequence for KIAA0467 (NM_015284.1,950-968).
cctgccttcgccaaactct

SEQ ID NO: 166925 - DNA, 19 bp, Homo sapiens
  siRNA target sequence for KIAA0467 (NM_015284.1,994-1012).
gagcgttccctcacacaat

SEQ ID NO: 166926 - DNA, 19 bp, Homo sapiens
  siRNA target sequence for KIAA0467 (NM_015284.1,997-1015).
cgttccctcacacaattca

SEQ ID NO: 166927 - DNA, 19 bp, Homo sapiens
  siRNA target sequence for KIAA0467 (NM_015284.1,998-1016).
gttccctcacacaattcaa

SEQ ID NO: 166928 - DNA, 19 bp, Homo sapiens
  siRNA target sequence for KIAA0467 (NM_015284.1,1116-1134).
ccatggggagccttcttca

SEQ ID NO: 166929 - DNA, 19 bp, Homo sapiens
  siRNA target sequence for KIAA0467 (NM_015284.1,1335-1353).
ctcagaccacctaggttat

SEQ ID NO: 166930 - DNA, 19 bp, Homo sapiens
  siRNA target sequence for KIAA0467 (NM_015284.1,1337-1355).
cagaccacctaggttatga

SEQ ID NO: 166931 - DNA, 19 bp, Homo sapiens
  siRNA target sequence for KIAA0467 (NM_015284.1,1521-1539).
ggaccgtgtggaagtgtat

SEQ ID NO: 166932 - DNA, 19 bp, Homo sapiens
  siRNA target sequence for KIAA0467 (NM_015284.1,1675-1693).
gacagccacgtgtgtaact

SEQ ID NO: 166933 - DNA, 19 bp, Homo sapiens
  siRNA target sequence for KIAA0467 (NM_015284.1,1770-1788).
gcccagtgatgattatgct

SEQ ID NO: 166934 - DNA, 19 bp, Homo sapiens
  siRNA target sequence for KIAA0467 (NM_015284.1,1888-1906).
gtccattcacgcctcaaaa

SEQ ID NO: 166935 - DNA, 19 bp, Homo sapiens
  siRNA target sequence for KIAA0467 (NM_015284.1,1970-1988).
ctgtggtgaaccggaaaaa

SEQ ID NO: 166936 - DNA, 19 bp, Homo sapiens
  siRNA target sequence for KIAA0467 (NM_015284.1,1972-1990).
gtggtgaaccggaaaaaca

SEQ ID NO: 166937 - DNA, 19 bp, Homo sapiens
  siRNA target sequence for KIAA0467 (NM_015284.1,1975-1993).
gtgaaccggaaaaacatgt

SEQ ID NO: 166938 - DNA, 19 bp, Homo sapiens
  siRNA target sequence for KIAA0467 (NM_015284.1,1977-1995).
gaaccggaaaaacatgttt

SEQ ID NO: 166939 - DNA, 19 bp, Homo sapiens
  siRNA target sequence for KIAA0467 (NM_015284.1,2015-2033).
caaaggctgtgtactatct

SEQ ID NO: 166940 - DNA, 19 bp, Homo sapiens
  siRNA target sequence for KIAA0467 (NM_015284.1,2055-2073).
cagtgaccggccatggaaa

SEQ ID NO: 166941 - DNA, 19 bp, Homo sapiens
  siRNA target sequence for KIAA0467 (NM_015284.1,2203-2221).
ggccaagtggacagacata

SEQ ID NO: 166942 - DNA, 19 bp, Homo sapiens
  siRNA target sequence for KIAA0467 (NM_015284.1,2272-2290).
gagctcgtgcgagttctat

SEQ ID NO: 166943 - DNA, 19 bp, Homo sapiens
  siRNA target sequence for KIAA0467 (NM_015284.1,2274-2292).
gctcgtgcgagttctatgt

SEQ ID NO: 166944 - DNA, 19 bp, Homo sapiens
  siRNA target sequence for KIAA0467 (NM_015284.1,2314-2332).
ctggacgtcatcacagtta

SEQ ID NO: 166945 - DNA, 19 bp, Homo sapiens
  siRNA target sequence for KIAA0467 (NM_015284.1,2319-2337).
cgtcatcacagttatgctt

SEQ ID NO: 166946 - DNA, 19 bp, Homo sapiens
  siRNA target sequence for KIAA0467 (NM_015284.1,2491-2509).
ctgcactctcccaagtaca

SEQ ID NO: 166947 - DNA, 19 bp, Homo sapiens
  siRNA target sequence for KIAA0467 (NM_015284.1,2501-2519).
ccaagtacacagatagcaa

SEQ ID NO: 166948 - DNA, 19 bp, Homo sapiens
  siRNA target sequence for KIAA0467 (NM_015284.1,2567-2585).
ctgacttggacatctactt

SEQ ID NO: 166949 - DNA, 19 bp, Homo sapiens
  siRNA target sequence for KIAA0467 (NM_015284.1,2571-2589).
cttggacatctacttgtat

SEQ ID NO: 166950 - DNA, 19 bp, Homo sapiens
  siRNA target sequence for KIAA0467 (NM_015284.1,2575-2593).
gacatctacttgtataaca

SEQ ID NO: 166951 - DNA, 19 bp, Homo sapiens
  siRNA target sequence for KIAA0467 (NM_015284.1,2717-2735).
cactgcgagaggaggaatt

SEQ ID NO: 166952 - DNA, 19 bp, Homo sapiens
  siRNA target sequence for KIAA0467 (NM_015284.1,2767-2785).
gttgttgtggacagttctt

SEQ ID NO: 166953 - DNA, 19 bp, Homo sapiens
  siRNA target sequence for KIAA0467 (NM_015284.1,2802-2820).
cccacggcttcgattggat

SEQ ID NO: 166954 - DNA, 19 bp, Homo sapiens
  siRNA target sequence for KIAA0467 (NM_015284.1,2922-2940).
gccagcttcactatgtaca

SEQ ID NO: 166955 - DNA, 19 bp, Homo sapiens
  siRNA target sequence for KIAA0467 (NM_015284.1,2971-2989).
ggatcgttggaaactaaga

SEQ ID NO: 166956 - DNA, 19 bp, Homo sapiens
  siRNA target sequence for KIAA0467 (NM_015284.1,3071-3089).
gtagcttctgggatatgct

SEQ ID NO: 166957 - DNA, 19 bp, Homo sapiens
  siRNA target sequence for KIAA0467 (NM_015284.1,3330-3348).
ctggatggagtttatggtt

SEQ ID NO: 166958 - DNA, 19 bp, Homo sapiens
  siRNA target sequence for KIAA0467 (NM_015284.1,3336-3354).
ggagtttatggttcagatt

SEQ ID NO: 166959 - DNA, 19 bp, Homo sapiens
  siRNA target sequence for KIAA0467 (NM_015284.1,3459-3477).
caccagtgtccgcatcttt

SEQ ID NO: 166960 - DNA, 19 bp, Homo sapiens
  siRNA target sequence for KIAA0467 (NM_015284.1,3574-3592).
cttctgggaaggaacttct

SEQ ID NO: 166961 - DNA, 19 bp, Homo sapiens
  siRNA target sequence for KIAA0467 (NM_015284.1,3660-3678).
gagctcagggcgaaatgct

SEQ ID NO: 166962 - DNA, 19 bp, Homo sapiens
  siRNA target sequence for KIAA0467 (NM_015284.1,3806-3824).
cacgagcccatctcatctt

SEQ ID NO: 166963 - DNA, 19 bp, Homo sapiens
  siRNA target sequence for KIAA0467 (NM_015284.1,3881-3899).
ccgtgcgagatgaaaagga

SEQ ID NO: 166964 - DNA, 19 bp, Homo sapiens
  siRNA target sequence for KIAA0467 (NM_015284.1,4042-4060).
gaggccctaagggatatca

SEQ ID NO: 166965 - DNA, 19 bp, Homo sapiens
  siRNA target sequence for KIAA0467 (NM_015284.1,4127-4145).
gacaacagttcctagagat

SEQ ID NO: 166966 - DNA, 19 bp, Homo sapiens
  siRNA target sequence for KIAA0467 (NM_015284.1,4736-4754).
cattccagggctgttactt

SEQ ID NO: 166967 - DNA, 19 bp, Homo sapiens
  siRNA target sequence for KIAA0467 (NM_015284.1,4746-4764).
ctgttacttctgtgtcaaa

SEQ ID NO: 166968 - DNA, 19 bp, Homo sapiens
  siRNA target sequence for KIAA0467 (NM_015284.1,4752-4770).
cttctgtgtcaaacagttt

SEQ ID NO: 166969 - DNA, 19 bp, Homo sapiens
  siRNA target sequence for KIAA0467 (NM_015284.1,4873-4891).
cactcgttcagctatgact

SEQ ID NO: 166970 - DNA, 19 bp, Homo sapiens
  siRNA target sequence for KIAA0467 (NM_015284.1,5005-5023).
cactttggccgcaatcaca

SEQ ID NO: 166971 - DNA, 19 bp, Homo sapiens
  siRNA target sequence for KIAA0467 (NM_015284.1,5007-5025).
ctttggccgcaatcacatt

SEQ ID NO: 166972 - DNA, 19 bp, Homo sapiens
  siRNA target sequence for KIAA0467 (NM_015284.1,5013-5031).
ccgcaatcacatttaccaa

SEQ ID NO: 166973 - DNA, 19 bp, Homo sapiens
  siRNA target sequence for KIAA0467 (NM_015284.1,5065-5083).
gcccaccagctatacaact

SEQ ID NO: 166974 - DNA, 19 bp, Homo sapiens
  siRNA target sequence for KIAA0467 (NM_015284.1,5066-5084).
cccaccagctatacaacta

SEQ ID NO: 166975 - DNA, 19 bp, Homo sapiens
  siRNA target sequence for KIAA0467 (NM_015284.1,5445-5463).
ggaggcctcagggcttatt

SEQ ID NO: 166976 - DNA, 19 bp, Homo sapiens
  siRNA target sequence for KIAA0467 (NM_015284.1,5448-5466).
ggcctcagggcttattcta

SEQ ID NO: 166977 - DNA, 19 bp, Homo sapiens
  siRNA target sequence for KIAA0467 (NM_015284.1,5567-5585).
gtcgggacaccctttggaa

SEQ ID NO: 166978 - DNA, 19 bp, Homo sapiens
  siRNA target sequence for KIAA0467 (NM_015284.1,5675-5693).
cagtccatgccaaatccat

SEQ ID NO: 166979 - DNA, 19 bp, Homo sapiens
  siRNA target sequence for KIAA0467 (NM_015284.1,5745-5763).
gtaccagagcctgatcaaa

SEQ ID NO: 166980 - DNA, 19 bp, Homo sapiens
  siRNA target sequence for KIAA0467 (NM_015284.1,5748-5766).
ccagagcctgatcaaagtt

SEQ ID NO: 166981 - DNA, 19 bp, Homo sapiens
  siRNA target sequence for KIAA0467 (NM_015284.1,5836-5854).
gtgctgaatcagaagttca

SEQ ID NO: 166982 - DNA, 19 bp, Homo sapiens
  siRNA target sequence for KIAA0467 (NM_015284.1,5861-5879).
gctttgtgctagtgtttct

SEQ ID NO: 166983 - DNA, 19 bp, Homo sapiens
  siRNA target sequence for KIAA0467 (NM_015284.1,5878-5896).
ctggactcccacttaggaa

SEQ ID NO: 166984 - DNA, 19 bp, Homo sapiens
  siRNA target sequence for KIAA0467 (NM_015284.1,6125-6143).
ctggcactggcttctcaat

SEQ ID NO: 166985 - DNA, 19 bp, Homo sapiens
  siRNA target sequence for KIAA0467 (NM_015284.1,6148-6166).
gggaagcagcagagaaact

SEQ ID NO: 166986 - DNA, 19 bp, Homo sapiens
  siRNA target sequence for MT3 (NM_005954.1,132-150).
caagtgcgagggatgcaaa

SEQ ID NO: 166987 - DNA, 19 bp, Homo sapiens
  siRNA target sequence for PITPNM1 (NM_004910.1,348-366).
gggcagcgggcaatacaca

SEQ ID NO: 166988 - DNA, 19 bp, Homo sapiens
  siRNA target sequence for PITPNM1 (NM_004910.1,810-828).
gcagttcatccatgatgta

SEQ ID NO: 166989 - DNA, 19 bp, Homo sapiens
  siRNA target sequence for PITPNM1 (NM_004910.1,1959-1977).
ccgtgggagcatgaacaat

SEQ ID NO: 166990 - DNA, 19 bp, Homo sapiens
  siRNA target sequence for PITPNM1 (NM_004910.1,2351-2369).
cagcctgtgaacagatcta

SEQ ID NO: 166991 - DNA, 19 bp, Homo sapiens
  siRNA target sequence for PITPNM1 (NM_004910.1,3041-3059).
gagagaaggtggatgtcta

SEQ ID NO: 166992 - DNA, 19 bp, Homo sapiens
  siRNA target sequence for PITPNM1 (NM_004910.1,3100-3118).
ggcaccgaagtcaccaata

SEQ ID NO: 166993 - DNA, 19 bp, Homo sapiens
  siRNA target sequence for PITPNM1 (NM_004910.1,3365-3383).
gctacctgatcgtgtatgt

SEQ ID NO: 166994 - DNA, 19 bp, Homo sapiens
  siRNA target sequence for PITPNM1 (NM_004910.1,3494-3512).
gccagaaggcaatgtttct

SEQ ID NO: 166995 - DNA, 19 bp, Homo sapiens
  siRNA target sequence for PKD1 (NM_000296.2,486-504).
ctggcagagctggatataa

SEQ ID NO: 166996 - DNA, 19 bp, Homo sapiens
  siRNA target sequence for PKD1 (NM_000296.2,512-530).
caagatttctacgttagaa

SEQ ID NO: 166997 - DNA, 19 bp, Homo sapiens
  siRNA target sequence for PKD1 (NM_000296.2,523-541).
cgttagaagaaggaatatt

SEQ ID NO: 166998 - DNA, 19 bp, Homo sapiens
  siRNA target sequence for PKD1 (NM_000296.2,1429-1447).
cctcggacacggagatctt

SEQ ID NO: 166999 - DNA, 19 bp, Homo sapiens
  siRNA target sequence for PKD1 (NM_000296.2,2674-2692).
ctgggctgcgggtcatcta

SEQ ID NO: 167000 - DNA, 19 bp, Homo sapiens
  siRNA target sequence for PKD1 (NM_000296.2,3518-3536).
gaccgtgctggcatctaat

SEQ ID NO: 167001 - DNA, 19 bp, Homo sapiens
  siRNA target sequence for PKD1 (NM_000296.2,3665-3683).
ctcgcctgggggtgttctt

SEQ ID NO: 167002 - DNA, 19 bp, Homo sapiens
  siRNA target sequence for PKD1 (NM_000296.2,3667-3685).
cgcctgggggtgttcttta

SEQ ID NO: 167003 - DNA, 19 bp, Homo sapiens
  siRNA target sequence for PKD1 (NM_000296.2,3820-3838).
cggatgtgcgcgtctttga

SEQ ID NO: 167004 - DNA, 19 bp, Homo sapiens
  siRNA target sequence for PKD1 (NM_000296.2,3915-3933).
cagacgggcgacaacatca

SEQ ID NO: 167005 - DNA, 19 bp, Homo sapiens
  siRNA target sequence for PKD1 (NM_000296.2,4237-4255).
cgacggtgacacacaactt

SEQ ID NO: 167006 - DNA, 19 bp, Homo sapiens
  siRNA target sequence for PKD1 (NM_000296.2,4302-4320).
gtgaacagggcgcattact

SEQ ID NO: 167007 - DNA, 19 bp, Homo sapiens
  siRNA target sequence for PKD1 (NM_000296.2,4495-4513).
ctgaggtgacgttcatcta

SEQ ID NO: 167008 - DNA, 19 bp, Homo sapiens
  siRNA target sequence for PKD1 (NM_000296.2,4542-4560).
gtcaccgcgtccaacaaca

SEQ ID NO: 167009 - DNA, 19 bp, Homo sapiens
  siRNA target sequence for PKD1 (NM_000296.2,4746-4764).
gtcacccacgcttacaaca

SEQ ID NO: 167010 - DNA, 19 bp, Homo sapiens
  siRNA target sequence for PKD1 (NM_000296.2,4816-4834).
gcgaggcctggctcaatgt

SEQ ID NO: 167011 - DNA, 19 bp, Homo sapiens
  siRNA target sequence for PKD1 (NM_000296.2,4857-4875).
gggctcgtcgtcaatgcaa

SEQ ID NO: 167012 - DNA, 19 bp, Homo sapiens
  siRNA target sequence for PKD1 (NM_000296.2,4986-5004).
gggggtcctaccatctctt

SEQ ID NO: 167013 - DNA, 19 bp, Homo sapiens
  siRNA target sequence for PKD1 (NM_000296.2,4987-5005).
ggggtcctaccatctctta

SEQ ID NO: 167014 - DNA, 19 bp, Homo sapiens
  siRNA target sequence for PKD1 (NM_000296.2,4989-5007).
ggtcctaccatctcttaca

SEQ ID NO: 167015 - DNA, 19 bp, Homo sapiens
  siRNA target sequence for PKD1 (NM_000296.2,5015-5033).
ctccgtgggcaccttcaat

SEQ ID NO: 167016 - DNA, 19 bp, Homo sapiens
  siRNA target sequence for PKD1 (NM_000296.2,5017-5035).
ccgtgggcaccttcaatat

SEQ ID NO: 167017 - DNA, 19 bp, Homo sapiens
  siRNA target sequence for PKD1 (NM_000296.2,5019-5037).
gtgggcaccttcaatatca

SEQ ID NO: 167018 - DNA, 19 bp, Homo sapiens
  siRNA target sequence for PKD1 (NM_000296.2,5394-5412).
ccagctgccgtcaacacaa

SEQ ID NO: 167019 - DNA, 19 bp, Homo sapiens
  siRNA target sequence for PKD1 (NM_000296.2,5444-5462).
cagtggtgtcgtatacact

SEQ ID NO: 167020 - DNA, 19 bp, Homo sapiens
  siRNA target sequence for PKD1 (NM_000296.2,5503-5521).
catttaccacccatagctt

SEQ ID NO: 167021 - DNA, 19 bp, Homo sapiens
  siRNA target sequence for PKD1 (NM_000296.2,6696-6714).
cgatcacagcgcaactact

SEQ ID NO: 167022 - DNA, 19 bp, Homo sapiens
  siRNA target sequence for PKD1 (NM_000296.2,6697-6715).
gatcacagcgcaactactt

SEQ ID NO: 167023 - DNA, 19 bp, Homo sapiens
  siRNA target sequence for PKD1 (NM_000296.2,6885-6903).
gggcactactgctttgtgt

SEQ ID NO: 167024 - DNA, 19 bp, Homo sapiens
  siRNA target sequence for PKD1 (NM_000296.2,6971-6989).
gcgcctggtgcccatcatt

SEQ ID NO: 167025 - DNA, 19 bp, Homo sapiens
  siRNA target sequence for PKD1 (NM_000296.2,7135-7153).
gcgggtgtgcgctgaactt

SEQ ID NO: 167026 - DNA, 19 bp, Homo sapiens
  siRNA target sequence for PKD1 (NM_000296.2,7136-7154).
cgggtgtgcgctgaacttt

SEQ ID NO: 167027 - DNA, 19 bp, Homo sapiens
  siRNA target sequence for PKD1 (NM_000296.2,10367-10385).
ccacgctgaggcctttgtt

SEQ ID NO: 167028 - DNA, 19 bp, Homo sapiens
  siRNA target sequence for PKD1 (NM_000296.2,10598-10616).
cttctcagcatcagatgaa

SEQ ID NO: 167029 - DNA, 19 bp, Homo sapiens
  siRNA target sequence for PKD1 (NM_000296.2,11069-11087).
gctgcacccggatgaagat

SEQ ID NO: 167030 - DNA, 19 bp, Homo sapiens
  siRNA target sequence for PKD1 (NM_000296.2,11582-11600).
ggggacgtgggcctattca

SEQ ID NO: 167031 - DNA, 19 bp, Homo sapiens
  siRNA target sequence for PKD1 (NM_000296.2,12505-12523).
ggctgggggctgttattct

SEQ ID NO: 167032 - DNA, 19 bp, Homo sapiens
  siRNA target sequence for SOD1 (NM_000454.3,157-175).
ggtgtggggaagcattaaa

SEQ ID NO: 167033 - DNA, 19 bp, Homo sapiens
  siRNA target sequence for SOD1 (NM_000454.3,160-178).
gtggggaagcattaaagga

SEQ ID NO: 167034 - DNA, 19 bp, Homo sapiens
  siRNA target sequence for SOD1 (NM_000454.3,282-300).
gtgggccaaaggatgaaga

SEQ ID NO: 167035 - DNA, 19 bp, Homo sapiens
  siRNA target sequence for SOD1 (NM_000454.3,345-363).
gtgtggccgatgtgtctat

SEQ ID NO: 167036 - DNA, 19 bp, Homo sapiens
  siRNA target sequence for SOD1 (NM_000454.3,414-432).
cactggtggtccatgaaaa

SEQ ID NO: 167037 - DNA, 19 bp, Homo sapiens
  siRNA target sequence for TXNRD1 (NM_003330.2,682-700).
cacccctcttggaactaga

SEQ ID NO: 167038 - DNA, 19 bp, Homo sapiens
  siRNA target sequence for TXNRD1 (NM_003330.2,728-746).
gtgggttgcatacctaaaa

SEQ ID NO: 167039 - DNA, 19 bp, Homo sapiens
  siRNA target sequence for TXNRD1 (NM_003330.2,735-753).
gcatacctaaaaaactgat

SEQ ID NO: 167040 - DNA, 19 bp, Homo sapiens
  siRNA target sequence for TXNRD1 (NM_003330.2,784-802).
gcaagactctcgaaattat

SEQ ID NO: 167041 - DNA, 19 bp, Homo sapiens
  siRNA target sequence for TXNRD1 (NM_003330.2,788-806).
gactctcgaaattatggat

SEQ ID NO: 167042 - DNA, 19 bp, Homo sapiens
  siRNA target sequence for TXNRD1 (NM_003330.2,814-832).
cgaggagacagttaagcat

SEQ ID NO: 167043 - DNA, 19 bp, Homo sapiens
  siRNA target sequence for TXNRD1 (NM_003330.2,818-836).
gagacagttaagcatgatt

SEQ ID NO: 167044 - DNA, 19 bp, Homo sapiens
  siRNA target sequence for TXNRD1 (NM_003330.2,851-869).
gaagctgtacagaatcaca

SEQ ID NO: 167045 - DNA, 19 bp, Homo sapiens
  siRNA target sequence for TXNRD1 (NM_003330.2,866-884).
cacattggctctttgaatt

SEQ ID NO: 167046 - DNA, 19 bp, Homo sapiens
  siRNA target sequence for TXNRD1 (NM_003330.2,917-935).
gtcgtctatgagaatgctt

SEQ ID NO: 167047 - DNA, 19 bp, Homo sapiens
  siRNA target sequence for TXNRD1 (NM_003330.2,919-937).
cgtctatgagaatgcttat

SEQ ID NO: 167048 - DNA, 19 bp, Homo sapiens
  siRNA target sequence for TXNRD1 (NM_003330.2,928-946).
gaatgcttatgggcaattt

SEQ ID NO: 167049 - DNA, 19 bp, Homo sapiens
  siRNA target sequence for TXNRD1 (NM_003330.2,1018-1036).
cattgccactggtgaaaga

SEQ ID NO: 167050 - DNA, 19 bp, Homo sapiens
  siRNA target sequence for TXNRD1 (NM_003330.2,1029-1047).
gtgaaagaccacgttactt

SEQ ID NO: 167051 - DNA, 19 bp, Homo sapiens
  siRNA target sequence for TXNRD1 (NM_003330.2,1055-1073).
cctggtgacaaagaatact

SEQ ID NO: 167052 - DNA, 19 bp, Homo sapiens
  siRNA target sequence for TXNRD1 (NM_003330.2,1126-1144).
ggttgttggagcatcctat

SEQ ID NO: 167053 - DNA, 19 bp, Homo sapiens
  siRNA target sequence for TXNRD1 (NM_003330.2,1181-1199).
ggtttagacgtcactgtta

SEQ ID NO: 167054 - DNA, 19 bp, Homo sapiens
  siRNA target sequence for TXNRD1 (NM_003330.2,1182-1200).
gtttagacgtcactgttat

SEQ ID NO: 167055 - DNA, 19 bp, Homo sapiens
  siRNA target sequence for TXNRD1 (NM_003330.2,1187-1205).
gacgtcactgttatggtta

SEQ ID NO: 167056 - DNA, 19 bp, Homo sapiens
  siRNA target sequence for TXNRD1 (NM_003330.2,1232-1250).
caggacatggccaacaaaa

SEQ ID NO: 167057 - DNA, 19 bp, Homo sapiens
  siRNA target sequence for TXNRD1 (NM_003330.2,1237-1255).
catggccaacaaaattggt

SEQ ID NO: 167058 - DNA, 19 bp, Homo sapiens
  siRNA target sequence for TXNRD1 (NM_003330.2,1275-1293).
gcatcaagtttataagaca

SEQ ID NO: 167059 - DNA, 19 bp, Homo sapiens
  siRNA target sequence for TXNRD1 (NM_003330.2,1290-1308).
gacagttcgtaccaattaa

SEQ ID NO: 167060 - DNA, 19 bp, Homo sapiens
  siRNA target sequence for TXNRD1 (NM_003330.2,1294-1312).
gttcgtaccaattaaagtt

SEQ ID NO: 167061 - DNA, 19 bp, Homo sapiens
  siRNA target sequence for TXNRD1 (NM_003330.2,1352-1370).
gtagctcagtccaccaata

SEQ ID NO: 167062 - DNA, 19 bp, Homo sapiens
  siRNA target sequence for TXNRD1 (NM_003330.2,1356-1374).
ctcagtccaccaatagtga

SEQ ID NO: 167063 - DNA, 19 bp, Homo sapiens
  siRNA target sequence for TXNRD1 (NM_003330.2,1455-1473).
ccgtaggggtgaagataaa

SEQ ID NO: 167064 - DNA, 19 bp, Homo sapiens
  siRNA target sequence for TXNRD1 (NM_003330.2,1456-1474).
cgtaggggtgaagataaat

SEQ ID NO: 167065 - DNA, 19 bp, Homo sapiens
  siRNA target sequence for TXNRD1 (NM_003330.2,1581-1599).
caatccaggcaggaagatt

SEQ ID NO: 167066 - DNA, 19 bp, Homo sapiens
  siRNA target sequence for TXNRD1 (NM_003330.2,1627-1645).
cactgtcaagtgtgactat

SEQ ID NO: 167067 - DNA, 19 bp, Homo sapiens
  siRNA target sequence for TXNRD1 (NM_003330.2,1631-1649).
gtcaagtgtgactatgaaa

SEQ ID NO: 167068 - DNA, 19 bp, Homo sapiens
  siRNA target sequence for TXNRD1 (NM_003330.2,1652-1670).
gttccaaccactgtattta

SEQ ID NO: 167069 - DNA, 19 bp, Homo sapiens
  siRNA target sequence for TXNRD1 (NM_003330.2,1742-1760).
gaggtttaccatagttact

SEQ ID NO: 167070 - DNA, 19 bp, Homo sapiens
  siRNA target sequence for TXNRD1 (NM_003330.2,1744-1762).
ggtttaccatagttacttt

SEQ ID NO: 167071 - DNA, 19 bp, Homo sapiens
  siRNA target sequence for TXNRD1 (NM_003330.2,1777-1795).
gacgattccgtcaagagat

SEQ ID NO: 167072 - DNA, 19 bp, Homo sapiens
  siRNA target sequence for TXNRD1 (NM_003330.2,1779-1797).
cgattccgtcaagagataa

SEQ ID NO: 167073 - DNA, 19 bp, Homo sapiens
  siRNA target sequence for TXNRD1 (NM_003330.2,1784-1802).
ccgtcaagagataacaaca

SEQ ID NO: 167074 - DNA, 19 bp, Homo sapiens
  siRNA target sequence for TXNRD1 (NM_003330.2,1822-1840).
ctgtaatactaaagacaat

SEQ ID NO: 167075 - DNA, 19 bp, Homo sapiens
  siRNA target sequence for TXNRD1 (NM_003330.2,1917-1935).
gtggactgaccaaaaagca

SEQ ID NO: 167076 - DNA, 19 bp, Homo sapiens
  siRNA target sequence for TXNRD1 (NM_003330.2,1964-1982).
gtctgtgcagaggtattca

SEQ ID NO: 167077 - DNA, 19 bp, Homo sapiens
  siRNA target sequence for TXNRD1 (NM_003330.2,1971-1989).
cagaggtattcacaacatt

SEQ ID NO: 167078 - DNA, 19 bp, Homo sapiens
  siRNA target sequence for C5 (NM_001735.2,33-51).
gggccttttgggaatactt

SEQ ID NO: 167079 - DNA, 19 bp, Homo sapiens
  siRNA target sequence for C5 (NM_001735.2,88-106).
gagcaaacatatgtcattt

SEQ ID NO: 167080 - DNA, 19 bp, Homo sapiens
  siRNA target sequence for C5 (NM_001735.2,123-141).
ccgtgttggagcatctgaa

SEQ ID NO: 167081 - DNA, 19 bp, Homo sapiens
  siRNA target sequence for C5 (NM_001735.2,124-142).
cgtgttggagcatctgaaa

SEQ ID NO: 167082 - DNA, 19 bp, Homo sapiens
  siRNA target sequence for C5 (NM_001735.2,133-151).
gcatctgaaaatattgtga

SEQ ID NO: 167083 - DNA, 19 bp, Homo sapiens
  siRNA target sequence for C5 (NM_001735.2,134-152).
catctgaaaatattgtgat

SEQ ID NO: 167084 - DNA, 19 bp, Homo sapiens
  siRNA target sequence for C5 (NM_001735.2,164-182).
gatacactgaagcatttga

SEQ ID NO: 167085 - DNA, 19 bp, Homo sapiens
  siRNA target sequence for C5 (NM_001735.2,181-199).
gatgcaacaatctctatta

SEQ ID NO: 167086 - DNA, 19 bp, Homo sapiens
  siRNA target sequence for C5 (NM_001735.2,208-226).
cctgataaaaaatttagtt

SEQ ID NO: 167087 - DNA, 19 bp, Homo sapiens
  siRNA target sequence for C5 (NM_001735.2,336-354).
gtatttggaagttgtatca

SEQ ID NO: 167088 - DNA, 19 bp, Homo sapiens
  siRNA target sequence for C5 (NM_001735.2,342-360).
ggaagttgtatcaaagcat

SEQ ID NO: 167089 - DNA, 19 bp, Homo sapiens
  siRNA target sequence for C5 (NM_001735.2,444-462).
ccagtcagtaaaagttaga

SEQ ID NO: 167090 - DNA, 19 bp, Homo sapiens
  siRNA target sequence for C5 (NM_001735.2,447-465).
gtcagtaaaagttagagtt

SEQ ID NO: 167091 - DNA, 19 bp, Homo sapiens
  siRNA target sequence for C5 (NM_001735.2,451-469).
gtaaaagttagagtttatt

SEQ ID NO: 167092 - DNA, 19 bp, Homo sapiens
  siRNA target sequence for C5 (NM_001735.2,461-479).
gagtttattcgttgaatga

SEQ ID NO: 167093 - DNA, 19 bp, Homo sapiens
  siRNA target sequence for C5 (NM_001735.2,470-488).
cgttgaatgacgacttgaa

SEQ ID NO: 167094 - DNA, 19 bp, Homo sapiens
  siRNA target sequence for C5 (NM_001735.2,562-580).
gatcatattggaattatct

SEQ ID NO: 167095 - DNA, 19 bp, Homo sapiens
  siRNA target sequence for C5 (NM_001735.2,591-609).
cttcaagattccgtctaat

SEQ ID NO: 167096 - DNA, 19 bp, Homo sapiens
  siRNA target sequence for C5 (NM_001735.2,594-612).
caagattccgtctaatcct

SEQ ID NO: 167097 - DNA, 19 bp, Homo sapiens
  siRNA target sequence for C5 (NM_001735.2,603-621).
gtctaatcctagatatggt

SEQ ID NO: 167098 - DNA, 19 bp, Homo sapiens
  siRNA target sequence for C5 (NM_001735.2,605-623).
ctaatcctagatatggtat

SEQ ID NO: 167099 - DNA, 19 bp, Homo sapiens
  siRNA target sequence for C5 (NM_001735.2,626-644).
ggacgatcaaggctaaata

SEQ ID NO: 167100 - DNA, 19 bp, Homo sapiens
  siRNA target sequence for C5 (NM_001735.2,629-647).
cgatcaaggctaaatataa

SEQ ID NO: 167101 - DNA, 19 bp, Homo sapiens
  siRNA target sequence for C5 (NM_001735.2,665-683).
ctggaaccgcatattttga

SEQ ID NO: 167102 - DNA, 19 bp, Homo sapiens
  siRNA target sequence for C5 (NM_001735.2,668-686).
gaaccgcatattttgaagt

SEQ ID NO: 167103 - DNA, 19 bp, Homo sapiens
  siRNA target sequence for C5 (NM_001735.2,671-689).
ccgcatattttgaagttaa

SEQ ID NO: 167104 - DNA, 19 bp, Homo sapiens
  siRNA target sequence for C5 (NM_001735.2,719-737).
caatcgagccagaatataa

SEQ ID NO: 167105 - DNA, 19 bp, Homo sapiens
  siRNA target sequence for C5 (NM_001735.2,745-763).
ggttacaagaactttaaga

SEQ ID NO: 167106 - DNA, 19 bp, Homo sapiens
  siRNA target sequence for C5 (NM_001735.2,810-828).
cactgaggctgacgtttat

SEQ ID NO: 167107 - DNA, 19 bp, Homo sapiens
  siRNA target sequence for C5 (NM_001735.2,812-830).
ctgaggctgacgtttatat

SEQ ID NO: 167108 - DNA, 19 bp, Homo sapiens
  siRNA target sequence for C5 (NM_001735.2,814-832).
gaggctgacgtttatatca

SEQ ID NO: 167109 - DNA, 19 bp, Homo sapiens
  siRNA target sequence for C5 (NM_001735.2,816-834).
ggctgacgtttatatcaca

SEQ ID NO: 167110 - DNA, 19 bp, Homo sapiens
  siRNA target sequence for C5 (NM_001735.2,817-835).
gctgacgtttatatcacat

SEQ ID NO: 167111 - DNA, 19 bp, Homo sapiens
  siRNA target sequence for C5 (NM_001735.2,818-836).
ctgacgtttatatcacatt

SEQ ID NO: 167112 - DNA, 19 bp, Homo sapiens
  siRNA target sequence for C5 (NM_001735.2,850-868).
gacttaaaagatgatcaaa

SEQ ID NO: 167113 - DNA, 19 bp, Homo sapiens
  siRNA target sequence for C5 (NM_001735.2,886-904).
gcaatgcaaaacacaatgt

SEQ ID NO: 167114 - DNA, 19 bp, Homo sapiens
  siRNA target sequence for C5 (NM_001735.2,892-910).
caaaacacaatgttgataa

SEQ ID NO: 167115 - DNA, 19 bp, Homo sapiens
  siRNA target sequence for C5 (NM_001735.2,919-937).
gctcaagtcacatttgatt

SEQ ID NO: 167116 - DNA, 19 bp, Homo sapiens
  siRNA target sequence for C5 (NM_001735.2,947-965).
cagtcaaagaactgtcata

SEQ ID NO: 167117 - DNA, 19 bp, Homo sapiens
  siRNA target sequence for C5 (NM_001735.2,949-967).
gtcaaagaactgtcatact

SEQ ID NO: 167118 - DNA, 19 bp, Homo sapiens
  siRNA target sequence for C5 (NM_001735.2,955-973).
gaactgtcatactacagtt

SEQ ID NO: 167119 - DNA, 19 bp, Homo sapiens
  siRNA target sequence for C5 (NM_001735.2,990-1008).
caagtacctttatattgct

SEQ ID NO: 167120 - DNA, 19 bp, Homo sapiens
  siRNA target sequence for C5 (NM_001735.2,1023-1041).
gtctacaggtggattttct

SEQ ID NO: 167121 - DNA, 19 bp, Homo sapiens
  siRNA target sequence for C5 (NM_001735.2,1079-1097).
ctccctacaaactgaattt

SEQ ID NO: 167122 - DNA, 19 bp, Homo sapiens
  siRNA target sequence for C5 (NM_001735.2,1181-1199).
gaggagtcccagtaacact

SEQ ID NO: 167123 - DNA, 19 bp, Homo sapiens
  siRNA target sequence for C5 (NM_001735.2,1239-1257).
cttggatccaagcaaaagt

SEQ ID NO: 167124 - DNA, 19 bp, Homo sapiens
  siRNA target sequence for C5 (NM_001735.2,1242-1260).
ggatccaagcaaaagtgta

SEQ ID NO: 167125 - DNA, 19 bp, Homo sapiens
  siRNA target sequence for C5 (NM_001735.2,1243-1261).
gatccaagcaaaagtgtaa

SEQ ID NO: 167126 - DNA, 19 bp, Homo sapiens
  siRNA target sequence for C5 (NM_001735.2,1256-1274).
gtgtaacacgtgttgatga

SEQ ID NO: 167127 - DNA, 19 bp, Homo sapiens
  siRNA target sequence for C5 (NM_001735.2,1283-1301).
cttcctttgtgcttaatct

SEQ ID NO: 167128 - DNA, 19 bp, Homo sapiens
  siRNA target sequence for C5 (NM_001735.2,1314-1332).
gacggtgctggagtttaat

SEQ ID NO: 167129 - DNA, 19 bp, Homo sapiens
  siRNA target sequence for C5 (NM_001735.2,1320-1338).
gctggagtttaatgtcaaa

SEQ ID NO: 167130 - DNA, 19 bp, Homo sapiens
  siRNA target sequence for C5 (NM_001735.2,1326-1344).
gtttaatgtcaaaactgat

SEQ ID NO: 167131 - DNA, 19 bp, Homo sapiens
  siRNA target sequence for C5 (NM_001735.2,1377-1395).
ggaaggttaccgagcaata

SEQ ID NO: 167132 - DNA, 19 bp, Homo sapiens
  siRNA target sequence for C5 (NM_001735.2,1381-1399).
ggttaccgagcaatagcat

SEQ ID NO: 167133 - DNA, 19 bp, Homo sapiens
  siRNA target sequence for C5 (NM_001735.2,1382-1400).
gttaccgagcaatagcata

SEQ ID NO: 167134 - DNA, 19 bp, Homo sapiens
  siRNA target sequence for C5 (NM_001735.2,1386-1404).
ccgagcaatagcatactca

SEQ ID NO: 167135 - DNA, 19 bp, Homo sapiens
  siRNA target sequence for C5 (NM_001735.2,1387-1405).
cgagcaatagcatactcat

SEQ ID NO: 167136 - DNA, 19 bp, Homo sapiens
  siRNA target sequence for C5 (NM_001735.2,1432-1450).
gattggactgataaccata

SEQ ID NO: 167137 - DNA, 19 bp, Homo sapiens
  siRNA target sequence for C5 (NM_001735.2,1520-1538).
ctcactataattacttgat

SEQ ID NO: 167138 - DNA, 19 bp, Homo sapiens
  siRNA target sequence for C5 (NM_001735.2,1588-1606).
gatgcatcttatcaaagta

SEQ ID NO: 167139 - DNA, 19 bp, Homo sapiens
  siRNA target sequence for C5 (NM_001735.2,1591-1609).
gcatcttatcaaagtataa

SEQ ID NO: 167140 - DNA, 19 bp, Homo sapiens
  siRNA target sequence for C5 (NM_001735.2,1645-1663).
cgacttctggtctattaca

SEQ ID NO: 167141 - DNA, 19 bp, Homo sapiens
  siRNA target sequence for C5 (NM_001735.2,1646-1664).
gacttctggtctattacat

SEQ ID NO: 167142 - DNA, 19 bp, Homo sapiens
  siRNA target sequence for C5 (NM_001735.2,1886-1904).
ccttggaaagagtatttca

SEQ ID NO: 167143 - DNA, 19 bp, Homo sapiens
  siRNA target sequence for C5 (NM_001735.2,1937-1955).
caggtggtggcctcaacaa

SEQ ID NO: 167144 - DNA, 19 bp, Homo sapiens
  siRNA target sequence for C5 (NM_001735.2,2054-2072).
caagaagaacgctgcaaaa

SEQ ID NO: 167145 - DNA, 19 bp, Homo sapiens
  siRNA target sequence for C5 (NM_001735.2,2131-2149).
gatggagcctgcgttaata

SEQ ID NO: 167146 - DNA, 19 bp, Homo sapiens
  siRNA target sequence for C5 (NM_001735.2,2135-2153).
gagcctgcgttaataatga

SEQ ID NO: 167147 - DNA, 19 bp, Homo sapiens
  siRNA target sequence for C5 (NM_001735.2,2138-2156).
cctgcgttaataatgatga

SEQ ID NO: 167148 - DNA, 19 bp, Homo sapiens
  siRNA target sequence for C5 (NM_001735.2,2139-2157).
ctgcgttaataatgatgaa

SEQ ID NO: 167149 - DNA, 19 bp, Homo sapiens
  siRNA target sequence for C5 (NM_001735.2,2169-2187).
gcgagctgcacggattagt

SEQ ID NO: 167150 - DNA, 19 bp, Homo sapiens
  siRNA target sequence for C5 (NM_001735.2,2170-2188).
cgagctgcacggattagtt

SEQ ID NO: 167151 - DNA, 19 bp, Homo sapiens
  siRNA target sequence for C5 (NM_001735.2,2171-2189).
gagctgcacggattagttt

SEQ ID NO: 167152 - DNA, 19 bp, Homo sapiens
  siRNA target sequence for C5 (NM_001735.2,2195-2213).
caagatgcatcaaagcttt

SEQ ID NO: 167153 - DNA, 19 bp, Homo sapiens
  siRNA target sequence for C5 (NM_001735.2,2237-2255).
gccagctccgtgctaatat

SEQ ID NO: 167154 - DNA, 19 bp, Homo sapiens
  siRNA target sequence for C5 (NM_001735.2,2239-2257).
cagctccgtgctaatatct

SEQ ID NO: 167155 - DNA, 19 bp, Homo sapiens
  siRNA target sequence for C5 (NM_001735.2,2241-2259).
gctccgtgctaatatctct

SEQ ID NO: 167156 - DNA, 19 bp, Homo sapiens
  siRNA target sequence for C5 (NM_001735.2,2245-2263).
cgtgctaatatctctcata

SEQ ID NO: 167157 - DNA, 19 bp, Homo sapiens
  siRNA target sequence for C5 (NM_001735.2,2246-2264).
gtgctaatatctctcataa

SEQ ID NO: 167158 - DNA, 19 bp, Homo sapiens
  siRNA target sequence for C5 (NM_001735.2,2249-2267).
ctaatatctctcataaaga

SEQ ID NO: 167159 - DNA, 19 bp, Homo sapiens
  siRNA target sequence for C5 (NM_001735.2,2316-2334).
gccagaaattcggagttat

SEQ ID NO: 167160 - DNA, 19 bp, Homo sapiens
  siRNA target sequence for C5 (NM_001735.2,2346-2364).
ctggttgtgggaagttcat

SEQ ID NO: 167161 - DNA, 19 bp, Homo sapiens
  siRNA target sequence for C5 (NM_001735.2,2431-2449).
ggcgttggcatttcaaaca

SEQ ID NO: 167162 - DNA, 19 bp, Homo sapiens
  siRNA target sequence for C5 (NM_001735.2,2433-2451).
cgttggcatttcaaacact

SEQ ID NO: 167163 - DNA, 19 bp, Homo sapiens
  siRNA target sequence for C5 (NM_001735.2,2439-2457).
catttcaaacactggtata

SEQ ID NO: 167164 - DNA, 19 bp, Homo sapiens
  siRNA target sequence for C5 (NM_001735.2,2503-2521).
ctggaaatgaatataccat

SEQ ID NO: 167165 - DNA, 19 bp, Homo sapiens
  siRNA target sequence for C5 (NM_001735.2,2533-2551).
cgaggagaacagatccaat

SEQ ID NO: 167166 - DNA, 19 bp, Homo sapiens
  siRNA target sequence for C5 (NM_001735.2,2534-2552).
gaggagaacagatccaatt

SEQ ID NO: 167167 - DNA, 19 bp, Homo sapiens
  siRNA target sequence for C5 (NM_001735.2,2536-2554).
ggagaacagatccaattga

SEQ ID NO: 167168 - DNA, 19 bp, Homo sapiens
  siRNA target sequence for C5 (NM_001735.2,2542-2560).
cagatccaattgaaaggaa

SEQ ID NO: 167169 - DNA, 19 bp, Homo sapiens
  siRNA target sequence for C5 (NM_001735.2,2585-2603).
ggatgcagttctgtgttaa

SEQ ID NO: 167170 - DNA, 19 bp, Homo sapiens
  siRNA target sequence for C5 (NM_001735.2,2586-2604).
gatgcagttctgtgttaaa

SEQ ID NO: 167171 - DNA, 19 bp, Homo sapiens
  siRNA target sequence for C5 (NM_001735.2,2678-2696).
gtgtgcgccagaaagtaga

SEQ ID NO: 167172 - DNA, 19 bp, Homo sapiens
  siRNA target sequence for C5 (NM_001735.2,2748-2766).
ccttcacaacatcaatttt

SEQ ID NO: 167173 - DNA, 19 bp, Homo sapiens
  siRNA target sequence for C5 (NM_001735.2,2772-2790).
ggagacttggtttggaaaa

SEQ ID NO: 167174 - DNA, 19 bp, Homo sapiens
  siRNA target sequence for C5 (NM_001735.2,2791-2809).
gaaatcttagtaaaaacat

SEQ ID NO: 167175 - DNA, 19 bp, Homo sapiens
  siRNA target sequence for C5 (NM_001735.2,2796-2814).
cttagtaaaaacattacga

SEQ ID NO: 167176 - DNA, 19 bp, Homo sapiens
  siRNA target sequence for C5 (NM_001735.2,2817-2835).
ggtgccagaaggtgtcaaa

SEQ ID NO: 167177 - DNA, 19 bp, Homo sapiens
  siRNA target sequence for C5 (NM_001735.2,2818-2836).
gtgccagaaggtgtcaaaa

SEQ ID NO: 167178 - DNA, 19 bp, Homo sapiens
  siRNA target sequence for C5 (NM_001735.2,2862-2880).
ggatcctaggggtatttat

SEQ ID NO: 167179 - DNA, 19 bp, Homo sapiens
  siRNA target sequence for C5 (NM_001735.2,2866-2884).
cctaggggtatttatggta

SEQ ID NO: 167180 - DNA, 19 bp, Homo sapiens
  siRNA target sequence for C5 (NM_001735.2,2871-2889).
gggtatttatggtaccatt

SEQ ID NO: 167181 - DNA, 19 bp, Homo sapiens
  siRNA target sequence for C5 (NM_001735.2,2977-2995).
cttgtaggtgagatcttgt

SEQ ID NO: 167182 - DNA, 19 bp, Homo sapiens
  siRNA target sequence for C5 (NM_001735.2,2988-3006).
gatcttgtctgcagttcta

SEQ ID NO: 167183 - DNA, 19 bp, Homo sapiens
  siRNA target sequence for C5 (NM_001735.2,2991-3009).
cttgtctgcagttctaagt

SEQ ID NO: 167184 - DNA, 19 bp, Homo sapiens
  siRNA target sequence for C5 (NM_001735.2,3012-3030).
ggaaggcatcaatatccta

SEQ ID NO: 167185 - DNA, 19 bp, Homo sapiens
  siRNA target sequence for C5 (NM_001735.2,3013-3031).
gaaggcatcaatatcctaa

SEQ ID NO: 167186 - DNA, 19 bp, Homo sapiens
  siRNA target sequence for C5 (NM_001735.2,3071-3089).
gcgttgtcccagtattcta

SEQ ID NO: 167187 - DNA, 19 bp, Homo sapiens
  siRNA target sequence for C5 (NM_001735.2,3082-3100).
gtattctatgtttttcact

SEQ ID NO: 167188 - DNA, 19 bp, Homo sapiens
  siRNA target sequence for C5 (NM_001735.2,3112-3130).
ggaaatcattggaacattt

SEQ ID NO: 167189 - DNA, 19 bp, Homo sapiens
  siRNA target sequence for C5 (NM_001735.2,3137-3155).
ctgacccattaattgaaaa

SEQ ID NO: 167190 - DNA, 19 bp, Homo sapiens
  siRNA target sequence for C5 (NM_001735.2,3209-3227).
gaaatgctgactactctta

SEQ ID NO: 167191 - DNA, 19 bp, Homo sapiens
  siRNA target sequence for C5 (NM_001735.2,3306-3324).
cgtagagcagaaccaaaat

SEQ ID NO: 167192 - DNA, 19 bp, Homo sapiens
  siRNA target sequence for C5 (NM_001735.2,3307-3325).
gtagagcagaaccaaaatt

SEQ ID NO: 167193 - DNA, 19 bp, Homo sapiens
  siRNA target sequence for C5 (NM_001735.2,3338-3356).
ctttattgtggctagttga

SEQ ID NO: 167194 - DNA, 19 bp, Homo sapiens
  siRNA target sequence for C5 (NM_001735.2,3345-3363).
gtggctagttgagaattat

SEQ ID NO: 167195 - DNA, 19 bp, Homo sapiens
  siRNA target sequence for C5 (NM_001735.2,3387-3405).
ggaaaattcacagtatcaa

SEQ ID NO: 167196 - DNA, 19 bp, Homo sapiens
  siRNA target sequence for C5 (NM_001735.2,3397-3415).
cagtatcaaccaataaaat

SEQ ID NO: 167197 - DNA, 19 bp, Homo sapiens
  siRNA target sequence for C5 (NM_001735.2,3506-3524).
gccccctggtgaaaatcga

SEQ ID NO: 167198 - DNA, 19 bp, Homo sapiens
  siRNA target sequence for C5 (NM_001735.2,3522-3540).
cgacacagctctaattaaa

SEQ ID NO: 167199 - DNA, 19 bp, Homo sapiens
  siRNA target sequence for C5 (NM_001735.2,3544-3562).
gacaactttctgcttgaaa

SEQ ID NO: 167200 - DNA, 19 bp, Homo sapiens
  siRNA target sequence for C5 (NM_001735.2,3574-3592).
gcccagagcacctttacat

SEQ ID NO: 167201 - DNA, 19 bp, Homo sapiens
  siRNA target sequence for C5 (NM_001735.2,3575-3593).
cccagagcacctttacatt

SEQ ID NO: 167202 - DNA, 19 bp, Homo sapiens
  siRNA target sequence for C5 (NM_001735.2,3636-3654).
cccacagtttcgttcaatt

SEQ ID NO: 167203 - DNA, 19 bp, Homo sapiens
  siRNA target sequence for C5 (NM_001735.2,3642-3660).
gtttcgttcaattgtttca

SEQ ID NO: 167204 - DNA, 19 bp, Homo sapiens
  siRNA target sequence for C5 (NM_001735.2,3694-3712).
ccacccatttatcgttttt

SEQ ID NO: 167205 - DNA, 19 bp, Homo sapiens
  siRNA target sequence for C5 (NM_001735.2,3738-3756).
cagctctgtacctaacact

SEQ ID NO: 167206 - DNA, 19 bp, Homo sapiens
  siRNA target sequence for C5 (NM_001735.2,3762-3780).
ggcacgtatggtagaaaca

SEQ ID NO: 167207 - DNA, 19 bp, Homo sapiens
  siRNA target sequence for C5 (NM_001735.2,3763-3781).
gcacgtatggtagaaacaa

SEQ ID NO: 167208 - DNA, 19 bp, Homo sapiens
  siRNA target sequence for C5 (NM_001735.2,3779-3797).
caactgcctatgctttact

SEQ ID NO: 167209 - DNA, 19 bp, Homo sapiens
  siRNA target sequence for C5 (NM_001735.2,3796-3814).
ctcaccagtctgaacttga

SEQ ID NO: 167210 - DNA, 19 bp, Homo sapiens
  siRNA target sequence for C5 (NM_001735.2,3866-3884).
ggtatggaggtggctttta

SEQ ID NO: 167211 - DNA, 19 bp, Homo sapiens
  siRNA target sequence for C5 (NM_001735.2,3867-3885).
gtatggaggtggcttttat

SEQ ID NO: 167212 - DNA, 19 bp, Homo sapiens
  siRNA target sequence for C5 (NM_001735.2,3871-3889).
ggaggtggcttttattcaa

SEQ ID NO: 167213 - DNA, 19 bp, Homo sapiens
  siRNA target sequence for C5 (NM_001735.2,3913-3931).
gagggcctgacggaatatt

SEQ ID NO: 167214 - DNA, 19 bp, Homo sapiens
  siRNA target sequence for C5 (NM_001735.2,3915-3933).
gggcctgacggaatattca

SEQ ID NO: 167215 - DNA, 19 bp, Homo sapiens
  siRNA target sequence for C5 (NM_001735.2,3917-3935).
gcctgacggaatattcact

SEQ ID NO: 167216 - DNA, 19 bp, Homo sapiens
  siRNA target sequence for C5 (NM_001735.2,3984-4002).
gcataaaggtgccttacat

SEQ ID NO: 167217 - DNA, 19 bp, Homo sapiens
  siRNA target sequence for C5 (NM_001735.2,3985-4003).
cataaaggtgccttacata

SEQ ID NO: 167218 - DNA, 19 bp, Homo sapiens
  siRNA target sequence for C5 (NM_001735.2,4094-4112).
gcttggctacagtacatgt

SEQ ID NO: 167219 - DNA, 19 bp, Homo sapiens
  siRNA target sequence for C5 (NM_001735.2,4095-4113).
cttggctacagtacatgta

SEQ ID NO: 167220 - DNA, 19 bp, Homo sapiens
  siRNA target sequence for C5 (NM_001735.2,4157-4175).
gcttttatttgaaaatcga

SEQ ID NO: 167221 - DNA, 19 bp, Homo sapiens
  siRNA target sequence for C5 (NM_001735.2,4173-4191).
cgatactcaggatattgaa

SEQ ID NO: 167222 - DNA, 19 bp, Homo sapiens
  siRNA target sequence for C5 (NM_001735.2,4203-4221).
cagaggctacggaaactct

SEQ ID NO: 167223 - DNA, 19 bp, Homo sapiens
  siRNA target sequence for C5 (NM_001735.2,4212-4230).
cggaaactctgattacaaa

SEQ ID NO: 167224 - DNA, 19 bp, Homo sapiens
  siRNA target sequence for C5 (NM_001735.2,4319-4337).
ctggaatcagtgcaaatga

SEQ ID NO: 167225 - DNA, 19 bp, Homo sapiens
  siRNA target sequence for C5 (NM_001735.2,4322-4340).
gaatcagtgcaaatgaaga

SEQ ID NO: 167226 - DNA, 19 bp, Homo sapiens
  siRNA target sequence for C5 (NM_001735.2,4360-4378).
gaaggggtggatcaactat

SEQ ID NO: 167227 - DNA, 19 bp, Homo sapiens
  siRNA target sequence for C5 (NM_001735.2,4365-4383).
ggtggatcaactattcact

SEQ ID NO: 167228 - DNA, 19 bp, Homo sapiens
  siRNA target sequence for C5 (NM_001735.2,4427-4445).
cgattccctccagtgattt

SEQ ID NO: 167229 - DNA, 19 bp, Homo sapiens
  siRNA target sequence for C5 (NM_001735.2,4451-4469).
gtgtacgattccggatatt

SEQ ID NO: 167230 - DNA, 19 bp, Homo sapiens
  siRNA target sequence for C5 (NM_001735.2,4457-4475).
gattccggatatttgaact

SEQ ID NO: 167231 - DNA, 19 bp, Homo sapiens
  siRNA target sequence for C5 (NM_001735.2,4461-4479).
ccggatatttgaactcttt

SEQ ID NO: 167232 - DNA, 19 bp, Homo sapiens
  siRNA target sequence for C5 (NM_001735.2,4494-4512).
cagtcctgccactttcaca

SEQ ID NO: 167233 - DNA, 19 bp, Homo sapiens
  siRNA target sequence for C5 (NM_001735.2,4540-4558).
cagtgtaccatgttttata

SEQ ID NO: 167234 - DNA, 19 bp, Homo sapiens
  siRNA target sequence for C5 (NM_001735.2,4551-4569).
gttttatagcacttccaat

SEQ ID NO: 167235 - DNA, 19 bp, Homo sapiens
  siRNA target sequence for C5 (NM_001735.2,4559-4577).
gcacttccaatatcaaaat

SEQ ID NO: 167236 - DNA, 19 bp, Homo sapiens
  siRNA target sequence for C5 (NM_001735.2,4562-4580).
cttccaatatcaaaattca

SEQ ID NO: 167237 - DNA, 19 bp, Homo sapiens
  siRNA target sequence for C5 (NM_001735.2,4565-4583).
ccaatatcaaaattcagaa

SEQ ID NO: 167238 - DNA, 19 bp, Homo sapiens
  siRNA target sequence for C5 (NM_001735.2,4694-4712).
cagagattgcatatgctta

SEQ ID NO: 167239 - DNA, 19 bp, Homo sapiens
  siRNA target sequence for C5 (NM_001735.2,4702-4720).
gcatatgcttataaagtta

SEQ ID NO: 167240 - DNA, 19 bp, Homo sapiens
  siRNA target sequence for C5 (NM_001735.2,4731-4749).
catcactgtagaaaatgtt

SEQ ID NO: 167241 - DNA, 19 bp, Homo sapiens
  siRNA target sequence for C5 (NM_001735.2,4770-4788).
ccttctggatatctacaaa

SEQ ID NO: 167242 - DNA, 19 bp, Homo sapiens
  siRNA target sequence for C5 (NM_001735.2,4807-4825).
gagaaagactctgagatta

SEQ ID NO: 167243 - DNA, 19 bp, Homo sapiens
  siRNA target sequence for C5 (NM_001735.2,4850-4868).
ctaacgctgagctggtaaa

SEQ ID NO: 167244 - DNA, 19 bp, Homo sapiens
  siRNA target sequence for C5 (NM_001735.2,4854-4872).
cgctgagctggtaaaagga

SEQ ID NO: 167245 - DNA, 19 bp, Homo sapiens
  siRNA target sequence for C5 (NM_001735.2,4897-4915).
gaagccctccagataaaat

SEQ ID NO: 167246 - DNA, 19 bp, Homo sapiens
  siRNA target sequence for C5 (NM_001735.2,4931-4949).
ggtacatctaccctttaga

SEQ ID NO: 167247 - DNA, 19 bp, Homo sapiens
  siRNA target sequence for C5 (NM_001735.2,4975-4993).
cctagagacacaacatgtt

SEQ ID NO: 167248 - DNA, 19 bp, Homo sapiens
  siRNA target sequence for C5 (NM_001735.2,4991-5009).
gttcatcgtgtcaagcatt

SEQ ID NO: 167249 - DNA, 19 bp, Homo sapiens
  siRNA target sequence for C5 (NM_001735.2,4994-5012).
catcgtgtcaagcattttt

SEQ ID NO: 167250 - DNA, 19 bp, Homo sapiens
  siRNA target sequence for C5 (NM_001735.2,4998-5016).
gtgtcaagcatttttagct

SEQ ID NO: 167251 - DNA, 19 bp, Homo sapiens
  siRNA target sequence for C5 (NM_001735.2,5000-5018).
gtcaagcatttttagctaa

SEQ ID NO: 167252 - DNA, 19 bp, Homo sapiens
  siRNA target sequence for C5 (NM_001735.2,5002-5020).
caagcatttttagctaatt

SEQ ID NO: 167253 - DNA, 19 bp, Homo sapiens
  siRNA target sequence for CCL1 (NM_002981.1,164-182).
ccagatgttgcttctcatt

SEQ ID NO: 167254 - DNA, 19 bp, Homo sapiens
  siRNA target sequence for CCL1 (NM_002981.1,179-197).
catttgcggagcaagagat

SEQ ID NO: 167255 - DNA, 19 bp, Homo sapiens
  siRNA target sequence for CCL1 (NM_002981.1,243-261).
ctccaatgagggcttaata

SEQ ID NO: 167256 - DNA, 19 bp, Homo sapiens
  siRNA target sequence for CCL1 (NM_002981.1,245-263).
ccaatgagggcttaatatt

SEQ ID NO: 167257 - DNA, 19 bp, Homo sapiens
  siRNA target sequence for CCL11 (NM_002986.2,382-400).
gtgcaggattccatgaagt

SEQ ID NO: 167258 - DNA, 19 bp, Homo sapiens
  siRNA target sequence for CCL15 (NM_004167.3,530-548).
cccaggcccagttcataaa

SEQ ID NO: 167259 - DNA, 19 bp, Homo sapiens
  siRNA target sequence for CCL15 (NM_004167.3,531-549).
ccaggcccagttcataaat

SEQ ID NO: 167260 - DNA, 19 bp, Homo sapiens
  siRNA target sequence for CCL15 (NM_004167.3,601-619).
gttctgaacagctttcact

SEQ ID NO: 167261 - DNA, 19 bp, Homo sapiens
  siRNA target sequence for CCL15 (NM_004167.3,663-681).
gtgttcactcatgaaaagt

SEQ ID NO: 167262 - DNA, 19 bp, Homo sapiens
  siRNA target sequence for CCL15 (NM_004167.3,665-683).
gttcactcatgaaaagtta

SEQ ID NO: 167263 - DNA, 19 bp, Homo sapiens
  siRNA target sequence for CCL15 (NM_004167.3,668-686).
cactcatgaaaagttattt

SEQ ID NO: 167264 - DNA, 19 bp, Homo sapiens
  siRNA target sequence for CCL15 (NM_004167.3,795-813).
gctgaagccctactcaata

SEQ ID NO: 167265 - DNA, 19 bp, Homo sapiens
  siRNA target sequence for CCL16 (NM_004590.2,98-116).
cttgtcctcatccttatca

SEQ ID NO: 167266 - DNA, 19 bp, Homo sapiens
  siRNA target sequence for CCL16 (NM_004590.2,104-122).
ctcatccttatcattactt

SEQ ID NO: 167267 - DNA, 19 bp, Homo sapiens
  siRNA target sequence for CCL16 (NM_004590.2,175-193).
ctgctgcctgaagtattat

SEQ ID NO: 167268 - DNA, 19 bp, Homo sapiens
  siRNA target sequence for CCL16 (NM_004590.2,246-264).
gtcacctgccagcaatcat

SEQ ID NO: 167269 - DNA, 19 bp, Homo sapiens
  siRNA target sequence for CCL16 (NM_004590.2,364-382).
gaacttgtccacggttaaa

SEQ ID NO: 167270 - DNA, 19 bp, Homo sapiens
  siRNA target sequence for CCL16 (NM_004590.2,367-385).
cttgtccacggttaaaatt

SEQ ID NO: 167271 - DNA, 19 bp, Homo sapiens
  siRNA target sequence for CCL16 (NM_004590.2,370-388).
gtccacggttaaaattatt

SEQ ID NO: 167272 - DNA, 19 bp, Homo sapiens
  siRNA target sequence for CCL16 (NM_004590.2,373-391).
cacggttaaaattattaca

SEQ ID NO: 167273 - DNA, 19 bp, Homo sapiens
  siRNA target sequence for CCL17 (NM_002987.2,302-320).
ccagggatgccatcgtttt

SEQ ID NO: 167274 - DNA, 19 bp, Homo sapiens
  siRNA target sequence for CCL17 (NM_002987.2,303-321).
cagggatgccatcgttttt

SEQ ID NO: 167275 - DNA, 19 bp, Homo sapiens
  siRNA target sequence for CCL18 (NM_002988.2,145-163).
ctctgctgcctcgtctata

SEQ ID NO: 167276 - DNA, 19 bp, Homo sapiens
  siRNA target sequence for CCL18 (NM_002988.2,186-204).
gttcatagttgactattct

SEQ ID NO: 167277 - DNA, 19 bp, Homo sapiens
  siRNA target sequence for CCL19 (NM_006274.2,305-323).
gggtgcctgctgtagtgtt

SEQ ID NO: 167278 - DNA, 19 bp, Homo sapiens
  siRNA target sequence for CCL2 (NM_002982.2,207-225).
cagaggctcgcgagctata

SEQ ID NO: 167279 - DNA, 19 bp, Homo sapiens
  siRNA target sequence for CCL2 (NM_002982.2,209-227).
gaggctcgcgagctataga

SEQ ID NO: 167280 - DNA, 19 bp, Homo sapiens
  siRNA target sequence for CCL2 (NM_002982.2,212-230).
gctcgcgagctatagaaga

SEQ ID NO: 167281 - DNA, 19 bp, Homo sapiens
  siRNA target sequence for CCL2 (NM_002982.2,213-231).
ctcgcgagctatagaagaa

SEQ ID NO: 167282 - DNA, 19 bp, Homo sapiens
  siRNA target sequence for CCL20 (NM_004591.1,162-180).
gatacacagaccgtattct

SEQ ID NO: 167283 - DNA, 19 bp, Homo sapiens
  siRNA target sequence for CCL20 (NM_004591.1,166-184).
cacagaccgtattcttcat

SEQ ID NO: 167284 - DNA, 19 bp, Homo sapiens
  siRNA target sequence for CCL20 (NM_004591.1,271-289).
gtctgtgtgcgcaaatcca

SEQ ID NO: 167285 - DNA, 19 bp, Homo sapiens
  siRNA target sequence for CCL20 (NM_004591.1,316-334).
gcgtctcctcagtaaaaaa

SEQ ID NO: 167286 - DNA, 19 bp, Homo sapiens
  siRNA target sequence for CCL20 (NM_004591.1,318-336).
gtctcctcagtaaaaaagt

SEQ ID NO: 167287 - DNA, 19 bp, Homo sapiens
  siRNA target sequence for CCL20 (NM_004591.1,327-345).
gtaaaaaagtcaagaacat

SEQ ID NO: 167288 - DNA, 19 bp, Homo sapiens
  siRNA target sequence for CCL22 (NM_002990.3,112-130).
gcgtctgctgccgtgatta

SEQ ID NO: 167289 - DNA, 19 bp, Homo sapiens
  siRNA target sequence for CCL22 (NM_002990.3,154-172).
gcgtggtgaaacacttcta

SEQ ID NO: 167290 - DNA, 19 bp, Homo sapiens
  siRNA target sequence for CCL22 (NM_002990.3,156-174).
gtggtgaaacacttctact

SEQ ID NO: 167291 - DNA, 19 bp, Homo sapiens
  siRNA target sequence for CCL22 (NM_002990.3,254-272).
gccctgggtgaagatgatt

SEQ ID NO: 167292 - DNA, 19 bp, Homo sapiens
  siRNA target sequence for CCL22 (NM_002990.3,259-277).
gggtgaagatgattctcaa

SEQ ID NO: 167293 - DNA, 19 bp, Homo sapiens
  siRNA target sequence for CCL23 (NM_005064.3,319-337).
cactcctggagagttactt

SEQ ID NO: 167294 - DNA, 19 bp, Homo sapiens
  siRNA target sequence for CCL23 (NM_005064.3,386-404).
gaaggggcgacgtttctgt

SEQ ID NO: 167295 - DNA, 19 bp, Homo sapiens
  siRNA target sequence for CCL24 (NM_002991.2,242-260).
gggtccagaggtacatgaa

SEQ ID NO: 167296 - DNA, 19 bp, Homo sapiens
  siRNA target sequence for CCL25 (NM_005624.2,63-81).
ccacacccaaggtgtcttt

SEQ ID NO: 167297 - DNA, 19 bp, Homo sapiens
  siRNA target sequence for CCL25 (NM_005624.2,178-196).
ctgcctgctgcgatattct

SEQ ID NO: 167298 - DNA, 19 bp, Homo sapiens
  siRNA target sequence for CCL25 (NM_005624.2,264-282).
gctcctggatgctcgaaat

SEQ ID NO: 167299 - DNA, 19 bp, Homo sapiens
  siRNA target sequence for CCL25 (NM_005624.2,265-283).
ctcctggatgctcgaaata

SEQ ID NO: 167300 - DNA, 19 bp, Homo sapiens
  siRNA target sequence for CCL25 (NM_005624.2,270-288).
ggatgctcgaaataaggtt

SEQ ID NO: 167301 - DNA, 19 bp, Homo sapiens
  siRNA target sequence for CCL25 (NM_005624.2,277-295).
cgaaataaggtttttgcaa

SEQ ID NO: 167302 - DNA, 19 bp, Homo sapiens
  siRNA target sequence for CCL25 (NM_005624.2,331-349).
cctcatgctgtaaagaagt

SEQ ID NO: 167303 - DNA, 19 bp, Homo sapiens
  siRNA target sequence for CCL25 (NM_005624.2,332-350).
ctcatgctgtaaagaagtt

SEQ ID NO: 167304 - DNA, 19 bp, Homo sapiens
  siRNA target sequence for CCL25 (NM_005624.2,334-352).
catgctgtaaagaagttga

SEQ ID NO: 167305 - DNA, 19 bp, Homo sapiens
  siRNA target sequence for CCL25 (NM_005624.2,337-355).
gctgtaaagaagttgagtt

SEQ ID NO: 167306 - DNA, 19 bp, Homo sapiens
  siRNA target sequence for CCL25 (NM_005624.2,358-376).
ggaaactccaagttatcat

SEQ ID NO: 167307 - DNA, 19 bp, Homo sapiens
  siRNA target sequence for CCL25 (NM_005624.2,369-387).
gttatcatcgtccaagttt

SEQ ID NO: 167308 - DNA, 19 bp, Homo sapiens
  siRNA target sequence for CCL25 (NM_005624.2,423-441).
cctcctgatatcagctaat

SEQ ID NO: 167309 - DNA, 19 bp, Homo sapiens
  siRNA target sequence for CCL26 (NM_006072.3,150-168).
cacacgtgggagtgacata

SEQ ID NO: 167310 - DNA, 19 bp, Homo sapiens
  siRNA target sequence for CCL26 (NM_006072.3,213-231).
gacctgggtgcgaagctat

SEQ ID NO: 167311 - DNA, 19 bp, Homo sapiens
  siRNA target sequence for CCL26 (NM_006072.3,216-234).
ctgggtgcgaagctatgaa

SEQ ID NO: 167312 - DNA, 19 bp, Homo sapiens
  siRNA target sequence for CCL26 (NM_006072.3,218-236).
gggtgcgaagctatgaatt

SEQ ID NO: 167313 - DNA, 19 bp, Homo sapiens
  siRNA target sequence for CCL26 (NM_006072.3,220-238).
gtgcgaagctatgaattca

SEQ ID NO: 167314 - DNA, 19 bp, Homo sapiens
  siRNA target sequence for CCL26 (NM_006072.3,252-270).
ctcccagcgggctgtgata

SEQ ID NO: 167315 - DNA, 19 bp, Homo sapiens
  siRNA target sequence for CCL26 (NM_006072.3,267-285).
gatattcactaccaaaaga

SEQ ID NO: 167316 - DNA, 19 bp, Homo sapiens
  siRNA target sequence for CCL26 (NM_006072.3,343-361).
ctgaaaactccgaaacaat

SEQ ID NO: 167317 - DNA, 19 bp, Homo sapiens
  siRNA target sequence for CCL27 (NM_006664.2,119-137).
ccctacagcagcattccta

SEQ ID NO: 167318 - DNA, 19 bp, Homo sapiens
  siRNA target sequence for CCL28 (NM_019846.3,143-161).
gttgcacggaggtttcaca

SEQ ID NO: 167319 - DNA, 19 bp, Homo sapiens
  siRNA target sequence for CCL28 (NM_019846.3,147-165).
cacggaggtttcacatcat

SEQ ID NO: 167320 - DNA, 19 bp, Homo sapiens
  siRNA target sequence for CCL28 (NM_019846.3,149-167).
cggaggtttcacatcatat

SEQ ID NO: 167321 - DNA, 19 bp, Homo sapiens
  siRNA target sequence for CCL28 (NM_019846.3,150-168).
ggaggtttcacatcatatt

SEQ ID NO: 167322 - DNA, 19 bp, Homo sapiens
  siRNA target sequence for CCL28 (NM_019846.3,239-257).
ctgtcatccttcatgtcaa

SEQ ID NO: 167323 - DNA, 19 bp, Homo sapiens
  siRNA target sequence for CCL28 (NM_019846.3,253-271).
gtcaagcgcagaagaatct

SEQ ID NO: 167324 - DNA, 19 bp, Homo sapiens
  siRNA target sequence for CCL28 (NM_019846.3,274-292).
gtcagcccgcacaaccata

SEQ ID NO: 167325 - DNA, 19 bp, Homo sapiens
  siRNA target sequence for CCL28 (NM_019846.3,280-298).
ccgcacaaccatactgtta

SEQ ID NO: 167326 - DNA, 19 bp, Homo sapiens
  siRNA target sequence for CCL28 (NM_019846.3,281-299).
cgcacaaccatactgttaa

SEQ ID NO: 167327 - DNA, 19 bp, Homo sapiens
  siRNA target sequence for CCL28 (NM_019846.3,320-338).
ctgccaagaaaaatggtaa

SEQ ID NO: 167328 - DNA, 19 bp, Homo sapiens
  siRNA target sequence for CCL28 (NM_019846.3,408-426).
cgaaacatacggccataaa

SEQ ID NO: 167329 - DNA, 19 bp, Homo sapiens
  siRNA target sequence for CCL28 (NM_019846.3,409-427).
gaaacatacggccataaaa

SEQ ID NO: 167330 - DNA, 19 bp, Homo sapiens
  siRNA target sequence for CCL28 (NM_019846.3,417-435).
cggccataaaactccttat

SEQ ID NO: 167331 - DNA, 19 bp, Homo sapiens
  siRNA target sequence for CCL28 (NM_019846.3,418-436).
ggccataaaactccttatt

SEQ ID NO: 167332 - DNA, 19 bp, Homo sapiens
  siRNA target sequence for CCL5 (NM_002985.2,93-111).
gctgtcatcctcattgcta

SEQ ID NO: 167333 - DNA, 19 bp, Homo sapiens
  siRNA target sequence for CCL5 (NM_002985.2,129-147).
gcatctgcctccccatatt

SEQ ID NO: 167334 - DNA, 19 bp, Homo sapiens
  siRNA target sequence for CCL5 (NM_002985.2,201-219).
gcccacatcaaggagtatt

SEQ ID NO: 167335 - DNA, 19 bp, Homo sapiens
  siRNA target sequence for CCL5 (NM_002985.2,204-222).
cacatcaaggagtatttct

SEQ ID NO: 167336 - DNA, 19 bp, Homo sapiens
  siRNA target sequence for CCL5 (NM_002985.2,246-264).
ccagcagtcgtctttgtca

SEQ ID NO: 167337 - DNA, 19 bp, Homo sapiens
  siRNA target sequence for CCL5 (NM_002985.2,307-325).
gggttcgggagtacatcaa

SEQ ID NO: 167338 - DNA, 19 bp, Homo sapiens
  siRNA target sequence for CCL5 (NM_002985.2,313-331).
gggagtacatcaactcttt

SEQ ID NO: 167339 - DNA, 19 bp, Homo sapiens
  siRNA target sequence for CCL7 (NM_006273.2,143-161).
ccagttgggattaatactt

SEQ ID NO: 167340 - DNA, 19 bp, Homo sapiens
  siRNA target sequence for CCL7 (NM_006273.2,149-167).
gggattaatacttcaacta

SEQ ID NO: 167341 - DNA, 19 bp, Homo sapiens
  siRNA target sequence for CCL7 (NM_006273.2,172-190).
ctgctacagatttatcaat

SEQ ID NO: 167342 - DNA, 19 bp, Homo sapiens
  siRNA target sequence for CCL7 (NM_006273.2,251-269).
cgggaagctgtaatcttca

SEQ ID NO: 167343 - DNA, 19 bp, Homo sapiens
  siRNA target sequence for CCL8 (NM_005623.2,522-540).
gctcagccagattcagttt

SEQ ID NO: 167344 - DNA, 19 bp, Homo sapiens
  siRNA target sequence for CCL8 (NM_005623.2,557-575).
ctgctttaacgtgatcaat

SEQ ID NO: 167345 - DNA, 19 bp, Homo sapiens
  siRNA target sequence for CCL8 (NM_005623.2,566-584).
cgtgatcaataggaaaatt

SEQ ID NO: 167346 - DNA, 19 bp, Homo sapiens
  siRNA target sequence for CCL8 (NM_005623.2,697-715).
gatgggtcagggattccat

SEQ ID NO: 167347 - DNA, 19 bp, Homo sapiens
  siRNA target sequence for CX3CL1 (NM_002996.1,155-173).
caccacggtgtgacgaaat

SEQ ID NO: 167348 - DNA, 19 bp, Homo sapiens
  siRNA target sequence for CX3CL1 (NM_002996.1,158-176).
cacggtgtgacgaaatgca

SEQ ID NO: 167349 - DNA, 19 bp, Homo sapiens
  siRNA target sequence for CX3CL1 (NM_002996.1,164-182).
gtgacgaaatgcaacatca

SEQ ID NO: 167350 - DNA, 19 bp, Homo sapiens
  siRNA target sequence for CX3CL1 (NM_002996.1,201-219).
caaagatacctgtagcttt

SEQ ID NO: 167351 - DNA, 19 bp, Homo sapiens
  siRNA target sequence for CX3CL1 (NM_002996.1,252-270).
gcggcaaacgcgcaatcat

SEQ ID NO: 167352 - DNA, 19 bp, Homo sapiens
  siRNA target sequence for CX3CL1 (NM_002996.1,254-272).
ggcaaacgcgcaatcatct

SEQ ID NO: 167353 - DNA, 19 bp, Homo sapiens
  siRNA target sequence for CX3CL1 (NM_002996.1,255-273).
gcaaacgcgcaatcatctt

SEQ ID NO: 167354 - DNA, 19 bp, Homo sapiens
  siRNA target sequence for CX3CL1 (NM_002996.1,1231-1249).
ccggagctgtggtagtaat

SEQ ID NO: 167355 - DNA, 19 bp, Homo sapiens
  siRNA target sequence for CX3CL1 (NM_002996.1,1232-1250).
cggagctgtggtagtaatt

SEQ ID NO: 167356 - DNA, 19 bp, Homo sapiens
  siRNA target sequence for CX3CL1 (NM_002996.1,1234-1252).
gagctgtggtagtaattca

SEQ ID NO: 167357 - DNA, 19 bp, Homo sapiens
  siRNA target sequence for CX3CL1 (NM_002996.1,1236-1254).
gctgtggtagtaattcata

SEQ ID NO: 167358 - DNA, 19 bp, Homo sapiens
  siRNA target sequence for CXCL1 (NM_001511.1,342-360).
ctgcatcccccatagttaa

SEQ ID NO: 167359 - DNA, 19 bp, Homo sapiens
  siRNA target sequence for CXCL1 (NM_001511.1,376-394).
gatgctgaacagtgacaaa

SEQ ID NO: 167360 - DNA, 19 bp, Homo sapiens
  siRNA target sequence for CXCL10 (NM_001565.1,108-126).
gactctaagtggcattcaa

SEQ ID NO: 167361 - DNA, 19 bp, Homo sapiens
  siRNA target sequence for CXCL10 (NM_001565.1,158-176).
cctgcatcagcattagtaa

SEQ ID NO: 167362 - DNA, 19 bp, Homo sapiens
  siRNA target sequence for CXCL10 (NM_001565.1,159-177).
ctgcatcagcattagtaat

SEQ ID NO: 167363 - DNA, 19 bp, Homo sapiens
  siRNA target sequence for CXCL10 (NM_001565.1,161-179).
gcatcagcattagtaatca

SEQ ID NO: 167364 - DNA, 19 bp, Homo sapiens
  siRNA target sequence for CXCL10 (NM_001565.1,236-254).
gtccacgtgttgagatcat

SEQ ID NO: 167365 - DNA, 19 bp, Homo sapiens
  siRNA target sequence for CXCL10 (NM_001565.1,241-259).
cgtgttgagatcattgcta

SEQ ID NO: 167366 - DNA, 19 bp, Homo sapiens
  siRNA target sequence for CXCL10 (NM_001565.1,287-305).
gtctgaatccagaatcgaa

SEQ ID NO: 167367 - DNA, 19 bp, Homo sapiens
  siRNA target sequence for CXCL10 (NM_001565.1,298-316).
gaatcgaaggccatcaaga

SEQ ID NO: 167368 - DNA, 19 bp, Homo sapiens
  siRNA target sequence for CXCL10 (NM_001565.1,302-320).
cgaaggccatcaagaattt

SEQ ID NO: 167369 - DNA, 19 bp, Homo sapiens
  siRNA target sequence for CXCL11 (NM_005409.3,118-136).
gccttggctgtgatattgt

SEQ ID NO: 167370 - DNA, 19 bp, Homo sapiens
  siRNA target sequence for CXCL11 (NM_005409.3,239-257).
ccataatgtacccaagtaa

SEQ ID NO: 167371 - DNA, 19 bp, Homo sapiens
  siRNA target sequence for CXCL11 (NM_005409.3,334-352).
caagcaaggcttataatca

SEQ ID NO: 167372 - DNA, 19 bp, Homo sapiens
  siRNA target sequence for CXCL12 (NM_000609.3,178-196).
gatgcccatgccgattctt

SEQ ID NO: 167373 - DNA, 19 bp, Homo sapiens
  siRNA target sequence for CXCL12 (NM_000609.3,218-236).
caacgtcaagcatctcaaa

SEQ ID NO: 167374 - DNA, 19 bp, Homo sapiens
  siRNA target sequence for CXCL12 (NM_000609.3,304-322).
gcattgacccgaagctaaa

SEQ ID NO: 167375 - DNA, 19 bp, Homo sapiens
  siRNA target sequence for CXCL13 (NM_006419.1,104-122).
cgacatctctgcttctcat

SEQ ID NO: 167376 - DNA, 19 bp, Homo sapiens
  siRNA target sequence for CXCL13 (NM_006419.1,154-172).
ggtgttctggaggtctatt

SEQ ID NO: 167377 - DNA, 19 bp, Homo sapiens
  siRNA target sequence for CXCL13 (NM_006419.1,155-173).
gtgttctggaggtctatta

SEQ ID NO: 167378 - DNA, 19 bp, Homo sapiens
  siRNA target sequence for CXCL13 (NM_006419.1,160-178).
ctggaggtctattacacaa

SEQ ID NO: 167379 - DNA, 19 bp, Homo sapiens
  siRNA target sequence for CXCL13 (NM_006419.1,199-217).
caagagagctcagtcttta

SEQ ID NO: 167380 - DNA, 19 bp, Homo sapiens
  siRNA target sequence for CXCL13 (NM_006419.1,219-237).
ccctagacgcttcattgat

SEQ ID NO: 167381 - DNA, 19 bp, Homo sapiens
  siRNA target sequence for CXCL13 (NM_006419.1,224-242).
gacgcttcattgatcgaat

SEQ ID NO: 167382 - DNA, 19 bp, Homo sapiens
  siRNA target sequence for CXCL13 (NM_006419.1,227-245).
gcttcattgatcgaattca

SEQ ID NO: 167383 - DNA, 19 bp, Homo sapiens
  siRNA target sequence for CXCL13 (NM_006419.1,228-246).
cttcattgatcgaattcaa

SEQ ID NO: 167384 - DNA, 19 bp, Homo sapiens
  siRNA target sequence for CXCL13 (NM_006419.1,332-350).
ctgaatggatacaaagaat

SEQ ID NO: 167385 - DNA, 19 bp, Homo sapiens
  siRNA target sequence for CXCL13 (NM_006419.1,391-409).
gttccagtgtttaagagaa

SEQ ID NO: 167386 - DNA, 19 bp, Homo sapiens
  siRNA target sequence for CXCL14 (NM_004887.3,556-574).
cgtgtggacgggtccaaat

SEQ ID NO: 167387 - DNA, 19 bp, Homo sapiens
  siRNA target sequence for CXCL14 (NM_004887.3,559-577).
gtggacgggtccaaatgca

SEQ ID NO: 167388 - DNA, 19 bp, Homo sapiens
  siRNA target sequence for CXCL14 (NM_004887.3,605-623).
gctacagcgacgtgaagaa

SEQ ID NO: 167389 - DNA, 19 bp, Homo sapiens
  siRNA target sequence for CXCL14 (NM_004887.3,647-665).
cgcactgcgaggagaagat

SEQ ID NO: 167390 - DNA, 19 bp, Homo sapiens
  siRNA target sequence for CXCL14 (NM_004887.3,653-671).
gcgaggagaagatggttat

SEQ ID NO: 167391 - DNA, 19 bp, Homo sapiens
  siRNA target sequence for CXCL14 (NM_004887.3,781-799).
cgcagggtctacgaagaat

SEQ ID NO: 167392 - DNA, 19 bp, Homo sapiens
  siRNA target sequence for CXCL5 (NM_002994.2,241-259).
cgttgcgtttgtttacaga

SEQ ID NO: 167393 - DNA, 19 bp, Homo sapiens
  siRNA target sequence for CXCL5 (NM_002994.2,258-276).
gaccacgcaaggagttcat

SEQ ID NO: 167394 - DNA, 19 bp, Homo sapiens
  siRNA target sequence for CXCL5 (NM_002994.2,268-286).
ggagttcatcccaaaatga

SEQ ID NO: 167395 - DNA, 19 bp, Homo sapiens
  siRNA target sequence for CXCL5 (NM_002994.2,360-378).
gaaggaaatttgtcttgat

SEQ ID NO: 167396 - DNA, 19 bp, Homo sapiens
  siRNA target sequence for CXCL6 (NM_002993.1,220-238).
cgcgttacgctgagagtaa

SEQ ID NO: 167397 - DNA, 19 bp, Homo sapiens
  siRNA target sequence for CXCL6 (NM_002993.1,221-239).
gcgttacgctgagagtaaa

SEQ ID NO: 167398 - DNA, 19 bp, Homo sapiens
  siRNA target sequence for CXCL6 (NM_002993.1,233-251).
gagtaaaccccaaaacgat

SEQ ID NO: 167399 - DNA, 19 bp, Homo sapiens
  siRNA target sequence for CXCL6 (NM_002993.1,242-260).
ccaaaacgattggtaaact

SEQ ID NO: 167400 - DNA, 19 bp, Homo sapiens
  siRNA target sequence for CXCL9 (NM_002416.1,104-122).
gaaccccagtagtgagaaa

SEQ ID NO: 167401 - DNA, 19 bp, Homo sapiens
  siRNA target sequence for CXCL9 (NM_002416.1,162-180).
ccacctacaatccttgaaa

SEQ ID NO: 167402 - DNA, 19 bp, Homo sapiens
  siRNA target sequence for CXCL9 (NM_002416.1,177-195).
gaaagaccttaaacaattt

SEQ ID NO: 167403 - DNA, 19 bp, Homo sapiens
  siRNA target sequence for CXCL9 (NM_002416.1,203-221).
gcccttcctgcgagaaaat

SEQ ID NO: 167404 - DNA, 19 bp, Homo sapiens
  siRNA target sequence for CXCL9 (NM_002416.1,204-222).
cccttcctgcgagaaaatt

SEQ ID NO: 167405 - DNA, 19 bp, Homo sapiens
  siRNA target sequence for CXCL9 (NM_002416.1,206-224).
cttcctgcgagaaaattga

SEQ ID NO: 167406 - DNA, 19 bp, Homo sapiens
  siRNA target sequence for CXCL9 (NM_002416.1,209-227).
cctgcgagaaaattgaaat

SEQ ID NO: 167407 - DNA, 19 bp, Homo sapiens
  siRNA target sequence for CXCL9 (NM_002416.1,243-261).
gaatggagttcaaacatgt

SEQ ID NO: 167408 - DNA, 19 bp, Homo sapiens
  siRNA target sequence for CXCL9 (NM_002416.1,247-265).
ggagttcaaacatgtctaa

SEQ ID NO: 167409 - DNA, 19 bp, Homo sapiens
  siRNA target sequence for CXCL9 (NM_002416.1,280-298).
gatgtgaaggaactgatta

SEQ ID NO: 167410 - DNA, 19 bp, Homo sapiens
  siRNA target sequence for CXCL9 (NM_002416.1,388-406).
caacgttctcgtcaaaaga

SEQ ID NO: 167411 - DNA, 19 bp, Homo sapiens
  siRNA target sequence for CXCL9 (NM_002416.1,397-415).
cgtcaaaagaagactacat

SEQ ID NO: 167412 - DNA, 19 bp, Homo sapiens
  siRNA target sequence for IL13 (NM_002188.2,228-246).
ctgacagctggcatgtact

SEQ ID NO: 167413 - DNA, 19 bp, Homo sapiens
  siRNA target sequence for IL13 (NM_002188.2,363-381).
catgtccgagacaccaaaa

SEQ ID NO: 167414 - DNA, 19 bp, Homo sapiens
  siRNA target sequence for IL13 (NM_002188.2,435-453).
cgcgagggacagttcaact

SEQ ID NO: 167415 - DNA, 19 bp, Homo sapiens
  siRNA target sequence for IL8 (NM_000584.2,178-196).
caaggagtgctaaagaact

SEQ ID NO: 167416 - DNA, 19 bp, Homo sapiens
  siRNA target sequence for IL8 (NM_000584.2,182-200).
gagtgctaaagaacttaga

SEQ ID NO: 167417 - DNA, 19 bp, Homo sapiens
  siRNA target sequence for IL8 (NM_000584.2,195-213).
cttagatgtcagtgcataa

SEQ ID NO: 167418 - DNA, 19 bp, Homo sapiens
  siRNA target sequence for IL8 (NM_000584.2,228-246).
cctttccaccccaaattta

SEQ ID NO: 167419 - DNA, 19 bp, Homo sapiens
  siRNA target sequence for IL8 (NM_000584.2,283-301).
gcgccaacacagaaattat

SEQ ID NO: 167420 - DNA, 19 bp, Homo sapiens
  siRNA target sequence for IL8 (NM_000584.2,292-310).
cagaaattattgtaaagct

SEQ ID NO: 167421 - DNA, 19 bp, Homo sapiens
  siRNA target sequence for IL8 (NM_000584.2,331-349).
gtctggaccccaaggaaaa

SEQ ID NO: 167422 - DNA, 19 bp, Homo sapiens
  siRNA target sequence for PPBP (NM_002704.1,244-262).
gaactccgctgcatgtgta

SEQ ID NO: 167423 - DNA, 19 bp, Homo sapiens
  siRNA target sequence for PPBP (NM_002704.1,247-265).
ctccgctgcatgtgtataa

SEQ ID NO: 167424 - DNA, 19 bp, Homo sapiens
  siRNA target sequence for PPBP (NM_002704.1,250-268).
cgctgcatgtgtataaaga

SEQ ID NO: 167425 - DNA, 19 bp, Homo sapiens
  siRNA target sequence for PPBP (NM_002704.1,275-293).
ctggaattcatcccaaaaa

SEQ ID NO: 167426 - DNA, 19 bp, Homo sapiens
  siRNA target sequence for PPBP (NM_002704.1,332-350).
gcaaccaagtcgaagtgat

SEQ ID NO: 167427 - DNA, 19 bp, Homo sapiens
  siRNA target sequence for PPBP (NM_002704.1,333-351).
caaccaagtcgaagtgata

SEQ ID NO: 167428 - DNA, 19 bp, Homo sapiens
  siRNA target sequence for IFNB1 (NM_002176.1,9-27).
caagtgtctcctccaaatt

SEQ ID NO: 167429 - DNA, 19 bp, Homo sapiens
  siRNA target sequence for IFNB1 (NM_002176.1,68-86).
gctacaacttgcttggatt

SEQ ID NO: 167430 - DNA, 19 bp, Homo sapiens
  siRNA target sequence for IFNB1 (NM_002176.1,120-138).
gctcctgtggcaattgaat

SEQ ID NO: 167431 - DNA, 19 bp, Homo sapiens
  siRNA target sequence for IFNB1 (NM_002176.1,225-243).
cgccgcattgaccatctat

SEQ ID NO: 167432 - DNA, 19 bp, Homo sapiens
  siRNA target sequence for IFNB1 (NM_002176.1,227-245).
ccgcattgaccatctatga

SEQ ID NO: 167433 - DNA, 19 bp, Homo sapiens
  siRNA target sequence for IFNB1 (NM_002176.1,229-247).
gcattgaccatctatgaga

SEQ ID NO: 167434 - DNA, 19 bp, Homo sapiens
  siRNA target sequence for IFNB1 (NM_002176.1,230-248).
cattgaccatctatgagat

SEQ ID NO: 167435 - DNA, 19 bp, Homo sapiens
  siRNA target sequence for IFNB1 (NM_002176.1,250-268).
ctccagaacatctttgcta

SEQ ID NO: 167436 - DNA, 19 bp, Homo sapiens
  siRNA target sequence for IFNB1 (NM_002176.1,296-314).
gctggaatgagactattgt

SEQ ID NO: 167437 - DNA, 19 bp, Homo sapiens
  siRNA target sequence for IFNB1 (NM_002176.1,321-339).
cctcctggctaatgtctat

SEQ ID NO: 167438 - DNA, 19 bp, Homo sapiens
  siRNA target sequence for IFNB1 (NM_002176.1,421-439).
ctgcacctgaaaagatatt

SEQ ID NO: 167439 - DNA, 19 bp, Homo sapiens
  siRNA target sequence for IFNB1 (NM_002176.1,423-441).
gcacctgaaaagatattat

SEQ ID NO: 167440 - DNA, 19 bp, Homo sapiens
  siRNA target sequence for IFNB1 (NM_002176.1,508-526).
gaaatcctaaggaactttt

SEQ ID NO: 167441 - DNA, 19 bp, Homo sapiens
  siRNA target sequence for IFNB1 (NM_002176.1,528-546).
cttcattaacagacttaca

SEQ ID NO: 167442 - DNA, 19 bp, Homo sapiens
  siRNA target sequence for IFNW1 (NM_002177.1,606-624).
ctagtgatgaccagctata

SEQ ID NO: 167443 - DNA, 19 bp, Homo sapiens
  siRNA target sequence for IFNW1 (NM_002177.1,657-675).
cagaaccatggcctactta

SEQ ID NO: 167444 - DNA, 19 bp, Homo sapiens
  siRNA target sequence for IFNW1 (NM_002177.1,966-984).
gaatctgctggggcaatta

SEQ ID NO: 167445 - DNA, 19 bp, Homo sapiens
  siRNA target sequence for CSH1 (NM_022640.2,674-692).
ccaagagaactcaccttat

SEQ ID NO: 167446 - DNA, 19 bp, Homo sapiens
  siRNA target sequence for LIF (NM_002309.2,240-258).
ccaatgccctctttattct

SEQ ID NO: 167447 - DNA, 19 bp, Homo sapiens
  siRNA target sequence for LIF (NM_002309.2,245-263).
gccctctttattctctatt

SEQ ID NO: 167448 - DNA, 19 bp, Homo sapiens
  siRNA target sequence for LIF (NM_002309.2,250-268).
ctttattctctattacaca

SEQ ID NO: 167449 - DNA, 19 bp, Homo sapiens
  siRNA target sequence for LIF (NM_002309.2,579-597).
cctcgggtaaggatgtctt

SEQ ID NO: 167450 - DNA, 19 bp, Homo sapiens
  siRNA target sequence for OSM (NM_020530.3,138-156).
gcagctgctcgaaagagta

SEQ ID NO: 167451 - DNA, 19 bp, Homo sapiens
  siRNA target sequence for OSM (NM_020530.3,218-236).
ctggacccctatatacgta

SEQ ID NO: 167452 - DNA, 19 bp, Homo sapiens
  siRNA target sequence for OSM (NM_020530.3,223-241).
cccctatatacgtatccaa

SEQ ID NO: 167453 - DNA, 19 bp, Homo sapiens
  siRNA target sequence for OSM (NM_020530.3,245-263).
ctggatgttcctaaactga

SEQ ID NO: 167454 - DNA, 19 bp, Homo sapiens
  siRNA target sequence for OSM (NM_020530.3,486-504).
ggctcaggaacaacatcta

SEQ ID NO: 167455 - DNA, 19 bp, Homo sapiens
  siRNA target sequence for CTF1 (NM_001330.2,137-155).
gcgcacctcctcaccaaat

SEQ ID NO: 167456 - DNA, 19 bp, Homo sapiens
  siRNA target sequence for CTF1 (NM_001330.2,138-156).
cgcacctcctcaccaaata

SEQ ID NO: 167457 - DNA, 19 bp, Homo sapiens
  siRNA target sequence for IL12A (NM_000882.2,403-421).
ctccagacccaggaatgtt

SEQ ID NO: 167458 - DNA, 19 bp, Homo sapiens
  siRNA target sequence for IL12A (NM_000882.2,476-494).
gaaggccagacaaactcta

SEQ ID NO: 167459 - DNA, 19 bp, Homo sapiens
  siRNA target sequence for IL12A (NM_000882.2,479-497).
ggccagacaaactctagaa

SEQ ID NO: 167460 - DNA, 19 bp, Homo sapiens
  siRNA target sequence for IL12A (NM_000882.2,511-529).
cttctgaagagattgatca

SEQ ID NO: 167461 - DNA, 19 bp, Homo sapiens
  siRNA target sequence for IL12A (NM_000882.2,525-543).
gatcatgaagatatcacaa

SEQ ID NO: 167462 - DNA, 19 bp, Homo sapiens
  siRNA target sequence for IL12A (NM_000882.2,620-638).
gacctctttcataactaat

SEQ ID NO: 167463 - DNA, 19 bp, Homo sapiens
  siRNA target sequence for IL12A (NM_000882.2,677-695).
ggccctgtgccttagtagt

SEQ ID NO: 167464 - DNA, 19 bp, Homo sapiens
  siRNA target sequence for IL12A (NM_000882.2,678-696).
gccctgtgccttagtagta

SEQ ID NO: 167465 - DNA, 19 bp, Homo sapiens
  siRNA target sequence for IL12A (NM_000882.2,680-698).
cctgtgccttagtagtatt

SEQ ID NO: 167466 - DNA, 19 bp, Homo sapiens
  siRNA target sequence for IL12A (NM_000882.2,681-699).
ctgtgccttagtagtattt

SEQ ID NO: 167467 - DNA, 19 bp, Homo sapiens
  siRNA target sequence for IL12A (NM_000882.2,694-712).
gtatttatgaagacttgaa

SEQ ID NO: 167468 - DNA, 19 bp, Homo sapiens
  siRNA target sequence for IL12A (NM_000882.2,734-752).
gaccatgaatgcaaagctt

SEQ ID NO: 167469 - DNA, 19 bp, Homo sapiens
  siRNA target sequence for IL12A (NM_000882.2,769-787).
ggcagatctttctagatca

SEQ ID NO: 167470 - DNA, 19 bp, Homo sapiens
  siRNA target sequence for IL12A (NM_000882.2,867-885).
gaagaaccggatttttata

SEQ ID NO: 167471 - DNA, 19 bp, Homo sapiens
  siRNA target sequence for IL12A (NM_000882.2,873-891).
ccggatttttataaaacta

SEQ ID NO: 167472 - DNA, 19 bp, Homo sapiens
  siRNA target sequence for IL12A (NM_000882.2,874-892).
cggatttttataaaactaa

SEQ ID NO: 167473 - DNA, 19 bp, Homo sapiens
  siRNA target sequence for IL12A (NM_000882.2,930-948).
cgggcagtgactattgata

SEQ ID NO: 167474 - DNA, 19 bp, Homo sapiens
  siRNA target sequence for IL12A (NM_000882.2,934-952).
cagtgactattgatagagt

SEQ ID NO: 167475 - DNA, 19 bp, Homo sapiens
  siRNA target sequence for IL12B (NM_002187.2,57-75).
gttggtcatctcttggttt

SEQ ID NO: 167476 - DNA, 19 bp, Homo sapiens
  siRNA target sequence for IL12B (NM_002187.2,68-86).
cttggttttccctggtttt

SEQ ID NO: 167477 - DNA, 19 bp, Homo sapiens
  siRNA target sequence for IL12B (NM_002187.2,264-282).
cctgaccatccaagtcaaa

SEQ ID NO: 167478 - DNA, 19 bp, Homo sapiens
  siRNA target sequence for IL12B (NM_002187.2,269-287).
ccatccaagtcaaagagtt

SEQ ID NO: 167479 - DNA, 19 bp, Homo sapiens
  siRNA target sequence for IL12B (NM_002187.2,270-288).
catccaagtcaaagagttt

SEQ ID NO: 167480 - DNA, 19 bp, Homo sapiens
  siRNA target sequence for IL12B (NM_002187.2,371-389).
gaatttggtccactgatat

SEQ ID NO: 167481 - DNA, 19 bp, Homo sapiens
  siRNA target sequence for IL12B (NM_002187.2,431-449).
gatgcgaggccaagaatta

SEQ ID NO: 167482 - DNA, 19 bp, Homo sapiens
  siRNA target sequence for IL12B (NM_002187.2,471-489).
gtggctgacgacaatcagt

SEQ ID NO: 167483 - DNA, 19 bp, Homo sapiens
  siRNA target sequence for IL12B (NM_002187.2,477-495).
gacgacaatcagtactgat

SEQ ID NO: 167484 - DNA, 19 bp, Homo sapiens
  siRNA target sequence for IL12B (NM_002187.2,479-497).
cgacaatcagtactgattt

SEQ ID NO: 167485 - DNA, 19 bp, Homo sapiens
  siRNA target sequence for IL12B (NM_002187.2,589-607).
gacaacaaggagtatgagt

SEQ ID NO: 167486 - DNA, 19 bp, Homo sapiens
  siRNA target sequence for IL12B (NM_002187.2,827-845).
ggagtactccacattccta

SEQ ID NO: 167487 - DNA, 19 bp, Homo sapiens
  siRNA target sequence for IL12B (NM_002187.2,932-950).
cggtcatctgccgcaaaaa

SEQ ID NO: 167488 - DNA, 19 bp, Homo sapiens
  siRNA target sequence for IL12B (NM_002187.2,933-951).
ggtcatctgccgcaaaaat

SEQ ID NO: 167489 - DNA, 19 bp, Homo sapiens
  siRNA target sequence for IL12B (NM_002187.2,943-961).
cgcaaaaatgccagcatta

SEQ ID NO: 167490 - DNA, 19 bp, Homo sapiens
  siRNA target sequence for IL12B (NM_002187.2,970-988).
gcccaggaccgctactata

SEQ ID NO: 167491 - DNA, 19 bp, Homo sapiens
  siRNA target sequence for IL12B (NM_002187.2,979-997).
cgctactatagctcatctt

SEQ ID NO: 167492 - DNA, 19 bp, Homo sapiens
  siRNA target sequence for IL5 (NM_000879.2,50-68).
gatgcttctgcatttgagt

SEQ ID NO: 167493 - DNA, 19 bp, Homo sapiens
  siRNA target sequence for IL5 (NM_000879.2,197-215).
gattcctgttcctgtacat

SEQ ID NO: 167494 - DNA, 19 bp, Homo sapiens
  siRNA target sequence for IL5 (NM_000879.2,370-388).
gacggagagtaaaccaatt

SEQ ID NO: 167495 - DNA, 19 bp, Homo sapiens
  siRNA target sequence for IL5 (NM_000879.2,373-391).
ggagagtaaaccaattcct

SEQ ID NO: 167496 - DNA, 19 bp, Homo sapiens
  siRNA target sequence for IL5 (NM_000879.2,374-392).
gagagtaaaccaattccta

SEQ ID NO: 167497 - DNA, 19 bp, Homo sapiens
  siRNA target sequence for IL5 (NM_000879.2,422-440).
gaacaccgagtggataata

SEQ ID NO: 167498 - DNA, 19 bp, Homo sapiens
  siRNA target sequence for IL5 (NM_000879.2,425-443).
caccgagtggataatagaa

SEQ ID NO: 167499 - DNA, 19 bp, Homo sapiens
  siRNA target sequence for IL5 (NM_000879.2,428-446).
cgagtggataatagaaagt

SEQ ID NO: 167500 - DNA, 19 bp, Homo sapiens
  siRNA target sequence for CSF2 (NM_000758.2,116-134).
gccctgggagcatgtgaat

SEQ ID NO: 167501 - DNA, 19 bp, Homo sapiens
  siRNA target sequence for CSF2 (NM_000758.2,204-222).
gaagtcatctcagaaatgt

SEQ ID NO: 167502 - DNA, 19 bp, Homo sapiens
  siRNA target sequence for CSF2 (NM_000758.2,348-366).
cctccaaccccggaaactt

SEQ ID NO: 167503 - DNA, 19 bp, Homo sapiens
  siRNA target sequence for CSF2 (NM_000758.2,367-385).
cctgtgcaacccagattat

SEQ ID NO: 167504 - DNA, 19 bp, Homo sapiens
  siRNA target sequence for CSF2 (NM_000758.2,377-395).
ccagattatcacctttgaa

SEQ ID NO: 167505 - DNA, 19 bp, Homo sapiens
  siRNA target sequence for CSF2 (NM_000758.2,426-444).
cttgtcatcccctttgact

SEQ ID NO: 167506 - DNA, 19 bp, Homo sapiens
  siRNA target sequence for EPO (NM_000799.1,385-403).
cccagacaccaaagttaat

SEQ ID NO: 167507 - DNA, 19 bp, Homo sapiens
  siRNA target sequence for EPO (NM_000799.1,386-404).
ccagacaccaaagttaatt

SEQ ID NO: 167508 - DNA, 19 bp, Homo sapiens
  siRNA target sequence for EPO (NM_000799.1,432-450).
ggcagcaggccgtagaagt

SEQ ID NO: 167509 - DNA, 19 bp, Homo sapiens
  siRNA target sequence for EPO (NM_000799.1,497-515).
gccctgttggtcaactctt

SEQ ID NO: 167510 - DNA, 19 bp, Homo sapiens
  siRNA target sequence for EPO (NM_000799.1,668-686).
gacactttccgcaaactct

SEQ ID NO: 167511 - DNA, 19 bp, Homo sapiens
  siRNA target sequence for EPO (NM_000799.1,690-708).
gagtctactccaatttcct

SEQ ID NO: 167512 - DNA, 19 bp, Homo sapiens
  siRNA target sequence for IL11 (NM_000641.2,172-190).
gagcctgtggccagataca

SEQ ID NO: 167513 - DNA, 19 bp, Homo sapiens
  siRNA target sequence for IL10 (NM_000572.2,234-252).
gatcagctggacaacttgt

SEQ ID NO: 167514 - DNA, 19 bp, Homo sapiens
  siRNA target sequence for IL10 (NM_000572.2,265-283).
ccttgctggaggactttaa

SEQ ID NO: 167515 - DNA, 19 bp, Homo sapiens
  siRNA target sequence for IL10 (NM_000572.2,430-448).
ggcgctgtcatcgatttct

SEQ ID NO: 167516 - DNA, 19 bp, Homo sapiens
  siRNA target sequence for IL10 (NM_000572.2,431-449).
gcgctgtcatcgatttctt

SEQ ID NO: 167517 - DNA, 19 bp, Homo sapiens
  siRNA target sequence for IL10 (NM_000572.2,564-582).
gaagcctacatgacaatga

SEQ ID NO: 167518 - DNA, 19 bp, Homo sapiens
  siRNA target sequence for IL9 (NM_000590.1,145-163).
gccactgcagtgctaatgt

SEQ ID NO: 167519 - DNA, 19 bp, Homo sapiens
  siRNA target sequence for IL9 (NM_000590.1,247-265).
ccaccatgcaaacaagata

SEQ ID NO: 167520 - DNA, 19 bp, Homo sapiens
  siRNA target sequence for IL9 (NM_000590.1,339-357).
gaacagccatgcaaccaaa

SEQ ID NO: 167521 - DNA, 19 bp, Homo sapiens
  siRNA target sequence for IL9 (NM_000590.1,364-382).
caggcaacgcgctgacatt

SEQ ID NO: 167522 - DNA, 19 bp, Homo sapiens
  siRNA target sequence for IL9 (NM_000590.1,367-385).
gcaacgcgctgacatttct

SEQ ID NO: 167523 - DNA, 19 bp, Homo sapiens
  siRNA target sequence for IL7 (NM_000880.2,607-625).
ccatgtttcttttaggtat

SEQ ID NO: 167524 - DNA, 19 bp, Homo sapiens
  siRNA target sequence for IL7 (NM_000880.2,642-660).
ccctgatccttgttctgtt

SEQ ID NO: 167525 - DNA, 19 bp, Homo sapiens
  siRNA target sequence for IL7 (NM_000880.2,672-690).
catctgattgtgatattga

SEQ ID NO: 167526 - DNA, 19 bp, Homo sapiens
  siRNA target sequence for IL7 (NM_000880.2,728-746).
gtcagcatcgatcaattat

SEQ ID NO: 167527 - DNA, 19 bp, Homo sapiens
  siRNA target sequence for IL7 (NM_000880.2,732-750).
gcatcgatcaattattgga

SEQ ID NO: 167528 - DNA, 19 bp, Homo sapiens
  siRNA target sequence for IL7 (NM_000880.2,767-785).
ggtagcaattgcctgaata

SEQ ID NO: 167529 - DNA, 19 bp, Homo sapiens
  siRNA target sequence for IL7 (NM_000880.2,807-825).
gacatatctgtgatgctaa

SEQ ID NO: 167530 - DNA, 19 bp, Homo sapiens
  siRNA target sequence for IL7 (NM_000880.2,848-866).
cgtgctgctcgcaagttga

SEQ ID NO: 167531 - DNA, 19 bp, Homo sapiens
  siRNA target sequence for IL7 (NM_000880.2,896-914).
gattttgatctccacttat

SEQ ID NO: 167532 - DNA, 19 bp, Homo sapiens
  siRNA target sequence for IL7 (NM_000880.2,920-938).
gtttcagaaggcacaacaa

SEQ ID NO: 167533 - DNA, 19 bp, Homo sapiens
  siRNA target sequence for IL7 (NM_000880.2,926-944).
gaaggcacaacaatactgt

SEQ ID NO: 167534 - DNA, 19 bp, Homo sapiens
  siRNA target sequence for IL7 (NM_000880.2,930-948).
gcacaacaatactgttgaa

SEQ ID NO: 167535 - DNA, 19 bp, Homo sapiens
  siRNA target sequence for IL7 (NM_000880.2,952-970).
cactggccaggttaaagga

SEQ ID NO: 167536 - DNA, 19 bp, Homo sapiens
  siRNA target sequence for IL7 (NM_000880.2,995-1013).
gcccaaccaacaaagagtt

SEQ ID NO: 167537 - DNA, 19 bp, Homo sapiens
  siRNA target sequence for IL7 (NM_000880.2,1066-1084).
cctaaagagactattacaa

SEQ ID NO: 167538 - DNA, 19 bp, Homo sapiens
  siRNA target sequence for IL7 (NM_000880.2,1074-1092).
gactattacaagagataaa

SEQ ID NO: 167539 - DNA, 19 bp, Homo sapiens
  siRNA target sequence for IL6 (NM_000600.1,197-215).
gccactcacctcttcagaa

SEQ ID NO: 167540 - DNA, 19 bp, Homo sapiens
  siRNA target sequence for IL6 (NM_000600.1,270-288).
gagacatgtaacaagagta

SEQ ID NO: 167541 - DNA, 19 bp, Homo sapiens
  siRNA target sequence for IL6 (NM_000600.1,422-440).
ggagtttgaggtataccta

SEQ ID NO: 167542 - DNA, 19 bp, Homo sapiens
  siRNA target sequence for IL6 (NM_000600.1,527-545).
gaaaaaggcaaagaatcta

SEQ ID NO: 167543 - DNA, 19 bp, Homo sapiens
  siRNA target sequence for IL6 (NM_000600.1,639-657).
ctcattctgcgcagcttta

SEQ ID NO: 167544 - DNA, 19 bp, Homo sapiens
  siRNA target sequence for IL4 (NM_000589.2,417-435).
catgtgccggcaactttgt

SEQ ID NO: 167545 - DNA, 19 bp, Homo sapiens
  siRNA target sequence for IL4 (NM_000589.2,440-458).
ggacacaagtgcgatatca

SEQ ID NO: 167546 - DNA, 19 bp, Homo sapiens
  siRNA target sequence for IL4 (NM_000589.2,516-534).
ccgagttgaccgtaacaga

SEQ ID NO: 167547 - DNA, 19 bp, Homo sapiens
  siRNA target sequence for IL4 (NM_000589.2,523-541).
gaccgtaacagacatcttt

SEQ ID NO: 167548 - DNA, 19 bp, Homo sapiens
  siRNA target sequence for IL4 (NM_000589.2,558-576).
caactgagaaggaaacctt

SEQ ID NO: 167549 - DNA, 19 bp, Homo sapiens
  siRNA target sequence for IL4 (NM_000589.2,758-776).
cagagtacgttggaaaact

SEQ ID NO: 167550 - DNA, 19 bp, Homo sapiens
  siRNA target sequence for IL4 (NM_000589.2,762-780).
gtacgttggaaaacttctt

SEQ ID NO: 167551 - DNA, 19 bp, Homo sapiens
  siRNA target sequence for IL3 (NM_000588.3,148-166).
gggttaactgctctaacat

SEQ ID NO: 167552 - DNA, 19 bp, Homo sapiens
  siRNA target sequence for IL3 (NM_000588.3,150-168).
gttaactgctctaacatga

SEQ ID NO: 167553 - DNA, 19 bp, Homo sapiens
  siRNA target sequence for IL3 (NM_000588.3,164-182).
catgatcgatgaaattata

SEQ ID NO: 167554 - DNA, 19 bp, Homo sapiens
  siRNA target sequence for IL3 (NM_000588.3,167-185).
gatcgatgaaattataaca

SEQ ID NO: 167555 - DNA, 19 bp, Homo sapiens
  siRNA target sequence for IL3 (NM_000588.3,382-400).
cacccacgcgacatccaat

SEQ ID NO: 167556 - DNA, 19 bp, Homo sapiens
  siRNA target sequence for IL3 (NM_000588.3,386-404).
cacgcgacatccaatccat

SEQ ID NO: 167557 - DNA, 19 bp, Homo sapiens
  siRNA target sequence for IL3 (NM_000588.3,388-406).
cgcgacatccaatccatat

SEQ ID NO: 167558 - DNA, 19 bp, Homo sapiens
  siRNA target sequence for IL3 (NM_000588.3,390-408).
cgacatccaatccatatca

SEQ ID NO: 167559 - DNA, 19 bp, Homo sapiens
  siRNA target sequence for IL3 (NM_000588.3,391-409).
gacatccaatccatatcaa

SEQ ID NO: 167560 - DNA, 19 bp, Homo sapiens
  siRNA target sequence for IL3 (NM_000588.3,410-428).
ggacggtgactggaatgaa

SEQ ID NO: 167561 - DNA, 19 bp, Homo sapiens
  siRNA target sequence for IL3 (NM_000588.3,411-429).
gacggtgactggaatgaat

SEQ ID NO: 167562 - DNA, 19 bp, Homo sapiens
  siRNA target sequence for IL3 (NM_000588.3,434-452).
gaggaaactgacgttctat

SEQ ID NO: 167563 - DNA, 19 bp, Homo sapiens
  siRNA target sequence for IL3 (NM_000588.3,436-454).
ggaaactgacgttctatct

SEQ ID NO: 167564 - DNA, 19 bp, Homo sapiens
  siRNA target sequence for IL3 (NM_000588.3,477-495).
gctcaacagacgactttga

SEQ ID NO: 167565 - DNA, 19 bp, Homo sapiens
  siRNA target sequence for IL2 (NM_000586.2,315-333).
gtcttgcattgcactaagt

SEQ ID NO: 167566 - DNA, 19 bp, Homo sapiens
  siRNA target sequence for IL2 (NM_000586.2,317-335).
cttgcattgcactaagtct

SEQ ID NO: 167567 - DNA, 19 bp, Homo sapiens
  siRNA target sequence for IL2 (NM_000586.2,387-405).
gctacaactggagcattta

SEQ ID NO: 167568 - DNA, 19 bp, Homo sapiens
  siRNA target sequence for IL2 (NM_000586.2,409-427).
ctggatttacagatgattt

SEQ ID NO: 167569 - DNA, 19 bp, Homo sapiens
  siRNA target sequence for IL2 (NM_000586.2,468-486).
gatgctcacatttaagttt

SEQ ID NO: 167570 - DNA, 19 bp, Homo sapiens
  siRNA target sequence for IL2 (NM_000586.2,498-516).
gaaggccacagaactgaaa

SEQ ID NO: 167571 - DNA, 19 bp, Homo sapiens
  siRNA target sequence for IL2 (NM_000586.2,503-521).
ccacagaactgaaacatct

SEQ ID NO: 167572 - DNA, 19 bp, Homo sapiens
  siRNA target sequence for IL2 (NM_000586.2,527-545).
gtctagaagaagaactcaa

SEQ ID NO: 167573 - DNA, 19 bp, Homo sapiens
  siRNA target sequence for IL2 (NM_000586.2,550-568).
ctggaggaagtgctaaatt

SEQ ID NO: 167574 - DNA, 19 bp, Homo sapiens
  siRNA target sequence for IL2 (NM_000586.2,604-622).
gacttaatcagcaatatca

SEQ ID NO: 167575 - DNA, 19 bp, Homo sapiens
  siRNA target sequence for IL2 (NM_000586.2,614-632).
gcaatatcaacgtaatagt

SEQ ID NO: 167576 - DNA, 19 bp, Homo sapiens
  siRNA target sequence for IL2 (NM_000586.2,615-633).
caatatcaacgtaatagtt

SEQ ID NO: 167577 - DNA, 19 bp, Homo sapiens
  siRNA target sequence for IL2 (NM_000586.2,646-664).
ggatctgaaacaacattca

SEQ ID NO: 167578 - DNA, 19 bp, Homo sapiens
  siRNA target sequence for IL2 (NM_000586.2,706-724).
ctgaacagatggattacct

SEQ ID NO: 167579 - DNA, 19 bp, Homo sapiens
  siRNA target sequence for IL2 (NM_000586.2,711-729).
cagatggattaccttttgt

SEQ ID NO: 167580 - DNA, 19 bp, Homo sapiens
  siRNA target sequence for IL2 (NM_000586.2,713-731).
gatggattaccttttgtca

SEQ ID NO: 167581 - DNA, 19 bp, Homo sapiens
  siRNA target sequence for IFNG (NM_000619.1,147-165).
catcgttttgggttctctt

SEQ ID NO: 167582 - DNA, 19 bp, Homo sapiens
  siRNA target sequence for IFNG (NM_000619.1,174-192).
ctgccaggacccatatgta

SEQ ID NO: 167583 - DNA, 19 bp, Homo sapiens
  siRNA target sequence for IFNG (NM_000619.1,238-256).
gatgtagcggataatggaa

SEQ ID NO: 167584 - DNA, 19 bp, Homo sapiens
  siRNA target sequence for IFNG (NM_000619.1,289-307).
gaggagagtgacagaaaaa

SEQ ID NO: 167585 - DNA, 19 bp, Homo sapiens
  siRNA target sequence for IFNG (NM_000619.1,327-345).
ctccttttacttcaaactt

SEQ ID NO: 167586 - DNA, 19 bp, Homo sapiens
  siRNA target sequence for IFNG (NM_000619.1,450-468).
cttcgaaaagctgactaat

SEQ ID NO: 167587 - DNA, 19 bp, Homo sapiens
  siRNA target sequence for IFNG (NM_000619.1,535-553).
ctgtcgccagcagctaaaa

SEQ ID NO: 167588 - DNA, 19 bp, Homo sapiens
  siRNA target sequence for IL17E (NM_022789.2,313-331).
gagggagcgacccagatta

SEQ ID NO: 167589 - DNA, 19 bp, Homo sapiens
  siRNA target sequence for IL17E (NM_022789.2,316-334).
ggagcgacccagattaggt

SEQ ID NO: 167590 - DNA, 19 bp, Homo sapiens
  siRNA target sequence for IL17E (NM_022789.2,573-591).
ccccctggagatatgagtt

SEQ ID NO: 167591 - DNA, 19 bp, Homo sapiens
  siRNA target sequence for IFNA5 (NM_002169.1,42-60).
caactgcaagtcaatctgt

SEQ ID NO: 167592 - DNA, 19 bp, Homo sapiens
  siRNA target sequence for IFNA6 (NM_021002.1,309-327).
gcttctagacaaactctat

SEQ ID NO: 167593 - DNA, 19 bp, Homo sapiens
  siRNA target sequence for IFNA8 (NM_002170.1,71-89).
ctcagctacaagtcattca

SEQ ID NO: 167594 - DNA, 19 bp, Homo sapiens
  siRNA target sequence for IFNA8 (NM_002170.1,224-242).
gagtttgatgataaacagt

SEQ ID NO: 167595 - DNA, 19 bp, Homo sapiens
  siRNA target sequence for IFNA8 (NM_002170.1,407-425).
gaagtgggggtgatagagt

SEQ ID NO: 167596 - DNA, 19 bp, Homo sapiens
  siRNA target sequence for IFNA8 (NM_002170.1,552-570).
ccttctctttatcaatcaa

SEQ ID NO: 167597 - DNA, 19 bp, Homo sapiens
  siRNA target sequence for IFNK (NM_020124.1,31-49).
ccaaacctgatatgattca

SEQ ID NO: 167598 - DNA, 19 bp, Homo sapiens
  siRNA target sequence for IFNK (NM_020124.1,36-54).
cctgatatgattcaaaagt

SEQ ID NO: 167599 - DNA, 19 bp, Homo sapiens
  siRNA target sequence for IFNK (NM_020124.1,99-117).
ctatccctggactgtaact

SEQ ID NO: 167600 - DNA, 19 bp, Homo sapiens
  siRNA target sequence for IFNK (NM_020124.1,105-123).
ctggactgtaacttactga

SEQ ID NO: 167601 - DNA, 19 bp, Homo sapiens
  siRNA target sequence for IFNK (NM_020124.1,156-174).
ctgagacatctgagtagta

SEQ ID NO: 167602 - DNA, 19 bp, Homo sapiens
  siRNA target sequence for IFNK (NM_020124.1,387-405).
gcagagtacctgaaccaat

SEQ ID NO: 167603 - DNA, 19 bp, Homo sapiens
  siRNA target sequence for IFNT1 (NM_176891.2,127-145).
ctcttgaataagttgcaaa

SEQ ID NO: 167604 - DNA, 19 bp, Homo sapiens
  siRNA target sequence for IFNT1 (NM_176891.2,138-156).
gttgcaaaccttgtcaatt

SEQ ID NO: 167605 - DNA, 19 bp, Homo sapiens
  siRNA target sequence for IFNT1 (NM_176891.2,275-293).
gcctcttcagggcaaatat

SEQ ID NO: 167606 - DNA, 19 bp, Homo sapiens
  siRNA target sequence for IFNT1 (NM_176891.2,404-422).
gtactttgggtagtgataa

SEQ ID NO: 167607 - DNA, 19 bp, Homo sapiens
  siRNA target sequence for IFNT1 (NM_176891.2,407-425).
ctttgggtagtgataacct

SEQ ID NO: 167608 - DNA, 19 bp, Homo sapiens
  siRNA target sequence for IFNT1 (NM_176891.2,412-430).
ggtagtgataaccttagat

SEQ ID NO: 167609 - DNA, 19 bp, Homo sapiens
  siRNA target sequence for IFNT1 (NM_176891.2,413-431).
gtagtgataaccttagatt

SEQ ID NO: 167610 - DNA, 19 bp, Homo sapiens
  siRNA target sequence for IFNT1 (NM_176891.2,424-442).
cttagattacaagttaaaa

SEQ ID NO: 167611 - DNA, 19 bp, Homo sapiens
  siRNA target sequence for IFNT1 (NM_176891.2,500-518).
gggccattgtccaagtaga

SEQ ID NO: 167612 - DNA, 19 bp, Homo sapiens
  siRNA target sequence for IFNT1 (NM_176891.2,524-542).
gccgatgtctgttctttgt

SEQ ID NO: 167613 - DNA, 19 bp, Homo sapiens
  siRNA target sequence for IFNT1 (NM_176891.2,526-544).
cgatgtctgttctttgtgt

SEQ ID NO: 167614 - DNA, 19 bp, Homo sapiens
  siRNA target sequence for IL15 (NM_000585.2,388-406).
ccacatttgagaagtattt

SEQ ID NO: 167615 - DNA, 19 bp, Homo sapiens
  siRNA target sequence for IL15 (NM_000585.2,391-409).
catttgagaagtatttcca

SEQ ID NO: 167616 - DNA, 19 bp, Homo sapiens
  siRNA target sequence for IL15 (NM_000585.2,460-478).
ggcattcatgtcttcattt

SEQ ID NO: 167617 - DNA, 19 bp, Homo sapiens
  siRNA target sequence for IL15 (NM_000585.2,519-537).
ctgggtgaatgtaataagt

SEQ ID NO: 167618 - DNA, 19 bp, Homo sapiens
  siRNA target sequence for IL15 (NM_000585.2,521-539).
gggtgaatgtaataagtga

SEQ ID NO: 167619 - DNA, 19 bp, Homo sapiens
  siRNA target sequence for IL15 (NM_000585.2,522-540).
ggtgaatgtaataagtgat

SEQ ID NO: 167620 - DNA, 19 bp, Homo sapiens
  siRNA target sequence for IL15 (NM_000585.2,553-571).
gaagatcttattcaatcta

SEQ ID NO: 167621 - DNA, 19 bp, Homo sapiens
  siRNA target sequence for IL15 (NM_000585.2,574-592).
catattgatgctactttat

SEQ ID NO: 167622 - DNA, 19 bp, Homo sapiens
  siRNA target sequence for IL15 (NM_000585.2,587-605).
ctttatatacggaaagtga

SEQ ID NO: 167623 - DNA, 19 bp, Homo sapiens
  siRNA target sequence for IL15 (NM_000585.2,675-693).
gtccggagatgcaagtatt

SEQ ID NO: 167624 - DNA, 19 bp, Homo sapiens
  siRNA target sequence for IL15 (NM_000585.2,677-695).
ccggagatgcaagtattca

SEQ ID NO: 167625 - DNA, 19 bp, Homo sapiens
  siRNA target sequence for IL15 (NM_000585.2,678-696).
cggagatgcaagtattcat

SEQ ID NO: 167626 - DNA, 19 bp, Homo sapiens
  siRNA target sequence for IL15 (NM_000585.2,682-700).
gatgcaagtattcatgata

SEQ ID NO: 167627 - DNA, 19 bp, Homo sapiens
  siRNA target sequence for IL15 (NM_000585.2,738-756).
gtcttctaatgggaatgta

SEQ ID NO: 167628 - DNA, 19 bp, Homo sapiens
  siRNA target sequence for ED1 (NM_001399.3,697-715).
ggcgtgttcgccgcaataa

SEQ ID NO: 167629 - DNA, 19 bp, Homo sapiens
  siRNA target sequence for ED1 (NM_001399.3,698-716).
gcgtgttcgccgcaataaa

SEQ ID NO: 167630 - DNA, 19 bp, Homo sapiens
  siRNA target sequence for ED1 (NM_001399.3,702-720).
gttcgccgcaataaaagaa

SEQ ID NO: 167631 - DNA, 19 bp, Homo sapiens
  siRNA target sequence for ED1 (NM_001399.3,708-726).
cgcaataaaagaagcaaaa

SEQ ID NO: 167632 - DNA, 19 bp, Homo sapiens
  siRNA target sequence for ED1 (NM_001399.3,738-756).
gcagatggcccagttaaaa

SEQ ID NO: 167633 - DNA, 19 bp, Homo sapiens
  siRNA target sequence for ED1 (NM_001399.3,739-757).
cagatggcccagttaaaaa

SEQ ID NO: 167634 - DNA, 19 bp, Homo sapiens
  siRNA target sequence for ED1 (NM_001399.3,1004-1022).
gggccaagggtcagcaatt

SEQ ID NO: 167635 - DNA, 19 bp, Homo sapiens
  siRNA target sequence for ED1 (NM_001399.3,1018-1036).
caattcaagtcaagaatga

SEQ ID NO: 167636 - DNA, 19 bp, Homo sapiens
  siRNA target sequence for ED1 (NM_001399.3,1023-1041).
caagtcaagaatgatcttt

SEQ ID NO: 167637 - DNA, 19 bp, Homo sapiens
  siRNA target sequence for ED1 (NM_001399.3,1063-1081).
ggtctcgcatcactatgaa

SEQ ID NO: 167638 - DNA, 19 bp, Homo sapiens
  siRNA target sequence for ED1 (NM_001399.3,1082-1100).
ccccaaggtgtttaagcta

SEQ ID NO: 167639 - DNA, 19 bp, Homo sapiens
  siRNA target sequence for ED1 (NM_001399.3,1158-1176).
caggtagaagtatactaca

SEQ ID NO: 167640 - DNA, 19 bp, Homo sapiens
  siRNA target sequence for ED1 (NM_001399.3,1161-1179).
gtagaagtatactacatca

SEQ ID NO: 167641 - DNA, 19 bp, Homo sapiens
  siRNA target sequence for ED1 (NM_001399.3,1164-1182).
gaagtatactacatcaact

SEQ ID NO: 167642 - DNA, 19 bp, Homo sapiens
  siRNA target sequence for ED1 (NM_001399.3,1167-1185).
gtatactacatcaacttca

SEQ ID NO: 167643 - DNA, 19 bp, Homo sapiens
  siRNA target sequence for ED1 (NM_001399.3,1265-1283).
caactacaacacttgctat

SEQ ID NO: 167644 - DNA, 19 bp, Homo sapiens
  siRNA target sequence for LTA (NM_000595.2,418-436).
ccttgagcaacaattctct

SEQ ID NO: 167645 - DNA, 19 bp, Homo sapiens
  siRNA target sequence for LTA (NM_000595.2,721-739).
gccctagtactgtcttctt

SEQ ID NO: 167646 - DNA, 19 bp, Homo sapiens
  siRNA target sequence for LTA (NM_000595.2,722-740).
ccctagtactgtcttcttt

SEQ ID NO: 167647 - DNA, 19 bp, Homo sapiens
  siRNA target sequence for LTB (NM_002341.1,390-408).
ccgcaggacggcctctatt

SEQ ID NO: 167648 - DNA, 19 bp, Homo sapiens
  siRNA target sequence for LTB (NM_002341.1,391-409).
cgcaggacggcctctatta

SEQ ID NO: 167649 - DNA, 19 bp, Homo sapiens
  siRNA target sequence for TNF (NM_000594.2,359-377).
cccagggacctctctctaa

SEQ ID NO: 167650 - DNA, 19 bp, Homo sapiens
  siRNA target sequence for TNF (NM_000594.2,360-378).
ccagggacctctctctaat

SEQ ID NO: 167651 - DNA, 19 bp, Homo sapiens
  siRNA target sequence for TNF (NM_000594.2,392-410).
caggcagtcagatcatctt

SEQ ID NO: 167652 - DNA, 19 bp, Homo sapiens
  siRNA target sequence for TNF (NM_000594.2,394-412).
ggcagtcagatcatcttct

SEQ ID NO: 167653 - DNA, 19 bp, Homo sapiens
  siRNA target sequence for TNF (NM_000594.2,430-448).
gcctgtagcccatgttgta

SEQ ID NO: 167654 - DNA, 19 bp, Homo sapiens
  siRNA target sequence for TNF (NM_000594.2,515-533).
ggcgtggagctgagagata

SEQ ID NO: 167655 - DNA, 19 bp, Homo sapiens
  siRNA target sequence for TNF (NM_000594.2,736-754).
ctggtatgagcccatctat

SEQ ID NO: 167656 - DNA, 19 bp, Homo sapiens
  siRNA target sequence for TNF (NM_000594.2,738-756).
ggtatgagcccatctatct

SEQ ID NO: 167657 - DNA, 19 bp, Homo sapiens
  siRNA target sequence for TNF (NM_000594.2,789-807).
gactcagcgctgagatcaa

SEQ ID NO: 167658 - DNA, 19 bp, Homo sapiens
  siRNA target sequence for TNF (NM_000594.2,835-853).
gtctgggcaggtctacttt

SEQ ID NO: 167659 - DNA, 19 bp, Homo sapiens
  siRNA target sequence for TNF (NM_000594.2,844-862).
ggtctactttgggatcatt

SEQ ID NO: 167660 - DNA, 19 bp, Homo sapiens
  siRNA target sequence for TNFSF10 (NM_003810.2,142-160).
gcgtgctgatcgtgatctt

SEQ ID NO: 167661 - DNA, 19 bp, Homo sapiens
  siRNA target sequence for TNFSF10 (NM_003810.2,144-162).
gtgctgatcgtgatcttca

SEQ ID NO: 167662 - DNA, 19 bp, Homo sapiens
  siRNA target sequence for TNFSF10 (NM_003810.2,192-210).
gtaacttacgtgtacttta

SEQ ID NO: 167663 - DNA, 19 bp, Homo sapiens
  siRNA target sequence for TNFSF10 (NM_003810.2,196-214).
cttacgtgtactttaccaa

SEQ ID NO: 167664 - DNA, 19 bp, Homo sapiens
  siRNA target sequence for TNFSF10 (NM_003810.2,300-318).
gacgaagagagtatgaaca

SEQ ID NO: 167665 - DNA, 19 bp, Homo sapiens
  siRNA target sequence for TNFSF10 (NM_003810.2,319-337).
gcccctgctggcaagtcaa

SEQ ID NO: 167666 - DNA, 19 bp, Homo sapiens
  siRNA target sequence for TNFSF10 (NM_003810.2,345-363).
ctccgtcagctcgttagaa

SEQ ID NO: 167667 - DNA, 19 bp, Homo sapiens
  siRNA target sequence for TNFSF10 (NM_003810.2,348-366).
cgtcagctcgttagaaaga

SEQ ID NO: 167668 - DNA, 19 bp, Homo sapiens
  siRNA target sequence for TNFSF10 (NM_003810.2,349-367).
gtcagctcgttagaaagat

SEQ ID NO: 167669 - DNA, 19 bp, Homo sapiens
  siRNA target sequence for TNFSF10 (NM_003810.2,353-371).
gctcgttagaaagatgatt

SEQ ID NO: 167670 - DNA, 19 bp, Homo sapiens
  siRNA target sequence for TNFSF10 (NM_003810.2,354-372).
ctcgttagaaagatgattt

SEQ ID NO: 167671 - DNA, 19 bp, Homo sapiens
  siRNA target sequence for TNFSF10 (NM_003810.2,391-409).
ccatttctacagttcaaga

SEQ ID NO: 167672 - DNA, 19 bp, Homo sapiens
  siRNA target sequence for TNFSF10 (NM_003810.2,392-410).
catttctacagttcaagaa

SEQ ID NO: 167673 - DNA, 19 bp, Homo sapiens
  siRNA target sequence for TNFSF10 (NM_003810.2,455-473).
gagagtagcagctcacata

SEQ ID NO: 167674 - DNA, 19 bp, Homo sapiens
  siRNA target sequence for TNFSF10 (NM_003810.2,612-630).
gaactggtcatccatgaaa

SEQ ID NO: 167675 - DNA, 19 bp, Homo sapiens
  siRNA target sequence for TNFSF10 (NM_003810.2,624-642).
catgaaaaagggttttact

SEQ ID NO: 167676 - DNA, 19 bp, Homo sapiens
  siRNA target sequence for TNFSF10 (NM_003810.2,652-670).
cccaaacatactttcgatt

SEQ ID NO: 167677 - DNA, 19 bp, Homo sapiens
  siRNA target sequence for TNFSF10 (NM_003810.2,653-671).
ccaaacatactttcgattt

SEQ ID NO: 167678 - DNA, 19 bp, Homo sapiens
  siRNA target sequence for TNFSF10 (NM_003810.2,713-731).
ggtccaatatatttacaaa

SEQ ID NO: 167679 - DNA, 19 bp, Homo sapiens
  siRNA target sequence for TNFSF10 (NM_003810.2,714-732).
gtccaatatatttacaaat

SEQ ID NO: 167680 - DNA, 19 bp, Homo sapiens
  siRNA target sequence for TNFSF10 (NM_003810.2,744-762).
cctgaccctatattgttga

SEQ ID NO: 167681 - DNA, 19 bp, Homo sapiens
  siRNA target sequence for TNFSF10 (NM_003810.2,745-763).
ctgaccctatattgttgat

SEQ ID NO: 167682 - DNA, 19 bp, Homo sapiens
  siRNA target sequence for TNFSF10 (NM_003810.2,747-765).
gaccctatattgttgatga

SEQ ID NO: 167683 - DNA, 19 bp, Homo sapiens
  siRNA target sequence for TNFSF10 (NM_003810.2,749-767).
ccctatattgttgatgaaa

SEQ ID NO: 167684 - DNA, 19 bp, Homo sapiens
  siRNA target sequence for TNFSF10 (NM_003810.2,801-819).
gaatatggactctattcca

SEQ ID NO: 167685 - DNA, 19 bp, Homo sapiens
  siRNA target sequence for TNFSF10 (NM_003810.2,899-917).
ggaccatgaagccagtttt

SEQ ID NO: 167686 - DNA, 19 bp, Homo sapiens
  siRNA target sequence for TNFSF11 (NM_003701.2,368-386).
gagcgcagatggatcctaa

SEQ ID NO: 167687 - DNA, 19 bp, Homo sapiens
  siRNA target sequence for TNFSF11 (NM_003701.2,378-396).
ggatcctaatagaatatca

SEQ ID NO: 167688 - DNA, 19 bp, Homo sapiens
  siRNA target sequence for TNFSF11 (NM_003701.2,473-491).
gtcaagatacaaaattaat

SEQ ID NO: 167689 - DNA, 19 bp, Homo sapiens
  siRNA target sequence for TNFSF11 (NM_003701.2,741-759).
gatctccaacatgactttt

SEQ ID NO: 167690 - DNA, 19 bp, Homo sapiens
  siRNA target sequence for TNFSF11 (NM_003701.2,813-831).
catttgctttcgacatcat

SEQ ID NO: 167691 - DNA, 19 bp, Homo sapiens
  siRNA target sequence for TNFSF11 (NM_003701.2,846-864).
cctagctacagagtatctt

SEQ ID NO: 167692 - DNA, 19 bp, Homo sapiens
  siRNA target sequence for TNFSF11 (NM_003701.2,851-869).
ctacagagtatcttcaact

SEQ ID NO: 167693 - DNA, 19 bp, Homo sapiens
  siRNA target sequence for TNFSF11 (NM_003701.2,931-949).
ggaagcaccaagtattggt

SEQ ID NO: 167694 - DNA, 19 bp, Homo sapiens
  siRNA target sequence for TNFSF11 (NM_003701.2,942-960).
gtattggtcagggaattct

SEQ ID NO: 167695 - DNA, 19 bp, Homo sapiens
  siRNA target sequence for TNFSF11 (NM_003701.2,978-996).
cataaacgttggtggattt

SEQ ID NO: 167696 - DNA, 19 bp, Homo sapiens
  siRNA target sequence for TNFSF11 (NM_003701.2,1058-1076).
cggatcaggatgcaacata

SEQ ID NO: 167697 - DNA, 19 bp, Homo sapiens
  siRNA target sequence for TNFSF11 (NM_003701.2,1060-1078).
gatcaggatgcaacatact

SEQ ID NO: 167698 - DNA, 19 bp, Homo sapiens
  siRNA target sequence for TNFSF11 (NM_003701.2,1085-1103).
cttttaaagttcgagatat

SEQ ID NO: 167699 - DNA, 19 bp, Homo sapiens
  siRNA target sequence for TNFSF13 (NM_003808.2,1033-1051).
gagagatcccggaaaagga

SEQ ID NO: 167700 - DNA, 19 bp, Homo sapiens
  siRNA target sequence for TNFSF13 (NM_003808.2,1314-1332).
gactctattccgatgtata

SEQ ID NO: 167701 - DNA, 19 bp, Homo sapiens
  siRNA target sequence for TNFSF13 (NM_003808.2,1360-1378).
gcctacaacagctgctata

SEQ ID NO: 167702 - DNA, 19 bp, Homo sapiens
  siRNA target sequence for TNFSF13 (NM_003808.2,1379-1397).
gcgcaggtgtcttccattt

SEQ ID NO: 167703 - DNA, 19 bp, Homo sapiens
  siRNA target sequence for TNFSF13 (NM_003808.2,1380-1398).
cgcaggtgtcttccattta

SEQ ID NO: 167704 - DNA, 19 bp, Homo sapiens
  siRNA target sequence for TNFSF13 (NM_003808.2,1433-1451).
gggcaagggcgaaacttaa

SEQ ID NO: 167705 - DNA, 19 bp, Homo sapiens
  siRNA target sequence for TNFSF13 (NM_003808.2,1436-1454).
caagggcgaaacttaacct

SEQ ID NO: 167706 - DNA, 19 bp, Homo sapiens
  siRNA target sequence for TNFSF13B (NM_006573.3,291-309).
gcagtcacgccttacttct

SEQ ID NO: 167707 - DNA, 19 bp, Homo sapiens
  siRNA target sequence for TNFSF13B (NM_006573.3,292-310).
cagtcacgccttacttctt

SEQ ID NO: 167708 - DNA, 19 bp, Homo sapiens
  siRNA target sequence for TNFSF13B (NM_006573.3,723-741).
cagtgaaacaccaactata

SEQ ID NO: 167709 - DNA, 19 bp, Homo sapiens
  siRNA target sequence for TNFSF13B (NM_006573.3,733-751).
ccaactatacaaaaaggat

SEQ ID NO: 167710 - DNA, 19 bp, Homo sapiens
  siRNA target sequence for TNFSF13B (NM_006573.3,789-807).
gggaagtgccctagaagaa

SEQ ID NO: 167711 - DNA, 19 bp, Homo sapiens
  siRNA target sequence for TNFSF13B (NM_006573.3,790-808).
ggaagtgccctagaagaaa

SEQ ID NO: 167712 - DNA, 19 bp, Homo sapiens
  siRNA target sequence for TNFSF13B (NM_006573.3,882-900).
ctacgccatgggacatcta

SEQ ID NO: 167713 - DNA, 19 bp, Homo sapiens
  siRNA target sequence for TNFSF13B (NM_006573.3,885-903).
cgccatgggacatctaatt

SEQ ID NO: 167714 - DNA, 19 bp, Homo sapiens
  siRNA target sequence for TNFSF13B (NM_006573.3,988-1006).
cccaataattcctgctatt

SEQ ID NO: 167715 - DNA, 19 bp, Homo sapiens
  siRNA target sequence for TNFSF15 (NM_005118.2,320-338).
gttccaggctctaaaagga

SEQ ID NO: 167716 - DNA, 19 bp, Homo sapiens
  siRNA target sequence for TNFSF15 (NM_005118.2,467-485).
gcactgggaacatgaacta

SEQ ID NO: 167717 - DNA, 19 bp, Homo sapiens
  siRNA target sequence for TNFSF15 (NM_005118.2,499-517).
ccaagaaccgaatgaacta

SEQ ID NO: 167718 - DNA, 19 bp, Homo sapiens
  siRNA target sequence for TNFSF15 (NM_005118.2,500-518).
caagaaccgaatgaactat

SEQ ID NO: 167719 - DNA, 19 bp, Homo sapiens
  siRNA target sequence for TNFSF15 (NM_005118.2,543-561).
gagtcgggagactacttca

SEQ ID NO: 167720 - DNA, 19 bp, Homo sapiens
  siRNA target sequence for TNFSF15 (NM_005118.2,815-833).
ctctttggtggattacaca

SEQ ID NO: 167721 - DNA, 19 bp, Homo sapiens
  siRNA target sequence for TNFSF15 (NM_005118.2,821-839).
ggtggattacacaaaagaa

SEQ ID NO: 167722 - DNA, 19 bp, Homo sapiens
  siRNA target sequence for TNFSF4 (NM_003326.2,319-337).
cggtatcctcgaattcaaa

SEQ ID NO: 167723 - DNA, 19 bp, Homo sapiens
  siRNA target sequence for TNFSF4 (NM_003326.2,325-343).
cctcgaattcaaagtatca

SEQ ID NO: 167724 - DNA, 19 bp, Homo sapiens
  siRNA target sequence for TNFSF4 (NM_003326.2,326-344).
ctcgaattcaaagtatcaa

SEQ ID NO: 167725 - DNA, 19 bp, Homo sapiens
  siRNA target sequence for TNFSF4 (NM_003326.2,334-352).
caaagtatcaaagtacaat

SEQ ID NO: 167726 - DNA, 19 bp, Homo sapiens
  siRNA target sequence for TNFSF4 (NM_003326.2,346-364).
gtacaatttaccgaatata

SEQ ID NO: 167727 - DNA, 19 bp, Homo sapiens
  siRNA target sequence for TNFSF4 (NM_003326.2,349-367).
caatttaccgaatataaga

SEQ ID NO: 167728 - DNA, 19 bp, Homo sapiens
  siRNA target sequence for TNFSF4 (NM_003326.2,493-511).
gtcaacattagccttcatt

SEQ ID NO: 167729 - DNA, 19 bp, Homo sapiens
  siRNA target sequence for TNFSF4 (NM_003326.2,587-605).
cttacaaagacaaagtcta

SEQ ID NO: 167730 - DNA, 19 bp, Homo sapiens
  siRNA target sequence for TNFSF4 (NM_003326.2,613-631).
gtgaccactgacaatacct

SEQ ID NO: 167731 - DNA, 19 bp, Homo sapiens
  siRNA target sequence for TNFSF4 (NM_003326.2,655-673).
ggcggagaactgattctta

SEQ ID NO: 167732 - DNA, 19 bp, Homo sapiens
  siRNA target sequence for TNFSF4 (NM_003326.2,656-674).
gcggagaactgattcttat

SEQ ID NO: 167733 - DNA, 19 bp, Homo sapiens
  siRNA target sequence for TNFSF4 (NM_003326.2,659-677).
gagaactgattcttatcca

SEQ ID NO: 167734 - DNA, 19 bp, Homo sapiens
  siRNA target sequence for TNFSF5 (NM_000074.1,98-116).
gcatgaaaatttttatgta

SEQ ID NO: 167735 - DNA, 19 bp, Homo sapiens
  siRNA target sequence for TNFSF5 (NM_000074.1,220-238).
gaagattttgtattcatga

SEQ ID NO: 167736 - DNA, 19 bp, Homo sapiens
  siRNA target sequence for TNFSF5 (NM_000074.1,269-287).
gatccttatccttactgaa

SEQ ID NO: 167737 - DNA, 19 bp, Homo sapiens
  siRNA target sequence for TNFSF5 (NM_000074.1,386-404).
gtgatcagaatcctcaaat

SEQ ID NO: 167738 - DNA, 19 bp, Homo sapiens
  siRNA target sequence for TNFSF5 (NM_000074.1,407-425).
cggcacatgtcataagtga

SEQ ID NO: 167739 - DNA, 19 bp, Homo sapiens
  siRNA target sequence for TNFSF5 (NM_000074.1,450-468).
gttacagtgggctgaaaaa

SEQ ID NO: 167740 - DNA, 19 bp, Homo sapiens
  siRNA target sequence for TNFSF5 (NM_000074.1,458-476).
gggctgaaaaaggatacta

SEQ ID NO: 167741 - DNA, 19 bp, Homo sapiens
  siRNA target sequence for TNFSF5 (NM_000074.1,513-531).
gaaacagctgaccgttaaa

SEQ ID NO: 167742 - DNA, 19 bp, Homo sapiens
  siRNA target sequence for TNFSF5 (NM_000074.1,533-551).
gacaaggactctattatat

SEQ ID NO: 167743 - DNA, 19 bp, Homo sapiens
  siRNA target sequence for TNFSF5 (NM_000074.1,535-553).
caaggactctattatatct

SEQ ID NO: 167744 - DNA, 19 bp, Homo sapiens
  siRNA target sequence for TNFSF5 (NM_000074.1,610-628).
gccagcctctgcctaaagt

SEQ ID NO: 167745 - DNA, 19 bp, Homo sapiens
  siRNA target sequence for TNFSF5 (NM_000074.1,632-650).
ccggtagattcgagagaat

SEQ ID NO: 167746 - DNA, 19 bp, Homo sapiens
  siRNA target sequence for TNFSF5 (NM_000074.1,634-652).
ggtagattcgagagaatct

SEQ ID NO: 167747 - DNA, 19 bp, Homo sapiens
  siRNA target sequence for TNFSF5 (NM_000074.1,635-653).
gtagattcgagagaatctt

SEQ ID NO: 167748 - DNA, 19 bp, Homo sapiens
  siRNA target sequence for TNFSF5 (NM_000074.1,689-707).
cttgcgggcaacaatccat

SEQ ID NO: 167749 - DNA, 19 bp, Homo sapiens
  siRNA target sequence for TNFSF5 (NM_000074.1,694-712).
gggcaacaatccattcact

SEQ ID NO: 167750 - DNA, 19 bp, Homo sapiens
  siRNA target sequence for TNFSF5 (NM_000074.1,737-755).
caggtgcttcggtgtttgt

SEQ ID NO: 167751 - DNA, 19 bp, Homo sapiens
  siRNA target sequence for TNFSF5 (NM_000074.1,739-757).
ggtgcttcggtgtttgtca

SEQ ID NO: 167752 - DNA, 19 bp, Homo sapiens
  siRNA target sequence for TNFSF5 (NM_000074.1,740-758).
gtgcttcggtgtttgtcaa

SEQ ID NO: 167753 - DNA, 19 bp, Homo sapiens
  siRNA target sequence for TNFSF5 (NM_000074.1,800-818).
cgtcctttggcttactcaa

SEQ ID NO: 167754 - DNA, 19 bp, Homo sapiens
  siRNA target sequence for TNFSF5 (NM_000074.1,801-819).
gtcctttggcttactcaaa

SEQ ID NO: 167755 - DNA, 19 bp, Homo sapiens
  siRNA target sequence for TNFSF5 (NM_000074.1,803-821).
cctttggcttactcaaact

SEQ ID NO: 167756 - DNA, 19 bp, Homo sapiens
  siRNA target sequence for TNFSF6 (NM_000639.1,558-576).
ccagtccaccccctgaaaa

SEQ ID NO: 167757 - DNA, 19 bp, Homo sapiens
  siRNA target sequence for TNFSF6 (NM_000639.1,561-579).
gtccaccccctgaaaaaaa

SEQ ID NO: 167758 - DNA, 19 bp, Homo sapiens
  siRNA target sequence for TNFSF6 (NM_000639.1,586-604).
gaggaaagtggcccattta

SEQ ID NO: 167759 - DNA, 19 bp, Homo sapiens
  siRNA target sequence for TNFSF6 (NM_000639.1,589-607).
gaaagtggcccatttaaca

SEQ ID NO: 167760 - DNA, 19 bp, Homo sapiens
  siRNA target sequence for TNFSF6 (NM_000639.1,643-661).
ggaagacacctatggaatt

SEQ ID NO: 167761 - DNA, 19 bp, Homo sapiens
  siRNA target sequence for TNFSF6 (NM_000639.1,667-685).
gctttctggagtgaagtat

SEQ ID NO: 167762 - DNA, 19 bp, Homo sapiens
  siRNA target sequence for TNFSF6 (NM_000639.1,714-732).
ctgggctgtactttgtata

SEQ ID NO: 167763 - DNA, 19 bp, Homo sapiens
  siRNA target sequence for TNFSF6 (NM_000639.1,716-734).
gggctgtactttgtatatt

SEQ ID NO: 167764 - DNA, 19 bp, Homo sapiens
  siRNA target sequence for TNFSF6 (NM_000639.1,724-742).
ctttgtatattccaaagta

SEQ ID NO: 167765 - DNA, 19 bp, Homo sapiens
  siRNA target sequence for TNFSF6 (NM_000639.1,892-910).
gggggcagtgttcaatctt

SEQ ID NO: 167766 - DNA, 19 bp, Homo sapiens
  siRNA target sequence for TNFSF6 (NM_000639.1,913-931).
cagtgctgatcatttatat

SEQ ID NO: 167767 - DNA, 19 bp, Homo sapiens
  siRNA target sequence for TNFSF6 (NM_000639.1,976-994).
gacgtttttcggcttatat

SEQ ID NO: 167768 - DNA, 19 bp, Homo sapiens
  siRNA target sequence for TNFSF6 (NM_000639.1,978-996).
cgtttttcggcttatataa

SEQ ID NO: 167769 - DNA, 19 bp, Homo sapiens
  siRNA target sequence for TNFSF8 (NM_001244.2,285-303).
ccacgagccgcagctattt

SEQ ID NO: 167770 - DNA, 19 bp, Homo sapiens
  siRNA target sequence for TNFSF8 (NM_001244.2,288-306).
cgagccgcagctatttcta

SEQ ID NO: 167771 - DNA, 19 bp, Homo sapiens
  siRNA target sequence for TNFSF8 (NM_001244.2,291-309).
gccgcagctatttctattt

SEQ ID NO: 167772 - DNA, 19 bp, Homo sapiens
  siRNA target sequence for TNFSF8 (NM_001244.2,345-363).
cggtggccactattatggt

SEQ ID NO: 167773 - DNA, 19 bp, Homo sapiens
  siRNA target sequence for TNFSF8 (NM_001244.2,416-434).
ctcaaaggaggaaattgct

SEQ ID NO: 167774 - DNA, 19 bp, Homo sapiens
  siRNA target sequence for TNFSF8 (NM_001244.2,509-527).
ctaaacaaaaccaagttgt

SEQ ID NO: 167775 - DNA, 19 bp, Homo sapiens
  siRNA target sequence for TNFSF8 (NM_001244.2,523-541).
gttgtcttggaacaaagat

SEQ ID NO: 167776 - DNA, 19 bp, Homo sapiens
  siRNA target sequence for TNFSF8 (NM_001244.2,572-590).
gggaatctggtgatccaat

SEQ ID NO: 167777 - DNA, 19 bp, Homo sapiens
  siRNA target sequence for TNFSF8 (NM_001244.2,573-591).
ggaatctggtgatccaatt

SEQ ID NO: 167778 - DNA, 19 bp, Homo sapiens
  siRNA target sequence for TNFSF8 (NM_001244.2,616-634).
ccaactgcagtttcttgta

SEQ ID NO: 167779 - DNA, 19 bp, Homo sapiens
  siRNA target sequence for TNFSF8 (NM_001244.2,632-650).
gtacaatgcccaaataatt

SEQ ID NO: 167780 - DNA, 19 bp, Homo sapiens
  siRNA target sequence for TNFSF8 (NM_001244.2,671-689).
cttctcatcaacaagcata

SEQ ID NO: 167781 - DNA, 19 bp, Homo sapiens
  siRNA target sequence for TNFSF8 (NM_001244.2,676-694).
catcaacaagcatatcaaa

SEQ ID NO: 167782 - DNA, 19 bp, Homo sapiens
  siRNA target sequence for TNFSF8 (NM_001244.2,715-733).
gtgtgagtctggaatgcaa

SEQ ID NO: 167783 - DNA, 19 bp, Homo sapiens
  siRNA target sequence for TNFSF8 (NM_001244.2,721-739).
gtctggaatgcaaacgaaa

SEQ ID NO: 167784 - DNA, 19 bp, Homo sapiens
  siRNA target sequence for TNFSF8 (NM_001244.2,782-800).
caggtcaacaccaccatat

SEQ ID NO: 167785 - DNA, 19 bp, Homo sapiens
  siRNA target sequence for TNFSF8 (NM_001244.2,784-802).
ggtcaacaccaccatatca

SEQ ID NO: 167786 - DNA, 19 bp, Homo sapiens
  siRNA target sequence for TNFSF8 (NM_001244.2,792-810).
ccaccatatcagtcaatgt

SEQ ID NO: 167787 - DNA, 19 bp, Homo sapiens
  siRNA target sequence for TNFSF8 (NM_001244.2,801-819).
cagtcaatgtggatacatt

SEQ ID NO: 167788 - DNA, 19 bp, Homo sapiens
  siRNA target sequence for TNFSF8 (NM_001244.2,862-880).
gtccatcttcttatacagt

SEQ ID NO: 167789 - DNA, 19 bp, Homo sapiens
  siRNA target sequence for TNFSF9 (NM_003811.2,290-308).
gcagctggtggcccaaaat

SEQ ID NO: 167790 - DNA, 19 bp, Homo sapiens
  siRNA target sequence for TNFSF9 (NM_003811.2,293-311).
gctggtggcccaaaatgtt

SEQ ID NO: 167791 - DNA, 19 bp, Homo sapiens
  siRNA target sequence for TNFSF9 (NM_003811.2,419-437).
caaggctggagtctactat

SEQ ID NO: 167792 - DNA, 19 bp, Homo sapiens
  siRNA target sequence for TNFSF9 (NM_003811.2,423-441).
gctggagtctactatgtct

SEQ ID NO: 167793 - DNA, 19 bp, Homo sapiens
  siRNA target sequence for TNFSF9 (NM_003811.2,424-442).
ctggagtctactatgtctt

SEQ ID NO: 167794 - DNA, 19 bp, Homo sapiens
  siRNA target sequence for TNFSF9 (NM_003811.2,431-449).
ctactatgtcttctttcaa

SEQ ID NO: 167795 - DNA, 19 bp, Homo sapiens
  siRNA target sequence for TNFSF9 (NM_003811.2,434-452).
ctatgtcttctttcaacta

SEQ ID NO: 167796 - DNA, 19 bp, Homo sapiens
  siRNA target sequence for TNFSF9 (NM_003811.2,481-499).
gctcaggctccgtttcact

SEQ ID NO: 167797 - DNA, 19 bp, Homo sapiens
  siRNA target sequence for IL1F5 (NM_012275.2,202-220).
cggcattgaaggtgcttta

SEQ ID NO: 167798 - DNA, 19 bp, Homo sapiens
  siRNA target sequence for IL1F5 (NM_012275.2,255-273).
catgcagggaaggtcatta

SEQ ID NO: 167799 - DNA, 19 bp, Homo sapiens
  siRNA target sequence for IL1F5 (NM_012275.2,413-431).
catcatggagctctatctt

SEQ ID NO: 167800 - DNA, 19 bp, Homo sapiens
  siRNA target sequence for IL1F5 (NM_012275.2,592-610).
cccccatcacagacttcta

SEQ ID NO: 167801 - DNA, 19 bp, Homo sapiens
  siRNA target sequence for IL1RN (NM_000577.3,147-165).
ccgaccctctgggagaaaa

SEQ ID NO: 167802 - DNA, 19 bp, Homo sapiens
  siRNA target sequence for IL1RN (NM_000577.3,148-166).
cgaccctctgggagaaaat

SEQ ID NO: 167803 - DNA, 19 bp, Homo sapiens
  siRNA target sequence for IL1RN (NM_000577.3,222-240).
gaggaacaaccaactagtt

SEQ ID NO: 167804 - DNA, 19 bp, Homo sapiens
  siRNA target sequence for IL1RN (NM_000577.3,252-270).
gcaaggaccaaatgtcaat

SEQ ID NO: 167805 - DNA, 19 bp, Homo sapiens
  siRNA target sequence for IL1RN (NM_000577.3,257-275).
gaccaaatgtcaatttaga

SEQ ID NO: 167806 - DNA, 19 bp, Homo sapiens
  siRNA target sequence for IL1RN (NM_000577.3,466-484).
cccaccaccagttttgagt

SEQ ID NO: 167807 - DNA, 19 bp, Homo sapiens
  siRNA target sequence for IL1RN (NM_000577.3,565-583).
ggcgtcatggtcaccaaat

SEQ ID NO: 167808 - DNA, 19 bp, Homo sapiens
  siRNA target sequence for IL1RN (NM_000577.3,566-584).
gcgtcatggtcaccaaatt

SEQ ID NO: 167809 - DNA, 19 bp, Homo sapiens
  siRNA target sequence for IL1RN (NM_000577.3,568-586).
gtcatggtcaccaaattct

SEQ ID NO: 167810 - DNA, 19 bp, Homo sapiens
  siRNA target sequence for IL1RN (NM_173841.1,129-147).
ggctttagctgacttgtat

SEQ ID NO: 167811 - DNA, 19 bp, Homo sapiens
  siRNA target sequence for IL1RN (NM_173841.1,131-149).
ctttagctgacttgtatga

SEQ ID NO: 167812 - DNA, 19 bp, Homo sapiens
  siRNA target sequence for IL1RN (NM_173842.1,83-101).
ctccgcagtcacctaatca

SEQ ID NO: 167813 - DNA, 19 bp, Homo sapiens
  siRNA target sequence for IL1RN (NM_173842.1,85-103).
ccgcagtcacctaatcact

SEQ ID NO: 167814 - DNA, 19 bp, Homo sapiens
  siRNA target sequence for IL18 (NM_001562.2,234-252).
cagtagaagacaattgcat

SEQ ID NO: 167815 - DNA, 19 bp, Homo sapiens
  siRNA target sequence for IL18 (NM_001562.2,239-257).
gaagacaattgcatcaact

SEQ ID NO: 167816 - DNA, 19 bp, Homo sapiens
  siRNA target sequence for IL18 (NM_001562.2,278-296).
gacaatacgctttacttta

SEQ ID NO: 167817 - DNA, 19 bp, Homo sapiens
  siRNA target sequence for IL18 (NM_001562.2,280-298).
caatacgctttactttata

SEQ ID NO: 167818 - DNA, 19 bp, Homo sapiens
  siRNA target sequence for IL18 (NM_001562.2,331-349).
ctttggcaagcttgaatct

SEQ ID NO: 167819 - DNA, 19 bp, Homo sapiens
  siRNA target sequence for IL18 (NM_001562.2,402-420).
gaaatcggcctctatttga

SEQ ID NO: 167820 - DNA, 19 bp, Homo sapiens
  siRNA target sequence for IL18 (NM_001562.2,407-425).
cggcctctatttgaagata

SEQ ID NO: 167821 - DNA, 19 bp, Homo sapiens
  siRNA target sequence for IL18 (NM_001562.2,452-470).
gcaccccggaccatattta

SEQ ID NO: 167822 - DNA, 19 bp, Homo sapiens
  siRNA target sequence for IL18 (NM_001562.2,458-476).
cggaccatatttattataa

SEQ ID NO: 167823 - DNA, 19 bp, Homo sapiens
  siRNA target sequence for IL18 (NM_001562.2,526-544).
gaagtgtgagaaaatttca

SEQ ID NO: 167824 - DNA, 19 bp, Homo sapiens
  siRNA target sequence for IL18 (NM_001562.2,596-614).
gataacatcaaggatacaa

SEQ ID NO: 167825 - DNA, 19 bp, Homo sapiens
  siRNA target sequence for IL18 (NM_001562.2,601-619).
catcaaggatacaaaaagt

SEQ ID NO: 167826 - DNA, 19 bp, Homo sapiens
  siRNA target sequence for IL18 (NM_001562.2,647-665).
ccaggacatgataataaga

SEQ ID NO: 167827 - DNA, 19 bp, Homo sapiens
  siRNA target sequence for IL18 (NM_001562.2,653-671).
catgataataagatgcaat

SEQ ID NO: 167828 - DNA, 19 bp, Homo sapiens
  siRNA target sequence for IL18 (NM_001562.2,681-699).
catcatacgaaggatactt

SEQ ID NO: 167829 - DNA, 19 bp, Homo sapiens
  siRNA target sequence for IL18 (NM_001562.2,684-702).
catacgaaggatactttct

SEQ ID NO: 167830 - DNA, 19 bp, Homo sapiens
  siRNA target sequence for IL18 (NM_001562.2,697-715).
ctttctagcttgtgaaaaa

SEQ ID NO: 167831 - DNA, 19 bp, Homo sapiens
  siRNA target sequence for IL18 (NM_001562.2,701-719).
ctagcttgtgaaaaagaga

SEQ ID NO: 167832 - DNA, 19 bp, Homo sapiens
  siRNA target sequence for IL18 (NM_001562.2,720-738).
gagacctttttaaactcat

SEQ ID NO: 167833 - DNA, 19 bp, Homo sapiens
  siRNA target sequence for IL18 (NM_001562.2,755-773).
gaattgggggatagatcta

SEQ ID NO: 167834 - DNA, 19 bp, Homo sapiens
  siRNA target sequence for IL18 (NM_001562.2,761-779).
ggggatagatctataatgt

SEQ ID NO: 167835 - DNA, 19 bp, Homo sapiens
  siRNA target sequence for IL1A (NM_000575.3,965-983).
ccaaagttccagacatgtt

SEQ ID NO: 167836 - DNA, 19 bp, Homo sapiens
  siRNA target sequence for IL1A (NM_000575.3,1025-1043).
gttcctccattgatcatct

SEQ ID NO: 167837 - DNA, 19 bp, Homo sapiens
  siRNA target sequence for IL1A (NM_000575.3,1039-1057).
catctgtctctgaatcaga

SEQ ID NO: 167838 - DNA, 19 bp, Homo sapiens
  siRNA target sequence for IL1A (NM_000575.3,1056-1074).
gaaatccttctatcatgta

SEQ ID NO: 167839 - DNA, 19 bp, Homo sapiens
  siRNA target sequence for IL1A (NM_000575.3,1061-1079).
ccttctatcatgtaagcta

SEQ ID NO: 167840 - DNA, 19 bp, Homo sapiens
  siRNA target sequence for IL1A (NM_000575.3,1093-1111).
gaaggctgcatggatcaat

SEQ ID NO: 167841 - DNA, 19 bp, Homo sapiens
  siRNA target sequence for IL1A (NM_000575.3,1187-1205).
ccaacgggaaggttctgaa

SEQ ID NO: 167842 - DNA, 19 bp, Homo sapiens
  siRNA target sequence for IL1A (NM_000575.3,1291-1309).
cctaggtcagcacctttta

SEQ ID NO: 167843 - DNA, 19 bp, Homo sapiens
  siRNA target sequence for IL1A (NM_000575.3,1324-1342).
gtgaaatacaactttatga

SEQ ID NO: 167844 - DNA, 19 bp, Homo sapiens
  siRNA target sequence for IL1A (NM_000575.3,1368-1386).
gaatgacgccctcaatcaa

SEQ ID NO: 167845 - DNA, 19 bp, Homo sapiens
  siRNA target sequence for IL1A (NM_000575.3,1372-1390).
gacgccctcaatcaaagta

SEQ ID NO: 167846 - DNA, 19 bp, Homo sapiens
  siRNA target sequence for IL1A (NM_000575.3,1374-1392).
cgccctcaatcaaagtata

SEQ ID NO: 167847 - DNA, 19 bp, Homo sapiens
  siRNA target sequence for IL1A (NM_000575.3,1376-1394).
ccctcaatcaaagtataat

SEQ ID NO: 167848 - DNA, 19 bp, Homo sapiens
  siRNA target sequence for IL1A (NM_000575.3,1377-1395).
cctcaatcaaagtataatt

SEQ ID NO: 167849 - DNA, 19 bp, Homo sapiens
  siRNA target sequence for IL1A (NM_000575.3,1413-1431).
cctcacggctgctgcatta

SEQ ID NO: 167850 - DNA, 19 bp, Homo sapiens
  siRNA target sequence for IL1A (NM_000575.3,1416-1434).
cacggctgctgcattacat

SEQ ID NO: 167851 - DNA, 19 bp, Homo sapiens
  siRNA target sequence for IL1A (NM_000575.3,1418-1436).
cggctgctgcattacataa

SEQ ID NO: 167852 - DNA, 19 bp, Homo sapiens
  siRNA target sequence for IL1A (NM_000575.3,1459-1477).
gacatgggtgcttataagt

SEQ ID NO: 167853 - DNA, 19 bp, Homo sapiens
  siRNA target sequence for IL1A (NM_000575.3,1461-1479).
catgggtgcttataagtca

SEQ ID NO: 167854 - DNA, 19 bp, Homo sapiens
  siRNA target sequence for IL1A (NM_000575.3,1465-1483).
ggtgcttataagtcatcaa

SEQ ID NO: 167855 - DNA, 19 bp, Homo sapiens
  siRNA target sequence for IL1A (NM_000575.3,1493-1511).
ctaaaattaccgtgattct

SEQ ID NO: 167856 - DNA, 19 bp, Homo sapiens
  siRNA target sequence for IL1A (NM_000575.3,1503-1521).
cgtgattctaagaatctca

SEQ ID NO: 167857 - DNA, 19 bp, Homo sapiens
  siRNA target sequence for IL1A (NM_000575.3,1636-1654).
gaaactcacggcactaaga

SEQ ID NO: 167858 - DNA, 19 bp, Homo sapiens
  siRNA target sequence for IL1A (NM_000575.3,1640-1658).
ctcacggcactaagaacta

SEQ ID NO: 167859 - DNA, 19 bp, Homo sapiens
  siRNA target sequence for IL1A (NM_000575.3,1642-1660).
cacggcactaagaactatt

SEQ ID NO: 167860 - DNA, 19 bp, Homo sapiens
  siRNA target sequence for IL1A (NM_000575.3,1647-1665).
cactaagaactatttcaca

SEQ ID NO: 167861 - DNA, 19 bp, Homo sapiens
  siRNA target sequence for IL1A (NM_000575.3,1667-1685).
cagttgcccatccaaactt

SEQ ID NO: 167862 - DNA, 19 bp, Homo sapiens
  siRNA target sequence for IL1A (NM_000575.3,1669-1687).
gttgcccatccaaacttgt

SEQ ID NO: 167863 - DNA, 19 bp, Homo sapiens
  siRNA target sequence for IL1B (NM_000576.2,100-118).
cctgagctcgccagtgaaa

SEQ ID NO: 167864 - DNA, 19 bp, Homo sapiens
  siRNA target sequence for IL1B (NM_000576.2,113-131).
gtgaaatgatggcttatta

SEQ ID NO: 167865 - DNA, 19 bp, Homo sapiens
  siRNA target sequence for IL1B (NM_000576.2,163-181).
gctgatggccctaaacaga

SEQ ID NO: 167866 - DNA, 19 bp, Homo sapiens
  siRNA target sequence for IL1B (NM_000576.2,164-182).
ctgatggccctaaacagat

SEQ ID NO: 167867 - DNA, 19 bp, Homo sapiens
  siRNA target sequence for IL1B (NM_000576.2,169-187).
ggccctaaacagatgaagt

SEQ ID NO: 167868 - DNA, 19 bp, Homo sapiens
  siRNA target sequence for IL1B (NM_000576.2,410-428).
gggataacgaggcttatgt

SEQ ID NO: 167869 - DNA, 19 bp, Homo sapiens
  siRNA target sequence for IL1B (NM_000576.2,465-483).
ccgggactcacagcaaaaa

SEQ ID NO: 167870 - DNA, 19 bp, Homo sapiens
  siRNA target sequence for IL1B (NM_000576.2,497-515).
ctggtccatatgaactgaa

SEQ ID NO: 167871 - DNA, 19 bp, Homo sapiens
  siRNA target sequence for IL1B (NM_000576.2,642-660).
gtcctgcgtgttgaaagat

SEQ ID NO: 167872 - DNA, 19 bp, Homo sapiens
  siRNA target sequence for IL1B (NM_000576.2,644-662).
cctgcgtgttgaaagatga

SEQ ID NO: 167873 - DNA, 19 bp, Homo sapiens
  siRNA target sequence for IL1B (NM_000576.2,727-745).
cgatttgtcttcaacaaga

SEQ ID NO: 167874 - DNA, 19 bp, Homo sapiens
  siRNA target sequence for IL1B (NM_000576.2,728-746).
gatttgtcttcaacaagat

SEQ ID NO: 167875 - DNA, 19 bp, Homo sapiens
  siRNA target sequence for IL1B (NM_000576.2,803-821).
gcacctctcaagcagaaaa

SEQ ID NO: 167876 - DNA, 19 bp, Homo sapiens
  siRNA target sequence for IL1F10 (NM_032556.4,429-447).
ccctccccatggcaagata

SEQ ID NO: 167877 - DNA, 19 bp, Homo sapiens
  siRNA target sequence for IL1F10 (NM_032556.4,434-452).
cccatggcaagatactaca

SEQ ID NO: 167878 - DNA, 19 bp, Homo sapiens
  siRNA target sequence for IL1F10 (NM_032556.4,436-454).
catggcaagatactacata

SEQ ID NO: 167879 - DNA, 19 bp, Homo sapiens
  siRNA target sequence for IL1F10 (NM_032556.4,439-457).
ggcaagatactacataatt

SEQ ID NO: 167880 - DNA, 19 bp, Homo sapiens
  siRNA target sequence for IL1F10 (NM_032556.4,440-458).
gcaagatactacataatta

SEQ ID NO: 167881 - DNA, 19 bp, Homo sapiens
  siRNA target sequence for IL1F10 (NM_032556.4,469-487).
ccagaaggctctatacaca

SEQ ID NO: 167882 - DNA, 19 bp, Homo sapiens
  siRNA target sequence for IL1F10 (NM_032556.4,841-859).
ctcagcccgtaccaagttt

SEQ ID NO: 167883 - DNA, 19 bp, Homo sapiens
  siRNA target sequence for IL1F10 (NM_032556.4,843-861).
cagcccgtaccaagtttta

SEQ ID NO: 167884 - DNA, 19 bp, Homo sapiens
  siRNA target sequence for IL1F10 (NM_032556.4,845-863).
gcccgtaccaagttttact

SEQ ID NO: 167885 - DNA, 19 bp, Homo sapiens
  siRNA target sequence for IL1F10 (NM_032556.4,846-864).
cccgtaccaagttttactt

SEQ ID NO: 167886 - DNA, 19 bp, Homo sapiens
  siRNA target sequence for IL1F10 (NM_032556.4,847-865).
ccgtaccaagttttacttt

SEQ ID NO: 167887 - DNA, 19 bp, Homo sapiens
  siRNA target sequence for IL1F10 (NM_032556.4,849-867).
gtaccaagttttactttga

SEQ ID NO: 167888 - DNA, 19 bp, Homo sapiens
  siRNA target sequence for IL1F6 (NM_014440.1,37-55).
gggagcattcaggatatca

SEQ ID NO: 167889 - DNA, 19 bp, Homo sapiens
  siRNA target sequence for IL1F6 (NM_014440.1,122-140).
cagtcactattgccttaat

SEQ ID NO: 167890 - DNA, 19 bp, Homo sapiens
  siRNA target sequence for IL1F6 (NM_014440.1,124-142).
gtcactattgccttaatct

SEQ ID NO: 167891 - DNA, 19 bp, Homo sapiens
  siRNA target sequence for IL1F6 (NM_014440.1,126-144).
cactattgccttaatctca

SEQ ID NO: 167892 - DNA, 19 bp, Homo sapiens
  siRNA target sequence for IL1F6 (NM_014440.1,216-234).
ctgcctgatgtgtgctaaa

SEQ ID NO: 167893 - DNA, 19 bp, Homo sapiens
  siRNA target sequence for IL1F6 (NM_014440.1,218-236).
gcctgatgtgtgctaaagt

SEQ ID NO: 167894 - DNA, 19 bp, Homo sapiens
  siRNA target sequence for IL1F6 (NM_014440.1,430-448).
ctggggaaagccaacacta

SEQ ID NO: 167895 - DNA, 19 bp, Homo sapiens
  siRNA target sequence for IL1F7 (NM_014439.3,162-180).
ccccaccatgaattttgtt

SEQ ID NO: 167896 - DNA, 19 bp, Homo sapiens
  siRNA target sequence for IL1F7 (NM_014439.3,381-399).
ctctaaaggggagttttgt

SEQ ID NO: 167897 - DNA, 19 bp, Homo sapiens
  siRNA target sequence for IL1F7 (NM_014439.3,400-418).
ctctactgtgacaaggata

SEQ ID NO: 167898 - DNA, 19 bp, Homo sapiens
  siRNA target sequence for IL1F7 (NM_014439.3,402-420).
ctactgtgacaaggataaa

SEQ ID NO: 167899 - DNA, 19 bp, Homo sapiens
  siRNA target sequence for IL1F7 (NM_014439.3,573-591).
ctgcacctcctgcaattgt

SEQ ID NO: 167900 - DNA, 19 bp, Homo sapiens
  siRNA target sequence for IL1F7 (NM_014439.3,575-593).
gcacctcctgcaattgtaa

SEQ ID NO: 167901 - DNA, 19 bp, Homo sapiens
  siRNA target sequence for IL1F7 (NM_014439.3,576-594).
cacctcctgcaattgtaat

SEQ ID NO: 167902 - DNA, 19 bp, Homo sapiens
  siRNA target sequence for IL1F7 (NM_014439.3,578-596).
cctcctgcaattgtaatga

SEQ ID NO: 167903 - DNA, 19 bp, Homo sapiens
  siRNA target sequence for IL1F7 (NM_014439.3,630-648).
gaaacacattgaattttca

SEQ ID NO: 167904 - DNA, 19 bp, Homo sapiens
  siRNA target sequence for IL1F7 (NM_014439.3,658-676).
gtttgcaaagctgaaatga

SEQ ID NO: 167905 - DNA, 19 bp, Homo sapiens
  siRNA target sequence for IL1F7 (NM_173203.1,113-131).
gctgcttagaagagatctt

SEQ ID NO: 167906 - DNA, 19 bp, Homo sapiens
  siRNA target sequence for IL1F7 (NM_173205.1,48-66).
ctttaagaagcgcttaaga

SEQ ID NO: 167907 - DNA, 19 bp, Homo sapiens
  siRNA target sequence for IL1F8 (NM_014438.3,120-138).
gaggcagcacccaaatcct

SEQ ID NO: 167908 - DNA, 19 bp, Homo sapiens
  siRNA target sequence for IL1F8 (NM_014438.3,122-140).
ggcagcacccaaatcctat

SEQ ID NO: 167909 - DNA, 19 bp, Homo sapiens
  siRNA target sequence for IL1F8 (NM_014438.3,126-144).
gcacccaaatcctatgcta

SEQ ID NO: 167910 - DNA, 19 bp, Homo sapiens
  siRNA target sequence for IL1F8 (NM_014438.3,127-145).
cacccaaatcctatgctat

SEQ ID NO: 167911 - DNA, 19 bp, Homo sapiens
  siRNA target sequence for IL1F8 (NM_014438.3,131-149).
caaatcctatgctattcgt

SEQ ID NO: 167912 - DNA, 19 bp, Homo sapiens
  siRNA target sequence for IL1F8 (NM_014438.3,137-155).
ctatgctattcgtgattct

SEQ ID NO: 167913 - DNA, 19 bp, Homo sapiens
  siRNA target sequence for IL1F8 (NM_014438.3,201-219).
cctcttagccgcagcatta

SEQ ID NO: 167914 - DNA, 19 bp, Homo sapiens
  siRNA target sequence for IL1F8 (NM_014438.3,202-220).
ctcttagccgcagcattaa

SEQ ID NO: 167915 - DNA, 19 bp, Homo sapiens
  siRNA target sequence for IL1F8 (NM_014438.3,221-239).
gcctgtcactcttcattta

SEQ ID NO: 167916 - DNA, 19 bp, Homo sapiens
  siRNA target sequence for IL1F8 (NM_014438.3,222-240).
cctgtcactcttcatttaa

SEQ ID NO: 167917 - DNA, 19 bp, Homo sapiens
  siRNA target sequence for IL1F8 (NM_014438.3,243-261).
gcctgtagagacacagaat

SEQ ID NO: 167918 - DNA, 19 bp, Homo sapiens
  siRNA target sequence for IL1F8 (NM_014438.3,371-389).
gggctcccaagataacata

SEQ ID NO: 167919 - DNA, 19 bp, Homo sapiens
  siRNA target sequence for IL1F8 (NM_014438.3,489-507).
ggagtgggtagaaagaagt

SEQ ID NO: 167920 - DNA, 19 bp, Homo sapiens
  siRNA target sequence for IL1F8 (NM_014438.3,508-526).
ggaagagttcctttcaaca

SEQ ID NO: 167921 - DNA, 19 bp, Homo sapiens
  siRNA target sequence for IL1F8 (NM_173178.1,504-522).
ggacagcccatctttctca

SEQ ID NO: 167922 - DNA, 19 bp, Homo sapiens
  siRNA target sequence for IL1F8 (NM_173178.1,524-542).
caaggagagaggcataact

SEQ ID NO: 167923 - DNA, 19 bp, Homo sapiens
  siRNA target sequence for IL1F8 (NM_173178.1,534-552).
ggcataactaataacacta

SEQ ID NO: 167924 - DNA, 19 bp, Homo sapiens
  siRNA target sequence for IL1F8 (NM_173178.1,535-553).
gcataactaataacactaa

SEQ ID NO: 167925 - DNA, 19 bp, Homo sapiens
  siRNA target sequence for IL1F9 (NM_019618.2,103-121).
ggaagggccgtctatcaat

SEQ ID NO: 167926 - DNA, 19 bp, Homo sapiens
  siRNA target sequence for IL1F9 (NM_019618.2,107-125).
gggccgtctatcaatcaat

SEQ ID NO: 167927 - DNA, 19 bp, Homo sapiens
  siRNA target sequence for IL1F9 (NM_019618.2,109-127).
gccgtctatcaatcaatgt

SEQ ID NO: 167928 - DNA, 19 bp, Homo sapiens
  siRNA target sequence for IL1F9 (NM_019618.2,111-129).
cgtctatcaatcaatgtgt

SEQ ID NO: 167929 - DNA, 19 bp, Homo sapiens
  siRNA target sequence for IL1F9 (NM_019618.2,112-130).
gtctatcaatcaatgtgta

SEQ ID NO: 167930 - DNA, 19 bp, Homo sapiens
  siRNA target sequence for IL1F9 (NM_019618.2,229-247).
gtcactgttgctgttatca

SEQ ID NO: 167931 - DNA, 19 bp, Homo sapiens
  siRNA target sequence for IL1F9 (NM_019618.2,278-296).
gcagaggggatcccattta

SEQ ID NO: 167932 - DNA, 19 bp, Homo sapiens
  siRNA target sequence for IL1F9 (NM_019618.2,279-297).
cagaggggatcccatttat

SEQ ID NO: 167933 - DNA, 19 bp, Homo sapiens
  siRNA target sequence for IL1F9 (NM_019618.2,407-425).
ccgtgaaacccttcctttt

SEQ ID NO: 167934 - DNA, 19 bp, Homo sapiens
  siRNA target sequence for IL1F9 (NM_019618.2,471-489).
cttcccggactggttcatt

SEQ ID NO: 167935 - DNA, 19 bp, Homo sapiens
  siRNA target sequence for IL1F9 (NM_019618.2,503-521).
gagaccagcccatcattct

SEQ ID NO: 167936 - DNA, 19 bp, Homo sapiens
  siRNA target sequence for IL1F9 (NM_019618.2,505-523).
gaccagcccatcattctga

SEQ ID NO: 167937 - DNA, 19 bp, Homo sapiens
  siRNA target sequence for IL1F9 (NM_019618.2,532-550).
cttgggaagtcatacaaca

SEQ ID NO: 167938 - DNA, 19 bp, Homo sapiens
  siRNA target sequence for IL1F9 (NM_019618.2,549-567).
cactgcctttgaattaaat

SEQ ID NO: 167939 - DNA, 19 bp, Homo sapiens
  siRNA target sequence for INHBC (NM_005538.2,373-391).
cccacagggggcacttcta

SEQ ID NO: 167940 - DNA, 19 bp, Homo sapiens
  siRNA target sequence for INHBC (NM_005538.2,454-472).
caaccagactcgtcttgat

SEQ ID NO: 167941 - DNA, 19 bp, Homo sapiens
  siRNA target sequence for INHBC (NM_005538.2,457-475).
ccagactcgtcttgatttt

SEQ ID NO: 167942 - DNA, 19 bp, Homo sapiens
  siRNA target sequence for INHBC (NM_005538.2,542-560).
cagctcccttccaatacca

SEQ ID NO: 167943 - DNA, 19 bp, Homo sapiens
  siRNA target sequence for INHBC (NM_005538.2,558-576).
ccacttggaccttgaaagt

SEQ ID NO: 167944 - DNA, 19 bp, Homo sapiens
  siRNA target sequence for INHBC (NM_005538.2,587-605).
gtgctgggtccacataata

SEQ ID NO: 167945 - DNA, 19 bp, Homo sapiens
  siRNA target sequence for INHBC (NM_005538.2,590-608).
ctgggtccacataatacca

SEQ ID NO: 167946 - DNA, 19 bp, Homo sapiens
  siRNA target sequence for INHBC (NM_005538.2,648-666).
ccagtggctggcatcaact

SEQ ID NO: 167947 - DNA, 19 bp, Homo sapiens
  siRNA target sequence for INHBC (NM_005538.2,865-883).
gtgctgtcgacaagagttt

SEQ ID NO: 167948 - DNA, 19 bp, Homo sapiens
  siRNA target sequence for INHBC (NM_005538.2,867-885).
gctgtcgacaagagttttt

SEQ ID NO: 167949 - DNA, 19 bp, Homo sapiens
  siRNA target sequence for INHBC (NM_005538.2,868-886).
ctgtcgacaagagtttttt

SEQ ID NO: 167950 - DNA, 19 bp, Homo sapiens
  siRNA target sequence for INHBC (NM_005538.2,961-979).
gcagtgcccactacacata

SEQ ID NO: 167951 - DNA, 19 bp, Homo sapiens
  siRNA target sequence for INHBC (NM_005538.2,1012-1030).
cactgcagtgctcaatctt

SEQ ID NO: 167952 - DNA, 19 bp, Homo sapiens
  siRNA target sequence for INHBC (NM_005538.2,1014-1032).
ctgcagtgctcaatcttct

SEQ ID NO: 167953 - DNA, 19 bp, Homo sapiens
  siRNA target sequence for INHBC (NM_005538.2,1098-1116).
ccctgtctctgctctatta

SEQ ID NO: 167954 - DNA, 19 bp, Homo sapiens
  siRNA target sequence for TGFB1 (NM_000660.1,929-947).
ctatccacctgcaagacta

SEQ ID NO: 167955 - DNA, 19 bp, Homo sapiens
  siRNA target sequence for TGFB1 (NM_000660.1,1070-1088).
gtgctcgccctgtacaaca

SEQ ID NO: 167956 - DNA, 19 bp, Homo sapiens
  siRNA target sequence for TGFB1 (NM_000660.1,1181-1199).
gtggaaacccacaacgaaa

SEQ ID NO: 167957 - DNA, 19 bp, Homo sapiens
  siRNA target sequence for TGFB1 (NM_000660.1,1184-1202).
gaaacccacaacgaaatct

SEQ ID NO: 167958 - DNA, 19 bp, Homo sapiens
  siRNA target sequence for TGFB1 (NM_000660.1,1188-1206).
cccacaacgaaatctatga

SEQ ID NO: 167959 - DNA, 19 bp, Homo sapiens
  siRNA target sequence for TGFB1 (NM_000660.1,1190-1208).
cacaacgaaatctatgaca

SEQ ID NO: 167960 - DNA, 19 bp, Homo sapiens
  siRNA target sequence for TGFB1 (NM_000660.1,1415-1433).
gactcgccagagtggttat

SEQ ID NO: 167961 - DNA, 19 bp, Homo sapiens
  siRNA target sequence for TGFB1 (NM_000660.1,1417-1435).
ctcgccagagtggttatct

SEQ ID NO: 167962 - DNA, 19 bp, Homo sapiens
  siRNA target sequence for TGFB1 (NM_000660.1,1419-1437).
cgccagagtggttatcttt

SEQ ID NO: 167963 - DNA, 19 bp, Homo sapiens
  siRNA target sequence for TGFB1 (NM_000660.1,1420-1438).
gccagagtggttatctttt

SEQ ID NO: 167964 - DNA, 19 bp, Homo sapiens
  siRNA target sequence for TGFB1 (NM_000660.1,1422-1440).
cagagtggttatcttttga

SEQ ID NO: 167965 - DNA, 19 bp, Homo sapiens
  siRNA target sequence for TGFB1 (NM_000660.1,1679-1697).
gccctggacaccaactatt

SEQ ID NO: 167966 - DNA, 19 bp, Homo sapiens
  siRNA target sequence for TGFB1 (NM_000660.1,1726-1744).
cgtgcggcagctgtacatt

SEQ ID NO: 167967 - DNA, 19 bp, Homo sapiens
  siRNA target sequence for TGFB1 (NM_000660.1,1730-1748).
cggcagctgtacattgact

SEQ ID NO: 167968 - DNA, 19 bp, Homo sapiens
  siRNA target sequence for TGFB1 (NM_000660.1,1866-1884).
ccctgtacaaccagcataa

SEQ ID NO: 167969 - DNA, 19 bp, Homo sapiens
  siRNA target sequence for TGFB2 (NM_003238.1,192-210).
gtgtgctgagcgcttttct

SEQ ID NO: 167970 - DNA, 19 bp, Homo sapiens
  siRNA target sequence for TGFB2 (NM_003238.1,249-267).
cctgcagcacactcgatat

SEQ ID NO: 167971 - DNA, 19 bp, Homo sapiens
  siRNA target sequence for TGFB2 (NM_003238.1,252-270).
gcagcacactcgatatgga

SEQ ID NO: 167972 - DNA, 19 bp, Homo sapiens
  siRNA target sequence for TGFB2 (NM_003238.1,459-477).
ggagcgacgaagagtacta

SEQ ID NO: 167973 - DNA, 19 bp, Homo sapiens
  siRNA target sequence for TGFB2 (NM_003238.1,511-529).
cttcttcccctccgaaaat

SEQ ID NO: 167974 - DNA, 19 bp, Homo sapiens
  siRNA target sequence for TGFB2 (NM_003238.1,550-568).
cagaccctacttcagaatt

SEQ ID NO: 167975 - DNA, 19 bp, Homo sapiens
  siRNA target sequence for TGFB2 (NM_003238.1,559-577).
cttcagaattgttcgattt

SEQ ID NO: 167976 - DNA, 19 bp, Homo sapiens
  siRNA target sequence for TGFB2 (NM_003238.1,592-610).
ggagaagaatgcttccaat

SEQ ID NO: 167977 - DNA, 19 bp, Homo sapiens
  siRNA target sequence for TGFB2 (NM_003238.1,674-692).
cggattgagctatatcaga

SEQ ID NO: 167978 - DNA, 19 bp, Homo sapiens
  siRNA target sequence for TGFB2 (NM_003238.1,680-698).
gagctatatcagattctca

SEQ ID NO: 167979 - DNA, 19 bp, Homo sapiens
  siRNA target sequence for TGFB2 (NM_003238.1,697-715).
caagtccaaagatttaaca

SEQ ID NO: 167980 - DNA, 19 bp, Homo sapiens
  siRNA target sequence for TGFB2 (NM_003238.1,730-748).
ctacatcgacagcaaagtt

SEQ ID NO: 167981 - DNA, 19 bp, Homo sapiens
  siRNA target sequence for TGFB2 (NM_003238.1,778-796).
ctccttcgatgtaactgat

SEQ ID NO: 167982 - DNA, 19 bp, Homo sapiens
  siRNA target sequence for TGFB2 (NM_003238.1,826-844).
caggaacctgggatttaaa

SEQ ID NO: 167983 - DNA, 19 bp, Homo sapiens
  siRNA target sequence for TGFB2 (NM_003238.1,835-853).
gggatttaaaataagctta

SEQ ID NO: 167984 - DNA, 19 bp, Homo sapiens
  siRNA target sequence for TGFB2 (NM_003238.1,924-942).
caagatttgcaggtattga

SEQ ID NO: 167985 - DNA, 19 bp, Homo sapiens
  siRNA target sequence for TGFB2 (NM_003238.1,944-962).
ggcacctccacatatacca

SEQ ID NO: 167986 - DNA, 19 bp, Homo sapiens
  siRNA target sequence for TGFB2 (NM_003238.1,1017-1035).
cacatctcctgctaatgtt

SEQ ID NO: 167987 - DNA, 19 bp, Homo sapiens
  siRNA target sequence for TGFB2 (NM_003238.1,1019-1037).
catctcctgctaatgttat

SEQ ID NO: 167988 - DNA, 19 bp, Homo sapiens
  siRNA target sequence for TGFB2 (NM_003238.1,1093-1111).
ggatgcggcctattgcttt

SEQ ID NO: 167989 - DNA, 19 bp, Homo sapiens
  siRNA target sequence for TGFB2 (NM_003238.1,1094-1112).
gatgcggcctattgcttta

SEQ ID NO: 167990 - DNA, 19 bp, Homo sapiens
  siRNA target sequence for TGFB2 (NM_003238.1,1097-1115).
gcggcctattgctttagaa

SEQ ID NO: 167991 - DNA, 19 bp, Homo sapiens
  siRNA target sequence for TGFB2 (NM_003238.1,1098-1116).
cggcctattgctttagaaa

SEQ ID NO: 167992 - DNA, 19 bp, Homo sapiens
  siRNA target sequence for TGFB2 (NM_003238.1,1131-1149).
gctgcctacgtccacttta

SEQ ID NO: 167993 - DNA, 19 bp, Homo sapiens
  siRNA target sequence for TGFB2 (NM_003238.1,1134-1152).
gcctacgtccactttacat

SEQ ID NO: 167994 - DNA, 19 bp, Homo sapiens
  siRNA target sequence for TGFB2 (NM_003238.1,1135-1153).
cctacgtccactttacatt

SEQ ID NO: 167995 - DNA, 19 bp, Homo sapiens
  siRNA target sequence for TGFB2 (NM_003238.1,1139-1157).
cgtccactttacattgatt

SEQ ID NO: 167996 - DNA, 19 bp, Homo sapiens
  siRNA target sequence for TGFB2 (NM_003238.1,1166-1184).
gatctagggtggaaatgga

SEQ ID NO: 167997 - DNA, 19 bp, Homo sapiens
  siRNA target sequence for TGFB2 (NM_003238.1,1189-1207).
cgaacccaaagggtacaat

SEQ ID NO: 167998 - DNA, 19 bp, Homo sapiens
  siRNA target sequence for TGFB2 (NM_003238.1,1223-1241).
ggagcatgcccgtatttat

SEQ ID NO: 167999 - DNA, 19 bp, Homo sapiens
  siRNA target sequence for TGFB2 (NM_003238.1,1226-1244).
gcatgcccgtatttatgga

SEQ ID NO: 168000 - DNA, 19 bp, Homo sapiens
  siRNA target sequence for TGFB2 (NM_003238.1,1263-1281).
gcagggtcctgagcttata

SEQ ID NO: 168001 - DNA, 19 bp, Homo sapiens
  siRNA target sequence for TGFB2 (NM_003238.1,1275-1293).
gcttatataataccataaa

SEQ ID NO: 168002 - DNA, 19 bp, Homo sapiens
  siRNA target sequence for TGFB2 (NM_003238.1,1317-1335).
gctgcgtgtcccaagattt

SEQ ID NO: 168003 - DNA, 19 bp, Homo sapiens
  siRNA target sequence for TGFB2 (NM_003238.1,1318-1336).
ctgcgtgtcccaagattta

SEQ ID NO: 168004 - DNA, 19 bp, Homo sapiens
  siRNA target sequence for TGFB2 (NM_003238.1,1320-1338).
gcgtgtcccaagatttaga

SEQ ID NO: 168005 - DNA, 19 bp, Homo sapiens
  siRNA target sequence for TGFB2 (NM_003238.1,1321-1339).
cgtgtcccaagatttagaa

SEQ ID NO: 168006 - DNA, 19 bp, Homo sapiens
  siRNA target sequence for TGFB2 (NM_003238.1,1337-1355).
gaacctctaaccattctct

SEQ ID NO: 168007 - DNA, 19 bp, Homo sapiens
  siRNA target sequence for TGFB2 (NM_003238.1,1354-1372).
ctactacattggcaaaaca

SEQ ID NO: 168008 - DNA, 19 bp, Homo sapiens
  siRNA target sequence for TGFB2 (NM_003238.1,1378-1396).
gattgaacagctttctaat

SEQ ID NO: 168009 - DNA, 19 bp, Homo sapiens
  siRNA target sequence for TGFB2 (NM_003238.1,1382-1400).
gaacagctttctaatatga

SEQ ID NO: 168010 - DNA, 19 bp, Homo sapiens
  siRNA target sequence for TGFB2 (NM_003238.1,1403-1421).
gtaaagtcttgcaaatgca

SEQ ID NO: 168011 - DNA, 19 bp, Homo sapiens
  siRNA target sequence for TGFB3 (NM_003239.1,629-647).
ggaattacctccaaggttt

SEQ ID NO: 168012 - DNA, 19 bp, Homo sapiens
  siRNA target sequence for TGFB3 (NM_003239.1,644-662).
gttttccgcttcaatgtgt

SEQ ID NO: 168013 - DNA, 19 bp, Homo sapiens
  siRNA target sequence for TGFB3 (NM_003239.1,805-823).
ctatatcggtggcaagaat

SEQ ID NO: 168014 - DNA, 19 bp, Homo sapiens
  siRNA target sequence for TGFB3 (NM_003239.1,844-862).
cgagtggctgtcctttgat

SEQ ID NO: 168015 - DNA, 19 bp, Homo sapiens
  siRNA target sequence for TGFB3 (NM_003239.1,878-896).
cgtgagtggctgttgagaa

SEQ ID NO: 168016 - DNA, 19 bp, Homo sapiens
  siRNA target sequence for TGFB3 (NM_003239.1,901-919).
gtccaacttaggtctagaa

SEQ ID NO: 168017 - DNA, 19 bp, Homo sapiens
  siRNA target sequence for TGFB3 (NM_003239.1,914-932).
ctagaaatcagcattcact

SEQ ID NO: 168018 - DNA, 19 bp, Homo sapiens
  siRNA target sequence for TGFB3 (NM_003239.1,959-977).
ggagatatcctggaaaaca

SEQ ID NO: 168019 - DNA, 19 bp, Homo sapiens
  siRNA target sequence for TGFB3 (NM_003239.1,980-998).
cacgaggtgatggaaatca

SEQ ID NO: 168020 - DNA, 19 bp, Homo sapiens
  siRNA target sequence for TGFB3 (NM_003239.1,1332-1350).
cggtgctgggactgtacaa

SEQ ID NO: 168021 - DNA, 19 bp, Homo sapiens
  siRNA target sequence for TGFB3 (NM_003239.1,1408-1426).
cctgaccatcctgtactat

SEQ ID NO: 168022 - DNA, 19 bp, Homo sapiens
  siRNA target sequence for TGFB3 (NM_003239.1,1468-1486).
ggtgaagtcttgtaaatgt

SEQ ID NO: 168023 - DNA, 19 bp, Homo sapiens
  siRNA target sequence for BTC (NM_001729.1,513-531).
caagcattactgcatcaaa

SEQ ID NO: 168024 - DNA, 19 bp, Homo sapiens
  siRNA target sequence for BTC (NM_001729.1,613-631).
gttgacttgttttacctaa

SEQ ID NO: 168025 - DNA, 19 bp, Homo sapiens
  siRNA target sequence for BTC (NM_001729.1,670-688).
gcagttatggtagttttta

SEQ ID NO: 168026 - DNA, 19 bp, Homo sapiens
  siRNA target sequence for BTC (NM_001729.1,727-745).
cttcggaaacgtcgtaaaa

SEQ ID NO: 168027 - DNA, 19 bp, Homo sapiens
  siRNA target sequence for BTC (NM_001729.1,730-748).
cggaaacgtcgtaaaagaa

SEQ ID NO: 168028 - DNA, 19 bp, Homo sapiens
  siRNA target sequence for BTC (NM_001729.1,731-749).
ggaaacgtcgtaaaagaaa

SEQ ID NO: 168029 - DNA, 19 bp, Homo sapiens
  siRNA target sequence for BTC (NM_001729.1,736-754).
cgtcgtaaaagaaagaaga

SEQ ID NO: 168030 - DNA, 19 bp, Homo sapiens
  siRNA target sequence for DTR (NM_001945.1,699-717).
gagcctcccagtggaaaat

SEQ ID NO: 168031 - DNA, 19 bp, Homo sapiens
  siRNA target sequence for DTR (NM_001945.1,707-725).
cagtggaaaatcgcttata

SEQ ID NO: 168032 - DNA, 19 bp, Homo sapiens
  siRNA target sequence for DTR (NM_001945.1,709-727).
gtggaaaatcgcttatata

SEQ ID NO: 168033 - DNA, 19 bp, Homo sapiens
  siRNA target sequence for DTR (NM_001945.1,795-813).
cgtggggcttctcatgttt

SEQ ID NO: 168034 - DNA, 19 bp, Homo sapiens
  siRNA target sequence for DTR (NM_001945.1,800-818).
ggcttctcatgtttaggta

SEQ ID NO: 168035 - DNA, 19 bp, Homo sapiens
  siRNA target sequence for DTR (NM_001945.1,830-848).
gaggttatgatgtggaaaa

SEQ ID NO: 168036 - DNA, 19 bp, Homo sapiens
  siRNA target sequence for DTR (NM_001945.1,859-877).
gtgaagttgggcatgacta

SEQ ID NO: 168037 - DNA, 19 bp, Homo sapiens
  siRNA target sequence for EREG (NM_001432.1,342-360).
gtgtggctcaagtgtcaat

SEQ ID NO: 168038 - DNA, 19 bp, Homo sapiens
  siRNA target sequence for EREG (NM_001432.1,344-362).
gtggctcaagtgtcaataa

SEQ ID NO: 168039 - DNA, 19 bp, Homo sapiens
  siRNA target sequence for EREG (NM_001432.1,367-385).
gtgtagctctgacatgaat

SEQ ID NO: 168040 - DNA, 19 bp, Homo sapiens
  siRNA target sequence for EREG (NM_001432.1,377-395).
gacatgaatggctattgtt

SEQ ID NO: 168041 - DNA, 19 bp, Homo sapiens
  siRNA target sequence for EREG (NM_001432.1,416-434).
ctggtggacatgagtcaaa

SEQ ID NO: 168042 - DNA, 19 bp, Homo sapiens
  siRNA target sequence for EREG (NM_001432.1,419-437).
gtggacatgagtcaaaact

SEQ ID NO: 168043 - DNA, 19 bp, Homo sapiens
  siRNA target sequence for EREG (NM_001432.1,422-440).
gacatgagtcaaaactact

SEQ ID NO: 168044 - DNA, 19 bp, Homo sapiens
  siRNA target sequence for EREG (NM_001432.1,445-463).
gtgtgaagtgggttatact

SEQ ID NO: 168045 - DNA, 19 bp, Homo sapiens
  siRNA target sequence for EREG (NM_001432.1,465-483).
gtgtccgatgtgaacactt

SEQ ID NO: 168046 - DNA, 19 bp, Homo sapiens
  siRNA target sequence for EREG (NM_001432.1,494-512).
gtccaccaacctttaagca

SEQ ID NO: 168047 - DNA, 19 bp, Homo sapiens
  siRNA target sequence for EREG (NM_001432.1,523-541).
ggctttgaccgtgattctt

SEQ ID NO: 168048 - DNA, 19 bp, Homo sapiens
  siRNA target sequence for EREG (NM_001432.1,524-542).
gctttgaccgtgattctta

SEQ ID NO: 168049 - DNA, 19 bp, Homo sapiens
  siRNA target sequence for EREG (NM_001432.1,525-543).
ctttgaccgtgattcttat

SEQ ID NO: 168050 - DNA, 19 bp, Homo sapiens
  siRNA target sequence for EREG (NM_001432.1,529-547).
gaccgtgattcttattatt

SEQ ID NO: 168051 - DNA, 19 bp, Homo sapiens
  siRNA target sequence for EREG (NM_001432.1,531-549).
ccgtgattcttattatttt

SEQ ID NO: 168052 - DNA, 19 bp, Homo sapiens
  siRNA target sequence for EREG (NM_001432.1,565-583).
cgtcggttccacatattat

SEQ ID NO: 168053 - DNA, 19 bp, Homo sapiens
  siRNA target sequence for EREG (NM_001432.1,589-607).
cagatggtacagaaatcga

SEQ ID NO: 168054 - DNA, 19 bp, Homo sapiens
  siRNA target sequence for ECGF1 (NM_001953.2,464-482).
cagcttgtggacaagcatt

SEQ ID NO: 168055 - DNA, 19 bp, Homo sapiens
  siRNA target sequence for ECGF1 (NM_001953.2,543-561).
gctgcaaggtgccaatgat

SEQ ID NO: 168056 - DNA, 19 bp, Homo sapiens
  siRNA target sequence for ECGF1 (NM_001953.2,585-603).
caggaggcaccttggataa

SEQ ID NO: 168057 - DNA, 19 bp, Homo sapiens
  siRNA target sequence for ECGF1 (NM_001953.2,710-728).
cctgcggacggaatcctat

SEQ ID NO: 168058 - DNA, 19 bp, Homo sapiens
  siRNA target sequence for ECGF1 (NM_001953.2,711-729).
ctgcggacggaatcctata

SEQ ID NO: 168059 - DNA, 19 bp, Homo sapiens
  siRNA target sequence for ECGF1 (NM_001953.2,821-839).
ctggtggtggacgttaagt

SEQ ID NO: 168060 - DNA, 19 bp, Homo sapiens
  siRNA target sequence for FIGF (NM_004469.2,521-539).
gtgggtagtggtgaatgtt

SEQ ID NO: 168061 - DNA, 19 bp, Homo sapiens
  siRNA target sequence for FIGF (NM_004469.2,523-541).
gggtagtggtgaatgtttt

SEQ ID NO: 168062 - DNA, 19 bp, Homo sapiens
  siRNA target sequence for FIGF (NM_004469.2,525-543).
gtagtggtgaatgttttca

SEQ ID NO: 168063 - DNA, 19 bp, Homo sapiens
  siRNA target sequence for FIGF (NM_004469.2,528-546).
gtggtgaatgttttcatga

SEQ ID NO: 168064 - DNA, 19 bp, Homo sapiens
  siRNA target sequence for FIGF (NM_004469.2,566-584).
gcagggctccagtaatgaa

SEQ ID NO: 168065 - DNA, 19 bp, Homo sapiens
  siRNA target sequence for FIGF (NM_004469.2,569-587).
gggctccagtaatgaacat

SEQ ID NO: 168066 - DNA, 19 bp, Homo sapiens
  siRNA target sequence for FIGF (NM_004469.2,614-632).
cacattggaacgatctgaa

SEQ ID NO: 168067 - DNA, 19 bp, Homo sapiens
  siRNA target sequence for FIGF (NM_004469.2,652-670).
ctagtttggaggaactact

SEQ ID NO: 168068 - DNA, 19 bp, Homo sapiens
  siRNA target sequence for FIGF (NM_004469.2,659-677).
ggaggaactacttcgaatt

SEQ ID NO: 168069 - DNA, 19 bp, Homo sapiens
  siRNA target sequence for FIGF (NM_004469.2,660-678).
gaggaactacttcgaatta

SEQ ID NO: 168070 - DNA, 19 bp, Homo sapiens
  siRNA target sequence for FIGF (NM_004469.2,662-680).
ggaactacttcgaattact

SEQ ID NO: 168071 - DNA, 19 bp, Homo sapiens
  siRNA target sequence for FIGF (NM_004469.2,769-787).
ctaggtttgcggcaacttt

SEQ ID NO: 168072 - DNA, 19 bp, Homo sapiens
  siRNA target sequence for FIGF (NM_004469.2,772-790).
ggtttgcggcaactttcta

SEQ ID NO: 168073 - DNA, 19 bp, Homo sapiens
  siRNA target sequence for FIGF (NM_004469.2,773-791).
gtttgcggcaactttctat

SEQ ID NO: 168074 - DNA, 19 bp, Homo sapiens
  siRNA target sequence for FIGF (NM_004469.2,777-795).
gcggcaactttctatgaca

SEQ ID NO: 168075 - DNA, 19 bp, Homo sapiens
  siRNA target sequence for FIGF (NM_004469.2,778-796).
cggcaactttctatgacat

SEQ ID NO: 168076 - DNA, 19 bp, Homo sapiens
  siRNA target sequence for FIGF (NM_004469.2,781-799).
caactttctatgacattga

SEQ ID NO: 168077 - DNA, 19 bp, Homo sapiens
  siRNA target sequence for FIGF (NM_004469.2,882-900).
gggaagagtaccaacacat

SEQ ID NO: 168078 - DNA, 19 bp, Homo sapiens
  siRNA target sequence for FIGF (NM_004469.2,951-969).
gaagagagccttatctgta

SEQ ID NO: 168079 - DNA, 19 bp, Homo sapiens
  siRNA target sequence for FIGF (NM_004469.2,954-972).
gagagccttatctgtatga

SEQ ID NO: 168080 - DNA, 19 bp, Homo sapiens
  siRNA target sequence for FIGF (NM_004469.2,1098-1116).
cgccatccatactcaatta

SEQ ID NO: 168081 - DNA, 19 bp, Homo sapiens
  siRNA target sequence for FIGF (NM_004469.2,1099-1117).
gccatccatactcaattat

SEQ ID NO: 168082 - DNA, 19 bp, Homo sapiens
  siRNA target sequence for FIGF (NM_004469.2,1101-1119).
catccatactcaattatca

SEQ ID NO: 168083 - DNA, 19 bp, Homo sapiens
  siRNA target sequence for FIGF (NM_004469.2,1104-1122).
ccatactcaattatcagaa

SEQ ID NO: 168084 - DNA, 19 bp, Homo sapiens
  siRNA target sequence for FIGF (NM_004469.2,1151-1169).
ctgttcccattccaagaaa

SEQ ID NO: 168085 - DNA, 19 bp, Homo sapiens
  siRNA target sequence for FIGF (NM_004469.2,1192-1210).
gggatagcaacaaatgtaa

SEQ ID NO: 168086 - DNA, 19 bp, Homo sapiens
  siRNA target sequence for FIGF (NM_004469.2,1193-1211).
ggatagcaacaaatgtaaa

SEQ ID NO: 168087 - DNA, 19 bp, Homo sapiens
  siRNA target sequence for FIGF (NM_004469.2,1194-1212).
gatagcaacaaatgtaaat

SEQ ID NO: 168088 - DNA, 19 bp, Homo sapiens
  siRNA target sequence for FIGF (NM_004469.2,1285-1303).
ggccacacatgatgtttga

SEQ ID NO: 168089 - DNA, 19 bp, Homo sapiens
  siRNA target sequence for FIGF (NM_004469.2,1335-1353).
ccatgtcccaaagatctaa

SEQ ID NO: 168090 - DNA, 19 bp, Homo sapiens
  siRNA target sequence for FIGF (NM_004469.2,1339-1357).
gtcccaaagatctaatcca

SEQ ID NO: 168091 - DNA, 19 bp, Homo sapiens
  siRNA target sequence for PDGFA (NM_002607.2,1423-1441).
gcctagggagtcaggtaaa

SEQ ID NO: 168092 - DNA, 19 bp, Homo sapiens
  siRNA target sequence for PDGFA (NM_002607.2,1424-1442).
cctagggagtcaggtaaaa

SEQ ID NO: 168093 - DNA, 19 bp, Homo sapiens
  siRNA target sequence for PDGFA (NM_002607.2,1425-1443).
ctagggagtcaggtaaaaa

SEQ ID NO: 168094 - DNA, 19 bp, Homo sapiens
  siRNA target sequence for PDGFB (NM_002608.1,1093-1111).
ccattcccgaggagcttta

SEQ ID NO: 168095 - DNA, 19 bp, Homo sapiens
  siRNA target sequence for PDGFB (NM_002608.1,1094-1112).
cattcccgaggagctttat

SEQ ID NO: 168096 - DNA, 19 bp, Homo sapiens
  siRNA target sequence for PDGFB (NM_002608.1,1099-1117).
ccgaggagctttatgagat

SEQ ID NO: 168097 - DNA, 19 bp, Homo sapiens
  siRNA target sequence for PDGFB (NM_002608.1,1130-1148).
ctcgatccgctcctttgat

SEQ ID NO: 168098 - DNA, 19 bp, Homo sapiens
  siRNA target sequence for PDGFB (NM_002608.1,1132-1150).
cgatccgctcctttgatga

SEQ ID NO: 168099 - DNA, 19 bp, Homo sapiens
  siRNA target sequence for PDGFB (NM_002608.1,1133-1151).
gatccgctcctttgatgat

SEQ ID NO: 168100 - DNA, 19 bp, Homo sapiens
  siRNA target sequence for PDGFB (NM_002608.1,1197-1215).
gagttggacctgaacatga

SEQ ID NO: 168101 - DNA, 19 bp, Homo sapiens
  siRNA target sequence for PDGFB (NM_002608.1,1471-1489).
ctgtccaggtgagaaagat

SEQ ID NO: 168102 - DNA, 19 bp, Homo sapiens
  siRNA target sequence for PDGFB (NM_002608.1,1500-1518).
cggaagaagccaatcttta

SEQ ID NO: 168103 - DNA, 19 bp, Homo sapiens
  siRNA target sequence for PDGFB (NM_002608.1,1684-1702).
gcaagcaccggaaattcaa

SEQ ID NO: 168104 - DNA, 19 bp, Homo sapiens
  siRNA target sequence for VEGF (NM_003376.3,1133-1151).
gaggagggcagaatcatca

SEQ ID NO: 168105 - DNA, 19 bp, Homo sapiens
  siRNA target sequence for VEGF (NM_003376.3,1150-1168).
cacgaagtggtgaagttca

SEQ ID NO: 168106 - DNA, 19 bp, Homo sapiens
  siRNA target sequence for VEGF (NM_003376.3,1184-1202).
gcagctactgccatccaat

SEQ ID NO: 168107 - DNA, 19 bp, Homo sapiens
  siRNA target sequence for VEGF (NM_003376.3,1240-1258).
gagatcgagtacatcttca

SEQ ID NO: 168108 - DNA, 19 bp, Homo sapiens
  siRNA target sequence for VEGF (NM_003376.3,1400-1418).
gcttcctacagcacaacaa

SEQ ID NO: 168109 - DNA, 19 bp, Homo sapiens
  siRNA target sequence for VEGF (NM_003376.3,1502-1520).
gcaagaaatcccggtataa

SEQ ID NO: 168110 - DNA, 19 bp, Homo sapiens
  siRNA target sequence for VEGF (NM_003376.3,1579-1597).
gatccgcagacgtgtaaat

SEQ ID NO: 168111 - DNA, 19 bp, Homo sapiens
  siRNA target sequence for VEGF (NM_003376.3,1582-1600).
ccgcagacgtgtaaatgtt

SEQ ID NO: 168112 - DNA, 19 bp, Homo sapiens
  siRNA target sequence for VEGF (NM_003376.3,1629-1647).
ggcgaggcagcttgagtta

SEQ ID NO: 168113 - DNA, 19 bp, Homo sapiens
  siRNA target sequence for VEGF (NM_003376.3,1634-1652).
ggcagcttgagttaaacga

SEQ ID NO: 168114 - DNA, 19 bp, Homo sapiens
  siRNA target sequence for VEGFB (NM_003377.3,148-166).
gtcatggatagatgtgtat

SEQ ID NO: 168115 - DNA, 19 bp, Homo sapiens
  siRNA target sequence for VEGFB (NM_003377.3,403-421).
gtgtgaatgcagacctaaa

SEQ ID NO: 168116 - DNA, 19 bp, Homo sapiens
  siRNA target sequence for MUC4 (NM_004532.2,816-834).
cgtgattccctctacttca

SEQ ID NO: 168117 - DNA, 19 bp, Homo sapiens
  siRNA target sequence for MUC4 (NM_004532.2,976-994).
gggggaccacattttatca

SEQ ID NO: 168118 - DNA, 19 bp, Homo sapiens
  siRNA target sequence for MUC4 (NM_004532.2,985-1003).
cattttatcaggaatacga

SEQ ID NO: 168119 - DNA, 19 bp, Homo sapiens
  siRNA target sequence for MUC4 (NM_004532.2,995-1013).
ggaatacgagacgttctat

SEQ ID NO: 168120 - DNA, 19 bp, Homo sapiens
  siRNA target sequence for MUC4 (NM_004532.2,1037-1055).
gcaggccgagtcttggatt

SEQ ID NO: 168121 - DNA, 19 bp, Homo sapiens
  siRNA target sequence for MUC4 (NM_004532.2,1038-1056).
caggccgagtcttggatta

SEQ ID NO: 168122 - DNA, 19 bp, Homo sapiens
  siRNA target sequence for MUC4 (NM_004532.2,1040-1058).
ggccgagtcttggattaga

SEQ ID NO: 168123 - DNA, 19 bp, Homo sapiens
  siRNA target sequence for MUC4 (NM_004532.2,1041-1059).
gccgagtcttggattagaa

SEQ ID NO: 168124 - DNA, 19 bp, Homo sapiens
  siRNA target sequence for MUC4 (NM_004532.2,1042-1060).
ccgagtcttggattagaaa

SEQ ID NO: 168125 - DNA, 19 bp, Homo sapiens
  siRNA target sequence for MUC4 (NM_004532.2,1192-1210).
ggtcctatgccctgtttct

SEQ ID NO: 168126 - DNA, 19 bp, Homo sapiens
  siRNA target sequence for MUC4 (NM_004532.2,1284-1302).
ggagatggctatttcgaaa

SEQ ID NO: 168127 - DNA, 19 bp, Homo sapiens
  siRNA target sequence for MUC4 (NM_004532.2,1285-1303).
gagatggctatttcgaaaa

SEQ ID NO: 168128 - DNA, 19 bp, Homo sapiens
  siRNA target sequence for MUC4 (NM_004532.2,1287-1305).
gatggctatttcgaaaaca

SEQ ID NO: 168129 - DNA, 19 bp, Homo sapiens
  siRNA target sequence for MUC4 (NM_004532.2,1336-1354).
ggtatcgccctgatagatt

SEQ ID NO: 168130 - DNA, 19 bp, Homo sapiens
  siRNA target sequence for MUC4 (NM_004532.2,1515-1533).
ggacgacgggacttacgat

SEQ ID NO: 168131 - DNA, 19 bp, Homo sapiens
  siRNA target sequence for MUC4 (NM_004532.2,1516-1534).
gacgacgggacttacgatt

SEQ ID NO: 168132 - DNA, 19 bp, Homo sapiens
  siRNA target sequence for MUC4 (NM_004532.2,1705-1723).
gctgccgctggaatgacaa

SEQ ID NO: 168133 - DNA, 19 bp, Homo sapiens
  siRNA target sequence for MUC4 (NM_004532.2,1764-1782).
gtgggctgtgctacataca

SEQ ID NO: 168134 - DNA, 19 bp, Homo sapiens
  siRNA target sequence for MUC4 (NM_004532.2,2041-2059).
gtgtcctgctggataacca

SEQ ID NO: 168135 - DNA, 19 bp, Homo sapiens
  siRNA target sequence for MUC4 (NM_004532.2,2259-2277).
ctcctgggggtctggaata

SEQ ID NO: 168136 - DNA, 19 bp, Homo sapiens
  siRNA target sequence for MUC4 (NM_004532.2,2262-2280).
ctgggggtctggaataaca

SEQ ID NO: 168137 - DNA, 19 bp, Homo sapiens
  siRNA target sequence for MUC4 (NM_004532.2,2359-2377).
gaatgacctggcagatcaa

SEQ ID NO: 168138 - DNA, 19 bp, Homo sapiens
  siRNA target sequence for MUC4 (NM_004532.2,2557-2575).
cgagggaagtcagtaaaaa

SEQ ID NO: 168139 - DNA, 19 bp, Homo sapiens
  siRNA target sequence for MUC4 (NM_004532.2,2587-2605).
cgaacgccaccctcaatca

SEQ ID NO: 168140 - DNA, 19 bp, Homo sapiens
  siRNA target sequence for MUC4 (NM_004532.2,2621-2639).
caatggtggtcgtgtgatt

SEQ ID NO: 168141 - DNA, 19 bp, Homo sapiens
  siRNA target sequence for MUC4 (NM_004532.2,2655-2673).
cagaccacgctgattcagt

SEQ ID NO: 168142 - DNA, 19 bp, Homo sapiens
  siRNA target sequence for MUC4 (NM_004532.2,2845-2863).
ctgtggtctgccattgcaa

SEQ ID NO: 168143 - DNA, 19 bp, Homo sapiens
  siRNA target sequence for MUC4 (NM_004532.2,2865-2883).
gcagagagccagtgtttgt

SEQ ID NO: 168144 - DNA, 19 bp, Homo sapiens
  siRNA target sequence for MUC4 (NM_004532.2,2866-2884).
cagagagccagtgtttgta

SEQ ID NO: 168145 - DNA, 19 bp, Homo sapiens
  siRNA target sequence for MUC4 (NM_004532.2,2868-2886).
gagagccagtgtttgtaca

SEQ ID NO: 168146 - DNA, 19 bp, Homo sapiens
  siRNA target sequence for MUC4 (NM_004532.2,2870-2888).
gagccagtgtttgtacaat

SEQ ID NO: 168147 - DNA, 19 bp, Homo sapiens
  siRNA target sequence for MUC4 (NM_004532.2,3141-3159).
caaggccactgctacatct

SEQ ID NO: 168148 - DNA, 19 bp, Homo sapiens
  siRNA target sequence for MUC4 (NM_004532.2,3247-3265).
caactgtcaacctagaact

SEQ ID NO: 168149 - DNA, 19 bp, Homo sapiens
  siRNA target sequence for MUC4 (NM_004532.2,3386-3404).
ccaagtggaacgaatcgat

SEQ ID NO: 168150 - DNA, 19 bp, Homo sapiens
  siRNA target sequence for MUC4 (NM_004532.2,3387-3405).
caagtggaacgaatcgatt

SEQ ID NO: 168151 - DNA, 19 bp, Homo sapiens
  siRNA target sequence for MUC4 (NM_004532.2,3518-3536).
ggtggtggaggcgttctta

SEQ ID NO: 168152 - DNA, 19 bp, Homo sapiens
  siRNA target sequence for MUC4 (NM_004532.2,3639-3657).
ctgaaggcttacttcagat

SEQ ID NO: 168153 - DNA, 19 bp, Homo sapiens
  siRNA target sequence for MUC4 (NM_018406.2,645-663).
cttcaaggacctctaatca

SEQ ID NO: 168154 - DNA, 19 bp, Homo sapiens
  siRNA target sequence for MUC4 (NM_018406.2,737-755).
ctcacgcagatgatgacat

SEQ ID NO: 168155 - DNA, 19 bp, Homo sapiens
  siRNA target sequence for MUC4 (NM_018406.2,811-829).
gacagctcctccagatgaa

SEQ ID NO: 168156 - DNA, 19 bp, Homo sapiens
  siRNA target sequence for MUC4 (NM_018406.2,864-882).
cactcatgatgacatcaaa

SEQ ID NO: 168157 - DNA, 19 bp, Homo sapiens
  siRNA target sequence for MUC4 (NM_018406.2,970-988).
gacctcagcagtctcaata

SEQ ID NO: 168158 - DNA, 19 bp, Homo sapiens
  siRNA target sequence for MUC4 (NM_018406.2,973-991).
ctcagcagtctcaataaca

SEQ ID NO: 168159 - DNA, 19 bp, Homo sapiens
  siRNA target sequence for MUC4 (NM_018406.2,1221-1239).
ccctctgtagtgtcacaaa

SEQ ID NO: 168160 - DNA, 19 bp, Homo sapiens
  siRNA target sequence for MUC4 (NM_018406.2,1388-1406).
caatcaccagcaactttct

SEQ ID NO: 168161 - DNA, 19 bp, Homo sapiens
  siRNA target sequence for MUC4 (NM_018406.2,1504-1522).
cctcacaccggttacaaca

SEQ ID NO: 168162 - DNA, 19 bp, Homo sapiens
  siRNA target sequence for MUC4 (NM_018406.2,1505-1523).
ctcacaccggttacaacat

SEQ ID NO: 168163 - DNA, 19 bp, Homo sapiens
  siRNA target sequence for MUC4 (NM_018406.2,1513-1531).
ggttacaacatcaactgtt

SEQ ID NO: 168164 - DNA, 19 bp, Homo sapiens
  siRNA target sequence for MUC4 (NM_018406.2,1514-1532).
gttacaacatcaactgttt

SEQ ID NO: 168165 - DNA, 19 bp, Homo sapiens
  siRNA target sequence for MUC4 (NM_018406.2,1536-1554).
cctcaccaagtggattcaa

SEQ ID NO: 168166 - DNA, 19 bp, Homo sapiens
  siRNA target sequence for MUC4 (NM_018406.2,1613-1631).
ccttccagtgtcagcaata

SEQ ID NO: 168167 - DNA, 19 bp, Homo sapiens
  siRNA target sequence for MUC4 (NM_018406.2,1632-1650).
cattcctggtaacatcaaa

SEQ ID NO: 168168 - DNA, 19 bp, Homo sapiens
  siRNA target sequence for MUC4 (NM_018406.2,1693-1711).
cacagaggagacatcacta

SEQ ID NO: 168169 - DNA, 19 bp, Homo sapiens
  siRNA target sequence for MUC4 (NM_018406.2,1699-1717).
ggagacatcactatctgta

SEQ ID NO: 168170 - DNA, 19 bp, Homo sapiens
  siRNA target sequence for MUC4 (NM_018406.2,1700-1718).
gagacatcactatctgtaa

SEQ ID NO: 168171 - DNA, 19 bp, Homo sapiens
  siRNA target sequence for MUC4 (NM_018406.2,1871-1889).
catgagaggagctcattct

SEQ ID NO: 168172 - DNA, 19 bp, Homo sapiens
  siRNA target sequence for MUC4 (NM_018406.2,1893-1911).
caggtgtgtctcaagaaat

SEQ ID NO: 168173 - DNA, 19 bp, Homo sapiens
  siRNA target sequence for MUC4 (NM_018406.2,1895-1913).
ggtgtgtctcaagaaatat

SEQ ID NO: 168174 - DNA, 19 bp, Homo sapiens
  siRNA target sequence for MUC4 (NM_018406.2,1968-1986).
caacttggtcacaaacaga

SEQ ID NO: 168175 - DNA, 19 bp, Homo sapiens
  siRNA target sequence for MUC4 (NM_018406.2,2020-2038).
gcttgtcacaggaaatcca

SEQ ID NO: 168176 - DNA, 19 bp, Homo sapiens
  siRNA target sequence for MUC4 (NM_018406.2,2026-2044).
cacaggaaatccatctaca

SEQ ID NO: 168177 - DNA, 19 bp, Homo sapiens
  siRNA target sequence for MUC4 (NM_018406.2,2074-2092).
ctctaaggtctcagcaata

SEQ ID NO: 168178 - DNA, 19 bp, Homo sapiens
  siRNA target sequence for MUC4 (NM_018406.2,2229-2247).
gtgtgactcagatgataaa

SEQ ID NO: 168179 - DNA, 19 bp, Homo sapiens
  siRNA target sequence for MUC4 (NM_018406.2,2311-2329).
ggcaccatcaacaaatcat

SEQ ID NO: 168180 - DNA, 19 bp, Homo sapiens
  siRNA target sequence for MUC4 (NM_018406.2,2312-2330).
gcaccatcaacaaatcatt

SEQ ID NO: 168181 - DNA, 19 bp, Homo sapiens
  siRNA target sequence for MUC4 (NM_018406.2,2315-2333).
ccatcaacaaatcattcaa

SEQ ID NO: 168182 - DNA, 19 bp, Homo sapiens
  siRNA target sequence for MUC4 (NM_018406.2,2500-2518).
gcactcgccctcagaaatt

SEQ ID NO: 168183 - DNA, 19 bp, Homo sapiens
  siRNA target sequence for MUC4 (NM_018406.2,2503-2521).
ctcgccctcagaaattgtt

SEQ ID NO: 168184 - DNA, 19 bp, Homo sapiens
  siRNA target sequence for MUC4 (NM_018406.2,2525-2543).
caggacgcacccaccataa

SEQ ID NO: 168185 - DNA, 19 bp, Homo sapiens
  siRNA target sequence for MUC4 (NM_018406.2,2527-2545).
ggacgcacccaccataagt

SEQ ID NO: 168186 - DNA, 19 bp, Homo sapiens
  siRNA target sequence for MUC4 (NM_018406.2,2658-2676).
gaggcacgtcactttccaa

SEQ ID NO: 168187 - DNA, 19 bp, Homo sapiens
  siRNA target sequence for MUC4 (NM_018406.2,2660-2678).
ggcacgtcactttccaaaa

SEQ ID NO: 168188 - DNA, 19 bp, Homo sapiens
  siRNA target sequence for MUC4 (NM_018406.2,2951-2969).
gagacgacaaggttttcat

SEQ ID NO: 168189 - DNA, 19 bp, Homo sapiens
  siRNA target sequence for MUC4 (NM_018406.2,2953-2971).
gacgacaaggttttcatca

SEQ ID NO: 168190 - DNA, 19 bp, Homo sapiens
  siRNA target sequence for MUC4 (NM_018406.2,2955-2973).
cgacaaggttttcatcaaa

SEQ ID NO: 168191 - DNA, 19 bp, Homo sapiens
  siRNA target sequence for MUC4 (NM_018406.2,3257-3275).
gcaaccgacaccttctcaa

SEQ ID NO: 168192 - DNA, 19 bp, Homo sapiens
  siRNA target sequence for MUC4 (NM_018406.2,3354-3372).
cagggtctggtaaaacctt

SEQ ID NO: 168193 - DNA, 19 bp, Homo sapiens
  siRNA target sequence for KITLG (NM_000899.1,203-221).
ggattctcacttgcattta

SEQ ID NO: 168194 - DNA, 19 bp, Homo sapiens
  siRNA target sequence for KITLG (NM_000899.1,204-222).
gattctcacttgcatttat

SEQ ID NO: 168195 - DNA, 19 bp, Homo sapiens
  siRNA target sequence for KITLG (NM_000899.1,228-246).
gctgctcctatttaatcct

SEQ ID NO: 168196 - DNA, 19 bp, Homo sapiens
  siRNA target sequence for KITLG (NM_000899.1,269-287).
gcaggaatcgtgtgactaa

SEQ ID NO: 168197 - DNA, 19 bp, Homo sapiens
  siRNA target sequence for KITLG (NM_000899.1,270-288).
caggaatcgtgtgactaat

SEQ ID NO: 168198 - DNA, 19 bp, Homo sapiens
  siRNA target sequence for KITLG (NM_000899.1,272-290).
ggaatcgtgtgactaataa

SEQ ID NO: 168199 - DNA, 19 bp, Homo sapiens
  siRNA target sequence for KITLG (NM_000899.1,273-291).
gaatcgtgtgactaataat

SEQ ID NO: 168200 - DNA, 19 bp, Homo sapiens
  siRNA target sequence for KITLG (NM_000899.1,277-295).
cgtgtgactaataatgtaa

SEQ ID NO: 168201 - DNA, 19 bp, Homo sapiens
  siRNA target sequence for KITLG (NM_000899.1,278-296).
gtgtgactaataatgtaaa

SEQ ID NO: 168202 - DNA, 19 bp, Homo sapiens
  siRNA target sequence for KITLG (NM_000899.1,292-310).
gtaaaagacgtcactaaat

SEQ ID NO: 168203 - DNA, 19 bp, Homo sapiens
  siRNA target sequence for KITLG (NM_000899.1,367-385).
gatgttttgccaagtcatt

SEQ ID NO: 168204 - DNA, 19 bp, Homo sapiens
  siRNA target sequence for KITLG (NM_000899.1,376-394).
ccaagtcattgttggataa

SEQ ID NO: 168205 - DNA, 19 bp, Homo sapiens
  siRNA target sequence for KITLG (NM_000899.1,395-413).
gcgagatggtagtacaatt

SEQ ID NO: 168206 - DNA, 19 bp, Homo sapiens
  siRNA target sequence for KITLG (NM_000899.1,397-415).
gagatggtagtacaattgt

SEQ ID NO: 168207 - DNA, 19 bp, Homo sapiens
  siRNA target sequence for KITLG (NM_000899.1,399-417).
gatggtagtacaattgtca

SEQ ID NO: 168208 - DNA, 19 bp, Homo sapiens
  siRNA target sequence for KITLG (NM_000899.1,430-448).
gatcttctggacaagtttt

SEQ ID NO: 168209 - DNA, 19 bp, Homo sapiens
  siRNA target sequence for KITLG (NM_000899.1,458-476).
ctgaaggcttgagtaatta

SEQ ID NO: 168210 - DNA, 19 bp, Homo sapiens
  siRNA target sequence for KITLG (NM_000899.1,460-478).
gaaggcttgagtaattatt

SEQ ID NO: 168211 - DNA, 19 bp, Homo sapiens
  siRNA target sequence for KITLG (NM_000899.1,479-497).
ccatcatagacaaacttgt

SEQ ID NO: 168212 - DNA, 19 bp, Homo sapiens
  siRNA target sequence for KITLG (NM_000899.1,539-557).
catctaaggatctaaaaaa

SEQ ID NO: 168213 - DNA, 19 bp, Homo sapiens
  siRNA target sequence for KITLG (NM_000899.1,593-611).
ctgaagaattctttagaat

SEQ ID NO: 168214 - DNA, 19 bp, Homo sapiens
  siRNA target sequence for KITLG (NM_000899.1,651-669).
ggcatctgaaactagtgat

SEQ ID NO: 168215 - DNA, 19 bp, Homo sapiens
  siRNA target sequence for KITLG (NM_000899.1,652-670).
gcatctgaaactagtgatt

SEQ ID NO: 168216 - DNA, 19 bp, Homo sapiens
  siRNA target sequence for KITLG (NM_000899.1,656-674).
ctgaaactagtgattgtgt

SEQ ID NO: 168217 - DNA, 19 bp, Homo sapiens
  siRNA target sequence for KITLG (NM_000899.1,714-732).
cagtgtcacaaaaccattt

SEQ ID NO: 168218 - DNA, 19 bp, Homo sapiens
  siRNA target sequence for KITLG (NM_000899.1,843-861).
gccagcattgttttctctt

SEQ ID NO: 168219 - DNA, 19 bp, Homo sapiens
  siRNA target sequence for KITLG (NM_000899.1,874-892).
gcttttggagccttatact

SEQ ID NO: 168220 - DNA, 19 bp, Homo sapiens
  siRNA target sequence for KITLG (NM_000899.1,913-931).
cttacaagggcagttgaaa

SEQ ID NO: 168221 - DNA, 19 bp, Homo sapiens
  siRNA target sequence for CSF1 (NM_000757.3,289-307).
gaggtgtcggagtactgta

SEQ ID NO: 168222 - DNA, 19 bp, Homo sapiens
  siRNA target sequence for CSF1 (NM_000757.3,366-384).
ggagacctcgtgccaaatt

SEQ ID NO: 168223 - DNA, 19 bp, Homo sapiens
  siRNA target sequence for CSF1 (NM_000757.3,367-385).
gagacctcgtgccaaatta

SEQ ID NO: 168224 - DNA, 19 bp, Homo sapiens
  siRNA target sequence for CSF1 (NM_000757.3,371-389).
cctcgtgccaaattacatt

SEQ ID NO: 168225 - DNA, 19 bp, Homo sapiens
  siRNA target sequence for CSF1 (NM_000757.3,374-392).
cgtgccaaattacatttga

SEQ ID NO: 168226 - DNA, 19 bp, Homo sapiens
  siRNA target sequence for CSF1 (NM_000757.3,421-439).
ccagtgtgctaccttaaga

SEQ ID NO: 168227 - DNA, 19 bp, Homo sapiens
  siRNA target sequence for CSF1 (NM_000757.3,422-440).
cagtgtgctaccttaagaa

SEQ ID NO: 168228 - DNA, 19 bp, Homo sapiens
  siRNA target sequence for CSF1 (NM_000757.3,476-494).
ccatgcgcttcagagataa

SEQ ID NO: 168229 - DNA, 19 bp, Homo sapiens
  siRNA target sequence for CSF1 (NM_000757.3,523-541).
ctgcaggaactctctttga

SEQ ID NO: 168230 - DNA, 19 bp, Homo sapiens
  siRNA target sequence for CSF1 (NM_000757.3,551-569).
gctgcttcaccaaggatta

SEQ ID NO: 168231 - DNA, 19 bp, Homo sapiens
  siRNA target sequence for CSF1 (NM_000757.3,554-572).
gcttcaccaaggattatga

SEQ ID NO: 168232 - DNA, 19 bp, Homo sapiens
  siRNA target sequence for CSF1 (NM_000757.3,555-573).
cttcaccaaggattatgaa

SEQ ID NO: 168233 - DNA, 19 bp, Homo sapiens
  siRNA target sequence for CSF1 (NM_000757.3,586-604).
gcctgcgtccgaactttct

SEQ ID NO: 168234 - DNA, 19 bp, Homo sapiens
  siRNA target sequence for CSF1 (NM_000757.3,587-605).
cctgcgtccgaactttcta

SEQ ID NO: 168235 - DNA, 19 bp, Homo sapiens
  siRNA target sequence for CSF1 (NM_000757.3,588-606).
ctgcgtccgaactttctat

SEQ ID NO: 168236 - DNA, 19 bp, Homo sapiens
  siRNA target sequence for CSF1 (NM_000757.3,592-610).
gtccgaactttctatgaga

SEQ ID NO: 168237 - DNA, 19 bp, Homo sapiens
  siRNA target sequence for CSF1 (NM_000757.3,656-674).
caaagaatctccttgacaa

SEQ ID NO: 168238 - DNA, 19 bp, Homo sapiens
  siRNA target sequence for CSF1 (NM_000757.3,667-685).
cttgacaaggactggaata

SEQ ID NO: 168239 - DNA, 19 bp, Homo sapiens
  siRNA target sequence for CSF1 (NM_000757.3,1077-1095).
ctctgcaatgggcactaat

SEQ ID NO: 168240 - DNA, 19 bp, Homo sapiens
  siRNA target sequence for CSF1 (NM_000757.3,1257-1275).
ccaacagccggcagatgta

SEQ ID NO: 168241 - DNA, 19 bp, Homo sapiens
  siRNA target sequence for CSF1 (NM_000757.3,1318-1336).
ggccaggactggaatcaca

SEQ ID NO: 168242 - DNA, 19 bp, Homo sapiens
  siRNA target sequence for CSF1 (NM_000757.3,1586-1604).
ggcccctgccccgttttaa

SEQ ID NO: 168243 - DNA, 19 bp, Homo sapiens
  siRNA target sequence for CSF1 (NM_000757.3,1588-1606).
cccctgccccgttttaact

SEQ ID NO: 168244 - DNA, 19 bp, Homo sapiens
  siRNA target sequence for CSF1 (NM_000757.3,1721-1739).
ccgtcggaggcctcttgtt

SEQ ID NO: 168245 - DNA, 19 bp, Homo sapiens
  siRNA target sequence for CSF1 (NM_000757.3,1723-1741).
gtcggaggcctcttgttct

SEQ ID NO: 168246 - DNA, 19 bp, Homo sapiens
  siRNA target sequence for CSF1 (NM_000757.3,1726-1744).
ggaggcctcttgttctaca

SEQ ID NO: 168247 - DNA, 19 bp, Homo sapiens
  siRNA target sequence for IL22 (NM_020525.3,170-188).
cccactgcaggcttgacaa

SEQ ID NO: 168248 - DNA, 19 bp, Homo sapiens
  siRNA target sequence for IL22 (NM_020525.3,244-262).
gctagcttggctgataaca

SEQ ID NO: 168249 - DNA, 19 bp, Homo sapiens
  siRNA target sequence for IL22 (NM_020525.3,245-263).
ctagcttggctgataacaa

SEQ ID NO: 168250 - DNA, 19 bp, Homo sapiens
  siRNA target sequence for IL22 (NM_020525.3,264-282).
cacagacgttcgtctcatt

SEQ ID NO: 168251 - DNA, 19 bp, Homo sapiens
  siRNA target sequence for IL22 (NM_020525.3,314-332).
gtgagcgctgctatctgat

SEQ ID NO: 168252 - DNA, 19 bp, Homo sapiens
  siRNA target sequence for IL22 (NM_020525.3,345-363).
gaacttcacccttgaagaa

SEQ ID NO: 168253 - DNA, 19 bp, Homo sapiens
  siRNA target sequence for IL22 (NM_020525.3,382-400).
gataggttccagccttata

SEQ ID NO: 168254 - DNA, 19 bp, Homo sapiens
  siRNA target sequence for IL22 (NM_020525.3,438-456).
caggctaagcacatgtcat

SEQ ID NO: 168255 - DNA, 19 bp, Homo sapiens
  siRNA target sequence for IL22 (NM_020525.3,567-585).
gtttatgtctctgagaaat

SEQ ID NO: 168256 - DNA, 19 bp, Homo sapiens
  siRNA target sequence for IL22 (NM_020525.3,577-595).
ctgagaaatgcctgcattt

SEQ ID NO: 168257 - DNA, 19 bp, Homo sapiens
  siRNA target sequence for DKFZp451J0118 (NM_175852.3,91-109).
gggctgccaaacaatccaa

SEQ ID NO: 168258 - DNA, 19 bp, Homo sapiens
  siRNA target sequence for DKFZp451J0118 (NM_175852.3,92-110).
ggctgccaaacaatccaat

SEQ ID NO: 168259 - DNA, 19 bp, Homo sapiens
  siRNA target sequence for DKFZp451J0118 (NM_175852.3,96-114).
gccaaacaatccaatccaa

SEQ ID NO: 168260 - DNA, 19 bp, Homo sapiens
  siRNA target sequence for DKFZp451J0118 (NM_175852.3,97-115).
ccaaacaatccaatccaaa

SEQ ID NO: 168261 - DNA, 19 bp, Homo sapiens
  siRNA target sequence for DKFZp451J0118 (NM_175852.3,102-120).
caatccaatccaaaaagca

SEQ ID NO: 168262 - DNA, 19 bp, Homo sapiens
  siRNA target sequence for DKFZp451J0118 (NM_175852.3,634-652).
ctgctctgtgcaagaagta

SEQ ID NO: 168263 - DNA, 19 bp, Homo sapiens
  siRNA target sequence for DKFZp451J0118 (NM_175852.3,1026-1044).
gagcatatcgacaaagtct

SEQ ID NO: 168264 - DNA, 19 bp, Homo sapiens
  siRNA target sequence for DKFZp451J0118 (NM_175852.3,1228-1246).
ccctatacacagagaagtt

SEQ ID NO: 168265 - DNA, 19 bp, Homo sapiens
  siRNA target sequence for DKFZp451J0118 (NM_175852.3,1229-1247).
cctatacacagagaagttt

SEQ ID NO: 168266 - DNA, 19 bp, Homo sapiens
  siRNA target sequence for DKFZp451J0118 (NM_175852.3,1270-1288).
ccaaaagcagcgaggtatt

SEQ ID NO: 168267 - DNA, 19 bp, Homo sapiens
  siRNA target sequence for DKFZp451J0118 (NM_175852.3,1281-1299).
gaggtattcaccacattca

SEQ ID NO: 168268 - DNA, 19 bp, Homo sapiens
  siRNA target sequence for DKFZp451J0118 (NM_175852.3,1437-1455).
gagggcctgcaggtaaaaa

SEQ ID NO: 168269 - DNA, 19 bp, Homo sapiens
  siRNA target sequence for AREG (NM_001657.2,243-261).
ggtgctgtcgctcttgata

SEQ ID NO: 168270 - DNA, 19 bp, Homo sapiens
  siRNA target sequence for AREG (NM_001657.2,264-282).
cggctcaggccattatgct

SEQ ID NO: 168271 - DNA, 19 bp, Homo sapiens
  siRNA target sequence for AREG (NM_001657.2,437-455).
cctcgggagccgactatga

SEQ ID NO: 168272 - DNA, 19 bp, Homo sapiens
  siRNA target sequence for AREG (NM_001657.2,440-458).
cgggagccgactatgacta

SEQ ID NO: 168273 - DNA, 19 bp, Homo sapiens
  siRNA target sequence for AREG (NM_001657.2,493-511).
ggctatattgtcgatgatt

SEQ ID NO: 168274 - DNA, 19 bp, Homo sapiens
  siRNA target sequence for AREG (NM_001657.2,495-513).
ctatattgtcgatgattca

SEQ ID NO: 168275 - DNA, 19 bp, Homo sapiens
  siRNA target sequence for AREG (NM_001657.2,518-536).
gagttgaacaggtagttaa

SEQ ID NO: 168276 - DNA, 19 bp, Homo sapiens
  siRNA target sequence for AREG (NM_001657.2,633-651).
gaagaaaaatccatgtaat

SEQ ID NO: 168277 - DNA, 19 bp, Homo sapiens
  siRNA target sequence for AREG (NM_001657.2,779-797).
gcatgattgacagtagttt

SEQ ID NO: 168278 - DNA, 19 bp, Homo sapiens
  siRNA target sequence for AREG (NM_001657.2,780-798).
catgattgacagtagttta

SEQ ID NO: 168279 - DNA, 19 bp, Homo sapiens
  siRNA target sequence for AREG (NM_001657.2,817-835).
gccatagctgcctttatgt

SEQ ID NO: 168280 - DNA, 19 bp, Homo sapiens
  siRNA target sequence for AREG (NM_001657.2,849-867).
cacagctgttgctgttatt

SEQ ID NO: 168281 - DNA, 19 bp, Homo sapiens
  siRNA target sequence for ARS (NM_020427.2,129-147).
gcttcctgcaggaccatta

SEQ ID NO: 168282 - DNA, 19 bp, Homo sapiens
  siRNA target sequence for BMP10 (NM_014482.1,295-313).
caagacggtgtcgacttta

SEQ ID NO: 168283 - DNA, 19 bp, Homo sapiens
  siRNA target sequence for BMP10 (NM_014482.1,298-316).
gacggtgtcgactttaaca

SEQ ID NO: 168284 - DNA, 19 bp, Homo sapiens
  siRNA target sequence for BMP10 (NM_014482.1,300-318).
cggtgtcgactttaacaca

SEQ ID NO: 168285 - DNA, 19 bp, Homo sapiens
  siRNA target sequence for BMP10 (NM_014482.1,329-347).
gcatgaaggatgagtttct

SEQ ID NO: 168286 - DNA, 19 bp, Homo sapiens
  siRNA target sequence for BMP10 (NM_014482.1,340-358).
gagtttcttaagacactaa

SEQ ID NO: 168287 - DNA, 19 bp, Homo sapiens
  siRNA target sequence for BMP10 (NM_014482.1,397-415).
gacccaccagagtacatgt

SEQ ID NO: 168288 - DNA, 19 bp, Homo sapiens
  siRNA target sequence for BMP10 (NM_014482.1,414-432).
gttggaactctacaacaaa

SEQ ID NO: 168289 - DNA, 19 bp, Homo sapiens
  siRNA target sequence for BMP10 (NM_014482.1,471-489).
cattaggagtttcaagaat

SEQ ID NO: 168290 - DNA, 19 bp, Homo sapiens
  siRNA target sequence for BMP10 (NM_014482.1,504-522).
ccagccggtcagttttaat

SEQ ID NO: 168291 - DNA, 19 bp, Homo sapiens
  siRNA target sequence for BMP10 (NM_014482.1,612-630).
gcaaagggatcgtatgata

SEQ ID NO: 168292 - DNA, 19 bp, Homo sapiens
  siRNA target sequence for BMP10 (NM_014482.1,617-635).
gggatcgtatgatatacga

SEQ ID NO: 168293 - DNA, 19 bp, Homo sapiens
  siRNA target sequence for BMP10 (NM_014482.1,618-636).
ggatcgtatgatatacgat

SEQ ID NO: 168294 - DNA, 19 bp, Homo sapiens
  siRNA target sequence for BMP10 (NM_014482.1,637-655).
ggagtagaccggaaaatta

SEQ ID NO: 168295 - DNA, 19 bp, Homo sapiens
  siRNA target sequence for BMP10 (NM_014482.1,640-658).
gtagaccggaaaattacca

SEQ ID NO: 168296 - DNA, 19 bp, Homo sapiens
  siRNA target sequence for BMP10 (NM_014482.1,643-661).
gaccggaaaattaccattt

SEQ ID NO: 168297 - DNA, 19 bp, Homo sapiens
  siRNA target sequence for BMP10 (NM_014482.1,717-735).
ggtgtctggggagatatat

SEQ ID NO: 168298 - DNA, 19 bp, Homo sapiens
  siRNA target sequence for BMP10 (NM_014482.1,720-738).
gtctggggagatatatgga

SEQ ID NO: 168299 - DNA, 19 bp, Homo sapiens
  siRNA target sequence for BMP10 (NM_014482.1,746-764).
gtgagtgggagacttttga

SEQ ID NO: 168300 - DNA, 19 bp, Homo sapiens
  siRNA target sequence for BMP10 (NM_014482.1,866-884).
gtggacggctagaaataga

SEQ ID NO: 168301 - DNA, 19 bp, Homo sapiens
  siRNA target sequence for BMP10 (NM_014482.1,915-933).
gctcatcgtgttttctgat

SEQ ID NO: 168302 - DNA, 19 bp, Homo sapiens
  siRNA target sequence for BMP10 (NM_014482.1,1065-1083).
gagatcaaacatcatctat

SEQ ID NO: 168303 - DNA, 19 bp, Homo sapiens
  siRNA target sequence for BMP10 (NM_014482.1,1086-1104).
ctccactgcccgaatcaga

SEQ ID NO: 168304 - DNA, 19 bp, Homo sapiens
  siRNA target sequence for BMP10 (NM_014482.1,1139-1157).
cgctctacatcgacttcaa

SEQ ID NO: 168305 - DNA, 19 bp, Homo sapiens
  siRNA target sequence for BMP10 (NM_014482.1,1185-1203).
cgctccgcctggatacgaa

SEQ ID NO: 168306 - DNA, 19 bp, Homo sapiens
  siRNA target sequence for BMP10 (NM_014482.1,1210-1228).
gaatgccgtggtgtttgta

SEQ ID NO: 168307 - DNA, 19 bp, Homo sapiens
  siRNA target sequence for BMP10 (NM_014482.1,1256-1274).
ccacaaagcatgcaattat

SEQ ID NO: 168308 - DNA, 19 bp, Homo sapiens
  siRNA target sequence for BMP10 (NM_014482.1,1372-1390).
ggcgtcgtcacctacaagt

SEQ ID NO: 168309 - DNA, 19 bp, Homo sapiens
  siRNA target sequence for BMP10 (NM_014482.1,1373-1391).
gcgtcgtcacctacaagtt

SEQ ID NO: 168310 - DNA, 19 bp, Homo sapiens
  siRNA target sequence for BMP15 (NM_005448.1,3-21).
ggtcctcctcagtattctt

SEQ ID NO: 168311 - DNA, 19 bp, Homo sapiens
  siRNA target sequence for BMP15 (NM_005448.1,119-137).
ctactttgcccctgattga

SEQ ID NO: 168312 - DNA, 19 bp, Homo sapiens
  siRNA target sequence for BMP15 (NM_005448.1,324-342).
cagaggtacctggcatata

SEQ ID NO: 168313 - DNA, 19 bp, Homo sapiens
  siRNA target sequence for BMP15 (NM_005448.1,326-344).
gaggtacctggcatataca

SEQ ID NO: 168314 - DNA, 19 bp, Homo sapiens
  siRNA target sequence for BMP15 (NM_005448.1,365-383).
gaccaaaccgaggactata

SEQ ID NO: 168315 - DNA, 19 bp, Homo sapiens
  siRNA target sequence for BMP15 (NM_005448.1,368-386).
caaaccgaggactatacca

SEQ ID NO: 168316 - DNA, 19 bp, Homo sapiens
  siRNA target sequence for BMP15 (NM_005448.1,374-392).
gaggactataccaactagt

SEQ ID NO: 168317 - DNA, 19 bp, Homo sapiens
  siRNA target sequence for BMP15 (NM_005448.1,376-394).
ggactataccaactagtta

SEQ ID NO: 168318 - DNA, 19 bp, Homo sapiens
  siRNA target sequence for BMP15 (NM_005448.1,423-441).
ccaactaactcgcttcaat

SEQ ID NO: 168319 - DNA, 19 bp, Homo sapiens
  siRNA target sequence for BMP15 (NM_005448.1,505-523).
ggagattcctcaaaacctt

SEQ ID NO: 168320 - DNA, 19 bp, Homo sapiens
  siRNA target sequence for BMP15 (NM_005448.1,528-546).
gatgtctaacgcttggaaa

SEQ ID NO: 168321 - DNA, 19 bp, Homo sapiens
  siRNA target sequence for BMP15 (NM_005448.1,533-551).
ctaacgcttggaaagagat

SEQ ID NO: 168322 - DNA, 19 bp, Homo sapiens
  siRNA target sequence for BMP15 (NM_005448.1,549-567).
gatggatatcacacaactt

SEQ ID NO: 168323 - DNA, 19 bp, Homo sapiens
  siRNA target sequence for BMP15 (NM_005448.1,607-625).
ctacgactccgttttatgt

SEQ ID NO: 168324 - DNA, 19 bp, Homo sapiens
  siRNA target sequence for BMP15 (NM_005448.1,726-744).
cattcggaaggctaaattt

SEQ ID NO: 168325 - DNA, 19 bp, Homo sapiens
  siRNA target sequence for BMP15 (NM_005448.1,797-815).
cccgacaagcagatggtat

SEQ ID NO: 168326 - DNA, 19 bp, Homo sapiens
  siRNA target sequence for BMP15 (NM_005448.1,938-956).
ctttctacaccccaaacta

SEQ ID NO: 168327 - DNA, 19 bp, Homo sapiens
  siRNA target sequence for BMP15 (NM_005448.1,948-966).
cccaaactactgtaaagga

SEQ ID NO: 168328 - DNA, 19 bp, Homo sapiens
  siRNA target sequence for BMP15 (NM_005448.1,949-967).
ccaaactactgtaaaggaa

SEQ ID NO: 168329 - DNA, 19 bp, Homo sapiens
  siRNA target sequence for BMP15 (NM_005448.1,982-1000).
ctacgcgatggtctcaatt

SEQ ID NO: 168330 - DNA, 19 bp, Homo sapiens
  siRNA target sequence for BMP15 (NM_005448.1,1004-1022).
ccaatcacgccattattca

SEQ ID NO: 168331 - DNA, 19 bp, Homo sapiens
  siRNA target sequence for BMP15 (NM_005448.1,1012-1030).
gccattattcagaacctta

SEQ ID NO: 168332 - DNA, 19 bp, Homo sapiens
  siRNA target sequence for BMP15 (NM_005448.1,1013-1031).
ccattattcagaaccttat

SEQ ID NO: 168333 - DNA, 19 bp, Homo sapiens
  siRNA target sequence for BMP15 (NM_005448.1,1067-1085).
cctgtgtcccgtataagta

SEQ ID NO: 168334 - DNA, 19 bp, Homo sapiens
  siRNA target sequence for BMP15 (NM_005448.1,1068-1086).
ctgtgtcccgtataagtat

SEQ ID NO: 168335 - DNA, 19 bp, Homo sapiens
  siRNA target sequence for BMP15 (NM_005448.1,1070-1088).
gtgtcccgtataagtatgt

SEQ ID NO: 168336 - DNA, 19 bp, Homo sapiens
  siRNA target sequence for BMP15 (NM_005448.1,1076-1094).
cgtataagtatgttccaat

SEQ ID NO: 168337 - DNA, 19 bp, Homo sapiens
  siRNA target sequence for BMP2 (NM_001200.1,332-350).
cgggacccgctgtcttcta

SEQ ID NO: 168338 - DNA, 19 bp, Homo sapiens
  siRNA target sequence for BMP2 (NM_001200.1,741-759).
cccacggaggagtttatca

SEQ ID NO: 168339 - DNA, 19 bp, Homo sapiens
  siRNA target sequence for BMP2 (NM_001200.1,801-819).
gctttaggaaacaatagca

SEQ ID NO: 168340 - DNA, 19 bp, Homo sapiens
  siRNA target sequence for BMP2 (NM_001200.1,824-842).
ccatcaccgaattaatatt

SEQ ID NO: 168341 - DNA, 19 bp, Homo sapiens
  siRNA target sequence for BMP2 (NM_001200.1,825-843).
catcaccgaattaatattt

SEQ ID NO: 168342 - DNA, 19 bp, Homo sapiens
  siRNA target sequence for BMP2 (NM_001200.1,862-880).
caacagccaactcgaaatt

SEQ ID NO: 168343 - DNA, 19 bp, Homo sapiens
  siRNA target sequence for BMP2 (NM_001200.1,883-901).
ccgtgaccagacttttgga

SEQ ID NO: 168344 - DNA, 19 bp, Homo sapiens
  siRNA target sequence for BMP2 (NM_001200.1,904-922).
ccaggttggtgaatcagaa

SEQ ID NO: 168345 - DNA, 19 bp, Homo sapiens
  siRNA target sequence for BMP2 (NM_001200.1,905-923).
caggttggtgaatcagaat

SEQ ID NO: 168346 - DNA, 19 bp, Homo sapiens
  siRNA target sequence for BMP2 (NM_001200.1,924-942).
gcaagcaggtgggaaagtt

SEQ ID NO: 168347 - DNA, 19 bp, Homo sapiens
  siRNA target sequence for BMP2 (NM_001200.1,982-1000).
gacacgccaaccatggatt

SEQ ID NO: 168348 - DNA, 19 bp, Homo sapiens
  siRNA target sequence for BMP2 (NM_001200.1,1038-1056).
gtctccaagagacatgtta

SEQ ID NO: 168349 - DNA, 19 bp, Homo sapiens
  siRNA target sequence for BMP2 (NM_001200.1,1066-1084).
ggtctttgcaccaagatga

SEQ ID NO: 168350 - DNA, 19 bp, Homo sapiens
  siRNA target sequence for BMP2 (NM_001200.1,1086-1104).
cacagctggtcacagataa

SEQ ID NO: 168351 - DNA, 19 bp, Homo sapiens
  siRNA target sequence for BMP2 (NM_001200.1,1105-1123).
ggccattgctagtaacttt

SEQ ID NO: 168352 - DNA, 19 bp, Homo sapiens
  siRNA target sequence for BMP2 (NM_001200.1,1106-1124).
gccattgctagtaactttt

SEQ ID NO: 168353 - DNA, 19 bp, Homo sapiens
  siRNA target sequence for BMP2 (NM_001200.1,1140-1158).
gggcatcctctccacaaaa

SEQ ID NO: 168354 - DNA, 19 bp, Homo sapiens
  siRNA target sequence for BMP2 (NM_001200.1,1185-1203).
cagcggaaacgccttaagt

SEQ ID NO: 168355 - DNA, 19 bp, Homo sapiens
  siRNA target sequence for BMP2 (NM_001200.1,1197-1215).
cttaagtccagctgtaaga

SEQ ID NO: 168356 - DNA, 19 bp, Homo sapiens
  siRNA target sequence for BMP2 (NM_001200.1,1278-1296).
gggtatcacgccttttact

SEQ ID NO: 168357 - DNA, 19 bp, Homo sapiens
  siRNA target sequence for BMP2 (NM_001200.1,1342-1360).
ctaatcatgccattgttca

SEQ ID NO: 168358 - DNA, 19 bp, Homo sapiens
  siRNA target sequence for BMP2 (NM_001200.1,1363-1381).
cgttggtcaactctgttaa

SEQ ID NO: 168359 - DNA, 19 bp, Homo sapiens
  siRNA target sequence for BMP2 (NM_001200.1,1367-1385).
ggtcaactctgttaactct

SEQ ID NO: 168360 - DNA, 19 bp, Homo sapiens
  siRNA target sequence for BMP2 (NM_001200.1,1373-1391).
ctctgttaactctaagatt

SEQ ID NO: 168361 - DNA, 19 bp, Homo sapiens
  siRNA target sequence for BMP2 (NM_001200.1,1377-1395).
gttaactctaagattccta

SEQ ID NO: 168362 - DNA, 19 bp, Homo sapiens
  siRNA target sequence for BMP2 (NM_001200.1,1439-1457).
gtaccttgacgagaatgaa

SEQ ID NO: 168363 - DNA, 19 bp, Homo sapiens
  siRNA target sequence for BMP3 (NM_001201.1,331-349).
cgagcaggctgctctttct

SEQ ID NO: 168364 - DNA, 19 bp, Homo sapiens
  siRNA target sequence for BMP3 (NM_001201.1,655-673).
gactgtatatcttcaatct

SEQ ID NO: 168365 - DNA, 19 bp, Homo sapiens
  siRNA target sequence for BMP3 (NM_001201.1,657-675).
ctgtatatcttcaatctga

SEQ ID NO: 168366 - DNA, 19 bp, Homo sapiens
  siRNA target sequence for BMP3 (NM_001201.1,681-699).
ctaaccaagtctgaaaaca

SEQ ID NO: 168367 - DNA, 19 bp, Homo sapiens
  siRNA target sequence for BMP3 (NM_001201.1,783-801).
catgctcagaggaaacaca

SEQ ID NO: 168368 - DNA, 19 bp, Homo sapiens
  siRNA target sequence for BMP3 (NM_001201.1,817-835).
ctgcatggaccctcaaatt

SEQ ID NO: 168369 - DNA, 19 bp, Homo sapiens
  siRNA target sequence for BMP3 (NM_001201.1,819-837).
gcatggaccctcaaattca

SEQ ID NO: 168370 - DNA, 19 bp, Homo sapiens
  siRNA target sequence for BMP3 (NM_001201.1,862-880).
gccatctgtcagtggatat

SEQ ID NO: 168371 - DNA, 19 bp, Homo sapiens
  siRNA target sequence for BMP3 (NM_001201.1,907-925).
cctggctgtctaaagatat

SEQ ID NO: 168372 - DNA, 19 bp, Homo sapiens
  siRNA target sequence for BMP3 (NM_001201.1,957-975).
gaagagttcctcataggat

SEQ ID NO: 168373 - DNA, 19 bp, Homo sapiens
  siRNA target sequence for BMP3 (NM_001201.1,960-978).
gagttcctcataggattta

SEQ ID NO: 168374 - DNA, 19 bp, Homo sapiens
  siRNA target sequence for BMP3 (NM_001201.1,965-983).
cctcataggatttaacatt

SEQ ID NO: 168375 - DNA, 19 bp, Homo sapiens
  siRNA target sequence for BMP3 (NM_001201.1,966-984).
ctcataggatttaacatta

SEQ ID NO: 168376 - DNA, 19 bp, Homo sapiens
  siRNA target sequence for BMP3 (NM_001201.1,1006-1024).
caaagaggaggttaccttt

SEQ ID NO: 168377 - DNA, 19 bp, Homo sapiens
  siRNA target sequence for BMP3 (NM_001201.1,1010-1028).
gaggaggttaccttttcca

SEQ ID NO: 168378 - DNA, 19 bp, Homo sapiens
  siRNA target sequence for BMP3 (NM_001201.1,1029-1047).
gagccttatatcttggtat

SEQ ID NO: 168379 - DNA, 19 bp, Homo sapiens
  siRNA target sequence for BMP3 (NM_001201.1,1031-1049).
gccttatatcttggtatat

SEQ ID NO: 168380 - DNA, 19 bp, Homo sapiens
  siRNA target sequence for BMP3 (NM_001201.1,1040-1058).
cttggtatatgccaatgat

SEQ ID NO: 168381 - DNA, 19 bp, Homo sapiens
  siRNA target sequence for BMP3 (NM_001201.1,1074-1092).
ccagaaagtgtggtatcaa

SEQ ID NO: 168382 - DNA, 19 bp, Homo sapiens
  siRNA target sequence for BMP3 (NM_001201.1,1299-1317).
caggcccctgaaaagagta

SEQ ID NO: 168383 - DNA, 19 bp, Homo sapiens
  siRNA target sequence for BMP3 (NM_001201.1,1357-1375).
gccagacgctccaatttga

SEQ ID NO: 168384 - DNA, 19 bp, Homo sapiens
  siRNA target sequence for BMP3 (NM_001201.1,1358-1376).
ccagacgctccaatttgat

SEQ ID NO: 168385 - DNA, 19 bp, Homo sapiens
  siRNA target sequence for BMP3 (NM_001201.1,1438-1456).
gatacctcaaggtagactt

SEQ ID NO: 168386 - DNA, 19 bp, Homo sapiens
  siRNA target sequence for BMP3 (NM_001201.1,1448-1466).
ggtagactttgcagatatt

SEQ ID NO: 168387 - DNA, 19 bp, Homo sapiens
  siRNA target sequence for BMP3 (NM_001201.1,1461-1479).
gatattggctggagtgaat

SEQ ID NO: 168388 - DNA, 19 bp, Homo sapiens
  siRNA target sequence for BMP3 (NM_001201.1,1532-1550).
gttccccatgccaaagtct

SEQ ID NO: 168389 - DNA, 19 bp, Homo sapiens
  siRNA target sequence for BMP3 (NM_001201.1,1570-1588).
ctaccatccagagtatagt

SEQ ID NO: 168390 - DNA, 19 bp, Homo sapiens
  siRNA target sequence for BMP3 (NM_001201.1,1646-1664).
gtcctcactcagtatttta

SEQ ID NO: 168391 - DNA, 19 bp, Homo sapiens
  siRNA target sequence for BMP3 (NM_001201.1,1682-1700).
gaatgtagtgcttaaagta

SEQ ID NO: 168392 - DNA, 19 bp, Homo sapiens
  siRNA target sequence for BMP4 (NM_001202.2,494-512).
gaatgctgatggtcgtttt

SEQ ID NO: 168393 - DNA, 19 bp, Homo sapiens
  siRNA target sequence for BMP4 (NM_001202.2,498-516).
gctgatggtcgttttatta

SEQ ID NO: 168394 - DNA, 19 bp, Homo sapiens
  siRNA target sequence for BMP4 (NM_001202.2,499-517).
ctgatggtcgttttattat

SEQ ID NO: 168395 - DNA, 19 bp, Homo sapiens
  siRNA target sequence for BMP4 (NM_001202.2,536-554).
gcgcgagccatgctagttt

SEQ ID NO: 168396 - DNA, 19 bp, Homo sapiens
  siRNA target sequence for BMP4 (NM_001202.2,538-556).
gcgagccatgctagtttga

SEQ ID NO: 168397 - DNA, 19 bp, Homo sapiens
  siRNA target sequence for BMP4 (NM_001202.2,539-557).
cgagccatgctagtttgat

SEQ ID NO: 168398 - DNA, 19 bp, Homo sapiens
  siRNA target sequence for BMP4 (NM_001202.2,707-725).
ccgtcattccggactacat

SEQ ID NO: 168399 - DNA, 19 bp, Homo sapiens
  siRNA target sequence for BMP4 (NM_001202.2,718-736).
gactacatgcgggatcttt

SEQ ID NO: 168400 - DNA, 19 bp, Homo sapiens
  siRNA target sequence for BMP4 (NM_001202.2,833-851).
gcttccaccacgaagaaca

SEQ ID NO: 168401 - DNA, 19 bp, Homo sapiens
  siRNA target sequence for BMP4 (NM_001202.2,877-895).
gaaaactctgcttttcgtt

SEQ ID NO: 168402 - DNA, 19 bp, Homo sapiens
  siRNA target sequence for BMP4 (NM_001202.2,995-1013).
ggggcttccaccgtataaa

SEQ ID NO: 168403 - DNA, 19 bp, Homo sapiens
  siRNA target sequence for BMP4 (NM_001202.2,997-1015).
ggcttccaccgtataaaca

SEQ ID NO: 168404 - DNA, 19 bp, Homo sapiens
  siRNA target sequence for BMP4 (NM_001202.2,998-1016).
gcttccaccgtataaacat

SEQ ID NO: 168405 - DNA, 19 bp, Homo sapiens
  siRNA target sequence for BMP4 (NM_001202.2,999-1017).
cttccaccgtataaacatt

SEQ ID NO: 168406 - DNA, 19 bp, Homo sapiens
  siRNA target sequence for BMP4 (NM_001202.2,1002-1020).
ccaccgtataaacatttat

SEQ ID NO: 168407 - DNA, 19 bp, Homo sapiens
  siRNA target sequence for BMP4 (NM_001202.2,1085-1103).
gactggtccaccacaatgt

SEQ ID NO: 168408 - DNA, 19 bp, Homo sapiens
  siRNA target sequence for BMP4 (NM_001202.2,1102-1120).
gtgacacggtgggaaactt

SEQ ID NO: 168409 - DNA, 19 bp, Homo sapiens
  siRNA target sequence for BMP4 (NM_001202.2,1222-1240).
ggccagcatgtcaggatta

SEQ ID NO: 168410 - DNA, 19 bp, Homo sapiens
  siRNA target sequence for BMP4 (NM_001202.2,1233-1251).
caggattagccgatcgtta

SEQ ID NO: 168411 - DNA, 19 bp, Homo sapiens
  siRNA target sequence for BMP4 (NM_001202.2,1347-1365).
caagcgtagccctaagcat

SEQ ID NO: 168412 - DNA, 19 bp, Homo sapiens
  siRNA target sequence for BMP4 (NM_001202.2,1554-1572).
cctggtcaattctgtcaat

SEQ ID NO: 168413 - DNA, 19 bp, Homo sapiens
  siRNA target sequence for BMP4 (NM_001202.2,1555-1573).
ctggtcaattctgtcaatt

SEQ ID NO: 168414 - DNA, 19 bp, Homo sapiens
  siRNA target sequence for BMP4 (NM_001202.2,1558-1576).
gtcaattctgtcaattcca

SEQ ID NO: 168415 - DNA, 19 bp, Homo sapiens
  siRNA target sequence for BMP5 (NM_021073.2,769-787).
ggttctagtgggttatgca

SEQ ID NO: 168416 - DNA, 19 bp, Homo sapiens
  siRNA target sequence for BMP5 (NM_021073.2,770-788).
gttctagtgggttatgcaa

SEQ ID NO: 168417 - DNA, 19 bp, Homo sapiens
  siRNA target sequence for BMP5 (NM_021073.2,792-810).
gaggtttgggagacaatca

SEQ ID NO: 168418 - DNA, 19 bp, Homo sapiens
  siRNA target sequence for BMP5 (NM_021073.2,817-835).
ctccagttttatttataga

SEQ ID NO: 168419 - DNA, 19 bp, Homo sapiens
  siRNA target sequence for BMP5 (NM_021073.2,976-994).
gaccaatgaagaaaatcct

SEQ ID NO: 168420 - DNA, 19 bp, Homo sapiens
  siRNA target sequence for BMP5 (NM_021073.2,998-1016).
gagtcggagtactcagtaa

SEQ ID NO: 168421 - DNA, 19 bp, Homo sapiens
  siRNA target sequence for BMP5 (NM_021073.2,1082-1100).
cctcgtcgcatacagttat

SEQ ID NO: 168422 - DNA, 19 bp, Homo sapiens
  siRNA target sequence for BMP5 (NM_021073.2,1136-1154).
ctagccagcctccatgata

SEQ ID NO: 168423 - DNA, 19 bp, Homo sapiens
  siRNA target sequence for BMP5 (NM_021073.2,1183-1201).
catgagctttgtcaactta

SEQ ID NO: 168424 - DNA, 19 bp, Homo sapiens
  siRNA target sequence for BMP5 (NM_021073.2,1226-1244).
caccagcgaaggcattaca

SEQ ID NO: 168425 - DNA, 19 bp, Homo sapiens
  siRNA target sequence for BMP5 (NM_021073.2,1228-1246).
ccagcgaaggcattacaaa

SEQ ID NO: 168426 - DNA, 19 bp, Homo sapiens
  siRNA target sequence for BMP5 (NM_021073.2,1232-1250).
cgaaggcattacaaagaat

SEQ ID NO: 168427 - DNA, 19 bp, Homo sapiens
  siRNA target sequence for BMP5 (NM_021073.2,1323-1341).
ggagcaacaaccgatttga

SEQ ID NO: 168428 - DNA, 19 bp, Homo sapiens
  siRNA target sequence for BMP5 (NM_021073.2,1324-1342).
gagcaacaaccgatttgaa

SEQ ID NO: 168429 - DNA, 19 bp, Homo sapiens
  siRNA target sequence for BMP5 (NM_021073.2,1330-1348).
caaccgatttgaaaatgaa

SEQ ID NO: 168430 - DNA, 19 bp, Homo sapiens
  siRNA target sequence for BMP5 (NM_021073.2,1375-1393).
catcaaggaatacacaaat

SEQ ID NO: 168431 - DNA, 19 bp, Homo sapiens
  siRNA target sequence for BMP5 (NM_021073.2,1403-1421).
gatctgttcttgttagaca

SEQ ID NO: 168432 - DNA, 19 bp, Homo sapiens
  siRNA target sequence for BMP5 (NM_021073.2,1449-1467).
gttggcttgtctttgatat

SEQ ID NO: 168433 - DNA, 19 bp, Homo sapiens
  siRNA target sequence for BMP5 (NM_021073.2,1453-1471).
gcttgtctttgatatcact

SEQ ID NO: 168434 - DNA, 19 bp, Homo sapiens
  siRNA target sequence for BMP5 (NM_021073.2,1538-1556).
ggggatggacgcagtatca

SEQ ID NO: 168435 - DNA, 19 bp, Homo sapiens
  siRNA target sequence for BMP5 (NM_021073.2,1539-1557).
gggatggacgcagtatcaa

SEQ ID NO: 168436 - DNA, 19 bp, Homo sapiens
  siRNA target sequence for BMP5 (NM_021073.2,1544-1562).
ggacgcagtatcaacgtaa

SEQ ID NO: 168437 - DNA, 19 bp, Homo sapiens
  siRNA target sequence for BMP5 (NM_021073.2,1545-1563).
gacgcagtatcaacgtaaa

SEQ ID NO: 168438 - DNA, 19 bp, Homo sapiens
  siRNA target sequence for BMP5 (NM_021073.2,1547-1565).
cgcagtatcaacgtaaaat

SEQ ID NO: 168439 - DNA, 19 bp, Homo sapiens
  siRNA target sequence for BMP5 (NM_021073.2,1549-1567).
cagtatcaacgtaaaatct

SEQ ID NO: 168440 - DNA, 19 bp, Homo sapiens
  siRNA target sequence for BMP5 (NM_021073.2,1584-1602).
gacagggacctcagtcaaa

SEQ ID NO: 168441 - DNA, 19 bp, Homo sapiens
  siRNA target sequence for BMP5 (NM_021073.2,1593-1611).
ctcagtcaaaacaaccatt

SEQ ID NO: 168442 - DNA, 19 bp, Homo sapiens
  siRNA target sequence for BMP5 (NM_021073.2,1630-1648).
ggcgagtgaggtacttctt

SEQ ID NO: 168443 - DNA, 19 bp, Homo sapiens
  siRNA target sequence for BMP5 (NM_021073.2,1726-1744).
gtccagtgttggagattat

SEQ ID NO: 168444 - DNA, 19 bp, Homo sapiens
  siRNA target sequence for BMP5 (NM_021073.2,1838-1856).
ggatacgctgcattttatt

SEQ ID NO: 168445 - DNA, 19 bp, Homo sapiens
  siRNA target sequence for BMP5 (NM_021073.2,1843-1861).
cgctgcattttattgtgat

SEQ ID NO: 168446 - DNA, 19 bp, Homo sapiens
  siRNA target sequence for BMP5 (NM_021073.2,1878-1896).
cacttaacgcccatatgaa

SEQ ID NO: 168447 - DNA, 19 bp, Homo sapiens
  siRNA target sequence for BMP5 (NM_021073.2,1900-1918).
caccaaccacgctatagtt

SEQ ID NO: 168448 - DNA, 19 bp, Homo sapiens
  siRNA target sequence for BMP5 (NM_021073.2,1951-1969).
cgtaccaaagccttgttgt

SEQ ID NO: 168449 - DNA, 19 bp, Homo sapiens
  siRNA target sequence for BMP5 (NM_021073.2,1968-1986).
gtgctccaaccaaattaaa

SEQ ID NO: 168450 - DNA, 19 bp, Homo sapiens
  siRNA target sequence for BMP6 (NM_001718.2,877-895).
gacaccacaaagagttcaa

SEQ ID NO: 168451 - DNA, 19 bp, Homo sapiens
  siRNA target sequence for BMP6 (NM_001718.2,879-897).
caccacaaagagttcaagt

SEQ ID NO: 168452 - DNA, 19 bp, Homo sapiens
  siRNA target sequence for BMP6 (NM_001718.2,882-900).
cacaaagagttcaagttca

SEQ ID NO: 168453 - DNA, 19 bp, Homo sapiens
  siRNA target sequence for BMP6 (NM_001718.2,1003-1021).
gcatttatcaagtcttaca

SEQ ID NO: 168454 - DNA, 19 bp, Homo sapiens
  siRNA target sequence for BMP6 (NM_001718.2,1038-1056).
gactctgacctgtttttgt

SEQ ID NO: 168455 - DNA, 19 bp, Homo sapiens
  siRNA target sequence for BMP6 (NM_001718.2,1055-1073).
gttggacacccgtgtagta

SEQ ID NO: 168456 - DNA, 19 bp, Homo sapiens
  siRNA target sequence for BMP6 (NM_001718.2,1106-1124).
catcacggccactagcaat

SEQ ID NO: 168457 - DNA, 19 bp, Homo sapiens
  siRNA target sequence for BMP6 (NM_001718.2,1319-1337).
ccgacaacagagtcgtaat

SEQ ID NO: 168458 - DNA, 19 bp, Homo sapiens
  siRNA target sequence for BMP6 (NM_001718.2,1367-1385).
ggtctccagtgcttcagat

SEQ ID NO: 168459 - DNA, 19 bp, Homo sapiens
  siRNA target sequence for BMP6 (NM_001718.2,1368-1386).
gtctccagtgcttcagatt

SEQ ID NO: 168460 - DNA, 19 bp, Homo sapiens
  siRNA target sequence for BMP6 (NM_001718.2,1482-1500).
ggctatgctgccaattact

SEQ ID NO: 168461 - DNA, 19 bp, Homo sapiens
  siRNA target sequence for BMP6 (NM_001718.2,1484-1502).
ctatgctgccaattactgt

SEQ ID NO: 168462 - DNA, 19 bp, Homo sapiens
  siRNA target sequence for BMP6 (NM_001718.2,1610-1628).
ctgtgcgccaactaagcta

SEQ ID NO: 168463 - DNA, 19 bp, Homo sapiens
  siRNA target sequence for BMP6 (NM_001718.2,1612-1630).
gtgcgccaactaagctaaa

SEQ ID NO: 168464 - DNA, 19 bp, Homo sapiens
  siRNA target sequence for BMP7 (NM_001719.1,288-306).
cgcgagatcctctccattt

SEQ ID NO: 168465 - DNA, 19 bp, Homo sapiens
  siRNA target sequence for BMP7 (NM_001719.1,289-307).
gcgagatcctctccatttt

SEQ ID NO: 168466 - DNA, 19 bp, Homo sapiens
  siRNA target sequence for BMP7 (NM_001719.1,543-561).
gaacatgacaaggaattct

SEQ ID NO: 168467 - DNA, 19 bp, Homo sapiens
  siRNA target sequence for BMP7 (NM_001719.1,585-603).
gagttccggtttgatcttt

SEQ ID NO: 168468 - DNA, 19 bp, Homo sapiens
  siRNA target sequence for BMP7 (NM_001719.1,667-685).
gggaacgcttcgacaatga

SEQ ID NO: 168469 - DNA, 19 bp, Homo sapiens
  siRNA target sequence for BMP7 (NM_001719.1,669-687).
gaacgcttcgacaatgaga

SEQ ID NO: 168470 - DNA, 19 bp, Homo sapiens
  siRNA target sequence for BMP7 (NM_001719.1,689-707).
gttccggatcagcgtttat

SEQ ID NO: 168471 - DNA, 19 bp, Homo sapiens
  siRNA target sequence for BMP7 (NM_001719.1,730-748).
gcagggaatcggatctctt

SEQ ID NO: 168472 - DNA, 19 bp, Homo sapiens
  siRNA target sequence for CKLF (NM_016326.2,156-174).
cgtgcagccgaaaataaaa

SEQ ID NO: 168473 - DNA, 19 bp, Homo sapiens
  siRNA target sequence for CKLF (NM_016326.2,302-320).
gcggtccttaccagaaaaa

SEQ ID NO: 168474 - DNA, 19 bp, Homo sapiens
  siRNA target sequence for CKLF (NM_016951.2,269-287).
cccctgaaccatatattgt

SEQ ID NO: 168475 - DNA, 19 bp, Homo sapiens
  siRNA target sequence for CKLF (NM_016951.2,271-289).
cctgaaccatatattgtta

SEQ ID NO: 168476 - DNA, 19 bp, Homo sapiens
  siRNA target sequence for CKLF (NM_016951.2,301-319).
gaagtcaccgttatcttat

SEQ ID NO: 168477 - DNA, 19 bp, Homo sapiens
  siRNA target sequence for CKLF (NM_016951.2,308-326).
ccgttatcttatttttcat

SEQ ID NO: 168478 - DNA, 19 bp, Homo sapiens
  siRNA target sequence for CKLF (NM_016951.2,309-327).
cgttatcttatttttcata

SEQ ID NO: 168479 - DNA, 19 bp, Homo sapiens
  siRNA target sequence for CKLF (NM_016951.2,340-358).
ctcagacttgatcgattaa

SEQ ID NO: 168480 - DNA, 19 bp, Homo sapiens
  siRNA target sequence for CKLF (NM_016951.2,344-362).
gacttgatcgattaatgaa

SEQ ID NO: 168481 - DNA, 19 bp, Homo sapiens
  siRNA target sequence for CKLF (NM_016951.2,346-364).
cttgatcgattaatgaagt

SEQ ID NO: 168482 - DNA, 19 bp, Homo sapiens
  siRNA target sequence for CKLF (NM_016951.2,353-371).
gattaatgaagtggttatt

SEQ ID NO: 168483 - DNA, 19 bp, Homo sapiens
  siRNA target sequence for CKLF (NM_016951.2,374-392).
ggcctttgcttgatattat

SEQ ID NO: 168484 - DNA, 19 bp, Homo sapiens
  siRNA target sequence for CKLF (NM_016951.2,376-394).
cctttgcttgatattatca

SEQ ID NO: 168485 - DNA, 19 bp, Homo sapiens
  siRNA target sequence for CKLF (NM_016951.2,377-395).
ctttgcttgatattatcaa

SEQ ID NO: 168486 - DNA, 19 bp, Homo sapiens
  siRNA target sequence for CKLF (NM_016951.2,398-416).
cactggtaacaacagtatt

SEQ ID NO: 168487 - DNA, 19 bp, Homo sapiens
  siRNA target sequence for CKLF (NM_016951.2,412-430).
gtattcatgctcatcgtat

SEQ ID NO: 168488 - DNA, 19 bp, Homo sapiens
  siRNA target sequence for CKLF (NM_181640.1,220-238).
cggctggatattatcaact

SEQ ID NO: 168489 - DNA, 19 bp, Homo sapiens
  siRNA target sequence for CLC (NM_013246.1,63-81).
ggactcgtgggggatgtta

SEQ ID NO: 168490 - DNA, 19 bp, Homo sapiens
  siRNA target sequence for CLC (NM_013246.1,154-172).
ggcccctccatccagaaaa

SEQ ID NO: 168491 - DNA, 19 bp, Homo sapiens
  siRNA target sequence for CXCL16 (NM_022059.1,626-644).
cgccatcggttcagttcat

SEQ ID NO: 168492 - DNA, 19 bp, Homo sapiens
  siRNA target sequence for CXCL16 (NM_022059.1,628-646).
ccatcggttcagttcatga

SEQ ID NO: 168493 - DNA, 19 bp, Homo sapiens
  siRNA target sequence for CXCL16 (NM_022059.1,671-689).
cttaccatcggtgtctata

SEQ ID NO: 168494 - DNA, 19 bp, Homo sapiens
  siRNA target sequence for CXCL16 (NM_022059.1,676-694).
catcggtgtctatactaca

SEQ ID NO: 168495 - DNA, 19 bp, Homo sapiens
  siRNA target sequence for CXCL16 (NM_022059.1,764-782).
gctgtcttgatctcaaaga

SEQ ID NO: 168496 - DNA, 19 bp, Homo sapiens
  siRNA target sequence for CXCL16 (NM_022059.1,765-783).
ctgtcttgatctcaaagaa

SEQ ID NO: 168497 - DNA, 19 bp, Homo sapiens
  siRNA target sequence for CXCL16 (NM_022059.1,866-884).
gggcatcttcagatatcca

SEQ ID NO: 168498 - DNA, 19 bp, Homo sapiens
  siRNA target sequence for CXCL16 (NM_022059.1,969-987).
gctcactcgtcccaatgaa

SEQ ID NO: 168499 - DNA, 19 bp, Homo sapiens
  siRNA target sequence for CXCL16 (NM_022059.1,970-988).
ctcactcgtcccaatgaaa

SEQ ID NO: 168500 - DNA, 19 bp, Homo sapiens
  siRNA target sequence for CXCL16 (NM_022059.1,1196-1214).
cagatctgccggttcatta

SEQ ID NO: 168501 - DNA, 19 bp, Homo sapiens
  siRNA target sequence for CXCL16 (NM_022059.1,1198-1216).
gatctgccggttcattata

SEQ ID NO: 168502 - DNA, 19 bp, Homo sapiens
  siRNA target sequence for CXCL16 (NM_022059.1,1225-1243).
gcacctgactctaatacct

SEQ ID NO: 168503 - DNA, 19 bp, Homo sapiens
  siRNA target sequence for EBAF (NM_003240.2,248-266).
cgtgagggcccagtatgta

SEQ ID NO: 168504 - DNA, 19 bp, Homo sapiens
  siRNA target sequence for FAM3B (NM_058186.2,120-138).
gattagctgctttgacata

SEQ ID NO: 168505 - DNA, 19 bp, Homo sapiens
  siRNA target sequence for FAM3B (NM_058186.2,145-163).
caaggacgtttgttggtta

SEQ ID NO: 168506 - DNA, 19 bp, Homo sapiens
  siRNA target sequence for FAM3B (NM_058186.2,148-166).
ggacgtttgttggttaagt

SEQ ID NO: 168507 - DNA, 19 bp, Homo sapiens
  siRNA target sequence for FAM3B (NM_058186.2,149-167).
gacgtttgttggttaagtt

SEQ ID NO: 168508 - DNA, 19 bp, Homo sapiens
  siRNA target sequence for FAM3B (NM_058186.2,151-169).
cgtttgttggttaagttaa

SEQ ID NO: 168509 - DNA, 19 bp, Homo sapiens
  siRNA target sequence for FAM3B (NM_058186.2,296-314).
ccagtgctgcctatagcat

SEQ ID NO: 168510 - DNA, 19 bp, Homo sapiens
  siRNA target sequence for FAM3B (NM_058186.2,453-471).
ctgctttgaggataaccta

SEQ ID NO: 168511 - DNA, 19 bp, Homo sapiens
  siRNA target sequence for FAM3B (NM_058186.2,496-514).
gttgccagaggaataaaca

SEQ ID NO: 168512 - DNA, 19 bp, Homo sapiens
  siRNA target sequence for FAM3B (NM_058186.2,519-537).
cattgtcaactatgtaact

SEQ ID NO: 168513 - DNA, 19 bp, Homo sapiens
  siRNA target sequence for FAM3B (NM_058186.2,546-564).
gacagcaacacgatgtttt

SEQ ID NO: 168514 - DNA, 19 bp, Homo sapiens
  siRNA target sequence for FAM3B (NM_058186.2,590-608).
gaccgatgacaaagtttat

SEQ ID NO: 168515 - DNA, 19 bp, Homo sapiens
  siRNA target sequence for FAM3B (NM_058186.2,657-675).
cggaagcacaagactgaat

SEQ ID NO: 168516 - DNA, 19 bp, Homo sapiens
  siRNA target sequence for FAM3B (NM_058186.2,738-756).
gtctagctgggtatttatt

SEQ ID NO: 168517 - DNA, 19 bp, Homo sapiens
  siRNA target sequence for FAM3B (NM_058186.2,782-800).
ccgaaattcagagagaaaa

SEQ ID NO: 168518 - DNA, 19 bp, Homo sapiens
  siRNA target sequence for FAM3C (NM_014888.1,260-278).
ggatgcaagtttaggaaat

SEQ ID NO: 168519 - DNA, 19 bp, Homo sapiens
  siRNA target sequence for FAM3C (NM_014888.1,264-282).
gcaagtttaggaaatctat

SEQ ID NO: 168520 - DNA, 19 bp, Homo sapiens
  siRNA target sequence for FAM3C (NM_014888.1,304-322).
cagctgcacgttctacaaa

SEQ ID NO: 168521 - DNA, 19 bp, Homo sapiens
  siRNA target sequence for FAM3C (NM_014888.1,319-337).
caaagcctcccagatataa

SEQ ID NO: 168522 - DNA, 19 bp, Homo sapiens
  siRNA target sequence for FAM3C (NM_014888.1,323-341).
gcctcccagatataagtgt

SEQ ID NO: 168523 - DNA, 19 bp, Homo sapiens
  siRNA target sequence for FAM3C (NM_014888.1,422-440).
ctgcctggaagataatgtt

SEQ ID NO: 168524 - DNA, 19 bp, Homo sapiens
  siRNA target sequence for FAM3C (NM_014888.1,508-526).
gagaagtattagacactaa

SEQ ID NO: 168525 - DNA, 19 bp, Homo sapiens
  siRNA target sequence for FAM3C (NM_014888.1,546-564).
ggagatgtggcaccattta

SEQ ID NO: 168526 - DNA, 19 bp, Homo sapiens
  siRNA target sequence for FAM3C (NM_014888.1,552-570).
gtggcaccatttattgagt

SEQ ID NO: 168527 - DNA, 19 bp, Homo sapiens
  siRNA target sequence for FAM3C (NM_014888.1,617-635).
cgatgatggagcaaccaaa

SEQ ID NO: 168528 - DNA, 19 bp, Homo sapiens
  siRNA target sequence for FAM3C (NM_014888.1,625-643).
gagcaaccaaactcaatga

SEQ ID NO: 168529 - DNA, 19 bp, Homo sapiens
  siRNA target sequence for FAM3C (NM_014888.1,677-695).
cacatctattactaatctt

SEQ ID NO: 168530 - DNA, 19 bp, Homo sapiens
  siRNA target sequence for FAM3C (NM_014888.1,750-768).
ccttttgaacagcacataa

SEQ ID NO: 168531 - DNA, 19 bp, Homo sapiens
  siRNA target sequence for FAM3C (NM_014888.1,799-817).
gatggcctgaagttgtaga

SEQ ID NO: 168532 - DNA, 19 bp, Homo sapiens
  siRNA target sequence for FAM3D (NM_138805.2,346-364).
gtcacgacatggatgttta

SEQ ID NO: 168533 - DNA, 19 bp, Homo sapiens
  siRNA target sequence for FAM3D (NM_138805.2,348-366).
cacgacatggatgtttatt

SEQ ID NO: 168534 - DNA, 19 bp, Homo sapiens
  siRNA target sequence for FAM3D (NM_138805.2,351-369).
gacatggatgtttattcga

SEQ ID NO: 168535 - DNA, 19 bp, Homo sapiens
  siRNA target sequence for FAM3D (NM_138805.2,380-398).
gcttcagcatgaaaaccat

SEQ ID NO: 168536 - DNA, 19 bp, Homo sapiens
  siRNA target sequence for FAM3D (NM_138805.2,431-449).
ccaaggagatccaggttaa

SEQ ID NO: 168537 - DNA, 19 bp, Homo sapiens
  siRNA target sequence for FAM3D (NM_138805.2,477-495).
ctgcccagccaactacttt

SEQ ID NO: 168538 - DNA, 19 bp, Homo sapiens
  siRNA target sequence for FAM3D (NM_138805.2,485-503).
ccaactactttgcgtttaa

SEQ ID NO: 168539 - DNA, 19 bp, Homo sapiens
  siRNA target sequence for FAM3D (NM_138805.2,486-504).
caactactttgcgtttaaa

SEQ ID NO: 168540 - DNA, 19 bp, Homo sapiens
  siRNA target sequence for FAM3D (NM_138805.2,526-544).
gtcgtgggccctactatgt

SEQ ID NO: 168541 - DNA, 19 bp, Homo sapiens
  siRNA target sequence for FAM3D (NM_138805.2,534-552).
ccctactatgtgctttgaa

SEQ ID NO: 168542 - DNA, 19 bp, Homo sapiens
  siRNA target sequence for FAM3D (NM_138805.2,550-568).
gaagaccgcatgatcatga

SEQ ID NO: 168543 - DNA, 19 bp, Homo sapiens
  siRNA target sequence for FAM3D (NM_138805.2,640-658).
ggacagaaggcatttgaca

SEQ ID NO: 168544 - DNA, 19 bp, Homo sapiens
  siRNA target sequence for FAM3D (NM_138805.2,673-691).
gttatgcacctagtgaaat

SEQ ID NO: 168545 - DNA, 19 bp, Homo sapiens
  siRNA target sequence for FAM3D (NM_138805.2,739-757).
gacgatccagggaccaaaa

SEQ ID NO: 168546 - DNA, 19 bp, Homo sapiens
  siRNA target sequence for FAM3D (NM_138805.2,794-812).
ggagttcctacgcaaaaca

SEQ ID NO: 168547 - DNA, 19 bp, Homo sapiens
  siRNA target sequence for FAM3D (NM_138805.2,795-813).
gagttcctacgcaaaacaa

SEQ ID NO: 168548 - DNA, 19 bp, Homo sapiens
  siRNA target sequence for FAM3D (NM_138805.2,825-843).
ggacagctgggtcttcata

SEQ ID NO: 168549 - DNA, 19 bp, Homo sapiens
  siRNA target sequence for FAM3D (NM_138805.2,894-912).
cagcccagacacaaacaaa

SEQ ID NO: 168550 - DNA, 19 bp, Homo sapiens
  siRNA target sequence for FLT3LG (NM_001459.2,238-256).
gactacctgcttcaagatt

SEQ ID NO: 168551 - DNA, 19 bp, Homo sapiens
  siRNA target sequence for FLT3LG (NM_001459.2,389-407).
gcgtgaacacggagataca

SEQ ID NO: 168552 - DNA, 19 bp, Homo sapiens
  siRNA target sequence for FLT3LG (NM_001459.2,393-411).
gaacacggagatacacttt

SEQ ID NO: 168553 - DNA, 19 bp, Homo sapiens
  siRNA target sequence for FLT3LG (NM_001459.2,521-539).
ggatcactcgccagaactt

SEQ ID NO: 168554 - DNA, 19 bp, Homo sapiens
  siRNA target sequence for GDF10 (NM_004962.2,787-805).
cagaaggccgtgtatttct

SEQ ID NO: 168555 - DNA, 19 bp, Homo sapiens
  siRNA target sequence for GDF10 (NM_004962.2,826-844).
gactcggaaatgatcctta

SEQ ID NO: 168556 - DNA, 19 bp, Homo sapiens
  siRNA target sequence for GDF10 (NM_004962.2,890-908).
cgctcgaggtgctatgcaa

SEQ ID NO: 168557 - DNA, 19 bp, Homo sapiens
  siRNA target sequence for GDF10 (NM_004962.2,1179-1197).
gccctacatcctagtctat

SEQ ID NO: 168558 - DNA, 19 bp, Homo sapiens
  siRNA target sequence for GDF10 (NM_004962.2,1635-1653).
gataatctcaccgaaatct

SEQ ID NO: 168559 - DNA, 19 bp, Homo sapiens
  siRNA target sequence for GDF10 (NM_004962.2,1641-1659).
ctcaccgaaatcttttgat

SEQ ID NO: 168560 - DNA, 19 bp, Homo sapiens
  siRNA target sequence for GDF10 (NM_004962.2,1781-1799).
gctgtgttcccgataagat

SEQ ID NO: 168561 - DNA, 19 bp, Homo sapiens
  siRNA target sequence for GDF11 (NM_005811.2,261-279).
cgcctagagagcatcaagt

SEQ ID NO: 168562 - DNA, 19 bp, Homo sapiens
  siRNA target sequence for GDF11 (NM_005811.2,271-289).
gcatcaagtcgcagatctt

SEQ ID NO: 168563 - DNA, 19 bp, Homo sapiens
  siRNA target sequence for GDF11 (NM_005811.2,454-472).
ccgagaccgtcattagcat

SEQ ID NO: 168564 - DNA, 19 bp, Homo sapiens
  siRNA target sequence for GDF11 (NM_005811.2,613-631).
cagtctacctgcagatctt

SEQ ID NO: 168565 - DNA, 19 bp, Homo sapiens
  siRNA target sequence for GDF11 (NM_005811.2,623-641).
gcagatcttgcgactaaaa

SEQ ID NO: 168566 - DNA, 19 bp, Homo sapiens
  siRNA target sequence for GDF11 (NM_005811.2,809-827).
cgagatcaacgcctttgat

SEQ ID NO: 168567 - DNA, 19 bp, Homo sapiens
  siRNA target sequence for GDF11 (NM_005811.2,871-889).
ccgaggggctgcatccatt

SEQ ID NO: 168568 - DNA, 19 bp, Homo sapiens
  siRNA target sequence for GDF11 (NM_005811.2,1063-1081).
ccggccagtgcgagtacat

SEQ ID NO: 168569 - DNA, 19 bp, Homo sapiens
  siRNA target sequence for GDF11 (NM_005811.2,1065-1083).
ggccagtgcgagtacatgt

SEQ ID NO: 168570 - DNA, 19 bp, Homo sapiens
  siRNA target sequence for GDF11 (NM_005811.2,1066-1084).
gccagtgcgagtacatgtt

SEQ ID NO: 168571 - DNA, 19 bp, Homo sapiens
  siRNA target sequence for GDF11 (NM_005811.2,1113-1131).
gtgcagcaggccaatccaa

SEQ ID NO: 168572 - DNA, 19 bp, Homo sapiens
  siRNA target sequence for GDF11 (NM_005811.2,1162-1180).
ccaagatgtccccaatcaa

SEQ ID NO: 168573 - DNA, 19 bp, Homo sapiens
  siRNA target sequence for GDF11 (NM_005811.2,1178-1196).
caacatgctctacttcaat

SEQ ID NO: 168574 - DNA, 19 bp, Homo sapiens
  siRNA target sequence for GDF2 (NM_016204.1,471-489).
cgccagcgtccaacattgt

SEQ ID NO: 168575 - DNA, 19 bp, Homo sapiens
  siRNA target sequence for GDF2 (NM_016204.1,608-626).
gagctccgactctatgtct

SEQ ID NO: 168576 - DNA, 19 bp, Homo sapiens
  siRNA target sequence for GDF2 (NM_016204.1,666-684).
gaagcgtggtcatttatga

SEQ ID NO: 168577 - DNA, 19 bp, Homo sapiens
  siRNA target sequence for GDF2 (NM_016204.1,669-687).
gcgtggtcatttatgatgt

SEQ ID NO: 168578 - DNA, 19 bp, Homo sapiens
  siRNA target sequence for GDF2 (NM_016204.1,1152-1170).
cctccctgcgggtaaactt

SEQ ID NO: 168579 - DNA, 19 bp, Homo sapiens
  siRNA target sequence for GDF2 (NM_016204.1,1397-1415).
cccaccctcaagtaccatt

SEQ ID NO: 168580 - DNA, 19 bp, Homo sapiens
  siRNA target sequence for GDF2 (NM_016204.1,1398-1416).
ccaccctcaagtaccatta

SEQ ID NO: 168581 - DNA, 19 bp, Homo sapiens
  siRNA target sequence for GDF3 (NM_020634.1,93-111).
ccaggcagtccaatttcaa

SEQ ID NO: 168582 - DNA, 19 bp, Homo sapiens
  siRNA target sequence for GDF3 (NM_020634.1,96-114).
ggcagtccaatttcaagaa

SEQ ID NO: 168583 - DNA, 19 bp, Homo sapiens
  siRNA target sequence for GDF3 (NM_020634.1,127-145).
caatttctgggcttagata

SEQ ID NO: 168584 - DNA, 19 bp, Homo sapiens
  siRNA target sequence for GDF3 (NM_020634.1,149-167).
cgccttcaccccagaagtt

SEQ ID NO: 168585 - DNA, 19 bp, Homo sapiens
  siRNA target sequence for GDF3 (NM_020634.1,172-190).
cctgtgccttatatcttga

SEQ ID NO: 168586 - DNA, 19 bp, Homo sapiens
  siRNA target sequence for GDF3 (NM_020634.1,229-247).
ggggtctcccgagacttat

SEQ ID NO: 168587 - DNA, 19 bp, Homo sapiens
  siRNA target sequence for GDF3 (NM_020634.1,232-250).
gtctcccgagacttatgct

SEQ ID NO: 168588 - DNA, 19 bp, Homo sapiens
  siRNA target sequence for GDF3 (NM_020634.1,238-256).
cgagacttatgctacgtaa

SEQ ID NO: 168589 - DNA, 19 bp, Homo sapiens
  siRNA target sequence for GDF3 (NM_020634.1,434-452).
ccaattcttactataacct

SEQ ID NO: 168590 - DNA, 19 bp, Homo sapiens
  siRNA target sequence for GDF3 (NM_020634.1,513-531).
cacccctaagccaggtaaa

SEQ ID NO: 168591 - DNA, 19 bp, Homo sapiens
  siRNA target sequence for GDF3 (NM_020634.1,515-533).
cccctaagccaggtaaaat

SEQ ID NO: 168592 - DNA, 19 bp, Homo sapiens
  siRNA target sequence for GDF3 (NM_020634.1,523-541).
ccaggtaaaatgtttgtgt

SEQ ID NO: 168593 - DNA, 19 bp, Homo sapiens
  siRNA target sequence for GDF3 (NM_020634.1,585-603).
gctggatgtagctaaggat

SEQ ID NO: 168594 - DNA, 19 bp, Homo sapiens
  siRNA target sequence for GDF3 (NM_020634.1,586-604).
ctggatgtagctaaggatt

SEQ ID NO: 168595 - DNA, 19 bp, Homo sapiens
  siRNA target sequence for GDF3 (NM_020634.1,620-638).
ggaaaaatttcgggttatt

SEQ ID NO: 168596 - DNA, 19 bp, Homo sapiens
  siRNA target sequence for GDF3 (NM_020634.1,696-714).
cacctgtgccagactaaga

SEQ ID NO: 168597 - DNA, 19 bp, Homo sapiens
  siRNA target sequence for GDF3 (NM_020634.1,766-784).
cacccttctcggaaaagga

SEQ ID NO: 168598 - DNA, 19 bp, Homo sapiens
  siRNA target sequence for GDF3 (NM_020634.1,947-965).
ctctcaacagctccaatta

SEQ ID NO: 168599 - DNA, 19 bp, Homo sapiens
  siRNA target sequence for GDF3 (NM_020634.1,951-969).
caacagctccaattatgct

SEQ ID NO: 168600 - DNA, 19 bp, Homo sapiens
  siRNA target sequence for GDF3 (NM_020634.1,1053-1071).
gctctaccaggacaataat

SEQ ID NO: 168601 - DNA, 19 bp, Homo sapiens
  siRNA target sequence for GDF3 (NM_020634.1,1080-1098).
cattctacgacattatgaa

SEQ ID NO: 168602 - DNA, 19 bp, Homo sapiens
  siRNA target sequence for GDF3 (NM_020634.1,1099-1117).
gacatggtagtcgatgaat

SEQ ID NO: 168603 - DNA, 19 bp, Homo sapiens
  siRNA target sequence for GDF8 (NM_005259.1,143-161).
ctgcaactctgtgtttata

SEQ ID NO: 168604 - DNA, 19 bp, Homo sapiens
  siRNA target sequence for GDF8 (NM_005259.1,155-173).
gtttatatttacctgttta

SEQ ID NO: 168605 - DNA, 19 bp, Homo sapiens
  siRNA target sequence for GDF8 (NM_005259.1,186-204).
ctggtccagtggatctaaa

SEQ ID NO: 168606 - DNA, 19 bp, Homo sapiens
  siRNA target sequence for GDF8 (NM_005259.1,244-262).
gctgtgtaatgcatgtact

SEQ ID NO: 168607 - DNA, 19 bp, Homo sapiens
  siRNA target sequence for GDF8 (NM_005259.1,265-283).
gagacaaaacactaaatct

SEQ ID NO: 168608 - DNA, 19 bp, Homo sapiens
  siRNA target sequence for GDF8 (NM_005259.1,276-294).
ctaaatcttcaagaataga

SEQ ID NO: 168609 - DNA, 19 bp, Homo sapiens
  siRNA target sequence for GDF8 (NM_005259.1,297-315).
ccattaagatacaaatcct

SEQ ID NO: 168610 - DNA, 19 bp, Homo sapiens
  siRNA target sequence for GDF8 (NM_005259.1,304-322).
gatacaaatcctcagtaaa

SEQ ID NO: 168611 - DNA, 19 bp, Homo sapiens
  siRNA target sequence for GDF8 (NM_005259.1,351-369).
gcaaagatgttataagaca

SEQ ID NO: 168612 - DNA, 19 bp, Homo sapiens
  siRNA target sequence for GDF8 (NM_005259.1,356-374).
gatgttataagacaacttt

SEQ ID NO: 168613 - DNA, 19 bp, Homo sapiens
  siRNA target sequence for GDF8 (NM_005259.1,387-405).
ctccactccgggaactgat

SEQ ID NO: 168614 - DNA, 19 bp, Homo sapiens
  siRNA target sequence for GDF8 (NM_005259.1,436-454).
cagcgatggctctttggaa

SEQ ID NO: 168615 - DNA, 19 bp, Homo sapiens
  siRNA target sequence for GDF8 (NM_005259.1,470-488).
gctacaacggaaacaatca

SEQ ID NO: 168616 - DNA, 19 bp, Homo sapiens
  siRNA target sequence for GDF8 (NM_005259.1,471-489).
ctacaacggaaacaatcat

SEQ ID NO: 168617 - DNA, 19 bp, Homo sapiens
  siRNA target sequence for GDF8 (NM_005259.1,536-554).
cccaaatgttgcttcttta

SEQ ID NO: 168618 - DNA, 19 bp, Homo sapiens
  siRNA target sequence for GDF8 (NM_005259.1,584-602).
gtagtaaaggcccaactat

SEQ ID NO: 168619 - DNA, 19 bp, Homo sapiens
  siRNA target sequence for GDF8 (NM_005259.1,592-610).
ggcccaactatggatatat

SEQ ID NO: 168620 - DNA, 19 bp, Homo sapiens
  siRNA target sequence for GDF8 (NM_005259.1,593-611).
gcccaactatggatatatt

SEQ ID NO: 168621 - DNA, 19 bp, Homo sapiens
  siRNA target sequence for GDF8 (NM_005259.1,594-612).
cccaactatggatatattt

SEQ ID NO: 168622 - DNA, 19 bp, Homo sapiens
  siRNA target sequence for GDF8 (NM_005259.1,619-637).
cgtcgagactcctacaaca

SEQ ID NO: 168623 - DNA, 19 bp, Homo sapiens
  siRNA target sequence for GDF8 (NM_005259.1,657-675).
gactcatcaaacctatgaa

SEQ ID NO: 168624 - DNA, 19 bp, Homo sapiens
  siRNA target sequence for GDF8 (NM_005259.1,673-691).
gaaagacggtacaaggtat

SEQ ID NO: 168625 - DNA, 19 bp, Homo sapiens
  siRNA target sequence for GDF8 (NM_005259.1,696-714).
gaatccgatctctgaaact

SEQ ID NO: 168626 - DNA, 19 bp, Homo sapiens
  siRNA target sequence for GDF8 (NM_005259.1,795-813).
ccaacttaggcattgaaat

SEQ ID NO: 168627 - DNA, 19 bp, Homo sapiens
  siRNA target sequence for GDF8 (NM_005259.1,876-894).
ggctgaatccgtttttaga

SEQ ID NO: 168628 - DNA, 19 bp, Homo sapiens
  siRNA target sequence for GDF8 (NM_005259.1,976-994).
ctgtcgttaccctctaact

SEQ ID NO: 168629 - DNA, 19 bp, Homo sapiens
  siRNA target sequence for GDF8 (NM_005259.1,978-996).
gtcgttaccctctaactgt

SEQ ID NO: 168630 - DNA, 19 bp, Homo sapiens
  siRNA target sequence for GDF8 (NM_005259.1,1159-1177).
cacaaagatgtctccaatt

SEQ ID NO: 168631 - DNA, 19 bp, Homo sapiens
  siRNA target sequence for GDF8 (NM_005259.1,1168-1186).
gtctccaattaatatgcta

SEQ ID NO: 168632 - DNA, 19 bp, Homo sapiens
  siRNA target sequence for GDF8 (NM_005259.1,1170-1188).
ctccaattaatatgctata

SEQ ID NO: 168633 - DNA, 19 bp, Homo sapiens
  siRNA target sequence for GDF9 (NM_005260.2,143-161).
ccttgctgcagcatataga

SEQ ID NO: 168634 - DNA, 19 bp, Homo sapiens
  siRNA target sequence for GDF9 (NM_005260.2,190-208).
gcgcttttcaaagttctat

SEQ ID NO: 168635 - DNA, 19 bp, Homo sapiens
  siRNA target sequence for GDF9 (NM_005260.2,248-266).
ccagagctttgcactacat

SEQ ID NO: 168636 - DNA, 19 bp, Homo sapiens
  siRNA target sequence for GDF9 (NM_005260.2,267-285).
gaagaagctctataagaca

SEQ ID NO: 168637 - DNA, 19 bp, Homo sapiens
  siRNA target sequence for GDF9 (NM_005260.2,273-291).
gctctataagacatatgct

SEQ ID NO: 168638 - DNA, 19 bp, Homo sapiens
  siRNA target sequence for GDF9 (NM_005260.2,294-312).
caaggaagggattcctaaa

SEQ ID NO: 168639 - DNA, 19 bp, Homo sapiens
  siRNA target sequence for GDF9 (NM_005260.2,298-316).
gaagggattcctaaatcca

SEQ ID NO: 168640 - DNA, 19 bp, Homo sapiens
  siRNA target sequence for GDF9 (NM_005260.2,301-319).
gggattcctaaatccaata

SEQ ID NO: 168641 - DNA, 19 bp, Homo sapiens
  siRNA target sequence for GDF9 (NM_005260.2,437-455).
gcattactaccgttgaaca

SEQ ID NO: 168642 - DNA, 19 bp, Homo sapiens
  siRNA target sequence for GDF9 (NM_005260.2,443-461).
ctaccgttgaacacttact

SEQ ID NO: 168643 - DNA, 19 bp, Homo sapiens
  siRNA target sequence for GDF9 (NM_005260.2,446-464).
ccgttgaacacttactcaa

SEQ ID NO: 168644 - DNA, 19 bp, Homo sapiens
  siRNA target sequence for GDF9 (NM_005260.2,537-555).
gataaaggagccaaagtct

SEQ ID NO: 168645 - DNA, 19 bp, Homo sapiens
  siRNA target sequence for GDF9 (NM_005260.2,571-589).
ggcagagctccatactcat

SEQ ID NO: 168646 - DNA, 19 bp, Homo sapiens
  siRNA target sequence for GDF9 (NM_005260.2,572-590).
gcagagctccatactcatt

SEQ ID NO: 168647 - DNA, 19 bp, Homo sapiens
  siRNA target sequence for GDF9 (NM_005260.2,585-603).
ctcatttacctttaactca

SEQ ID NO: 168648 - DNA, 19 bp, Homo sapiens
  siRNA target sequence for GDF9 (NM_005260.2,653-671).
gcctccttcaacctttagt

SEQ ID NO: 168649 - DNA, 19 bp, Homo sapiens
  siRNA target sequence for GDF9 (NM_005260.2,743-761).
cagcacagaatggtttgtt

SEQ ID NO: 168650 - DNA, 19 bp, Homo sapiens
  siRNA target sequence for GDF9 (NM_005260.2,745-763).
gcacagaatggtttgttta

SEQ ID NO: 168651 - DNA, 19 bp, Homo sapiens
  siRNA target sequence for GDF9 (NM_005260.2,748-766).
cagaatggtttgtttaaca

SEQ ID NO: 168652 - DNA, 19 bp, Homo sapiens
  siRNA target sequence for GDF9 (NM_005260.2,779-797).
ccccctcactgatcttata

SEQ ID NO: 168653 - DNA, 19 bp, Homo sapiens
  siRNA target sequence for GDF9 (NM_005260.2,780-798).
cccctcactgatcttatat

SEQ ID NO: 168654 - DNA, 19 bp, Homo sapiens
  siRNA target sequence for GDF9 (NM_005260.2,781-799).
ccctcactgatcttatatt

SEQ ID NO: 168655 - DNA, 19 bp, Homo sapiens
  siRNA target sequence for GDF9 (NM_005260.2,785-803).
cactgatcttatatttgaa

SEQ ID NO: 168656 - DNA, 19 bp, Homo sapiens
  siRNA target sequence for GDF9 (NM_005260.2,809-827).
caagtgctcaggcttatca

SEQ ID NO: 168657 - DNA, 19 bp, Homo sapiens
  siRNA target sequence for GDF9 (NM_005260.2,830-848).
gctggtattcccttcacta

SEQ ID NO: 168658 - DNA, 19 bp, Homo sapiens
  siRNA target sequence for GDF9 (NM_005260.2,833-851).
ggtattcccttcactataa

SEQ ID NO: 168659 - DNA, 19 bp, Homo sapiens
  siRNA target sequence for GDF9 (NM_005260.2,968-986).
ctgtcagttctgaattgaa

SEQ ID NO: 168660 - DNA, 19 bp, Homo sapiens
  siRNA target sequence for GDF9 (NM_005260.2,970-988).
gtcagttctgaattgaaga

SEQ ID NO: 168661 - DNA, 19 bp, Homo sapiens
  siRNA target sequence for GDF9 (NM_005260.2,1000-1018).
ccagcttccttcaatctga

SEQ ID NO: 168662 - DNA, 19 bp, Homo sapiens
  siRNA target sequence for GDF9 (NM_005260.2,1007-1025).
ccttcaatctgagtgaata

SEQ ID NO: 168663 - DNA, 19 bp, Homo sapiens
  siRNA target sequence for GDF9 (NM_005260.2,1026-1044).
cttcagacaatttcttctt

SEQ ID NO: 168664 - DNA, 19 bp, Homo sapiens
  siRNA target sequence for GDF9 (NM_005260.2,1062-1080).
gctccatgactttagactt

SEQ ID NO: 168665 - DNA, 19 bp, Homo sapiens
  siRNA target sequence for GDF9 (NM_005260.2,1071-1089).
ctttagacttagctttagt

SEQ ID NO: 168666 - DNA, 19 bp, Homo sapiens
  siRNA target sequence for GDF9 (NM_005260.2,1128-1146).
gtacaaccctcgatactgt

SEQ ID NO: 168667 - DNA, 19 bp, Homo sapiens
  siRNA target sequence for GDF9 (NM_005260.2,1131-1149).
caaccctcgatactgtaaa

SEQ ID NO: 168668 - DNA, 19 bp, Homo sapiens
  siRNA target sequence for GDF9 (NM_005260.2,1203-1221).
ggtacagaacatcatctat

SEQ ID NO: 168669 - DNA, 19 bp, Homo sapiens
  siRNA target sequence for GDF9 (NM_005260.2,1242-1260).
gccaagaccgtcatgtgta

SEQ ID NO: 168670 - DNA, 19 bp, Homo sapiens
  siRNA target sequence for GDF9 (NM_005260.2,1253-1271).
catgtgtacctgccaaata

SEQ ID NO: 168671 - DNA, 19 bp, Homo sapiens
  siRNA target sequence for GDF9 (NM_005260.2,1307-1325).
gctcaattgcctataaaga

SEQ ID NO: 168672 - DNA, 19 bp, Homo sapiens
  siRNA target sequence for GDF9 (NM_005260.2,1333-1351).
gatatgatagctacaaagt

SEQ ID NO: 168673 - DNA, 19 bp, Homo sapiens
  siRNA target sequence for GPI (NM_000175.2,249-267).
ggcatatcctggtggatta

SEQ ID NO: 168674 - DNA, 19 bp, Homo sapiens
  siRNA target sequence for GPI (NM_000175.2,251-269).
catatcctggtggattact

SEQ ID NO: 168675 - DNA, 19 bp, Homo sapiens
  siRNA target sequence for GPI (NM_000175.2,410-428).
ctgcggaaccggtcaaaca

SEQ ID NO: 168676 - DNA, 19 bp, Homo sapiens
  siRNA target sequence for GPI (NM_000175.2,412-430).
gcggaaccggtcaaacaca

SEQ ID NO: 168677 - DNA, 19 bp, Homo sapiens
  siRNA target sequence for GPI (NM_000175.2,550-568).
cacggacgtcatcaacatt

SEQ ID NO: 168678 - DNA, 19 bp, Homo sapiens
  siRNA target sequence for GPI (NM_000175.2,705-723).
ccgagtcctccctgttcat

SEQ ID NO: 168679 - DNA, 19 bp, Homo sapiens
  siRNA target sequence for GPI (NM_000175.2,728-746).
gcctccaagacctttacta

SEQ ID NO: 168680 - DNA, 19 bp, Homo sapiens
  siRNA target sequence for GPI (NM_000175.2,816-834).
cagtggcgaagcactttgt

SEQ ID NO: 168681 - DNA, 19 bp, Homo sapiens
  siRNA target sequence for GPI (NM_000175.2,833-851).
gttgccctgtctactaaca

SEQ ID NO: 168682 - DNA, 19 bp, Homo sapiens
  siRNA target sequence for GPI (NM_000175.2,836-854).
gccctgtctactaacacaa

SEQ ID NO: 168683 - DNA, 19 bp, Homo sapiens
  siRNA target sequence for GPI (NM_000175.2,872-890).
ggaattgaccctcaaaaca

SEQ ID NO: 168684 - DNA, 19 bp, Homo sapiens
  siRNA target sequence for GPI (NM_000175.2,873-891).
gaattgaccctcaaaacat

SEQ ID NO: 168685 - DNA, 19 bp, Homo sapiens
  siRNA target sequence for GPI (NM_000175.2,1070-1088).
ctgggtatctggtacatca

SEQ ID NO: 168686 - DNA, 19 bp, Homo sapiens
  siRNA target sequence for GPI (NM_000175.2,1073-1091).
ggtatctggtacatcaact

SEQ ID NO: 168687 - DNA, 19 bp, Homo sapiens
  siRNA target sequence for GPI (NM_000175.2,1257-1275).
ccaatggccagcatgcttt

SEQ ID NO: 168688 - DNA, 19 bp, Homo sapiens
  siRNA target sequence for GPI (NM_000175.2,1406-1424).
gccctgatgaggggaaaat

SEQ ID NO: 168689 - DNA, 19 bp, Homo sapiens
  siRNA target sequence for GPI (NM_000175.2,1409-1427).
ctgatgaggggaaaatcga

SEQ ID NO: 168690 - DNA, 19 bp, Homo sapiens
  siRNA target sequence for GPI (NM_000175.2,1492-1510).
gccacataaggtctttgaa

SEQ ID NO: 168691 - DNA, 19 bp, Homo sapiens
  siRNA target sequence for GPI (NM_000175.2,1518-1536).
gcccaaccaactctattgt

SEQ ID NO: 168692 - DNA, 19 bp, Homo sapiens
  siRNA target sequence for GPI (NM_000175.2,1520-1538).
ccaaccaactctattgtgt

SEQ ID NO: 168693 - DNA, 19 bp, Homo sapiens
  siRNA target sequence for GPI (NM_000175.2,1542-1560).
ccaagctcacaccattcat

SEQ ID NO: 168694 - DNA, 19 bp, Homo sapiens
  siRNA target sequence for GPI (NM_000175.2,1569-1587).
ccttggtcgccatgtatga

SEQ ID NO: 168695 - DNA, 19 bp, Homo sapiens
  siRNA target sequence for GPI (NM_000175.2,1578-1596).
ccatgtatgagcacaagat

SEQ ID NO: 168696 - DNA, 19 bp, Homo sapiens
  siRNA target sequence for GPI (NM_000175.2,1725-1743).
ctaccaatgggctcatcaa

SEQ ID NO: 168697 - DNA, 19 bp, Homo sapiens
  siRNA target sequence for IK (NM_006083.2,1699-1717).
cgccagtggaagaagatta

SEQ ID NO: 168698 - DNA, 19 bp, Homo sapiens
  siRNA target sequence for IL16 (NM_004513.3,496-514).
ggcactcccaaagtttaca

SEQ ID NO: 168699 - DNA, 19 bp, Homo sapiens
  siRNA target sequence for IL16 (NM_004513.3,497-515).
gcactcccaaagtttacaa

SEQ ID NO: 168700 - DNA, 19 bp, Homo sapiens
  siRNA target sequence for IL16 (NM_004513.3,573-591).
gtttcgccaaagcttgaaa

SEQ ID NO: 168701 - DNA, 19 bp, Homo sapiens
  siRNA target sequence for IL16 (NM_004513.3,577-595).
cgccaaagcttgaaaggtt

SEQ ID NO: 168702 - DNA, 19 bp, Homo sapiens
  siRNA target sequence for IL16 (NM_004513.3,979-997).
cggcagcccaatcagaaaa

SEQ ID NO: 168703 - DNA, 19 bp, Homo sapiens
  siRNA target sequence for IL16 (NM_004513.3,1040-1058).
cacaggctgaggaatctca

SEQ ID NO: 168704 - DNA, 19 bp, Homo sapiens
  siRNA target sequence for IL16 (NM_004513.3,1130-1148).
cgaagctacttgacgaaaa

SEQ ID NO: 168705 - DNA, 19 bp, Homo sapiens
  siRNA target sequence for IL16 (NM_004513.3,1151-1169).
ccagcaaactctattctat

SEQ ID NO: 168706 - DNA, 19 bp, Homo sapiens
  siRNA target sequence for IL16 (NM_004513.3,1182-1200).
gtcatcggctgtcatgaaa

SEQ ID NO: 168707 - DNA, 19 bp, Homo sapiens
  siRNA target sequence for IL16 (NM_004513.3,1187-1205).
cggctgtcatgaaatcctt

SEQ ID NO: 168708 - DNA, 19 bp, Homo sapiens
  siRNA target sequence for IL16 (NM_004513.3,1450-1468).
ctgctgagctcagaagaat

SEQ ID NO: 168709 - DNA, 19 bp, Homo sapiens
  siRNA target sequence for IL16 (NM_004513.3,1452-1470).
gctgagctcagaagaatta

SEQ ID NO: 168710 - DNA, 19 bp, Homo sapiens
  siRNA target sequence for IL16 (NM_004513.3,1530-1548).
catccatgtcaccatctta

SEQ ID NO: 168711 - DNA, 19 bp, Homo sapiens
  siRNA target sequence for IL16 (NM_004513.3,1621-1639).
gttcacagagtgtttccaa

SEQ ID NO: 168712 - DNA, 19 bp, Homo sapiens
  siRNA target sequence for IL16 (NM_004513.3,1650-1668).
ctcccaggaagggactatt

SEQ ID NO: 168713 - DNA, 19 bp, Homo sapiens
  siRNA target sequence for IL16 (NM_004513.3,1652-1670).
cccaggaagggactattca

SEQ ID NO: 168714 - DNA, 19 bp, Homo sapiens
  siRNA target sequence for IL16 (NM_004513.3,1676-1694).
gcaatgaggttctttccat

SEQ ID NO: 168715 - DNA, 19 bp, Homo sapiens
  siRNA target sequence for IL16 (NM_004513.3,1763-1781).
ccaggcaagctgtgattgt

SEQ ID NO: 168716 - DNA, 19 bp, Homo sapiens
  siRNA target sequence for IL16 (NM_004513.3,1848-1866).
ctctgcagccagtgatgtt

SEQ ID NO: 168717 - DNA, 19 bp, Homo sapiens
  siRNA target sequence for IL16 (NM_004513.3,1861-1879).
gatgtttctgtagaatcta

SEQ ID NO: 168718 - DNA, 19 bp, Homo sapiens
  siRNA target sequence for IL16 (NM_004513.3,1972-1990).
gacaagcctctcaccatta

SEQ ID NO: 168719 - DNA, 19 bp, Homo sapiens
  siRNA target sequence for IL16 (NM_004513.3,1985-2003).
ccattaacaggattttcaa

SEQ ID NO: 168720 - DNA, 19 bp, Homo sapiens
  siRNA target sequence for IL16 (NM_004513.3,2079-2097).
gggcctcacacggtttgaa

SEQ ID NO: 168721 - DNA, 19 bp, Homo sapiens
  siRNA target sequence for IL16 (NM_004513.3,2128-2146).
ggacctgtcacgattgtca

SEQ ID NO: 168722 - DNA, 19 bp, Homo sapiens
  siRNA target sequence for IL16 (NM_004513.3,2129-2147).
gacctgtcacgattgtcat

SEQ ID NO: 168723 - DNA, 19 bp, Homo sapiens
  siRNA target sequence for IL16 (NM_172217.1,295-313).
gcagaaaatctgcaaaatt

SEQ ID NO: 168724 - DNA, 19 bp, Homo sapiens
  siRNA target sequence for IL16 (NM_172217.1,328-346).
ggtccctgatgctctgtaa

SEQ ID NO: 168725 - DNA, 19 bp, Homo sapiens
  siRNA target sequence for IL16 (NM_172217.1,332-350).
cctgatgctctgtaatgct

SEQ ID NO: 168726 - DNA, 19 bp, Homo sapiens
  siRNA target sequence for IL16 (NM_172217.1,367-385).
gctctagccctgatgagaa

SEQ ID NO: 168727 - DNA, 19 bp, Homo sapiens
  siRNA target sequence for IL16 (NM_172217.1,368-386).
ctctagccctgatgagaaa

SEQ ID NO: 168728 - DNA, 19 bp, Homo sapiens
  siRNA target sequence for IL16 (NM_172217.1,479-497).
cagcagtgttcctgatcta

SEQ ID NO: 168729 - DNA, 19 bp, Homo sapiens
  siRNA target sequence for IL16 (NM_172217.1,524-542).
ccaagcagctgggaatgat

SEQ ID NO: 168730 - DNA, 19 bp, Homo sapiens
  siRNA target sequence for IL16 (NM_172217.1,677-695).
caactcaaccagtgttaat

SEQ ID NO: 168731 - DNA, 19 bp, Homo sapiens
  siRNA target sequence for IL16 (NM_172217.1,698-716).
ctattgcacaagagaaatt

SEQ ID NO: 168732 - DNA, 19 bp, Homo sapiens
  siRNA target sequence for IL16 (NM_172217.1,709-727).
gagaaattgattttccaat

SEQ ID NO: 168733 - DNA, 19 bp, Homo sapiens
  siRNA target sequence for IL16 (NM_172217.1,785-803).
gaagtccctctctcaacaa

SEQ ID NO: 168734 - DNA, 19 bp, Homo sapiens
  siRNA target sequence for IL16 (NM_172217.1,993-1011).
gggatttacgtcaaaacca

SEQ ID NO: 168735 - DNA, 19 bp, Homo sapiens
  siRNA target sequence for IL16 (NM_172217.1,994-1012).
ggatttacgtcaaaaccat

SEQ ID NO: 168736 - DNA, 19 bp, Homo sapiens
  siRNA target sequence for IL16 (NM_172217.1,995-1013).
gatttacgtcaaaaccatt

SEQ ID NO: 168737 - DNA, 19 bp, Homo sapiens
  siRNA target sequence for IL16 (NM_172217.1,1001-1019).
cgtcaaaaccatttttgca

SEQ ID NO: 168738 - DNA, 19 bp, Homo sapiens
  siRNA target sequence for IL16 (NM_172217.1,1087-1105).
caatggctggactaacaca

SEQ ID NO: 168739 - DNA, 19 bp, Homo sapiens
  siRNA target sequence for IL16 (NM_172217.1,1297-1315).
gcaccgccaagcccaatta

SEQ ID NO: 168740 - DNA, 19 bp, Homo sapiens
  siRNA target sequence for IL16 (NM_172217.1,1301-1319).
cgccaagcccaattacaga

SEQ ID NO: 168741 - DNA, 19 bp, Homo sapiens
  siRNA target sequence for IL16 (NM_172217.1,1465-1483).
ggtgtggggacgagattgt

SEQ ID NO: 168742 - DNA, 19 bp, Homo sapiens
  siRNA target sequence for IL16 (NM_172217.1,1508-1526).
ctgcctgacgctcaatgaa

SEQ ID NO: 168743 - DNA, 19 bp, Homo sapiens
  siRNA target sequence for IL16 (NM_172217.1,1510-1528).
gcctgacgctcaatgaagt

SEQ ID NO: 168744 - DNA, 19 bp, Homo sapiens
  siRNA target sequence for IL16 (NM_172217.1,1771-1789).
gggctcagaaggtcatgat

SEQ ID NO: 168745 - DNA, 19 bp, Homo sapiens
  siRNA target sequence for IL16 (NM_172217.1,1919-1937).
gccagtggtgctttctata

SEQ ID NO: 168746 - DNA, 19 bp, Homo sapiens
  siRNA target sequence for IL16 (NM_172217.1,2185-2203).
cccaaacatccccgataaa

SEQ ID NO: 168747 - DNA, 19 bp, Homo sapiens
  siRNA target sequence for IL16 (NM_172217.1,2186-2204).
ccaaacatccccgataaaa

SEQ ID NO: 168748 - DNA, 19 bp, Homo sapiens
  siRNA target sequence for IL16 (NM_172217.1,2223-2241).
caggctcggatggactata

SEQ ID NO: 168749 - DNA, 19 bp, Homo sapiens
  siRNA target sequence for IL16 (NM_172217.1,2226-2244).
gctcggatggactatagct

SEQ ID NO: 168750 - DNA, 19 bp, Homo sapiens
  siRNA target sequence for IL16 (NM_172217.1,2227-2245).
ctcggatggactatagctt

SEQ ID NO: 168751 - DNA, 19 bp, Homo sapiens
  siRNA target sequence for IL16 (NM_172217.1,3962-3980).
caagatccctgtaaatatt

SEQ ID NO: 168752 - DNA, 19 bp, Homo sapiens
  siRNA target sequence for IL16 (NM_172217.1,3965-3983).
gatccctgtaaatattgtt

SEQ ID NO: 168753 - DNA, 19 bp, Homo sapiens
  siRNA target sequence for IL17 (NM_002190.2,106-124).
gtgaaggcaggaatcacaa

SEQ ID NO: 168754 - DNA, 19 bp, Homo sapiens
  siRNA target sequence for IL17 (NM_002190.2,184-202).
gtcaacctgaacatccata

SEQ ID NO: 168755 - DNA, 19 bp, Homo sapiens
  siRNA target sequence for IL17 (NM_002190.2,198-216).
ccataaccggaataccaat

SEQ ID NO: 168756 - DNA, 19 bp, Homo sapiens
  siRNA target sequence for IL17 (NM_002190.2,199-217).
cataaccggaataccaata

SEQ ID NO: 168757 - DNA, 19 bp, Homo sapiens
  siRNA target sequence for IL17 (NM_002190.2,204-222).
ccggaataccaataccaat

SEQ ID NO: 168758 - DNA, 19 bp, Homo sapiens
  siRNA target sequence for IL17 (NM_002190.2,223-241).
cccaaaaggtcctcagatt

SEQ ID NO: 168759 - DNA, 19 bp, Homo sapiens
  siRNA target sequence for IL17 (NM_002190.2,230-248).
ggtcctcagattactacaa

SEQ ID NO: 168760 - DNA, 19 bp, Homo sapiens
  siRNA target sequence for IL17 (NM_002190.2,361-379).
gtggactaccacatgaact

SEQ ID NO: 168761 - DNA, 19 bp, Homo sapiens
  siRNA target sequence for IL17C (NM_013278.3,439-457).
gtgcagaggctgtatcgat

SEQ ID NO: 168762 - DNA, 19 bp, Homo sapiens
  siRNA target sequence for IL17F (NM_052872.2,23-41).
gcccagccatggtcaagta

SEQ ID NO: 168763 - DNA, 19 bp, Homo sapiens
  siRNA target sequence for IL17F (NM_052872.2,99-117).
ccccaaagtaggacatact

SEQ ID NO: 168764 - DNA, 19 bp, Homo sapiens
  siRNA target sequence for IL17F (NM_052872.2,100-118).
cccaaagtaggacatactt

SEQ ID NO: 168765 - DNA, 19 bp, Homo sapiens
  siRNA target sequence for IL17F (NM_052872.2,101-119).
ccaaagtaggacatacttt

SEQ ID NO: 168766 - DNA, 19 bp, Homo sapiens
  siRNA target sequence for IL17F (NM_052872.2,148-166).
gtgccaggaggtagtatga

SEQ ID NO: 168767 - DNA, 19 bp, Homo sapiens
  siRNA target sequence for IL17F (NM_052872.2,158-176).
gtagtatgaagcttgacat

SEQ ID NO: 168768 - DNA, 19 bp, Homo sapiens
  siRNA target sequence for IL17F (NM_052872.2,275-293).
ggtacccctcggaagttgt

SEQ ID NO: 168769 - DNA, 19 bp, Homo sapiens
  siRNA target sequence for IL19 (NM_013371.2,965-983).
ggctcctgggtacaatact

SEQ ID NO: 168770 - DNA, 19 bp, Homo sapiens
  siRNA target sequence for IL19 (NM_013371.2,969-987).
cctgggtacaatactgata

SEQ ID NO: 168771 - DNA, 19 bp, Homo sapiens
  siRNA target sequence for IL19 (NM_013371.2,970-988).
ctgggtacaatactgatat

SEQ ID NO: 168772 - DNA, 19 bp, Homo sapiens
  siRNA target sequence for IL19 (NM_013371.2,973-991).
ggtacaatactgatattgt

SEQ ID NO: 168773 - DNA, 19 bp, Homo sapiens
  siRNA target sequence for IL19 (NM_013371.2,1032-1050).
cacagacatgcaccatata

SEQ ID NO: 168774 - DNA, 19 bp, Homo sapiens
  siRNA target sequence for IL19 (NM_013371.2,1034-1052).
cagacatgcaccatataga

SEQ ID NO: 168775 - DNA, 19 bp, Homo sapiens
  siRNA target sequence for IL19 (NM_013371.2,1140-1158).
gatcattaagcccttagat

SEQ ID NO: 168776 - DNA, 19 bp, Homo sapiens
  siRNA target sequence for IL19 (NM_013371.2,1222-1240).
gagccaaaccccaaaatct

SEQ ID NO: 168777 - DNA, 19 bp, Homo sapiens
  siRNA target sequence for IL19 (NM_013371.2,1230-1248).
ccccaaaatcttgagaaaa

SEQ ID NO: 168778 - DNA, 19 bp, Homo sapiens
  siRNA target sequence for IL19 (NM_013371.2,1352-1370).
gagtcatccatgacaacta

SEQ ID NO: 168779 - DNA, 19 bp, Homo sapiens
  siRNA target sequence for IL19 (NM_013371.2,1386-1404).
ccacgctgctgccattaaa

SEQ ID NO: 168780 - DNA, 19 bp, Homo sapiens
  siRNA target sequence for IL19 (NM_013371.2,1412-1430).
gagagctcgacgtctttct

SEQ ID NO: 168781 - DNA, 19 bp, Homo sapiens
  siRNA target sequence for IL19 (NM_013371.2,1425-1443).
ctttctagcctggattaat

SEQ ID NO: 168782 - DNA, 19 bp, Homo sapiens
  siRNA target sequence for IL19 (NM_013371.2,1436-1454).
ggattaataagaatcatga

SEQ ID NO: 168783 - DNA, 19 bp, Homo sapiens
  siRNA target sequence for IL19 (NM_153758.1,128-146).
gttccacggggcatgaagt

SEQ ID NO: 168784 - DNA, 19 bp, Homo sapiens
  siRNA target sequence for IL20 (NM_018724.2,114-132).
ggactgaagacactcaatt

SEQ ID NO: 168785 - DNA, 19 bp, Homo sapiens
  siRNA target sequence for IL20 (NM_018724.2,115-133).
gactgaagacactcaattt

SEQ ID NO: 168786 - DNA, 19 bp, Homo sapiens
  siRNA target sequence for IL20 (NM_018724.2,158-176).
ccttcaggaaatacgaaat

SEQ ID NO: 168787 - DNA, 19 bp, Homo sapiens
  siRNA target sequence for IL20 (NM_018724.2,162-180).
caggaaatacgaaatggat

SEQ ID NO: 168788 - DNA, 19 bp, Homo sapiens
  siRNA target sequence for IL20 (NM_018724.2,221-239).
cattgacatcagaatctta

SEQ ID NO: 168789 - DNA, 19 bp, Homo sapiens
  siRNA target sequence for IL20 (NM_018724.2,287-305).
cctcctgcgccatttgcta

SEQ ID NO: 168790 - DNA, 19 bp, Homo sapiens
  siRNA target sequence for IL20 (NM_018724.2,311-329).
ctatctggacagggtattt

SEQ ID NO: 168791 - DNA, 19 bp, Homo sapiens
  siRNA target sequence for IL20 (NM_018724.2,315-333).
ctggacagggtatttaaaa

SEQ ID NO: 168792 - DNA, 19 bp, Homo sapiens
  siRNA target sequence for IL20 (NM_018724.2,341-359).
gacccctgaccattatact

SEQ ID NO: 168793 - DNA, 19 bp, Homo sapiens
  siRNA target sequence for IL20 (NM_018724.2,378-396).
ctcgccaattcctttctta

SEQ ID NO: 168794 - DNA, 19 bp, Homo sapiens
  siRNA target sequence for IL20 (NM_018724.2,526-544).
ctttgggggaactagacat

SEQ ID NO: 168795 - DNA, 19 bp, Homo sapiens
  siRNA target sequence for IL21 (NM_021803.1,107-125).
gggacactggtccacaaat

SEQ ID NO: 168796 - DNA, 19 bp, Homo sapiens
  siRNA target sequence for IL21 (NM_021803.1,109-127).
gacactggtccacaaatca

SEQ ID NO: 168797 - DNA, 19 bp, Homo sapiens
  siRNA target sequence for IL21 (NM_021803.1,140-158).
caagatcgccacatgatta

SEQ ID NO: 168798 - DNA, 19 bp, Homo sapiens
  siRNA target sequence for IL21 (NM_021803.1,143-161).
gatcgccacatgattagaa

SEQ ID NO: 168799 - DNA, 19 bp, Homo sapiens
  siRNA target sequence for IL21 (NM_021803.1,159-177).
gaatgcgtcaacttataga

SEQ ID NO: 168800 - DNA, 19 bp, Homo sapiens
  siRNA target sequence for IL21 (NM_021803.1,163-181).
gcgtcaacttatagatatt

SEQ ID NO: 168801 - DNA, 19 bp, Homo sapiens
  siRNA target sequence for IL21 (NM_021803.1,165-183).
gtcaacttatagatattgt

SEQ ID NO: 168802 - DNA, 19 bp, Homo sapiens
  siRNA target sequence for IL21 (NM_021803.1,231-249).
cagctccagaagatgtaga

SEQ ID NO: 168803 - DNA, 19 bp, Homo sapiens
  siRNA target sequence for IL21 (NM_021803.1,237-255).
cagaagatgtagagacaaa

SEQ ID NO: 168804 - DNA, 19 bp, Homo sapiens
  siRNA target sequence for IL21 (NM_021803.1,286-304).
gaaggcccaactaaagtca

SEQ ID NO: 168805 - DNA, 19 bp, Homo sapiens
  siRNA target sequence for IL21 (NM_021803.1,420-438).
gtgattcttatgagaaaaa

SEQ ID NO: 168806 - DNA, 19 bp, Homo sapiens
  siRNA target sequence for IL24 (NM_006850.2,295-313).
gcaaagcctgtggacttta

SEQ ID NO: 168807 - DNA, 19 bp, Homo sapiens
  siRNA target sequence for IL24 (NM_006850.2,643-661).
ctaccacaatagaacagtt

SEQ ID NO: 168808 - DNA, 19 bp, Homo sapiens
  siRNA target sequence for IL24 (NM_006850.2,725-743).
ctgcaacccagtcaagaaa

SEQ ID NO: 168809 - DNA, 19 bp, Homo sapiens
  siRNA target sequence for IL24 (NM_006850.2,727-745).
gcaacccagtcaagaaaat

SEQ ID NO: 168810 - DNA, 19 bp, Homo sapiens
  siRNA target sequence for IL24 (NM_006850.2,794-812).
cggagagcattcaaacagt

SEQ ID NO: 168811 - DNA, 19 bp, Homo sapiens
  siRNA target sequence for IL26 (NM_018402.1,58-76).
ggtgtgggttgctgttagt

SEQ ID NO: 168812 - DNA, 19 bp, Homo sapiens
  siRNA target sequence for IL26 (NM_018402.1,96-114).
gccaagcacaagcaatctt

SEQ ID NO: 168813 - DNA, 19 bp, Homo sapiens
  siRNA target sequence for IL26 (NM_018402.1,159-177).
gttgacgctctctatatca

SEQ ID NO: 168814 - DNA, 19 bp, Homo sapiens
  siRNA target sequence for IL26 (NM_018402.1,180-198).
gcagcatggctcaaagcaa

SEQ ID NO: 168815 - DNA, 19 bp, Homo sapiens
  siRNA target sequence for IL26 (NM_018402.1,204-222).
ccagaagaccgcataaaaa

SEQ ID NO: 168816 - DNA, 19 bp, Homo sapiens
  siRNA target sequence for IL26 (NM_018402.1,205-223).
cagaagaccgcataaaaaa

SEQ ID NO: 168817 - DNA, 19 bp, Homo sapiens
  siRNA target sequence for IL26 (NM_018402.1,212-230).
ccgcataaaaaatatacga

SEQ ID NO: 168818 - DNA, 19 bp, Homo sapiens
  siRNA target sequence for IL26 (NM_018402.1,213-231).
cgcataaaaaatatacgat

SEQ ID NO: 168819 - DNA, 19 bp, Homo sapiens
  siRNA target sequence for IL26 (NM_018402.1,285-303).
cagcttctgtccttcttca

SEQ ID NO: 168820 - DNA, 19 bp, Homo sapiens
  siRNA target sequence for IL26 (NM_018402.1,490-508).
ccatcagtgaactggatat

SEQ ID NO: 168821 - DNA, 19 bp, Homo sapiens
  siRNA target sequence for IL26 (NM_018402.1,491-509).
catcagtgaactggatatt

SEQ ID NO: 168822 - DNA, 19 bp, Homo sapiens
  siRNA target sequence for MDK (NM_002391.2,81-99).
ccgcggtcgccaaaaagaa

SEQ ID NO: 168823 - DNA, 19 bp, Homo sapiens
  siRNA target sequence for MDK (NM_002391.2,82-100).
cgcggtcgccaaaaagaaa

SEQ ID NO: 168824 - DNA, 19 bp, Homo sapiens
  siRNA target sequence for MDK (NM_002391.2,266-284).
ggagccgactgcaagtaca

SEQ ID NO: 168825 - DNA, 19 bp, Homo sapiens
  siRNA target sequence for MDK (NM_002391.2,267-285).
gagccgactgcaagtacaa

SEQ ID NO: 168826 - DNA, 19 bp, Homo sapiens
  siRNA target sequence for MIF (NM_002415.1,101-119).
ccgatgttcatcgtaaaca

SEQ ID NO: 168827 - DNA, 19 bp, Homo sapiens
  siRNA target sequence for MIF (NM_002415.1,369-387).
gcccggacagggtctacat

SEQ ID NO: 168828 - DNA, 19 bp, Homo sapiens
  siRNA target sequence for MIF (NM_002415.1,371-389).
ccggacagggtctacatca

SEQ ID NO: 168829 - DNA, 19 bp, Homo sapiens
  siRNA target sequence for MIF (NM_002415.1,374-392).
gacagggtctacatcaact

SEQ ID NO: 168830 - DNA, 19 bp, Homo sapiens
  siRNA target sequence for MIF (NM_002415.1,378-396).
gggtctacatcaactatta

SEQ ID NO: 168831 - DNA, 19 bp, Homo sapiens
  siRNA target sequence for NODAL (NM_018055.3,211-229).
cagaactggacgtttgctt

SEQ ID NO: 168832 - DNA, 19 bp, Homo sapiens
  siRNA target sequence for NODAL (NM_018055.3,213-231).
gaactggacgtttgctttt

SEQ ID NO: 168833 - DNA, 19 bp, Homo sapiens
  siRNA target sequence for NODAL (NM_018055.3,218-236).
ggacgtttgcttttgactt

SEQ ID NO: 168834 - DNA, 19 bp, Homo sapiens
  siRNA target sequence for NODAL (NM_018055.3,319-337).
ggctcacttgccattgaga

SEQ ID NO: 168835 - DNA, 19 bp, Homo sapiens
  siRNA target sequence for NODAL (NM_018055.3,383-401).
gcttagagcggtttcagat

SEQ ID NO: 168836 - DNA, 19 bp, Homo sapiens
  siRNA target sequence for NODAL (NM_018055.3,566-584).
ccaccaatgtgctccttat

SEQ ID NO: 168837 - DNA, 19 bp, Homo sapiens
  siRNA target sequence for NODAL (NM_018055.3,701-719).
ggcaccgtcgacatcactt

SEQ ID NO: 168838 - DNA, 19 bp, Homo sapiens
  siRNA target sequence for NODAL (NM_018055.3,782-800).
ggggctcctggatcatcta

SEQ ID NO: 168839 - DNA, 19 bp, Homo sapiens
  siRNA target sequence for NODAL (NM_018055.3,869-887).
cgaccaaccatgcatacat

SEQ ID NO: 168840 - DNA, 19 bp, Homo sapiens
  siRNA target sequence for NODAL (NM_018055.3,889-907).
cagagtctgctgaaacgtt

SEQ ID NO: 168841 - DNA, 19 bp, Homo sapiens
  siRNA target sequence for NODAL (NM_018055.3,919-937).
cgagtcccttccacttgtt

SEQ ID NO: 168842 - DNA, 19 bp, Homo sapiens
  siRNA target sequence for NODAL (NM_018055.3,959-977).
cgctgagcatgctgtatgt

SEQ ID NO: 168843 - DNA, 19 bp, Homo sapiens
  siRNA target sequence for NODAL (NM_018055.3,965-983).
gcatgctgtatgtggataa

SEQ ID NO: 168844 - DNA, 19 bp, Homo sapiens
  siRNA target sequence for NODAL (NM_018055.3,966-984).
catgctgtatgtggataat

SEQ ID NO: 168845 - DNA, 19 bp, Homo sapiens
  siRNA target sequence for NODAL (NM_018055.3,986-1004).
gcagagtgctcctagatca

SEQ ID NO: 168846 - DNA, 19 bp, Homo sapiens
  siRNA target sequence for NODAL (NM_018055.3,993-1011).
gctcctagatcaccataaa

SEQ ID NO: 168847 - DNA, 19 bp, Homo sapiens
  siRNA target sequence for NODAL (NM_018055.3,997-1015).
ctagatcaccataaagaca

SEQ ID NO: 168848 - DNA, 19 bp, Homo sapiens
  siRNA target sequence for PBEF (NM_005746.1,78-96).
ctacaaggttactcactat

SEQ ID NO: 168849 - DNA, 19 bp, Homo sapiens
  siRNA target sequence for PGLYRP (NM_005091.1,343-361).
gagaagacgggctcgtata

SEQ ID NO: 168850 - DNA, 19 bp, Homo sapiens
  siRNA target sequence for PGLYRP (NM_005091.1,523-541).
ccctgaggtccaactatgt

SEQ ID NO: 168851 - DNA, 19 bp, Homo sapiens
  siRNA target sequence for PLAB (NM_004864.1,901-919).
gtcgctccagacctatgat

SEQ ID NO: 168852 - DNA, 19 bp, Homo sapiens
  siRNA target sequence for PLAB (NM_004864.1,903-921).
cgctccagacctatgatga

SEQ ID NO: 168853 - DNA, 19 bp, Homo sapiens
  siRNA target sequence for PLAB (NM_004864.1,920-938).
gacttgttagccaaagact

SEQ ID NO: 168854 - DNA, 19 bp, Homo sapiens
  siRNA target sequence for PTN (NM_002825.4,375-393).
gcagcgtcgaaaatttgca

SEQ ID NO: 168855 - DNA, 19 bp, Homo sapiens
  siRNA target sequence for PTN (NM_002825.4,395-413).
ctgccttcttggcattcat

SEQ ID NO: 168856 - DNA, 19 bp, Homo sapiens
  siRNA target sequence for PTN (NM_002825.4,397-415).
gccttcttggcattcattt

SEQ ID NO: 168857 - DNA, 19 bp, Homo sapiens
  siRNA target sequence for PTN (NM_002825.4,568-586).
ggagctgagtgcaagcaaa

SEQ ID NO: 168858 - DNA, 19 bp, Homo sapiens
  siRNA target sequence for PTN (NM_002825.4,572-590).
ctgagtgcaagcaaaccat

SEQ ID NO: 168859 - DNA, 19 bp, Homo sapiens
  siRNA target sequence for PTN (NM_002825.4,660-678).
ccaggcctggggagaatgt

SEQ ID NO: 168860 - DNA, 19 bp, Homo sapiens
  siRNA target sequence for PTN (NM_002825.4,796-814).
cctcaagcagaatctaaga

SEQ ID NO: 168861 - DNA, 19 bp, Homo sapiens
  siRNA target sequence for SCGB1A1 (NM_003357.3,153-171).
ggacacaccctccagttat

SEQ ID NO: 168862 - DNA, 19 bp, Homo sapiens
  siRNA target sequence for SCGB1A1 (NM_003357.3,263-281).
ccagagaaagcatcattaa

SEQ ID NO: 168863 - DNA, 19 bp, Homo sapiens
  siRNA target sequence for SCGB1A1 (NM_003357.3,276-294).
cattaagctcatggaaaaa

SEQ ID NO: 168864 - DNA, 19 bp, Homo sapiens
  siRNA target sequence for SCGB1A1 (NM_003357.3,299-317).
cccaaagctcactgtgtaa

SEQ ID NO: 168865 - DNA, 19 bp, Homo sapiens
  siRNA target sequence for SCGB1A1 (NM_003357.3,300-318).
ccaaagctcactgtgtaat

SEQ ID NO: 168866 - DNA, 19 bp, Homo sapiens
  siRNA target sequence for SCGB1A1 (NM_003357.3,301-319).
caaagctcactgtgtaatt

SEQ ID NO: 168867 - DNA, 19 bp, Homo sapiens
  siRNA target sequence for SPP1 (NM_000582.2,207-225).
ctgtgccataccagttaaa

SEQ ID NO: 168868 - DNA, 19 bp, Homo sapiens
  siRNA target sequence for SPP1 (NM_000582.2,209-227).
gtgccataccagttaaaca

SEQ ID NO: 168869 - DNA, 19 bp, Homo sapiens
  siRNA target sequence for SPP1 (NM_000582.2,335-353).
cacagacccttccaagtaa

SEQ ID NO: 168870 - DNA, 19 bp, Homo sapiens
  siRNA target sequence for SPP1 (NM_000582.2,337-355).
cagacccttccaagtaagt

SEQ ID NO: 168871 - DNA, 19 bp, Homo sapiens
  siRNA target sequence for SPP1 (NM_000582.2,346-364).
ccaagtaagtccaacgaaa

SEQ ID NO: 168872 - DNA, 19 bp, Homo sapiens
  siRNA target sequence for SPP1 (NM_000582.2,435-453).
ctcgaacgactctgatgat

SEQ ID NO: 168873 - DNA, 19 bp, Homo sapiens
  siRNA target sequence for SPP1 (NM_000582.2,438-456).
gaacgactctgatgatgta

SEQ ID NO: 168874 - DNA, 19 bp, Homo sapiens
  siRNA target sequence for SPP1 (NM_000582.2,441-459).
cgactctgatgatgtagat

SEQ ID NO: 168875 - DNA, 19 bp, Homo sapiens
  siRNA target sequence for SPP1 (NM_000582.2,541-559).
ctgccagcaaccgaagttt

SEQ ID NO: 168876 - DNA, 19 bp, Homo sapiens
  siRNA target sequence for SPP1 (NM_000582.2,573-591).
ccccacagtagacacatat

SEQ ID NO: 168877 - DNA, 19 bp, Homo sapiens
  siRNA target sequence for SPP1 (NM_000582.2,576-594).
cacagtagacacatatgat

SEQ ID NO: 168878 - DNA, 19 bp, Homo sapiens
  siRNA target sequence for SPP1 (NM_000582.2,619-637).
ggactgaggtcaaaatcta

SEQ ID NO: 168879 - DNA, 19 bp, Homo sapiens
  siRNA target sequence for SPP1 (NM_000582.2,626-644).
ggtcaaaatctaagaagtt

SEQ ID NO: 168880 - DNA, 19 bp, Homo sapiens
  siRNA target sequence for SPP1 (NM_000582.2,753-771).
cctgaacgcgccttctgat

SEQ ID NO: 168881 - DNA, 19 bp, Homo sapiens
  siRNA target sequence for SPP1 (NM_000582.2,754-772).
ctgaacgcgccttctgatt

SEQ ID NO: 168882 - DNA, 19 bp, Homo sapiens
  siRNA target sequence for SPP1 (NM_000582.2,780-798).
ccgtgggaaggacagttat

SEQ ID NO: 168883 - DNA, 19 bp, Homo sapiens
  siRNA target sequence for SPP1 (NM_000582.2,782-800).
gtgggaaggacagttatga

SEQ ID NO: 168884 - DNA, 19 bp, Homo sapiens
  siRNA target sequence for SPP1 (NM_000582.2,841-859).
cacaagcagtccagattat

SEQ ID NO: 168885 - DNA, 19 bp, Homo sapiens
  siRNA target sequence for SPP1 (NM_000582.2,891-909).
gcattccgatgtgattgat

SEQ ID NO: 168886 - DNA, 19 bp, Homo sapiens
  siRNA target sequence for SPP1 (NM_000582.2,892-910).
cattccgatgtgattgata

SEQ ID NO: 168887 - DNA, 19 bp, Homo sapiens
  siRNA target sequence for SPP1 (NM_000582.2,923-941).
ccaaagtcagccgtgaatt

SEQ ID NO: 168888 - DNA, 19 bp, Homo sapiens
  siRNA target sequence for SPP1 (NM_000582.2,978-996).
ggttgtagaccccaaaagt

SEQ ID NO: 168889 - DNA, 19 bp, Homo sapiens
  siRNA target sequence for SPP1 (NM_000582.2,979-997).
gttgtagaccccaaaagta

SEQ ID NO: 168890 - DNA, 19 bp, Homo sapiens
  siRNA target sequence for SPP1 (NM_000582.2,1003-1021).
gaagataaacacctgaaat

SEQ ID NO: 168891 - DNA, 19 bp, Homo sapiens
  siRNA target sequence for SPP1 (NM_000582.2,1025-1043).
gtatttctcatgaattaga

SEQ ID NO: 168892 - DNA, 19 bp, Homo sapiens
  siRNA target sequence for SPP1 (NM_000582.2,1048-1066).
gcatcttctgaggtcaatt

SEQ ID NO: 168893 - DNA, 19 bp, Homo sapiens
  siRNA target sequence for THPO (NM_000460.2,402-420).
cctgctgtggactttagct

SEQ ID NO: 168894 - DNA, 19 bp, Homo sapiens
  siRNA target sequence for THPO (NM_000460.2,816-834).
ggattgttggagacaaact

SEQ ID NO: 168895 - DNA, 19 bp, Homo sapiens
  siRNA target sequence for THPO (NM_000460.2,961-979).
ggatacacgaactcttgaa

SEQ ID NO: 168896 - DNA, 19 bp, Homo sapiens
  siRNA target sequence for THPO (NM_000460.2,966-984).
cacgaactcttgaatggaa

SEQ ID NO: 168897 - DNA, 19 bp, Homo sapiens
  siRNA target sequence for THPO (NM_000460.2,1110-1128).
cctcctactggacagtata

SEQ ID NO: 168898 - DNA, 19 bp, Homo sapiens
  siRNA target sequence for TNFRSF11B (NM_002546.2,268-286).
gctgcgcgctcgtgtttct

SEQ ID NO: 168899 - DNA, 19 bp, Homo sapiens
  siRNA target sequence for TNFRSF11B (NM_002546.2,304-322).
ggaccacccaggaaacgtt

SEQ ID NO: 168900 - DNA, 19 bp, Homo sapiens
  siRNA target sequence for TNFRSF11B (NM_002546.2,328-346).
caaagtaccttcattatga

SEQ ID NO: 168901 - DNA, 19 bp, Homo sapiens
  siRNA target sequence for TNFRSF11B (NM_002546.2,365-383).
gctgttgtgtgacaaatgt

SEQ ID NO: 168902 - DNA, 19 bp, Homo sapiens
  siRNA target sequence for TNFRSF11B (NM_002546.2,388-406).
ctggtacctacctaaaaca

SEQ ID NO: 168903 - DNA, 19 bp, Homo sapiens
  siRNA target sequence for TNFRSF11B (NM_002546.2,391-409).
gtacctacctaaaacaaca

SEQ ID NO: 168904 - DNA, 19 bp, Homo sapiens
  siRNA target sequence for TNFRSF11B (NM_002546.2,442-460).
cttgccctgaccactacta

SEQ ID NO: 168905 - DNA, 19 bp, Homo sapiens
  siRNA target sequence for TNFRSF11B (NM_002546.2,478-496).
ccagtgacgagtgtctata

SEQ ID NO: 168906 - DNA, 19 bp, Homo sapiens
  siRNA target sequence for TNFRSF11B (NM_002546.2,580-598).
ggcgctaccttgagataga

SEQ ID NO: 168907 - DNA, 19 bp, Homo sapiens
  siRNA target sequence for TNFRSF11B (NM_002546.2,582-600).
cgctaccttgagatagagt

SEQ ID NO: 168908 - DNA, 19 bp, Homo sapiens
  siRNA target sequence for TNFRSF11B (NM_002546.2,651-669).
ggaaccccagagcgaaata

SEQ ID NO: 168909 - DNA, 19 bp, Homo sapiens
  siRNA target sequence for TNFRSF11B (NM_002546.2,655-673).
ccccagagcgaaatacagt

SEQ ID NO: 168910 - DNA, 19 bp, Homo sapiens
  siRNA target sequence for TNFRSF11B (NM_002546.2,693-711).
gggttcttctcaaatgaga

SEQ ID NO: 168911 - DNA, 19 bp, Homo sapiens
  siRNA target sequence for TNFRSF11B (NM_002546.2,826-844).
ctcaaaaatgtggaataga

SEQ ID NO: 168912 - DNA, 19 bp, Homo sapiens
  siRNA target sequence for TNFRSF11B (NM_002546.2,985-1003).
gctcacaagaacagacttt

SEQ ID NO: 168913 - DNA, 19 bp, Homo sapiens
  siRNA target sequence for TNFRSF11B (NM_002546.2,1013-1031).
gaagttatggaaacatcaa

SEQ ID NO: 168914 - DNA, 19 bp, Homo sapiens
  siRNA target sequence for TNFRSF11B (NM_002546.2,1068-1086).
gatattgacctctgtgaaa

SEQ ID NO: 168915 - DNA, 19 bp, Homo sapiens
  siRNA target sequence for TNFRSF11B (NM_002546.2,1134-1152).
cttcgtagcttgatggaaa

SEQ ID NO: 168916 - DNA, 19 bp, Homo sapiens
  siRNA target sequence for TNFRSF11B (NM_002546.2,1138-1156).
gtagcttgatggaaagctt

SEQ ID NO: 168917 - DNA, 19 bp, Homo sapiens
  siRNA target sequence for TNFRSF11B (NM_002546.2,1153-1171).
gcttaccgggaaagaaagt

SEQ ID NO: 168918 - DNA, 19 bp, Homo sapiens
  siRNA target sequence for TNFRSF11B (NM_002546.2,1236-1254).
ctcagtttgtggcgaataa

SEQ ID NO: 168919 - DNA, 19 bp, Homo sapiens
  siRNA target sequence for TNFRSF11B (NM_002546.2,1238-1256).
cagtttgtggcgaataaaa

SEQ ID NO: 168920 - DNA, 19 bp, Homo sapiens
  siRNA target sequence for TNFRSF11B (NM_002546.2,1273-1291).
ccttgaagggcctaatgca

SEQ ID NO: 168921 - DNA, 19 bp, Homo sapiens
  siRNA target sequence for TNFRSF11B (NM_002546.2,1282-1300).
gcctaatgcacgcactaaa

SEQ ID NO: 168922 - DNA, 19 bp, Homo sapiens
  siRNA target sequence for TNFRSF11B (NM_002546.2,1293-1311).
gcactaaagcactcaaaga

SEQ ID NO: 168923 - DNA, 19 bp, Homo sapiens
  siRNA target sequence for TNFRSF11B (NM_002546.2,1437-1455).
gtaaaaataagctgcttat

SEQ ID NO: 168924 - DNA, 19 bp, Homo sapiens
  siRNA target sequence for TNFSF18 (NM_005092.2,47-65).
gcctttaagccattcaaga

SEQ ID NO: 168925 - DNA, 19 bp, Homo sapiens
  siRNA target sequence for TNFSF18 (NM_005092.2,100-118).
ggctcttttgctcaatagt

SEQ ID NO: 168926 - DNA, 19 bp, Homo sapiens
  siRNA target sequence for TNFSF18 (NM_005092.2,101-119).
gctcttttgctcaatagtt

SEQ ID NO: 168927 - DNA, 19 bp, Homo sapiens
  siRNA target sequence for TNFSF18 (NM_005092.2,112-130).
caatagttatgttgctatt

SEQ ID NO: 168928 - DNA, 19 bp, Homo sapiens
  siRNA target sequence for TNFSF18 (NM_005092.2,117-135).
gttatgttgctatttcttt

SEQ ID NO: 168929 - DNA, 19 bp, Homo sapiens
  siRNA target sequence for TNFSF18 (NM_005092.2,139-157).
ccttcagttggctaatctt

SEQ ID NO: 168930 - DNA, 19 bp, Homo sapiens
  siRNA target sequence for TNFSF18 (NM_005092.2,188-206).
gccctgtatggctaagttt

SEQ ID NO: 168931 - DNA, 19 bp, Homo sapiens
  siRNA target sequence for TNFSF18 (NM_005092.2,207-225).
ggaccattaccctcaaaat

SEQ ID NO: 168932 - DNA, 19 bp, Homo sapiens
  siRNA target sequence for TNFSF18 (NM_005092.2,243-261).
gaacctccttgcgtgaata

SEQ ID NO: 168933 - DNA, 19 bp, Homo sapiens
  siRNA target sequence for TNFSF18 (NM_005092.2,324-342).
gctcccaatgcaaactaca

SEQ ID NO: 168934 - DNA, 19 bp, Homo sapiens
  siRNA target sequence for TNFSF18 (NM_005092.2,325-343).
ctcccaatgcaaactacaa

SEQ ID NO: 168935 - DNA, 19 bp, Homo sapiens
  siRNA target sequence for TNFSF18 (NM_005092.2,363-381).
gtgcggctgtataaaaaca

SEQ ID NO: 168936 - DNA, 19 bp, Homo sapiens
  siRNA target sequence for TNFSF18 (NM_005092.2,380-398).
caaagacatgatacaaact

SEQ ID NO: 168937 - DNA, 19 bp, Homo sapiens
  siRNA target sequence for TNFSF18 (NM_005092.2,384-402).
gacatgatacaaactctaa

SEQ ID NO: 168938 - DNA, 19 bp, Homo sapiens
  siRNA target sequence for TNFSF18 (NM_005092.2,386-404).
catgatacaaactctaaca

SEQ ID NO: 168939 - DNA, 19 bp, Homo sapiens
  siRNA target sequence for TNFSF18 (NM_005092.2,430-448).
gagggacttatgaattgca

SEQ ID NO: 168940 - DNA, 19 bp, Homo sapiens
  siRNA target sequence for TNFSF18 (NM_005092.2,450-468).
gttggggacaccatagact

SEQ ID NO: 168941 - DNA, 19 bp, Homo sapiens
  siRNA target sequence for TNFSF18 (NM_005092.2,454-472).
gggacaccatagacttgat

SEQ ID NO: 168942 - DNA, 19 bp, Homo sapiens
  siRNA target sequence for TNFSF18 (NM_005092.2,455-473).
ggacaccatagacttgata

SEQ ID NO: 168943 - DNA, 19 bp, Homo sapiens
  siRNA target sequence for TNFSF18 (NM_005092.2,460-478).
ccatagacttgatattcaa

SEQ ID NO: 168944 - DNA, 19 bp, Homo sapiens
  siRNA target sequence for TNFSF18 (NM_005092.2,508-526).
catactggggtatcatttt

SEQ ID NO: 168945 - DNA, 19 bp, Homo sapiens
  siRNA target sequence for TNFSF18 (NM_005092.2,512-530).
ctggggtatcattttacta

SEQ ID NO: 168946 - DNA, 19 bp, Homo sapiens
  siRNA target sequence for TNFSF18 (NM_005092.2,517-535).
gtatcattttactagcaaa

SEQ ID NO: 168947 - DNA, 19 bp, Homo sapiens
  siRNA target sequence for TNFSF18 (NM_005092.2,528-546).
ctagcaaatccccaattca

SEQ ID NO: 168948 - DNA, 19 bp, Homo sapiens
  siRNA target sequence for AMH (NM_000479.2,1628-1646).
ccgagcgctccgtactcat

SEQ ID NO: 168949 - DNA, 19 bp, Homo sapiens
  siRNA target sequence for BDNF (NM_001709.3,297-315).
cttttccttactatggtta

SEQ ID NO: 168950 - DNA, 19 bp, Homo sapiens
  siRNA target sequence for BDNF (NM_001709.3,302-320).
ccttactatggttatttca

SEQ ID NO: 168951 - DNA, 19 bp, Homo sapiens
  siRNA target sequence for BDNF (NM_001709.3,303-321).
cttactatggttatttcat

SEQ ID NO: 168952 - DNA, 19 bp, Homo sapiens
  siRNA target sequence for BDNF (NM_001709.3,338-356).
ggctgcccccatgaaagaa

SEQ ID NO: 168953 - DNA, 19 bp, Homo sapiens
  siRNA target sequence for BDNF (NM_001709.3,441-459).
ggttcaagaggcttgacat

SEQ ID NO: 168954 - DNA, 19 bp, Homo sapiens
  siRNA target sequence for BDNF (NM_001709.3,445-463).
caagaggcttgacatcatt

SEQ ID NO: 168955 - DNA, 19 bp, Homo sapiens
  siRNA target sequence for BDNF (NM_001709.3,457-475).
catcattggctgacacttt

SEQ ID NO: 168956 - DNA, 19 bp, Homo sapiens
  siRNA target sequence for BDNF (NM_001709.3,472-490).
ctttcgaacacgtgataga

SEQ ID NO: 168957 - DNA, 19 bp, Homo sapiens
  siRNA target sequence for BDNF (NM_001709.3,512-530).
gaaagttcggcccaatgaa

SEQ ID NO: 168958 - DNA, 19 bp, Homo sapiens
  siRNA target sequence for BDNF (NM_001709.3,516-534).
gttcggcccaatgaagaaa

SEQ ID NO: 168959 - DNA, 19 bp, Homo sapiens
  siRNA target sequence for BDNF (NM_001709.3,519-537).
cggcccaatgaagaaaaca

SEQ ID NO: 168960 - DNA, 19 bp, Homo sapiens
  siRNA target sequence for BDNF (NM_001709.3,521-539).
gcccaatgaagaaaacaat

SEQ ID NO: 168961 - DNA, 19 bp, Homo sapiens
  siRNA target sequence for BDNF (NM_001709.3,775-793).
cggtcacagtccttgaaaa

SEQ ID NO: 168962 - DNA, 19 bp, Homo sapiens
  siRNA target sequence for BDNF (NM_001709.3,810-828).
ggccaactgaagcaatact

SEQ ID NO: 168963 - DNA, 19 bp, Homo sapiens
  siRNA target sequence for BDNF (NM_001709.3,811-829).
gccaactgaagcaatactt

SEQ ID NO: 168964 - DNA, 19 bp, Homo sapiens
  siRNA target sequence for BDNF (NM_001709.3,845-863).
caatcccatgggttacaca

SEQ ID NO: 168965 - DNA, 19 bp, Homo sapiens
  siRNA target sequence for BDNF (NM_001709.3,850-868).
ccatgggttacacaaaaga

SEQ ID NO: 168966 - DNA, 19 bp, Homo sapiens
  siRNA target sequence for BDNF (NM_001709.3,871-889).
gctgcaggggcatagacaa

SEQ ID NO: 168967 - DNA, 19 bp, Homo sapiens
  siRNA target sequence for BDNF (NM_001709.3,872-890).
ctgcaggggcatagacaaa

SEQ ID NO: 168968 - DNA, 19 bp, Homo sapiens
  siRNA target sequence for BDNF (NM_001709.3,937-955).
cccttaccatggatagcaa

SEQ ID NO: 168969 - DNA, 19 bp, Homo sapiens
  siRNA target sequence for BDNF (NM_001709.3,961-979).
gaattggctggcgattcat

SEQ ID NO: 168970 - DNA, 19 bp, Homo sapiens
  siRNA target sequence for BDNF (NM_001709.3,967-985).
gctggcgattcataaggat

SEQ ID NO: 168971 - DNA, 19 bp, Homo sapiens
  siRNA target sequence for BDNF (NM_001709.3,968-986).
ctggcgattcataaggata

SEQ ID NO: 168972 - DNA, 19 bp, Homo sapiens
  siRNA target sequence for BDNF (NM_001709.3,972-990).
cgattcataaggatagaca

SEQ ID NO: 168973 - DNA, 19 bp, Homo sapiens
  siRNA target sequence for BDNF (NM_001709.3,987-1005).
gacacttcttgtgtatgta

SEQ ID NO: 168974 - DNA, 19 bp, Homo sapiens
  siRNA target sequence for BDNF (NM_001709.3,999-1017).
gtatgtacattgaccatta

SEQ ID NO: 168975 - DNA, 19 bp, Homo sapiens
  siRNA target sequence for BDNF (NM_170731.2,334-352).
gagtgatgaccatcctttt

SEQ ID NO: 168976 - DNA, 19 bp, Homo sapiens
  siRNA target sequence for CECR1 (NM_017424.2,287-305).
ctcagctctatccatagat

SEQ ID NO: 168977 - DNA, 19 bp, Homo sapiens
  siRNA target sequence for CECR1 (NM_017424.2,289-307).
cagctctatccatagatga

SEQ ID NO: 168978 - DNA, 19 bp, Homo sapiens
  siRNA target sequence for CECR1 (NM_017424.2,316-334).
cgcatctgttgttgaaaga

SEQ ID NO: 168979 - DNA, 19 bp, Homo sapiens
  siRNA target sequence for CECR1 (NM_017424.2,496-514).
gaagtcaagtgtttaatat

SEQ ID NO: 168980 - DNA, 19 bp, Homo sapiens
  siRNA target sequence for CECR1 (NM_017424.2,637-655).
ggatcatgcagttcagatt

SEQ ID NO: 168981 - DNA, 19 bp, Homo sapiens
  siRNA target sequence for CECR1 (NM_017424.2,638-656).
gatcatgcagttcagattt

SEQ ID NO: 168982 - DNA, 19 bp, Homo sapiens
  siRNA target sequence for CECR1 (NM_017424.2,671-689).
ccgtccatcagaaaaatgt

SEQ ID NO: 168983 - DNA, 19 bp, Homo sapiens
  siRNA target sequence for CECR1 (NM_017424.2,672-690).
cgtccatcagaaaaatgtt

SEQ ID NO: 168984 - DNA, 19 bp, Homo sapiens
  siRNA target sequence for CECR1 (NM_017424.2,697-715).
ggattctgctggaggatta

SEQ ID NO: 168985 - DNA, 19 bp, Homo sapiens
  siRNA target sequence for CECR1 (NM_017424.2,728-746).
gcagaacgtcactgagttt

SEQ ID NO: 168986 - DNA, 19 bp, Homo sapiens
  siRNA target sequence for CECR1 (NM_017424.2,788-806).
cccggaggtgatttacaca

SEQ ID NO: 168987 - DNA, 19 bp, Homo sapiens
  siRNA target sequence for CECR1 (NM_017424.2,789-807).
ccggaggtgatttacacaa

SEQ ID NO: 168988 - DNA, 19 bp, Homo sapiens
  siRNA target sequence for CECR1 (NM_017424.2,790-808).
cggaggtgatttacacaaa

SEQ ID NO: 168989 - DNA, 19 bp, Homo sapiens
  siRNA target sequence for CECR1 (NM_017424.2,819-837).
gtctggtcgaaatttgaaa

SEQ ID NO: 168990 - DNA, 19 bp, Homo sapiens
  siRNA target sequence for CECR1 (NM_017424.2,879-897).
gtgttcagagactatgtct

SEQ ID NO: 168991 - DNA, 19 bp, Homo sapiens
  siRNA target sequence for CECR1 (NM_017424.2,955-973).
ggctgctgccggtgtatga

SEQ ID NO: 168992 - DNA, 19 bp, Homo sapiens
  siRNA target sequence for CECR1 (NM_017424.2,1022-1040).
ggaagtagctcagaagttt

SEQ ID NO: 168993 - DNA, 19 bp, Homo sapiens
  siRNA target sequence for CECR1 (NM_017424.2,1043-1061).
ggaaactcaccctgagttt

SEQ ID NO: 168994 - DNA, 19 bp, Homo sapiens
  siRNA target sequence for CECR1 (NM_017424.2,1056-1074).
gagtttattggaatcaaaa

SEQ ID NO: 168995 - DNA, 19 bp, Homo sapiens
  siRNA target sequence for CECR1 (NM_017424.2,1108-1126).
ctgtcatcgcagaatccat

SEQ ID NO: 168996 - DNA, 19 bp, Homo sapiens
  siRNA target sequence for CECR1 (NM_017424.2,1135-1153).
ccatggggctccgaatcaa

SEQ ID NO: 168997 - DNA, 19 bp, Homo sapiens
  siRNA target sequence for CECR1 (NM_017424.2,1255-1273).
gcgttaagctgccttactt

SEQ ID NO: 168998 - DNA, 19 bp, Homo sapiens
  siRNA target sequence for CECR1 (NM_017424.2,1274-1292).
cttccacgccggagaaaca

SEQ ID NO: 168999 - DNA, 19 bp, Homo sapiens
  siRNA target sequence for CECR1 (NM_017424.2,1386-1404).
cccgcagtcaggacttact

SEQ ID NO: 169000 - DNA, 19 bp, Homo sapiens
  siRNA target sequence for CECR1 (NM_017424.2,1444-1462).
ctaaccaggtgctgaaact

SEQ ID NO: 169001 - DNA, 19 bp, Homo sapiens
  siRNA target sequence for CECR1 (NM_017424.2,1531-1549).
ctgatgacccagctatgtt

SEQ ID NO: 169002 - DNA, 19 bp, Homo sapiens
  siRNA target sequence for CECR1 (NM_017424.2,1556-1574).
caaaggcttgtcctatgat

SEQ ID NO: 169003 - DNA, 19 bp, Homo sapiens
  siRNA target sequence for CECR1 (NM_017424.2,1562-1580).
cttgtcctatgatttctat

SEQ ID NO: 169004 - DNA, 19 bp, Homo sapiens
  siRNA target sequence for CECR1 (NM_017424.2,1709-1727).
gagatgggataagttcata

SEQ ID NO: 169005 - DNA, 19 bp, Homo sapiens
  siRNA target sequence for DKK1 (NM_012242.1,162-180).
gagctacccgggtctttgt

SEQ ID NO: 169006 - DNA, 19 bp, Homo sapiens
  siRNA target sequence for DKK1 (NM_012242.1,224-242).
gtgagcgccaccttgaact

SEQ ID NO: 169007 - DNA, 19 bp, Homo sapiens
  siRNA target sequence for DKK1 (NM_012242.1,552-570).
gtgtgtcttctgatcaaaa

SEQ ID NO: 169008 - DNA, 19 bp, Homo sapiens
  siRNA target sequence for DKK1 (NM_012242.1,757-775).
gtccaagatctgtaaacct

SEQ ID NO: 169009 - DNA, 19 bp, Homo sapiens
  siRNA target sequence for DKK1 (NM_012242.1,820-838).
ctctcatggactagaaata

SEQ ID NO: 169010 - DNA, 19 bp, Homo sapiens
  siRNA target sequence for DKK1 (NM_012242.1,868-886).
gtcttgccggatacagaaa

SEQ ID NO: 169011 - DNA, 19 bp, Homo sapiens
  siRNA target sequence for DKK1 (NM_012242.1,870-888).
cttgccggatacagaaaga

SEQ ID NO: 169012 - DNA, 19 bp, Homo sapiens
  siRNA target sequence for DKK1 (NM_012242.1,873-891).
gccggatacagaaagatca

SEQ ID NO: 169013 - DNA, 19 bp, Homo sapiens
  siRNA target sequence for DKK1 (NM_012242.1,896-914).
caagccagtaattcttcta

SEQ ID NO: 169014 - DNA, 19 bp, Homo sapiens
  siRNA target sequence for EDN2 (NM_001956.2,524-542).
gagcctcggtccacacatt

SEQ ID NO: 169015 - DNA, 19 bp, Homo sapiens
  siRNA target sequence for FGF1 (NM_000800.2,174-192).
cctgaccgagaagtttaat

SEQ ID NO: 169016 - DNA, 19 bp, Homo sapiens
  siRNA target sequence for FGF1 (NM_000800.2,296-314).
ggagcgaccagcacattca

SEQ ID NO: 169017 - DNA, 19 bp, Homo sapiens
  siRNA target sequence for FGF1 (NM_000800.2,335-353).
gcgtgggggaggtgtatat

SEQ ID NO: 169018 - DNA, 19 bp, Homo sapiens
  siRNA target sequence for FGF1 (NM_000800.2,336-354).
cgtgggggaggtgtatata

SEQ ID NO: 169019 - DNA, 19 bp, Homo sapiens
  siRNA target sequence for FGF1 (NM_000800.2,342-360).
ggaggtgtatataaagagt

SEQ ID NO: 169020 - DNA, 19 bp, Homo sapiens
  siRNA target sequence for FGF1 (NM_000800.2,362-380).
ccgagactggccagtactt

SEQ ID NO: 169021 - DNA, 19 bp, Homo sapiens
  siRNA target sequence for FGF1 (NM_000800.2,387-405).
ggacaccgacgggctttta

SEQ ID NO: 169022 - DNA, 19 bp, Homo sapiens
  siRNA target sequence for FGF1 (NM_000800.2,388-406).
gacaccgacgggcttttat

SEQ ID NO: 169023 - DNA, 19 bp, Homo sapiens
  siRNA target sequence for FGF1 (NM_000800.2,419-437).
caccaaatgaggaatgttt

SEQ ID NO: 169024 - DNA, 19 bp, Homo sapiens
  siRNA target sequence for FGF1 (NM_000800.2,454-472).
gaggagaaccattacaaca

SEQ ID NO: 169025 - DNA, 19 bp, Homo sapiens
  siRNA target sequence for FGF1 (NM_000800.2,506-524).
ggtttgttggcctcaagaa

SEQ ID NO: 169026 - DNA, 19 bp, Homo sapiens
  siRNA target sequence for FGF1 (NM_000800.2,543-561).
cggtcctcggactcactat

SEQ ID NO: 169027 - DNA, 19 bp, Homo sapiens
  siRNA target sequence for FGF1 (NM_033137.1,301-319).
gaccagcacaacaccaaat

SEQ ID NO: 169028 - DNA, 19 bp, Homo sapiens
  siRNA target sequence for FGF10 (NM_004465.1,195-213).
gcatgtgcggagctacaat

SEQ ID NO: 169029 - DNA, 19 bp, Homo sapiens
  siRNA target sequence for FGF10 (NM_004465.1,229-247).
gtccgctggagaaagctat

SEQ ID NO: 169030 - DNA, 19 bp, Homo sapiens
  siRNA target sequence for FGF10 (NM_004465.1,472-490).
gaaaatggatacaatacct

SEQ ID NO: 169031 - DNA, 19 bp, Homo sapiens
  siRNA target sequence for FGF10 (NM_004465.1,511-529).
cataatgggaggcaaatgt

SEQ ID NO: 169032 - DNA, 19 bp, Homo sapiens
  siRNA target sequence for FGF11 (NM_004112.2,653-671).
cagttcgccgcatttcaca

SEQ ID NO: 169033 - DNA, 19 bp, Homo sapiens
  siRNA target sequence for FGF11 (NM_004112.2,670-688).
cagctgagtgtcgctttaa

SEQ ID NO: 169034 - DNA, 19 bp, Homo sapiens
  siRNA target sequence for FGF11 (NM_004112.2,673-691).
ctgagtgtcgctttaagga

SEQ ID NO: 169035 - DNA, 19 bp, Homo sapiens
  siRNA target sequence for FGF11 (NM_004112.2,801-819).
ggaaaccgagttaagaaga

SEQ ID NO: 169036 - DNA, 19 bp, Homo sapiens
  siRNA target sequence for FGF12 (NM_004113.3,258-276).
gggattgtgacaaggttat

SEQ ID NO: 169037 - DNA, 19 bp, Homo sapiens
  siRNA target sequence for FGF12 (NM_004113.3,305-323).
gcacccagatggtaccatt

SEQ ID NO: 169038 - DNA, 19 bp, Homo sapiens
  siRNA target sequence for FGF12 (NM_004113.3,308-326).
cccagatggtaccattgat

SEQ ID NO: 169039 - DNA, 19 bp, Homo sapiens
  siRNA target sequence for FGF12 (NM_004113.3,350-368).
ctacactctcttcaatcta

SEQ ID NO: 169040 - DNA, 19 bp, Homo sapiens
  siRNA target sequence for FGF12 (NM_004113.3,438-456).
gaaggctatctctacagtt

SEQ ID NO: 169041 - DNA, 19 bp, Homo sapiens
  siRNA target sequence for FGF12 (NM_004113.3,443-461).
ctatctctacagttcagat

SEQ ID NO: 169042 - DNA, 19 bp, Homo sapiens
  siRNA target sequence for FGF12 (NM_004113.3,447-465).
ctctacagttcagatgttt

SEQ ID NO: 169043 - DNA, 19 bp, Homo sapiens
  siRNA target sequence for FGF12 (NM_004113.3,531-549).
ctgtaccgccagcaagaat

SEQ ID NO: 169044 - DNA, 19 bp, Homo sapiens
  siRNA target sequence for FGF12 (NM_004113.3,633-651).
cattttgtaccgaaaccta

SEQ ID NO: 169045 - DNA, 19 bp, Homo sapiens
  siRNA target sequence for FGF12 (NM_004113.3,648-666).
cctattgaagtgtgtatgt

SEQ ID NO: 169046 - DNA, 19 bp, Homo sapiens
  siRNA target sequence for FGF12 (NM_004113.3,649-667).
ctattgaagtgtgtatgta

SEQ ID NO: 169047 - DNA, 19 bp, Homo sapiens
  siRNA target sequence for FGF12 (NM_004113.3,670-688).
gagaaccatcgctacatga

SEQ ID NO: 169048 - DNA, 19 bp, Homo sapiens
  siRNA target sequence for FGF12 (NM_004113.3,672-690).
gaaccatcgctacatgaaa

SEQ ID NO: 169049 - DNA, 19 bp, Homo sapiens
  siRNA target sequence for FGF12 (NM_004113.3,702-720).
caagggcgttcaaggaaaa

SEQ ID NO: 169050 - DNA, 19 bp, Homo sapiens
  siRNA target sequence for FGF12 (NM_004113.3,737-755).
catgaatggaggcaaagtt

SEQ ID NO: 169051 - DNA, 19 bp, Homo sapiens
  siRNA target sequence for FGF12 (NM_004113.3,753-771).
gttgtgaatcaagattcaa

SEQ ID NO: 169052 - DNA, 19 bp, Homo sapiens
  siRNA target sequence for FGF13 (NM_004114.2,708-726).
cgcgagcgcgagaaatcca

SEQ ID NO: 169053 - DNA, 19 bp, Homo sapiens
  siRNA target sequence for FGF13 (NM_004114.2,709-727).
gcgagcgcgagaaatccaa

SEQ ID NO: 169054 - DNA, 19 bp, Homo sapiens
  siRNA target sequence for FGF13 (NM_004114.2,769-787).
gctgcgacaaaaacaagtt

SEQ ID NO: 169055 - DNA, 19 bp, Homo sapiens
  siRNA target sequence for FGF13 (NM_004114.2,841-859).
gaccagagcctcagcttaa

SEQ ID NO: 169056 - DNA, 19 bp, Homo sapiens
  siRNA target sequence for FGF13 (NM_004114.2,908-926).
gcaggcggatggaaccatt

SEQ ID NO: 169057 - DNA, 19 bp, Homo sapiens
  siRNA target sequence for FGF13 (NM_004114.2,949-967).
gcacttacactctgtttaa

SEQ ID NO: 169058 - DNA, 19 bp, Homo sapiens
  siRNA target sequence for FGF13 (NM_004114.2,986-1004).
gcgagtggtggctatccaa

SEQ ID NO: 169059 - DNA, 19 bp, Homo sapiens
  siRNA target sequence for FGF13 (NM_004114.2,995-1013).
ggctatccaaggagttcaa

SEQ ID NO: 169060 - DNA, 19 bp, Homo sapiens
  siRNA target sequence for FGF13 (NM_004114.2,1055-1073).
cacctcggaacttttcaca

SEQ ID NO: 169061 - DNA, 19 bp, Homo sapiens
  siRNA target sequence for FGF13 (NM_004114.2,1118-1136).
gacatattcatcaatgata

SEQ ID NO: 169062 - DNA, 19 bp, Homo sapiens
  siRNA target sequence for FGF13 (NM_004114.2,1254-1272).
ctgaaagtggccatgtaca

SEQ ID NO: 169063 - DNA, 19 bp, Homo sapiens
  siRNA target sequence for FGF13 (NM_004114.2,1356-1374).
ctgaacggaggcaaatcca

SEQ ID NO: 169064 - DNA, 19 bp, Homo sapiens
  siRNA target sequence for FGF13 (NM_033642.1,93-111).
gttaaggaagtcgtattca

SEQ ID NO: 169065 - DNA, 19 bp, Homo sapiens
  siRNA target sequence for FGF14 (NM_004115.2,124-142).
ggcaacctggtggatatct

SEQ ID NO: 169066 - DNA, 19 bp, Homo sapiens
  siRNA target sequence for FGF14 (NM_004115.2,125-143).
gcaacctggtggatatctt

SEQ ID NO: 169067 - DNA, 19 bp, Homo sapiens
  siRNA target sequence for FGF14 (NM_004115.2,155-173).
gcatcttcggcctcaagaa

SEQ ID NO: 169068 - DNA, 19 bp, Homo sapiens
  siRNA target sequence for FGF14 (NM_004115.2,208-226).
ggtatagtgaccaggttat

SEQ ID NO: 169069 - DNA, 19 bp, Homo sapiens
  siRNA target sequence for FGF14 (NM_004115.2,209-227).
gtatagtgaccaggttata

SEQ ID NO: 169070 - DNA, 19 bp, Homo sapiens
  siRNA target sequence for FGF14 (NM_004115.2,214-232).
gtgaccaggttatattgca

SEQ ID NO: 169071 - DNA, 19 bp, Homo sapiens
  siRNA target sequence for FGF14 (NM_004115.2,285-303).
ggatgacagcactaattct

SEQ ID NO: 169072 - DNA, 19 bp, Homo sapiens
  siRNA target sequence for FGF14 (NM_004115.2,296-314).
ctaattctacactcttcaa

SEQ ID NO: 169073 - DNA, 19 bp, Homo sapiens
  siRNA target sequence for FGF14 (NM_004115.2,357-375).
gaaaacagggttgtatata

SEQ ID NO: 169074 - DNA, 19 bp, Homo sapiens
  siRNA target sequence for FGF14 (NM_004115.2,366-384).
gttgtatatagccatgaat

SEQ ID NO: 169075 - DNA, 19 bp, Homo sapiens
  siRNA target sequence for FGF14 (NM_004115.2,399-417).
ctacccatcagaacttttt

SEQ ID NO: 169076 - DNA, 19 bp, Homo sapiens
  siRNA target sequence for FGF14 (NM_004115.2,419-437).
cccctgaatgcaagtttaa

SEQ ID NO: 169077 - DNA, 19 bp, Homo sapiens
  siRNA target sequence for FGF14 (NM_004115.2,420-438).
ccctgaatgcaagtttaaa

SEQ ID NO: 169078 - DNA, 19 bp, Homo sapiens
  siRNA target sequence for FGF14 (NM_004115.2,422-440).
ctgaatgcaagtttaaaga

SEQ ID NO: 169079 - DNA, 19 bp, Homo sapiens
  siRNA target sequence for FGF14 (NM_004115.2,662-680).
ctggggtgacgccaagtaa

SEQ ID NO: 169080 - DNA, 19 bp, Homo sapiens
  siRNA target sequence for FGF14 (NM_004115.2,664-682).
ggggtgacgccaagtaaaa

SEQ ID NO: 169081 - DNA, 19 bp, Homo sapiens
  siRNA target sequence for FGF14 (NM_004115.2,667-685).
gtgacgccaagtaaaagca

SEQ ID NO: 169082 - DNA, 19 bp, Homo sapiens
  siRNA target sequence for FGF14 (NM_004115.2,684-702).
cacaagtgcgtctgcaata

SEQ ID NO: 169083 - DNA, 19 bp, Homo sapiens
  siRNA target sequence for FGF14 (NM_004115.2,686-704).
caagtgcgtctgcaataat

SEQ ID NO: 169084 - DNA, 19 bp, Homo sapiens
  siRNA target sequence for FGF14 (NM_004115.2,689-707).
gtgcgtctgcaataatgaa

SEQ ID NO: 169085 - DNA, 19 bp, Homo sapiens
  siRNA target sequence for FGF14 (NM_004115.2,712-730).
ggcaaaccagtcaacaaga

SEQ ID NO: 169086 - DNA, 19 bp, Homo sapiens
  siRNA target sequence for FGF14 (NM_004115.2,721-739).
gtcaacaagagtaagacaa

SEQ ID NO: 169087 - DNA, 19 bp, Homo sapiens
  siRNA target sequence for FGF14 (NM_175929.1,182-200).
ctaagctgctggattgctt

SEQ ID NO: 169088 - DNA, 19 bp, Homo sapiens
  siRNA target sequence for FGF14 (NM_175929.1,197-215).
gcttttcgcccaaatcaat

SEQ ID NO: 169089 - DNA, 19 bp, Homo sapiens
  siRNA target sequence for FGF14 (NM_175929.1,207-225).
caaatcaatgtggtttctt

SEQ ID NO: 169090 - DNA, 19 bp, Homo sapiens
  siRNA target sequence for FGF14 (NM_175929.1,250-268).
catatgctgcagtgtcttt

SEQ ID NO: 169091 - DNA, 19 bp, Homo sapiens
  siRNA target sequence for FGF17 (NM_003867.1,90-108).
gaatcacccgtctcctaat

SEQ ID NO: 169092 - DNA, 19 bp, Homo sapiens
  siRNA target sequence for FGF17 (NM_003867.1,94-112).
cacccgtctcctaatttta

SEQ ID NO: 169093 - DNA, 19 bp, Homo sapiens
  siRNA target sequence for FGF17 (NM_003867.1,98-116).
cgtctcctaattttaacca

SEQ ID NO: 169094 - DNA, 19 bp, Homo sapiens
  siRNA target sequence for FGF17 (NM_003867.1,520-538).
cgcgaggcccacttcatca

SEQ ID NO: 169095 - DNA, 19 bp, Homo sapiens
  siRNA target sequence for FGF18 (NM_003862.1,560-578).
gcacttgcctgtgtttaca

SEQ ID NO: 169096 - DNA, 19 bp, Homo sapiens
  siRNA target sequence for FGF18 (NM_003862.1,768-786).
cgaggatggggacaagtat

SEQ ID NO: 169097 - DNA, 19 bp, Homo sapiens
  siRNA target sequence for FGF18 (NM_003862.1,958-976).
ctgatgtcggctaagtact

SEQ ID NO: 169098 - DNA, 19 bp, Homo sapiens
  siRNA target sequence for FGF19 (NM_005117.2,1002-1020).
ggggccacttggaatctga

SEQ ID NO: 169099 - DNA, 19 bp, Homo sapiens
  siRNA target sequence for FGF2 (NM_002006.2,643-661).
catcaagctacaacttcaa

SEQ ID NO: 169100 - DNA, 19 bp, Homo sapiens
  siRNA target sequence for FGF2 (NM_002006.2,732-750).
gaagattactggcttctaa

SEQ ID NO: 169101 - DNA, 19 bp, Homo sapiens
  siRNA target sequence for FGF2 (NM_002006.2,753-771).
gtgttacggatgagtgttt

SEQ ID NO: 169102 - DNA, 19 bp, Homo sapiens
  siRNA target sequence for FGF2 (NM_002006.2,759-777).
cggatgagtgtttcttttt

SEQ ID NO: 169103 - DNA, 19 bp, Homo sapiens
  siRNA target sequence for FGF2 (NM_002006.2,768-786).
gtttcttttttgaacgatt

SEQ ID NO: 169104 - DNA, 19 bp, Homo sapiens
  siRNA target sequence for FGF2 (NM_002006.2,779-797).
gaacgattggaatctaata

SEQ ID NO: 169105 - DNA, 19 bp, Homo sapiens
  siRNA target sequence for FGF2 (NM_002006.2,782-800).
cgattggaatctaataact

SEQ ID NO: 169106 - DNA, 19 bp, Homo sapiens
  siRNA target sequence for FGF2 (NM_002006.2,787-805).
ggaatctaataactacaat

SEQ ID NO: 169107 - DNA, 19 bp, Homo sapiens
  siRNA target sequence for FGF2 (NM_002006.2,788-806).
gaatctaataactacaata

SEQ ID NO: 169108 - DNA, 19 bp, Homo sapiens
  siRNA target sequence for FGF2 (NM_002006.2,807-825).
cttaccggtcaaggaaata

SEQ ID NO: 169109 - DNA, 19 bp, Homo sapiens
  siRNA target sequence for FGF2 (NM_002006.2,852-870).
gaactgggcagtataaact

SEQ ID NO: 169110 - DNA, 19 bp, Homo sapiens
  siRNA target sequence for FGF2 (NM_002006.2,891-909).
ggcagaaagctatactttt

SEQ ID NO: 169111 - DNA, 19 bp, Homo sapiens
  siRNA target sequence for FGF20 (NM_019851.1,419-437).
ggtatcttggaattcatca

SEQ ID NO: 169112 - DNA, 19 bp, Homo sapiens
  siRNA target sequence for FGF20 (NM_019851.1,446-464).
gtgggactggtcagtatta

SEQ ID NO: 169113 - DNA, 19 bp, Homo sapiens
  siRNA target sequence for FGF20 (NM_019851.1,448-466).
gggactggtcagtattaga

SEQ ID NO: 169114 - DNA, 19 bp, Homo sapiens
  siRNA target sequence for FGF20 (NM_019851.1,477-495).
gtggtctctatcttggaat

SEQ ID NO: 169115 - DNA, 19 bp, Homo sapiens
  siRNA target sequence for FGF20 (NM_019851.1,480-498).
gtctctatcttggaatgaa

SEQ ID NO: 169116 - DNA, 19 bp, Homo sapiens
  siRNA target sequence for FGF20 (NM_019851.1,571-589).
ctggtataacacctattca

SEQ ID NO: 169117 - DNA, 19 bp, Homo sapiens
  siRNA target sequence for FGF20 (NM_019851.1,574-592).
gtataacacctattcatct

SEQ ID NO: 169118 - DNA, 19 bp, Homo sapiens
  siRNA target sequence for FGF20 (NM_019851.1,611-629).
gacactggccgcaggtatt

SEQ ID NO: 169119 - DNA, 19 bp, Homo sapiens
  siRNA target sequence for FGF20 (NM_019851.1,613-631).
cactggccgcaggtatttt

SEQ ID NO: 169120 - DNA, 19 bp, Homo sapiens
  siRNA target sequence for FGF20 (NM_019851.1,624-642).
ggtattttgtggcacttaa

SEQ ID NO: 169121 - DNA, 19 bp, Homo sapiens
  siRNA target sequence for FGF20 (NM_019851.1,672-690).
ggtccaagaggcatcagaa

SEQ ID NO: 169122 - DNA, 19 bp, Homo sapiens
  siRNA target sequence for FGF20 (NM_019851.1,729-747).
gagttccagaattgtacaa

SEQ ID NO: 169123 - DNA, 19 bp, Homo sapiens
  siRNA target sequence for FGF21 (NM_019113.1,254-272).
ccttgaagccgggagttat

SEQ ID NO: 169124 - DNA, 19 bp, Homo sapiens
  siRNA target sequence for FGF21 (NM_019113.1,255-273).
cttgaagccgggagttatt

SEQ ID NO: 169125 - DNA, 19 bp, Homo sapiens
  siRNA target sequence for FGF21 (NM_019113.1,258-276).
gaagccgggagttattcaa

SEQ ID NO: 169126 - DNA, 19 bp, Homo sapiens
  siRNA target sequence for FGF21 (NM_019113.1,263-281).
cgggagttattcaaatctt

SEQ ID NO: 169127 - DNA, 19 bp, Homo sapiens
  siRNA target sequence for FGF22 (NM_020637.1,243-261).
gggcgtcgtggtcatcaaa

SEQ ID NO: 169128 - DNA, 19 bp, Homo sapiens
  siRNA target sequence for FGF23 (NM_020638.2,339-357).
ccccatcagaccatctaca

SEQ ID NO: 169129 - DNA, 19 bp, Homo sapiens
  siRNA target sequence for FGF23 (NM_020638.2,384-402).
gctggctttgtggtgatta

SEQ ID NO: 169130 - DNA, 19 bp, Homo sapiens
  siRNA target sequence for FGF23 (NM_020638.2,406-424).
gtgtgatgagcagaagata

SEQ ID NO: 169131 - DNA, 19 bp, Homo sapiens
  siRNA target sequence for FGF23 (NM_020638.2,421-439).
gatacctctgcatggattt

SEQ ID NO: 169132 - DNA, 19 bp, Homo sapiens
  siRNA target sequence for FGF23 (NM_020638.2,528-546).
cactctcctcagtatcact

SEQ ID NO: 169133 - DNA, 19 bp, Homo sapiens
  siRNA target sequence for FGF23 (NM_020638.2,629-647).
gaacgagatccccctaatt

SEQ ID NO: 169134 - DNA, 19 bp, Homo sapiens
  siRNA target sequence for FGF23 (NM_020638.2,633-651).
gagatccccctaattcact

SEQ ID NO: 169135 - DNA, 19 bp, Homo sapiens
  siRNA target sequence for FGF23 (NM_020638.2,639-657).
cccctaattcacttcaaca

SEQ ID NO: 169136 - DNA, 19 bp, Homo sapiens
  siRNA target sequence for FGF23 (NM_020638.2,882-900).
cccttcgccaagttcatct

SEQ ID NO: 169137 - DNA, 19 bp, Homo sapiens
  siRNA target sequence for FGF3 (NM_005247.2,698-716).
gaacagcgcctacagtatt

SEQ ID NO: 169138 - DNA, 19 bp, Homo sapiens
  siRNA target sequence for FGF3 (NM_005247.2,826-844).
gcgccgagtgcgagtttgt

SEQ ID NO: 169139 - DNA, 19 bp, Homo sapiens
  siRNA target sequence for FGF3 (NM_005247.2,860-878).
gctgggctataatacgtat

SEQ ID NO: 169140 - DNA, 19 bp, Homo sapiens
  siRNA target sequence for FGF4 (NM_002007.1,821-839).
gcctacgagtcctacaagt

SEQ ID NO: 169141 - DNA, 19 bp, Homo sapiens
  siRNA target sequence for FGF4 (NM_002007.1,822-840).
cctacgagtcctacaagta

SEQ ID NO: 169142 - DNA, 19 bp, Homo sapiens
  siRNA target sequence for FGF5 (NM_004464.2,294-312).
cagcagtagcgctatgtct

SEQ ID NO: 169143 - DNA, 19 bp, Homo sapiens
  siRNA target sequence for FGF5 (NM_004464.2,440-458).
gtttccatctgcagatcta

SEQ ID NO: 169144 - DNA, 19 bp, Homo sapiens
  siRNA target sequence for FGF5 (NM_004464.2,459-477).
cccggatggcaaagtcaat

SEQ ID NO: 169145 - DNA, 19 bp, Homo sapiens
  siRNA target sequence for FGF5 (NM_004464.2,479-497).
gatcccacgaagccaatat

SEQ ID NO: 169146 - DNA, 19 bp, Homo sapiens
  siRNA target sequence for FGF5 (NM_004464.2,482-500).
cccacgaagccaatatgtt

SEQ ID NO: 169147 - DNA, 19 bp, Homo sapiens
  siRNA target sequence for FGF5 (NM_004464.2,483-501).
ccacgaagccaatatgtta

SEQ ID NO: 169148 - DNA, 19 bp, Homo sapiens
  siRNA target sequence for FGF5 (NM_004464.2,484-502).
cacgaagccaatatgttaa

SEQ ID NO: 169149 - DNA, 19 bp, Homo sapiens
  siRNA target sequence for FGF5 (NM_004464.2,527-545).
ctcaggggattgtaggaat

SEQ ID NO: 169150 - DNA, 19 bp, Homo sapiens
  siRNA target sequence for FGF5 (NM_004464.2,531-549).
ggggattgtaggaatacga

SEQ ID NO: 169151 - DNA, 19 bp, Homo sapiens
  siRNA target sequence for FGF5 (NM_004464.2,541-559).
ggaatacgaggagttttca

SEQ ID NO: 169152 - DNA, 19 bp, Homo sapiens
  siRNA target sequence for FGF5 (NM_004464.2,630-648).
gttcagggagcgttttcaa

SEQ ID NO: 169153 - DNA, 19 bp, Homo sapiens
  siRNA target sequence for FGF5 (NM_004464.2,635-653).
gggagcgttttcaagaaaa

SEQ ID NO: 169154 - DNA, 19 bp, Homo sapiens
  siRNA target sequence for FGF5 (NM_004464.2,636-654).
ggagcgttttcaagaaaat

SEQ ID NO: 169155 - DNA, 19 bp, Homo sapiens
  siRNA target sequence for FGF5 (NM_004464.2,761-779).
gggttaaaccccagcatat

SEQ ID NO: 169156 - DNA, 19 bp, Homo sapiens
  siRNA target sequence for FGF5 (NM_004464.2,763-781).
gttaaaccccagcatatct

SEQ ID NO: 169157 - DNA, 19 bp, Homo sapiens
  siRNA target sequence for FGF5 (NM_004464.2,810-828).
gtcggagcagccagaactt

SEQ ID NO: 169158 - DNA, 19 bp, Homo sapiens
  siRNA target sequence for FGF5 (NM_004464.2,817-835).
cagccagaactttctttca

SEQ ID NO: 169159 - DNA, 19 bp, Homo sapiens
  siRNA target sequence for FGF5 (NM_004464.2,898-916).
gcacctcggaaaaatacca

SEQ ID NO: 169160 - DNA, 19 bp, Homo sapiens
  siRNA target sequence for FGF5 (NM_004464.2,899-917).
cacctcggaaaaataccaa

SEQ ID NO: 169161 - DNA, 19 bp, Homo sapiens
  siRNA target sequence for FGF5 (NM_004464.2,924-942).
gaaatacagactcaagttt

SEQ ID NO: 169162 - DNA, 19 bp, Homo sapiens
  siRNA target sequence for FGF6 (NM_020996.1,165-183).
ggcacccgtgccaacaaca

SEQ ID NO: 169163 - DNA, 19 bp, Homo sapiens
  siRNA target sequence for FGF6 (NM_020996.1,453-471).
ctcttcgttgccatgaaca

SEQ ID NO: 169164 - DNA, 19 bp, Homo sapiens
  siRNA target sequence for FGF6 (NM_020996.1,458-476).
cgttgccatgaacagtaaa

SEQ ID NO: 169165 - DNA, 19 bp, Homo sapiens
  siRNA target sequence for FGF6 (NM_020996.1,495-513).
cccagcttccaagaagaat

SEQ ID NO: 169166 - DNA, 19 bp, Homo sapiens
  siRNA target sequence for FGF6 (NM_020996.1,553-571).
cctacgagtcagacttgta

SEQ ID NO: 169167 - DNA, 19 bp, Homo sapiens
  siRNA target sequence for FGF7 (NM_002009.2,484-502).
gctctacagatcatgcttt

SEQ ID NO: 169168 - DNA, 19 bp, Homo sapiens
  siRNA target sequence for FGF7 (NM_002009.2,511-529).
ctgtctagtgggtactata

SEQ ID NO: 169169 - DNA, 19 bp, Homo sapiens
  siRNA target sequence for FGF7 (NM_002009.2,515-533).
ctagtgggtactatatctt

SEQ ID NO: 169170 - DNA, 19 bp, Homo sapiens
  siRNA target sequence for FGF7 (NM_002009.2,520-538).
gggtactatatctttagct

SEQ ID NO: 169171 - DNA, 19 bp, Homo sapiens
  siRNA target sequence for FGF7 (NM_002009.2,521-539).
ggtactatatctttagctt

SEQ ID NO: 169172 - DNA, 19 bp, Homo sapiens
  siRNA target sequence for FGF7 (NM_002009.2,531-549).
ctttagcttgcaatgacat

SEQ ID NO: 169173 - DNA, 19 bp, Homo sapiens
  siRNA target sequence for FGF7 (NM_002009.2,555-573).
cagagcaaatggctacaaa

SEQ ID NO: 169174 - DNA, 19 bp, Homo sapiens
  siRNA target sequence for FGF7 (NM_002009.2,590-608).
cctgagcgacacacaagaa

SEQ ID NO: 169175 - DNA, 19 bp, Homo sapiens
  siRNA target sequence for FGF7 (NM_002009.2,595-613).
gcgacacacaagaagttat

SEQ ID NO: 169176 - DNA, 19 bp, Homo sapiens
  siRNA target sequence for FGF7 (NM_002009.2,603-621).
caagaagttatgattacat

SEQ ID NO: 169177 - DNA, 19 bp, Homo sapiens
  siRNA target sequence for FGF7 (NM_002009.2,669-687).
ggtacctgaggatcgataa

SEQ ID NO: 169178 - DNA, 19 bp, Homo sapiens
  siRNA target sequence for FGF7 (NM_002009.2,670-688).
gtacctgaggatcgataaa

SEQ ID NO: 169179 - DNA, 19 bp, Homo sapiens
  siRNA target sequence for FGF7 (NM_002009.2,673-691).
cctgaggatcgataaaaga

SEQ ID NO: 169180 - DNA, 19 bp, Homo sapiens
  siRNA target sequence for FGF7 (NM_002009.2,682-700).
cgataaaagaggcaaagta

SEQ ID NO: 169181 - DNA, 19 bp, Homo sapiens
  siRNA target sequence for FGF8 (NM_006119.2,246-264).
gttcagtcctcacctaatt

SEQ ID NO: 169182 - DNA, 19 bp, Homo sapiens
  siRNA target sequence for FGF8 (NM_006119.2,249-267).
cagtcctcacctaatttta

SEQ ID NO: 169183 - DNA, 19 bp, Homo sapiens
  siRNA target sequence for FGF8 (NM_006119.2,253-271).
cctcacctaattttacaca

SEQ ID NO: 169184 - DNA, 19 bp, Homo sapiens
  siRNA target sequence for FGF8 (NM_006119.2,678-696).
cgtgaggtccacttcatga

SEQ ID NO: 169185 - DNA, 19 bp, Homo sapiens
  siRNA target sequence for FGF8 (NM_006119.2,679-697).
gtgaggtccacttcatgaa

SEQ ID NO: 169186 - DNA, 19 bp, Homo sapiens
  siRNA target sequence for FGF8 (NM_006119.2,739-757).
gcttcgagttcctcaacta

SEQ ID NO: 169187 - DNA, 19 bp, Homo sapiens
  siRNA target sequence for FGF8 (NM_033163.1,317-335).
ctcccaacaggtaactgtt

SEQ ID NO: 169188 - DNA, 19 bp, Homo sapiens
  siRNA target sequence for FGF9 (NM_002010.1,181-199).
ggctcccttaggtgaagtt

SEQ ID NO: 169189 - DNA, 19 bp, Homo sapiens
  siRNA target sequence for FGF9 (NM_002010.1,191-209).
ggtgaagttgggaactatt

SEQ ID NO: 169190 - DNA, 19 bp, Homo sapiens
  siRNA target sequence for FGF9 (NM_002010.1,192-210).
gtgaagttgggaactattt

SEQ ID NO: 169191 - DNA, 19 bp, Homo sapiens
  siRNA target sequence for FGF9 (NM_002010.1,257-275).
gtggacagcccggttttgt

SEQ ID NO: 169192 - DNA, 19 bp, Homo sapiens
  siRNA target sequence for FGF9 (NM_002010.1,259-277).
ggacagcccggttttgtta

SEQ ID NO: 169193 - DNA, 19 bp, Homo sapiens
  siRNA target sequence for FGF9 (NM_002010.1,260-278).
gacagcccggttttgttaa

SEQ ID NO: 169194 - DNA, 19 bp, Homo sapiens
  siRNA target sequence for FGF9 (NM_002010.1,262-280).
cagcccggttttgttaagt

SEQ ID NO: 169195 - DNA, 19 bp, Homo sapiens
  siRNA target sequence for FGF9 (NM_002010.1,264-282).
gcccggttttgttaagtga

SEQ ID NO: 169196 - DNA, 19 bp, Homo sapiens
  siRNA target sequence for FGF9 (NM_002010.1,329-347).
gtcacggacttggatcatt

SEQ ID NO: 169197 - DNA, 19 bp, Homo sapiens
  siRNA target sequence for FGF9 (NM_002010.1,331-349).
cacggacttggatcattta

SEQ ID NO: 169198 - DNA, 19 bp, Homo sapiens
  siRNA target sequence for FGF9 (NM_002010.1,333-351).
cggacttggatcatttaaa

SEQ ID NO: 169199 - DNA, 19 bp, Homo sapiens
  siRNA target sequence for FGF9 (NM_002010.1,381-399).
gcaggactggatttcactt

SEQ ID NO: 169200 - DNA, 19 bp, Homo sapiens
  siRNA target sequence for FGF9 (NM_002010.1,384-402).
ggactggatttcacttaga

SEQ ID NO: 169201 - DNA, 19 bp, Homo sapiens
  siRNA target sequence for FGF9 (NM_002010.1,544-562).
ggagctgtatggatcagaa

SEQ ID NO: 169202 - DNA, 19 bp, Homo sapiens
  siRNA target sequence for FGF9 (NM_002010.1,545-563).
gagctgtatggatcagaaa

SEQ ID NO: 169203 - DNA, 19 bp, Homo sapiens
  siRNA target sequence for FGF9 (NM_002010.1,566-584).
ctaacccaagagtgtgtat

SEQ ID NO: 169204 - DNA, 19 bp, Homo sapiens
  siRNA target sequence for FGF9 (NM_002010.1,598-616).
cgaagaaaactggtataat

SEQ ID NO: 169205 - DNA, 19 bp, Homo sapiens
  siRNA target sequence for FGF9 (NM_002010.1,649-667).
cactggaaggcgatactat

SEQ ID NO: 169206 - DNA, 19 bp, Homo sapiens
  siRNA target sequence for FGF9 (NM_002010.1,659-677).
cgatactatgttgcattaa

SEQ ID NO: 169207 - DNA, 19 bp, Homo sapiens
  siRNA target sequence for FGF9 (NM_002010.1,770-788).
cctgaactgtataaggata

SEQ ID NO: 169208 - DNA, 19 bp, Homo sapiens
  siRNA target sequence for FGF9 (NM_002010.1,771-789).
ctgaactgtataaggatat

SEQ ID NO: 169209 - DNA, 19 bp, Homo sapiens
  siRNA target sequence for FGF9 (NM_002010.1,776-794).
ctgtataaggatattctaa

SEQ ID NO: 169210 - DNA, 19 bp, Homo sapiens
  siRNA target sequence for FGF9 (NM_002010.1,785-803).
gatattctaagccaaagtt

SEQ ID NO: 169211 - DNA, 19 bp, Homo sapiens
  siRNA target sequence for FRA (NM_024816.1,1163-1181).
gcctgcaccatgaggtaaa

SEQ ID NO: 169212 - DNA, 19 bp, Homo sapiens
  siRNA target sequence for GDNF (NM_000514.2,337-355).
cgctgagcagtgactcaaa

SEQ ID NO: 169213 - DNA, 19 bp, Homo sapiens
  siRNA target sequence for GDNF (NM_000514.2,338-356).
gctgagcagtgactcaaat

SEQ ID NO: 169214 - DNA, 19 bp, Homo sapiens
  siRNA target sequence for GDNF (NM_000514.2,373-391).
ctgatcagttcgatgatgt

SEQ ID NO: 169215 - DNA, 19 bp, Homo sapiens
  siRNA target sequence for GDNF (NM_000514.2,545-563).
ccggggttgtgtcttaact

SEQ ID NO: 169216 - DNA, 19 bp, Homo sapiens
  siRNA target sequence for GDNF (NM_000514.2,553-571).
gtgtcttaactgcaataca

SEQ ID NO: 169217 - DNA, 19 bp, Homo sapiens
  siRNA target sequence for GDNF (NM_000514.2,555-573).
gtcttaactgcaatacatt

SEQ ID NO: 169218 - DNA, 19 bp, Homo sapiens
  siRNA target sequence for GDNF (NM_000514.2,587-605).
cttgggtctgggctatgaa

SEQ ID NO: 169219 - DNA, 19 bp, Homo sapiens
  siRNA target sequence for GDNF (NM_000514.2,657-675).
gagacaacgtacgacaaaa

SEQ ID NO: 169220 - DNA, 19 bp, Homo sapiens
  siRNA target sequence for GDNF (NM_000514.2,659-677).
gacaacgtacgacaaaata

SEQ ID NO: 169221 - DNA, 19 bp, Homo sapiens
  siRNA target sequence for GDNF (NM_000514.2,661-679).
caacgtacgacaaaatatt

SEQ ID NO: 169222 - DNA, 19 bp, Homo sapiens
  siRNA target sequence for GDNF (NM_000514.2,737-755).
cagacccatcgcctttgat

SEQ ID NO: 169223 - DNA, 19 bp, Homo sapiens
  siRNA target sequence for GDNF (NM_000514.2,753-771).
gatgatgacctgtcgtttt

SEQ ID NO: 169224 - DNA, 19 bp, Homo sapiens
  siRNA target sequence for GDNF (NM_000514.2,777-795).
gataacctggtttaccata

SEQ ID NO: 169225 - DNA, 19 bp, Homo sapiens
  siRNA target sequence for GDNF (NM_000514.2,782-800).
cctggtttaccatattcta

SEQ ID NO: 169226 - DNA, 19 bp, Homo sapiens
  siRNA target sequence for GDNF (NM_000514.2,783-801).
ctggtttaccatattctaa

SEQ ID NO: 169227 - DNA, 19 bp, Homo sapiens
  siRNA target sequence for GDNF (NM_000514.2,785-803).
ggtttaccatattctaaga

SEQ ID NO: 169228 - DNA, 19 bp, Homo sapiens
  siRNA target sequence for GRP (NM_002091.3,193-211).
ccgtgctgaccaagatgta

SEQ ID NO: 169229 - DNA, 19 bp, Homo sapiens
  siRNA target sequence for GRP (NM_002091.3,229-247).
gggcggtggggcacttaat

SEQ ID NO: 169230 - DNA, 19 bp, Homo sapiens
  siRNA target sequence for GRP (NM_002091.3,344-362).
gaatttgctgggtctcata

SEQ ID NO: 169231 - DNA, 19 bp, Homo sapiens
  siRNA target sequence for HDGF (NM_004494.1,330-348).
ccggcagaaggagtacaaa

SEQ ID NO: 169232 - DNA, 19 bp, Homo sapiens
  siRNA target sequence for HDGF (NM_004494.1,415-433).
cctgaggctgccgtgaaat

SEQ ID NO: 169233 - DNA, 19 bp, Homo sapiens
  siRNA target sequence for HDGF (NM_004494.1,434-452).
caacagccaacaaatacca

SEQ ID NO: 169234 - DNA, 19 bp, Homo sapiens
  siRNA target sequence for HDGF (NM_004494.1,673-691).
gagggtgacggtgataaga

SEQ ID NO: 169235 - DNA, 19 bp, Homo sapiens
  siRNA target sequence for HDGF (NM_004494.1,801-819).
ggaggactctcctaaacgt

SEQ ID NO: 169236 - DNA, 19 bp, Homo sapiens
  siRNA target sequence for IGF1 (NM_000618.2,181-199).
cagtcttccaacccaatta

SEQ ID NO: 169237 - DNA, 19 bp, Homo sapiens
  siRNA target sequence for IGF1 (NM_000618.2,183-201).
gtcttccaacccaattatt

SEQ ID NO: 169238 - DNA, 19 bp, Homo sapiens
  siRNA target sequence for IGF1 (NM_000618.2,188-206).
ccaacccaattatttaagt

SEQ ID NO: 169239 - DNA, 19 bp, Homo sapiens
  siRNA target sequence for IGF1 (NM_000618.2,249-267).
cctcctcgcatctcttcta

SEQ ID NO: 169240 - DNA, 19 bp, Homo sapiens
  siRNA target sequence for IGF1 (NM_000618.2,372-390).
ggggcttttatttcaacaa

SEQ ID NO: 169241 - DNA, 19 bp, Homo sapiens
  siRNA target sequence for INHBE (NM_031479.3,398-416).
cagtcgtcccagaataact

SEQ ID NO: 169242 - DNA, 19 bp, Homo sapiens
  siRNA target sequence for INHBE (NM_031479.3,400-418).
gtcgtcccagaataactca

SEQ ID NO: 169243 - DNA, 19 bp, Homo sapiens
  siRNA target sequence for INHBE (NM_031479.3,719-737).
cctgggctggcatacctta

SEQ ID NO: 169244 - DNA, 19 bp, Homo sapiens
  siRNA target sequence for INHBE (NM_031479.3,720-738).
ctgggctggcataccttaa

SEQ ID NO: 169245 - DNA, 19 bp, Homo sapiens
  siRNA target sequence for INHBE (NM_031479.3,722-740).
gggctggcataccttaact

SEQ ID NO: 169246 - DNA, 19 bp, Homo sapiens
  siRNA target sequence for INHBE (NM_031479.3,724-742).
gctggcataccttaactct

SEQ ID NO: 169247 - DNA, 19 bp, Homo sapiens
  siRNA target sequence for INHBE (NM_031479.3,810-828).
gaaggcaacagcacagtta

SEQ ID NO: 169248 - DNA, 19 bp, Homo sapiens
  siRNA target sequence for INHBE (NM_031479.3,873-891).
cccttcctagagcttaaga

SEQ ID NO: 169249 - DNA, 19 bp, Homo sapiens
  siRNA target sequence for INHBE (NM_031479.3,947-965).
gcctgcgacccccttatgt

SEQ ID NO: 169250 - DNA, 19 bp, Homo sapiens
  siRNA target sequence for INHBE (NM_031479.3,964-982).
gttgcaggcgagaccatta

SEQ ID NO: 169251 - DNA, 19 bp, Homo sapiens
  siRNA target sequence for INHBE (NM_031479.3,973-991).
gagaccattacgtagactt

SEQ ID NO: 169252 - DNA, 19 bp, Homo sapiens
  siRNA target sequence for INHBE (NM_031479.3,1029-1047).
gaggggtaccagctgaatt

SEQ ID NO: 169253 - DNA, 19 bp, Homo sapiens
  siRNA target sequence for INHBE (NM_031479.3,1032-1050).
gggtaccagctgaattact

SEQ ID NO: 169254 - DNA, 19 bp, Homo sapiens
  siRNA target sequence for INHBE (NM_031479.3,1197-1215).
ctcctctacctggatcata

SEQ ID NO: 169255 - DNA, 19 bp, Homo sapiens
  siRNA target sequence for LOC145957 (NM_138573.1,217-235).
cccagtcacaagtcgtttt

SEQ ID NO: 169256 - DNA, 19 bp, Homo sapiens
  siRNA target sequence for LOC145957 (NM_138573.1,254-272).
gttatgtgatacctactat

SEQ ID NO: 169257 - DNA, 19 bp, Homo sapiens
  siRNA target sequence for LOC145957 (NM_138573.1,287-305).
gtaggtgcgttgaaaacta

SEQ ID NO: 169258 - DNA, 19 bp, Homo sapiens
  siRNA target sequence for LOC145957 (NM_138573.1,340-358).
ggctccagcatccaaacta

SEQ ID NO: 169259 - DNA, 19 bp, Homo sapiens
  siRNA target sequence for LOC145957 (NM_138573.1,341-359).
gctccagcatccaaactaa

SEQ ID NO: 169260 - DNA, 19 bp, Homo sapiens
  siRNA target sequence for LOC145957 (NM_138573.1,342-360).
ctccagcatccaaactaaa

SEQ ID NO: 169261 - DNA, 19 bp, Homo sapiens
  siRNA target sequence for LOC145957 (NM_138573.1,390-408).
ggcggtcctagtaacactt

SEQ ID NO: 169262 - DNA, 19 bp, Homo sapiens
  siRNA target sequence for LOC145957 (NM_138573.1,391-409).
gcggtcctagtaacactta

SEQ ID NO: 169263 - DNA, 19 bp, Homo sapiens
  siRNA target sequence for LOC145957 (NM_138573.1,392-410).
cggtcctagtaacacttat

SEQ ID NO: 169264 - DNA, 19 bp, Homo sapiens
  siRNA target sequence for LOC145957 (NM_138573.1,394-412).
gtcctagtaacacttatca

SEQ ID NO: 169265 - DNA, 19 bp, Homo sapiens
  siRNA target sequence for LOC145957 (NM_138573.1,396-414).
cctagtaacacttatcatt

SEQ ID NO: 169266 - DNA, 19 bp, Homo sapiens
  siRNA target sequence for LOC145957 (NM_138573.1,458-476).
ccagttcagtccagtatga

SEQ ID NO: 169267 - DNA, 19 bp, Homo sapiens
  siRNA target sequence for LOC145957 (NM_138573.1,459-477).
cagttcagtccagtatgat

SEQ ID NO: 169268 - DNA, 19 bp, Homo sapiens
  siRNA target sequence for MIA (NM_006533.1,271-289).
gccaagtggtgtatgtctt

SEQ ID NO: 169269 - DNA, 19 bp, Homo sapiens
  siRNA target sequence for MIA (NM_006533.1,331-349).
gcgttcagggagattacta

SEQ ID NO: 169270 - DNA, 19 bp, Homo sapiens
  siRNA target sequence for MIA (NM_006533.1,332-350).
cgttcagggagattactat

SEQ ID NO: 169271 - DNA, 19 bp, Homo sapiens
  siRNA target sequence for MIA (NM_006533.1,428-446).
cgatgtgaagacagacaaa

SEQ ID NO: 169272 - DNA, 19 bp, Homo sapiens
  siRNA target sequence for NDP (NM_000266.1,421-439).
gtactagctgcatcctttt

SEQ ID NO: 169273 - DNA, 19 bp, Homo sapiens
  siRNA target sequence for NDP (NM_000266.1,424-442).
ctagctgcatccttttcta

SEQ ID NO: 169274 - DNA, 19 bp, Homo sapiens
  siRNA target sequence for NDP (NM_000266.1,524-542).
gcatgaggcaccactatgt

SEQ ID NO: 169275 - DNA, 19 bp, Homo sapiens
  siRNA target sequence for NDP (NM_000266.1,532-550).
caccactatgtggattcta

SEQ ID NO: 169276 - DNA, 19 bp, Homo sapiens
  siRNA target sequence for NDP (NM_000266.1,535-553).
cactatgtggattctatca

SEQ ID NO: 169277 - DNA, 19 bp, Homo sapiens
  siRNA target sequence for NGFB (NM_002506.1,362-380).
gggcagacccgcaacatta

SEQ ID NO: 169278 - DNA, 19 bp, Homo sapiens
  siRNA target sequence for NGFB (NM_002506.1,364-382).
gcagacccgcaacattact

SEQ ID NO: 169279 - DNA, 19 bp, Homo sapiens
  siRNA target sequence for NGFB (NM_002506.1,383-401).
gtggaccccaggctgttta

SEQ ID NO: 169280 - DNA, 19 bp, Homo sapiens
  siRNA target sequence for NGFB (NM_002506.1,422-440).
ccccgtgtgctgtttagca

SEQ ID NO: 169281 - DNA, 19 bp, Homo sapiens
  siRNA target sequence for NGFB (NM_002506.1,650-668).
ggagaggtgaacattaaca

SEQ ID NO: 169282 - DNA, 19 bp, Homo sapiens
  siRNA target sequence for NGFB (NM_002506.1,674-692).
gtattcaaacagtactttt

SEQ ID NO: 169283 - DNA, 19 bp, Homo sapiens
  siRNA target sequence for NGFB (NM_002506.1,750-768).
caaagcactggaactcata

SEQ ID NO: 169284 - DNA, 19 bp, Homo sapiens
  siRNA target sequence for NGFB (NM_002506.1,754-772).
gcactggaactcatattgt

SEQ ID NO: 169285 - DNA, 19 bp, Homo sapiens
  siRNA target sequence for NGFB (NM_002506.1,829-847).
gcggtttatccggatagat

SEQ ID NO: 169286 - DNA, 19 bp, Homo sapiens
  siRNA target sequence for NGFB (NM_002506.1,830-848).
cggtttatccggatagata

SEQ ID NO: 169287 - DNA, 19 bp, Homo sapiens
  siRNA target sequence for NRG1 (NM_004495.1,870-888).
ctcaactgaaggagcatat

SEQ ID NO: 169288 - DNA, 19 bp, Homo sapiens
  siRNA target sequence for NRG1 (NM_004495.1,900-918).
gtctcccattagaatatca

SEQ ID NO: 169289 - DNA, 19 bp, Homo sapiens
  siRNA target sequence for NRG1 (NM_004495.1,904-922).
cccattagaatatcagtat

SEQ ID NO: 169290 - DNA, 19 bp, Homo sapiens
  siRNA target sequence for NRG1 (NM_013956.1,782-800).
caagcatcttgggattgaa

SEQ ID NO: 169291 - DNA, 19 bp, Homo sapiens
  siRNA target sequence for NRG1 (NM_013956.1,867-885).
cttgtggtcggcatcatgt

SEQ ID NO: 169292 - DNA, 19 bp, Homo sapiens
  siRNA target sequence for NRG1 (NM_013956.1,949-967).
gccttcggtctgaacgaaa

SEQ ID NO: 169293 - DNA, 19 bp, Homo sapiens
  siRNA target sequence for NRG1 (NM_013956.1,954-972).
cggtctgaacgaaacaata

SEQ ID NO: 169294 - DNA, 19 bp, Homo sapiens
  siRNA target sequence for NRG1 (NM_013956.1,955-973).
ggtctgaacgaaacaatat

SEQ ID NO: 169295 - DNA, 19 bp, Homo sapiens
  siRNA target sequence for NRG1 (NM_013956.1,958-976).
ctgaacgaaacaatatgat

SEQ ID NO: 169296 - DNA, 19 bp, Homo sapiens
  siRNA target sequence for NRG1 (NM_013956.1,963-981).
cgaaacaatatgatgaaca

SEQ ID NO: 169297 - DNA, 19 bp, Homo sapiens
  siRNA target sequence for NRG1 (NM_013956.1,1023-1041).
gtccagctggtgaatcaat

SEQ ID NO: 169298 - DNA, 19 bp, Homo sapiens
  siRNA target sequence for NRG1 (NM_013956.1,1028-1046).
gctggtgaatcaatacgta

SEQ ID NO: 169299 - DNA, 19 bp, Homo sapiens
  siRNA target sequence for NRG1 (NM_013956.1,1029-1047).
ctggtgaatcaatacgtat

SEQ ID NO: 169300 - DNA, 19 bp, Homo sapiens
  siRNA target sequence for NRG1 (NM_013956.1,1032-1050).
gtgaatcaatacgtatcta

SEQ ID NO: 169301 - DNA, 19 bp, Homo sapiens
  siRNA target sequence for NRG1 (NM_013956.1,1221-1239).
gtgatgtcatccgtagaaa

SEQ ID NO: 169302 - DNA, 19 bp, Homo sapiens
  siRNA target sequence for NRG1 (NM_013956.1,1226-1244).
gtcatccgtagaaaacagt

SEQ ID NO: 169303 - DNA, 19 bp, Homo sapiens
  siRNA target sequence for NRG1 (NM_013956.1,1267-1285).
gcccaagaggacgtcttaa

SEQ ID NO: 169304 - DNA, 19 bp, Homo sapiens
  siRNA target sequence for NRG1 (NM_013956.1,1268-1286).
cccaagaggacgtcttaat

SEQ ID NO: 169305 - DNA, 19 bp, Homo sapiens
  siRNA target sequence for NRG1 (NM_013956.1,1293-1311).
ggaggccctcgtgaatgta

SEQ ID NO: 169306 - DNA, 19 bp, Homo sapiens
  siRNA target sequence for NRG1 (NM_013956.1,1294-1312).
gaggccctcgtgaatgtaa

SEQ ID NO: 169307 - DNA, 19 bp, Homo sapiens
  siRNA target sequence for NRG1 (NM_013956.1,1296-1314).
ggccctcgtgaatgtaaca

SEQ ID NO: 169308 - DNA, 19 bp, Homo sapiens
  siRNA target sequence for NRG1 (NM_013956.1,1333-1351).
gagaaacccctgattccta

SEQ ID NO: 169309 - DNA, 19 bp, Homo sapiens
  siRNA target sequence for NRG1 (NM_013956.1,1352-1370).
ccgagactctcctcatagt

SEQ ID NO: 169310 - DNA, 19 bp, Homo sapiens
  siRNA target sequence for NRG1 (NM_013956.1,1354-1372).
gagactctcctcatagtga

SEQ ID NO: 169311 - DNA, 19 bp, Homo sapiens
  siRNA target sequence for NRG1 (NM_013956.1,1365-1383).
catagtgaaaggtatgtgt

SEQ ID NO: 169312 - DNA, 19 bp, Homo sapiens
  siRNA target sequence for NRG1 (NM_013956.1,1404-1422).
cgtatgtcacctgtagatt

SEQ ID NO: 169313 - DNA, 19 bp, Homo sapiens
  siRNA target sequence for NRG1 (NM_013956.1,1405-1423).
gtatgtcacctgtagattt

SEQ ID NO: 169314 - DNA, 19 bp, Homo sapiens
  siRNA target sequence for NRG1 (NM_013956.1,1705-1723).
cagcccaagagcctgttaa

SEQ ID NO: 169315 - DNA, 19 bp, Homo sapiens
  siRNA target sequence for NRG1 (NM_013956.1,1707-1725).
gcccaagagcctgttaaga

SEQ ID NO: 169316 - DNA, 19 bp, Homo sapiens
  siRNA target sequence for NRG1 (NM_013956.1,1708-1726).
cccaagagcctgttaagaa

SEQ ID NO: 169317 - DNA, 19 bp, Homo sapiens
  siRNA target sequence for NRG1 (NM_013956.1,1762-1780).
ccaatggccacattgctaa

SEQ ID NO: 169318 - DNA, 19 bp, Homo sapiens
  siRNA target sequence for NRG1 (NM_013956.1,1767-1785).
ggccacattgctaacagat

SEQ ID NO: 169319 - DNA, 19 bp, Homo sapiens
  siRNA target sequence for NRG1 (NM_013956.1,1768-1786).
gccacattgctaacagatt

SEQ ID NO: 169320 - DNA, 19 bp, Homo sapiens
  siRNA target sequence for NRG1 (NM_013956.1,1772-1790).
cattgctaacagattggaa

SEQ ID NO: 169321 - DNA, 19 bp, Homo sapiens
  siRNA target sequence for NRG1 (NM_013956.1,1963-1981).
cgacacaggaagaaatcca

SEQ ID NO: 169322 - DNA, 19 bp, Homo sapiens
  siRNA target sequence for NRG1 (NM_013956.1,1982-2000).
ggccaggctgtctagtgta

SEQ ID NO: 169323 - DNA, 19 bp, Homo sapiens
  siRNA target sequence for NRG1 (NM_013956.1,1983-2001).
gccaggctgtctagtgtaa

SEQ ID NO: 169324 - DNA, 19 bp, Homo sapiens
  siRNA target sequence for NRG1 (NM_013956.1,1984-2002).
ccaggctgtctagtgtaat

SEQ ID NO: 169325 - DNA, 19 bp, Homo sapiens
  siRNA target sequence for NRG1 (NM_013956.1,1988-2006).
gctgtctagtgtaattgct

SEQ ID NO: 169326 - DNA, 19 bp, Homo sapiens
  siRNA target sequence for NRG1 (NM_013956.1,1989-2007).
ctgtctagtgtaattgcta

SEQ ID NO: 169327 - DNA, 19 bp, Homo sapiens
  siRNA target sequence for NRG1 (NM_013959.1,781-799).
gcctcaagtgggtatttgt

SEQ ID NO: 169328 - DNA, 19 bp, Homo sapiens
  siRNA target sequence for NRG1 (NM_013959.1,905-923).
gtcgtctgaggcatacact

SEQ ID NO: 169329 - DNA, 19 bp, Homo sapiens
  siRNA target sequence for NRG1 (NM_013959.1,1010-1028).
ggcaccgacaccgaagaat

SEQ ID NO: 169330 - DNA, 19 bp, Homo sapiens
  siRNA target sequence for NRG1 (NM_013959.1,1014-1032).
ccgacaccgaagaatcgta

SEQ ID NO: 169331 - DNA, 19 bp, Homo sapiens
  siRNA target sequence for NRG1 (NM_013959.1,1158-1176).
cctaaactttctacatcta

SEQ ID NO: 169332 - DNA, 19 bp, Homo sapiens
  siRNA target sequence for NRG1 (NM_013960.1,756-774).
cactggagcaagatgtact

SEQ ID NO: 169333 - DNA, 19 bp, Homo sapiens
  siRNA target sequence for NRG1 (NM_013960.1,1412-1430).
cacacagatccaaatgcat

SEQ ID NO: 169334 - DNA, 19 bp, Homo sapiens
  siRNA target sequence for NRG1 (NM_013960.1,1440-1458).
gctatcagcaactcatctt

SEQ ID NO: 169335 - DNA, 19 bp, Homo sapiens
  siRNA target sequence for NRG1 (NM_013960.1,1441-1459).
ctatcagcaactcatctta

SEQ ID NO: 169336 - DNA, 19 bp, Homo sapiens
  siRNA target sequence for NRG1 (NM_013960.1,1477-1495).
catttgggcttcattctct

SEQ ID NO: 169337 - DNA, 19 bp, Homo sapiens
  siRNA target sequence for NRG1 (NM_013962.1,869-887).
gcaggtacatcttcttcat

SEQ ID NO: 169338 - DNA, 19 bp, Homo sapiens
  siRNA target sequence for NRG1 (NM_013962.1,1297-1315).
gaatcaaacgctacatcta

SEQ ID NO: 169339 - DNA, 19 bp, Homo sapiens
  siRNA target sequence for NRG2 (NM_004883.1,691-709).
ggtcgggtggcgttggtaa

SEQ ID NO: 169340 - DNA, 19 bp, Homo sapiens
  siRNA target sequence for NRG2 (NM_004883.1,692-710).
gtcgggtggcgttggtaaa

SEQ ID NO: 169341 - DNA, 19 bp, Homo sapiens
  siRNA target sequence for NRG2 (NM_004883.1,827-845).
cggaacagcccttagtctt

SEQ ID NO: 169342 - DNA, 19 bp, Homo sapiens
  siRNA target sequence for NRG2 (NM_004883.1,828-846).
ggaacagcccttagtcttt

SEQ ID NO: 169343 - DNA, 19 bp, Homo sapiens
  siRNA target sequence for NRG2 (NM_004883.1,829-847).
gaacagcccttagtcttta

SEQ ID NO: 169344 - DNA, 19 bp, Homo sapiens
  siRNA target sequence for NRG2 (NM_004883.1,832-850).
cagcccttagtctttaaga

SEQ ID NO: 169345 - DNA, 19 bp, Homo sapiens
  siRNA target sequence for NRG2 (NM_004883.1,867-885).
cgataccaacggcaaaaat

SEQ ID NO: 169346 - DNA, 19 bp, Homo sapiens
  siRNA target sequence for NRG2 (NM_004883.1,1056-1074).
caaccgcagccgagacatt

SEQ ID NO: 169347 - DNA, 19 bp, Homo sapiens
  siRNA target sequence for NRG2 (NM_004883.1,1065-1083).
ccgagacattcgcatcaaa

SEQ ID NO: 169348 - DNA, 19 bp, Homo sapiens
  siRNA target sequence for NRG2 (NM_004883.1,1066-1084).
cgagacattcgcatcaaat

SEQ ID NO: 169349 - DNA, 19 bp, Homo sapiens
  siRNA target sequence for NRG2 (NM_004883.1,1087-1105).
ggcaacggcagaaagaact

SEQ ID NO: 169350 - DNA, 19 bp, Homo sapiens
  siRNA target sequence for NRG2 (NM_004883.1,1106-1124).
cacgactacagttcaacaa

SEQ ID NO: 169351 - DNA, 19 bp, Homo sapiens
  siRNA target sequence for NRG2 (NM_004883.1,1291-1309).
ggaggcgtctgctactaca

SEQ ID NO: 169352 - DNA, 19 bp, Homo sapiens
  siRNA target sequence for NRG2 (NM_004883.1,1292-1310).
gaggcgtctgctactacat

SEQ ID NO: 169353 - DNA, 19 bp, Homo sapiens
  siRNA target sequence for NRG2 (NM_004883.1,1395-1413).
catgccagatcctaagcaa

SEQ ID NO: 169354 - DNA, 19 bp, Homo sapiens
  siRNA target sequence for NRG2 (NM_004883.1,1825-1843).
cagtcggggatcatgctat

SEQ ID NO: 169355 - DNA, 19 bp, Homo sapiens
  siRNA target sequence for NRG2 (NM_004883.1,1830-1848).
ggggatcatgctatcatca

SEQ ID NO: 169356 - DNA, 19 bp, Homo sapiens
  siRNA target sequence for NRG2 (NM_004883.1,1849-1867).
gtgggtaccagcaaatgca

SEQ ID NO: 169357 - DNA, 19 bp, Homo sapiens
  siRNA target sequence for NRG2 (NM_004883.1,2241-2259).
cagctatgacagctactat

SEQ ID NO: 169358 - DNA, 19 bp, Homo sapiens
  siRNA target sequence for NRG2 (NM_004883.1,2243-2261).
gctatgacagctactatta

SEQ ID NO: 169359 - DNA, 19 bp, Homo sapiens
  siRNA target sequence for NRG2 (NM_004883.1,2671-2689).
gccgacagcaggacttact

SEQ ID NO: 169360 - DNA, 19 bp, Homo sapiens
  siRNA target sequence for NRG2 (NM_004883.1,2672-2690).
ccgacagcaggacttacta

SEQ ID NO: 169361 - DNA, 19 bp, Homo sapiens
  siRNA target sequence for NRG2 (NM_013982.1,1400-1418).
cagatcctaagcaaaagca

SEQ ID NO: 169362 - DNA, 19 bp, Homo sapiens
  siRNA target sequence for NRG2 (NM_013982.1,1410-1428).
gcaaaagcaccttggattt

SEQ ID NO: 169363 - DNA, 19 bp, Homo sapiens
  siRNA target sequence for NRG2 (NM_013982.1,1417-1435).
caccttggatttgaattaa

SEQ ID NO: 169364 - DNA, 19 bp, Homo sapiens
  siRNA target sequence for NRG2 (NM_013984.1,1400-1418).
cagatcctaagcaaagtgt

SEQ ID NO: 169365 - DNA, 19 bp, Homo sapiens
  siRNA target sequence for NTF3 (NM_002527.2,121-139).
catcttgttttatgtgata

SEQ ID NO: 169366 - DNA, 19 bp, Homo sapiens
  siRNA target sequence for NTF3 (NM_002527.2,156-174).
gtggcatccaaggtaacaa

SEQ ID NO: 169367 - DNA, 19 bp, Homo sapiens
  siRNA target sequence for NTF3 (NM_002527.2,159-177).
gcatccaaggtaacaacat

SEQ ID NO: 169368 - DNA, 19 bp, Homo sapiens
  siRNA target sequence for NTF3 (NM_002527.2,167-185).
ggtaacaacatggatcaaa

SEQ ID NO: 169369 - DNA, 19 bp, Homo sapiens
  siRNA target sequence for NTF3 (NM_002527.2,194-212).
ccagaagactcgctcaatt

SEQ ID NO: 169370 - DNA, 19 bp, Homo sapiens
  siRNA target sequence for NTF3 (NM_002527.2,204-222).
cgctcaattccctcattat

SEQ ID NO: 169371 - DNA, 19 bp, Homo sapiens
  siRNA target sequence for NTF3 (NM_002527.2,205-223).
gctcaattccctcattatt

SEQ ID NO: 169372 - DNA, 19 bp, Homo sapiens
  siRNA target sequence for NTF3 (NM_002527.2,268-286).
gatggtggacgttaaggaa

SEQ ID NO: 169373 - DNA, 19 bp, Homo sapiens
  siRNA target sequence for NTF3 (NM_002527.2,271-289).
ggtggacgttaaggaaaat

SEQ ID NO: 169374 - DNA, 19 bp, Homo sapiens
  siRNA target sequence for NTF3 (NM_002527.2,272-290).
gtggacgttaaggaaaatt

SEQ ID NO: 169375 - DNA, 19 bp, Homo sapiens
  siRNA target sequence for NTF3 (NM_002527.2,527-545).
cggtacgcggagcataaga

SEQ ID NO: 169376 - DNA, 19 bp, Homo sapiens
  siRNA target sequence for NTF3 (NM_002527.2,529-547).
gtacgcggagcataagagt

SEQ ID NO: 169377 - DNA, 19 bp, Homo sapiens
  siRNA target sequence for NTF3 (NM_002527.2,555-573).
gggagtactcggtatgtga

SEQ ID NO: 169378 - DNA, 19 bp, Homo sapiens
  siRNA target sequence for NTF3 (NM_002527.2,660-678).
gcaactctcccgtcaaaca

SEQ ID NO: 169379 - DNA, 19 bp, Homo sapiens
  siRNA target sequence for NTF3 (NM_002527.2,661-679).
caactctcccgtcaaacaa

SEQ ID NO: 169380 - DNA, 19 bp, Homo sapiens
  siRNA target sequence for NTF3 (NM_002527.2,664-682).
ctctcccgtcaaacaatat

SEQ ID NO: 169381 - DNA, 19 bp, Homo sapiens
  siRNA target sequence for NTF3 (NM_002527.2,666-684).
ctcccgtcaaacaatattt

SEQ ID NO: 169382 - DNA, 19 bp, Homo sapiens
  siRNA target sequence for NTF3 (NM_002527.2,704-722).
gaagccaggccggtcaaaa

SEQ ID NO: 169383 - DNA, 19 bp, Homo sapiens
  siRNA target sequence for NTF3 (NM_002527.2,729-747).
gcaggggtattgatgataa

SEQ ID NO: 169384 - DNA, 19 bp, Homo sapiens
  siRNA target sequence for NTF3 (NM_002527.2,732-750).
ggggtattgatgataaaca

SEQ ID NO: 169385 - DNA, 19 bp, Homo sapiens
  siRNA target sequence for NTF3 (NM_002527.2,754-772).
gaactctcagtgcaaaaca

SEQ ID NO: 169386 - DNA, 19 bp, Homo sapiens
  siRNA target sequence for NTF3 (NM_002527.2,827-845).
cggtggatacggatagaca

SEQ ID NO: 169387 - DNA, 19 bp, Homo sapiens
  siRNA target sequence for NTF5 (NM_006179.3,530-548).
gtcccctccgccagtactt

SEQ ID NO: 169388 - DNA, 19 bp, Homo sapiens
  siRNA target sequence for NTF5 (NM_006179.3,538-556).
cgccagtacttctttgaaa

SEQ ID NO: 169389 - DNA, 19 bp, Homo sapiens
  siRNA target sequence for NTF5 (NM_006179.3,557-575).
cccgctgcaaggctgataa

SEQ ID NO: 169390 - DNA, 19 bp, Homo sapiens
  siRNA target sequence for NTF5 (NM_006179.3,707-725).
gctggcgatggattcgaat

SEQ ID NO: 169391 - DNA, 19 bp, Homo sapiens
  siRNA target sequence for NTF5 (NM_006179.3,708-726).
ctggcgatggattcgaatt

SEQ ID NO: 169392 - DNA, 19 bp, Homo sapiens
  siRNA target sequence for NTF5 (NM_006179.3,710-728).
ggcgatggattcgaattga

SEQ ID NO: 169393 - DNA, 19 bp, Homo sapiens
  siRNA target sequence for NTF5 (NM_006179.3,712-730).
cgatggattcgaattgaca

SEQ ID NO: 169394 - DNA, 19 bp, Homo sapiens
  siRNA target sequence for NUDT6 (NM_007083.3,381-399).
cacgcagaatcggattcat

SEQ ID NO: 169395 - DNA, 19 bp, Homo sapiens
  siRNA target sequence for NUDT6 (NM_007083.3,383-401).
cgcagaatcggattcatca

SEQ ID NO: 169396 - DNA, 19 bp, Homo sapiens
  siRNA target sequence for NUDT6 (NM_007083.3,499-517).
gaaaaatactggttgtaca

SEQ ID NO: 169397 - DNA, 19 bp, Homo sapiens
  siRNA target sequence for NUDT6 (NM_007083.3,510-528).
gttgtacaagatcgaaata

SEQ ID NO: 169398 - DNA, 19 bp, Homo sapiens
  siRNA target sequence for NUDT6 (NM_007083.3,513-531).
gtacaagatcgaaataaat

SEQ ID NO: 169399 - DNA, 19 bp, Homo sapiens
  siRNA target sequence for NUDT6 (NM_007083.3,516-534).
caagatcgaaataaattga

SEQ ID NO: 169400 - DNA, 19 bp, Homo sapiens
  siRNA target sequence for NUDT6 (NM_007083.3,590-608).
cacagcggttcgagaagtt

SEQ ID NO: 169401 - DNA, 19 bp, Homo sapiens
  siRNA target sequence for NUDT6 (NM_007083.3,638-656).
caggtccgtcctgagtatt

SEQ ID NO: 169402 - DNA, 19 bp, Homo sapiens
  siRNA target sequence for NUDT6 (NM_007083.3,681-699).
gcttttgggaagtcagata

SEQ ID NO: 169403 - DNA, 19 bp, Homo sapiens
  siRNA target sequence for NUDT6 (NM_007083.3,713-731).
ccgcctaaagccatattca

SEQ ID NO: 169404 - DNA, 19 bp, Homo sapiens
  siRNA target sequence for NUDT6 (NM_007083.3,714-732).
cgcctaaagccatattcat

SEQ ID NO: 169405 - DNA, 19 bp, Homo sapiens
  siRNA target sequence for NUDT6 (NM_007083.3,715-733).
gcctaaagccatattcatt

SEQ ID NO: 169406 - DNA, 19 bp, Homo sapiens
  siRNA target sequence for NUDT6 (NM_007083.3,717-735).
ctaaagccatattcattca

SEQ ID NO: 169407 - DNA, 19 bp, Homo sapiens
  siRNA target sequence for NUDT6 (NM_007083.3,789-807).
gacctggcgaagactgaaa

SEQ ID NO: 169408 - DNA, 19 bp, Homo sapiens
  siRNA target sequence for NUDT6 (NM_007083.3,791-809).
cctggcgaagactgaaaat

SEQ ID NO: 169409 - DNA, 19 bp, Homo sapiens
  siRNA target sequence for NUDT6 (NM_007083.3,794-812).
ggcgaagactgaaaataca

SEQ ID NO: 169410 - DNA, 19 bp, Homo sapiens
  siRNA target sequence for NUDT6 (NM_007083.3,920-938).
gttttataaactctatcat

SEQ ID NO: 169411 - DNA, 19 bp, Homo sapiens
  siRNA target sequence for NUDT6 (NM_007083.3,942-960).
gaactgccagagaattata

SEQ ID NO: 169412 - DNA, 19 bp, Homo sapiens
  siRNA target sequence for OGN (NM_014057.2,174-192).
ctgcttgtgcctctgataa

SEQ ID NO: 169413 - DNA, 19 bp, Homo sapiens
  siRNA target sequence for OGN (NM_014057.2,215-233).
ggactcacgcattatctat

SEQ ID NO: 169414 - DNA, 19 bp, Homo sapiens
  siRNA target sequence for OGN (NM_014057.2,218-236).
ctcacgcattatctatgat

SEQ ID NO: 169415 - DNA, 19 bp, Homo sapiens
  siRNA target sequence for OGN (NM_014057.2,220-238).
cacgcattatctatgatta

SEQ ID NO: 169416 - DNA, 19 bp, Homo sapiens
  siRNA target sequence for OGN (NM_014057.2,262-280).
ccatatttagccaagatta

SEQ ID NO: 169417 - DNA, 19 bp, Homo sapiens
  siRNA target sequence for OGN (NM_014057.2,477-495).
gctgtaccacccttaccaa

SEQ ID NO: 169418 - DNA, 19 bp, Homo sapiens
  siRNA target sequence for OGN (NM_014057.2,510-528).
ctttacgcacgattcaaca

SEQ ID NO: 169419 - DNA, 19 bp, Homo sapiens
  siRNA target sequence for OGN (NM_014057.2,515-533).
cgcacgattcaacaaaatt

SEQ ID NO: 169420 - DNA, 19 bp, Homo sapiens
  siRNA target sequence for OGN (NM_014057.2,563-581).
catacctaacttaagaaga

SEQ ID NO: 169421 - DNA, 19 bp, Homo sapiens
  siRNA target sequence for OGN (NM_014057.2,644-662).
gttagaagaactttcactt

SEQ ID NO: 169422 - DNA, 19 bp, Homo sapiens
  siRNA target sequence for OGN (NM_014057.2,663-681).
gctgaaaatcaactactaa

SEQ ID NO: 169423 - DNA, 19 bp, Homo sapiens
  siRNA target sequence for OGN (NM_014057.2,742-760).
gtaggggaatcaaagcaaa

SEQ ID NO: 169424 - DNA, 19 bp, Homo sapiens
  siRNA target sequence for OGN (NM_014057.2,762-780).
gcattcaaaaaactgaata

SEQ ID NO: 169425 - DNA, 19 bp, Homo sapiens
  siRNA target sequence for OGN (NM_014057.2,815-833).
ggaatccgtgcctcttaat

SEQ ID NO: 169426 - DNA, 19 bp, Homo sapiens
  siRNA target sequence for OGN (NM_014057.2,816-834).
gaatccgtgcctcttaatt

SEQ ID NO: 169427 - DNA, 19 bp, Homo sapiens
  siRNA target sequence for OGN (NM_014057.2,838-856).
cagaaagtctacgtgtaat

SEQ ID NO: 169428 - DNA, 19 bp, Homo sapiens
  siRNA target sequence for OGN (NM_014057.2,844-862).
gtctacgtgtaattcatct

SEQ ID NO: 169429 - DNA, 19 bp, Homo sapiens
  siRNA target sequence for OGN (NM_014057.2,909-927).
gctaatgacaccagttaca

SEQ ID NO: 169430 - DNA, 19 bp, Homo sapiens
  siRNA target sequence for OGN (NM_014057.2,910-928).
ctaatgacaccagttacat

SEQ ID NO: 169431 - DNA, 19 bp, Homo sapiens
  siRNA target sequence for OGN (NM_014057.2,926-944).
catccgggaccgcattgaa

SEQ ID NO: 169432 - DNA, 19 bp, Homo sapiens
  siRNA target sequence for OGN (NM_014057.2,932-950).
ggaccgcattgaagagata

SEQ ID NO: 169433 - DNA, 19 bp, Homo sapiens
  siRNA target sequence for OGN (NM_014057.2,977-995).
gggaaagcatccaaacagt

SEQ ID NO: 169434 - DNA, 19 bp, Homo sapiens
  siRNA target sequence for OGN (NM_014057.2,1017-1035).
ccgatagggtcatactttt

SEQ ID NO: 169435 - DNA, 19 bp, Homo sapiens
  siRNA target sequence for PDGFC (NM_016205.1,673-691).
caaggtttcctcatactta

SEQ ID NO: 169436 - DNA, 19 bp, Homo sapiens
  siRNA target sequence for PDGFC (NM_016205.1,677-695).
gtttcctcatacttatcca

SEQ ID NO: 169437 - DNA, 19 bp, Homo sapiens
  siRNA target sequence for PDGFC (NM_016205.1,682-700).
ctcatacttatccaagaaa

SEQ ID NO: 169438 - DNA, 19 bp, Homo sapiens
  siRNA target sequence for PDGFC (NM_016205.1,704-722).
ggtcttggtatggagatta

SEQ ID NO: 169439 - DNA, 19 bp, Homo sapiens
  siRNA target sequence for PDGFC (NM_016205.1,746-764).
gatacaacttacgtttgat

SEQ ID NO: 169440 - DNA, 19 bp, Homo sapiens
  siRNA target sequence for PDGFC (NM_016205.1,795-813).
gacatatgcaagtatgatt

SEQ ID NO: 169441 - DNA, 19 bp, Homo sapiens
  siRNA target sequence for PDGFC (NM_016205.1,797-815).
catatgcaagtatgatttt

SEQ ID NO: 169442 - DNA, 19 bp, Homo sapiens
  siRNA target sequence for PDGFC (NM_016205.1,832-850).
ccagtgatggaactatatt

SEQ ID NO: 169443 - DNA, 19 bp, Homo sapiens
  siRNA target sequence for PDGFC (NM_016205.1,860-878).
gtgtggttctggtactgta

SEQ ID NO: 169444 - DNA, 19 bp, Homo sapiens
  siRNA target sequence for PDGFC (NM_016205.1,913-931).
ggataagatttgtatctga

SEQ ID NO: 169445 - DNA, 19 bp, Homo sapiens
  siRNA target sequence for PDGFC (NM_016205.1,1041-1059).
gacctgcttaataatgcta

SEQ ID NO: 169446 - DNA, 19 bp, Homo sapiens
  siRNA target sequence for PDGFC (NM_016205.1,1056-1074).
gctataactgcctttagta

SEQ ID NO: 169447 - DNA, 19 bp, Homo sapiens
  siRNA target sequence for PDGFC (NM_016205.1,1072-1090).
gtaccttggaagaccttat

SEQ ID NO: 169448 - DNA, 19 bp, Homo sapiens
  siRNA target sequence for PDGFC (NM_016205.1,1079-1097).
ggaagaccttattcgatat

SEQ ID NO: 169449 - DNA, 19 bp, Homo sapiens
  siRNA target sequence for PDGFC (NM_016205.1,1118-1136).
gttggacttagaagatcta

SEQ ID NO: 169450 - DNA, 19 bp, Homo sapiens
  siRNA target sequence for PDGFC (NM_016205.1,1121-1139).
ggacttagaagatctatat

SEQ ID NO: 169451 - DNA, 19 bp, Homo sapiens
  siRNA target sequence for PDGFC (NM_016205.1,1122-1140).
gacttagaagatctatata

SEQ ID NO: 169452 - DNA, 19 bp, Homo sapiens
  siRNA target sequence for PDGFC (NM_016205.1,1141-1159).
ggccaacttggcaacttct

SEQ ID NO: 169453 - DNA, 19 bp, Homo sapiens
  siRNA target sequence for PDGFC (NM_016205.1,1142-1160).
gccaacttggcaacttctt

SEQ ID NO: 169454 - DNA, 19 bp, Homo sapiens
  siRNA target sequence for PDGFC (NM_016205.1,1199-1217).
ggatctgaaccttctaaca

SEQ ID NO: 169455 - DNA, 19 bp, Homo sapiens
  siRNA target sequence for PDGFC (NM_016205.1,1216-1234).
cagaggaggtaagattata

SEQ ID NO: 169456 - DNA, 19 bp, Homo sapiens
  siRNA target sequence for PDGFC (NM_016205.1,1237-1255).
gctgcacacctcgtaactt

SEQ ID NO: 169457 - DNA, 19 bp, Homo sapiens
  siRNA target sequence for PDGFC (NM_016205.1,1348-1366).
gttgtctccacaattgcaa

SEQ ID NO: 169458 - DNA, 19 bp, Homo sapiens
  siRNA target sequence for PDGFC (NM_016205.1,1363-1381).
gcaatgaatgtcaatgtgt

SEQ ID NO: 169459 - DNA, 19 bp, Homo sapiens
  siRNA target sequence for PDGFC (NM_016205.1,1380-1398).
gtcccaagcaaagttacta

SEQ ID NO: 169460 - DNA, 19 bp, Homo sapiens
  siRNA target sequence for PDGFC (NM_016205.1,1440-1458).
gtcaggggattgcacaaat

SEQ ID NO: 169461 - DNA, 19 bp, Homo sapiens
  siRNA target sequence for PGF (NM_002632.3,546-564).
gcgaggtggagcacatgtt

SEQ ID NO: 169462 - DNA, 19 bp, Homo sapiens
  siRNA target sequence for PGF (NM_002632.3,600-618).
gctgctgcggcgatgagaa

SEQ ID NO: 169463 - DNA, 19 bp, Homo sapiens
  siRNA target sequence for PGF (NM_002632.3,601-619).
ctgctgcggcgatgagaat

SEQ ID NO: 169464 - DNA, 19 bp, Homo sapiens
  siRNA target sequence for PGF (NM_002632.3,603-621).
gctgcggcgatgagaatct

SEQ ID NO: 169465 - DNA, 19 bp, Homo sapiens
  siRNA target sequence for PGF (NM_002632.3,635-653).
gtggagacggccaatgtca

SEQ ID NO: 169466 - DNA, 19 bp, Homo sapiens
  siRNA target sequence for PGF (NM_002632.3,654-672).
ccatgcagctcctaaagat

SEQ ID NO: 169467 - DNA, 19 bp, Homo sapiens
  siRNA target sequence for PROK1 (NM_032414.1,62-80).
gtgccacgcgagtctcaat

SEQ ID NO: 169468 - DNA, 19 bp, Homo sapiens
  siRNA target sequence for PROK1 (NM_032414.1,64-82).
gccacgcgagtctcaatca

SEQ ID NO: 169469 - DNA, 19 bp, Homo sapiens
  siRNA target sequence for PROK1 (NM_032414.1,65-83).
ccacgcgagtctcaatcat

SEQ ID NO: 169470 - DNA, 19 bp, Homo sapiens
  siRNA target sequence for RABEP1 (NM_004703.2,214-232).
ccagcctgacgtttctctt

SEQ ID NO: 169471 - DNA, 19 bp, Homo sapiens
  siRNA target sequence for RABEP1 (NM_004703.2,364-382).
gaggcaaaatgcagtatta

SEQ ID NO: 169472 - DNA, 19 bp, Homo sapiens
  siRNA target sequence for RABEP1 (NM_004703.2,366-384).
ggcaaaatgcagtattaca

SEQ ID NO: 169473 - DNA, 19 bp, Homo sapiens
  siRNA target sequence for RABEP1 (NM_004703.2,487-505).
gcaagaagctatagatgaa

SEQ ID NO: 169474 - DNA, 19 bp, Homo sapiens
  siRNA target sequence for RABEP1 (NM_004703.2,513-531).
gacagtggagagaagaagt

SEQ ID NO: 169475 - DNA, 19 bp, Homo sapiens
  siRNA target sequence for RABEP1 (NM_004703.2,537-555).
cacttcaggctgttatgaa

SEQ ID NO: 169476 - DNA, 19 bp, Homo sapiens
  siRNA target sequence for RABEP1 (NM_004703.2,777-795).
cagctttgaaggataaact

SEQ ID NO: 169477 - DNA, 19 bp, Homo sapiens
  siRNA target sequence for RABEP1 (NM_004703.2,824-842).
ctggaggcctcaaaggtta

SEQ ID NO: 169478 - DNA, 19 bp, Homo sapiens
  siRNA target sequence for RABEP1 (NM_004703.2,826-844).
ggaggcctcaaaggttaaa

SEQ ID NO: 169479 - DNA, 19 bp, Homo sapiens
  siRNA target sequence for RABEP1 (NM_004703.2,862-880).
ggaagctgagaaatcttgt

SEQ ID NO: 169480 - DNA, 19 bp, Homo sapiens
  siRNA target sequence for RABEP1 (NM_004703.2,863-881).
gaagctgagaaatcttgta

SEQ ID NO: 169481 - DNA, 19 bp, Homo sapiens
  siRNA target sequence for RABEP1 (NM_004703.2,876-894).
cttgtaggactgatctaga

SEQ ID NO: 169482 - DNA, 19 bp, Homo sapiens
  siRNA target sequence for RABEP1 (NM_004703.2,885-903).
ctgatctagagatgtatgt

SEQ ID NO: 169483 - DNA, 19 bp, Homo sapiens
  siRNA target sequence for RABEP1 (NM_004703.2,898-916).
gtatgtagctgttttgaat

SEQ ID NO: 169484 - DNA, 19 bp, Homo sapiens
  siRNA target sequence for RABEP1 (NM_004703.2,958-976).
gaaagaattgcatgaagtt

SEQ ID NO: 169485 - DNA, 19 bp, Homo sapiens
  siRNA target sequence for RABEP1 (NM_004703.2,1055-1073).
gaatctcagcgtttactga

SEQ ID NO: 169486 - DNA, 19 bp, Homo sapiens
  siRNA target sequence for RABEP1 (NM_004703.2,1093-1111).
ggagattgtgctaacttca

SEQ ID NO: 169487 - DNA, 19 bp, Homo sapiens
  siRNA target sequence for RABEP1 (NM_004703.2,1256-1274).
gaatcttcagcccagttat

SEQ ID NO: 169488 - DNA, 19 bp, Homo sapiens
  siRNA target sequence for RABEP1 (NM_004703.2,1260-1278).
cttcagcccagttatcaaa

SEQ ID NO: 169489 - DNA, 19 bp, Homo sapiens
  siRNA target sequence for RABEP1 (NM_004703.2,1305-1323).
gtggctcagttcattcctt

SEQ ID NO: 169490 - DNA, 19 bp, Homo sapiens
  siRNA target sequence for RABEP1 (NM_004703.2,1347-1365).
ctggagatcctttcagtaa

SEQ ID NO: 169491 - DNA, 19 bp, Homo sapiens
  siRNA target sequence for RABEP1 (NM_004703.2,1349-1367).
ggagatcctttcagtaaat

SEQ ID NO: 169492 - DNA, 19 bp, Homo sapiens
  siRNA target sequence for RABEP1 (NM_004703.2,1368-1386).
cggacaatgacatgtttaa

SEQ ID NO: 169493 - DNA, 19 bp, Homo sapiens
  siRNA target sequence for RABEP1 (NM_004703.2,1431-1449).
cgggctcattgcaatccaa

SEQ ID NO: 169494 - DNA, 19 bp, Homo sapiens
  siRNA target sequence for RABEP1 (NM_004703.2,1432-1450).
gggctcattgcaatccaaa

SEQ ID NO: 169495 - DNA, 19 bp, Homo sapiens
  siRNA target sequence for RABEP1 (NM_004703.2,1446-1464).
ccaaagctttaggctataa

SEQ ID NO: 169496 - DNA, 19 bp, Homo sapiens
  siRNA target sequence for RABEP1 (NM_004703.2,1451-1469).
gctttaggctataactaca

SEQ ID NO: 169497 - DNA, 19 bp, Homo sapiens
  siRNA target sequence for RABEP1 (NM_004703.2,1489-1507).
cctggacgagtcagatttt

SEQ ID NO: 169498 - DNA, 19 bp, Homo sapiens
  siRNA target sequence for RABEP1 (NM_004703.2,1532-1550).
gtgtctgagaactttgata

SEQ ID NO: 169499 - DNA, 19 bp, Homo sapiens
  siRNA target sequence for RABEP1 (NM_004703.2,1534-1552).
gtctgagaactttgatact

SEQ ID NO: 169500 - DNA, 19 bp, Homo sapiens
  siRNA target sequence for RABEP1 (NM_004703.2,1576-1594).
gccaagtgggtttatgtta

SEQ ID NO: 169501 - DNA, 19 bp, Homo sapiens
  siRNA target sequence for RABEP1 (NM_004703.2,1577-1595).
ccaagtgggtttatgttaa

SEQ ID NO: 169502 - DNA, 19 bp, Homo sapiens
  siRNA target sequence for RABEP1 (NM_004703.2,1581-1599).
gtgggtttatgttaaccaa

SEQ ID NO: 169503 - DNA, 19 bp, Homo sapiens
  siRNA target sequence for RABEP1 (NM_004703.2,1621-1639).
ggcgatgacaccagaacaa

SEQ ID NO: 169504 - DNA, 19 bp, Homo sapiens
  siRNA target sequence for RABEP1 (NM_004703.2,1623-1641).
cgatgacaccagaacaaga

SEQ ID NO: 169505 - DNA, 19 bp, Homo sapiens
  siRNA target sequence for RABEP1 (NM_004703.2,1698-1716).
cccctagtggttatcgttt

SEQ ID NO: 169506 - DNA, 19 bp, Homo sapiens
  siRNA target sequence for RABEP1 (NM_004703.2,1699-1717).
ccctagtggttatcgttta

SEQ ID NO: 169507 - DNA, 19 bp, Homo sapiens
  siRNA target sequence for RABEP1 (NM_004703.2,1701-1719).
ctagtggttatcgtttagt

SEQ ID NO: 169508 - DNA, 19 bp, Homo sapiens
  siRNA target sequence for RABEP1 (NM_004703.2,1707-1725).
gttatcgtttagttagtga

SEQ ID NO: 169509 - DNA, 19 bp, Homo sapiens
  siRNA target sequence for RABEP1 (NM_004703.2,1747-1765).
gaaagaggtacataatgct

SEQ ID NO: 169510 - DNA, 19 bp, Homo sapiens
  siRNA target sequence for RABEP1 (NM_004703.2,1775-1793).
cttggtagacgttgtgata

SEQ ID NO: 169511 - DNA, 19 bp, Homo sapiens
  siRNA target sequence for RABEP1 (NM_004703.2,1778-1796).
ggtagacgttgtgatatgt

SEQ ID NO: 169512 - DNA, 19 bp, Homo sapiens
  siRNA target sequence for RABEP1 (NM_004703.2,1795-1813).
gtgttccaattacgaaaaa

SEQ ID NO: 169513 - DNA, 19 bp, Homo sapiens
  siRNA target sequence for RABEP1 (NM_004703.2,1797-1815).
gttccaattacgaaaaaca

SEQ ID NO: 169514 - DNA, 19 bp, Homo sapiens
  siRNA target sequence for RABEP1 (NM_004703.2,1801-1819).
caattacgaaaaacagtta

SEQ ID NO: 169515 - DNA, 19 bp, Homo sapiens
  siRNA target sequence for RABEP1 (NM_004703.2,1814-1832).
cagttacaaggaattcaga

SEQ ID NO: 169516 - DNA, 19 bp, Homo sapiens
  siRNA target sequence for RABEP1 (NM_004703.2,1816-1834).
gttacaaggaattcagatt

SEQ ID NO: 169517 - DNA, 19 bp, Homo sapiens
  siRNA target sequence for RABEP1 (NM_004703.2,1889-1907).
gctaatgaccagttagaga

SEQ ID NO: 169518 - DNA, 19 bp, Homo sapiens
  siRNA target sequence for RABEP1 (NM_004703.2,2011-2029).
gatcttacttgaagagtta

SEQ ID NO: 169519 - DNA, 19 bp, Homo sapiens
  siRNA target sequence for RABEP1 (NM_004703.2,2091-2109).
cacgggaacaggtttcaga

SEQ ID NO: 169520 - DNA, 19 bp, Homo sapiens
  siRNA target sequence for RABEP1 (NM_004703.2,2121-2139).
ggttacagaaagataatga

SEQ ID NO: 169521 - DNA, 19 bp, Homo sapiens
  siRNA target sequence for RABEP1 (NM_004703.2,2158-2176).
cagcctgcatgtgtcatta

SEQ ID NO: 169522 - DNA, 19 bp, Homo sapiens
  siRNA target sequence for RABEP1 (NM_004703.2,2217-2235).
cactgcgggagttggtatt

SEQ ID NO: 169523 - DNA, 19 bp, Homo sapiens
  siRNA target sequence for RABEP1 (NM_004703.2,2219-2237).
ctgcgggagttggtattaa

SEQ ID NO: 169524 - DNA, 19 bp, Homo sapiens
  siRNA target sequence for RABEP1 (NM_004703.2,2221-2239).
gcgggagttggtattaaaa

SEQ ID NO: 169525 - DNA, 19 bp, Homo sapiens
  siRNA target sequence for RABEP1 (NM_004703.2,2222-2240).
cgggagttggtattaaaat

SEQ ID NO: 169526 - DNA, 19 bp, Homo sapiens
  siRNA target sequence for RABEP1 (NM_004703.2,2271-2289).
cagcagaccacgtagaaga

SEQ ID NO: 169527 - DNA, 19 bp, Homo sapiens
  siRNA target sequence for RABEP1 (NM_004703.2,2294-2312).
ctgaaggctgagatacttt

SEQ ID NO: 169528 - DNA, 19 bp, Homo sapiens
  siRNA target sequence for RABEP1 (NM_004703.2,2369-2387).
ctgcaactagaaatagaaa

SEQ ID NO: 169529 - DNA, 19 bp, Homo sapiens
  siRNA target sequence for RABEP1 (NM_004703.2,2556-2574).
ctaaggctaccgttgaaca

SEQ ID NO: 169530 - DNA, 19 bp, Homo sapiens
  siRNA target sequence for RABEP1 (NM_004703.2,2605-2623).
gagattacagacagaatta

SEQ ID NO: 169531 - DNA, 19 bp, Homo sapiens
  siRNA target sequence for RABEP1 (NM_004703.2,2607-2625).
gattacagacagaattaga

SEQ ID NO: 169532 - DNA, 19 bp, Homo sapiens
  siRNA target sequence for RABEP1 (NM_004703.2,2718-2736).
gaatccgggcaattctgaa

SEQ ID NO: 169533 - DNA, 19 bp, Homo sapiens
  siRNA target sequence for RABEP1 (NM_004703.2,2723-2741).
cgggcaattctgaatgata

SEQ ID NO: 169534 - DNA, 19 bp, Homo sapiens
  siRNA target sequence for RABEP1 (NM_004703.2,2725-2743).
ggcaattctgaatgatact

SEQ ID NO: 169535 - DNA, 19 bp, Homo sapiens
  siRNA target sequence for RABEP1 (NM_004703.2,2726-2744).
gcaattctgaatgatacta

SEQ ID NO: 169536 - DNA, 19 bp, Homo sapiens
  siRNA target sequence for RABEP1 (NM_004703.2,2727-2745).
caattctgaatgatactaa

SEQ ID NO: 169537 - DNA, 19 bp, Homo sapiens
  siRNA target sequence for SCDGF-B (NM_025208.2,255-273).
gcgcatccatcaaagcttt

SEQ ID NO: 169538 - DNA, 19 bp, Homo sapiens
  siRNA target sequence for SCDGF-B (NM_025208.2,441-459).
cacggatacagctagtgtt

SEQ ID NO: 169539 - DNA, 19 bp, Homo sapiens
  siRNA target sequence for SCDGF-B (NM_025208.2,444-462).
ggatacagctagtgtttga

SEQ ID NO: 169540 - DNA, 19 bp, Homo sapiens
  siRNA target sequence for SCDGF-B (NM_025208.2,452-470).
ctagtgtttgacaatcagt

SEQ ID NO: 169541 - DNA, 19 bp, Homo sapiens
  siRNA target sequence for SCDGF-B (NM_025208.2,482-500).
gaagcagaaaatgatatct

SEQ ID NO: 169542 - DNA, 19 bp, Homo sapiens
  siRNA target sequence for SCDGF-B (NM_025208.2,494-512).
gatatctgtaggtatgatt

SEQ ID NO: 169543 - DNA, 19 bp, Homo sapiens
  siRNA target sequence for SCDGF-B (NM_025208.2,515-533).
gtggaagttgaagatatat

SEQ ID NO: 169544 - DNA, 19 bp, Homo sapiens
  siRNA target sequence for SCDGF-B (NM_025208.2,600-618).
caagaacgaaccaaattaa

SEQ ID NO: 169545 - DNA, 19 bp, Homo sapiens
  siRNA target sequence for SCDGF-B (NM_025208.2,624-642).
cattcaagtccgatgacta

SEQ ID NO: 169546 - DNA, 19 bp, Homo sapiens
  siRNA target sequence for SCDGF-B (NM_025208.2,628-646).
caagtccgatgactacttt

SEQ ID NO: 169547 - DNA, 19 bp, Homo sapiens
  siRNA target sequence for SCDGF-B (NM_025208.2,651-669).
ctaaacctggattcaagat

SEQ ID NO: 169548 - DNA, 19 bp, Homo sapiens
  siRNA target sequence for SCDGF-B (NM_025208.2,741-759).
ctatttcaggggtatccta

SEQ ID NO: 169549 - DNA, 19 bp, Homo sapiens
  siRNA target sequence for SCDGF-B (NM_025208.2,794-812).
gcggatgctctggacaaaa

SEQ ID NO: 169550 - DNA, 19 bp, Homo sapiens
  siRNA target sequence for SCDGF-B (NM_025208.2,839-857).
gatctgctcaagtacttca

SEQ ID NO: 169551 - DNA, 19 bp, Homo sapiens
  siRNA target sequence for SCDGF-B (NM_025208.2,872-890).
caagaagatcttgagaata

SEQ ID NO: 169552 - DNA, 19 bp, Homo sapiens
  siRNA target sequence for SCDGF-B (NM_025208.2,955-973).
ggataggctcaatgatgat

SEQ ID NO: 169553 - DNA, 19 bp, Homo sapiens
  siRNA target sequence for SCDGF-B (NM_025208.2,971-989).
gatgccaagcgttacagtt

SEQ ID NO: 169554 - DNA, 19 bp, Homo sapiens
  siRNA target sequence for SCDGF-B (NM_025208.2,1006-1024).
ctcggtcaatataagagaa

SEQ ID NO: 169555 - DNA, 19 bp, Homo sapiens
  siRNA target sequence for SCDGF-B (NM_025208.2,1073-1091).
cagcgctgtggaggaaatt

SEQ ID NO: 169556 - DNA, 19 bp, Homo sapiens
  siRNA target sequence for SCDGF-B (NM_025208.2,1241-1259).
caccatgaacgatgtgatt

SEQ ID NO: 169557 - DNA, 19 bp, Homo sapiens
  siRNA target sequence for SCDGF-B (NM_025208.2,1243-1261).
ccatgaacgatgtgattgt

SEQ ID NO: 169558 - DNA, 19 bp, Homo sapiens
  siRNA target sequence for SCDGF-B (NM_025208.2,1244-1262).
catgaacgatgtgattgta

SEQ ID NO: 169559 - DNA, 19 bp, Homo sapiens
  siRNA target sequence for SCDGF-B (NM_025208.2,1247-1265).
gaacgatgtgattgtatct

SEQ ID NO: 169560 - DNA, 19 bp, Homo sapiens
  siRNA target sequence for SCGF (NM_002975.2,370-388).
gaatcctgccggaactgtt

SEQ ID NO: 169561 - DNA, 19 bp, Homo sapiens
  siRNA target sequence for TFF1 (NM_003225.1,232-250).
ggtcccctggtgcttctat

SEQ ID NO: 169562 - DNA, 19 bp, Homo sapiens
  siRNA target sequence for TFF1 (NM_003225.1,238-256).
ctggtgcttctatcctaat

SEQ ID NO: 169563 - DNA, 19 bp, Homo sapiens
  siRNA target sequence for TFF1 (NM_003225.1,243-261).
gcttctatcctaataccat

SEQ ID NO: 169564 - DNA, 19 bp, Homo sapiens
  siRNA target sequence for VEGFC (NM_005429.2,568-586).
cgaggccacggcttatgca

SEQ ID NO: 169565 - DNA, 19 bp, Homo sapiens
  siRNA target sequence for VEGFC (NM_005429.2,569-587).
gaggccacggcttatgcaa

SEQ ID NO: 169566 - DNA, 19 bp, Homo sapiens
  siRNA target sequence for VEGFC (NM_005429.2,574-592).
cacggcttatgcaagcaaa

SEQ ID NO: 169567 - DNA, 19 bp, Homo sapiens
  siRNA target sequence for VEGFC (NM_005429.2,649-667).
ctacccagaatattggaaa

SEQ ID NO: 169568 - DNA, 19 bp, Homo sapiens
  siRNA target sequence for VEGFC (NM_005429.2,762-780).
cagcacattataatacaga

SEQ ID NO: 169569 - DNA, 19 bp, Homo sapiens
  siRNA target sequence for VEGFC (NM_005429.2,828-846).
cacgggaggtgtgtataga

SEQ ID NO: 169570 - DNA, 19 bp, Homo sapiens
  siRNA target sequence for VEGFC (NM_005429.2,868-886).
cgcgacaaacaccttcttt

SEQ ID NO: 169571 - DNA, 19 bp, Homo sapiens
  siRNA target sequence for VEGFC (NM_005429.2,918-936).
ggggttgctgcaatagtga

SEQ ID NO: 169572 - DNA, 19 bp, Homo sapiens
  siRNA target sequence for VEGFC (NM_005429.2,973-991).
cagcaagacgttatttgaa

SEQ ID NO: 169573 - DNA, 19 bp, Homo sapiens
  siRNA target sequence for VEGFC (NM_005429.2,976-994).
caagacgttatttgaaatt

SEQ ID NO: 169574 - DNA, 19 bp, Homo sapiens
  siRNA target sequence for VEGFC (NM_005429.2,979-997).
gacgttatttgaaattaca

SEQ ID NO: 169575 - DNA, 19 bp, Homo sapiens
  siRNA target sequence for VEGFC (NM_005429.2,981-999).
cgttatttgaaattacagt

SEQ ID NO: 169576 - DNA, 19 bp, Homo sapiens
  siRNA target sequence for VEGFC (NM_005429.2,1014-1032).
gccccaaaccagtaacaat

SEQ ID NO: 169577 - DNA, 19 bp, Homo sapiens
  siRNA target sequence for VEGFC (NM_005429.2,1053-1071).
cctgccgatgcatgtctaa

SEQ ID NO: 169578 - DNA, 19 bp, Homo sapiens
  siRNA target sequence for VEGFC (NM_005429.2,1054-1072).
ctgccgatgcatgtctaaa

SEQ ID NO: 169579 - DNA, 19 bp, Homo sapiens
  siRNA target sequence for VEGFC (NM_005429.2,1079-1097).
gtttacagacaagttcatt

SEQ ID NO: 169580 - DNA, 19 bp, Homo sapiens
  siRNA target sequence for VEGFC (NM_005429.2,1155-1173).
cctgccccaccaattacat

SEQ ID NO: 169581 - DNA, 19 bp, Homo sapiens
  siRNA target sequence for VEGFC (NM_005429.2,1344-1362).
gaccccacaaagaactaga

SEQ ID NO: 169582 - DNA, 19 bp, Homo sapiens
  siRNA target sequence for VEGFC (NM_005429.2,1376-1394).
cagtgtgtctgtaaaaaca

SEQ ID NO: 169583 - DNA, 19 bp, Homo sapiens
  siRNA target sequence for VEGFC (NM_005429.2,1416-1434).
gggccaaccgagaatttga

SEQ ID NO: 169584 - DNA, 19 bp, Homo sapiens
  siRNA target sequence for VEGFC (NM_005429.2,1419-1437).
ccaaccgagaatttgatga

SEQ ID NO: 169585 - DNA, 19 bp, Homo sapiens
  siRNA target sequence for VEGFC (NM_005429.2,1420-1438).
caaccgagaatttgatgaa

SEQ ID NO: 169586 - DNA, 19 bp, Homo sapiens
  siRNA target sequence for VEGFC (NM_005429.2,1474-1492).
cagaaatcaacccctaaat

SEQ ID NO: 169587 - DNA, 19 bp, Homo sapiens
  siRNA target sequence for VEGFC (NM_005429.2,1486-1504).
cctaaatcctggaaaatgt

SEQ ID NO: 169588 - DNA, 19 bp, Homo sapiens
  siRNA target sequence for VEGFC (NM_005429.2,1620-1638).
caggattttcatatagtga

SEQ ID NO: 169589 - DNA, 19 bp, Homo sapiens
  siRNA target sequence for VEGFC (NM_005429.2,1649-1667).
cgttgtgtcccttcatatt

SEQ ID NO: 169590 - DNA, 19 bp, Homo sapiens
  siRNA target sequence for VEGFC (NM_005429.2,1653-1671).
gtgtcccttcatattggaa

SEQ ID NO: 169591 - DNA, 19 bp, Homo sapiens
  siRNA target sequence for VEGFC (NM_005429.2,1657-1675).
cccttcatattggaaaaga

SEQ ID NO: 169592 - DNA, 19 bp, Homo sapiens
  siRNA target sequence for VGF (NM_003378.2,707-725).
caggaactgcgagatttca

SEQ ID NO: 169593 - DNA, 19 bp, Homo sapiens
  siRNA target sequence for VGF (NM_003378.2,709-727).
ggaactgcgagatttcagt

SEQ ID NO: 169594 - DNA, 19 bp, Homo sapiens
  siRNA target sequence for VGF (NM_003378.2,787-805).
cacgctgacccgagtgaat

SEQ ID NO: 169595 - DNA, 19 bp, Homo sapiens
  siRNA target sequence for VGF (NM_003378.2,789-807).
cgctgacccgagtgaatct

SEQ ID NO: 169596 - DNA, 19 bp, Homo sapiens
  siRNA target sequence for VGF (NM_003378.2,1205-1223).
gacctgctgctccagtatt

SEQ ID NO: 169597 - DNA, 19 bp, Homo sapiens
  siRNA target sequence for VGF (NM_003378.2,1569-1587).
cgatcgacagcctcattga

SEQ ID NO: 169598 - DNA, 19 bp, Homo sapiens
  siRNA target sequence for ADCYAP1 (NM_001117.2,35-53).
ctggtctatgggataatca

SEQ ID NO: 169599 - DNA, 19 bp, Homo sapiens
  siRNA target sequence for ADCYAP1 (NM_001117.2,248-266).
gtcgcccacgggatcctta

SEQ ID NO: 169600 - DNA, 19 bp, Homo sapiens
  siRNA target sequence for ADCYAP1 (NM_001117.2,252-270).
cccacgggatccttaacga

SEQ ID NO: 169601 - DNA, 19 bp, Homo sapiens
  siRNA target sequence for ADCYAP1 (NM_001117.2,395-413).
cactcggacgggatcttca

SEQ ID NO: 169602 - DNA, 19 bp, Homo sapiens
  siRNA target sequence for ADCYAP1 (NM_001117.2,470-488).
gtcctagggaagaggtata

SEQ ID NO: 169603 - DNA, 19 bp, Homo sapiens
  siRNA target sequence for ADCYAP1 (NM_001117.2,472-490).
cctagggaagaggtataaa

SEQ ID NO: 169604 - DNA, 19 bp, Homo sapiens
  siRNA target sequence for ADCYAP1 (NM_001117.2,509-527).
ggacgccgaatagcttatt

SEQ ID NO: 169605 - DNA, 19 bp, Homo sapiens
  siRNA target sequence for ADCYAP1 (NM_001117.2,512-530).
cgccgaatagcttatttgt

SEQ ID NO: 169606 - DNA, 19 bp, Homo sapiens
  siRNA target sequence for AGRP (NM_001138.1,624-642).
ctactgccgcttcttcaat

SEQ ID NO: 169607 - DNA, 19 bp, Homo sapiens
  siRNA target sequence for ASMT (NM_004043.1,202-220).
ggcctatcgcctccttaat

SEQ ID NO: 169608 - DNA, 19 bp, Homo sapiens
  siRNA target sequence for ASMT (NM_004043.1,204-222).
cctatcgcctccttaatga

SEQ ID NO: 169609 - DNA, 19 bp, Homo sapiens
  siRNA target sequence for ASMT (NM_004043.1,267-285).
gcgagctgggcgtgtttga

SEQ ID NO: 169610 - DNA, 19 bp, Homo sapiens
  siRNA target sequence for ASMT (NM_004043.1,411-429).
cgaggggaggaaaagcttt

SEQ ID NO: 169611 - DNA, 19 bp, Homo sapiens
  siRNA target sequence for ASMT (NM_004043.1,470-488).
gtcagcccgacgtcacaat

SEQ ID NO: 169612 - DNA, 19 bp, Homo sapiens
  siRNA target sequence for ASMT (NM_004043.1,593-611).
cccgctgaagagcttttta

SEQ ID NO: 169613 - DNA, 19 bp, Homo sapiens
  siRNA target sequence for ASMT (NM_004043.1,605-623).
ctttttacggccatctaca

SEQ ID NO: 169614 - DNA, 19 bp, Homo sapiens
  siRNA target sequence for ASMT (NM_004043.1,633-651).
gcgagcggctacagttcat

SEQ ID NO: 169615 - DNA, 19 bp, Homo sapiens
  siRNA target sequence for ASMT (NM_004043.1,876-894).
gtaagatcaccgtttttga

SEQ ID NO: 169616 - DNA, 19 bp, Homo sapiens
  siRNA target sequence for ASMT (NM_004043.1,993-1011).
cggaagctgatctgtacat

SEQ ID NO: 169617 - DNA, 19 bp, Homo sapiens
  siRNA target sequence for CALCB (NM_000728.2,441-459).
caccaatgtgggttccaaa

SEQ ID NO: 169618 - DNA, 19 bp, Homo sapiens
  siRNA target sequence for CORT (NM_001302.1,171-189).
gccgagacagcgagcatat

SEQ ID NO: 169619 - DNA, 19 bp, Homo sapiens
  siRNA target sequence for CORT (NM_001302.1,233-251).
ctcgcttggtggtttgagt

SEQ ID NO: 169620 - DNA, 19 bp, Homo sapiens
  siRNA target sequence for CRH (NM_000756.1,385-403).
gcatgggagaggagtactt

SEQ ID NO: 169621 - DNA, 19 bp, Homo sapiens
  siRNA target sequence for CRH (NM_000756.1,501-519).
caggcgaccgccaactttt

SEQ ID NO: 169622 - DNA, 19 bp, Homo sapiens
  siRNA target sequence for GAL (NM_015973.2,437-455).
gcgcacaatcattgagttt

SEQ ID NO: 169623 - DNA, 19 bp, Homo sapiens
  siRNA target sequence for GAL (NM_015973.2,439-457).
gcacaatcattgagtttct

SEQ ID NO: 169624 - DNA, 19 bp, Homo sapiens
  siRNA target sequence for GALP (NM_033106.1,258-276).
gggagacagcccttgagat

SEQ ID NO: 169625 - DNA, 19 bp, Homo sapiens
  siRNA target sequence for GALP (NM_033106.1,330-348).
cctccaagaggaatgtgat

SEQ ID NO: 169626 - DNA, 19 bp, Homo sapiens
  siRNA target sequence for GALP (NM_033106.1,355-373).
gtttgccaaaccagagatt

SEQ ID NO: 169627 - DNA, 19 bp, Homo sapiens
  siRNA target sequence for NPY (NM_000905.2,235-253).
cggcgctgcgacactacat

SEQ ID NO: 169628 - DNA, 19 bp, Homo sapiens
  siRNA target sequence for NPY (NM_000905.2,237-255).
gcgctgcgacactacatca

SEQ ID NO: 169629 - DNA, 19 bp, Homo sapiens
  siRNA target sequence for NPY (NM_000905.2,238-256).
cgctgcgacactacatcaa

SEQ ID NO: 169630 - DNA, 19 bp, Homo sapiens
  siRNA target sequence for NPY (NM_000905.2,290-308).
cagcccagagacactgatt

SEQ ID NO: 169631 - DNA, 19 bp, Homo sapiens
  siRNA target sequence for NTS (NM_006183.3,258-276).
gttccctcttggaagatga

SEQ ID NO: 169632 - DNA, 19 bp, Homo sapiens
  siRNA target sequence for NTS (NM_006183.3,268-286).
ggaagatgactctgctaaa

SEQ ID NO: 169633 - DNA, 19 bp, Homo sapiens
  siRNA target sequence for NTS (NM_006183.3,382-400).
ctttagatggctttagctt

SEQ ID NO: 169634 - DNA, 19 bp, Homo sapiens
  siRNA target sequence for NTS (NM_006183.3,515-533).
ggaagaagtcataaagaga

SEQ ID NO: 169635 - DNA, 19 bp, Homo sapiens
  siRNA target sequence for NTS (NM_006183.3,555-573).
cggcagctgtatgagaata

SEQ ID NO: 169636 - DNA, 19 bp, Homo sapiens
  siRNA target sequence for NTS (NM_006183.3,577-595).
ccagaagaccctacatact

SEQ ID NO: 169637 - DNA, 19 bp, Homo sapiens
  siRNA target sequence for NTS (NM_006183.3,580-598).
gaagaccctacatactcaa

SEQ ID NO: 169638 - DNA, 19 bp, Homo sapiens
  siRNA target sequence for PMCH (NM_002674.1,70-88).
ctctcttcctatatattaa

SEQ ID NO: 169639 - DNA, 19 bp, Homo sapiens
  siRNA target sequence for PMCH (NM_002674.1,74-92).
cttcctatatattaatact

SEQ ID NO: 169640 - DNA, 19 bp, Homo sapiens
  siRNA target sequence for PMCH (NM_002674.1,131-149).
catccaagtccataagaaa

SEQ ID NO: 169641 - DNA, 19 bp, Homo sapiens
  siRNA target sequence for PMCH (NM_002674.1,134-152).
ccaagtccataagaaattt

SEQ ID NO: 169642 - DNA, 19 bp, Homo sapiens
  siRNA target sequence for PMCH (NM_002674.1,141-159).
cataagaaatttagatgat

SEQ ID NO: 169643 - DNA, 19 bp, Homo sapiens
  siRNA target sequence for PMCH (NM_002674.1,233-251).
ctccttccctggaacaata

SEQ ID NO: 169644 - DNA, 19 bp, Homo sapiens
  siRNA target sequence for PMCH (NM_002674.1,235-253).
ccttccctggaacaatata

SEQ ID NO: 169645 - DNA, 19 bp, Homo sapiens
  siRNA target sequence for PMCH (NM_002674.1,236-254).
cttccctggaacaatataa

SEQ ID NO: 169646 - DNA, 19 bp, Homo sapiens
  siRNA target sequence for PMCH (NM_002674.1,240-258).
cctggaacaatataaaaat

SEQ ID NO: 169647 - DNA, 19 bp, Homo sapiens
  siRNA target sequence for PMCH (NM_002674.1,273-291).
catgaacgaagaggaaaat

SEQ ID NO: 169648 - DNA, 19 bp, Homo sapiens
  siRNA target sequence for PNOC (NM_006228.2,633-651).
ggaagttggccaatcagaa

SEQ ID NO: 169649 - DNA, 19 bp, Homo sapiens
  siRNA target sequence for PNOC (NM_006228.2,649-667).
gaagcggttcagtgagttt

SEQ ID NO: 169650 - DNA, 19 bp, Homo sapiens
  siRNA target sequence for PNOC (NM_006228.2,722-740).
caccagaatggtaatgtgt

SEQ ID NO: 169651 - DNA, 19 bp, Homo sapiens
  siRNA target sequence for TAC1 (NM_003182.1,162-180).
ccttggcagtcttttttct

SEQ ID NO: 169652 - DNA, 19 bp, Homo sapiens
  siRNA target sequence for TAC1 (NM_003182.1,213-231).
gagccaatgatgatctgaa

SEQ ID NO: 169653 - DNA, 19 bp, Homo sapiens
  siRNA target sequence for TAC1 (NM_003182.1,216-234).
ccaatgatgatctgaatta

SEQ ID NO: 169654 - DNA, 19 bp, Homo sapiens
  siRNA target sequence for TAC1 (NM_003182.1,321-339).
ccaagcctcagcagttctt

SEQ ID NO: 169655 - DNA, 19 bp, Homo sapiens
  siRNA target sequence for TAC1 (NM_003182.1,466-484).
gggcaaaagagctttaaat

SEQ ID NO: 169656 - DNA, 19 bp, Homo sapiens
  siRNA target sequence for TAC1 (NM_003182.1,502-520).
gagtgcaatgcagaattat

SEQ ID NO: 169657 - DNA, 19 bp, Homo sapiens
  siRNA target sequence for TAC1 (NM_003182.1,506-524).
gcaatgcagaattatgaaa

SEQ ID NO: 169658 - DNA, 19 bp, Homo sapiens
  siRNA target sequence for UCN (NM_003353.2,452-470).
cgagcagaaccgcatcata

SEQ ID NO: 169659 - DNA, 19 bp, Homo sapiens
  siRNA target sequence for UCN (NM_003353.2,453-471).
gagcagaaccgcatcatat

SEQ ID NO: 169660 - DNA, 19 bp, Homo sapiens
  siRNA target sequence for VIP (NM_003381.2,309-327).
caaatgaacctgatcaagt

SEQ ID NO: 169661 - DNA, 19 bp, Homo sapiens
  siRNA target sequence for VIP (NM_003381.2,341-359).
gacattgacatgttgcaaa

SEQ ID NO: 169662 - DNA, 19 bp, Homo sapiens
  siRNA target sequence for VIP (NM_003381.2,352-370).
gttgcaaaatgcattagct

SEQ ID NO: 169663 - DNA, 19 bp, Homo sapiens
  siRNA target sequence for VIP (NM_003381.2,379-397).
cacaccctattatgatgta

SEQ ID NO: 169664 - DNA, 19 bp, Homo sapiens
  siRNA target sequence for VIP (NM_003381.2,432-450).
ccagtgacttcagtaaact

SEQ ID NO: 169665 - DNA, 19 bp, Homo sapiens
  siRNA target sequence for VIP (NM_003381.2,484-502).
gtctcttatgggaaaacgt

SEQ ID NO: 169666 - DNA, 19 bp, Homo sapiens
  siRNA target sequence for VIP (NM_003381.2,571-589).
ctatacccgccttagaaaa

SEQ ID NO: 169667 - DNA, 19 bp, Homo sapiens
  siRNA target sequence for VIP (NM_003381.2,576-594).
cccgccttagaaaacaaat

SEQ ID NO: 169668 - DNA, 19 bp, Homo sapiens
  siRNA target sequence for VIP (NM_003381.2,657-675).
ccgactttccagaagagtt

SEQ ID NO: 169669 - DNA, 19 bp, Homo sapiens
  siRNA target sequence for VIP (NM_003381.2,658-676).
cgactttccagaagagtta

SEQ ID NO: 169670 - DNA, 19 bp, Homo sapiens
  siRNA target sequence for VIP (NM_194435.1,494-512).
ggaaaacgtgttagtaaca

SEQ ID NO: 169671 - DNA, 19 bp, Homo sapiens
  siRNA target sequence for PTH (NM_000315.2,131-149).
gacatggctaaagttatga

SEQ ID NO: 169672 - DNA, 19 bp, Homo sapiens
  siRNA target sequence for PTH (NM_000315.2,133-151).
catggctaaagttatgatt

SEQ ID NO: 169673 - DNA, 19 bp, Homo sapiens
  siRNA target sequence for PTH (NM_000315.2,137-155).
gctaaagttatgattgtca

SEQ ID NO: 169674 - DNA, 19 bp, Homo sapiens
  siRNA target sequence for PTH (NM_000315.2,138-156).
ctaaagttatgattgtcat

SEQ ID NO: 169675 - DNA, 19 bp, Homo sapiens
  siRNA target sequence for PTH (NM_000315.2,152-170).
gtcatgttggcaatttgtt

SEQ ID NO: 169676 - DNA, 19 bp, Homo sapiens
  siRNA target sequence for PTH (NM_000315.2,183-201).
cggatgggaaatctgttaa

SEQ ID NO: 169677 - DNA, 19 bp, Homo sapiens
  siRNA target sequence for PTH (NM_000315.2,185-203).
gatgggaaatctgttaaga

SEQ ID NO: 169678 - DNA, 19 bp, Homo sapiens
  siRNA target sequence for PTH (NM_000315.2,207-225).
gatctgtgagtgaaataca

SEQ ID NO: 169679 - DNA, 19 bp, Homo sapiens
  siRNA target sequence for PTH (NM_000315.2,218-236).
gaaatacagcttatgcata

SEQ ID NO: 169680 - DNA, 19 bp, Homo sapiens
  siRNA target sequence for PTH (NM_000315.2,232-250).
gcataacctgggaaaacat

SEQ ID NO: 169681 - DNA, 19 bp, Homo sapiens
  siRNA target sequence for PTH (NM_000315.2,256-274).
ctcgatggagagagtagaa

SEQ ID NO: 169682 - DNA, 19 bp, Homo sapiens
  siRNA target sequence for PTH (NM_000315.2,292-310).
gcaggatgtgcacaatttt

SEQ ID NO: 169683 - DNA, 19 bp, Homo sapiens
  siRNA target sequence for PTH (NM_000315.2,386-404).
gttgagagccatgaaaaaa

SEQ ID NO: 169684 - DNA, 19 bp, Homo sapiens
  siRNA target sequence for PTHLH (NM_002820.2,464-482).
gggaagtccatccaagatt

SEQ ID NO: 169685 - DNA, 19 bp, Homo sapiens
  siRNA target sequence for PTHLH (NM_002820.2,465-483).
ggaagtccatccaagattt

SEQ ID NO: 169686 - DNA, 19 bp, Homo sapiens
  siRNA target sequence for PTHLH (NM_002820.2,601-619).
ccgatttgggtctgatgat

SEQ ID NO: 169687 - DNA, 19 bp, Homo sapiens
  siRNA target sequence for GNRH1 (NM_000825.2,1181-1199).
gagatgccgaaaatttgat

SEQ ID NO: 169688 - DNA, 19 bp, Homo sapiens
  siRNA target sequence for GNRH1 (NM_000825.2,1186-1204).
gccgaaaatttgattgatt

SEQ ID NO: 169689 - DNA, 19 bp, Homo sapiens
  siRNA target sequence for GNRH1 (NM_000825.2,1243-1261).
gaaacccaacgcttcgaat

SEQ ID NO: 169690 - DNA, 19 bp, Homo sapiens
  siRNA target sequence for NPPB (NM_002521.1,229-247).
caggagcagcgcaaccatt

SEQ ID NO: 169691 - DNA, 19 bp, Homo sapiens
  siRNA target sequence for NPPB (NM_002521.1,362-380).
gtgggcaccgcaaaatggt

SEQ ID NO: 169692 - DNA, 19 bp, Homo sapiens
  siRNA target sequence for TRH (NM_007117.1,322-340).
cgcgtcccagatctttcaa

SEQ ID NO: 169693 - DNA, 19 bp, Homo sapiens
  siRNA target sequence for TRH (NM_007117.1,323-341).
gcgtcccagatctttcaat

SEQ ID NO: 169694 - DNA, 19 bp, Homo sapiens
  siRNA target sequence for TRH (NM_007117.1,325-343).
gtcccagatctttcaatct

SEQ ID NO: 169695 - DNA, 19 bp, Homo sapiens
  siRNA target sequence for TRH (NM_007117.1,531-549).
gctccccctggcttgcata

SEQ ID NO: 169696 - DNA, 19 bp, Homo sapiens
  siRNA target sequence for ADM (NM_001124.1,232-250).
gtcgcgtcggagtttcgaa

SEQ ID NO: 169697 - DNA, 19 bp, Homo sapiens
  siRNA target sequence for ADM (NM_001124.1,236-254).
cgtcggagtttcgaaagaa

SEQ ID NO: 169698 - DNA, 19 bp, Homo sapiens
  siRNA target sequence for ADM (NM_001124.1,442-460).
cgccagagcatgaacaact

SEQ ID NO: 169699 - DNA, 19 bp, Homo sapiens
  siRNA target sequence for ADM (NM_001124.1,692-710).
gaagtgctccccactttct

SEQ ID NO: 169700 - DNA, 19 bp, Homo sapiens
  siRNA target sequence for AGT (NM_000029.1,375-393).
cttgggcttccgtatatat

SEQ ID NO: 169701 - DNA, 19 bp, Homo sapiens
  siRNA target sequence for AGT (NM_000029.1,1112-1130).
gtctcactttccagcaaaa

SEQ ID NO: 169702 - DNA, 19 bp, Homo sapiens
  siRNA target sequence for AGT (NM_000029.1,1191-1209).
ggtgctgcaaggatcttat

SEQ ID NO: 169703 - DNA, 19 bp, Homo sapiens
  siRNA target sequence for APLN (NM_017413.2,473-491).
cagggaggtcggaggaaat

SEQ ID NO: 169704 - DNA, 19 bp, Homo sapiens
  siRNA target sequence for APLN (NM_017413.2,733-751).
cccgttctctcacaagaat

SEQ ID NO: 169705 - DNA, 19 bp, Homo sapiens
  siRNA target sequence for APM1 (NM_004797.1,373-391).
gtgtgggattggagactta

SEQ ID NO: 169706 - DNA, 19 bp, Homo sapiens
  siRNA target sequence for APM1 (NM_004797.1,377-395).
gggattggagacttacgtt

SEQ ID NO: 169707 - DNA, 19 bp, Homo sapiens
  siRNA target sequence for APM1 (NM_004797.1,378-396).
ggattggagacttacgtta

SEQ ID NO: 169708 - DNA, 19 bp, Homo sapiens
  siRNA target sequence for APM1 (NM_004797.1,417-435).
cgctttaccaagatcttct

SEQ ID NO: 169709 - DNA, 19 bp, Homo sapiens
  siRNA target sequence for APM1 (NM_004797.1,460-478).
gctccactggtaaattcca

SEQ ID NO: 169710 - DNA, 19 bp, Homo sapiens
  siRNA target sequence for APM1 (NM_004797.1,513-531).
cacatcacagtctatatga

SEQ ID NO: 169711 - DNA, 19 bp, Homo sapiens
  siRNA target sequence for APM1 (NM_004797.1,677-695).
ggaaggagagcgtaatgga

SEQ ID NO: 169712 - DNA, 19 bp, Homo sapiens
  siRNA target sequence for APM1 (NM_004797.1,694-712).
gactctatgctgataatga

SEQ ID NO: 169713 - DNA, 19 bp, Homo sapiens
  siRNA target sequence for CALCA (NM_001741.1,315-333).
ctaagcggtgcggtaatct

SEQ ID NO: 169714 - DNA, 19 bp, Homo sapiens
  siRNA target sequence for CALCA (NM_001741.1,385-403).
gttcccccaaactgcaatt

SEQ ID NO: 169715 - DNA, 19 bp, Homo sapiens
  siRNA target sequence for CALCA (NM_001741.1,455-473).
gaccatcgccctcatgtta

SEQ ID NO: 169716 - DNA, 19 bp, Homo sapiens
  siRNA target sequence for CCK (NM_000729.2,287-305).
ggacgaatgtccatcgtta

SEQ ID NO: 169717 - DNA, 19 bp, Homo sapiens
  siRNA target sequence for CCK (NM_000729.2,288-306).
gacgaatgtccatcgttaa

SEQ ID NO: 169718 - DNA, 19 bp, Homo sapiens
  siRNA target sequence for CCK (NM_000729.2,291-309).
gaatgtccatcgttaagaa

SEQ ID NO: 169719 - DNA, 19 bp, Homo sapiens
  siRNA target sequence for CCK (NM_000729.2,325-343).
ccccagccacaggataagt

SEQ ID NO: 169720 - DNA, 19 bp, Homo sapiens
  siRNA target sequence for CCK (NM_000729.2,327-345).
ccagccacaggataagtga

SEQ ID NO: 169721 - DNA, 19 bp, Homo sapiens
  siRNA target sequence for CCK (NM_000729.2,381-399).
gcagtgccgaggagtatga

SEQ ID NO: 169722 - DNA, 19 bp, Homo sapiens
  siRNA target sequence for CCK (NM_000729.2,384-402).
gtgccgaggagtatgagta

SEQ ID NO: 169723 - DNA, 19 bp, Homo sapiens
  siRNA target sequence for CGA (NM_000735.2,344-362).
cacttgctgtgtagctaaa

SEQ ID NO: 169724 - DNA, 19 bp, Homo sapiens
  siRNA target sequence for CGA (NM_000735.2,349-367).
gctgtgtagctaaatcata

SEQ ID NO: 169725 - DNA, 19 bp, Homo sapiens
  siRNA target sequence for CGA (NM_000735.2,350-368).
ctgtgtagctaaatcatat

SEQ ID NO: 169726 - DNA, 19 bp, Homo sapiens
  siRNA target sequence for CGA (NM_000735.2,414-432).
gcgtgccactgcagtactt

SEQ ID NO: 169727 - DNA, 19 bp, Homo sapiens
  siRNA target sequence for CGA (NM_000735.2,424-442).
gcagtacttgttattatca

SEQ ID NO: 169728 - DNA, 19 bp, Homo sapiens
  siRNA target sequence for COPA (NM_004371.2,837-855).
ctagaacctgtgtttgtgt

SEQ ID NO: 169729 - DNA, 19 bp, Homo sapiens
  siRNA target sequence for COPA (NM_004371.2,941-959).
gtgcgcgtttgggatattt

SEQ ID NO: 169730 - DNA, 19 bp, Homo sapiens
  siRNA target sequence for COPA (NM_004371.2,943-961).
gcgcgtttgggatatttct

SEQ ID NO: 169731 - DNA, 19 bp, Homo sapiens
  siRNA target sequence for COPA (NM_004371.2,1074-1092).
gtcacgatcgtggagtaaa

SEQ ID NO: 169732 - DNA, 19 bp, Homo sapiens
  siRNA target sequence for COPA (NM_004371.2,1076-1094).
cacgatcgtggagtaaact

SEQ ID NO: 169733 - DNA, 19 bp, Homo sapiens
  siRNA target sequence for COPA (NM_004371.2,1111-1129).
cactatgccccttattgta

SEQ ID NO: 169734 - DNA, 19 bp, Homo sapiens
  siRNA target sequence for COPA (NM_004371.2,1161-1179).
ggcgcatgaatgaatcaaa

SEQ ID NO: 169735 - DNA, 19 bp, Homo sapiens
  siRNA target sequence for COPA (NM_004371.2,1205-1223).
ggccattacaacaatgtat

SEQ ID NO: 169736 - DNA, 19 bp, Homo sapiens
  siRNA target sequence for COPA (NM_004371.2,1252-1270).
gttgatcctcagcaattct

SEQ ID NO: 169737 - DNA, 19 bp, Homo sapiens
  siRNA target sequence for COPA (NM_004371.2,1286-1304).
cgagtctgggatatgtcta

SEQ ID NO: 169738 - DNA, 19 bp, Homo sapiens
  siRNA target sequence for COPA (NM_004371.2,1358-1376).
gctgctcaccctaacctta

SEQ ID NO: 169739 - DNA, 19 bp, Homo sapiens
  siRNA target sequence for COPA (NM_004371.2,1359-1377).
ctgctcaccctaaccttaa

SEQ ID NO: 169740 - DNA, 19 bp, Homo sapiens
  siRNA target sequence for COPA (NM_004371.2,1362-1380).
ctcaccctaaccttaacct

SEQ ID NO: 169741 - DNA, 19 bp, Homo sapiens
  siRNA target sequence for COPA (NM_004371.2,1392-1410).
gccatgatggtggtatgat

SEQ ID NO: 169742 - DNA, 19 bp, Homo sapiens
  siRNA target sequence for COPA (NM_004371.2,1400-1418).
ggtggtatgattgtgttta

SEQ ID NO: 169743 - DNA, 19 bp, Homo sapiens
  siRNA target sequence for COPA (NM_004371.2,1401-1419).
gtggtatgattgtgtttaa

SEQ ID NO: 169744 - DNA, 19 bp, Homo sapiens
  siRNA target sequence for COPA (NM_004371.2,1490-1508).
cgacagctggatttcaaca

SEQ ID NO: 169745 - DNA, 19 bp, Homo sapiens
  siRNA target sequence for COPA (NM_004371.2,1537-1555).
gcggagtggttccaagttt

SEQ ID NO: 169746 - DNA, 19 bp, Homo sapiens
  siRNA target sequence for COPA (NM_004371.2,1545-1563).
gttccaagtttccagtatt

SEQ ID NO: 169747 - DNA, 19 bp, Homo sapiens
  siRNA target sequence for COPA (NM_004371.2,1548-1566).
ccaagtttccagtattcaa

SEQ ID NO: 169748 - DNA, 19 bp, Homo sapiens
  siRNA target sequence for COPA (NM_004371.2,1592-1610).
gcagtcctgctttgtacaa

SEQ ID NO: 169749 - DNA, 19 bp, Homo sapiens
  siRNA target sequence for COPA (NM_004371.2,1645-1663).
gtacaccatccctaaagat

SEQ ID NO: 169750 - DNA, 19 bp, Homo sapiens
  siRNA target sequence for COPA (NM_004371.2,1720-1738).
cgtttgggtcgctcgaaat

SEQ ID NO: 169751 - DNA, 19 bp, Homo sapiens
  siRNA target sequence for COPA (NM_004371.2,1748-1766).
gtcctagatcggatgcatt

SEQ ID NO: 169752 - DNA, 19 bp, Homo sapiens
  siRNA target sequence for COPA (NM_004371.2,1763-1781).
cattcgcttctgatcaaga

SEQ ID NO: 169753 - DNA, 19 bp, Homo sapiens
  siRNA target sequence for COPA (NM_004371.2,1767-1785).
cgcttctgatcaagaatct

SEQ ID NO: 169754 - DNA, 19 bp, Homo sapiens
  siRNA target sequence for COPA (NM_004371.2,1865-1883).
cgagatgcggactctatca

SEQ ID NO: 169755 - DNA, 19 bp, Homo sapiens
  siRNA target sequence for COPA (NM_004371.2,1873-1891).
ggactctatcacactcttt

SEQ ID NO: 169756 - DNA, 19 bp, Homo sapiens
  siRNA target sequence for COPA (NM_004371.2,1920-1938).
ctgtgaagatttctaaagt

SEQ ID NO: 169757 - DNA, 19 bp, Homo sapiens
  siRNA target sequence for COPA (NM_004371.2,1966-1984).
gtcacatgtagcactacta

SEQ ID NO: 169758 - DNA, 19 bp, Homo sapiens
  siRNA target sequence for COPA (NM_004371.2,2012-2030).
cgcaaactggatgctttat

SEQ ID NO: 169759 - DNA, 19 bp, Homo sapiens
  siRNA target sequence for COPA (NM_004371.2,2014-2032).
caaactggatgctttatgt

SEQ ID NO: 169760 - DNA, 19 bp, Homo sapiens
  siRNA target sequence for COPA (NM_004371.2,2077-2095).
gagtggggtatttatctat

SEQ ID NO: 169761 - DNA, 19 bp, Homo sapiens
  siRNA target sequence for COPA (NM_004371.2,2081-2099).
ggggtatttatctatacca

SEQ ID NO: 169762 - DNA, 19 bp, Homo sapiens
  siRNA target sequence for COPA (NM_004371.2,2135-2153).
gaccacgggatcattcgaa

SEQ ID NO: 169763 - DNA, 19 bp, Homo sapiens
  siRNA target sequence for COPA (NM_004371.2,2146-2164).
cattcgaactctggattta

SEQ ID NO: 169764 - DNA, 19 bp, Homo sapiens
  siRNA target sequence for COPA (NM_004371.2,2181-2199).
gggtgaagggcaacaatgt

SEQ ID NO: 169765 - DNA, 19 bp, Homo sapiens
  siRNA target sequence for COPA (NM_004371.2,2182-2200).
ggtgaagggcaacaatgta

SEQ ID NO: 169766 - DNA, 19 bp, Homo sapiens
  siRNA target sequence for COPA (NM_004371.2,2183-2201).
gtgaagggcaacaatgtat

SEQ ID NO: 169767 - DNA, 19 bp, Homo sapiens
  siRNA target sequence for COPA (NM_004371.2,2243-2261).
gatcccactgagttcaaat

SEQ ID NO: 169768 - DNA, 19 bp, Homo sapiens
  siRNA target sequence for COPA (NM_004371.2,2311-2329).
gaggaatgccaaactagtt

SEQ ID NO: 169769 - DNA, 19 bp, Homo sapiens
  siRNA target sequence for COPA (NM_004371.2,2324-2342).
ctagttggccagtctatta

SEQ ID NO: 169770 - DNA, 19 bp, Homo sapiens
  siRNA target sequence for COPA (NM_004371.2,2330-2348).
ggccagtctattattgctt

SEQ ID NO: 169771 - DNA, 19 bp, Homo sapiens
  siRNA target sequence for COPA (NM_004371.2,2332-2350).
ccagtctattattgcttat

SEQ ID NO: 169772 - DNA, 19 bp, Homo sapiens
  siRNA target sequence for COPA (NM_004371.2,2370-2388).
ctgaagtggcactgcattt

SEQ ID NO: 169773 - DNA, 19 bp, Homo sapiens
  siRNA target sequence for COPA (NM_004371.2,2375-2393).
gtggcactgcattttgtca

SEQ ID NO: 169774 - DNA, 19 bp, Homo sapiens
  siRNA target sequence for COPA (NM_004371.2,2542-2560).
gtgctatcagcgtaccaaa

SEQ ID NO: 169775 - DNA, 19 bp, Homo sapiens
  siRNA target sequence for COPA (NM_004371.2,2544-2562).
gctatcagcgtaccaaaaa

SEQ ID NO: 169776 - DNA, 19 bp, Homo sapiens
  siRNA target sequence for COPA (NM_004371.2,2552-2570).
cgtaccaaaaactttgaca

SEQ ID NO: 169777 - DNA, 19 bp, Homo sapiens
  siRNA target sequence for COPA (NM_004371.2,2606-2624).
gaaaaacttcgcaagatga

SEQ ID NO: 169778 - DNA, 19 bp, Homo sapiens
  siRNA target sequence for COPA (NM_004371.2,2653-2671).
gagtggccactatcagaat

SEQ ID NO: 169779 - DNA, 19 bp, Homo sapiens
  siRNA target sequence for COPA (NM_004371.2,2754-2772).
ctacccatggcttagatga

SEQ ID NO: 169780 - DNA, 19 bp, Homo sapiens
  siRNA target sequence for COPA (NM_004371.2,2879-2897).
gataccaattggcctttat

SEQ ID NO: 169781 - DNA, 19 bp, Homo sapiens
  siRNA target sequence for COPA (NM_004371.2,2884-2902).
caattggcctttattgact

SEQ ID NO: 169782 - DNA, 19 bp, Homo sapiens
  siRNA target sequence for COPA (NM_004371.2,2892-2910).
ctttattgactgtatccaa

SEQ ID NO: 169783 - DNA, 19 bp, Homo sapiens
  siRNA target sequence for COPA (NM_004371.2,3131-3149).
cctcctgagctggatatat

SEQ ID NO: 169784 - DNA, 19 bp, Homo sapiens
  siRNA target sequence for COPA (NM_004371.2,3165-3183).
gtggggctgaagatggttt

SEQ ID NO: 169785 - DNA, 19 bp, Homo sapiens
  siRNA target sequence for COPA (NM_004371.2,3193-3211).
cccaaccaagggaacaagt

SEQ ID NO: 169786 - DNA, 19 bp, Homo sapiens
  siRNA target sequence for COPA (NM_004371.2,3220-3238).
gatctggtgtaataactct

SEQ ID NO: 169787 - DNA, 19 bp, Homo sapiens
  siRNA target sequence for COPA (NM_004371.2,3235-3253).
ctctcagcttccagttgat

SEQ ID NO: 169788 - DNA, 19 bp, Homo sapiens
  siRNA target sequence for COPA (NM_004371.2,3324-3342).
gcccctacaagcaactgtt

SEQ ID NO: 169789 - DNA, 19 bp, Homo sapiens
  siRNA target sequence for COPA (NM_004371.2,3399-3417).
ccatgtatggctatcctaa

SEQ ID NO: 169790 - DNA, 19 bp, Homo sapiens
  siRNA target sequence for COPA (NM_004371.2,3458-3476).
gctgtgggcctgaagctta

SEQ ID NO: 169791 - DNA, 19 bp, Homo sapiens
  siRNA target sequence for COPA (NM_004371.2,3570-3588).
gtgtgccacttcttgttgt

SEQ ID NO: 169792 - DNA, 19 bp, Homo sapiens
  siRNA target sequence for COPA (NM_004371.2,3630-3648).
ccatttgccgtgagtacat

SEQ ID NO: 169793 - DNA, 19 bp, Homo sapiens
  siRNA target sequence for COPA (NM_004371.2,3631-3649).
catttgccgtgagtacatt

SEQ ID NO: 169794 - DNA, 19 bp, Homo sapiens
  siRNA target sequence for COPA (NM_004371.2,3660-3678).
ccgtggagacagaaaggaa

SEQ ID NO: 169795 - DNA, 19 bp, Homo sapiens
  siRNA target sequence for COPA (NM_004371.2,3685-3703).
gcccaaagagactctagaa

SEQ ID NO: 169796 - DNA, 19 bp, Homo sapiens
  siRNA target sequence for COPA (NM_004371.2,3732-3750).
cctatttcacccactcaaa

SEQ ID NO: 169797 - DNA, 19 bp, Homo sapiens
  siRNA target sequence for COPA (NM_004371.2,3878-3896).
gcccaacagacccgaaaaa

SEQ ID NO: 169798 - DNA, 19 bp, Homo sapiens
  siRNA target sequence for COPA (NM_004371.2,3879-3897).
cccaacagacccgaaaaat

SEQ ID NO: 169799 - DNA, 19 bp, Homo sapiens
  siRNA target sequence for COPA (NM_004371.2,3930-3948).
cctaccagctcaattatga

SEQ ID NO: 169800 - DNA, 19 bp, Homo sapiens
  siRNA target sequence for COPA (NM_004371.2,3953-3971).
cacaacccctttgacattt

SEQ ID NO: 169801 - DNA, 19 bp, Homo sapiens
  siRNA target sequence for COPA (NM_004371.2,4039-4057).
ctattcccctgagttcaaa

SEQ ID NO: 169802 - DNA, 19 bp, Homo sapiens
  siRNA target sequence for COPA (NM_004371.2,4090-4108).
gattggcaaagatgtgatt

SEQ ID NO: 169803 - DNA, 19 bp, Homo sapiens
  siRNA target sequence for COPA (NM_004371.2,4094-4112).
ggcaaagatgtgattggtt

SEQ ID NO: 169804 - DNA, 19 bp, Homo sapiens
  siRNA target sequence for COPA (NM_004371.2,4100-4118).
gatgtgattggtttaagga

SEQ ID NO: 169805 - DNA, 19 bp, Homo sapiens
  siRNA target sequence for CSHL1 (NM_022579.1,244-262).
ggggaatggaagcctatat

SEQ ID NO: 169806 - DNA, 19 bp, Homo sapiens
  siRNA target sequence for FLJ14800 (NM_032840.1,153-171).
gaggttcaaacatatcctt

SEQ ID NO: 169807 - DNA, 19 bp, Homo sapiens
  siRNA target sequence for FLJ14800 (NM_032840.1,159-177).
caaacatatccttgtagat

SEQ ID NO: 169808 - DNA, 19 bp, Homo sapiens
  siRNA target sequence for FLJ14800 (NM_032840.1,243-261).
gaccaaggacagcaattat

SEQ ID NO: 169809 - DNA, 19 bp, Homo sapiens
  siRNA target sequence for FLJ14800 (NM_032840.1,311-329).
ggctggtccctcagtacta

SEQ ID NO: 169810 - DNA, 19 bp, Homo sapiens
  siRNA target sequence for FLJ14800 (NM_032840.1,418-436).
cgccagtttgggtcaaagt

SEQ ID NO: 169811 - DNA, 19 bp, Homo sapiens
  siRNA target sequence for FLJ14800 (NM_032840.1,490-508).
cagaccgcccagatcttct

SEQ ID NO: 169812 - DNA, 19 bp, Homo sapiens
  siRNA target sequence for FLJ14800 (NM_032840.1,710-728).
ggactctgctggagtactt

SEQ ID NO: 169813 - DNA, 19 bp, Homo sapiens
  siRNA target sequence for FLJ14800 (NM_032840.1,711-729).
gactctgctggagtactta

SEQ ID NO: 169814 - DNA, 19 bp, Homo sapiens
  siRNA target sequence for FLJ14800 (NM_032840.1,785-803).
gcacccgcagccactactt

SEQ ID NO: 169815 - DNA, 19 bp, Homo sapiens
  siRNA target sequence for FLJ14800 (NM_032840.1,1099-1117).
cggaacgtgcggaatgtca

SEQ ID NO: 169816 - DNA, 19 bp, Homo sapiens
  siRNA target sequence for FLJ14800 (NM_032840.1,1100-1118).
ggaacgtgcggaatgtcat

SEQ ID NO: 169817 - DNA, 19 bp, Homo sapiens
  siRNA target sequence for FSHB (NM_000510.1,43-61).
gcaatctgctgcaatagct

SEQ ID NO: 169818 - DNA, 19 bp, Homo sapiens
  siRNA target sequence for FSHB (NM_000510.1,100-118).
gaatgtcgtttctgcataa

SEQ ID NO: 169819 - DNA, 19 bp, Homo sapiens
  siRNA target sequence for FSHB (NM_000510.1,104-122).
gtcgtttctgcataagcat

SEQ ID NO: 169820 - DNA, 19 bp, Homo sapiens
  siRNA target sequence for FSHB (NM_000510.1,254-272).
ctcaccatgcagattcctt

SEQ ID NO: 169821 - DNA, 19 bp, Homo sapiens
  siRNA target sequence for FSHB (NM_000510.1,262-280).
gcagattccttgtatacat

SEQ ID NO: 169822 - DNA, 19 bp, Homo sapiens
  siRNA target sequence for FSHB (NM_000510.1,316-334).
gacagcgacagcactgatt

SEQ ID NO: 169823 - DNA, 19 bp, Homo sapiens
  siRNA target sequence for FSHB (NM_000510.1,321-339).
cgacagcactgattgtact

SEQ ID NO: 169824 - DNA, 19 bp, Homo sapiens
  siRNA target sequence for FSHB (NM_000510.1,365-383).
gctcctttggtgaaatgaa

SEQ ID NO: 169825 - DNA, 19 bp, Homo sapiens
  siRNA target sequence for GAS (NM_000805.2,153-171).
ccagatgcacccttaggta

SEQ ID NO: 169826 - DNA, 19 bp, Homo sapiens
  siRNA target sequence for GCG (NM_002054.2,302-320).
ccaggcgtgcccaagattt

SEQ ID NO: 169827 - DNA, 19 bp, Homo sapiens
  siRNA target sequence for GCG (NM_002054.2,303-321).
caggcgtgcccaagatttt

SEQ ID NO: 169828 - DNA, 19 bp, Homo sapiens
  siRNA target sequence for GCG (NM_002054.2,305-323).
ggcgtgcccaagattttgt

SEQ ID NO: 169829 - DNA, 19 bp, Homo sapiens
  siRNA target sequence for GCG (NM_002054.2,366-384).
caaacgtcacgatgaattt

SEQ ID NO: 169830 - DNA, 19 bp, Homo sapiens
  siRNA target sequence for GCG (NM_002054.2,394-412).
gctgaagggacctttacca

SEQ ID NO: 169831 - DNA, 19 bp, Homo sapiens
  siRNA target sequence for GCG (NM_002054.2,405-423).
ctttaccagtgatgtaagt

SEQ ID NO: 169832 - DNA, 19 bp, Homo sapiens
  siRNA target sequence for GCG (NM_002054.2,476-494).
gccgaggaaggcgagattt

SEQ ID NO: 169833 - DNA, 19 bp, Homo sapiens
  siRNA target sequence for GCG (NM_002054.2,504-522).
ggtcgccattgttgaagaa

SEQ ID NO: 169834 - DNA, 19 bp, Homo sapiens
  siRNA target sequence for GCG (NM_002054.2,507-525).
cgccattgttgaagaactt

SEQ ID NO: 169835 - DNA, 19 bp, Homo sapiens
  siRNA target sequence for GCG (NM_002054.2,561-579).
gatgaacaccattcttgat

SEQ ID NO: 169836 - DNA, 19 bp, Homo sapiens
  siRNA target sequence for GCG (NM_002054.2,564-582).
gaacaccattcttgataat

SEQ ID NO: 169837 - DNA, 19 bp, Homo sapiens
  siRNA target sequence for GCG (NM_002054.2,587-605).
ccgccagggactttataaa

SEQ ID NO: 169838 - DNA, 19 bp, Homo sapiens
  siRNA target sequence for GCG (NM_002054.2,589-607).
gccagggactttataaact

SEQ ID NO: 169839 - DNA, 19 bp, Homo sapiens
  siRNA target sequence for GH1 (NM_000515.3,457-475).
ctgacagcaacgtctatga

SEQ ID NO: 169840 - DNA, 19 bp, Homo sapiens
  siRNA target sequence for GH2 (NM_002059.3,546-564).
gggcagatcttcaatcagt

SEQ ID NO: 169841 - DNA, 19 bp, Homo sapiens
  siRNA target sequence for GIP (NM_004123.1,354-372).
gactggaaacacaacatca

SEQ ID NO: 169842 - DNA, 19 bp, Homo sapiens
  siRNA target sequence for GIP (NM_004123.1,398-416).
gctggccagtcaagctaat

SEQ ID NO: 169843 - DNA, 19 bp, Homo sapiens
  siRNA target sequence for GIP (NM_004123.1,399-417).
ctggccagtcaagctaata

SEQ ID NO: 169844 - DNA, 19 bp, Homo sapiens
  siRNA target sequence for GIP (NM_004123.1,402-420).
gccagtcaagctaatagga

SEQ ID NO: 169845 - DNA, 19 bp, Homo sapiens
  siRNA target sequence for GIP (NM_004123.1,403-421).
ccagtcaagctaataggaa

SEQ ID NO: 169846 - DNA, 19 bp, Homo sapiens
  siRNA target sequence for GNRH2 (NM_001501.1,392-410).
cgccatcctccaataaagt

SEQ ID NO: 169847 - DNA, 19 bp, Homo sapiens
  siRNA target sequence for GNRH2 (NM_001501.1,394-412).
ccatcctccaataaagtgt

SEQ ID NO: 169848 - DNA, 19 bp, Homo sapiens
  siRNA target sequence for GPB5 (NM_145171.2,109-127).
gccgtgagggagtttactt

SEQ ID NO: 169849 - DNA, 19 bp, Homo sapiens
  siRNA target sequence for GPB5 (NM_145171.2,215-233).
ggaacccccctatattgaa

SEQ ID NO: 169850 - DNA, 19 bp, Homo sapiens
  siRNA target sequence for GPHA2 (NM_130769.2,282-300).
gtggttaccgacacaacat

SEQ ID NO: 169851 - DNA, 19 bp, Homo sapiens
  siRNA target sequence for GPHA2 (NM_130769.2,284-302).
ggttaccgacacaacatca

SEQ ID NO: 169852 - DNA, 19 bp, Homo sapiens
  siRNA target sequence for GPHA2 (NM_130769.2,333-351).
gcctgaagaaggtcaaagt

SEQ ID NO: 169853 - DNA, 19 bp, Homo sapiens
  siRNA target sequence for GPHA2 (NM_130769.2,334-352).
cctgaagaaggtcaaagta

SEQ ID NO: 169854 - DNA, 19 bp, Homo sapiens
  siRNA target sequence for GRTP1 (NM_024719.1,291-309).
gaatactaccagattacta

SEQ ID NO: 169855 - DNA, 19 bp, Homo sapiens
  siRNA target sequence for GRTP1 (NM_024719.1,447-465).
gcctgtttgtggacatctt

SEQ ID NO: 169856 - DNA, 19 bp, Homo sapiens
  siRNA target sequence for GRTP1 (NM_024719.1,485-503).
cggatctgggactgtttgt

SEQ ID NO: 169857 - DNA, 19 bp, Homo sapiens
  siRNA target sequence for GRTP1 (NM_024719.1,492-510).
gggactgtttgtttaacga

SEQ ID NO: 169858 - DNA, 19 bp, Homo sapiens
  siRNA target sequence for GRTP1 (NM_024719.1,493-511).
ggactgtttgtttaacgaa

SEQ ID NO: 169859 - DNA, 19 bp, Homo sapiens
  siRNA target sequence for GRTP1 (NM_024719.1,509-527).
gaaggctcgaagattatct

SEQ ID NO: 169860 - DNA, 19 bp, Homo sapiens
  siRNA target sequence for GRTP1 (NM_024719.1,530-548).
cgggtggccctgaccttaa

SEQ ID NO: 169861 - DNA, 19 bp, Homo sapiens
  siRNA target sequence for GRTP1 (NM_024719.1,531-549).
gggtggccctgaccttaat

SEQ ID NO: 169862 - DNA, 19 bp, Homo sapiens
  siRNA target sequence for GRTP1 (NM_024719.1,532-550).
ggtggccctgaccttaatt

SEQ ID NO: 169863 - DNA, 19 bp, Homo sapiens
  siRNA target sequence for GRTP1 (NM_024719.1,590-608).
ccagacatttgcgataagt

SEQ ID NO: 169864 - DNA, 19 bp, Homo sapiens
  siRNA target sequence for GRTP1 (NM_024719.1,591-609).
cagacatttgcgataagtt

SEQ ID NO: 169865 - DNA, 19 bp, Homo sapiens
  siRNA target sequence for GRTP1 (NM_024719.1,593-611).
gacatttgcgataagttta

SEQ ID NO: 169866 - DNA, 19 bp, Homo sapiens
  siRNA target sequence for GUCA2A (NM_033553.2,78-96).
caccgtgcaggatggaaat

SEQ ID NO: 169867 - DNA, 19 bp, Homo sapiens
  siRNA target sequence for GUCA2A (NM_033553.2,80-98).
ccgtgcaggatggaaattt

SEQ ID NO: 169868 - DNA, 19 bp, Homo sapiens
  siRNA target sequence for GUCA2A (NM_033553.2,225-243).
cccgaactttccagaagaa

SEQ ID NO: 169869 - DNA, 19 bp, Homo sapiens
  siRNA target sequence for GUCA2A (NM_033553.2,227-245).
cgaactttccagaagaact

SEQ ID NO: 169870 - DNA, 19 bp, Homo sapiens
  siRNA target sequence for HAMP (NM_021175.1,250-268).
gctgctgtcatcgatcaaa

SEQ ID NO: 169871 - DNA, 19 bp, Homo sapiens
  siRNA target sequence for HAMP (NM_021175.1,254-272).
ctgtcatcgatcaaagtgt

SEQ ID NO: 169872 - DNA, 19 bp, Homo sapiens
  siRNA target sequence for IAPP (NM_000415.1,201-219).
ctacacccattgaaagtca

SEQ ID NO: 169873 - DNA, 19 bp, Homo sapiens
  siRNA target sequence for IAPP (NM_000415.1,305-323).
ggtgccattctctcatcta

SEQ ID NO: 169874 - DNA, 19 bp, Homo sapiens
  siRNA target sequence for IAPP (NM_000415.1,328-346).
cgtgggatccaatacatat

SEQ ID NO: 169875 - DNA, 19 bp, Homo sapiens
  siRNA target sequence for IAPP (NM_000415.1,354-372).
ggaatgcagtagaggtttt

SEQ ID NO: 169876 - DNA, 19 bp, Homo sapiens
  siRNA target sequence for IAPP (NM_000415.1,355-373).
gaatgcagtagaggtttta

SEQ ID NO: 169877 - DNA, 19 bp, Homo sapiens
  siRNA target sequence for INS (NM_000207.1,105-123).
ccagccgcagcctttgtga

SEQ ID NO: 169878 - DNA, 19 bp, Homo sapiens
  siRNA target sequence for INS (NM_000207.1,174-192).
ggggaacgaggcttcttct

SEQ ID NO: 169879 - DNA, 19 bp, Homo sapiens
  siRNA target sequence for INS (NM_000207.1,175-193).
gggaacgaggcttcttcta

SEQ ID NO: 169880 - DNA, 19 bp, Homo sapiens
  siRNA target sequence for INS (NM_000207.1,309-327).
cgtggcattgtggaacaat

SEQ ID NO: 169881 - DNA, 19 bp, Homo sapiens
  siRNA target sequence for INSL4 (NM_002195.1,153-171).
gagccaactccttagagaa

SEQ ID NO: 169882 - DNA, 19 bp, Homo sapiens
  siRNA target sequence for INSL4 (NM_002195.1,200-218).
gtccccgatttggaaaaca

SEQ ID NO: 169883 - DNA, 19 bp, Homo sapiens
  siRNA target sequence for INSL4 (NM_002195.1,287-305).
ctggacgtcccaaagaaat

SEQ ID NO: 169884 - DNA, 19 bp, Homo sapiens
  siRNA target sequence for INSL4 (NM_002195.1,290-308).
gacgtcccaaagaaatggt

SEQ ID NO: 169885 - DNA, 19 bp, Homo sapiens
  siRNA target sequence for INSL4 (NM_002195.1,307-325).
gtgtcaacctccaacaaca

SEQ ID NO: 169886 - DNA, 19 bp, Homo sapiens
  siRNA target sequence for INSL4 (NM_002195.1,309-327).
gtcaacctccaacaacaaa

SEQ ID NO: 169887 - DNA, 19 bp, Homo sapiens
  siRNA target sequence for INSL4 (NM_002195.1,339-357).
cttaggtacgacatcagaa

SEQ ID NO: 169888 - DNA, 19 bp, Homo sapiens
  siRNA target sequence for INSL4 (NM_002195.1,343-361).
ggtacgacatcagaattca

SEQ ID NO: 169889 - DNA, 19 bp, Homo sapiens
  siRNA target sequence for INSL4 (NM_002195.1,344-362).
gtacgacatcagaattcat

SEQ ID NO: 169890 - DNA, 19 bp, Homo sapiens
  siRNA target sequence for INSL4 (NM_002195.1,350-368).
catcagaattcattcctaa

SEQ ID NO: 169891 - DNA, 19 bp, Homo sapiens
  siRNA target sequence for INSL4 (NM_002195.1,446-464).
gaagtggacgtcacagatt

SEQ ID NO: 169892 - DNA, 19 bp, Homo sapiens
  siRNA target sequence for INSL4 (NM_002195.1,449-467).
gtggacgtcacagatttga

SEQ ID NO: 169893 - DNA, 19 bp, Homo sapiens
  siRNA target sequence for INSL4 (NM_002195.1,455-473).
gtcacagatttgatccatt

SEQ ID NO: 169894 - DNA, 19 bp, Homo sapiens
  siRNA target sequence for INSL4 (NM_002195.1,474-492).
ctgttgtgaagtaatttgt

SEQ ID NO: 169895 - DNA, 19 bp, Homo sapiens
  siRNA target sequence for INSL4 (NM_002195.1,476-494).
gttgtgaagtaatttgtga

SEQ ID NO: 169896 - DNA, 19 bp, Homo sapiens
  siRNA target sequence for INSL4 (NM_002195.1,493-511).
gacgatggaacttcagtta

SEQ ID NO: 169897 - DNA, 19 bp, Homo sapiens
  siRNA target sequence for INSL4 (NM_002195.1,495-513).
cgatggaacttcagttaaa

SEQ ID NO: 169898 - DNA, 19 bp, Homo sapiens
  siRNA target sequence for INSL5 (NM_005478.3,38-56).
gaagggctccattttcact

SEQ ID NO: 169899 - DNA, 19 bp, Homo sapiens
  siRNA target sequence for INSL5 (NM_005478.3,115-133).
gactctgtgggctagaata

SEQ ID NO: 169900 - DNA, 19 bp, Homo sapiens
  siRNA target sequence for INSL5 (NM_005478.3,117-135).
ctctgtgggctagaataca

SEQ ID NO: 169901 - DNA, 19 bp, Homo sapiens
  siRNA target sequence for INSL5 (NM_005478.3,119-137).
ctgtgggctagaatacata

SEQ ID NO: 169902 - DNA, 19 bp, Homo sapiens
  siRNA target sequence for INSL5 (NM_005478.3,138-156).
cggacagtcatctatatct

SEQ ID NO: 169903 - DNA, 19 bp, Homo sapiens
  siRNA target sequence for INSL5 (NM_005478.3,140-158).
gacagtcatctatatctgt

SEQ ID NO: 169904 - DNA, 19 bp, Homo sapiens
  siRNA target sequence for INSL5 (NM_005478.3,227-245).
cttccagctcccacataaa

SEQ ID NO: 169905 - DNA, 19 bp, Homo sapiens
  siRNA target sequence for INSL5 (NM_005478.3,230-248).
ccagctcccacataaacgt

SEQ ID NO: 169906 - DNA, 19 bp, Homo sapiens
  siRNA target sequence for INSL5 (NM_005478.3,236-254).
cccacataaacgtgagttt

SEQ ID NO: 169907 - DNA, 19 bp, Homo sapiens
  siRNA target sequence for INSL5 (NM_005478.3,237-255).
ccacataaacgtgagtttt

SEQ ID NO: 169908 - DNA, 19 bp, Homo sapiens
  siRNA target sequence for INSL5 (NM_005478.3,371-389).
gtcaagacaagatttacaa

SEQ ID NO: 169909 - DNA, 19 bp, Homo sapiens
  siRNA target sequence for INSL5 (NM_005478.3,376-394).
gacaagatttacaaacttt

SEQ ID NO: 169910 - DNA, 19 bp, Homo sapiens
  siRNA target sequence for INSL5 (NM_005478.3,408-426).
ggctgttccatgactgatt

SEQ ID NO: 169911 - DNA, 19 bp, Homo sapiens
  siRNA target sequence for INSL5 (NM_005478.3,409-427).
gctgttccatgactgattt

SEQ ID NO: 169912 - DNA, 19 bp, Homo sapiens
  siRNA target sequence for INSL6 (NM_007179.2,58-76).
cctgctggttcggttttct

SEQ ID NO: 169913 - DNA, 19 bp, Homo sapiens
  siRNA target sequence for INSL6 (NM_007179.2,184-202).
ggaggaaacccctttctca

SEQ ID NO: 169914 - DNA, 19 bp, Homo sapiens
  siRNA target sequence for INSL6 (NM_007179.2,193-211).
ccctttctcacggttgatt

SEQ ID NO: 169915 - DNA, 19 bp, Homo sapiens
  siRNA target sequence for INSL6 (NM_007179.2,347-365).
cagtcactacctgagtata

SEQ ID NO: 169916 - DNA, 19 bp, Homo sapiens
  siRNA target sequence for INSL6 (NM_007179.2,351-369).
cactacctgagtataagga

SEQ ID NO: 169917 - DNA, 19 bp, Homo sapiens
  siRNA target sequence for INSL6 (NM_007179.2,353-371).
ctacctgagtataaggata

SEQ ID NO: 169918 - DNA, 19 bp, Homo sapiens
  siRNA target sequence for INSL6 (NM_007179.2,367-385).
ggataaaaagggatattca

SEQ ID NO: 169919 - DNA, 19 bp, Homo sapiens
  siRNA target sequence for INSL6 (NM_007179.2,417-435).
cacataatatcaatgtata

SEQ ID NO: 169920 - DNA, 19 bp, Homo sapiens
  siRNA target sequence for INSL6 (NM_007179.2,419-437).
cataatatcaatgtatata

SEQ ID NO: 169921 - DNA, 19 bp, Homo sapiens
  siRNA target sequence for INSL6 (NM_007179.2,552-570).
gtcttacaggatgtacaaa

SEQ ID NO: 169922 - DNA, 19 bp, Homo sapiens
  siRNA target sequence for INSL6 (NM_007179.2,582-600).
gcattgcatgtcttccata

SEQ ID NO: 169923 - DNA, 19 bp, Homo sapiens
  siRNA target sequence for INSL6 (NM_007179.2,583-601).
cattgcatgtcttccatat

SEQ ID NO: 169924 - DNA, 19 bp, Homo sapiens
  siRNA target sequence for INSL6 (NM_007179.2,630-648).
gatcatcacttgtaactaa

SEQ ID NO: 169925 - DNA, 19 bp, Homo sapiens
  siRNA target sequence for INSL6 (NM_007179.2,638-656).
cttgtaactaagatatact

SEQ ID NO: 169926 - DNA, 19 bp, Homo sapiens
  siRNA target sequence for LEP (NM_000230.1,227-245).
caccggtttggacttcatt

SEQ ID NO: 169927 - DNA, 19 bp, Homo sapiens
  siRNA target sequence for LEP (NM_000230.1,255-273).
caccccatcctgaccttat

SEQ ID NO: 169928 - DNA, 19 bp, Homo sapiens
  siRNA target sequence for LEP (NM_000230.1,258-276).
cccatcctgaccttatcca

SEQ ID NO: 169929 - DNA, 19 bp, Homo sapiens
  siRNA target sequence for LEP (NM_000230.1,259-277).
ccatcctgaccttatccaa

SEQ ID NO: 169930 - DNA, 19 bp, Homo sapiens
  siRNA target sequence for LEP (NM_000230.1,328-346).
ccagaaacgtgatccaaat

SEQ ID NO: 169931 - DNA, 19 bp, Homo sapiens
  siRNA target sequence for LEP (NM_000230.1,329-347).
cagaaacgtgatccaaata

SEQ ID NO: 169932 - DNA, 19 bp, Homo sapiens
  siRNA target sequence for LEP (NM_000230.1,362-380).
gaacctccgggatcttctt

SEQ ID NO: 169933 - DNA, 19 bp, Homo sapiens
  siRNA target sequence for LRSAM1 (NM_138361.2,473-491).
gacattctcgacatctcta

SEQ ID NO: 169934 - DNA, 19 bp, Homo sapiens
  siRNA target sequence for LRSAM1 (NM_138361.2,475-493).
cattctcgacatctctaaa

SEQ ID NO: 169935 - DNA, 19 bp, Homo sapiens
  siRNA target sequence for LRSAM1 (NM_138361.2,621-639).
caaccatcaaggttctaga

SEQ ID NO: 169936 - DNA, 19 bp, Homo sapiens
  siRNA target sequence for LRSAM1 (NM_138361.2,690-708).
ctgccctccaggtcttaaa

SEQ ID NO: 169937 - DNA, 19 bp, Homo sapiens
  siRNA target sequence for LRSAM1 (NM_138361.2,693-711).
ccctccaggtcttaaacgt

SEQ ID NO: 169938 - DNA, 19 bp, Homo sapiens
  siRNA target sequence for LRSAM1 (NM_138361.2,833-851).
ctgcgtaccctcaacatca

SEQ ID NO: 169939 - DNA, 19 bp, Homo sapiens
  siRNA target sequence for LRSAM1 (NM_138361.2,1088-1106).
gggcccacggacagattct

SEQ ID NO: 169940 - DNA, 19 bp, Homo sapiens
  siRNA target sequence for LRSAM1 (NM_138361.2,1090-1108).
gcccacggacagattctca

SEQ ID NO: 169941 - DNA, 19 bp, Homo sapiens
  siRNA target sequence for LRSAM1 (NM_138361.2,1091-1109).
cccacggacagattctcaa

SEQ ID NO: 169942 - DNA, 19 bp, Homo sapiens
  siRNA target sequence for LRSAM1 (NM_138361.2,1129-1147).
gaacaggttctcagactat

SEQ ID NO: 169943 - DNA, 19 bp, Homo sapiens
  siRNA target sequence for LRSAM1 (NM_138361.2,1174-1192).
ggagaaactcgagtttgaa

SEQ ID NO: 169944 - DNA, 19 bp, Homo sapiens
  siRNA target sequence for LRSAM1 (NM_138361.2,1409-1427).
caggacaatcagagacaaa

SEQ ID NO: 169945 - DNA, 19 bp, Homo sapiens
  siRNA target sequence for LRSAM1 (NM_138361.2,1658-1676).
cgattccagcagattctgt

SEQ ID NO: 169946 - DNA, 19 bp, Homo sapiens
  siRNA target sequence for LRSAM1 (NM_138361.2,1787-1805).
cagatcaggagccagatta

SEQ ID NO: 169947 - DNA, 19 bp, Homo sapiens
  siRNA target sequence for LRSAM1 (NM_138361.2,1792-1810).
caggagccagattaagtta

SEQ ID NO: 169948 - DNA, 19 bp, Homo sapiens
  siRNA target sequence for LRSAM1 (NM_138361.2,1794-1812).
ggagccagattaagttaat

SEQ ID NO: 169949 - DNA, 19 bp, Homo sapiens
  siRNA target sequence for LRSAM1 (NM_138361.2,1795-1813).
gagccagattaagttaata

SEQ ID NO: 169950 - DNA, 19 bp, Homo sapiens
  siRNA target sequence for LRSAM1 (NM_138361.2,1797-1815).
gccagattaagttaataga

SEQ ID NO: 169951 - DNA, 19 bp, Homo sapiens
  siRNA target sequence for LRSAM1 (NM_138361.2,1798-1816).
ccagattaagttaatagaa

SEQ ID NO: 169952 - DNA, 19 bp, Homo sapiens
  siRNA target sequence for MGC45438 (NM_152459.2,139-157).
ctggacactgctgaaagta

SEQ ID NO: 169953 - DNA, 19 bp, Homo sapiens
  siRNA target sequence for MGC45438 (NM_152459.2,911-929).
cagatggaccagtcatgtt

SEQ ID NO: 169954 - DNA, 19 bp, Homo sapiens
  siRNA target sequence for MGC45438 (NM_152459.2,913-931).
gatggaccagtcatgttct

SEQ ID NO: 169955 - DNA, 19 bp, Homo sapiens
  siRNA target sequence for MGC45438 (NM_152459.2,1092-1110).
gaggcgagaaaaacaattt

SEQ ID NO: 169956 - DNA, 19 bp, Homo sapiens
  siRNA target sequence for NPPA (NM_006172.1,123-141).
cgtgagcttcctcctttta

SEQ ID NO: 169957 - DNA, 19 bp, Homo sapiens
  siRNA target sequence for NPPA (NM_006172.1,170-188).
gagctaatcccatgtacaa

SEQ ID NO: 169958 - DNA, 19 bp, Homo sapiens
  siRNA target sequence for NPPA (NM_006172.1,285-303).
gctcagtgagccgaatgaa

SEQ ID NO: 169959 - DNA, 19 bp, Homo sapiens
  siRNA target sequence for POMC (NM_000939.1,812-830).
cgctacggcggtttcatga

SEQ ID NO: 169960 - DNA, 19 bp, Homo sapiens
  siRNA target sequence for PPY (NM_002722.1,59-77).
ctgcgtggctctgttacta

SEQ ID NO: 169961 - DNA, 19 bp, Homo sapiens
  siRNA target sequence for PPY (NM_002722.1,61-79).
gcgtggctctgttactaca

SEQ ID NO: 169962 - DNA, 19 bp, Homo sapiens
  siRNA target sequence for PPY (NM_002722.1,200-218).
gcctaggtatgggaaaaga

SEQ ID NO: 169963 - DNA, 19 bp, Homo sapiens
  siRNA target sequence for PYY (NM_004160.1,263-281).
gcagcggtatgggaaaaga

SEQ ID NO: 169964 - DNA, 19 bp, Homo sapiens
  siRNA target sequence for RETNLB (NM_032579.1,175-193).
ccttagactccgttatgga

SEQ ID NO: 169965 - DNA, 19 bp, Homo sapiens
  siRNA target sequence for RETNLB (NM_032579.1,176-194).
cttagactccgttatggat

SEQ ID NO: 169966 - DNA, 19 bp, Homo sapiens
  siRNA target sequence for RETNLB (NM_032579.1,184-202).
ccgttatggataagaagat

SEQ ID NO: 169967 - DNA, 19 bp, Homo sapiens
  siRNA target sequence for RETNLB (NM_032579.1,227-245).
gtacagtccctctcctata

SEQ ID NO: 169968 - DNA, 19 bp, Homo sapiens
  siRNA target sequence for RETNLB (NM_032579.1,232-250).
gtccctctcctataagcaa

SEQ ID NO: 169969 - DNA, 19 bp, Homo sapiens
  siRNA target sequence for RETNLB (NM_032579.1,257-275).
ctcgtgtgctagtgtcaaa

SEQ ID NO: 169970 - DNA, 19 bp, Homo sapiens
  siRNA target sequence for RETNLB (NM_032579.1,343-361).
gtggttcgtgggatgttca

SEQ ID NO: 169971 - DNA, 19 bp, Homo sapiens
  siRNA target sequence for RLN1 (NM_006911.2,148-166).
ccacctgctagaattctgt

SEQ ID NO: 169972 - DNA, 19 bp, Homo sapiens
  siRNA target sequence for RLN1 (NM_006911.2,208-226).
gaaggacgatgttattaaa

SEQ ID NO: 169973 - DNA, 19 bp, Homo sapiens
  siRNA target sequence for RLN1 (NM_006911.2,211-229).
ggacgatgttattaaatta

SEQ ID NO: 169974 - DNA, 19 bp, Homo sapiens
  siRNA target sequence for RLN1 (NM_006911.2,212-230).
gacgatgttattaaattat

SEQ ID NO: 169975 - DNA, 19 bp, Homo sapiens
  siRNA target sequence for RLN1 (NM_006911.2,466-484).
gcagtatgtacctgcatta

SEQ ID NO: 169976 - DNA, 19 bp, Homo sapiens
  siRNA target sequence for RLN1 (NM_006911.2,477-495).
ctgcattaaaggattccaa

SEQ ID NO: 169977 - DNA, 19 bp, Homo sapiens
  siRNA target sequence for RLN1 (NM_006911.2,620-638).
gtggcactgtttgagaaat

SEQ ID NO: 169978 - DNA, 19 bp, Homo sapiens
  siRNA target sequence for RLN2 (NM_005059.2,38-56).
gtttactactgaaccaatt

SEQ ID NO: 169979 - DNA, 19 bp, Homo sapiens
  siRNA target sequence for RLN2 (NM_005059.2,43-61).
ctactgaaccaattttcca

SEQ ID NO: 169980 - DNA, 19 bp, Homo sapiens
  siRNA target sequence for RLN2 (NM_005059.2,207-225).
ggcaggtgattttattcaa

SEQ ID NO: 169981 - DNA, 19 bp, Homo sapiens
  siRNA target sequence for RLN2 (NM_134441.1,368-386).
gtcttctctttgaagaatt

SEQ ID NO: 169982 - DNA, 19 bp, Homo sapiens
  siRNA target sequence for RLN2 (NM_134441.1,492-510).
cagtgcattggctaataaa

SEQ ID NO: 169983 - DNA, 19 bp, Homo sapiens
  siRNA target sequence for RLN2 (NM_134441.1,496-514).
gcattggctaataaatgtt

SEQ ID NO: 169984 - DNA, 19 bp, Homo sapiens
  siRNA target sequence for RLN3 (NM_080864.1,387-405).
caagtgggggtgtagcaaa

SEQ ID NO: 169985 - DNA, 19 bp, Homo sapiens
  siRNA target sequence for RLN3 (NM_080864.1,390-408).
gtgggggtgtagcaaaagt

SEQ ID NO: 169986 - DNA, 19 bp, Homo sapiens
  siRNA target sequence for RLN3 (NM_080864.1,393-411).
ggggtgtagcaaaagtgaa

SEQ ID NO: 169987 - DNA, 19 bp, Homo sapiens
  siRNA target sequence for SRP (NM_033199.2,320-338).
gcctcttgcagatcttact

SEQ ID NO: 169988 - DNA, 19 bp, Homo sapiens
  siRNA target sequence for SS18L1 (NM_015558.3,575-593).
gtgtctcggaccaacatca

SEQ ID NO: 169989 - DNA, 19 bp, Homo sapiens
  siRNA target sequence for SS18L1 (NM_015558.3,579-597).
ctcggaccaacatcaacat

SEQ ID NO: 169990 - DNA, 19 bp, Homo sapiens
  siRNA target sequence for SS18L1 (NM_015558.3,852-870).
ccatgggccagcagtacta

SEQ ID NO: 169991 - DNA, 19 bp, Homo sapiens
  siRNA target sequence for SS18L1 (NM_015558.3,946-964).
gtccacgcagcactactat

SEQ ID NO: 169992 - DNA, 19 bp, Homo sapiens
  siRNA target sequence for STC1 (NM_003155.1,379-397).
cccgagtggcggctcaaaa

SEQ ID NO: 169993 - DNA, 19 bp, Homo sapiens
  siRNA target sequence for STC1 (NM_003155.1,490-508).
ggatgtatgacatctgtaa

SEQ ID NO: 169994 - DNA, 19 bp, Homo sapiens
  siRNA target sequence for STC1 (NM_003155.1,515-533).
cttgtacagcgctgctaaa

SEQ ID NO: 169995 - DNA, 19 bp, Homo sapiens
  siRNA target sequence for STC1 (NM_003155.1,518-536).
gtacagcgctgctaaattt

SEQ ID NO: 169996 - DNA, 19 bp, Homo sapiens
  siRNA target sequence for STC1 (NM_003155.1,537-555).
gacactcagggaaaagcat

SEQ ID NO: 169997 - DNA, 19 bp, Homo sapiens
  siRNA target sequence for STC1 (NM_003155.1,557-575).
cgtcaaagagagcttaaaa

SEQ ID NO: 169998 - DNA, 19 bp, Homo sapiens
  siRNA target sequence for STC1 (NM_003155.1,667-685).
gctacagcaagctgaatgt

SEQ ID NO: 169999 - DNA, 19 bp, Homo sapiens
  siRNA target sequence for STC1 (NM_003155.1,729-747).
gtccagctgcccaatcact

SEQ ID NO: 170000 - DNA, 19 bp, Homo sapiens
  siRNA target sequence for STC1 (NM_003155.1,746-764).
cttctccaacagatactat

SEQ ID NO: 170001 - DNA, 19 bp, Homo sapiens
  siRNA target sequence for STC2 (NM_003714.1,286-304).
cggagatccagcactgttt

SEQ ID NO: 170002 - DNA, 19 bp, Homo sapiens
  siRNA target sequence for STC2 (NM_003714.1,326-344).
gtgtggcgtgtttgaatgt

SEQ ID NO: 170003 - DNA, 19 bp, Homo sapiens
  siRNA target sequence for STC2 (NM_003714.1,350-368).
gaacaactcttgtgagatt

SEQ ID NO: 170004 - DNA, 19 bp, Homo sapiens
  siRNA target sequence for STC2 (NM_003714.1,372-390).
ggcttacatgggatttgca

SEQ ID NO: 170005 - DNA, 19 bp, Homo sapiens
  siRNA target sequence for STC2 (NM_003714.1,430-448).
gcaagtcattcatcaaaga

SEQ ID NO: 170006 - DNA, 19 bp, Homo sapiens
  siRNA target sequence for STC2 (NM_003714.1,480-498).
cacaggttcggctgcataa

SEQ ID NO: 170007 - DNA, 19 bp, Homo sapiens
  siRNA target sequence for STC2 (NM_003714.1,603-621).
gtggagatgatccatttca

SEQ ID NO: 170008 - DNA, 19 bp, Homo sapiens
  siRNA target sequence for STC2 (NM_003714.1,1008-1026).
gacgaacagtctgagtatt

SEQ ID NO: 170009 - DNA, 19 bp, Homo sapiens
  siRNA target sequence for STC2 (NM_003714.1,1010-1028).
cgaacagtctgagtattct

SEQ ID NO: 170010 - DNA, 19 bp, Homo sapiens
  siRNA target sequence for STC2 (NM_003714.1,1014-1032).
cagtctgagtattctgata

SEQ ID NO: 170011 - DNA, 19 bp, Homo sapiens
  siRNA target sequence for TG (NM_003235.3,85-103).
gctgggtgtcggccaatat

SEQ ID NO: 170012 - DNA, 19 bp, Homo sapiens
  siRNA target sequence for TG (NM_003235.3,88-106).
gggtgtcggccaatatctt

SEQ ID NO: 170013 - DNA, 19 bp, Homo sapiens
  siRNA target sequence for TG (NM_003235.3,354-372).
ctgagtggctacattaaca

SEQ ID NO: 170014 - DNA, 19 bp, Homo sapiens
  siRNA target sequence for TG (NM_003235.3,520-538).
gtccaaggagctgtgaaat

SEQ ID NO: 170015 - DNA, 19 bp, Homo sapiens
  siRNA target sequence for TG (NM_003235.3,558-576).
cacggggtgggagataagt

SEQ ID NO: 170016 - DNA, 19 bp, Homo sapiens
  siRNA target sequence for TG (NM_003235.3,592-610).
ctgcggagggagagtttat

SEQ ID NO: 170017 - DNA, 19 bp, Homo sapiens
  siRNA target sequence for TG (NM_003235.3,611-629).
gcctgtccagtgcaaattt

SEQ ID NO: 170018 - DNA, 19 bp, Homo sapiens
  siRNA target sequence for TG (NM_003235.3,640-658).
cagacatgatgatttttga

SEQ ID NO: 170019 - DNA, 19 bp, Homo sapiens
  siRNA target sequence for TG (NM_003235.3,690-708).
gcatttgtgaccttcagtt

SEQ ID NO: 170020 - DNA, 19 bp, Homo sapiens
  siRNA target sequence for TG (NM_003235.3,782-800).
gacaggtttggagttgtta

SEQ ID NO: 170021 - DNA, 19 bp, Homo sapiens
  siRNA target sequence for TG (NM_003235.3,784-802).
caggtttggagttgttact

SEQ ID NO: 170022 - DNA, 19 bp, Homo sapiens
  siRNA target sequence for TG (NM_003235.3,794-812).
gttgttactggatgaaatt

SEQ ID NO: 170023 - DNA, 19 bp, Homo sapiens
  siRNA target sequence for TG (NM_003235.3,888-906).
cggttcctcgcagttcaat

SEQ ID NO: 170024 - DNA, 19 bp, Homo sapiens
  siRNA target sequence for TG (NM_003235.3,890-908).
gttcctcgcagttcaatca

SEQ ID NO: 170025 - DNA, 19 bp, Homo sapiens
  siRNA target sequence for TG (NM_003235.3,926-944).
ccgatgccccacaaaatgt

SEQ ID NO: 170026 - DNA, 19 bp, Homo sapiens
  siRNA target sequence for TG (NM_003235.3,928-946).
gatgccccacaaaatgtga

SEQ ID NO: 170027 - DNA, 19 bp, Homo sapiens
  siRNA target sequence for TG (NM_003235.3,1000-1018).
gccgaaatggcgactatca

SEQ ID NO: 170028 - DNA, 19 bp, Homo sapiens
  siRNA target sequence for TG (NM_003235.3,1154-1172).
cttgtccagactctacttt

SEQ ID NO: 170029 - DNA, 19 bp, Homo sapiens
  siRNA target sequence for TG (NM_003235.3,1273-1291).
cgatcaaggagctctttgt

SEQ ID NO: 170030 - DNA, 19 bp, Homo sapiens
  siRNA target sequence for TG (NM_003235.3,1322-1340).
gggacagagccaacagttt

SEQ ID NO: 170031 - DNA, 19 bp, Homo sapiens
  siRNA target sequence for TG (NM_003235.3,1323-1341).
ggacagagccaacagtttt

SEQ ID NO: 170032 - DNA, 19 bp, Homo sapiens
  siRNA target sequence for TG (NM_003235.3,1365-1383).
gaagccatccgagcaattt

SEQ ID NO: 170033 - DNA, 19 bp, Homo sapiens
  siRNA target sequence for TG (NM_003235.3,1402-1420).
ctcgtcttgcccttcagtt

SEQ ID NO: 170034 - DNA, 19 bp, Homo sapiens
  siRNA target sequence for TG (NM_003235.3,1479-1497).
gttggccagtttaacttgt

SEQ ID NO: 170035 - DNA, 19 bp, Homo sapiens
  siRNA target sequence for TG (NM_003235.3,1555-1573).
gtcttgcaagcttcttgaa

SEQ ID NO: 170036 - DNA, 19 bp, Homo sapiens
  siRNA target sequence for TG (NM_003235.3,1603-1621).
cactctctgtgggattaga

SEQ ID NO: 170037 - DNA, 19 bp, Homo sapiens
  siRNA target sequence for TG (NM_003235.3,1605-1623).
ctctctgtgggattagatt

SEQ ID NO: 170038 - DNA, 19 bp, Homo sapiens
  siRNA target sequence for TG (NM_003235.3,1607-1625).
ctctgtgggattagattca

SEQ ID NO: 170039 - DNA, 19 bp, Homo sapiens
  siRNA target sequence for TG (NM_003235.3,1613-1631).
gggattagattcaaattct

SEQ ID NO: 170040 - DNA, 19 bp, Homo sapiens
  siRNA target sequence for TG (NM_003235.3,1654-1672).
ctaagaaggatggtactat

SEQ ID NO: 170041 - DNA, 19 bp, Homo sapiens
  siRNA target sequence for TG (NM_003235.3,1757-1775).
ggagcttccagaattcctt

SEQ ID NO: 170042 - DNA, 19 bp, Homo sapiens
  siRNA target sequence for TG (NM_003235.3,1781-1799).
cttgcaacatgctatctct

SEQ ID NO: 170043 - DNA, 19 bp, Homo sapiens
  siRNA target sequence for TG (NM_003235.3,1871-1889).
gacacctgaaaggctattt

SEQ ID NO: 170044 - DNA, 19 bp, Homo sapiens
  siRNA target sequence for TG (NM_003235.3,1873-1891).
cacctgaaaggctatttgt

SEQ ID NO: 170045 - DNA, 19 bp, Homo sapiens
  siRNA target sequence for TG (NM_003235.3,1901-1919).
cacgacagaaggaagctat

SEQ ID NO: 170046 - DNA, 19 bp, Homo sapiens
  siRNA target sequence for TG (NM_003235.3,2074-2092).
ctggctccaccttgtttgt

SEQ ID NO: 170047 - DNA, 19 bp, Homo sapiens
  siRNA target sequence for TG (NM_003235.3,2218-2236).
gccccacgccctgtcaatt

SEQ ID NO: 170048 - DNA, 19 bp, Homo sapiens
  siRNA target sequence for TG (NM_003235.3,2221-2239).
ccacgccctgtcaattaca

SEQ ID NO: 170049 - DNA, 19 bp, Homo sapiens
  siRNA target sequence for TG (NM_003235.3,2445-2463).
ctgctagtgaagatcatga

SEQ ID NO: 170050 - DNA, 19 bp, Homo sapiens
  siRNA target sequence for TG (NM_003235.3,2640-2658).
ctcttctggcagatcttaa

SEQ ID NO: 170051 - DNA, 19 bp, Homo sapiens
  siRNA target sequence for TG (NM_003235.3,2642-2660).
cttctggcagatcttaaat

SEQ ID NO: 170052 - DNA, 19 bp, Homo sapiens
  siRNA target sequence for TG (NM_003235.3,2831-2849).
ccgtgtactgcagttcatt

SEQ ID NO: 170053 - DNA, 19 bp, Homo sapiens
  siRNA target sequence for TG (NM_003235.3,2832-2850).
cgtgtactgcagttcatta

SEQ ID NO: 170054 - DNA, 19 bp, Homo sapiens
  siRNA target sequence for TG (NM_003235.3,2851-2869).
gggaaacggaagagattgt

SEQ ID NO: 170055 - DNA, 19 bp, Homo sapiens
  siRNA target sequence for TG (NM_003235.3,2853-2871).
gaaacggaagagattgttt

SEQ ID NO: 170056 - DNA, 19 bp, Homo sapiens
  siRNA target sequence for TG (NM_003235.3,3026-3044).
ggcggctcagtctacctta

SEQ ID NO: 170057 - DNA, 19 bp, Homo sapiens
  siRNA target sequence for TG (NM_003235.3,3027-3045).
gcggctcagtctaccttaa

SEQ ID NO: 170058 - DNA, 19 bp, Homo sapiens
  siRNA target sequence for TG (NM_003235.3,3035-3053).
gtctaccttaagcttctat

SEQ ID NO: 170059 - DNA, 19 bp, Homo sapiens
  siRNA target sequence for TG (NM_003235.3,3037-3055).
ctaccttaagcttctatca

SEQ ID NO: 170060 - DNA, 19 bp, Homo sapiens
  siRNA target sequence for TG (NM_003235.3,3258-3276).
ccgacaacctgcgagaaat

SEQ ID NO: 170061 - DNA, 19 bp, Homo sapiens
  siRNA target sequence for TG (NM_003235.3,3260-3278).
gacaacctgcgagaaatct

SEQ ID NO: 170062 - DNA, 19 bp, Homo sapiens
  siRNA target sequence for TG (NM_003235.3,3309-3327).
caggctagatcccaagaaa

SEQ ID NO: 170063 - DNA, 19 bp, Homo sapiens
  siRNA target sequence for TG (NM_003235.3,3424-3442).
ctgcatcaggagaagagtt

SEQ ID NO: 170064 - DNA, 19 bp, Homo sapiens
  siRNA target sequence for TG (NM_003235.3,3679-3697).
ggtgtccgctgccattcaa

SEQ ID NO: 170065 - DNA, 19 bp, Homo sapiens
  siRNA target sequence for TG (NM_003235.3,4115-4133).
ggagcgtttaggagtgaat

SEQ ID NO: 170066 - DNA, 19 bp, Homo sapiens
  siRNA target sequence for TG (NM_003235.3,4118-4136).
gcgtttaggagtgaatgtt

SEQ ID NO: 170067 - DNA, 19 bp, Homo sapiens
  siRNA target sequence for TG (NM_003235.3,4119-4137).
cgtttaggagtgaatgtta

SEQ ID NO: 170068 - DNA, 19 bp, Homo sapiens
  siRNA target sequence for TG (NM_003235.3,4169-4187).
ggcttctcttcctgactta

SEQ ID NO: 170069 - DNA, 19 bp, Homo sapiens
  siRNA target sequence for TG (NM_003235.3,4354-4372).
ggtgctcggaaggattcta

SEQ ID NO: 170070 - DNA, 19 bp, Homo sapiens
  siRNA target sequence for TG (NM_003235.3,4404-4422).
ggactgggatgcgttaagt

SEQ ID NO: 170071 - DNA, 19 bp, Homo sapiens
  siRNA target sequence for TG (NM_003235.3,4521-4539).
gtgggcagaacgaccattt

SEQ ID NO: 170072 - DNA, 19 bp, Homo sapiens
  siRNA target sequence for TG (NM_003235.3,4719-4737).
gaggactcacagtgtttga

SEQ ID NO: 170073 - DNA, 19 bp, Homo sapiens
  siRNA target sequence for TG (NM_003235.3,4722-4740).
gactcacagtgtttgatga

SEQ ID NO: 170074 - DNA, 19 bp, Homo sapiens
  siRNA target sequence for TG (NM_003235.3,4895-4913).
cacgacggagccagagatt

SEQ ID NO: 170075 - DNA, 19 bp, Homo sapiens
  siRNA target sequence for TG (NM_003235.3,4977-4995).
gatgcactggggaactcaa

SEQ ID NO: 170076 - DNA, 19 bp, Homo sapiens
  siRNA target sequence for TG (NM_003235.3,5000-5018).
caccagctttggaagtctt

SEQ ID NO: 170077 - DNA, 19 bp, Homo sapiens
  siRNA target sequence for TG (NM_003235.3,5039-5057).
gagccatggtcaagattct

SEQ ID NO: 170078 - DNA, 19 bp, Homo sapiens
  siRNA target sequence for TG (NM_003235.3,5056-5074).
ctccagctgtgtatttgaa

SEQ ID NO: 170079 - DNA, 19 bp, Homo sapiens
  siRNA target sequence for TG (NM_003235.3,5119-5137).
ccactggtttccaaaacat

SEQ ID NO: 170080 - DNA, 19 bp, Homo sapiens
  siRNA target sequence for TG (NM_003235.3,5307-5325).
gtcctgctttgtaatgtca

SEQ ID NO: 170081 - DNA, 19 bp, Homo sapiens
  siRNA target sequence for TG (NM_003235.3,5309-5327).
cctgctttgtaatgtcaaa

SEQ ID NO: 170082 - DNA, 19 bp, Homo sapiens
  siRNA target sequence for TG (NM_003235.3,5313-5331).
ctttgtaatgtcaaagact

SEQ ID NO: 170083 - DNA, 19 bp, Homo sapiens
  siRNA target sequence for TG (NM_003235.3,5368-5386).
gtcctggtgtgacatatga

SEQ ID NO: 170084 - DNA, 19 bp, Homo sapiens
  siRNA target sequence for TG (NM_003235.3,5438-5456).
gagtctgacacccttagaa

SEQ ID NO: 170085 - DNA, 19 bp, Homo sapiens
  siRNA target sequence for TG (NM_003235.3,5457-5475).
ggaactcaagacaccttta

SEQ ID NO: 170086 - DNA, 19 bp, Homo sapiens
  siRNA target sequence for TG (NM_003235.3,5518-5536).
ggtctcggcctgagtctat

SEQ ID NO: 170087 - DNA, 19 bp, Homo sapiens
  siRNA target sequence for TG (NM_003235.3,5529-5547).
gagtctatgggatgtagaa

SEQ ID NO: 170088 - DNA, 19 bp, Homo sapiens
  siRNA target sequence for TG (NM_003235.3,5586-5604).
ggtttgacaacagaacttt

SEQ ID NO: 170089 - DNA, 19 bp, Homo sapiens
  siRNA target sequence for TG (NM_003235.3,5621-5639).
caaccaggtcattgtcaat

SEQ ID NO: 170090 - DNA, 19 bp, Homo sapiens
  siRNA target sequence for TG (NM_003235.3,5636-5654).
caatggaaatcaatcacta

SEQ ID NO: 170091 - DNA, 19 bp, Homo sapiens
  siRNA target sequence for TG (NM_003235.3,5730-5748).
gtgcaggagcactctttct

SEQ ID NO: 170092 - DNA, 19 bp, Homo sapiens
  siRNA target sequence for TG (NM_003235.3,5884-5902).
ccctgttccggaagaaagt

SEQ ID NO: 170093 - DNA, 19 bp, Homo sapiens
  siRNA target sequence for TG (NM_003235.3,5885-5903).
cctgttccggaagaaagtt

SEQ ID NO: 170094 - DNA, 19 bp, Homo sapiens
  siRNA target sequence for TG (NM_003235.3,5888-5906).
gttccggaagaaagttata

SEQ ID NO: 170095 - DNA, 19 bp, Homo sapiens
  siRNA target sequence for TG (NM_003235.3,5935-5953).
ctcgcctgccgttccaaaa

SEQ ID NO: 170096 - DNA, 19 bp, Homo sapiens
  siRNA target sequence for TG (NM_003235.3,5940-5958).
ctgccgttccaaaaactga

SEQ ID NO: 170097 - DNA, 19 bp, Homo sapiens
  siRNA target sequence for TG (NM_003235.3,5955-5973).
ctgatggggatatccatta

SEQ ID NO: 170098 - DNA, 19 bp, Homo sapiens
  siRNA target sequence for TG (NM_003235.3,5957-5975).
gatggggatatccattaga

SEQ ID NO: 170099 - DNA, 19 bp, Homo sapiens
  siRNA target sequence for TG (NM_003235.3,5960-5978).
ggggatatccattagaaat

SEQ ID NO: 170100 - DNA, 19 bp, Homo sapiens
  siRNA target sequence for TG (NM_003235.3,5962-5980).
ggatatccattagaaataa

SEQ ID NO: 170101 - DNA, 19 bp, Homo sapiens
  siRNA target sequence for TG (NM_003235.3,5984-6002).
gcccatgtctgaaaaatct

SEQ ID NO: 170102 - DNA, 19 bp, Homo sapiens
  siRNA target sequence for TG (NM_003235.3,5985-6003).
cccatgtctgaaaaatcta

SEQ ID NO: 170103 - DNA, 19 bp, Homo sapiens
  siRNA target sequence for TG (NM_003235.3,6230-6248).
gaagcccattgctcaaaat

SEQ ID NO: 170104 - DNA, 19 bp, Homo sapiens
  siRNA target sequence for TG (NM_003235.3,6233-6251).
gcccattgctcaaaataat

SEQ ID NO: 170105 - DNA, 19 bp, Homo sapiens
  siRNA target sequence for TG (NM_003235.3,6257-6275).
cagtttttgccctttggtt

SEQ ID NO: 170106 - DNA, 19 bp, Homo sapiens
  siRNA target sequence for TG (NM_003235.3,6341-6359).
ggttgttgatccatccatt

SEQ ID NO: 170107 - DNA, 19 bp, Homo sapiens
  siRNA target sequence for TG (NM_003235.3,6342-6360).
gttgttgatccatccatta

SEQ ID NO: 170108 - DNA, 19 bp, Homo sapiens
  siRNA target sequence for TG (NM_003235.3,6352-6370).
catccattaggcactttga

SEQ ID NO: 170109 - DNA, 19 bp, Homo sapiens
  siRNA target sequence for TG (NM_003235.3,6355-6373).
ccattaggcactttgatgt

SEQ ID NO: 170110 - DNA, 19 bp, Homo sapiens
  siRNA target sequence for TG (NM_003235.3,6423-6441).
ctctgtttgtcggaatgtt

SEQ ID NO: 170111 - DNA, 19 bp, Homo sapiens
  siRNA target sequence for TG (NM_003235.3,6433-6451).
cggaatgttcccaacatga

SEQ ID NO: 170112 - DNA, 19 bp, Homo sapiens
  siRNA target sequence for TG (NM_003235.3,6503-6521).
gttctatgctgatactcaa

SEQ ID NO: 170113 - DNA, 19 bp, Homo sapiens
  siRNA target sequence for TG (NM_003235.3,6719-6737).
gttccttggagttccatat

SEQ ID NO: 170114 - DNA, 19 bp, Homo sapiens
  siRNA target sequence for TG (NM_003235.3,6722-6740).
ccttggagttccatatgct

SEQ ID NO: 170115 - DNA, 19 bp, Homo sapiens
  siRNA target sequence for TG (NM_003235.3,6864-6882).
ggagtcagtgaagattgtt

SEQ ID NO: 170116 - DNA, 19 bp, Homo sapiens
  siRNA target sequence for TG (NM_003235.3,6865-6883).
gagtcagtgaagattgttt

SEQ ID NO: 170117 - DNA, 19 bp, Homo sapiens
  siRNA target sequence for TG (NM_003235.3,6867-6885).
gtcagtgaagattgtttgt

SEQ ID NO: 170118 - DNA, 19 bp, Homo sapiens
  siRNA target sequence for TG (NM_003235.3,6925-6943).
cgtctgtgctggtgttctt

SEQ ID NO: 170119 - DNA, 19 bp, Homo sapiens
  siRNA target sequence for TG (NM_003235.3,7239-7257).
gccaccaactcccaacttt

SEQ ID NO: 170120 - DNA, 19 bp, Homo sapiens
  siRNA target sequence for TG (NM_003235.3,7326-7344).
cagcagcaggcaattgctt

SEQ ID NO: 170121 - DNA, 19 bp, Homo sapiens
  siRNA target sequence for TG (NM_003235.3,7356-7374).
gtcagttgccccatgtcat

SEQ ID NO: 170122 - DNA, 19 bp, Homo sapiens
  siRNA target sequence for TG (NM_003235.3,7521-7539).
gcactgaagaggtctttat

SEQ ID NO: 170123 - DNA, 19 bp, Homo sapiens
  siRNA target sequence for TG (NM_003235.3,7631-7649).
ccggaccagtagcaaaaca

SEQ ID NO: 170124 - DNA, 19 bp, Homo sapiens
  siRNA target sequence for TG (NM_003235.3,7639-7657).
gtagcaaaacagcctttta

SEQ ID NO: 170125 - DNA, 19 bp, Homo sapiens
  siRNA target sequence for TG (NM_003235.3,7709-7727).
ggctgctgctacatggtat

SEQ ID NO: 170126 - DNA, 19 bp, Homo sapiens
  siRNA target sequence for TG (NM_003235.3,7739-7757).
gcactccacggatgactat

SEQ ID NO: 170127 - DNA, 19 bp, Homo sapiens
  siRNA target sequence for TG (NM_003235.3,7785-7803).
gccacccgggactacttta

SEQ ID NO: 170128 - DNA, 19 bp, Homo sapiens
  siRNA target sequence for TG (NM_003235.3,7789-7807).
cccgggactactttatcat

SEQ ID NO: 170129 - DNA, 19 bp, Homo sapiens
  siRNA target sequence for TG (NM_003235.3,7791-7809).
cgggactactttatcatct

SEQ ID NO: 170130 - DNA, 19 bp, Homo sapiens
  siRNA target sequence for TG (NM_003235.3,7849-7867).
cccgaggaaacgtcttcat

SEQ ID NO: 170131 - DNA, 19 bp, Homo sapiens
  siRNA target sequence for TG (NM_003235.3,7851-7869).
cgaggaaacgtcttcatgt

SEQ ID NO: 170132 - DNA, 19 bp, Homo sapiens
  siRNA target sequence for TG (NM_003235.3,7852-7870).
gaggaaacgtcttcatgta

SEQ ID NO: 170133 - DNA, 19 bp, Homo sapiens
  siRNA target sequence for TG (NM_003235.3,7910-7928).
gctggcggatgttcagttt

SEQ ID NO: 170134 - DNA, 19 bp, Homo sapiens
  siRNA target sequence for TG (NM_003235.3,7953-7971).
gcctacgaggggcagtttt

SEQ ID NO: 170135 - DNA, 19 bp, Homo sapiens
  siRNA target sequence for TG (NM_003235.3,7955-7973).
ctacgaggggcagttttct

SEQ ID NO: 170136 - DNA, 19 bp, Homo sapiens
  siRNA target sequence for TG (NM_003235.3,7987-8005).
gcctgtcgctgaaaatcat

SEQ ID NO: 170137 - DNA, 19 bp, Homo sapiens
  siRNA target sequence for TG (NM_003235.3,8040-8058).
cccaactacccttatgagt

SEQ ID NO: 170138 - DNA, 19 bp, Homo sapiens
  siRNA target sequence for TG (NM_003235.3,8041-8059).
ccaactacccttatgagtt

SEQ ID NO: 170139 - DNA, 19 bp, Homo sapiens
  siRNA target sequence for TG (NM_003235.3,8066-8084).
gaaagtacccacatttgca

SEQ ID NO: 170140 - DNA, 19 bp, Homo sapiens
  siRNA target sequence for TSHB (NM_000549.1,44-62).
gtgggcaagcgatgtcttt

SEQ ID NO: 170141 - DNA, 19 bp, Homo sapiens
  siRNA target sequence for TSHB (NM_000549.1,46-64).
gggcaagcgatgtcttttt

SEQ ID NO: 170142 - DNA, 19 bp, Homo sapiens
  siRNA target sequence for TSHB (NM_000549.1,48-66).
gcaagcgatgtctttttgt

SEQ ID NO: 170143 - DNA, 19 bp, Homo sapiens
  siRNA target sequence for TSHB (NM_000549.1,107-125).
gtgcttattgcctaaccat

SEQ ID NO: 170144 - DNA, 19 bp, Homo sapiens
  siRNA target sequence for TSHB (NM_000549.1,152-170).
gtatgacacgggatatcaa

SEQ ID NO: 170145 - DNA, 19 bp, Homo sapiens
  siRNA target sequence for TSHB (NM_000549.1,168-186).
caatggcaaactgtttctt

SEQ ID NO: 170146 - DNA, 19 bp, Homo sapiens
  siRNA target sequence for TSHB (NM_000549.1,231-249).
catctacaggactgtagaa

SEQ ID NO: 170147 - DNA, 19 bp, Homo sapiens
  siRNA target sequence for TSHB (NM_000549.1,271-289).
gttgctccctatttttcct

SEQ ID NO: 170148 - DNA, 19 bp, Homo sapiens
  siRNA target sequence for TSHB (NM_000549.1,312-330).
gtgtggcaagtgcaatact

SEQ ID NO: 170149 - DNA, 19 bp, Homo sapiens
  siRNA target sequence for TSHB (NM_000549.1,314-332).
gtggcaagtgcaatactga

SEQ ID NO: 170150 - DNA, 19 bp, Homo sapiens
  siRNA target sequence for TSHB (NM_000549.1,323-341).
gcaatactgactatagtga

SEQ ID NO: 170151 - DNA, 19 bp, Homo sapiens
  siRNA target sequence for TSHB (NM_000549.1,349-367).
catgaagccatcaagacaa

SEQ ID NO: 170152 - DNA, 19 bp, Homo sapiens
  siRNA target sequence for TSHB (NM_000549.1,378-396).
caaacctcagaagtcttat

SEQ ID NO: 170153 - DNA, 19 bp, Homo sapiens
  siRNA target sequence for UCN3 (NM_053049.1,59-77).
caggcctcccccacaagtt

SEQ ID NO: 170154 - DNA, 19 bp, Homo sapiens
  siRNA target sequence for UCN3 (NM_053049.1,373-391).
gacgtccccaccaacatca

SEQ ID NO: 170155 - DNA, 19 bp, Homo sapiens
  siRNA target sequence for UCN3 (NM_053049.1,453-471).
ccacctgatggcgcaaatt

SEQ ID NO: 170156 - DNA, 19 bp, Homo sapiens
  siRNA target sequence for UCN3 (NM_053049.1,466-484).
caaattgggaggaagaagt

SEQ ID NO: 170157 - DNA, 19 bp, Homo sapiens
  siRNA target sequence for UTS2 (NM_006786.2,45-63).
gcctcctgctgtttgcttt

SEQ ID NO: 170158 - DNA, 19 bp, Homo sapiens
  siRNA target sequence for UTS2 (NM_006786.2,65-83).
cataggattcttaaatcct

SEQ ID NO: 170159 - DNA, 19 bp, Homo sapiens
  siRNA target sequence for UTS2 (NM_006786.2,101-119).
ccttgactccagggaaata

SEQ ID NO: 170160 - DNA, 19 bp, Homo sapiens
  siRNA target sequence for UTS2 (NM_006786.2,102-120).
cttgactccagggaaatat

SEQ ID NO: 170161 - DNA, 19 bp, Homo sapiens
  siRNA target sequence for UTS2 (NM_006786.2,178-196).
gagcttcccttctacagat

SEQ ID NO: 170162 - DNA, 19 bp, Homo sapiens
  siRNA target sequence for UTS2 (NM_006786.2,181-199).
cttcccttctacagatact

SEQ ID NO: 170163 - DNA, 19 bp, Homo sapiens
  siRNA target sequence for UTS2 (NM_006786.2,296-314).
ggatttctctggacaagat

SEQ ID NO: 170164 - DNA, 19 bp, Homo sapiens
  siRNA target sequence for UTS2 (NM_006786.2,304-322).
ctggacaagatcctaacat

SEQ ID NO: 170165 - DNA, 19 bp, Homo sapiens
  siRNA target sequence for UTS2 (NM_006786.2,306-324).
ggacaagatcctaacattt

SEQ ID NO: 170166 - DNA, 19 bp, Homo sapiens
  siRNA target sequence for UTS2 (NM_006786.2,307-325).
gacaagatcctaacatttt

SEQ ID NO: 170167 - DNA, 19 bp, Homo sapiens
  siRNA target sequence for UTS2 (NM_006786.2,378-396).
cctgattgcttctggaaat

SEQ ID NO: 170168 - DNA, 19 bp, Homo sapiens
  siRNA target sequence for UTS2 (NM_021995.1,89-107).
ccaacgtatttcatcttat

SEQ ID NO: 170169 - DNA, 19 bp, Homo sapiens
  siRNA target sequence for UTS2 (NM_021995.1,119-137).
cttctgctcggactcataa

SEQ ID NO: 170170 - DNA, 19 bp, Homo sapiens
  siRNA target sequence for UTS2 (NM_021995.1,124-142).
gctcggactcataaatcca

SEQ ID NO: 170171 - DNA, 19 bp, Homo sapiens
  siRNA target sequence for UTS2 (NM_021995.1,133-151).
cataaatccacgtctcttt

SEQ ID NO: 170172 - DNA, 19 bp, Homo sapiens
  siRNA target sequence for UTS2 (NM_021995.1,159-177).
ccacttcaactcatatcca

SEQ ID NO: 170173 - DNA, 19 bp, Homo sapiens
  siRNA target sequence for UTS2 (NM_021995.1,160-178).
cacttcaactcatatccaa

SEQ ID NO: 170174 - DNA, 19 bp, Homo sapiens
  siRNA target sequence for UTS2 (NM_021995.1,176-194).
caagccttcctttaattca

SEQ ID NO: 170175 - DNA, 19 bp, Homo sapiens
  siRNA target sequence for ADAM11 (NM_002390.2,694-712).
cctacagtgcacagtgaaa

SEQ ID NO: 170176 - DNA, 19 bp, Homo sapiens
  siRNA target sequence for ADAM11 (NM_002390.2,714-732).
caagtatgtggagctaatt

SEQ ID NO: 170177 - DNA, 19 bp, Homo sapiens
  siRNA target sequence for ADAM11 (NM_002390.2,777-795).
ggtcctcaccagcaacttt

SEQ ID NO: 170178 - DNA, 19 bp, Homo sapiens
  siRNA target sequence for ADAM11 (NM_002390.2,1411-1429).
ggcaactgctgcaagaaat

SEQ ID NO: 170179 - DNA, 19 bp, Homo sapiens
  siRNA target sequence for ADAM11 (NM_002390.2,1801-1819).
ctcctctgtgtcaacatct

SEQ ID NO: 170180 - DNA, 19 bp, Homo sapiens
  siRNA target sequence for ADAM11 (NM_002390.2,2162-2180).
cgggggagacggagagata

SEQ ID NO: 170181 - DNA, 19 bp, Homo sapiens
  siRNA target sequence for ADAM11 (NM_002390.2,2163-2181).
gggggagacggagagatat

SEQ ID NO: 170182 - DNA, 19 bp, Homo sapiens
  siRNA target sequence for ADAM11 (NM_002390.2,2164-2182).
ggggagacggagagatata

SEQ ID NO: 170183 - DNA, 19 bp, Homo sapiens
  siRNA target sequence for ADAM11 (NM_002390.2,2165-2183).
gggagacggagagatataa

SEQ ID NO: 170184 - DNA, 19 bp, Homo sapiens
  siRNA target sequence for ADAM11 (NM_002390.2,2166-2184).
ggagacggagagatataaa

SEQ ID NO: 170185 - DNA, 19 bp, Homo sapiens
  siRNA target sequence for ADAM11 (NM_002390.2,2169-2187).
gacggagagatataaaggt

SEQ ID NO: 170186 - DNA, 19 bp, Homo sapiens
  siRNA target sequence for ADAM11 (NM_002390.2,2189-2207).
ccagcggcaccaacatcat

SEQ ID NO: 170187 - DNA, 19 bp, Homo sapiens
  siRNA target sequence for ADAM11 (NM_002390.2,2192-2210).
gcggcaccaacatcatcat

SEQ ID NO: 170188 - DNA, 19 bp, Homo sapiens
  siRNA target sequence for ADAM2 (NM_001464.2,106-124).
ggctgcggatggacagtaa

SEQ ID NO: 170189 - DNA, 19 bp, Homo sapiens
  siRNA target sequence for ADAM2 (NM_001464.2,108-126).
ctgcggatggacagtaatt

SEQ ID NO: 170190 - DNA, 19 bp, Homo sapiens
  siRNA target sequence for ADAM2 (NM_001464.2,158-176).
ggagaaaatacggtcaata

SEQ ID NO: 170191 - DNA, 19 bp, Homo sapiens
  siRNA target sequence for ADAM2 (NM_001464.2,161-179).
gaaaatacggtcaataata

SEQ ID NO: 170192 - DNA, 19 bp, Homo sapiens
  siRNA target sequence for ADAM2 (NM_001464.2,200-218).
ggcatcctacaaaattgta

SEQ ID NO: 170193 - DNA, 19 bp, Homo sapiens
  siRNA target sequence for ADAM2 (NM_001464.2,201-219).
gcatcctacaaaattgtaa

SEQ ID NO: 170194 - DNA, 19 bp, Homo sapiens
  siRNA target sequence for ADAM2 (NM_001464.2,202-220).
catcctacaaaattgtaat

SEQ ID NO: 170195 - DNA, 19 bp, Homo sapiens
  siRNA target sequence for ADAM2 (NM_001464.2,267-285).
ccccataattttagagttt

SEQ ID NO: 170196 - DNA, 19 bp, Homo sapiens
  siRNA target sequence for ADAM2 (NM_001464.2,343-361).
gccactaccaagggtatat

SEQ ID NO: 170197 - DNA, 19 bp, Homo sapiens
  siRNA target sequence for ADAM2 (NM_001464.2,344-362).
ccactaccaagggtatatt

SEQ ID NO: 170198 - DNA, 19 bp, Homo sapiens
  siRNA target sequence for ADAM2 (NM_001464.2,347-365).
ctaccaagggtatattgaa

SEQ ID NO: 170199 - DNA, 19 bp, Homo sapiens
  siRNA target sequence for ADAM2 (NM_001464.2,384-402).
gtgatggttagcacatgta

SEQ ID NO: 170200 - DNA, 19 bp, Homo sapiens
  siRNA target sequence for ADAM2 (NM_001464.2,386-404).
gatggttagcacatgtact

SEQ ID NO: 170201 - DNA, 19 bp, Homo sapiens
  siRNA target sequence for ADAM2 (NM_001464.2,406-424).
gactcaggggcgtactaca

SEQ ID NO: 170202 - DNA, 19 bp, Homo sapiens
  siRNA target sequence for ADAM2 (NM_001464.2,410-428).
caggggcgtactacagttt

SEQ ID NO: 170203 - DNA, 19 bp, Homo sapiens
  siRNA target sequence for ADAM2 (NM_001464.2,412-430).
ggggcgtactacagtttga

SEQ ID NO: 170204 - DNA, 19 bp, Homo sapiens
  siRNA target sequence for ADAM2 (NM_001464.2,413-431).
gggcgtactacagtttgaa

SEQ ID NO: 170205 - DNA, 19 bp, Homo sapiens
  siRNA target sequence for ADAM2 (NM_001464.2,414-432).
ggcgtactacagtttgaaa

SEQ ID NO: 170206 - DNA, 19 bp, Homo sapiens
  siRNA target sequence for ADAM2 (NM_001464.2,415-433).
gcgtactacagtttgaaaa

SEQ ID NO: 170207 - DNA, 19 bp, Homo sapiens
  siRNA target sequence for ADAM2 (NM_001464.2,416-434).
cgtactacagtttgaaaat

SEQ ID NO: 170208 - DNA, 19 bp, Homo sapiens
  siRNA target sequence for ADAM2 (NM_001464.2,466-484).
cagttggctttgaacatgt

SEQ ID NO: 170209 - DNA, 19 bp, Homo sapiens
  siRNA target sequence for ADAM2 (NM_001464.2,511-529).
cagatgtttccttatataa

SEQ ID NO: 170210 - DNA, 19 bp, Homo sapiens
  siRNA target sequence for ADAM2 (NM_001464.2,531-549).
gagaaggatattgaatcaa

SEQ ID NO: 170211 - DNA, 19 bp, Homo sapiens
  siRNA target sequence for ADAM2 (NM_001464.2,547-565).
caagagatctgtcctttaa

SEQ ID NO: 170212 - DNA, 19 bp, Homo sapiens
  siRNA target sequence for ADAM2 (NM_001464.2,581-599).
gccacagcaagattttgca

SEQ ID NO: 170213 - DNA, 19 bp, Homo sapiens
  siRNA target sequence for ADAM2 (NM_001464.2,624-642).
gttgaaaaacaattgtata

SEQ ID NO: 170214 - DNA, 19 bp, Homo sapiens
  siRNA target sequence for ADAM2 (NM_001464.2,650-668).
ggggtctgatacaactgtt

SEQ ID NO: 170215 - DNA, 19 bp, Homo sapiens
  siRNA target sequence for ADAM2 (NM_001464.2,661-679).
caactgttgtcgctcaaaa

SEQ ID NO: 170216 - DNA, 19 bp, Homo sapiens
  siRNA target sequence for ADAM2 (NM_001464.2,664-682).
ctgttgtcgctcaaaaagt

SEQ ID NO: 170217 - DNA, 19 bp, Homo sapiens
  siRNA target sequence for ADAM2 (NM_001464.2,681-699).
gttttccagttgattggat

SEQ ID NO: 170218 - DNA, 19 bp, Homo sapiens
  siRNA target sequence for ADAM2 (NM_001464.2,696-714).
ggattgacgaatgctattt

SEQ ID NO: 170219 - DNA, 19 bp, Homo sapiens
  siRNA target sequence for ADAM2 (NM_001464.2,697-715).
gattgacgaatgctatttt

SEQ ID NO: 170220 - DNA, 19 bp, Homo sapiens
  siRNA target sequence for ADAM2 (NM_001464.2,701-719).
gacgaatgctatttttgtt

SEQ ID NO: 170221 - DNA, 19 bp, Homo sapiens
  siRNA target sequence for ADAM2 (NM_001464.2,823-841).
gatggaaaacatcttatct

SEQ ID NO: 170222 - DNA, 19 bp, Homo sapiens
  siRNA target sequence for ADAM2 (NM_001464.2,826-844).
ggaaaacatcttatcttgt

SEQ ID NO: 170223 - DNA, 19 bp, Homo sapiens
  siRNA target sequence for ADAM2 (NM_001464.2,919-937).
ggaagatgtgtgatgcaaa

SEQ ID NO: 170224 - DNA, 19 bp, Homo sapiens
  siRNA target sequence for ADAM2 (NM_001464.2,970-988).
ccataagtctggaatcact

SEQ ID NO: 170225 - DNA, 19 bp, Homo sapiens
  siRNA target sequence for ADAM2 (NM_001464.2,971-989).
cataagtctggaatcactt

SEQ ID NO: 170226 - DNA, 19 bp, Homo sapiens
  siRNA target sequence for ADAM2 (NM_001464.2,980-998).
ggaatcacttgcagttatt

SEQ ID NO: 170227 - DNA, 19 bp, Homo sapiens
  siRNA target sequence for ADAM2 (NM_001464.2,1017-1035).
cttagtatggggatcactt

SEQ ID NO: 170228 - DNA, 19 bp, Homo sapiens
  siRNA target sequence for ADAM2 (NM_001464.2,1021-1039).
gtatggggatcacttatga

SEQ ID NO: 170229 - DNA, 19 bp, Homo sapiens
  siRNA target sequence for ADAM2 (NM_001464.2,1063-1081).
caggagctgtctgcattat

SEQ ID NO: 170230 - DNA, 19 bp, Homo sapiens
  siRNA target sequence for ADAM2 (NM_001464.2,1082-1100).
gaatccagaagcaattcat

SEQ ID NO: 170231 - DNA, 19 bp, Homo sapiens
  siRNA target sequence for ADAM2 (NM_001464.2,1171-1189).
cccagtgtcttcacaatca

SEQ ID NO: 170232 - DNA, 19 bp, Homo sapiens
  siRNA target sequence for ADAM2 (NM_001464.2,1184-1202).
caatcagcctcgcttagat

SEQ ID NO: 170233 - DNA, 19 bp, Homo sapiens
  siRNA target sequence for ADAM2 (NM_001464.2,1190-1208).
gcctcgcttagatcctttt

SEQ ID NO: 170234 - DNA, 19 bp, Homo sapiens
  siRNA target sequence for ADAM2 (NM_001464.2,1221-1239).
gcagtgtgtggtaatgcaa

SEQ ID NO: 170235 - DNA, 19 bp, Homo sapiens
  siRNA target sequence for ADAM2 (NM_001464.2,1311-1329).
gatattgccacatgtagat

SEQ ID NO: 170236 - DNA, 19 bp, Homo sapiens
  siRNA target sequence for ADAM2 (NM_001464.2,1366-1384).
gcgaaaactgtctatttat

SEQ ID NO: 170237 - DNA, 19 bp, Homo sapiens
  siRNA target sequence for ADAM2 (NM_001464.2,1373-1391).
ctgtctatttatgtcaaaa

SEQ ID NO: 170238 - DNA, 19 bp, Homo sapiens
  siRNA target sequence for ADAM2 (NM_001464.2,1462-1480).
gcccagaaaaccactatgt

SEQ ID NO: 170239 - DNA, 19 bp, Homo sapiens
  siRNA target sequence for ADAM2 (NM_001464.2,1465-1483).
cagaaaaccactatgttca

SEQ ID NO: 170240 - DNA, 19 bp, Homo sapiens
  siRNA target sequence for ADAM2 (NM_001464.2,1498-1516).
gtggactgaatcaatggat

SEQ ID NO: 170241 - DNA, 19 bp, Homo sapiens
  siRNA target sequence for ADAM2 (NM_001464.2,1503-1521).
ctgaatcaatggatctgta

SEQ ID NO: 170242 - DNA, 19 bp, Homo sapiens
  siRNA target sequence for ADAM2 (NM_001464.2,1505-1523).
gaatcaatggatctgtata

SEQ ID NO: 170243 - DNA, 19 bp, Homo sapiens
  siRNA target sequence for ADAM2 (NM_001464.2,1517-1535).
ctgtatagatggagtttgt

SEQ ID NO: 170244 - DNA, 19 bp, Homo sapiens
  siRNA target sequence for ADAM2 (NM_001464.2,1581-1599).
gagtttggcccttcagaat

SEQ ID NO: 170245 - DNA, 19 bp, Homo sapiens
  siRNA target sequence for ADAM2 (NM_001464.2,1691-1709).
gtgcggaaaattaatatgt

SEQ ID NO: 170246 - DNA, 19 bp, Homo sapiens
  siRNA target sequence for ADAM2 (NM_001464.2,1693-1711).
gcggaaaattaatatgtaa

SEQ ID NO: 170247 - DNA, 19 bp, Homo sapiens
  siRNA target sequence for ADAM2 (NM_001464.2,1740-1758).
ccaagagccactattattt

SEQ ID NO: 170248 - DNA, 19 bp, Homo sapiens
  siRNA target sequence for ADAM2 (NM_001464.2,1741-1759).
caagagccactattattta

SEQ ID NO: 170249 - DNA, 19 bp, Homo sapiens
  siRNA target sequence for ADAM2 (NM_001464.2,1793-1811).
ggaatttgccagtgatcat

SEQ ID NO: 170250 - DNA, 19 bp, Homo sapiens
  siRNA target sequence for ADAM2 (NM_001464.2,1882-1900).
gatgtgtgagttcttcata

SEQ ID NO: 170251 - DNA, 19 bp, Homo sapiens
  siRNA target sequence for ADAM2 (NM_001464.2,1935-1953).
gatagaggtgtatgcaata

SEQ ID NO: 170252 - DNA, 19 bp, Homo sapiens
  siRNA target sequence for ADAM2 (NM_001464.2,1939-1957).
gaggtgtatgcaataacaa

SEQ ID NO: 170253 - DNA, 19 bp, Homo sapiens
  siRNA target sequence for ADAM2 (NM_001464.2,1941-1959).
ggtgtatgcaataacaaaa

SEQ ID NO: 170254 - DNA, 19 bp, Homo sapiens
  siRNA target sequence for ADAM2 (NM_001464.2,1966-1984).
gtcactgtagtgcttcata

SEQ ID NO: 170255 - DNA, 19 bp, Homo sapiens
  siRNA target sequence for ADAM2 (NM_001464.2,1970-1988).
ctgtagtgcttcatattta

SEQ ID NO: 170256 - DNA, 19 bp, Homo sapiens
  siRNA target sequence for ADAM2 (NM_001464.2,2000-2018).
ctcagttcaatcagatcta

SEQ ID NO: 170257 - DNA, 19 bp, Homo sapiens
  siRNA target sequence for ADAM2 (NM_001464.2,2078-2096).
ccctgaaaggcgctacatt

SEQ ID NO: 170258 - DNA, 19 bp, Homo sapiens
  siRNA target sequence for ADAM2 (NM_001464.2,2080-2098).
ctgaaaggcgctacattga

SEQ ID NO: 170259 - DNA, 19 bp, Homo sapiens
  siRNA target sequence for ADAM2 (NM_001464.2,2086-2104).
ggcgctacattgagaacat

SEQ ID NO: 170260 - DNA, 19 bp, Homo sapiens
  siRNA target sequence for ADAM2 (NM_001464.2,2087-2105).
gcgctacattgagaacatt

SEQ ID NO: 170261 - DNA, 19 bp, Homo sapiens
  siRNA target sequence for ADAM2 (NM_001464.2,2165-2183).
ctgtgtactgattgctata

SEQ ID NO: 170262 - DNA, 19 bp, Homo sapiens
  siRNA target sequence for ADAM2 (NM_001464.2,2167-2185).
gtgtactgattgctataat

SEQ ID NO: 170263 - DNA, 19 bp, Homo sapiens
  siRNA target sequence for ADAM22 (NM_004194.2,321-339).
cgcagttgactcatgttga

SEQ ID NO: 170264 - DNA, 19 bp, Homo sapiens
  siRNA target sequence for ADAM22 (NM_004194.2,363-381).
cctttggaacgtcattcat

SEQ ID NO: 170265 - DNA, 19 bp, Homo sapiens
  siRNA target sequence for ADAM22 (NM_004194.2,385-403).
cgatgtcgtgctaaatcat

SEQ ID NO: 170266 - DNA, 19 bp, Homo sapiens
  siRNA target sequence for ADAM22 (NM_004194.2,409-427).
gctgtcctctgaatacata

SEQ ID NO: 170267 - DNA, 19 bp, Homo sapiens
  siRNA target sequence for ADAM22 (NM_004194.2,454-472).
gactgtggaagttaaagga

SEQ ID NO: 170268 - DNA, 19 bp, Homo sapiens
  siRNA target sequence for ADAM22 (NM_004194.2,545-563).
ggacttcatgggatgttct

SEQ ID NO: 170269 - DNA, 19 bp, Homo sapiens
  siRNA target sequence for ADAM22 (NM_004194.2,546-564).
gacttcatgggatgttcta

SEQ ID NO: 170270 - DNA, 19 bp, Homo sapiens
  siRNA target sequence for ADAM22 (NM_004194.2,569-587).
gggaaccacacatatctca

SEQ ID NO: 170271 - DNA, 19 bp, Homo sapiens
  siRNA target sequence for ADAM22 (NM_004194.2,609-627).
ctactcaagaggatttcca

SEQ ID NO: 170272 - DNA, 19 bp, Homo sapiens
  siRNA target sequence for ADAM22 (NM_004194.2,612-630).
ctcaagaggatttccattt

SEQ ID NO: 170273 - DNA, 19 bp, Homo sapiens
  siRNA target sequence for ADAM22 (NM_004194.2,643-661).
caaatccagactgtttgaa

SEQ ID NO: 170274 - DNA, 19 bp, Homo sapiens
  siRNA target sequence for ADAM22 (NM_004194.2,671-689).
gatgatcttccatctgaat

SEQ ID NO: 170275 - DNA, 19 bp, Homo sapiens
  siRNA target sequence for ADAM22 (NM_004194.2,754-772).
gcagcttcgtcgatatcct

SEQ ID NO: 170276 - DNA, 19 bp, Homo sapiens
  siRNA target sequence for ADAM22 (NM_004194.2,762-780).
gtcgatatcctcgtaatgt

SEQ ID NO: 170277 - DNA, 19 bp, Homo sapiens
  siRNA target sequence for ADAM22 (NM_004194.2,765-783).
gatatcctcgtaatgtaga

SEQ ID NO: 170278 - DNA, 19 bp, Homo sapiens
  siRNA target sequence for ADAM22 (NM_004194.2,845-863).
cggctttccgttgtacata

SEQ ID NO: 170279 - DNA, 19 bp, Homo sapiens
  siRNA target sequence for ADAM22 (NM_004194.2,854-872).
gttgtacataccaatacct

SEQ ID NO: 170280 - DNA, 19 bp, Homo sapiens
  siRNA target sequence for ADAM22 (NM_004194.2,865-883).
caatacctatgcgaaatct

SEQ ID NO: 170281 - DNA, 19 bp, Homo sapiens
  siRNA target sequence for ADAM22 (NM_004194.2,920-938).
cttaagaccaggatagtat

SEQ ID NO: 170282 - DNA, 19 bp, Homo sapiens
  siRNA target sequence for ADAM22 (NM_004194.2,930-948).
ggatagtattggttgctat

SEQ ID NO: 170283 - DNA, 19 bp, Homo sapiens
  siRNA target sequence for ADAM22 (NM_004194.2,957-975).
gggcgactgacaacaagtt

SEQ ID NO: 170284 - DNA, 19 bp, Homo sapiens
  siRNA target sequence for ADAM22 (NM_004194.2,958-976).
ggcgactgacaacaagttt

SEQ ID NO: 170285 - DNA, 19 bp, Homo sapiens
  siRNA target sequence for ADAM22 (NM_004194.2,967-985).
caacaagtttgccatatct

SEQ ID NO: 170286 - DNA, 19 bp, Homo sapiens
  siRNA target sequence for ADAM22 (NM_004194.2,970-988).
caagtttgccatatctgaa

SEQ ID NO: 170287 - DNA, 19 bp, Homo sapiens
  siRNA target sequence for ADAM22 (NM_004194.2,997-1015).
gatcaccctacgtgagttt

SEQ ID NO: 170288 - DNA, 19 bp, Homo sapiens
  siRNA target sequence for ADAM22 (NM_004194.2,1002-1020).
ccctacgtgagtttatgaa

SEQ ID NO: 170289 - DNA, 19 bp, Homo sapiens
  siRNA target sequence for ADAM22 (NM_004194.2,1003-1021).
cctacgtgagtttatgaaa

SEQ ID NO: 170290 - DNA, 19 bp, Homo sapiens
  siRNA target sequence for ADAM22 (NM_004194.2,1140-1158).
gaggaggcgtgaatgaatt

SEQ ID NO: 170291 - DNA, 19 bp, Homo sapiens
  siRNA target sequence for ADAM22 (NM_004194.2,1192-1210).
ccagtcattagcccataat

SEQ ID NO: 170292 - DNA, 19 bp, Homo sapiens
  siRNA target sequence for ADAM22 (NM_004194.2,1195-1213).
gtcattagcccataatatt

SEQ ID NO: 170293 - DNA, 19 bp, Homo sapiens
  siRNA target sequence for ADAM22 (NM_004194.2,1202-1220).
gcccataatattggtatta

SEQ ID NO: 170294 - DNA, 19 bp, Homo sapiens
  siRNA target sequence for ADAM22 (NM_004194.2,1241-1259).
gcaagtggtgaatgtaaat

SEQ ID NO: 170295 - DNA, 19 bp, Homo sapiens
  siRNA target sequence for ADAM22 (NM_004194.2,1269-1287).
cgtggtccgggtgcataat

SEQ ID NO: 170296 - DNA, 19 bp, Homo sapiens
  siRNA target sequence for ADAM22 (NM_004194.2,1288-1306).
gggagacactggctattat

SEQ ID NO: 170297 - DNA, 19 bp, Homo sapiens
  siRNA target sequence for ADAM22 (NM_004194.2,1296-1314).
ctggctattatcttcctaa

SEQ ID NO: 170298 - DNA, 19 bp, Homo sapiens
  siRNA target sequence for ADAM22 (NM_004194.2,1298-1316).
ggctattatcttcctaaaa

SEQ ID NO: 170299 - DNA, 19 bp, Homo sapiens
  siRNA target sequence for ADAM22 (NM_004194.2,1323-1341).
cccagtgtaatattgaaga

SEQ ID NO: 170300 - DNA, 19 bp, Homo sapiens
  siRNA target sequence for ADAM22 (NM_004194.2,1384-1402).
caacaaaccttctaagctt

SEQ ID NO: 170301 - DNA, 19 bp, Homo sapiens
  siRNA target sequence for ADAM22 (NM_004194.2,1493-1511).
gagtgttgtaagaaatgca

SEQ ID NO: 170302 - DNA, 19 bp, Homo sapiens
  siRNA target sequence for ADAM22 (NM_004194.2,1538-1556).
gacggtctttgctgtaaaa

SEQ ID NO: 170303 - DNA, 19 bp, Homo sapiens
  siRNA target sequence for ADAM22 (NM_004194.2,1549-1567).
ctgtaaaaagtgcaagttt

SEQ ID NO: 170304 - DNA, 19 bp, Homo sapiens
  siRNA target sequence for ADAM22 (NM_004194.2,1588-1606).
ccgagaagcagtaaatgat

SEQ ID NO: 170305 - DNA, 19 bp, Homo sapiens
  siRNA target sequence for ADAM22 (NM_004194.2,1641-1659).
gccagtgtgcccctaatat

SEQ ID NO: 170306 - DNA, 19 bp, Homo sapiens
  siRNA target sequence for ADAM22 (NM_004194.2,1642-1660).
ccagtgtgcccctaatatt

SEQ ID NO: 170307 - DNA, 19 bp, Homo sapiens
  siRNA target sequence for ADAM22 (NM_004194.2,1647-1665).
gtgcccctaatattcataa

SEQ ID NO: 170308 - DNA, 19 bp, Homo sapiens
  siRNA target sequence for ADAM22 (NM_004194.2,1649-1667).
gcccctaatattcataaaa

SEQ ID NO: 170309 - DNA, 19 bp, Homo sapiens
  siRNA target sequence for ADAM22 (NM_004194.2,1685-1703).
gatggtgttcagggaattt

SEQ ID NO: 170310 - DNA, 19 bp, Homo sapiens
  siRNA target sequence for ADAM22 (NM_004194.2,1725-1743).
ccagagatagacaatgcaa

SEQ ID NO: 170311 - DNA, 19 bp, Homo sapiens
  siRNA target sequence for ADAM22 (NM_004194.2,1785-1803).
gctatgagaaactgaatat

SEQ ID NO: 170312 - DNA, 19 bp, Homo sapiens
  siRNA target sequence for ADAM22 (NM_004194.2,1786-1804).
ctatgagaaactgaatatt

SEQ ID NO: 170313 - DNA, 19 bp, Homo sapiens
  siRNA target sequence for ADAM22 (NM_004194.2,1820-1838).
ggtaactgtgggaaagaca

SEQ ID NO: 170314 - DNA, 19 bp, Homo sapiens
  siRNA target sequence for ADAM22 (NM_004194.2,1821-1839).
gtaactgtgggaaagacaa

SEQ ID NO: 170315 - DNA, 19 bp, Homo sapiens
  siRNA target sequence for ADAM22 (NM_004194.2,1925-1943).
gaactcgatggtgaaatca

SEQ ID NO: 170316 - DNA, 19 bp, Homo sapiens
  siRNA target sequence for ADAM22 (NM_004194.2,1928-1946).
ctcgatggtgaaatcacat

SEQ ID NO: 170317 - DNA, 19 bp, Homo sapiens
  siRNA target sequence for ADAM22 (NM_004194.2,1958-1976).
gtgcagcaaggaagaacat

SEQ ID NO: 170318 - DNA, 19 bp, Homo sapiens
  siRNA target sequence for ADAM22 (NM_004194.2,2045-2063).
ccttgtggtccccaaatga

SEQ ID NO: 170319 - DNA, 19 bp, Homo sapiens
  siRNA target sequence for ADAM22 (NM_004194.2,2046-2064).
cttgtggtccccaaatgat

SEQ ID NO: 170320 - DNA, 19 bp, Homo sapiens
  siRNA target sequence for ADAM22 (NM_004194.2,2090-2108).
gtggcttctttcaacttta

SEQ ID NO: 170321 - DNA, 19 bp, Homo sapiens
  siRNA target sequence for ADAM22 (NM_004194.2,2092-2110).
ggcttctttcaactttagt

SEQ ID NO: 170322 - DNA, 19 bp, Homo sapiens
  siRNA target sequence for ADAM22 (NM_004194.2,2122-2140).
cagtaaagaaggcactatt

SEQ ID NO: 170323 - DNA, 19 bp, Homo sapiens
  siRNA target sequence for ADAM22 (NM_004194.2,2171-2189).
ctgaagtgtgtgtgtaaca

SEQ ID NO: 170324 - DNA, 19 bp, Homo sapiens
  siRNA target sequence for ADAM22 (NM_004194.2,2215-2233).
cacttacttccctcacaat

SEQ ID NO: 170325 - DNA, 19 bp, Homo sapiens
  siRNA target sequence for ADAM22 (NM_004194.2,2276-2294).
gctggcaccaatatcataa

SEQ ID NO: 170326 - DNA, 19 bp, Homo sapiens
  siRNA target sequence for ADAM22 (NM_004194.2,2290-2308).
cataataggcataattgct

SEQ ID NO: 170327 - DNA, 19 bp, Homo sapiens
  siRNA target sequence for ADAM22 (NM_004194.2,2323-2341).
gctggccctcatattagga

SEQ ID NO: 170328 - DNA, 19 bp, Homo sapiens
  siRNA target sequence for ADAM22 (NM_004194.2,2326-2344).
ggccctcatattaggaata

SEQ ID NO: 170329 - DNA, 19 bp, Homo sapiens
  siRNA target sequence for ADAM22 (NM_004194.2,2327-2345).
gccctcatattaggaataa

SEQ ID NO: 170330 - DNA, 19 bp, Homo sapiens
  siRNA target sequence for ADAM22 (NM_004194.2,2349-2367).
cgtggggttataaaaacta

SEQ ID NO: 170331 - DNA, 19 bp, Homo sapiens
  siRNA target sequence for ADAM22 (NM_004194.2,2458-2476).
cacaaactcagcatctagt

SEQ ID NO: 170332 - DNA, 19 bp, Homo sapiens
  siRNA target sequence for ADAM22 (NM_004194.2,2466-2484).
cagcatctagttctaagaa

SEQ ID NO: 170333 - DNA, 19 bp, Homo sapiens
  siRNA target sequence for ADAM22 (NM_004194.2,2468-2486).
gcatctagttctaagaaga

SEQ ID NO: 170334 - DNA, 19 bp, Homo sapiens
  siRNA target sequence for ADAM22 (NM_016351.3,2671-2689).
gctatgggagacatccatt

SEQ ID NO: 170335 - DNA, 19 bp, Homo sapiens
  siRNA target sequence for ADAM22 (NM_021722.2,2586-2604).
ctaagtgggtagaagatgt

SEQ ID NO: 170336 - DNA, 19 bp, Homo sapiens
  siRNA target sequence for ADAM22 (NM_021722.2,2614-2632).
cactgaaggaccatacttt

SEQ ID NO: 170337 - DNA, 19 bp, Homo sapiens
  siRNA target sequence for ADAM22 (NM_021722.2,2618-2636).
gaaggaccatactttagga

SEQ ID NO: 170338 - DNA, 19 bp, Homo sapiens
  siRNA target sequence for ADAM23 (NM_003812.1,432-450).
ccagcgctccgcattggaa

SEQ ID NO: 170339 - DNA, 19 bp, Homo sapiens
  siRNA target sequence for ADAM23 (NM_003812.1,436-454).
cgctccgcattggaatgaa

SEQ ID NO: 170340 - DNA, 19 bp, Homo sapiens
  siRNA target sequence for ADAM23 (NM_003812.1,437-455).
gctccgcattggaatgaaa

SEQ ID NO: 170341 - DNA, 19 bp, Homo sapiens
  siRNA target sequence for ADAM23 (NM_003812.1,472-490).
gggagtcctggcagatgaa

SEQ ID NO: 170342 - DNA, 19 bp, Homo sapiens
  siRNA target sequence for ADAM23 (NM_003812.1,479-497).
ctggcagatgaagacaata

SEQ ID NO: 170343 - DNA, 19 bp, Homo sapiens
  siRNA target sequence for ADAM23 (NM_003812.1,513-531).
gcagcagtaatatcagtta

SEQ ID NO: 170344 - DNA, 19 bp, Homo sapiens
  siRNA target sequence for ADAM23 (NM_003812.1,534-552).
gcaatgcaatgcagaaaga

SEQ ID NO: 170345 - DNA, 19 bp, Homo sapiens
  siRNA target sequence for ADAM23 (NM_003812.1,560-578).
ctgccttcaagactcatat

SEQ ID NO: 170346 - DNA, 19 bp, Homo sapiens
  siRNA target sequence for ADAM23 (NM_003812.1,562-580).
gccttcaagactcatatat

SEQ ID NO: 170347 - DNA, 19 bp, Homo sapiens
  siRNA target sequence for ADAM23 (NM_003812.1,563-581).
ccttcaagactcatatatt

SEQ ID NO: 170348 - DNA, 19 bp, Homo sapiens
  siRNA target sequence for ADAM23 (NM_003812.1,564-582).
cttcaagactcatatatta

SEQ ID NO: 170349 - DNA, 19 bp, Homo sapiens
  siRNA target sequence for ADAM23 (NM_003812.1,673-691).
ggcaagcttccagattgaa

SEQ ID NO: 170350 - DNA, 19 bp, Homo sapiens
  siRNA target sequence for ADAM23 (NM_003812.1,693-711).
ccttcggctccaaattcat

SEQ ID NO: 170351 - DNA, 19 bp, Homo sapiens
  siRNA target sequence for ADAM23 (NM_003812.1,694-712).
cttcggctccaaattcatt

SEQ ID NO: 170352 - DNA, 19 bp, Homo sapiens
  siRNA target sequence for ADAM23 (NM_003812.1,719-737).
ctcatactgaacaatggtt

SEQ ID NO: 170353 - DNA, 19 bp, Homo sapiens
  siRNA target sequence for ADAM23 (NM_003812.1,735-753).
gtttgttgtcttctgatta

SEQ ID NO: 170354 - DNA, 19 bp, Homo sapiens
  siRNA target sequence for ADAM23 (NM_003812.1,755-773).
gtggagattcactacgaaa

SEQ ID NO: 170355 - DNA, 19 bp, Homo sapiens
  siRNA target sequence for ADAM23 (NM_003812.1,757-775).
ggagattcactacgaaaat

SEQ ID NO: 170356 - DNA, 19 bp, Homo sapiens
  siRNA target sequence for ADAM23 (NM_003812.1,776-794).
gggaaaccacagtactcta

SEQ ID NO: 170357 - DNA, 19 bp, Homo sapiens
  siRNA target sequence for ADAM23 (NM_003812.1,777-795).
ggaaaccacagtactctaa

SEQ ID NO: 170358 - DNA, 19 bp, Homo sapiens
  siRNA target sequence for ADAM23 (NM_003812.1,893-911).
gatgataccttcgtgtata

SEQ ID NO: 170359 - DNA, 19 bp, Homo sapiens
  siRNA target sequence for ADAM23 (NM_003812.1,896-914).
gataccttcgtgtatatga

SEQ ID NO: 170360 - DNA, 19 bp, Homo sapiens
  siRNA target sequence for ADAM23 (NM_003812.1,900-918).
ccttcgtgtatatgataga

SEQ ID NO: 170361 - DNA, 19 bp, Homo sapiens
  siRNA target sequence for ADAM23 (NM_003812.1,921-939).
cactagagctggttcatga

SEQ ID NO: 170362 - DNA, 19 bp, Homo sapiens
  siRNA target sequence for ADAM23 (NM_003812.1,928-946).
gctggttcatgatgagaaa

SEQ ID NO: 170363 - DNA, 19 bp, Homo sapiens
  siRNA target sequence for ADAM23 (NM_003812.1,949-967).
cacaggtcgaccacatata

SEQ ID NO: 170364 - DNA, 19 bp, Homo sapiens
  siRNA target sequence for ADAM23 (NM_003812.1,951-969).
caggtcgaccacatataat

SEQ ID NO: 170365 - DNA, 19 bp, Homo sapiens
  siRNA target sequence for ADAM23 (NM_003812.1,1006-1024).
gaagaatctcactatggaa

SEQ ID NO: 170366 - DNA, 19 bp, Homo sapiens
  siRNA target sequence for ADAM23 (NM_003812.1,1087-1105).
gaatccatcacgtggtata

SEQ ID NO: 170367 - DNA, 19 bp, Homo sapiens
  siRNA target sequence for ADAM23 (NM_003812.1,1126-1144).
ggaacttatgattgttaat

SEQ ID NO: 170368 - DNA, 19 bp, Homo sapiens
  siRNA target sequence for ADAM23 (NM_003812.1,1135-1153).
gattgttaatgatcacaaa

SEQ ID NO: 170369 - DNA, 19 bp, Homo sapiens
  siRNA target sequence for ADAM23 (NM_003812.1,1145-1163).
gatcacaaaacgtataaga

SEQ ID NO: 170370 - DNA, 19 bp, Homo sapiens
  siRNA target sequence for ADAM23 (NM_003812.1,1213-1231).
caaccttgtggattctatt

SEQ ID NO: 170371 - DNA, 19 bp, Homo sapiens
  siRNA target sequence for ADAM23 (NM_003812.1,1217-1235).
cttgtggattctatttaca

SEQ ID NO: 170372 - DNA, 19 bp, Homo sapiens
  siRNA target sequence for ADAM23 (NM_003812.1,1282-1300).
gactgagaaggatcagatt

SEQ ID NO: 170373 - DNA, 19 bp, Homo sapiens
  siRNA target sequence for ADAM23 (NM_003812.1,1387-1405).
catctcgcgggtgacattt

SEQ ID NO: 170374 - DNA, 19 bp, Homo sapiens
  siRNA target sequence for ADAM23 (NM_003812.1,1392-1410).
cgcgggtgacatttcacta

SEQ ID NO: 170375 - DNA, 19 bp, Homo sapiens
  siRNA target sequence for ADAM23 (NM_003812.1,1394-1412).
cgggtgacatttcactata

SEQ ID NO: 170376 - DNA, 19 bp, Homo sapiens
  siRNA target sequence for ADAM23 (NM_003812.1,1395-1413).
gggtgacatttcactataa

SEQ ID NO: 170377 - DNA, 19 bp, Homo sapiens
  siRNA target sequence for ADAM23 (NM_003812.1,1397-1415).
gtgacatttcactataaga

SEQ ID NO: 170378 - DNA, 19 bp, Homo sapiens
  siRNA target sequence for ADAM23 (NM_003812.1,1399-1417).
gacatttcactataagaga

SEQ ID NO: 170379 - DNA, 19 bp, Homo sapiens
  siRNA target sequence for ADAM23 (NM_003812.1,1416-1434).
gaagcagtctgagttactt

SEQ ID NO: 170380 - DNA, 19 bp, Homo sapiens
  siRNA target sequence for ADAM23 (NM_003812.1,1526-1544).
caaaaccttggaatccaat

SEQ ID NO: 170381 - DNA, 19 bp, Homo sapiens
  siRNA target sequence for ADAM23 (NM_003812.1,1618-1636).
ggtgtcccattctcgaaaa

SEQ ID NO: 170382 - DNA, 19 bp, Homo sapiens
  siRNA target sequence for ADAM23 (NM_003812.1,1619-1637).
gtgtcccattctcgaaaat

SEQ ID NO: 170383 - DNA, 19 bp, Homo sapiens
  siRNA target sequence for ADAM23 (NM_003812.1,1621-1639).
gtcccattctcgaaaattt

SEQ ID NO: 170384 - DNA, 19 bp, Homo sapiens
  siRNA target sequence for ADAM23 (NM_003812.1,1624-1642).
ccattctcgaaaattttca

SEQ ID NO: 170385 - DNA, 19 bp, Homo sapiens
  siRNA target sequence for ADAM23 (NM_003812.1,1625-1643).
cattctcgaaaattttcaa

SEQ ID NO: 170386 - DNA, 19 bp, Homo sapiens
  siRNA target sequence for ADAM23 (NM_003812.1,1648-1666).
cagcattttggagtataga

SEQ ID NO: 170387 - DNA, 19 bp, Homo sapiens
  siRNA target sequence for ADAM23 (NM_003812.1,1657-1675).
ggagtatagagacttttta

SEQ ID NO: 170388 - DNA, 19 bp, Homo sapiens
  siRNA target sequence for ADAM23 (NM_003812.1,1705-1723).
caggccaacaaagctattt

SEQ ID NO: 170389 - DNA, 19 bp, Homo sapiens
  siRNA target sequence for ADAM23 (NM_003812.1,1883-1901).
cagccacgagggtatgaat

SEQ ID NO: 170390 - DNA, 19 bp, Homo sapiens
  siRNA target sequence for ADAM23 (NM_003812.1,1915-1933).
gaacgagtgtgatattact

SEQ ID NO: 170391 - DNA, 19 bp, Homo sapiens
  siRNA target sequence for ADAM23 (NM_003812.1,1919-1937).
gagtgtgatattactgaat

SEQ ID NO: 170392 - DNA, 19 bp, Homo sapiens
  siRNA target sequence for ADAM23 (NM_003812.1,1960-1978).
gtgcccaccaaatcttcat

SEQ ID NO: 170393 - DNA, 19 bp, Homo sapiens
  siRNA target sequence for ADAM23 (NM_003812.1,1962-1980).
gcccaccaaatcttcataa

SEQ ID NO: 170394 - DNA, 19 bp, Homo sapiens
  siRNA target sequence for ADAM23 (NM_003812.1,1987-2005).
cggatatgcatgcaatcaa

SEQ ID NO: 170395 - DNA, 19 bp, Homo sapiens
  siRNA target sequence for ADAM23 (NM_003812.1,2079-2097).
ctgcagggtctgacaagtt

SEQ ID NO: 170396 - DNA, 19 bp, Homo sapiens
  siRNA target sequence for ADAM23 (NM_003812.1,2101-2119).
ctatgaaaagctgaataca

SEQ ID NO: 170397 - DNA, 19 bp, Homo sapiens
  siRNA target sequence for ADAM23 (NM_003812.1,2153-2171).
ggagaccggtggattcagt

SEQ ID NO: 170398 - DNA, 19 bp, Homo sapiens
  siRNA target sequence for ADAM23 (NM_003812.1,2229-2247).
cacgtattggtcaacttca

SEQ ID NO: 170399 - DNA, 19 bp, Homo sapiens
  siRNA target sequence for ADAM23 (NM_003812.1,2298-2316).
gcagtggtgcccatgtagt

SEQ ID NO: 170400 - DNA, 19 bp, Homo sapiens
  siRNA target sequence for ADAM23 (NM_003812.1,2312-2330).
gtagttttagatgatgata

SEQ ID NO: 170401 - DNA, 19 bp, Homo sapiens
  siRNA target sequence for ADAM23 (NM_003812.1,2360-2378).
ccatgtggcccgtctatga

SEQ ID NO: 170402 - DNA, 19 bp, Homo sapiens
  siRNA target sequence for ADAM23 (NM_003812.1,2361-2379).
catgtggcccgtctatgat

SEQ ID NO: 170403 - DNA, 19 bp, Homo sapiens
  siRNA target sequence for ADAM23 (NM_003812.1,2366-2384).
ggcccgtctatgatgtgtt

SEQ ID NO: 170404 - DNA, 19 bp, Homo sapiens
  siRNA target sequence for ADAM23 (NM_003812.1,2367-2385).
gcccgtctatgatgtgttt

SEQ ID NO: 170405 - DNA, 19 bp, Homo sapiens
  siRNA target sequence for ADAM23 (NM_003812.1,2368-2386).
cccgtctatgatgtgttta

SEQ ID NO: 170406 - DNA, 19 bp, Homo sapiens
  siRNA target sequence for ADAM23 (NM_003812.1,2370-2388).
cgtctatgatgtgtttaga

SEQ ID NO: 170407 - DNA, 19 bp, Homo sapiens
  siRNA target sequence for ADAM23 (NM_003812.1,2387-2405).
gatcggaagtgcctacaaa

SEQ ID NO: 170408 - DNA, 19 bp, Homo sapiens
  siRNA target sequence for ADAM23 (NM_003812.1,2464-2482).
ccatggggtgtgtagtaat

SEQ ID NO: 170409 - DNA, 19 bp, Homo sapiens
  siRNA target sequence for ADAM23 (NM_003812.1,2585-2603).
cctagtgccaccaatctca

SEQ ID NO: 170410 - DNA, 19 bp, Homo sapiens
  siRNA target sequence for ADAM23 (NM_003812.1,2589-2607).
gtgccaccaatctcataat

SEQ ID NO: 170411 - DNA, 19 bp, Homo sapiens
  siRNA target sequence for ADAM23 (NM_003812.1,2664-2682).
ggggatttaaaaatgtcaa

SEQ ID NO: 170412 - DNA, 19 bp, Homo sapiens
  siRNA target sequence for ECM2 (NM_001393.1,297-315).
gcatggaggaaaagtttga

SEQ ID NO: 170413 - DNA, 19 bp, Homo sapiens
  siRNA target sequence for ECM2 (NM_001393.1,304-322).
ggaaaagtttgaatccttt

SEQ ID NO: 170414 - DNA, 19 bp, Homo sapiens
  siRNA target sequence for ECM2 (NM_001393.1,335-353).
ggagtagaatcaagttata

SEQ ID NO: 170415 - DNA, 19 bp, Homo sapiens
  siRNA target sequence for ECM2 (NM_001393.1,370-388).
gaagggacactgtttggta

SEQ ID NO: 170416 - DNA, 19 bp, Homo sapiens
  siRNA target sequence for ECM2 (NM_001393.1,496-514).
gaggtgcccccaaacagtt

SEQ ID NO: 170417 - DNA, 19 bp, Homo sapiens
  siRNA target sequence for ECM2 (NM_001393.1,502-520).
cccccaaacagttatacct

SEQ ID NO: 170418 - DNA, 19 bp, Homo sapiens
  siRNA target sequence for ECM2 (NM_001393.1,566-584).
ctactcagtggtatagcat

SEQ ID NO: 170419 - DNA, 19 bp, Homo sapiens
  siRNA target sequence for ECM2 (NM_001393.1,569-587).
ctcagtggtatagcattaa

SEQ ID NO: 170420 - DNA, 19 bp, Homo sapiens
  siRNA target sequence for ECM2 (NM_001393.1,571-589).
cagtggtatagcattaaat

SEQ ID NO: 170421 - DNA, 19 bp, Homo sapiens
  siRNA target sequence for ECM2 (NM_001393.1,636-654).
ccaatttacttcataagca

SEQ ID NO: 170422 - DNA, 19 bp, Homo sapiens
  siRNA target sequence for ECM2 (NM_001393.1,673-691).
gggaatggaccgaatagta

SEQ ID NO: 170423 - DNA, 19 bp, Homo sapiens
  siRNA target sequence for ECM2 (NM_001393.1,674-692).
ggaatggaccgaatagtaa

SEQ ID NO: 170424 - DNA, 19 bp, Homo sapiens
  siRNA target sequence for ECM2 (NM_001393.1,774-792).
gaaatcaggggcaacttta

SEQ ID NO: 170425 - DNA, 19 bp, Homo sapiens
  siRNA target sequence for ECM2 (NM_001393.1,947-965).
ccggtaagaggagatatgt

SEQ ID NO: 170426 - DNA, 19 bp, Homo sapiens
  siRNA target sequence for ECM2 (NM_001393.1,1118-1136).
gagctcactggcaattcca

SEQ ID NO: 170427 - DNA, 19 bp, Homo sapiens
  siRNA target sequence for ECM2 (NM_001393.1,1166-1184).
ggattaccaaatttggaaa

SEQ ID NO: 170428 - DNA, 19 bp, Homo sapiens
  siRNA target sequence for ECM2 (NM_001393.1,1220-1238).
ggcataggtccaaaagcat

SEQ ID NO: 170429 - DNA, 19 bp, Homo sapiens
  siRNA target sequence for ECM2 (NM_001393.1,1221-1239).
gcataggtccaaaagcatt

SEQ ID NO: 170430 - DNA, 19 bp, Homo sapiens
  siRNA target sequence for ECM2 (NM_001393.1,1252-1270).
gaagttaatgcgtttgaat

SEQ ID NO: 170431 - DNA, 19 bp, Homo sapiens
  siRNA target sequence for ECM2 (NM_001393.1,1288-1306).
gatacagattccttcacaa

SEQ ID NO: 170432 - DNA, 19 bp, Homo sapiens
  siRNA target sequence for ECM2 (NM_001393.1,1302-1320).
cacaattgccatctacatt

SEQ ID NO: 170433 - DNA, 19 bp, Homo sapiens
  siRNA target sequence for ECM2 (NM_001393.1,1309-1327).
gccatctacattagaagaa

SEQ ID NO: 170434 - DNA, 19 bp, Homo sapiens
  siRNA target sequence for ECM2 (NM_001393.1,1345-1363).
caatcttcaggctatcgat

SEQ ID NO: 170435 - DNA, 19 bp, Homo sapiens
  siRNA target sequence for ECM2 (NM_001393.1,1352-1370).
caggctatcgatgaagaaa

SEQ ID NO: 170436 - DNA, 19 bp, Homo sapiens
  siRNA target sequence for ECM2 (NM_001393.1,1356-1374).
ctatcgatgaagaaagttt

SEQ ID NO: 170437 - DNA, 19 bp, Homo sapiens
  siRNA target sequence for ECM2 (NM_001393.1,1367-1385).
gaaagtttatcagacttaa

SEQ ID NO: 170438 - DNA, 19 bp, Homo sapiens
  siRNA target sequence for ECM2 (NM_001393.1,1393-1411).
ggtcaccttagaattggaa

SEQ ID NO: 170439 - DNA, 19 bp, Homo sapiens
  siRNA target sequence for ECM2 (NM_001393.1,1438-1456).
caatcctttagctttcaaa

SEQ ID NO: 170440 - DNA, 19 bp, Homo sapiens
  siRNA target sequence for ECM2 (NM_001393.1,1516-1534).
gggtcttcctggttctatt

SEQ ID NO: 170441 - DNA, 19 bp, Homo sapiens
  siRNA target sequence for ECM2 (NM_001393.1,1524-1542).
ctggttctattgaggaatt

SEQ ID NO: 170442 - DNA, 19 bp, Homo sapiens
  siRNA target sequence for ECM2 (NM_001393.1,1577-1595).
gaaatttgtttcaatcata

SEQ ID NO: 170443 - DNA, 19 bp, Homo sapiens
  siRNA target sequence for ECM2 (NM_001393.1,1597-1615).
cagaaagatcaatgtcatt

SEQ ID NO: 170444 - DNA, 19 bp, Homo sapiens
  siRNA target sequence for ECM2 (NM_001393.1,1599-1617).
gaaagatcaatgtcattgt

SEQ ID NO: 170445 - DNA, 19 bp, Homo sapiens
  siRNA target sequence for ECM2 (NM_001393.1,1610-1628).
gtcattgtactacgttata

SEQ ID NO: 170446 - DNA, 19 bp, Homo sapiens
  siRNA target sequence for ECM2 (NM_001393.1,1616-1634).
gtactacgttataacaaaa

SEQ ID NO: 170447 - DNA, 19 bp, Homo sapiens
  siRNA target sequence for ECM2 (NM_001393.1,1652-1670).
gctcctttagcctggataa

SEQ ID NO: 170448 - DNA, 19 bp, Homo sapiens
  siRNA target sequence for ECM2 (NM_001393.1,1653-1671).
ctcctttagcctggataaa

SEQ ID NO: 170449 - DNA, 19 bp, Homo sapiens
  siRNA target sequence for ECM2 (NM_001393.1,1743-1761).
ccttgctgcacctagtact

SEQ ID NO: 170450 - DNA, 19 bp, Homo sapiens
  siRNA target sequence for ECM2 (NM_001393.1,1781-1799).
cggatccctggctatgtgt

SEQ ID NO: 170451 - DNA, 19 bp, Homo sapiens
  siRNA target sequence for ECM2 (NM_001393.1,1782-1800).
ggatccctggctatgtgtt

SEQ ID NO: 170452 - DNA, 19 bp, Homo sapiens
  siRNA target sequence for ECM2 (NM_001393.1,1815-1833).
caggcctggaatacttgta

SEQ ID NO: 170453 - DNA, 19 bp, Homo sapiens
  siRNA target sequence for ECM2 (NM_001393.1,1831-1849).
gtacctgtcatttaacaaa

SEQ ID NO: 170454 - DNA, 19 bp, Homo sapiens
  siRNA target sequence for ECM2 (NM_001393.1,1867-1885).
ggaccgtgtctccttctat

SEQ ID NO: 170455 - DNA, 19 bp, Homo sapiens
  siRNA target sequence for ECM2 (NM_001393.1,1916-1934).
ctggatcacaatgacttaa

SEQ ID NO: 170456 - DNA, 19 bp, Homo sapiens
  siRNA target sequence for ECM2 (NM_001393.1,1918-1936).
ggatcacaatgacttaaaa

SEQ ID NO: 170457 - DNA, 19 bp, Homo sapiens
  siRNA target sequence for ECM2 (NM_001393.1,1919-1937).
gatcacaatgacttaaaat

SEQ ID NO: 170458 - DNA, 19 bp, Homo sapiens
  siRNA target sequence for ECM2 (NM_001393.1,1946-1964).
cctgggatacaagaaatga

SEQ ID NO: 170459 - DNA, 19 bp, Homo sapiens
  siRNA target sequence for ECM2 (NM_001393.1,1996-2014).
caagatacggaacattctt

SEQ ID NO: 170460 - DNA, 19 bp, Homo sapiens
  siRNA target sequence for ECM2 (NM_001393.1,2099-2117).
gaaataccatcttacacat

SEQ ID NO: 170461 - DNA, 19 bp, Homo sapiens
  siRNA target sequence for ECM2 (NM_001393.1,2137-2155).
ctcaagtatcgttcttaaa

SEQ ID NO: 170462 - DNA, 19 bp, Homo sapiens
  siRNA target sequence for ICAM2 (NM_000873.2,112-130).
gtccaggatcggatgagaa

SEQ ID NO: 170463 - DNA, 19 bp, Homo sapiens
  siRNA target sequence for ICAM2 (NM_000873.2,118-136).
gatcggatgagaaggtatt

SEQ ID NO: 170464 - DNA, 19 bp, Homo sapiens
  siRNA target sequence for ICAM2 (NM_000873.2,121-139).
cggatgagaaggtattcga

SEQ ID NO: 170465 - DNA, 19 bp, Homo sapiens
  siRNA target sequence for ICAM2 (NM_000873.2,285-303).
cattacttggtctcaaaca

SEQ ID NO: 170466 - DNA, 19 bp, Homo sapiens
  siRNA target sequence for ICAM2 (NM_000873.2,603-621).
gatggccaccgcaacttct

SEQ ID NO: 170467 - DNA, 19 bp, Homo sapiens
  siRNA target sequence for ICAM2 (NM_000873.2,652-670).
gcggtggcaacatctttca

SEQ ID NO: 170468 - DNA, 19 bp, Homo sapiens
  siRNA target sequence for ICAM2 (NM_000873.2,685-703).
cgaagatgttggagatcta

SEQ ID NO: 170469 - DNA, 19 bp, Homo sapiens
  siRNA target sequence for ICAM3 (NM_002162.2,166-184).
gtgaactgcagtactgatt

SEQ ID NO: 170470 - DNA, 19 bp, Homo sapiens
  siRNA target sequence for ICAM3 (NM_002162.2,168-186).
gaactgcagtactgattgt

SEQ ID NO: 170471 - DNA, 19 bp, Homo sapiens
  siRNA target sequence for ICAM3 (NM_002162.2,249-267).
gggctgggcagccttcaat

SEQ ID NO: 170472 - DNA, 19 bp, Homo sapiens
  siRNA target sequence for ICAM3 (NM_002162.2,564-582).
ccacggagcccctttctca

SEQ ID NO: 170473 - DNA, 19 bp, Homo sapiens
  siRNA target sequence for ICAM3 (NM_002162.2,565-583).
cacggagcccctttctcat

SEQ ID NO: 170474 - DNA, 19 bp, Homo sapiens
  siRNA target sequence for ICAM3 (NM_002162.2,741-759).
cctagacgggctttttcca

SEQ ID NO: 170475 - DNA, 19 bp, Homo sapiens
  siRNA target sequence for ICAM3 (NM_002162.2,934-952).
gagaacttgacggtcttta

SEQ ID NO: 170476 - DNA, 19 bp, Homo sapiens
  siRNA target sequence for ICAM3 (NM_002162.2,1203-1221).
cctgtatggtcccaaaatt

SEQ ID NO: 170477 - DNA, 19 bp, Homo sapiens
  siRNA target sequence for ICAM3 (NM_002162.2,1237-1255).
ccccagcacttgaaatgga

SEQ ID NO: 170478 - DNA, 19 bp, Homo sapiens
  siRNA target sequence for ICAM3 (NM_002162.2,1238-1256).
cccagcacttgaaatggaa

SEQ ID NO: 170479 - DNA, 19 bp, Homo sapiens
  siRNA target sequence for ICAM3 (NM_002162.2,1306-1324).
cccgagctgcggtgtttga

SEQ ID NO: 170480 - DNA, 19 bp, Homo sapiens
  siRNA target sequence for ICAM3 (NM_002162.2,1307-1325).
ccgagctgcggtgtttgaa

SEQ ID NO: 170481 - DNA, 19 bp, Homo sapiens
  siRNA target sequence for ICAM3 (NM_002162.2,1360-1378).
ccgttcttcgtcaacgtaa

SEQ ID NO: 170482 - DNA, 19 bp, Homo sapiens
  siRNA target sequence for ICAM3 (NM_002162.2,1365-1383).
cttcgtcaacgtaacacat

SEQ ID NO: 170483 - DNA, 19 bp, Homo sapiens
  siRNA target sequence for ICAM3 (NM_002162.2,1368-1386).
cgtcaacgtaacacataat

SEQ ID NO: 170484 - DNA, 19 bp, Homo sapiens
  siRNA target sequence for ICAM3 (NM_002162.2,1371-1389).
caacgtaacacataatggt

SEQ ID NO: 170485 - DNA, 19 bp, Homo sapiens
  siRNA target sequence for ICAM3 (NM_002162.2,1379-1397).
cacataatggtacttatca

SEQ ID NO: 170486 - DNA, 19 bp, Homo sapiens
  siRNA target sequence for ICAM3 (NM_002162.2,1381-1399).
cataatggtacttatcagt

SEQ ID NO: 170487 - DNA, 19 bp, Homo sapiens
  siRNA target sequence for ICAM3 (NM_002162.2,1457-1475).
ctgggagctcccactttgt

SEQ ID NO: 170488 - DNA, 19 bp, Homo sapiens
  siRNA target sequence for ICAM3 (NM_002162.2,1506-1524).
gggcgtggtgactatcgta

SEQ ID NO: 170489 - DNA, 19 bp, Homo sapiens
  siRNA target sequence for ICAM3 (NM_002162.2,1517-1535).
ctatcgtactggccttaat

SEQ ID NO: 170490 - DNA, 19 bp, Homo sapiens
  siRNA target sequence for ICAM4 (NM_001544.2,229-247).
ccccagccgcagaattcca

SEQ ID NO: 170491 - DNA, 19 bp, Homo sapiens
  siRNA target sequence for ICAM4 (NM_001544.2,387-405).
caggatcaccgcctacaaa

SEQ ID NO: 170492 - DNA, 19 bp, Homo sapiens
  siRNA target sequence for ICAM4 (NM_001544.2,520-538).
ggaagccgggtcatctatt

SEQ ID NO: 170493 - DNA, 19 bp, Homo sapiens
  siRNA target sequence for ICAM4 (NM_001544.2,680-698).
gctcggcacccattacact

SEQ ID NO: 170494 - DNA, 19 bp, Homo sapiens
  siRNA target sequence for ICAM4 (NM_001544.2,775-793).
gtgggcgctgcgtacctat

SEQ ID NO: 170495 - DNA, 19 bp, Homo sapiens
  siRNA target sequence for ICAM4 (NM_001544.2,779-797).
gcgctgcgtacctatgcaa

SEQ ID NO: 170496 - DNA, 19 bp, Homo sapiens
  siRNA target sequence for TGFBI (NM_000358.1,193-211).
gtgctgtgcagaaggttat

SEQ ID NO: 170497 - DNA, 19 bp, Homo sapiens
  siRNA target sequence for TGFBI (NM_000358.1,203-221).
gaaggttattggcactaat

SEQ ID NO: 170498 - DNA, 19 bp, Homo sapiens
  siRNA target sequence for TGFBI (NM_000358.1,245-263).
gcagtggtaccaaaggaaa

SEQ ID NO: 170499 - DNA, 19 bp, Homo sapiens
  siRNA target sequence for TGFBI (NM_000358.1,293-311).
cgagtgctgtcctggatat

SEQ ID NO: 170500 - DNA, 19 bp, Homo sapiens
  siRNA target sequence for TGFBI (NM_000358.1,301-319).
gtcctggatatgaaaaggt

SEQ ID NO: 170501 - DNA, 19 bp, Homo sapiens
  siRNA target sequence for TGFBI (NM_000358.1,343-361).
cagccctaccactctcaaa

SEQ ID NO: 170502 - DNA, 19 bp, Homo sapiens
  siRNA target sequence for TGFBI (NM_000358.1,347-365).
cctaccactctcaaacctt

SEQ ID NO: 170503 - DNA, 19 bp, Homo sapiens
  siRNA target sequence for TGFBI (NM_000358.1,348-366).
ctaccactctcaaaccttt

SEQ ID NO: 170504 - DNA, 19 bp, Homo sapiens
  siRNA target sequence for TGFBI (NM_000358.1,352-370).
cactctcaaacctttacga

SEQ ID NO: 170505 - DNA, 19 bp, Homo sapiens
  siRNA target sequence for TGFBI (NM_000358.1,556-574).
ccctccgctaccatatggt

SEQ ID NO: 170506 - DNA, 19 bp, Homo sapiens
  siRNA target sequence for TGFBI (NM_000358.1,1066-1084).
gcggggacatgctcactat

SEQ ID NO: 170507 - DNA, 19 bp, Homo sapiens
  siRNA target sequence for TGFBI (NM_000358.1,1068-1086).
ggggacatgctcactatca

SEQ ID NO: 170508 - DNA, 19 bp, Homo sapiens
  siRNA target sequence for TGFBI (NM_000358.1,1094-1112).
ggcgatcatctccaataaa

SEQ ID NO: 170509 - DNA, 19 bp, Homo sapiens
  siRNA target sequence for TGFBI (NM_000358.1,1096-1114).
cgatcatctccaataaaga

SEQ ID NO: 170510 - DNA, 19 bp, Homo sapiens
  siRNA target sequence for TGFBI (NM_000358.1,1130-1148).
cggggtgatccactacatt

SEQ ID NO: 170511 - DNA, 19 bp, Homo sapiens
  siRNA target sequence for TGFBI (NM_000358.1,1132-1150).
gggtgatccactacattga

SEQ ID NO: 170512 - DNA, 19 bp, Homo sapiens
  siRNA target sequence for TGFBI (NM_000358.1,1133-1151).
ggtgatccactacattgat

SEQ ID NO: 170513 - DNA, 19 bp, Homo sapiens
  siRNA target sequence for TGFBI (NM_000358.1,1173-1191).
gccaagacactatttgaat

SEQ ID NO: 170514 - DNA, 19 bp, Homo sapiens
  siRNA target sequence for TGFBI (NM_000358.1,1286-1304).
ggctcccctgaattctgta

SEQ ID NO: 170515 - DNA, 19 bp, Homo sapiens
  siRNA target sequence for TGFBI (NM_000358.1,1291-1309).
ccctgaattctgtattcaa

SEQ ID NO: 170516 - DNA, 19 bp, Homo sapiens
  siRNA target sequence for TGFBI (NM_000358.1,1292-1310).
cctgaattctgtattcaaa

SEQ ID NO: 170517 - DNA, 19 bp, Homo sapiens
  siRNA target sequence for TGFBI (NM_000358.1,1295-1313).
gaattctgtattcaaagat

SEQ ID NO: 170518 - DNA, 19 bp, Homo sapiens
  siRNA target sequence for TGFBI (NM_000358.1,1323-1341).
ccaattgatgcccatacaa

SEQ ID NO: 170519 - DNA, 19 bp, Homo sapiens
  siRNA target sequence for TGFBI (NM_000358.1,1329-1347).
gatgcccatacaaggaatt

SEQ ID NO: 170520 - DNA, 19 bp, Homo sapiens
  siRNA target sequence for TGFBI (NM_000358.1,1334-1352).
ccatacaaggaatttgctt

SEQ ID NO: 170521 - DNA, 19 bp, Homo sapiens
  siRNA target sequence for TGFBI (NM_000358.1,1349-1367).
gcttcggaaccacataatt

SEQ ID NO: 170522 - DNA, 19 bp, Homo sapiens
  siRNA target sequence for TGFBI (NM_000358.1,1350-1368).
cttcggaaccacataatta

SEQ ID NO: 170523 - DNA, 19 bp, Homo sapiens
  siRNA target sequence for TGFBI (NM_000358.1,1436-1454).
gagagtttttgtttatcgt

SEQ ID NO: 170524 - DNA, 19 bp, Homo sapiens
  siRNA target sequence for TGFBI (NM_000358.1,1440-1458).
gtttttgtttatcgtaata

SEQ ID NO: 170525 - DNA, 19 bp, Homo sapiens
  siRNA target sequence for TGFBI (NM_000358.1,1579-1597).
gagacaatcgctttagcat

SEQ ID NO: 170526 - DNA, 19 bp, Homo sapiens
  siRNA target sequence for TGFBI (NM_000358.1,1802-1820).
cctggtgcggctaaagtct

SEQ ID NO: 170527 - DNA, 19 bp, Homo sapiens
  siRNA target sequence for TGFBI (NM_000358.1,1996-2014).
cgcttgagatcttcaaaca

SEQ ID NO: 170528 - DNA, 19 bp, Homo sapiens
  siRNA target sequence for TGFBI (NM_000358.1,2053-2071).
gactagcccctgtctatca

SEQ ID NO: 170529 - DNA, 19 bp, Homo sapiens
  siRNA target sequence for TGFBI (NM_000358.1,2061-2079).
cctgtctatcaaaagttat

SEQ ID NO: 170530 - DNA, 19 bp, Homo sapiens
  siRNA target sequence for DOK4 (NM_018110.2,523-541).
gcaggcggtggccatcata

SEQ ID NO: 170531 - DNA, 19 bp, Homo sapiens
  siRNA target sequence for DOK4 (NM_018110.2,529-547).
ggtggccatcatattcact

SEQ ID NO: 170532 - DNA, 19 bp, Homo sapiens
  siRNA target sequence for DOK4 (NM_018110.2,596-614).
gagtggtacaagacactat

SEQ ID NO: 170533 - DNA, 19 bp, Homo sapiens
  siRNA target sequence for DOK4 (NM_018110.2,598-616).
gtggtacaagacactatct

SEQ ID NO: 170534 - DNA, 19 bp, Homo sapiens
  siRNA target sequence for DOK4 (NM_018110.2,699-717).
cagatcgcttcaatgtctt

SEQ ID NO: 170535 - DNA, 19 bp, Homo sapiens
  siRNA target sequence for DOK4 (NM_018110.2,902-920).
gctggggaaggactctata

SEQ ID NO: 170536 - DNA, 19 bp, Homo sapiens
  siRNA target sequence for DOK4 (NM_018110.2,905-923).
ggggaaggactctatacct

SEQ ID NO: 170537 - DNA, 19 bp, Homo sapiens
  siRNA target sequence for DOK4 (NM_018110.2,999-1017).
gggtcctgctggaaatgga

SEQ ID NO: 170538 - DNA, 19 bp, Homo sapiens
  siRNA target sequence for DOK5 (NM_018431.2,273-291).
gcagacgcctcgggattta

SEQ ID NO: 170539 - DNA, 19 bp, Homo sapiens
  siRNA target sequence for DOK5 (NM_018431.2,274-292).
cagacgcctcgggatttat

SEQ ID NO: 170540 - DNA, 19 bp, Homo sapiens
  siRNA target sequence for DOK5 (NM_018431.2,276-294).
gacgcctcgggatttatca

SEQ ID NO: 170541 - DNA, 19 bp, Homo sapiens
  siRNA target sequence for DOK5 (NM_018431.2,296-314).
cgatgctggttagtattca

SEQ ID NO: 170542 - DNA, 19 bp, Homo sapiens
  siRNA target sequence for DOK5 (NM_018431.2,300-318).
gctggttagtattcaagaa

SEQ ID NO: 170543 - DNA, 19 bp, Homo sapiens
  siRNA target sequence for DOK5 (NM_018431.2,301-319).
ctggttagtattcaagaaa

SEQ ID NO: 170544 - DNA, 19 bp, Homo sapiens
  siRNA target sequence for DOK5 (NM_018431.2,359-377).
gatgaacgtgctgcatatt

SEQ ID NO: 170545 - DNA, 19 bp, Homo sapiens
  siRNA target sequence for DOK5 (NM_018431.2,384-402).
gttatcataaggttacaga

SEQ ID NO: 170546 - DNA, 19 bp, Homo sapiens
  siRNA target sequence for DOK5 (NM_018431.2,422-440).
gtagctcgattgccaaaaa

SEQ ID NO: 170547 - DNA, 19 bp, Homo sapiens
  siRNA target sequence for DOK5 (NM_018431.2,425-443).
gctcgattgccaaaaagca

SEQ ID NO: 170548 - DNA, 19 bp, Homo sapiens
  siRNA target sequence for DOK5 (NM_018431.2,455-473).
gccatagggatttatttca

SEQ ID NO: 170549 - DNA, 19 bp, Homo sapiens
  siRNA target sequence for DOK5 (NM_018431.2,476-494).
gacgatacctccaagactt

SEQ ID NO: 170550 - DNA, 19 bp, Homo sapiens
  siRNA target sequence for DOK5 (NM_018431.2,492-510).
cttttgcttgcgaatcaga

SEQ ID NO: 170551 - DNA, 19 bp, Homo sapiens
  siRNA target sequence for DOK5 (NM_018431.2,498-516).
cttgcgaatcagatcttga

SEQ ID NO: 170552 - DNA, 19 bp, Homo sapiens
  siRNA target sequence for DOK5 (NM_018431.2,558-576).
gaacacggatcaatgacat

SEQ ID NO: 170553 - DNA, 19 bp, Homo sapiens
  siRNA target sequence for DOK5 (NM_018431.2,649-667).
gatgccatctcctaactta

SEQ ID NO: 170554 - DNA, 19 bp, Homo sapiens
  siRNA target sequence for DOK5 (NM_018431.2,654-672).
catctcctaacttagatgt

SEQ ID NO: 170555 - DNA, 19 bp, Homo sapiens
  siRNA target sequence for DOK5 (NM_018431.2,691-709).
gcagattacatatgagtat

SEQ ID NO: 170556 - DNA, 19 bp, Homo sapiens
  siRNA target sequence for DOK5 (NM_018431.2,727-745).
ccagaatcccagagtcaaa

SEQ ID NO: 170557 - DNA, 19 bp, Homo sapiens
  siRNA target sequence for DOK5 (NM_018431.2,775-793).
gcggtatggacgtgatact

SEQ ID NO: 170558 - DNA, 19 bp, Homo sapiens
  siRNA target sequence for DOK5 (NM_018431.2,776-794).
cggtatggacgtgatacta

SEQ ID NO: 170559 - DNA, 19 bp, Homo sapiens
  siRNA target sequence for DOK5 (NM_018431.2,831-849).
ctggtgaagggctgtttat

SEQ ID NO: 170560 - DNA, 19 bp, Homo sapiens
  siRNA target sequence for DOK5 (NM_018431.2,833-851).
ggtgaagggctgtttatct

SEQ ID NO: 170561 - DNA, 19 bp, Homo sapiens
  siRNA target sequence for DOK5 (NM_018431.2,834-852).
gtgaagggctgtttatctt

SEQ ID NO: 170562 - DNA, 19 bp, Homo sapiens
  siRNA target sequence for FLJ22570 (NM_024872.1,1046-1064).
cacccacgtccaggaaaat

SEQ ID NO: 170563 - DNA, 19 bp, Homo sapiens
  siRNA target sequence for FRS2 (NM_006654.2,260-278).
gtagctgtccagataaaga

SEQ ID NO: 170564 - DNA, 19 bp, Homo sapiens
  siRNA target sequence for FRS2 (NM_006654.2,289-307).
gataaccatcggaacaagt

SEQ ID NO: 170565 - DNA, 19 bp, Homo sapiens
  siRNA target sequence for FRS2 (NM_006654.2,331-349).
gatgggaatgagttaggtt

SEQ ID NO: 170566 - DNA, 19 bp, Homo sapiens
  siRNA target sequence for FRS2 (NM_006654.2,394-412).
cgcaaacgtgactcagtaa

SEQ ID NO: 170567 - DNA, 19 bp, Homo sapiens
  siRNA target sequence for FRS2 (NM_006654.2,395-413).
gcaaacgtgactcagtaaa

SEQ ID NO: 170568 - DNA, 19 bp, Homo sapiens
  siRNA target sequence for FRS2 (NM_006654.2,442-460).
ggctatgactcgaatctct

SEQ ID NO: 170569 - DNA, 19 bp, Homo sapiens
  siRNA target sequence for FRS2 (NM_006654.2,443-461).
gctatgactcgaatctctt

SEQ ID NO: 170570 - DNA, 19 bp, Homo sapiens
  siRNA target sequence for FRS2 (NM_006654.2,444-462).
ctatgactcgaatctcttt

SEQ ID NO: 170571 - DNA, 19 bp, Homo sapiens
  siRNA target sequence for FRS2 (NM_006654.2,518-536).
gtgcccgtgcagaagaatt

SEQ ID NO: 170572 - DNA, 19 bp, Homo sapiens
  siRNA target sequence for FRS2 (NM_006654.2,523-541).
cgtgcagaagaattattta

SEQ ID NO: 170573 - DNA, 19 bp, Homo sapiens
  siRNA target sequence for FRS2 (NM_006654.2,524-542).
gtgcagaagaattatttaa

SEQ ID NO: 170574 - DNA, 19 bp, Homo sapiens
  siRNA target sequence for FRS2 (NM_006654.2,665-683).
gatttgctgctcagaactt

SEQ ID NO: 170575 - DNA, 19 bp, Homo sapiens
  siRNA target sequence for FRS2 (NM_006654.2,678-696).
gaacttacctaatggatat

SEQ ID NO: 170576 - DNA, 19 bp, Homo sapiens
  siRNA target sequence for FRS2 (NM_006654.2,699-717).
ccgatatccctcatttgga

SEQ ID NO: 170577 - DNA, 19 bp, Homo sapiens
  siRNA target sequence for FRS2 (NM_006654.2,826-844).
catacctatgtcaacacta

SEQ ID NO: 170578 - DNA, 19 bp, Homo sapiens
  siRNA target sequence for FRS2 (NM_006654.2,954-972).
ggacagggatcctcagatt

SEQ ID NO: 170579 - DNA, 19 bp, Homo sapiens
  siRNA target sequence for FRS2 (NM_006654.2,1006-1024).
gggccaacccctgttcaaa

SEQ ID NO: 170580 - DNA, 19 bp, Homo sapiens
  siRNA target sequence for FRS2 (NM_006654.2,1007-1025).
ggccaacccctgttcaaaa

SEQ ID NO: 170581 - DNA, 19 bp, Homo sapiens
  siRNA target sequence for FRS2 (NM_006654.2,1010-1028).
caacccctgttcaaaagca

SEQ ID NO: 170582 - DNA, 19 bp, Homo sapiens
  siRNA target sequence for FRS2 (NM_006654.2,1135-1153).
gatgcaccctctgttaaca

SEQ ID NO: 170583 - DNA, 19 bp, Homo sapiens
  siRNA target sequence for FRS2 (NM_006654.2,1139-1157).
caccctctgttaacaaact

SEQ ID NO: 170584 - DNA, 19 bp, Homo sapiens
  siRNA target sequence for FRS2 (NM_006654.2,1158-1176).
ggtgtatgaaaatataaat

SEQ ID NO: 170585 - DNA, 19 bp, Homo sapiens
  siRNA target sequence for FRS2 (NM_006654.2,1274-1292).
gaactgcattattaaacta

SEQ ID NO: 170586 - DNA, 19 bp, Homo sapiens
  siRNA target sequence for FRS2 (NM_006654.2,1277-1295).
ctgcattattaaactatga

SEQ ID NO: 170587 - DNA, 19 bp, Homo sapiens
  siRNA target sequence for FRS2 (NM_006654.2,1335-1353).
gctaagtagggatgaagat

SEQ ID NO: 170588 - DNA, 19 bp, Homo sapiens
  siRNA target sequence for FRS2 (NM_006654.2,1379-1397).
ctctaaatggctaccataa

SEQ ID NO: 170589 - DNA, 19 bp, Homo sapiens
  siRNA target sequence for FRS2 (NM_006654.2,1381-1399).
ctaaatggctaccataata

SEQ ID NO: 170590 - DNA, 19 bp, Homo sapiens
  siRNA target sequence for FRS2 (NM_006654.2,1388-1406).
gctaccataataatctaga

SEQ ID NO: 170591 - DNA, 19 bp, Homo sapiens
  siRNA target sequence for FRS2 (NM_006654.2,1389-1407).
ctaccataataatctagat

SEQ ID NO: 170592 - DNA, 19 bp, Homo sapiens
  siRNA target sequence for FRS2 (NM_006654.2,1402-1420).
ctagatccaatgcataact

SEQ ID NO: 170593 - DNA, 19 bp, Homo sapiens
  siRNA target sequence for FRS2 (NM_006654.2,1419-1437).
ctatgtaaatacagagaat

SEQ ID NO: 170594 - DNA, 19 bp, Homo sapiens
  siRNA target sequence for FRS2 (NM_006654.2,1490-1508).
gtacaccaacagtctttaa

SEQ ID NO: 170595 - DNA, 19 bp, Homo sapiens
  siRNA target sequence for FRS2 (NM_006654.2,1518-1536).
cagacgcccaagtttagaa

SEQ ID NO: 170596 - DNA, 19 bp, Homo sapiens
  siRNA target sequence for FRS2 (NM_006654.2,1520-1538).
gacgcccaagtttagaaca

SEQ ID NO: 170597 - DNA, 19 bp, Homo sapiens
  siRNA target sequence for FRS2 (NM_006654.2,1539-1557).
caggcagcttaattacata

SEQ ID NO: 170598 - DNA, 19 bp, Homo sapiens
  siRNA target sequence for FRS2 (NM_006654.2,1654-1672).
ctgtatgccgtgatagaca

SEQ ID NO: 170599 - DNA, 19 bp, Homo sapiens
  siRNA target sequence for FRS2 (NM_006654.2,1723-1741).
gatggtacatctaggaaaa

SEQ ID NO: 170600 - DNA, 19 bp, Homo sapiens
  siRNA target sequence for FRS2 (NM_006654.2,1726-1744).
ggtacatctaggaaaacta

SEQ ID NO: 170601 - DNA, 19 bp, Homo sapiens
  siRNA target sequence for FRS3 (NM_006653.3,300-318).
ccaagttcaaggtgacaaa

SEQ ID NO: 170602 - DNA, 19 bp, Homo sapiens
  siRNA target sequence for FRS3 (NM_006653.3,405-423).
ccgtccgctggccttatct

SEQ ID NO: 170603 - DNA, 19 bp, Homo sapiens
  siRNA target sequence for FRS3 (NM_006653.3,407-425).
gtccgctggccttatctct

SEQ ID NO: 170604 - DNA, 19 bp, Homo sapiens
  siRNA target sequence for FRS3 (NM_006653.3,487-505).
gacaggccagggaatattt

SEQ ID NO: 170605 - DNA, 19 bp, Homo sapiens
  siRNA target sequence for FRS3 (NM_006653.3,559-577).
gcagtgcaacagcatcaat

SEQ ID NO: 170606 - DNA, 19 bp, Homo sapiens
  siRNA target sequence for FRS3 (NM_006653.3,826-844).
cacaccggccagtgaagat

SEQ ID NO: 170607 - DNA, 19 bp, Homo sapiens
  siRNA target sequence for FRS3 (NM_006653.3,956-974).
ggccaggtgaagtttgtgt

SEQ ID NO: 170608 - DNA, 19 bp, Homo sapiens
  siRNA target sequence for FRS3 (NM_006653.3,1039-1057).
ccccccacaccacaataat

SEQ ID NO: 170609 - DNA, 19 bp, Homo sapiens
  siRNA target sequence for FRS3 (NM_006653.3,1041-1059).
ccccacaccacaataataa

SEQ ID NO: 170610 - DNA, 19 bp, Homo sapiens
  siRNA target sequence for FRS3 (NM_006653.3,1043-1061).
ccacaccacaataataaca

SEQ ID NO: 170611 - DNA, 19 bp, Homo sapiens
  siRNA target sequence for FRS3 (NM_006653.3,1428-1446).
gctccccaagggtcttcaa

SEQ ID NO: 170612 - DNA, 19 bp, Homo sapiens
  siRNA target sequence for FRS3 (NM_006653.3,1432-1450).
cccaagggtcttcaacttt

SEQ ID NO: 170613 - DNA, 19 bp, Homo sapiens
  siRNA target sequence for FRS3 (NM_006653.3,1476-1494).
ccccaaggcagcttaacta

SEQ ID NO: 170614 - DNA, 19 bp, Homo sapiens
  siRNA target sequence for FRS3 (NM_006653.3,1479-1497).
caaggcagcttaactacat

SEQ ID NO: 170615 - DNA, 19 bp, Homo sapiens
  siRNA target sequence for IRS2 (NM_003749.2,828-846).
ccgacgccaagcacaagta

SEQ ID NO: 170616 - DNA, 19 bp, Homo sapiens
  siRNA target sequence for IRS2 (NM_003749.2,2289-2307).
ctgcctcgctggatgaata

SEQ ID NO: 170617 - DNA, 19 bp, Homo sapiens
  siRNA target sequence for IRS2 (NM_003749.2,3434-3452).
ccgctctccgactacatga

SEQ ID NO: 170618 - DNA, 19 bp, Homo sapiens
  siRNA target sequence for IRS2 (NM_003749.2,3435-3453).
cgctctccgactacatgaa

SEQ ID NO: 170619 - DNA, 19 bp, Homo sapiens
  siRNA target sequence for IRS2 (NM_003749.2,4037-4055).
gcctccgtggaaaatgtct

SEQ ID NO: 170620 - DNA, 19 bp, Homo sapiens
  siRNA target sequence for IRS2 (NM_003749.2,4470-4488).
cctacgccagcattgactt

SEQ ID NO: 170621 - DNA, 19 bp, Homo sapiens
  siRNA target sequence for IRS4 (NM_003604.1,100-118).
cgcgaccaagcgacaagaa

SEQ ID NO: 170622 - DNA, 19 bp, Homo sapiens
  siRNA target sequence for IRS4 (NM_003604.1,102-120).
cgaccaagcgacaagaaga

SEQ ID NO: 170623 - DNA, 19 bp, Homo sapiens
  siRNA target sequence for IRS4 (NM_003604.1,105-123).
ccaagcgacaagaagacta

SEQ ID NO: 170624 - DNA, 19 bp, Homo sapiens
  siRNA target sequence for IRS4 (NM_003604.1,166-184).
gtgaccaccccgcttcttt

SEQ ID NO: 170625 - DNA, 19 bp, Homo sapiens
  siRNA target sequence for IRS4 (NM_003604.1,359-377).
gctacttcgtgctcaaact

SEQ ID NO: 170626 - DNA, 19 bp, Homo sapiens
  siRNA target sequence for IRS4 (NM_003604.1,395-413).
cagctcggctggaatacta

SEQ ID NO: 170627 - DNA, 19 bp, Homo sapiens
  siRNA target sequence for IRS4 (NM_003604.1,400-418).
cggctggaatactacgaaa

SEQ ID NO: 170628 - DNA, 19 bp, Homo sapiens
  siRNA target sequence for IRS4 (NM_003604.1,402-420).
gctggaatactacgaaaat

SEQ ID NO: 170629 - DNA, 19 bp, Homo sapiens
  siRNA target sequence for IRS4 (NM_003604.1,515-533).
gcgtgatcaccctatacca

SEQ ID NO: 170630 - DNA, 19 bp, Homo sapiens
  siRNA target sequence for IRS4 (NM_003604.1,754-772).
gcggagccacccttctata

SEQ ID NO: 170631 - DNA, 19 bp, Homo sapiens
  siRNA target sequence for IRS4 (NM_003604.1,755-773).
cggagccacccttctataa

SEQ ID NO: 170632 - DNA, 19 bp, Homo sapiens
  siRNA target sequence for IRS4 (NM_003604.1,756-774).
ggagccacccttctataaa

SEQ ID NO: 170633 - DNA, 19 bp, Homo sapiens
  siRNA target sequence for IRS4 (NM_003604.1,759-777).
gccacccttctataaagat

SEQ ID NO: 170634 - DNA, 19 bp, Homo sapiens
  siRNA target sequence for IRS4 (NM_003604.1,778-796).
gtgtggcaggtaatagtca

SEQ ID NO: 170635 - DNA, 19 bp, Homo sapiens
  siRNA target sequence for IRS4 (NM_003604.1,780-798).
gtggcaggtaatagtcaaa

SEQ ID NO: 170636 - DNA, 19 bp, Homo sapiens
  siRNA target sequence for IRS4 (NM_003604.1,835-853).
gtgttccggctgtgtctaa

SEQ ID NO: 170637 - DNA, 19 bp, Homo sapiens
  siRNA target sequence for IRS4 (NM_003604.1,937-955).
cactcggagcagtatttct

SEQ ID NO: 170638 - DNA, 19 bp, Homo sapiens
  siRNA target sequence for IRS4 (NM_003604.1,1071-1089).
gtgtgcagacgaatacaga

SEQ ID NO: 170639 - DNA, 19 bp, Homo sapiens
  siRNA target sequence for IRS4 (NM_003604.1,1243-1261).
ggggaagacgagatgcttt

SEQ ID NO: 170640 - DNA, 19 bp, Homo sapiens
  siRNA target sequence for IRS4 (NM_003604.1,1244-1262).
gggaagacgagatgctttt

SEQ ID NO: 170641 - DNA, 19 bp, Homo sapiens
  siRNA target sequence for IRS4 (NM_003604.1,1343-1361).
caaggagagcggtttcagt

SEQ ID NO: 170642 - DNA, 19 bp, Homo sapiens
  siRNA target sequence for IRS4 (NM_003604.1,1523-1541).
gaagcggaggtgactacat

SEQ ID NO: 170643 - DNA, 19 bp, Homo sapiens
  siRNA target sequence for IRS4 (NM_003604.1,1532-1550).
gtgactacatgcctatgaa

SEQ ID NO: 170644 - DNA, 19 bp, Homo sapiens
  siRNA target sequence for IRS4 (NM_003604.1,1534-1552).
gactacatgcctatgaaca

SEQ ID NO: 170645 - DNA, 19 bp, Homo sapiens
  siRNA target sequence for IRS4 (NM_003604.1,1536-1554).
ctacatgcctatgaacaat

SEQ ID NO: 170646 - DNA, 19 bp, Homo sapiens
  siRNA target sequence for IRS4 (NM_003604.1,2018-2036).
ggaagtctgggggaagatt

SEQ ID NO: 170647 - DNA, 19 bp, Homo sapiens
  siRNA target sequence for IRS4 (NM_003604.1,2027-2045).
ggggaagattcagacttta

SEQ ID NO: 170648 - DNA, 19 bp, Homo sapiens
  siRNA target sequence for IRS4 (NM_003604.1,2058-2076).
cagaggagccacgaaagaa

SEQ ID NO: 170649 - DNA, 19 bp, Homo sapiens
  siRNA target sequence for IRS4 (NM_003604.1,2063-2081).
gagccacgaaagaatgcaa

SEQ ID NO: 170650 - DNA, 19 bp, Homo sapiens
  siRNA target sequence for IRS4 (NM_003604.1,2196-2214).
ggtggccacccctcttgta

SEQ ID NO: 170651 - DNA, 19 bp, Homo sapiens
  siRNA target sequence for IRS4 (NM_003604.1,2212-2230).
gtaagctccagtgattata

SEQ ID NO: 170652 - DNA, 19 bp, Homo sapiens
  siRNA target sequence for IRS4 (NM_003604.1,2276-2294).
ctcgatccccttttgaaga

SEQ ID NO: 170653 - DNA, 19 bp, Homo sapiens
  siRNA target sequence for IRS4 (NM_003604.1,2278-2296).
cgatccccttttgaagatt

SEQ ID NO: 170654 - DNA, 19 bp, Homo sapiens
  siRNA target sequence for IRS4 (NM_003604.1,2293-2311).
gattcaagagggtacatga

SEQ ID NO: 170655 - DNA, 19 bp, Homo sapiens
  siRNA target sequence for IRS4 (NM_003604.1,2300-2318).
gagggtacatgatgatgtt

SEQ ID NO: 170656 - DNA, 19 bp, Homo sapiens
  siRNA target sequence for IRS4 (NM_003604.1,2353-2371).
ccaaaagcacctgatacta

SEQ ID NO: 170657 - DNA, 19 bp, Homo sapiens
  siRNA target sequence for IRS4 (NM_003604.1,2360-2378).
cacctgatactaataaaga

SEQ ID NO: 170658 - DNA, 19 bp, Homo sapiens
  siRNA target sequence for IRS4 (NM_003604.1,2383-2401).
gactcaaaggacaatgaca

SEQ ID NO: 170659 - DNA, 19 bp, Homo sapiens
  siRNA target sequence for IRS4 (NM_003604.1,2404-2422).
gagagtgactacatgttta

SEQ ID NO: 170660 - DNA, 19 bp, Homo sapiens
  siRNA target sequence for IRS4 (NM_003604.1,2434-2452).
gccggtgcaattccaaaaa

SEQ ID NO: 170661 - DNA, 19 bp, Homo sapiens
  siRNA target sequence for IRS4 (NM_003604.1,2544-2562).
gaatgacaacagtgagtat

SEQ ID NO: 170662 - DNA, 19 bp, Homo sapiens
  siRNA target sequence for IRS4 (NM_003604.1,2592-2610).
gaggggcctagacaaagaa

SEQ ID NO: 170663 - DNA, 19 bp, Homo sapiens
  siRNA target sequence for IRS4 (NM_003604.1,2602-2620).
gacaaagaagtctcctata

SEQ ID NO: 170664 - DNA, 19 bp, Homo sapiens
  siRNA target sequence for IRS4 (NM_003604.1,2630-2648).
ccaaagatgcagcttcaaa

SEQ ID NO: 170665 - DNA, 19 bp, Homo sapiens
  siRNA target sequence for IRS4 (NM_003604.1,2656-2674).
ggtgagggatcattctcaa

SEQ ID NO: 170666 - DNA, 19 bp, Homo sapiens
  siRNA target sequence for IRS4 (NM_003604.1,2713-2731).
catgagcccccaaagaata

SEQ ID NO: 170667 - DNA, 19 bp, Homo sapiens
  siRNA target sequence for IRS4 (NM_003604.1,2719-2737).
cccccaaagaataaagcta

SEQ ID NO: 170668 - DNA, 19 bp, Homo sapiens
  siRNA target sequence for IRS4 (NM_003604.1,2739-2757).
gagacctaaccgactttct

SEQ ID NO: 170669 - DNA, 19 bp, Homo sapiens
  siRNA target sequence for IRS4 (NM_003604.1,2741-2759).
gacctaaccgactttcttt

SEQ ID NO: 170670 - DNA, 19 bp, Homo sapiens
  siRNA target sequence for IRS4 (NM_003604.1,2744-2762).
ctaaccgactttcttttat

SEQ ID NO: 170671 - DNA, 19 bp, Homo sapiens
  siRNA target sequence for IRS4 (NM_003604.1,2748-2766).
ccgactttcttttattaca

SEQ ID NO: 170672 - DNA, 19 bp, Homo sapiens
  siRNA target sequence for IRS4 (NM_003604.1,2749-2767).
cgactttcttttattacaa

SEQ ID NO: 170673 - DNA, 19 bp, Homo sapiens
  siRNA target sequence for IRS4 (NM_003604.1,2903-2921).
cagattcgtggggcataat

SEQ ID NO: 170674 - DNA, 19 bp, Homo sapiens
  siRNA target sequence for IRS4 (NM_003604.1,2939-2957).
cagccttttctaattatgt

SEQ ID NO: 170675 - DNA, 19 bp, Homo sapiens
  siRNA target sequence for IRS4 (NM_003604.1,2941-2959).
gccttttctaattatgtga

SEQ ID NO: 170676 - DNA, 19 bp, Homo sapiens
  siRNA target sequence for IRS4 (NM_003604.1,2997-3015).
cgacctctcagatctttta

SEQ ID NO: 170677 - DNA, 19 bp, Homo sapiens
  siRNA target sequence for IRS4 (NM_003604.1,2998-3016).
gacctctcagatcttttaa

SEQ ID NO: 170678 - DNA, 19 bp, Homo sapiens
  siRNA target sequence for IRS4 (NM_003604.1,3084-3102).
cagtgctacaggtagcaat

SEQ ID NO: 170679 - DNA, 19 bp, Homo sapiens
  siRNA target sequence for IRS4 (NM_003604.1,3088-3106).
gctacaggtagcaatgcta

SEQ ID NO: 170680 - DNA, 19 bp, Homo sapiens
  siRNA target sequence for IRS4 (NM_003604.1,3089-3107).
ctacaggtagcaatgctat

SEQ ID NO: 170681 - DNA, 19 bp, Homo sapiens
  siRNA target sequence for IRS4 (NM_003604.1,3092-3110).
caggtagcaatgctattga

SEQ ID NO: 170682 - DNA, 19 bp, Homo sapiens
  siRNA target sequence for IRS4 (NM_003604.1,3117-3135).
gggtgactacattgaagta

SEQ ID NO: 170683 - DNA, 19 bp, Homo sapiens
  siRNA target sequence for IRS4 (NM_003604.1,3119-3137).
gtgactacattgaagtaat

SEQ ID NO: 170684 - DNA, 19 bp, Homo sapiens
  siRNA target sequence for IRS4 (NM_003604.1,3177-3195).
cagtgccattcgctatgat

SEQ ID NO: 170685 - DNA, 19 bp, Homo sapiens
  siRNA target sequence for IRS4 (NM_003604.1,3233-3251).
ctgagtgctgtatggatat

SEQ ID NO: 170686 - DNA, 19 bp, Homo sapiens
  siRNA target sequence for IRS4 (NM_003604.1,3235-3253).
gagtgctgtatggatattt

SEQ ID NO: 170687 - DNA, 19 bp, Homo sapiens
  siRNA target sequence for IRS4 (NM_003604.1,3527-3545).
ccgcagctgctggatttga

SEQ ID NO: 170688 - DNA, 19 bp, Homo sapiens
  siRNA target sequence for IRS4 (NM_003604.1,3786-3804).
cactcacgtgagaatggat

SEQ ID NO: 170689 - DNA, 19 bp, Homo sapiens
  siRNA target sequence for IRS4 (NM_003604.1,3788-3806).
ctcacgtgagaatggattt

SEQ ID NO: 170690 - DNA, 19 bp, Homo sapiens
  siRNA target sequence for IRS4 (NM_003604.1,3808-3826).
gccagacgtgataatcagt

SEQ ID NO: 170691 - DNA, 19 bp, Homo sapiens
  siRNA target sequence for IRS4 (NM_003604.1,3809-3827).
ccagacgtgataatcagtt

SEQ ID NO: 170692 - DNA, 19 bp, Homo sapiens
  siRNA target sequence for MGC20785 (NM_152721.1,377-395).
gcagatcactcatgaaaat

SEQ ID NO: 170693 - DNA, 19 bp, Homo sapiens
  siRNA target sequence for MGC20785 (NM_152721.1,383-401).
cactcatgaaaatatctat

SEQ ID NO: 170694 - DNA, 19 bp, Homo sapiens
  siRNA target sequence for MGC20785 (NM_152721.1,519-537).
ggagaaggactattcactt

SEQ ID NO: 170695 - DNA, 19 bp, Homo sapiens
  siRNA target sequence for MGC20785 (NM_152721.1,592-610).
ccatagctgagcaacatga

SEQ ID NO: 170696 - DNA, 19 bp, Homo sapiens
  siRNA target sequence for MGC20785 (NM_152721.1,597-615).
gctgagcaacatgaaagat

SEQ ID NO: 170697 - DNA, 19 bp, Homo sapiens
  siRNA target sequence for MGC20785 (NM_152721.1,598-616).
ctgagcaacatgaaagatt

SEQ ID NO: 170698 - DNA, 19 bp, Homo sapiens
  siRNA target sequence for MGC20785 (NM_152721.1,656-674).
cttgactgaaccaatgaca

SEQ ID NO: 170699 - DNA, 19 bp, Homo sapiens
  siRNA target sequence for MGC20785 (NM_152721.1,659-677).
gactgaaccaatgacatta

SEQ ID NO: 170700 - DNA, 19 bp, Homo sapiens
  siRNA target sequence for MGC20785 (NM_152721.1,671-689).
gacattatccaaatcaata

SEQ ID NO: 170701 - DNA, 19 bp, Homo sapiens
  siRNA target sequence for MGC20785 (NM_152721.1,738-756).
gttggtgaaatctacagtt

SEQ ID NO: 170702 - DNA, 19 bp, Homo sapiens
  siRNA target sequence for MGC20785 (NM_152721.1,759-777).
caaggtcatgggtttggtt

SEQ ID NO: 170703 - DNA, 19 bp, Homo sapiens
  siRNA target sequence for MGC20785 (NM_152721.1,768-786).
gggtttggttcgtcaaaga

SEQ ID NO: 170704 - DNA, 19 bp, Homo sapiens
  siRNA target sequence for MGC20785 (NM_152721.1,769-787).
ggtttggttcgtcaaagat

SEQ ID NO: 170705 - DNA, 19 bp, Homo sapiens
  siRNA target sequence for MGC20785 (NM_152721.1,788-806).
gtctcgtgcacagacattt

SEQ ID NO: 170706 - DNA, 19 bp, Homo sapiens
  siRNA target sequence for MGC20785 (NM_152721.1,856-874).
ggtccagcagctatggatt

SEQ ID NO: 170707 - DNA, 19 bp, Homo sapiens
  siRNA target sequence for CD4 (NM_000616.2,317-335).
ctccaaccagataaagatt

SEQ ID NO: 170708 - DNA, 19 bp, Homo sapiens
  siRNA target sequence for CD4 (NM_000616.2,367-385).
gtccatccaagctgaatga

SEQ ID NO: 170709 - DNA, 19 bp, Homo sapiens
  siRNA target sequence for CD4 (NM_000616.2,384-402).
gatcgcgctgactcaagaa

SEQ ID NO: 170710 - DNA, 19 bp, Homo sapiens
  siRNA target sequence for CD4 (NM_000616.2,431-449).
cctgatcatcaagaatctt

SEQ ID NO: 170711 - DNA, 19 bp, Homo sapiens
  siRNA target sequence for CD4 (NM_000616.2,497-515).
ggaggaggtgcaattgcta

SEQ ID NO: 170712 - DNA, 19 bp, Homo sapiens
  siRNA target sequence for CD4 (NM_000616.2,512-530).
gctagtgttcggattgact

SEQ ID NO: 170713 - DNA, 19 bp, Homo sapiens
  siRNA target sequence for CD4 (NM_000616.2,770-788).
ggcctccagcatagtctat

SEQ ID NO: 170714 - DNA, 19 bp, Homo sapiens
  siRNA target sequence for CD4 (NM_000616.2,771-789).
gcctccagcatagtctata

SEQ ID NO: 170715 - DNA, 19 bp, Homo sapiens
  siRNA target sequence for CD4 (NM_000616.2,772-790).
cctccagcatagtctataa

SEQ ID NO: 170716 - DNA, 19 bp, Homo sapiens
  siRNA target sequence for CD4 (NM_000616.2,821-839).
cccactcgcctttacagtt

SEQ ID NO: 170717 - DNA, 19 bp, Homo sapiens
  siRNA target sequence for CD4 (NM_000616.2,825-843).
ctcgcctttacagttgaaa

SEQ ID NO: 170718 - DNA, 19 bp, Homo sapiens
  siRNA target sequence for CD4 (NM_000616.2,829-847).
cctttacagttgaaaagct

SEQ ID NO: 170719 - DNA, 19 bp, Homo sapiens
  siRNA target sequence for CD4 (NM_000616.2,1049-1067).
ggcccttgaagcgaaaaca

SEQ ID NO: 170720 - DNA, 19 bp, Homo sapiens
  siRNA target sequence for CD4 (NM_000616.2,1443-1461).
cggatgtctcagatcaaga

SEQ ID NO: 170721 - DNA, 19 bp, Homo sapiens
  siRNA target sequence for TLR8 (NM_016610.2,186-204).
gcctgggaaaggagactaa

SEQ ID NO: 170722 - DNA, 19 bp, Homo sapiens
  siRNA target sequence for TLR8 (NM_016610.2,240-258).
cctgcattttcctgctaat

SEQ ID NO: 170723 - DNA, 19 bp, Homo sapiens
  siRNA target sequence for TLR8 (NM_016610.2,244-262).
cattttcctgctaatatct

SEQ ID NO: 170724 - DNA, 19 bp, Homo sapiens
  siRNA target sequence for TLR8 (NM_016610.2,272-290).
gagttatgcgccgaagaaa

SEQ ID NO: 170725 - DNA, 19 bp, Homo sapiens
  siRNA target sequence for TLR8 (NM_016610.2,274-292).
gttatgcgccgaagaaaat

SEQ ID NO: 170726 - DNA, 19 bp, Homo sapiens
  siRNA target sequence for TLR8 (NM_016610.2,280-298).
cgccgaagaaaatttttct

SEQ ID NO: 170727 - DNA, 19 bp, Homo sapiens
  siRNA target sequence for TLR8 (NM_016610.2,281-299).
gccgaagaaaatttttcta

SEQ ID NO: 170728 - DNA, 19 bp, Homo sapiens
  siRNA target sequence for TLR8 (NM_016610.2,303-321).
gctatccttgtgatgagaa

SEQ ID NO: 170729 - DNA, 19 bp, Homo sapiens
  siRNA target sequence for TLR8 (NM_016610.2,378-396).
cccaaacggtgggcaaata

SEQ ID NO: 170730 - DNA, 19 bp, Homo sapiens
  siRNA target sequence for TLR8 (NM_016610.2,379-397).
ccaaacggtgggcaaatat

SEQ ID NO: 170731 - DNA, 19 bp, Homo sapiens
  siRNA target sequence for TLR8 (NM_016610.2,407-425).
ctagacctgtctgataatt

SEQ ID NO: 170732 - DNA, 19 bp, Homo sapiens
  siRNA target sequence for TLR8 (NM_016610.2,434-452).
cacataacgaatgaatcat

SEQ ID NO: 170733 - DNA, 19 bp, Homo sapiens
  siRNA target sequence for TLR8 (NM_016610.2,436-454).
cataacgaatgaatcattt

SEQ ID NO: 170734 - DNA, 19 bp, Homo sapiens
  siRNA target sequence for TLR8 (NM_016610.2,517-535).
cggaaatcccggtatacaa

SEQ ID NO: 170735 - DNA, 19 bp, Homo sapiens
  siRNA target sequence for TLR8 (NM_016610.2,518-536).
ggaaatcccggtatacaat

SEQ ID NO: 170736 - DNA, 19 bp, Homo sapiens
  siRNA target sequence for TLR8 (NM_016610.2,563-581).
gcattcctcaacctaaaaa

SEQ ID NO: 170737 - DNA, 19 bp, Homo sapiens
  siRNA target sequence for TLR8 (NM_016610.2,568-586).
cctcaacctaaaaaaccta

SEQ ID NO: 170738 - DNA, 19 bp, Homo sapiens
  siRNA target sequence for TLR8 (NM_016610.2,607-625).
caaccagttaccccaaata

SEQ ID NO: 170739 - DNA, 19 bp, Homo sapiens
  siRNA target sequence for TLR8 (NM_016610.2,643-661).
gtctttgacagaacttagt

SEQ ID NO: 170740 - DNA, 19 bp, Homo sapiens
  siRNA target sequence for TLR8 (NM_016610.2,645-663).
ctttgacagaacttagtct

SEQ ID NO: 170741 - DNA, 19 bp, Homo sapiens
  siRNA target sequence for TLR8 (NM_016610.2,649-667).
gacagaacttagtctaatt

SEQ ID NO: 170742 - DNA, 19 bp, Homo sapiens
  siRNA target sequence for TLR8 (NM_016610.2,656-674).
cttagtctaattcaaaaca

SEQ ID NO: 170743 - DNA, 19 bp, Homo sapiens
  siRNA target sequence for TLR8 (NM_016610.2,737-755).
gcctggaactgctatttta

SEQ ID NO: 170744 - DNA, 19 bp, Homo sapiens
  siRNA target sequence for TLR8 (NM_016610.2,757-775).
caaagtttgcgagaaaact

SEQ ID NO: 170745 - DNA, 19 bp, Homo sapiens
  siRNA target sequence for TLR8 (NM_016610.2,814-832).
ggagttgctatcactatct

SEQ ID NO: 170746 - DNA, 19 bp, Homo sapiens
  siRNA target sequence for TLR8 (NM_016610.2,815-833).
gagttgctatcactatctt

SEQ ID NO: 170747 - DNA, 19 bp, Homo sapiens
  siRNA target sequence for TLR8 (NM_016610.2,820-838).
gctatcactatctttcaat

SEQ ID NO: 170748 - DNA, 19 bp, Homo sapiens
  siRNA target sequence for TLR8 (NM_016610.2,821-839).
ctatcactatctttcaatt

SEQ ID NO: 170749 - DNA, 19 bp, Homo sapiens
  siRNA target sequence for TLR8 (NM_016610.2,825-843).
cactatctttcaattctct

SEQ ID NO: 170750 - DNA, 19 bp, Homo sapiens
  siRNA target sequence for TLR8 (NM_016610.2,870-888).
gctccctacgcaaactttt

SEQ ID NO: 170751 - DNA, 19 bp, Homo sapiens
  siRNA target sequence for TLR8 (NM_016610.2,875-893).
ctacgcaaactttttctga

SEQ ID NO: 170752 - DNA, 19 bp, Homo sapiens
  siRNA target sequence for TLR8 (NM_016610.2,892-910).
gagcaacacccagatcaaa

SEQ ID NO: 170753 - DNA, 19 bp, Homo sapiens
  siRNA target sequence for TLR8 (NM_016610.2,894-912).
gcaacacccagatcaaata

SEQ ID NO: 170754 - DNA, 19 bp, Homo sapiens
  siRNA target sequence for TLR8 (NM_016610.2,898-916).
cacccagatcaaatacatt

SEQ ID NO: 170755 - DNA, 19 bp, Homo sapiens
  siRNA target sequence for TLR8 (NM_016610.2,926-944).
gatttcaagggattgataa

SEQ ID NO: 170756 - DNA, 19 bp, Homo sapiens
  siRNA target sequence for TLR8 (NM_016610.2,931-949).
caagggattgataaattta

SEQ ID NO: 170757 - DNA, 19 bp, Homo sapiens
  siRNA target sequence for TLR8 (NM_016610.2,934-952).
gggattgataaatttaaca

SEQ ID NO: 170758 - DNA, 19 bp, Homo sapiens
  siRNA target sequence for TLR8 (NM_016610.2,935-953).
ggattgataaatttaacat

SEQ ID NO: 170759 - DNA, 19 bp, Homo sapiens
  siRNA target sequence for TLR8 (NM_016610.2,1019-1037).
ggtggtgcttcaattaata

SEQ ID NO: 170760 - DNA, 19 bp, Homo sapiens
  siRNA target sequence for TLR8 (NM_016610.2,1063-1081).
gacccaacttcgataccta

SEQ ID NO: 170761 - DNA, 19 bp, Homo sapiens
  siRNA target sequence for TLR8 (NM_016610.2,1065-1083).
cccaacttcgatacctaaa

SEQ ID NO: 170762 - DNA, 19 bp, Homo sapiens
  siRNA target sequence for TLR8 (NM_016610.2,1115-1133).
gctgcctggtttaaaaata

SEQ ID NO: 170763 - DNA, 19 bp, Homo sapiens
  siRNA target sequence for TLR8 (NM_016610.2,1151-1169).
ctggatcttgaattcaact

SEQ ID NO: 170764 - DNA, 19 bp, Homo sapiens
  siRNA target sequence for TLR8 (NM_016610.2,1191-1209).
ctggggcatttttaacgat

SEQ ID NO: 170765 - DNA, 19 bp, Homo sapiens
  siRNA target sequence for TLR8 (NM_016610.2,1246-1264).
ctatataaaggggagttat

SEQ ID NO: 170766 - DNA, 19 bp, Homo sapiens
  siRNA target sequence for TLR8 (NM_016610.2,1306-1324).
gtctctacgggcattgcat

SEQ ID NO: 170767 - DNA, 19 bp, Homo sapiens
  siRNA target sequence for TLR8 (NM_016610.2,1308-1326).
ctctacgggcattgcattt

SEQ ID NO: 170768 - DNA, 19 bp, Homo sapiens
  siRNA target sequence for TLR8 (NM_016610.2,1310-1328).
ctacgggcattgcatttaa

SEQ ID NO: 170769 - DNA, 19 bp, Homo sapiens
  siRNA target sequence for TLR8 (NM_016610.2,1379-1397).
cagcttccaaacttatcga

SEQ ID NO: 170770 - DNA, 19 bp, Homo sapiens
  siRNA target sequence for TLR8 (NM_016610.2,1386-1404).
caaacttatcgactatcaa

SEQ ID NO: 170771 - DNA, 19 bp, Homo sapiens
  siRNA target sequence for TLR8 (NM_016610.2,1426-1444).
gcaaatcgatttcaaactt

SEQ ID NO: 170772 - DNA, 19 bp, Homo sapiens
  siRNA target sequence for TLR8 (NM_016610.2,1427-1445).
caaatcgatttcaaacttt

SEQ ID NO: 170773 - DNA, 19 bp, Homo sapiens
  siRNA target sequence for TLR8 (NM_016610.2,1432-1450).
cgatttcaaacttttccaa

SEQ ID NO: 170774 - DNA, 19 bp, Homo sapiens
  siRNA target sequence for TLR8 (NM_016610.2,1491-1509).
gaatatcaccgttggtaaa

SEQ ID NO: 170775 - DNA, 19 bp, Homo sapiens
  siRNA target sequence for TLR8 (NM_016610.2,1515-1533).
cccggcagagttatgcaaa

SEQ ID NO: 170776 - DNA, 19 bp, Homo sapiens
  siRNA target sequence for TLR8 (NM_016610.2,1516-1534).
ccggcagagttatgcaaat

SEQ ID NO: 170777 - DNA, 19 bp, Homo sapiens
  siRNA target sequence for TLR8 (NM_016610.2,1517-1535).
cggcagagttatgcaaata

SEQ ID NO: 170778 - DNA, 19 bp, Homo sapiens
  siRNA target sequence for TLR8 (NM_016610.2,1530-1548).
caaatagttcctcttttca

SEQ ID NO: 170779 - DNA, 19 bp, Homo sapiens
  siRNA target sequence for TLR8 (NM_016610.2,1539-1557).
cctcttttcaacgtcatat

SEQ ID NO: 170780 - DNA, 19 bp, Homo sapiens
  siRNA target sequence for TLR8 (NM_016610.2,1561-1579).
gaaacgacgctcaacagat

SEQ ID NO: 170781 - DNA, 19 bp, Homo sapiens
  siRNA target sequence for TLR8 (NM_016610.2,1566-1584).
gacgctcaacagattttga

SEQ ID NO: 170782 - DNA, 19 bp, Homo sapiens
  siRNA target sequence for TLR8 (NM_016610.2,1568-1586).
cgctcaacagattttgagt

SEQ ID NO: 170783 - DNA, 19 bp, Homo sapiens
  siRNA target sequence for TLR8 (NM_016610.2,1610-1628).
catttcacccgtcctttaa

SEQ ID NO: 170784 - DNA, 19 bp, Homo sapiens
  siRNA target sequence for TLR8 (NM_016610.2,1652-1670).
ggaaaagccttagatttaa

SEQ ID NO: 170785 - DNA, 19 bp, Homo sapiens
  siRNA target sequence for TLR8 (NM_016610.2,1664-1682).
gatttaagcctcaacagta

SEQ ID NO: 170786 - DNA, 19 bp, Homo sapiens
  siRNA target sequence for TLR8 (NM_016610.2,1787-1805).
gccattcctcatgtcaaat

SEQ ID NO: 170787 - DNA, 19 bp, Homo sapiens
  siRNA target sequence for TLR8 (NM_016610.2,1788-1806).
ccattcctcatgtcaaata

SEQ ID NO: 170788 - DNA, 19 bp, Homo sapiens
  siRNA target sequence for TLR8 (NM_016610.2,1789-1807).
cattcctcatgtcaaatat

SEQ ID NO: 170789 - DNA, 19 bp, Homo sapiens
  siRNA target sequence for TLR8 (NM_016610.2,1822-1840).
caatagactagactttgat

SEQ ID NO: 170790 - DNA, 19 bp, Homo sapiens
  siRNA target sequence for TLR8 (NM_016610.2,1829-1847).
ctagactttgataatgcta

SEQ ID NO: 170791 - DNA, 19 bp, Homo sapiens
  siRNA target sequence for TLR8 (NM_016610.2,1844-1862).
gctagtgctcttactgaat

SEQ ID NO: 170792 - DNA, 19 bp, Homo sapiens
  siRNA target sequence for TLR8 (NM_016610.2,1864-1882).
gtccgacttggaagttcta

SEQ ID NO: 170793 - DNA, 19 bp, Homo sapiens
  siRNA target sequence for TLR8 (NM_016610.2,1866-1884).
ccgacttggaagttctaga

SEQ ID NO: 170794 - DNA, 19 bp, Homo sapiens
  siRNA target sequence for TLR8 (NM_016610.2,1867-1885).
cgacttggaagttctagat

SEQ ID NO: 170795 - DNA, 19 bp, Homo sapiens
  siRNA target sequence for TLR8 (NM_016610.2,1877-1895).
gttctagatctcagctata

SEQ ID NO: 170796 - DNA, 19 bp, Homo sapiens
  siRNA target sequence for TLR8 (NM_016610.2,1888-1906).
cagctataattcacactat

SEQ ID NO: 170797 - DNA, 19 bp, Homo sapiens
  siRNA target sequence for TLR8 (NM_016610.2,1890-1908).
gctataattcacactattt

SEQ ID NO: 170798 - DNA, 19 bp, Homo sapiens
  siRNA target sequence for TLR8 (NM_016610.2,1911-1929).
gaatagcaggcgtaacaca

SEQ ID NO: 170799 - DNA, 19 bp, Homo sapiens
  siRNA target sequence for TLR8 (NM_016610.2,1920-1938).
gcgtaacacatcatctaga

SEQ ID NO: 170800 - DNA, 19 bp, Homo sapiens
  siRNA target sequence for TLR8 (NM_016610.2,1921-1939).
cgtaacacatcatctagaa

SEQ ID NO: 170801 - DNA, 19 bp, Homo sapiens
  siRNA target sequence for TLR8 (NM_016610.2,1922-1940).
gtaacacatcatctagaat

SEQ ID NO: 170802 - DNA, 19 bp, Homo sapiens
  siRNA target sequence for TLR8 (NM_016610.2,1931-1949).
catctagaatttattcaaa

SEQ ID NO: 170803 - DNA, 19 bp, Homo sapiens
  siRNA target sequence for TLR8 (NM_016610.2,1981-1999).
ccacaacaacatttatact

SEQ ID NO: 170804 - DNA, 19 bp, Homo sapiens
  siRNA target sequence for TLR8 (NM_016610.2,2025-2043).
gcaagtccctggtagaatt

SEQ ID NO: 170805 - DNA, 19 bp, Homo sapiens
  siRNA target sequence for TLR8 (NM_016610.2,2026-2044).
caagtccctggtagaatta

SEQ ID NO: 170806 - DNA, 19 bp, Homo sapiens
  siRNA target sequence for TLR8 (NM_016610.2,2029-2047).
gtccctggtagaattagtt

SEQ ID NO: 170807 - DNA, 19 bp, Homo sapiens
  siRNA target sequence for TLR8 (NM_016610.2,2052-2070).
gtggcaatcgccttgacat

SEQ ID NO: 170808 - DNA, 19 bp, Homo sapiens
  siRNA target sequence for TLR8 (NM_016610.2,2055-2073).
gcaatcgccttgacatttt

SEQ ID NO: 170809 - DNA, 19 bp, Homo sapiens
  siRNA target sequence for TLR8 (NM_016610.2,2081-2099).
gatgatgacaacaggtata

SEQ ID NO: 170810 - DNA, 19 bp, Homo sapiens
  siRNA target sequence for TLR8 (NM_016610.2,2084-2102).
gatgacaacaggtatatct

SEQ ID NO: 170811 - DNA, 19 bp, Homo sapiens
  siRNA target sequence for TLR8 (NM_016610.2,2126-2144).
ctgacacgtctggatttat

SEQ ID NO: 170812 - DNA, 19 bp, Homo sapiens
  siRNA target sequence for TLR8 (NM_016610.2,2158-2176).
gaagcacatcccaaatgaa

SEQ ID NO: 170813 - DNA, 19 bp, Homo sapiens
  siRNA target sequence for TLR8 (NM_016610.2,2167-2185).
cccaaatgaagcattcctt

SEQ ID NO: 170814 - DNA, 19 bp, Homo sapiens
  siRNA target sequence for TLR8 (NM_016610.2,2196-2214).
cgagtctcactgaactaca

SEQ ID NO: 170815 - DNA, 19 bp, Homo sapiens
  siRNA target sequence for TLR8 (NM_016610.2,2199-2217).
gtctcactgaactacatat

SEQ ID NO: 170816 - DNA, 19 bp, Homo sapiens
  siRNA target sequence for TLR8 (NM_016610.2,2271-2289).
gtctcgagttgcttgactt

SEQ ID NO: 170817 - DNA, 19 bp, Homo sapiens
  siRNA target sequence for TLR8 (NM_016610.2,2287-2305).
cttacgtggaaacaaacta

SEQ ID NO: 170818 - DNA, 19 bp, Homo sapiens
  siRNA target sequence for TLR8 (NM_016610.2,2299-2317).
caaactactctttttaact

SEQ ID NO: 170819 - DNA, 19 bp, Homo sapiens
  siRNA target sequence for TLR8 (NM_016610.2,2303-2321).
ctactctttttaactgata

SEQ ID NO: 170820 - DNA, 19 bp, Homo sapiens
  siRNA target sequence for TLR8 (NM_016610.2,2318-2336).
gatagcctatctgacttta

SEQ ID NO: 170821 - DNA, 19 bp, Homo sapiens
  siRNA target sequence for TLR8 (NM_016610.2,2323-2341).
cctatctgactttacatct

SEQ ID NO: 170822 - DNA, 19 bp, Homo sapiens
  siRNA target sequence for TLR8 (NM_016610.2,2383-2401).
cctaccctctggctttctt

SEQ ID NO: 170823 - DNA, 19 bp, Homo sapiens
  siRNA target sequence for TLR8 (NM_016610.2,2419-2437).
gaagcacctcgatttaagt

SEQ ID NO: 170824 - DNA, 19 bp, Homo sapiens
  siRNA target sequence for TLR8 (NM_016610.2,2425-2443).
cctcgatttaagttccaat

SEQ ID NO: 170825 - DNA, 19 bp, Homo sapiens
  siRNA target sequence for TLR8 (NM_016610.2,2482-2500).
gaccaccaccaaattatct

SEQ ID NO: 170826 - DNA, 19 bp, Homo sapiens
  siRNA target sequence for TLR8 (NM_016610.2,2487-2505).
ccaccaaattatctatgtt

SEQ ID NO: 170827 - DNA, 19 bp, Homo sapiens
  siRNA target sequence for TLR8 (NM_016610.2,2656-2674).
ggagctaacaacttgtgtt

SEQ ID NO: 170828 - DNA, 19 bp, Homo sapiens
  siRNA target sequence for TLR8 (NM_016610.2,2657-2675).
gagctaacaacttgtgttt

SEQ ID NO: 170829 - DNA, 19 bp, Homo sapiens
  siRNA target sequence for TLR8 (NM_016610.2,2747-2765).
gctcaccatttgttttact

SEQ ID NO: 170830 - DNA, 19 bp, Homo sapiens
  siRNA target sequence for TLR8 (NM_016610.2,2767-2785).
ggatgtttggtttatatat

SEQ ID NO: 170831 - DNA, 19 bp, Homo sapiens
  siRNA target sequence for TLR8 (NM_016610.2,2789-2807).
gtgtgtttagctaaggtaa

SEQ ID NO: 170832 - DNA, 19 bp, Homo sapiens
  siRNA target sequence for TLR8 (NM_016610.2,2791-2809).
gtgtttagctaaggtaaaa

SEQ ID NO: 170833 - DNA, 19 bp, Homo sapiens
  siRNA target sequence for TLR8 (NM_016610.2,2882-2900).
gttactgactgggtgataa

SEQ ID NO: 170834 - DNA, 19 bp, Homo sapiens
  siRNA target sequence for TLR8 (NM_016610.2,2926-2944).
gagccgagacaaaaacgtt

SEQ ID NO: 170835 - DNA, 19 bp, Homo sapiens
  siRNA target sequence for TLR8 (NM_016610.2,3022-3040).
caagaaaacagtatttgtt

SEQ ID NO: 170836 - DNA, 19 bp, Homo sapiens
  siRNA target sequence for TLR8 (NM_016610.2,3154-3172).
gttacagcattctcagtat

SEQ ID NO: 170837 - DNA, 19 bp, Homo sapiens
  siRNA target sequence for TLR8 (NM_016610.2,3179-3197).
ctacggcagcggatctgta

SEQ ID NO: 170838 - DNA, 19 bp, Homo sapiens
  siRNA target sequence for TLR8 (NM_016610.2,3182-3200).
cggcagcggatctgtaaga

SEQ ID NO: 170839 - DNA, 19 bp, Homo sapiens
  siRNA target sequence for TLR8 (NM_016610.2,3284-3302).
gattcacggtataacaata

SEQ ID NO: 170840 - DNA, 19 bp, Homo sapiens
  siRNA target sequence for TLR8 (NM_016610.2,3288-3306).
cacggtataacaatatgta

SEQ ID NO: 170841 - DNA, 19 bp, Homo sapiens
  siRNA target sequence for TLR8 (NM_016610.2,3308-3326).
gtcgattccattaagcaat

SEQ ID NO: 170842 - DNA, 19 bp, Homo sapiens
  siRNA target sequence for PDYN (NM_024411.2,302-320).
gctccttgtgtgctgtaaa

SEQ ID NO: 170843 - DNA, 19 bp, Homo sapiens
  siRNA target sequence for PDYN (NM_024411.2,325-343).
caggatggtcccaaaccta

SEQ ID NO: 170844 - DNA, 19 bp, Homo sapiens
  siRNA target sequence for PDYN (NM_024411.2,551-569).
gcaagtttctcccaagtat

SEQ ID NO: 170845 - DNA, 19 bp, Homo sapiens
  siRNA target sequence for PDYN (NM_024411.2,555-573).
gtttctcccaagtatctca

SEQ ID NO: 170846 - DNA, 19 bp, Homo sapiens
  siRNA target sequence for PDYN (NM_024411.2,693-711).
ggagactggcacactctat

SEQ ID NO: 170847 - DNA, 19 bp, Homo sapiens
  siRNA target sequence for PDYN (NM_024411.2,752-770).
ggggctttttgcgcaaata

SEQ ID NO: 170848 - DNA, 19 bp, Homo sapiens
  siRNA target sequence for PDYN (NM_024411.2,822-840).
ccatgaggacctgtacaaa

SEQ ID NO: 170849 - DNA, 19 bp, Homo sapiens
  siRNA target sequence for PDYN (NM_024411.2,946-964).
caggaagatccgaatgctt

SEQ ID NO: 170850 - DNA, 19 bp, Homo sapiens
  siRNA target sequence for REA (NM_007273.3,326-344).
cagagccatcttcttcaat

SEQ ID NO: 170851 - DNA, 19 bp, Homo sapiens
  siRNA target sequence for REA (NM_007273.3,355-373).
gagtgcagcaggacactat

SEQ ID NO: 170852 - DNA, 19 bp, Homo sapiens
  siRNA target sequence for REA (NM_007273.3,406-424).
ggttccagtaccccattat

SEQ ID NO: 170853 - DNA, 19 bp, Homo sapiens
  siRNA target sequence for REA (NM_007273.3,410-428).
ccagtaccccattatctat

SEQ ID NO: 170854 - DNA, 19 bp, Homo sapiens
  siRNA target sequence for REA (NM_007273.3,435-453).
cgggccagacctcgaaaaa

SEQ ID NO: 170855 - DNA, 19 bp, Homo sapiens
  siRNA target sequence for REA (NM_007273.3,438-456).
gccagacctcgaaaaatct

SEQ ID NO: 170856 - DNA, 19 bp, Homo sapiens
  siRNA target sequence for REA (NM_007273.3,477-495).
gacctacagatggtgaata

SEQ ID NO: 170857 - DNA, 19 bp, Homo sapiens
  siRNA target sequence for REA (NM_007273.3,480-498).
ctacagatggtgaatatct

SEQ ID NO: 170858 - DNA, 19 bp, Homo sapiens
  siRNA target sequence for REA (NM_007273.3,813-831).
gcccaattcttggtagaaa

SEQ ID NO: 170859 - DNA, 19 bp, Homo sapiens
  siRNA target sequence for REA (NM_007273.3,917-935).
gaaccctggctacatcaaa

SEQ ID NO: 170860 - DNA, 19 bp, Homo sapiens
  siRNA target sequence for REA (NM_007273.3,920-938).
ccctggctacatcaaactt

SEQ ID NO: 170861 - DNA, 19 bp, Homo sapiens
  siRNA target sequence for REA (NM_007273.3,929-947).
catcaaacttcgcaagatt

SEQ ID NO: 170862 - DNA, 19 bp, Homo sapiens
  siRNA target sequence for REA (NM_007273.3,978-996).
gccacatcacagaatcgta

SEQ ID NO: 170863 - DNA, 19 bp, Homo sapiens
  siRNA target sequence for REA (NM_007273.3,979-997).
ccacatcacagaatcgtat

SEQ ID NO: 170864 - DNA, 19 bp, Homo sapiens
  siRNA target sequence for REA (NM_007273.3,982-1000).
catcacagaatcgtatcta

SEQ ID NO: 170865 - DNA, 19 bp, Homo sapiens
  siRNA target sequence for REA (NM_007273.3,985-1003).
cacagaatcgtatctatct

SEQ ID NO: 170866 - DNA, 19 bp, Homo sapiens
  siRNA target sequence for REA (NM_007273.3,987-1005).
cagaatcgtatctatctca

SEQ ID NO: 170867 - DNA, 19 bp, Homo sapiens
  siRNA target sequence for REA (NM_007273.3,1063-1081).
gcctcatcaagggtaagaa

SEQ ID NO: 170868 - DNA, 19 bp, Homo sapiens
  siRNA target sequence for REA (NM_007273.3,1065-1083).
ctcatcaagggtaagaaat

SEQ ID NO: 170869 - DNA, 19 bp, Homo sapiens
  siRNA target sequence for BID (NM_001196.2,205-223).
gggatgagtgcatcacaaa

SEQ ID NO: 170870 - DNA, 19 bp, Homo sapiens
  siRNA target sequence for BID (NM_001196.2,368-386).
ctcccgcttgggaagaata

SEQ ID NO: 170871 - DNA, 19 bp, Homo sapiens
  siRNA target sequence for BID (NM_001196.2,370-388).
cccgcttgggaagaataga

SEQ ID NO: 170872 - DNA, 19 bp, Homo sapiens
  siRNA target sequence for BID (NM_001196.2,664-682).
ccttgctccgtgatgtctt

SEQ ID NO: 170873 - DNA, 19 bp, Homo sapiens
  siRNA target sequence for BID (NM_001196.2,680-698).
ctttcacacaacagtgaat

SEQ ID NO: 170874 - DNA, 19 bp, Homo sapiens
  siRNA target sequence for BID (NM_197966.1,332-350).
gcggtgctggggtcatgat

SEQ ID NO: 170875 - DNA, 19 bp, Homo sapiens
  siRNA target sequence for GPRC5D (NM_018654.1,18-36).
cgagtccactggagactat

SEQ ID NO: 170876 - DNA, 19 bp, Homo sapiens
  siRNA target sequence for GPRC5D (NM_018654.1,98-116).
gcatcgtggtcacaattct

SEQ ID NO: 170877 - DNA, 19 bp, Homo sapiens
  siRNA target sequence for GPRC5D (NM_018654.1,108-126).
cacaattctgctactctta

SEQ ID NO: 170878 - DNA, 19 bp, Homo sapiens
  siRNA target sequence for GPRC5D (NM_018654.1,118-136).
ctactcttagcatttctct

SEQ ID NO: 170879 - DNA, 19 bp, Homo sapiens
  siRNA target sequence for GPRC5D (NM_018654.1,226-244).
ctcgcttttgccttcatca

SEQ ID NO: 170880 - DNA, 19 bp, Homo sapiens
  siRNA target sequence for GPRC5D (NM_018654.1,240-258).
catcatcgagctcaatcaa

SEQ ID NO: 170881 - DNA, 19 bp, Homo sapiens
  siRNA target sequence for GPRC5D (NM_018654.1,246-264).
cgagctcaatcaacaaact

SEQ ID NO: 170882 - DNA, 19 bp, Homo sapiens
  siRNA target sequence for GPRC5D (NM_018654.1,268-286).
cccgtacgctactttctct

SEQ ID NO: 170883 - DNA, 19 bp, Homo sapiens
  siRNA target sequence for GPRC5D (NM_018654.1,269-287).
ccgtacgctactttctctt

SEQ ID NO: 170884 - DNA, 19 bp, Homo sapiens
  siRNA target sequence for GPRC5D (NM_018654.1,270-288).
cgtacgctactttctcttt

SEQ ID NO: 170885 - DNA, 19 bp, Homo sapiens
  siRNA target sequence for GPRC5D (NM_018654.1,326-344).
ctcatgcctccaatctagt

SEQ ID NO: 170886 - DNA, 19 bp, Homo sapiens
  siRNA target sequence for GPRC5D (NM_018654.1,369-387).
cttctcctggacgacaatt

SEQ ID NO: 170887 - DNA, 19 bp, Homo sapiens
  siRNA target sequence for GPRC5D (NM_018654.1,404-422).
gttgcagtctgttgcaaat

SEQ ID NO: 170888 - DNA, 19 bp, Homo sapiens
  siRNA target sequence for GPRC5D (NM_018654.1,456-474).
gaccagaggtatgatgttt

SEQ ID NO: 170889 - DNA, 19 bp, Homo sapiens
  siRNA target sequence for GPRC5D (NM_018654.1,458-476).
ccagaggtatgatgtttgt

SEQ ID NO: 170890 - DNA, 19 bp, Homo sapiens
  siRNA target sequence for GPRC5D (NM_018654.1,603-621).
gcatggaaggctcatcttt

SEQ ID NO: 170891 - DNA, 19 bp, Homo sapiens
  siRNA target sequence for GPRC5D (NM_018654.1,607-625).
ggaaggctcatctttatca

SEQ ID NO: 170892 - DNA, 19 bp, Homo sapiens
  siRNA target sequence for GPRC5D (NM_018654.1,921-939).
ggatgtagcattaacttca

SEQ ID NO: 170893 - DNA, 19 bp, Homo sapiens
  siRNA target sequence for GPRC5D (NM_018654.1,922-940).
gatgtagcattaacttcat

SEQ ID NO: 170894 - DNA, 19 bp, Homo sapiens
  siRNA target sequence for GPRC5D (NM_018654.1,973-991).
cccacacaagagtgtttca

SEQ ID NO: 170895 - DNA, 19 bp, Homo sapiens
  siRNA target sequence for BZRAP1 (NM_004758.1,1163-1181).
caacctacccgtgattcta

SEQ ID NO: 170896 - DNA, 19 bp, Homo sapiens
  siRNA target sequence for BZRAP1 (NM_004758.1,1665-1683).
ctggagtctaccttggatt

SEQ ID NO: 170897 - DNA, 19 bp, Homo sapiens
  siRNA target sequence for BZRAP1 (NM_004758.1,1925-1943).
gcgctgcaccccaaagtct

SEQ ID NO: 170898 - DNA, 19 bp, Homo sapiens
  siRNA target sequence for BZRAP1 (NM_004758.1,1926-1944).
cgctgcaccccaaagtctt

SEQ ID NO: 170899 - DNA, 19 bp, Homo sapiens
  siRNA target sequence for BZRAP1 (NM_004758.1,2165-2183).
ggtcttcctagcacgttat

SEQ ID NO: 170900 - DNA, 19 bp, Homo sapiens
  siRNA target sequence for BZRAP1 (NM_004758.1,2166-2184).
gtcttcctagcacgttata

SEQ ID NO: 170901 - DNA, 19 bp, Homo sapiens
  siRNA target sequence for BZRAP1 (NM_004758.1,2246-2264).
cgagtacatctacatctat

SEQ ID NO: 170902 - DNA, 19 bp, Homo sapiens
  siRNA target sequence for BZRAP1 (NM_004758.1,2320-2338).
gcctggtcccttccaattt

SEQ ID NO: 170903 - DNA, 19 bp, Homo sapiens
  siRNA target sequence for BZRAP1 (NM_004758.1,2382-2400).
ccagagctggccgatttgt

SEQ ID NO: 170904 - DNA, 19 bp, Homo sapiens
  siRNA target sequence for BZRAP1 (NM_004758.1,3177-3195).
gggatcttgatcatcagtt

SEQ ID NO: 170905 - DNA, 19 bp, Homo sapiens
  siRNA target sequence for BZRAP1 (NM_004758.1,3825-3843).
gcccagcaggcgccaaata

SEQ ID NO: 170906 - DNA, 19 bp, Homo sapiens
  siRNA target sequence for BZRAP1 (NM_004758.1,4376-4394).
ggaagacatgcctggatta

SEQ ID NO: 170907 - DNA, 19 bp, Homo sapiens
  siRNA target sequence for BZRAP1 (NM_004758.1,4544-4562).
gggtggcctccccgtaatt

SEQ ID NO: 170908 - DNA, 19 bp, Homo sapiens
  siRNA target sequence for BZRAP1 (NM_004758.1,4546-4564).
gtggcctccccgtaattga

SEQ ID NO: 170909 - DNA, 19 bp, Homo sapiens
  siRNA target sequence for BZRAP1 (NM_004758.1,4778-4796).
ctggggcacagcaactgta

SEQ ID NO: 170910 - DNA, 19 bp, Homo sapiens
  siRNA target sequence for BZRAP1 (NM_004758.1,5069-5087).
cctacccgtcaggatcttt

SEQ ID NO: 170911 - DNA, 19 bp, Homo sapiens
  siRNA target sequence for BZRAP1 (NM_004758.1,5301-5319).
ctgctccagcggggttatt

SEQ ID NO: 170912 - DNA, 19 bp, Homo sapiens
  siRNA target sequence for BZRAP1 (NM_004758.1,5350-5368).
ggaatggtccgtttgtgta

SEQ ID NO: 170913 - DNA, 19 bp, Homo sapiens
  siRNA target sequence for BZRAP1 (NM_004758.1,5612-5630).
cgatgacggtttctactat

SEQ ID NO: 170914 - DNA, 19 bp, Homo sapiens
  siRNA target sequence for ALCAM (NM_001627.1,132-150).
gccaggccttggatggtat

SEQ ID NO: 170915 - DNA, 19 bp, Homo sapiens
  siRNA target sequence for ALCAM (NM_001627.1,133-151).
ccaggccttggatggtata

SEQ ID NO: 170916 - DNA, 19 bp, Homo sapiens
  siRNA target sequence for ALCAM (NM_001627.1,137-155).
gccttggatggtatactgt

SEQ ID NO: 170917 - DNA, 19 bp, Homo sapiens
  siRNA target sequence for ALCAM (NM_001627.1,138-156).
ccttggatggtatactgta

SEQ ID NO: 170918 - DNA, 19 bp, Homo sapiens
  siRNA target sequence for ALCAM (NM_001627.1,142-160).
ggatggtatactgtaaatt

SEQ ID NO: 170919 - DNA, 19 bp, Homo sapiens
  siRNA target sequence for ALCAM (NM_001627.1,161-179).
cagcatatggagataccat

SEQ ID NO: 170920 - DNA, 19 bp, Homo sapiens
  siRNA target sequence for ALCAM (NM_001627.1,163-181).
gcatatggagataccatta

SEQ ID NO: 170921 - DNA, 19 bp, Homo sapiens
  siRNA target sequence for ALCAM (NM_001627.1,245-263).
ccgatggctccccagtatt

SEQ ID NO: 170922 - DNA, 19 bp, Homo sapiens
  siRNA target sequence for ALCAM (NM_001627.1,246-264).
cgatggctccccagtattt

SEQ ID NO: 170923 - DNA, 19 bp, Homo sapiens
  siRNA target sequence for ALCAM (NM_001627.1,247-265).
gatggctccccagtattta

SEQ ID NO: 170924 - DNA, 19 bp, Homo sapiens
  siRNA target sequence for ALCAM (NM_001627.1,268-286).
gccttcagatcctctacaa

SEQ ID NO: 170925 - DNA, 19 bp, Homo sapiens
  siRNA target sequence for ALCAM (NM_001627.1,269-287).
ccttcagatcctctacaaa

SEQ ID NO: 170926 - DNA, 19 bp, Homo sapiens
  siRNA target sequence for ALCAM (NM_001627.1,304-322).
gacgatgtaccagaataca

SEQ ID NO: 170927 - DNA, 19 bp, Homo sapiens
  siRNA target sequence for ALCAM (NM_001627.1,306-324).
cgatgtaccagaatacaaa

SEQ ID NO: 170928 - DNA, 19 bp, Homo sapiens
  siRNA target sequence for ALCAM (NM_001627.1,329-347).
gattgaacctctcagaaaa

SEQ ID NO: 170929 - DNA, 19 bp, Homo sapiens
  siRNA target sequence for ALCAM (NM_001627.1,337-355).
ctctcagaaaactacactt

SEQ ID NO: 170930 - DNA, 19 bp, Homo sapiens
  siRNA target sequence for ALCAM (NM_001627.1,343-361).
gaaaactacactttgtcta

SEQ ID NO: 170931 - DNA, 19 bp, Homo sapiens
  siRNA target sequence for ALCAM (NM_001627.1,351-369).
cactttgtctatcagtaat

SEQ ID NO: 170932 - DNA, 19 bp, Homo sapiens
  siRNA target sequence for ALCAM (NM_001627.1,426-444).
gtttgaggcacctacaata

SEQ ID NO: 170933 - DNA, 19 bp, Homo sapiens
  siRNA target sequence for ALCAM (NM_001627.1,440-458).
caatagtcaaggtgttcaa

SEQ ID NO: 170934 - DNA, 19 bp, Homo sapiens
  siRNA target sequence for ALCAM (NM_001627.1,453-471).
gttcaagcaaccatctaaa

SEQ ID NO: 170935 - DNA, 19 bp, Homo sapiens
  siRNA target sequence for ALCAM (NM_001627.1,456-474).
caagcaaccatctaaacct

SEQ ID NO: 170936 - DNA, 19 bp, Homo sapiens
  siRNA target sequence for ALCAM (NM_001627.1,491-509).
cactgtttctcgaaacaga

SEQ ID NO: 170937 - DNA, 19 bp, Homo sapiens
  siRNA target sequence for ALCAM (NM_001627.1,501-519).
cgaaacagagcagctaaaa

SEQ ID NO: 170938 - DNA, 19 bp, Homo sapiens
  siRNA target sequence for ALCAM (NM_001627.1,522-540).
gttgggtgactgcatttca

SEQ ID NO: 170939 - DNA, 19 bp, Homo sapiens
  siRNA target sequence for ALCAM (NM_001627.1,533-551).
gcatttcagaagacagtta

SEQ ID NO: 170940 - DNA, 19 bp, Homo sapiens
  siRNA target sequence for ALCAM (NM_001627.1,534-552).
catttcagaagacagttat

SEQ ID NO: 170941 - DNA, 19 bp, Homo sapiens
  siRNA target sequence for ALCAM (NM_001627.1,604-622).
gaaggagcggtggtcataa

SEQ ID NO: 170942 - DNA, 19 bp, Homo sapiens
  siRNA target sequence for ALCAM (NM_001627.1,643-661).
ccagtgactcagctctata

SEQ ID NO: 170943 - DNA, 19 bp, Homo sapiens
  siRNA target sequence for ALCAM (NM_001627.1,687-705).
gacaaccaaggctgacata

SEQ ID NO: 170944 - DNA, 19 bp, Homo sapiens
  siRNA target sequence for ALCAM (NM_001627.1,717-735).
cacctgctcggtgacatat

SEQ ID NO: 170945 - DNA, 19 bp, Homo sapiens
  siRNA target sequence for ALCAM (NM_001627.1,719-737).
cctgctcggtgacatatta

SEQ ID NO: 170946 - DNA, 19 bp, Homo sapiens
  siRNA target sequence for ALCAM (NM_001627.1,720-738).
ctgctcggtgacatattat

SEQ ID NO: 170947 - DNA, 19 bp, Homo sapiens
  siRNA target sequence for ALCAM (NM_001627.1,723-741).
ctcggtgacatattatgga

SEQ ID NO: 170948 - DNA, 19 bp, Homo sapiens
  siRNA target sequence for ALCAM (NM_001627.1,748-766).
ggccagaaaacaattcatt

SEQ ID NO: 170949 - DNA, 19 bp, Homo sapiens
  siRNA target sequence for ALCAM (NM_001627.1,769-787).
gaacaggcagtatttgata

SEQ ID NO: 170950 - DNA, 19 bp, Homo sapiens
  siRNA target sequence for ALCAM (NM_001627.1,853-871).
gataacatcactcttaaat

SEQ ID NO: 170951 - DNA, 19 bp, Homo sapiens
  siRNA target sequence for ALCAM (NM_001627.1,858-876).
catcactcttaaatgctta

SEQ ID NO: 170952 - DNA, 19 bp, Homo sapiens
  siRNA target sequence for ALCAM (NM_001627.1,920-938).
caggacagcccgaaggaat

SEQ ID NO: 170953 - DNA, 19 bp, Homo sapiens
  siRNA target sequence for ALCAM (NM_001627.1,1114-1132).
cccgtgtcatgcacaatat

SEQ ID NO: 170954 - DNA, 19 bp, Homo sapiens
  siRNA target sequence for ALCAM (NM_001627.1,1116-1134).
cgtgtcatgcacaatatct

SEQ ID NO: 170955 - DNA, 19 bp, Homo sapiens
  siRNA target sequence for ALCAM (NM_001627.1,1156-1174).
gtatggatgaaagataaca

SEQ ID NO: 170956 - DNA, 19 bp, Homo sapiens
  siRNA target sequence for ALCAM (NM_001627.1,1183-1201).
cgatctagcccgtcatttt

SEQ ID NO: 170957 - DNA, 19 bp, Homo sapiens
  siRNA target sequence for ALCAM (NM_001627.1,1191-1209).
cccgtcattttctagtctt

SEQ ID NO: 170958 - DNA, 19 bp, Homo sapiens
  siRNA target sequence for ALCAM (NM_001627.1,1336-1354).
gatcccagtggactatcta

SEQ ID NO: 170959 - DNA, 19 bp, Homo sapiens
  siRNA target sequence for ALCAM (NM_001627.1,1343-1361).
gtggactatctaaaacaat

SEQ ID NO: 170960 - DNA, 19 bp, Homo sapiens
  siRNA target sequence for ALCAM (NM_001627.1,1348-1366).
ctatctaaaacaataatct

SEQ ID NO: 170961 - DNA, 19 bp, Homo sapiens
  siRNA target sequence for ALCAM (NM_001627.1,1414-1432).
ggcagtggaagcgtcataa

SEQ ID NO: 170962 - DNA, 19 bp, Homo sapiens
  siRNA target sequence for ALCAM (NM_001627.1,1415-1433).
gcagtggaagcgtcataaa

SEQ ID NO: 170963 - DNA, 19 bp, Homo sapiens
  siRNA target sequence for ALCAM (NM_001627.1,1420-1438).
ggaagcgtcataaaccaaa

SEQ ID NO: 170964 - DNA, 19 bp, Homo sapiens
  siRNA target sequence for ALCAM (NM_001627.1,1441-1459).
gaggaatctccttatatta

SEQ ID NO: 170965 - DNA, 19 bp, Homo sapiens
  siRNA target sequence for ALCAM (NM_001627.1,1491-1509).
ccctgaagagaatgttaca

SEQ ID NO: 170966 - DNA, 19 bp, Homo sapiens
  siRNA target sequence for ALCAM (NM_001627.1,1492-1510).
cctgaagagaatgttacat

SEQ ID NO: 170967 - DNA, 19 bp, Homo sapiens
  siRNA target sequence for ALCAM (NM_001627.1,1554-1572).
cttgaatgtctctgctata

SEQ ID NO: 170968 - DNA, 19 bp, Homo sapiens
  siRNA target sequence for ALCAM (NM_001627.1,1563-1581).
ctctgctataagtattcca

SEQ ID NO: 170969 - DNA, 19 bp, Homo sapiens
  siRNA target sequence for ALCAM (NM_001627.1,1588-1606).
gatgaggcagacgagataa

SEQ ID NO: 170970 - DNA, 19 bp, Homo sapiens
  siRNA target sequence for ALCAM (NM_001627.1,1593-1611).
ggcagacgagataagtgat

SEQ ID NO: 170971 - DNA, 19 bp, Homo sapiens
  siRNA target sequence for ALCAM (NM_001627.1,1724-1742).
caaagactgcatcaaaaca

SEQ ID NO: 170972 - DNA, 19 bp, Homo sapiens
  siRNA target sequence for ALCAM (NM_001627.1,1728-1746).
gactgcatcaaaacatgta

SEQ ID NO: 170973 - DNA, 19 bp, Homo sapiens
  siRNA target sequence for ALS2CR3 (NM_015049.1,386-404).
gtcaatcccagaatgcaat

SEQ ID NO: 170974 - DNA, 19 bp, Homo sapiens
  siRNA target sequence for ALS2CR3 (NM_015049.1,416-434).
caacaggtgaagaaaacct

SEQ ID NO: 170975 - DNA, 19 bp, Homo sapiens
  siRNA target sequence for ALS2CR3 (NM_015049.1,427-445).
gaaaacctcatgaatagca

SEQ ID NO: 170976 - DNA, 19 bp, Homo sapiens
  siRNA target sequence for ALS2CR3 (NM_015049.1,510-528).
ggtgagtctgctagaagaa

SEQ ID NO: 170977 - DNA, 19 bp, Homo sapiens
  siRNA target sequence for ALS2CR3 (NM_015049.1,513-531).
gagtctgctagaagaacaa

SEQ ID NO: 170978 - DNA, 19 bp, Homo sapiens
  siRNA target sequence for ALS2CR3 (NM_015049.1,515-533).
gtctgctagaagaacaact

SEQ ID NO: 170979 - DNA, 19 bp, Homo sapiens
  siRNA target sequence for ALS2CR3 (NM_015049.1,526-544).
gaacaactaccacagtata

SEQ ID NO: 170980 - DNA, 19 bp, Homo sapiens
  siRNA target sequence for ALS2CR3 (NM_015049.1,536-554).
cacagtataggctaaaagt

SEQ ID NO: 170981 - DNA, 19 bp, Homo sapiens
  siRNA target sequence for ALS2CR3 (NM_015049.1,553-571).
gtagacactctctttctat

SEQ ID NO: 170982 - DNA, 19 bp, Homo sapiens
  siRNA target sequence for ALS2CR3 (NM_015049.1,606-624).
gcggcagcatgcatctgat

SEQ ID NO: 170983 - DNA, 19 bp, Homo sapiens
  siRNA target sequence for ALS2CR3 (NM_015049.1,649-667).
gagactttccgttacatga

SEQ ID NO: 170984 - DNA, 19 bp, Homo sapiens
  siRNA target sequence for ALS2CR3 (NM_015049.1,653-671).
ctttccgttacatgattct

SEQ ID NO: 170985 - DNA, 19 bp, Homo sapiens
  siRNA target sequence for ALS2CR3 (NM_015049.1,688-706).
gagcagatgaccaaaactt

SEQ ID NO: 170986 - DNA, 19 bp, Homo sapiens
  siRNA target sequence for ALS2CR3 (NM_015049.1,714-732).
catcgacatggttacacat

SEQ ID NO: 170987 - DNA, 19 bp, Homo sapiens
  siRNA target sequence for ALS2CR3 (NM_015049.1,759-777).
ggaactcgctgctcgaatt

SEQ ID NO: 170988 - DNA, 19 bp, Homo sapiens
  siRNA target sequence for ALS2CR3 (NM_015049.1,843-861).
gggacaagcctttgatcaa

SEQ ID NO: 170989 - DNA, 19 bp, Homo sapiens
  siRNA target sequence for ALS2CR3 (NM_015049.1,845-863).
gacaagcctttgatcaagt

SEQ ID NO: 170990 - DNA, 19 bp, Homo sapiens
  siRNA target sequence for ALS2CR3 (NM_015049.1,907-925).
cgaatcgtctccattgctt

SEQ ID NO: 170991 - DNA, 19 bp, Homo sapiens
  siRNA target sequence for ALS2CR3 (NM_015049.1,912-930).
cgtctccattgcttctgaa

SEQ ID NO: 170992 - DNA, 19 bp, Homo sapiens
  siRNA target sequence for ALS2CR3 (NM_015049.1,961-979).
cctcttcggttcaatgagt

SEQ ID NO: 170993 - DNA, 19 bp, Homo sapiens
  siRNA target sequence for ALS2CR3 (NM_015049.1,967-985).
cggttcaatgagtccttta

SEQ ID NO: 170994 - DNA, 19 bp, Homo sapiens
  siRNA target sequence for ALS2CR3 (NM_015049.1,978-996).
gtcctttagcttatctcaa

SEQ ID NO: 170995 - DNA, 19 bp, Homo sapiens
  siRNA target sequence for ALS2CR3 (NM_015049.1,1067-1085).
ccaaggcttgtcacataaa

SEQ ID NO: 170996 - DNA, 19 bp, Homo sapiens
  siRNA target sequence for ALS2CR3 (NM_015049.1,1071-1089).
ggcttgtcacataaagaca

SEQ ID NO: 170997 - DNA, 19 bp, Homo sapiens
  siRNA target sequence for ALS2CR3 (NM_015049.1,1094-1112).
ctgttacctatgaagaaaa

SEQ ID NO: 170998 - DNA, 19 bp, Homo sapiens
  siRNA target sequence for ALS2CR3 (NM_015049.1,1123-1141).
cttgtcagcgactgtgtta

SEQ ID NO: 170999 - DNA, 19 bp, Homo sapiens
  siRNA target sequence for ALS2CR3 (NM_015049.1,1130-1148).
gcgactgtgttaaagaact

SEQ ID NO: 171000 - DNA, 19 bp, Homo sapiens
  siRNA target sequence for ALS2CR3 (NM_015049.1,1131-1149).
cgactgtgttaaagaactt

SEQ ID NO: 171001 - DNA, 19 bp, Homo sapiens
  siRNA target sequence for ALS2CR3 (NM_015049.1,1202-1220).
gtgatgagctgattcgata

SEQ ID NO: 171002 - DNA, 19 bp, Homo sapiens
  siRNA target sequence for ALS2CR3 (NM_015049.1,1383-1401).
ggagtgtctaggaatgtta

SEQ ID NO: 171003 - DNA, 19 bp, Homo sapiens
  siRNA target sequence for ALS2CR3 (NM_015049.1,1388-1406).
gtctaggaatgttacatga

SEQ ID NO: 171004 - DNA, 19 bp, Homo sapiens
  siRNA target sequence for ALS2CR3 (NM_015049.1,1425-1443).
ggaacttcgtagtagatct

SEQ ID NO: 171005 - DNA, 19 bp, Homo sapiens
  siRNA target sequence for ALS2CR3 (NM_015049.1,1470-1488).
ccaatcatatggagctttt

SEQ ID NO: 171006 - DNA, 19 bp, Homo sapiens
  siRNA target sequence for ALS2CR3 (NM_015049.1,1520-1538).
ggactatgcgtaaaaagct

SEQ ID NO: 171007 - DNA, 19 bp, Homo sapiens
  siRNA target sequence for ALS2CR3 (NM_015049.1,1582-1600).
cagaagcgggtatttgata

SEQ ID NO: 171008 - DNA, 19 bp, Homo sapiens
  siRNA target sequence for ALS2CR3 (NM_015049.1,1807-1825).
ccctcaggagatagtgatt

SEQ ID NO: 171009 - DNA, 19 bp, Homo sapiens
  siRNA target sequence for ALS2CR3 (NM_015049.1,1808-1826).
cctcaggagatagtgattt

SEQ ID NO: 171010 - DNA, 19 bp, Homo sapiens
  siRNA target sequence for ALS2CR3 (NM_015049.1,1835-1853).
cactgcatcgccttagctt

SEQ ID NO: 171011 - DNA, 19 bp, Homo sapiens
  siRNA target sequence for ALS2CR3 (NM_015049.1,1850-1868).
gcttgcgtcgacaaaacta

SEQ ID NO: 171012 - DNA, 19 bp, Homo sapiens
  siRNA target sequence for ALS2CR3 (NM_015049.1,1851-1869).
cttgcgtcgacaaaactat

SEQ ID NO: 171013 - DNA, 19 bp, Homo sapiens
  siRNA target sequence for ALS2CR3 (NM_015049.1,2022-2040).
cagttgccttcgaggtttt

SEQ ID NO: 171014 - DNA, 19 bp, Homo sapiens
  siRNA target sequence for ALS2CR3 (NM_015049.1,2067-2085).
gccccttgaaggatcacaa

SEQ ID NO: 171015 - DNA, 19 bp, Homo sapiens
  siRNA target sequence for ALS2CR3 (NM_015049.1,2068-2086).
ccccttgaaggatcacaaa

SEQ ID NO: 171016 - DNA, 19 bp, Homo sapiens
  siRNA target sequence for ALS2CR3 (NM_015049.1,2078-2096).
gatcacaaactctgtatca

SEQ ID NO: 171017 - DNA, 19 bp, Homo sapiens
  siRNA target sequence for ALS2CR3 (NM_015049.1,2140-2158).
ccacgaccaggtgtcatta

SEQ ID NO: 171018 - DNA, 19 bp, Homo sapiens
  siRNA target sequence for ALS2CR3 (NM_015049.1,2143-2161).
cgaccaggtgtcattacta

SEQ ID NO: 171019 - DNA, 19 bp, Homo sapiens
  siRNA target sequence for ALS2CR3 (NM_015049.1,2144-2162).
gaccaggtgtcattactaa

SEQ ID NO: 171020 - DNA, 19 bp, Homo sapiens
  siRNA target sequence for ALS2CR3 (NM_015049.1,2370-2388).
cctgtcgtgcacaaactca

SEQ ID NO: 171021 - DNA, 19 bp, Homo sapiens
  siRNA target sequence for ALS2CR3 (NM_015049.1,2371-2389).
ctgtcgtgcacaaactcaa

SEQ ID NO: 171022 - DNA, 19 bp, Homo sapiens
  siRNA target sequence for ALS2CR3 (NM_015049.1,2379-2397).
cacaaactcaacattcact

SEQ ID NO: 171023 - DNA, 19 bp, Homo sapiens
  siRNA target sequence for ALS2CR3 (NM_015049.1,2563-2581).
cgacgagattccactacaa

SEQ ID NO: 171024 - DNA, 19 bp, Homo sapiens
  siRNA target sequence for ALS2CR3 (NM_015049.1,2595-2613).
catgagcttggccaaactt

SEQ ID NO: 171025 - DNA, 19 bp, Homo sapiens
  siRNA target sequence for ALS2CR3 (NM_015049.1,2598-2616).
gagcttggccaaacttcta

SEQ ID NO: 171026 - DNA, 19 bp, Homo sapiens
  siRNA target sequence for ALS2CR3 (NM_015049.1,2600-2618).
gcttggccaaacttctaca

SEQ ID NO: 171027 - DNA, 19 bp, Homo sapiens
  siRNA target sequence for ALS2CR3 (NM_015049.1,2601-2619).
cttggccaaacttctacaa

SEQ ID NO: 171028 - DNA, 19 bp, Homo sapiens
  siRNA target sequence for ALS2CR3 (NM_015049.1,2641-2659).
gtgtaccacagcccaattt

SEQ ID NO: 171029 - DNA, 19 bp, Homo sapiens
  siRNA target sequence for ALS2CR3 (NM_015049.1,2643-2661).
gtaccacagcccaatttca

SEQ ID NO: 171030 - DNA, 19 bp, Homo sapiens
  siRNA target sequence for ALS2CR3 (NM_015049.1,2764-2782).
cgagtgcatctctctgaaa

SEQ ID NO: 171031 - DNA, 19 bp, Homo sapiens
  siRNA target sequence for ALS2CR3 (NM_015049.1,2765-2783).
gagtgcatctctctgaaaa

SEQ ID NO: 171032 - DNA, 19 bp, Homo sapiens
  siRNA target sequence for ALS2CR3 (NM_015049.1,2767-2785).
gtgcatctctctgaaaatt

SEQ ID NO: 171033 - DNA, 19 bp, Homo sapiens
  siRNA target sequence for ALS2CR3 (NM_015049.1,2844-2862).
ccggaaccctcctgatgtt

SEQ ID NO: 171034 - DNA, 19 bp, Homo sapiens
  siRNA target sequence for ALS2CR3 (NM_015049.1,2857-2875).
gatgttggccagttgaaga

SEQ ID NO: 171035 - DNA, 19 bp, Homo sapiens
  siRNA target sequence for ALS2CR3 (NM_015049.1,2863-2881).
ggccagttgaagatgaact

SEQ ID NO: 171036 - DNA, 19 bp, Homo sapiens
  siRNA target sequence for ALS2CR3 (NM_015049.1,2864-2882).
gccagttgaagatgaactt

SEQ ID NO: 171037 - DNA, 19 bp, Homo sapiens
  siRNA target sequence for ANGPT1 (NM_001146.3,535-553).
cgccgaagtccagaaaaca

SEQ ID NO: 171038 - DNA, 19 bp, Homo sapiens
  siRNA target sequence for ANGPT1 (NM_001146.3,563-581).
gatataaccggattcaaca

SEQ ID NO: 171039 - DNA, 19 bp, Homo sapiens
  siRNA target sequence for ANGPT1 (NM_001146.3,583-601).
gggcaatgtgcctacactt

SEQ ID NO: 171040 - DNA, 19 bp, Homo sapiens
  siRNA target sequence for ANGPT1 (NM_001146.3,586-604).
caatgtgcctacactttca

SEQ ID NO: 171041 - DNA, 19 bp, Homo sapiens
  siRNA target sequence for ANGPT1 (NM_001146.3,638-656).
gtacgacagaccagtacaa

SEQ ID NO: 171042 - DNA, 19 bp, Homo sapiens
  siRNA target sequence for ANGPT1 (NM_001146.3,644-662).
cagaccagtacaacacaaa

SEQ ID NO: 171043 - DNA, 19 bp, Homo sapiens
  siRNA target sequence for ANGPT1 (NM_001146.3,685-703).
cacgtggaaccggatttct

SEQ ID NO: 171044 - DNA, 19 bp, Homo sapiens
  siRNA target sequence for ANGPT1 (NM_001146.3,687-705).
cgtggaaccggatttctct

SEQ ID NO: 171045 - DNA, 19 bp, Homo sapiens
  siRNA target sequence for ANGPT1 (NM_001146.3,707-725).
cccagaaacttcaacatct

SEQ ID NO: 171046 - DNA, 19 bp, Homo sapiens
  siRNA target sequence for ANGPT1 (NM_001146.3,921-939).
ggtactaaatcaaacttct

SEQ ID NO: 171047 - DNA, 19 bp, Homo sapiens
  siRNA target sequence for ANGPT1 (NM_001146.3,935-953).
cttctcgacttgagataca

SEQ ID NO: 171048 - DNA, 19 bp, Homo sapiens
  siRNA target sequence for ANGPT1 (NM_001146.3,1092-1110).
gttggacaccttaaaggaa

SEQ ID NO: 171049 - DNA, 19 bp, Homo sapiens
  siRNA target sequence for ANGPT1 (NM_001146.3,1098-1116).
caccttaaaggaagagaaa

SEQ ID NO: 171050 - DNA, 19 bp, Homo sapiens
  siRNA target sequence for ANGPT1 (NM_001146.3,1131-1149).
cttggttactcgtcaaaca

SEQ ID NO: 171051 - DNA, 19 bp, Homo sapiens
  siRNA target sequence for ANGPT1 (NM_001146.3,1134-1152).
ggttactcgtcaaacatat

SEQ ID NO: 171052 - DNA, 19 bp, Homo sapiens
  siRNA target sequence for ANGPT1 (NM_001146.3,1135-1153).
gttactcgtcaaacatata

SEQ ID NO: 171053 - DNA, 19 bp, Homo sapiens
  siRNA target sequence for ANGPT1 (NM_001146.3,1142-1160).
gtcaaacatatataatcca

SEQ ID NO: 171054 - DNA, 19 bp, Homo sapiens
  siRNA target sequence for ANGPT1 (NM_001146.3,1263-1281).
cactaaagaaggtgtttta

SEQ ID NO: 171055 - DNA, 19 bp, Homo sapiens
  siRNA target sequence for ANGPT1 (NM_001146.3,1360-1378).
ggaatctacactatttata

SEQ ID NO: 171056 - DNA, 19 bp, Homo sapiens
  siRNA target sequence for ANGPT1 (NM_001146.3,1398-1416).
caaaaaggtgttttgcaat

SEQ ID NO: 171057 - DNA, 19 bp, Homo sapiens
  siRNA target sequence for ANGPT1 (NM_001146.3,1404-1422).
ggtgttttgcaatatggat

SEQ ID NO: 171058 - DNA, 19 bp, Homo sapiens
  siRNA target sequence for ANGPT1 (NM_001146.3,1465-1483).
ggaagtctagatttccaaa

SEQ ID NO: 171059 - DNA, 19 bp, Homo sapiens
  siRNA target sequence for ANGPT1 (NM_001146.3,1565-1583).
ccagtcagaggcagtacat

SEQ ID NO: 171060 - DNA, 19 bp, Homo sapiens
  siRNA target sequence for ANGPT1 (NM_001146.3,1617-1635).
ccgagcctattcacagtat

SEQ ID NO: 171061 - DNA, 19 bp, Homo sapiens
  siRNA target sequence for ANGPT1 (NM_001146.3,1619-1637).
gagcctattcacagtatga

SEQ ID NO: 171062 - DNA, 19 bp, Homo sapiens
  siRNA target sequence for ANGPT1 (NM_001146.3,1621-1639).
gcctattcacagtatgaca

SEQ ID NO: 171063 - DNA, 19 bp, Homo sapiens
  siRNA target sequence for ANGPT1 (NM_001146.3,1636-1654).
gacagattccacataggaa

SEQ ID NO: 171064 - DNA, 19 bp, Homo sapiens
  siRNA target sequence for ANGPT1 (NM_001146.3,1638-1656).
cagattccacataggaaat

SEQ ID NO: 171065 - DNA, 19 bp, Homo sapiens
  siRNA target sequence for ANGPT1 (NM_001146.3,1745-1763).
gcactaaagatgctgataa

SEQ ID NO: 171066 - DNA, 19 bp, Homo sapiens
  siRNA target sequence for ANGPT1 (NM_001146.3,1746-1764).
cactaaagatgctgataat

SEQ ID NO: 171067 - DNA, 19 bp, Homo sapiens
  siRNA target sequence for ANGPT1 (NM_001146.3,1823-1841).
gtggcccctccaatctaaa

SEQ ID NO: 171068 - DNA, 19 bp, Homo sapiens
  siRNA target sequence for ANGPT1 (NM_001146.3,1912-1930).
cccagttactccttacgtt

SEQ ID NO: 171069 - DNA, 19 bp, Homo sapiens
  siRNA target sequence for ANGPT1 (NM_001146.3,1922-1940).
ccttacgttccacaactat

SEQ ID NO: 171070 - DNA, 19 bp, Homo sapiens
  siRNA target sequence for ANGPT1 (NM_001146.3,1927-1945).
cgttccacaactatgatga

SEQ ID NO: 171071 - DNA, 19 bp, Homo sapiens
  siRNA target sequence for ANGPT1 (NM_001146.3,1928-1946).
gttccacaactatgatgat

SEQ ID NO: 171072 - DNA, 19 bp, Homo sapiens
  siRNA target sequence for ANGPT2 (NM_001147.1,395-413).
gccgcagcctataacaact

SEQ ID NO: 171073 - DNA, 19 bp, Homo sapiens
  siRNA target sequence for ANGPT2 (NM_001147.1,396-414).
ccgcagcctataacaactt

SEQ ID NO: 171074 - DNA, 19 bp, Homo sapiens
  siRNA target sequence for ANGPT2 (NM_001147.1,464-482).
gggtcctgcagctacactt

SEQ ID NO: 171075 - DNA, 19 bp, Homo sapiens
  siRNA target sequence for ANGPT2 (NM_001147.1,706-724).
ccagacggctgtgatgata

SEQ ID NO: 171076 - DNA, 19 bp, Homo sapiens
  siRNA target sequence for ANGPT2 (NM_001147.1,709-727).
gacggctgtgatgatagaa

SEQ ID NO: 171077 - DNA, 19 bp, Homo sapiens
  siRNA target sequence for ANGPT2 (NM_001147.1,758-776).
gagcaaacgcggaagttaa

SEQ ID NO: 171078 - DNA, 19 bp, Homo sapiens
  siRNA target sequence for ANGPT2 (NM_001147.1,760-778).
gcaaacgcggaagttaact

SEQ ID NO: 171079 - DNA, 19 bp, Homo sapiens
  siRNA target sequence for ANGPT2 (NM_001147.1,805-823).
gaccacgagacttgaactt

SEQ ID NO: 171080 - DNA, 19 bp, Homo sapiens
  siRNA target sequence for ANGPT2 (NM_001147.1,807-825).
ccacgagacttgaacttca

SEQ ID NO: 171081 - DNA, 19 bp, Homo sapiens
  siRNA target sequence for ANGPT2 (NM_001147.1,836-854).
cactccctctcgacaaaca

SEQ ID NO: 171082 - DNA, 19 bp, Homo sapiens
  siRNA target sequence for ANGPT2 (NM_001147.1,958-976).
catccaactacagtcaata

SEQ ID NO: 171083 - DNA, 19 bp, Homo sapiens
  siRNA target sequence for ANGPT2 (NM_001147.1,992-1010).
cagctacaggtgttagtat

SEQ ID NO: 171084 - DNA, 19 bp, Homo sapiens
  siRNA target sequence for ANGPT2 (NM_001147.1,1052-1070).
gtgactgccacggtgaata

SEQ ID NO: 171085 - DNA, 19 bp, Homo sapiens
  siRNA target sequence for ANGPT2 (NM_001147.1,1059-1077).
ccacggtgaataattcagt

SEQ ID NO: 171086 - DNA, 19 bp, Homo sapiens
  siRNA target sequence for ANGPT2 (NM_001147.1,1060-1078).
cacggtgaataattcagtt

SEQ ID NO: 171087 - DNA, 19 bp, Homo sapiens
  siRNA target sequence for ANGPT2 (NM_001147.1,1063-1081).
ggtgaataattcagttctt

SEQ ID NO: 171088 - DNA, 19 bp, Homo sapiens
  siRNA target sequence for ANGPT2 (NM_001147.1,1100-1118).
ctcatggagacagttaata

SEQ ID NO: 171089 - DNA, 19 bp, Homo sapiens
  siRNA target sequence for ANGPT2 (NM_001147.1,1128-1146).
ctatgatgtccacatcaaa

SEQ ID NO: 171090 - DNA, 19 bp, Homo sapiens
  siRNA target sequence for ANGPT2 (NM_001147.1,1156-1174).
ggaccccactgttgctaaa

SEQ ID NO: 171091 - DNA, 19 bp, Homo sapiens
  siRNA target sequence for ANGPT2 (NM_001147.1,1161-1179).
ccactgttgctaaagaaga

SEQ ID NO: 171092 - DNA, 19 bp, Homo sapiens
  siRNA target sequence for ANGPT2 (NM_001147.1,1192-1210).
cagagactgtgctgaagta

SEQ ID NO: 171093 - DNA, 19 bp, Homo sapiens
  siRNA target sequence for ANGPT2 (NM_001147.1,1194-1212).
gagactgtgctgaagtatt

SEQ ID NO: 171094 - DNA, 19 bp, Homo sapiens
  siRNA target sequence for ANGPT2 (NM_001147.1,1235-1253).
ggcatctacacgttaacat

SEQ ID NO: 171095 - DNA, 19 bp, Homo sapiens
  siRNA target sequence for ANGPT2 (NM_001147.1,1236-1254).
gcatctacacgttaacatt

SEQ ID NO: 171096 - DNA, 19 bp, Homo sapiens
  siRNA target sequence for ANGPT2 (NM_001147.1,1305-1323).
gaggcgggtggacaattat

SEQ ID NO: 171097 - DNA, 19 bp, Homo sapiens
  siRNA target sequence for ANGPT2 (NM_001147.1,1308-1326).
gcgggtggacaattattca

SEQ ID NO: 171098 - DNA, 19 bp, Homo sapiens
  siRNA target sequence for ANGPT2 (NM_001147.1,1334-1352).
gaggatggcagcgttgatt

SEQ ID NO: 171099 - DNA, 19 bp, Homo sapiens
  siRNA target sequence for ANGPT2 (NM_001147.1,1336-1354).
ggatggcagcgttgatttt

SEQ ID NO: 171100 - DNA, 19 bp, Homo sapiens
  siRNA target sequence for ANGPT2 (NM_001147.1,1389-1407).
gtaacccttcaggagaata

SEQ ID NO: 171101 - DNA, 19 bp, Homo sapiens
  siRNA target sequence for ANGPT2 (NM_001147.1,1447-1465).
gcaacgctatgtgcttaaa

SEQ ID NO: 171102 - DNA, 19 bp, Homo sapiens
  siRNA target sequence for ANGPT2 (NM_001147.1,1448-1466).
caacgctatgtgcttaaaa

SEQ ID NO: 171103 - DNA, 19 bp, Homo sapiens
  siRNA target sequence for ANGPT2 (NM_001147.1,1487-1505).
gggaatgaggcttactcat

SEQ ID NO: 171104 - DNA, 19 bp, Homo sapiens
  siRNA target sequence for ANGPT2 (NM_001147.1,1488-1506).
ggaatgaggcttactcatt

SEQ ID NO: 171105 - DNA, 19 bp, Homo sapiens
  siRNA target sequence for ANGPT2 (NM_001147.1,1497-1515).
cttactcattgtatgaaca

SEQ ID NO: 171106 - DNA, 19 bp, Homo sapiens
  siRNA target sequence for ANGPT2 (NM_001147.1,1519-1537).
ctatctctcaagtgaagaa

SEQ ID NO: 171107 - DNA, 19 bp, Homo sapiens
  siRNA target sequence for ANGPT2 (NM_001147.1,1569-1587).
cagggacagccggcaaaat

SEQ ID NO: 171108 - DNA, 19 bp, Homo sapiens
  siRNA target sequence for ANGPT2 (NM_001147.1,1571-1589).
gggacagccggcaaaataa

SEQ ID NO: 171109 - DNA, 19 bp, Homo sapiens
  siRNA target sequence for ANGPT2 (NM_001147.1,1698-1716).
gtggtccttccaacttgaa

SEQ ID NO: 171110 - DNA, 19 bp, Homo sapiens
  siRNA target sequence for ANGPT2 (NM_001147.1,1739-1757).
cagaacacaaataagttca

SEQ ID NO: 171111 - DNA, 19 bp, Homo sapiens
  siRNA target sequence for ANGPTL1 (NM_004673.3,493-511).
ggaccctaggtgtgctatt

SEQ ID NO: 171112 - DNA, 19 bp, Homo sapiens
  siRNA target sequence for ANGPTL1 (NM_004673.3,541-559).
gaggtggacaattcaaaat

SEQ ID NO: 171113 - DNA, 19 bp, Homo sapiens
  siRNA target sequence for ANGPTL1 (NM_004673.3,543-561).
ggtggacaattcaaaatta

SEQ ID NO: 171114 - DNA, 19 bp, Homo sapiens
  siRNA target sequence for ANGPTL1 (NM_004673.3,586-604).
ctcgtgccacagatggtaa

SEQ ID NO: 171115 - DNA, 19 bp, Homo sapiens
  siRNA target sequence for ANGPTL1 (NM_004673.3,638-656).
ggtacctgaacaaagaata

SEQ ID NO: 171116 - DNA, 19 bp, Homo sapiens
  siRNA target sequence for ANGPTL1 (NM_004673.3,835-853).
gaaaggaaagccgtaacat

SEQ ID NO: 171117 - DNA, 19 bp, Homo sapiens
  siRNA target sequence for ANGPTL1 (NM_004673.3,851-869).
catgaactctcgtgttact

SEQ ID NO: 171118 - DNA, 19 bp, Homo sapiens
  siRNA target sequence for ANGPTL1 (NM_004673.3,854-872).
gaactctcgtgttactcaa

SEQ ID NO: 171119 - DNA, 19 bp, Homo sapiens
  siRNA target sequence for ANGPTL1 (NM_004673.3,859-877).
ctcgtgttactcaactcta

SEQ ID NO: 171120 - DNA, 19 bp, Homo sapiens
  siRNA target sequence for ANGPTL1 (NM_004673.3,861-879).
cgtgttactcaactctata

SEQ ID NO: 171121 - DNA, 19 bp, Homo sapiens
  siRNA target sequence for ANGPTL1 (NM_004673.3,862-880).
gtgttactcaactctatat

SEQ ID NO: 171122 - DNA, 19 bp, Homo sapiens
  siRNA target sequence for ANGPTL1 (NM_004673.3,881-899).
gcaattattacatgagatt

SEQ ID NO: 171123 - DNA, 19 bp, Homo sapiens
  siRNA target sequence for ANGPTL1 (NM_004673.3,908-926).
gagggataattcacttgaa

SEQ ID NO: 171124 - DNA, 19 bp, Homo sapiens
  siRNA target sequence for ANGPTL1 (NM_004673.3,957-975).
gtcaccacagaaatgttga

SEQ ID NO: 171125 - DNA, 19 bp, Homo sapiens
  siRNA target sequence for ANGPTL1 (NM_004673.3,994-1012).
gggaactagaggtgaaata

SEQ ID NO: 171126 - DNA, 19 bp, Homo sapiens
  siRNA target sequence for ANGPTL1 (NM_004673.3,1013-1031).
cgcttccttgactgatctt

SEQ ID NO: 171127 - DNA, 19 bp, Homo sapiens
  siRNA target sequence for ANGPTL1 (NM_004673.3,1026-1044).
gatcttgtcaataaccaat

SEQ ID NO: 171128 - DNA, 19 bp, Homo sapiens
  siRNA target sequence for ANGPTL1 (NM_004673.3,1041-1059).
caatctgtgatgatcactt

SEQ ID NO: 171129 - DNA, 19 bp, Homo sapiens
  siRNA target sequence for ANGPTL1 (NM_004673.3,1068-1086).
gaacagtgcttgaggatat

SEQ ID NO: 171130 - DNA, 19 bp, Homo sapiens
  siRNA target sequence for ANGPTL1 (NM_004673.3,1071-1089).
cagtgcttgaggatatttt

SEQ ID NO: 171131 - DNA, 19 bp, Homo sapiens
  siRNA target sequence for ANGPTL1 (NM_004673.3,1124-1142).
ccaggtggtgccacaacat

SEQ ID NO: 171132 - DNA, 19 bp, Homo sapiens
  siRNA target sequence for ANGPTL1 (NM_004673.3,1125-1143).
caggtggtgccacaacata

SEQ ID NO: 171133 - DNA, 19 bp, Homo sapiens
  siRNA target sequence for ANGPTL1 (NM_004673.3,1127-1145).
ggtggtgccacaacatatt

SEQ ID NO: 171134 - DNA, 19 bp, Homo sapiens
  siRNA target sequence for ANGPTL1 (NM_004673.3,1146-1164).
cctaacagccaacagtata

SEQ ID NO: 171135 - DNA, 19 bp, Homo sapiens
  siRNA target sequence for ANGPTL1 (NM_004673.3,1179-1197).
ggaggtaacgagattcaga

SEQ ID NO: 171136 - DNA, 19 bp, Homo sapiens
  siRNA target sequence for ANGPTL1 (NM_004673.3,1204-1222).
caggttatcccagagattt

SEQ ID NO: 171137 - DNA, 19 bp, Homo sapiens
  siRNA target sequence for ANGPTL1 (NM_004673.3,1242-1260).
gcaacttctcccaccaaaa

SEQ ID NO: 171138 - DNA, 19 bp, Homo sapiens
  siRNA target sequence for ANGPTL1 (NM_004673.3,1275-1293).
ccaccggtaactttcatca

SEQ ID NO: 171139 - DNA, 19 bp, Homo sapiens
  siRNA target sequence for ANGPTL1 (NM_004673.3,1276-1294).
caccggtaactttcatcaa

SEQ ID NO: 171140 - DNA, 19 bp, Homo sapiens
  siRNA target sequence for ANGPTL1 (NM_004673.3,1279-1297).
cggtaactttcatcaatga

SEQ ID NO: 171141 - DNA, 19 bp, Homo sapiens
  siRNA target sequence for ANGPTL1 (NM_004673.3,1280-1298).
ggtaactttcatcaatgaa

SEQ ID NO: 171142 - DNA, 19 bp, Homo sapiens
  siRNA target sequence for ANGPTL1 (NM_004673.3,1292-1310).
caatgaaggaccattcaaa

SEQ ID NO: 171143 - DNA, 19 bp, Homo sapiens
  siRNA target sequence for ANGPTL1 (NM_004673.3,1394-1412).
gttatggtgtgaaaacagt

SEQ ID NO: 171144 - DNA, 19 bp, Homo sapiens
  siRNA target sequence for ANGPTL1 (NM_004673.3,1420-1438).
ctgggggttggactgttat

SEQ ID NO: 171145 - DNA, 19 bp, Homo sapiens
  siRNA target sequence for ANGPTL1 (NM_004673.3,1423-1441).
ggggttggactgttattca

SEQ ID NO: 171146 - DNA, 19 bp, Homo sapiens
  siRNA target sequence for ANGPTL1 (NM_004673.3,1450-1468).
cagacggctctgtcaactt

SEQ ID NO: 171147 - DNA, 19 bp, Homo sapiens
  siRNA target sequence for ANGPTL1 (NM_004673.3,1525-1543).
ggcttggactggaaaatat

SEQ ID NO: 171148 - DNA, 19 bp, Homo sapiens
  siRNA target sequence for ANGPTL1 (NM_004673.3,1544-1562).
ctatatgcttagcaatcaa

SEQ ID NO: 171149 - DNA, 19 bp, Homo sapiens
  siRNA target sequence for ANGPTL1 (NM_004673.3,1550-1568).
gcttagcaatcaagataat

SEQ ID NO: 171150 - DNA, 19 bp, Homo sapiens
  siRNA target sequence for ANGPTL1 (NM_004673.3,1563-1581).
gataattacaagttattga

SEQ ID NO: 171151 - DNA, 19 bp, Homo sapiens
  siRNA target sequence for ANGPTL1 (NM_004673.3,1571-1589).
caagttattgattgaatta

SEQ ID NO: 171152 - DNA, 19 bp, Homo sapiens
  siRNA target sequence for ANGPTL1 (NM_004673.3,1598-1616).
gagtgataaaaaagtctat

SEQ ID NO: 171153 - DNA, 19 bp, Homo sapiens
  siRNA target sequence for ANGPTL1 (NM_004673.3,1644-1662).
cctgaaagtgaattctata

SEQ ID NO: 171154 - DNA, 19 bp, Homo sapiens
  siRNA target sequence for ANGPTL1 (NM_004673.3,1686-1704).
ggaaatgcaggggattcta

SEQ ID NO: 171155 - DNA, 19 bp, Homo sapiens
  siRNA target sequence for ANGPTL1 (NM_004673.3,1692-1710).
gcaggggattctatgatgt

SEQ ID NO: 171156 - DNA, 19 bp, Homo sapiens
  siRNA target sequence for ANGPTL1 (NM_004673.3,1709-1727).
gtggcataatggtaaacaa

SEQ ID NO: 171157 - DNA, 19 bp, Homo sapiens
  siRNA target sequence for ANGPTL1 (NM_004673.3,1711-1729).
ggcataatggtaaacaatt

SEQ ID NO: 171158 - DNA, 19 bp, Homo sapiens
  siRNA target sequence for ANGPTL1 (NM_004673.3,1765-1783).
gaaactgcgcccactttca

SEQ ID NO: 171159 - DNA, 19 bp, Homo sapiens
  siRNA target sequence for ANGPTL1 (NM_004673.3,1769-1787).
ctgcgcccactttcataaa

SEQ ID NO: 171160 - DNA, 19 bp, Homo sapiens
  siRNA target sequence for ANGPTL1 (NM_004673.3,1810-1828).
gtgcacattctaacctaaa

SEQ ID NO: 171161 - DNA, 19 bp, Homo sapiens
  siRNA target sequence for ANGPTL1 (NM_004673.3,1841-1859).
cagaggaggccattacaga

SEQ ID NO: 171162 - DNA, 19 bp, Homo sapiens
  siRNA target sequence for ANGPTL1 (NM_004673.3,1899-1917).
ggcgggtcatactccttaa

SEQ ID NO: 171163 - DNA, 19 bp, Homo sapiens
  siRNA target sequence for ANGPTL1 (NM_004673.3,1901-1919).
cgggtcatactccttaaga

SEQ ID NO: 171164 - DNA, 19 bp, Homo sapiens
  siRNA target sequence for ANGPTL2 (NM_012098.2,565-583).
gccaggaggacggttttga

SEQ ID NO: 171165 - DNA, 19 bp, Homo sapiens
  siRNA target sequence for ANGPTL2 (NM_012098.2,598-616).
gctcgccaagagagttcat

SEQ ID NO: 171166 - DNA, 19 bp, Homo sapiens
  siRNA target sequence for ANGPTL2 (NM_012098.2,599-617).
ctcgccaagagagttcatt

SEQ ID NO: 171167 - DNA, 19 bp, Homo sapiens
  siRNA target sequence for ANGPTL2 (NM_012098.2,609-627).
gagttcatttacctaaaca

SEQ ID NO: 171168 - DNA, 19 bp, Homo sapiens
  siRNA target sequence for ANGPTL2 (NM_012098.2,764-782).
gctagagctgctcaacaat

SEQ ID NO: 171169 - DNA, 19 bp, Homo sapiens
  siRNA target sequence for ANGPTL2 (NM_012098.2,898-916).
gggtcacgcagctctacat

SEQ ID NO: 171170 - DNA, 19 bp, Homo sapiens
  siRNA target sequence for ANGPTL2 (NM_012098.2,1464-1482).
cgcctggatggctctgtta

SEQ ID NO: 171171 - DNA, 19 bp, Homo sapiens
  siRNA target sequence for ANGPTL2 (NM_012098.2,1659-1677).
gaacctgagagcgagtatt

SEQ ID NO: 171172 - DNA, 19 bp, Homo sapiens
  siRNA target sequence for ANGPTL2 (NM_012098.2,1662-1680).
cctgagagcgagtattata

SEQ ID NO: 171173 - DNA, 19 bp, Homo sapiens
  siRNA target sequence for ANGPTL2 (NM_012098.2,1663-1681).
ctgagagcgagtattataa

SEQ ID NO: 171174 - DNA, 19 bp, Homo sapiens
  siRNA target sequence for ANGPTL2 (NM_012098.2,1913-1931).
ccgaggaggctcttactca

SEQ ID NO: 171175 - DNA, 19 bp, Homo sapiens
  siRNA target sequence for ANGPTL2 (NM_012098.2,1921-1939).
gctcttactcactcaagaa

SEQ ID NO: 171176 - DNA, 19 bp, Homo sapiens
  siRNA target sequence for ANGPTL2 (NM_012098.2,1922-1940).
ctcttactcactcaagaaa

SEQ ID NO: 171177 - DNA, 19 bp, Homo sapiens
  siRNA target sequence for ANGPTL2 (NM_012098.2,1924-1942).
cttactcactcaagaaagt

SEQ ID NO: 171178 - DNA, 19 bp, Homo sapiens
  siRNA target sequence for APOB (NM_000384.1,236-254).
cctggtctgtccaaaagat

SEQ ID NO: 171179 - DNA, 19 bp, Homo sapiens
  siRNA target sequence for APOB (NM_000384.1,270-288).
cacctccggaagtacacat

SEQ ID NO: 171180 - DNA, 19 bp, Homo sapiens
  siRNA target sequence for APOB (NM_000384.1,273-291).
ctccggaagtacacataca

SEQ ID NO: 171181 - DNA, 19 bp, Homo sapiens
  siRNA target sequence for APOB (NM_000384.1,321-339).
cctgggactgctgattcaa

SEQ ID NO: 171182 - DNA, 19 bp, Homo sapiens
  siRNA target sequence for APOB (NM_000384.1,541-559).
ggaagcaggttttccttta

SEQ ID NO: 171183 - DNA, 19 bp, Homo sapiens
  siRNA target sequence for APOB (NM_000384.1,646-664).
ccaagcaagtgttgtttct

SEQ ID NO: 171184 - DNA, 19 bp, Homo sapiens
  siRNA target sequence for APOB (NM_000384.1,663-681).
ctggataccgtgtatggaa

SEQ ID NO: 171185 - DNA, 19 bp, Homo sapiens
  siRNA target sequence for APOB (NM_000384.1,716-734).
gggcaatgtggcaacagaa

SEQ ID NO: 171186 - DNA, 19 bp, Homo sapiens
  siRNA target sequence for APOB (NM_000384.1,796-814).
gcccacttgctctcatcaa

SEQ ID NO: 171187 - DNA, 19 bp, Homo sapiens
  siRNA target sequence for APOB (NM_000384.1,797-815).
cccacttgctctcatcaaa

SEQ ID NO: 171188 - DNA, 19 bp, Homo sapiens
  siRNA target sequence for APOB (NM_000384.1,967-985).
cacaagtgacacagacttt

SEQ ID NO: 171189 - DNA, 19 bp, Homo sapiens
  siRNA target sequence for APOB (NM_000384.1,1007-1025).
gatcaacagccgcttcttt

SEQ ID NO: 171190 - DNA, 19 bp, Homo sapiens
  siRNA target sequence for APOB (NM_000384.1,1027-1045).
gtgaaggtactaagaagat

SEQ ID NO: 171191 - DNA, 19 bp, Homo sapiens
  siRNA target sequence for APOB (NM_000384.1,1157-1175).
gagagctaatctcttcaat

SEQ ID NO: 171192 - DNA, 19 bp, Homo sapiens
  siRNA target sequence for APOB (NM_000384.1,1159-1177).
gagctaatctcttcaataa

SEQ ID NO: 171193 - DNA, 19 bp, Homo sapiens
  siRNA target sequence for APOB (NM_000384.1,1193-1211).
gagaggcctcagtgatgaa

SEQ ID NO: 171194 - DNA, 19 bp, Homo sapiens
  siRNA target sequence for APOB (NM_000384.1,1465-1483).
gccacgcggtcaacaacta

SEQ ID NO: 171195 - DNA, 19 bp, Homo sapiens
  siRNA target sequence for APOB (NM_000384.1,1466-1484).
ccacgcggtcaacaactat

SEQ ID NO: 171196 - DNA, 19 bp, Homo sapiens
  siRNA target sequence for APOB (NM_000384.1,1469-1487).
cgcggtcaacaactatcat

SEQ ID NO: 171197 - DNA, 19 bp, Homo sapiens
  siRNA target sequence for APOB (NM_000384.1,1470-1488).
gcggtcaacaactatcata

SEQ ID NO: 171198 - DNA, 19 bp, Homo sapiens
  siRNA target sequence for APOB (NM_000384.1,1471-1489).
cggtcaacaactatcataa

SEQ ID NO: 171199 - DNA, 19 bp, Homo sapiens
  siRNA target sequence for APOB (NM_000384.1,1475-1493).
caacaactatcataagaca

SEQ ID NO: 171200 - DNA, 19 bp, Homo sapiens
  siRNA target sequence for APOB (NM_000384.1,1800-1818).
cgactggctgcctatctta

SEQ ID NO: 171201 - DNA, 19 bp, Homo sapiens
  siRNA target sequence for APOB (NM_000384.1,1801-1819).
gactggctgcctatcttat

SEQ ID NO: 171202 - DNA, 19 bp, Homo sapiens
  siRNA target sequence for APOB (NM_000384.1,1806-1824).
gctgcctatcttatgttga

SEQ ID NO: 171203 - DNA, 19 bp, Homo sapiens
  siRNA target sequence for APOB (NM_000384.1,1809-1827).
gcctatcttatgttgatga

SEQ ID NO: 171204 - DNA, 19 bp, Homo sapiens
  siRNA target sequence for APOB (NM_000384.1,1831-1849).
gtccttcacaggcagatat

SEQ ID NO: 171205 - DNA, 19 bp, Homo sapiens
  siRNA target sequence for APOB (NM_000384.1,1837-1855).
cacaggcagatattaacaa

SEQ ID NO: 171206 - DNA, 19 bp, Homo sapiens
  siRNA target sequence for APOB (NM_000384.1,1853-1871).
caaaattgtccaaattcta

SEQ ID NO: 171207 - DNA, 19 bp, Homo sapiens
  siRNA target sequence for APOB (NM_000384.1,1912-1930).
cccatattgccaatatctt

SEQ ID NO: 171208 - DNA, 19 bp, Homo sapiens
  siRNA target sequence for APOB (NM_000384.1,1931-1949).
gaactcagaagaattggat

SEQ ID NO: 171209 - DNA, 19 bp, Homo sapiens
  siRNA target sequence for APOB (NM_000384.1,1947-1965).
gatatccaagatctgaaaa

SEQ ID NO: 171210 - DNA, 19 bp, Homo sapiens
  siRNA target sequence for APOB (NM_000384.1,2005-2023).
ctgtcatggacttcagaaa

SEQ ID NO: 171211 - DNA, 19 bp, Homo sapiens
  siRNA target sequence for APOB (NM_000384.1,2029-2047).
ctcggaactatcaactcta

SEQ ID NO: 171212 - DNA, 19 bp, Homo sapiens
  siRNA target sequence for APOB (NM_000384.1,2036-2054).
ctatcaactctacaaatct

SEQ ID NO: 171213 - DNA, 19 bp, Homo sapiens
  siRNA target sequence for APOB (NM_000384.1,2116-2134).
caaataactaccttcctaa

SEQ ID NO: 171214 - DNA, 19 bp, Homo sapiens
  siRNA target sequence for APOB (NM_000384.1,2216-2234).
ctttgagccaacattggaa

SEQ ID NO: 171215 - DNA, 19 bp, Homo sapiens
  siRNA target sequence for APOB (NM_000384.1,2224-2242).
caacattggaagctctttt

SEQ ID NO: 171216 - DNA, 19 bp, Homo sapiens
  siRNA target sequence for APOB (NM_000384.1,2314-2332).
gtgtctctaaggtcttagt

SEQ ID NO: 171217 - DNA, 19 bp, Homo sapiens
  siRNA target sequence for APOB (NM_000384.1,2334-2352).
gaccactttggctatacca

SEQ ID NO: 171218 - DNA, 19 bp, Homo sapiens
  siRNA target sequence for APOB (NM_000384.1,2336-2354).
ccactttggctataccaaa

SEQ ID NO: 171219 - DNA, 19 bp, Homo sapiens
  siRNA target sequence for APOB (NM_000384.1,2339-2357).
ctttggctataccaaagat

SEQ ID NO: 171220 - DNA, 19 bp, Homo sapiens
  siRNA target sequence for APOB (NM_000384.1,2343-2361).
ggctataccaaagatgata

SEQ ID NO: 171221 - DNA, 19 bp, Homo sapiens
  siRNA target sequence for APOB (NM_000384.1,2398-2416).
gtgttgagaagctgattaa

SEQ ID NO: 171222 - DNA, 19 bp, Homo sapiens
  siRNA target sequence for APOB (NM_000384.1,2549-2567).
ggggatcccccagatgatt

SEQ ID NO: 171223 - DNA, 19 bp, Homo sapiens
  siRNA target sequence for APOB (NM_000384.1,2586-2604).
ggctcaaagaatgactttt

SEQ ID NO: 171224 - DNA, 19 bp, Homo sapiens
  siRNA target sequence for APOB (NM_000384.1,2655-2673).
ggattacagttgcaaatat

SEQ ID NO: 171225 - DNA, 19 bp, Homo sapiens
  siRNA target sequence for APOB (NM_000384.1,2663-2681).
gttgcaaatatcttcatct

SEQ ID NO: 171226 - DNA, 19 bp, Homo sapiens
  siRNA target sequence for APOB (NM_000384.1,2815-2833).
ggagtggggtccagatgaa

SEQ ID NO: 171227 - DNA, 19 bp, Homo sapiens
  siRNA target sequence for APOB (NM_000384.1,2940-2958).
ggaggcaacacattacatt

SEQ ID NO: 171228 - DNA, 19 bp, Homo sapiens
  siRNA target sequence for APOB (NM_000384.1,2941-2959).
gaggcaacacattacattt

SEQ ID NO: 171229 - DNA, 19 bp, Homo sapiens
  siRNA target sequence for APOB (NM_000384.1,2981-2999).
ggtgatcccacctctcatt

SEQ ID NO: 171230 - DNA, 19 bp, Homo sapiens
  siRNA target sequence for APOB (NM_000384.1,3113-3131).
gaccggggacaccagatta

SEQ ID NO: 171231 - DNA, 19 bp, Homo sapiens
  siRNA target sequence for APOB (NM_000384.1,3115-3133).
ccggggacaccagattaga

SEQ ID NO: 171232 - DNA, 19 bp, Homo sapiens
  siRNA target sequence for APOB (NM_000384.1,3143-3161).
gaggcctacaggagagatt

SEQ ID NO: 171233 - DNA, 19 bp, Homo sapiens
  siRNA target sequence for APOB (NM_000384.1,3224-3242).
cctgaagtttgtaactcaa

SEQ ID NO: 171234 - DNA, 19 bp, Homo sapiens
  siRNA target sequence for APOB (NM_000384.1,3262-3280).
ctgaggctaccatgacatt

SEQ ID NO: 171235 - DNA, 19 bp, Homo sapiens
  siRNA target sequence for APOB (NM_000384.1,3266-3284).
ggctaccatgacattcaaa

SEQ ID NO: 171236 - DNA, 19 bp, Homo sapiens
  siRNA target sequence for APOB (NM_000384.1,3267-3285).
gctaccatgacattcaaat

SEQ ID NO: 171237 - DNA, 19 bp, Homo sapiens
  siRNA target sequence for APOB (NM_000384.1,3268-3286).
ctaccatgacattcaaata

SEQ ID NO: 171238 - DNA, 19 bp, Homo sapiens
  siRNA target sequence for APOB (NM_000384.1,3271-3289).
ccatgacattcaaatataa

SEQ ID NO: 171239 - DNA, 19 bp, Homo sapiens
  siRNA target sequence for APOB (NM_000384.1,3381-3399).
gagggcaaaacgtcttaca

SEQ ID NO: 171240 - DNA, 19 bp, Homo sapiens
  siRNA target sequence for APOB (NM_000384.1,3444-3462).
ctcatgggccacctaagtt

SEQ ID NO: 171241 - DNA, 19 bp, Homo sapiens
  siRNA target sequence for APOB (NM_000384.1,3446-3464).
catgggccacctaagttgt

SEQ ID NO: 171242 - DNA, 19 bp, Homo sapiens
  siRNA target sequence for APOB (NM_000384.1,3581-3599).
ctcatctgctacagcttat

SEQ ID NO: 171243 - DNA, 19 bp, Homo sapiens
  siRNA target sequence for APOB (NM_000384.1,3594-3612).
gcttatggctccacagttt

SEQ ID NO: 171244 - DNA, 19 bp, Homo sapiens
  siRNA target sequence for APOB (NM_000384.1,3617-3635).
gagggtggcatggcattat

SEQ ID NO: 171245 - DNA, 19 bp, Homo sapiens
  siRNA target sequence for APOB (NM_000384.1,3623-3641).
ggcatggcattatgatgaa

SEQ ID NO: 171246 - DNA, 19 bp, Homo sapiens
  siRNA target sequence for APOB (NM_000384.1,3662-3680).
gaacacaggcaccaatgta

SEQ ID NO: 171247 - DNA, 19 bp, Homo sapiens
  siRNA target sequence for APOB (NM_000384.1,3670-3688).
gcaccaatgtagataccaa

SEQ ID NO: 171248 - DNA, 19 bp, Homo sapiens
  siRNA target sequence for APOB (NM_000384.1,3681-3699).
gataccaaaaaaatgactt

SEQ ID NO: 171249 - DNA, 19 bp, Homo sapiens
  siRNA target sequence for APOB (NM_000384.1,3686-3704).
caaaaaaatgacttccaat

SEQ ID NO: 171250 - DNA, 19 bp, Homo sapiens
  siRNA target sequence for APOB (NM_000384.1,3713-3731).
ggatctctccgattatcct

SEQ ID NO: 171251 - DNA, 19 bp, Homo sapiens
  siRNA target sequence for APOB (NM_000384.1,3730-3748).
ctaagagcttgcatatgta

SEQ ID NO: 171252 - DNA, 19 bp, Homo sapiens
  siRNA target sequence for APOB (NM_000384.1,3797-3815).
ccggcacgtgggttccaaa

SEQ ID NO: 171253 - DNA, 19 bp, Homo sapiens
  siRNA target sequence for APOB (NM_000384.1,3798-3816).
cggcacgtgggttccaaat

SEQ ID NO: 171254 - DNA, 19 bp, Homo sapiens
  siRNA target sequence for APOB (NM_000384.1,3799-3817).
ggcacgtgggttccaaatt

SEQ ID NO: 171255 - DNA, 19 bp, Homo sapiens
  siRNA target sequence for APOB (NM_000384.1,3800-3818).
gcacgtgggttccaaatta

SEQ ID NO: 171256 - DNA, 19 bp, Homo sapiens
  siRNA target sequence for APOB (NM_000384.1,3801-3819).
cacgtgggttccaaattaa

SEQ ID NO: 171257 - DNA, 19 bp, Homo sapiens
  siRNA target sequence for APOB (NM_000384.1,3803-3821).
cgtgggttccaaattaata

SEQ ID NO: 171258 - DNA, 19 bp, Homo sapiens
  siRNA target sequence for APOB (NM_000384.1,3811-3829).
ccaaattaatagttgcaat

SEQ ID NO: 171259 - DNA, 19 bp, Homo sapiens
  siRNA target sequence for APOB (NM_000384.1,3947-3965).
cccagaaaacctcttctta

SEQ ID NO: 171260 - DNA, 19 bp, Homo sapiens
  siRNA target sequence for APOB (NM_000384.1,3981-3999).
gtcaaatataccttgaaca

SEQ ID NO: 171261 - DNA, 19 bp, Homo sapiens
  siRNA target sequence for APOB (NM_000384.1,4029-4047).
ccttttggtggcaaatcct

SEQ ID NO: 171262 - DNA, 19 bp, Homo sapiens
  siRNA target sequence for APOB (NM_000384.1,4130-4148).
gttccaagtccctactttt

SEQ ID NO: 171263 - DNA, 19 bp, Homo sapiens
  siRNA target sequence for APOB (NM_000384.1,4134-4152).
caagtccctacttttacca

SEQ ID NO: 171264 - DNA, 19 bp, Homo sapiens
  siRNA target sequence for APOB (NM_000384.1,4151-4169).
cattcccaagttgtatcaa

SEQ ID NO: 171265 - DNA, 19 bp, Homo sapiens
  siRNA target sequence for APOB (NM_000384.1,4180-4198).
ctctcctgggtgttctaga

SEQ ID NO: 171266 - DNA, 19 bp, Homo sapiens
  siRNA target sequence for APOB (NM_000384.1,4285-4303).
gggctcgttaccacatgaa

SEQ ID NO: 171267 - DNA, 19 bp, Homo sapiens
  siRNA target sequence for APOB (NM_000384.1,4373-4391).
gaatacgttcacactatca

SEQ ID NO: 171268 - DNA, 19 bp, Homo sapiens
  siRNA target sequence for APOB (NM_000384.1,4399-4417).
ggtctctacgccacaaatt

SEQ ID NO: 171269 - DNA, 19 bp, Homo sapiens
  siRNA target sequence for APOB (NM_000384.1,4400-4418).
gtctctacgccacaaattt

SEQ ID NO: 171270 - DNA, 19 bp, Homo sapiens
  siRNA target sequence for APOB (NM_000384.1,4402-4420).
ctctacgccacaaatttct

SEQ ID NO: 171271 - DNA, 19 bp, Homo sapiens
  siRNA target sequence for APOB (NM_000384.1,4407-4425).
cgccacaaatttctagatt

SEQ ID NO: 171272 - DNA, 19 bp, Homo sapiens
  siRNA target sequence for APOB (NM_000384.1,4422-4440).
gattcgaatatcaaattca

SEQ ID NO: 171273 - DNA, 19 bp, Homo sapiens
  siRNA target sequence for APOB (NM_000384.1,4463-4481).
caacccagtctcaaaaggt

SEQ ID NO: 171274 - DNA, 19 bp, Homo sapiens
  siRNA target sequence for APOB (NM_000384.1,4466-4484).
cccagtctcaaaaggttta

SEQ ID NO: 171275 - DNA, 19 bp, Homo sapiens
  siRNA target sequence for APOB (NM_000384.1,4470-4488).
gtctcaaaaggtttactaa

SEQ ID NO: 171276 - DNA, 19 bp, Homo sapiens
  siRNA target sequence for APOB (NM_000384.1,4525-4543).
ctgcttcagttcatttgga

SEQ ID NO: 171277 - DNA, 19 bp, Homo sapiens
  siRNA target sequence for APOB (NM_000384.1,4533-4551).
gttcatttggactccaaaa

SEQ ID NO: 171278 - DNA, 19 bp, Homo sapiens
  siRNA target sequence for APOB (NM_000384.1,4602-4620).
gtctcttcgttctatgcta

SEQ ID NO: 171279 - DNA, 19 bp, Homo sapiens
  siRNA target sequence for APOB (NM_000384.1,4613-4631).
ctatgctaaaggcacatat

SEQ ID NO: 171280 - DNA, 19 bp, Homo sapiens
  siRNA target sequence for APOB (NM_000384.1,4721-4739).
ccagataacaggaagatat

SEQ ID NO: 171281 - DNA, 19 bp, Homo sapiens
  siRNA target sequence for APOB (NM_000384.1,4776-4794).
ctgcaaagtggcatcatta

SEQ ID NO: 171282 - DNA, 19 bp, Homo sapiens
  siRNA target sequence for APOB (NM_000384.1,4803-4821).
gcttccctaaagtatgaga

SEQ ID NO: 171283 - DNA, 19 bp, Homo sapiens
  siRNA target sequence for APOB (NM_000384.1,4820-4838).
gaactacgagctgacttta

SEQ ID NO: 171284 - DNA, 19 bp, Homo sapiens
  siRNA target sequence for APOB (NM_000384.1,4845-4863).
gacaccaatgggaagtata

SEQ ID NO: 171285 - DNA, 19 bp, Homo sapiens
  siRNA target sequence for APOB (NM_000384.1,4849-4867).
ccaatgggaagtataagaa

SEQ ID NO: 171286 - DNA, 19 bp, Homo sapiens
  siRNA target sequence for APOB (NM_000384.1,4895-4913).
gaccttctctaagcaaaat

SEQ ID NO: 171287 - DNA, 19 bp, Homo sapiens
  siRNA target sequence for APOB (NM_000384.1,4914-4932).
gcactgctgcgttctgaat

SEQ ID NO: 171288 - DNA, 19 bp, Homo sapiens
  siRNA target sequence for APOB (NM_000384.1,4938-4956).
gctgattacgagtcattga

SEQ ID NO: 171289 - DNA, 19 bp, Homo sapiens
  siRNA target sequence for APOB (NM_000384.1,4970-4988).
gctttctggatcactaaat

SEQ ID NO: 171290 - DNA, 19 bp, Homo sapiens
  siRNA target sequence for APOB (NM_000384.1,5015-5033).
catcttaggcactgacaaa

SEQ ID NO: 171291 - DNA, 19 bp, Homo sapiens
  siRNA target sequence for APOB (NM_000384.1,5046-5064).
gctcacaaggcgacactaa

SEQ ID NO: 171292 - DNA, 19 bp, Homo sapiens
  siRNA target sequence for APOB (NM_000384.1,5065-5083).
ggattggccaagatggaat

SEQ ID NO: 171293 - DNA, 19 bp, Homo sapiens
  siRNA target sequence for APOB (NM_000384.1,5092-5110).
gtgcaacgaccaacttgaa

SEQ ID NO: 171294 - DNA, 19 bp, Homo sapiens
  siRNA target sequence for APOB (NM_000384.1,5094-5112).
gcaacgaccaacttgaagt

SEQ ID NO: 171295 - DNA, 19 bp, Homo sapiens
  siRNA target sequence for APOB (NM_000384.1,5191-5209).
gccgcttcagggaacacaa

SEQ ID NO: 171296 - DNA, 19 bp, Homo sapiens
  siRNA target sequence for APOB (NM_000384.1,5266-5284).
cttatcaggccatgattct

SEQ ID NO: 171297 - DNA, 19 bp, Homo sapiens
  siRNA target sequence for APOB (NM_000384.1,5287-5305).
gtgtcgacagcaaaaacat

SEQ ID NO: 171298 - DNA, 19 bp, Homo sapiens
  siRNA target sequence for APOB (NM_000384.1,5312-5330).
cttcaaggtcagtcaagaa

SEQ ID NO: 171299 - DNA, 19 bp, Homo sapiens
  siRNA target sequence for APOB (NM_000384.1,5323-5341).
gtcaagaaggacttaagct

SEQ ID NO: 171300 - DNA, 19 bp, Homo sapiens
  siRNA target sequence for APOB (NM_000384.1,5334-5352).
cttaagctctcaaatgaca

SEQ ID NO: 171301 - DNA, 19 bp, Homo sapiens
  siRNA target sequence for APOB (NM_000384.1,5399-5417).
gaacattgcaggcttatca

SEQ ID NO: 171302 - DNA, 19 bp, Homo sapiens
  siRNA target sequence for APOB (NM_000384.1,5428-5446).
cttcaaaacttgacaacat

SEQ ID NO: 171303 - DNA, 19 bp, Homo sapiens
  siRNA target sequence for APOB (NM_000384.1,5455-5473).
ctgacaagttttataagca

SEQ ID NO: 171304 - DNA, 19 bp, Homo sapiens
  siRNA target sequence for APOB (NM_000384.1,5507-5525).
ggtaactactttaaacagt

SEQ ID NO: 171305 - DNA, 19 bp, Homo sapiens
  siRNA target sequence for APOB (NM_000384.1,5552-5570).
caccaacaatgggaaacta

SEQ ID NO: 171306 - DNA, 19 bp, Homo sapiens
  siRNA target sequence for APOB (NM_000384.1,5607-5625).
ctaaaaggagcctaccaaa

SEQ ID NO: 171307 - DNA, 19 bp, Homo sapiens
  siRNA target sequence for APOB (NM_000384.1,5614-5632).
gagcctaccaaaataatga

SEQ ID NO: 171308 - DNA, 19 bp, Homo sapiens
  siRNA target sequence for APOB (NM_000384.1,5666-5684).
cttatcagcaagctataaa

SEQ ID NO: 171309 - DNA, 19 bp, Homo sapiens
  siRNA target sequence for APOB (NM_000384.1,5703-5721).
gttcagggtgtggagttta

SEQ ID NO: 171310 - DNA, 19 bp, Homo sapiens
  siRNA target sequence for APOB (NM_000384.1,5771-5789).
gagcacaaactataattca

SEQ ID NO: 171311 - DNA, 19 bp, Homo sapiens
  siRNA target sequence for APOB (NM_000384.1,5843-5861).
gaccatcgatgcacataca

SEQ ID NO: 171312 - DNA, 19 bp, Homo sapiens
  siRNA target sequence for APOB (NM_000384.1,5846-5864).
catcgatgcacatacaaat

SEQ ID NO: 171313 - DNA, 19 bp, Homo sapiens
  siRNA target sequence for APOB (NM_000384.1,5879-5897).
cgctctctggggagaacat

SEQ ID NO: 171314 - DNA, 19 bp, Homo sapiens
  siRNA target sequence for APOB (NM_000384.1,5880-5898).
gctctctggggagaacata

SEQ ID NO: 171315 - DNA, 19 bp, Homo sapiens
  siRNA target sequence for APOB (NM_000384.1,5901-5919).
gggcagctgtatagcaaat

SEQ ID NO: 171316 - DNA, 19 bp, Homo sapiens
  siRNA target sequence for APOB (NM_000384.1,5966-5984).
caaaggctccacaagtcat

SEQ ID NO: 171317 - DNA, 19 bp, Homo sapiens
  siRNA target sequence for APOB (NM_000384.1,6013-6031).
cagctcttgaacacaaagt

SEQ ID NO: 171318 - DNA, 19 bp, Homo sapiens
  siRNA target sequence for APOB (NM_000384.1,6015-6033).
gctcttgaacacaaagtca

SEQ ID NO: 171319 - DNA, 19 bp, Homo sapiens
  siRNA target sequence for APOB (NM_000384.1,6080-6098).
gacccaatttaacaacaat

SEQ ID NO: 171320 - DNA, 19 bp, Homo sapiens
  siRNA target sequence for APOB (NM_000384.1,6106-6124).
gccaggacttggatgctta

SEQ ID NO: 171321 - DNA, 19 bp, Homo sapiens
  siRNA target sequence for APOB (NM_000384.1,6116-6134).
ggatgcttacaacactaaa

SEQ ID NO: 171322 - DNA, 19 bp, Homo sapiens
  siRNA target sequence for APOB (NM_000384.1,6170-6188).
ggctgacctaactctacta

SEQ ID NO: 171323 - DNA, 19 bp, Homo sapiens
  siRNA target sequence for APOB (NM_000384.1,6172-6190).
ctgacctaactctactaga

SEQ ID NO: 171324 - DNA, 19 bp, Homo sapiens
  siRNA target sequence for APOB (NM_000384.1,6183-6201).
ctactagactccccaatta

SEQ ID NO: 171325 - DNA, 19 bp, Homo sapiens
  siRNA target sequence for APOB (NM_000384.1,6272-6290).
gccccaagaatttacaatt

SEQ ID NO: 171326 - DNA, 19 bp, Homo sapiens
  siRNA target sequence for APOB (NM_000384.1,6331-6349).
ccattaacctcccattttt

SEQ ID NO: 171327 - DNA, 19 bp, Homo sapiens
  siRNA target sequence for APOB (NM_000384.1,6377-6395).
gaatcgacaaaccattata

SEQ ID NO: 171328 - DNA, 19 bp, Homo sapiens
  siRNA target sequence for APOB (NM_000384.1,6382-6400).
gacaaaccattatagttgt

SEQ ID NO: 171329 - DNA, 19 bp, Homo sapiens
  siRNA target sequence for APOB (NM_000384.1,6425-6443).
gaagcacatcaatattgat

SEQ ID NO: 171330 - DNA, 19 bp, Homo sapiens
  siRNA target sequence for APOB (NM_000384.1,6431-6449).
catcaatattgatcaattt

SEQ ID NO: 171331 - DNA, 19 bp, Homo sapiens
  siRNA target sequence for APOB (NM_000384.1,6434-6452).
caatattgatcaatttgta

SEQ ID NO: 171332 - DNA, 19 bp, Homo sapiens
  siRNA target sequence for APOB (NM_000384.1,6483-6501).
ccacagcaagctaatgatt

SEQ ID NO: 171333 - DNA, 19 bp, Homo sapiens
  siRNA target sequence for APOB (NM_000384.1,6484-6502).
cacagcaagctaatgatta

SEQ ID NO: 171334 - DNA, 19 bp, Homo sapiens
  siRNA target sequence for APOB (NM_000384.1,6616-6634).
ccaaaatcaactttaatga

SEQ ID NO: 171335 - DNA, 19 bp, Homo sapiens
  siRNA target sequence for APOB (NM_000384.1,6645-6663).
caactgcagacatatatga

SEQ ID NO: 171336 - DNA, 19 bp, Homo sapiens
  siRNA target sequence for APOB (NM_000384.1,6653-6671).
gacatatatgatacaattt

SEQ ID NO: 171337 - DNA, 19 bp, Homo sapiens
  siRNA target sequence for APOB (NM_000384.1,6662-6680).
gatacaatttgatcagtat

SEQ ID NO: 171338 - DNA, 19 bp, Homo sapiens
  siRNA target sequence for APOB (NM_000384.1,6723-6741).
gctaatattattgatgaaa

SEQ ID NO: 171339 - DNA, 19 bp, Homo sapiens
  siRNA target sequence for APOB (NM_000384.1,6760-6778).
gtcttgatgagcactatca

SEQ ID NO: 171340 - DNA, 19 bp, Homo sapiens
  siRNA target sequence for APOB (NM_000384.1,6762-6780).
cttgatgagcactatcata

SEQ ID NO: 171341 - DNA, 19 bp, Homo sapiens
  siRNA target sequence for APOB (NM_000384.1,6782-6800).
ccgtgtaaatttagtaaaa

SEQ ID NO: 171342 - DNA, 19 bp, Homo sapiens
  siRNA target sequence for APOB (NM_000384.1,6783-6801).
cgtgtaaatttagtaaaaa

SEQ ID NO: 171343 - DNA, 19 bp, Homo sapiens
  siRNA target sequence for APOB (NM_000384.1,6802-6820).
caatccatgatctacattt

SEQ ID NO: 171344 - DNA, 19 bp, Homo sapiens
  siRNA target sequence for APOB (NM_000384.1,6806-6824).
ccatgatctacatttgttt

SEQ ID NO: 171345 - DNA, 19 bp, Homo sapiens
  siRNA target sequence for APOB (NM_000384.1,6807-6825).
catgatctacatttgttta

SEQ ID NO: 171346 - DNA, 19 bp, Homo sapiens
  siRNA target sequence for APOB (NM_000384.1,6889-6907).
ctaagtaccaaatcagaat

SEQ ID NO: 171347 - DNA, 19 bp, Homo sapiens
  siRNA target sequence for APOB (NM_000384.1,6965-6983).
gcacctagctggaaagtta

SEQ ID NO: 171348 - DNA, 19 bp, Homo sapiens
  siRNA target sequence for APOB (NM_000384.1,6966-6984).
cacctagctggaaagttaa

SEQ ID NO: 171349 - DNA, 19 bp, Homo sapiens
  siRNA target sequence for APOB (NM_000384.1,7012-7030).
gagtgcttttagatcaatt

SEQ ID NO: 171350 - DNA, 19 bp, Homo sapiens
  siRNA target sequence for APOB (NM_000384.1,7023-7041).
gatcaattgggaactacaa

SEQ ID NO: 171351 - DNA, 19 bp, Homo sapiens
  siRNA target sequence for APOB (NM_000384.1,7031-7049).
gggaactacaatttcattt

SEQ ID NO: 171352 - DNA, 19 bp, Homo sapiens
  siRNA target sequence for APOB (NM_000384.1,7068-7086).
cttgagcatgtcaaacact

SEQ ID NO: 171353 - DNA, 19 bp, Homo sapiens
  siRNA target sequence for APOB (NM_000384.1,7073-7091).
gcatgtcaaacactttgtt

SEQ ID NO: 171354 - DNA, 19 bp, Homo sapiens
  siRNA target sequence for APOB (NM_000384.1,7079-7097).
caaacactttgttataaat

SEQ ID NO: 171355 - DNA, 19 bp, Homo sapiens
  siRNA target sequence for APOB (NM_000384.1,7141-7159).
gagccaaagtccatgagtt

SEQ ID NO: 171356 - DNA, 19 bp, Homo sapiens
  siRNA target sequence for APOB (NM_000384.1,7157-7175).
gttaatcgagaggtatgaa

SEQ ID NO: 171357 - DNA, 19 bp, Homo sapiens
  siRNA target sequence for APOB (NM_000384.1,7181-7199).
ccaacaaatccaggtttta

SEQ ID NO: 171358 - DNA, 19 bp, Homo sapiens
  siRNA target sequence for APOB (NM_000384.1,7190-7208).
ccaggttttaatggataaa

SEQ ID NO: 171359 - DNA, 19 bp, Homo sapiens
  siRNA target sequence for APOB (NM_000384.1,7222-7240).
cccaccaatacaagttgaa

SEQ ID NO: 171360 - DNA, 19 bp, Homo sapiens
  siRNA target sequence for APOB (NM_000384.1,7242-7260).
gagactattcagaagctaa

SEQ ID NO: 171361 - DNA, 19 bp, Homo sapiens
  siRNA target sequence for APOB (NM_000384.1,7246-7264).
ctattcagaagctaagcaa

SEQ ID NO: 171362 - DNA, 19 bp, Homo sapiens
  siRNA target sequence for APOB (NM_000384.1,7261-7279).
gcaatgtcctacaacaagt

SEQ ID NO: 171363 - DNA, 19 bp, Homo sapiens
  siRNA target sequence for APOB (NM_000384.1,7266-7284).
gtcctacaacaagttaaga

SEQ ID NO: 171364 - DNA, 19 bp, Homo sapiens
  siRNA target sequence for APOB (NM_000384.1,7268-7286).
cctacaacaagttaagata

SEQ ID NO: 171365 - DNA, 19 bp, Homo sapiens
  siRNA target sequence for APOB (NM_000384.1,7386-7404).
cttgacatgttgataaaga

SEQ ID NO: 171366 - DNA, 19 bp, Homo sapiens
  siRNA target sequence for APOB (NM_000384.1,7434-7452).
gtagatgaaaccaatgaca

SEQ ID NO: 171367 - DNA, 19 bp, Homo sapiens
  siRNA target sequence for APOB (NM_000384.1,7463-7481).
ggtgactcagagactcaat

SEQ ID NO: 171368 - DNA, 19 bp, Homo sapiens
  siRNA target sequence for APOB (NM_000384.1,7472-7490).
gagactcaatggtgaaatt

SEQ ID NO: 171369 - DNA, 19 bp, Homo sapiens
  siRNA target sequence for APOB (NM_000384.1,7495-7513).
ctctggaactaccacaaaa

SEQ ID NO: 171370 - DNA, 19 bp, Homo sapiens
  siRNA target sequence for APOB (NM_000384.1,7509-7527).
caaaaagctgaagcattaa

SEQ ID NO: 171371 - DNA, 19 bp, Homo sapiens
  siRNA target sequence for APOB (NM_000384.1,7552-7570).
ccacagttgcagtgtatct

SEQ ID NO: 171372 - DNA, 19 bp, Homo sapiens
  siRNA target sequence for APOB (NM_000384.1,7583-7601).
ggacaccaaaataacctta

SEQ ID NO: 171373 - DNA, 19 bp, Homo sapiens
  siRNA target sequence for APOB (NM_000384.1,7584-7602).
gacaccaaaataaccttaa

SEQ ID NO: 171374 - DNA, 19 bp, Homo sapiens
  siRNA target sequence for APOB (NM_000384.1,7588-7606).
ccaaaataaccttaatcat

SEQ ID NO: 171375 - DNA, 19 bp, Homo sapiens
  siRNA target sequence for APOB (NM_000384.1,7613-7631).
gttacaggaggctttaagt

SEQ ID NO: 171376 - DNA, 19 bp, Homo sapiens
  siRNA target sequence for APOB (NM_000384.1,7636-7654).
catctttggctcacatgaa

SEQ ID NO: 171377 - DNA, 19 bp, Homo sapiens
  siRNA target sequence for APOB (NM_000384.1,7686-7704).
cgagaccgaatgtatcaaa

SEQ ID NO: 171378 - DNA, 19 bp, Homo sapiens
  siRNA target sequence for APOB (NM_000384.1,7687-7705).
gagaccgaatgtatcaaat

SEQ ID NO: 171379 - DNA, 19 bp, Homo sapiens
  siRNA target sequence for APOB (NM_000384.1,7740-7758).
ctggtaggccaggtttata

SEQ ID NO: 171380 - DNA, 19 bp, Homo sapiens
  siRNA target sequence for APOB (NM_000384.1,7794-7812).
cttgctgctaagaacctta

SEQ ID NO: 171381 - DNA, 19 bp, Homo sapiens
  siRNA target sequence for APOB (NM_000384.1,7798-7816).
ctgctaagaaccttactga

SEQ ID NO: 171382 - DNA, 19 bp, Homo sapiens
  siRNA target sequence for APOB (NM_000384.1,7813-7831).
ctgactttgcagagcaata

SEQ ID NO: 171383 - DNA, 19 bp, Homo sapiens
  siRNA target sequence for APOB (NM_000384.1,7838-7856).
ccaagattgggctaaacgt

SEQ ID NO: 171384 - DNA, 19 bp, Homo sapiens
  siRNA target sequence for APOB (NM_000384.1,7839-7857).
caagattgggctaaacgta

SEQ ID NO: 171385 - DNA, 19 bp, Homo sapiens
  siRNA target sequence for APOB (NM_000384.1,7848-7866).
gctaaacgtatgaaagcat

SEQ ID NO: 171386 - DNA, 19 bp, Homo sapiens
  siRNA target sequence for APOB (NM_000384.1,7983-8001).
gtccccctaacagatttga

SEQ ID NO: 171387 - DNA, 19 bp, Homo sapiens
  siRNA target sequence for APOB (NM_000384.1,8003-8021).
gattccatcagttcagata

SEQ ID NO: 171388 - DNA, 19 bp, Homo sapiens
  siRNA target sequence for APOB (NM_000384.1,8007-8025).
ccatcagttcagataaact

SEQ ID NO: 171389 - DNA, 19 bp, Homo sapiens
  siRNA target sequence for APOB (NM_000384.1,8008-8026).
catcagttcagataaactt

SEQ ID NO: 171390 - DNA, 19 bp, Homo sapiens
  siRNA target sequence for APOB (NM_000384.1,8016-8034).
cagataaacttcaaagact

SEQ ID NO: 171391 - DNA, 19 bp, Homo sapiens
  siRNA target sequence for APOB (NM_000384.1,8018-8036).
gataaacttcaaagactta

SEQ ID NO: 171392 - DNA, 19 bp, Homo sapiens
  siRNA target sequence for APOB (NM_000384.1,8060-8078).
gttttccacaccagaattt

SEQ ID NO: 171393 - DNA, 19 bp, Homo sapiens
  siRNA target sequence for APOB (NM_000384.1,8070-8088).
ccagaatttaccatcctta

SEQ ID NO: 171394 - DNA, 19 bp, Homo sapiens
  siRNA target sequence for APOB (NM_000384.1,8071-8089).
cagaatttaccatccttaa

SEQ ID NO: 171395 - DNA, 19 bp, Homo sapiens
  siRNA target sequence for APOB (NM_000384.1,8073-8091).
gaatttaccatccttaaca

SEQ ID NO: 171396 - DNA, 19 bp, Homo sapiens
  siRNA target sequence for APOB (NM_000384.1,8097-8115).
cacattccttcctttacaa

SEQ ID NO: 171397 - DNA, 19 bp, Homo sapiens
  siRNA target sequence for APOB (NM_000384.1,8104-8122).
cttcctttacaattgactt

SEQ ID NO: 171398 - DNA, 19 bp, Homo sapiens
  siRNA target sequence for APOB (NM_000384.1,8107-8125).
cctttacaattgactttgt

SEQ ID NO: 171399 - DNA, 19 bp, Homo sapiens
  siRNA target sequence for APOB (NM_000384.1,8183-8201).
gtggcccgttccagatata

SEQ ID NO: 171400 - DNA, 19 bp, Homo sapiens
  siRNA target sequence for APOB (NM_000384.1,8185-8203).
ggcccgttccagatatata

SEQ ID NO: 171401 - DNA, 19 bp, Homo sapiens
  siRNA target sequence for APOB (NM_000384.1,8188-8206).
ccgttccagatatatatct

SEQ ID NO: 171402 - DNA, 19 bp, Homo sapiens
  siRNA target sequence for APOB (NM_000384.1,8252-8270).
gccagacttccgtttacca

SEQ ID NO: 171403 - DNA, 19 bp, Homo sapiens
  siRNA target sequence for APOB (NM_000384.1,8276-8294).
cgcaattccagaattcata

SEQ ID NO: 171404 - DNA, 19 bp, Homo sapiens
  siRNA target sequence for APOB (NM_000384.1,8297-8315).
cccaactctcaaccttaat

SEQ ID NO: 171405 - DNA, 19 bp, Homo sapiens
  siRNA target sequence for APOB (NM_000384.1,8374-8392).
caattgaagtacctacttt

SEQ ID NO: 171406 - DNA, 19 bp, Homo sapiens
  siRNA target sequence for APOB (NM_000384.1,8385-8403).
cctacttttggcaagctat

SEQ ID NO: 171407 - DNA, 19 bp, Homo sapiens
  siRNA target sequence for APOB (NM_000384.1,8395-8413).
gcaagctatacagtattct

SEQ ID NO: 171408 - DNA, 19 bp, Homo sapiens
  siRNA target sequence for APOB (NM_000384.1,8399-8417).
gctatacagtattctgaaa

SEQ ID NO: 171409 - DNA, 19 bp, Homo sapiens
  siRNA target sequence for APOB (NM_000384.1,8451-8469).
gctgacatagggaatggaa

SEQ ID NO: 171410 - DNA, 19 bp, Homo sapiens
  siRNA target sequence for APOB (NM_000384.1,8518-8536).
gagagtccaaattagaagt

SEQ ID NO: 171411 - DNA, 19 bp, Homo sapiens
  siRNA target sequence for APOB (NM_000384.1,8524-8542).
ccaaattagaagttctcaa

SEQ ID NO: 171412 - DNA, 19 bp, Homo sapiens
  siRNA target sequence for APOB (NM_000384.1,8568-8586).
ctctcaaaccctaagatta

SEQ ID NO: 171413 - DNA, 19 bp, Homo sapiens
  siRNA target sequence for APOB (NM_000384.1,8570-8588).
ctcaaaccctaagattaat

SEQ ID NO: 171414 - DNA, 19 bp, Homo sapiens
  siRNA target sequence for APOB (NM_000384.1,8638-8656).
cggagcatgggagtgaaat

SEQ ID NO: 171415 - DNA, 19 bp, Homo sapiens
  siRNA target sequence for APOB (NM_000384.1,8673-8691).
gctattgagggaaaatcaa

SEQ ID NO: 171416 - DNA, 19 bp, Homo sapiens
  siRNA target sequence for APOB (NM_000384.1,8737-8755).
gtaatggagtgattgtcaa

SEQ ID NO: 171417 - DNA, 19 bp, Homo sapiens
  siRNA target sequence for APOB (NM_000384.1,8773-8791).
ccctggatagcaacactaa

SEQ ID NO: 171418 - DNA, 19 bp, Homo sapiens
  siRNA target sequence for APOB (NM_000384.1,8774-8792).
cctggatagcaacactaaa

SEQ ID NO: 171419 - DNA, 19 bp, Homo sapiens
  siRNA target sequence for APOB (NM_000384.1,8844-8862).
ctgcgcaacgagatcaaga

SEQ ID NO: 171420 - DNA, 19 bp, Homo sapiens
  siRNA target sequence for APOB (NM_000384.1,8940-8958).
gatgagggaacacatgaat

SEQ ID NO: 171421 - DNA, 19 bp, Homo sapiens
  siRNA target sequence for APOB (NM_000384.1,8952-8970).
catgaatcacaaattagtt

SEQ ID NO: 171422 - DNA, 19 bp, Homo sapiens
  siRNA target sequence for APOB (NM_000384.1,9003-9021).
ctgtccaataagatcaata

SEQ ID NO: 171423 - DNA, 19 bp, Homo sapiens
  siRNA target sequence for APOB (NM_000384.1,9007-9025).
ccaataagatcaatagcaa

SEQ ID NO: 171424 - DNA, 19 bp, Homo sapiens
  siRNA target sequence for APOB (NM_000384.1,9063-9081).
ggctccctcaacttttcta

SEQ ID NO: 171425 - DNA, 19 bp, Homo sapiens
  siRNA target sequence for APOB (NM_000384.1,9064-9082).
gctccctcaacttttctaa

SEQ ID NO: 171426 - DNA, 19 bp, Homo sapiens
  siRNA target sequence for APOB (NM_000384.1,9117-9135).
gtgggccacagtgttctaa

SEQ ID NO: 171427 - DNA, 19 bp, Homo sapiens
  siRNA target sequence for APOB (NM_000384.1,9119-9137).
gggccacagtgttctaact

SEQ ID NO: 171428 - DNA, 19 bp, Homo sapiens
  siRNA target sequence for APOB (NM_000384.1,9212-9230).
ggttattggaactttgaaa

SEQ ID NO: 171429 - DNA, 19 bp, Homo sapiens
  siRNA target sequence for APOB (NM_000384.1,9213-9231).
gttattggaactttgaaaa

SEQ ID NO: 171430 - DNA, 19 bp, Homo sapiens
  siRNA target sequence for APOB (NM_000384.1,9266-9284).
cacggcatccacaaacaat

SEQ ID NO: 171431 - DNA, 19 bp, Homo sapiens
  siRNA target sequence for APOB (NM_000384.1,9268-9286).
cggcatccacaaacaatga

SEQ ID NO: 171432 - DNA, 19 bp, Homo sapiens
  siRNA target sequence for APOB (NM_000384.1,9300-9318).
gttcgttttccattaaggt

SEQ ID NO: 171433 - DNA, 19 bp, Homo sapiens
  siRNA target sequence for APOB (NM_000384.1,9303-9321).
cgttttccattaaggttaa

SEQ ID NO: 171434 - DNA, 19 bp, Homo sapiens
  siRNA target sequence for APOB (NM_000384.1,9316-9334).
ggttaacagggaagataga

SEQ ID NO: 171435 - DNA, 19 bp, Homo sapiens
  siRNA target sequence for APOB (NM_000384.1,9397-9415).
gtgctaggttcaatcagta

SEQ ID NO: 171436 - DNA, 19 bp, Homo sapiens
  siRNA target sequence for APOB (NM_000384.1,9399-9417).
gctaggttcaatcagtata

SEQ ID NO: 171437 - DNA, 19 bp, Homo sapiens
  siRNA target sequence for APOB (NM_000384.1,9400-9418).
ctaggttcaatcagtataa

SEQ ID NO: 171438 - DNA, 19 bp, Homo sapiens
  siRNA target sequence for APOB (NM_000384.1,9403-9421).
ggttcaatcagtataagta

SEQ ID NO: 171439 - DNA, 19 bp, Homo sapiens
  siRNA target sequence for APOB (NM_000384.1,9411-9429).
cagtataagtacaaccaaa

SEQ ID NO: 171440 - DNA, 19 bp, Homo sapiens
  siRNA target sequence for APOB (NM_000384.1,9441-9459).
ggaaacaacgagaacatta

SEQ ID NO: 171441 - DNA, 19 bp, Homo sapiens
  siRNA target sequence for APOB (NM_000384.1,9462-9480).
gaggcccatgtaggaataa

SEQ ID NO: 171442 - DNA, 19 bp, Homo sapiens
  siRNA target sequence for APOB (NM_000384.1,9464-9482).
ggcccatgtaggaataaat

SEQ ID NO: 171443 - DNA, 19 bp, Homo sapiens
  siRNA target sequence for APOB (NM_000384.1,9526-9544).
ctgaaatgcgtctacctta

SEQ ID NO: 171444 - DNA, 19 bp, Homo sapiens
  siRNA target sequence for APOB (NM_000384.1,9540-9558).
ccttacacaataatcacaa

SEQ ID NO: 171445 - DNA, 19 bp, Homo sapiens
  siRNA target sequence for APOB (NM_000384.1,9651-9669).
gctcagtataagaaaaaca

SEQ ID NO: 171446 - DNA, 19 bp, Homo sapiens
  siRNA target sequence for APOB (NM_000384.1,9672-9690).
cacaggcattccatcacaa

SEQ ID NO: 171447 - DNA, 19 bp, Homo sapiens
  siRNA target sequence for APOB (NM_000384.1,9677-9695).
gcattccatcacaaatcct

SEQ ID NO: 171448 - DNA, 19 bp, Homo sapiens
  siRNA target sequence for APOB (NM_000384.1,9694-9712).
ctttggctgtgctttgtga

SEQ ID NO: 171449 - DNA, 19 bp, Homo sapiens
  siRNA target sequence for APOB (NM_000384.1,9721-9739).
gtcagagcatcaaatcctt

SEQ ID NO: 171450 - DNA, 19 bp, Homo sapiens
  siRNA target sequence for APOB (NM_000384.1,9785-9803).
caccaaatcctataatgaa

SEQ ID NO: 171451 - DNA, 19 bp, Homo sapiens
  siRNA target sequence for APOB (NM_000384.1,9881-9899).
cactgttccagttgtcaat

SEQ ID NO: 171452 - DNA, 19 bp, Homo sapiens
  siRNA target sequence for APOB (NM_000384.1,9889-9907).
cagttgtcaatgttgaagt

SEQ ID NO: 171453 - DNA, 19 bp, Homo sapiens
  siRNA target sequence for APOB (NM_000384.1,9910-9928).
ctccattcaccatagagat

SEQ ID NO: 171454 - DNA, 19 bp, Homo sapiens
  siRNA target sequence for APOB (NM_000384.1,9931-9949).
cggcattcggctatgtgtt

SEQ ID NO: 171455 - DNA, 19 bp, Homo sapiens
  siRNA target sequence for APOB (NM_000384.1,9958-9976).
cagtcagcatgcctagttt

SEQ ID NO: 171456 - DNA, 19 bp, Homo sapiens
  siRNA target sequence for APOB (NM_000384.1,9998-10016).
ccgtgtgccttcatacaca

SEQ ID NO: 171457 - DNA, 19 bp, Homo sapiens
  siRNA target sequence for APOB (NM_000384.1,10000-10018).
gtgtgccttcatacacatt

SEQ ID NO: 171458 - DNA, 19 bp, Homo sapiens
  siRNA target sequence for APOB (NM_000384.1,10002-10020).
gtgccttcatacacattaa

SEQ ID NO: 171459 - DNA, 19 bp, Homo sapiens
  siRNA target sequence for APOB (NM_000384.1,10046-10064).
ccttcatgtccctagaaat

SEQ ID NO: 171460 - DNA, 19 bp, Homo sapiens
  siRNA target sequence for APOB (NM_000384.1,10050-10068).
catgtccctagaaatctca

SEQ ID NO: 171461 - DNA, 19 bp, Homo sapiens
  siRNA target sequence for APOB (NM_000384.1,10056-10074).
cctagaaatctcaagcttt

SEQ ID NO: 171462 - DNA, 19 bp, Homo sapiens
  siRNA target sequence for APOB (NM_000384.1,10126-10144).
ccatgggcaatattaccta

SEQ ID NO: 171463 - DNA, 19 bp, Homo sapiens
  siRNA target sequence for APOB (NM_000384.1,10127-10145).
catgggcaatattacctat

SEQ ID NO: 171464 - DNA, 19 bp, Homo sapiens
  siRNA target sequence for APOB (NM_000384.1,10130-10148).
gggcaatattacctatgat

SEQ ID NO: 171465 - DNA, 19 bp, Homo sapiens
  siRNA target sequence for APOB (NM_000384.1,10131-10149).
ggcaatattacctatgatt

SEQ ID NO: 171466 - DNA, 19 bp, Homo sapiens
  siRNA target sequence for APOB (NM_000384.1,10132-10150).
gcaatattacctatgattt

SEQ ID NO: 171467 - DNA, 19 bp, Homo sapiens
  siRNA target sequence for APOB (NM_000384.1,10194-10212).
ctttttaaccagtcagata

SEQ ID NO: 171468 - DNA, 19 bp, Homo sapiens
  siRNA target sequence for APOB (NM_000384.1,10251-10269).
gatgcactgcagtacaaat

SEQ ID NO: 171469 - DNA, 19 bp, Homo sapiens
  siRNA target sequence for APOB (NM_000384.1,10272-10290).
gagggcaccacaagattga

SEQ ID NO: 171470 - DNA, 19 bp, Homo sapiens
  siRNA target sequence for APOB (NM_000384.1,10291-10309).
caagaaaaaggggattgaa

SEQ ID NO: 171471 - DNA, 19 bp, Homo sapiens
  siRNA target sequence for APOB (NM_000384.1,10325-10343).
gtctctgagcaacaaattt

SEQ ID NO: 171472 - DNA, 19 bp, Homo sapiens
  siRNA target sequence for APOB (NM_000384.1,10344-10362).
gtggagggtagtcataaca

SEQ ID NO: 171473 - DNA, 19 bp, Homo sapiens
  siRNA target sequence for APOB (NM_000384.1,10347-10365).
gagggtagtcataacagta

SEQ ID NO: 171474 - DNA, 19 bp, Homo sapiens
  siRNA target sequence for APOB (NM_000384.1,10368-10386).
gtgagcttaaccacgaaaa

SEQ ID NO: 171475 - DNA, 19 bp, Homo sapiens
  siRNA target sequence for APOB (NM_000384.1,10370-10388).
gagcttaaccacgaaaaat

SEQ ID NO: 171476 - DNA, 19 bp, Homo sapiens
  siRNA target sequence for APOB (NM_000384.1,10455-10473).
gaacttaatggaaatacca

SEQ ID NO: 171477 - DNA, 19 bp, Homo sapiens
  siRNA target sequence for APOB (NM_000384.1,10495-10513).
cctccatggaatttaagta

SEQ ID NO: 171478 - DNA, 19 bp, Homo sapiens
  siRNA target sequence for APOB (NM_000384.1,10496-10514).
ctccatggaatttaagtat

SEQ ID NO: 171479 - DNA, 19 bp, Homo sapiens
  siRNA target sequence for APOB (NM_000384.1,10535-10553).
gtactctaccgctaaagga

SEQ ID NO: 171480 - DNA, 19 bp, Homo sapiens
  siRNA target sequence for APOB (NM_000384.1,10563-10581).
cacaagcttagcttggaaa

SEQ ID NO: 171481 - DNA, 19 bp, Homo sapiens
  siRNA target sequence for APOB (NM_000384.1,10578-10596).
gaaagcctcacctcttact

SEQ ID NO: 171482 - DNA, 19 bp, Homo sapiens
  siRNA target sequence for APOB (NM_000384.1,10626-10644).
gtcaagggttcggttcttt

SEQ ID NO: 171483 - DNA, 19 bp, Homo sapiens
  siRNA target sequence for APOB (NM_000384.1,10628-10646).
caagggttcggttctttct

SEQ ID NO: 171484 - DNA, 19 bp, Homo sapiens
  siRNA target sequence for APOB (NM_000384.1,10649-10667).
ggaatattcaggaactatt

SEQ ID NO: 171485 - DNA, 19 bp, Homo sapiens
  siRNA target sequence for APOB (NM_000384.1,10669-10687).
ctagtgaggccaacactta

SEQ ID NO: 171486 - DNA, 19 bp, Homo sapiens
  siRNA target sequence for APOB (NM_000384.1,10672-10690).
gtgaggccaacacttactt

SEQ ID NO: 171487 - DNA, 19 bp, Homo sapiens
  siRNA target sequence for APOB (NM_000384.1,10676-10694).
ggccaacacttacttgaat

SEQ ID NO: 171488 - DNA, 19 bp, Homo sapiens
  siRNA target sequence for APOB (NM_000384.1,10677-10695).
gccaacacttacttgaatt

SEQ ID NO: 171489 - DNA, 19 bp, Homo sapiens
  siRNA target sequence for APOB (NM_000384.1,10721-10739).
gctgcagggcacttccaaa

SEQ ID NO: 171490 - DNA, 19 bp, Homo sapiens
  siRNA target sequence for APOB (NM_000384.1,10751-10769).
ctggaaccttgaagtaaaa

SEQ ID NO: 171491 - DNA, 19 bp, Homo sapiens
  siRNA target sequence for APOB (NM_000384.1,10789-10807).
ccacactccaacgcatata

SEQ ID NO: 171492 - DNA, 19 bp, Homo sapiens
  siRNA target sequence for APOB (NM_000384.1,10790-10808).
cacactccaacgcatatat

SEQ ID NO: 171493 - DNA, 19 bp, Homo sapiens
  siRNA target sequence for APOB (NM_000384.1,10814-10832).
ctgggagcacagtacgaaa

SEQ ID NO: 171494 - DNA, 19 bp, Homo sapiens
  siRNA target sequence for APOB (NM_000384.1,10816-10834).
gggagcacagtacgaaaaa

SEQ ID NO: 171495 - DNA, 19 bp, Homo sapiens
  siRNA target sequence for APOB (NM_000384.1,10862-10880).
caccaacggagaacataca

SEQ ID NO: 171496 - DNA, 19 bp, Homo sapiens
  siRNA target sequence for APOB (NM_000384.1,10868-10886).
cggagaacatacaagcaaa

SEQ ID NO: 171497 - DNA, 19 bp, Homo sapiens
  siRNA target sequence for APOB (NM_000384.1,10947-10965).
cccagttccttccatgatt

SEQ ID NO: 171498 - DNA, 19 bp, Homo sapiens
  siRNA target sequence for APOB (NM_000384.1,10983-11001).
gaagtggccctgaatgcta

SEQ ID NO: 171499 - DNA, 19 bp, Homo sapiens
  siRNA target sequence for APOB (NM_000384.1,10988-11006).
ggccctgaatgctaacact

SEQ ID NO: 171500 - DNA, 19 bp, Homo sapiens
  siRNA target sequence for APOB (NM_000384.1,10989-11007).
gccctgaatgctaacacta

SEQ ID NO: 171501 - DNA, 19 bp, Homo sapiens
  siRNA target sequence for APOB (NM_000384.1,11065-11083).
gccaggtcgagctttccaa

SEQ ID NO: 171502 - DNA, 19 bp, Homo sapiens
  siRNA target sequence for APOB (NM_000384.1,11066-11084).
ccaggtcgagctttccaat

SEQ ID NO: 171503 - DNA, 19 bp, Homo sapiens
  siRNA target sequence for APOB (NM_000384.1,11137-11155).
ggttcctcaaaaatatcat

SEQ ID NO: 171504 - DNA, 19 bp, Homo sapiens
  siRNA target sequence for APOB (NM_000384.1,11226-11244).
cagcatcttcgtgtttcaa

SEQ ID NO: 171505 - DNA, 19 bp, Homo sapiens
  siRNA target sequence for APOB (NM_000384.1,11228-11246).
gcatcttcgtgtttcaact

SEQ ID NO: 171506 - DNA, 19 bp, Homo sapiens
  siRNA target sequence for APOB (NM_000384.1,11285-11303).
ctccatccctgtaaaagtt

SEQ ID NO: 171507 - DNA, 19 bp, Homo sapiens
  siRNA target sequence for APOB (NM_000384.1,11331-11349).
ctgaaactaaatgatctaa

SEQ ID NO: 171508 - DNA, 19 bp, Homo sapiens
  siRNA target sequence for APOB (NM_000384.1,11375-11393).
ccatgtcccatttacagat

SEQ ID NO: 171509 - DNA, 19 bp, Homo sapiens
  siRNA target sequence for APOB (NM_000384.1,11404-11422).
catcgtgcaaacttgactt

SEQ ID NO: 171510 - DNA, 19 bp, Homo sapiens
  siRNA target sequence for APOB (NM_000384.1,11479-11497).
caacactccccgaggtaaa

SEQ ID NO: 171511 - DNA, 19 bp, Homo sapiens
  siRNA target sequence for APOB (NM_000384.1,11482-11500).
cactccccgaggtaaaatt

SEQ ID NO: 171512 - DNA, 19 bp, Homo sapiens
  siRNA target sequence for APOB (NM_000384.1,11492-11510).
ggtaaaattccctgaagtt

SEQ ID NO: 171513 - DNA, 19 bp, Homo sapiens
  siRNA target sequence for APOB (NM_000384.1,11516-11534).
gttaacaaaatattctcaa

SEQ ID NO: 171514 - DNA, 19 bp, Homo sapiens
  siRNA target sequence for APOB (NM_000384.1,11564-11582).
gataaccgtgcctgaatct

SEQ ID NO: 171515 - DNA, 19 bp, Homo sapiens
  siRNA target sequence for APOB (NM_000384.1,11570-11588).
cgtgcctgaatctcagtta

SEQ ID NO: 171516 - DNA, 19 bp, Homo sapiens
  siRNA target sequence for APOB (NM_000384.1,11598-11616).
cagttcacgcttccaaaaa

SEQ ID NO: 171517 - DNA, 19 bp, Homo sapiens
  siRNA target sequence for APOB (NM_000384.1,11745-11763).
gctggaattgtcattcctt

SEQ ID NO: 171518 - DNA, 19 bp, Homo sapiens
  siRNA target sequence for APOB (NM_000384.1,11793-11811).
gtagactctcccgtgtata

SEQ ID NO: 171519 - DNA, 19 bp, Homo sapiens
  siRNA target sequence for APOB (NM_000384.1,11821-11839).
ggagtgccagtttgaaaaa

SEQ ID NO: 171520 - DNA, 19 bp, Homo sapiens
  siRNA target sequence for APOB (NM_000384.1,11878-11896).
gcagctcaaccgtacagtt

SEQ ID NO: 171521 - DNA, 19 bp, Homo sapiens
  siRNA target sequence for APOB (NM_000384.1,11887-11905).
ccgtacagttcctagaata

SEQ ID NO: 171522 - DNA, 19 bp, Homo sapiens
  siRNA target sequence for APOB (NM_000384.1,11897-11915).
cctagaatatgaactaaat

SEQ ID NO: 171523 - DNA, 19 bp, Homo sapiens
  siRNA target sequence for APOB (NM_000384.1,11921-11939).
gggaacacacaaaatcgaa

SEQ ID NO: 171524 - DNA, 19 bp, Homo sapiens
  siRNA target sequence for APOB (NM_000384.1,11943-11961).
ggtacgttagcctctaaga

SEQ ID NO: 171525 - DNA, 19 bp, Homo sapiens
  siRNA target sequence for APOB (NM_000384.1,11947-11965).
cgttagcctctaagactaa

SEQ ID NO: 171526 - DNA, 19 bp, Homo sapiens
  siRNA target sequence for APOB (NM_000384.1,11948-11966).
gttagcctctaagactaaa

SEQ ID NO: 171527 - DNA, 19 bp, Homo sapiens
  siRNA target sequence for APOB (NM_000384.1,11983-12001).
gtgacttcagtgcagaata

SEQ ID NO: 171528 - DNA, 19 bp, Homo sapiens
  siRNA target sequence for APOB (NM_000384.1,11987-12005).
cttcagtgcagaatatgaa

SEQ ID NO: 171529 - DNA, 19 bp, Homo sapiens
  siRNA target sequence for APOB (NM_000384.1,12043-12061).
gaaaagcgcacctcaatat

SEQ ID NO: 171530 - DNA, 19 bp, Homo sapiens
  siRNA target sequence for APOB (NM_000384.1,12048-12066).
gcgcacctcaatatcaaaa

SEQ ID NO: 171531 - DNA, 19 bp, Homo sapiens
  siRNA target sequence for APOB (NM_000384.1,12147-12165).
ggcaccgtgggcatggata

SEQ ID NO: 171532 - DNA, 19 bp, Homo sapiens
  siRNA target sequence for APOB (NM_000384.1,12148-12166).
gcaccgtgggcatggatat

SEQ ID NO: 171533 - DNA, 19 bp, Homo sapiens
  siRNA target sequence for APOB (NM_000384.1,12177-12195).
gacgacttttctaaatgga

SEQ ID NO: 171534 - DNA, 19 bp, Homo sapiens
  siRNA target sequence for APOB (NM_000384.1,12358-12376).
ccacaggggtcctttatga

SEQ ID NO: 171535 - DNA, 19 bp, Homo sapiens
  siRNA target sequence for APOB (NM_000384.1,12359-12377).
cacaggggtcctttatgat

SEQ ID NO: 171536 - DNA, 19 bp, Homo sapiens
  siRNA target sequence for APOB (NM_000384.1,12361-12379).
caggggtcctttatgatta

SEQ ID NO: 171537 - DNA, 19 bp, Homo sapiens
  siRNA target sequence for APOB (NM_000384.1,12482-12500).
ggccattaggcaaattgat

SEQ ID NO: 171538 - DNA, 19 bp, Homo sapiens
  siRNA target sequence for APOB (NM_000384.1,12484-12502).
ccattaggcaaattgatga

SEQ ID NO: 171539 - DNA, 19 bp, Homo sapiens
  siRNA target sequence for APOB (NM_000384.1,12485-12503).
cattaggcaaattgatgat

SEQ ID NO: 171540 - DNA, 19 bp, Homo sapiens
  siRNA target sequence for APOB (NM_000384.1,12490-12508).
ggcaaattgatgatatcga

SEQ ID NO: 171541 - DNA, 19 bp, Homo sapiens
  siRNA target sequence for APOB (NM_000384.1,12629-12647).
caaggataacgtgtttgat

SEQ ID NO: 171542 - DNA, 19 bp, Homo sapiens
  siRNA target sequence for APOB (NM_000384.1,12649-12667).
gcttggtacgagttactca

SEQ ID NO: 171543 - DNA, 19 bp, Homo sapiens
  siRNA target sequence for APOB (NM_000384.1,12650-12668).
cttggtacgagttactcaa

SEQ ID NO: 171544 - DNA, 19 bp, Homo sapiens
  siRNA target sequence for APOB (NM_000384.1,12774-12792).
ctttgcactatgttcataa

SEQ ID NO: 171545 - DNA, 19 bp, Homo sapiens
  siRNA target sequence for APOB (NM_000384.1,12805-12823).
cggtactgtcccaggtata

SEQ ID NO: 171546 - DNA, 19 bp, Homo sapiens
  siRNA target sequence for APOB (NM_000384.1,12810-12828).
ctgtcccaggtatattcga

SEQ ID NO: 171547 - DNA, 19 bp, Homo sapiens
  siRNA target sequence for APOB (NM_000384.1,12812-12830).
gtcccaggtatattcgaaa

SEQ ID NO: 171548 - DNA, 19 bp, Homo sapiens
  siRNA target sequence for APOB (NM_000384.1,12831-12849).
gtccataatggttcagaaa

SEQ ID NO: 171549 - DNA, 19 bp, Homo sapiens
  siRNA target sequence for APOB (NM_000384.1,12866-12884).
ccaagacctagtgattaca

SEQ ID NO: 171550 - DNA, 19 bp, Homo sapiens
  siRNA target sequence for APOB (NM_000384.1,12901-12919).
ggaaacataaactaataga

SEQ ID NO: 171551 - DNA, 19 bp, Homo sapiens
  siRNA target sequence for APOB (NM_000384.1,12918-12936).
gatgtaatctcgatgtata

SEQ ID NO: 171552 - DNA, 19 bp, Homo sapiens
  siRNA target sequence for APOB (NM_000384.1,12928-12946).
cgatgtatagggaactgtt

SEQ ID NO: 171553 - DNA, 19 bp, Homo sapiens
  siRNA target sequence for APOB (NM_000384.1,12932-12950).
gtatagggaactgttgaaa

SEQ ID NO: 171554 - DNA, 19 bp, Homo sapiens
  siRNA target sequence for APOB (NM_000384.1,12944-12962).
gttgaaagatttatcaaaa

SEQ ID NO: 171555 - DNA, 19 bp, Homo sapiens
  siRNA target sequence for APOB (NM_000384.1,12963-12981).
gaagcccaagaggtattta

SEQ ID NO: 171556 - DNA, 19 bp, Homo sapiens
  siRNA target sequence for APOB (NM_000384.1,12975-12993).
gtatttaaagccattcagt

SEQ ID NO: 171557 - DNA, 19 bp, Homo sapiens
  siRNA target sequence for APOB (NM_000384.1,13003-13021).
ccacagaggtgctacgtaa

SEQ ID NO: 171558 - DNA, 19 bp, Homo sapiens
  siRNA target sequence for APOB (NM_000384.1,13004-13022).
cacagaggtgctacgtaat

SEQ ID NO: 171559 - DNA, 19 bp, Homo sapiens
  siRNA target sequence for APOB (NM_000384.1,13006-13024).
cagaggtgctacgtaatct

SEQ ID NO: 171560 - DNA, 19 bp, Homo sapiens
  siRNA target sequence for APOB (NM_000384.1,13181-13199).
cctatgccttaatcttcat

SEQ ID NO: 171561 - DNA, 19 bp, Homo sapiens
  siRNA target sequence for APOB (NM_000384.1,13186-13204).
gccttaatcttcataagtt

SEQ ID NO: 171562 - DNA, 19 bp, Homo sapiens
  siRNA target sequence for APOB (NM_000384.1,13232-13250).
ggaagcttctcaagagtta

SEQ ID NO: 171563 - DNA, 19 bp, Homo sapiens
  siRNA target sequence for APOB (NM_000384.1,13274-13292).
ggcccttcgtgaagaatat

SEQ ID NO: 171564 - DNA, 19 bp, Homo sapiens
  siRNA target sequence for APOB (NM_000384.1,13275-13293).
gcccttcgtgaagaatatt

SEQ ID NO: 171565 - DNA, 19 bp, Homo sapiens
  siRNA target sequence for APOB (NM_000384.1,13276-13294).
cccttcgtgaagaatattt

SEQ ID NO: 171566 - DNA, 19 bp, Homo sapiens
  siRNA target sequence for APOB (NM_000384.1,13358-13376).
gatcaagaacctgttagtt

SEQ ID NO: 171567 - DNA, 19 bp, Homo sapiens
  siRNA target sequence for APOB (NM_000384.1,13377-13395).
gctcttaaggacttccatt

SEQ ID NO: 171568 - DNA, 19 bp, Homo sapiens
  siRNA target sequence for APOB (NM_000384.1,13407-13425).
gtcagtgcctctaacttta

SEQ ID NO: 171569 - DNA, 19 bp, Homo sapiens
  siRNA target sequence for APOB (NM_000384.1,13430-13448).
ccaactctcaagtcaagtt

SEQ ID NO: 171570 - DNA, 19 bp, Homo sapiens
  siRNA target sequence for APOB (NM_000384.1,13451-13469).
gcaatttctgcacagaaat

SEQ ID NO: 171571 - DNA, 19 bp, Homo sapiens
  siRNA target sequence for APOB (NM_000384.1,13568-13586).
ggccattgcgacgaagaaa

SEQ ID NO: 171572 - DNA, 19 bp, Homo sapiens
  siRNA target sequence for APOB (NM_000384.1,13569-13587).
gccattgcgacgaagaaaa

SEQ ID NO: 171573 - DNA, 19 bp, Homo sapiens
  siRNA target sequence for APOB (NM_000384.1,13570-13588).
ccattgcgacgaagaaaat

SEQ ID NO: 171574 - DNA, 19 bp, Homo sapiens
  siRNA target sequence for APOB (NM_000384.1,13571-13589).
cattgcgacgaagaaaata

SEQ ID NO: 171575 - DNA, 19 bp, Homo sapiens
  siRNA target sequence for APOB (NM_000384.1,13601-13619).
ccaccagcagtttagatat

SEQ ID NO: 171576 - DNA, 19 bp, Homo sapiens
  siRNA target sequence for APOB (NM_000384.1,13638-13656).
gaccaactctctgattact

SEQ ID NO: 171577 - DNA, 19 bp, Homo sapiens
  siRNA target sequence for APOB (NM_000384.1,13640-13658).
ccaactctctgattactat

SEQ ID NO: 171578 - DNA, 19 bp, Homo sapiens
  siRNA target sequence for APOB (NM_000384.1,13672-13690).
ctgaatccaaaagattgat

SEQ ID NO: 171579 - DNA, 19 bp, Homo sapiens
  siRNA target sequence for APOB (NM_000384.1,13688-13706).
gattgacctgtccattcaa

SEQ ID NO: 171580 - DNA, 19 bp, Homo sapiens
  siRNA target sequence for APOB (NM_000384.1,13730-13748).
catcacggagttactgaaa

SEQ ID NO: 171581 - DNA, 19 bp, Homo sapiens
  siRNA target sequence for APOB (NM_000384.1,13735-13753).
cggagttactgaaaaagct

SEQ ID NO: 171582 - DNA, 19 bp, Homo sapiens
  siRNA target sequence for APOB (NM_000384.1,13767-13785).
gtcatgaacccctacatga

SEQ ID NO: 171583 - DNA, 19 bp, Homo sapiens
  siRNA target sequence for APOB (NM_000384.1,13788-13806).
cttgctccaggagaactta

SEQ ID NO: 171584 - DNA, 19 bp, Homo sapiens
  siRNA target sequence for APOE (NM_000041.1,321-339).
ggagttgaaggcctacaaa

SEQ ID NO: 171585 - DNA, 19 bp, Homo sapiens
  siRNA target sequence for APOE (NM_000041.1,322-340).
gagttgaaggcctacaaat

SEQ ID NO: 171586 - DNA, 19 bp, Homo sapiens
  siRNA target sequence for APOE (NM_000041.1,994-1012).
gtgcccagcgacaatcact

SEQ ID NO: 171587 - DNA, 19 bp, Homo sapiens
  siRNA target sequence for APOF (NM_001638.1,233-251).
ccccttgtcctgccaattt

SEQ ID NO: 171588 - DNA, 19 bp, Homo sapiens
  siRNA target sequence for APOF (NM_001638.1,288-306).
gcccctctacccaagttct

SEQ ID NO: 171589 - DNA, 19 bp, Homo sapiens
  siRNA target sequence for APOF (NM_001638.1,289-307).
cccctctacccaagttctt

SEQ ID NO: 171590 - DNA, 19 bp, Homo sapiens
  siRNA target sequence for APOF (NM_001638.1,294-312).
ctacccaagttcttggtaa

SEQ ID NO: 171591 - DNA, 19 bp, Homo sapiens
  siRNA target sequence for APOF (NM_001638.1,345-363).
ggttgtcaggctgatgttt

SEQ ID NO: 171592 - DNA, 19 bp, Homo sapiens
  siRNA target sequence for APOF (NM_001638.1,386-404).
ccgccagggtggtgtgaat

SEQ ID NO: 171593 - DNA, 19 bp, Homo sapiens
  siRNA target sequence for APOF (NM_001638.1,390-408).
cagggtggtgtgaatgcta

SEQ ID NO: 171594 - DNA, 19 bp, Homo sapiens
  siRNA target sequence for APOF (NM_001638.1,578-596).
gcaagctgtgcacaatgta

SEQ ID NO: 171595 - DNA, 19 bp, Homo sapiens
  siRNA target sequence for APOF (NM_001638.1,612-630).
ggagtgggaaccttctaca

SEQ ID NO: 171596 - DNA, 19 bp, Homo sapiens
  siRNA target sequence for APOF (NM_001638.1,613-631).
gagtgggaaccttctacaa

SEQ ID NO: 171597 - DNA, 19 bp, Homo sapiens
  siRNA target sequence for APOF (NM_001638.1,769-787).
cgatcagtgctgcacttaa

SEQ ID NO: 171598 - DNA, 19 bp, Homo sapiens
  siRNA target sequence for APOF (NM_001638.1,770-788).
gatcagtgctgcacttaaa

SEQ ID NO: 171599 - DNA, 19 bp, Homo sapiens
  siRNA target sequence for APOF (NM_001638.1,773-791).
cagtgctgcacttaaacct

SEQ ID NO: 171600 - DNA, 19 bp, Homo sapiens
  siRNA target sequence for APOF (NM_001638.1,783-801).
cttaaacctgcattaaggt

SEQ ID NO: 171601 - DNA, 19 bp, Homo sapiens
  siRNA target sequence for APOF (NM_001638.1,815-833).
gttgatccagtattaccaa

SEQ ID NO: 171602 - DNA, 19 bp, Homo sapiens
  siRNA target sequence for APOF (NM_001638.1,824-842).
gtattaccaagatcagaaa

SEQ ID NO: 171603 - DNA, 19 bp, Homo sapiens
  siRNA target sequence for APOF (NM_001638.1,837-855).
cagaaagacgcaaacatct

SEQ ID NO: 171604 - DNA, 19 bp, Homo sapiens
  siRNA target sequence for APOF (NM_001638.1,972-990).
gggtgggccataatcaaga

SEQ ID NO: 171605 - DNA, 19 bp, Homo sapiens
  siRNA target sequence for APOF (NM_001638.1,986-1004).
caagagctatgacttagat

SEQ ID NO: 171606 - DNA, 19 bp, Homo sapiens
  siRNA target sequence for APOF (NM_001638.1,1011-1029).
gctgggagtcttgagatat

SEQ ID NO: 171607 - DNA, 19 bp, Homo sapiens
  siRNA target sequence for APOL2 (NM_030882.2,401-419).
gagagaatctgctacaact

SEQ ID NO: 171608 - DNA, 19 bp, Homo sapiens
  siRNA target sequence for ASIP (NM_001672.2,167-185).
gtggcgctgaacaagaaat

SEQ ID NO: 171609 - DNA, 19 bp, Homo sapiens
  siRNA target sequence for ASIP (NM_001672.2,170-188).
gcgctgaacaagaaatcca

SEQ ID NO: 171610 - DNA, 19 bp, Homo sapiens
  siRNA target sequence for C17 (NM_018659.1,207-225).
ggctgtacctggacataca

SEQ ID NO: 171611 - DNA, 19 bp, Homo sapiens
  siRNA target sequence for C17 (NM_018659.1,342-360).
cgttctgcaggagagattt

SEQ ID NO: 171612 - DNA, 19 bp, Homo sapiens
  siRNA target sequence for C17 (NM_018659.1,346-364).
ctgcaggagagatttggta

SEQ ID NO: 171613 - DNA, 19 bp, Homo sapiens
  siRNA target sequence for C17 (NM_018659.1,351-369).
ggagagatttggtattcct

SEQ ID NO: 171614 - DNA, 19 bp, Homo sapiens
  siRNA target sequence for C3 (NM_000064.1,124-142).
gggagtcccatgtactcta

SEQ ID NO: 171615 - DNA, 19 bp, Homo sapiens
  siRNA target sequence for C3 (NM_000064.1,125-143).
ggagtcccatgtactctat

SEQ ID NO: 171616 - DNA, 19 bp, Homo sapiens
  siRNA target sequence for C3 (NM_000064.1,128-146).
gtcccatgtactctatcat

SEQ ID NO: 171617 - DNA, 19 bp, Homo sapiens
  siRNA target sequence for C3 (NM_000064.1,240-258).
cgacttcccaggcaaaaaa

SEQ ID NO: 171618 - DNA, 19 bp, Homo sapiens
  siRNA target sequence for C3 (NM_000064.1,545-563).
cggtcatggtcaacattga

SEQ ID NO: 171619 - DNA, 19 bp, Homo sapiens
  siRNA target sequence for C3 (NM_000064.1,672-690).
gaagatccgagcctactat

SEQ ID NO: 171620 - DNA, 19 bp, Homo sapiens
  siRNA target sequence for C3 (NM_000064.1,679-697).
cgagcctactatgaaaact

SEQ ID NO: 171621 - DNA, 19 bp, Homo sapiens
  siRNA target sequence for C3 (NM_000064.1,749-767).
ccagtttcgaggtcatagt

SEQ ID NO: 171622 - DNA, 19 bp, Homo sapiens
  siRNA target sequence for C3 (NM_000064.1,769-787).
gagcctacagagaaattct

SEQ ID NO: 171623 - DNA, 19 bp, Homo sapiens
  siRNA target sequence for C3 (NM_000064.1,780-798).
gaaattctactacatctat

SEQ ID NO: 171624 - DNA, 19 bp, Homo sapiens
  siRNA target sequence for C3 (NM_000064.1,1137-1155).
gacacccaagtacttcaaa

SEQ ID NO: 171625 - DNA, 19 bp, Homo sapiens
  siRNA target sequence for C3 (NM_000064.1,1270-1288).
gatggcgtggccaaactca

SEQ ID NO: 171626 - DNA, 19 bp, Homo sapiens
  siRNA target sequence for C3 (NM_000064.1,1409-1427).
gcaactccaacaattacct

SEQ ID NO: 171627 - DNA, 19 bp, Homo sapiens
  siRNA target sequence for C3 (NM_000064.1,1513-1531).
gccaagatccgctactaca

SEQ ID NO: 171628 - DNA, 19 bp, Homo sapiens
  siRNA target sequence for C3 (NM_000064.1,1648-1666).
cgcctggtggcgtactaca

SEQ ID NO: 171629 - DNA, 19 bp, Homo sapiens
  siRNA target sequence for C3 (NM_000064.1,1740-1758).
gggctcgctggtggtaaaa

SEQ ID NO: 171630 - DNA, 19 bp, Homo sapiens
  siRNA target sequence for C3 (NM_000064.1,1741-1759).
ggctcgctggtggtaaaaa

SEQ ID NO: 171631 - DNA, 19 bp, Homo sapiens
  siRNA target sequence for C3 (NM_000064.1,1862-1880).
gcgtgttcgtgctgaataa

SEQ ID NO: 171632 - DNA, 19 bp, Homo sapiens
  siRNA target sequence for C3 (NM_000064.1,1891-1909).
ctgacgcagagtaagatct

SEQ ID NO: 171633 - DNA, 19 bp, Homo sapiens
  siRNA target sequence for C3 (NM_000064.1,2418-2436).
ctctacgaagctcatgaat

SEQ ID NO: 171634 - DNA, 19 bp, Homo sapiens
  siRNA target sequence for C3 (NM_000064.1,2582-2600).
gaaacgagcaggtggaaat

SEQ ID NO: 171635 - DNA, 19 bp, Homo sapiens
  siRNA target sequence for C3 (NM_000064.1,2601-2619).
ccgagccgttctctacaat

SEQ ID NO: 171636 - DNA, 19 bp, Homo sapiens
  siRNA target sequence for C3 (NM_000064.1,2602-2620).
cgagccgttctctacaatt

SEQ ID NO: 171637 - DNA, 19 bp, Homo sapiens
  siRNA target sequence for C3 (NM_000064.1,2735-2753).
cctcgttgtccgttccata

SEQ ID NO: 171638 - DNA, 19 bp, Homo sapiens
  siRNA target sequence for C3 (NM_000064.1,2736-2754).
ctcgttgtccgttccatat

SEQ ID NO: 171639 - DNA, 19 bp, Homo sapiens
  siRNA target sequence for C3 (NM_000064.1,2738-2756).
cgttgtccgttccatatgt

SEQ ID NO: 171640 - DNA, 19 bp, Homo sapiens
  siRNA target sequence for C3 (NM_000064.1,2755-2773).
gtcatcgtgccgctaaaga

SEQ ID NO: 171641 - DNA, 19 bp, Homo sapiens
  siRNA target sequence for C3 (NM_000064.1,2857-2875).
ccggaaggaatcagaatga

SEQ ID NO: 171642 - DNA, 19 bp, Homo sapiens
  siRNA target sequence for C3 (NM_000064.1,2982-3000).
cgagtctgagaccagaatt

SEQ ID NO: 171643 - DNA, 19 bp, Homo sapiens
  siRNA target sequence for C3 (NM_000064.1,3056-3074).
ggctgaagcacctcattgt

SEQ ID NO: 171644 - DNA, 19 bp, Homo sapiens
  siRNA target sequence for C3 (NM_000064.1,3122-3140).
cggtcatcgctgtgcatta

SEQ ID NO: 171645 - DNA, 19 bp, Homo sapiens
  siRNA target sequence for C3 (NM_000064.1,3152-3170).
cggagcagtgggagaagtt

SEQ ID NO: 171646 - DNA, 19 bp, Homo sapiens
  siRNA target sequence for C3 (NM_000064.1,3428-3446).
ccgtgatacaccaagaaat

SEQ ID NO: 171647 - DNA, 19 bp, Homo sapiens
  siRNA target sequence for C3 (NM_000064.1,3432-3450).
gatacaccaagaaatgatt

SEQ ID NO: 171648 - DNA, 19 bp, Homo sapiens
  siRNA target sequence for C3 (NM_000064.1,3451-3469).
ggtggattacggaacaaca

SEQ ID NO: 171649 - DNA, 19 bp, Homo sapiens
  siRNA target sequence for C3 (NM_000064.1,3452-3470).
gtggattacggaacaacaa

SEQ ID NO: 171650 - DNA, 19 bp, Homo sapiens
  siRNA target sequence for C3 (NM_000064.1,3461-3479).
ggaacaacaacgagaaaga

SEQ ID NO: 171651 - DNA, 19 bp, Homo sapiens
  siRNA target sequence for C3 (NM_000064.1,3555-3573).
gccaggcagcatcactaaa

SEQ ID NO: 171652 - DNA, 19 bp, Homo sapiens
  siRNA target sequence for C3 (NM_000064.1,3670-3688).
gggcctcttcttaacaaat

SEQ ID NO: 171653 - DNA, 19 bp, Homo sapiens
  siRNA target sequence for C3 (NM_000064.1,3672-3690).
gcctcttcttaacaaattt

SEQ ID NO: 171654 - DNA, 19 bp, Homo sapiens
  siRNA target sequence for C3 (NM_000064.1,3747-3765).
cgtggaggccacatcctat

SEQ ID NO: 171655 - DNA, 19 bp, Homo sapiens
  siRNA target sequence for C3 (NM_000064.1,3774-3792).
ggccctactgcagctaaaa

SEQ ID NO: 171656 - DNA, 19 bp, Homo sapiens
  siRNA target sequence for C3 (NM_000064.1,3776-3794).
ccctactgcagctaaaaga

SEQ ID NO: 171657 - DNA, 19 bp, Homo sapiens
  siRNA target sequence for C3 (NM_000064.1,3778-3796).
ctactgcagctaaaagact

SEQ ID NO: 171658 - DNA, 19 bp, Homo sapiens
  siRNA target sequence for C3 (NM_000064.1,3816-3834).
cgtgcgttggctcaatgaa

SEQ ID NO: 171659 - DNA, 19 bp, Homo sapiens
  siRNA target sequence for C3 (NM_000064.1,4082-4100).
ccttgtcggtggtgacaat

SEQ ID NO: 171660 - DNA, 19 bp, Homo sapiens
  siRNA target sequence for C3 (NM_000064.1,4165-4183).
ccagcaccggaaacagaaa

SEQ ID NO: 171661 - DNA, 19 bp, Homo sapiens
  siRNA target sequence for C3 (NM_000064.1,4248-4266).
ggatgccactatgtctata

SEQ ID NO: 171662 - DNA, 19 bp, Homo sapiens
  siRNA target sequence for C3 (NM_000064.1,4249-4267).
gatgccactatgtctatat

SEQ ID NO: 171663 - DNA, 19 bp, Homo sapiens
  siRNA target sequence for C3 (NM_000064.1,4262-4280).
ctatattggacatatccat

SEQ ID NO: 171664 - DNA, 19 bp, Homo sapiens
  siRNA target sequence for C3 (NM_000064.1,4340-4358).
gatacatctccaagtatga

SEQ ID NO: 171665 - DNA, 19 bp, Homo sapiens
  siRNA target sequence for C3 (NM_000064.1,4569-4587).
caagctctgccgtgatgaa

SEQ ID NO: 171666 - DNA, 19 bp, Homo sapiens
  siRNA target sequence for C3 (NM_000064.1,4594-4612).
cgctgtgctgaggagaatt

SEQ ID NO: 171667 - DNA, 19 bp, Homo sapiens
  siRNA target sequence for C3 (NM_000064.1,4598-4616).
gtgctgaggagaattgctt

SEQ ID NO: 171668 - DNA, 19 bp, Homo sapiens
  siRNA target sequence for C3 (NM_000064.1,4605-4623).
ggagaattgcttcatacaa

SEQ ID NO: 171669 - DNA, 19 bp, Homo sapiens
  siRNA target sequence for C3 (NM_000064.1,4675-4693).
ccaggagtggactatgtgt

SEQ ID NO: 171670 - DNA, 19 bp, Homo sapiens
  siRNA target sequence for C3 (NM_000064.1,4679-4697).
gagtggactatgtgtacaa

SEQ ID NO: 171671 - DNA, 19 bp, Homo sapiens
  siRNA target sequence for C3 (NM_000064.1,4876-4894).
ggtctctcctccgatttct

SEQ ID NO: 171672 - DNA, 19 bp, Homo sapiens
  siRNA target sequence for C3 (NM_000064.1,5018-5036).
ccgagagcatggttgtctt

SEQ ID NO: 171673 - DNA, 19 bp, Homo sapiens
  siRNA target sequence for CD1D (NM_001766.2,742-760).
ggagacgctgcagcatata

SEQ ID NO: 171674 - DNA, 19 bp, Homo sapiens
  siRNA target sequence for CD1D (NM_001766.2,743-761).
gagacgctgcagcatatat

SEQ ID NO: 171675 - DNA, 19 bp, Homo sapiens
  siRNA target sequence for CD1D (NM_001766.2,745-763).
gacgctgcagcatatattt

SEQ ID NO: 171676 - DNA, 19 bp, Homo sapiens
  siRNA target sequence for CD1D (NM_001766.2,868-886).
ccctgggaacgcctcaaat

SEQ ID NO: 171677 - DNA, 19 bp, Homo sapiens
  siRNA target sequence for CD1D (NM_001766.2,869-887).
cctgggaacgcctcaaata

SEQ ID NO: 171678 - DNA, 19 bp, Homo sapiens
  siRNA target sequence for CD1D (NM_001766.2,870-888).
ctgggaacgcctcaaataa

SEQ ID NO: 171679 - DNA, 19 bp, Homo sapiens
  siRNA target sequence for CD1D (NM_001766.2,872-890).
gggaacgcctcaaataact

SEQ ID NO: 171680 - DNA, 19 bp, Homo sapiens
  siRNA target sequence for CD1D (NM_001766.2,873-891).
ggaacgcctcaaataactt

SEQ ID NO: 171681 - DNA, 19 bp, Homo sapiens
  siRNA target sequence for CD1D (NM_001766.2,973-991).
ggtaaacttggccattcaa

SEQ ID NO: 171682 - DNA, 19 bp, Homo sapiens
  siRNA target sequence for CD1D (NM_001766.2,1023-1041).
cagtgcagtggctccttaa

SEQ ID NO: 171683 - DNA, 19 bp, Homo sapiens
  siRNA target sequence for CD1D (NM_001766.2,1458-1476).
gctttacctcccggtttaa

SEQ ID NO: 171684 - DNA, 19 bp, Homo sapiens
  siRNA target sequence for CD72 (NM_001782.1,219-237).
cacctacgagaatgttcaa

SEQ ID NO: 171685 - DNA, 19 bp, Homo sapiens
  siRNA target sequence for CD72 (NM_001782.1,221-239).
cctacgagaatgttcaagt

SEQ ID NO: 171686 - DNA, 19 bp, Homo sapiens
  siRNA target sequence for CD72 (NM_001782.1,499-517).
gttctggaagtcactaaca

SEQ ID NO: 171687 - DNA, 19 bp, Homo sapiens
  siRNA target sequence for CD72 (NM_001782.1,804-822).
ctgtccgtcgggatggata

SEQ ID NO: 171688 - DNA, 19 bp, Homo sapiens
  siRNA target sequence for CD72 (NM_001782.1,806-824).
gtccgtcgggatggataat

SEQ ID NO: 171689 - DNA, 19 bp, Homo sapiens
  siRNA target sequence for CD72 (NM_001782.1,849-867).
ctcacttacttcaaaaaat

SEQ ID NO: 171690 - DNA, 19 bp, Homo sapiens
  siRNA target sequence for CD72 (NM_001782.1,906-924).
caagctggccacattcagt

SEQ ID NO: 171691 - DNA, 19 bp, Homo sapiens
  siRNA target sequence for CD72 (NM_001782.1,913-931).
gccacattcagtgaaattt

SEQ ID NO: 171692 - DNA, 19 bp, Homo sapiens
  siRNA target sequence for CD72 (NM_001782.1,914-932).
ccacattcagtgaaattta

SEQ ID NO: 171693 - DNA, 19 bp, Homo sapiens
  siRNA target sequence for CD72 (NM_001782.1,937-955).
caatcacactcttactact

SEQ ID NO: 171694 - DNA, 19 bp, Homo sapiens
  siRNA target sequence for CD72 (NM_001782.1,979-997).
ggtggttcagggaattcat

SEQ ID NO: 171695 - DNA, 19 bp, Homo sapiens
  siRNA target sequence for CD72 (NM_001782.1,1004-1022).
ctggcctcagctctaacaa

SEQ ID NO: 171696 - DNA, 19 bp, Homo sapiens
  siRNA target sequence for CD72 (NM_001782.1,1009-1027).
ctcagctctaacaaggatt

SEQ ID NO: 171697 - DNA, 19 bp, Homo sapiens
  siRNA target sequence for CD72 (NM_001782.1,1032-1050).
gttgactgatgatacacaa

SEQ ID NO: 171698 - DNA, 19 bp, Homo sapiens
  siRNA target sequence for CD72 (NM_001782.1,1117-1135).
ctggagtcagagtcatgta

SEQ ID NO: 171699 - DNA, 19 bp, Homo sapiens
  siRNA target sequence for CD72 (NM_001782.1,1119-1137).
ggagtcagagtcatgtaga

SEQ ID NO: 171700 - DNA, 19 bp, Homo sapiens
  siRNA target sequence for CD72 (NM_001782.1,1120-1138).
gagtcagagtcatgtagaa

SEQ ID NO: 171701 - DNA, 19 bp, Homo sapiens
  siRNA target sequence for CD80 (NM_005191.2,404-422).
gtccatacctcaatttctt

SEQ ID NO: 171702 - DNA, 19 bp, Homo sapiens
  siRNA target sequence for CD80 (NM_005191.2,510-528).
ctgtggtcacaatgtttct

SEQ ID NO: 171703 - DNA, 19 bp, Homo sapiens
  siRNA target sequence for CD80 (NM_005191.2,512-530).
gtggtcacaatgtttctgt

SEQ ID NO: 171704 - DNA, 19 bp, Homo sapiens
  siRNA target sequence for CD80 (NM_005191.2,541-559).
gcacaaactcgcatctact

SEQ ID NO: 171705 - DNA, 19 bp, Homo sapiens
  siRNA target sequence for CD80 (NM_005191.2,594-612).
gtctggggacatgaatata

SEQ ID NO: 171706 - DNA, 19 bp, Homo sapiens
  siRNA target sequence for CD80 (NM_005191.2,631-649).
cggaccatctttgatatca

SEQ ID NO: 171707 - DNA, 19 bp, Homo sapiens
  siRNA target sequence for CD80 (NM_005191.2,701-719).
catacgagtgtgttgttct

SEQ ID NO: 171708 - DNA, 19 bp, Homo sapiens
  siRNA target sequence for CD80 (NM_005191.2,754-772).
ctggctgaagtgacgttat

SEQ ID NO: 171709 - DNA, 19 bp, Homo sapiens
  siRNA target sequence for CD80 (NM_005191.2,756-774).
ggctgaagtgacgttatca

SEQ ID NO: 171710 - DNA, 19 bp, Homo sapiens
  siRNA target sequence for CD80 (NM_005191.2,786-804).
cttccctacacctagtata

SEQ ID NO: 171711 - DNA, 19 bp, Homo sapiens
  siRNA target sequence for CD80 (NM_005191.2,789-807).
ccctacacctagtatatct

SEQ ID NO: 171712 - DNA, 19 bp, Homo sapiens
  siRNA target sequence for CD80 (NM_005191.2,797-815).
ctagtatatctgactttga

SEQ ID NO: 171713 - DNA, 19 bp, Homo sapiens
  siRNA target sequence for CD80 (NM_005191.2,877-895).
cacctctcctggttggaaa

SEQ ID NO: 171714 - DNA, 19 bp, Homo sapiens
  siRNA target sequence for CD80 (NM_005191.2,1001-1019).
gcttcatgtgtctcatcaa

SEQ ID NO: 171715 - DNA, 19 bp, Homo sapiens
  siRNA target sequence for CD80 (NM_005191.2,1005-1023).
catgtgtctcatcaagtat

SEQ ID NO: 171716 - DNA, 19 bp, Homo sapiens
  siRNA target sequence for CD80 (NM_005191.2,1014-1032).
catcaagtatggacattta

SEQ ID NO: 171717 - DNA, 19 bp, Homo sapiens
  siRNA target sequence for CD80 (NM_005191.2,1017-1035).
caagtatggacatttaaga

SEQ ID NO: 171718 - DNA, 19 bp, Homo sapiens
  siRNA target sequence for CD80 (NM_005191.2,1025-1043).
gacatttaagagtgaatca

SEQ ID NO: 171719 - DNA, 19 bp, Homo sapiens
  siRNA target sequence for CD80 (NM_005191.2,1027-1045).
catttaagagtgaatcaga

SEQ ID NO: 171720 - DNA, 19 bp, Homo sapiens
  siRNA target sequence for CD80 (NM_005191.2,1042-1060).
cagaccttcaactggaata

SEQ ID NO: 171721 - DNA, 19 bp, Homo sapiens
  siRNA target sequence for CD80 (NM_005191.2,1065-1083).
caagcaagagcattttcct

SEQ ID NO: 171722 - DNA, 19 bp, Homo sapiens
  siRNA target sequence for CD80 (NM_005191.2,1100-1118).
cctgggccattaccttaat

SEQ ID NO: 171723 - DNA, 19 bp, Homo sapiens
  siRNA target sequence for CD80 (NM_005191.2,1113-1131).
cttaatctcagtaaatgga

SEQ ID NO: 171724 - DNA, 19 bp, Homo sapiens
  siRNA target sequence for DBI (NM_020548.2,104-122).
gaggttaggcaccttaaga

SEQ ID NO: 171725 - DNA, 19 bp, Homo sapiens
  siRNA target sequence for DBI (NM_020548.2,154-172).
ctatggccactacaaacaa

SEQ ID NO: 171726 - DNA, 19 bp, Homo sapiens
  siRNA target sequence for DBI (NM_020548.2,173-191).
gcaactgtgggcgacataa

SEQ ID NO: 171727 - DNA, 19 bp, Homo sapiens
  siRNA target sequence for DBI (NM_020548.2,174-192).
caactgtgggcgacataaa

SEQ ID NO: 171728 - DNA, 19 bp, Homo sapiens
  siRNA target sequence for DBI (NM_020548.2,181-199).
gggcgacataaatacagaa

SEQ ID NO: 171729 - DNA, 19 bp, Homo sapiens
  siRNA target sequence for DBI (NM_020548.2,278-296).
gccatgaaagcttacatca

SEQ ID NO: 171730 - DNA, 19 bp, Homo sapiens
  siRNA target sequence for EDN3 (NM_000114.1,505-523).
caaggagtgtgtctactat

SEQ ID NO: 171731 - DNA, 19 bp, Homo sapiens
  siRNA target sequence for EDN3 (NM_000114.1,722-740).
ctggacgtcagcagtaatt

SEQ ID NO: 171732 - DNA, 19 bp, Homo sapiens
  siRNA target sequence for EFNA1 (NM_004428.2,223-241).
catgtgcagctgaatgact

SEQ ID NO: 171733 - DNA, 19 bp, Homo sapiens
  siRNA target sequence for EFNA1 (NM_004428.2,252-270).
catctgtccgcactatgaa

SEQ ID NO: 171734 - DNA, 19 bp, Homo sapiens
  siRNA target sequence for EFNA1 (NM_004428.2,255-273).
ctgtccgcactatgaagat

SEQ ID NO: 171735 - DNA, 19 bp, Homo sapiens
  siRNA target sequence for EFNA1 (NM_004428.2,469-487).
gaaggacacagctactact

SEQ ID NO: 171736 - DNA, 19 bp, Homo sapiens
  siRNA target sequence for EFNA1 (NM_004428.2,472-490).
ggacacagctactactaca

SEQ ID NO: 171737 - DNA, 19 bp, Homo sapiens
  siRNA target sequence for EFNA1 (NM_004428.2,473-491).
gacacagctactactacat

SEQ ID NO: 171738 - DNA, 19 bp, Homo sapiens
  siRNA target sequence for EFNA1 (NM_004428.2,566-584).
gtcctcaggcccatgacaa

SEQ ID NO: 171739 - DNA, 19 bp, Homo sapiens
  siRNA target sequence for EFNA1 (NM_004428.2,619-637).
gaggtgcgggttctacata

SEQ ID NO: 171740 - DNA, 19 bp, Homo sapiens
  siRNA target sequence for ENSA (NM_004436.1,471-489).
gcgggtggccaagttgaat

SEQ ID NO: 171741 - DNA, 19 bp, Homo sapiens
  siRNA target sequence for F2R (NM_001992.2,422-440).
ccgcaggccagaatcaaaa

SEQ ID NO: 171742 - DNA, 19 bp, Homo sapiens
  siRNA target sequence for F2R (NM_001992.2,455-473).
cttagatccccggtcattt

SEQ ID NO: 171743 - DNA, 19 bp, Homo sapiens
  siRNA target sequence for F2R (NM_001992.2,477-495).
ctcaggaaccccaatgata

SEQ ID NO: 171744 - DNA, 19 bp, Homo sapiens
  siRNA target sequence for F2R (NM_001992.2,479-497).
caggaaccccaatgataaa

SEQ ID NO: 171745 - DNA, 19 bp, Homo sapiens
  siRNA target sequence for F2R (NM_001992.2,481-499).
ggaaccccaatgataaata

SEQ ID NO: 171746 - DNA, 19 bp, Homo sapiens
  siRNA target sequence for F2R (NM_001992.2,482-500).
gaaccccaatgataaatat

SEQ ID NO: 171747 - DNA, 19 bp, Homo sapiens
  siRNA target sequence for F2R (NM_001992.2,539-557).
gttaactgaatacagatta

SEQ ID NO: 171748 - DNA, 19 bp, Homo sapiens
  siRNA target sequence for F2R (NM_001992.2,558-576).
gtctccatcaataaaagca

SEQ ID NO: 171749 - DNA, 19 bp, Homo sapiens
  siRNA target sequence for F2R (NM_001992.2,577-595).
gtcctcttcaaaaacaact

SEQ ID NO: 171750 - DNA, 19 bp, Homo sapiens
  siRNA target sequence for F2R (NM_001992.2,640-658).
cctggctgacactctttgt

SEQ ID NO: 171751 - DNA, 19 bp, Homo sapiens
  siRNA target sequence for F2R (NM_001992.2,668-686).
gtacaccggagtgtttgta

SEQ ID NO: 171752 - DNA, 19 bp, Homo sapiens
  siRNA target sequence for F2R (NM_001992.2,720-738).
gtgttcatcctgaaaatga

SEQ ID NO: 171753 - DNA, 19 bp, Homo sapiens
  siRNA target sequence for F2R (NM_001992.2,804-822).
gtgctcccctttaagatca

SEQ ID NO: 171754 - DNA, 19 bp, Homo sapiens
  siRNA target sequence for F2R (NM_001992.2,849-867).
cagtttgggtctgaattgt

SEQ ID NO: 171755 - DNA, 19 bp, Homo sapiens
  siRNA target sequence for F2R (NM_001992.2,851-869).
gtttgggtctgaattgtgt

SEQ ID NO: 171756 - DNA, 19 bp, Homo sapiens
  siRNA target sequence for F2R (NM_001992.2,882-900).
gcagcattttactgtaaca

SEQ ID NO: 171757 - DNA, 19 bp, Homo sapiens
  siRNA target sequence for F2R (NM_001992.2,918-936).
ctcatgacagtcataagca

SEQ ID NO: 171758 - DNA, 19 bp, Homo sapiens
  siRNA target sequence for F2R (NM_001992.2,920-938).
catgacagtcataagcatt

SEQ ID NO: 171759 - DNA, 19 bp, Homo sapiens
  siRNA target sequence for F2R (NM_001992.2,1196-1214).
catttccacggtctgttat

SEQ ID NO: 171760 - DNA, 19 bp, Homo sapiens
  siRNA target sequence for F2R (NM_001992.2,1204-1222).
cggtctgttatgtgtctat

SEQ ID NO: 171761 - DNA, 19 bp, Homo sapiens
  siRNA target sequence for F2R (NM_001992.2,1208-1226).
ctgttatgtgtctatcatt

SEQ ID NO: 171762 - DNA, 19 bp, Homo sapiens
  siRNA target sequence for F2R (NM_001992.2,1217-1235).
gtctatcattcgatgtctt

SEQ ID NO: 171763 - DNA, 19 bp, Homo sapiens
  siRNA target sequence for F2R (NM_001992.2,1296-1314).
gttttctgcatcttcatca

SEQ ID NO: 171764 - DNA, 19 bp, Homo sapiens
  siRNA target sequence for F2R (NM_001992.2,1303-1321).
gcatcttcatcatttgctt

SEQ ID NO: 171765 - DNA, 19 bp, Homo sapiens
  siRNA target sequence for F2R (NM_001992.2,1340-1358).
cctgattgcgcattactca

SEQ ID NO: 171766 - DNA, 19 bp, Homo sapiens
  siRNA target sequence for F2R (NM_001992.2,1413-1431).
gtctgtgtcagcagcataa

SEQ ID NO: 171767 - DNA, 19 bp, Homo sapiens
  siRNA target sequence for F2R (NM_001992.2,1438-1456).
gcatcgaccccctaattta

SEQ ID NO: 171768 - DNA, 19 bp, Homo sapiens
  siRNA target sequence for F2R (NM_001992.2,1442-1460).
cgaccccctaatttactat

SEQ ID NO: 171769 - DNA, 19 bp, Homo sapiens
  siRNA target sequence for F2R (NM_001992.2,1443-1461).
gaccccctaatttactatt

SEQ ID NO: 171770 - DNA, 19 bp, Homo sapiens
  siRNA target sequence for F2R (NM_001992.2,1479-1497).
cagaggtacgtctacagta

SEQ ID NO: 171771 - DNA, 19 bp, Homo sapiens
  siRNA target sequence for F2R (NM_001992.2,1483-1501).
ggtacgtctacagtatctt

SEQ ID NO: 171772 - DNA, 19 bp, Homo sapiens
  siRNA target sequence for F2R (NM_001992.2,1484-1502).
gtacgtctacagtatctta

SEQ ID NO: 171773 - DNA, 19 bp, Homo sapiens
  siRNA target sequence for F2R (NM_001992.2,1521-1539).
gatcccagcagttataaca

SEQ ID NO: 171774 - DNA, 19 bp, Homo sapiens
  siRNA target sequence for F2R (NM_001992.2,1546-1564).
ggcagttgatggcaagtaa

SEQ ID NO: 171775 - DNA, 19 bp, Homo sapiens
  siRNA target sequence for F2R (NM_001992.2,1547-1565).
gcagttgatggcaagtaaa

SEQ ID NO: 171776 - DNA, 19 bp, Homo sapiens
  siRNA target sequence for F2R (NM_001992.2,1548-1566).
cagttgatggcaagtaaaa

SEQ ID NO: 171777 - DNA, 19 bp, Homo sapiens
  siRNA target sequence for F2R (NM_001992.2,1576-1594).
gctctagtaacctgaataa

SEQ ID NO: 171778 - DNA, 19 bp, Homo sapiens
  siRNA target sequence for F2RL1 (NM_005242.3,257-275).
ggaagaagccttattggta

SEQ ID NO: 171779 - DNA, 19 bp, Homo sapiens
  siRNA target sequence for F2RL1 (NM_005242.3,258-276).
gaagaagccttattggtaa

SEQ ID NO: 171780 - DNA, 19 bp, Homo sapiens
  siRNA target sequence for F2RL1 (NM_005242.3,441-459).
ccctgtgggtctttctttt

SEQ ID NO: 171781 - DNA, 19 bp, Homo sapiens
  siRNA target sequence for F2RL1 (NM_005242.3,455-473).
cttttccgaactaagaaga

SEQ ID NO: 171782 - DNA, 19 bp, Homo sapiens
  siRNA target sequence for F2RL1 (NM_005242.3,585-603).
gggaagctctttgtaatgt

SEQ ID NO: 171783 - DNA, 19 bp, Homo sapiens
  siRNA target sequence for F2RL1 (NM_005242.3,825-843).
cgacctgtcatgatgtttt

SEQ ID NO: 171784 - DNA, 19 bp, Homo sapiens
  siRNA target sequence for F2RL1 (NM_005242.3,860-878).
gtgggagacatgttcaatt

SEQ ID NO: 171785 - DNA, 19 bp, Homo sapiens
  siRNA target sequence for F2RL1 (NM_005242.3,864-882).
gagacatgttcaattactt

SEQ ID NO: 171786 - DNA, 19 bp, Homo sapiens
  siRNA target sequence for F2RL1 (NM_005242.3,893-911).
gccattggggtctttctgt

SEQ ID NO: 171787 - DNA, 19 bp, Homo sapiens
  siRNA target sequence for F2RL1 (NM_005242.3,952-970).
cagaatgctgcgatcttct

SEQ ID NO: 171788 - DNA, 19 bp, Homo sapiens
  siRNA target sequence for F2RL1 (NM_005242.3,1003-1021).
gagggccatcaaactcatt

SEQ ID NO: 171789 - DNA, 19 bp, Homo sapiens
  siRNA target sequence for F2RL1 (NM_005242.3,1005-1023).
gggccatcaaactcattgt

SEQ ID NO: 171790 - DNA, 19 bp, Homo sapiens
  siRNA target sequence for F2RL1 (NM_005242.3,1070-1088).
ctgcttgtggtgcattatt

SEQ ID NO: 171791 - DNA, 19 bp, Homo sapiens
  siRNA target sequence for F2RL1 (NM_005242.3,1238-1256).
cgaagtgtccgcactgtaa

SEQ ID NO: 171792 - DNA, 19 bp, Homo sapiens
  siRNA target sequence for F2RL1 (NM_005242.3,1253-1271).
gtaaagcagatgcaagtat

SEQ ID NO: 171793 - DNA, 19 bp, Homo sapiens
  siRNA target sequence for F2RL1 (NM_005242.3,1268-1286).
gtatccctcacctcaaaga

SEQ ID NO: 171794 - DNA, 19 bp, Homo sapiens
  siRNA target sequence for GFRA3 (NM_001496.2,107-125).
cagaaagccgactcatgaa

SEQ ID NO: 171795 - DNA, 19 bp, Homo sapiens
  siRNA target sequence for GFRA3 (NM_001496.2,334-352).
gcctgcttggacatctatt

SEQ ID NO: 171796 - DNA, 19 bp, Homo sapiens
  siRNA target sequence for GFRA3 (NM_001496.2,365-383).
gtgcccgcagccttggtaa

SEQ ID NO: 171797 - DNA, 19 bp, Homo sapiens
  siRNA target sequence for GFRA3 (NM_001496.2,368-386).
cccgcagccttggtaacta

SEQ ID NO: 171798 - DNA, 19 bp, Homo sapiens
  siRNA target sequence for GFRA3 (NM_001496.2,369-387).
ccgcagccttggtaactat

SEQ ID NO: 171799 - DNA, 19 bp, Homo sapiens
  siRNA target sequence for GFRA3 (NM_001496.2,498-516).
catgctgtgtactctcaat

SEQ ID NO: 171800 - DNA, 19 bp, Homo sapiens
  siRNA target sequence for GFRA3 (NM_001496.2,785-803).
gatcacgcctggtggattt

SEQ ID NO: 171801 - DNA, 19 bp, Homo sapiens
  siRNA target sequence for GFRA3 (NM_001496.2,825-843).
ggacatcctaggaacttgt

SEQ ID NO: 171802 - DNA, 19 bp, Homo sapiens
  siRNA target sequence for GFRA3 (NM_001496.2,1039-1057).
gctaagatgcgttttcaca

SEQ ID NO: 171803 - DNA, 19 bp, Homo sapiens
  siRNA target sequence for GFRA3 (NM_001496.2,1049-1067).
gttttcacagccaactctt

SEQ ID NO: 171804 - DNA, 19 bp, Homo sapiens
  siRNA target sequence for GFRA3 (NM_001496.2,1164-1182).
ctgcacgcttcccttgatt

SEQ ID NO: 171805 - DNA, 19 bp, Homo sapiens
  siRNA target sequence for GFRA3 (NM_001496.2,1166-1184).
gcacgcttcccttgattct

SEQ ID NO: 171806 - DNA, 19 bp, Homo sapiens
  siRNA target sequence for GLG1 (NM_012201.1,555-573).
gaggtttgcaaatctacta

SEQ ID NO: 171807 - DNA, 19 bp, Homo sapiens
  siRNA target sequence for GLG1 (NM_012201.1,557-575).
ggtttgcaaatctactata

SEQ ID NO: 171808 - DNA, 19 bp, Homo sapiens
  siRNA target sequence for GLG1 (NM_012201.1,562-580).
gcaaatctactataacaga

SEQ ID NO: 171809 - DNA, 19 bp, Homo sapiens
  siRNA target sequence for GLG1 (NM_012201.1,568-586).
ctactataacagagattaa

SEQ ID NO: 171810 - DNA, 19 bp, Homo sapiens
  siRNA target sequence for GLG1 (NM_012201.1,571-589).
ctataacagagattaaaga

SEQ ID NO: 171811 - DNA, 19 bp, Homo sapiens
  siRNA target sequence for GLG1 (NM_012201.1,595-613).
ctgatgaaccggttggaaa

SEQ ID NO: 171812 - DNA, 19 bp, Homo sapiens
  siRNA target sequence for GLG1 (NM_012201.1,600-618).
gaaccggttggaaaaggtt

SEQ ID NO: 171813 - DNA, 19 bp, Homo sapiens
  siRNA target sequence for GLG1 (NM_012201.1,670-688).
gtcaccagtacattaccaa

SEQ ID NO: 171814 - DNA, 19 bp, Homo sapiens
  siRNA target sequence for GLG1 (NM_012201.1,686-704).
caagatgacggccatcatt

SEQ ID NO: 171815 - DNA, 19 bp, Homo sapiens
  siRNA target sequence for GLG1 (NM_012201.1,689-707).
gatgacggccatcattttt

SEQ ID NO: 171816 - DNA, 19 bp, Homo sapiens
  siRNA target sequence for GLG1 (NM_012201.1,692-710).
gacggccatcatttttagt

SEQ ID NO: 171817 - DNA, 19 bp, Homo sapiens
  siRNA target sequence for GLG1 (NM_012201.1,694-712).
cggccatcatttttagtga

SEQ ID NO: 171818 - DNA, 19 bp, Homo sapiens
  siRNA target sequence for GLG1 (NM_012201.1,697-715).
ccatcatttttagtgatta

SEQ ID NO: 171819 - DNA, 19 bp, Homo sapiens
  siRNA target sequence for GLG1 (NM_012201.1,778-796).
gtattcggcttggagaaaa

SEQ ID NO: 171820 - DNA, 19 bp, Homo sapiens
  siRNA target sequence for GLG1 (NM_012201.1,928-946).
catcggatgactttcactt

SEQ ID NO: 171821 - DNA, 19 bp, Homo sapiens
  siRNA target sequence for GLG1 (NM_012201.1,942-960).
cacttagaccggcatttat

SEQ ID NO: 171822 - DNA, 19 bp, Homo sapiens
  siRNA target sequence for GLG1 (NM_012201.1,944-962).
cttagaccggcatttatat

SEQ ID NO: 171823 - DNA, 19 bp, Homo sapiens
  siRNA target sequence for GLG1 (NM_012201.1,975-993).
gatgatcgggagcgttttt

SEQ ID NO: 171824 - DNA, 19 bp, Homo sapiens
  siRNA target sequence for GLG1 (NM_012201.1,983-1001).
ggagcgtttttgtgaaaat

SEQ ID NO: 171825 - DNA, 19 bp, Homo sapiens
  siRNA target sequence for GLG1 (NM_012201.1,986-1004).
gcgtttttgtgaaaataca

SEQ ID NO: 171826 - DNA, 19 bp, Homo sapiens
  siRNA target sequence for GLG1 (NM_012201.1,1014-1032).
gagggcagagtgtataagt

SEQ ID NO: 171827 - DNA, 19 bp, Homo sapiens
  siRNA target sequence for GLG1 (NM_012201.1,1023-1041).
gtgtataagtgcctcttta

SEQ ID NO: 171828 - DNA, 19 bp, Homo sapiens
  siRNA target sequence for GLG1 (NM_012201.1,1110-1128).
gcccaggattataaagtca

SEQ ID NO: 171829 - DNA, 19 bp, Homo sapiens
  siRNA target sequence for GLG1 (NM_012201.1,1115-1133).
ggattataaagtcagttat

SEQ ID NO: 171830 - DNA, 19 bp, Homo sapiens
  siRNA target sequence for GLG1 (NM_012201.1,1147-1165).
cctgtaaaagtgacttgaa

SEQ ID NO: 171831 - DNA, 19 bp, Homo sapiens
  siRNA target sequence for GLG1 (NM_012201.1,1213-1231).
ggctctcctacttgttaat

SEQ ID NO: 171832 - DNA, 19 bp, Homo sapiens
  siRNA target sequence for GLG1 (NM_012201.1,1296-1314).
gattaccgacgcatgttga

SEQ ID NO: 171833 - DNA, 19 bp, Homo sapiens
  siRNA target sequence for GLG1 (NM_012201.1,1306-1324).
gcatgttgatggaagactt

SEQ ID NO: 171834 - DNA, 19 bp, Homo sapiens
  siRNA target sequence for GLG1 (NM_012201.1,1373-1391).
ccattgttccggattacat

SEQ ID NO: 171835 - DNA, 19 bp, Homo sapiens
  siRNA target sequence for GLG1 (NM_012201.1,1378-1396).
gttccggattacatcgaaa

SEQ ID NO: 171836 - DNA, 19 bp, Homo sapiens
  siRNA target sequence for GLG1 (NM_012201.1,1405-1423).
ccctacactgtctgatgaa

SEQ ID NO: 171837 - DNA, 19 bp, Homo sapiens
  siRNA target sequence for GLG1 (NM_012201.1,1463-1481).
ccagcaggcgcttcaaaca

SEQ ID NO: 171838 - DNA, 19 bp, Homo sapiens
  siRNA target sequence for GLG1 (NM_012201.1,1469-1487).
ggcgcttcaaacactgatt

SEQ ID NO: 171839 - DNA, 19 bp, Homo sapiens
  siRNA target sequence for GLG1 (NM_012201.1,1471-1489).
cgcttcaaacactgattca

SEQ ID NO: 171840 - DNA, 19 bp, Homo sapiens
  siRNA target sequence for GLG1 (NM_012201.1,1516-1534).
gcattgatcgagctttgaa

SEQ ID NO: 171841 - DNA, 19 bp, Homo sapiens
  siRNA target sequence for GLG1 (NM_012201.1,1517-1535).
cattgatcgagctttgaat

SEQ ID NO: 171842 - DNA, 19 bp, Homo sapiens
  siRNA target sequence for GLG1 (NM_012201.1,1557-1575).
cagacagcctgcaaacata

SEQ ID NO: 171843 - DNA, 19 bp, Homo sapiens
  siRNA target sequence for GLG1 (NM_012201.1,1559-1577).
gacagcctgcaaacatata

SEQ ID NO: 171844 - DNA, 19 bp, Homo sapiens
  siRNA target sequence for GLG1 (NM_012201.1,1563-1581).
gcctgcaaacatataagat

SEQ ID NO: 171845 - DNA, 19 bp, Homo sapiens
  siRNA target sequence for GLG1 (NM_012201.1,1565-1583).
ctgcaaacatataagatct

SEQ ID NO: 171846 - DNA, 19 bp, Homo sapiens
  siRNA target sequence for GLG1 (NM_012201.1,1579-1597).
gatctggagacccaatgat

SEQ ID NO: 171847 - DNA, 19 bp, Homo sapiens
  siRNA target sequence for GLG1 (NM_012201.1,1603-1621).
cgtgcctgatggaacattt

SEQ ID NO: 171848 - DNA, 19 bp, Homo sapiens
  siRNA target sequence for GLG1 (NM_012201.1,1610-1628).
gatggaacatttatacaca

SEQ ID NO: 171849 - DNA, 19 bp, Homo sapiens
  siRNA target sequence for GLG1 (NM_012201.1,1646-1664).
ctgtgaacaccgtctctta

SEQ ID NO: 171850 - DNA, 19 bp, Homo sapiens
  siRNA target sequence for GLG1 (NM_012201.1,1648-1666).
gtgaacaccgtctcttaga

SEQ ID NO: 171851 - DNA, 19 bp, Homo sapiens
  siRNA target sequence for GLG1 (NM_012201.1,1665-1683).
gagctgcagtatttcatct

SEQ ID NO: 171852 - DNA, 19 bp, Homo sapiens
  siRNA target sequence for GLG1 (NM_012201.1,1931-1949).
ggataagtgcctgattgat

SEQ ID NO: 171853 - DNA, 19 bp, Homo sapiens
  siRNA target sequence for GLG1 (NM_012201.1,2027-2045).
ggtggagtgtagagatata

SEQ ID NO: 171854 - DNA, 19 bp, Homo sapiens
  siRNA target sequence for GLG1 (NM_012201.1,2107-2125).
cctgtgagcccataattca

SEQ ID NO: 171855 - DNA, 19 bp, Homo sapiens
  siRNA target sequence for GLG1 (NM_012201.1,2258-2276).
gaaggattttcggttttct

SEQ ID NO: 171856 - DNA, 19 bp, Homo sapiens
  siRNA target sequence for GLG1 (NM_012201.1,2268-2286).
cggttttcttacaagttta

SEQ ID NO: 171857 - DNA, 19 bp, Homo sapiens
  siRNA target sequence for GLG1 (NM_012201.1,2301-2319).
gaggacgtgttgaagcttt

SEQ ID NO: 171858 - DNA, 19 bp, Homo sapiens
  siRNA target sequence for GLG1 (NM_012201.1,2468-2486).
ccgcttggagccagatcta

SEQ ID NO: 171859 - DNA, 19 bp, Homo sapiens
  siRNA target sequence for GLG1 (NM_012201.1,2469-2487).
cgcttggagccagatctat

SEQ ID NO: 171860 - DNA, 19 bp, Homo sapiens
  siRNA target sequence for GLG1 (NM_012201.1,2470-2488).
gcttggagccagatctata

SEQ ID NO: 171861 - DNA, 19 bp, Homo sapiens
  siRNA target sequence for GLG1 (NM_012201.1,2494-2512).
cctgcaagagtgacatcaa

SEQ ID NO: 171862 - DNA, 19 bp, Homo sapiens
  siRNA target sequence for GLG1 (NM_012201.1,2539-2557).
gcaacgctcagattatcga

SEQ ID NO: 171863 - DNA, 19 bp, Homo sapiens
  siRNA target sequence for GLG1 (NM_012201.1,2540-2558).
caacgctcagattatcgaa

SEQ ID NO: 171864 - DNA, 19 bp, Homo sapiens
  siRNA target sequence for GLG1 (NM_012201.1,2545-2563).
ctcagattatcgaatgtct

SEQ ID NO: 171865 - DNA, 19 bp, Homo sapiens
  siRNA target sequence for GLG1 (NM_012201.1,2549-2567).
gattatcgaatgtctgaaa

SEQ ID NO: 171866 - DNA, 19 bp, Homo sapiens
  siRNA target sequence for GLG1 (NM_012201.1,2592-2610).
cgctgccaccaaaaagtat

SEQ ID NO: 171867 - DNA, 19 bp, Homo sapiens
  siRNA target sequence for GLG1 (NM_012201.1,2593-2611).
gctgccaccaaaaagtatt

SEQ ID NO: 171868 - DNA, 19 bp, Homo sapiens
  siRNA target sequence for GLG1 (NM_012201.1,2596-2614).
gccaccaaaaagtatttaa

SEQ ID NO: 171869 - DNA, 19 bp, Homo sapiens
  siRNA target sequence for GLG1 (NM_012201.1,2693-2711).
ctgtccggaagcagattct

SEQ ID NO: 171870 - DNA, 19 bp, Homo sapiens
  siRNA target sequence for GLG1 (NM_012201.1,2697-2715).
ccggaagcagattctaaaa

SEQ ID NO: 171871 - DNA, 19 bp, Homo sapiens
  siRNA target sequence for GLG1 (NM_012201.1,2723-2741).
gcagtgcttgaagcaaaat

SEQ ID NO: 171872 - DNA, 19 bp, Homo sapiens
  siRNA target sequence for GLG1 (NM_012201.1,2724-2742).
cagtgcttgaagcaaaata

SEQ ID NO: 171873 - DNA, 19 bp, Homo sapiens
  siRNA target sequence for GLG1 (NM_012201.1,2760-2778).
gatcccaaatgcaaacaga

SEQ ID NO: 171874 - DNA, 19 bp, Homo sapiens
  siRNA target sequence for GLG1 (NM_012201.1,2817-2835).
cgcttaaaccccatgttaa

SEQ ID NO: 171875 - DNA, 19 bp, Homo sapiens
  siRNA target sequence for GLG1 (NM_012201.1,2819-2837).
cttaaaccccatgttaaga

SEQ ID NO: 171876 - DNA, 19 bp, Homo sapiens
  siRNA target sequence for GLG1 (NM_012201.1,2850-2868).
gctgacattcctaaattct

SEQ ID NO: 171877 - DNA, 19 bp, Homo sapiens
  siRNA target sequence for GLG1 (NM_012201.1,2869-2887).
gtcacggtatcctgactaa

SEQ ID NO: 171878 - DNA, 19 bp, Homo sapiens
  siRNA target sequence for GLG1 (NM_012201.1,2889-2907).
gccaaggatgattcagaat

SEQ ID NO: 171879 - DNA, 19 bp, Homo sapiens
  siRNA target sequence for GLG1 (NM_012201.1,2930-2948).
cctgaagctgagatatgct

SEQ ID NO: 171880 - DNA, 19 bp, Homo sapiens
  siRNA target sequence for GLG1 (NM_012201.1,3053-3071).
cgagatctccagtctatgt

SEQ ID NO: 171881 - DNA, 19 bp, Homo sapiens
  siRNA target sequence for GLG1 (NM_012201.1,3207-3225).
gttgacccggtacttcata

SEQ ID NO: 171882 - DNA, 19 bp, Homo sapiens
  siRNA target sequence for GLG1 (NM_012201.1,3228-3246).
gcttgtgccctggacatta

SEQ ID NO: 171883 - DNA, 19 bp, Homo sapiens
  siRNA target sequence for GLG1 (NM_012201.1,3229-3247).
cttgtgccctggacattaa

SEQ ID NO: 171884 - DNA, 19 bp, Homo sapiens
  siRNA target sequence for GLG1 (NM_012201.1,3343-3361).
gcaaaaagcgcctcaatga

SEQ ID NO: 171885 - DNA, 19 bp, Homo sapiens
  siRNA target sequence for GLG1 (NM_012201.1,3354-3372).
ctcaatgaccggattgaga

SEQ ID NO: 171886 - DNA, 19 bp, Homo sapiens
  siRNA target sequence for GLG1 (NM_012201.1,3439-3457).
cgtctccatctaagaacta

SEQ ID NO: 171887 - DNA, 19 bp, Homo sapiens
  siRNA target sequence for GLG1 (NM_012201.1,3442-3460).
ctccatctaagaactacat

SEQ ID NO: 171888 - DNA, 19 bp, Homo sapiens
  siRNA target sequence for GLG1 (NM_012201.1,3445-3463).
catctaagaactacattct

SEQ ID NO: 171889 - DNA, 19 bp, Homo sapiens
  siRNA target sequence for GLG1 (NM_012201.1,3473-3491).
cagtgggagcatctgtata

SEQ ID NO: 171890 - DNA, 19 bp, Homo sapiens
  siRNA target sequence for GLG1 (NM_012201.1,3475-3493).
gtgggagcatctgtatatt

SEQ ID NO: 171891 - DNA, 19 bp, Homo sapiens
  siRNA target sequence for GLG1 (NM_012201.1,3477-3495).
gggagcatctgtatattgt

SEQ ID NO: 171892 - DNA, 19 bp, Homo sapiens
  siRNA target sequence for GLMN (NM_007070.2,105-123).
ggaacttcagtctataata

SEQ ID NO: 171893 - DNA, 19 bp, Homo sapiens
  siRNA target sequence for GLMN (NM_007070.2,112-130).
cagtctataataaagagat

SEQ ID NO: 171894 - DNA, 19 bp, Homo sapiens
  siRNA target sequence for GLMN (NM_007070.2,139-157).
ctagaagagcaagacttta

SEQ ID NO: 171895 - DNA, 19 bp, Homo sapiens
  siRNA target sequence for GLMN (NM_007070.2,166-184).
gattttggcctatttcagt

SEQ ID NO: 171896 - DNA, 19 bp, Homo sapiens
  siRNA target sequence for GLMN (NM_007070.2,192-210).
gcaaagatgcatagaagaa

SEQ ID NO: 171897 - DNA, 19 bp, Homo sapiens
  siRNA target sequence for GLMN (NM_007070.2,212-230).
ggcacacagaccagctatt

SEQ ID NO: 171898 - DNA, 19 bp, Homo sapiens
  siRNA target sequence for GLMN (NM_007070.2,213-231).
gcacacagaccagctatta

SEQ ID NO: 171899 - DNA, 19 bp, Homo sapiens
  siRNA target sequence for GLMN (NM_007070.2,218-236).
cagaccagctattagaaat

SEQ ID NO: 171900 - DNA, 19 bp, Homo sapiens
  siRNA target sequence for GLMN (NM_007070.2,225-243).
gctattagaaattattcaa

SEQ ID NO: 171901 - DNA, 19 bp, Homo sapiens
  siRNA target sequence for GLMN (NM_007070.2,226-244).
ctattagaaattattcaaa

SEQ ID NO: 171902 - DNA, 19 bp, Homo sapiens
  siRNA target sequence for GLMN (NM_007070.2,298-316).
gttgttcgatgccttttgt

SEQ ID NO: 171903 - DNA, 19 bp, Homo sapiens
  siRNA target sequence for GLMN (NM_007070.2,373-391).
gtaaagttatgcaatccaa

SEQ ID NO: 171904 - DNA, 19 bp, Homo sapiens
  siRNA target sequence for GLMN (NM_007070.2,378-396).
gttatgcaatccaaaggaa

SEQ ID NO: 171905 - DNA, 19 bp, Homo sapiens
  siRNA target sequence for GLMN (NM_007070.2,407-425).
gtttgcttgaactgattga

SEQ ID NO: 171906 - DNA, 19 bp, Homo sapiens
  siRNA target sequence for GLMN (NM_007070.2,427-445).
gagccctctggaaaacaga

SEQ ID NO: 171907 - DNA, 19 bp, Homo sapiens
  siRNA target sequence for GLMN (NM_007070.2,429-447).
gccctctggaaaacagata

SEQ ID NO: 171908 - DNA, 19 bp, Homo sapiens
  siRNA target sequence for GLMN (NM_007070.2,430-448).
ccctctggaaaacagatat

SEQ ID NO: 171909 - DNA, 19 bp, Homo sapiens
  siRNA target sequence for GLMN (NM_007070.2,444-462).
gatatcccaaagtattctt

SEQ ID NO: 171910 - DNA, 19 bp, Homo sapiens
  siRNA target sequence for GLMN (NM_007070.2,468-486).
gcttcagccattacaaaca

SEQ ID NO: 171911 - DNA, 19 bp, Homo sapiens
  siRNA target sequence for GLMN (NM_007070.2,499-517).
cttcataacaaggcatatt

SEQ ID NO: 171912 - DNA, 19 bp, Homo sapiens
  siRNA target sequence for GLMN (NM_007070.2,510-528).
ggcatattcaattggatta

SEQ ID NO: 171913 - DNA, 19 bp, Homo sapiens
  siRNA target sequence for GLMN (NM_007070.2,618-636).
gtgttgcaaggccttaata

SEQ ID NO: 171914 - DNA, 19 bp, Homo sapiens
  siRNA target sequence for GLMN (NM_007070.2,620-638).
gttgcaaggccttaataga

SEQ ID NO: 171915 - DNA, 19 bp, Homo sapiens
  siRNA target sequence for GLMN (NM_007070.2,749-767).
ctttgctgacagcacaatt

SEQ ID NO: 171916 - DNA, 19 bp, Homo sapiens
  siRNA target sequence for GLMN (NM_007070.2,753-771).
gctgacagcacaattcttt

SEQ ID NO: 171917 - DNA, 19 bp, Homo sapiens
  siRNA target sequence for GLMN (NM_007070.2,799-817).
cctttcaggtattttgcat

SEQ ID NO: 171918 - DNA, 19 bp, Homo sapiens
  siRNA target sequence for GLMN (NM_007070.2,814-832).
gcatcagaaataataggtt

SEQ ID NO: 171919 - DNA, 19 bp, Homo sapiens
  siRNA target sequence for GLMN (NM_007070.2,815-833).
catcagaaataataggttt

SEQ ID NO: 171920 - DNA, 19 bp, Homo sapiens
  siRNA target sequence for GLMN (NM_007070.2,953-971).
cttctctggcatatctagt

SEQ ID NO: 171921 - DNA, 19 bp, Homo sapiens
  siRNA target sequence for GLMN (NM_007070.2,962-980).
catatctagtatttgtaca

SEQ ID NO: 171922 - DNA, 19 bp, Homo sapiens
  siRNA target sequence for GLMN (NM_007070.2,1044-1062).
ggggcacattgaagtcttt

SEQ ID NO: 171923 - DNA, 19 bp, Homo sapiens
  siRNA target sequence for GLMN (NM_007070.2,1046-1064).
ggcacattgaagtcttttt

SEQ ID NO: 171924 - DNA, 19 bp, Homo sapiens
  siRNA target sequence for GLMN (NM_007070.2,1104-1122).
gctgctggagaatagttta

SEQ ID NO: 171925 - DNA, 19 bp, Homo sapiens
  siRNA target sequence for GLMN (NM_007070.2,1105-1123).
ctgctggagaatagtttat

SEQ ID NO: 171926 - DNA, 19 bp, Homo sapiens
  siRNA target sequence for GLMN (NM_007070.2,1187-1205).
ctcagggcttagtgaaagt

SEQ ID NO: 171927 - DNA, 19 bp, Homo sapiens
  siRNA target sequence for GLMN (NM_007070.2,1189-1207).
cagggcttagtgaaagtaa

SEQ ID NO: 171928 - DNA, 19 bp, Homo sapiens
  siRNA target sequence for GLMN (NM_007070.2,1249-1267).
gctatgcttcagctgtata

SEQ ID NO: 171929 - DNA, 19 bp, Homo sapiens
  siRNA target sequence for GLMN (NM_007070.2,1250-1268).
ctatgcttcagctgtatat

SEQ ID NO: 171930 - DNA, 19 bp, Homo sapiens
  siRNA target sequence for GLMN (NM_007070.2,1258-1276).
cagctgtatattaacaagt

SEQ ID NO: 171931 - DNA, 19 bp, Homo sapiens
  siRNA target sequence for GLMN (NM_053274.1,1310-1328).
gcttattgaatacaagtaa

SEQ ID NO: 171932 - DNA, 19 bp, Homo sapiens
  siRNA target sequence for GLMN (NM_053274.1,1311-1329).
cttattgaatacaagtaat

SEQ ID NO: 171933 - DNA, 19 bp, Homo sapiens
  siRNA target sequence for GLMN (NM_053274.1,1428-1446).
gttgatttcccttcttgat

SEQ ID NO: 171934 - DNA, 19 bp, Homo sapiens
  siRNA target sequence for GLMN (NM_053274.1,1582-1600).
gaacttggaaatattgaga

SEQ ID NO: 171935 - DNA, 19 bp, Homo sapiens
  siRNA target sequence for GLMN (NM_053274.1,1608-1626).
cttaaagccacttcatata

SEQ ID NO: 171936 - DNA, 19 bp, Homo sapiens
  siRNA target sequence for GLMN (NM_053274.1,1618-1636).
cttcatataggacttaata

SEQ ID NO: 171937 - DNA, 19 bp, Homo sapiens
  siRNA target sequence for GLMN (NM_053274.1,1680-1698).
ggcccagaaatctaaagat

SEQ ID NO: 171938 - DNA, 19 bp, Homo sapiens
  siRNA target sequence for GLMN (NM_053274.1,1682-1700).
cccagaaatctaaagatct

SEQ ID NO: 171939 - DNA, 19 bp, Homo sapiens
  siRNA target sequence for GLMN (NM_053274.1,1691-1709).
ctaaagatctttgttctat

SEQ ID NO: 171940 - DNA, 19 bp, Homo sapiens
  siRNA target sequence for GLMN (NM_053274.1,1699-1717).
ctttgttctataactgtaa

SEQ ID NO: 171941 - DNA, 19 bp, Homo sapiens
  siRNA target sequence for GLMN (NM_053274.1,1720-1738).
ggagaagagatccctaata

SEQ ID NO: 171942 - DNA, 19 bp, Homo sapiens
  siRNA target sequence for GLMN (NM_053274.1,1721-1739).
gagaagagatccctaatat

SEQ ID NO: 171943 - DNA, 19 bp, Homo sapiens
  siRNA target sequence for GLMN (NM_053274.1,1733-1751).
ctaatatgcctcctgaaat

SEQ ID NO: 171944 - DNA, 19 bp, Homo sapiens
  siRNA target sequence for GLMN (NM_053274.1,1745-1763).
ctgaaatgcagcttaaggt

SEQ ID NO: 171945 - DNA, 19 bp, Homo sapiens
  siRNA target sequence for GLMN (NM_053274.1,1782-1800).
cacatttgatttgattgaa

SEQ ID NO: 171946 - DNA, 19 bp, Homo sapiens
  siRNA target sequence for GLMN (NM_053274.1,1811-1829).
ctcgagtggaagaactcat

SEQ ID NO: 171947 - DNA, 19 bp, Homo sapiens
  siRNA target sequence for ICOSL (NM_015259.2,232-250).
ggaagccgttttgatttaa

SEQ ID NO: 171948 - DNA, 19 bp, Homo sapiens
  siRNA target sequence for ICOSL (NM_015259.2,236-254).
gccgttttgatttaaatga

SEQ ID NO: 171949 - DNA, 19 bp, Homo sapiens
  siRNA target sequence for ICOSL (NM_015259.2,271-289).
caaaccagtgagtcgaaaa

SEQ ID NO: 171950 - DNA, 19 bp, Homo sapiens
  siRNA target sequence for ICOSL (NM_015259.2,427-445).
gacgagcagaagtttcact

SEQ ID NO: 171951 - DNA, 19 bp, Homo sapiens
  siRNA target sequence for ICOSL (NM_015259.2,469-487).
ggattccaggaggttttga

SEQ ID NO: 171952 - DNA, 19 bp, Homo sapiens
  siRNA target sequence for ICOSL (NM_015259.2,609-627).
caacgtgtactggatcaat

SEQ ID NO: 171953 - DNA, 19 bp, Homo sapiens
  siRNA target sequence for ICOSL (NM_015259.2,792-810).
cggcagccagacaggaaat

SEQ ID NO: 171954 - DNA, 19 bp, Homo sapiens
  siRNA target sequence for ICOSL (NM_015259.2,847-865).
gtcagtaccggcgagaaaa

SEQ ID NO: 171955 - DNA, 19 bp, Homo sapiens
  siRNA target sequence for NMU (NM_006681.1,212-230).
gccgaggtgctccaatatt

SEQ ID NO: 171956 - DNA, 19 bp, Homo sapiens
  siRNA target sequence for NMU (NM_006681.1,213-231).
ccgaggtgctccaatatta

SEQ ID NO: 171957 - DNA, 19 bp, Homo sapiens
  siRNA target sequence for NMU (NM_006681.1,270-288).
gaatgagatagatgatact

SEQ ID NO: 171958 - DNA, 19 bp, Homo sapiens
  siRNA target sequence for NMU (NM_006681.1,335-353).
cactggaggagctttgctt

SEQ ID NO: 171959 - DNA, 19 bp, Homo sapiens
  siRNA target sequence for NMU (NM_006681.1,533-551).
gagtggacgaagaattcca

SEQ ID NO: 171960 - DNA, 19 bp, Homo sapiens
  siRNA target sequence for PCSK1N (NM_013271.2,617-635).
cttgctgggacggattctt

SEQ ID NO: 171961 - DNA, 19 bp, Homo sapiens
  siRNA target sequence for PLXNC1 (NM_005761.1,1233-1251).
ctgcctcttcagaatgagt

SEQ ID NO: 171962 - DNA, 19 bp, Homo sapiens
  siRNA target sequence for PLXNC1 (NM_005761.1,1276-1294).
gtcagctgggacttcaaga

SEQ ID NO: 171963 - DNA, 19 bp, Homo sapiens
  siRNA target sequence for PLXNC1 (NM_005761.1,1299-1317).
cgagagccactgcaaagaa

SEQ ID NO: 171964 - DNA, 19 bp, Homo sapiens
  siRNA target sequence for PLXNC1 (NM_005761.1,1339-1357).
caaccaatcgcatcatcta

SEQ ID NO: 171965 - DNA, 19 bp, Homo sapiens
  siRNA target sequence for PLXNC1 (NM_005761.1,1371-1389).
cgacctgacatccgtttat

SEQ ID NO: 171966 - DNA, 19 bp, Homo sapiens
  siRNA target sequence for PLXNC1 (NM_005761.1,1390-1408).
ggcaccgtggtaatgaaca

SEQ ID NO: 171967 - DNA, 19 bp, Homo sapiens
  siRNA target sequence for PLXNC1 (NM_005761.1,1432-1450).
ggagatggccagttactta

SEQ ID NO: 171968 - DNA, 19 bp, Homo sapiens
  siRNA target sequence for PLXNC1 (NM_005761.1,1439-1457).
gccagttacttaaggttat

SEQ ID NO: 171969 - DNA, 19 bp, Homo sapiens
  siRNA target sequence for PLXNC1 (NM_005761.1,1443-1461).
gttacttaaggttattctt

SEQ ID NO: 171970 - DNA, 19 bp, Homo sapiens
  siRNA target sequence for PLXNC1 (NM_005761.1,1459-1477).
cttggtgagaatttgactt

SEQ ID NO: 171971 - DNA, 19 bp, Homo sapiens
  siRNA target sequence for PLXNC1 (NM_005761.1,1462-1480).
ggtgagaatttgacttcaa

SEQ ID NO: 171972 - DNA, 19 bp, Homo sapiens
  siRNA target sequence for PLXNC1 (NM_005761.1,1463-1481).
gtgagaatttgacttcaaa

SEQ ID NO: 171973 - DNA, 19 bp, Homo sapiens
  siRNA target sequence for PLXNC1 (NM_005761.1,1513-1531).
gagacacctgttttctaca

SEQ ID NO: 171974 - DNA, 19 bp, Homo sapiens
  siRNA target sequence for PLXNC1 (NM_005761.1,1592-1610).
ggagaattcgtgttgcaaa

SEQ ID NO: 171975 - DNA, 19 bp, Homo sapiens
  siRNA target sequence for PLXNC1 (NM_005761.1,1600-1618).
cgtgttgcaaactgcaata

SEQ ID NO: 171976 - DNA, 19 bp, Homo sapiens
  siRNA target sequence for PLXNC1 (NM_005761.1,1601-1619).
gtgttgcaaactgcaataa

SEQ ID NO: 171977 - DNA, 19 bp, Homo sapiens
  siRNA target sequence for PLXNC1 (NM_005761.1,1703-1721).
gagattgtgtacattcaga

SEQ ID NO: 171978 - DNA, 19 bp, Homo sapiens
  siRNA target sequence for PLXNC1 (NM_005761.1,1709-1727).
gtgtacattcagagaactt

SEQ ID NO: 171979 - DNA, 19 bp, Homo sapiens
  siRNA target sequence for PLXNC1 (NM_005761.1,1764-1782).
gtgccctaaaattcagata

SEQ ID NO: 171980 - DNA, 19 bp, Homo sapiens
  siRNA target sequence for PLXNC1 (NM_005761.1,1779-1797).
gataattcgaagcagtaaa

SEQ ID NO: 171981 - DNA, 19 bp, Homo sapiens
  siRNA target sequence for PLXNC1 (NM_005761.1,1944-1962).
ctacaaagatgtttcagtt

SEQ ID NO: 171982 - DNA, 19 bp, Homo sapiens
  siRNA target sequence for PLXNC1 (NM_005761.1,1980-1998).
cttcggttcttggaattta

SEQ ID NO: 171983 - DNA, 19 bp, Homo sapiens
  siRNA target sequence for PLXNC1 (NM_005761.1,1991-2009).
ggaatttatcagacagatt

SEQ ID NO: 171984 - DNA, 19 bp, Homo sapiens
  siRNA target sequence for PLXNC1 (NM_005761.1,2022-2040).
ctgctcatcattaaaagaa

SEQ ID NO: 171985 - DNA, 19 bp, Homo sapiens
  siRNA target sequence for PLXNC1 (NM_005761.1,2062-2080).
ggctgcgcgtggtgtaaaa

SEQ ID NO: 171986 - DNA, 19 bp, Homo sapiens
  siRNA target sequence for PLXNC1 (NM_005761.1,2064-2082).
ctgcgcgtggtgtaaaagt

SEQ ID NO: 171987 - DNA, 19 bp, Homo sapiens
  siRNA target sequence for PLXNC1 (NM_005761.1,2110-2128).
gcttgcgacccttctgatt

SEQ ID NO: 171988 - DNA, 19 bp, Homo sapiens
  siRNA target sequence for PLXNC1 (NM_005761.1,2111-2129).
cttgcgacccttctgatta

SEQ ID NO: 171989 - DNA, 19 bp, Homo sapiens
  siRNA target sequence for PLXNC1 (NM_005761.1,2114-2132).
gcgacccttctgattatga

SEQ ID NO: 171990 - DNA, 19 bp, Homo sapiens
  siRNA target sequence for PLXNC1 (NM_005761.1,2116-2134).
gacccttctgattatgaga

SEQ ID NO: 171991 - DNA, 19 bp, Homo sapiens
  siRNA target sequence for PLXNC1 (NM_005761.1,2155-2173).
gtggctgtcgagaagacat

SEQ ID NO: 171992 - DNA, 19 bp, Homo sapiens
  siRNA target sequence for PLXNC1 (NM_005761.1,2221-2239).
gctttacaggtcttctaca

SEQ ID NO: 171993 - DNA, 19 bp, Homo sapiens
  siRNA target sequence for PLXNC1 (NM_005761.1,2227-2245).
caggtcttctacattaagt

SEQ ID NO: 171994 - DNA, 19 bp, Homo sapiens
  siRNA target sequence for PLXNC1 (NM_005761.1,2267-2285).
cgacattagggaaaagcaa

SEQ ID NO: 171995 - DNA, 19 bp, Homo sapiens
  siRNA target sequence for PLXNC1 (NM_005761.1,2315-2333).
gggcatcgaacatcacaat

SEQ ID NO: 171996 - DNA, 19 bp, Homo sapiens
  siRNA target sequence for PLXNC1 (NM_005761.1,2318-2336).
catcgaacatcacaatgat

SEQ ID NO: 171997 - DNA, 19 bp, Homo sapiens
  siRNA target sequence for PLXNC1 (NM_005761.1,2344-2362).
ggaaccagtacctgtgata

SEQ ID NO: 171998 - DNA, 19 bp, Homo sapiens
  siRNA target sequence for PLXNC1 (NM_005761.1,2345-2363).
gaaccagtacctgtgataa

SEQ ID NO: 171999 - DNA, 19 bp, Homo sapiens
  siRNA target sequence for PLXNC1 (NM_005761.1,2348-2366).
ccagtacctgtgataagga

SEQ ID NO: 172000 - DNA, 19 bp, Homo sapiens
  siRNA target sequence for PLXNC1 (NM_005761.1,2349-2367).
cagtacctgtgataaggat

SEQ ID NO: 172001 - DNA, 19 bp, Homo sapiens
  siRNA target sequence for PLXNC1 (NM_005761.1,2355-2373).
ctgtgataaggatgtgata

SEQ ID NO: 172002 - DNA, 19 bp, Homo sapiens
  siRNA target sequence for PLXNC1 (NM_005761.1,2357-2375).
gtgataaggatgtgataca

SEQ ID NO: 172003 - DNA, 19 bp, Homo sapiens
  siRNA target sequence for PLXNC1 (NM_005761.1,2376-2394).
ggttagccatgtgctaaat

SEQ ID NO: 172004 - DNA, 19 bp, Homo sapiens
  siRNA target sequence for PLXNC1 (NM_005761.1,2475-2493).
ctcttctgtgggatcctta

SEQ ID NO: 172005 - DNA, 19 bp, Homo sapiens
  siRNA target sequence for PLXNC1 (NM_005761.1,2480-2498).
ctgtgggatccttatccta

SEQ ID NO: 172006 - DNA, 19 bp, Homo sapiens
  siRNA target sequence for PLXNC1 (NM_005761.1,2484-2502).
gggatccttatcctacatt

SEQ ID NO: 172007 - DNA, 19 bp, Homo sapiens
  siRNA target sequence for PLXNC1 (NM_005761.1,2510-2528).
cacattgttcccttatatt

SEQ ID NO: 172008 - DNA, 19 bp, Homo sapiens
  siRNA target sequence for PLXNC1 (NM_005761.1,2544-2562).
gatcagtggtggtcaaaat

SEQ ID NO: 172009 - DNA, 19 bp, Homo sapiens
  siRNA target sequence for PLXNC1 (NM_005761.1,2551-2569).
ggtggtcaaaatataacca

SEQ ID NO: 172010 - DNA, 19 bp, Homo sapiens
  siRNA target sequence for PLXNC1 (NM_005761.1,2552-2570).
gtggtcaaaatataaccat

SEQ ID NO: 172011 - DNA, 19 bp, Homo sapiens
  siRNA target sequence for PLXNC1 (NM_005761.1,2567-2585).
ccatgatgggcagaaattt

SEQ ID NO: 172012 - DNA, 19 bp, Homo sapiens
  siRNA target sequence for PLXNC1 (NM_005761.1,2601-2619).
cttaatcatttcacatgaa

SEQ ID NO: 172013 - DNA, 19 bp, Homo sapiens
  siRNA target sequence for PLXNC1 (NM_005761.1,2657-2675).
cgacttactgcgggttttt

SEQ ID NO: 172014 - DNA, 19 bp, Homo sapiens
  siRNA target sequence for PLXNC1 (NM_005761.1,2658-2676).
gacttactgcgggttttta

SEQ ID NO: 172015 - DNA, 19 bp, Homo sapiens
  siRNA target sequence for PLXNC1 (NM_005761.1,2677-2695).
gcccccagtttaaagagtt

SEQ ID NO: 172016 - DNA, 19 bp, Homo sapiens
  siRNA target sequence for PLXNC1 (NM_005761.1,2684-2702).
gtttaaagagttcaaaagt

SEQ ID NO: 172017 - DNA, 19 bp, Homo sapiens
  siRNA target sequence for PLXNC1 (NM_005761.1,2901-2919).
ggaaaatgggcaattaaat

SEQ ID NO: 172018 - DNA, 19 bp, Homo sapiens
  siRNA target sequence for PLXNC1 (NM_005761.1,2999-3017).
ccattgccaactcttctaa

SEQ ID NO: 172019 - DNA, 19 bp, Homo sapiens
  siRNA target sequence for PLXNC1 (NM_005761.1,3005-3023).
ccaactcttctaagaaagt

SEQ ID NO: 172020 - DNA, 19 bp, Homo sapiens
  siRNA target sequence for PLXNC1 (NM_005761.1,3080-3098).
catggtattttctgattgt

SEQ ID NO: 172021 - DNA, 19 bp, Homo sapiens
  siRNA target sequence for PLXNC1 (NM_005761.1,3102-3120).
ccctgtcttgctagtgatt

SEQ ID NO: 172022 - DNA, 19 bp, Homo sapiens
  siRNA target sequence for PLXNC1 (NM_005761.1,3206-3224).
gcgagctccggaaagagat

SEQ ID NO: 172023 - DNA, 19 bp, Homo sapiens
  siRNA target sequence for PLXNC1 (NM_005761.1,3207-3225).
cgagctccggaaagagata

SEQ ID NO: 172024 - DNA, 19 bp, Homo sapiens
  siRNA target sequence for PLXNC1 (NM_005761.1,3291-3309).
cttccttgactacaaacat

SEQ ID NO: 172025 - DNA, 19 bp, Homo sapiens
  siRNA target sequence for PLXNC1 (NM_005761.1,3357-3375).
cttcactgaagatatgcat

SEQ ID NO: 172026 - DNA, 19 bp, Homo sapiens
  siRNA target sequence for PLXNC1 (NM_005761.1,3380-3398).
gagacgccaacgacaagaa

SEQ ID NO: 172027 - DNA, 19 bp, Homo sapiens
  siRNA target sequence for PLXNC1 (NM_005761.1,3384-3402).
cgccaacgacaagaatgaa

SEQ ID NO: 172028 - DNA, 19 bp, Homo sapiens
  siRNA target sequence for PLXNC1 (NM_005761.1,3412-3430).
gctttggatgccctaatct

SEQ ID NO: 172029 - DNA, 19 bp, Homo sapiens
  siRNA target sequence for PLXNC1 (NM_005761.1,3417-3435).
ggatgccctaatctgtaat

SEQ ID NO: 172030 - DNA, 19 bp, Homo sapiens
  siRNA target sequence for PLXNC1 (NM_005761.1,3418-3436).
gatgccctaatctgtaata

SEQ ID NO: 172031 - DNA, 19 bp, Homo sapiens
  siRNA target sequence for PLXNC1 (NM_005761.1,3421-3439).
gccctaatctgtaataaaa

SEQ ID NO: 172032 - DNA, 19 bp, Homo sapiens
  siRNA target sequence for PLXNC1 (NM_005761.1,3454-3472).
gtcatccacacccttgaaa

SEQ ID NO: 172033 - DNA, 19 bp, Homo sapiens
  siRNA target sequence for PLXNC1 (NM_005761.1,3635-3653).
cggagtccgtcgtcgaaaa

SEQ ID NO: 172034 - DNA, 19 bp, Homo sapiens
  siRNA target sequence for PLXNC1 (NM_005761.1,3636-3654).
ggagtccgtcgtcgaaaaa

SEQ ID NO: 172035 - DNA, 19 bp, Homo sapiens
  siRNA target sequence for PLXNC1 (NM_005761.1,3649-3667).
gaaaaactcctcacaaact

SEQ ID NO: 172036 - DNA, 19 bp, Homo sapiens
  siRNA target sequence for PLXNC1 (NM_005761.1,3706-3724).
gtcggagagcccttctatt

SEQ ID NO: 172037 - DNA, 19 bp, Homo sapiens
  siRNA target sequence for PLXNC1 (NM_005761.1,3710-3728).
gagagcccttctatttgct

SEQ ID NO: 172038 - DNA, 19 bp, Homo sapiens
  siRNA target sequence for PLXNC1 (NM_005761.1,3763-3781).
cccgtggatgtaatcactt

SEQ ID NO: 172039 - DNA, 19 bp, Homo sapiens
  siRNA target sequence for PLXNC1 (NM_005761.1,3789-3807).
cctgtacacacttaatgaa

SEQ ID NO: 172040 - DNA, 19 bp, Homo sapiens
  siRNA target sequence for PLXNC1 (NM_005761.1,3823-3841).
caggttccggaattcagta

SEQ ID NO: 172041 - DNA, 19 bp, Homo sapiens
  siRNA target sequence for PLXNC1 (NM_005761.1,3839-3857).
gtactgtggcattaaacgt

SEQ ID NO: 172042 - DNA, 19 bp, Homo sapiens
  siRNA target sequence for PLXNC1 (NM_005761.1,3848-3866).
cattaaacgtcgtctttga

SEQ ID NO: 172043 - DNA, 19 bp, Homo sapiens
  siRNA target sequence for PLXNC1 (NM_005761.1,3890-3908).
cagatgtctgtcggaatat

SEQ ID NO: 172044 - DNA, 19 bp, Homo sapiens
  siRNA target sequence for PLXNC1 (NM_005761.1,3892-3910).
gatgtctgtcggaatattt

SEQ ID NO: 172045 - DNA, 19 bp, Homo sapiens
  siRNA target sequence for PLXNC1 (NM_005761.1,3963-3981).
ccaagcattcttaagcaaa

SEQ ID NO: 172046 - DNA, 19 bp, Homo sapiens
  siRNA target sequence for PLXNC1 (NM_005761.1,3964-3982).
caagcattcttaagcaaaa

SEQ ID NO: 172047 - DNA, 19 bp, Homo sapiens
  siRNA target sequence for PLXNC1 (NM_005761.1,3992-4010).
cttatggacttcagcttaa

SEQ ID NO: 172048 - DNA, 19 bp, Homo sapiens
  siRNA target sequence for PLXNC1 (NM_005761.1,3997-4015).
ggacttcagcttaatgaaa

SEQ ID NO: 172049 - DNA, 19 bp, Homo sapiens
  siRNA target sequence for PLXNC1 (NM_005761.1,4037-4055).
gcacacgacagaaagaact

SEQ ID NO: 172050 - DNA, 19 bp, Homo sapiens
  siRNA target sequence for PLXNC1 (NM_005761.1,4068-4086).
cagttcctccgtgattctt

SEQ ID NO: 172051 - DNA, 19 bp, Homo sapiens
  siRNA target sequence for PLXNC1 (NM_005761.1,4070-4088).
gttcctccgtgattcttga

SEQ ID NO: 172052 - DNA, 19 bp, Homo sapiens
  siRNA target sequence for PLXNC1 (NM_005761.1,4112-4130).
ccattggccactatgagat

SEQ ID NO: 172053 - DNA, 19 bp, Homo sapiens
  siRNA target sequence for PLXNC1 (NM_005761.1,4113-4131).
cattggccactatgagata

SEQ ID NO: 172054 - DNA, 19 bp, Homo sapiens
  siRNA target sequence for PLXNC1 (NM_005761.1,4117-4135).
ggccactatgagatatcaa

SEQ ID NO: 172055 - DNA, 19 bp, Homo sapiens
  siRNA target sequence for PLXNC1 (NM_005761.1,4133-4151).
caaatggatccactataaa

SEQ ID NO: 172056 - DNA, 19 bp, Homo sapiens
  siRNA target sequence for PLXNC1 (NM_005761.1,4138-4156).
ggatccactataaaagtct

SEQ ID NO: 172057 - DNA, 19 bp, Homo sapiens
  siRNA target sequence for PLXNC1 (NM_005761.1,4139-4157).
gatccactataaaagtctt

SEQ ID NO: 172058 - DNA, 19 bp, Homo sapiens
  siRNA target sequence for PLXNC1 (NM_005761.1,4142-4160).
ccactataaaagtctttaa

SEQ ID NO: 172059 - DNA, 19 bp, Homo sapiens
  siRNA target sequence for PLXNC1 (NM_005761.1,4264-4282).
cgagggaagcacaagttca

SEQ ID NO: 172060 - DNA, 19 bp, Homo sapiens
  siRNA target sequence for PLXNC1 (NM_005761.1,4316-4334).
cgaccaaggtggcaattca

SEQ ID NO: 172061 - DNA, 19 bp, Homo sapiens
  siRNA target sequence for PLXNC1 (NM_005761.1,4339-4357).
gtgcttgaaaaacttttta

SEQ ID NO: 172062 - DNA, 19 bp, Homo sapiens
  siRNA target sequence for PLXNC1 (NM_005761.1,4380-4398).
cagcagagctccatttgct

SEQ ID NO: 172063 - DNA, 19 bp, Homo sapiens
  siRNA target sequence for PLXNC1 (NM_005761.1,4383-4401).
cagagctccatttgctata

SEQ ID NO: 172064 - DNA, 19 bp, Homo sapiens
  siRNA target sequence for PLXNC1 (NM_005761.1,4385-4403).
gagctccatttgctataaa

SEQ ID NO: 172065 - DNA, 19 bp, Homo sapiens
  siRNA target sequence for PLXNC1 (NM_005761.1,4453-4471).
gatcctgacgtcgtacata

SEQ ID NO: 172066 - DNA, 19 bp, Homo sapiens
  siRNA target sequence for PLXNC1 (NM_005761.1,4459-4477).
gacgtcgtacatatttgga

SEQ ID NO: 172067 - DNA, 19 bp, Homo sapiens
  siRNA target sequence for PLXNC1 (NM_005761.1,4461-4479).
cgtcgtacatatttggaaa

SEQ ID NO: 172068 - DNA, 19 bp, Homo sapiens
  siRNA target sequence for PLXNC1 (NM_005761.1,4462-4480).
gtcgtacatatttggaaaa

SEQ ID NO: 172069 - DNA, 19 bp, Homo sapiens
  siRNA target sequence for PLXNC1 (NM_005761.1,4464-4482).
cgtacatatttggaaaaca

SEQ ID NO: 172070 - DNA, 19 bp, Homo sapiens
  siRNA target sequence for PLXNC1 (NM_005761.1,4495-4513).
cttcgcttctgggtaaaca

SEQ ID NO: 172071 - DNA, 19 bp, Homo sapiens
  siRNA target sequence for PLXNC1 (NM_005761.1,4566-4584).
cggctgtttgtcagtgatt

SEQ ID NO: 172072 - DNA, 19 bp, Homo sapiens
  siRNA target sequence for PLXNC1 (NM_005761.1,4631-4649).
ggaaggaagcaccaactaa

SEQ ID NO: 172073 - DNA, 19 bp, Homo sapiens
  siRNA target sequence for PLXNC1 (NM_005761.1,4734-4752).
gtcatcctcagaaatggaa

SEQ ID NO: 172074 - DNA, 19 bp, Homo sapiens
  siRNA target sequence for PLXNC1 (NM_005761.1,4824-4842).
caaatacatcgtaaaatat

SEQ ID NO: 172075 - DNA, 19 bp, Homo sapiens
  siRNA target sequence for PLXNC1 (NM_005761.1,4903-4921).
ctcttgcatgtaaaagtct

SEQ ID NO: 172076 - DNA, 19 bp, Homo sapiens
  siRNA target sequence for PLXNC1 (NM_005761.1,4905-4923).
cttgcatgtaaaagtctta

SEQ ID NO: 172077 - DNA, 19 bp, Homo sapiens
  siRNA target sequence for SELPLG (NM_003006.2,181-199).
gacaggccaccgaatatga

SEQ ID NO: 172078 - DNA, 19 bp, Homo sapiens
  siRNA target sequence for SELPLG (NM_003006.2,192-210).
gaatatgagtacctagatt

SEQ ID NO: 172079 - DNA, 19 bp, Homo sapiens
  siRNA target sequence for SELPLG (NM_003006.2,198-216).
gagtacctagattatgatt

SEQ ID NO: 172080 - DNA, 19 bp, Homo sapiens
  siRNA target sequence for SELPLG (NM_003006.2,919-937).
ccatggcagccagcaattt

SEQ ID NO: 172081 - DNA, 19 bp, Homo sapiens
  siRNA target sequence for SELPLG (NM_003006.2,931-949).
gcaatttgtccgtcaacta

SEQ ID NO: 172082 - DNA, 19 bp, Homo sapiens
  siRNA target sequence for SELPLG (NM_003006.2,1011-1029).
gcgctggtggccactatct

SEQ ID NO: 172083 - DNA, 19 bp, Homo sapiens
  siRNA target sequence for SELPLG (NM_003006.2,1066-1084).
cccgcaagggccacatgta

SEQ ID NO: 172084 - DNA, 19 bp, Homo sapiens
  siRNA target sequence for STOML2 (NM_013442.1,296-314).
gtctcaaggaaattgtcat

SEQ ID NO: 172085 - DNA, 19 bp, Homo sapiens
  siRNA target sequence for STOML2 (NM_013442.1,335-353).
ctgtgactctcgacaatgt

SEQ ID NO: 172086 - DNA, 19 bp, Homo sapiens
  siRNA target sequence for STOML2 (NM_013442.1,337-355).
gtgactctcgacaatgtaa

SEQ ID NO: 172087 - DNA, 19 bp, Homo sapiens
  siRNA target sequence for STOML2 (NM_013442.1,339-357).
gactctcgacaatgtaact

SEQ ID NO: 172088 - DNA, 19 bp, Homo sapiens
  siRNA target sequence for STOML2 (NM_013442.1,341-359).
ctctcgacaatgtaactct

SEQ ID NO: 172089 - DNA, 19 bp, Homo sapiens
  siRNA target sequence for STOML2 (NM_013442.1,441-459).
cacccagctagctcaaaca

SEQ ID NO: 172090 - DNA, 19 bp, Homo sapiens
  siRNA target sequence for STOML2 (NM_013442.1,574-592).
cgctgcctccgttatgaga

SEQ ID NO: 172091 - DNA, 19 bp, Homo sapiens
  siRNA target sequence for STOML2 (NM_013442.1,575-593).
gctgcctccgttatgagat

SEQ ID NO: 172092 - DNA, 19 bp, Homo sapiens
  siRNA target sequence for STOML2 (NM_013442.1,578-596).
gcctccgttatgagatcaa

SEQ ID NO: 172093 - DNA, 19 bp, Homo sapiens
  siRNA target sequence for STOML2 (NM_013442.1,584-602).
gttatgagatcaaggatat

SEQ ID NO: 172094 - DNA, 19 bp, Homo sapiens
  siRNA target sequence for STOML2 (NM_013442.1,660-678).
gaaacgggccacagttcta

SEQ ID NO: 172095 - DNA, 19 bp, Homo sapiens
  siRNA target sequence for STOML2 (NM_013442.1,693-711).
ccgagagtcggccatcaat

SEQ ID NO: 172096 - DNA, 19 bp, Homo sapiens
  siRNA target sequence for STOML2 (NM_013442.1,695-713).
gagagtcggccatcaatgt

SEQ ID NO: 172097 - DNA, 19 bp, Homo sapiens
  siRNA target sequence for STOML2 (NM_013442.1,819-837).
ggctaaagctgaagctatt

SEQ ID NO: 172098 - DNA, 19 bp, Homo sapiens
  siRNA target sequence for STOML2 (NM_013442.1,893-911).
ctgtggccgagcagtatgt

SEQ ID NO: 172099 - DNA, 19 bp, Homo sapiens
  siRNA target sequence for STOML2 (NM_013442.1,936-954).
ggactccaacactatccta

SEQ ID NO: 172100 - DNA, 19 bp, Homo sapiens
  siRNA target sequence for STOML2 (NM_013442.1,1111-1129).
cttgatcgagtcaagatga

SEQ ID NO: 172101 - DNA, 19 bp, Homo sapiens
  siRNA target sequence for STOML2 (NM_013442.1,1114-1132).
gatcgagtcaagatgagtt

SEQ ID NO: 172102 - DNA, 19 bp, Homo sapiens
  siRNA target sequence for TAC3 (NM_013251.1,361-379).
gtgacatgcatgacttctt

SEQ ID NO: 172103 - DNA, 19 bp, Homo sapiens
  siRNA target sequence for TAC3 (NM_013251.1,416-434).
ctctcctacggatgtgaat

SEQ ID NO: 172104 - DNA, 19 bp, Homo sapiens
  siRNA target sequence for TAC3 (NM_013251.1,424-442).
cggatgtgaatcaagagaa

SEQ ID NO: 172105 - DNA, 19 bp, Homo sapiens
  siRNA target sequence for WNT5A (NM_003392.3,321-339).
gaagaagtccattggaata

SEQ ID NO: 172106 - DNA, 19 bp, Homo sapiens
  siRNA target sequence for WNT5A (NM_003392.3,423-441).
cttcgcccaggttgtaatt

SEQ ID NO: 172107 - DNA, 19 bp, Homo sapiens
  siRNA target sequence for WNT5A (NM_003392.3,452-470).
cttggtggtcgctaggtat

SEQ ID NO: 172108 - DNA, 19 bp, Homo sapiens
  siRNA target sequence for WNT5A (NM_003392.3,455-473).
ggtggtcgctaggtatgaa

SEQ ID NO: 172109 - DNA, 19 bp, Homo sapiens
  siRNA target sequence for WNT5A (NM_003392.3,456-474).
gtggtcgctaggtatgaat

SEQ ID NO: 172110 - DNA, 19 bp, Homo sapiens
  siRNA target sequence for WNT5A (NM_003392.3,458-476).
ggtcgctaggtatgaataa

SEQ ID NO: 172111 - DNA, 19 bp, Homo sapiens
  siRNA target sequence for WNT5A (NM_003392.3,481-499).
gttcagatgtcagaagtat

SEQ ID NO: 172112 - DNA, 19 bp, Homo sapiens
  siRNA target sequence for WNT5A (NM_003392.3,528-546).
ccaactggcaggactttct

SEQ ID NO: 172113 - DNA, 19 bp, Homo sapiens
  siRNA target sequence for WNT5A (NM_003392.3,621-639).
caaagaatgccagtatcaa

SEQ ID NO: 172114 - DNA, 19 bp, Homo sapiens
  siRNA target sequence for WNT5A (NM_003392.3,670-688).
gtggataacacctctgttt

SEQ ID NO: 172115 - DNA, 19 bp, Homo sapiens
  siRNA target sequence for WNT5A (NM_003392.3,715-733).
cgcgagacggccttcacat

SEQ ID NO: 172116 - DNA, 19 bp, Homo sapiens
  siRNA target sequence for WNT5A (NM_003392.3,956-974).
gtgctcgcatcctcatgaa

SEQ ID NO: 172117 - DNA, 19 bp, Homo sapiens
  siRNA target sequence for WNT7A (NM_004625.3,402-420).
ggcgcaagcatcatctgta

SEQ ID NO: 172118 - DNA, 19 bp, Homo sapiens
  siRNA target sequence for WNT7A (NM_004625.3,403-421).
gcgcaagcatcatctgtaa

SEQ ID NO: 172119 - DNA, 19 bp, Homo sapiens
  siRNA target sequence for WNT7A (NM_004625.3,405-423).
gcaagcatcatctgtaaca

SEQ ID NO: 172120 - DNA, 19 bp, Homo sapiens
  siRNA target sequence for WNT7A (NM_004625.3,406-424).
caagcatcatctgtaacaa

SEQ ID NO: 172121 - DNA, 19 bp, Homo sapiens
  siRNA target sequence for WNT7A (NM_004625.3,516-534).
gacgagtgtcagtttcagt

SEQ ID NO: 172122 - DNA, 19 bp, Homo sapiens
  siRNA target sequence for WNT7A (NM_004625.3,697-715).
gtggctgcgacaaagagaa

SEQ ID NO: 172123 - DNA, 19 bp, Homo sapiens
  siRNA target sequence for ZP3 (NM_007155.4,550-568).
gactaaccgcgcagagatt

SEQ ID NO: 172124 - DNA, 19 bp, Homo sapiens
  siRNA target sequence for ZP3 (NM_007155.4,781-799).
cgtgccactgcggttgttt

SEQ ID NO: 172125 - DNA, 19 bp, Homo sapiens
  siRNA target sequence for ARHGEF2 (NM_004723.2,127-145).
ggatgcccgctataccaat

SEQ ID NO: 172126 - DNA, 19 bp, Homo sapiens
  siRNA target sequence for ARHGEF2 (NM_004723.2,257-275).
cacaaccgctgtaaagaca

SEQ ID NO: 172127 - DNA, 19 bp, Homo sapiens
  siRNA target sequence for ARHGEF2 (NM_004723.2,272-290).
gacaccctcgccaactgta

SEQ ID NO: 172128 - DNA, 19 bp, Homo sapiens
  siRNA target sequence for ARHGEF2 (NM_004723.2,343-361).
cttgcagtccgtttctctt

SEQ ID NO: 172129 - DNA, 19 bp, Homo sapiens
  siRNA target sequence for ARHGEF2 (NM_004723.2,353-371).
gtttctcttcgaagtaaga

SEQ ID NO: 172130 - DNA, 19 bp, Homo sapiens
  siRNA target sequence for ARHGEF2 (NM_004723.2,489-507).
ccaacattgctggacattt

SEQ ID NO: 172131 - DNA, 19 bp, Homo sapiens
  siRNA target sequence for ARHGEF2 (NM_004723.2,552-570).
ccacagactccctcaacat

SEQ ID NO: 172132 - DNA, 19 bp, Homo sapiens
  siRNA target sequence for ARHGEF2 (NM_004723.2,605-623).
gacgaagaggtaatctaca

SEQ ID NO: 172133 - DNA, 19 bp, Homo sapiens
  siRNA target sequence for ARHGEF2 (NM_004723.2,954-972).
gcacccggaactttgtcat

SEQ ID NO: 172134 - DNA, 19 bp, Homo sapiens
  siRNA target sequence for ARHGEF2 (NM_004723.2,1090-1108).
gctgtacgcccgagacaaa

SEQ ID NO: 172135 - DNA, 19 bp, Homo sapiens
  siRNA target sequence for ARHGEF2 (NM_004723.2,1550-1568).
cagaagtacatctttccta

SEQ ID NO: 172136 - DNA, 19 bp, Homo sapiens
  siRNA target sequence for ARHGEF2 (NM_004723.2,1588-1606).
ggtatcgctgcagaatcta

SEQ ID NO: 172137 - DNA, 19 bp, Homo sapiens
  siRNA target sequence for ARHGEF2 (NM_004723.2,1589-1607).
gtatcgctgcagaatctaa

SEQ ID NO: 172138 - DNA, 19 bp, Homo sapiens
  siRNA target sequence for ARHGEF2 (NM_004723.2,1593-1611).
cgctgcagaatctaatcgt

SEQ ID NO: 172139 - DNA, 19 bp, Homo sapiens
  siRNA target sequence for ARHGEF2 (NM_004723.2,1594-1612).
gctgcagaatctaatcgta

SEQ ID NO: 172140 - DNA, 19 bp, Homo sapiens
  siRNA target sequence for ARHGEF2 (NM_004723.2,1656-1674).
cagccccacctgagatgta

SEQ ID NO: 172141 - DNA, 19 bp, Homo sapiens
  siRNA target sequence for ARHGEF2 (NM_004723.2,1710-1728).
cctggatccgggtcattca

SEQ ID NO: 172142 - DNA, 19 bp, Homo sapiens
  siRNA target sequence for ARHGEF2 (NM_004723.2,1760-1778).
gacttccccctgattgaga

SEQ ID NO: 172143 - DNA, 19 bp, Homo sapiens
  siRNA target sequence for ARHGEF2 (NM_004723.2,1790-1808).
gcttacctgcggcgaatta

SEQ ID NO: 172144 - DNA, 19 bp, Homo sapiens
  siRNA target sequence for ARHGEF2 (NM_004723.2,1791-1809).
cttacctgcggcgaattaa

SEQ ID NO: 172145 - DNA, 19 bp, Homo sapiens
  siRNA target sequence for ARHGEF2 (NM_004723.2,2149-2167).
cttcaatggctccattgaa

SEQ ID NO: 172146 - DNA, 19 bp, Homo sapiens
  siRNA target sequence for ARHGEF2 (NM_004723.2,2190-2208).
ctagccagagggatcgaaa

SEQ ID NO: 172147 - DNA, 19 bp, Homo sapiens
  siRNA target sequence for ARHGEF2 (NM_004723.2,2194-2212).
ccagagggatcgaaatgga

SEQ ID NO: 172148 - DNA, 19 bp, Homo sapiens
  siRNA target sequence for ARHGEF2 (NM_004723.2,2195-2213).
cagagggatcgaaatggaa

SEQ ID NO: 172149 - DNA, 19 bp, Homo sapiens
  siRNA target sequence for ARHGEF2 (NM_004723.2,2197-2215).
gagggatcgaaatggaaat

SEQ ID NO: 172150 - DNA, 19 bp, Homo sapiens
  siRNA target sequence for ARHGEF2 (NM_004723.2,2248-2266).
gcgattggtcaatctctat

SEQ ID NO: 172151 - DNA, 19 bp, Homo sapiens
  siRNA target sequence for ARHGEF2 (NM_004723.2,2430-2448).
ccacggaactggcattact

SEQ ID NO: 172152 - DNA, 19 bp, Homo sapiens
  siRNA target sequence for ARHGEF2 (NM_004723.2,2696-2714).
ggcgatgccctgtacttga

SEQ ID NO: 172153 - DNA, 19 bp, Homo sapiens
  siRNA target sequence for ARHGEF2 (NM_004723.2,2699-2717).
gatgccctgtacttgagtt

SEQ ID NO: 172154 - DNA, 19 bp, Homo sapiens
  siRNA target sequence for ARHGEF2 (NM_004723.2,2776-2794).
ctctgtccatcgaaacttt

SEQ ID NO: 172155 - DNA, 19 bp, Homo sapiens
  siRNA target sequence for ARHGEF2 (NM_004723.2,2778-2796).
ctgtccatcgaaactttga

SEQ ID NO: 172156 - DNA, 19 bp, Homo sapiens
  siRNA target sequence for CHN1 (NM_001822.2,316-334).
ggccctgaccctgtttgat

SEQ ID NO: 172157 - DNA, 19 bp, Homo sapiens
  siRNA target sequence for CHN1 (NM_001822.2,317-335).
gccctgaccctgtttgata

SEQ ID NO: 172158 - DNA, 19 bp, Homo sapiens
  siRNA target sequence for CHN1 (NM_001822.2,319-337).
cctgaccctgtttgataca

SEQ ID NO: 172159 - DNA, 19 bp, Homo sapiens
  siRNA target sequence for CHN1 (NM_001822.2,322-340).
gaccctgtttgatacagat

SEQ ID NO: 172160 - DNA, 19 bp, Homo sapiens
  siRNA target sequence for CHN1 (NM_001822.2,325-343).
cctgtttgatacagatgaa

SEQ ID NO: 172161 - DNA, 19 bp, Homo sapiens
  siRNA target sequence for CHN1 (NM_001822.2,417-435).
gtacttgcgaggtggaaaa

SEQ ID NO: 172162 - DNA, 19 bp, Homo sapiens
  siRNA target sequence for CHN1 (NM_001822.2,486-504).
cagccgaccagctcttgat

SEQ ID NO: 172163 - DNA, 19 bp, Homo sapiens
  siRNA target sequence for CHN1 (NM_001822.2,545-563).
cagccagggacctacactt

SEQ ID NO: 172164 - DNA, 19 bp, Homo sapiens
  siRNA target sequence for CHN1 (NM_001822.2,664-682).
gactgatggcttgattact

SEQ ID NO: 172165 - DNA, 19 bp, Homo sapiens
  siRNA target sequence for CHN1 (NM_001822.2,666-684).
ctgatggcttgattactct

SEQ ID NO: 172166 - DNA, 19 bp, Homo sapiens
  siRNA target sequence for CHN1 (NM_001822.2,672-690).
gcttgattactctctatat

SEQ ID NO: 172167 - DNA, 19 bp, Homo sapiens
  siRNA target sequence for CHN1 (NM_001822.2,673-691).
cttgattactctctatatt

SEQ ID NO: 172168 - DNA, 19 bp, Homo sapiens
  siRNA target sequence for CHN1 (NM_001822.2,676-694).
gattactctctatattgaa

SEQ ID NO: 172169 - DNA, 19 bp, Homo sapiens
  siRNA target sequence for CHN1 (NM_001822.2,724-742).
gacgataaacccaatttat

SEQ ID NO: 172170 - DNA, 19 bp, Homo sapiens
  siRNA target sequence for CHN1 (NM_001822.2,726-744).
cgataaacccaatttatga

SEQ ID NO: 172171 - DNA, 19 bp, Homo sapiens
  siRNA target sequence for CHN1 (NM_001822.2,743-761).
gagcacgtaggatacacaa

SEQ ID NO: 172172 - DNA, 19 bp, Homo sapiens
  siRNA target sequence for CHN1 (NM_001822.2,748-766).
cgtaggatacacaacctta

SEQ ID NO: 172173 - DNA, 19 bp, Homo sapiens
  siRNA target sequence for CHN1 (NM_001822.2,749-767).
gtaggatacacaaccttaa

SEQ ID NO: 172174 - DNA, 19 bp, Homo sapiens
  siRNA target sequence for CHN1 (NM_001822.2,752-770).
ggatacacaaccttaaaca

SEQ ID NO: 172175 - DNA, 19 bp, Homo sapiens
  siRNA target sequence for CHN1 (NM_001822.2,815-833).
catgatgagagagattcta

SEQ ID NO: 172176 - DNA, 19 bp, Homo sapiens
  siRNA target sequence for CHN1 (NM_001822.2,845-863).
ggggtgtcagagaaaaggt

SEQ ID NO: 172177 - DNA, 19 bp, Homo sapiens
  siRNA target sequence for CHN1 (NM_001822.2,856-874).
gaaaaggttgacatcactt

SEQ ID NO: 172178 - DNA, 19 bp, Homo sapiens
  siRNA target sequence for CHN1 (NM_001822.2,937-955).
caaggtgcatacattcaga

SEQ ID NO: 172179 - DNA, 19 bp, Homo sapiens
  siRNA target sequence for CHN1 (NM_001822.2,985-1003).
ctttatgtggggtctcatt

SEQ ID NO: 172180 - DNA, 19 bp, Homo sapiens
  siRNA target sequence for CHN1 (NM_001822.2,1190-1208).
gagtctagaggtcttaatt

SEQ ID NO: 172181 - DNA, 19 bp, Homo sapiens
  siRNA target sequence for CHN1 (NM_001822.2,1192-1210).
gtctagaggtcttaattct

SEQ ID NO: 172182 - DNA, 19 bp, Homo sapiens
  siRNA target sequence for CHN1 (NM_001822.2,1194-1212).
ctagaggtcttaattctga

SEQ ID NO: 172183 - DNA, 19 bp, Homo sapiens
  siRNA target sequence for CHN1 (NM_001822.2,1222-1240).
ccgagtatcaggatttagt

SEQ ID NO: 172184 - DNA, 19 bp, Homo sapiens
  siRNA target sequence for CHN1 (NM_001822.2,1230-1248).
caggatttagtgacctaat

SEQ ID NO: 172185 - DNA, 19 bp, Homo sapiens
  siRNA target sequence for CHN1 (NM_001822.2,1233-1251).
gatttagtgacctaattga

SEQ ID NO: 172186 - DNA, 19 bp, Homo sapiens
  siRNA target sequence for CHN1 (NM_001822.2,1301-1319).
gtgaacatgtatgaagata

SEQ ID NO: 172187 - DNA, 19 bp, Homo sapiens
  siRNA target sequence for CHN1 (NM_001822.2,1363-1381).
gccaattccactcattaca

SEQ ID NO: 172188 - DNA, 19 bp, Homo sapiens
  siRNA target sequence for CHN1 (NM_001822.2,1364-1382).
ccaattccactcattacat

SEQ ID NO: 172189 - DNA, 19 bp, Homo sapiens
  siRNA target sequence for CHN1 (NM_001822.2,1365-1383).
caattccactcattacata

SEQ ID NO: 172190 - DNA, 19 bp, Homo sapiens
  siRNA target sequence for CHN1 (NM_001822.2,1393-1411).
ccctaagtttatagaatct

SEQ ID NO: 172191 - DNA, 19 bp, Homo sapiens
  siRNA target sequence for CHN1 (NM_001822.2,1427-1445).
ccggatgagcaattggaaa

SEQ ID NO: 172192 - DNA, 19 bp, Homo sapiens
  siRNA target sequence for CHN1 (NM_001822.2,1498-1516).
gtacctcatggcacatcta

SEQ ID NO: 172193 - DNA, 19 bp, Homo sapiens
  siRNA target sequence for CHN1 (NM_001822.2,1502-1520).
ctcatggcacatctaaaga

SEQ ID NO: 172194 - DNA, 19 bp, Homo sapiens
  siRNA target sequence for CHN1 (NM_001822.2,1504-1522).
catggcacatctaaagaga

SEQ ID NO: 172195 - DNA, 19 bp, Homo sapiens
  siRNA target sequence for CHN1 (NM_001822.2,1618-1636).
ggctgcattgaatgatata

SEQ ID NO: 172196 - DNA, 19 bp, Homo sapiens
  siRNA target sequence for CHN1 (NM_001822.2,1652-1670).
gtggtggagctgcttatca

SEQ ID NO: 172197 - DNA, 19 bp, Homo sapiens
  siRNA target sequence for CHN1 (NM_001822.2,1660-1678).
gctgcttatcaaaaacgaa

SEQ ID NO: 172198 - DNA, 19 bp, Homo sapiens
  siRNA target sequence for CHN2 (NM_004067.1,281-299).
ccgatgctgaagaatacca

SEQ ID NO: 172199 - DNA, 19 bp, Homo sapiens
  siRNA target sequence for CHN2 (NM_004067.1,298-316).
cagcctcctatatggaaat

SEQ ID NO: 172200 - DNA, 19 bp, Homo sapiens
  siRNA target sequence for CHN2 (NM_004067.1,346-364).
cctcgtcccaagagaatca

SEQ ID NO: 172201 - DNA, 19 bp, Homo sapiens
  siRNA target sequence for CHN2 (NM_004067.1,347-365).
ctcgtcccaagagaatcat

SEQ ID NO: 172202 - DNA, 19 bp, Homo sapiens
  siRNA target sequence for CHN2 (NM_004067.1,349-367).
cgtcccaagagaatcattt

SEQ ID NO: 172203 - DNA, 19 bp, Homo sapiens
  siRNA target sequence for CHN2 (NM_004067.1,368-386).
gtcctcgggaggtggaaaa

SEQ ID NO: 172204 - DNA, 19 bp, Homo sapiens
  siRNA target sequence for CHN2 (NM_004067.1,463-481).
gagggtgcctacatcctta

SEQ ID NO: 172205 - DNA, 19 bp, Homo sapiens
  siRNA target sequence for CHN2 (NM_004067.1,467-485).
gtgcctacatccttagaga

SEQ ID NO: 172206 - DNA, 19 bp, Homo sapiens
  siRNA target sequence for CHN2 (NM_004067.1,558-576).
ccacgacgggaaacacttt

SEQ ID NO: 172207 - DNA, 19 bp, Homo sapiens
  siRNA target sequence for CHN2 (NM_004067.1,580-598).
ggtgagaagaggtttgagt

SEQ ID NO: 172208 - DNA, 19 bp, Homo sapiens
  siRNA target sequence for CHN2 (NM_004067.1,588-606).
gaggtttgagtcgattcat

SEQ ID NO: 172209 - DNA, 19 bp, Homo sapiens
  siRNA target sequence for CHN2 (NM_004067.1,590-608).
ggtttgagtcgattcatga

SEQ ID NO: 172210 - DNA, 19 bp, Homo sapiens
  siRNA target sequence for CHN2 (NM_004067.1,591-609).
gtttgagtcgattcatgat

SEQ ID NO: 172211 - DNA, 19 bp, Homo sapiens
  siRNA target sequence for CHN2 (NM_004067.1,623-641).
gcttgataacactgtacat

SEQ ID NO: 172212 - DNA, 19 bp, Homo sapiens
  siRNA target sequence for CHN2 (NM_004067.1,627-645).
gataacactgtacatagaa

SEQ ID NO: 172213 - DNA, 19 bp, Homo sapiens
  siRNA target sequence for CHN2 (NM_004067.1,636-654).
gtacatagaaacaaaagct

SEQ ID NO: 172214 - DNA, 19 bp, Homo sapiens
  siRNA target sequence for CHN2 (NM_004067.1,647-665).
caaaagctgccgagtacat

SEQ ID NO: 172215 - DNA, 19 bp, Homo sapiens
  siRNA target sequence for CHN2 (NM_004067.1,652-670).
gctgccgagtacatttcaa

SEQ ID NO: 172216 - DNA, 19 bp, Homo sapiens
  siRNA target sequence for CHN2 (NM_004067.1,675-693).
gacaactaaccccatctat

SEQ ID NO: 172217 - DNA, 19 bp, Homo sapiens
  siRNA target sequence for CHN2 (NM_004067.1,677-695).
caactaaccccatctatga

SEQ ID NO: 172218 - DNA, 19 bp, Homo sapiens
  siRNA target sequence for CHN2 (NM_004067.1,680-698).
ctaaccccatctatgaaca

SEQ ID NO: 172219 - DNA, 19 bp, Homo sapiens
  siRNA target sequence for CHN2 (NM_004067.1,715-733).
ctactcagagaaaaagtat

SEQ ID NO: 172220 - DNA, 19 bp, Homo sapiens
  siRNA target sequence for CHN2 (NM_004067.1,741-759).
gctgagcaggtctaaaaat

SEQ ID NO: 172221 - DNA, 19 bp, Homo sapiens
  siRNA target sequence for CHN2 (NM_004067.1,793-811).
cacacagcggtggaaaaga

SEQ ID NO: 172222 - DNA, 19 bp, Homo sapiens
  siRNA target sequence for CHN2 (NM_004067.1,846-864).
caacgacaaccacttcaat

SEQ ID NO: 172223 - DNA, 19 bp, Homo sapiens
  siRNA target sequence for CHN2 (NM_004067.1,849-867).
cgacaaccacttcaattat

SEQ ID NO: 172224 - DNA, 19 bp, Homo sapiens
  siRNA target sequence for CHN2 (NM_004067.1,977-995).
gtggattgaacgtacacaa

SEQ ID NO: 172225 - DNA, 19 bp, Homo sapiens
  siRNA target sequence for CHN2 (NM_004067.1,1119-1137).
catatgcattcgggaaatt

SEQ ID NO: 172226 - DNA, 19 bp, Homo sapiens
  siRNA target sequence for CHN2 (NM_004067.1,1181-1199).
ggttcactgaacacattga

SEQ ID NO: 172227 - DNA, 19 bp, Homo sapiens
  siRNA target sequence for CHN2 (NM_004067.1,1228-1246).
ggtgaaaaggccgatatat

SEQ ID NO: 172228 - DNA, 19 bp, Homo sapiens
  siRNA target sequence for CHN2 (NM_004067.1,1240-1258).
gatatatctgccaatgtct

SEQ ID NO: 172229 - DNA, 19 bp, Homo sapiens
  siRNA target sequence for CHN2 (NM_004067.1,1251-1269).
caatgtctatccagacata

SEQ ID NO: 172230 - DNA, 19 bp, Homo sapiens
  siRNA target sequence for CHN2 (NM_004067.1,1255-1273).
gtctatccagacataaaca

SEQ ID NO: 172231 - DNA, 19 bp, Homo sapiens
  siRNA target sequence for CHN2 (NM_004067.1,1283-1301).
gagcccttaaactgtattt

SEQ ID NO: 172232 - DNA, 19 bp, Homo sapiens
  siRNA target sequence for CHN2 (NM_004067.1,1318-1336).
cctgtcatcacatatgata

SEQ ID NO: 172233 - DNA, 19 bp, Homo sapiens
  siRNA target sequence for CHN2 (NM_004067.1,1323-1341).
catcacatatgatacctat

SEQ ID NO: 172234 - DNA, 19 bp, Homo sapiens
  siRNA target sequence for CHN2 (NM_004067.1,1333-1351).
gatacctattccaaattta

SEQ ID NO: 172235 - DNA, 19 bp, Homo sapiens
  siRNA target sequence for CHN2 (NM_004067.1,1419-1437).
gcctcctgcccactatgaa

SEQ ID NO: 172236 - DNA, 19 bp, Homo sapiens
  siRNA target sequence for CHN2 (NM_004067.1,1420-1438).
cctcctgcccactatgaaa

SEQ ID NO: 172237 - DNA, 19 bp, Homo sapiens
  siRNA target sequence for CHN2 (NM_004067.1,1439-1457).
ccctccggtacctaatgat

SEQ ID NO: 172238 - DNA, 19 bp, Homo sapiens
  siRNA target sequence for CHN2 (NM_004067.1,1455-1473).
gatccacctcaaaaaggtt

SEQ ID NO: 172239 - DNA, 19 bp, Homo sapiens
  siRNA target sequence for CHN2 (NM_004067.1,1459-1477).
cacctcaaaaaggttacta

SEQ ID NO: 172240 - DNA, 19 bp, Homo sapiens
  siRNA target sequence for CHN2 (NM_004067.1,1596-1614).
gctgattgtgcagatttta

SEQ ID NO: 172241 - DNA, 19 bp, Homo sapiens
  siRNA target sequence for DGKD (NM_003648.2,124-142).
gctgaccaaacagaacaat

SEQ ID NO: 172242 - DNA, 19 bp, Homo sapiens
  siRNA target sequence for DGKD (NM_003648.2,179-197).
cgagggcgaacgctttact

SEQ ID NO: 172243 - DNA, 19 bp, Homo sapiens
  siRNA target sequence for DGKD (NM_003648.2,180-198).
gagggcgaacgctttacta

SEQ ID NO: 172244 - DNA, 19 bp, Homo sapiens
  siRNA target sequence for DGKD (NM_003648.2,200-218).
gccaaaacggcaaagtcaa

SEQ ID NO: 172245 - DNA, 19 bp, Homo sapiens
  siRNA target sequence for DGKD (NM_003648.2,201-219).
ccaaaacggcaaagtcaat

SEQ ID NO: 172246 - DNA, 19 bp, Homo sapiens
  siRNA target sequence for DGKD (NM_003648.2,207-225).
cggcaaagtcaatcatatt

SEQ ID NO: 172247 - DNA, 19 bp, Homo sapiens
  siRNA target sequence for DGKD (NM_003648.2,267-285).
gtaccaaaaacgtcaacaa

SEQ ID NO: 172248 - DNA, 19 bp, Homo sapiens
  siRNA target sequence for DGKD (NM_003648.2,286-304).
cagttttacggtcataact

SEQ ID NO: 172249 - DNA, 19 bp, Homo sapiens
  siRNA target sequence for DGKD (NM_003648.2,358-376).
gattgcagcattaaagact

SEQ ID NO: 172250 - DNA, 19 bp, Homo sapiens
  siRNA target sequence for DGKD (NM_003648.2,467-485).
ccgacctactgcaatgtgt

SEQ ID NO: 172251 - DNA, 19 bp, Homo sapiens
  siRNA target sequence for DGKD (NM_003648.2,528-546).
gcgaggtgtgcaaatttaa

SEQ ID NO: 172252 - DNA, 19 bp, Homo sapiens
  siRNA target sequence for DGKD (NM_003648.2,563-581).
gctgtgcgtgcaaccaata

SEQ ID NO: 172253 - DNA, 19 bp, Homo sapiens
  siRNA target sequence for DGKD (NM_003648.2,564-582).
ctgtgcgtgcaaccaataa

SEQ ID NO: 172254 - DNA, 19 bp, Homo sapiens
  siRNA target sequence for DGKD (NM_003648.2,566-584).
gtgcgtgcaaccaataact

SEQ ID NO: 172255 - DNA, 19 bp, Homo sapiens
  siRNA target sequence for DGKD (NM_003648.2,607-625).
gatcgggaaggacatcatt

SEQ ID NO: 172256 - DNA, 19 bp, Homo sapiens
  siRNA target sequence for DGKD (NM_003648.2,766-784).
ggttcacacatcgtgtaaa

SEQ ID NO: 172257 - DNA, 19 bp, Homo sapiens
  siRNA target sequence for DGKD (NM_003648.2,774-792).
catcgtgtaaagaatcctt

SEQ ID NO: 172258 - DNA, 19 bp, Homo sapiens
  siRNA target sequence for DGKD (NM_003648.2,911-929).
ctgttggtcttcgtcaatt

SEQ ID NO: 172259 - DNA, 19 bp, Homo sapiens
  siRNA target sequence for DGKD (NM_003648.2,916-934).
ggtcttcgtcaattcaaaa

SEQ ID NO: 172260 - DNA, 19 bp, Homo sapiens
  siRNA target sequence for DGKD (NM_003648.2,917-935).
gtcttcgtcaattcaaaaa

SEQ ID NO: 172261 - DNA, 19 bp, Homo sapiens
  siRNA target sequence for DGKD (NM_003648.2,919-937).
cttcgtcaattcaaaaagt

SEQ ID NO: 172262 - DNA, 19 bp, Homo sapiens
  siRNA target sequence for DGKD (NM_003648.2,953-971).
gtgaagttcctcagaagat

SEQ ID NO: 172263 - DNA, 19 bp, Homo sapiens
  siRNA target sequence for DGKD (NM_003648.2,969-987).
gattcaaacagctactaaa

SEQ ID NO: 172264 - DNA, 19 bp, Homo sapiens
  siRNA target sequence for DGKD (NM_003648.2,1101-1119).
gggtcctctccgaaatcga

SEQ ID NO: 172265 - DNA, 19 bp, Homo sapiens
  siRNA target sequence for DGKD (NM_003648.2,1122-1140).
gcctcaaccttcataaaca

SEQ ID NO: 172266 - DNA, 19 bp, Homo sapiens
  siRNA target sequence for DGKD (NM_003648.2,1124-1142).
ctcaaccttcataaacagt

SEQ ID NO: 172267 - DNA, 19 bp, Homo sapiens
  siRNA target sequence for DGKD (NM_003648.2,1332-1350).
ctaccgtcaccgaagactt

SEQ ID NO: 172268 - DNA, 19 bp, Homo sapiens
  siRNA target sequence for DGKD (NM_003648.2,1372-1390).
gcagattctcttctatgaa

SEQ ID NO: 172269 - DNA, 19 bp, Homo sapiens
  siRNA target sequence for DGKD (NM_003648.2,1400-1418).
gcagcccacctttctaaaa

SEQ ID NO: 172270 - DNA, 19 bp, Homo sapiens
  siRNA target sequence for DGKD (NM_003648.2,1976-1994).
cagcgcaaagtgtcgaaat

SEQ ID NO: 172271 - DNA, 19 bp, Homo sapiens
  siRNA target sequence for DGKD (NM_003648.2,1978-1996).
gcgcaaagtgtcgaaatct

SEQ ID NO: 172272 - DNA, 19 bp, Homo sapiens
  siRNA target sequence for DGKD (NM_003648.2,2156-2174).
gtcatcagtcgcctgttaa

SEQ ID NO: 172273 - DNA, 19 bp, Homo sapiens
  siRNA target sequence for DGKD (NM_003648.2,2158-2176).
catcagtcgcctgttaatt

SEQ ID NO: 172274 - DNA, 19 bp, Homo sapiens
  siRNA target sequence for DGKD (NM_003648.2,2161-2179).
cagtcgcctgttaattaat

SEQ ID NO: 172275 - DNA, 19 bp, Homo sapiens
  siRNA target sequence for DGKD (NM_003648.2,2204-2222).
gaaaccctagagtattaca

SEQ ID NO: 172276 - DNA, 19 bp, Homo sapiens
  siRNA target sequence for DGKD (NM_003648.2,2215-2233).
gtattacacggagaaatgt

SEQ ID NO: 172277 - DNA, 19 bp, Homo sapiens
  siRNA target sequence for DGKD (NM_003648.2,2258-2276).
ggcctggatgcgaagatat

SEQ ID NO: 172278 - DNA, 19 bp, Homo sapiens
  siRNA target sequence for DGKD (NM_003648.2,2529-2547).
ctttcgcagctccatcatt

SEQ ID NO: 172279 - DNA, 19 bp, Homo sapiens
  siRNA target sequence for DGKD (NM_003648.2,2538-2556).
ctccatcattcgatgacaa

SEQ ID NO: 172280 - DNA, 19 bp, Homo sapiens
  siRNA target sequence for DGKD (NM_003648.2,2909-2927).
gcaggggtcctcattcaca

SEQ ID NO: 172281 - DNA, 19 bp, Homo sapiens
  siRNA target sequence for DGKD (NM_003648.2,2913-2931).
gggtcctcattcacagtat

SEQ ID NO: 172282 - DNA, 19 bp, Homo sapiens
  siRNA target sequence for DGKD (NM_003648.2,2926-2944).
cagtatccgagaaatagct

SEQ ID NO: 172283 - DNA, 19 bp, Homo sapiens
  siRNA target sequence for DGKD (NM_003648.2,3051-3069).
gcagcttcgtcctggaaat

SEQ ID NO: 172284 - DNA, 19 bp, Homo sapiens
  siRNA target sequence for DGKD (NM_003648.2,3277-3295).
gcgcagtcgcagtggtaaa

SEQ ID NO: 172285 - DNA, 19 bp, Homo sapiens
  siRNA target sequence for DGKD (NM_003648.2,3278-3296).
cgcagtcgcagtggtaaat

SEQ ID NO: 172286 - DNA, 19 bp, Homo sapiens
  siRNA target sequence for DGKD (NM_003648.2,3279-3297).
gcagtcgcagtggtaaatt

SEQ ID NO: 172287 - DNA, 19 bp, Homo sapiens
  siRNA target sequence for DGKD (NM_003648.2,3298-3316).
ccgcctcgtgaccaagttt

SEQ ID NO: 172288 - DNA, 19 bp, Homo sapiens
  siRNA target sequence for DGKD (NM_003648.2,3299-3317).
cgcctcgtgaccaagttta

SEQ ID NO: 172289 - DNA, 19 bp, Homo sapiens
  siRNA target sequence for DGKD (NM_003648.2,3301-3319).
cctcgtgaccaagtttaaa

SEQ ID NO: 172290 - DNA, 19 bp, Homo sapiens
  siRNA target sequence for DGKD (NM_003648.2,3416-3434).
ctcagtctctgtgagtata

SEQ ID NO: 172291 - DNA, 19 bp, Homo sapiens
  siRNA target sequence for DGKD (NM_003648.2,3428-3446).
gagtataaggacatcttca

SEQ ID NO: 172292 - DNA, 19 bp, Homo sapiens
  siRNA target sequence for DGKQ (NM_001347.2,336-354).
ctgtgcgacgtctgcaatt

SEQ ID NO: 172293 - DNA, 19 bp, Homo sapiens
  siRNA target sequence for DGKQ (NM_001347.2,340-358).
gcgacgtctgcaatttcat

SEQ ID NO: 172294 - DNA, 19 bp, Homo sapiens
  siRNA target sequence for DGKQ (NM_001347.2,951-969).
ccggagtccgggaagcaaa

SEQ ID NO: 172295 - DNA, 19 bp, Homo sapiens
  siRNA target sequence for DGKQ (NM_001347.2,990-1008).
gacgacgcggtgagaagaa

SEQ ID NO: 172296 - DNA, 19 bp, Homo sapiens
  siRNA target sequence for DGKQ (NM_001347.2,1564-1582).
cgcacgtctccctgtttgt

SEQ ID NO: 172297 - DNA, 19 bp, Homo sapiens
  siRNA target sequence for DGKQ (NM_001347.2,1565-1583).
gcacgtctccctgtttgtt

SEQ ID NO: 172298 - DNA, 19 bp, Homo sapiens
  siRNA target sequence for DGKQ (NM_001347.2,1897-1915).
gcttccggaagctactgaa

SEQ ID NO: 172299 - DNA, 19 bp, Homo sapiens
  siRNA target sequence for DGKQ (NM_001347.2,2292-2310).
gtgcagatgagtaactact

SEQ ID NO: 172300 - DNA, 19 bp, Homo sapiens
  siRNA target sequence for DGKQ (NM_001347.2,2489-2507).
ggtggagctgcccagtatt

SEQ ID NO: 172301 - DNA, 19 bp, Homo sapiens
  siRNA target sequence for DGKQ (NM_001347.2,2503-2521).
gtattgaaggcctcatctt

SEQ ID NO: 172302 - DNA, 19 bp, Homo sapiens
  siRNA target sequence for DGKQ (NM_001347.2,2572-2590).
gcgacaccaggtttgagaa

SEQ ID NO: 172303 - DNA, 19 bp, Homo sapiens
  siRNA target sequence for VAV2 (NM_003371.2,31-49).
gctggctcatcgattgcaa

SEQ ID NO: 172304 - DNA, 19 bp, Homo sapiens
  siRNA target sequence for VAV2 (NM_003371.2,231-249).
cgcaccttcctgaaagtct

SEQ ID NO: 172305 - DNA, 19 bp, Homo sapiens
  siRNA target sequence for VAV2 (NM_003371.2,242-260).
gaaagtctgccacgataaa

SEQ ID NO: 172306 - DNA, 19 bp, Homo sapiens
  siRNA target sequence for VAV2 (NM_003371.2,248-266).
ctgccacgataaatttgga

SEQ ID NO: 172307 - DNA, 19 bp, Homo sapiens
  siRNA target sequence for VAV2 (NM_003371.2,250-268).
gccacgataaatttggatt

SEQ ID NO: 172308 - DNA, 19 bp, Homo sapiens
  siRNA target sequence for VAV2 (NM_003371.2,251-269).
ccacgataaatttggatta

SEQ ID NO: 172309 - DNA, 19 bp, Homo sapiens
  siRNA target sequence for VAV2 (NM_003371.2,252-270).
cacgataaatttggattaa

SEQ ID NO: 172310 - DNA, 19 bp, Homo sapiens
  siRNA target sequence for VAV2 (NM_003371.2,302-320).
cttcgatgtgcgagacttt

SEQ ID NO: 172311 - DNA, 19 bp, Homo sapiens
  siRNA target sequence for VAV2 (NM_003371.2,565-583).
gcatgactgaagatgacaa

SEQ ID NO: 172312 - DNA, 19 bp, Homo sapiens
  siRNA target sequence for VAV2 (NM_003371.2,612-630).
gagaccgaggccaagtact

SEQ ID NO: 172313 - DNA, 19 bp, Homo sapiens
  siRNA target sequence for VAV2 (NM_003371.2,799-817).
ccaaggtcttcctcgattt

SEQ ID NO: 172314 - DNA, 19 bp, Homo sapiens
  siRNA target sequence for VAV2 (NM_003371.2,941-959).
ggtccaggatggaaaattt

SEQ ID NO: 172315 - DNA, 19 bp, Homo sapiens
  siRNA target sequence for VAV2 (NM_003371.2,942-960).
gtccaggatggaaaattta

SEQ ID NO: 172316 - DNA, 19 bp, Homo sapiens
  siRNA target sequence for VAV2 (NM_003371.2,1092-1110).
gacttggcgatgtacatca

SEQ ID NO: 172317 - DNA, 19 bp, Homo sapiens
  siRNA target sequence for VAV2 (NM_003371.2,1094-1112).
cttggcgatgtacatcaat

SEQ ID NO: 172318 - DNA, 19 bp, Homo sapiens
  siRNA target sequence for VAV2 (NM_003371.2,1097-1115).
ggcgatgtacatcaatgaa

SEQ ID NO: 172319 - DNA, 19 bp, Homo sapiens
  siRNA target sequence for VAV2 (NM_003371.2,1150-1168).
gcgaatttcagagttctat

SEQ ID NO: 172320 - DNA, 19 bp, Homo sapiens
  siRNA target sequence for VAV2 (NM_003371.2,1151-1169).
cgaatttcagagttctata

SEQ ID NO: 172321 - DNA, 19 bp, Homo sapiens
  siRNA target sequence for VAV2 (NM_003371.2,1545-1563).
cacagtttccagatgtaca

SEQ ID NO: 172322 - DNA, 19 bp, Homo sapiens
  siRNA target sequence for VAV2 (NM_003371.2,1554-1572).
cagatgtacacgtttgaca

SEQ ID NO: 172323 - DNA, 19 bp, Homo sapiens
  siRNA target sequence for VAV2 (NM_003371.2,1751-1769).
ggccatgcagaattaccat

SEQ ID NO: 172324 - DNA, 19 bp, Homo sapiens
  siRNA target sequence for VAV2 (NM_003371.2,1863-1881).
gagggtcgtctggtacaaa

SEQ ID NO: 172325 - DNA, 19 bp, Homo sapiens
  siRNA target sequence for VAV2 (NM_003371.2,2084-2102).
ggctgagcgctttgcaata

SEQ ID NO: 172326 - DNA, 19 bp, Homo sapiens
  siRNA target sequence for VAV2 (NM_003371.2,2085-2103).
gctgagcgctttgcaataa

SEQ ID NO: 172327 - DNA, 19 bp, Homo sapiens
  siRNA target sequence for VAV2 (NM_003371.2,2088-2106).
gagcgctttgcaataagca

SEQ ID NO: 172328 - DNA, 19 bp, Homo sapiens
  siRNA target sequence for VAV2 (NM_003371.2,2347-2365).
cagctgtggccaggtataa

SEQ ID NO: 172329 - DNA, 19 bp, Homo sapiens
  siRNA target sequence for VAV2 (NM_003371.2,2349-2367).
gctgtggccaggtataact

SEQ ID NO: 172330 - DNA, 19 bp, Homo sapiens
  siRNA target sequence for VAV2 (NM_003371.2,2475-2493).
cggattggctggtttcctt

SEQ ID NO: 172331 - DNA, 19 bp, Homo sapiens
  siRNA target sequence for VAV2 (NM_003371.2,2491-2509).
cttcaacgtacgtagaaga

SEQ ID NO: 172332 - DNA, 19 bp, Homo sapiens
  siRNA target sequence for VAV3 (NM_006113.3,329-347).
cgaggcatttgacttgttt

SEQ ID NO: 172333 - DNA, 19 bp, Homo sapiens
  siRNA target sequence for VAV3 (NM_006113.3,344-362).
gtttgatgttcgtgacttt

SEQ ID NO: 172334 - DNA, 19 bp, Homo sapiens
  siRNA target sequence for VAV3 (NM_006113.3,368-386).
ggttatagaaacattatca

SEQ ID NO: 172335 - DNA, 19 bp, Homo sapiens
  siRNA target sequence for VAV3 (NM_006113.3,394-412).
ctcgaacacctatagcatt

SEQ ID NO: 172336 - DNA, 19 bp, Homo sapiens
  siRNA target sequence for VAV3 (NM_006113.3,475-493).
gccttcctgatttaataga

SEQ ID NO: 172337 - DNA, 19 bp, Homo sapiens
  siRNA target sequence for VAV3 (NM_006113.3,476-494).
ccttcctgatttaatagat

SEQ ID NO: 172338 - DNA, 19 bp, Homo sapiens
  siRNA target sequence for VAV3 (NM_006113.3,558-576).
gaagtctatgaggacttaa

SEQ ID NO: 172339 - DNA, 19 bp, Homo sapiens
  siRNA target sequence for VAV3 (NM_006113.3,708-726).
ccactaaaaagatttctga

SEQ ID NO: 172340 - DNA, 19 bp, Homo sapiens
  siRNA target sequence for VAV3 (NM_006113.3,741-759).
gattcagtattcatcaaca

SEQ ID NO: 172341 - DNA, 19 bp, Homo sapiens
  siRNA target sequence for VAV3 (NM_006113.3,755-773).
caacattcctgaacttgta

SEQ ID NO: 172342 - DNA, 19 bp, Homo sapiens
  siRNA target sequence for VAV3 (NM_006113.3,857-875).
ctacaaggaaagattggtt

SEQ ID NO: 172343 - DNA, 19 bp, Homo sapiens
  siRNA target sequence for VAV3 (NM_006113.3,903-921).
gagtcagccatctctagtt

SEQ ID NO: 172344 - DNA, 19 bp, Homo sapiens
  siRNA target sequence for VAV3 (NM_006113.3,905-923).
gtcagccatctctagttta

SEQ ID NO: 172345 - DNA, 19 bp, Homo sapiens
  siRNA target sequence for VAV3 (NM_006113.3,914-932).
ctctagtttagactacatt

SEQ ID NO: 172346 - DNA, 19 bp, Homo sapiens
  siRNA target sequence for VAV3 (NM_006113.3,1016-1034).
gcttgtggttcctatgcaa

SEQ ID NO: 172347 - DNA, 19 bp, Homo sapiens
  siRNA target sequence for VAV3 (NM_006113.3,1062-1080).
caggaactggtcaaacata

SEQ ID NO: 172348 - DNA, 19 bp, Homo sapiens
  siRNA target sequence for VAV3 (NM_006113.3,1090-1108).
cgactgagaaggcaaatct

SEQ ID NO: 172349 - DNA, 19 bp, Homo sapiens
  siRNA target sequence for VAV3 (NM_006113.3,1134-1152).
gacttggcacaatatgtga

SEQ ID NO: 172350 - DNA, 19 bp, Homo sapiens
  siRNA target sequence for VAV3 (NM_006113.3,1177-1195).
cccttcgtgaaattaaaca

SEQ ID NO: 172351 - DNA, 19 bp, Homo sapiens
  siRNA target sequence for VAV3 (NM_006113.3,1220-1238).
gaaccaaccagttttgctt

SEQ ID NO: 172352 - DNA, 19 bp, Homo sapiens
  siRNA target sequence for VAV3 (NM_006113.3,1253-1271).
gggagatggtgaaattcga

SEQ ID NO: 172353 - DNA, 19 bp, Homo sapiens
  siRNA target sequence for VAV3 (NM_006113.3,1255-1273).
gagatggtgaaattcgaat

SEQ ID NO: 172354 - DNA, 19 bp, Homo sapiens
  siRNA target sequence for VAV3 (NM_006113.3,1260-1278).
ggtgaaattcgaataacca

SEQ ID NO: 172355 - DNA, 19 bp, Homo sapiens
  siRNA target sequence for VAV3 (NM_006113.3,1279-1297).
ctctagacaagcataccaa

SEQ ID NO: 172356 - DNA, 19 bp, Homo sapiens
  siRNA target sequence for VAV3 (NM_006113.3,1306-1324).
ggcatatcttcttatttga

SEQ ID NO: 172357 - DNA, 19 bp, Homo sapiens
  siRNA target sequence for VAV3 (NM_006113.3,1307-1325).
gcatatcttcttatttgat

SEQ ID NO: 172358 - DNA, 19 bp, Homo sapiens
  siRNA target sequence for VAV3 (NM_006113.3,1323-1341).
gatttggcagtgatcgtat

SEQ ID NO: 172359 - DNA, 19 bp, Homo sapiens
  siRNA target sequence for VAV3 (NM_006113.3,1329-1347).
gcagtgatcgtatgtaaga

SEQ ID NO: 172360 - DNA, 19 bp, Homo sapiens
  siRNA target sequence for VAV3 (NM_006113.3,1332-1350).
gtgatcgtatgtaagagaa

SEQ ID NO: 172361 - DNA, 19 bp, Homo sapiens
  siRNA target sequence for VAV3 (NM_006113.3,1337-1355).
cgtatgtaagagaaaaggt

SEQ ID NO: 172362 - DNA, 19 bp, Homo sapiens
  siRNA target sequence for VAV3 (NM_006113.3,1346-1364).
gagaaaaggtgataactat

SEQ ID NO: 172363 - DNA, 19 bp, Homo sapiens
  siRNA target sequence for VAV3 (NM_006113.3,1353-1371).
ggtgataactatgaaatga

SEQ ID NO: 172364 - DNA, 19 bp, Homo sapiens
  siRNA target sequence for VAV3 (NM_006113.3,1413-1431).
cctacaaccgataaagaaa

SEQ ID NO: 172365 - DNA, 19 bp, Homo sapiens
  siRNA target sequence for VAV3 (NM_006113.3,1463-1481).
ccatacccaaggacaaaat

SEQ ID NO: 172366 - DNA, 19 bp, Homo sapiens
  siRNA target sequence for VAV3 (NM_006113.3,1473-1491).
ggacaaaatgggttagaat

SEQ ID NO: 172367 - DNA, 19 bp, Homo sapiens
  siRNA target sequence for VAV3 (NM_006113.3,1474-1492).
gacaaaatgggttagaatt

SEQ ID NO: 172368 - DNA, 19 bp, Homo sapiens
  siRNA target sequence for VAV3 (NM_006113.3,1476-1494).
caaaatgggttagaatttt

SEQ ID NO: 172369 - DNA, 19 bp, Homo sapiens
  siRNA target sequence for VAV3 (NM_006113.3,1544-1562).
ggctttgtctaacataaga

SEQ ID NO: 172370 - DNA, 19 bp, Homo sapiens
  siRNA target sequence for VAV3 (NM_006113.3,1587-1605).
cacgacttcaagatgcata

SEQ ID NO: 172371 - DNA, 19 bp, Homo sapiens
  siRNA target sequence for VAV3 (NM_006113.3,1646-1664).
cctgaggggaacattttat

SEQ ID NO: 172372 - DNA, 19 bp, Homo sapiens
  siRNA target sequence for VAV3 (NM_006113.3,1665-1683).
caaggctatttatgtttta

SEQ ID NO: 172373 - DNA, 19 bp, Homo sapiens
  siRNA target sequence for VAV3 (NM_006113.3,1668-1686).
ggctatttatgttttaagt

SEQ ID NO: 172374 - DNA, 19 bp, Homo sapiens
  siRNA target sequence for VAV3 (NM_006113.3,1715-1733).
gggaagagtagacaattgt

SEQ ID NO: 172375 - DNA, 19 bp, Homo sapiens
  siRNA target sequence for VAV3 (NM_006113.3,1725-1743).
gacaattgtggcagagtta

SEQ ID NO: 172376 - DNA, 19 bp, Homo sapiens
  siRNA target sequence for VAV3 (NM_006113.3,1727-1745).
caattgtggcagagttaat

SEQ ID NO: 172377 - DNA, 19 bp, Homo sapiens
  siRNA target sequence for VAV3 (NM_006113.3,1814-1832).
ggtggatccaggtttacca

SEQ ID NO: 172378 - DNA, 19 bp, Homo sapiens
  siRNA target sequence for VAV3 (NM_006113.3,1815-1833).
gtggatccaggtttaccaa

SEQ ID NO: 172379 - DNA, 19 bp, Homo sapiens
  siRNA target sequence for VAV3 (NM_006113.3,1841-1859).
ggtcattaggaactattct

SEQ ID NO: 172380 - DNA, 19 bp, Homo sapiens
  siRNA target sequence for VAV3 (NM_006113.3,1912-1930).
gggataccgttgaacttct

SEQ ID NO: 172381 - DNA, 19 bp, Homo sapiens
  siRNA target sequence for VAV3 (NM_006113.3,2028-2046).
gtgcccaaaccagtagatt

SEQ ID NO: 172382 - DNA, 19 bp, Homo sapiens
  siRNA target sequence for VAV3 (NM_006113.3,2030-2048).
gcccaaaccagtagattat

SEQ ID NO: 172383 - DNA, 19 bp, Homo sapiens
  siRNA target sequence for VAV3 (NM_006113.3,2031-2049).
cccaaaccagtagattatt

SEQ ID NO: 172384 - DNA, 19 bp, Homo sapiens
  siRNA target sequence for VAV3 (NM_006113.3,2088-2106).
caagcagagaccgaactta

SEQ ID NO: 172385 - DNA, 19 bp, Homo sapiens
  siRNA target sequence for VAV3 (NM_006113.3,2091-2109).
gcagagaccgaacttatta

SEQ ID NO: 172386 - DNA, 19 bp, Homo sapiens
  siRNA target sequence for VAV3 (NM_006113.3,2092-2110).
cagagaccgaacttattaa

SEQ ID NO: 172387 - DNA, 19 bp, Homo sapiens
  siRNA target sequence for VAV3 (NM_006113.3,2094-2112).
gagaccgaacttattaata

SEQ ID NO: 172388 - DNA, 19 bp, Homo sapiens
  siRNA target sequence for VAV3 (NM_006113.3,2114-2132).
ggtaaatagtacttacctt

SEQ ID NO: 172389 - DNA, 19 bp, Homo sapiens
  siRNA target sequence for VAV3 (NM_006113.3,2153-2171).
gtcaggagaatatgcaatt

SEQ ID NO: 172390 - DNA, 19 bp, Homo sapiens
  siRNA target sequence for VAV3 (NM_006113.3,2166-2184).
gcaattagcattaagtaca

SEQ ID NO: 172391 - DNA, 19 bp, Homo sapiens
  siRNA target sequence for VAV3 (NM_006113.3,2167-2185).
caattagcattaagtacaa

SEQ ID NO: 172392 - DNA, 19 bp, Homo sapiens
  siRNA target sequence for VAV3 (NM_006113.3,2190-2208).
gaagcaaagcacatcaaga

SEQ ID NO: 172393 - DNA, 19 bp, Homo sapiens
  siRNA target sequence for VAV3 (NM_006113.3,2193-2211).
gcaaagcacatcaagattt

SEQ ID NO: 172394 - DNA, 19 bp, Homo sapiens
  siRNA target sequence for VAV3 (NM_006113.3,2277-2295).
gagtactacaagcatcatt

SEQ ID NO: 172395 - DNA, 19 bp, Homo sapiens
  siRNA target sequence for VAV3 (NM_006113.3,2279-2297).
gtactacaagcatcattct

SEQ ID NO: 172396 - DNA, 19 bp, Homo sapiens
  siRNA target sequence for VAV3 (NM_006113.3,2303-2321).
ggaagggttcagaacctta

SEQ ID NO: 172397 - DNA, 19 bp, Homo sapiens
  siRNA target sequence for VAV3 (NM_006113.3,2307-2325).
gggttcagaaccttagata

SEQ ID NO: 172398 - DNA, 19 bp, Homo sapiens
  siRNA target sequence for VAV3 (NM_006113.3,2309-2327).
gttcagaaccttagataca

SEQ ID NO: 172399 - DNA, 19 bp, Homo sapiens
  siRNA target sequence for VAV3 (NM_006113.3,2364-2382).
gctggacagaggggtaata

SEQ ID NO: 172400 - DNA, 19 bp, Homo sapiens
  siRNA target sequence for VAV3 (NM_006113.3,2385-2403).
gcaggcaacagcttgttaa

SEQ ID NO: 172401 - DNA, 19 bp, Homo sapiens
  siRNA target sequence for VAV3 (NM_006113.3,2424-2442).
gccatcgctcggtatgact

SEQ ID NO: 172402 - DNA, 19 bp, Homo sapiens
  siRNA target sequence for VAV3 (NM_006113.3,2425-2443).
ccatcgctcggtatgactt

SEQ ID NO: 172403 - DNA, 19 bp, Homo sapiens
  siRNA target sequence for VAV3 (NM_006113.3,2439-2457).
gacttctgtgcaagagata

SEQ ID NO: 172404 - DNA, 19 bp, Homo sapiens
  siRNA target sequence for VAV3 (NM_006113.3,2444-2462).
ctgtgcaagagatatgaga

SEQ ID NO: 172405 - DNA, 19 bp, Homo sapiens
  siRNA target sequence for VAV3 (NM_006113.3,2557-2575).
ggtttccatccacatatgt

SEQ ID NO: 172406 - DNA, 19 bp, Homo sapiens
  siRNA target sequence for ACBD3 (NM_022735.3,312-330).
ctggcactgcgcttcttca

SEQ ID NO: 172407 - DNA, 19 bp, Homo sapiens
  siRNA target sequence for ACBD3 (NM_022735.3,314-332).
ggcactgcgcttcttcaaa

SEQ ID NO: 172408 - DNA, 19 bp, Homo sapiens
  siRNA target sequence for ACBD3 (NM_022735.3,316-334).
cactgcgcttcttcaaaga

SEQ ID NO: 172409 - DNA, 19 bp, Homo sapiens
  siRNA target sequence for ACBD3 (NM_022735.3,318-336).
ctgcgcttcttcaaagaaa

SEQ ID NO: 172410 - DNA, 19 bp, Homo sapiens
  siRNA target sequence for ACBD3 (NM_022735.3,320-338).
gcgcttcttcaaagaaaaa

SEQ ID NO: 172411 - DNA, 19 bp, Homo sapiens
  siRNA target sequence for ACBD3 (NM_022735.3,402-420).
gttcttatgggcccatata

SEQ ID NO: 172412 - DNA, 19 bp, Homo sapiens
  siRNA target sequence for ACBD3 (NM_022735.3,430-448).
cttgtcctgaggttggatt

SEQ ID NO: 172413 - DNA, 19 bp, Homo sapiens
  siRNA target sequence for ACBD3 (NM_022735.3,436-454).
ctgaggttggattctttga

SEQ ID NO: 172414 - DNA, 19 bp, Homo sapiens
  siRNA target sequence for ACBD3 (NM_022735.3,489-507).
gccctgggaaacatgtcta

SEQ ID NO: 172415 - DNA, 19 bp, Homo sapiens
  siRNA target sequence for ACBD3 (NM_022735.3,548-566).
gtgttgccatctcttttca

SEQ ID NO: 172416 - DNA, 19 bp, Homo sapiens
  siRNA target sequence for ACBD3 (NM_022735.3,576-594).
gcgtcccacaaaatagaga

SEQ ID NO: 172417 - DNA, 19 bp, Homo sapiens
  siRNA target sequence for ACBD3 (NM_022735.3,728-746).
ggaaaggagacggatagaa

SEQ ID NO: 172418 - DNA, 19 bp, Homo sapiens
  siRNA target sequence for ACBD3 (NM_022735.3,827-845).
gtatgcagcccaacagtat

SEQ ID NO: 172419 - DNA, 19 bp, Homo sapiens
  siRNA target sequence for ACBD3 (NM_022735.3,854-872).
ctacgaacagcagcaaatt

SEQ ID NO: 172420 - DNA, 19 bp, Homo sapiens
  siRNA target sequence for ACBD3 (NM_022735.3,884-902).
gttgcaggagcaacactat

SEQ ID NO: 172421 - DNA, 19 bp, Homo sapiens
  siRNA target sequence for ACBD3 (NM_022735.3,911-929).
catgcagcagttgtatcaa

SEQ ID NO: 172422 - DNA, 19 bp, Homo sapiens
  siRNA target sequence for ACBD3 (NM_022735.3,995-1013).
cttgcctacatcatcaaaa

SEQ ID NO: 172423 - DNA, 19 bp, Homo sapiens
  siRNA target sequence for ACBD3 (NM_022735.3,999-1017).
cctacatcatcaaaagtga

SEQ ID NO: 172424 - DNA, 19 bp, Homo sapiens
  siRNA target sequence for ACBD3 (NM_022735.3,1020-1038).
gcaactgtaccaagtaata

SEQ ID NO: 172425 - DNA, 19 bp, Homo sapiens
  siRNA target sequence for ACBD3 (NM_022735.3,1021-1039).
caactgtaccaagtaatat

SEQ ID NO: 172426 - DNA, 19 bp, Homo sapiens
  siRNA target sequence for ACBD3 (NM_022735.3,1024-1042).
ctgtaccaagtaatatgat

SEQ ID NO: 172427 - DNA, 19 bp, Homo sapiens
  siRNA target sequence for ACBD3 (NM_022735.3,1033-1051).
gtaatatgatgtcagttaa

SEQ ID NO: 172428 - DNA, 19 bp, Homo sapiens
  siRNA target sequence for ACBD3 (NM_022735.3,1124-1142).
gaatggaccaaaagaatct

SEQ ID NO: 172429 - DNA, 19 bp, Homo sapiens
  siRNA target sequence for ACBD3 (NM_022735.3,1171-1189).
ggacacgacctcagatcaa

SEQ ID NO: 172430 - DNA, 19 bp, Homo sapiens
  siRNA target sequence for ACBD3 (NM_022735.3,1172-1190).
gacacgacctcagatcaaa

SEQ ID NO: 172431 - DNA, 19 bp, Homo sapiens
  siRNA target sequence for ACBD3 (NM_022735.3,1215-1233).
gatgcagattccgtgatta

SEQ ID NO: 172432 - DNA, 19 bp, Homo sapiens
  siRNA target sequence for ACBD3 (NM_022735.3,1219-1237).
cagattccgtgattacagt

SEQ ID NO: 172433 - DNA, 19 bp, Homo sapiens
  siRNA target sequence for ACBD3 (NM_022735.3,1427-1445).
catcggttgtgaagagaaa

SEQ ID NO: 172434 - DNA, 19 bp, Homo sapiens
  siRNA target sequence for ACBD3 (NM_022735.3,1572-1590).
gacaactcctactctttgt

SEQ ID NO: 172435 - DNA, 19 bp, Homo sapiens
  siRNA target sequence for ACBD3 (NM_022735.3,1607-1625).
ctactacagagtctattat

SEQ ID NO: 172436 - DNA, 19 bp, Homo sapiens
  siRNA target sequence for ACBD3 (NM_022735.3,1610-1628).
ctacagagtctattatact

SEQ ID NO: 172437 - DNA, 19 bp, Homo sapiens
  siRNA target sequence for ACBD3 (NM_022735.3,1613-1631).
cagagtctattatactaga

SEQ ID NO: 172438 - DNA, 19 bp, Homo sapiens
  siRNA target sequence for ACBD4 (NM_024722.1,570-588).
gagatgctgcgattctaca

SEQ ID NO: 172439 - DNA, 19 bp, Homo sapiens
  siRNA target sequence for ACBD4 (NM_024722.1,644-662).
ggaccccattggacgatat

SEQ ID NO: 172440 - DNA, 19 bp, Homo sapiens
  siRNA target sequence for ACBD4 (NM_024722.1,645-663).
gaccccattggacgatata

SEQ ID NO: 172441 - DNA, 19 bp, Homo sapiens
  siRNA target sequence for ACBD4 (NM_024722.1,648-666).
cccattggacgatataagt

SEQ ID NO: 172442 - DNA, 19 bp, Homo sapiens
  siRNA target sequence for ACBD4 (NM_024722.1,715-733).
ctgcctacatcactgaaat

SEQ ID NO: 172443 - DNA, 19 bp, Homo sapiens
  siRNA target sequence for ACBD4 (NM_024722.1,717-735).
gcctacatcactgaaatga

SEQ ID NO: 172444 - DNA, 19 bp, Homo sapiens
  siRNA target sequence for ACBD4 (NM_024722.1,718-736).
cctacatcactgaaatgaa

SEQ ID NO: 172445 - DNA, 19 bp, Homo sapiens
  siRNA target sequence for ACBD4 (NM_024722.1,783-801).
gcagaggacatgtttggtt

SEQ ID NO: 172446 - DNA, 19 bp, Homo sapiens
  siRNA target sequence for ACBD5 (NM_145698.1,257-275).
ccagagtttgccgaagaat

SEQ ID NO: 172447 - DNA, 19 bp, Homo sapiens
  siRNA target sequence for ACBD5 (NM_145698.1,342-360).
ggaccctgtaaactttcaa

SEQ ID NO: 172448 - DNA, 19 bp, Homo sapiens
  siRNA target sequence for ACBD5 (NM_145698.1,364-382).
ctggattttgggatcctat

SEQ ID NO: 172449 - DNA, 19 bp, Homo sapiens
  siRNA target sequence for ACBD5 (NM_145698.1,373-391).
gggatcctattggaagata

SEQ ID NO: 172450 - DNA, 19 bp, Homo sapiens
  siRNA target sequence for ACBD5 (NM_145698.1,374-392).
ggatcctattggaagatat

SEQ ID NO: 172451 - DNA, 19 bp, Homo sapiens
  siRNA target sequence for ACBD5 (NM_145698.1,406-424).
ggagttcactgggtgatat

SEQ ID NO: 172452 - DNA, 19 bp, Homo sapiens
  siRNA target sequence for ACBD5 (NM_145698.1,580-598).
cctcagatcttggtaatgt

SEQ ID NO: 172453 - DNA, 19 bp, Homo sapiens
  siRNA target sequence for ACBD5 (NM_145698.1,617-635).
cgccaaaaccgttaatggt

SEQ ID NO: 172454 - DNA, 19 bp, Homo sapiens
  siRNA target sequence for ACBD5 (NM_145698.1,700-718).
gagcagaacaaagtgataa

SEQ ID NO: 172455 - DNA, 19 bp, Homo sapiens
  siRNA target sequence for ACBD5 (NM_145698.1,740-758).
gtcagcagaccataagaat

SEQ ID NO: 172456 - DNA, 19 bp, Homo sapiens
  siRNA target sequence for ACBD5 (NM_145698.1,761-779).
ggaagtcattgtcactaat

SEQ ID NO: 172457 - DNA, 19 bp, Homo sapiens
  siRNA target sequence for ACBD5 (NM_145698.1,796-814).
gctttgttcaggatataca

SEQ ID NO: 172458 - DNA, 19 bp, Homo sapiens
  siRNA target sequence for ACBD5 (NM_145698.1,864-882).
gtaaagcccattgatgaaa

SEQ ID NO: 172459 - DNA, 19 bp, Homo sapiens
  siRNA target sequence for ACBD5 (NM_145698.1,884-902).
cttggggcaaactggaaaa

SEQ ID NO: 172460 - DNA, 19 bp, Homo sapiens
  siRNA target sequence for ACBD5 (NM_145698.1,913-931).
gcattcaccaagatataaa

SEQ ID NO: 172461 - DNA, 19 bp, Homo sapiens
  siRNA target sequence for ACBD5 (NM_145698.1,1040-1058).
cagctttacgtccaacaat

SEQ ID NO: 172462 - DNA, 19 bp, Homo sapiens
  siRNA target sequence for ACBD5 (NM_145698.1,1055-1073).
caatggaccatttcagtat

SEQ ID NO: 172463 - DNA, 19 bp, Homo sapiens
  siRNA target sequence for ACBD5 (NM_145698.1,1059-1077).
ggaccatttcagtattact

SEQ ID NO: 172464 - DNA, 19 bp, Homo sapiens
  siRNA target sequence for ACBD5 (NM_145698.1,1090-1108).
ccagtcaacccatggaaaa

SEQ ID NO: 172465 - DNA, 19 bp, Homo sapiens
  siRNA target sequence for ACBD5 (NM_145698.1,1258-1276).
gcggagaaactgacgaatt

SEQ ID NO: 172466 - DNA, 19 bp, Homo sapiens
  siRNA target sequence for ACBD5 (NM_145698.1,1260-1278).
ggagaaactgacgaattct

SEQ ID NO: 172467 - DNA, 19 bp, Homo sapiens
  siRNA target sequence for ACBD5 (NM_145698.1,1263-1281).
gaaactgacgaattctcta

SEQ ID NO: 172468 - DNA, 19 bp, Homo sapiens
  siRNA target sequence for ACBD5 (NM_145698.1,1267-1285).
ctgacgaattctctaatgt

SEQ ID NO: 172469 - DNA, 19 bp, Homo sapiens
  siRNA target sequence for ACBD5 (NM_145698.1,1271-1289).
cgaattctctaatgttaga

SEQ ID NO: 172470 - DNA, 19 bp, Homo sapiens
  siRNA target sequence for ACBD5 (NM_145698.1,1291-1309).
gaggaagaggacataggat

SEQ ID NO: 172471 - DNA, 19 bp, Homo sapiens
  siRNA target sequence for ACBD5 (NM_145698.1,1579-1597).
ctcctggtgtgctaacgtt

SEQ ID NO: 172472 - DNA, 19 bp, Homo sapiens
  siRNA target sequence for ACBD5 (NM_145698.1,1589-1607).
gctaacgtttgccatcata

SEQ ID NO: 172473 - DNA, 19 bp, Homo sapiens
  siRNA target sequence for ACBD5 (NM_145698.1,1590-1608).
ctaacgtttgccatcatat

SEQ ID NO: 172474 - DNA, 19 bp, Homo sapiens
  siRNA target sequence for ACBD5 (NM_145698.1,1599-1617).
gccatcatatggcctttta

SEQ ID NO: 172475 - DNA, 19 bp, Homo sapiens
  siRNA target sequence for ACBD5 (NM_145698.1,1620-1638).
gcacagtggttggtgtatt

SEQ ID NO: 172476 - DNA, 19 bp, Homo sapiens
  siRNA target sequence for ACBD5 (NM_145698.1,1623-1641).
cagtggttggtgtatttat

SEQ ID NO: 172477 - DNA, 19 bp, Homo sapiens
  siRNA target sequence for ACBD6 (NM_032360.2,260-278).
gcagggagcagctcttgta

SEQ ID NO: 172478 - DNA, 19 bp, Homo sapiens
  siRNA target sequence for ACBD6 (NM_032360.2,290-308).
ggtacaaacaggtcaaagt

SEQ ID NO: 172479 - DNA, 19 bp, Homo sapiens
  siRNA target sequence for ACBD6 (NM_032360.2,403-421).
caagcaatgcaggaatata

SEQ ID NO: 172480 - DNA, 19 bp, Homo sapiens
  siRNA target sequence for ACBD6 (NM_032360.2,414-432).
ggaatatatcgcagtagtt

SEQ ID NO: 172481 - DNA, 19 bp, Homo sapiens
  siRNA target sequence for ACBD6 (NM_032360.2,415-433).
gaatatatcgcagtagtta

SEQ ID NO: 172482 - DNA, 19 bp, Homo sapiens
  siRNA target sequence for ACBD6 (NM_032360.2,497-515).
gttttggtgggccagttat

SEQ ID NO: 172483 - DNA, 19 bp, Homo sapiens
  siRNA target sequence for ACBD6 (NM_032360.2,502-520).
ggtgggccagttattagtt

SEQ ID NO: 172484 - DNA, 19 bp, Homo sapiens
  siRNA target sequence for ACBD6 (NM_032360.2,507-525).
gccagttattagttctcta

SEQ ID NO: 172485 - DNA, 19 bp, Homo sapiens
  siRNA target sequence for ACBD6 (NM_032360.2,508-526).
ccagttattagttctctat

SEQ ID NO: 172486 - DNA, 19 bp, Homo sapiens
  siRNA target sequence for ACBD6 (NM_032360.2,509-527).
cagttattagttctctata

SEQ ID NO: 172487 - DNA, 19 bp, Homo sapiens
  siRNA target sequence for ACBD6 (NM_032360.2,518-536).
gttctctatatcatgaaga

SEQ ID NO: 172488 - DNA, 19 bp, Homo sapiens
  siRNA target sequence for ACBD6 (NM_032360.2,602-620).
ccaaagccatcaaatcgaa

SEQ ID NO: 172489 - DNA, 19 bp, Homo sapiens
  siRNA target sequence for ACBD6 (NM_032360.2,603-621).
caaagccatcaaatcgaaa

SEQ ID NO: 172490 - DNA, 19 bp, Homo sapiens
  siRNA target sequence for ACBD6 (NM_032360.2,608-626).
ccatcaaatcgaaaaatgt

SEQ ID NO: 172491 - DNA, 19 bp, Homo sapiens
  siRNA target sequence for ACBD6 (NM_032360.2,674-692).
cctgtgatcgaggacataa

SEQ ID NO: 172492 - DNA, 19 bp, Homo sapiens
  siRNA target sequence for ACBD6 (NM_032360.2,683-701).
gaggacataaggaactagt

SEQ ID NO: 172493 - DNA, 19 bp, Homo sapiens
  siRNA target sequence for ACBD6 (NM_032360.2,715-733).
caacatagagctgacatta

SEQ ID NO: 172494 - DNA, 19 bp, Homo sapiens
  siRNA target sequence for ACBD6 (NM_032360.2,751-769).
ggccaaacagctctacatt

SEQ ID NO: 172495 - DNA, 19 bp, Homo sapiens
  siRNA target sequence for ACBD6 (NM_032360.2,752-770).
gccaaacagctctacatta

SEQ ID NO: 172496 - DNA, 19 bp, Homo sapiens
  siRNA target sequence for ACBD6 (NM_032360.2,867-885).
ggtgacaggctgcaaaaca

SEQ ID NO: 172497 - DNA, 19 bp, Homo sapiens
  siRNA target sequence for ACBD6 (NM_032360.2,870-888).
gacaggctgcaaaacagtt

SEQ ID NO: 172498 - DNA, 19 bp, Homo sapiens
  siRNA target sequence for BACH (NM_181865.1,34-52).
cactaaacgtcctcagaaa

SEQ ID NO: 172499 - DNA, 19 bp, Homo sapiens
  siRNA target sequence for PECI (NM_006117.1,169-187).
ggaaacgaagtgaagctaa

SEQ ID NO: 172500 - DNA, 19 bp, Homo sapiens
  siRNA target sequence for PECI (NM_006117.1,170-188).
gaaacgaagtgaagctaaa

SEQ ID NO: 172501 - DNA, 19 bp, Homo sapiens
  siRNA target sequence for PECI (NM_006117.1,245-263).
gtgtatttgacttgatcaa

SEQ ID NO: 172502 - DNA, 19 bp, Homo sapiens
  siRNA target sequence for PECI (NM_006117.1,247-265).
gtatttgacttgatcaaca

SEQ ID NO: 172503 - DNA, 19 bp, Homo sapiens
  siRNA target sequence for PECI (NM_006117.1,320-338).
ggcagaactatgtggattt

SEQ ID NO: 172504 - DNA, 19 bp, Homo sapiens
  siRNA target sequence for PECI (NM_006117.1,439-457).
gatggcatcacaaagatca

SEQ ID NO: 172505 - DNA, 19 bp, Homo sapiens
  siRNA target sequence for PECI (NM_006117.1,486-504).
cataaacactgagatgtat

SEQ ID NO: 172506 - DNA, 19 bp, Homo sapiens
  siRNA target sequence for PECI (NM_006117.1,536-554).
gcaaggatgactcaatcat

SEQ ID NO: 172507 - DNA, 19 bp, Homo sapiens
  siRNA target sequence for PECI (NM_006117.1,544-562).
gactcaatcatcactgttt

SEQ ID NO: 172508 - DNA, 19 bp, Homo sapiens
  siRNA target sequence for PECI (NM_006117.1,546-564).
ctcaatcatcactgtttta

SEQ ID NO: 172509 - DNA, 19 bp, Homo sapiens
  siRNA target sequence for PECI (NM_006117.1,566-584).
caggaaatggtgactatta

SEQ ID NO: 172510 - DNA, 19 bp, Homo sapiens
  siRNA target sequence for PECI (NM_006117.1,590-608).
gtgggaatgatctgactaa

SEQ ID NO: 172511 - DNA, 19 bp, Homo sapiens
  siRNA target sequence for PECI (NM_006117.1,592-610).
gggaatgatctgactaact

SEQ ID NO: 172512 - DNA, 19 bp, Homo sapiens
  siRNA target sequence for PECI (NM_006117.1,593-611).
ggaatgatctgactaactt

SEQ ID NO: 172513 - DNA, 19 bp, Homo sapiens
  siRNA target sequence for PECI (NM_006117.1,603-621).
gactaacttcactgatatt

SEQ ID NO: 172514 - DNA, 19 bp, Homo sapiens
  siRNA target sequence for PECI (NM_006117.1,679-697).
gtgggctgttttatagatt

SEQ ID NO: 172515 - DNA, 19 bp, Homo sapiens
  siRNA target sequence for PECI (NM_006117.1,782-800).
catctgacagggcaacatt

SEQ ID NO: 172516 - DNA, 19 bp, Homo sapiens
  siRNA target sequence for PECI (NM_006117.1,838-856).
ggatgctcctcttacactt

SEQ ID NO: 172517 - DNA, 19 bp, Homo sapiens
  siRNA target sequence for PECI (NM_006117.1,940-958).
ggacttgttactgaagttt

SEQ ID NO: 172518 - DNA, 19 bp, Homo sapiens
  siRNA target sequence for PECI (NM_006117.1,961-979).
cctgatagcacttttcaga

SEQ ID NO: 172519 - DNA, 19 bp, Homo sapiens
  siRNA target sequence for PECI (NM_006117.1,1018-1036).
cccccaaatgccttgagaa

SEQ ID NO: 172520 - DNA, 19 bp, Homo sapiens
  siRNA target sequence for PECI (NM_006117.1,1019-1037).
ccccaaatgccttgagaat

SEQ ID NO: 172521 - DNA, 19 bp, Homo sapiens
  siRNA target sequence for PECI (NM_006117.1,1020-1038).
cccaaatgccttgagaatt

SEQ ID NO: 172522 - DNA, 19 bp, Homo sapiens
  siRNA target sequence for PECI (NM_006117.1,1021-1039).
ccaaatgccttgagaattt

SEQ ID NO: 172523 - DNA, 19 bp, Homo sapiens
  siRNA target sequence for PECI (NM_006117.1,1152-1170).
gaacttcttatccagaaaa

SEQ ID NO: 172524 - DNA, 19 bp, Homo sapiens
  siRNA target sequence for NDUFAB1 (NM_005003.2,194-212).
caggttcctggtagagtta

SEQ ID NO: 172525 - DNA, 19 bp, Homo sapiens
  siRNA target sequence for NDUFAB1 (NM_005003.2,262-280).
catccaggaccgtgttctt

SEQ ID NO: 172526 - DNA, 19 bp, Homo sapiens
  siRNA target sequence for NDUFAB1 (NM_005003.2,268-286).
ggaccgtgttctttacgta

SEQ ID NO: 172527 - DNA, 19 bp, Homo sapiens
  siRNA target sequence for NDUFAB1 (NM_005003.2,269-287).
gaccgtgttctttacgtat

SEQ ID NO: 172528 - DNA, 19 bp, Homo sapiens
  siRNA target sequence for NDUFAB1 (NM_005003.2,272-290).
cgtgttctttacgtattga

SEQ ID NO: 172529 - DNA, 19 bp, Homo sapiens
  siRNA target sequence for NDUFAB1 (NM_005003.2,273-291).
gtgttctttacgtattgaa

SEQ ID NO: 172530 - DNA, 19 bp, Homo sapiens
  siRNA target sequence for CPNE1 (NM_003915.2,596-614).
cagaagctacgctttggaa

SEQ ID NO: 172531 - DNA, 19 bp, Homo sapiens
  siRNA target sequence for CPNE1 (NM_003915.2,601-619).
gctacgctttggaatctat

SEQ ID NO: 172532 - DNA, 19 bp, Homo sapiens
  siRNA target sequence for CPNE1 (NM_003915.2,605-623).
cgctttggaatctatgaca

SEQ ID NO: 172533 - DNA, 19 bp, Homo sapiens
  siRNA target sequence for CPNE1 (NM_003915.2,606-624).
gctttggaatctatgacat

SEQ ID NO: 172534 - DNA, 19 bp, Homo sapiens
  siRNA target sequence for CPNE1 (NM_003915.2,611-629).
ggaatctatgacatagaca

SEQ ID NO: 172535 - DNA, 19 bp, Homo sapiens
  siRNA target sequence for CPNE1 (NM_003915.2,678-696).
gttccctaggacagattgt

SEQ ID NO: 172536 - DNA, 19 bp, Homo sapiens
  siRNA target sequence for CPNE1 (NM_003915.2,765-783).
cggtctcagctcaggaatt

SEQ ID NO: 172537 - DNA, 19 bp, Homo sapiens
  siRNA target sequence for CPNE1 (NM_003915.2,766-784).
ggtctcagctcaggaatta

SEQ ID NO: 172538 - DNA, 19 bp, Homo sapiens
  siRNA target sequence for CPNE1 (NM_003915.2,815-833).
gaggccagaaacctagata

SEQ ID NO: 172539 - DNA, 19 bp, Homo sapiens
  siRNA target sequence for CPNE1 (NM_003915.2,818-836).
gccagaaacctagataaga

SEQ ID NO: 172540 - DNA, 19 bp, Homo sapiens
  siRNA target sequence for CPNE1 (NM_003915.2,912-930).
gatctgaggtcatcaagaa

SEQ ID NO: 172541 - DNA, 19 bp, Homo sapiens
  siRNA target sequence for CPNE1 (NM_003915.2,962-980).
gtccccgttcagcatttct

SEQ ID NO: 172542 - DNA, 19 bp, Homo sapiens
  siRNA target sequence for CPNE1 (NM_003915.2,1009-1027).
ggtgcaatgctccgattat

SEQ ID NO: 172543 - DNA, 19 bp, Homo sapiens
  siRNA target sequence for CPNE1 (NM_003915.2,1013-1031).
caatgctccgattatgaca

SEQ ID NO: 172544 - DNA, 19 bp, Homo sapiens
  siRNA target sequence for CPNE1 (NM_003915.2,1089-1107).
cagtcccggctgagtttga

SEQ ID NO: 172545 - DNA, 19 bp, Homo sapiens
  siRNA target sequence for CPNE1 (NM_003915.2,1091-1109).
gtcccggctgagtttgaat

SEQ ID NO: 172546 - DNA, 19 bp, Homo sapiens
  siRNA target sequence for CPNE1 (NM_003915.2,1095-1113).
cggctgagtttgaatgcat

SEQ ID NO: 172547 - DNA, 19 bp, Homo sapiens
  siRNA target sequence for CPNE1 (NM_003915.2,1158-1176).
gaactatccgtgtcaagat

SEQ ID NO: 172548 - DNA, 19 bp, Homo sapiens
  siRNA target sequence for CPNE1 (NM_003915.2,1174-1192).
gatttgtcgggtagaaaca

SEQ ID NO: 172549 - DNA, 19 bp, Homo sapiens
  siRNA target sequence for CPNE1 (NM_003915.2,1220-1238).
ggaggctgtcagatcaact

SEQ ID NO: 172550 - DNA, 19 bp, Homo sapiens
  siRNA target sequence for CPNE1 (NM_003915.2,1310-1328).
ccaacaggggtcaatgagt

SEQ ID NO: 172551 - DNA, 19 bp, Homo sapiens
  siRNA target sequence for CPNE1 (NM_003915.2,1311-1329).
caacaggggtcaatgagta

SEQ ID NO: 172552 - DNA, 19 bp, Homo sapiens
  siRNA target sequence for CPNE1 (NM_003915.2,1356-1374).
gcgtggttcaggactatga

SEQ ID NO: 172553 - DNA, 19 bp, Homo sapiens
  siRNA target sequence for CPNE1 (NM_003915.2,1358-1376).
gtggttcaggactatgact

SEQ ID NO: 172554 - DNA, 19 bp, Homo sapiens
  siRNA target sequence for CPNE1 (NM_003915.2,1438-1456).
gcatgaatttgccttgaat

SEQ ID NO: 172555 - DNA, 19 bp, Homo sapiens
  siRNA target sequence for CPNE1 (NM_003915.2,1607-1625).
gggactgcctcgcaatact

SEQ ID NO: 172556 - DNA, 19 bp, Homo sapiens
  siRNA target sequence for CPNE1 (NM_003915.2,1608-1626).
ggactgcctcgcaatactt

SEQ ID NO: 172557 - DNA, 19 bp, Homo sapiens
  siRNA target sequence for CPNE1 (NM_003915.2,1611-1629).
ctgcctcgcaatacttcat

SEQ ID NO: 172558 - DNA, 19 bp, Homo sapiens
  siRNA target sequence for CPNE1 (NM_003915.2,1899-1917).
ccacacaactggtctcata

SEQ ID NO: 172559 - DNA, 19 bp, Homo sapiens
  siRNA target sequence for CPNE3 (NM_003909.1,140-158).
caaaggtggcgctgaatgt

SEQ ID NO: 172560 - DNA, 19 bp, Homo sapiens
  siRNA target sequence for CPNE3 (NM_003909.1,256-274).
gagcgcacagaaaggatta

SEQ ID NO: 172561 - DNA, 19 bp, Homo sapiens
  siRNA target sequence for CPNE3 (NM_003909.1,289-307).
ccccaattttccaagacat

SEQ ID NO: 172562 - DNA, 19 bp, Homo sapiens
  siRNA target sequence for CPNE3 (NM_003909.1,299-317).
ccaagacatttattattga

SEQ ID NO: 172563 - DNA, 19 bp, Homo sapiens
  siRNA target sequence for CPNE3 (NM_003909.1,300-318).
caagacatttattattgat

SEQ ID NO: 172564 - DNA, 19 bp, Homo sapiens
  siRNA target sequence for CPNE3 (NM_003909.1,363-381).
catcgacaacaaaactatt

SEQ ID NO: 172565 - DNA, 19 bp, Homo sapiens
  siRNA target sequence for CPNE3 (NM_003909.1,455-473).
ctcgaccactggtgatgaa

SEQ ID NO: 172566 - DNA, 19 bp, Homo sapiens
  siRNA target sequence for CPNE3 (NM_003909.1,457-475).
cgaccactggtgatgaaaa

SEQ ID NO: 172567 - DNA, 19 bp, Homo sapiens
  siRNA target sequence for CPNE3 (NM_003909.1,490-508).
ggaaaagggagcattacga

SEQ ID NO: 172568 - DNA, 19 bp, Homo sapiens
  siRNA target sequence for CPNE3 (NM_003909.1,491-509).
gaaaagggagcattacgat

SEQ ID NO: 172569 - DNA, 19 bp, Homo sapiens
  siRNA target sequence for CPNE3 (NM_003909.1,506-524).
cgatttcagctgaagaaat

SEQ ID NO: 172570 - DNA, 19 bp, Homo sapiens
  siRNA target sequence for CPNE3 (NM_003909.1,540-558).
ggtcttgtttgaaatggaa

SEQ ID NO: 172571 - DNA, 19 bp, Homo sapiens
  siRNA target sequence for CPNE3 (NM_003909.1,568-586).
ctggataataaggatctat

SEQ ID NO: 172572 - DNA, 19 bp, Homo sapiens
  siRNA target sequence for CPNE3 (NM_003909.1,570-588).
ggataataaggatctattt

SEQ ID NO: 172573 - DNA, 19 bp, Homo sapiens
  siRNA target sequence for CPNE3 (NM_003909.1,579-597).
ggatctatttggaaagtca

SEQ ID NO: 172574 - DNA, 19 bp, Homo sapiens
  siRNA target sequence for CPNE3 (NM_003909.1,652-670).
catcggacagaggttgtta

SEQ ID NO: 172575 - DNA, 19 bp, Homo sapiens
  siRNA target sequence for CPNE3 (NM_003909.1,655-673).
cggacagaggttgttaaaa

SEQ ID NO: 172576 - DNA, 19 bp, Homo sapiens
  siRNA target sequence for CPNE3 (NM_003909.1,688-706).
gtttggaggcctttcaaga

SEQ ID NO: 172577 - DNA, 19 bp, Homo sapiens
  siRNA target sequence for CPNE3 (NM_003909.1,702-720).
caagatctctcttaactca

SEQ ID NO: 172578 - DNA, 19 bp, Homo sapiens
  siRNA target sequence for CPNE3 (NM_003909.1,719-737).
cactgtgttacggagatat

SEQ ID NO: 172579 - DNA, 19 bp, Homo sapiens
  siRNA target sequence for CPNE3 (NM_003909.1,747-765).
cattaaggtggagtgttat

SEQ ID NO: 172580 - DNA, 19 bp, Homo sapiens
  siRNA target sequence for CPNE3 (NM_003909.1,753-771).
ggtggagtgttatgattat

SEQ ID NO: 172581 - DNA, 19 bp, Homo sapiens
  siRNA target sequence for CPNE3 (NM_003909.1,842-860).
gaagctcacctgttgaatt

SEQ ID NO: 172582 - DNA, 19 bp, Homo sapiens
  siRNA target sequence for CPNE3 (NM_003909.1,845-863).
gctcacctgttgaatttga

SEQ ID NO: 172583 - DNA, 19 bp, Homo sapiens
  siRNA target sequence for CPNE3 (NM_003909.1,851-869).
ctgttgaatttgaatgcat

SEQ ID NO: 172584 - DNA, 19 bp, Homo sapiens
  siRNA target sequence for CPNE3 (NM_003909.1,916-934).
gttatcagtgtgaaacagt

SEQ ID NO: 172585 - DNA, 19 bp, Homo sapiens
  siRNA target sequence for CPNE3 (NM_003909.1,925-943).
gtgaaacagtgtgagatta

SEQ ID NO: 172586 - DNA, 19 bp, Homo sapiens
  siRNA target sequence for CPNE3 (NM_003909.1,933-951).
gtgtgagattacagtagaa

SEQ ID NO: 172587 - DNA, 19 bp, Homo sapiens
  siRNA target sequence for CPNE3 (NM_003909.1,976-994).
ggaggatgtcagctgaatt

SEQ ID NO: 172588 - DNA, 19 bp, Homo sapiens
  siRNA target sequence for CPNE3 (NM_003909.1,977-995).
gaggatgtcagctgaattt

SEQ ID NO: 172589 - DNA, 19 bp, Homo sapiens
  siRNA target sequence for CPNE3 (NM_003909.1,1040-1058).
ctccagactcccttcatta

SEQ ID NO: 172590 - DNA, 19 bp, Homo sapiens
  siRNA target sequence for CPNE3 (NM_003909.1,1045-1063).
gactcccttcattacatca

SEQ ID NO: 172591 - DNA, 19 bp, Homo sapiens
  siRNA target sequence for CPNE3 (NM_003909.1,1066-1084).
cccaatggcgttaatgagt

SEQ ID NO: 172592 - DNA, 19 bp, Homo sapiens
  siRNA target sequence for CPNE3 (NM_003909.1,1067-1085).
ccaatggcgttaatgagta

SEQ ID NO: 172593 - DNA, 19 bp, Homo sapiens
  siRNA target sequence for CPNE3 (NM_003909.1,1068-1086).
caatggcgttaatgagtat

SEQ ID NO: 172594 - DNA, 19 bp, Homo sapiens
  siRNA target sequence for CPNE3 (NM_003909.1,1072-1090).
ggcgttaatgagtatttga

SEQ ID NO: 172595 - DNA, 19 bp, Homo sapiens
  siRNA target sequence for CPNE3 (NM_003909.1,1074-1092).
cgttaatgagtatttgact

SEQ ID NO: 172596 - DNA, 19 bp, Homo sapiens
  siRNA target sequence for CPNE3 (NM_003909.1,1103-1121).
ctgtgggactggtcattca

SEQ ID NO: 172597 - DNA, 19 bp, Homo sapiens
  siRNA target sequence for CPNE3 (NM_003909.1,1107-1125).
gggactggtcattcaagat

SEQ ID NO: 172598 - DNA, 19 bp, Homo sapiens
  siRNA target sequence for CPNE3 (NM_003909.1,1113-1131).
ggtcattcaagattatgat

SEQ ID NO: 172599 - DNA, 19 bp, Homo sapiens
  siRNA target sequence for CPNE3 (NM_003909.1,1178-1196).
ctcagtggcaggtatcaca

SEQ ID NO: 172600 - DNA, 19 bp, Homo sapiens
  siRNA target sequence for CPNE3 (NM_003909.1,1193-1211).
cacatgaatttccaatgaa

SEQ ID NO: 172601 - DNA, 19 bp, Homo sapiens
  siRNA target sequence for CPNE3 (NM_003909.1,1198-1216).
gaatttccaatgaacttca

SEQ ID NO: 172602 - DNA, 19 bp, Homo sapiens
  siRNA target sequence for CPNE3 (NM_003909.1,1260-1278).
ggcgtatcggtcttgtctt

SEQ ID NO: 172603 - DNA, 19 bp, Homo sapiens
  siRNA target sequence for CPNE3 (NM_003909.1,1274-1292).
gtcttcctcagataaaact

SEQ ID NO: 172604 - DNA, 19 bp, Homo sapiens
  siRNA target sequence for CPNE3 (NM_003909.1,1291-1309).
ctctatggaccaactaatt

SEQ ID NO: 172605 - DNA, 19 bp, Homo sapiens
  siRNA target sequence for CPNE3 (NM_003909.1,1293-1311).
ctatggaccaactaatttt

SEQ ID NO: 172606 - DNA, 19 bp, Homo sapiens
  siRNA target sequence for CPNE3 (NM_003909.1,1363-1381).
cagacagcttctcaatatt

SEQ ID NO: 172607 - DNA, 19 bp, Homo sapiens
  siRNA target sequence for CPNE3 (NM_003909.1,1410-1428).
gatcacagaccttgatgaa

SEQ ID NO: 172608 - DNA, 19 bp, Homo sapiens
  siRNA target sequence for CPNE3 (NM_003909.1,1430-1448).
ccagacaagctatagttaa

SEQ ID NO: 172609 - DNA, 19 bp, Homo sapiens
  siRNA target sequence for CPNE3 (NM_003909.1,1431-1449).
cagacaagctatagttaat

SEQ ID NO: 172610 - DNA, 19 bp, Homo sapiens
  siRNA target sequence for CPNE3 (NM_003909.1,1461-1479).
gcctatgtccatcataatt

SEQ ID NO: 172611 - DNA, 19 bp, Homo sapiens
  siRNA target sequence for CPNE3 (NM_003909.1,1463-1481).
ctatgtccatcataattgt

SEQ ID NO: 172612 - DNA, 19 bp, Homo sapiens
  siRNA target sequence for CPNE3 (NM_003909.1,1662-1680).
ggtggtgggctacttcaat

SEQ ID NO: 172613 - DNA, 19 bp, Homo sapiens
  siRNA target sequence for CPNE3 (NM_003909.1,1663-1681).
gtggtgggctacttcaata

SEQ ID NO: 172614 - DNA, 19 bp, Homo sapiens
  siRNA target sequence for CPNE3 (NM_003909.1,1665-1683).
ggtgggctacttcaataca

SEQ ID NO: 172615 - DNA, 19 bp, Homo sapiens
  siRNA target sequence for CPNE3 (NM_003909.1,1666-1684).
gtgggctacttcaatacat

SEQ ID NO: 172616 - DNA, 19 bp, Homo sapiens
  siRNA target sequence for CPNE3 (NM_003909.1,1669-1687).
ggctacttcaatacataca

SEQ ID NO: 172617 - DNA, 19 bp, Homo sapiens
  siRNA target sequence for CPNE3 (NM_003909.1,1670-1688).
gctacttcaatacatacaa

SEQ ID NO: 172618 - DNA, 19 bp, Homo sapiens
  siRNA target sequence for CPNE3 (NM_003909.1,1671-1689).
ctacttcaatacatacaaa

SEQ ID NO: 172619 - DNA, 19 bp, Homo sapiens
  siRNA target sequence for DOC2B (NM_003585.1,683-701).
gcaaataagctcagaacaa

SEQ ID NO: 172620 - DNA, 19 bp, Homo sapiens
  siRNA target sequence for DOC2B (NM_003585.1,751-769).
ctacgggatcacagatgaa

SEQ ID NO: 172621 - DNA, 19 bp, Homo sapiens
  siRNA target sequence for DOC2B (NM_003585.1,1060-1078).
ggacccctacgtgaaaaca

SEQ ID NO: 172622 - DNA, 19 bp, Homo sapiens
  siRNA target sequence for DOC2B (NM_003585.1,1061-1079).
gacccctacgtgaaaacat

SEQ ID NO: 172623 - DNA, 19 bp, Homo sapiens
  siRNA target sequence for DOC2B (NM_003585.1,1222-1240).
ggattacgacattggaaaa

SEQ ID NO: 172624 - DNA, 19 bp, Homo sapiens
  siRNA target sequence for DOC2B (NM_003585.1,1223-1241).
gattacgacattggaaaat

SEQ ID NO: 172625 - DNA, 19 bp, Homo sapiens
  siRNA target sequence for DOC2B (NM_003585.1,1235-1253).
ggaaaatccaacgatttca

SEQ ID NO: 172626 - DNA, 19 bp, Homo sapiens
  siRNA target sequence for DOC2B (NM_003585.1,1236-1254).
gaaaatccaacgatttcat

SEQ ID NO: 172627 - DNA, 19 bp, Homo sapiens
  siRNA target sequence for PEPP2 (NM_019012.2,189-207).
ctgggaagaagcatatact

SEQ ID NO: 172628 - DNA, 19 bp, Homo sapiens
  siRNA target sequence for PEPP2 (NM_019012.2,191-209).
gggaagaagcatatacttt

SEQ ID NO: 172629 - DNA, 19 bp, Homo sapiens
  siRNA target sequence for PEPP2 (NM_019012.2,214-232).
ggtgcaagatactatataa

SEQ ID NO: 172630 - DNA, 19 bp, Homo sapiens
  siRNA target sequence for PEPP2 (NM_019012.2,218-236).
caagatactatataaacca

SEQ ID NO: 172631 - DNA, 19 bp, Homo sapiens
  siRNA target sequence for PEPP2 (NM_019012.2,277-295).
caaccatcacaggacaatt

SEQ ID NO: 172632 - DNA, 19 bp, Homo sapiens
  siRNA target sequence for PEPP2 (NM_019012.2,280-298).
ccatcacaggacaattgta

SEQ ID NO: 172633 - DNA, 19 bp, Homo sapiens
  siRNA target sequence for PEPP2 (NM_019012.2,281-299).
catcacaggacaattgtat

SEQ ID NO: 172634 - DNA, 19 bp, Homo sapiens
  siRNA target sequence for PEPP2 (NM_019012.2,296-314).
gtatttttgtagtgaatga

SEQ ID NO: 172635 - DNA, 19 bp, Homo sapiens
  siRNA target sequence for PEPP2 (NM_019012.2,348-366).
gaaggaacggccaataagt

SEQ ID NO: 172636 - DNA, 19 bp, Homo sapiens
  siRNA target sequence for PEPP2 (NM_019012.2,352-370).
gaacggccaataagtatga

SEQ ID NO: 172637 - DNA, 19 bp, Homo sapiens
  siRNA target sequence for PEPP2 (NM_019012.2,355-373).
cggccaataagtatgataa

SEQ ID NO: 172638 - DNA, 19 bp, Homo sapiens
  siRNA target sequence for PEPP2 (NM_019012.2,356-374).
ggccaataagtatgataaa

SEQ ID NO: 172639 - DNA, 19 bp, Homo sapiens
  siRNA target sequence for PEPP2 (NM_019012.2,387-405).
ctataacgtgacttcagat

SEQ ID NO: 172640 - DNA, 19 bp, Homo sapiens
  siRNA target sequence for PEPP2 (NM_019012.2,426-444).
ccctgtaggcagaacttca

SEQ ID NO: 172641 - DNA, 19 bp, Homo sapiens
  siRNA target sequence for PEPP2 (NM_019012.2,443-461).
cacgagcttcaaaaaaagt

SEQ ID NO: 172642 - DNA, 19 bp, Homo sapiens
  siRNA target sequence for PEPP2 (NM_019012.2,448-466).
gcttcaaaaaaagttcata

SEQ ID NO: 172643 - DNA, 19 bp, Homo sapiens
  siRNA target sequence for PEPP2 (NM_019012.2,473-491).
gaaagaggtcaaattcaat

SEQ ID NO: 172644 - DNA, 19 bp, Homo sapiens
  siRNA target sequence for PEPP2 (NM_019012.2,521-539).
gacgaggttggctttataa

SEQ ID NO: 172645 - DNA, 19 bp, Homo sapiens
  siRNA target sequence for PEPP2 (NM_019012.2,636-654).
cctgggaagcatactgtta

SEQ ID NO: 172646 - DNA, 19 bp, Homo sapiens
  siRNA target sequence for PEPP2 (NM_019012.2,651-669).
gttacctagttttcagata

SEQ ID NO: 172647 - DNA, 19 bp, Homo sapiens
  siRNA target sequence for PEPP2 (NM_019012.2,681-699).
ctctgaagatcacattaat

SEQ ID NO: 172648 - DNA, 19 bp, Homo sapiens
  siRNA target sequence for PEPP2 (NM_019012.2,693-711).
cattaatcgcaaatatgct

SEQ ID NO: 172649 - DNA, 19 bp, Homo sapiens
  siRNA target sequence for PEPP2 (NM_019012.2,727-745).
ccaaacatgcggacctatt

SEQ ID NO: 172650 - DNA, 19 bp, Homo sapiens
  siRNA target sequence for PEPP2 (NM_019012.2,728-746).
caaacatgcggacctatta

SEQ ID NO: 172651 - DNA, 19 bp, Homo sapiens
  siRNA target sequence for PEPP2 (NM_019012.2,782-800).
ggatgaaagccatgttaga

SEQ ID NO: 172652 - DNA, 19 bp, Homo sapiens
  siRNA target sequence for PEPP2 (NM_019012.2,837-855).
ggacaagattacatctgaa

SEQ ID NO: 172653 - DNA, 19 bp, Homo sapiens
  siRNA target sequence for PEPP2 (NM_019012.2,838-856).
gacaagattacatctgaaa

SEQ ID NO: 172654 - DNA, 19 bp, Homo sapiens
  siRNA target sequence for PEPP2 (NM_019012.2,851-869).
ctgaaaatgcaccaactaa

SEQ ID NO: 172655 - DNA, 19 bp, Homo sapiens
  siRNA target sequence for PEPP2 (NM_019012.2,888-906).
caaccatagagtgctaatt

SEQ ID NO: 172656 - DNA, 19 bp, Homo sapiens
  siRNA target sequence for PEPP2 (NM_019012.2,994-1012).
cagaaggatggtcaagata

SEQ ID NO: 172657 - DNA, 19 bp, Homo sapiens
  siRNA target sequence for PEPP2 (NM_019012.2,1006-1024).
caagatagacccttaacaa

SEQ ID NO: 172658 - DNA, 19 bp, Homo sapiens
  siRNA target sequence for PEPP2 (NM_019012.2,1051-1069).
ctgccatctgaatatgaga

SEQ ID NO: 172659 - DNA, 19 bp, Homo sapiens
  siRNA target sequence for PEPP2 (NM_019012.2,1099-1117).
cactacagaccaatcaact

SEQ ID NO: 172660 - DNA, 19 bp, Homo sapiens
  siRNA target sequence for PEPP2 (NM_019012.2,1147-1165).
gttagcctggcagatctta

SEQ ID NO: 172661 - DNA, 19 bp, Homo sapiens
  siRNA target sequence for PEPP2 (NM_019012.2,1181-1199).
ccaatacagggcccttata

SEQ ID NO: 172662 - DNA, 19 bp, Homo sapiens
  siRNA target sequence for PEPP2 (NM_019012.2,1207-1225).
gccgatcgagtcatacaga

SEQ ID NO: 172663 - DNA, 19 bp, Homo sapiens
  siRNA target sequence for PEPP2 (NM_019012.2,1213-1231).
cgagtcatacagagaacaa

SEQ ID NO: 172664 - DNA, 19 bp, Homo sapiens
  siRNA target sequence for PEPP2 (NM_019012.2,1269-1287).
gaaggggaggggtcatgaa

SEQ ID NO: 172665 - DNA, 19 bp, Homo sapiens
  siRNA target sequence for PEPP2 (NM_019012.2,1340-1358).
gtcacagagcccagattat

SEQ ID NO: 172666 - DNA, 19 bp, Homo sapiens
  siRNA target sequence for PEPP2 (NM_019012.2,1363-1381).
cgctaccctgaaggttata

SEQ ID NO: 172667 - DNA, 19 bp, Homo sapiens
  siRNA target sequence for PEPP2 (NM_019012.2,1440-1458).
cactcatgacaagacatta

SEQ ID NO: 172668 - DNA, 19 bp, Homo sapiens
  siRNA target sequence for PEPP2 (NM_019012.2,1523-1541).
ggcagcagcgtcagtttta

SEQ ID NO: 172669 - DNA, 19 bp, Homo sapiens
  siRNA target sequence for PEPP2 (NM_019012.2,1524-1542).
gcagcagcgtcagttttat

SEQ ID NO: 172670 - DNA, 19 bp, Homo sapiens
  siRNA target sequence for PEPP2 (NM_019012.2,1528-1546).
cagcgtcagttttataaca

SEQ ID NO: 172671 - DNA, 19 bp, Homo sapiens
  siRNA target sequence for PEPP2 (NM_019012.2,1561-1579).
cctcgacacagtactttga

SEQ ID NO: 172672 - DNA, 19 bp, Homo sapiens
  siRNA target sequence for PEPP2 (NM_019012.2,1564-1582).
cgacacagtactttgagta

SEQ ID NO: 172673 - DNA, 19 bp, Homo sapiens
  siRNA target sequence for PEPP2 (NM_019012.2,1647-1665).
cgggtcaatagctgcttat

SEQ ID NO: 172674 - DNA, 19 bp, Homo sapiens
  siRNA target sequence for PEPP2 (NM_019012.2,1649-1667).
ggtcaatagctgcttatca

SEQ ID NO: 172675 - DNA, 19 bp, Homo sapiens
  siRNA target sequence for PEPP2 (NM_019012.2,1702-1720).
gtgtcttcaccaattcaga

SEQ ID NO: 172676 - DNA, 19 bp, Homo sapiens
  siRNA target sequence for PEPP2 (NM_019012.2,1797-1815).
gccagctggcctgacttta

SEQ ID NO: 172677 - DNA, 19 bp, Homo sapiens
  siRNA target sequence for PEPP2 (NM_019012.2,1799-1817).
cagctggcctgactttaca

SEQ ID NO: 172678 - DNA, 19 bp, Homo sapiens
  siRNA target sequence for PEPP2 (NM_019012.2,1864-1882).
gaaggtagaggcacattat

SEQ ID NO: 172679 - DNA, 19 bp, Homo sapiens
  siRNA target sequence for PEPP2 (NM_019012.2,1871-1889).
gaggcacattatacaaata

SEQ ID NO: 172680 - DNA, 19 bp, Homo sapiens
  siRNA target sequence for PEPP2 (NM_019012.2,1873-1891).
ggcacattatacaaataca

SEQ ID NO: 172681 - DNA, 19 bp, Homo sapiens
  siRNA target sequence for PEPP2 (NM_019012.2,1906-1924).
gatattgatgccaagttaa

SEQ ID NO: 172682 - DNA, 19 bp, Homo sapiens
  siRNA target sequence for PEPP2 (NM_019012.2,1915-1933).
gccaagttaagccgattat

SEQ ID NO: 172683 - DNA, 19 bp, Homo sapiens
  siRNA target sequence for PEPP2 (NM_019012.2,1917-1935).
caagttaagccgattatgt

SEQ ID NO: 172684 - DNA, 19 bp, Homo sapiens
  siRNA target sequence for PEPP2 (NM_019012.2,1920-1938).
gttaagccgattatgtgaa

SEQ ID NO: 172685 - DNA, 19 bp, Homo sapiens
  siRNA target sequence for PEPP2 (NM_019012.2,1925-1943).
gccgattatgtgaacaaga

SEQ ID NO: 172686 - DNA, 19 bp, Homo sapiens
  siRNA target sequence for PEPP2 (NM_019012.2,2001-2019).
gcttgagcaagctttgcta

SEQ ID NO: 172687 - DNA, 19 bp, Homo sapiens
  siRNA target sequence for PEPP2 (NM_019012.2,2002-2020).
cttgagcaagctttgctat

SEQ ID NO: 172688 - DNA, 19 bp, Homo sapiens
  siRNA target sequence for PEPP2 (NM_019012.2,2098-2116).
caaaatggactgcttagta

SEQ ID NO: 172689 - DNA, 19 bp, Homo sapiens
  siRNA target sequence for PEPP2 (NM_019012.2,2152-2170).
gaacgagcatggagagaat

SEQ ID NO: 172690 - DNA, 19 bp, Homo sapiens
  siRNA target sequence for PEPP2 (NM_019012.2,2162-2180).
ggagagaatatgataagtt

SEQ ID NO: 172691 - DNA, 19 bp, Homo sapiens
  siRNA target sequence for PEPP2 (NM_019012.2,2163-2181).
gagagaatatgataagtta

SEQ ID NO: 172692 - DNA, 19 bp, Homo sapiens
  siRNA target sequence for PEPP2 (NM_019012.2,2167-2185).
gaatatgataagttagaat

SEQ ID NO: 172693 - DNA, 19 bp, Homo sapiens
  siRNA target sequence for PEPP2 (NM_019012.2,2226-2244).
ggatcaccttggtgaagtt

SEQ ID NO: 172694 - DNA, 19 bp, Homo sapiens
  siRNA target sequence for PEPP2 (NM_019012.2,2268-2286).
gcgtgcacagattcagaaa

SEQ ID NO: 172695 - DNA, 19 bp, Homo sapiens
  siRNA target sequence for PEPP2 (NM_019012.2,2294-2312).
ggcgaattcaggatgtcat

SEQ ID NO: 172696 - DNA, 19 bp, Homo sapiens
  siRNA target sequence for PEPP2 (NM_019012.2,2310-2328).
catggaagggctgagtaaa

SEQ ID NO: 172697 - DNA, 19 bp, Homo sapiens
  siRNA target sequence for PEPP2 (NM_019012.2,2314-2332).
gaagggctgagtaaacata

SEQ ID NO: 172698 - DNA, 19 bp, Homo sapiens
  siRNA target sequence for PEPP2 (NM_019012.2,2318-2336).
ggctgagtaaacataagca

SEQ ID NO: 172699 - DNA, 19 bp, Homo sapiens
  siRNA target sequence for PEPP2 (NM_019012.2,2334-2352).
gcagcaaagaggtactaca

SEQ ID NO: 172700 - DNA, 19 bp, Homo sapiens
  siRNA target sequence for PEPP2 (NM_019012.2,2344-2362).
ggtactacagaaataggta

SEQ ID NO: 172701 - DNA, 19 bp, Homo sapiens
  siRNA target sequence for PEPP2 (NM_019012.2,2345-2363).
gtactacagaaataggtat

SEQ ID NO: 172702 - DNA, 19 bp, Homo sapiens
  siRNA target sequence for PEPP2 (NM_019012.2,2348-2366).
ctacagaaataggtatgat

SEQ ID NO: 172703 - DNA, 19 bp, Homo sapiens
  siRNA target sequence for PEPP2 (NM_019012.2,2368-2386).
ggatcaaagcctttctcaa

SEQ ID NO: 172704 - DNA, 19 bp, Homo sapiens
  siRNA target sequence for PEPP2 (NM_019012.2,2411-2429).
cagattatagactctacaa

SEQ ID NO: 172705 - DNA, 19 bp, Homo sapiens
  siRNA target sequence for PEPP2 (NM_019012.2,2413-2431).
gattatagactctacaaga

SEQ ID NO: 172706 - DNA, 19 bp, Homo sapiens
  siRNA target sequence for PEPP2 (NM_019012.2,2581-2599).
gaatcttcgacaatagctt

SEQ ID NO: 172707 - DNA, 19 bp, Homo sapiens
  siRNA target sequence for PEPP2 (NM_019012.2,2609-2627).
ccttgaggaaaactaagaa

SEQ ID NO: 172708 - DNA, 19 bp, Homo sapiens
  siRNA target sequence for PEPP2 (NM_019012.2,2766-2784).
gaaaaaagggttaaatgtt

SEQ ID NO: 172709 - DNA, 19 bp, Homo sapiens
  siRNA target sequence for PEPP2 (NM_019012.2,2797-2815).
gaccagtcacccttacaaa

SEQ ID NO: 172710 - DNA, 19 bp, Homo sapiens
  siRNA target sequence for PEPP2 (NM_019012.2,2807-2825).
ccttacaaagcccttcaaa

SEQ ID NO: 172711 - DNA, 19 bp, Homo sapiens
  siRNA target sequence for PEPP2 (NM_019012.2,2884-2902).
gacactgccattagagaaa

SEQ ID NO: 172712 - DNA, 19 bp, Homo sapiens
  siRNA target sequence for PEPP2 (NM_019012.2,2976-2994).
ggacttcagcaaagagtta

SEQ ID NO: 172713 - DNA, 19 bp, Homo sapiens
  siRNA target sequence for PEPP2 (NM_019012.2,3037-3055).
gagccaaatggagtaaatt

SEQ ID NO: 172714 - DNA, 19 bp, Homo sapiens
  siRNA target sequence for PEPP2 (NM_019012.2,3208-3226).
gttatttcttacgaatcaa

SEQ ID NO: 172715 - DNA, 19 bp, Homo sapiens
  siRNA target sequence for PIK3R1 (NM_181504.2,65-83).
gtacaatactgtttggaat

SEQ ID NO: 172716 - DNA, 19 bp, Homo sapiens
  siRNA target sequence for PIK3R1 (NM_181504.2,173-191).
gcctcctaaaccaccaaaa

SEQ ID NO: 172717 - DNA, 19 bp, Homo sapiens
  siRNA target sequence for PIK3R1 (NM_181504.2,177-195).
cctaaaccaccaaaaccta

SEQ ID NO: 172718 - DNA, 19 bp, Homo sapiens
  siRNA target sequence for PIK3R1 (NM_181504.2,209-227).
caacggtatgaataacaat

SEQ ID NO: 172719 - DNA, 19 bp, Homo sapiens
  siRNA target sequence for PIK3R1 (NM_181504.2,321-339).
gtacgagatgcgtctacta

SEQ ID NO: 172720 - DNA, 19 bp, Homo sapiens
  siRNA target sequence for PIK3R1 (NM_181504.2,324-342).
cgagatgcgtctactaaaa

SEQ ID NO: 172721 - DNA, 19 bp, Homo sapiens
  siRNA target sequence for PIK3R1 (NM_181504.2,337-355).
ctaaaatgcatggtgatta

SEQ ID NO: 172722 - DNA, 19 bp, Homo sapiens
  siRNA target sequence for PIK3R1 (NM_181504.2,345-363).
catggtgattatactctta

SEQ ID NO: 172723 - DNA, 19 bp, Homo sapiens
  siRNA target sequence for PIK3R1 (NM_181504.2,423-441).
ggcttctctgacccattaa

SEQ ID NO: 172724 - DNA, 19 bp, Homo sapiens
  siRNA target sequence for PIK3R1 (NM_181504.2,470-488).
ccactaccggaatgaatct

SEQ ID NO: 172725 - DNA, 19 bp, Homo sapiens
  siRNA target sequence for PIK3R1 (NM_181504.2,497-515).
gtataatcccaaattggat

SEQ ID NO: 172726 - DNA, 19 bp, Homo sapiens
  siRNA target sequence for PIK3R1 (NM_181504.2,525-543).
ctttatccagtatccaaat

SEQ ID NO: 172727 - DNA, 19 bp, Homo sapiens
  siRNA target sequence for PIK3R1 (NM_181504.2,631-649).
gtcgagaatatgatagatt

SEQ ID NO: 172728 - DNA, 19 bp, Homo sapiens
  siRNA target sequence for PIK3R1 (NM_181504.2,633-651).
cgagaatatgatagattat

SEQ ID NO: 172729 - DNA, 19 bp, Homo sapiens
  siRNA target sequence for PIK3R1 (NM_181504.2,695-713).
gacagctattgaagcattt

SEQ ID NO: 172730 - DNA, 19 bp, Homo sapiens
  siRNA target sequence for PIK3R1 (NM_181504.2,756-774).
gagcggtacagcaaagaat

SEQ ID NO: 172731 - DNA, 19 bp, Homo sapiens
  siRNA target sequence for PIK3R1 (NM_181504.2,820-838).
ggattatgcataattatga

SEQ ID NO: 172732 - DNA, 19 bp, Homo sapiens
  siRNA target sequence for PIK3R1 (NM_181504.2,842-860).
gttgaagtctcgaatcagt

SEQ ID NO: 172733 - DNA, 19 bp, Homo sapiens
  siRNA target sequence for PIK3R1 (NM_181504.2,848-866).
gtctcgaatcagtgaaatt

SEQ ID NO: 172734 - DNA, 19 bp, Homo sapiens
  siRNA target sequence for PIK3R1 (NM_181504.2,850-868).
ctcgaatcagtgaaattat

SEQ ID NO: 172735 - DNA, 19 bp, Homo sapiens
  siRNA target sequence for PIK3R1 (NM_181504.2,853-871).
gaatcagtgaaattattga

SEQ ID NO: 172736 - DNA, 19 bp, Homo sapiens
  siRNA target sequence for PIK3R1 (NM_181504.2,915-933).
gagtatcgagaaattgaca

SEQ ID NO: 172737 - DNA, 19 bp, Homo sapiens
  siRNA target sequence for PIK3R1 (NM_181504.2,917-935).
gtatcgagaaattgacaaa

SEQ ID NO: 172738 - DNA, 19 bp, Homo sapiens
  siRNA target sequence for PIK3R1 (NM_181504.2,921-939).
cgagaaattgacaaacgta

SEQ ID NO: 172739 - DNA, 19 bp, Homo sapiens
  siRNA target sequence for PIK3R1 (NM_181504.2,922-940).
gagaaattgacaaacgtat

SEQ ID NO: 172740 - DNA, 19 bp, Homo sapiens
  siRNA target sequence for PIK3R1 (NM_181504.2,973-991).
gaaagacgagagaccaata

SEQ ID NO: 172741 - DNA, 19 bp, Homo sapiens
  siRNA target sequence for PIK3R1 (NM_181504.2,979-997).
cgagagaccaatacttgat

SEQ ID NO: 172742 - DNA, 19 bp, Homo sapiens
  siRNA target sequence for PIK3R1 (NM_181504.2,995-1013).
gatgtggttgactcaaaaa

SEQ ID NO: 172743 - DNA, 19 bp, Homo sapiens
  siRNA target sequence for PIK3R1 (NM_181504.2,1037-1055).
cgagtggttgggcaatgaa

SEQ ID NO: 172744 - DNA, 19 bp, Homo sapiens
  siRNA target sequence for PIK3R1 (NM_181504.2,1043-1061).
gttgggcaatgaaaacact

SEQ ID NO: 172745 - DNA, 19 bp, Homo sapiens
  siRNA target sequence for PIK3R1 (NM_181504.2,1132-1150).
gaagcagcaaccgaaacaa

SEQ ID NO: 172746 - DNA, 19 bp, Homo sapiens
  siRNA target sequence for PIK3R1 (NM_181504.2,1172-1190).
gaagcgagatggcactttt

SEQ ID NO: 172747 - DNA, 19 bp, Homo sapiens
  siRNA target sequence for PIK3R1 (NM_181504.2,1175-1193).
gcgagatggcacttttctt

SEQ ID NO: 172748 - DNA, 19 bp, Homo sapiens
  siRNA target sequence for PIK3R1 (NM_181504.2,1241-1259).
ggacggcgaagtaaagcat

SEQ ID NO: 172749 - DNA, 19 bp, Homo sapiens
  siRNA target sequence for PIK3R1 (NM_181504.2,1242-1260).
gacggcgaagtaaagcatt

SEQ ID NO: 172750 - DNA, 19 bp, Homo sapiens
  siRNA target sequence for PIK3R1 (NM_181504.2,1246-1264).
gcgaagtaaagcattgtgt

SEQ ID NO: 172751 - DNA, 19 bp, Homo sapiens
  siRNA target sequence for PIK3R1 (NM_181504.2,1296-1314).
gccgagccctataacttgt

SEQ ID NO: 172752 - DNA, 19 bp, Homo sapiens
  siRNA target sequence for PIK3R1 (NM_181504.2,1297-1315).
ccgagccctataacttgta

SEQ ID NO: 172753 - DNA, 19 bp, Homo sapiens
  siRNA target sequence for PIK3R1 (NM_181504.2,1390-1408).
cactagcctacccagtata

SEQ ID NO: 172754 - DNA, 19 bp, Homo sapiens
  siRNA target sequence for PIK3R1 (NM_181523.1,63-81).
gtacagagcgctgtatgat

SEQ ID NO: 172755 - DNA, 19 bp, Homo sapiens
  siRNA target sequence for PIK3R1 (NM_181523.1,68-86).
gagcgctgtatgattataa

SEQ ID NO: 172756 - DNA, 19 bp, Homo sapiens
  siRNA target sequence for PIK3R1 (NM_181523.1,70-88).
gcgctgtatgattataaaa

SEQ ID NO: 172757 - DNA, 19 bp, Homo sapiens
  siRNA target sequence for PIK3R1 (NM_181523.1,71-89).
cgctgtatgattataaaaa

SEQ ID NO: 172758 - DNA, 19 bp, Homo sapiens
  siRNA target sequence for PIK3R1 (NM_181523.1,124-142).
gacatattgactgtgaata

SEQ ID NO: 172759 - DNA, 19 bp, Homo sapiens
  siRNA target sequence for PIK3R1 (NM_181523.1,138-156).
gaataaagggtccttagta

SEQ ID NO: 172760 - DNA, 19 bp, Homo sapiens
  siRNA target sequence for PIK3R1 (NM_181523.1,149-167).
ccttagtagctcttggatt

SEQ ID NO: 172761 - DNA, 19 bp, Homo sapiens
  siRNA target sequence for PIK3R1 (NM_181523.1,203-221).
gctggttaaatggctataa

SEQ ID NO: 172762 - DNA, 19 bp, Homo sapiens
  siRNA target sequence for PIK3R1 (NM_181523.1,204-222).
ctggttaaatggctataat

SEQ ID NO: 172763 - DNA, 19 bp, Homo sapiens
  siRNA target sequence for PIK3R1 (NM_181523.1,242-260).
gggactttccgggaactta

SEQ ID NO: 172764 - DNA, 19 bp, Homo sapiens
  siRNA target sequence for PIK3R1 (NM_181523.1,246-264).
ctttccgggaacttacgta

SEQ ID NO: 172765 - DNA, 19 bp, Homo sapiens
  siRNA target sequence for PIK3R1 (NM_181523.1,250-268).
ccgggaacttacgtagaat

SEQ ID NO: 172766 - DNA, 19 bp, Homo sapiens
  siRNA target sequence for PIK3R1 (NM_181523.1,251-269).
cgggaacttacgtagaata

SEQ ID NO: 172767 - DNA, 19 bp, Homo sapiens
  siRNA target sequence for PIK3R1 (NM_181523.1,472-490).
ctggaatgttcaactctat

SEQ ID NO: 172768 - DNA, 19 bp, Homo sapiens
  siRNA target sequence for PIK3R1 (NM_181523.1,475-493).
gaatgttcaactctataca

SEQ ID NO: 172769 - DNA, 19 bp, Homo sapiens
  siRNA target sequence for PIK3R1 (NM_181523.1,506-524).
ccagcaacctggcagaatt

SEQ ID NO: 172770 - DNA, 19 bp, Homo sapiens
  siRNA target sequence for PIK3R1 (NM_181523.1,507-525).
cagcaacctggcagaatta

SEQ ID NO: 172771 - DNA, 19 bp, Homo sapiens
  siRNA target sequence for PIK3R1 (NM_181523.1,510-528).
caacctggcagaattacga

SEQ ID NO: 172772 - DNA, 19 bp, Homo sapiens
  siRNA target sequence for PIK3R1 (NM_181523.1,529-547).
cagcttcttgattgtgata

SEQ ID NO: 172773 - DNA, 19 bp, Homo sapiens
  siRNA target sequence for PIK3R1 (NM_181523.1,531-549).
gcttcttgattgtgataca

SEQ ID NO: 172774 - DNA, 19 bp, Homo sapiens
  siRNA target sequence for PIK3R1 (NM_181523.1,551-569).
cctccgtggacttggaaat

SEQ ID NO: 172775 - DNA, 19 bp, Homo sapiens
  siRNA target sequence for PIK3R1 (NM_181523.1,641-659).
cagccgtttacagtgaaat

SEQ ID NO: 172776 - DNA, 19 bp, Homo sapiens
  siRNA target sequence for PIK3R1 (NM_181523.1,643-661).
gccgtttacagtgaaatga

SEQ ID NO: 172777 - DNA, 19 bp, Homo sapiens
  siRNA target sequence for PIK3R1 (NM_181523.1,644-662).
ccgtttacagtgaaatgat

SEQ ID NO: 172778 - DNA, 19 bp, Homo sapiens
  siRNA target sequence for PIK3R1 (NM_181523.1,645-663).
cgtttacagtgaaatgatt

SEQ ID NO: 172779 - DNA, 19 bp, Homo sapiens
  siRNA target sequence for PIK3R1 (NM_181523.1,665-683).
ctttagctccagaagtaca

SEQ ID NO: 172780 - DNA, 19 bp, Homo sapiens
  siRNA target sequence for PIK3R1 (NM_181523.1,679-697).
gtacaaagctccgaagaat

SEQ ID NO: 172781 - DNA, 19 bp, Homo sapiens
  siRNA target sequence for PIK3R1 (NM_181523.1,682-700).
caaagctccgaagaatata

SEQ ID NO: 172782 - DNA, 19 bp, Homo sapiens
  siRNA target sequence for PIK3R1 (NM_181523.1,703-721).
cagctattgaagaagctta

SEQ ID NO: 172783 - DNA, 19 bp, Homo sapiens
  siRNA target sequence for PIK3R1 (NM_181523.1,800-818).
cctccagcaaaaatctgtt

SEQ ID NO: 172784 - DNA, 19 bp, Homo sapiens
  siRNA target sequence for PIK3R1 (NM_181523.1,824-842).
caagagtactctctgaaat

SEQ ID NO: 172785 - DNA, 19 bp, Homo sapiens
  siRNA target sequence for PIK3R1 (NM_181523.1,871-889).
gcagccagctctgataata

SEQ ID NO: 172786 - DNA, 19 bp, Homo sapiens
  siRNA target sequence for PIK3R1 (NM_181523.1,875-893).
ccagctctgataatactga

SEQ ID NO: 172787 - DNA, 19 bp, Homo sapiens
  siRNA target sequence for PIK3R1 (NM_181523.1,876-894).
cagctctgataatactgaa

SEQ ID NO: 172788 - DNA, 19 bp, Homo sapiens
  siRNA target sequence for PIK3R1 (NM_181523.1,924-942).
ctcaactgaatggaatgaa

SEQ ID NO: 172789 - DNA, 19 bp, Homo sapiens
  siRNA target sequence for PIK3R1 (NM_181524.1,324-342).
gcaaacactgcctcctaaa

SEQ ID NO: 172790 - DNA, 19 bp, Homo sapiens
  siRNA target sequence for PLEKHA4 (NM_020904.1,765-783).
cggccattgcctcttttat

SEQ ID NO: 172791 - DNA, 19 bp, Homo sapiens
  siRNA target sequence for PLEKHA4 (NM_020904.1,822-840).
cctgctccccagctacaat

SEQ ID NO: 172792 - DNA, 19 bp, Homo sapiens
  siRNA target sequence for PLEKHA4 (NM_020904.1,825-843).
gctccccagctacaatatt

SEQ ID NO: 172793 - DNA, 19 bp, Homo sapiens
  siRNA target sequence for PLEKHA4 (NM_020904.1,826-844).
ctccccagctacaatatta

SEQ ID NO: 172794 - DNA, 19 bp, Homo sapiens
  siRNA target sequence for PLEKHA4 (NM_020904.1,828-846).
ccccagctacaatattaga

SEQ ID NO: 172795 - DNA, 19 bp, Homo sapiens
  siRNA target sequence for PLEKHA4 (NM_020904.1,904-922).
ggcatgaggacctacgttt

SEQ ID NO: 172796 - DNA, 19 bp, Homo sapiens
  siRNA target sequence for PLEKHA4 (NM_020904.1,905-923).
gcatgaggacctacgtttt

SEQ ID NO: 172797 - DNA, 19 bp, Homo sapiens
  siRNA target sequence for PLEKHA4 (NM_020904.1,1338-1356).
cccgttgagtcgcattgat

SEQ ID NO: 172798 - DNA, 19 bp, Homo sapiens
  siRNA target sequence for PLEKHA4 (NM_020904.1,1340-1358).
cgttgagtcgcattgatgt

SEQ ID NO: 172799 - DNA, 19 bp, Homo sapiens
  siRNA target sequence for PLEKHA4 (NM_020904.1,1505-1523).
ctggctcccccacttatct

SEQ ID NO: 172800 - DNA, 19 bp, Homo sapiens
  siRNA target sequence for PLEKHA4 (NM_020904.1,1579-1597).
cctcccctggagtcaactt

SEQ ID NO: 172801 - DNA, 19 bp, Homo sapiens
  siRNA target sequence for PLEKHA4 (NM_020904.1,1580-1598).
ctcccctggagtcaacttt

SEQ ID NO: 172802 - DNA, 19 bp, Homo sapiens
  siRNA target sequence for PLEKHA4 (NM_020904.1,1891-1909).
caggagctgggcaccttaa

SEQ ID NO: 172803 - DNA, 19 bp, Homo sapiens
  siRNA target sequence for PLEKHA4 (NM_020904.1,1893-1911).
ggagctgggcaccttaaga

SEQ ID NO: 172804 - DNA, 19 bp, Homo sapiens
  siRNA target sequence for PLEKHA4 (NM_020904.1,2576-2594).
cgtcgcagtggcacagaat

SEQ ID NO: 172805 - DNA, 19 bp, Homo sapiens
  siRNA target sequence for PLEKHA4 (NM_020904.1,2579-2597).
cgcagtggcacagaatgat

SEQ ID NO: 172806 - DNA, 19 bp, Homo sapiens
  siRNA target sequence for PLEKHA4 (NM_020904.1,2836-2854).
cgagtcactctgctacaat

SEQ ID NO: 172807 - DNA, 19 bp, Homo sapiens
  siRNA target sequence for PSCD3 (NM_004227.3,142-160).
ctgaagacctctcattaga

SEQ ID NO: 172808 - DNA, 19 bp, Homo sapiens
  siRNA target sequence for PSCD3 (NM_004227.3,180-198).
gacattcgtcgaagaaaaa

SEQ ID NO: 172809 - DNA, 19 bp, Homo sapiens
  siRNA target sequence for PSCD3 (NM_004227.3,200-218).
ggaacttattgatgacatt

SEQ ID NO: 172810 - DNA, 19 bp, Homo sapiens
  siRNA target sequence for PSCD3 (NM_004227.3,255-273).
gagatcgacaatctaactt

SEQ ID NO: 172811 - DNA, 19 bp, Homo sapiens
  siRNA target sequence for PSCD3 (NM_004227.3,292-310).
cgactcagaggaacaaaca

SEQ ID NO: 172812 - DNA, 19 bp, Homo sapiens
  siRNA target sequence for PSCD3 (NM_004227.3,402-420).
gacgtcgcccagttccttt

SEQ ID NO: 172813 - DNA, 19 bp, Homo sapiens
  siRNA target sequence for PSCD3 (NM_004227.3,407-425).
cgcccagttcctttataaa

SEQ ID NO: 172814 - DNA, 19 bp, Homo sapiens
  siRNA target sequence for PSCD3 (NM_004227.3,426-444).
ggagaaggcctaaataaga

SEQ ID NO: 172815 - DNA, 19 bp, Homo sapiens
  siRNA target sequence for PSCD3 (NM_004227.3,462-480).
ctgggtgaaagggatgaat

SEQ ID NO: 172816 - DNA, 19 bp, Homo sapiens
  siRNA target sequence for PSCD3 (NM_004227.3,465-483).
ggtgaaagggatgaattta

SEQ ID NO: 172817 - DNA, 19 bp, Homo sapiens
  siRNA target sequence for PSCD3 (NM_004227.3,583-601).
gggaggcgcagaagattga

SEQ ID NO: 172818 - DNA, 19 bp, Homo sapiens
  siRNA target sequence for PSCD3 (NM_004227.3,584-602).
ggaggcgcagaagattgat

SEQ ID NO: 172819 - DNA, 19 bp, Homo sapiens
  siRNA target sequence for PSCD3 (NM_004227.3,989-1007).
ctttgaatacacaacagat

SEQ ID NO: 172820 - DNA, 19 bp, Homo sapiens
  siRNA target sequence for PSCD3 (NM_004227.3,1246-1264).
gagatcccttctatgacat

SEQ ID NO: 172821 - DNA, 19 bp, Homo sapiens
  siRNA target sequence for PSCD3 (NM_004227.3,1281-1299).
cgaaggattgccaataaaa

SEQ ID NO: 172822 - DNA, 19 bp, Homo sapiens
  siRNA target sequence for PSCD3 (NM_004227.3,1282-1300).
gaaggattgccaataaaaa

SEQ ID NO: 172823 - DNA, 19 bp, Homo sapiens
  siRNA target sequence for TULP3 (NM_003324.2,152-170).
gacaggctaagctggatta

SEQ ID NO: 172824 - DNA, 19 bp, Homo sapiens
  siRNA target sequence for TULP3 (NM_003324.2,209-227).
gccttgagccatttatggt

SEQ ID NO: 172825 - DNA, 19 bp, Homo sapiens
  siRNA target sequence for TULP3 (NM_003324.2,289-307).
cccttggtgaactgtcata

SEQ ID NO: 172826 - DNA, 19 bp, Homo sapiens
  siRNA target sequence for TULP3 (NM_003324.2,291-309).
cttggtgaactgtcatact

SEQ ID NO: 172827 - DNA, 19 bp, Homo sapiens
  siRNA target sequence for TULP3 (NM_003324.2,324-342).
catcttacatggtattgat

SEQ ID NO: 172828 - DNA, 19 bp, Homo sapiens
  siRNA target sequence for TULP3 (NM_003324.2,360-378).
gaaaccagacgaagttcat

SEQ ID NO: 172829 - DNA, 19 bp, Homo sapiens
  siRNA target sequence for TULP3 (NM_003324.2,460-478).
cgtctccaaaagcatgata

SEQ ID NO: 172830 - DNA, 19 bp, Homo sapiens
  siRNA target sequence for TULP3 (NM_003324.2,463-481).
ctccaaaagcatgatatct

SEQ ID NO: 172831 - DNA, 19 bp, Homo sapiens
  siRNA target sequence for TULP3 (NM_003324.2,521-539).
cccagtcagcatgtttaga

SEQ ID NO: 172832 - DNA, 19 bp, Homo sapiens
  siRNA target sequence for TULP3 (NM_003324.2,522-540).
ccagtcagcatgtttagaa

SEQ ID NO: 172833 - DNA, 19 bp, Homo sapiens
  siRNA target sequence for TULP3 (NM_003324.2,683-701).
cagtaagatgtcggataat

SEQ ID NO: 172834 - DNA, 19 bp, Homo sapiens
  siRNA target sequence for TULP3 (NM_003324.2,736-754).
cccacctactatatgtact

SEQ ID NO: 172835 - DNA, 19 bp, Homo sapiens
  siRNA target sequence for TULP3 (NM_003324.2,737-755).
ccacctactatatgtactt

SEQ ID NO: 172836 - DNA, 19 bp, Homo sapiens
  siRNA target sequence for TULP3 (NM_003324.2,825-843).
ctaccttatctccattgat

SEQ ID NO: 172837 - DNA, 19 bp, Homo sapiens
  siRNA target sequence for TULP3 (NM_003324.2,834-852).
ctccattgatccagttgat

SEQ ID NO: 172838 - DNA, 19 bp, Homo sapiens
  siRNA target sequence for TULP3 (NM_003324.2,857-875).
ctcgtgaaggagaaagtta

SEQ ID NO: 172839 - DNA, 19 bp, Homo sapiens
  siRNA target sequence for TULP3 (NM_003324.2,904-922).
gggaccaagtttacagttt

SEQ ID NO: 172840 - DNA, 19 bp, Homo sapiens
  siRNA target sequence for TULP3 (NM_003324.2,1087-1105).
ccctatcagccacaaaaca

SEQ ID NO: 172841 - DNA, 19 bp, Homo sapiens
  siRNA target sequence for TULP3 (NM_003324.2,1273-1291).
gaccctgattatatagtca

SEQ ID NO: 172842 - DNA, 19 bp, Homo sapiens
  siRNA target sequence for TULP3 (NM_003324.2,1362-1380).
ctttggcatcggtctttct

SEQ ID NO: 172843 - DNA, 19 bp, Homo sapiens
  siRNA target sequence for TULP3 (NM_003324.2,1372-1390).
ggtctttctagctttgaca

SEQ ID NO: 172844 - DNA, 19 bp, Homo sapiens
  siRNA target sequence for DAPP1 (NM_014395.1,84-102).
gggcagagcagaacttcta

SEQ ID NO: 172845 - DNA, 19 bp, Homo sapiens
  siRNA target sequence for DAPP1 (NM_014395.1,303-321).
gagggccaaagattctgtt

SEQ ID NO: 172846 - DNA, 19 bp, Homo sapiens
  siRNA target sequence for DAPP1 (NM_014395.1,305-323).
gggccaaagattctgttaa

SEQ ID NO: 172847 - DNA, 19 bp, Homo sapiens
  siRNA target sequence for DAPP1 (NM_014395.1,317-335).
ctgttaaacactttcatgt

SEQ ID NO: 172848 - DNA, 19 bp, Homo sapiens
  siRNA target sequence for DAPP1 (NM_014395.1,439-457).
ggcactctgatggttctaa

SEQ ID NO: 172849 - DNA, 19 bp, Homo sapiens
  siRNA target sequence for DAPP1 (NM_014395.1,440-458).
gcactctgatggttctaaa

SEQ ID NO: 172850 - DNA, 19 bp, Homo sapiens
  siRNA target sequence for DAPP1 (NM_014395.1,613-631).
gtcaagacctggaaaacaa

SEQ ID NO: 172851 - DNA, 19 bp, Homo sapiens
  siRNA target sequence for DAPP1 (NM_014395.1,678-696).
gatgtcaccagaaccaatt

SEQ ID NO: 172852 - DNA, 19 bp, Homo sapiens
  siRNA target sequence for DAPP1 (NM_014395.1,698-716).
ggatcctagacctaacaga

SEQ ID NO: 172853 - DNA, 19 bp, Homo sapiens
  siRNA target sequence for DAPP1 (NM_014395.1,699-717).
gatcctagacctaacagaa

SEQ ID NO: 172854 - DNA, 19 bp, Homo sapiens
  siRNA target sequence for DAPP1 (NM_014395.1,722-740).
cagctgtacaattcgatta

SEQ ID NO: 172855 - DNA, 19 bp, Homo sapiens
  siRNA target sequence for DAPP1 (NM_014395.1,724-742).
gctgtacaattcgattatt

SEQ ID NO: 172856 - DNA, 19 bp, Homo sapiens
  siRNA target sequence for DAPP1 (NM_014395.1,745-763).
caagaaagggtaaactgtt

SEQ ID NO: 172857 - DNA, 19 bp, Homo sapiens
  siRNA target sequence for DAPP1 (NM_014395.1,748-766).
gaaagggtaaactgttttt

SEQ ID NO: 172858 - DNA, 19 bp, Homo sapiens
  siRNA target sequence for DAPP1 (NM_014395.1,823-841).
gatgagtggatcaagatat

SEQ ID NO: 172859 - DNA, 19 bp, Homo sapiens
  siRNA target sequence for DAPP1 (NM_014395.1,879-897).
gtctgctctctgtatatct

SEQ ID NO: 172860 - DNA, 19 bp, Homo sapiens
  siRNA target sequence for LYPLA3 (NM_012320.2,260-278).
ccgaaagctacttcacaat

SEQ ID NO: 172861 - DNA, 19 bp, Homo sapiens
  siRNA target sequence for LYPLA3 (NM_012320.2,262-280).
gaaagctacttcacaatct

SEQ ID NO: 172862 - DNA, 19 bp, Homo sapiens
  siRNA target sequence for LYPLA3 (NM_012320.2,301-319).
ctgcctgtcatcattgact

SEQ ID NO: 172863 - DNA, 19 bp, Homo sapiens
  siRNA target sequence for LYPLA3 (NM_012320.2,316-334).
gactgctggattgacaata

SEQ ID NO: 172864 - DNA, 19 bp, Homo sapiens
  siRNA target sequence for LYPLA3 (NM_012320.2,336-354).
caggctggtttacaacaaa

SEQ ID NO: 172865 - DNA, 19 bp, Homo sapiens
  siRNA target sequence for LYPLA3 (NM_012320.2,340-358).
ctggtttacaacaaaacat

SEQ ID NO: 172866 - DNA, 19 bp, Homo sapiens
  siRNA target sequence for LYPLA3 (NM_012320.2,449-467).
gcagcgtgggttcctattt

SEQ ID NO: 172867 - DNA, 19 bp, Homo sapiens
  siRNA target sequence for LYPLA3 (NM_012320.2,523-541).
cgaggggctccctatgact

SEQ ID NO: 172868 - DNA, 19 bp, Homo sapiens
  siRNA target sequence for LYPLA3 (NM_012320.2,545-563).
gccgagccccaaatgaaaa

SEQ ID NO: 172869 - DNA, 19 bp, Homo sapiens
  siRNA target sequence for LYPLA3 (NM_012320.2,643-661).
cacagtatgggcaacatgt

SEQ ID NO: 172870 - DNA, 19 bp, Homo sapiens
  siRNA target sequence for LYPLA3 (NM_012320.2,657-675).
catgtacacgctctacttt

SEQ ID NO: 172871 - DNA, 19 bp, Homo sapiens
  siRNA target sequence for LYPLA3 (NM_012320.2,862-880).
ctgccctacaactacacat

SEQ ID NO: 172872 - DNA, 19 bp, Homo sapiens
  siRNA target sequence for LYPLA3 (NM_012320.2,904-922).
cagacacccacaatcaact

SEQ ID NO: 172873 - DNA, 19 bp, Homo sapiens
  siRNA target sequence for LYPLA3 (NM_012320.2,931-949).
cgggactaccgcaagttct

SEQ ID NO: 172874 - DNA, 19 bp, Homo sapiens
  siRNA target sequence for LYPLA3 (NM_012320.2,951-969).
ccaggacatcggctttgaa

SEQ ID NO: 172875 - DNA, 19 bp, Homo sapiens
  siRNA target sequence for LYPLA3 (NM_012320.2,954-972).
ggacatcggctttgaagat

SEQ ID NO: 172876 - DNA, 19 bp, Homo sapiens
  siRNA target sequence for LYPLA3 (NM_012320.2,1036-1054).
ctgcactgcctctatggta

SEQ ID NO: 172877 - DNA, 19 bp, Homo sapiens
  siRNA target sequence for LYPLA3 (NM_012320.2,1067-1085).
caccagactccttctacta

SEQ ID NO: 172878 - DNA, 19 bp, Homo sapiens
  siRNA target sequence for LYPLA3 (NM_012320.2,1097-1115).
ctgaccgtgaccctaaaat

SEQ ID NO: 172879 - DNA, 19 bp, Homo sapiens
  siRNA target sequence for LYPLA3 (NM_012320.2,1099-1117).
gaccgtgaccctaaaatct

SEQ ID NO: 172880 - DNA, 19 bp, Homo sapiens
  siRNA target sequence for OSBPL1A (NM_018030.3,982-1000).
gcatcctcagaaaatgtat

SEQ ID NO: 172881 - DNA, 19 bp, Homo sapiens
  siRNA target sequence for OSBPL1A (NM_018030.3,1022-1040).
cacgatgccagttatattt

SEQ ID NO: 172882 - DNA, 19 bp, Homo sapiens
  siRNA target sequence for OSBPL1A (NM_018030.3,1024-1042).
cgatgccagttatatttaa

SEQ ID NO: 172883 - DNA, 19 bp, Homo sapiens
  siRNA target sequence for OSBPL1A (NM_018030.3,1025-1043).
gatgccagttatatttaat

SEQ ID NO: 172884 - DNA, 19 bp, Homo sapiens
  siRNA target sequence for OSBPL1A (NM_018030.3,1058-1076).
cctacagcgcctaactgaa

SEQ ID NO: 172885 - DNA, 19 bp, Homo sapiens
  siRNA target sequence for OSBPL1A (NM_018030.3,1059-1077).
ctacagcgcctaactgaat

SEQ ID NO: 172886 - DNA, 19 bp, Homo sapiens
  siRNA target sequence for OSBPL1A (NM_018030.3,1062-1080).
cagcgcctaactgaataca

SEQ ID NO: 172887 - DNA, 19 bp, Homo sapiens
  siRNA target sequence for OSBPL1A (NM_018030.3,1074-1092).
gaatacatggagcatactt

SEQ ID NO: 172888 - DNA, 19 bp, Homo sapiens
  siRNA target sequence for OSBPL1A (NM_018030.3,1184-1202).
ggaacggactggaaaacct

SEQ ID NO: 172889 - DNA, 19 bp, Homo sapiens
  siRNA target sequence for OSBPL1A (NM_018030.3,1185-1203).
gaacggactggaaaacctt

SEQ ID NO: 172890 - DNA, 19 bp, Homo sapiens
  siRNA target sequence for OSBPL1A (NM_018030.3,1210-1228).
cactgctgggagagactta

SEQ ID NO: 172891 - DNA, 19 bp, Homo sapiens
  siRNA target sequence for OSBPL1A (NM_018030.3,1219-1237).
gagagacttatgaattagt

SEQ ID NO: 172892 - DNA, 19 bp, Homo sapiens
  siRNA target sequence for OSBPL1A (NM_018030.3,1286-1304).
cccaccaatcagtgcattt

SEQ ID NO: 172893 - DNA, 19 bp, Homo sapiens
  siRNA target sequence for OSBPL1A (NM_018030.3,1288-1306).
caccaatcagtgcatttca

SEQ ID NO: 172894 - DNA, 19 bp, Homo sapiens
  siRNA target sequence for OSBPL1A (NM_018030.3,1300-1318).
catttcatgctgaaggatt

SEQ ID NO: 172895 - DNA, 19 bp, Homo sapiens
  siRNA target sequence for OSBPL1A (NM_018030.3,1315-1333).
gattaaacaatgacttcat

SEQ ID NO: 172896 - DNA, 19 bp, Homo sapiens
  siRNA target sequence for OSBPL1A (NM_018030.3,1408-1426).
ccttggagctccttgaaca

SEQ ID NO: 172897 - DNA, 19 bp, Homo sapiens
  siRNA target sequence for OSBPL1A (NM_018030.3,1412-1430).
ggagctccttgaacacaat

SEQ ID NO: 172898 - DNA, 19 bp, Homo sapiens
  siRNA target sequence for OSBPL1A (NM_018030.3,1422-1440).
gaacacaatgaggcatata

SEQ ID NO: 172899 - DNA, 19 bp, Homo sapiens
  siRNA target sequence for OSBPL1A (NM_018030.3,1456-1474).
cctgctgtgtgcataatat

SEQ ID NO: 172900 - DNA, 19 bp, Homo sapiens
  siRNA target sequence for OSBPL1A (NM_018030.3,1459-1477).
gctgtgtgcataatatcat

SEQ ID NO: 172901 - DNA, 19 bp, Homo sapiens
  siRNA target sequence for OSBPL1A (NM_018030.3,1460-1478).
ctgtgtgcataatatcatt

SEQ ID NO: 172902 - DNA, 19 bp, Homo sapiens
  siRNA target sequence for OSBPL1A (NM_018030.3,1537-1555).
gggacaaatgtgtgttgaa

SEQ ID NO: 172903 - DNA, 19 bp, Homo sapiens
  siRNA target sequence for OSBPL1A (NM_018030.3,1569-1587).
ggcctttttggtaaggaat

SEQ ID NO: 172904 - DNA, 19 bp, Homo sapiens
  siRNA target sequence for OSBPL1A (NM_018030.3,1647-1665).
gggaagtggactgaatgtt

SEQ ID NO: 172905 - DNA, 19 bp, Homo sapiens
  siRNA target sequence for OSBPL1A (NM_018030.3,1648-1666).
ggaagtggactgaatgttt

SEQ ID NO: 172906 - DNA, 19 bp, Homo sapiens
  siRNA target sequence for OSBPL1A (NM_018030.3,1649-1667).
gaagtggactgaatgttta

SEQ ID NO: 172907 - DNA, 19 bp, Homo sapiens
  siRNA target sequence for OSBPL1A (NM_018030.3,1655-1673).
gactgaatgtttatacagt

SEQ ID NO: 172908 - DNA, 19 bp, Homo sapiens
  siRNA target sequence for OSBPL1A (NM_018030.3,1684-1702).
ccacgtttgacgcttacaa

SEQ ID NO: 172909 - DNA, 19 bp, Homo sapiens
  siRNA target sequence for OSBPL1A (NM_018030.3,1685-1703).
cacgtttgacgcttacaaa

SEQ ID NO: 172910 - DNA, 19 bp, Homo sapiens
  siRNA target sequence for OSBPL1A (NM_018030.3,1779-1797).
ccagtgccggattctgaaa

SEQ ID NO: 172911 - DNA, 19 bp, Homo sapiens
  siRNA target sequence for OSBPL1A (NM_018030.3,1784-1802).
gccggattctgaaagtgta

SEQ ID NO: 172912 - DNA, 19 bp, Homo sapiens
  siRNA target sequence for OSBPL1A (NM_018030.3,1785-1803).
ccggattctgaaagtgtat

SEQ ID NO: 172913 - DNA, 19 bp, Homo sapiens
  siRNA target sequence for OSBPL1A (NM_018030.3,1786-1804).
cggattctgaaagtgtatt

SEQ ID NO: 172914 - DNA, 19 bp, Homo sapiens
  siRNA target sequence for OSBPL1A (NM_018030.3,1841-1859).
cccacggcctccaaattct

SEQ ID NO: 172915 - DNA, 19 bp, Homo sapiens
  siRNA target sequence for OSBPL1A (NM_018030.3,2113-2131).
gagcacaggactggattta

SEQ ID NO: 172916 - DNA, 19 bp, Homo sapiens
  siRNA target sequence for OSBPL1A (NM_018030.3,2115-2133).
gcacaggactggatttact

SEQ ID NO: 172917 - DNA, 19 bp, Homo sapiens
  siRNA target sequence for OSBPL1A (NM_018030.3,2140-2158).
gctactgggacagaaatta

SEQ ID NO: 172918 - DNA, 19 bp, Homo sapiens
  siRNA target sequence for OSBPL1A (NM_018030.3,2162-2180).
caatttgcctgacatttat

SEQ ID NO: 172919 - DNA, 19 bp, Homo sapiens
  siRNA target sequence for OSBPL1A (NM_080597.2,235-253).
gtaagacaactattagaga

SEQ ID NO: 172920 - DNA, 19 bp, Homo sapiens
  siRNA target sequence for OSBPL1A (NM_080597.2,258-276).
ggcgaggaatgaagtgatt

SEQ ID NO: 172921 - DNA, 19 bp, Homo sapiens
  siRNA target sequence for OSBPL1A (NM_080597.2,295-313).
ggaagaagtaagtctaact

SEQ ID NO: 172922 - DNA, 19 bp, Homo sapiens
  siRNA target sequence for OSBPL1A (NM_080597.2,328-346).
ctacatctggcatgctatt

SEQ ID NO: 172923 - DNA, 19 bp, Homo sapiens
  siRNA target sequence for OSBPL1A (NM_080597.2,449-467).
gacgaaaggagttggtaat

SEQ ID NO: 172924 - DNA, 19 bp, Homo sapiens
  siRNA target sequence for OSBPL1A (NM_080597.2,452-470).
gaaaggagttggtaatgct

SEQ ID NO: 172925 - DNA, 19 bp, Homo sapiens
  siRNA target sequence for OSBPL1A (NM_080597.2,459-477).
gttggtaatgcttctctta

SEQ ID NO: 172926 - DNA, 19 bp, Homo sapiens
  siRNA target sequence for OSBPL1A (NM_080597.2,462-480).
ggtaatgcttctcttagaa

SEQ ID NO: 172927 - DNA, 19 bp, Homo sapiens
  siRNA target sequence for OSBPL1A (NM_080597.2,519-537).
gacagcaaaagaagttact

SEQ ID NO: 172928 - DNA, 19 bp, Homo sapiens
  siRNA target sequence for OSBPL1A (NM_080597.2,665-683).
ccaatcctcctgatgttaa

SEQ ID NO: 172929 - DNA, 19 bp, Homo sapiens
  siRNA target sequence for OSBPL1A (NM_080597.2,670-688).
cctcctgatgttaactgtt

SEQ ID NO: 172930 - DNA, 19 bp, Homo sapiens
  siRNA target sequence for OSBPL1A (NM_080597.2,686-704).
gttcggatcagttaggaaa

SEQ ID NO: 172931 - DNA, 19 bp, Homo sapiens
  siRNA target sequence for OSBPL1A (NM_080597.2,750-768).
cttaaagcttctaagaagt

SEQ ID NO: 172932 - DNA, 19 bp, Homo sapiens
  siRNA target sequence for OSBPL1A (NM_080597.2,767-785).
gtggagcagaccctaatct

SEQ ID NO: 172933 - DNA, 19 bp, Homo sapiens
  siRNA target sequence for OSBPL1A (NM_080597.2,827-845).
gtgctgaaatgaaacacat

SEQ ID NO: 172934 - DNA, 19 bp, Homo sapiens
  siRNA target sequence for OSBPL1A (NM_080597.2,841-859).
cacattcttgttggtaata

SEQ ID NO: 172935 - DNA, 19 bp, Homo sapiens
  siRNA target sequence for OSBPL1A (NM_080597.2,949-967).
gagcatggagtcctttcat

SEQ ID NO: 172936 - DNA, 19 bp, Homo sapiens
  siRNA target sequence for OSBPL1A (NM_080597.2,955-973).
ggagtcctttcatggtata

SEQ ID NO: 172937 - DNA, 19 bp, Homo sapiens
  siRNA target sequence for OSBPL1A (NM_080597.2,1033-1051).
gcagtatgcacggtaaaat

SEQ ID NO: 172938 - DNA, 19 bp, Homo sapiens
  siRNA target sequence for OSBPL1A (NM_080597.2,1036-1054).
gtatgcacggtaaaatcca

SEQ ID NO: 172939 - DNA, 19 bp, Homo sapiens
  siRNA target sequence for OSBPL1A (NM_080597.2,1103-1121).
gcttccgggttcctaagaa

SEQ ID NO: 172940 - DNA, 19 bp, Homo sapiens
  siRNA target sequence for OSBPL1A (NM_080597.2,1104-1122).
cttccgggttcctaagaat

SEQ ID NO: 172941 - DNA, 19 bp, Homo sapiens
  siRNA target sequence for OSBPL1A (NM_080597.2,1243-1261).
gcagacctgaagaaatcat

SEQ ID NO: 172942 - DNA, 19 bp, Homo sapiens
  siRNA target sequence for OSBPL1A (NM_080597.2,1287-1305).
gcgactagatagggaaatt

SEQ ID NO: 172943 - DNA, 19 bp, Homo sapiens
  siRNA target sequence for OSBPL1A (NM_080597.2,1288-1306).
cgactagatagggaaattt

SEQ ID NO: 172944 - DNA, 19 bp, Homo sapiens
  siRNA target sequence for OSBPL1A (NM_080597.2,1291-1309).
ctagatagggaaatttcca

SEQ ID NO: 172945 - DNA, 19 bp, Homo sapiens
  siRNA target sequence for OSBPL1A (NM_080597.2,1298-1316).
gggaaatttccaactttct

SEQ ID NO: 172946 - DNA, 19 bp, Homo sapiens
  siRNA target sequence for OSBPL1A (NM_080597.2,1307-1325).
ccaactttctcaaaatgat

SEQ ID NO: 172947 - DNA, 19 bp, Homo sapiens
  siRNA target sequence for OSBPL1A (NM_080597.2,1308-1326).
caactttctcaaaatgatt

SEQ ID NO: 172948 - DNA, 19 bp, Homo sapiens
  siRNA target sequence for OSBPL1A (NM_080597.2,1332-1350).
gtgtgacatggctaaagaa

SEQ ID NO: 172949 - DNA, 19 bp, Homo sapiens
  siRNA target sequence for OSBPL1A (NM_080597.2,1334-1352).
gtgacatggctaaagaaat

SEQ ID NO: 172950 - DNA, 19 bp, Homo sapiens
  siRNA target sequence for OSBPL1A (NM_080597.2,1518-1536).
gacgctggccactgaacat

SEQ ID NO: 172951 - DNA, 19 bp, Homo sapiens
  siRNA target sequence for OSBPL1A (NM_080597.2,1524-1542).
ggccactgaacatcatgaa

SEQ ID NO: 172952 - DNA, 19 bp, Homo sapiens
  siRNA target sequence for OSBPL1A (NM_080597.2,1570-1588).
ccacccgccagcatcctta

SEQ ID NO: 172953 - DNA, 19 bp, Homo sapiens
  siRNA target sequence for OSBPL1A (NM_080597.2,1589-1607).
gcgaggacgagttctatga

SEQ ID NO: 172954 - DNA, 19 bp, Homo sapiens
  siRNA target sequence for OSBPL1A (NM_080597.2,1630-1648).
gaaaggtccctgagtagat

SEQ ID NO: 172955 - DNA, 19 bp, Homo sapiens
  siRNA target sequence for OSBPL1A (NM_080597.2,1635-1653).
gtccctgagtagattggaa

SEQ ID NO: 172956 - DNA, 19 bp, Homo sapiens
  siRNA target sequence for OSBPL1A (NM_080597.2,1659-1677).
gacagcacgctcctttgaa

SEQ ID NO: 172957 - DNA, 19 bp, Homo sapiens
  siRNA target sequence for OSBPL1A (NM_080597.2,1661-1679).
cagcacgctcctttgaaga

SEQ ID NO: 172958 - DNA, 19 bp, Homo sapiens
  siRNA target sequence for OSBPL1A (NM_080597.2,1687-1705).
gagcatttgggcagtagaa

SEQ ID NO: 172959 - DNA, 19 bp, Homo sapiens
  siRNA target sequence for OSBPL1A (NM_080597.2,1697-1715).
gcagtagaaaacacagaat

SEQ ID NO: 172960 - DNA, 19 bp, Homo sapiens
  siRNA target sequence for OSBPL1A (NM_080597.2,1710-1728).
cagaatgtccgaagaaaaa

SEQ ID NO: 172961 - DNA, 19 bp, Homo sapiens
  siRNA target sequence for PAFAH2 (NM_000437.2,298-316).
gcttctttcgactcttcta

SEQ ID NO: 172962 - DNA, 19 bp, Homo sapiens
  siRNA target sequence for PAFAH2 (NM_000437.2,358-376).
ggattccccgctatgagta

SEQ ID NO: 172963 - DNA, 19 bp, Homo sapiens
  siRNA target sequence for PAFAH2 (NM_000437.2,390-408).
gccgagtacctgcagttta

SEQ ID NO: 172964 - DNA, 19 bp, Homo sapiens
  siRNA target sequence for PAFAH2 (NM_000437.2,391-409).
ccgagtacctgcagtttaa

SEQ ID NO: 172965 - DNA, 19 bp, Homo sapiens
  siRNA target sequence for PAFAH2 (NM_000437.2,392-410).
cgagtacctgcagtttaat

SEQ ID NO: 172966 - DNA, 19 bp, Homo sapiens
  siRNA target sequence for PAFAH2 (NM_000437.2,501-519).
ggataccccttgatcatct

SEQ ID NO: 172967 - DNA, 19 bp, Homo sapiens
  siRNA target sequence for PAFAH2 (NM_000437.2,502-520).
gataccccttgatcatctt

SEQ ID NO: 172968 - DNA, 19 bp, Homo sapiens
  siRNA target sequence for PAFAH2 (NM_000437.2,535-553).
gagccttcaggactttgta

SEQ ID NO: 172969 - DNA, 19 bp, Homo sapiens
  siRNA target sequence for PAFAH2 (NM_000437.2,622-640).
cagcggcaaccacctattt

SEQ ID NO: 172970 - DNA, 19 bp, Homo sapiens
  siRNA target sequence for PAFAH2 (NM_000437.2,764-782).
gcgggtaagcgagtgttta

SEQ ID NO: 172971 - DNA, 19 bp, Homo sapiens
  siRNA target sequence for PAFAH2 (NM_000437.2,778-796).
gtttacgggtgttgaagat

SEQ ID NO: 172972 - DNA, 19 bp, Homo sapiens
  siRNA target sequence for PAFAH2 (NM_000437.2,860-878).
gactttgaagggcaacatt

SEQ ID NO: 172973 - DNA, 19 bp, Homo sapiens
  siRNA target sequence for PAFAH2 (NM_000437.2,899-917).
gatgggacattcatttgga

SEQ ID NO: 172974 - DNA, 19 bp, Homo sapiens
  siRNA target sequence for PAFAH2 (NM_000437.2,1022-1040).
ccgaggacctgtgttcttt

SEQ ID NO: 172975 - DNA, 19 bp, Homo sapiens
  siRNA target sequence for PAFAH2 (NM_000437.2,1023-1041).
cgaggacctgtgttcttta

SEQ ID NO: 172976 - DNA, 19 bp, Homo sapiens
  siRNA target sequence for PAFAH2 (NM_000437.2,1027-1045).
gacctgtgttctttatcaa

SEQ ID NO: 172977 - DNA, 19 bp, Homo sapiens
  siRNA target sequence for PAFAH2 (NM_000437.2,1063-1081).
caatggagagtgtcaattt

SEQ ID NO: 172978 - DNA, 19 bp, Homo sapiens
  siRNA target sequence for PAFAH2 (NM_000437.2,1107-1125).
gaacagtctaggatcataa

SEQ ID NO: 172979 - DNA, 19 bp, Homo sapiens
  siRNA target sequence for PAFAH2 (NM_000437.2,1127-1145).
cgttcttggttctgttcat

SEQ ID NO: 172980 - DNA, 19 bp, Homo sapiens
  siRNA target sequence for PAFAH2 (NM_000437.2,1174-1192).
ctggcaacttgattggtaa

SEQ ID NO: 172981 - DNA, 19 bp, Homo sapiens
  siRNA target sequence for PAFAH2 (NM_000437.2,1280-1298).
gcacctcgacctgaaagaa

SEQ ID NO: 172982 - DNA, 19 bp, Homo sapiens
  siRNA target sequence for PLA2G7 (NM_005084.2,219-237).
ggtgccacccaaattgcat

SEQ ID NO: 172983 - DNA, 19 bp, Homo sapiens
  siRNA target sequence for PLA2G7 (NM_005084.2,262-280).
ctggctgtggtttatcctt

SEQ ID NO: 172984 - DNA, 19 bp, Homo sapiens
  siRNA target sequence for PLA2G7 (NM_005084.2,266-284).
ctgtggtttatccttttga

SEQ ID NO: 172985 - DNA, 19 bp, Homo sapiens
  siRNA target sequence for PLA2G7 (NM_005084.2,285-303).
ctggcaatacataaatcct

SEQ ID NO: 172986 - DNA, 19 bp, Homo sapiens
  siRNA target sequence for PLA2G7 (NM_005084.2,304-322).
gttgcccatatgaaatcat

SEQ ID NO: 172987 - DNA, 19 bp, Homo sapiens
  siRNA target sequence for PLA2G7 (NM_005084.2,320-338).
catcagcatgggtcaacaa

SEQ ID NO: 172988 - DNA, 19 bp, Homo sapiens
  siRNA target sequence for PLA2G7 (NM_005084.2,323-341).
cagcatgggtcaacaaaat

SEQ ID NO: 172989 - DNA, 19 bp, Homo sapiens
  siRNA target sequence for PLA2G7 (NM_005084.2,329-347).
gggtcaacaaaatacaagt

SEQ ID NO: 172990 - DNA, 19 bp, Homo sapiens
  siRNA target sequence for PLA2G7 (NM_005084.2,330-348).
ggtcaacaaaatacaagta

SEQ ID NO: 172991 - DNA, 19 bp, Homo sapiens
  siRNA target sequence for PLA2G7 (NM_005084.2,361-379).
gcaagctttggccaaacta

SEQ ID NO: 172992 - DNA, 19 bp, Homo sapiens
  siRNA target sequence for PLA2G7 (NM_005084.2,408-426).
cgttggttgtacagactta

SEQ ID NO: 172993 - DNA, 19 bp, Homo sapiens
  siRNA target sequence for PLA2G7 (NM_005084.2,413-431).
gttgtacagacttaatgtt

SEQ ID NO: 172994 - DNA, 19 bp, Homo sapiens
  siRNA target sequence for PLA2G7 (NM_005084.2,416-434).
gtacagacttaatgtttga

SEQ ID NO: 172995 - DNA, 19 bp, Homo sapiens
  siRNA target sequence for PLA2G7 (NM_005084.2,448-466).
ggcaccttcttgcgtttat

SEQ ID NO: 172996 - DNA, 19 bp, Homo sapiens
  siRNA target sequence for PLA2G7 (NM_005084.2,449-467).
gcaccttcttgcgtttata

SEQ ID NO: 172997 - DNA, 19 bp, Homo sapiens
  siRNA target sequence for PLA2G7 (NM_005084.2,453-471).
cttcttgcgtttatattat

SEQ ID NO: 172998 - DNA, 19 bp, Homo sapiens
  siRNA target sequence for PLA2G7 (NM_005084.2,456-474).
cttgcgtttatattatcca

SEQ ID NO: 172999 - DNA, 19 bp, Homo sapiens
  siRNA target sequence for PLA2G7 (NM_005084.2,491-509).
gccttgacaccctttggat

SEQ ID NO: 173000 - DNA, 19 bp, Homo sapiens
  siRNA target sequence for PLA2G7 (NM_005084.2,581-599).
ggttactctttggttcaat

SEQ ID NO: 173001 - DNA, 19 bp, Homo sapiens
  siRNA target sequence for PLA2G7 (NM_005084.2,678-696).
ggcattcaggacactttat

SEQ ID NO: 173002 - DNA, 19 bp, Homo sapiens
  siRNA target sequence for PLA2G7 (NM_005084.2,805-823).
gaaataggggacaagtctt

SEQ ID NO: 173003 - DNA, 19 bp, Homo sapiens
  siRNA target sequence for PLA2G7 (NM_005084.2,831-849).
ccttagaaccctgaaacaa

SEQ ID NO: 173004 - DNA, 19 bp, Homo sapiens
  siRNA target sequence for PLA2G7 (NM_005084.2,852-870).
ggaggagacacatatacga

SEQ ID NO: 173005 - DNA, 19 bp, Homo sapiens
  siRNA target sequence for PLA2G7 (NM_005084.2,853-871).
gaggagacacatatacgaa

SEQ ID NO: 173006 - DNA, 19 bp, Homo sapiens
  siRNA target sequence for PLA2G7 (NM_005084.2,915-933).
cagtctgattcttgacatt

SEQ ID NO: 173007 - DNA, 19 bp, Homo sapiens
  siRNA target sequence for PLA2G7 (NM_005084.2,917-935).
gtctgattcttgacattga

SEQ ID NO: 173008 - DNA, 19 bp, Homo sapiens
  siRNA target sequence for PLA2G7 (NM_005084.2,959-977).
cattagatttaaagtttga

SEQ ID NO: 173009 - DNA, 19 bp, Homo sapiens
  siRNA target sequence for PLA2G7 (NM_005084.2,988-1006).
ctgaaggactctattgata

SEQ ID NO: 173010 - DNA, 19 bp, Homo sapiens
  siRNA target sequence for PLA2G7 (NM_005084.2,1018-1036).
gcagtaattggacattctt

SEQ ID NO: 173011 - DNA, 19 bp, Homo sapiens
  siRNA target sequence for PLA2G7 (NM_005084.2,1019-1037).
cagtaattggacattcttt

SEQ ID NO: 173012 - DNA, 19 bp, Homo sapiens
  siRNA target sequence for PLA2G7 (NM_005084.2,1040-1058).
gtggagcaacggttattca

SEQ ID NO: 173013 - DNA, 19 bp, Homo sapiens
  siRNA target sequence for PLA2G7 (NM_005084.2,1042-1060).
ggagcaacggttattcaga

SEQ ID NO: 173014 - DNA, 19 bp, Homo sapiens
  siRNA target sequence for PLA2G7 (NM_005084.2,1050-1068).
ggttattcagactcttagt

SEQ ID NO: 173015 - DNA, 19 bp, Homo sapiens
  siRNA target sequence for PLA2G7 (NM_005084.2,1189-1207).
cctgctaatatcataaaaa

SEQ ID NO: 173016 - DNA, 19 bp, Homo sapiens
  siRNA target sequence for PLA2G7 (NM_005084.2,1217-1235).
gctactcacctgataaaga

SEQ ID NO: 173017 - DNA, 19 bp, Homo sapiens
  siRNA target sequence for PLA2G7 (NM_005084.2,1218-1236).
ctactcacctgataaagaa

SEQ ID NO: 173018 - DNA, 19 bp, Homo sapiens
  siRNA target sequence for PLA2G7 (NM_005084.2,1258-1276).
ggttcagtccaccagaatt

SEQ ID NO: 173019 - DNA, 19 bp, Homo sapiens
  siRNA target sequence for PLA2G7 (NM_005084.2,1259-1277).
gttcagtccaccagaattt

SEQ ID NO: 173020 - DNA, 19 bp, Homo sapiens
  siRNA target sequence for PLA2G7 (NM_005084.2,1368-1386).
caacaaagcttcattagca

SEQ ID NO: 173021 - DNA, 19 bp, Homo sapiens
  siRNA target sequence for PLA2G7 (NM_005084.2,1471-1489).
gggaccaacattaacacaa

SEQ ID NO: 173022 - DNA, 19 bp, Homo sapiens
  siRNA target sequence for PLA2G7 (NM_005084.2,1479-1497).
cattaacacaaccaatcaa

SEQ ID NO: 173023 - DNA, 19 bp, Homo sapiens
  siRNA target sequence for PLA2G7 (NM_005084.2,1495-1513).
caacacatcatgttacaga

SEQ ID NO: 173024 - DNA, 19 bp, Homo sapiens
  siRNA target sequence for PLEKHA1 (NM_021622.2,1485-1503).
gaatcgcatttgtggtttt

SEQ ID NO: 173025 - DNA, 19 bp, Homo sapiens
  siRNA target sequence for PLEKHA1 (NM_021622.2,1560-1578).
ggataccagagaagatagt

SEQ ID NO: 173026 - DNA, 19 bp, Homo sapiens
  siRNA target sequence for PLEKHA1 (NM_021622.2,1561-1579).
gataccagagaagatagtt

SEQ ID NO: 173027 - DNA, 19 bp, Homo sapiens
  siRNA target sequence for PLEKHA1 (NM_021622.2,1625-1643).
cacgtgttggagccattaa

SEQ ID NO: 173028 - DNA, 19 bp, Homo sapiens
  siRNA target sequence for PLEKHA1 (NM_021622.2,1628-1646).
gtgttggagccattaagct

SEQ ID NO: 173029 - DNA, 19 bp, Homo sapiens
  siRNA target sequence for PLEKHA1 (NM_021622.2,1630-1648).
gttggagccattaagctta

SEQ ID NO: 173030 - DNA, 19 bp, Homo sapiens
  siRNA target sequence for PLEKHA1 (NM_021622.2,1634-1652).
gagccattaagcttaccta

SEQ ID NO: 173031 - DNA, 19 bp, Homo sapiens
  siRNA target sequence for PLEKHA1 (NM_021622.2,1761-1779).
cctagtggaatgggtaaat

SEQ ID NO: 173032 - DNA, 19 bp, Homo sapiens
  siRNA target sequence for PLEKHA1 (NM_021622.2,1767-1785).
ggaatgggtaaatgtgtta

SEQ ID NO: 173033 - DNA, 19 bp, Homo sapiens
  siRNA target sequence for PLEKHA1 (NM_021622.2,1772-1790).
gggtaaatgtgttaaacaa

SEQ ID NO: 173034 - DNA, 19 bp, Homo sapiens
  siRNA target sequence for PLEKHA1 (NM_021622.2,1780-1798).
gtgttaaacaaagctataa

SEQ ID NO: 173035 - DNA, 19 bp, Homo sapiens
  siRNA target sequence for PLEKHA1 (NM_021622.2,1824-1842).
ctcacagcctaattctgat

SEQ ID NO: 173036 - DNA, 19 bp, Homo sapiens
  siRNA target sequence for PLEKHA1 (NM_021622.2,1826-1844).
cacagcctaattctgataa

SEQ ID NO: 173037 - DNA, 19 bp, Homo sapiens
  siRNA target sequence for PLEKHA1 (NM_021622.2,1859-1877).
gtgaatgtgggaaaaagca

SEQ ID NO: 173038 - DNA, 19 bp, Homo sapiens
  siRNA target sequence for PLEKHA1 (NM_021622.2,1903-1921).
ggtggcgtacccatcatta

SEQ ID NO: 173039 - DNA, 19 bp, Homo sapiens
  siRNA target sequence for PLEKHA1 (NM_021622.2,1917-1935).
cattactcccactcagaaa

SEQ ID NO: 173040 - DNA, 19 bp, Homo sapiens
  siRNA target sequence for PLEKHA1 (NM_021622.2,1988-2006).
cacaaagccatcttcctta

SEQ ID NO: 173041 - DNA, 19 bp, Homo sapiens
  siRNA target sequence for PLEKHA1 (NM_021622.2,2014-2032).
cctaaaccacctcaagata

SEQ ID NO: 173042 - DNA, 19 bp, Homo sapiens
  siRNA target sequence for PLEKHA1 (NM_021622.2,2026-2044).
caagatagtgcggttatca

SEQ ID NO: 173043 - DNA, 19 bp, Homo sapiens
  siRNA target sequence for PLEKHA1 (NM_021622.2,2037-2055).
ggttatcaaagctggatat

SEQ ID NO: 173044 - DNA, 19 bp, Homo sapiens
  siRNA target sequence for PLEKHA1 (NM_021622.2,2118-2136).
cacaataggctacttcaaa

SEQ ID NO: 173045 - DNA, 19 bp, Homo sapiens
  siRNA target sequence for PLEKHA1 (NM_021622.2,2151-2169).
ggaacctcttcgtgtaata

SEQ ID NO: 173046 - DNA, 19 bp, Homo sapiens
  siRNA target sequence for PLEKHA1 (NM_021622.2,2162-2180).
gtgtaataccacttaaaga

SEQ ID NO: 173047 - DNA, 19 bp, Homo sapiens
  siRNA target sequence for PLEKHA1 (NM_021622.2,2170-2188).
ccacttaaagaggttcata

SEQ ID NO: 173048 - DNA, 19 bp, Homo sapiens
  siRNA target sequence for PLEKHA1 (NM_021622.2,2171-2189).
cacttaaagaggttcataa

SEQ ID NO: 173049 - DNA, 19 bp, Homo sapiens
  siRNA target sequence for PLEKHA1 (NM_021622.2,2201-2219).
gtaagcaaagcgacataat

SEQ ID NO: 173050 - DNA, 19 bp, Homo sapiens
  siRNA target sequence for PLEKHA1 (NM_021622.2,2223-2241).
gagggacaacctctttgaa

SEQ ID NO: 173051 - DNA, 19 bp, Homo sapiens
  siRNA target sequence for PLEKHA1 (NM_021622.2,2226-2244).
ggacaacctctttgaaatt

SEQ ID NO: 173052 - DNA, 19 bp, Homo sapiens
  siRNA target sequence for PLEKHA1 (NM_021622.2,2252-2270).
cgtctcgaactttctatgt

SEQ ID NO: 173053 - DNA, 19 bp, Homo sapiens
  siRNA target sequence for PLEKHA1 (NM_021622.2,2292-2310).
gatgcacagttggattaaa

SEQ ID NO: 173054 - DNA, 19 bp, Homo sapiens
  siRNA target sequence for PLEKHA1 (NM_021622.2,2375-2393).
ccggtccttcagaatccaa

SEQ ID NO: 173055 - DNA, 19 bp, Homo sapiens
  siRNA target sequence for PLEKHA1 (NM_021622.2,2574-2592).
gactgaacaagctctgtta

SEQ ID NO: 173056 - DNA, 19 bp, Homo sapiens
  siRNA target sequence for PLEKHA3 (NM_019091.2,279-297).
ctggcagcctcgttggttt

SEQ ID NO: 173057 - DNA, 19 bp, Homo sapiens
  siRNA target sequence for PLEKHA3 (NM_019091.2,304-322).
gataatggaatcttatcct

SEQ ID NO: 173058 - DNA, 19 bp, Homo sapiens
  siRNA target sequence for PLEKHA3 (NM_019091.2,311-329).
gaatcttatcctactatga

SEQ ID NO: 173059 - DNA, 19 bp, Homo sapiens
  siRNA target sequence for PLEKHA3 (NM_019091.2,315-333).
cttatcctactatgattca

SEQ ID NO: 173060 - DNA, 19 bp, Homo sapiens
  siRNA target sequence for PLEKHA3 (NM_019091.2,436-454).
ggagagcagcatttctaca

SEQ ID NO: 173061 - DNA, 19 bp, Homo sapiens
  siRNA target sequence for PLEKHA3 (NM_019091.2,499-517).
ctggggagctccaaagcat

SEQ ID NO: 173062 - DNA, 19 bp, Homo sapiens
  siRNA target sequence for PLEKHA3 (NM_019091.2,514-532).
gcatgtttgactgatacaa

SEQ ID NO: 173063 - DNA, 19 bp, Homo sapiens
  siRNA target sequence for PLEKHA3 (NM_019091.2,566-584).
gtgaatcgctgaaaaccaa

SEQ ID NO: 173064 - DNA, 19 bp, Homo sapiens
  siRNA target sequence for PLEKHA3 (NM_019091.2,568-586).
gaatcgctgaaaaccaaaa

SEQ ID NO: 173065 - DNA, 19 bp, Homo sapiens
  siRNA target sequence for PLEKHA3 (NM_019091.2,674-692).
ctcctagtgcagagaacat

SEQ ID NO: 173066 - DNA, 19 bp, Homo sapiens
  siRNA target sequence for PLEKHA3 (NM_019091.2,740-758).
caacgcttgaggaatgtgt

SEQ ID NO: 173067 - DNA, 19 bp, Homo sapiens
  siRNA target sequence for PLEKHA3 (NM_019091.2,762-780).
gatagccaatgccaagttt

SEQ ID NO: 173068 - DNA, 19 bp, Homo sapiens
  siRNA target sequence for PLEKHA3 (NM_019091.2,804-822).
ccatccggatcccttagtt

SEQ ID NO: 173069 - DNA, 19 bp, Homo sapiens
  siRNA target sequence for PLEKHA3 (NM_019091.2,805-823).
catccggatcccttagttt

SEQ ID NO: 173070 - DNA, 19 bp, Homo sapiens
  siRNA target sequence for PLEKHA3 (NM_019091.2,897-915).
gagtagccactctataaaa

SEQ ID NO: 173071 - DNA, 19 bp, Homo sapiens
  siRNA target sequence for PLEKHA3 (NM_019091.2,974-992).
cagattcttgtagtgatat

SEQ ID NO: 173072 - DNA, 19 bp, Homo sapiens
  siRNA target sequence for PLEKHA3 (NM_019091.2,1090-1108).
gccaaaaaacaatctgaat

SEQ ID NO: 173073 - DNA, 19 bp, Homo sapiens
  siRNA target sequence for RASAL1 (NM_004658.1,560-578).
gagcagggaggcgattaca

SEQ ID NO: 173074 - DNA, 19 bp, Homo sapiens
  siRNA target sequence for RASAL1 (NM_004658.1,749-767).
cacatctgacccatttgca

SEQ ID NO: 173075 - DNA, 19 bp, Homo sapiens
  siRNA target sequence for RASAL1 (NM_004658.1,758-776).
cccatttgcacgtgtgttt

SEQ ID NO: 173076 - DNA, 19 bp, Homo sapiens
  siRNA target sequence for RASAL1 (NM_004658.1,759-777).
ccatttgcacgtgtgtttt

SEQ ID NO: 173077 - DNA, 19 bp, Homo sapiens
  siRNA target sequence for RASAL1 (NM_004658.1,795-813).
gagacctcaaccatcaaga

SEQ ID NO: 173078 - DNA, 19 bp, Homo sapiens
  siRNA target sequence for RASAL1 (NM_004658.1,959-977).
ccagcagaagccacctaaa

SEQ ID NO: 173079 - DNA, 19 bp, Homo sapiens
  siRNA target sequence for RASAL1 (NM_004658.1,1217-1235).
gctggtgaaactctttctt

SEQ ID NO: 173080 - DNA, 19 bp, Homo sapiens
  siRNA target sequence for RASAL1 (NM_004658.1,1337-1355).
caagtcgatggaacagttt

SEQ ID NO: 173081 - DNA, 19 bp, Homo sapiens
  siRNA target sequence for RASAL1 (NM_004658.1,1472-1490).
ccggaggatctccttcaaa

SEQ ID NO: 173082 - DNA, 19 bp, Homo sapiens
  siRNA target sequence for RASAL1 (NM_004658.1,2243-2261).
ctacctccagtgcaagaat

SEQ ID NO: 173083 - DNA, 19 bp, Homo sapiens
  siRNA target sequence for RASAL1 (NM_004658.1,2247-2265).
ctccagtgcaagaatgtga

SEQ ID NO: 173084 - DNA, 19 bp, Homo sapiens
  siRNA target sequence for RASAL1 (NM_004658.1,2249-2267).
ccagtgcaagaatgtgaat

SEQ ID NO: 173085 - DNA, 19 bp, Homo sapiens
  siRNA target sequence for RASAL1 (NM_004658.1,2529-2547).
gaggattctaacatggata

SEQ ID NO: 173086 - DNA, 19 bp, Homo sapiens
  siRNA target sequence for SDPR (NM_004657.3,152-170).
gctgcacaggccgaaaagt

SEQ ID NO: 173087 - DNA, 19 bp, Homo sapiens
  siRNA target sequence for SDPR (NM_004657.3,153-171).
ctgcacaggccgaaaagtt

SEQ ID NO: 173088 - DNA, 19 bp, Homo sapiens
  siRNA target sequence for SDPR (NM_004657.3,521-539).
gtcaaagagcgcatggata

SEQ ID NO: 173089 - DNA, 19 bp, Homo sapiens
  siRNA target sequence for SDPR (NM_004657.3,584-602).
ctcctccgacgcaaccatt

SEQ ID NO: 173090 - DNA, 19 bp, Homo sapiens
  siRNA target sequence for SDPR (NM_004657.3,587-605).
ctccgacgcaaccatttca

SEQ ID NO: 173091 - DNA, 19 bp, Homo sapiens
  siRNA target sequence for SDPR (NM_004657.3,589-607).
ccgacgcaaccatttcaaa

SEQ ID NO: 173092 - DNA, 19 bp, Homo sapiens
  siRNA target sequence for SDPR (NM_004657.3,591-609).
gacgcaaccatttcaaagt

SEQ ID NO: 173093 - DNA, 19 bp, Homo sapiens
  siRNA target sequence for SDPR (NM_004657.3,639-657).
ctgccagcgtgtttgtgaa

SEQ ID NO: 173094 - DNA, 19 bp, Homo sapiens
  siRNA target sequence for SDPR (NM_004657.3,739-757).
ggacctctcctcagatgat

SEQ ID NO: 173095 - DNA, 19 bp, Homo sapiens
  siRNA target sequence for SDPR (NM_004657.3,873-891).
cattttctcgccagaacat

SEQ ID NO: 173096 - DNA, 19 bp, Homo sapiens
  siRNA target sequence for SDPR (NM_004657.3,916-934).
gacaaagatcgtatctgta

SEQ ID NO: 173097 - DNA, 19 bp, Homo sapiens
  siRNA target sequence for SDPR (NM_004657.3,1249-1267).
caacatcgacttgactatt

SEQ ID NO: 173098 - DNA, 19 bp, Homo sapiens
  siRNA target sequence for SDPR (NM_004657.3,1328-1346).
ggtagctacgcgctaacat

SEQ ID NO: 173099 - DNA, 19 bp, Homo sapiens
  siRNA target sequence for SEC14L2 (NM_012429.1,212-230).
ggaggcattggccaagttt

SEQ ID NO: 173100 - DNA, 19 bp, Homo sapiens
  siRNA target sequence for SEC14L2 (NM_012429.1,263-281).
gccgaatccagatgactat

SEQ ID NO: 173101 - DNA, 19 bp, Homo sapiens
  siRNA target sequence for SEC14L2 (NM_012429.1,265-283).
cgaatccagatgactattt

SEQ ID NO: 173102 - DNA, 19 bp, Homo sapiens
  siRNA target sequence for SEC14L2 (NM_012429.1,266-284).
gaatccagatgactatttt

SEQ ID NO: 173103 - DNA, 19 bp, Homo sapiens
  siRNA target sequence for SEC14L2 (NM_012429.1,462-480).
ccagtctggtacgacataa

SEQ ID NO: 173104 - DNA, 19 bp, Homo sapiens
  siRNA target sequence for SEC14L2 (NM_012429.1,467-485).
ctggtacgacataattgga

SEQ ID NO: 173105 - DNA, 19 bp, Homo sapiens
  siRNA target sequence for SEC14L2 (NM_012429.1,580-598).
cccaccagaccacaaagtt

SEQ ID NO: 173106 - DNA, 19 bp, Homo sapiens
  siRNA target sequence for SEC14L2 (NM_012429.1,609-627).
gtggagaccatcaccataa

SEQ ID NO: 173107 - DNA, 19 bp, Homo sapiens
  siRNA target sequence for SEC14L2 (NM_012429.1,616-634).
ccatcaccataatttatga

SEQ ID NO: 173108 - DNA, 19 bp, Homo sapiens
  siRNA target sequence for SEC14L2 (NM_012429.1,700-718).
gcatgtttgaggaaaatta

SEQ ID NO: 173109 - DNA, 19 bp, Homo sapiens
  siRNA target sequence for SEC14L2 (NM_012429.1,727-745).
cactgaagcgtctttttgt

SEQ ID NO: 173110 - DNA, 19 bp, Homo sapiens
  siRNA target sequence for SEC14L2 (NM_012429.1,734-752).
gcgtctttttgttgttaaa

SEQ ID NO: 173111 - DNA, 19 bp, Homo sapiens
  siRNA target sequence for SEC14L2 (NM_012429.1,804-822).
gaggacactcgtaagaaga

SEQ ID NO: 173112 - DNA, 19 bp, Homo sapiens
  siRNA target sequence for SEC14L2 (NM_012429.1,824-842).
catggtcctgggagcaaat

SEQ ID NO: 173113 - DNA, 19 bp, Homo sapiens
  siRNA target sequence for SEC14L2 (NM_012429.1,921-939).
ggaaaccccaagtgcaaat

SEQ ID NO: 173114 - DNA, 19 bp, Homo sapiens
  siRNA target sequence for SEC14L2 (NM_012429.1,962-980).
catccccaggaagtattat

SEQ ID NO: 173115 - DNA, 19 bp, Homo sapiens
  siRNA target sequence for SEC14L2 (NM_012429.1,1008-1026).
gaacacagcgtgcagattt

SEQ ID NO: 173116 - DNA, 19 bp, Homo sapiens
  siRNA target sequence for SEC14L2 (NM_012429.1,1039-1057).
cccaccaagtggagtatga

SEQ ID NO: 173117 - DNA, 19 bp, Homo sapiens
  siRNA target sequence for SEC14L2 (NM_012429.1,1185-1203).
cccaaccagaggtacaact

SEQ ID NO: 173118 - DNA, 19 bp, Homo sapiens
  siRNA target sequence for SYT1 (NM_005639.1,199-217).
ccgtgggccttaattgcaa

SEQ ID NO: 173119 - DNA, 19 bp, Homo sapiens
  siRNA target sequence for SYT1 (NM_005639.1,200-218).
cgtgggccttaattgcaat

SEQ ID NO: 173120 - DNA, 19 bp, Homo sapiens
  siRNA target sequence for SYT1 (NM_005639.1,201-219).
gtgggccttaattgcaata

SEQ ID NO: 173121 - DNA, 19 bp, Homo sapiens
  siRNA target sequence for SYT1 (NM_005639.1,221-239).
ccatagtcgcagtcctttt

SEQ ID NO: 173122 - DNA, 19 bp, Homo sapiens
  siRNA target sequence for SYT1 (NM_005639.1,222-240).
catagtcgcagtcctttta

SEQ ID NO: 173123 - DNA, 19 bp, Homo sapiens
  siRNA target sequence for SYT1 (NM_005639.1,317-335).
gagggaagaatgccattaa

SEQ ID NO: 173124 - DNA, 19 bp, Homo sapiens
  siRNA target sequence for SYT1 (NM_005639.1,319-337).
gggaagaatgccattaaca

SEQ ID NO: 173125 - DNA, 19 bp, Homo sapiens
  siRNA target sequence for SYT1 (NM_005639.1,329-347).
ccattaacatgaaagatgt

SEQ ID NO: 173126 - DNA, 19 bp, Homo sapiens
  siRNA target sequence for SYT1 (NM_005639.1,621-639).
ccaccgaaaaacccttaat

SEQ ID NO: 173127 - DNA, 19 bp, Homo sapiens
  siRNA target sequence for SYT1 (NM_005639.1,643-661).
gtcttcaatgagcaattta

SEQ ID NO: 173128 - DNA, 19 bp, Homo sapiens
  siRNA target sequence for SYT1 (NM_005639.1,645-663).
cttcaatgagcaatttact

SEQ ID NO: 173129 - DNA, 19 bp, Homo sapiens
  siRNA target sequence for SYT1 (NM_005639.1,689-707).
gtggcaaaaccctagtgat

SEQ ID NO: 173130 - DNA, 19 bp, Homo sapiens
  siRNA target sequence for SYT1 (NM_005639.1,698-716).
ccctagtgatggctgtata

SEQ ID NO: 173131 - DNA, 19 bp, Homo sapiens
  siRNA target sequence for SYT1 (NM_005639.1,944-962).
gtggcttatccgatcctta

SEQ ID NO: 173132 - DNA, 19 bp, Homo sapiens
  siRNA target sequence for SYT1 (NM_005639.1,1031-1049).
cacttaacccctactacaa

SEQ ID NO: 173133 - DNA, 19 bp, Homo sapiens
  siRNA target sequence for SYT1 (NM_005639.1,1061-1079).
gctttgaagtaccttttga

SEQ ID NO: 173134 - DNA, 19 bp, Homo sapiens
  siRNA target sequence for SYT1 (NM_005639.1,1145-1163).
ccatcggcaaagtctttgt

SEQ ID NO: 173135 - DNA, 19 bp, Homo sapiens
  siRNA target sequence for SYT1 (NM_005639.1,1215-1233).
caaccccaggcgacctatt

SEQ ID NO: 173136 - DNA, 19 bp, Homo sapiens
  siRNA target sequence for FABP2 (NM_000134.2,92-110).
cggagtgaaaactatgaca

SEQ ID NO: 173137 - DNA, 19 bp, Homo sapiens
  siRNA target sequence for FABP2 (NM_000134.2,131-149).
gttaatatagtgaaaagga

SEQ ID NO: 173138 - DNA, 19 bp, Homo sapiens
  siRNA target sequence for FABP2 (NM_000134.2,175-193).
gctgacaattacacaagaa

SEQ ID NO: 173139 - DNA, 19 bp, Homo sapiens
  siRNA target sequence for FABP2 (NM_000134.2,225-243).
cttttcgaaacattgaagt

SEQ ID NO: 173140 - DNA, 19 bp, Homo sapiens
  siRNA target sequence for FABP2 (NM_000134.2,230-248).
cgaaacattgaagttgttt

SEQ ID NO: 173141 - DNA, 19 bp, Homo sapiens
  siRNA target sequence for FABP2 (NM_000134.2,254-272).
cttggtgtcacctttaatt

SEQ ID NO: 173142 - DNA, 19 bp, Homo sapiens
  siRNA target sequence for FABP2 (NM_000134.2,258-276).
gtgtcacctttaattacaa

SEQ ID NO: 173143 - DNA, 19 bp, Homo sapiens
  siRNA target sequence for FABP2 (NM_000134.2,310-328).
gagccttgagggaaataaa

SEQ ID NO: 173144 - DNA, 19 bp, Homo sapiens
  siRNA target sequence for FABP2 (NM_000134.2,360-378).
gaaacgaactgaatactgt

SEQ ID NO: 173145 - DNA, 19 bp, Homo sapiens
  siRNA target sequence for FABP3 (NM_004102.2,76-94).
ctagtggacagcaagaatt

SEQ ID NO: 173146 - DNA, 19 bp, Homo sapiens
  siRNA target sequence for FABP3 (NM_004102.2,81-99).
ggacagcaagaatttcgat

SEQ ID NO: 173147 - DNA, 19 bp, Homo sapiens
  siRNA target sequence for FABP3 (NM_004102.2,161-179).
ctaccacaatcatcgaaaa

SEQ ID NO: 173148 - DNA, 19 bp, Homo sapiens
  siRNA target sequence for FABP3 (NM_004102.2,164-182).
ccacaatcatcgaaaagaa

SEQ ID NO: 173149 - DNA, 19 bp, Homo sapiens
  siRNA target sequence for FABP3 (NM_004102.2,189-207).
cattctcaccctaaaaaca

SEQ ID NO: 173150 - DNA, 19 bp, Homo sapiens
  siRNA target sequence for FABP3 (NM_004102.2,356-374).
cacttgtgcgggagctaat

SEQ ID NO: 173151 - DNA, 19 bp, Homo sapiens
  siRNA target sequence for FABP3 (NM_004102.2,370-388).
ctaattgatggaaaactca

SEQ ID NO: 173152 - DNA, 19 bp, Homo sapiens
  siRNA target sequence for FABP4 (NM_001442.1,147-165).
gctggcatggccaaaccta

SEQ ID NO: 173153 - DNA, 19 bp, Homo sapiens
  siRNA target sequence for FABP4 (NM_001442.1,148-166).
ctggcatggccaaacctaa

SEQ ID NO: 173154 - DNA, 19 bp, Homo sapiens
  siRNA target sequence for FABP4 (NM_001442.1,156-174).
gccaaacctaacatgatca

SEQ ID NO: 173155 - DNA, 19 bp, Homo sapiens
  siRNA target sequence for FABP4 (NM_001442.1,189-207).
gatgtgatcaccattaaat

SEQ ID NO: 173156 - DNA, 19 bp, Homo sapiens
  siRNA target sequence for FABP4 (NM_001442.1,313-331).
ggggtgtcctggtacatgt

SEQ ID NO: 173157 - DNA, 19 bp, Homo sapiens
  siRNA target sequence for FABP4 (NM_001442.1,346-364).
gaaaatcaaccaccataaa

SEQ ID NO: 173158 - DNA, 19 bp, Homo sapiens
  siRNA target sequence for FABP4 (NM_001442.1,392-410).
ggtggaatgcgtcatgaaa

SEQ ID NO: 173159 - DNA, 19 bp, Homo sapiens
  siRNA target sequence for FABP4 (NM_001442.1,414-432).
gtcacttccacgagagttt

SEQ ID NO: 173160 - DNA, 19 bp, Homo sapiens
  siRNA target sequence for FABP4 (NM_001442.1,416-434).
cacttccacgagagtttat

SEQ ID NO: 173161 - DNA, 19 bp, Homo sapiens
  siRNA target sequence for FABP4 (NM_001442.1,418-436).
cttccacgagagtttatga

SEQ ID NO: 173162 - DNA, 19 bp, Homo sapiens
  siRNA target sequence for FABP6 (NM_001445.1,195-213).
gggatctccagcgatgtaa

SEQ ID NO: 173163 - DNA, 19 bp, Homo sapiens
  siRNA target sequence for FABP6 (NM_001445.1,196-214).
ggatctccagcgatgtaat

SEQ ID NO: 173164 - DNA, 19 bp, Homo sapiens
  siRNA target sequence for FABP6 (NM_001445.1,200-218).
ctccagcgatgtaatcgaa

SEQ ID NO: 173165 - DNA, 19 bp, Homo sapiens
  siRNA target sequence for FABP6 (NM_001445.1,404-422).
ggtgaatttccccaactat

SEQ ID NO: 173166 - DNA, 19 bp, Homo sapiens
  siRNA target sequence for RBP3 (NM_002900.1,705-723).
cacgtggacactatctaca

SEQ ID NO: 173167 - DNA, 19 bp, Homo sapiens
  siRNA target sequence for RBP3 (NM_002900.1,1445-1463).
cctgcgcttcgatagtttt

SEQ ID NO: 173168 - DNA, 19 bp, Homo sapiens
  siRNA target sequence for RBP3 (NM_002900.1,1448-1466).
gcgcttcgatagttttgct

SEQ ID NO: 173169 - DNA, 19 bp, Homo sapiens
  siRNA target sequence for RBP3 (NM_002900.1,1483-1501).
gtgtgttggccccatatgt

SEQ ID NO: 173170 - DNA, 19 bp, Homo sapiens
  siRNA target sequence for RBP3 (NM_002900.1,1653-1671).
gatcgccgcaccaacatca

SEQ ID NO: 173171 - DNA, 19 bp, Homo sapiens
  siRNA target sequence for RBP3 (NM_002900.1,1720-1738).
cccaacgtggggtgtatct

SEQ ID NO: 173172 - DNA, 19 bp, Homo sapiens
  siRNA target sequence for RBP3 (NM_002900.1,2294-2312).
ggagctcacctaccttatt

SEQ ID NO: 173173 - DNA, 19 bp, Homo sapiens
  siRNA target sequence for RBP3 (NM_002900.1,2777-2795).
cagcagccccttatatgca

SEQ ID NO: 173174 - DNA, 19 bp, Homo sapiens
  siRNA target sequence for RBP3 (NM_002900.1,2896-2914).
ccatagcccaggacatagt

SEQ ID NO: 173175 - DNA, 19 bp, Homo sapiens
  siRNA target sequence for RBP3 (NM_002900.1,3146-3164).
ggaccgcattcctggaatt

SEQ ID NO: 173176 - DNA, 19 bp, Homo sapiens
  siRNA target sequence for RBP3 (NM_002900.1,3176-3194).
gatcccttcccctgaagta

SEQ ID NO: 173177 - DNA, 19 bp, Homo sapiens
  siRNA target sequence for RBP3 (NM_002900.1,3181-3199).
cttcccctgaagtatttga

SEQ ID NO: 173178 - DNA, 19 bp, Homo sapiens
  siRNA target sequence for RBP3 (NM_002900.1,3201-3219).
gagctgatcaagttttcct

SEQ ID NO: 173179 - DNA, 19 bp, Homo sapiens
  siRNA target sequence for RBP3 (NM_002900.1,3230-3248).
cgtgcttgaggacaacatt

SEQ ID NO: 173180 - DNA, 19 bp, Homo sapiens
  siRNA target sequence for RBP3 (NM_002900.1,3249-3267).
ggctacttgaggtttgaca

SEQ ID NO: 173181 - DNA, 19 bp, Homo sapiens
  siRNA target sequence for RBP3 (NM_002900.1,3404-3422).
cttgtgctcctacttcttt

SEQ ID NO: 173182 - DNA, 19 bp, Homo sapiens
  siRNA target sequence for RBP3 (NM_002900.1,3438-3456).
gttctgctggacaagatct

SEQ ID NO: 173183 - DNA, 19 bp, Homo sapiens
  siRNA target sequence for RBP3 (NM_002900.1,3516-3534).
cgctatggctccaagaaga

SEQ ID NO: 173184 - DNA, 19 bp, Homo sapiens
  siRNA target sequence for RBP3 (NM_002900.1,3574-3592).
cggaggagttcacctatat

SEQ ID NO: 173185 - DNA, 19 bp, Homo sapiens
  siRNA target sequence for RBP3 (NM_002900.1,3576-3594).
gaggagttcacctatatca

SEQ ID NO: 173186 - DNA, 19 bp, Homo sapiens
  siRNA target sequence for ALB (NM_000477.3,73-91).
ctctttagctcggcttatt

SEQ ID NO: 173187 - DNA, 19 bp, Homo sapiens
  siRNA target sequence for ALB (NM_000477.3,129-147).
ggttgctcatcggtttaaa

SEQ ID NO: 173188 - DNA, 19 bp, Homo sapiens
  siRNA target sequence for ALB (NM_000477.3,214-232).
ccatttgaagatcatgtaa

SEQ ID NO: 173189 - DNA, 19 bp, Homo sapiens
  siRNA target sequence for ALB (NM_000477.3,215-233).
catttgaagatcatgtaaa

SEQ ID NO: 173190 - DNA, 19 bp, Homo sapiens
  siRNA target sequence for ALB (NM_000477.3,286-304).
gctgaaaattgtgacaaat

SEQ ID NO: 173191 - DNA, 19 bp, Homo sapiens
  siRNA target sequence for ALB (NM_000477.3,414-432).
cttcttgcaacacaaagat

SEQ ID NO: 173192 - DNA, 19 bp, Homo sapiens
  siRNA target sequence for ALB (NM_000477.3,461-479).
gaccagaggttgatgtgat

SEQ ID NO: 173193 - DNA, 19 bp, Homo sapiens
  siRNA target sequence for ALB (NM_000477.3,477-495).
gatgtgcactgcttttcat

SEQ ID NO: 173194 - DNA, 19 bp, Homo sapiens
  siRNA target sequence for ALB (NM_000477.3,539-557).
ccagaagacatccttactt

SEQ ID NO: 173195 - DNA, 19 bp, Homo sapiens
  siRNA target sequence for ALB (NM_000477.3,568-586).
gaactccttttctttgcta

SEQ ID NO: 173196 - DNA, 19 bp, Homo sapiens
  siRNA target sequence for ALB (NM_000477.3,648-666).
gccaaagctcgatgaactt

SEQ ID NO: 173197 - DNA, 19 bp, Homo sapiens
  siRNA target sequence for ALB (NM_000477.3,682-700).
gcttcgtctgccaaacaga

SEQ ID NO: 173198 - DNA, 19 bp, Homo sapiens
  siRNA target sequence for ALB (NM_000477.3,761-779).
ctcgcctgagccagagatt

SEQ ID NO: 173199 - DNA, 19 bp, Homo sapiens
  siRNA target sequence for ALB (NM_000477.3,787-805).
gctgagtttgcagaagttt

SEQ ID NO: 173200 - DNA, 19 bp, Homo sapiens
  siRNA target sequence for ALB (NM_000477.3,807-825).
caagttagtgacagatctt

SEQ ID NO: 173201 - DNA, 19 bp, Homo sapiens
  siRNA target sequence for ALB (NM_000477.3,882-900).
ggcggaccttgccaagtat

SEQ ID NO: 173202 - DNA, 19 bp, Homo sapiens
  siRNA target sequence for ALB (NM_000477.3,883-901).
gcggaccttgccaagtata

SEQ ID NO: 173203 - DNA, 19 bp, Homo sapiens
  siRNA target sequence for ALB (NM_000477.3,884-902).
cggaccttgccaagtatat

SEQ ID NO: 173204 - DNA, 19 bp, Homo sapiens
  siRNA target sequence for ALB (NM_000477.3,886-904).
gaccttgccaagtatatct

SEQ ID NO: 173205 - DNA, 19 bp, Homo sapiens
  siRNA target sequence for ALB (NM_000477.3,905-923).
gtgaaaatcaagattcgat

SEQ ID NO: 173206 - DNA, 19 bp, Homo sapiens
  siRNA target sequence for ALB (NM_000477.3,1222-1240).
gccaaagtgttcgatgaat

SEQ ID NO: 173207 - DNA, 19 bp, Homo sapiens
  siRNA target sequence for ALB (NM_000477.3,1223-1241).
ccaaagtgttcgatgaatt

SEQ ID NO: 173208 - DNA, 19 bp, Homo sapiens
  siRNA target sequence for ALB (NM_000477.3,1230-1248).
gttcgatgaatttaaacct

SEQ ID NO: 173209 - DNA, 19 bp, Homo sapiens
  siRNA target sequence for ALB (NM_000477.3,1252-1270).
gtggaagagcctcagaatt

SEQ ID NO: 173210 - DNA, 19 bp, Homo sapiens
  siRNA target sequence for ALB (NM_000477.3,1262-1280).
ctcagaatttaatcaaaca

SEQ ID NO: 173211 - DNA, 19 bp, Homo sapiens
  siRNA target sequence for ALB (NM_000477.3,1299-1317).
gcagcttggagagtacaaa

SEQ ID NO: 173212 - DNA, 19 bp, Homo sapiens
  siRNA target sequence for ALB (NM_000477.3,1300-1318).
cagcttggagagtacaaat

SEQ ID NO: 173213 - DNA, 19 bp, Homo sapiens
  siRNA target sequence for ALB (NM_000477.3,1378-1396).
cttgtagaggtctcaagaa

SEQ ID NO: 173214 - DNA, 19 bp, Homo sapiens
  siRNA target sequence for ALB (NM_000477.3,1412-1430).
gcagcaaatgttgtaaaca

SEQ ID NO: 173215 - DNA, 19 bp, Homo sapiens
  siRNA target sequence for ALB (NM_000477.3,1476-1494).
ggtcctgaaccagttatgt

SEQ ID NO: 173216 - DNA, 19 bp, Homo sapiens
  siRNA target sequence for ALB (NM_000477.3,1560-1578).
caggcgaccatgcttttca

SEQ ID NO: 173217 - DNA, 19 bp, Homo sapiens
  siRNA target sequence for ALB (NM_000477.3,1582-1600).
ctggaagtcgatgaaacat

SEQ ID NO: 173218 - DNA, 19 bp, Homo sapiens
  siRNA target sequence for ALB (NM_000477.3,1598-1616).
catacgttcccaaagagtt

SEQ ID NO: 173219 - DNA, 19 bp, Homo sapiens
  siRNA target sequence for ALB (NM_000477.3,1632-1650).
caccttccatgcagatata

SEQ ID NO: 173220 - DNA, 19 bp, Homo sapiens
  siRNA target sequence for ALB (NM_000477.3,1642-1660).
gcagatatatgcacacttt

SEQ ID NO: 173221 - DNA, 19 bp, Homo sapiens
  siRNA target sequence for ALB (NM_000477.3,1699-1717).
gttgagctcgtgaaacaca

SEQ ID NO: 173222 - DNA, 19 bp, Homo sapiens
  siRNA target sequence for ALB (NM_000477.3,1755-1773).
ggatgatttcgcagctttt

SEQ ID NO: 173223 - DNA, 19 bp, Homo sapiens
  siRNA target sequence for APOA1 (NM_000039.1,194-212).
ctatgtgtcccagtttgaa

SEQ ID NO: 173224 - DNA, 19 bp, Homo sapiens
  siRNA target sequence for APOA1 (NM_000039.1,214-232).
gctccgccttgggaaaaca

SEQ ID NO: 173225 - DNA, 19 bp, Homo sapiens
  siRNA target sequence for APOA1 (NM_000039.1,220-238).
ccttgggaaaacagctaaa

SEQ ID NO: 173226 - DNA, 19 bp, Homo sapiens
  siRNA target sequence for APOA1 (NM_000039.1,224-242).
gggaaaacagctaaaccta

SEQ ID NO: 173227 - DNA, 19 bp, Homo sapiens
  siRNA target sequence for APOA1 (NM_000039.1,225-243).
ggaaaacagctaaacctaa

SEQ ID NO: 173228 - DNA, 19 bp, Homo sapiens
  siRNA target sequence for APOA1 (NM_000039.1,807-825).
ctcgaggagtacactaaga

SEQ ID NO: 173229 - DNA, 19 bp, Homo sapiens
  siRNA target sequence for APOA4 (NM_000482.2,202-220).
gtgatgtgggactacttca

SEQ ID NO: 173230 - DNA, 19 bp, Homo sapiens
  siRNA target sequence for APOA4 (NM_000482.2,719-737).
cgccctacgctgacgaatt

SEQ ID NO: 173231 - DNA, 19 bp, Homo sapiens
  siRNA target sequence for APOA4 (NM_000482.2,721-739).
ccctacgctgacgaattca

SEQ ID NO: 173232 - DNA, 19 bp, Homo sapiens
  siRNA target sequence for APOA4 (NM_000482.2,722-740).
cctacgctgacgaattcaa

SEQ ID NO: 173233 - DNA, 19 bp, Homo sapiens
  siRNA target sequence for APOA4 (NM_000482.2,723-741).
ctacgctgacgaattcaaa

SEQ ID NO: 173234 - DNA, 19 bp, Homo sapiens
  siRNA target sequence for APOA4 (NM_000482.2,732-750).
cgaattcaaagtcaagatt

SEQ ID NO: 173235 - DNA, 19 bp, Homo sapiens
  siRNA target sequence for APOA4 (NM_000482.2,1036-1054).
gagccctacggggaaaact

SEQ ID NO: 173236 - DNA, 19 bp, Homo sapiens
  siRNA target sequence for APOA4 (NM_000482.2,1040-1058).
cctacggggaaaacttcaa

SEQ ID NO: 173237 - DNA, 19 bp, Homo sapiens
  siRNA target sequence for APOA5 (NM_052968.2,195-213).
gacctcaacaatatgaaca

SEQ ID NO: 173238 - DNA, 19 bp, Homo sapiens
  siRNA target sequence for APOA5 (NM_052968.2,400-418).
cctacacgatggatctgat

SEQ ID NO: 173239 - DNA, 19 bp, Homo sapiens
  siRNA target sequence for APOA5 (NM_052968.2,981-999).
gccccagagtttcaacaaa

SEQ ID NO: 173240 - DNA, 19 bp, Homo sapiens
  siRNA target sequence for APOA5 (NM_052968.2,983-1001).
cccagagtttcaacaaaca

SEQ ID NO: 173241 - DNA, 19 bp, Homo sapiens
  siRNA target sequence for APOA5 (NM_052968.2,985-1003).
cagagtttcaacaaacaga

SEQ ID NO: 173242 - DNA, 19 bp, Homo sapiens
  siRNA target sequence for APOD (NM_001647.1,111-129).
cggcagagggacaagcatt

SEQ ID NO: 173243 - DNA, 19 bp, Homo sapiens
  siRNA target sequence for APOD (NM_001647.1,152-170).
cctccggtgcaggagaatt

SEQ ID NO: 173244 - DNA, 19 bp, Homo sapiens
  siRNA target sequence for APOD (NM_001647.1,164-182).
gagaattttgacgtgaata

SEQ ID NO: 173245 - DNA, 19 bp, Homo sapiens
  siRNA target sequence for APOD (NM_001647.1,190-208).
cggaagatggtacgaaatt

SEQ ID NO: 173246 - DNA, 19 bp, Homo sapiens
  siRNA target sequence for APOD (NM_001647.1,195-213).
gatggtacgaaattgagaa

SEQ ID NO: 173247 - DNA, 19 bp, Homo sapiens
  siRNA target sequence for APOD (NM_001647.1,198-216).
ggtacgaaattgagaagat

SEQ ID NO: 173248 - DNA, 19 bp, Homo sapiens
  siRNA target sequence for APOD (NM_001647.1,253-271).
caactactcactaatggaa

SEQ ID NO: 173249 - DNA, 19 bp, Homo sapiens
  siRNA target sequence for APOD (NM_001647.1,274-292).
cggaaagatcaaagtgtta

SEQ ID NO: 173250 - DNA, 19 bp, Homo sapiens
  siRNA target sequence for ATP5G1 (NM_005175.1,166-184).
gttgtaccaggggtctaat

SEQ ID NO: 173251 - DNA, 19 bp, Homo sapiens
  siRNA target sequence for ATP5G1 (NM_005175.1,206-224).
cttgaatagcccagtgaat

SEQ ID NO: 173252 - DNA, 19 bp, Homo sapiens
  siRNA target sequence for ATP5G1 (NM_005175.1,294-312).
gtctcccgggacattgaca

SEQ ID NO: 173253 - DNA, 19 bp, Homo sapiens
  siRNA target sequence for ATP5G2 (NM_005176.3,62-80).
gttcgcctgctccaagttt

SEQ ID NO: 173254 - DNA, 19 bp, Homo sapiens
  siRNA target sequence for ATP5G2 (NM_005176.3,433-451).
ccatggggctcttttgtct

SEQ ID NO: 173255 - DNA, 19 bp, Homo sapiens
  siRNA target sequence for ATP5G3 (NM_001689.1,301-319).
ctggatccagagttgcata

SEQ ID NO: 173256 - DNA, 19 bp, Homo sapiens
  siRNA target sequence for ATP5G3 (NM_001689.1,312-330).
gttgcatacagaccaattt

SEQ ID NO: 173257 - DNA, 19 bp, Homo sapiens
  siRNA target sequence for ATP5G3 (NM_001689.1,374-392).
gggctctacggtatttaat

SEQ ID NO: 173258 - DNA, 19 bp, Homo sapiens
  siRNA target sequence for ATP5G3 (NM_001689.1,408-426).
gtgtctcagctaatccaaa

SEQ ID NO: 173259 - DNA, 19 bp, Homo sapiens
  siRNA target sequence for ATP5G3 (NM_001689.1,445-463).
caatcagcagagacattga

SEQ ID NO: 173260 - DNA, 19 bp, Homo sapiens
  siRNA target sequence for ATP5G3 (NM_001689.1,449-467).
cagcagagacattgatact

SEQ ID NO: 173261 - DNA, 19 bp, Homo sapiens
  siRNA target sequence for ATP5G3 (NM_001689.1,539-557).
ctttggcagccttatcatt

SEQ ID NO: 173262 - DNA, 19 bp, Homo sapiens
  siRNA target sequence for ATP5G3 (NM_001689.1,587-605).
gcagctgttctcatatgct

SEQ ID NO: 173263 - DNA, 19 bp, Homo sapiens
  siRNA target sequence for ATP5G3 (NM_001689.1,646-664).
gtttgatggttgctttctt

SEQ ID NO: 173264 - DNA, 19 bp, Homo sapiens
  siRNA target sequence for BPI (NM_001725.1,287-305).
gcatggacatccgtgaatt

SEQ ID NO: 173265 - DNA, 19 bp, Homo sapiens
  siRNA target sequence for BPI (NM_001725.1,310-328).
cttcccagttcccagataa

SEQ ID NO: 173266 - DNA, 19 bp, Homo sapiens
  siRNA target sequence for BPI (NM_001725.1,337-355).
cccaatgtgggccttaagt

SEQ ID NO: 173267 - DNA, 19 bp, Homo sapiens
  siRNA target sequence for BPI (NM_001725.1,338-356).
ccaatgtgggccttaagtt

SEQ ID NO: 173268 - DNA, 19 bp, Homo sapiens
  siRNA target sequence for BPI (NM_001725.1,365-383).
gcaacgccaatatcaagat

SEQ ID NO: 173269 - DNA, 19 bp, Homo sapiens
  siRNA target sequence for BPI (NM_001725.1,400-418).
gcacaaaagagattcttaa

SEQ ID NO: 173270 - DNA, 19 bp, Homo sapiens
  siRNA target sequence for BPI (NM_001725.1,458-476).
ccatttcggctgatctgaa

SEQ ID NO: 173271 - DNA, 19 bp, Homo sapiens
  siRNA target sequence for BPI (NM_001725.1,550-568).
cacgtgcacatctcaaaga

SEQ ID NO: 173272 - DNA, 19 bp, Homo sapiens
  siRNA target sequence for BPI (NM_001725.1,614-632).
ctgcgcttcgaaacaagat

SEQ ID NO: 173273 - DNA, 19 bp, Homo sapiens
  siRNA target sequence for BPI (NM_001725.1,616-634).
gcgcttcgaaacaagatga

SEQ ID NO: 173274 - DNA, 19 bp, Homo sapiens
  siRNA target sequence for BPI (NM_001725.1,725-743).
ctgtggctggaatcaacta

SEQ ID NO: 173275 - DNA, 19 bp, Homo sapiens
  siRNA target sequence for BPI (NM_001725.1,779-797).
ccctggatgtacagatgaa

SEQ ID NO: 173276 - DNA, 19 bp, Homo sapiens
  siRNA target sequence for BPI (NM_001725.1,868-886).
gcccatgaccgcatggtat

SEQ ID NO: 173277 - DNA, 19 bp, Homo sapiens
  siRNA target sequence for BPI (NM_001725.1,892-910).
ggcctctcagactacttct

SEQ ID NO: 173278 - DNA, 19 bp, Homo sapiens
  siRNA target sequence for BPI (NM_001725.1,895-913).
ctctcagactacttcttca

SEQ ID NO: 173279 - DNA, 19 bp, Homo sapiens
  siRNA target sequence for BPI (NM_001725.1,951-969).
gaagatgacccttagagat

SEQ ID NO: 173280 - DNA, 19 bp, Homo sapiens
  siRNA target sequence for BPI (NM_001725.1,960-978).
ccttagagatgacatgatt

SEQ ID NO: 173281 - DNA, 19 bp, Homo sapiens
  siRNA target sequence for BPI (NM_001725.1,1282-1300).
gaactgaagcactcaaata

SEQ ID NO: 173282 - DNA, 19 bp, Homo sapiens
  siRNA target sequence for BPI (NM_001725.1,1307-1325).
ccttcccggttgaattgct

SEQ ID NO: 173283 - DNA, 19 bp, Homo sapiens
  siRNA target sequence for BPI (NM_001725.1,1324-1342).
ctgcaggatatcatgaact

SEQ ID NO: 173284 - DNA, 19 bp, Homo sapiens
  siRNA target sequence for BPI (NM_001725.1,1341-1359).
ctacattgtacccattctt

SEQ ID NO: 173285 - DNA, 19 bp, Homo sapiens
  siRNA target sequence for BPI (NM_001725.1,1367-1385).
ccagggttaacgagaaact

SEQ ID NO: 173286 - DNA, 19 bp, Homo sapiens
  siRNA target sequence for BPI (NM_001725.1,1368-1386).
cagggttaacgagaaacta

SEQ ID NO: 173287 - DNA, 19 bp, Homo sapiens
  siRNA target sequence for BPI (NM_001725.1,1370-1388).
gggttaacgagaaactaca

SEQ ID NO: 173288 - DNA, 19 bp, Homo sapiens
  siRNA target sequence for BPI (NM_001725.1,1472-1490).
gtgcagacgttgtctataa

SEQ ID NO: 173289 - DNA, 19 bp, Homo sapiens
  siRNA target sequence for BPI (NM_001725.1,1474-1492).
gcagacgttgtctataaat

SEQ ID NO: 173290 - DNA, 19 bp, Homo sapiens
  siRNA target sequence for BPIL1 (NM_025227.1,268-286).
ccgtggtccgactcaacaa

SEQ ID NO: 173291 - DNA, 19 bp, Homo sapiens
  siRNA target sequence for BPIL1 (NM_025227.1,296-314).
gagctacgtgtctgaaatt

SEQ ID NO: 173292 - DNA, 19 bp, Homo sapiens
  siRNA target sequence for BPIL1 (NM_025227.1,394-412).
ccaggatccggattctgaa

SEQ ID NO: 173293 - DNA, 19 bp, Homo sapiens
  siRNA target sequence for BPIL1 (NM_025227.1,395-413).
caggatccggattctgaat

SEQ ID NO: 173294 - DNA, 19 bp, Homo sapiens
  siRNA target sequence for BPIL1 (NM_025227.1,674-692).
ggtgcagaagcacattaaa

SEQ ID NO: 173295 - DNA, 19 bp, Homo sapiens
  siRNA target sequence for BPIL1 (NM_025227.1,677-695).
gcagaagcacattaaagct

SEQ ID NO: 173296 - DNA, 19 bp, Homo sapiens
  siRNA target sequence for BPIL1 (NM_025227.1,731-749).
cctggtgcagggtgtcaat

SEQ ID NO: 173297 - DNA, 19 bp, Homo sapiens
  siRNA target sequence for BPIL1 (NM_025227.1,750-768).
gtccacctgggcaccttaa

SEQ ID NO: 173298 - DNA, 19 bp, Homo sapiens
  siRNA target sequence for BPIL1 (NM_025227.1,752-770).
ccacctgggcaccttaatt

SEQ ID NO: 173299 - DNA, 19 bp, Homo sapiens
  siRNA target sequence for BPIL1 (NM_025227.1,904-922).
cggatgccaccccttttgt

SEQ ID NO: 173300 - DNA, 19 bp, Homo sapiens
  siRNA target sequence for BPIL1 (NM_025227.1,1376-1394).
gggcttcattgatacagat

SEQ ID NO: 173301 - DNA, 19 bp, Homo sapiens
  siRNA target sequence for BPIL1 (NM_025227.1,1527-1545).
gagggctacgtggtgatat

SEQ ID NO: 173302 - DNA, 19 bp, Homo sapiens
  siRNA target sequence for BPIL1 (NM_025227.1,1530-1548).
ggctacgtggtgatatcca

SEQ ID NO: 173303 - DNA, 19 bp, Homo sapiens
  siRNA target sequence for BPIL2 (NM_174932.1,20-38).
cagtcctctggggatgttt

SEQ ID NO: 173304 - DNA, 19 bp, Homo sapiens
  siRNA target sequence for BPIL2 (NM_174932.1,39-57).
cctcctgtggaatctctat

SEQ ID NO: 173305 - DNA, 19 bp, Homo sapiens
  siRNA target sequence for BPIL2 (NM_174932.1,62-80).
catcctctcagaccattta

SEQ ID NO: 173306 - DNA, 19 bp, Homo sapiens
  siRNA target sequence for BPIL2 (NM_174932.1,85-103).
ggaatcaaggcaaggatta

SEQ ID NO: 173307 - DNA, 19 bp, Homo sapiens
  siRNA target sequence for BPIL2 (NM_174932.1,104-122).
ctcagagggcacttgacta

SEQ ID NO: 173308 - DNA, 19 bp, Homo sapiens
  siRNA target sequence for BPIL2 (NM_174932.1,388-406).
ggggctgatctgtttctct

SEQ ID NO: 173309 - DNA, 19 bp, Homo sapiens
  siRNA target sequence for BPIL2 (NM_174932.1,414-432).
ctactttaccggtatcatt

SEQ ID NO: 173310 - DNA, 19 bp, Homo sapiens
  siRNA target sequence for BPIL2 (NM_174932.1,435-453).
cctaacccgaaatgacttt

SEQ ID NO: 173311 - DNA, 19 bp, Homo sapiens
  siRNA target sequence for BPIL2 (NM_174932.1,685-703).
ctggattactccctaatca

SEQ ID NO: 173312 - DNA, 19 bp, Homo sapiens
  siRNA target sequence for BPIL2 (NM_174932.1,827-845).
ccatgctctacattggaat

SEQ ID NO: 173313 - DNA, 19 bp, Homo sapiens
  siRNA target sequence for BPIL2 (NM_174932.1,841-859).
ggaatcgccgagtatttct

SEQ ID NO: 173314 - DNA, 19 bp, Homo sapiens
  siRNA target sequence for BPIL2 (NM_174932.1,842-860).
gaatcgccgagtatttctt

SEQ ID NO: 173315 - DNA, 19 bp, Homo sapiens
  siRNA target sequence for BPIL2 (NM_174932.1,849-867).
cgagtatttctttaaatct

SEQ ID NO: 173316 - DNA, 19 bp, Homo sapiens
  siRNA target sequence for BPIL2 (NM_174932.1,887-905).
cagctggggttttcaatgt

SEQ ID NO: 173317 - DNA, 19 bp, Homo sapiens
  siRNA target sequence for BPIL2 (NM_174932.1,910-928).
ctctccaccgaagagattt

SEQ ID NO: 173318 - DNA, 19 bp, Homo sapiens
  siRNA target sequence for BPIL2 (NM_174932.1,974-992).
cccggattgcagagatcta

SEQ ID NO: 173319 - DNA, 19 bp, Homo sapiens
  siRNA target sequence for BPIL2 (NM_174932.1,976-994).
cggattgcagagatctaca

SEQ ID NO: 173320 - DNA, 19 bp, Homo sapiens
  siRNA target sequence for BPIL2 (NM_174932.1,1028-1046).
ccacagagcctcccataat

SEQ ID NO: 173321 - DNA, 19 bp, Homo sapiens
  siRNA target sequence for BPIL2 (NM_174932.1,1035-1053).
gcctcccataatcaatcta

SEQ ID NO: 173322 - DNA, 19 bp, Homo sapiens
  siRNA target sequence for BPIL2 (NM_174932.1,1037-1055).
ctcccataatcaatctaca

SEQ ID NO: 173323 - DNA, 19 bp, Homo sapiens
  siRNA target sequence for BPIL2 (NM_174932.1,1160-1178).
ccagtgttggcctggttat

SEQ ID NO: 173324 - DNA, 19 bp, Homo sapiens
  siRNA target sequence for BPIL2 (NM_174932.1,1161-1179).
cagtgttggcctggttatt

SEQ ID NO: 173325 - DNA, 19 bp, Homo sapiens
  siRNA target sequence for BPIL2 (NM_174932.1,1239-1257).
gtccaatcgcagcaacatt

SEQ ID NO: 173326 - DNA, 19 bp, Homo sapiens
  siRNA target sequence for BPIL2 (NM_174932.1,1241-1259).
ccaatcgcagcaacattga

SEQ ID NO: 173327 - DNA, 19 bp, Homo sapiens
  siRNA target sequence for BPIL2 (NM_174932.1,1261-1279).
gtcttgaggtttgaaaata

SEQ ID NO: 173328 - DNA, 19 bp, Homo sapiens
  siRNA target sequence for BPIL2 (NM_174932.1,1263-1281).
cttgaggtttgaaaatatt

SEQ ID NO: 173329 - DNA, 19 bp, Homo sapiens
  siRNA target sequence for BPIL2 (NM_174932.1,1266-1284).
gaggtttgaaaatattcta

SEQ ID NO: 173330 - DNA, 19 bp, Homo sapiens
  siRNA target sequence for BPIL2 (NM_174932.1,1312-1330).
ccactggccaatgcaaaat

SEQ ID NO: 173331 - DNA, 19 bp, Homo sapiens
  siRNA target sequence for BPIL2 (NM_174932.1,1313-1331).
cactggccaatgcaaaatt

SEQ ID NO: 173332 - DNA, 19 bp, Homo sapiens
  siRNA target sequence for BPIL2 (NM_174932.1,1348-1366).
ctgtccaatccacacaaat

SEQ ID NO: 173333 - DNA, 19 bp, Homo sapiens
  siRNA target sequence for BPIL2 (NM_174932.1,1353-1371).
caatccacacaaattctta

SEQ ID NO: 173334 - DNA, 19 bp, Homo sapiens
  siRNA target sequence for BPIL2 (NM_174932.1,1368-1386).
cttattcgtcaattcagat

SEQ ID NO: 173335 - DNA, 19 bp, Homo sapiens
  siRNA target sequence for BPIL3 (NM_174897.1,110-128).
ccatggatgagagtcatat

SEQ ID NO: 173336 - DNA, 19 bp, Homo sapiens
  siRNA target sequence for BPIL3 (NM_174897.1,122-140).
gtcatatcctggagaagat

SEQ ID NO: 173337 - DNA, 19 bp, Homo sapiens
  siRNA target sequence for BPIL3 (NM_174897.1,146-164).
ccgaggcaggcaagaaaca

SEQ ID NO: 173338 - DNA, 19 bp, Homo sapiens
  siRNA target sequence for BPIL3 (NM_174897.1,167-185).
cagggatgaaacctatcaa

SEQ ID NO: 173339 - DNA, 19 bp, Homo sapiens
  siRNA target sequence for BPIL3 (NM_174897.1,224-242).
ccgtcatcacactgaactt

SEQ ID NO: 173340 - DNA, 19 bp, Homo sapiens
  siRNA target sequence for BPIL3 (NM_174897.1,225-243).
cgtcatcacactgaacttt

SEQ ID NO: 173341 - DNA, 19 bp, Homo sapiens
  siRNA target sequence for BPIL3 (NM_174897.1,415-433).
gtcatcctggtcaatgtga

SEQ ID NO: 173342 - DNA, 19 bp, Homo sapiens
  siRNA target sequence for BPIL3 (NM_174897.1,535-553).
gcagtcctggtgtatgtga

SEQ ID NO: 173343 - DNA, 19 bp, Homo sapiens
  siRNA target sequence for BPIL3 (NM_174897.1,597-615).
gatgggcaccgtcaaatat

SEQ ID NO: 173344 - DNA, 19 bp, Homo sapiens
  siRNA target sequence for BPIL3 (NM_174897.1,600-618).
gggcaccgtcaaatatgtt

SEQ ID NO: 173345 - DNA, 19 bp, Homo sapiens
  siRNA target sequence for BPIL3 (NM_174897.1,876-894).
gaccctggctcgcttcatt

SEQ ID NO: 173346 - DNA, 19 bp, Homo sapiens
  siRNA target sequence for BPIL3 (NM_174897.1,959-977).
ctcccaaggtcactatgaa

SEQ ID NO: 173347 - DNA, 19 bp, Homo sapiens
  siRNA target sequence for BPIL3 (NM_174897.1,1065-1083).
cctagaagtgcacttcaat

SEQ ID NO: 173348 - DNA, 19 bp, Homo sapiens
  siRNA target sequence for BPIL3 (NM_174897.1,1069-1087).
gaagtgcacttcaatctga

SEQ ID NO: 173349 - DNA, 19 bp, Homo sapiens
  siRNA target sequence for BPIL3 (NM_174897.1,1158-1176).
ccggaagtcctcatcgatt

SEQ ID NO: 173350 - DNA, 19 bp, Homo sapiens
  siRNA target sequence for BPIL3 (NM_174897.1,1169-1187).
catcgattggcaacttcaa

SEQ ID NO: 173351 - DNA, 19 bp, Homo sapiens
  siRNA target sequence for BPIL3 (NM_174897.1,1172-1190).
cgattggcaacttcaatga

SEQ ID NO: 173352 - DNA, 19 bp, Homo sapiens
  siRNA target sequence for BPIL3 (NM_174897.1,1182-1200).
cttcaatgagagggaatta

SEQ ID NO: 173353 - DNA, 19 bp, Homo sapiens
  siRNA target sequence for BPIL3 (NM_174897.1,1232-1250).
cctacatcccagttgtcaa

SEQ ID NO: 173354 - DNA, 19 bp, Homo sapiens
  siRNA target sequence for BPIL3 (NM_174897.1,1281-1299).
ggactttctggccatgaat

SEQ ID NO: 173355 - DNA, 19 bp, Homo sapiens
  siRNA target sequence for BPIL3 (NM_174897.1,1308-1326).
ggctgagctggacatagta

SEQ ID NO: 173356 - DNA, 19 bp, Homo sapiens
  siRNA target sequence for C20orf114 (NM_033197.2,687-705).
ctggtgaacgccttagcta

SEQ ID NO: 173357 - DNA, 19 bp, Homo sapiens
  siRNA target sequence for C20orf114 (NM_033197.2,728-746).
gccatccctgcccaatcta

SEQ ID NO: 173358 - DNA, 19 bp, Homo sapiens
  siRNA target sequence for C20orf114 (NM_033197.2,730-748).
catccctgcccaatctagt

SEQ ID NO: 173359 - DNA, 19 bp, Homo sapiens
  siRNA target sequence for C20orf114 (NM_033197.2,733-751).
ccctgcccaatctagtgaa

SEQ ID NO: 173360 - DNA, 19 bp, Homo sapiens
  siRNA target sequence for C20orf114 (NM_033197.2,735-753).
ctgcccaatctagtgaaaa

SEQ ID NO: 173361 - DNA, 19 bp, Homo sapiens
  siRNA target sequence for C20orf114 (NM_033197.2,936-954).
gtgaccaagtggttcaata

SEQ ID NO: 173362 - DNA, 19 bp, Homo sapiens
  siRNA target sequence for C20orf114 (NM_033197.2,941-959).
caagtggttcaataactct

SEQ ID NO: 173363 - DNA, 19 bp, Homo sapiens
  siRNA target sequence for C20orf114 (NM_033197.2,1050-1068).
ctctctccagaagaattca

SEQ ID NO: 173364 - DNA, 19 bp, Homo sapiens
  siRNA target sequence for C20orf114 (NM_033197.2,1101-1119).
gcccatcggctgaagtcaa

SEQ ID NO: 173365 - DNA, 19 bp, Homo sapiens
  siRNA target sequence for C20orf114 (NM_033197.2,1117-1135).
caagcatcgggctgatcaa

SEQ ID NO: 173366 - DNA, 19 bp, Homo sapiens
  siRNA target sequence for C20orf114 (NM_033197.2,1120-1138).
gcatcgggctgatcaatga

SEQ ID NO: 173367 - DNA, 19 bp, Homo sapiens
  siRNA target sequence for C20orf114 (NM_033197.2,1121-1139).
catcgggctgatcaatgaa

SEQ ID NO: 173368 - DNA, 19 bp, Homo sapiens
  siRNA target sequence for C20orf114 (NM_033197.2,1167-1185).
cagatcgtgaagatcctaa

SEQ ID NO: 173369 - DNA, 19 bp, Homo sapiens
  siRNA target sequence for C20orf114 (NM_033197.2,1188-1206).
caggacactcccgagtttt

SEQ ID NO: 173370 - DNA, 19 bp, Homo sapiens
  siRNA target sequence for C20orf114 (NM_033197.2,1190-1208).
ggacactcccgagtttttt

SEQ ID NO: 173371 - DNA, 19 bp, Homo sapiens
  siRNA target sequence for C20orf114 (NM_033197.2,1191-1209).
gacactcccgagtttttta

SEQ ID NO: 173372 - DNA, 19 bp, Homo sapiens
  siRNA target sequence for C20orf114 (NM_033197.2,1272-1290).
gccctccgccctttgttca

SEQ ID NO: 173373 - DNA, 19 bp, Homo sapiens
  siRNA target sequence for C20orf114 (NM_033197.2,1307-1325).
cagctcggaagctcagttt

SEQ ID NO: 173374 - DNA, 19 bp, Homo sapiens
  siRNA target sequence for C20orf114 (NM_033197.2,1309-1327).
gctcggaagctcagtttta

SEQ ID NO: 173375 - DNA, 19 bp, Homo sapiens
  siRNA target sequence for C20orf114 (NM_033197.2,1330-1348).
ccaaaggtgaccaacttat

SEQ ID NO: 173376 - DNA, 19 bp, Homo sapiens
  siRNA target sequence for C20orf114 (NM_033197.2,1331-1349).
caaaggtgaccaacttata

SEQ ID NO: 173377 - DNA, 19 bp, Homo sapiens
  siRNA target sequence for C20orf114 (NM_033197.2,1335-1353).
ggtgaccaacttatactca

SEQ ID NO: 173378 - DNA, 19 bp, Homo sapiens
  siRNA target sequence for C20orf114 (NM_033197.2,1468-1486).
cgaaccagaatggcaaatt

SEQ ID NO: 173379 - DNA, 19 bp, Homo sapiens
  siRNA target sequence for CETP (NM_000078.1,412-430).
ggaagccaagtccattgat

SEQ ID NO: 173380 - DNA, 19 bp, Homo sapiens
  siRNA target sequence for CETP (NM_000078.1,674-692).
cagctgttcacaaatttca

SEQ ID NO: 173381 - DNA, 19 bp, Homo sapiens
  siRNA target sequence for CETP (NM_000078.1,723-741).
gacagatctgcaaagagat

SEQ ID NO: 173382 - DNA, 19 bp, Homo sapiens
  siRNA target sequence for CETP (NM_000078.1,737-755).
gagatcaacgtcatctcta

SEQ ID NO: 173383 - DNA, 19 bp, Homo sapiens
  siRNA target sequence for CETP (NM_000078.1,809-827).
gacattggggtggacattt

SEQ ID NO: 173384 - DNA, 19 bp, Homo sapiens
  siRNA target sequence for CETP (NM_000078.1,872-890).
catcacaagggtcatttca

SEQ ID NO: 173385 - DNA, 19 bp, Homo sapiens
  siRNA target sequence for CETP (NM_000078.1,996-1014).
cgctggccaaggtagcttt

SEQ ID NO: 173386 - DNA, 19 bp, Homo sapiens
  siRNA target sequence for CETP (NM_000078.1,1070-1088).
gagacctggggcttcaaca

SEQ ID NO: 173387 - DNA, 19 bp, Homo sapiens
  siRNA target sequence for CETP (NM_000078.1,1189-1207).
gggagtcgtggtcaattct

SEQ ID NO: 173388 - DNA, 19 bp, Homo sapiens
  siRNA target sequence for CETP (NM_000078.1,1235-1253).
cgcccagaccagcaacatt

SEQ ID NO: 173389 - DNA, 19 bp, Homo sapiens
  siRNA target sequence for CETP (NM_000078.1,1237-1255).
cccagaccagcaacattct

SEQ ID NO: 173390 - DNA, 19 bp, Homo sapiens
  siRNA target sequence for CETP (NM_000078.1,1254-1272).
ctgtagcttacacatttga

SEQ ID NO: 173391 - DNA, 19 bp, Homo sapiens
  siRNA target sequence for CETP (NM_000078.1,1266-1284).
catttgaagaggatatcgt

SEQ ID NO: 173392 - DNA, 19 bp, Homo sapiens
  siRNA target sequence for CETP (NM_000078.1,1295-1313).
caggcctcctattctaaga

SEQ ID NO: 173393 - DNA, 19 bp, Homo sapiens
  siRNA target sequence for CETP (NM_000078.1,1297-1315).
ggcctcctattctaagaaa

SEQ ID NO: 173394 - DNA, 19 bp, Homo sapiens
  siRNA target sequence for CETP (NM_000078.1,1449-1467).
ctcggctcgaggtagtgtt

SEQ ID NO: 173395 - DNA, 19 bp, Homo sapiens
  siRNA target sequence for CETP (NM_000078.1,1451-1469).
cggctcgaggtagtgttta

SEQ ID NO: 173396 - DNA, 19 bp, Homo sapiens
  siRNA target sequence for CETP (NM_000078.1,1453-1471).
gctcgaggtagtgtttaca

SEQ ID NO: 173397 - DNA, 19 bp, Homo sapiens
  siRNA target sequence for CETP (NM_000078.1,1507-1525).
catcatcaaccctgagatt

SEQ ID NO: 173398 - DNA, 19 bp, Homo sapiens
  siRNA target sequence for CRABP1 (NM_004378.1,106-124).
gcagcagcgagaatttcga

SEQ ID NO: 173399 - DNA, 19 bp, Homo sapiens
  siRNA target sequence for CRABP1 (NM_004378.1,208-226).
gccaggacggggatcagtt

SEQ ID NO: 173400 - DNA, 19 bp, Homo sapiens
  siRNA target sequence for CRABP1 (NM_004378.1,216-234).
ggggatcagttctacatca

SEQ ID NO: 173401 - DNA, 19 bp, Homo sapiens
  siRNA target sequence for CRABP1 (NM_004378.1,217-235).
gggatcagttctacatcaa

SEQ ID NO: 173402 - DNA, 19 bp, Homo sapiens
  siRNA target sequence for CRABP1 (NM_004378.1,219-237).
gatcagttctacatcaaga

SEQ ID NO: 173403 - DNA, 19 bp, Homo sapiens
  siRNA target sequence for CRABP1 (NM_004378.1,414-432).
ctggccaacgatgaactta

SEQ ID NO: 173404 - DNA, 19 bp, Homo sapiens
  siRNA target sequence for CRABP1 (NM_004378.1,418-436).
ccaacgatgaacttatcct

SEQ ID NO: 173405 - DNA, 19 bp, Homo sapiens
  siRNA target sequence for CRABP2 (NM_001878.2,175-193).
cggaaaacttcgaggaatt

SEQ ID NO: 173406 - DNA, 19 bp, Homo sapiens
  siRNA target sequence for CRABP2 (NM_001878.2,311-329).
cgtgcgcaccacagagatt

SEQ ID NO: 173407 - DNA, 19 bp, Homo sapiens
  siRNA target sequence for CRABP2 (NM_001878.2,369-387).
gatgggaggccctgtaaga

SEQ ID NO: 173408 - DNA, 19 bp, Homo sapiens
  siRNA target sequence for CRABP2 (NM_001878.2,481-499).
ccaacgatggggaactgat

SEQ ID NO: 173409 - DNA, 19 bp, Homo sapiens
  siRNA target sequence for CRBPIV (NM_052960.1,107-125).
ctggccctaggtattgact

SEQ ID NO: 173410 - DNA, 19 bp, Homo sapiens
  siRNA target sequence for CRBPIV (NM_052960.1,109-127).
ggccctaggtattgacttt

SEQ ID NO: 173411 - DNA, 19 bp, Homo sapiens
  siRNA target sequence for CRBPIV (NM_052960.1,124-142).
ctttgccactcgtaaaata

SEQ ID NO: 173412 - DNA, 19 bp, Homo sapiens
  siRNA target sequence for CRBPIV (NM_052960.1,173-191).
gagcagaatggggattctt

SEQ ID NO: 173413 - DNA, 19 bp, Homo sapiens
  siRNA target sequence for EDG3 (NM_005226.2,666-684).
cgcttacaaggtcaacatt

SEQ ID NO: 173414 - DNA, 19 bp, Homo sapiens
  siRNA target sequence for EDG3 (NM_005226.2,733-751).
ctcagggagggcagtatgt

SEQ ID NO: 173415 - DNA, 19 bp, Homo sapiens
  siRNA target sequence for EDG3 (NM_005226.2,799-817).
gagcggcacttgacaatga

SEQ ID NO: 173416 - DNA, 19 bp, Homo sapiens
  siRNA target sequence for EDG3 (NM_005226.2,802-820).
cggcacttgacaatgatca

SEQ ID NO: 173417 - DNA, 19 bp, Homo sapiens
  siRNA target sequence for EDG3 (NM_005226.2,803-821).
ggcacttgacaatgatcaa

SEQ ID NO: 173418 - DNA, 19 bp, Homo sapiens
  siRNA target sequence for EDG3 (NM_005226.2,804-822).
gcacttgacaatgatcaaa

SEQ ID NO: 173419 - DNA, 19 bp, Homo sapiens
  siRNA target sequence for EDG3 (NM_005226.2,829-847).
ccttacgacgccaacaaga

SEQ ID NO: 173420 - DNA, 19 bp, Homo sapiens
  siRNA target sequence for EDG3 (NM_005226.2,964-982).
cccctctactccaagaagt

SEQ ID NO: 173421 - DNA, 19 bp, Homo sapiens
  siRNA target sequence for EDG3 (NM_005226.2,1081-1099).
gtggccaaccacaacaact

SEQ ID NO: 173422 - DNA, 19 bp, Homo sapiens
  siRNA target sequence for EDG3 (NM_005226.2,1160-1178).
gctggtccccactcttcat

SEQ ID NO: 173423 - DNA, 19 bp, Homo sapiens
  siRNA target sequence for EDG3 (NM_005226.2,1390-1408).
ctcgacccaagcagaagta

SEQ ID NO: 173424 - DNA, 19 bp, Homo sapiens
  siRNA target sequence for EDG3 (NM_005226.2,1392-1410).
cgacccaagcagaagtaaa

SEQ ID NO: 173425 - DNA, 19 bp, Homo sapiens
  siRNA target sequence for EDG3 (NM_005226.2,1393-1411).
gacccaagcagaagtaaat

SEQ ID NO: 173426 - DNA, 19 bp, Homo sapiens
  siRNA target sequence for EDG3 (NM_005226.2,1497-1515).
gaacgcagcacttcagaat

SEQ ID NO: 173427 - DNA, 19 bp, Homo sapiens
  siRNA target sequence for EDG5 (NM_004230.1,39-57).
ggtccaggaacactataat

SEQ ID NO: 173428 - DNA, 19 bp, Homo sapiens
  siRNA target sequence for EDG5 (NM_004230.1,40-58).
gtccaggaacactataatt

SEQ ID NO: 173429 - DNA, 19 bp, Homo sapiens
  siRNA target sequence for EDG5 (NM_004230.1,42-60).
ccaggaacactataattat

SEQ ID NO: 173430 - DNA, 19 bp, Homo sapiens
  siRNA target sequence for EDG5 (NM_004230.1,43-61).
caggaacactataattata

SEQ ID NO: 173431 - DNA, 19 bp, Homo sapiens
  siRNA target sequence for EDG5 (NM_004230.1,197-215).
cggcaatgtacctgtttct

SEQ ID NO: 173432 - DNA, 19 bp, Homo sapiens
  siRNA target sequence for EDG5 (NM_004230.1,254-272).
ccttcgtagccaatacctt

SEQ ID NO: 173433 - DNA, 19 bp, Homo sapiens
  siRNA target sequence for EDG5 (NM_004230.1,550-568).
cctctctacgccaagcatt

SEQ ID NO: 173434 - DNA, 19 bp, Homo sapiens
  siRNA target sequence for EDG5 (NM_004230.1,551-569).
ctctctacgccaagcatta

SEQ ID NO: 173435 - DNA, 19 bp, Homo sapiens
  siRNA target sequence for EDG5 (NM_004230.1,823-841).
gccgtctccaccctgaatt

SEQ ID NO: 173436 - DNA, 19 bp, Homo sapiens
  siRNA target sequence for EDG6 (NM_003775.1,81-99).
ggcacagccggctcattgt

SEQ ID NO: 173437 - DNA, 19 bp, Homo sapiens
  siRNA target sequence for EDG6 (NM_003775.1,82-100).
gcacagccggctcattgtt

SEQ ID NO: 173438 - DNA, 19 bp, Homo sapiens
  siRNA target sequence for EDG6 (NM_003775.1,252-270).
cgcgacgctgggtctacta

SEQ ID NO: 173439 - DNA, 19 bp, Homo sapiens
  siRNA target sequence for EDG6 (NM_003775.1,253-271).
gcgacgctgggtctactat

SEQ ID NO: 173440 - DNA, 19 bp, Homo sapiens
  siRNA target sequence for EDG6 (NM_003775.1,254-272).
cgacgctgggtctactatt

SEQ ID NO: 173441 - DNA, 19 bp, Homo sapiens
  siRNA target sequence for EDG7 (NM_012152.1,199-217).
gcggcagtgatcaaaaaca

SEQ ID NO: 173442 - DNA, 19 bp, Homo sapiens
  siRNA target sequence for EDG7 (NM_012152.1,267-285).
cgatttcttcgctggaatt

SEQ ID NO: 173443 - DNA, 19 bp, Homo sapiens
  siRNA target sequence for EDG7 (NM_012152.1,281-299).
gaattgcctatgtattcct

SEQ ID NO: 173444 - DNA, 19 bp, Homo sapiens
  siRNA target sequence for EDG7 (NM_012152.1,287-305).
cctatgtattcctgatgtt

SEQ ID NO: 173445 - DNA, 19 bp, Homo sapiens
  siRNA target sequence for EDG7 (NM_012152.1,418-436).
gagaggcacatgtcaatca

SEQ ID NO: 173446 - DNA, 19 bp, Homo sapiens
  siRNA target sequence for EDG7 (NM_012152.1,673-691).
gtgtacgtcaagaggaaaa

SEQ ID NO: 173447 - DNA, 19 bp, Homo sapiens
  siRNA target sequence for EDG7 (NM_012152.1,697-715).
gtcttgtctccgcatacaa

SEQ ID NO: 173448 - DNA, 19 bp, Homo sapiens
  siRNA target sequence for EDG7 (NM_012152.1,699-717).
cttgtctccgcatacaagt

SEQ ID NO: 173449 - DNA, 19 bp, Homo sapiens
  siRNA target sequence for EDG7 (NM_012152.1,737-755).
ggacacccatgaagctaat

SEQ ID NO: 173450 - DNA, 19 bp, Homo sapiens
  siRNA target sequence for EDG7 (NM_012152.1,848-866).
gtggcgtgcagcatgtgaa

SEQ ID NO: 173451 - DNA, 19 bp, Homo sapiens
  siRNA target sequence for EDG7 (NM_012152.1,927-945).
caaggacgaggacatgtat

SEQ ID NO: 173452 - DNA, 19 bp, Homo sapiens
  siRNA target sequence for EDG7 (NM_012152.1,1038-1056).
cacaggcagccagtacata

SEQ ID NO: 173453 - DNA, 19 bp, Homo sapiens
  siRNA target sequence for EDG7 (NM_012152.1,1050-1068).
gtacatagaggatagtatt

SEQ ID NO: 173454 - DNA, 19 bp, Homo sapiens
  siRNA target sequence for EDG7 (NM_012152.1,1078-1096).
gcagtctgcaataaaagca

SEQ ID NO: 173455 - DNA, 19 bp, Homo sapiens
  siRNA target sequence for FABP1 (NM_001443.1,72-90).
gagccaggaaaactttgaa

SEQ ID NO: 173456 - DNA, 19 bp, Homo sapiens
  siRNA target sequence for FABP1 (NM_001443.1,210-228).
caaagtgatccaaaacgaa

SEQ ID NO: 173457 - DNA, 19 bp, Homo sapiens
  siRNA target sequence for FABP1 (NM_001443.1,214-232).
gtgatccaaaacgaattca

SEQ ID NO: 173458 - DNA, 19 bp, Homo sapiens
  siRNA target sequence for FABP1 (NM_001443.1,349-367).
gaactcaacggcgacataa

SEQ ID NO: 173459 - DNA, 19 bp, Homo sapiens
  siRNA target sequence for FABP1 (NM_001443.1,358-376).
ggcgacataatcaccaata

SEQ ID NO: 173460 - DNA, 19 bp, Homo sapiens
  siRNA target sequence for FABP1 (NM_001443.1,361-379).
gacataatcaccaatacca

SEQ ID NO: 173461 - DNA, 19 bp, Homo sapiens
  siRNA target sequence for FABP7 (NM_001446.3,327-345).
gaccaacagtcagaacttt

SEQ ID NO: 173462 - DNA, 19 bp, Homo sapiens
  siRNA target sequence for FABP7 (NM_001446.3,402-420).
gaccaaaccaacggtaatt

SEQ ID NO: 173463 - DNA, 19 bp, Homo sapiens
  siRNA target sequence for FABP7 (NM_001446.3,404-422).
ccaaaccaacggtaattat

SEQ ID NO: 173464 - DNA, 19 bp, Homo sapiens
  siRNA target sequence for FABP7 (NM_001446.3,452-470).
ggactctcagcacattcaa

SEQ ID NO: 173465 - DNA, 19 bp, Homo sapiens
  siRNA target sequence for FABP7 (NM_001446.3,515-533).
ccactgcagatgatagaaa

SEQ ID NO: 173466 - DNA, 19 bp, Homo sapiens
  siRNA target sequence for FABP7 (NM_001446.3,523-541).
gatgatagaaactgtaagt

SEQ ID NO: 173467 - DNA, 19 bp, Homo sapiens
  siRNA target sequence for FABP7 (NM_001446.3,552-570).
cctggatggagacaaactt

SEQ ID NO: 173468 - DNA, 19 bp, Homo sapiens
  siRNA target sequence for FABP7 (NM_001446.3,625-643).
gatggcaaaatggttatga

SEQ ID NO: 173469 - DNA, 19 bp, Homo sapiens
  siRNA target sequence for FABP7 (NM_001446.3,636-654).
ggttatgacccttactttt

SEQ ID NO: 173470 - DNA, 19 bp, Homo sapiens
  siRNA target sequence for FABP7 (NM_001446.3,667-685).
gctgttcgccactatgaga

SEQ ID NO: 173471 - DNA, 19 bp, Homo sapiens
  siRNA target sequence for FABP7 (NM_001446.3,668-686).
ctgttcgccactatgagaa

SEQ ID NO: 173472 - DNA, 19 bp, Homo sapiens
  siRNA target sequence for LBP (NM_004139.2,249-267).
ggccgtgggcgctatgagt

SEQ ID NO: 173473 - DNA, 19 bp, Homo sapiens
  siRNA target sequence for LBP (NM_004139.2,250-268).
gccgtgggcgctatgagtt

SEQ ID NO: 173474 - DNA, 19 bp, Homo sapiens
  siRNA target sequence for LBP (NM_004139.2,382-400).
ggaaggtgcgcaagtcatt

SEQ ID NO: 173475 - DNA, 19 bp, Homo sapiens
  siRNA target sequence for LBP (NM_004139.2,432-450).
gtcaagggcatcagcattt

SEQ ID NO: 173476 - DNA, 19 bp, Homo sapiens
  siRNA target sequence for LBP (NM_004139.2,619-637).
gcaggatttgcgaaatgat

SEQ ID NO: 173477 - DNA, 19 bp, Homo sapiens
  siRNA target sequence for LBP (NM_004139.2,646-664).
cggtgtcctccgatctaca

SEQ ID NO: 173478 - DNA, 19 bp, Homo sapiens
  siRNA target sequence for LBP (NM_004139.2,655-673).
ccgatctacagccttatct

SEQ ID NO: 173479 - DNA, 19 bp, Homo sapiens
  siRNA target sequence for LBP (NM_004139.2,675-693).
caaactctgccagttacaa

SEQ ID NO: 173480 - DNA, 19 bp, Homo sapiens
  siRNA target sequence for LBP (NM_004139.2,687-705).
gttacaacagagattgaca

SEQ ID NO: 173481 - DNA, 19 bp, Homo sapiens
  siRNA target sequence for LBP (NM_004139.2,691-709).
caacagagattgacagttt

SEQ ID NO: 173482 - DNA, 19 bp, Homo sapiens
  siRNA target sequence for LBP (NM_004139.2,704-722).
cagtttcgccgacattgat

SEQ ID NO: 173483 - DNA, 19 bp, Homo sapiens
  siRNA target sequence for LBP (NM_004139.2,711-729).
gccgacattgattatagct

SEQ ID NO: 173484 - DNA, 19 bp, Homo sapiens
  siRNA target sequence for LBP (NM_004139.2,712-730).
ccgacattgattatagctt

SEQ ID NO: 173485 - DNA, 19 bp, Homo sapiens
  siRNA target sequence for LBP (NM_004139.2,773-791).
gtttaagggtgaaatcttt

SEQ ID NO: 173486 - DNA, 19 bp, Homo sapiens
  siRNA target sequence for LBP (NM_004139.2,838-856).
gccttcctgaggaacacaa

SEQ ID NO: 173487 - DNA, 19 bp, Homo sapiens
  siRNA target sequence for LBP (NM_004139.2,869-887).
ctttgccatctcggattat

SEQ ID NO: 173488 - DNA, 19 bp, Homo sapiens
  siRNA target sequence for LBP (NM_004139.2,874-892).
ccatctcggattatgtctt

SEQ ID NO: 173489 - DNA, 19 bp, Homo sapiens
  siRNA target sequence for LBP (NM_004139.2,898-916).
cggccagcctggtttatca

SEQ ID NO: 173490 - DNA, 19 bp, Homo sapiens
  siRNA target sequence for LBP (NM_004139.2,901-919).
ccagcctggtttatcatga

SEQ ID NO: 173491 - DNA, 19 bp, Homo sapiens
  siRNA target sequence for LBP (NM_004139.2,941-959).
catcacagatgacatgata

SEQ ID NO: 173492 - DNA, 19 bp, Homo sapiens
  siRNA target sequence for LBP (NM_004139.2,956-974).
gataccgcctgactctaat

SEQ ID NO: 173493 - DNA, 19 bp, Homo sapiens
  siRNA target sequence for LBP (NM_004139.2,1024-1042).
ggctctaccccaacatgaa

SEQ ID NO: 173494 - DNA, 19 bp, Homo sapiens
  siRNA target sequence for LBP (NM_004139.2,1112-1130).
cccctatatggagatagat

SEQ ID NO: 173495 - DNA, 19 bp, Homo sapiens
  siRNA target sequence for LBP (NM_004139.2,1175-1193).
gctcagtgtggccactaat

SEQ ID NO: 173496 - DNA, 19 bp, Homo sapiens
  siRNA target sequence for LBP (NM_004139.2,1277-1295).
caaagttggactattcaat

SEQ ID NO: 173497 - DNA, 19 bp, Homo sapiens
  siRNA target sequence for LBP (NM_004139.2,1307-1325).
ggaagcgctcctcaactat

SEQ ID NO: 173498 - DNA, 19 bp, Homo sapiens
  siRNA target sequence for LBP (NM_004139.2,1308-1326).
gaagcgctcctcaactatt

SEQ ID NO: 173499 - DNA, 19 bp, Homo sapiens
  siRNA target sequence for LBP (NM_004139.2,1311-1329).
gcgctcctcaactattaca

SEQ ID NO: 173500 - DNA, 19 bp, Homo sapiens
  siRNA target sequence for LBP (NM_004139.2,1312-1330).
cgctcctcaactattacat

SEQ ID NO: 173501 - DNA, 19 bp, Homo sapiens
  siRNA target sequence for LBP (NM_004139.2,1317-1335).
ctcaactattacatcctta

SEQ ID NO: 173502 - DNA, 19 bp, Homo sapiens
  siRNA target sequence for LBP (NM_004139.2,1340-1358).
cttctaccccaagttcaat

SEQ ID NO: 173503 - DNA, 19 bp, Homo sapiens
  siRNA target sequence for LBP (NM_004139.2,1347-1365).
cccaagttcaatgataagt

SEQ ID NO: 173504 - DNA, 19 bp, Homo sapiens
  siRNA target sequence for LBP (NM_004139.2,1452-1470).
ggtgccaatgtccaataca

SEQ ID NO: 173505 - DNA, 19 bp, Homo sapiens
  siRNA target sequence for LBP (NM_004139.2,1453-1471).
gtgccaatgtccaatacat

SEQ ID NO: 173506 - DNA, 19 bp, Homo sapiens
  siRNA target sequence for LIPF (NM_004190.1,89-107).
gactacacatggtttgttt

SEQ ID NO: 173507 - DNA, 19 bp, Homo sapiens
  siRNA target sequence for LIPF (NM_004190.1,124-142).
gaagccctgaagtgactat

SEQ ID NO: 173508 - DNA, 19 bp, Homo sapiens
  siRNA target sequence for LIPF (NM_004190.1,127-145).
gccctgaagtgactatgaa

SEQ ID NO: 173509 - DNA, 19 bp, Homo sapiens
  siRNA target sequence for LIPF (NM_004190.1,132-150).
gaagtgactatgaacatta

SEQ ID NO: 173510 - DNA, 19 bp, Homo sapiens
  siRNA target sequence for LIPF (NM_004190.1,222-240).
gaagtcaatagaattcctt

SEQ ID NO: 173511 - DNA, 19 bp, Homo sapiens
  siRNA target sequence for LIPF (NM_004190.1,303-321).
cttgcatcagccacaaact

SEQ ID NO: 173512 - DNA, 19 bp, Homo sapiens
  siRNA target sequence for LIPF (NM_004190.1,428-446).
gtactattcaccagattca

SEQ ID NO: 173513 - DNA, 19 bp, Homo sapiens
  siRNA target sequence for LIPF (NM_004190.1,431-449).
ctattcaccagattcagtt

SEQ ID NO: 173514 - DNA, 19 bp, Homo sapiens
  siRNA target sequence for LIPF (NM_004190.1,438-456).
ccagattcagttgaattct

SEQ ID NO: 173515 - DNA, 19 bp, Homo sapiens
  siRNA target sequence for LIPF (NM_004190.1,499-517).
ccacaatcgacttcattgt

SEQ ID NO: 173516 - DNA, 19 bp, Homo sapiens
  siRNA target sequence for LIPF (NM_004190.1,604-622).
gcctggctaaaagaatcaa

SEQ ID NO: 173517 - DNA, 19 bp, Homo sapiens
  siRNA target sequence for LIPF (NM_004190.1,645-663).
gttgccactgtgaagtata

SEQ ID NO: 173518 - DNA, 19 bp, Homo sapiens
  siRNA target sequence for LIPF (NM_004190.1,671-689).
ccttataaacaaacttaga

SEQ ID NO: 173519 - DNA, 19 bp, Homo sapiens
  siRNA target sequence for LIPF (NM_004190.1,784-802).
cccgtgagatgctgaatct

SEQ ID NO: 173520 - DNA, 19 bp, Homo sapiens
  siRNA target sequence for LIPF (NM_004190.1,811-829).
gcaatgccttatttataat

SEQ ID NO: 173521 - DNA, 19 bp, Homo sapiens
  siRNA target sequence for LIPF (NM_004190.1,864-882).
cgcttggatgtgtatctat

SEQ ID NO: 173522 - DNA, 19 bp, Homo sapiens
  siRNA target sequence for LIPF (NM_004190.1,866-884).
cttggatgtgtatctatca

SEQ ID NO: 173523 - DNA, 19 bp, Homo sapiens
  siRNA target sequence for LIPF (NM_004190.1,869-887).
ggatgtgtatctatcacat

SEQ ID NO: 173524 - DNA, 19 bp, Homo sapiens
  siRNA target sequence for LIPF (NM_004190.1,870-888).
gatgtgtatctatcacata

SEQ ID NO: 173525 - DNA, 19 bp, Homo sapiens
  siRNA target sequence for LIPF (NM_004190.1,967-985).
ggggaagcccagttcagaa

SEQ ID NO: 173526 - DNA, 19 bp, Homo sapiens
  siRNA target sequence for LIPF (NM_004190.1,1007-1025).
ccaacctccctactacaat

SEQ ID NO: 173527 - DNA, 19 bp, Homo sapiens
  siRNA target sequence for LIPF (NM_004190.1,1079-1097).
ggctgacccccaagatgtt

SEQ ID NO: 173528 - DNA, 19 bp, Homo sapiens
  siRNA target sequence for LIPF (NM_004190.1,1166-1184).
ctttatctgggcaatggat

SEQ ID NO: 173529 - DNA, 19 bp, Homo sapiens
  siRNA target sequence for LIPF (NM_004190.1,1191-1209).
caagaagtttacaatgaca

SEQ ID NO: 173530 - DNA, 19 bp, Homo sapiens
  siRNA target sequence for LIPF (NM_004190.1,1206-1224).
gacattgtttctatgatat

SEQ ID NO: 173531 - DNA, 19 bp, Homo sapiens
  siRNA target sequence for MTP (NM_000253.1,196-214).
cgtactccactgaagttct

SEQ ID NO: 173532 - DNA, 19 bp, Homo sapiens
  siRNA target sequence for MTP (NM_000253.1,202-220).
ccactgaagttcttcttga

SEQ ID NO: 173533 - DNA, 19 bp, Homo sapiens
  siRNA target sequence for MTP (NM_000253.1,216-234).
cttgatcggggcaaaggaa

SEQ ID NO: 173534 - DNA, 19 bp, Homo sapiens
  siRNA target sequence for MTP (NM_000253.1,249-267).
gtgggctaccgcatttcct

SEQ ID NO: 173535 - DNA, 19 bp, Homo sapiens
  siRNA target sequence for MTP (NM_000253.1,272-290).
cgtggatgtggccttacta

SEQ ID NO: 173536 - DNA, 19 bp, Homo sapiens
  siRNA target sequence for MTP (NM_000253.1,273-291).
gtggatgtggccttactat

SEQ ID NO: 173537 - DNA, 19 bp, Homo sapiens
  siRNA target sequence for MTP (NM_000253.1,312-330).
gatgaccagttgatccaaa

SEQ ID NO: 173538 - DNA, 19 bp, Homo sapiens
  siRNA target sequence for MTP (NM_000253.1,334-352).
cgatgaaggatgtaaatgt

SEQ ID NO: 173539 - DNA, 19 bp, Homo sapiens
  siRNA target sequence for MTP (NM_000253.1,451-469).
ctacgctccttcatctaat

SEQ ID NO: 173540 - DNA, 19 bp, Homo sapiens
  siRNA target sequence for MTP (NM_000253.1,454-472).
cgctccttcatctaatcca

SEQ ID NO: 173541 - DNA, 19 bp, Homo sapiens
  siRNA target sequence for MTP (NM_000253.1,455-473).
gctccttcatctaatccat

SEQ ID NO: 173542 - DNA, 19 bp, Homo sapiens
  siRNA target sequence for MTP (NM_000253.1,471-489).
catggaaaggtcaaagagt

SEQ ID NO: 173543 - DNA, 19 bp, Homo sapiens
  siRNA target sequence for MTP (NM_000253.1,480-498).
gtcaaagagttctactcat

SEQ ID NO: 173544 - DNA, 19 bp, Homo sapiens
  siRNA target sequence for MTP (NM_000253.1,488-506).
gttctactcatatcaaaat

SEQ ID NO: 173545 - DNA, 19 bp, Homo sapiens
  siRNA target sequence for MTP (NM_000253.1,577-595).
ccaccaatgaggtagatat

SEQ ID NO: 173546 - DNA, 19 bp, Homo sapiens
  siRNA target sequence for MTP (NM_000253.1,581-599).
caatgaggtagatatctct

SEQ ID NO: 173547 - DNA, 19 bp, Homo sapiens
  siRNA target sequence for MTP (NM_000253.1,614-632).
gacctaccaggctcatcaa

SEQ ID NO: 173548 - DNA, 19 bp, Homo sapiens
  siRNA target sequence for MTP (NM_000253.1,654-672).
gccttggattcatgcaaaa

SEQ ID NO: 173549 - DNA, 19 bp, Homo sapiens
  siRNA target sequence for MTP (NM_000253.1,655-673).
ccttggattcatgcaaaat

SEQ ID NO: 173550 - DNA, 19 bp, Homo sapiens
  siRNA target sequence for MTP (NM_000253.1,675-693).
gcgaggtctggatttacga

SEQ ID NO: 173551 - DNA, 19 bp, Homo sapiens
  siRNA target sequence for MTP (NM_000253.1,685-703).
gatttacgaccccaaatca

SEQ ID NO: 173552 - DNA, 19 bp, Homo sapiens
  siRNA target sequence for MTP (NM_000253.1,705-723).
gtcttgggtgtcagttcaa

SEQ ID NO: 173553 - DNA, 19 bp, Homo sapiens
  siRNA target sequence for MTP (NM_000253.1,707-725).
cttgggtgtcagttcaaaa

SEQ ID NO: 173554 - DNA, 19 bp, Homo sapiens
  siRNA target sequence for MTP (NM_000253.1,710-728).
gggtgtcagttcaaaagct

SEQ ID NO: 173555 - DNA, 19 bp, Homo sapiens
  siRNA target sequence for MTP (NM_000253.1,711-729).
ggtgtcagttcaaaagcta

SEQ ID NO: 173556 - DNA, 19 bp, Homo sapiens
  siRNA target sequence for MTP (NM_000253.1,730-748).
catctgtcaccacctataa

SEQ ID NO: 173557 - DNA, 19 bp, Homo sapiens
  siRNA target sequence for MTP (NM_000253.1,792-810).
cacaattttggactgaatt

SEQ ID NO: 173558 - DNA, 19 bp, Homo sapiens
  siRNA target sequence for MTP (NM_000253.1,820-838).
ccattaaggggaaaatagt

SEQ ID NO: 173559 - DNA, 19 bp, Homo sapiens
  siRNA target sequence for MTP (NM_000253.1,870-888).
gaagcaggcccaagattga

SEQ ID NO: 173560 - DNA, 19 bp, Homo sapiens
  siRNA target sequence for MTP (NM_000253.1,968-986).
ccagagccactgtaaagga

SEQ ID NO: 173561 - DNA, 19 bp, Homo sapiens
  siRNA target sequence for MTP (NM_000253.1,969-987).
cagagccactgtaaaggat

SEQ ID NO: 173562 - DNA, 19 bp, Homo sapiens
  siRNA target sequence for MTP (NM_000253.1,1009-1027).
ggcggtccaccaggaaata

SEQ ID NO: 173563 - DNA, 19 bp, Homo sapiens
  siRNA target sequence for MTP (NM_000253.1,1308-1326).
ctgagagccctcattagta

SEQ ID NO: 173564 - DNA, 19 bp, Homo sapiens
  siRNA target sequence for MTP (NM_000253.1,1312-1330).
gagccctcattagtaagtt

SEQ ID NO: 173565 - DNA, 19 bp, Homo sapiens
  siRNA target sequence for MTP (NM_000253.1,1314-1332).
gccctcattagtaagttca

SEQ ID NO: 173566 - DNA, 19 bp, Homo sapiens
  siRNA target sequence for MTP (NM_000253.1,1315-1333).
ccctcattagtaagttcaa

SEQ ID NO: 173567 - DNA, 19 bp, Homo sapiens
  siRNA target sequence for MTP (NM_000253.1,1324-1342).
gtaagttcaaaggttctat

SEQ ID NO: 173568 - DNA, 19 bp, Homo sapiens
  siRNA target sequence for MTP (NM_000253.1,1328-1346).
gttcaaaggttctattggt

SEQ ID NO: 173569 - DNA, 19 bp, Homo sapiens
  siRNA target sequence for MTP (NM_000253.1,1644-1662).
gtgaagaagaccttaaaca

SEQ ID NO: 173570 - DNA, 19 bp, Homo sapiens
  siRNA target sequence for MTP (NM_000253.1,1670-1688).
ccaccaaaaccgtaaagtt

SEQ ID NO: 173571 - DNA, 19 bp, Homo sapiens
  siRNA target sequence for MTP (NM_000253.1,1673-1691).
ccaaaaccgtaaagttcat

SEQ ID NO: 173572 - DNA, 19 bp, Homo sapiens
  siRNA target sequence for MTP (NM_000253.1,1760-1778).
gaacatcctgctgtctatt

SEQ ID NO: 173573 - DNA, 19 bp, Homo sapiens
  siRNA target sequence for MTP (NM_000253.1,1784-1802).
gcttccccaagaaatgaat

SEQ ID NO: 173574 - DNA, 19 bp, Homo sapiens
  siRNA target sequence for MTP (NM_000253.1,1785-1803).
cttccccaagaaatgaata

SEQ ID NO: 173575 - DNA, 19 bp, Homo sapiens
  siRNA target sequence for MTP (NM_000253.1,1808-1826).
catgctcgccattgttcaa

SEQ ID NO: 173576 - DNA, 19 bp, Homo sapiens
  siRNA target sequence for MTP (NM_000253.1,1866-1884).
cgtcgagttctgaaggaaa

SEQ ID NO: 173577 - DNA, 19 bp, Homo sapiens
  siRNA target sequence for MTP (NM_000253.1,1880-1898).
ggaaatggtcgctcacaat

SEQ ID NO: 173578 - DNA, 19 bp, Homo sapiens
  siRNA target sequence for MTP (NM_000253.1,1881-1899).
gaaatggtcgctcacaatt

SEQ ID NO: 173579 - DNA, 19 bp, Homo sapiens
  siRNA target sequence for MTP (NM_000253.1,1959-1977).
ccccgttcggcatctactt

SEQ ID NO: 173580 - DNA, 19 bp, Homo sapiens
  siRNA target sequence for MTP (NM_000253.1,1960-1978).
cccgttcggcatctactta

SEQ ID NO: 173581 - DNA, 19 bp, Homo sapiens
  siRNA target sequence for MTP (NM_000253.1,1962-1980).
cgttcggcatctacttaca

SEQ ID NO: 173582 - DNA, 19 bp, Homo sapiens
  siRNA target sequence for MTP (NM_000253.1,1997-2015).
ctcgggttctggcattcta

SEQ ID NO: 173583 - DNA, 19 bp, Homo sapiens
  siRNA target sequence for MTP (NM_000253.1,2007-2025).
ggcattctaaggagaagta

SEQ ID NO: 173584 - DNA, 19 bp, Homo sapiens
  siRNA target sequence for MTP (NM_000253.1,2008-2026).
gcattctaaggagaagtaa

SEQ ID NO: 173585 - DNA, 19 bp, Homo sapiens
  siRNA target sequence for MTP (NM_000253.1,2017-2035).
ggagaagtaacctgaacat

SEQ ID NO: 173586 - DNA, 19 bp, Homo sapiens
  siRNA target sequence for MTP (NM_000253.1,2020-2038).
gaagtaacctgaacatctt

SEQ ID NO: 173587 - DNA, 19 bp, Homo sapiens
  siRNA target sequence for MTP (NM_000253.1,2066-2084).
cggtagccaggtggttatt

SEQ ID NO: 173588 - DNA, 19 bp, Homo sapiens
  siRNA target sequence for MTP (NM_000253.1,2068-2086).
gtagccaggtggttattga

SEQ ID NO: 173589 - DNA, 19 bp, Homo sapiens
  siRNA target sequence for MTP (NM_000253.1,2147-2165).
ctcctatgctggtatgtca

SEQ ID NO: 173590 - DNA, 19 bp, Homo sapiens
  siRNA target sequence for MTP (NM_000253.1,2218-2236).
gtgatttgatgtccaaaat

SEQ ID NO: 173591 - DNA, 19 bp, Homo sapiens
  siRNA target sequence for MTP (NM_000253.1,2263-2281).
gtgtggtgaaaggacttat

SEQ ID NO: 173592 - DNA, 19 bp, Homo sapiens
  siRNA target sequence for MTP (NM_000253.1,2275-2293).
gacttattctgctaataga

SEQ ID NO: 173593 - DNA, 19 bp, Homo sapiens
  siRNA target sequence for MTP (NM_000253.1,2312-2330).
gttacaatctggactaaaa

SEQ ID NO: 173594 - DNA, 19 bp, Homo sapiens
  siRNA target sequence for MTP (NM_000253.1,2349-2367).
ggtggtctagctattgata

SEQ ID NO: 173595 - DNA, 19 bp, Homo sapiens
  siRNA target sequence for MTP (NM_000253.1,2350-2368).
gtggtctagctattgatat

SEQ ID NO: 173596 - DNA, 19 bp, Homo sapiens
  siRNA target sequence for MTP (NM_000253.1,2352-2370).
ggtctagctattgatattt

SEQ ID NO: 173597 - DNA, 19 bp, Homo sapiens
  siRNA target sequence for MTP (NM_000253.1,2374-2392).
gtgcaatggagtttagctt

SEQ ID NO: 173598 - DNA, 19 bp, Homo sapiens
  siRNA target sequence for MTP (NM_000253.1,2393-2411).
gtggtatcgtgagtctaaa

SEQ ID NO: 173599 - DNA, 19 bp, Homo sapiens
  siRNA target sequence for MTP (NM_000253.1,2405-2423).
gtctaaaacccgagtgaaa

SEQ ID NO: 173600 - DNA, 19 bp, Homo sapiens
  siRNA target sequence for MTP (NM_000253.1,2407-2425).
ctaaaacccgagtgaaaaa

SEQ ID NO: 173601 - DNA, 19 bp, Homo sapiens
  siRNA target sequence for MTP (NM_000253.1,2458-2476).
cagtggactcctcttttgt

SEQ ID NO: 173602 - DNA, 19 bp, Homo sapiens
  siRNA target sequence for MTP (NM_000253.1,2590-2608).
ctccattcaggcaatttga

SEQ ID NO: 173603 - DNA, 19 bp, Homo sapiens
  siRNA target sequence for MTP (NM_000253.1,2592-2610).
ccattcaggcaatttgaga

SEQ ID NO: 173604 - DNA, 19 bp, Homo sapiens
  siRNA target sequence for MTP (NM_000253.1,2627-2645).
gtccacaggcagaggttat

SEQ ID NO: 173605 - DNA, 19 bp, Homo sapiens
  siRNA target sequence for MTP (NM_000253.1,2640-2658).
ggttatgtctctcagaaaa

SEQ ID NO: 173606 - DNA, 19 bp, Homo sapiens
  siRNA target sequence for MTP (NM_000253.1,2669-2687).
cgtattagcaggatgtgaa

SEQ ID NO: 173607 - DNA, 19 bp, Homo sapiens
  siRNA target sequence for MTP (NM_000253.1,2670-2688).
gtattagcaggatgtgaat

SEQ ID NO: 173608 - DNA, 19 bp, Homo sapiens
  siRNA target sequence for MTP (NM_000253.1,2733-2751).
gcccctcagccggatagta

SEQ ID NO: 173609 - DNA, 19 bp, Homo sapiens
  siRNA target sequence for MTP (NM_000253.1,2735-2753).
ccctcagccggatagtact

SEQ ID NO: 173610 - DNA, 19 bp, Homo sapiens
  siRNA target sequence for MTP (NM_000253.1,2736-2754).
cctcagccggatagtactt

SEQ ID NO: 173611 - DNA, 19 bp, Homo sapiens
  siRNA target sequence for PCTP (NM_021213.1,212-230).
ctctactggcagacatcta

SEQ ID NO: 173612 - DNA, 19 bp, Homo sapiens
  siRNA target sequence for PCTP (NM_021213.1,214-232).
ctactggcagacatctata

SEQ ID NO: 173613 - DNA, 19 bp, Homo sapiens
  siRNA target sequence for PCTP (NM_021213.1,253-271).
caatgggaccagtatgtta

SEQ ID NO: 173614 - DNA, 19 bp, Homo sapiens
  siRNA target sequence for PCTP (NM_021213.1,258-276).
ggaccagtatgttaaagaa

SEQ ID NO: 173615 - DNA, 19 bp, Homo sapiens
  siRNA target sequence for PCTP (NM_021213.1,344-362).
ccaacagagactatgtcta

SEQ ID NO: 173616 - DNA, 19 bp, Homo sapiens
  siRNA target sequence for PCTP (NM_021213.1,460-478).
gtgatccgggtgaagcaat

SEQ ID NO: 173617 - DNA, 19 bp, Homo sapiens
  siRNA target sequence for PCTP (NM_021213.1,565-583).
ccgtcctggctcattaact

SEQ ID NO: 173618 - DNA, 19 bp, Homo sapiens
  siRNA target sequence for PCTP (NM_021213.1,590-608).
ccaagaatggagttcctaa

SEQ ID NO: 173619 - DNA, 19 bp, Homo sapiens
  siRNA target sequence for PCTP (NM_021213.1,598-616).
ggagttcctaacttcttga

SEQ ID NO: 173620 - DNA, 19 bp, Homo sapiens
  siRNA target sequence for PCTP (NM_021213.1,599-617).
gagttcctaacttcttgaa

SEQ ID NO: 173621 - DNA, 19 bp, Homo sapiens
  siRNA target sequence for PCTP (NM_021213.1,604-622).
cctaacttcttgaaagaca

SEQ ID NO: 173622 - DNA, 19 bp, Homo sapiens
  siRNA target sequence for PCTP (NM_021213.1,605-623).
ctaacttcttgaaagacat

SEQ ID NO: 173623 - DNA, 19 bp, Homo sapiens
  siRNA target sequence for PCTP (NM_021213.1,626-644).
caagagcctgtcagaacta

SEQ ID NO: 173624 - DNA, 19 bp, Homo sapiens
  siRNA target sequence for PITPN (NM_006224.2,270-288).
gtctgtagatgagtatcaa

SEQ ID NO: 173625 - DNA, 19 bp, Homo sapiens
  siRNA target sequence for PITPN (NM_006224.2,272-290).
ctgtagatgagtatcaagt

SEQ ID NO: 173626 - DNA, 19 bp, Homo sapiens
  siRNA target sequence for PITPN (NM_006224.2,286-304).
caagtggggcagctgtatt

SEQ ID NO: 173627 - DNA, 19 bp, Homo sapiens
  siRNA target sequence for PITPN (NM_006224.2,429-447).
caaagtacccacgtttgtt

SEQ ID NO: 173628 - DNA, 19 bp, Homo sapiens
  siRNA target sequence for PITPN (NM_006224.2,570-588).
ctggcacaaaccagatctt

SEQ ID NO: 173629 - DNA, 19 bp, Homo sapiens
  siRNA target sequence for PITPN (NM_006224.2,593-611).
cgcaggagaatgtgcataa

SEQ ID NO: 173630 - DNA, 19 bp, Homo sapiens
  siRNA target sequence for PITPN (NM_006224.2,634-652).
cacgtggaagccgtatata

SEQ ID NO: 173631 - DNA, 19 bp, Homo sapiens
  siRNA target sequence for PITPN (NM_006224.2,636-654).
cgtggaagccgtatatata

SEQ ID NO: 173632 - DNA, 19 bp, Homo sapiens
  siRNA target sequence for PITPN (NM_006224.2,640-658).
gaagccgtatatatagaca

SEQ ID NO: 173633 - DNA, 19 bp, Homo sapiens
  siRNA target sequence for PITPN (NM_006224.2,673-691).
caagtgctcagcaaggatt

SEQ ID NO: 173634 - DNA, 19 bp, Homo sapiens
  siRNA target sequence for PITPN (NM_006224.2,676-694).
gtgctcagcaaggattaca

SEQ ID NO: 173635 - DNA, 19 bp, Homo sapiens
  siRNA target sequence for PITPN (NM_006224.2,706-724).
gacccagcaaaatttaaat

SEQ ID NO: 173636 - DNA, 19 bp, Homo sapiens
  siRNA target sequence for PITPN (NM_006224.2,761-779).
ggaagcaagagcttgtaaa

SEQ ID NO: 173637 - DNA, 19 bp, Homo sapiens
  siRNA target sequence for PITPN (NM_006224.2,837-855).
gtggggcctgcagaacaaa

SEQ ID NO: 173638 - DNA, 19 bp, Homo sapiens
  siRNA target sequence for PITPN (NM_006224.2,861-879).
gaacttcatccataagcaa

SEQ ID NO: 173639 - DNA, 19 bp, Homo sapiens
  siRNA target sequence for PITPN (NM_006224.2,876-894).
gcaagagaggcgtctgttt

SEQ ID NO: 173640 - DNA, 19 bp, Homo sapiens
  siRNA target sequence for PITPN (NM_006224.2,877-895).
caagagaggcgtctgttta

SEQ ID NO: 173641 - DNA, 19 bp, Homo sapiens
  siRNA target sequence for PITPN (NM_006224.2,880-898).
gagaggcgtctgtttacaa

SEQ ID NO: 173642 - DNA, 19 bp, Homo sapiens
  siRNA target sequence for PITPNB (NM_012399.2,77-95).
gttctgttcaggagtatca

SEQ ID NO: 173643 - DNA, 19 bp, Homo sapiens
  siRNA target sequence for PITPNB (NM_012399.2,94-112).
caggttgggcagctttact

SEQ ID NO: 173644 - DNA, 19 bp, Homo sapiens
  siRNA target sequence for PITPNB (NM_012399.2,115-133).
gttgcagaagctagtaaga

SEQ ID NO: 173645 - DNA, 19 bp, Homo sapiens
  siRNA target sequence for PITPNB (NM_012399.2,202-220).
ggacagtatacgcacaaaa

SEQ ID NO: 173646 - DNA, 19 bp, Homo sapiens
  siRNA target sequence for PITPNB (NM_012399.2,203-221).
gacagtatacgcacaaaat

SEQ ID NO: 173647 - DNA, 19 bp, Homo sapiens
  siRNA target sequence for PITPNB (NM_012399.2,205-223).
cagtatacgcacaaaattt

SEQ ID NO: 173648 - DNA, 19 bp, Homo sapiens
  siRNA target sequence for PITPNB (NM_012399.2,207-225).
gtatacgcacaaaatttat

SEQ ID NO: 173649 - DNA, 19 bp, Homo sapiens
  siRNA target sequence for PITPNB (NM_012399.2,275-293).
gctccttggtgtttcatga

SEQ ID NO: 173650 - DNA, 19 bp, Homo sapiens
  siRNA target sequence for PITPNB (NM_012399.2,279-297).
cttggtgtttcatgagaaa

SEQ ID NO: 173651 - DNA, 19 bp, Homo sapiens
  siRNA target sequence for PITPNB (NM_012399.2,309-327).
gtacccctactgtagaaca

SEQ ID NO: 173652 - DNA, 19 bp, Homo sapiens
  siRNA target sequence for PITPNB (NM_012399.2,312-330).
cccctactgtagaacaatt

SEQ ID NO: 173653 - DNA, 19 bp, Homo sapiens
  siRNA target sequence for PITPNB (NM_012399.2,470-488).
cagatagaagtcaagttga

SEQ ID NO: 173654 - DNA, 19 bp, Homo sapiens
  siRNA target sequence for PITPNB (NM_012399.2,508-526).
gatgaagacccagcattat

SEQ ID NO: 173655 - DNA, 19 bp, Homo sapiens
  siRNA target sequence for PITPNB (NM_012399.2,708-726).
cttccatcgccagcttttt

SEQ ID NO: 173656 - DNA, 19 bp, Homo sapiens
  siRNA target sequence for PLIN (NM_002666.1,216-234).
gtggcacctgcgaatgctt

SEQ ID NO: 173657 - DNA, 19 bp, Homo sapiens
  siRNA target sequence for PLIN (NM_002666.1,244-262).
ctacaccagcactaaggaa

SEQ ID NO: 173658 - DNA, 19 bp, Homo sapiens
  siRNA target sequence for PLIN (NM_002666.1,284-302).
gtgtgcaatgcctatgaga

SEQ ID NO: 173659 - DNA, 19 bp, Homo sapiens
  siRNA target sequence for PLIN (NM_002666.1,440-458).
cagtacccccctgaaaaga

SEQ ID NO: 173660 - DNA, 19 bp, Homo sapiens
  siRNA target sequence for PLIN (NM_002666.1,442-460).
gtacccccctgaaaagatt

SEQ ID NO: 173661 - DNA, 19 bp, Homo sapiens
  siRNA target sequence for PLIN (NM_002666.1,446-464).
ccccctgaaaagattgctt

SEQ ID NO: 173662 - DNA, 19 bp, Homo sapiens
  siRNA target sequence for PLIN (NM_002666.1,1260-1278).
gggccatgtccctatcaga

SEQ ID NO: 173663 - DNA, 19 bp, Homo sapiens
  siRNA target sequence for PLTP (NM_006227.2,247-265).
gcaaagaaggccacttcta

SEQ ID NO: 173664 - DNA, 19 bp, Homo sapiens
  siRNA target sequence for PLTP (NM_006227.2,307-325).
catcttccgagctcgattt

SEQ ID NO: 173665 - DNA, 19 bp, Homo sapiens
  siRNA target sequence for PLTP (NM_006227.2,310-328).
cttccgagctcgatttcca

SEQ ID NO: 173666 - DNA, 19 bp, Homo sapiens
  siRNA target sequence for PLTP (NM_006227.2,484-502).
ccgctggacggatgaaagt

SEQ ID NO: 173667 - DNA, 19 bp, Homo sapiens
  siRNA target sequence for PLTP (NM_006227.2,711-729).
gagcttgttggcattgact

SEQ ID NO: 173668 - DNA, 19 bp, Homo sapiens
  siRNA target sequence for PLTP (NM_006227.2,713-731).
gcttgttggcattgactat

SEQ ID NO: 173669 - DNA, 19 bp, Homo sapiens
  siRNA target sequence for PLTP (NM_006227.2,986-1004).
gctgagggccacctacttt

SEQ ID NO: 173670 - DNA, 19 bp, Homo sapiens
  siRNA target sequence for PLTP (NM_006227.2,1250-1268).
gcgcaggttccgaatctat

SEQ ID NO: 173671 - DNA, 19 bp, Homo sapiens
  siRNA target sequence for PLTP (NM_006227.2,1251-1269).
cgcaggttccgaatctatt

SEQ ID NO: 173672 - DNA, 19 bp, Homo sapiens
  siRNA target sequence for PLTP (NM_006227.2,1255-1273).
ggttccgaatctattccaa

SEQ ID NO: 173673 - DNA, 19 bp, Homo sapiens
  siRNA target sequence for PLTP (NM_006227.2,1260-1278).
cgaatctattccaaccatt

SEQ ID NO: 173674 - DNA, 19 bp, Homo sapiens
  siRNA target sequence for PLTP (NM_006227.2,1392-1410).
ctacctgagggcatcaact

SEQ ID NO: 173675 - DNA, 19 bp, Homo sapiens
  siRNA target sequence for PLTP (NM_006227.2,1480-1498).
ggctgcgagaggtgattga

SEQ ID NO: 173676 - DNA, 19 bp, Homo sapiens
  siRNA target sequence for PMP2 (NM_002677.2,181-199).
ggggttagccaccagaaaa

SEQ ID NO: 173677 - DNA, 19 bp, Homo sapiens
  siRNA target sequence for PMP2 (NM_002677.2,238-256).
gaaaggagatattataact

SEQ ID NO: 173678 - DNA, 19 bp, Homo sapiens
  siRNA target sequence for PMP2 (NM_002677.2,298-316).
caagctaggccaggaattt

SEQ ID NO: 173679 - DNA, 19 bp, Homo sapiens
  siRNA target sequence for PMP2 (NM_002677.2,369-387).
gaggatcactgaatcaagt

SEQ ID NO: 173680 - DNA, 19 bp, Homo sapiens
  siRNA target sequence for PSAP (NM_002778.1,219-237).
cttccctgcgacatatgca

SEQ ID NO: 173681 - DNA, 19 bp, Homo sapiens
  siRNA target sequence for PSAP (NM_002778.1,250-268).
ccgcagctggtgatatgct

SEQ ID NO: 173682 - DNA, 19 bp, Homo sapiens
  siRNA target sequence for PSAP (NM_002778.1,349-367).
cttcatgcaaggagatagt

SEQ ID NO: 173683 - DNA, 19 bp, Homo sapiens
  siRNA target sequence for PSAP (NM_002778.1,741-759).
cctggcatggccgacatat

SEQ ID NO: 173684 - DNA, 19 bp, Homo sapiens
  siRNA target sequence for PSAP (NM_002778.1,744-762).
ggcatggccgacatatgca

SEQ ID NO: 173685 - DNA, 19 bp, Homo sapiens
  siRNA target sequence for PSAP (NM_002778.1,745-763).
gcatggccgacatatgcaa

SEQ ID NO: 173686 - DNA, 19 bp, Homo sapiens
  siRNA target sequence for PSAP (NM_002778.1,751-769).
ccgacatatgcaagaacta

SEQ ID NO: 173687 - DNA, 19 bp, Homo sapiens
  siRNA target sequence for PSAP (NM_002778.1,752-770).
cgacatatgcaagaactat

SEQ ID NO: 173688 - DNA, 19 bp, Homo sapiens
  siRNA target sequence for PSAP (NM_002778.1,776-794).
ccagtattctgaaattgct

SEQ ID NO: 173689 - DNA, 19 bp, Homo sapiens
  siRNA target sequence for PSAP (NM_002778.1,953-971).
cgaggtcccagcaaagtct

SEQ ID NO: 173690 - DNA, 19 bp, Homo sapiens
  siRNA target sequence for PSAP (NM_002778.1,1053-1071).
ctcgacgcttttgacaaaa

SEQ ID NO: 173691 - DNA, 19 bp, Homo sapiens
  siRNA target sequence for PSAP (NM_002778.1,1296-1314).
gatcgcaacctggagaaaa

SEQ ID NO: 173692 - DNA, 19 bp, Homo sapiens
  siRNA target sequence for PSAP (NM_002778.1,1456-1474).
ccttcgtgtgcttgaaaat

SEQ ID NO: 173693 - DNA, 19 bp, Homo sapiens
  siRNA target sequence for PSAP (NM_002778.1,1460-1478).
cgtgtgcttgaaaattgga

SEQ ID NO: 173694 - DNA, 19 bp, Homo sapiens
  siRNA target sequence for RBP1 (NM_002899.2,258-276).
caggacggtgaccatatga

SEQ ID NO: 173695 - DNA, 19 bp, Homo sapiens
  siRNA target sequence for RBP1 (NM_002899.2,261-279).
gacggtgaccatatgatca

SEQ ID NO: 173696 - DNA, 19 bp, Homo sapiens
  siRNA target sequence for RBP1 (NM_002899.2,282-300).
cgcacgctgagcactttta

SEQ ID NO: 173697 - DNA, 19 bp, Homo sapiens
  siRNA target sequence for RBP1 (NM_002899.2,295-313).
cttttaggaactacatcat

SEQ ID NO: 173698 - DNA, 19 bp, Homo sapiens
  siRNA target sequence for RBP1 (NM_002899.2,498-516).
gtggtctgcaagcaagtat

SEQ ID NO: 173699 - DNA, 19 bp, Homo sapiens
  siRNA target sequence for RBP2 (NM_004164.2,162-180).
cactcagacgaaggttatt

SEQ ID NO: 173700 - DNA, 19 bp, Homo sapiens
  siRNA target sequence for RBP2 (NM_004164.2,164-182).
ctcagacgaaggttattga

SEQ ID NO: 173701 - DNA, 19 bp, Homo sapiens
  siRNA target sequence for RBP2 (NM_004164.2,168-186).
gacgaaggttattgatcaa

SEQ ID NO: 173702 - DNA, 19 bp, Homo sapiens
  siRNA target sequence for RBP2 (NM_004164.2,170-188).
cgaaggttattgatcaaga

SEQ ID NO: 173703 - DNA, 19 bp, Homo sapiens
  siRNA target sequence for RBP2 (NM_004164.2,218-236).
gcacattccgcaactatga

SEQ ID NO: 173704 - DNA, 19 bp, Homo sapiens
  siRNA target sequence for RBP2 (NM_004164.2,219-237).
cacattccgcaactatgat

SEQ ID NO: 173705 - DNA, 19 bp, Homo sapiens
  siRNA target sequence for RBP2 (NM_004164.2,221-239).
cattccgcaactatgatgt

SEQ ID NO: 173706 - DNA, 19 bp, Homo sapiens
  siRNA target sequence for RBP2 (NM_004164.2,231-249).
ctatgatgtggatttcact

SEQ ID NO: 173707 - DNA, 19 bp, Homo sapiens
  siRNA target sequence for RBP2 (NM_004164.2,259-277).
gagtttgacgagtacacaa

SEQ ID NO: 173708 - DNA, 19 bp, Homo sapiens
  siRNA target sequence for RBP2 (NM_004164.2,283-301).
ctggataaccggcatgtta

SEQ ID NO: 173709 - DNA, 19 bp, Homo sapiens
  siRNA target sequence for RBP2 (NM_004164.2,429-447).
gtgccgtcaagtgttcaaa

SEQ ID NO: 173710 - DNA, 19 bp, Homo sapiens
  siRNA target sequence for RBP2 (NM_004164.2,431-449).
gccgtcaagtgttcaaaaa

SEQ ID NO: 173711 - DNA, 19 bp, Homo sapiens
  siRNA target sequence for RBP5 (NM_031491.1,327-345).
gagcgtggacggacgaaaa

SEQ ID NO: 173712 - DNA, 19 bp, Homo sapiens
  siRNA target sequence for RRAGC (NM_022157.2,260-278).
gtggtgtttcataagatgt

SEQ ID NO: 173713 - DNA, 19 bp, Homo sapiens
  siRNA target sequence for RRAGC (NM_022157.2,281-299).
cccaacgagaccctctttt

SEQ ID NO: 173714 - DNA, 19 bp, Homo sapiens
  siRNA target sequence for RRAGC (NM_022157.2,282-300).
ccaacgagaccctcttttt

SEQ ID NO: 173715 - DNA, 19 bp, Homo sapiens
  siRNA target sequence for RRAGC (NM_022157.2,301-319).
ggaaagtaccaacaagatt

SEQ ID NO: 173716 - DNA, 19 bp, Homo sapiens
  siRNA target sequence for RRAGC (NM_022157.2,374-392).
cctgggcaaatggactttt

SEQ ID NO: 173717 - DNA, 19 bp, Homo sapiens
  siRNA target sequence for RRAGC (NM_022157.2,432-450).
caggagcattgatatacgt

SEQ ID NO: 173718 - DNA, 19 bp, Homo sapiens
  siRNA target sequence for RRAGC (NM_022157.2,467-485).
gactacatggaggctttaa

SEQ ID NO: 173719 - DNA, 19 bp, Homo sapiens
  siRNA target sequence for RRAGC (NM_022157.2,491-509).
cttcacattactgtttcta

SEQ ID NO: 173720 - DNA, 19 bp, Homo sapiens
  siRNA target sequence for RRAGC (NM_022157.2,507-525).
ctaaagcctacaaagttaa

SEQ ID NO: 173721 - DNA, 19 bp, Homo sapiens
  siRNA target sequence for RRAGC (NM_022157.2,521-539).
gttaacccagacatgaatt

SEQ ID NO: 173722 - DNA, 19 bp, Homo sapiens
  siRNA target sequence for RRAGC (NM_022157.2,678-696).
gtatctatgaccattcaat

SEQ ID NO: 173723 - DNA, 19 bp, Homo sapiens
  siRNA target sequence for RRAGC (NM_022157.2,711-729).
gtaaggtggtgcagaaact

SEQ ID NO: 173724 - DNA, 19 bp, Homo sapiens
  siRNA target sequence for RRAGC (NM_022157.2,737-755).
caactgccgaccttggaaa

SEQ ID NO: 173725 - DNA, 19 bp, Homo sapiens
  siRNA target sequence for RRAGC (NM_022157.2,748-766).
cttggaaaacctattaaat

SEQ ID NO: 173726 - DNA, 19 bp, Homo sapiens
  siRNA target sequence for RRAGC (NM_022157.2,757-775).
cctattaaatatctttata

SEQ ID NO: 173727 - DNA, 19 bp, Homo sapiens
  siRNA target sequence for RRAGC (NM_022157.2,809-827).
gatgttgtcagcaaaatct

SEQ ID NO: 173728 - DNA, 19 bp, Homo sapiens
  siRNA target sequence for RRAGC (NM_022157.2,812-830).
gttgtcagcaaaatctaca

SEQ ID NO: 173729 - DNA, 19 bp, Homo sapiens
  siRNA target sequence for RRAGC (NM_022157.2,848-866).
cctgtggatatgcaatctt

SEQ ID NO: 173730 - DNA, 19 bp, Homo sapiens
  siRNA target sequence for RRAGC (NM_022157.2,853-871).
ggatatgcaatcttatgaa

SEQ ID NO: 173731 - DNA, 19 bp, Homo sapiens
  siRNA target sequence for RRAGC (NM_022157.2,879-897).
gtgacatgatcgatgttgt

SEQ ID NO: 173732 - DNA, 19 bp, Homo sapiens
  siRNA target sequence for RRAGC (NM_022157.2,883-901).
catgatcgatgttgtaatt

SEQ ID NO: 173733 - DNA, 19 bp, Homo sapiens
  siRNA target sequence for RRAGC (NM_022157.2,886-904).
gatcgatgttgtaattgat

SEQ ID NO: 173734 - DNA, 19 bp, Homo sapiens
  siRNA target sequence for RRAGC (NM_022157.2,939-957).
gtggaagtgcttatgacaa

SEQ ID NO: 173735 - DNA, 19 bp, Homo sapiens
  siRNA target sequence for RRAGC (NM_022157.2,942-960).
gaagtgcttatgacaaaga

SEQ ID NO: 173736 - DNA, 19 bp, Homo sapiens
  siRNA target sequence for RRAGC (NM_022157.2,948-966).
cttatgacaaagaatctat

SEQ ID NO: 173737 - DNA, 19 bp, Homo sapiens
  siRNA target sequence for RRAGC (NM_022157.2,959-977).
gaatctatggcaattatca

SEQ ID NO: 173738 - DNA, 19 bp, Homo sapiens
  siRNA target sequence for RRAGC (NM_022157.2,1027-1045).
ggcactggtctgcattcta

SEQ ID NO: 173739 - DNA, 19 bp, Homo sapiens
  siRNA target sequence for RRAGC (NM_022157.2,1028-1046).
gcactggtctgcattctaa

SEQ ID NO: 173740 - DNA, 19 bp, Homo sapiens
  siRNA target sequence for RRAGC (NM_022157.2,1090-1108).
ccactgtttccgaaaagct

SEQ ID NO: 173741 - DNA, 19 bp, Homo sapiens
  siRNA target sequence for RRAGC (NM_022157.2,1093-1111).
ctgtttccgaaaagctatt

SEQ ID NO: 173742 - DNA, 19 bp, Homo sapiens
  siRNA target sequence for RRAGC (NM_022157.2,1180-1198).
gaaagcgctgacacacaat

SEQ ID NO: 173743 - DNA, 19 bp, Homo sapiens
  siRNA target sequence for SCP2 (NM_002979.2,166-184).
gatgcacagatcccttatt

SEQ ID NO: 173744 - DNA, 19 bp, Homo sapiens
  siRNA target sequence for SCP2 (NM_002979.2,198-216).
ggcatgtgttggctatgtt

SEQ ID NO: 173745 - DNA, 19 bp, Homo sapiens
  siRNA target sequence for SCP2 (NM_002979.2,199-217).
gcatgtgttggctatgttt

SEQ ID NO: 173746 - DNA, 19 bp, Homo sapiens
  siRNA target sequence for SCP2 (NM_002979.2,238-256).
cagagggctatctatcaca

SEQ ID NO: 173747 - DNA, 19 bp, Homo sapiens
  siRNA target sequence for SCP2 (NM_002979.2,242-260).
gggctatctatcacagttt

SEQ ID NO: 173748 - DNA, 19 bp, Homo sapiens
  siRNA target sequence for SCP2 (NM_002979.2,310-328).
ggttctactgctttgttta

SEQ ID NO: 173749 - DNA, 19 bp, Homo sapiens
  siRNA target sequence for SCP2 (NM_002979.2,395-413).
gtaagggaagccttggaat

SEQ ID NO: 173750 - DNA, 19 bp, Homo sapiens
  siRNA target sequence for SCP2 (NM_002979.2,428-446).
gaaccattcccactgataa

SEQ ID NO: 173751 - DNA, 19 bp, Homo sapiens
  siRNA target sequence for SCP2 (NM_002979.2,431-449).
ccattcccactgataagca

SEQ ID NO: 173752 - DNA, 19 bp, Homo sapiens
  siRNA target sequence for SCP2 (NM_002979.2,437-455).
ccactgataagcatgttga

SEQ ID NO: 173753 - DNA, 19 bp, Homo sapiens
  siRNA target sequence for SCP2 (NM_002979.2,451-469).
gttgacctcctgatcaata

SEQ ID NO: 173754 - DNA, 19 bp, Homo sapiens
  siRNA target sequence for SCP2 (NM_002979.2,454-472).
gacctcctgatcaataagt

SEQ ID NO: 173755 - DNA, 19 bp, Homo sapiens
  siRNA target sequence for SCP2 (NM_002979.2,456-474).
cctcctgatcaataagtat

SEQ ID NO: 173756 - DNA, 19 bp, Homo sapiens
  siRNA target sequence for SCP2 (NM_002979.2,460-478).
ctgatcaataagtatggat

SEQ ID NO: 173757 - DNA, 19 bp, Homo sapiens
  siRNA target sequence for SCP2 (NM_002979.2,618-636).
gttccaagatgaatacagt

SEQ ID NO: 173758 - DNA, 19 bp, Homo sapiens
  siRNA target sequence for SCP2 (NM_002979.2,648-666).
gatggcatctaaagaagtt

SEQ ID NO: 173759 - DNA, 19 bp, Homo sapiens
  siRNA target sequence for SCP2 (NM_002979.2,729-747).
ggccagtgaagcatttgta

SEQ ID NO: 173760 - DNA, 19 bp, Homo sapiens
  siRNA target sequence for SCP2 (NM_002979.2,810-828).
gccaagctcgtttgaagaa

SEQ ID NO: 173761 - DNA, 19 bp, Homo sapiens
  siRNA target sequence for SCP2 (NM_002979.2,811-829).
ccaagctcgtttgaagaaa

SEQ ID NO: 173762 - DNA, 19 bp, Homo sapiens
  siRNA target sequence for SCP2 (NM_002979.2,847-865).
gttggctttgatatgagta

SEQ ID NO: 173763 - DNA, 19 bp, Homo sapiens
  siRNA target sequence for SCP2 (NM_002979.2,874-892).
gcaagaaaatgctatgaga

SEQ ID NO: 173764 - DNA, 19 bp, Homo sapiens
  siRNA target sequence for SCP2 (NM_002979.2,898-916).
ggcctgacaccaaatgata

SEQ ID NO: 173765 - DNA, 19 bp, Homo sapiens
  siRNA target sequence for SCP2 (NM_002979.2,931-949).
cttcacgattgcttttcta

SEQ ID NO: 173766 - DNA, 19 bp, Homo sapiens
  siRNA target sequence for SCP2 (NM_002979.2,1000-1018).
ggtgcaacgctggttgata

SEQ ID NO: 173767 - DNA, 19 bp, Homo sapiens
  siRNA target sequence for SCP2 (NM_002979.2,1012-1030).
gttgatagaggagataata

SEQ ID NO: 173768 - DNA, 19 bp, Homo sapiens
  siRNA target sequence for SCP2 (NM_002979.2,1015-1033).
gatagaggagataatacat

SEQ ID NO: 173769 - DNA, 19 bp, Homo sapiens
  siRNA target sequence for SCP2 (NM_002979.2,1037-1055).
gaggaaagtgggtcataaa

SEQ ID NO: 173770 - DNA, 19 bp, Homo sapiens
  siRNA target sequence for SCP2 (NM_002979.2,1057-1075).
cctagtggtggactgattt

SEQ ID NO: 173771 - DNA, 19 bp, Homo sapiens
  siRNA target sequence for SCP2 (NM_002979.2,1216-1234).
gttgtaacactctacaaga

SEQ ID NO: 173772 - DNA, 19 bp, Homo sapiens
  siRNA target sequence for SCP2 (NM_002979.2,1244-1262).
cggaagccgccagttcttt

SEQ ID NO: 173773 - DNA, 19 bp, Homo sapiens
  siRNA target sequence for SCP2 (NM_002979.2,1251-1269).
cgccagttcttttagaact

SEQ ID NO: 173774 - DNA, 19 bp, Homo sapiens
  siRNA target sequence for SCP2 (NM_002979.2,1295-1313).
gctctgcaagtgatggatt

SEQ ID NO: 173775 - DNA, 19 bp, Homo sapiens
  siRNA target sequence for SCP2 (NM_002979.2,1310-1328).
gatttaaggcaaatcttgt

SEQ ID NO: 173776 - DNA, 19 bp, Homo sapiens
  siRNA target sequence for SCP2 (NM_002979.2,1474-1492).
gtgcttcctaactcagata

SEQ ID NO: 173777 - DNA, 19 bp, Homo sapiens
  siRNA target sequence for SCP2 (NM_002979.2,1497-1515).
ggctgactgcacaatcaca

SEQ ID NO: 173778 - DNA, 19 bp, Homo sapiens
  siRNA target sequence for SCP2 (NM_002979.2,1498-1516).
gctgactgcacaatcacaa

SEQ ID NO: 173779 - DNA, 19 bp, Homo sapiens
  siRNA target sequence for SCP2 (NM_002979.2,1499-1517).
ctgactgcacaatcacaat

SEQ ID NO: 173780 - DNA, 19 bp, Homo sapiens
  siRNA target sequence for SCP2 (NM_002979.2,1608-1626).
gggtctcgctatgaagtta

SEQ ID NO: 173781 - DNA, 19 bp, Homo sapiens
  siRNA target sequence for SCP2 (NM_002979.2,1610-1628).
gtctcgctatgaagttaca

SEQ ID NO: 173782 - DNA, 19 bp, Homo sapiens
  siRNA target sequence for SCP2 (NM_002979.2,1612-1630).
ctcgctatgaagttacaaa

SEQ ID NO: 173783 - DNA, 19 bp, Homo sapiens
  siRNA target sequence for SCP2 (NM_002979.2,1614-1632).
cgctatgaagttacaaaat

SEQ ID NO: 173784 - DNA, 19 bp, Homo sapiens
  siRNA target sequence for SCP2 (NM_002979.2,1616-1634).
ctatgaagttacaaaatct

SEQ ID NO: 173785 - DNA, 19 bp, Homo sapiens
  siRNA target sequence for SEC14L3 (NM_174975.2,61-79).
ccaagttccgagaaaacgt

SEQ ID NO: 173786 - DNA, 19 bp, Homo sapiens
  siRNA target sequence for SEC14L3 (NM_174975.2,101-119).
gcccaaccctgatgattat

SEQ ID NO: 173787 - DNA, 19 bp, Homo sapiens
  siRNA target sequence for SEC14L3 (NM_174975.2,138-156).
cgagctcggaattttgact

SEQ ID NO: 173788 - DNA, 19 bp, Homo sapiens
  siRNA target sequence for SEC14L3 (NM_174975.2,139-157).
gagctcggaattttgactt

SEQ ID NO: 173789 - DNA, 19 bp, Homo sapiens
  siRNA target sequence for SEC14L3 (NM_174975.2,171-189).
gctttgctccgcaagtaca

SEQ ID NO: 173790 - DNA, 19 bp, Homo sapiens
  siRNA target sequence for SEC14L3 (NM_174975.2,172-190).
ctttgctccgcaagtacat

SEQ ID NO: 173791 - DNA, 19 bp, Homo sapiens
  siRNA target sequence for SEC14L3 (NM_174975.2,197-215).
ccggaagaccatggatatt

SEQ ID NO: 173792 - DNA, 19 bp, Homo sapiens
  siRNA target sequence for SEC14L3 (NM_174975.2,199-217).
ggaagaccatggatattga

SEQ ID NO: 173793 - DNA, 19 bp, Homo sapiens
  siRNA target sequence for SEC14L3 (NM_174975.2,205-223).
ccatggatattgaccatat

SEQ ID NO: 173794 - DNA, 19 bp, Homo sapiens
  siRNA target sequence for SEC14L3 (NM_174975.2,298-316).
gccccgtgtggtatgacat

SEQ ID NO: 173795 - DNA, 19 bp, Homo sapiens
  siRNA target sequence for SEC14L3 (NM_174975.2,450-468).
gagaccatcgtgatgatat

SEQ ID NO: 173796 - DNA, 19 bp, Homo sapiens
  siRNA target sequence for SEC14L3 (NM_174975.2,452-470).
gaccatcgtgatgatattt

SEQ ID NO: 173797 - DNA, 19 bp, Homo sapiens
  siRNA target sequence for SEC14L3 (NM_174975.2,454-472).
ccatcgtgatgatatttga

SEQ ID NO: 173798 - DNA, 19 bp, Homo sapiens
  siRNA target sequence for SEC14L3 (NM_174975.2,537-555).
ggcctccttgaagagaatt

SEQ ID NO: 173799 - DNA, 19 bp, Homo sapiens
  siRNA target sequence for SEC14L3 (NM_174975.2,538-556).
gcctccttgaagagaatta

SEQ ID NO: 173800 - DNA, 19 bp, Homo sapiens
  siRNA target sequence for SEC14L3 (NM_174975.2,581-599).
catcgtgaaagctaccaaa

SEQ ID NO: 173801 - DNA, 19 bp, Homo sapiens
  siRNA target sequence for SEC14L3 (NM_174975.2,644-662).
ggacactcgcaggaaaatt

SEQ ID NO: 173802 - DNA, 19 bp, Homo sapiens
  siRNA target sequence for SEC14L3 (NM_174975.2,645-663).
gacactcgcaggaaaatta

SEQ ID NO: 173803 - DNA, 19 bp, Homo sapiens
  siRNA target sequence for SEC14L3 (NM_174975.2,651-669).
cgcaggaaaattattgtgt

SEQ ID NO: 173804 - DNA, 19 bp, Homo sapiens
  siRNA target sequence for SEC14L3 (NM_174975.2,759-777).
gggaaccccaaatgtttaa

SEQ ID NO: 173805 - DNA, 19 bp, Homo sapiens
  siRNA target sequence for SEC14L3 (NM_174975.2,874-892).
catcacaccaagtggaata

SEQ ID NO: 173806 - DNA, 19 bp, Homo sapiens
  siRNA target sequence for SEC14L3 (NM_174975.2,877-895).
cacaccaagtggaatacga

SEQ ID NO: 173807 - DNA, 19 bp, Homo sapiens
  siRNA target sequence for SEC14L3 (NM_174975.2,885-903).
gtggaatacgagatcctat

SEQ ID NO: 173808 - DNA, 19 bp, Homo sapiens
  siRNA target sequence for SEC14L3 (NM_174975.2,1106-1124).
cgacaacacctatagcttt

SEQ ID NO: 173809 - DNA, 19 bp, Homo sapiens
  siRNA target sequence for SEC14L4 (NM_174977.2,427-445).
gcctccaagcaggatatga

SEQ ID NO: 173810 - DNA, 19 bp, Homo sapiens
  siRNA target sequence for SEC14L4 (NM_174977.2,428-446).
cctccaagcaggatatgat

SEQ ID NO: 173811 - DNA, 19 bp, Homo sapiens
  siRNA target sequence for SEC14L4 (NM_174977.2,448-466).
cggaagcgcatcaaagtct

SEQ ID NO: 173812 - DNA, 19 bp, Homo sapiens
  siRNA target sequence for SEC14L4 (NM_174977.2,530-548).
cgctgatggtgtttgacat

SEQ ID NO: 173813 - DNA, 19 bp, Homo sapiens
  siRNA target sequence for SEC14L4 (NM_174977.2,634-652).
gagaccctgaagaatttaa

SEQ ID NO: 173814 - DNA, 19 bp, Homo sapiens
  siRNA target sequence for SEC14L4 (NM_174977.2,645-663).
gaatttaattgttattcga

SEQ ID NO: 173815 - DNA, 19 bp, Homo sapiens
  siRNA target sequence for STAR (NM_000349.1,170-188).
gacacatgcgcaacatgaa

SEQ ID NO: 173816 - DNA, 19 bp, Homo sapiens
  siRNA target sequence for STAR (NM_000349.1,257-275).
cccctagcacgtggattaa

SEQ ID NO: 173817 - DNA, 19 bp, Homo sapiens
  siRNA target sequence for STAR (NM_000349.1,260-278).
ctagcacgtggattaacca

SEQ ID NO: 173818 - DNA, 19 bp, Homo sapiens
  siRNA target sequence for STAR (NM_000349.1,383-401).
ccttgggcatccttagcaa

SEQ ID NO: 173819 - DNA, 19 bp, Homo sapiens
  siRNA target sequence for STAR (NM_000349.1,439-457).
ggggacaaagtgatgagta

SEQ ID NO: 173820 - DNA, 19 bp, Homo sapiens
  siRNA target sequence for STAR (NM_000349.1,440-458).
gggacaaagtgatgagtaa

SEQ ID NO: 173821 - DNA, 19 bp, Homo sapiens
  siRNA target sequence for STAR (NM_000349.1,597-615).
gcagaagatcggaaaagat

SEQ ID NO: 173822 - DNA, 19 bp, Homo sapiens
  siRNA target sequence for STAR (NM_000349.1,606-624).
cggaaaagatacattcatt

SEQ ID NO: 173823 - DNA, 19 bp, Homo sapiens
  siRNA target sequence for STARD3 (NM_006804.2,377-395).
gagatcatccagtacaact

SEQ ID NO: 173824 - DNA, 19 bp, Homo sapiens
  siRNA target sequence for STARD3 (NM_006804.2,386-404).
cagtacaactttaaaactt

SEQ ID NO: 173825 - DNA, 19 bp, Homo sapiens
  siRNA target sequence for STARD3 (NM_006804.2,405-423).
ccttcttcgacatctttgt

SEQ ID NO: 173826 - DNA, 19 bp, Homo sapiens
  siRNA target sequence for STARD3 (NM_006804.2,519-537).
gtgcattcctcattgtcaa

SEQ ID NO: 173827 - DNA, 19 bp, Homo sapiens
  siRNA target sequence for STARD3 (NM_006804.2,733-751).
cgagggacagttctattca

SEQ ID NO: 173828 - DNA, 19 bp, Homo sapiens
  siRNA target sequence for STARD3 (NM_006804.2,931-949).
caccgtgtacaccattgaa

SEQ ID NO: 173829 - DNA, 19 bp, Homo sapiens
  siRNA target sequence for STARD3 (NM_006804.2,933-951).
ccgtgtacaccattgaagt

SEQ ID NO: 173830 - DNA, 19 bp, Homo sapiens
  siRNA target sequence for STARD3 (NM_006804.2,934-952).
cgtgtacaccattgaagtt

SEQ ID NO: 173831 - DNA, 19 bp, Homo sapiens
  siRNA target sequence for STARD3 (NM_006804.2,1155-1173).
caagggacttcgtgaatgt

SEQ ID NO: 173832 - DNA, 19 bp, Homo sapiens
  siRNA target sequence for STARD3 (NM_006804.2,1190-1208).
cgcagggaccgatacttgt

SEQ ID NO: 173833 - DNA, 19 bp, Homo sapiens
  siRNA target sequence for STARD3 (NM_006804.2,1316-1334).
cgtgtttgcacctttgtct

SEQ ID NO: 173834 - DNA, 19 bp, Homo sapiens
  siRNA target sequence for STARD3 (NM_006804.2,1327-1345).
ctttgtctggattcttaat

SEQ ID NO: 173835 - DNA, 19 bp, Homo sapiens
  siRNA target sequence for STARD3 (NM_006804.2,1396-1414).
ggccaccatgtttgaattt

SEQ ID NO: 173836 - DNA, 19 bp, Homo sapiens
  siRNA target sequence for STARD4 (NM_139164.1,138-156).
catccagtaccatagcatt

SEQ ID NO: 173837 - DNA, 19 bp, Homo sapiens
  siRNA target sequence for STARD4 (NM_139164.1,172-190).
cgagttgctaagaaaacga

SEQ ID NO: 173838 - DNA, 19 bp, Homo sapiens
  siRNA target sequence for STARD4 (NM_139164.1,183-201).
gaaaacgaaagatgtaact

SEQ ID NO: 173839 - DNA, 19 bp, Homo sapiens
  siRNA target sequence for STARD4 (NM_139164.1,216-234).
ctcagaagaatttaatgga

SEQ ID NO: 173840 - DNA, 19 bp, Homo sapiens
  siRNA target sequence for STARD4 (NM_139164.1,218-236).
cagaagaatttaatggata

SEQ ID NO: 173841 - DNA, 19 bp, Homo sapiens
  siRNA target sequence for STARD4 (NM_139164.1,265-283).
gaccttgtctatagtataa

SEQ ID NO: 173842 - DNA, 19 bp, Homo sapiens
  siRNA target sequence for STARD4 (NM_139164.1,301-319).
gggccttgtcgtttggatt

SEQ ID NO: 173843 - DNA, 19 bp, Homo sapiens
  siRNA target sequence for STARD4 (NM_139164.1,397-415).
ggtcagctttggaatataa

SEQ ID NO: 173844 - DNA, 19 bp, Homo sapiens
  siRNA target sequence for STARD4 (NM_139164.1,398-416).
gtcagctttggaatataat

SEQ ID NO: 173845 - DNA, 19 bp, Homo sapiens
  siRNA target sequence for STARD4 (NM_139164.1,421-439).
ccaagagaatttgttgatt

SEQ ID NO: 173846 - DNA, 19 bp, Homo sapiens
  siRNA target sequence for STARD4 (NM_139164.1,468-486).
gcttttatcttgtggaata

SEQ ID NO: 173847 - DNA, 19 bp, Homo sapiens
  siRNA target sequence for STARD4 (NM_139164.1,548-566).
ggttttgtgttccacttaa

SEQ ID NO: 173848 - DNA, 19 bp, Homo sapiens
  siRNA target sequence for STARD4 (NM_139164.1,628-646).
cctcagtctgcggtagata

SEQ ID NO: 173849 - DNA, 19 bp, Homo sapiens
  siRNA target sequence for STARD4 (NM_139164.1,649-667).
gccatggcaagcactttaa

SEQ ID NO: 173850 - DNA, 19 bp, Homo sapiens
  siRNA target sequence for STARD4 (NM_139164.1,659-677).
gcactttaaccaacttcta

SEQ ID NO: 173851 - DNA, 19 bp, Homo sapiens
  siRNA target sequence for STARD4 (NM_139164.1,668-686).
ccaacttctatggtgattt

SEQ ID NO: 173852 - DNA, 19 bp, Homo sapiens
  siRNA target sequence for STARD4 (NM_139164.1,669-687).
caacttctatggtgattta

SEQ ID NO: 173853 - DNA, 19 bp, Homo sapiens
  siRNA target sequence for STARD4 (NM_139164.1,672-690).
cttctatggtgatttacga

SEQ ID NO: 173854 - DNA, 19 bp, Homo sapiens
  siRNA target sequence for STARD4 (NM_139164.1,675-693).
ctatggtgatttacgaaaa

SEQ ID NO: 173855 - DNA, 19 bp, Homo sapiens
  siRNA target sequence for STARD5 (NM_030574.2,188-206).
cgaggagaaggcattgtat

SEQ ID NO: 173856 - DNA, 19 bp, Homo sapiens
  siRNA target sequence for STARD5 (NM_181900.2,177-195).
ggaaggcaatggagtttca

SEQ ID NO: 173857 - DNA, 19 bp, Homo sapiens
  siRNA target sequence for STARD5 (NM_181900.2,335-353).
ccggttttgaaattatcca

SEQ ID NO: 173858 - DNA, 19 bp, Homo sapiens
  siRNA target sequence for STARD5 (NM_181900.2,441-459).
ggtgctagtcaagagatat

SEQ ID NO: 173859 - DNA, 19 bp, Homo sapiens
  siRNA target sequence for STARD5 (NM_181900.2,514-532).
ccgaagccaggttttgtga

SEQ ID NO: 173860 - DNA, 19 bp, Homo sapiens
  siRNA target sequence for STARD5 (NM_181900.2,523-541).
ggttttgtgagaggattta

SEQ ID NO: 173861 - DNA, 19 bp, Homo sapiens
  siRNA target sequence for STARD5 (NM_181900.2,524-542).
gttttgtgagaggatttaa

SEQ ID NO: 173862 - DNA, 19 bp, Homo sapiens
  siRNA target sequence for STARD5 (NM_181900.2,593-611).
ccaacctggtcacattctt

SEQ ID NO: 173863 - DNA, 19 bp, Homo sapiens
  siRNA target sequence for STARD5 (NM_181900.2,598-616).
ctggtcacattcttccata

SEQ ID NO: 173864 - DNA, 19 bp, Homo sapiens
  siRNA target sequence for STARD6 (NM_139171.1,114-132).
ggcttctagaaaattccat

SEQ ID NO: 173865 - DNA, 19 bp, Homo sapiens
  siRNA target sequence for STARD6 (NM_139171.1,129-147).
ccatggaaatctatatcgt

SEQ ID NO: 173866 - DNA, 19 bp, Homo sapiens
  siRNA target sequence for STARD6 (NM_139171.1,166-184).
gaatcaccagctaaactat

SEQ ID NO: 173867 - DNA, 19 bp, Homo sapiens
  siRNA target sequence for STARD6 (NM_139171.1,173-191).
cagctaaactatctgattt

SEQ ID NO: 173868 - DNA, 19 bp, Homo sapiens
  siRNA target sequence for STARD6 (NM_139171.1,176-194).
ctaaactatctgatttcct

SEQ ID NO: 173869 - DNA, 19 bp, Homo sapiens
  siRNA target sequence for STARD6 (NM_139171.1,257-275).
ggattgattcggacacatt

SEQ ID NO: 173870 - DNA, 19 bp, Homo sapiens
  siRNA target sequence for STARD6 (NM_139171.1,262-280).
gattcggacacattcatat

SEQ ID NO: 173871 - DNA, 19 bp, Homo sapiens
  siRNA target sequence for STARD6 (NM_139171.1,268-286).
gacacattcatatgtcata

SEQ ID NO: 173872 - DNA, 19 bp, Homo sapiens
  siRNA target sequence for STARD6 (NM_139171.1,272-290).
cattcatatgtcataccat

SEQ ID NO: 173873 - DNA, 19 bp, Homo sapiens
  siRNA target sequence for STARD6 (NM_139171.1,276-294).
catatgtcataccattaca

SEQ ID NO: 173874 - DNA, 19 bp, Homo sapiens
  siRNA target sequence for STARD6 (NM_139171.1,315-333).
catttcccctcgagacttt

SEQ ID NO: 173875 - DNA, 19 bp, Homo sapiens
  siRNA target sequence for STARD6 (NM_139171.1,320-338).
cccctcgagactttatcga

SEQ ID NO: 173876 - DNA, 19 bp, Homo sapiens
  siRNA target sequence for STARD6 (NM_139171.1,328-346).
gactttatcgacttagtgt

SEQ ID NO: 173877 - DNA, 19 bp, Homo sapiens
  siRNA target sequence for STARD6 (NM_139171.1,351-369).
caagcgctacgaaggaaat

SEQ ID NO: 173878 - DNA, 19 bp, Homo sapiens
  siRNA target sequence for STARD6 (NM_139171.1,355-373).
cgctacgaaggaaatatga

SEQ ID NO: 173879 - DNA, 19 bp, Homo sapiens
  siRNA target sequence for STARD6 (NM_139171.1,356-374).
gctacgaaggaaatatgaa

SEQ ID NO: 173880 - DNA, 19 bp, Homo sapiens
  siRNA target sequence for STARD6 (NM_139171.1,364-382).
ggaaatatgaacattatca

SEQ ID NO: 173881 - DNA, 19 bp, Homo sapiens
  siRNA target sequence for STARD6 (NM_139171.1,372-390).
gaacattatcagttctaaa

SEQ ID NO: 173882 - DNA, 19 bp, Homo sapiens
  siRNA target sequence for STARD6 (NM_139171.1,483-501).
cccagcatattccaaacta

SEQ ID NO: 173883 - DNA, 19 bp, Homo sapiens
  siRNA target sequence for STARD6 (NM_139171.1,494-512).
ccaaactagtgatgtttgt

SEQ ID NO: 173884 - DNA, 19 bp, Homo sapiens
  siRNA target sequence for STARD6 (NM_139171.1,530-548).
gaaaattgtccccatcaat

SEQ ID NO: 173885 - DNA, 19 bp, Homo sapiens
  siRNA target sequence for STARD6 (NM_139171.1,537-555).
gtccccatcaataattgaa

SEQ ID NO: 173886 - DNA, 19 bp, Homo sapiens
  siRNA target sequence for STARD6 (NM_139171.1,539-557).
ccccatcaataattgaaaa

SEQ ID NO: 173887 - DNA, 19 bp, Homo sapiens
  siRNA target sequence for STARD6 (NM_139171.1,540-558).
cccatcaataattgaaaaa

SEQ ID NO: 173888 - DNA, 19 bp, Homo sapiens
  siRNA target sequence for STARD6 (NM_139171.1,545-563).
caataattgaaaaaaccat

SEQ ID NO: 173889 - DNA, 19 bp, Homo sapiens
  siRNA target sequence for STARD6 (NM_139171.1,565-583).
ccttccaacttagtaaact

SEQ ID NO: 173890 - DNA, 19 bp, Homo sapiens
  siRNA target sequence for STARD6 (NM_139171.1,626-644).
catcaagacgtggatttca

SEQ ID NO: 173891 - DNA, 19 bp, Homo sapiens
  siRNA target sequence for CD209 (NM_021155.2,86-104).
gacagactcgaggatacaa

SEQ ID NO: 173892 - DNA, 19 bp, Homo sapiens
  siRNA target sequence for CD209 (NM_021155.2,88-106).
cagactcgaggatacaaga

SEQ ID NO: 173893 - DNA, 19 bp, Homo sapiens
  siRNA target sequence for CD209 (NM_021155.2,1022-1040).
gcttcaagcagtattggaa

SEQ ID NO: 173894 - DNA, 19 bp, Homo sapiens
  siRNA target sequence for CD209 (NM_021155.2,1096-1114).
ggctggaacgacgacaaat

SEQ ID NO: 173895 - DNA, 19 bp, Homo sapiens
  siRNA target sequence for CD209 (NM_021155.2,1098-1116).
ctggaacgacgacaaatgt

SEQ ID NO: 173896 - DNA, 19 bp, Homo sapiens
  siRNA target sequence for CD209 (NM_021155.2,1100-1118).
ggaacgacgacaaatgtaa

SEQ ID NO: 173897 - DNA, 19 bp, Homo sapiens
  siRNA target sequence for CD209 (NM_021155.2,1101-1119).
gaacgacgacaaatgtaat

SEQ ID NO: 173898 - DNA, 19 bp, Homo sapiens
  siRNA target sequence for CD209 (NM_021155.2,1104-1122).
cgacgacaaatgtaatctt

SEQ ID NO: 173899 - DNA, 19 bp, Homo sapiens
  siRNA target sequence for CD209 (NM_021155.2,1160-1178).
gctccagggatgaagaaca

SEQ ID NO: 173900 - DNA, 19 bp, Homo sapiens
  siRNA target sequence for CD209 (NM_021155.2,1166-1184).
gggatgaagaacagtttct

SEQ ID NO: 173901 - DNA, 19 bp, Homo sapiens
  siRNA target sequence for LMAN2L (NM_030805.1,102-120).
ggatgttactccttcttct

SEQ ID NO: 173902 - DNA, 19 bp, Homo sapiens
  siRNA target sequence for LMAN2L (NM_030805.1,103-121).
gatgttactccttcttctt

SEQ ID NO: 173903 - DNA, 19 bp, Homo sapiens
  siRNA target sequence for LMAN2L (NM_030805.1,162-180).
gtcaaacgttcgagtactt

SEQ ID NO: 173904 - DNA, 19 bp, Homo sapiens
  siRNA target sequence for LMAN2L (NM_030805.1,164-182).
caaacgttcgagtacttga

SEQ ID NO: 173905 - DNA, 19 bp, Homo sapiens
  siRNA target sequence for LMAN2L (NM_030805.1,324-342).
ggaaccgggtgccatgttt

SEQ ID NO: 173906 - DNA, 19 bp, Homo sapiens
  siRNA target sequence for LMAN2L (NM_030805.1,364-382).
ggtgcacttcaaaatccat

SEQ ID NO: 173907 - DNA, 19 bp, Homo sapiens
  siRNA target sequence for LMAN2L (NM_030805.1,536-554).
cgggtattcccctacatct

SEQ ID NO: 173908 - DNA, 19 bp, Homo sapiens
  siRNA target sequence for LMAN2L (NM_030805.1,571-589).
cggctccctcagctatgat

SEQ ID NO: 173909 - DNA, 19 bp, Homo sapiens
  siRNA target sequence for LMAN2L (NM_030805.1,634-652).
cattgtccgcaatcttcat

SEQ ID NO: 173910 - DNA, 19 bp, Homo sapiens
  siRNA target sequence for LMAN2L (NM_030805.1,687-705).
ggcatttgacgataatgat

SEQ ID NO: 173911 - DNA, 19 bp, Homo sapiens
  siRNA target sequence for LMAN2L (NM_030805.1,696-714).
cgataatgatggatattga

SEQ ID NO: 173912 - DNA, 19 bp, Homo sapiens
  siRNA target sequence for LMAN2L (NM_030805.1,729-747).
ggagggactgcattgaagt

SEQ ID NO: 173913 - DNA, 19 bp, Homo sapiens
  siRNA target sequence for LMAN2L (NM_030805.1,801-819).
gggatctctcagataatca

SEQ ID NO: 173914 - DNA, 19 bp, Homo sapiens
  siRNA target sequence for LMAN2L (NM_030805.1,802-820).
ggatctctcagataatcat

SEQ ID NO: 173915 - DNA, 19 bp, Homo sapiens
  siRNA target sequence for LMAN2L (NM_030805.1,902-920).
ccctcagtggacaatatga

SEQ ID NO: 173916 - DNA, 19 bp, Homo sapiens
  siRNA target sequence for LMAN2L (NM_030805.1,903-921).
cctcagtggacaatatgaa

SEQ ID NO: 173917 - DNA, 19 bp, Homo sapiens
  siRNA target sequence for LMAN2L (NM_030805.1,1002-1020).
ctgtatttgccatagtcat

SEQ ID NO: 173918 - DNA, 19 bp, Homo sapiens
  siRNA target sequence for LMAN2L (NM_030805.1,1012-1030).
catagtcattggtatcata

SEQ ID NO: 173919 - DNA, 19 bp, Homo sapiens
  siRNA target sequence for LMAN2L (NM_030805.1,1022-1040).
ggtatcatactctacaaca

SEQ ID NO: 173920 - DNA, 19 bp, Homo sapiens
  siRNA target sequence for LMAN2L (NM_030805.1,1023-1041).
gtatcatactctacaacaa

SEQ ID NO: 173921 - DNA, 19 bp, Homo sapiens
  siRNA target sequence for MBL2 (NM_000242.1,111-129).
gcagcgtcttactcagaaa

SEQ ID NO: 173922 - DNA, 19 bp, Homo sapiens
  siRNA target sequence for MBL2 (NM_000242.1,417-435).
gaaatggcacgtatcaaaa

SEQ ID NO: 173923 - DNA, 19 bp, Homo sapiens
  siRNA target sequence for MBL2 (NM_000242.1,704-722).
caacaatgctggttctgat

SEQ ID NO: 173924 - DNA, 19 bp, Homo sapiens
  siRNA target sequence for AGC1 (NM_013227.1,6644-6662).
gcgagcactgtaacataga

SEQ ID NO: 173925 - DNA, 19 bp, Homo sapiens
  siRNA target sequence for AGC1 (NM_013227.1,7104-7122).
ggaccggtatgagatcaat

SEQ ID NO: 173926 - DNA, 19 bp, Homo sapiens
  siRNA target sequence for AGC1 (NM_013227.1,7105-7123).
gaccggtatgagatcaatt

SEQ ID NO: 173927 - DNA, 19 bp, Homo sapiens
  siRNA target sequence for APCS (NM_001639.2,177-195).
gtttgtatttcctagagaa

SEQ ID NO: 173928 - DNA, 19 bp, Homo sapiens
  siRNA target sequence for APCS (NM_001639.2,197-215).
ctgttactgatcatgtaaa

SEQ ID NO: 173929 - DNA, 19 bp, Homo sapiens
  siRNA target sequence for APCS (NM_001639.2,199-217).
gttactgatcatgtaaact

SEQ ID NO: 173930 - DNA, 19 bp, Homo sapiens
  siRNA target sequence for APCS (NM_001639.2,205-223).
gatcatgtaaacttgatca

SEQ ID NO: 173931 - DNA, 19 bp, Homo sapiens
  siRNA target sequence for APCS (NM_001639.2,238-256).
cctctacagaactttacct

SEQ ID NO: 173932 - DNA, 19 bp, Homo sapiens
  siRNA target sequence for APCS (NM_001639.2,239-257).
ctctacagaactttacctt

SEQ ID NO: 173933 - DNA, 19 bp, Homo sapiens
  siRNA target sequence for APCS (NM_001639.2,258-276).
gtgttttcgagcctatagt

SEQ ID NO: 173934 - DNA, 19 bp, Homo sapiens
  siRNA target sequence for APCS (NM_001639.2,260-278).
gttttcgagcctatagtga

SEQ ID NO: 173935 - DNA, 19 bp, Homo sapiens
  siRNA target sequence for APCS (NM_001639.2,314-332).
cccaaggcagggataatga

SEQ ID NO: 173936 - DNA, 19 bp, Homo sapiens
  siRNA target sequence for APCS (NM_001639.2,325-343).
gataatgagctactagttt

SEQ ID NO: 173937 - DNA, 19 bp, Homo sapiens
  siRNA target sequence for APCS (NM_001639.2,353-371).
gagttggagagtatagtct

SEQ ID NO: 173938 - DNA, 19 bp, Homo sapiens
  siRNA target sequence for APCS (NM_001639.2,355-373).
gttggagagtatagtctat

SEQ ID NO: 173939 - DNA, 19 bp, Homo sapiens
  siRNA target sequence for APCS (NM_001639.2,358-376).
ggagagtatagtctataca

SEQ ID NO: 173940 - DNA, 19 bp, Homo sapiens
  siRNA target sequence for APCS (NM_001639.2,359-377).
gagagtatagtctatacat

SEQ ID NO: 173941 - DNA, 19 bp, Homo sapiens
  siRNA target sequence for APCS (NM_001639.2,395-413).
catccaaagttatcgaaaa

SEQ ID NO: 173942 - DNA, 19 bp, Homo sapiens
  siRNA target sequence for APCS (NM_001639.2,398-416).
ccaaagttatcgaaaagtt

SEQ ID NO: 173943 - DNA, 19 bp, Homo sapiens
  siRNA target sequence for APCS (NM_001639.2,460-478).
ggtattgctgaattttgga

SEQ ID NO: 173944 - DNA, 19 bp, Homo sapiens
  siRNA target sequence for ASGR1 (NM_001671.2,703-721).
gggctgacgccgacaacta

SEQ ID NO: 173945 - DNA, 19 bp, Homo sapiens
  siRNA target sequence for ASGR1 (NM_001671.2,705-723).
gctgacgccgacaactact

SEQ ID NO: 173946 - DNA, 19 bp, Homo sapiens
  siRNA target sequence for ASGR2 (NM_001181.2,965-983).
cagactataggcacaacta

SEQ ID NO: 173947 - DNA, 19 bp, Homo sapiens
  siRNA target sequence for ATRN (NM_012070.2,275-293).
ggatcttctgggtttgtga

SEQ ID NO: 173948 - DNA, 19 bp, Homo sapiens
  siRNA target sequence for ATRN (NM_012070.2,328-346).
gtgcacgtggctcattgaa

SEQ ID NO: 173949 - DNA, 19 bp, Homo sapiens
  siRNA target sequence for ATRN (NM_012070.2,347-365).
ggacagccaaatagaataa

SEQ ID NO: 173950 - DNA, 19 bp, Homo sapiens
  siRNA target sequence for ATRN (NM_012070.2,360-378).
gaataatgagacttcgttt

SEQ ID NO: 173951 - DNA, 19 bp, Homo sapiens
  siRNA target sequence for ATRN (NM_012070.2,367-385).
gagacttcgtttcaatcat

SEQ ID NO: 173952 - DNA, 19 bp, Homo sapiens
  siRNA target sequence for ATRN (NM_012070.2,369-387).
gacttcgtttcaatcattt

SEQ ID NO: 173953 - DNA, 19 bp, Homo sapiens
  siRNA target sequence for ATRN (NM_012070.2,446-464).
ccgctagttgctgcattta

SEQ ID NO: 173954 - DNA, 19 bp, Homo sapiens
  siRNA target sequence for ATRN (NM_012070.2,554-572).
gatgctgcttataatttga

SEQ ID NO: 173955 - DNA, 19 bp, Homo sapiens
  siRNA target sequence for ATRN (NM_012070.2,624-642).
gccgaggagagtgtaagat

SEQ ID NO: 173956 - DNA, 19 bp, Homo sapiens
  siRNA target sequence for ATRN (NM_012070.2,629-647).
ggagagtgtaagatcagta

SEQ ID NO: 173957 - DNA, 19 bp, Homo sapiens
  siRNA target sequence for ATRN (NM_012070.2,630-648).
gagagtgtaagatcagtaa

SEQ ID NO: 173958 - DNA, 19 bp, Homo sapiens
  siRNA target sequence for ATRN (NM_012070.2,632-650).
gagtgtaagatcagtaata

SEQ ID NO: 173959 - DNA, 19 bp, Homo sapiens
  siRNA target sequence for ATRN (NM_012070.2,645-663).
gtaatagcagcgatactgt

SEQ ID NO: 173960 - DNA, 19 bp, Homo sapiens
  siRNA target sequence for ATRN (NM_012070.2,652-670).
cagcgatactgttgaatgt

SEQ ID NO: 173961 - DNA, 19 bp, Homo sapiens
  siRNA target sequence for ATRN (NM_012070.2,654-672).
gcgatactgttgaatgtga

SEQ ID NO: 173962 - DNA, 19 bp, Homo sapiens
  siRNA target sequence for ATRN (NM_012070.2,655-673).
cgatactgttgaatgtgaa

SEQ ID NO: 173963 - DNA, 19 bp, Homo sapiens
  siRNA target sequence for ATRN (NM_012070.2,740-758).
catcgaggcatctgcaatt

SEQ ID NO: 173964 - DNA, 19 bp, Homo sapiens
  siRNA target sequence for ATRN (NM_012070.2,743-761).
cgaggcatctgcaattcaa

SEQ ID NO: 173965 - DNA, 19 bp, Homo sapiens
  siRNA target sequence for ATRN (NM_012070.2,748-766).
catctgcaattcaagtgat

SEQ ID NO: 173966 - DNA, 19 bp, Homo sapiens
  siRNA target sequence for ATRN (NM_012070.2,799-817).
gggtcctggatgttcagtt

SEQ ID NO: 173967 - DNA, 19 bp, Homo sapiens
  siRNA target sequence for ATRN (NM_012070.2,824-842).
ccagctaaccagtcatttt

SEQ ID NO: 173968 - DNA, 19 bp, Homo sapiens
  siRNA target sequence for ATRN (NM_012070.2,844-862).
gactcgagaggaatattct

SEQ ID NO: 173969 - DNA, 19 bp, Homo sapiens
  siRNA target sequence for ATRN (NM_012070.2,846-864).
ctcgagaggaatattctaa

SEQ ID NO: 173970 - DNA, 19 bp, Homo sapiens
  siRNA target sequence for ATRN (NM_012070.2,848-866).
cgagaggaatattctaact

SEQ ID NO: 173971 - DNA, 19 bp, Homo sapiens
  siRNA target sequence for ATRN (NM_012070.2,849-867).
gagaggaatattctaactt

SEQ ID NO: 173972 - DNA, 19 bp, Homo sapiens
  siRNA target sequence for ATRN (NM_012070.2,851-869).
gaggaatattctaacttaa

SEQ ID NO: 173973 - DNA, 19 bp, Homo sapiens
  siRNA target sequence for ATRN (NM_012070.2,871-889).
gctccccagagcatctcat

SEQ ID NO: 173974 - DNA, 19 bp, Homo sapiens
  siRNA target sequence for ATRN (NM_012070.2,916-934).
gtgggttgttggaggatat

SEQ ID NO: 173975 - DNA, 19 bp, Homo sapiens
  siRNA target sequence for ATRN (NM_012070.2,920-938).
gttgttggaggatatatgt

SEQ ID NO: 173976 - DNA, 19 bp, Homo sapiens
  siRNA target sequence for ATRN (NM_012070.2,1028-1046).
gttagatatggtcattctt

SEQ ID NO: 173977 - DNA, 19 bp, Homo sapiens
  siRNA target sequence for ATRN (NM_012070.2,1040-1058).
cattctttggcattataca

SEQ ID NO: 173978 - DNA, 19 bp, Homo sapiens
  siRNA target sequence for ATRN (NM_012070.2,1049-1067).
gcattatacaaggataaaa

SEQ ID NO: 173979 - DNA, 19 bp, Homo sapiens
  siRNA target sequence for ATRN (NM_012070.2,1060-1078).
ggataaaatttacatgtat

SEQ ID NO: 173980 - DNA, 19 bp, Homo sapiens
  siRNA target sequence for ATRN (NM_012070.2,1101-1119).
ggaatgtgaccaatgagtt

SEQ ID NO: 173981 - DNA, 19 bp, Homo sapiens
  siRNA target sequence for ATRN (NM_012070.2,1120-1138).
gagagtttttcacattcat

SEQ ID NO: 173982 - DNA, 19 bp, Homo sapiens
  siRNA target sequence for ATRN (NM_012070.2,1195-1213).
gcactctgcacacattgtt

SEQ ID NO: 173983 - DNA, 19 bp, Homo sapiens
  siRNA target sequence for ATRN (NM_012070.2,1198-1216).
ctctgcacacattgttaca

SEQ ID NO: 173984 - DNA, 19 bp, Homo sapiens
  siRNA target sequence for ATRN (NM_012070.2,1200-1218).
ctgcacacattgttacact

SEQ ID NO: 173985 - DNA, 19 bp, Homo sapiens
  siRNA target sequence for ATRN (NM_012070.2,1260-1278).
gccctctctatggatatat

SEQ ID NO: 173986 - DNA, 19 bp, Homo sapiens
  siRNA target sequence for ATRN (NM_012070.2,1281-1299).
gcaatgtgcaggaatatga

SEQ ID NO: 173987 - DNA, 19 bp, Homo sapiens
  siRNA target sequence for ATRN (NM_012070.2,1309-1327).
gaacacatggagtatatta

SEQ ID NO: 173988 - DNA, 19 bp, Homo sapiens
  siRNA target sequence for ATRN (NM_012070.2,1386-1404).
ggaccagggccctatacgt

SEQ ID NO: 173989 - DNA, 19 bp, Homo sapiens
  siRNA target sequence for ATRN (NM_012070.2,1387-1405).
gaccagggccctatacgtt

SEQ ID NO: 173990 - DNA, 19 bp, Homo sapiens
  siRNA target sequence for ATRN (NM_012070.2,1438-1456).
gtaccggcttgcagatgat

SEQ ID NO: 173991 - DNA, 19 bp, Homo sapiens
  siRNA target sequence for ATRN (NM_012070.2,1481-1499).
cagatgtggaccattctta

SEQ ID NO: 173992 - DNA, 19 bp, Homo sapiens
  siRNA target sequence for ATRN (NM_012070.2,1522-1540).
cttgcacacagctgtgata

SEQ ID NO: 173993 - DNA, 19 bp, Homo sapiens
  siRNA target sequence for ATRN (NM_012070.2,1575-1593).
cacacaatgacacatctat

SEQ ID NO: 173994 - DNA, 19 bp, Homo sapiens
  siRNA target sequence for ATRN (NM_012070.2,1611-1629).
gcttctcttcagatttcat

SEQ ID NO: 173995 - DNA, 19 bp, Homo sapiens
  siRNA target sequence for ATRN (NM_012070.2,1704-1722).
gccattcagcagtcttaca

SEQ ID NO: 173996 - DNA, 19 bp, Homo sapiens
  siRNA target sequence for ATRN (NM_012070.2,1739-1757).
gtgttcggtggtttcaata

SEQ ID NO: 173997 - DNA, 19 bp, Homo sapiens
  siRNA target sequence for ATRN (NM_012070.2,1741-1759).
gttcggtggtttcaatagt

SEQ ID NO: 173998 - DNA, 19 bp, Homo sapiens
  siRNA target sequence for ATRN (NM_012070.2,1813-1831).
gagtgaagccgcttgttta

SEQ ID NO: 173999 - DNA, 19 bp, Homo sapiens
  siRNA target sequence for ATRN (NM_012070.2,1868-1886).
gggtcgtctcagtgtatct

SEQ ID NO: 174000 - DNA, 19 bp, Homo sapiens
  siRNA target sequence for ATRN (NM_012070.2,1888-1906).
gtgggcgctggcaactgat

SEQ ID NO: 174001 - DNA, 19 bp, Homo sapiens
  siRNA target sequence for ATRN (NM_012070.2,1893-1911).
cgctggcaactgatgaaca

SEQ ID NO: 174002 - DNA, 19 bp, Homo sapiens
  siRNA target sequence for ATRN (NM_012070.2,1894-1912).
gctggcaactgatgaacaa

SEQ ID NO: 174003 - DNA, 19 bp, Homo sapiens
  siRNA target sequence for ATRN (NM_012070.2,1897-1915).
ggcaactgatgaacaagaa

SEQ ID NO: 174004 - DNA, 19 bp, Homo sapiens
  siRNA target sequence for ATRN (NM_012070.2,1970-1988).
gaccagcacacagattgtt

SEQ ID NO: 174005 - DNA, 19 bp, Homo sapiens
  siRNA target sequence for ATRN (NM_012070.2,2069-2087).
cagatctccatttttaggt

SEQ ID NO: 174006 - DNA, 19 bp, Homo sapiens
  siRNA target sequence for ATRN (NM_012070.2,2105-2123).
gataaccccatgtactact

SEQ ID NO: 174007 - DNA, 19 bp, Homo sapiens
  siRNA target sequence for ATRN (NM_012070.2,2112-2130).
ccatgtactactgtaacaa

SEQ ID NO: 174008 - DNA, 19 bp, Homo sapiens
  siRNA target sequence for ATRN (NM_012070.2,2197-2215).
cattgccctgcccgaaaat

SEQ ID NO: 174009 - DNA, 19 bp, Homo sapiens
  siRNA target sequence for ATRN (NM_012070.2,2229-2247).
gctggcatttggttggaaa

SEQ ID NO: 174010 - DNA, 19 bp, Homo sapiens
  siRNA target sequence for ATRN (NM_012070.2,2240-2258).
gttggaaactcatgtttga

SEQ ID NO: 174011 - DNA, 19 bp, Homo sapiens
  siRNA target sequence for ATRN (NM_012070.2,2265-2283).
ctactgccaaggagaatta

SEQ ID NO: 174012 - DNA, 19 bp, Homo sapiens
  siRNA target sequence for ATRN (NM_012070.2,2272-2290).
caaggagaattatgacaat

SEQ ID NO: 174013 - DNA, 19 bp, Homo sapiens
  siRNA target sequence for ATRN (NM_012070.2,2278-2296).
gaattatgacaatgctaaa

SEQ ID NO: 174014 - DNA, 19 bp, Homo sapiens
  siRNA target sequence for ATRN (NM_012070.2,2426-2444).
gtcggccttcggaagatca

SEQ ID NO: 174015 - DNA, 19 bp, Homo sapiens
  siRNA target sequence for ATRN (NM_012070.2,2428-2446).
cggccttcggaagatcaat

SEQ ID NO: 174016 - DNA, 19 bp, Homo sapiens
  siRNA target sequence for ATRN (NM_012070.2,2430-2448).
gccttcggaagatcaatgt

SEQ ID NO: 174017 - DNA, 19 bp, Homo sapiens
  siRNA target sequence for ATRN (NM_012070.2,2432-2450).
cttcggaagatcaatgtgt

SEQ ID NO: 174018 - DNA, 19 bp, Homo sapiens
  siRNA target sequence for ATRN (NM_012070.2,2465-2483).
gaagatatgtccccattta

SEQ ID NO: 174019 - DNA, 19 bp, Homo sapiens
  siRNA target sequence for ATRN (NM_012070.2,2468-2486).
gatatgtccccatttacaa

SEQ ID NO: 174020 - DNA, 19 bp, Homo sapiens
  siRNA target sequence for ATRN (NM_012070.2,2475-2493).
ccccatttacaaatagttt

SEQ ID NO: 174021 - DNA, 19 bp, Homo sapiens
  siRNA target sequence for ATRN (NM_012070.2,2775-2793).
gtatggaatggtatacgat

SEQ ID NO: 174022 - DNA, 19 bp, Homo sapiens
  siRNA target sequence for ATRN (NM_012070.2,2904-2922).
gcatagagggttcctataa

SEQ ID NO: 174023 - DNA, 19 bp, Homo sapiens
  siRNA target sequence for ATRN (NM_012070.2,2905-2923).
catagagggttcctataaa

SEQ ID NO: 174024 - DNA, 19 bp, Homo sapiens
  siRNA target sequence for ATRN (NM_012070.2,2948-2966).
gcccctacaggaaatttct

SEQ ID NO: 174025 - DNA, 19 bp, Homo sapiens
  siRNA target sequence for ATRN (NM_012070.2,2950-2968).
ccctacaggaaatttctat

SEQ ID NO: 174026 - DNA, 19 bp, Homo sapiens
  siRNA target sequence for ATRN (NM_012070.2,2999-3017).
ctagaggacagcagataca

SEQ ID NO: 174027 - DNA, 19 bp, Homo sapiens
  siRNA target sequence for ATRN (NM_012070.2,3012-3030).
gatacaactggtctttcat

SEQ ID NO: 174028 - DNA, 19 bp, Homo sapiens
  siRNA target sequence for ATRN (NM_012070.2,3058-3076).
ccacagtaaatgcatcaat

SEQ ID NO: 174029 - DNA, 19 bp, Homo sapiens
  siRNA target sequence for ATRN (NM_012070.2,3119-3137).
cactgcgagacctgcatat

SEQ ID NO: 174030 - DNA, 19 bp, Homo sapiens
  siRNA target sequence for ATRN (NM_012070.2,3121-3139).
ctgcgagacctgcatatct

SEQ ID NO: 174031 - DNA, 19 bp, Homo sapiens
  siRNA target sequence for ATRN (NM_012070.2,3271-3289).
gctatgtgaggtagaaaat

SEQ ID NO: 174032 - DNA, 19 bp, Homo sapiens
  siRNA target sequence for ATRN (NM_012070.2,3276-3294).
gtgaggtagaaaatcgata

SEQ ID NO: 174033 - DNA, 19 bp, Homo sapiens
  siRNA target sequence for ATRN (NM_012070.2,3304-3322).
ccctctcagaggaacatgt

SEQ ID NO: 174034 - DNA, 19 bp, Homo sapiens
  siRNA target sequence for ATRN (NM_012070.2,3315-3333).
gaacatgttattatactct

SEQ ID NO: 174035 - DNA, 19 bp, Homo sapiens
  siRNA target sequence for ATRN (NM_012070.2,3332-3350).
cttcttattgactatcagt

SEQ ID NO: 174036 - DNA, 19 bp, Homo sapiens
  siRNA target sequence for ATRN (NM_012070.2,3371-3389).
gaagatgatcgctattaca

SEQ ID NO: 174037 - DNA, 19 bp, Homo sapiens
  siRNA target sequence for ATRN (NM_012070.2,3528-3546).
ctgttgtttcaaaaaccaa

SEQ ID NO: 174038 - DNA, 19 bp, Homo sapiens
  siRNA target sequence for ATRN (NM_012070.2,3543-3561).
ccaacattaaggagtacaa

SEQ ID NO: 174039 - DNA, 19 bp, Homo sapiens
  siRNA target sequence for ATRN (NM_012070.2,3544-3562).
caacattaaggagtacaaa

SEQ ID NO: 174040 - DNA, 19 bp, Homo sapiens
  siRNA target sequence for ATRN (NM_012070.2,3554-3572).
gagtacaaagatagtttct

SEQ ID NO: 174041 - DNA, 19 bp, Homo sapiens
  siRNA target sequence for ATRN (NM_012070.2,3637-3655).
cacctggcccatcaaaatt

SEQ ID NO: 174042 - DNA, 19 bp, Homo sapiens
  siRNA target sequence for ATRN (NM_139321.1,4070-4088).
gtaaatgtcgccttggaaa

SEQ ID NO: 174043 - DNA, 19 bp, Homo sapiens
  siRNA target sequence for ATRN (NM_139321.1,4096-4114).
ggagcctcctgatcttatt

SEQ ID NO: 174044 - DNA, 19 bp, Homo sapiens
  siRNA target sequence for ATRN (NM_139321.1,4109-4127).
cttattggggggagtataa

SEQ ID NO: 174045 - DNA, 19 bp, Homo sapiens
  siRNA target sequence for ATRN (NM_139321.1,4261-4279).
cgccctggtggacatttct

SEQ ID NO: 174046 - DNA, 19 bp, Homo sapiens
  siRNA target sequence for ATRN (NM_139321.1,4280-4298).
cagcagatgccgatagtgt

SEQ ID NO: 174047 - DNA, 19 bp, Homo sapiens
  siRNA target sequence for BCAN (NM_021948.3,826-844).
ggctctgcccgctatgctt

SEQ ID NO: 174048 - DNA, 19 bp, Homo sapiens
  siRNA target sequence for BCAN (NM_021948.3,835-853).
cgctatgctttctcctttt

SEQ ID NO: 174049 - DNA, 19 bp, Homo sapiens
  siRNA target sequence for BCAN (NM_021948.3,930-948).
gggctatgagcaatgtgat

SEQ ID NO: 174050 - DNA, 19 bp, Homo sapiens
  siRNA target sequence for BCAN (NM_021948.3,1061-1079).
cggatgacctctatgatgt

SEQ ID NO: 174051 - DNA, 19 bp, Homo sapiens
  siRNA target sequence for BCAN (NM_021948.3,1069-1087).
ctctatgatgtgtactgtt

SEQ ID NO: 174052 - DNA, 19 bp, Homo sapiens
  siRNA target sequence for BCAN (NM_021948.3,1085-1103).
gttatgctgaagacctaaa

SEQ ID NO: 174053 - DNA, 19 bp, Homo sapiens
  siRNA target sequence for BCAN (NM_021948.3,1618-1636).
cctaggacgctcctagaat

SEQ ID NO: 174054 - DNA, 19 bp, Homo sapiens
  siRNA target sequence for BCAN (NM_021948.3,1619-1637).
ctaggacgctcctagaatt

SEQ ID NO: 174055 - DNA, 19 bp, Homo sapiens
  siRNA target sequence for BCAN (NM_021948.3,1622-1640).
ggacgctcctagaatttga

SEQ ID NO: 174056 - DNA, 19 bp, Homo sapiens
  siRNA target sequence for BCAN (NM_021948.3,2336-2354).
gggtccgctgcctatgtct

SEQ ID NO: 174057 - DNA, 19 bp, Homo sapiens
  siRNA target sequence for BCAN (NM_021948.3,2588-2606).
ccatcgaaggcgacttctt

SEQ ID NO: 174058 - DNA, 19 bp, Homo sapiens
  siRNA target sequence for BCAN (NM_198427.1,2268-2286).
ccccgcatcaggtaattct

SEQ ID NO: 174059 - DNA, 19 bp, Homo sapiens
  siRNA target sequence for BCAN (NM_198427.1,2294-2312).
gctcaactgccctctctat

SEQ ID NO: 174060 - DNA, 19 bp, Homo sapiens
  siRNA target sequence for C14orf27 (NM_175060.1,1002-1020).
cagctcccgatctcagtta

SEQ ID NO: 174061 - DNA, 19 bp, Homo sapiens
  siRNA target sequence for C14orf27 (NM_175060.1,1004-1022).
gctcccgatctcagttact

SEQ ID NO: 174062 - DNA, 19 bp, Homo sapiens
  siRNA target sequence for C14orf27 (NM_175060.1,1021-1039).
cttgcatcgcggacgaaat

SEQ ID NO: 174063 - DNA, 19 bp, Homo sapiens
  siRNA target sequence for C14orf27 (NM_175060.1,1339-1357).
cacttgtccctgaacaaga

SEQ ID NO: 174064 - DNA, 19 bp, Homo sapiens
  siRNA target sequence for C14orf27 (NM_175060.1,1353-1371).
caagacaattcagtaacat

SEQ ID NO: 174065 - DNA, 19 bp, Homo sapiens
  siRNA target sequence for C14orf27 (NM_175060.1,1408-1426).
cgatgtctacccttcaaat

SEQ ID NO: 174066 - DNA, 19 bp, Homo sapiens
  siRNA target sequence for C14orf27 (NM_175060.1,1429-1447).
cccttcaagccgagtcaaa

SEQ ID NO: 174067 - DNA, 19 bp, Homo sapiens
  siRNA target sequence for C14orf27 (NM_175060.1,1461-1479).
ccatcagggagcgtgattt

SEQ ID NO: 174068 - DNA, 19 bp, Homo sapiens
  siRNA target sequence for C14orf27 (NM_175060.1,1465-1483).
cagggagcgtgatttccaa

SEQ ID NO: 174069 - DNA, 19 bp, Homo sapiens
  siRNA target sequence for C14orf27 (NM_175060.1,1469-1487).
gagcgtgatttccaagttt

SEQ ID NO: 174070 - DNA, 19 bp, Homo sapiens
  siRNA target sequence for C14orf27 (NM_175060.1,1471-1489).
gcgtgatttccaagtttaa

SEQ ID NO: 174071 - DNA, 19 bp, Homo sapiens
  siRNA target sequence for C14orf27 (NM_175060.1,1472-1490).
cgtgatttccaagtttaat

SEQ ID NO: 174072 - DNA, 19 bp, Homo sapiens
  siRNA target sequence for C14orf27 (NM_175060.1,1534-1552).
ctgccgtggtcttcatatt

SEQ ID NO: 174073 - DNA, 19 bp, Homo sapiens
  siRNA target sequence for C14orf27 (NM_175060.1,1569-1587).
gtagtgttggtgatcttga

SEQ ID NO: 174074 - DNA, 19 bp, Homo sapiens
  siRNA target sequence for C14orf27 (NM_175060.1,1594-1612).
cagtactggggcttgtcaa

SEQ ID NO: 174075 - DNA, 19 bp, Homo sapiens
  siRNA target sequence for C21orf63 (NM_058187.3,561-579).
gacttctctggttacctaa

SEQ ID NO: 174076 - DNA, 19 bp, Homo sapiens
  siRNA target sequence for C21orf63 (NM_058187.3,566-584).
ctctggttacctaaccaaa

SEQ ID NO: 174077 - DNA, 19 bp, Homo sapiens
  siRNA target sequence for C21orf63 (NM_058187.3,619-637).
gggactatttgaatctaca

SEQ ID NO: 174078 - DNA, 19 bp, Homo sapiens
  siRNA target sequence for C21orf63 (NM_058187.3,636-654).
cagtgccctcggcattcta

SEQ ID NO: 174079 - DNA, 19 bp, Homo sapiens
  siRNA target sequence for C21orf63 (NM_058187.3,641-659).
ccctcggcattctacgata

SEQ ID NO: 174080 - DNA, 19 bp, Homo sapiens
  siRNA target sequence for C21orf63 (NM_058187.3,642-660).
cctcggcattctacgataa

SEQ ID NO: 174081 - DNA, 19 bp, Homo sapiens
  siRNA target sequence for C21orf63 (NM_058187.3,646-664).
ggcattctacgataagtgt

SEQ ID NO: 174082 - DNA, 19 bp, Homo sapiens
  siRNA target sequence for C21orf63 (NM_058187.3,661-679).
gtgtccaatcggcatttta

SEQ ID NO: 174083 - DNA, 19 bp, Homo sapiens
  siRNA target sequence for C21orf63 (NM_058187.3,672-690).
gcattttatgggcaagatt

SEQ ID NO: 174084 - DNA, 19 bp, Homo sapiens
  siRNA target sequence for C21orf63 (NM_058187.3,673-691).
cattttatgggcaagatta

SEQ ID NO: 174085 - DNA, 19 bp, Homo sapiens
  siRNA target sequence for C21orf63 (NM_058187.3,687-705).
gattaccaaatgtgtagtt

SEQ ID NO: 174086 - DNA, 19 bp, Homo sapiens
  siRNA target sequence for C21orf63 (NM_058187.3,844-862).
gtccaggaagcagtaaata

SEQ ID NO: 174087 - DNA, 19 bp, Homo sapiens
  siRNA target sequence for C21orf63 (NM_058187.3,1038-1056).
cctttcgattgcttgtctt

SEQ ID NO: 174088 - DNA, 19 bp, Homo sapiens
  siRNA target sequence for C21orf63 (NM_058187.3,1043-1061).
cgattgcttgtcttactca

SEQ ID NO: 174089 - DNA, 19 bp, Homo sapiens
  siRNA target sequence for C21orf63 (NM_058187.3,1106-1124).
caaaatcatcgtcaacaat

SEQ ID NO: 174090 - DNA, 19 bp, Homo sapiens
  siRNA target sequence for C21orf63 (NM_058187.3,1150-1168).
caggcgtgaaaaaatacct

SEQ ID NO: 174091 - DNA, 19 bp, Homo sapiens
  siRNA target sequence for C21orf63 (NM_058187.3,1199-1217).
catactcacagcgattgat

SEQ ID NO: 174092 - DNA, 19 bp, Homo sapiens
  siRNA target sequence for C21orf63 (NM_058187.3,1218-1236).
ccagccattgctaatctaa

SEQ ID NO: 174093 - DNA, 19 bp, Homo sapiens
  siRNA target sequence for C21orf63 (NM_058187.3,1253-1271).
gaaagatggtgaatatggt

SEQ ID NO: 174094 - DNA, 19 bp, Homo sapiens
  siRNA target sequence for C21orf63 (NM_058187.3,1575-1593).
gaactgtcggggttctgta

SEQ ID NO: 174095 - DNA, 19 bp, Homo sapiens
  siRNA target sequence for C21orf63 (NM_058187.3,1585-1603).
ggttctgtaggacttcata

SEQ ID NO: 174096 - DNA, 19 bp, Homo sapiens
  siRNA target sequence for C21orf63 (NM_058187.3,1586-1604).
gttctgtaggacttcatat

SEQ ID NO: 174097 - DNA, 19 bp, Homo sapiens
  siRNA target sequence for C21orf63 (NM_058187.3,1652-1670).
gcgcagggagcaaatcatt

SEQ ID NO: 174098 - DNA, 19 bp, Homo sapiens
  siRNA target sequence for C21orf63 (NM_058187.3,1702-1720).
cctcgctcccaagaaacat

SEQ ID NO: 174099 - DNA, 19 bp, Homo sapiens
  siRNA target sequence for CD207 (NM_015717.1,167-185).
cacagtccgtgctgcatta

SEQ ID NO: 174100 - DNA, 19 bp, Homo sapiens
  siRNA target sequence for CD207 (NM_015717.1,171-189).
gtccgtgctgcattaatct

SEQ ID NO: 174101 - DNA, 19 bp, Homo sapiens
  siRNA target sequence for CD207 (NM_015717.1,221-239).
gctgcaggccgtcctttat

SEQ ID NO: 174102 - DNA, 19 bp, Homo sapiens
  siRNA target sequence for CD207 (NM_015717.1,245-263).
gtttatgggcaccatatca

SEQ ID NO: 174103 - DNA, 19 bp, Homo sapiens
  siRNA target sequence for CD207 (NM_015717.1,252-270).
ggcaccatatcagatgtaa

SEQ ID NO: 174104 - DNA, 19 bp, Homo sapiens
  siRNA target sequence for CD207 (NM_015717.1,449-467).
cgcacagatccagatctta

SEQ ID NO: 174105 - DNA, 19 bp, Homo sapiens
  siRNA target sequence for CD207 (NM_015717.1,450-468).
gcacagatccagatcttaa

SEQ ID NO: 174106 - DNA, 19 bp, Homo sapiens
  siRNA target sequence for CD207 (NM_015717.1,480-498).
gaagaagtcagtaccttaa

SEQ ID NO: 174107 - DNA, 19 bp, Homo sapiens
  siRNA target sequence for CD207 (NM_015717.1,501-519).
gcccaaatcccagagttaa

SEQ ID NO: 174108 - DNA, 19 bp, Homo sapiens
  siRNA target sequence for CD207 (NM_015717.1,596-614).
gttgctcaaacgacaaaat

SEQ ID NO: 174109 - DNA, 19 bp, Homo sapiens
  siRNA target sequence for CD207 (NM_015717.1,599-617).
gctcaaacgacaaaatgat

SEQ ID NO: 174110 - DNA, 19 bp, Homo sapiens
  siRNA target sequence for CD207 (NM_015717.1,600-618).
ctcaaacgacaaaatgata

SEQ ID NO: 174111 - DNA, 19 bp, Homo sapiens
  siRNA target sequence for CD207 (NM_015717.1,602-620).
caaacgacaaaatgatatt

SEQ ID NO: 174112 - DNA, 19 bp, Homo sapiens
  siRNA target sequence for CD207 (NM_015717.1,800-818).
ctggattggcctgactaaa

SEQ ID NO: 174113 - DNA, 19 bp, Homo sapiens
  siRNA target sequence for CD207 (NM_015717.1,803-821).
gattggcctgactaaagca

SEQ ID NO: 174114 - DNA, 19 bp, Homo sapiens
  siRNA target sequence for CD209L (NM_014257.2,304-322).
ccgagcaagacgcaatcta

SEQ ID NO: 174115 - DNA, 19 bp, Homo sapiens
  siRNA target sequence for CD209L (NM_014257.2,719-737).
caagcagcagcaaatctat

SEQ ID NO: 174116 - DNA, 19 bp, Homo sapiens
  siRNA target sequence for CD209L (NM_014257.2,722-740).
gcagcagcaaatctatcaa

SEQ ID NO: 174117 - DNA, 19 bp, Homo sapiens
  siRNA target sequence for CD209L (NM_014257.2,1107-1125).
ggctggaacgacaatcgat

SEQ ID NO: 174118 - DNA, 19 bp, Homo sapiens
  siRNA target sequence for CD209L (NM_014257.2,1122-1140).
cgatgtgacgttgacaatt

SEQ ID NO: 174119 - DNA, 19 bp, Homo sapiens
  siRNA target sequence for CD209L (NM_014257.2,1123-1141).
gatgtgacgttgacaatta

SEQ ID NO: 174120 - DNA, 19 bp, Homo sapiens
  siRNA target sequence for CD22 (NM_001771.1,106-124).
ctttctctgactcaagtaa

SEQ ID NO: 174121 - DNA, 19 bp, Homo sapiens
  siRNA target sequence for CD22 (NM_001771.1,234-252).
cacaatcctgagtataaca

SEQ ID NO: 174122 - DNA, 19 bp, Homo sapiens
  siRNA target sequence for CD22 (NM_001771.1,254-272).
gaacacctcgaagtttgat

SEQ ID NO: 174123 - DNA, 19 bp, Homo sapiens
  siRNA target sequence for CD22 (NM_001771.1,273-291).
gggacaagactctatgaaa

SEQ ID NO: 174124 - DNA, 19 bp, Homo sapiens
  siRNA target sequence for CD22 (NM_001771.1,378-396).
ccggtgcacctcaatgaca

SEQ ID NO: 174125 - DNA, 19 bp, Homo sapiens
  siRNA target sequence for CD22 (NM_001771.1,420-438).
gagtccaagactgagaaat

SEQ ID NO: 174126 - DNA, 19 bp, Homo sapiens
  siRNA target sequence for CD22 (NM_001771.1,447-465).
cgaatacacctcaatgtct

SEQ ID NO: 174127 - DNA, 19 bp, Homo sapiens
  siRNA target sequence for CD22 (NM_001771.1,472-490).
ggccttttccacctcatat

SEQ ID NO: 174128 - DNA, 19 bp, Homo sapiens
  siRNA target sequence for CD22 (NM_001771.1,475-493).
cttttccacctcatatcca

SEQ ID NO: 174129 - DNA, 19 bp, Homo sapiens
  siRNA target sequence for CD22 (NM_001771.1,562-580).
ggtatccgatccaattgca

SEQ ID NO: 174130 - DNA, 19 bp, Homo sapiens
  siRNA target sequence for CD22 (NM_001771.1,657-675).
cggagcgagctcaagttct

SEQ ID NO: 174131 - DNA, 19 bp, Homo sapiens
  siRNA target sequence for CD22 (NM_001771.1,688-706).
gtcaccatgggaagattgt

SEQ ID NO: 174132 - DNA, 19 bp, Homo sapiens
  siRNA target sequence for CD22 (NM_001771.1,778-796).
ccccgaagttggagatcaa

SEQ ID NO: 174133 - DNA, 19 bp, Homo sapiens
  siRNA target sequence for CD22 (NM_001771.1,960-978).
gaccagagtgggaagtact

SEQ ID NO: 174134 - DNA, 19 bp, Homo sapiens
  siRNA target sequence for CD22 (NM_001771.1,1006-1024).
cgggaaggtcggaagaagt

SEQ ID NO: 174135 - DNA, 19 bp, Homo sapiens
  siRNA target sequence for CD22 (NM_001771.1,1009-1027).
gaaggtcggaagaagtgtt

SEQ ID NO: 174136 - DNA, 19 bp, Homo sapiens
  siRNA target sequence for CD22 (NM_001771.1,1220-1238).
ctggcacgctgggacttat

SEQ ID NO: 174137 - DNA, 19 bp, Homo sapiens
  siRNA target sequence for CD22 (NM_001771.1,1224-1242).
cacgctgggacttattcct

SEQ ID NO: 174138 - DNA, 19 bp, Homo sapiens
  siRNA target sequence for CD22 (NM_001771.1,1243-1261).
gtgtggcagaaaacattct

SEQ ID NO: 174139 - DNA, 19 bp, Homo sapiens
  siRNA target sequence for CD22 (NM_001771.1,1403-1421).
cagtgttacccggtatgaa

SEQ ID NO: 174140 - DNA, 19 bp, Homo sapiens
  siRNA target sequence for CD22 (NM_001771.1,1453-1471).
cgcttggggtgctgaagat

SEQ ID NO: 174141 - DNA, 19 bp, Homo sapiens
  siRNA target sequence for CD22 (NM_001771.1,1458-1476).
ggggtgctgaagatccaaa

SEQ ID NO: 174142 - DNA, 19 bp, Homo sapiens
  siRNA target sequence for CD22 (NM_001771.1,1463-1481).
gctgaagatccaaaacgtt

SEQ ID NO: 174143 - DNA, 19 bp, Homo sapiens
  siRNA target sequence for CD22 (NM_001771.1,1599-1617).
cccctttccgagattcact

SEQ ID NO: 174144 - DNA, 19 bp, Homo sapiens
  siRNA target sequence for CD22 (NM_001771.1,1627-1645).
cggtcagcctccaatgtga

SEQ ID NO: 174145 - DNA, 19 bp, Homo sapiens
  siRNA target sequence for CD22 (NM_001771.1,1802-1820).
caaggcctggacacttgaa

SEQ ID NO: 174146 - DNA, 19 bp, Homo sapiens
  siRNA target sequence for CD22 (NM_001771.1,1942-1960).
ggtttgactggaataacca

SEQ ID NO: 174147 - DNA, 19 bp, Homo sapiens
  siRNA target sequence for CD22 (NM_001771.1,1943-1961).
gtttgactggaataaccaa

SEQ ID NO: 174148 - DNA, 19 bp, Homo sapiens
  siRNA target sequence for CD22 (NM_001771.1,2211-2229).
caggggcttcaggagaatt

SEQ ID NO: 174149 - DNA, 19 bp, Homo sapiens
  siRNA target sequence for CD22 (NM_001771.1,2233-2251).
gcggccagagcttctttgt

SEQ ID NO: 174150 - DNA, 19 bp, Homo sapiens
  siRNA target sequence for CD22 (NM_001771.1,2235-2253).
ggccagagcttctttgtga

SEQ ID NO: 174151 - DNA, 19 bp, Homo sapiens
  siRNA target sequence for CD22 (NM_001771.1,2301-2319).
ctgggatgctacaatccaa

SEQ ID NO: 174152 - DNA, 19 bp, Homo sapiens
  siRNA target sequence for CD22 (NM_001771.1,2305-2323).
gatgctacaatccaatgat

SEQ ID NO: 174153 - DNA, 19 bp, Homo sapiens
  siRNA target sequence for CD22 (NM_001771.1,2352-2370).
cgctttcccgagatgaaca

SEQ ID NO: 174154 - DNA, 19 bp, Homo sapiens
  siRNA target sequence for CD22 (NM_001771.1,2354-2372).
ctttcccgagatgaacata

SEQ ID NO: 174155 - DNA, 19 bp, Homo sapiens
  siRNA target sequence for CD22 (NM_001771.1,2425-2443).
gcgatgacacggtcactta

SEQ ID NO: 174156 - DNA, 19 bp, Homo sapiens
  siRNA target sequence for CD22 (NM_001771.1,2463-2481).
caagtgggcgactatgaga

SEQ ID NO: 174157 - DNA, 19 bp, Homo sapiens
  siRNA target sequence for CD22 (NM_001771.1,2480-2498).
gaacgtcattccagatttt

SEQ ID NO: 174158 - DNA, 19 bp, Homo sapiens
  siRNA target sequence for CD22 (NM_001771.1,2483-2501).
cgtcattccagattttcca

SEQ ID NO: 174159 - DNA, 19 bp, Homo sapiens
  siRNA target sequence for CD22 (NM_001771.1,2505-2523).
gatgaggggattcattact

SEQ ID NO: 174160 - DNA, 19 bp, Homo sapiens
  siRNA target sequence for CD22 (NM_001771.1,2554-2572).
ggcctcaggcacaagaaaa

SEQ ID NO: 174161 - DNA, 19 bp, Homo sapiens
  siRNA target sequence for CD33 (NM_001772.1,195-213).
ccgggaaggagccattata

SEQ ID NO: 174162 - DNA, 19 bp, Homo sapiens
  siRNA target sequence for CD33 (NM_001772.1,233-251).
ccacaaacaagctagatca

SEQ ID NO: 174163 - DNA, 19 bp, Homo sapiens
  siRNA target sequence for CD33 (NM_001772.1,234-252).
cacaaacaagctagatcaa

SEQ ID NO: 174164 - DNA, 19 bp, Homo sapiens
  siRNA target sequence for CD33 (NM_001772.1,380-398).
gaagtaccaaatacagtta

SEQ ID NO: 174165 - DNA, 19 bp, Homo sapiens
  siRNA target sequence for CD33 (NM_001772.1,1018-1036).
gaggagctgcattatgctt

SEQ ID NO: 174166 - DNA, 19 bp, Homo sapiens
  siRNA target sequence for CD33 (NM_001772.1,1041-1059).
caactttcatgggatgaat

SEQ ID NO: 174167 - DNA, 19 bp, Homo sapiens
  siRNA target sequence for CD33 (NM_001772.1,1069-1087).
gacacctccaccgaatact

SEQ ID NO: 174168 - DNA, 19 bp, Homo sapiens
  siRNA target sequence for CD69 (NM_001781.1,87-105).
ctctgaaaattgtttcgta

SEQ ID NO: 174169 - DNA, 19 bp, Homo sapiens
  siRNA target sequence for CD69 (NM_001781.1,127-145).
ccggagagtggacaagaaa

SEQ ID NO: 174170 - DNA, 19 bp, Homo sapiens
  siRNA target sequence for CD69 (NM_001781.1,200-218).
ctgtcctgtgtgctgtaat

SEQ ID NO: 174171 - DNA, 19 bp, Homo sapiens
  siRNA target sequence for CD69 (NM_001781.1,286-304).
ccaggccaatacacattct

SEQ ID NO: 174172 - DNA, 19 bp, Homo sapiens
  siRNA target sequence for CD69 (NM_001781.1,289-307).
ggccaatacacattctcaa

SEQ ID NO: 174173 - DNA, 19 bp, Homo sapiens
  siRNA target sequence for CD69 (NM_001781.1,316-334).
gacagccatgtttcttcat

SEQ ID NO: 174174 - DNA, 19 bp, Homo sapiens
  siRNA target sequence for CD69 (NM_001781.1,587-605).
ggtctgacaagtgtgtttt

SEQ ID NO: 174175 - DNA, 19 bp, Homo sapiens
  siRNA target sequence for CHODL (NM_024944.2,468-486).
gcggccaaaaggtgtgttt

SEQ ID NO: 174176 - DNA, 19 bp, Homo sapiens
  siRNA target sequence for CHODL (NM_024944.2,469-487).
cggccaaaaggtgtgtttt

SEQ ID NO: 174177 - DNA, 19 bp, Homo sapiens
  siRNA target sequence for CHODL (NM_024944.2,472-490).
ccaaaaggtgtgttttgct

SEQ ID NO: 174178 - DNA, 19 bp, Homo sapiens
  siRNA target sequence for CHODL (NM_024944.2,660-678).
ccgggacagggatttctga

SEQ ID NO: 174179 - DNA, 19 bp, Homo sapiens
  siRNA target sequence for CHODL (NM_024944.2,661-679).
cgggacagggatttctgat

SEQ ID NO: 174180 - DNA, 19 bp, Homo sapiens
  siRNA target sequence for CHODL (NM_024944.2,751-769).
gtggtctgatggaagcaat

SEQ ID NO: 174181 - DNA, 19 bp, Homo sapiens
  siRNA target sequence for CHODL (NM_024944.2,864-882).
ggggtccctacctttacca

SEQ ID NO: 174182 - DNA, 19 bp, Homo sapiens
  siRNA target sequence for CHODL (NM_024944.2,900-918).
gtaacatgaagcacaatta

SEQ ID NO: 174183 - DNA, 19 bp, Homo sapiens
  siRNA target sequence for CHODL (NM_024944.2,904-922).
catgaagcacaattatatt

SEQ ID NO: 174184 - DNA, 19 bp, Homo sapiens
  siRNA target sequence for CHODL (NM_024944.2,962-980).
gaaaagccttatcttacaa

SEQ ID NO: 174185 - DNA, 19 bp, Homo sapiens
  siRNA target sequence for CHODL (NM_024944.2,990-1008).
gagacacccatcagaatgt

SEQ ID NO: 174186 - DNA, 19 bp, Homo sapiens
  siRNA target sequence for CHODL (NM_024944.2,998-1016).
catcagaatgtggttgtta

SEQ ID NO: 174187 - DNA, 19 bp, Homo sapiens
  siRNA target sequence for CHODL (NM_024944.2,1026-1044).
gtataattcccaatctaat

SEQ ID NO: 174188 - DNA, 19 bp, Homo sapiens
  siRNA target sequence for CHODL (NM_024944.2,1035-1053).
ccaatctaatttatgttgt

SEQ ID NO: 174189 - DNA, 19 bp, Homo sapiens
  siRNA target sequence for CHODL (NM_024944.2,1062-1080).
caatacccctgctcttact

SEQ ID NO: 174190 - DNA, 19 bp, Homo sapiens
  siRNA target sequence for CHODL (NM_024944.2,1068-1086).
ccctgctcttactgatact

SEQ ID NO: 174191 - DNA, 19 bp, Homo sapiens
  siRNA target sequence for CHODL (NM_024944.2,1081-1099).
gatactggttgcttttgga

SEQ ID NO: 174192 - DNA, 19 bp, Homo sapiens
  siRNA target sequence for CHODL (NM_024944.2,1091-1109).
gcttttggaacctgttgtt

SEQ ID NO: 174193 - DNA, 19 bp, Homo sapiens
  siRNA target sequence for CHODL (NM_024944.2,1111-1129).
ccagatgctgcataaaagt

SEQ ID NO: 174194 - DNA, 19 bp, Homo sapiens
  siRNA target sequence for CHODL (NM_024944.2,1112-1130).
cagatgctgcataaaagta

SEQ ID NO: 174195 - DNA, 19 bp, Homo sapiens
  siRNA target sequence for CHST4 (NM_005769.1,233-251).
gccatcttggctctattct

SEQ ID NO: 174196 - DNA, 19 bp, Homo sapiens
  siRNA target sequence for CHST4 (NM_005769.1,243-261).
ctctattcttccacatgta

SEQ ID NO: 174197 - DNA, 19 bp, Homo sapiens
  siRNA target sequence for CHST4 (NM_005769.1,369-387).
ggcagcacccagatgtttt

SEQ ID NO: 174198 - DNA, 19 bp, Homo sapiens
  siRNA target sequence for CHST4 (NM_005769.1,457-475).
ggctgtgcgggatctgata

SEQ ID NO: 174199 - DNA, 19 bp, Homo sapiens
  siRNA target sequence for CHST4 (NM_005769.1,492-510).
gcgacatgagcgtctttga

SEQ ID NO: 174200 - DNA, 19 bp, Homo sapiens
  siRNA target sequence for CHST4 (NM_005769.1,493-511).
cgacatgagcgtctttgat

SEQ ID NO: 174201 - DNA, 19 bp, Homo sapiens
  siRNA target sequence for CHST4 (NM_005769.1,831-849).
caaagggagatctcatgat

SEQ ID NO: 174202 - DNA, 19 bp, Homo sapiens
  siRNA target sequence for CHST4 (NM_005769.1,836-854).
ggagatctcatgattgaca

SEQ ID NO: 174203 - DNA, 19 bp, Homo sapiens
  siRNA target sequence for CHST4 (NM_005769.1,1035-1053).
cccagacttcccgaatgta

SEQ ID NO: 174204 - DNA, 19 bp, Homo sapiens
  siRNA target sequence for CHST4 (NM_005769.1,1036-1054).
ccagacttcccgaatgtat

SEQ ID NO: 174205 - DNA, 19 bp, Homo sapiens
  siRNA target sequence for CHST4 (NM_005769.1,1039-1057).
gacttcccgaatgtatgaa

SEQ ID NO: 174206 - DNA, 19 bp, Homo sapiens
  siRNA target sequence for CHST4 (NM_005769.1,1041-1059).
cttcccgaatgtatgaatt

SEQ ID NO: 174207 - DNA, 19 bp, Homo sapiens
  siRNA target sequence for CHST4 (NM_005769.1,1044-1062).
cccgaatgtatgaattcgt

SEQ ID NO: 174208 - DNA, 19 bp, Homo sapiens
  siRNA target sequence for CHST4 (NM_005769.1,1055-1073).
gaattcgtgggattggaat

SEQ ID NO: 174209 - DNA, 19 bp, Homo sapiens
  siRNA target sequence for CHST4 (NM_005769.1,1088-1106).
cagacctgggtgcataaca

SEQ ID NO: 174210 - DNA, 19 bp, Homo sapiens
  siRNA target sequence for CHST4 (NM_005769.1,1152-1170).
ccagggatgcccttaatgt

SEQ ID NO: 174211 - DNA, 19 bp, Homo sapiens
  siRNA target sequence for CHST4 (NM_005769.1,1191-1209).
ctttgccctatgaaaaggt

SEQ ID NO: 174212 - DNA, 19 bp, Homo sapiens
  siRNA target sequence for CHST4 (NM_005769.1,1207-1225).
ggtttctcgacttcagaaa

SEQ ID NO: 174213 - DNA, 19 bp, Homo sapiens
  siRNA target sequence for CHST4 (NM_005769.1,1230-1248).
gtggcgatgccatgaattt

SEQ ID NO: 174214 - DNA, 19 bp, Homo sapiens
  siRNA target sequence for CHST4 (NM_005769.1,1258-1276).
ccgccacgtcagatctgaa

SEQ ID NO: 174215 - DNA, 19 bp, Homo sapiens
  siRNA target sequence for CHST4 (NM_005769.1,1264-1282).
cgtcagatctgaacaagaa

SEQ ID NO: 174216 - DNA, 19 bp, Homo sapiens
  siRNA target sequence for CHST4 (NM_005769.1,1317-1335).
ggactgtccctgagcaaat

SEQ ID NO: 174217 - DNA, 19 bp, Homo sapiens
  siRNA target sequence for CLEC1 (NM_016511.2,309-327).
ctaccagctctccaatact

SEQ ID NO: 174218 - DNA, 19 bp, Homo sapiens
  siRNA target sequence for CLEC1 (NM_016511.2,329-347).
gtcaagacaccatttctca

SEQ ID NO: 174219 - DNA, 19 bp, Homo sapiens
  siRNA target sequence for CLEC1 (NM_016511.2,365-383).
gaaatacgtcccaagagtt

SEQ ID NO: 174220 - DNA, 19 bp, Homo sapiens
  siRNA target sequence for CLEC1 (NM_016511.2,374-392).
cccaagagttgcaatctct

SEQ ID NO: 174221 - DNA, 19 bp, Homo sapiens
  siRNA target sequence for CLEC1 (NM_016511.2,430-448).
catgtggctgaaaaactct

SEQ ID NO: 174222 - DNA, 19 bp, Homo sapiens
  siRNA target sequence for CLEC1 (NM_016511.2,445-463).
ctctgtcgtgagctgtata

SEQ ID NO: 174223 - DNA, 19 bp, Homo sapiens
  siRNA target sequence for CLEC1 (NM_016511.2,486-504).
cagcccttgtacagaacaa

SEQ ID NO: 174224 - DNA, 19 bp, Homo sapiens
  siRNA target sequence for CLEC1 (NM_016511.2,522-540).
caattgctaccagttctat

SEQ ID NO: 174225 - DNA, 19 bp, Homo sapiens
  siRNA target sequence for CLEC1 (NM_016511.2,527-545).
gctaccagttctataaaga

SEQ ID NO: 174226 - DNA, 19 bp, Homo sapiens
  siRNA target sequence for CLEC1 (NM_016511.2,742-760).
gaactgttccatattataa

SEQ ID NO: 174227 - DNA, 19 bp, Homo sapiens
  siRNA target sequence for CLEC2 (NM_016509.1,70-88).
gatggatacatcaccttaa

SEQ ID NO: 174228 - DNA, 19 bp, Homo sapiens
  siRNA target sequence for CLEC2 (NM_016509.1,221-239).
ctgtcatgcagcgcaatta

SEQ ID NO: 174229 - DNA, 19 bp, Homo sapiens
  siRNA target sequence for CLEC2 (NM_016509.1,225-243).
catgcagcgcaattaccta

SEQ ID NO: 174230 - DNA, 19 bp, Homo sapiens
  siRNA target sequence for CLEC2 (NM_016509.1,286-304).
gcaaagcgcttctgtcaat

SEQ ID NO: 174231 - DNA, 19 bp, Homo sapiens
  siRNA target sequence for CLEC2 (NM_016509.1,287-305).
caaagcgcttctgtcaata

SEQ ID NO: 174232 - DNA, 19 bp, Homo sapiens
  siRNA target sequence for CLEC2 (NM_016509.1,364-382).
gacacaaactggagatatt

SEQ ID NO: 174233 - DNA, 19 bp, Homo sapiens
  siRNA target sequence for CLEC2 (NM_016509.1,366-384).
cacaaactggagatattat

SEQ ID NO: 174234 - DNA, 19 bp, Homo sapiens
  siRNA target sequence for CLEC2 (NM_016509.1,405-423).
cttcaggcacaacttaaca

SEQ ID NO: 174235 - DNA, 19 bp, Homo sapiens
  siRNA target sequence for CLEC2 (NM_016509.1,485-503).
ggaacattgtggagtacat

SEQ ID NO: 174236 - DNA, 19 bp, Homo sapiens
  siRNA target sequence for CLEC2 (NM_016509.1,574-592).
gaggatggctcggttatct

SEQ ID NO: 174237 - DNA, 19 bp, Homo sapiens
  siRNA target sequence for CLEC2 (NM_016509.1,576-594).
ggatggctcggttatctca

SEQ ID NO: 174238 - DNA, 19 bp, Homo sapiens
  siRNA target sequence for CLEC2 (NM_016509.1,671-689).
ctaccttctgtgagaacaa

SEQ ID NO: 174239 - DNA, 19 bp, Homo sapiens
  siRNA target sequence for CLECSF1 (NM_005752.1,229-247).
gctctggacagaagtcaat

SEQ ID NO: 174240 - DNA, 19 bp, Homo sapiens
  siRNA target sequence for CLECSF1 (NM_005752.1,291-309).
gcactaaagttcacaagaa

SEQ ID NO: 174241 - DNA, 19 bp, Homo sapiens
  siRNA target sequence for CLECSF1 (NM_005752.1,350-368).
gccaatgaagactgcattt

SEQ ID NO: 174242 - DNA, 19 bp, Homo sapiens
  siRNA target sequence for CLECSF1 (NM_005752.1,412-430).
caacgccctccaagactat

SEQ ID NO: 174243 - DNA, 19 bp, Homo sapiens
  siRNA target sequence for CLECSF1 (NM_005752.1,417-435).
ccctccaagactatggtaa

SEQ ID NO: 174244 - DNA, 19 bp, Homo sapiens
  siRNA target sequence for CLECSF1 (NM_005752.1,418-436).
cctccaagactatggtaaa

SEQ ID NO: 174245 - DNA, 19 bp, Homo sapiens
  siRNA target sequence for CLECSF1 (NM_005752.1,441-459).
gcctgccaggtgtcaatga

SEQ ID NO: 174246 - DNA, 19 bp, Homo sapiens
  siRNA target sequence for CLECSF1 (NM_005752.1,445-463).
gccaggtgtcaatgacttt

SEQ ID NO: 174247 - DNA, 19 bp, Homo sapiens
  siRNA target sequence for CLECSF1 (NM_005752.1,460-478).
cttttggctgggcatcaat

SEQ ID NO: 174248 - DNA, 19 bp, Homo sapiens
  siRNA target sequence for CLECSF1 (NM_005752.1,484-502).
ggtcacggaaggcaagttt

SEQ ID NO: 174249 - DNA, 19 bp, Homo sapiens
  siRNA target sequence for CLECSF1 (NM_005752.1,487-505).
cacggaaggcaagtttgtt

SEQ ID NO: 174250 - DNA, 19 bp, Homo sapiens
  siRNA target sequence for CLECSF1 (NM_005752.1,489-507).
cggaaggcaagtttgttga

SEQ ID NO: 174251 - DNA, 19 bp, Homo sapiens
  siRNA target sequence for CLECSF1 (NM_005752.1,629-647).
cgcagcagcaagagataca

SEQ ID NO: 174252 - DNA, 19 bp, Homo sapiens
  siRNA target sequence for CLECSF11 (NM_130441.1,559-577).
ccatggcagtcgtatccat

SEQ ID NO: 174253 - DNA, 19 bp, Homo sapiens
  siRNA target sequence for CLECSF11 (NM_130441.1,610-628).
ctgtggtgcctcacaattt

SEQ ID NO: 174254 - DNA, 19 bp, Homo sapiens
  siRNA target sequence for CLECSF11 (NM_130441.1,612-630).
gtggtgcctcacaatttta

SEQ ID NO: 174255 - DNA, 19 bp, Homo sapiens
  siRNA target sequence for CLECSF11 (NM_130441.1,617-635).
gcctcacaattttatgtat

SEQ ID NO: 174256 - DNA, 19 bp, Homo sapiens
  siRNA target sequence for CLECSF11 (NM_130441.1,656-674).
gtccaagttacgagagtat

SEQ ID NO: 174257 - DNA, 19 bp, Homo sapiens
  siRNA target sequence for CLECSF11 (NM_130441.1,658-676).
ccaagttacgagagtatca

SEQ ID NO: 174258 - DNA, 19 bp, Homo sapiens
  siRNA target sequence for CLECSF11 (NM_130441.1,659-677).
caagttacgagagtatcaa

SEQ ID NO: 174259 - DNA, 19 bp, Homo sapiens
  siRNA target sequence for CLECSF11 (NM_130441.1,667-685).
gagagtatcaacagtatca

SEQ ID NO: 174260 - DNA, 19 bp, Homo sapiens
  siRNA target sequence for CLECSF11 (NM_130441.1,742-760).
caaccccttggacttcatt

SEQ ID NO: 174261 - DNA, 19 bp, Homo sapiens
  siRNA target sequence for CLECSF11 (NM_130441.1,762-780).
cagtctagttgctacttta

SEQ ID NO: 174262 - DNA, 19 bp, Homo sapiens
  siRNA target sequence for CLECSF11 (NM_130441.1,764-782).
gtctagttgctactttatt

SEQ ID NO: 174263 - DNA, 19 bp, Homo sapiens
  siRNA target sequence for CLECSF11 (NM_130441.1,794-812).
gcaatcttggactaagagt

SEQ ID NO: 174264 - DNA, 19 bp, Homo sapiens
  siRNA target sequence for CLECSF11 (NM_130441.1,799-817).
cttggactaagagtcaaaa

SEQ ID NO: 174265 - DNA, 19 bp, Homo sapiens
  siRNA target sequence for CLECSF11 (NM_130441.1,838-856).
ctgatctggtggtgatcaa

SEQ ID NO: 174266 - DNA, 19 bp, Homo sapiens
  siRNA target sequence for CLECSF11 (NM_130441.1,840-858).
gatctggtggtgatcaaca

SEQ ID NO: 174267 - DNA, 19 bp, Homo sapiens
  siRNA target sequence for CLECSF11 (NM_130441.1,1000-1018).
caggtgaacccaataacct

SEQ ID NO: 174268 - DNA, 19 bp, Homo sapiens
  siRNA target sequence for CLECSF11 (NM_130441.1,1023-1041).
gagcgttgtgcgataataa

SEQ ID NO: 174269 - DNA, 19 bp, Homo sapiens
  siRNA target sequence for CLECSF11 (NM_130441.1,1025-1043).
gcgttgtgcgataataaat

SEQ ID NO: 174270 - DNA, 19 bp, Homo sapiens
  siRNA target sequence for CLECSF11 (NM_130441.1,1026-1044).
cgttgtgcgataataaatt

SEQ ID NO: 174271 - DNA, 19 bp, Homo sapiens
  siRNA target sequence for CLECSF11 (NM_130441.1,1059-1077).
gaatggggctggaatgaca

SEQ ID NO: 174272 - DNA, 19 bp, Homo sapiens
  siRNA target sequence for CLECSF11 (NM_130441.1,1063-1081).
ggggctggaatgacattca

SEQ ID NO: 174273 - DNA, 19 bp, Homo sapiens
  siRNA target sequence for CLECSF11 (NM_130441.1,1089-1107).
gtacctcagaagtcaattt

SEQ ID NO: 174274 - DNA, 19 bp, Homo sapiens
  siRNA target sequence for CLECSF12 (NM_022570.3,196-214).
gatatactcaattacactt

SEQ ID NO: 174275 - DNA, 19 bp, Homo sapiens
  siRNA target sequence for CLECSF12 (NM_022570.3,212-230).
cttcgactctcaaagcaat

SEQ ID NO: 174276 - DNA, 19 bp, Homo sapiens
  siRNA target sequence for CLECSF12 (NM_022570.3,216-234).
gactctcaaagcaatacca

SEQ ID NO: 174277 - DNA, 19 bp, Homo sapiens
  siRNA target sequence for CLECSF12 (NM_022570.3,235-253).
ggatagctgttgtttcaga

SEQ ID NO: 174278 - DNA, 19 bp, Homo sapiens
  siRNA target sequence for CLECSF12 (NM_022570.3,283-301).
ggcgcctcattgctgtaat

SEQ ID NO: 174279 - DNA, 19 bp, Homo sapiens
  siRNA target sequence for CLECSF12 (NM_022570.3,284-302).
gcgcctcattgctgtaatt

SEQ ID NO: 174280 - DNA, 19 bp, Homo sapiens
  siRNA target sequence for CLECSF12 (NM_022570.3,285-303).
cgcctcattgctgtaattt

SEQ ID NO: 174281 - DNA, 19 bp, Homo sapiens
  siRNA target sequence for CLECSF12 (NM_022570.3,297-315).
gtaattttgggaatcctat

SEQ ID NO: 174282 - DNA, 19 bp, Homo sapiens
  siRNA target sequence for CLECSF12 (NM_022570.3,348-366).
ggtaccatgggggttcttt

SEQ ID NO: 174283 - DNA, 19 bp, Homo sapiens
  siRNA target sequence for CLECSF12 (NM_022570.3,376-394).
gtcctcctaattggattat

SEQ ID NO: 174284 - DNA, 19 bp, Homo sapiens
  siRNA target sequence for CLECSF12 (NM_022570.3,414-432).
ctattcagcatgtcactaa

SEQ ID NO: 174285 - DNA, 19 bp, Homo sapiens
  siRNA target sequence for CLECSF12 (NM_022570.3,472-490).
gctctaatctcctaaagat

SEQ ID NO: 174286 - DNA, 19 bp, Homo sapiens
  siRNA target sequence for CLECSF12 (NM_022570.3,473-491).
ctctaatctcctaaagata

SEQ ID NO: 174287 - DNA, 19 bp, Homo sapiens
  siRNA target sequence for CLECSF12 (NM_022570.3,475-493).
ctaatctcctaaagataga

SEQ ID NO: 174288 - DNA, 19 bp, Homo sapiens
  siRNA target sequence for CLECSF12 (NM_022570.3,530-548).
gtcttcccaacctgataat

SEQ ID NO: 174289 - DNA, 19 bp, Homo sapiens
  siRNA target sequence for CLECSF12 (NM_022570.3,540-558).
cctgataattcattttgga

SEQ ID NO: 174290 - DNA, 19 bp, Homo sapiens
  siRNA target sequence for CLECSF12 (NM_022570.3,598-616).
gggaggatggatcaacatt

SEQ ID NO: 174291 - DNA, 19 bp, Homo sapiens
  siRNA target sequence for CLECSF12 (NM_022570.3,662-680).
cccatctccaaattgtgta

SEQ ID NO: 174292 - DNA, 19 bp, Homo sapiens
  siRNA target sequence for CLECSF12 (NM_022570.3,713-731).
gtgtagtgtgccctcatat

SEQ ID NO: 174293 - DNA, 19 bp, Homo sapiens
  siRNA target sequence for CLECSF12 (NM_022570.3,718-736).
gtgtgccctcatatagtat

SEQ ID NO: 174294 - DNA, 19 bp, Homo sapiens
  siRNA target sequence for CLECSF12 (NM_022570.3,722-740).
gccctcatatagtatttgt

SEQ ID NO: 174295 - DNA, 19 bp, Homo sapiens
  siRNA target sequence for CLECSF12 (NM_022570.3,739-757).
gtgagaagaagttttcaat

SEQ ID NO: 174296 - DNA, 19 bp, Homo sapiens
  siRNA target sequence for CLECSF12 (NM_197947.1,348-366).
ggtaccatggctatttgga

SEQ ID NO: 174297 - DNA, 19 bp, Homo sapiens
  siRNA target sequence for CLECSF12 (NM_197947.1,401-419).
ctactttctatcaagaaat

SEQ ID NO: 174298 - DNA, 19 bp, Homo sapiens
  siRNA target sequence for CLECSF12 (NM_197947.1,440-458).
cacacaatcatctttagaa

SEQ ID NO: 174299 - DNA, 19 bp, Homo sapiens
  siRNA target sequence for CLECSF12 (NM_197954.1,361-379).
gtttcaaagctgtggaatt

SEQ ID NO: 174300 - DNA, 19 bp, Homo sapiens
  siRNA target sequence for CLECSF12 (NM_197954.1,369-387).
gctgtggaattcaaaggat

SEQ ID NO: 174301 - DNA, 19 bp, Homo sapiens
  siRNA target sequence for CLECSF13 (NM_006344.1,212-230).
caaggacgtatgaaaactt

SEQ ID NO: 174302 - DNA, 19 bp, Homo sapiens
  siRNA target sequence for CLECSF13 (NM_006344.1,252-270).
gaaagtccaggggtttaaa

SEQ ID NO: 174303 - DNA, 19 bp, Homo sapiens
  siRNA target sequence for CLECSF13 (NM_006344.1,376-394).
gtggttggattccaaaatt

SEQ ID NO: 174304 - DNA, 19 bp, Homo sapiens
  siRNA target sequence for CLECSF13 (NM_006344.1,491-509).
gcagcttggaagaaacgat

SEQ ID NO: 174305 - DNA, 19 bp, Homo sapiens
  siRNA target sequence for CLECSF13 (NM_006344.1,492-510).
cagcttggaagaaacgata

SEQ ID NO: 174306 - DNA, 19 bp, Homo sapiens
  siRNA target sequence for CLECSF13 (NM_006344.1,546-564).
ggaacggcaggcagttcat

SEQ ID NO: 174307 - DNA, 19 bp, Homo sapiens
  siRNA target sequence for CLECSF13 (NM_006344.1,547-565).
gaacggcaggcagttcatt

SEQ ID NO: 174308 - DNA, 19 bp, Homo sapiens
  siRNA target sequence for CLECSF13 (NM_006344.1,627-645).
ggctactctcaacaacaat

SEQ ID NO: 174309 - DNA, 19 bp, Homo sapiens
  siRNA target sequence for CLECSF13 (NM_182906.1,674-692).
gtgtgtcccagttcattct

SEQ ID NO: 174310 - DNA, 19 bp, Homo sapiens
  siRNA target sequence for CLECSF13 (NM_173535.1,93-111).
gtccgcttctgcacagata

SEQ ID NO: 174311 - DNA, 19 bp, Homo sapiens
  siRNA target sequence for CLECSF13 (NM_173535.1,286-304).
ctgtgcaagccgtaattct

SEQ ID NO: 174312 - DNA, 19 bp, Homo sapiens
  siRNA target sequence for CLECSF13 (NM_173535.1,311-329).
caacattactgggcattta

SEQ ID NO: 174313 - DNA, 19 bp, Homo sapiens
  siRNA target sequence for CLECSF13 (NM_173535.1,319-337).
ctgggcatttaccttttga

SEQ ID NO: 174314 - DNA, 19 bp, Homo sapiens
  siRNA target sequence for CLECSF13 (NM_173535.1,331-349).
cttttgaacccaacaatca

SEQ ID NO: 174315 - DNA, 19 bp, Homo sapiens
  siRNA target sequence for CLECSF13 (NM_173535.1,370-388).
cagaaatgcgagagcttat

SEQ ID NO: 174316 - DNA, 19 bp, Homo sapiens
  siRNA target sequence for CLECSF13 (NM_173535.1,379-397).
gagagcttatccagacatt

SEQ ID NO: 174317 - DNA, 19 bp, Homo sapiens
  siRNA target sequence for CLECSF13 (NM_173535.1,383-401).
gcttatccagacatttaaa

SEQ ID NO: 174318 - DNA, 19 bp, Homo sapiens
  siRNA target sequence for CLECSF13 (NM_173535.1,418-436).
ccagtgcctgggtagtaga

SEQ ID NO: 174319 - DNA, 19 bp, Homo sapiens
  siRNA target sequence for CLECSF13 (NM_173535.1,419-437).
cagtgcctgggtagtagaa

SEQ ID NO: 174320 - DNA, 19 bp, Homo sapiens
  siRNA target sequence for CLECSF13 (NM_173535.1,421-439).
gtgcctgggtagtagaaat

SEQ ID NO: 174321 - DNA, 19 bp, Homo sapiens
  siRNA target sequence for CLECSF13 (NM_173535.1,482-500).
ccaggtgctcggtgatcat

SEQ ID NO: 174322 - DNA, 19 bp, Homo sapiens
  siRNA target sequence for CLECSF13 (NM_173535.1,543-561).
ctaaaggatgccactacat

SEQ ID NO: 174323 - DNA, 19 bp, Homo sapiens
  siRNA target sequence for CLECSF13 (NM_173535.1,548-566).
ggatgccactacattgagt

SEQ ID NO: 174324 - DNA, 19 bp, Homo sapiens
  siRNA target sequence for CLECSF13 (NM_173535.1,565-583).
gtttgcagacacagatgtt

SEQ ID NO: 174325 - DNA, 19 bp, Homo sapiens
  siRNA target sequence for CLECSF13 (NM_173535.1,662-680).
ccagacgctgaatttctta

SEQ ID NO: 174326 - DNA, 19 bp, Homo sapiens
  siRNA target sequence for CLECSF13 (NM_173535.1,663-681).
cagacgctgaatttcttaa

SEQ ID NO: 174327 - DNA, 19 bp, Homo sapiens
  siRNA target sequence for CLECSF13 (NM_173535.1,795-813).
gctcagttagccaatagca

SEQ ID NO: 174328 - DNA, 19 bp, Homo sapiens
  siRNA target sequence for CLECSF13 (NM_173535.1,800-818).
gttagccaatagcagttta

SEQ ID NO: 174329 - DNA, 19 bp, Homo sapiens
  siRNA target sequence for CLECSF13 (NM_173535.1,824-842).
cgctaatgctgagatctat

SEQ ID NO: 174330 - DNA, 19 bp, Homo sapiens
  siRNA target sequence for CLECSF13 (NM_173535.1,826-844).
ctaatgctgagatctatgt

SEQ ID NO: 174331 - DNA, 19 bp, Homo sapiens
  siRNA target sequence for CLECSF13 (NM_173535.1,848-866).
gagaggccatctagatagt

SEQ ID NO: 174332 - DNA, 19 bp, Homo sapiens
  siRNA target sequence for CLECSF13 (NM_173535.1,858-876).
ctagatagtgtcaatgact

SEQ ID NO: 174333 - DNA, 19 bp, Homo sapiens
  siRNA target sequence for CLECSF13 (NM_173535.1,977-995).
ccagacccaggcctttata

SEQ ID NO: 174334 - DNA, 19 bp, Homo sapiens
  siRNA target sequence for CLECSF13 (NM_173535.1,984-1002).
caggcctttataaaaagca

SEQ ID NO: 174335 - DNA, 19 bp, Homo sapiens
  siRNA target sequence for CLECSF13 (NM_173535.1,1104-1122).
gcccagacccaaaaagcaa

SEQ ID NO: 174336 - DNA, 19 bp, Homo sapiens
  siRNA target sequence for CLECSF13 (NM_173535.1,1128-1146).
cgtctggaccagacagata

SEQ ID NO: 174337 - DNA, 19 bp, Homo sapiens
  siRNA target sequence for CLECSF13 (NM_173535.1,1136-1154).
ccagacagatactcagatt

SEQ ID NO: 174338 - DNA, 19 bp, Homo sapiens
  siRNA target sequence for CLECSF13 (NM_173535.1,1175-1193).
ggaaaatgtgaatacctta

SEQ ID NO: 174339 - DNA, 19 bp, Homo sapiens
  siRNA target sequence for CLECSF13 (NM_173535.1,1189-1207).
ccttaaatgcccagattca

SEQ ID NO: 174340 - DNA, 19 bp, Homo sapiens
  siRNA target sequence for CLECSF13 (NM_173535.1,1209-1227).
gtcttaaatggtcatatga

SEQ ID NO: 174341 - DNA, 19 bp, Homo sapiens
  siRNA target sequence for CLECSF13 (NM_173535.1,1288-1306).
cttcccagacccagatgtt

SEQ ID NO: 174342 - DNA, 19 bp, Homo sapiens
  siRNA target sequence for CLECSF13 (NM_173535.1,1345-1363).
ggttaagaggggatctaga

SEQ ID NO: 174343 - DNA, 19 bp, Homo sapiens
  siRNA target sequence for CLECSF13 (NM_173535.1,1375-1393).
ctctaaccatggaaatcca

SEQ ID NO: 174344 - DNA, 19 bp, Homo sapiens
  siRNA target sequence for CLECSF13 (NM_173535.1,1421-1439).
ccatgtggtcattacttca

SEQ ID NO: 174345 - DNA, 19 bp, Homo sapiens
  siRNA target sequence for CLECSF13 (NM_173535.1,1487-1505).
gcaaggctggaagttcaat

SEQ ID NO: 174346 - DNA, 19 bp, Homo sapiens
  siRNA target sequence for CLECSF13 (NM_173535.1,1506-1524).
ggtggaagcttatattatt

SEQ ID NO: 174347 - DNA, 19 bp, Homo sapiens
  siRNA target sequence for CLECSF13 (NM_173535.1,1629-1647).
gagttcacaagtaaagtgt

SEQ ID NO: 174348 - DNA, 19 bp, Homo sapiens
  siRNA target sequence for CLECSF2 (NM_005127.2,740-758).
ctcgagattctcagagttt

SEQ ID NO: 174349 - DNA, 19 bp, Homo sapiens
  siRNA target sequence for CLECSF2 (NM_005127.2,763-781).
ccctatgattggattggtt

SEQ ID NO: 174350 - DNA, 19 bp, Homo sapiens
  siRNA target sequence for CLECSF2 (NM_005127.2,764-782).
cctatgattggattggttt

SEQ ID NO: 174351 - DNA, 19 bp, Homo sapiens
  siRNA target sequence for CLECSF2 (NM_005127.2,773-791).
ggattggtttccaaaacaa

SEQ ID NO: 174352 - DNA, 19 bp, Homo sapiens
  siRNA target sequence for CLECSF2 (NM_005127.2,824-842).
ggaattcaagtaaatacaa

SEQ ID NO: 174353 - DNA, 19 bp, Homo sapiens
  siRNA target sequence for CLECSF2 (NM_005127.2,853-871).
caacatgccgacctaacta

SEQ ID NO: 174354 - DNA, 19 bp, Homo sapiens
  siRNA target sequence for CLECSF2 (NM_005127.2,856-874).
catgccgacctaactataa

SEQ ID NO: 174355 - DNA, 19 bp, Homo sapiens
  siRNA target sequence for CLECSF2 (NM_005127.2,860-878).
ccgacctaactataattga

SEQ ID NO: 174356 - DNA, 19 bp, Homo sapiens
  siRNA target sequence for CLECSF2 (NM_005127.2,862-880).
gacctaactataattgaca

SEQ ID NO: 174357 - DNA, 19 bp, Homo sapiens
  siRNA target sequence for CLECSF2 (NM_005127.2,901-919).
cttaggcggtataaatgca

SEQ ID NO: 174358 - DNA, 19 bp, Homo sapiens
  siRNA target sequence for CLECSF2 (NM_005127.2,909-927).
gtataaatgcagttctgat

SEQ ID NO: 174359 - DNA, 19 bp, Homo sapiens
  siRNA target sequence for CLECSF2 (NM_005127.2,982-1000).
gctacatttaccaaatcgt

SEQ ID NO: 174360 - DNA, 19 bp, Homo sapiens
  siRNA target sequence for CLECSF2 (NM_005127.2,983-1001).
ctacatttaccaaatcgtt

SEQ ID NO: 174361 - DNA, 19 bp, Homo sapiens
  siRNA target sequence for CLECSF2 (NM_005127.2,1049-1067).
cagcaacagctagatgtta

SEQ ID NO: 174362 - DNA, 19 bp, Homo sapiens
  siRNA target sequence for CLECSF2 (NM_005127.2,1051-1069).
gcaacagctagatgttaca

SEQ ID NO: 174363 - DNA, 19 bp, Homo sapiens
  siRNA target sequence for CLECSF5 (NM_013252.2,212-230).
gatcatctctgggcttatt

SEQ ID NO: 174364 - DNA, 19 bp, Homo sapiens
  siRNA target sequence for CLECSF5 (NM_013252.2,233-251).
ggtagtgcttaaagttgtt

SEQ ID NO: 174365 - DNA, 19 bp, Homo sapiens
  siRNA target sequence for CLECSF5 (NM_013252.2,246-264).
gttgttggaatgaccttat

SEQ ID NO: 174366 - DNA, 19 bp, Homo sapiens
  siRNA target sequence for CLECSF5 (NM_013252.2,331-349).
gaacagtctcacagatttt

SEQ ID NO: 174367 - DNA, 19 bp, Homo sapiens
  siRNA target sequence for CLECSF5 (NM_013252.2,369-387).
cccaacggcttcattacca

SEQ ID NO: 174368 - DNA, 19 bp, Homo sapiens
  siRNA target sequence for CLECSF5 (NM_013252.2,505-523).
gatccacattggcaattgt

SEQ ID NO: 174369 - DNA, 19 bp, Homo sapiens
  siRNA target sequence for CLECSF5 (NM_013252.2,508-526).
ccacattggcaattgtcaa

SEQ ID NO: 174370 - DNA, 19 bp, Homo sapiens
  siRNA target sequence for CLECSF5 (NM_013252.2,564-582).
gatgctgagaagtatttta

SEQ ID NO: 174371 - DNA, 19 bp, Homo sapiens
  siRNA target sequence for CLECSF5 (NM_013252.2,613-631).
ggtggcgttggatcaacaa

SEQ ID NO: 174372 - DNA, 19 bp, Homo sapiens
  siRNA target sequence for CLECSF5 (NM_013252.2,636-654).
gtgttcaatggcaatgtta

SEQ ID NO: 174373 - DNA, 19 bp, Homo sapiens
  siRNA target sequence for CLECSF5 (NM_013252.2,641-659).
caatggcaatgttaccaat

SEQ ID NO: 174374 - DNA, 19 bp, Homo sapiens
  siRNA target sequence for CLECSF5 (NM_013252.2,681-699).
gcgaccattggcctaacaa

SEQ ID NO: 174375 - DNA, 19 bp, Homo sapiens
  siRNA target sequence for CLECSF5 (NM_013252.2,682-700).
cgaccattggcctaacaaa

SEQ ID NO: 174376 - DNA, 19 bp, Homo sapiens
  siRNA target sequence for CLECSF6 (NM_016184.2,269-287).
gctgaagtgaggttcaaaa

SEQ ID NO: 174377 - DNA, 19 bp, Homo sapiens
  siRNA target sequence for CLECSF6 (NM_016184.2,387-405).
gtgcctcactgttgatatt

SEQ ID NO: 174378 - DNA, 19 bp, Homo sapiens
  siRNA target sequence for CLECSF6 (NM_016184.2,409-427).
cctgctattggcaatctca

SEQ ID NO: 174379 - DNA, 19 bp, Homo sapiens
  siRNA target sequence for CLECSF6 (NM_016184.2,418-436).
ggcaatctcattctttatt

SEQ ID NO: 174380 - DNA, 19 bp, Homo sapiens
  siRNA target sequence for CLECSF6 (NM_016184.2,561-579).
gttgcccaaagaattggaa

SEQ ID NO: 174381 - DNA, 19 bp, Homo sapiens
  siRNA target sequence for CLECSF6 (NM_016184.2,662-680).
gctcacctgctggtgataa

SEQ ID NO: 174382 - DNA, 19 bp, Homo sapiens
  siRNA target sequence for CLECSF6 (NM_016184.2,663-681).
ctcacctgctggtgataaa

SEQ ID NO: 174383 - DNA, 19 bp, Homo sapiens
  siRNA target sequence for CLECSF6 (NM_016184.2,665-683).
cacctgctggtgataaaca

SEQ ID NO: 174384 - DNA, 19 bp, Homo sapiens
  siRNA target sequence for CLECSF6 (NM_016184.2,850-868).
gcgctgcgttgtgctaaat

SEQ ID NO: 174385 - DNA, 19 bp, Homo sapiens
  siRNA target sequence for CLECSF6 (NM_016184.2,851-869).
cgctgcgttgtgctaaatt

SEQ ID NO: 174386 - DNA, 19 bp, Homo sapiens
  siRNA target sequence for CLECSF6 (NM_016184.2,852-870).
gctgcgttgtgctaaattt

SEQ ID NO: 174387 - DNA, 19 bp, Homo sapiens
  siRNA target sequence for CLECSF6 (NM_016184.2,856-874).
cgttgtgctaaattttcgt

SEQ ID NO: 174388 - DNA, 19 bp, Homo sapiens
  siRNA target sequence for CLECSF6 (NM_016184.2,857-875).
gttgtgctaaattttcgta

SEQ ID NO: 174389 - DNA, 19 bp, Homo sapiens
  siRNA target sequence for CLECSF6 (NM_016184.2,860-878).
gtgctaaattttcgtaaat

SEQ ID NO: 174390 - DNA, 19 bp, Homo sapiens
  siRNA target sequence for CLECSF6 (NM_016184.2,862-880).
gctaaattttcgtaaatca

SEQ ID NO: 174391 - DNA, 19 bp, Homo sapiens
  siRNA target sequence for CLECSF6 (NM_016184.2,872-890).
cgtaaatcacccaaaagat

SEQ ID NO: 174392 - DNA, 19 bp, Homo sapiens
  siRNA target sequence for CLECSF6 (NM_016184.2,892-910).
gggctggaatgatgttaat

SEQ ID NO: 174393 - DNA, 19 bp, Homo sapiens
  siRNA target sequence for CLECSF6 (NM_016184.2,893-911).
ggctggaatgatgttaatt

SEQ ID NO: 174394 - DNA, 19 bp, Homo sapiens
  siRNA target sequence for CLECSF6 (NM_016184.2,897-915).
ggaatgatgttaattgtct

SEQ ID NO: 174395 - DNA, 19 bp, Homo sapiens
  siRNA target sequence for CLECSF6 (NM_016184.2,930-948).
cagtttgtgagatgatgaa

SEQ ID NO: 174396 - DNA, 19 bp, Homo sapiens
  siRNA target sequence for CLECSF6 (NM_194447.1,324-342).
ctgcagtctttcaaaaata

SEQ ID NO: 174397 - DNA, 19 bp, Homo sapiens
  siRNA target sequence for CLECSF8 (NM_080387.4,199-217).
gctagaaaaacctcaaagt

SEQ ID NO: 174398 - DNA, 19 bp, Homo sapiens
  siRNA target sequence for CLECSF8 (NM_080387.4,247-265).
gataccttcggttattgct

SEQ ID NO: 174399 - DNA, 19 bp, Homo sapiens
  siRNA target sequence for CLECSF8 (NM_080387.4,255-273).
cggttattgctgtagtttt

SEQ ID NO: 174400 - DNA, 19 bp, Homo sapiens
  siRNA target sequence for CLECSF8 (NM_080387.4,257-275).
gttattgctgtagttttca

SEQ ID NO: 174401 - DNA, 19 bp, Homo sapiens
  siRNA target sequence for CLECSF8 (NM_080387.4,328-346).
cttttcacgctgtaagaga

SEQ ID NO: 174402 - DNA, 19 bp, Homo sapiens
  siRNA target sequence for CLECSF8 (NM_080387.4,348-366).
gcacaggagtgcacaagtt

SEQ ID NO: 174403 - DNA, 19 bp, Homo sapiens
  siRNA target sequence for CLECSF8 (NM_080387.4,435-453).
ggaactgttgtcctattga

SEQ ID NO: 174404 - DNA, 19 bp, Homo sapiens
  siRNA target sequence for CLECSF8 (NM_080387.4,466-484).
ccagtccaactgctatttt

SEQ ID NO: 174405 - DNA, 19 bp, Homo sapiens
  siRNA target sequence for CLECSF8 (NM_080387.4,477-495).
gctattttcctcttactga

SEQ ID NO: 174406 - DNA, 19 bp, Homo sapiens
  siRNA target sequence for CLECSF8 (NM_080387.4,598-616).
ggatagacggctttcctat

SEQ ID NO: 174407 - DNA, 19 bp, Homo sapiens
  siRNA target sequence for CLECSF8 (NM_080387.4,599-617).
gatagacggctttcctatt

SEQ ID NO: 174408 - DNA, 19 bp, Homo sapiens
  siRNA target sequence for CLECSF8 (NM_080387.4,662-680).
gtggaccagacgccattta

SEQ ID NO: 174409 - DNA, 19 bp, Homo sapiens
  siRNA target sequence for CLECSF8 (NM_080387.4,746-764).
cttgtttataaccaagata

SEQ ID NO: 174410 - DNA, 19 bp, Homo sapiens
  siRNA target sequence for CLECSF8 (NM_080387.4,800-818).
gcaagtaggatttgtaaaa

SEQ ID NO: 174411 - DNA, 19 bp, Homo sapiens
  siRNA target sequence for CLECSF8 (NM_080387.4,821-839).
cctggaacaacattgaact

SEQ ID NO: 174412 - DNA, 19 bp, Homo sapiens
  siRNA target sequence for CLECSF9 (NM_014358.1,231-249).
ctgggatccccatcctatt

SEQ ID NO: 174413 - DNA, 19 bp, Homo sapiens
  siRNA target sequence for CLECSF9 (NM_014358.1,234-252).
ggatccccatcctatttct

SEQ ID NO: 174414 - DNA, 19 bp, Homo sapiens
  siRNA target sequence for CLECSF9 (NM_014358.1,283-301).
gacatttcgcatctttcaa

SEQ ID NO: 174415 - DNA, 19 bp, Homo sapiens
  siRNA target sequence for CLECSF9 (NM_014358.1,323-341).
cagctacctgagaatttca

SEQ ID NO: 174416 - DNA, 19 bp, Homo sapiens
  siRNA target sequence for CLECSF9 (NM_014358.1,371-389).
ggttcagtcaagaattgtt

SEQ ID NO: 174417 - DNA, 19 bp, Homo sapiens
  siRNA target sequence for CLECSF9 (NM_014358.1,392-410).
ccattgaactgggaatatt

SEQ ID NO: 174418 - DNA, 19 bp, Homo sapiens
  siRNA target sequence for CLECSF9 (NM_014358.1,445-463).
catttcctgggcgttaagt

SEQ ID NO: 174419 - DNA, 19 bp, Homo sapiens
  siRNA target sequence for CLECSF9 (NM_014358.1,450-468).
cctgggcgttaagtttaaa

SEQ ID NO: 174420 - DNA, 19 bp, Homo sapiens
  siRNA target sequence for CLECSF9 (NM_014358.1,453-471).
gggcgttaagtttaaagaa

SEQ ID NO: 174421 - DNA, 19 bp, Homo sapiens
  siRNA target sequence for CLECSF9 (NM_014358.1,455-473).
gcgttaagtttaaagaact

SEQ ID NO: 174422 - DNA, 19 bp, Homo sapiens
  siRNA target sequence for CLECSF9 (NM_014358.1,610-628).
ggacggcacacctttgaca

SEQ ID NO: 174423 - DNA, 19 bp, Homo sapiens
  siRNA target sequence for CLECSF9 (NM_014358.1,611-629).
gacggcacacctttgacaa

SEQ ID NO: 174424 - DNA, 19 bp, Homo sapiens
  siRNA target sequence for CLECSF9 (NM_014358.1,650-668).
gtaggggagcccaacaaca

SEQ ID NO: 174425 - DNA, 19 bp, Homo sapiens
  siRNA target sequence for CLECSF9 (NM_014358.1,656-674).
gagcccaacaacatagcta

SEQ ID NO: 174426 - DNA, 19 bp, Homo sapiens
  siRNA target sequence for CLECSF9 (NM_014358.1,712-730).
cccaaggcaaaattggaat

SEQ ID NO: 174427 - DNA, 19 bp, Homo sapiens
  siRNA target sequence for CLECSF9 (NM_014358.1,738-756).
cctgtttcctcaattattt

SEQ ID NO: 174428 - DNA, 19 bp, Homo sapiens
  siRNA target sequence for CLECSF9 (NM_014358.1,748-766).
caattattttcggatttgt

SEQ ID NO: 174429 - DNA, 19 bp, Homo sapiens
  siRNA target sequence for CLL-1 (NM_138337.2,367-385).
gcatgtttcacgtaacttt

SEQ ID NO: 174430 - DNA, 19 bp, Homo sapiens
  siRNA target sequence for CLL-1 (NM_138337.2,432-450).
gagctccagagaaatattt

SEQ ID NO: 174431 - DNA, 19 bp, Homo sapiens
  siRNA target sequence for CLL-1 (NM_138337.2,542-560).
gctatatagcaaagaacaa

SEQ ID NO: 174432 - DNA, 19 bp, Homo sapiens
  siRNA target sequence for CLL-1 (NM_138337.2,589-607).
gatggatttggcataagga

SEQ ID NO: 174433 - DNA, 19 bp, Homo sapiens
  siRNA target sequence for CLL-1 (NM_138337.2,599-617).
gcataaggacagctgttat

SEQ ID NO: 174434 - DNA, 19 bp, Homo sapiens
  siRNA target sequence for CLL-1 (NM_138337.2,600-618).
cataaggacagctgttatt

SEQ ID NO: 174435 - DNA, 19 bp, Homo sapiens
  siRNA target sequence for CLL-1 (NM_138337.2,605-623).
ggacagctgttatttccta

SEQ ID NO: 174436 - DNA, 19 bp, Homo sapiens
  siRNA target sequence for CLL-1 (NM_138337.2,606-624).
gacagctgttatttcctaa

SEQ ID NO: 174437 - DNA, 19 bp, Homo sapiens
  siRNA target sequence for CLL-1 (NM_138337.2,640-658).
catggcaggagagtaaaat

SEQ ID NO: 174438 - DNA, 19 bp, Homo sapiens
  siRNA target sequence for CLL-1 (NM_138337.2,678-696).
gccagcctgttgaagataa

SEQ ID NO: 174439 - DNA, 19 bp, Homo sapiens
  siRNA target sequence for CLL-1 (NM_138337.2,708-726).
gcattggaatttataaaat

SEQ ID NO: 174440 - DNA, 19 bp, Homo sapiens
  siRNA target sequence for CLL-1 (NM_138337.2,731-749).
gagtagatcatatgactat

SEQ ID NO: 174441 - DNA, 19 bp, Homo sapiens
  siRNA target sequence for CLL-1 (NM_138337.2,832-850).
gaaacgcacctgacttaaa

SEQ ID NO: 174442 - DNA, 19 bp, Homo sapiens
  siRNA target sequence for CLL-1 (NM_138337.2,840-858).
cctgacttaaataacatgt

SEQ ID NO: 174443 - DNA, 19 bp, Homo sapiens
  siRNA target sequence for CLL-1 (NM_138337.2,841-859).
ctgacttaaataacatgta

SEQ ID NO: 174444 - DNA, 19 bp, Homo sapiens
  siRNA target sequence for CLL-1 (NM_138337.2,862-880).
gtggatatataaatagact

SEQ ID NO: 174445 - DNA, 19 bp, Homo sapiens
  siRNA target sequence for CLL-1 (NM_138337.2,916-934).
gaatgatatgtgagaagat

SEQ ID NO: 174446 - DNA, 19 bp, Homo sapiens
  siRNA target sequence for CLL-1 (NM_138337.2,950-968).
gcttggttctacatatttt

SEQ ID NO: 174447 - DNA, 19 bp, Homo sapiens
  siRNA target sequence for CLL-1 (NM_138337.2,951-969).
cttggttctacatatttta

SEQ ID NO: 174448 - DNA, 19 bp, Homo sapiens
  siRNA target sequence for COLEC10 (NM_006438.2,89-107).
catccttgcttcgaagaaa

SEQ ID NO: 174449 - DNA, 19 bp, Homo sapiens
  siRNA target sequence for COLEC10 (NM_006438.2,93-111).
cttgcttcgaagaaaccaa

SEQ ID NO: 174450 - DNA, 19 bp, Homo sapiens
  siRNA target sequence for COLEC10 (NM_006438.2,101-119).
gaagaaaccaatttatcct

SEQ ID NO: 174451 - DNA, 19 bp, Homo sapiens
  siRNA target sequence for COLEC10 (NM_006438.2,149-167).
gtctgggtctggatattga

SEQ ID NO: 174452 - DNA, 19 bp, Homo sapiens
  siRNA target sequence for COLEC10 (NM_006438.2,189-207).
ctgtgccacacacacaatt

SEQ ID NO: 174453 - DNA, 19 bp, Homo sapiens
  siRNA target sequence for COLEC10 (NM_006438.2,288-306).
gccgaaaggaattaaagga

SEQ ID NO: 174454 - DNA, 19 bp, Homo sapiens
  siRNA target sequence for COLEC10 (NM_006438.2,440-458).
gaagataccggaaatttgt

SEQ ID NO: 174455 - DNA, 19 bp, Homo sapiens
  siRNA target sequence for COLEC10 (NM_006438.2,457-475).
gttggacaactggatatta

SEQ ID NO: 174456 - DNA, 19 bp, Homo sapiens
  siRNA target sequence for COLEC10 (NM_006438.2,460-478).
ggacaactggatattagta

SEQ ID NO: 174457 - DNA, 19 bp, Homo sapiens
  siRNA target sequence for COLEC10 (NM_006438.2,484-502).
cggctcaagacatctatga

SEQ ID NO: 174458 - DNA, 19 bp, Homo sapiens
  siRNA target sequence for COLEC10 (NM_006438.2,485-503).
ggctcaagacatctatgaa

SEQ ID NO: 174459 - DNA, 19 bp, Homo sapiens
  siRNA target sequence for COLEC10 (NM_006438.2,494-512).
catctatgaagtttgtcaa

SEQ ID NO: 174460 - DNA, 19 bp, Homo sapiens
  siRNA target sequence for COLEC10 (NM_006438.2,504-522).
gtttgtcaagaatgtgata

SEQ ID NO: 174461 - DNA, 19 bp, Homo sapiens
  siRNA target sequence for COLEC10 (NM_006438.2,524-542).
cagggattagggaaactga

SEQ ID NO: 174462 - DNA, 19 bp, Homo sapiens
  siRNA target sequence for COLEC10 (NM_006438.2,606-624).
gattcggggtggaatgcta

SEQ ID NO: 174463 - DNA, 19 bp, Homo sapiens
  siRNA target sequence for COLEC10 (NM_006438.2,653-671).
cactcatcgctgactatgt

SEQ ID NO: 174464 - DNA, 19 bp, Homo sapiens
  siRNA target sequence for COLEC10 (NM_006438.2,684-702).
cttctttcgggtgttcatt

SEQ ID NO: 174465 - DNA, 19 bp, Homo sapiens
  siRNA target sequence for COLEC10 (NM_006438.2,750-768).
cactccactgcagaactat

SEQ ID NO: 174466 - DNA, 19 bp, Homo sapiens
  siRNA target sequence for COLEC10 (NM_006438.2,854-872).
cagagtgccatcttaccat

SEQ ID NO: 174467 - DNA, 19 bp, Homo sapiens
  siRNA target sequence for COLEC10 (NM_006438.2,880-898).
gtctgtgagttcatcaaga

SEQ ID NO: 174468 - DNA, 19 bp, Homo sapiens
  siRNA target sequence for COLEC11 (NM_024027.3,165-183).
ccctggtgggcgttctaat

SEQ ID NO: 174469 - DNA, 19 bp, Homo sapiens
  siRNA target sequence for COLEC11 (NM_024027.3,167-185).
ctggtgggcgttctaatca

SEQ ID NO: 174470 - DNA, 19 bp, Homo sapiens
  siRNA target sequence for COLEC11 (NM_024027.3,381-399).
gtgtgggtcgtcatggaaa

SEQ ID NO: 174471 - DNA, 19 bp, Homo sapiens
  siRNA target sequence for COLEC11 (NM_024027.3,810-828).
ccatgcggaccttcaacaa

SEQ ID NO: 174472 - DNA, 19 bp, Homo sapiens
  siRNA target sequence for COLEC11 (NM_024027.3,835-853).
cagcggtgagcccaacaat

SEQ ID NO: 174473 - DNA, 19 bp, Homo sapiens
  siRNA target sequence for COLEC12 (NM_030781.2,214-232).
ggttacaagcggtttggta

SEQ ID NO: 174474 - DNA, 19 bp, Homo sapiens
  siRNA target sequence for COLEC12 (NM_030781.2,215-233).
gttacaagcggtttggtat

SEQ ID NO: 174475 - DNA, 19 bp, Homo sapiens
  siRNA target sequence for COLEC12 (NM_030781.2,277-295).
ctgaagttttctatcatat

SEQ ID NO: 174476 - DNA, 19 bp, Homo sapiens
  siRNA target sequence for COLEC12 (NM_030781.2,323-341).
caatcacagtagccatttt

SEQ ID NO: 174477 - DNA, 19 bp, Homo sapiens
  siRNA target sequence for COLEC12 (NM_030781.2,344-362).
gatataaagttgtagagaa

SEQ ID NO: 174478 - DNA, 19 bp, Homo sapiens
  siRNA target sequence for COLEC12 (NM_030781.2,373-391).
gtcacaggtggcatggaaa

SEQ ID NO: 174479 - DNA, 19 bp, Homo sapiens
  siRNA target sequence for COLEC12 (NM_030781.2,395-413).
ctcgccaaacctatgatga

SEQ ID NO: 174480 - DNA, 19 bp, Homo sapiens
  siRNA target sequence for COLEC12 (NM_030781.2,398-416).
gccaaacctatgatgacaa

SEQ ID NO: 174481 - DNA, 19 bp, Homo sapiens
  siRNA target sequence for COLEC12 (NM_030781.2,498-516).
caccttcagatcagacatt

SEQ ID NO: 174482 - DNA, 19 bp, Homo sapiens
  siRNA target sequence for COLEC12 (NM_030781.2,504-522).
cagatcagacattctagat

SEQ ID NO: 174483 - DNA, 19 bp, Homo sapiens
  siRNA target sequence for COLEC12 (NM_030781.2,506-524).
gatcagacattctagatct

SEQ ID NO: 174484 - DNA, 19 bp, Homo sapiens
  siRNA target sequence for COLEC12 (NM_030781.2,531-549).
gcaacttcgtgagattaca

SEQ ID NO: 174485 - DNA, 19 bp, Homo sapiens
  siRNA target sequence for COLEC12 (NM_030781.2,535-553).
cttcgtgagattacagaaa

SEQ ID NO: 174486 - DNA, 19 bp, Homo sapiens
  siRNA target sequence for COLEC12 (NM_030781.2,613-631).
gacaggcagagtcaattga

SEQ ID NO: 174487 - DNA, 19 bp, Homo sapiens
  siRNA target sequence for COLEC12 (NM_030781.2,615-633).
caggcagagtcaattgaaa

SEQ ID NO: 174488 - DNA, 19 bp, Homo sapiens
  siRNA target sequence for COLEC12 (NM_030781.2,688-706).
gcgtataatggctatgtca

SEQ ID NO: 174489 - DNA, 19 bp, Homo sapiens
  siRNA target sequence for COLEC12 (NM_030781.2,745-763).
ctgcagaaccaaatgtatt

SEQ ID NO: 174490 - DNA, 19 bp, Homo sapiens
  siRNA target sequence for COLEC12 (NM_030781.2,878-896).
gaatcaagaacgactttca

SEQ ID NO: 174491 - DNA, 19 bp, Homo sapiens
  siRNA target sequence for COLEC12 (NM_030781.2,1065-1083).
gaacatcaccactatctct

SEQ ID NO: 174492 - DNA, 19 bp, Homo sapiens
  siRNA target sequence for COLEC12 (NM_030781.2,1108-1126).
gacctgcaggacttacaca

SEQ ID NO: 174493 - DNA, 19 bp, Homo sapiens
  siRNA target sequence for COLEC12 (NM_030781.2,1110-1128).
cctgcaggacttacacaaa

SEQ ID NO: 174494 - DNA, 19 bp, Homo sapiens
  siRNA target sequence for COLEC12 (NM_030781.2,1182-1200).
gctctttgagacggatatt

SEQ ID NO: 174495 - DNA, 19 bp, Homo sapiens
  siRNA target sequence for COLEC12 (NM_030781.2,1193-1211).
cggatattgtgaacatcat

SEQ ID NO: 174496 - DNA, 19 bp, Homo sapiens
  siRNA target sequence for COLEC12 (NM_030781.2,1248-1266).
gctgaccagcaatctaaat

SEQ ID NO: 174497 - DNA, 19 bp, Homo sapiens
  siRNA target sequence for COLEC12 (NM_030781.2,1251-1269).
gaccagcaatctaaatgaa

SEQ ID NO: 174498 - DNA, 19 bp, Homo sapiens
  siRNA target sequence for COLEC12 (NM_030781.2,1253-1271).
ccagcaatctaaatgaagt

SEQ ID NO: 174499 - DNA, 19 bp, Homo sapiens
  siRNA target sequence for COLEC12 (NM_030781.2,1283-1301).
gcacagatacccttaccaa

SEQ ID NO: 174500 - DNA, 19 bp, Homo sapiens
  siRNA target sequence for COLEC12 (NM_030781.2,1288-1306).
gatacccttaccaaacaca

SEQ ID NO: 174501 - DNA, 19 bp, Homo sapiens
  siRNA target sequence for COLEC12 (NM_030781.2,1312-1330).
gatctgacctccttgaata

SEQ ID NO: 174502 - DNA, 19 bp, Homo sapiens
  siRNA target sequence for COLEC12 (NM_030781.2,1338-1356).
ggccaacatccgtttggat

SEQ ID NO: 174503 - DNA, 19 bp, Homo sapiens
  siRNA target sequence for COLEC12 (NM_030781.2,1339-1357).
gccaacatccgtttggatt

SEQ ID NO: 174504 - DNA, 19 bp, Homo sapiens
  siRNA target sequence for COLEC12 (NM_030781.2,1347-1365).
ccgtttggattctgtttct

SEQ ID NO: 174505 - DNA, 19 bp, Homo sapiens
  siRNA target sequence for COLEC12 (NM_030781.2,1395-1413).
gaggttagacactgaagta

SEQ ID NO: 174506 - DNA, 19 bp, Homo sapiens
  siRNA target sequence for COLEC12 (NM_030781.2,1414-1432).
gccaacttatcagtgatta

SEQ ID NO: 174507 - DNA, 19 bp, Homo sapiens
  siRNA target sequence for COLEC12 (NM_030781.2,1466-1484).
gtcagctcatcaagaattt

SEQ ID NO: 174508 - DNA, 19 bp, Homo sapiens
  siRNA target sequence for COLEC12 (NM_030781.2,1470-1488).
gctcatcaagaattttaca

SEQ ID NO: 174509 - DNA, 19 bp, Homo sapiens
  siRNA target sequence for COLEC12 (NM_030781.2,1471-1489).
ctcatcaagaattttacaa

SEQ ID NO: 174510 - DNA, 19 bp, Homo sapiens
  siRNA target sequence for COLEC12 (NM_030781.2,1473-1491).
catcaagaattttacaata

SEQ ID NO: 174511 - DNA, 19 bp, Homo sapiens
  siRNA target sequence for COLEC12 (NM_030781.2,1479-1497).
gaattttacaatactacaa

SEQ ID NO: 174512 - DNA, 19 bp, Homo sapiens
  siRNA target sequence for COLEC12 (NM_030781.2,1658-1676).
gtggcggcaaaggatctaa

SEQ ID NO: 174513 - DNA, 19 bp, Homo sapiens
  siRNA target sequence for COLEC12 (NM_130386.1,2056-2074).
gaggatgcaaagcttttct

SEQ ID NO: 174514 - DNA, 19 bp, Homo sapiens
  siRNA target sequence for COLEC12 (NM_130386.1,2114-2132).
gagaggaacagcaatggat

SEQ ID NO: 174515 - DNA, 19 bp, Homo sapiens
  siRNA target sequence for COLEC12 (NM_130386.1,2224-2242).
ccagactacaaaaattgga

SEQ ID NO: 174516 - DNA, 19 bp, Homo sapiens
  siRNA target sequence for COLEC12 (NM_130386.1,2245-2263).
gctggacagccggataact

SEQ ID NO: 174517 - DNA, 19 bp, Homo sapiens
  siRNA target sequence for COLEC12 (NM_130386.1,2290-2308).
gactgtgctgggttgattt

SEQ ID NO: 174518 - DNA, 19 bp, Homo sapiens
  siRNA target sequence for COLEC12 (NM_130386.1,2292-2310).
ctgtgctgggttgatttat

SEQ ID NO: 174519 - DNA, 19 bp, Homo sapiens
  siRNA target sequence for COLEC12 (NM_130386.1,2312-2330).
ctgggcagtggaacgattt

SEQ ID NO: 174520 - DNA, 19 bp, Homo sapiens
  siRNA target sequence for COLEC12 (NM_130386.1,2315-2333).
ggcagtggaacgatttcca

SEQ ID NO: 174521 - DNA, 19 bp, Homo sapiens
  siRNA target sequence for COLEC12 (NM_130386.1,2316-2334).
gcagtggaacgatttccaa

SEQ ID NO: 174522 - DNA, 19 bp, Homo sapiens
  siRNA target sequence for COLEC12 (NM_130386.1,2336-2354).
gtgaagacgtcaataactt

SEQ ID NO: 174523 - DNA, 19 bp, Homo sapiens
  siRNA target sequence for COLEC12 (NM_130386.1,2341-2359).
gacgtcaataacttcattt

SEQ ID NO: 174524 - DNA, 19 bp, Homo sapiens
  siRNA target sequence for CSAD (NM_015989.2,531-549).
gcggtgtcgggctgtgatt

SEQ ID NO: 174525 - DNA, 19 bp, Homo sapiens
  siRNA target sequence for CSAD (NM_015989.2,569-587).
gtcaccctcggttcttcaa

SEQ ID NO: 174526 - DNA, 19 bp, Homo sapiens
  siRNA target sequence for CSAD (NM_015989.2,740-758).
gctctggggacggaatctt

SEQ ID NO: 174527 - DNA, 19 bp, Homo sapiens
  siRNA target sequence for CSAD (NM_015989.2,780-798).
caacatgtatgctgtaaat

SEQ ID NO: 174528 - DNA, 19 bp, Homo sapiens
  siRNA target sequence for CSAD (NM_015989.2,1656-1674).
ggagggctccatgatgatt

SEQ ID NO: 174529 - DNA, 19 bp, Homo sapiens
  siRNA target sequence for DCL-1 (NM_014880.3,107-125).
cgcggactgtccttcatct

SEQ ID NO: 174530 - DNA, 19 bp, Homo sapiens
  siRNA target sequence for DCL-1 (NM_014880.3,121-139).
catctacttggattcagtt

SEQ ID NO: 174531 - DNA, 19 bp, Homo sapiens
  siRNA target sequence for DCL-1 (NM_014880.3,192-210).
gaggatgtcagaaatcagt

SEQ ID NO: 174532 - DNA, 19 bp, Homo sapiens
  siRNA target sequence for DCL-1 (NM_014880.3,218-236).
ccatggagcggacatgata

SEQ ID NO: 174533 - DNA, 19 bp, Homo sapiens
  siRNA target sequence for DCL-1 (NM_014880.3,222-240).
ggagcggacatgataagca

SEQ ID NO: 174534 - DNA, 19 bp, Homo sapiens
  siRNA target sequence for DCL-1 (NM_014880.3,227-245).
ggacatgataagcatacat

SEQ ID NO: 174535 - DNA, 19 bp, Homo sapiens
  siRNA target sequence for DCL-1 (NM_014880.3,292-310).
ggaaaggcccagatgatat

SEQ ID NO: 174536 - DNA, 19 bp, Homo sapiens
  siRNA target sequence for DCL-1 (NM_014880.3,336-354).
gatgatgcgagtttcaagt

SEQ ID NO: 174537 - DNA, 19 bp, Homo sapiens
  siRNA target sequence for DCL-1 (NM_014880.3,350-368).
caagtggtttgataattca

SEQ ID NO: 174538 - DNA, 19 bp, Homo sapiens
  siRNA target sequence for DCL-1 (NM_014880.3,353-371).
gtggtttgataattcaaat

SEQ ID NO: 174539 - DNA, 19 bp, Homo sapiens
  siRNA target sequence for DCL-1 (NM_014880.3,510-528).
gctatcccatacaaaagga

SEQ ID NO: 174540 - DNA, 19 bp, Homo sapiens
  siRNA target sequence for DCL-1 (NM_014880.3,511-529).
ctatcccatacaaaaggaa

SEQ ID NO: 174541 - DNA, 19 bp, Homo sapiens
  siRNA target sequence for DCL-1 (NM_014880.3,569-587).
gattgctagcacggtaatt

SEQ ID NO: 174542 - DNA, 19 bp, Homo sapiens
  siRNA target sequence for DCL-1 (NM_014880.3,573-591).
gctagcacggtaattttga

SEQ ID NO: 174543 - DNA, 19 bp, Homo sapiens
  siRNA target sequence for DCL-1 (NM_014880.3,592-610).
cagttttgggagcaatcat

SEQ ID NO: 174544 - DNA, 19 bp, Homo sapiens
  siRNA target sequence for DCL-1 (NM_014880.3,594-612).
gttttgggagcaatcattt

SEQ ID NO: 174545 - DNA, 19 bp, Homo sapiens
  siRNA target sequence for DCL-1 (NM_014880.3,613-631).
ggttcctgtacaaaaaaca

SEQ ID NO: 174546 - DNA, 19 bp, Homo sapiens
  siRNA target sequence for DCL-1 (NM_014880.3,617-635).
cctgtacaaaaaacattct

SEQ ID NO: 174547 - DNA, 19 bp, Homo sapiens
  siRNA target sequence for DCL-1 (NM_014880.3,640-658).
ctcgtttcaccacagtttt

SEQ ID NO: 174548 - DNA, 19 bp, Homo sapiens
  siRNA target sequence for DCL-1 (NM_014880.3,665-683).
cgcaccccaatcaccttat

SEQ ID NO: 174549 - DNA, 19 bp, Homo sapiens
  siRNA target sequence for DCL-1 (NM_014880.3,666-684).
gcaccccaatcaccttata

SEQ ID NO: 174550 - DNA, 19 bp, Homo sapiens
  siRNA target sequence for DCL-1 (NM_014880.3,667-685).
caccccaatcaccttataa

SEQ ID NO: 174551 - DNA, 19 bp, Homo sapiens
  siRNA target sequence for DGCR2 (NM_005137.1,741-759).
gttggctatcagtatgtta

SEQ ID NO: 174552 - DNA, 19 bp, Homo sapiens
  siRNA target sequence for DGCR2 (NM_005137.1,744-762).
ggctatcagtatgttatca

SEQ ID NO: 174553 - DNA, 19 bp, Homo sapiens
  siRNA target sequence for DGCR2 (NM_005137.1,955-973).
gctacgagaagtcttcatt

SEQ ID NO: 174554 - DNA, 19 bp, Homo sapiens
  siRNA target sequence for DGCR2 (NM_005137.1,956-974).
ctacgagaagtcttcattt

SEQ ID NO: 174555 - DNA, 19 bp, Homo sapiens
  siRNA target sequence for DGCR2 (NM_005137.1,1023-1041).
gatgaagggttctacttca

SEQ ID NO: 174556 - DNA, 19 bp, Homo sapiens
  siRNA target sequence for DGCR2 (NM_005137.1,1161-1179).
gagtgctgcaagttcatgt

SEQ ID NO: 174557 - DNA, 19 bp, Homo sapiens
  siRNA target sequence for DGCR2 (NM_005137.1,1327-1345).
ccctgattggagcaaactt

SEQ ID NO: 174558 - DNA, 19 bp, Homo sapiens
  siRNA target sequence for DGCR2 (NM_005137.1,1339-1357).
caaacttgcaccacttcaa

SEQ ID NO: 174559 - DNA, 19 bp, Homo sapiens
  siRNA target sequence for DGCR2 (NM_005137.1,1369-1387).
ggatccctggctttgatta

SEQ ID NO: 174560 - DNA, 19 bp, Homo sapiens
  siRNA target sequence for DGCR2 (NM_005137.1,1413-1431).
ctcacgccgctgcatcttt

SEQ ID NO: 174561 - DNA, 19 bp, Homo sapiens
  siRNA target sequence for DGCR2 (NM_005137.1,1415-1433).
cacgccgctgcatctttct

SEQ ID NO: 174562 - DNA, 19 bp, Homo sapiens
  siRNA target sequence for DGCR2 (NM_005137.1,1477-1495).
ctccctacacggcatacaa

SEQ ID NO: 174563 - DNA, 19 bp, Homo sapiens
  siRNA target sequence for DGCR2 (NM_005137.1,1479-1497).
ccctacacggcatacaagt

SEQ ID NO: 174564 - DNA, 19 bp, Homo sapiens
  siRNA target sequence for DGCR2 (NM_005137.1,1480-1498).
cctacacggcatacaagta

SEQ ID NO: 174565 - DNA, 19 bp, Homo sapiens
  siRNA target sequence for DGCR2 (NM_005137.1,1579-1597).
cagacgatgatgcttttga

SEQ ID NO: 174566 - DNA, 19 bp, Homo sapiens
  siRNA target sequence for DGCR2 (NM_005137.1,1636-1654).
ggagtgaaggtgcattact

SEQ ID NO: 174567 - DNA, 19 bp, Homo sapiens
  siRNA target sequence for DGCR2 (NM_005137.1,1813-1831).
gcagctccctcaatactgt

SEQ ID NO: 174568 - DNA, 19 bp, Homo sapiens
  siRNA target sequence for DTX2 (NM_020892.1,1520-1538).
gcatgacgagtgttctgat

SEQ ID NO: 174569 - DNA, 19 bp, Homo sapiens
  siRNA target sequence for DTX2 (NM_020892.1,1884-1902).
ctgcaacggcaataaggat

SEQ ID NO: 174570 - DNA, 19 bp, Homo sapiens
  siRNA target sequence for DTX2 (NM_020892.1,2018-2036).
gcgggaccatcctcatagt

SEQ ID NO: 174571 - DNA, 19 bp, Homo sapiens
  siRNA target sequence for DTX2 (NM_020892.1,2019-2037).
cgggaccatcctcatagtt

SEQ ID NO: 174572 - DNA, 19 bp, Homo sapiens
  siRNA target sequence for DTX2 (NM_020892.1,2020-2038).
gggaccatcctcatagttt

SEQ ID NO: 174573 - DNA, 19 bp, Homo sapiens
  siRNA target sequence for DTX2 (NM_020892.1,2021-2039).
ggaccatcctcatagttta

SEQ ID NO: 174574 - DNA, 19 bp, Homo sapiens
  siRNA target sequence for DTX2 (NM_020892.1,2266-2284).
gagatggaccgcaacatta

SEQ ID NO: 174575 - DNA, 19 bp, Homo sapiens
  siRNA target sequence for FCN3 (NM_003665.2,450-468).
ctcctacagagcaggtttt

SEQ ID NO: 174576 - DNA, 19 bp, Homo sapiens
  siRNA target sequence for FCN3 (NM_003665.2,709-727).
gacgctgaccacgattcaa

SEQ ID NO: 174577 - DNA, 19 bp, Homo sapiens
  siRNA target sequence for FCN3 (NM_003665.2,773-791).
catcctgttaccgatcaaa

SEQ ID NO: 174578 - DNA, 19 bp, Homo sapiens
  siRNA target sequence for FCN3 (NM_003665.2,776-794).
cctgttaccgatcaaatct

SEQ ID NO: 174579 - DNA, 19 bp, Homo sapiens
  siRNA target sequence for GCKR (NM_001486.2,74-92).
gcacaaaacggtttcaaca

SEQ ID NO: 174580 - DNA, 19 bp, Homo sapiens
  siRNA target sequence for GCKR (NM_001486.2,75-93).
cacaaaacggtttcaacat

SEQ ID NO: 174581 - DNA, 19 bp, Homo sapiens
  siRNA target sequence for GCKR (NM_001486.2,151-169).
ccaatcacggagaagtcaa

SEQ ID NO: 174582 - DNA, 19 bp, Homo sapiens
  siRNA target sequence for GCKR (NM_001486.2,284-302).
gactctacagcgaatccat

SEQ ID NO: 174583 - DNA, 19 bp, Homo sapiens
  siRNA target sequence for GCKR (NM_001486.2,412-430).
ctcatgtcggtgtccttta

SEQ ID NO: 174584 - DNA, 19 bp, Homo sapiens
  siRNA target sequence for GCKR (NM_001486.2,414-432).
catgtcggtgtcctttaat

SEQ ID NO: 174585 - DNA, 19 bp, Homo sapiens
  siRNA target sequence for GCKR (NM_001486.2,754-772).
gcagagcggatgcagaaaa

SEQ ID NO: 174586 - DNA, 19 bp, Homo sapiens
  siRNA target sequence for GCKR (NM_001486.2,831-849).
cggctcctcccggatgaaa

SEQ ID NO: 174587 - DNA, 19 bp, Homo sapiens
  siRNA target sequence for GCKR (NM_001486.2,873-891).
gctggaaaccctgttatta

SEQ ID NO: 174588 - DNA, 19 bp, Homo sapiens
  siRNA target sequence for GCKR (NM_001486.2,915-933).
gggcattgcagcatctcaa

SEQ ID NO: 174589 - DNA, 19 bp, Homo sapiens
  siRNA target sequence for GCKR (NM_001486.2,916-934).
ggcattgcagcatctcaaa

SEQ ID NO: 174590 - DNA, 19 bp, Homo sapiens
  siRNA target sequence for GCKR (NM_001486.2,935-953).
gatgcctcctggaaatctt

SEQ ID NO: 174591 - DNA, 19 bp, Homo sapiens
  siRNA target sequence for GCKR (NM_001486.2,945-963).
ggaaatcttgcggacattt

SEQ ID NO: 174592 - DNA, 19 bp, Homo sapiens
  siRNA target sequence for GCKR (NM_001486.2,987-1005).
cagccaaagccccaagatt

SEQ ID NO: 174593 - DNA, 19 bp, Homo sapiens
  siRNA target sequence for GCKR (NM_001486.2,1141-1159).
gatgtccgtggctttctca

SEQ ID NO: 174594 - DNA, 19 bp, Homo sapiens
  siRNA target sequence for GCKR (NM_001486.2,1163-1181).
gtgatcacagtgacatgtt

SEQ ID NO: 174595 - DNA, 19 bp, Homo sapiens
  siRNA target sequence for GCKR (NM_001486.2,1165-1183).
gatcacagtgacatgttta

SEQ ID NO: 174596 - DNA, 19 bp, Homo sapiens
  siRNA target sequence for GCKR (NM_001486.2,1259-1277).
cctctctcacggaaatcga

SEQ ID NO: 174597 - DNA, 19 bp, Homo sapiens
  siRNA target sequence for GCKR (NM_001486.2,1260-1278).
ctctctcacggaaatcgat

SEQ ID NO: 174598 - DNA, 19 bp, Homo sapiens
  siRNA target sequence for GCKR (NM_001486.2,1314-1332).
cacggaggtgcagactata

SEQ ID NO: 174599 - DNA, 19 bp, Homo sapiens
  siRNA target sequence for GCKR (NM_001486.2,1316-1334).
cggaggtgcagactatagt

SEQ ID NO: 174600 - DNA, 19 bp, Homo sapiens
  siRNA target sequence for GCKR (NM_001486.2,1498-1516).
cgtgagctaagcaccaaat

SEQ ID NO: 174601 - DNA, 19 bp, Homo sapiens
  siRNA target sequence for GCKR (NM_001486.2,1701-1719).
ccagccactgtcagatgat

SEQ ID NO: 174602 - DNA, 19 bp, Homo sapiens
  siRNA target sequence for GFPT1 (NM_002056.1,160-178).
ctcgaacgagacgagaaat

SEQ ID NO: 174603 - DNA, 19 bp, Homo sapiens
  siRNA target sequence for GFPT1 (NM_002056.1,339-357).
gttcacaagcaacaagata

SEQ ID NO: 174604 - DNA, 19 bp, Homo sapiens
  siRNA target sequence for GFPT1 (NM_002056.1,365-383).
ggatatagaatttgatgta

SEQ ID NO: 174605 - DNA, 19 bp, Homo sapiens
  siRNA target sequence for GFPT1 (NM_002056.1,444-462).
cacccccagcgctctgata

SEQ ID NO: 174606 - DNA, 19 bp, Homo sapiens
  siRNA target sequence for GFPT1 (NM_002056.1,446-464).
cccccagcgctctgataaa

SEQ ID NO: 174607 - DNA, 19 bp, Homo sapiens
  siRNA target sequence for GFPT1 (NM_002056.1,447-465).
ccccagcgctctgataaaa

SEQ ID NO: 174608 - DNA, 19 bp, Homo sapiens
  siRNA target sequence for GFPT1 (NM_002056.1,449-467).
ccagcgctctgataaaaat

SEQ ID NO: 174609 - DNA, 19 bp, Homo sapiens
  siRNA target sequence for GFPT1 (NM_002056.1,450-468).
cagcgctctgataaaaata

SEQ ID NO: 174610 - DNA, 19 bp, Homo sapiens
  siRNA target sequence for GFPT1 (NM_002056.1,452-470).
gcgctctgataaaaataat

SEQ ID NO: 174611 - DNA, 19 bp, Homo sapiens
  siRNA target sequence for GFPT1 (NM_002056.1,471-489).
gaatttatcgttattcaca

SEQ ID NO: 174612 - DNA, 19 bp, Homo sapiens
  siRNA target sequence for GFPT1 (NM_002056.1,541-559).
gctatgacttcgaatctga

SEQ ID NO: 174613 - DNA, 19 bp, Homo sapiens
  siRNA target sequence for GFPT1 (NM_002056.1,542-560).
ctatgacttcgaatctgaa

SEQ ID NO: 174614 - DNA, 19 bp, Homo sapiens
  siRNA target sequence for GFPT1 (NM_002056.1,574-592).
caattgccaagctcgttaa

SEQ ID NO: 174615 - DNA, 19 bp, Homo sapiens
  siRNA target sequence for GFPT1 (NM_002056.1,579-597).
gccaagctcgttaagtata

SEQ ID NO: 174616 - DNA, 19 bp, Homo sapiens
  siRNA target sequence for GFPT1 (NM_002056.1,588-606).
gttaagtatatgtatgaca

SEQ ID NO: 174617 - DNA, 19 bp, Homo sapiens
  siRNA target sequence for GFPT1 (NM_002056.1,618-636).
caagataccagctttacta

SEQ ID NO: 174618 - DNA, 19 bp, Homo sapiens
  siRNA target sequence for GFPT1 (NM_002056.1,637-655).
ccttggtggagagagttat

SEQ ID NO: 174619 - DNA, 19 bp, Homo sapiens
  siRNA target sequence for GFPT1 (NM_002056.1,645-663).
gagagagttatccaacaat

SEQ ID NO: 174620 - DNA, 19 bp, Homo sapiens
  siRNA target sequence for GFPT1 (NM_002056.1,730-748).
gaggtagccctctgttgat

SEQ ID NO: 174621 - DNA, 19 bp, Homo sapiens
  siRNA target sequence for GFPT1 (NM_002056.1,750-768).
ggtgtacggagtgaacata

SEQ ID NO: 174622 - DNA, 19 bp, Homo sapiens
  siRNA target sequence for GFPT1 (NM_002056.1,751-769).
gtgtacggagtgaacataa

SEQ ID NO: 174623 - DNA, 19 bp, Homo sapiens
  siRNA target sequence for GFPT1 (NM_002056.1,756-774).
cggagtgaacataaacttt

SEQ ID NO: 174624 - DNA, 19 bp, Homo sapiens
  siRNA target sequence for GFPT1 (NM_002056.1,775-793).
ctactgatcacattcctat

SEQ ID NO: 174625 - DNA, 19 bp, Homo sapiens
  siRNA target sequence for GFPT1 (NM_002056.1,778-796).
ctgatcacattcctatact

SEQ ID NO: 174626 - DNA, 19 bp, Homo sapiens
  siRNA target sequence for GFPT1 (NM_002056.1,780-798).
gatcacattcctatactct

SEQ ID NO: 174627 - DNA, 19 bp, Homo sapiens
  siRNA target sequence for GFPT1 (NM_002056.1,861-879).
cttttcccggtggaagaaa

SEQ ID NO: 174628 - DNA, 19 bp, Homo sapiens
  siRNA target sequence for GFPT1 (NM_002056.1,931-949).
ccaatcgcgtcatctttct

SEQ ID NO: 174629 - DNA, 19 bp, Homo sapiens
  siRNA target sequence for GFPT1 (NM_002056.1,985-1003).
gtctttctatccatcgaat

SEQ ID NO: 174630 - DNA, 19 bp, Homo sapiens
  siRNA target sequence for GFPT1 (NM_002056.1,1030-1048).
gacgagctgtgcaaacact

SEQ ID NO: 174631 - DNA, 19 bp, Homo sapiens
  siRNA target sequence for GFPT1 (NM_002056.1,1154-1172).
caactttgatgactatact

SEQ ID NO: 174632 - DNA, 19 bp, Homo sapiens
  siRNA target sequence for GFPT1 (NM_002056.1,1185-1203).
ggtttgaaggatcacataa

SEQ ID NO: 174633 - DNA, 19 bp, Homo sapiens
  siRNA target sequence for GFPT1 (NM_002056.1,1223-1241).
gcgtttgattcttattgct

SEQ ID NO: 174634 - DNA, 19 bp, Homo sapiens
  siRNA target sequence for GFPT1 (NM_002056.1,1340-1358).
cagaaacacaccagtcttt

SEQ ID NO: 174635 - DNA, 19 bp, Homo sapiens
  siRNA target sequence for GFPT1 (NM_002056.1,1353-1371).
gtctttcgagatgatgttt

SEQ ID NO: 174636 - DNA, 19 bp, Homo sapiens
  siRNA target sequence for GFPT1 (NM_002056.1,1408-1426).
ctttgatgggtcttcgtta

SEQ ID NO: 174637 - DNA, 19 bp, Homo sapiens
  siRNA target sequence for GFPT1 (NM_002056.1,1412-1430).
gatgggtcttcgttactgt

SEQ ID NO: 174638 - DNA, 19 bp, Homo sapiens
  siRNA target sequence for GFPT1 (NM_002056.1,1495-1513).
cagattgtggagttcatat

SEQ ID NO: 174639 - DNA, 19 bp, Homo sapiens
  siRNA target sequence for GFPT1 (NM_002056.1,1497-1515).
gattgtggagttcatatta

SEQ ID NO: 174640 - DNA, 19 bp, Homo sapiens
  siRNA target sequence for GFPT1 (NM_002056.1,1552-1570).
cttataccagccagtttgt

SEQ ID NO: 174641 - DNA, 19 bp, Homo sapiens
  siRNA target sequence for GFPT1 (NM_002056.1,1637-1655).
gatcatgcttggattgaaa

SEQ ID NO: 174642 - DNA, 19 bp, Homo sapiens
  siRNA target sequence for GFPT1 (NM_002056.1,1656-1674).
cggctgcctgatttgatta

SEQ ID NO: 174643 - DNA, 19 bp, Homo sapiens
  siRNA target sequence for GFPT1 (NM_002056.1,1657-1675).
ggctgcctgatttgattaa

SEQ ID NO: 174644 - DNA, 19 bp, Homo sapiens
  siRNA target sequence for GFPT1 (NM_002056.1,1685-1703).
gagcatggatgacgaaatt

SEQ ID NO: 174645 - DNA, 19 bp, Homo sapiens
  siRNA target sequence for GFPT1 (NM_002056.1,1687-1705).
gcatggatgacgaaattca

SEQ ID NO: 174646 - DNA, 19 bp, Homo sapiens
  siRNA target sequence for GFPT1 (NM_002056.1,1755-1773).
cgaggctatcattatgcta

SEQ ID NO: 174647 - DNA, 19 bp, Homo sapiens
  siRNA target sequence for GFPT1 (NM_002056.1,1760-1778).
ctatcattatgctacttgt

SEQ ID NO: 174648 - DNA, 19 bp, Homo sapiens
  siRNA target sequence for GFPT1 (NM_002056.1,1828-1846).
gcatccttgctggtgaatt

SEQ ID NO: 174649 - DNA, 19 bp, Homo sapiens
  siRNA target sequence for GFPT1 (NM_002056.1,1863-1881).
gctttggtggataaattga

SEQ ID NO: 174650 - DNA, 19 bp, Homo sapiens
  siRNA target sequence for GFPT1 (NM_002056.1,1966-1984).
ggcctgtggtaatttgtga

SEQ ID NO: 174651 - DNA, 19 bp, Homo sapiens
  siRNA target sequence for GFPT1 (NM_002056.1,1969-1987).
ctgtggtaatttgtgataa

SEQ ID NO: 174652 - DNA, 19 bp, Homo sapiens
  siRNA target sequence for GFPT1 (NM_002056.1,2068-2086).
gcgtgatccctttacagtt

SEQ ID NO: 174653 - DNA, 19 bp, Homo sapiens
  siRNA target sequence for GFPT2 (NM_005110.1,106-124).
ggaatctttgcctacatga

SEQ ID NO: 174654 - DNA, 19 bp, Homo sapiens
  siRNA target sequence for GFPT2 (NM_005110.1,107-125).
gaatctttgcctacatgaa

SEQ ID NO: 174655 - DNA, 19 bp, Homo sapiens
  siRNA target sequence for GFPT2 (NM_005110.1,219-237).
ggcgatcgatgggaataat

SEQ ID NO: 174656 - DNA, 19 bp, Homo sapiens
  siRNA target sequence for GFPT2 (NM_005110.1,221-239).
cgatcgatgggaataatca

SEQ ID NO: 174657 - DNA, 19 bp, Homo sapiens
  siRNA target sequence for GFPT2 (NM_005110.1,230-248).
ggaataatcacgaagtcaa

SEQ ID NO: 174658 - DNA, 19 bp, Homo sapiens
  siRNA target sequence for GFPT2 (NM_005110.1,231-249).
gaataatcacgaagtcaaa

SEQ ID NO: 174659 - DNA, 19 bp, Homo sapiens
  siRNA target sequence for GFPT2 (NM_005110.1,291-309).
ggctctcgatgaagaactt

SEQ ID NO: 174660 - DNA, 19 bp, Homo sapiens
  siRNA target sequence for GFPT2 (NM_005110.1,425-443).
cagacaaaggcaacgaatt

SEQ ID NO: 174661 - DNA, 19 bp, Homo sapiens
  siRNA target sequence for GFPT2 (NM_005110.1,434-452).
gcaacgaatttgttgtcat

SEQ ID NO: 174662 - DNA, 19 bp, Homo sapiens
  siRNA target sequence for GFPT2 (NM_005110.1,456-474).
caatgggatcatcacaaat

SEQ ID NO: 174663 - DNA, 19 bp, Homo sapiens
  siRNA target sequence for GFPT2 (NM_005110.1,460-478).
gggatcatcacaaattaca

SEQ ID NO: 174664 - DNA, 19 bp, Homo sapiens
  siRNA target sequence for GFPT2 (NM_005110.1,503-521).
gcaaaggctacgagtttga

SEQ ID NO: 174665 - DNA, 19 bp, Homo sapiens
  siRNA target sequence for GFPT2 (NM_005110.1,516-534).
gtttgagtcagaaacagat

SEQ ID NO: 174666 - DNA, 19 bp, Homo sapiens
  siRNA target sequence for GFPT2 (NM_005110.1,542-560).
ccatcgccaagctgattaa

SEQ ID NO: 174667 - DNA, 19 bp, Homo sapiens
  siRNA target sequence for GFPT2 (NM_005110.1,543-561).
catcgccaagctgattaaa

SEQ ID NO: 174668 - DNA, 19 bp, Homo sapiens
  siRNA target sequence for GFPT2 (NM_005110.1,565-583).
gtgttcgacaacagagaaa

SEQ ID NO: 174669 - DNA, 19 bp, Homo sapiens
  siRNA target sequence for GFPT2 (NM_005110.1,567-585).
gttcgacaacagagaaact

SEQ ID NO: 174670 - DNA, 19 bp, Homo sapiens
  siRNA target sequence for GFPT2 (NM_005110.1,580-598).
gaaactgaggacattacgt

SEQ ID NO: 174671 - DNA, 19 bp, Homo sapiens
  siRNA target sequence for GFPT2 (NM_005110.1,606-624).
gttggtcgagagagtcatt

SEQ ID NO: 174672 - DNA, 19 bp, Homo sapiens
  siRNA target sequence for GFPT2 (NM_005110.1,638-656).
gtgcattcgcgctggtttt

SEQ ID NO: 174673 - DNA, 19 bp, Homo sapiens
  siRNA target sequence for GFPT2 (NM_005110.1,640-658).
gcattcgcgctggttttca

SEQ ID NO: 174674 - DNA, 19 bp, Homo sapiens
  siRNA target sequence for GFPT2 (NM_005110.1,641-659).
cattcgcgctggttttcaa

SEQ ID NO: 174675 - DNA, 19 bp, Homo sapiens
  siRNA target sequence for GFPT2 (NM_005110.1,746-764).
cagaacagatccctatctt

SEQ ID NO: 174676 - DNA, 19 bp, Homo sapiens
  siRNA target sequence for GFPT2 (NM_005110.1,748-766).
gaacagatccctatcttat

SEQ ID NO: 174677 - DNA, 19 bp, Homo sapiens
  siRNA target sequence for GFPT2 (NM_005110.1,751-769).
cagatccctatcttataca

SEQ ID NO: 174678 - DNA, 19 bp, Homo sapiens
  siRNA target sequence for GFPT2 (NM_005110.1,773-791).
cgtgcactctggagaatgt

SEQ ID NO: 174679 - DNA, 19 bp, Homo sapiens
  siRNA target sequence for GFPT2 (NM_005110.1,854-872).
gcgacaaggccgtggaatt

SEQ ID NO: 174680 - DNA, 19 bp, Homo sapiens
  siRNA target sequence for GFPT2 (NM_005110.1,865-883).
gtggaattcttctttgctt

SEQ ID NO: 174681 - DNA, 19 bp, Homo sapiens
  siRNA target sequence for GFPT2 (NM_005110.1,1089-1107).
cttcgaacagccagaatca

SEQ ID NO: 174682 - DNA, 19 bp, Homo sapiens
  siRNA target sequence for GFPT2 (NM_005110.1,1092-1110).
cgaacagccagaatcagtt

SEQ ID NO: 174683 - DNA, 19 bp, Homo sapiens
  siRNA target sequence for GFPT2 (NM_005110.1,1093-1111).
gaacagccagaatcagttt

SEQ ID NO: 174684 - DNA, 19 bp, Homo sapiens
  siRNA target sequence for GFPT2 (NM_005110.1,1124-1142).
gaggtcgggtgaattttga

SEQ ID NO: 174685 - DNA, 19 bp, Homo sapiens
  siRNA target sequence for GFPT2 (NM_005110.1,1126-1144).
ggtcgggtgaattttgaaa

SEQ ID NO: 174686 - DNA, 19 bp, Homo sapiens
  siRNA target sequence for GFPT2 (NM_005110.1,1246-1264).
gtggctacgcggcaagttt

SEQ ID NO: 174687 - DNA, 19 bp, Homo sapiens
  siRNA target sequence for GFPT2 (NM_005110.1,1250-1268).
ctacgcggcaagttttgga

SEQ ID NO: 174688 - DNA, 19 bp, Homo sapiens
  siRNA target sequence for GFPT2 (NM_005110.1,1293-1311).
ggttgaacttgctagtgat

SEQ ID NO: 174689 - DNA, 19 bp, Homo sapiens
  siRNA target sequence for GFPT2 (NM_005110.1,1393-1411).
ctggcgctgcgctactgta

SEQ ID NO: 174690 - DNA, 19 bp, Homo sapiens
  siRNA target sequence for GFPT2 (NM_005110.1,1532-1550).
cttataccagtcagttcat

SEQ ID NO: 174691 - DNA, 19 bp, Homo sapiens
  siRNA target sequence for GFPT2 (NM_005110.1,1588-1606).
cgaatttcactacaaaaca

SEQ ID NO: 174692 - DNA, 19 bp, Homo sapiens
  siRNA target sequence for GFPT2 (NM_005110.1,1623-1641).
ccgtggcttgagatcttta

SEQ ID NO: 174693 - DNA, 19 bp, Homo sapiens
  siRNA target sequence for GFPT2 (NM_005110.1,1864-1882).
cccgtcatcatggtcatta

SEQ ID NO: 174694 - DNA, 19 bp, Homo sapiens
  siRNA target sequence for GFPT2 (NM_005110.1,1867-1885).
gtcatcatggtcattatga

SEQ ID NO: 174695 - DNA, 19 bp, Homo sapiens
  siRNA target sequence for GFPT2 (NM_005110.1,1937-1955).
gccagggtcgccccattat

SEQ ID NO: 174696 - DNA, 19 bp, Homo sapiens
  siRNA target sequence for GFPT2 (NM_005110.1,1938-1956).
ccagggtcgccccattata

SEQ ID NO: 174697 - DNA, 19 bp, Homo sapiens
  siRNA target sequence for GFPT2 (NM_005110.1,1942-1960).
ggtcgccccattatactgt

SEQ ID NO: 174698 - DNA, 19 bp, Homo sapiens
  siRNA target sequence for GFPT2 (NM_005110.1,1965-1983).
caaggacgatactgaaagt

SEQ ID NO: 174699 - DNA, 19 bp, Homo sapiens
  siRNA target sequence for GFPT2 (NM_005110.1,1986-2004).
caagtttgcgtataagaca

SEQ ID NO: 174700 - DNA, 19 bp, Homo sapiens
  siRNA target sequence for GFPT2 (NM_005110.1,1989-2007).
gtttgcgtataagacaatt

SEQ ID NO: 174701 - DNA, 19 bp, Homo sapiens
  siRNA target sequence for GFPT2 (NM_005110.1,2093-2111).
gaggatatgacgttgactt

SEQ ID NO: 174702 - DNA, 19 bp, Homo sapiens
  siRNA target sequence for ITLN1 (NM_017625.2,172-190).
cagatgaggctaatactta

SEQ ID NO: 174703 - DNA, 19 bp, Homo sapiens
  siRNA target sequence for ITLN1 (NM_017625.2,811-829).
ctgcgggatttgttcagtt

SEQ ID NO: 174704 - DNA, 19 bp, Homo sapiens
  siRNA target sequence for ITLN1 (NM_017625.2,881-899).
ggtcaccggatgtaacact

SEQ ID NO: 174705 - DNA, 19 bp, Homo sapiens
  siRNA target sequence for ITLN1 (NM_017625.2,1010-1028).
cagcagccgtgagataact

SEQ ID NO: 174706 - DNA, 19 bp, Homo sapiens
  siRNA target sequence for ITLN1 (NM_017625.2,1012-1030).
gcagccgtgagataactga

SEQ ID NO: 174707 - DNA, 19 bp, Homo sapiens
  siRNA target sequence for ITLN1 (NM_017625.2,1029-1047).
gaggcagctgtgcttctat

SEQ ID NO: 174708 - DNA, 19 bp, Homo sapiens
  siRNA target sequence for ITLN1 (NM_017625.2,1032-1050).
gcagctgtgcttctattct

SEQ ID NO: 174709 - DNA, 19 bp, Homo sapiens
  siRNA target sequence for ITLN1 (NM_017625.2,1038-1056).
gtgcttctattctatcgtt

SEQ ID NO: 174710 - DNA, 19 bp, Homo sapiens
  siRNA target sequence for ITLN2 (NM_080878.2,160-178).
gctctcgagggaattcgaa

SEQ ID NO: 174711 - DNA, 19 bp, Homo sapiens
  siRNA target sequence for ITLN2 (NM_080878.2,161-179).
ctctcgagggaattcgaaa

SEQ ID NO: 174712 - DNA, 19 bp, Homo sapiens
  siRNA target sequence for ITLN2 (NM_080878.2,273-291).
ccaagaatggtgttgtcta

SEQ ID NO: 174713 - DNA, 19 bp, Homo sapiens
  siRNA target sequence for ITLN2 (NM_080878.2,741-759).
ctaagaagactgcatctta

SEQ ID NO: 174714 - DNA, 19 bp, Homo sapiens
  siRNA target sequence for ITLN2 (NM_080878.2,769-787).
gtatggtcaacgggaattt

SEQ ID NO: 174715 - DNA, 19 bp, Homo sapiens
  siRNA target sequence for ITLN2 (NM_080878.2,840-858).
ccctttgtgctgggataaa

SEQ ID NO: 174716 - DNA, 19 bp, Homo sapiens
  siRNA target sequence for ITLN2 (NM_080878.2,841-859).
cctttgtgctgggataaaa

SEQ ID NO: 174717 - DNA, 19 bp, Homo sapiens
  siRNA target sequence for ITLN2 (NM_080878.2,963-981).
gatatggaactcacgttaa

SEQ ID NO: 174718 - DNA, 19 bp, Homo sapiens
  siRNA target sequence for ITLN2 (NM_080878.2,1005-1023).
cggaggcggctgtactctt

SEQ ID NO: 174719 - DNA, 19 bp, Homo sapiens
  siRNA target sequence for ITLN2 (NM_080878.2,1010-1028).
gcggctgtactcttgttct

SEQ ID NO: 174720 - DNA, 19 bp, Homo sapiens
  siRNA target sequence for ITLN2 (NM_080878.2,1011-1029).
cggctgtactcttgttcta

SEQ ID NO: 174721 - DNA, 19 bp, Homo sapiens
  siRNA target sequence for ITLN2 (NM_080878.2,1012-1030).
ggctgtactcttgttctat

SEQ ID NO: 174722 - DNA, 19 bp, Homo sapiens
  siRNA target sequence for ITLN2 (NM_080878.2,1013-1031).
gctgtactcttgttctata

SEQ ID NO: 174723 - DNA, 19 bp, Homo sapiens
  siRNA target sequence for ITLN2 (NM_080878.2,1016-1034).
gtactcttgttctatagat

SEQ ID NO: 174724 - DNA, 19 bp, Homo sapiens
  siRNA target sequence for KLRB1 (NM_002258.1,63-81).
ggaccaacaagcaatatat

SEQ ID NO: 174725 - DNA, 19 bp, Homo sapiens
  siRNA target sequence for KLRB1 (NM_002258.1,73-91).
gcaatatatgctgagttaa

SEQ ID NO: 174726 - DNA, 19 bp, Homo sapiens
  siRNA target sequence for KLRB1 (NM_002258.1,157-175).
ggttcaccttggcatcaat

SEQ ID NO: 174727 - DNA, 19 bp, Homo sapiens
  siRNA target sequence for KLRB1 (NM_002258.1,158-176).
gttcaccttggcatcaatt

SEQ ID NO: 174728 - DNA, 19 bp, Homo sapiens
  siRNA target sequence for KLRB1 (NM_002258.1,172-190).
caatttgccctgaaactta

SEQ ID NO: 174729 - DNA, 19 bp, Homo sapiens
  siRNA target sequence for KLRB1 (NM_002258.1,191-209).
gctgtgctgggattattct

SEQ ID NO: 174730 - DNA, 19 bp, Homo sapiens
  siRNA target sequence for KLRB1 (NM_002258.1,208-226).
ctccttgtcttggttgtta

SEQ ID NO: 174731 - DNA, 19 bp, Homo sapiens
  siRNA target sequence for KLRB1 (NM_002258.1,210-228).
ccttgtcttggttgttact

SEQ ID NO: 174732 - DNA, 19 bp, Homo sapiens
  siRNA target sequence for KLRB1 (NM_002258.1,238-256).
gtttcagtgacatccttaa

SEQ ID NO: 174733 - DNA, 19 bp, Homo sapiens
  siRNA target sequence for KLRB1 (NM_002258.1,244-262).
gtgacatccttaatacaga

SEQ ID NO: 174734 - DNA, 19 bp, Homo sapiens
  siRNA target sequence for KLRB1 (NM_002258.1,246-264).
gacatccttaatacagaaa

SEQ ID NO: 174735 - DNA, 19 bp, Homo sapiens
  siRNA target sequence for KLRB1 (NM_002258.1,333-351).
cttaaactgcccaatatat

SEQ ID NO: 174736 - DNA, 19 bp, Homo sapiens
  siRNA target sequence for KLRB1 (NM_002258.1,363-381).
ccgagagaaatgcttgtta

SEQ ID NO: 174737 - DNA, 19 bp, Homo sapiens
  siRNA target sequence for KLRB1 (NM_002258.1,392-410).
ctgtcaacccttggaataa

SEQ ID NO: 174738 - DNA, 19 bp, Homo sapiens
  siRNA target sequence for KLRB1 (NM_002258.1,394-412).
gtcaacccttggaataaca

SEQ ID NO: 174739 - DNA, 19 bp, Homo sapiens
  siRNA target sequence for KLRB1 (NM_002258.1,396-414).
caacccttggaataacagt

SEQ ID NO: 174740 - DNA, 19 bp, Homo sapiens
  siRNA target sequence for KLRB1 (NM_002258.1,441-459).
cagcctgctgcttattcga

SEQ ID NO: 174741 - DNA, 19 bp, Homo sapiens
  siRNA target sequence for KLRB1 (NM_002258.1,486-504).
gaacctgatacgtgacaaa

SEQ ID NO: 174742 - DNA, 19 bp, Homo sapiens
  siRNA target sequence for KLRB1 (NM_002258.1,492-510).
gatacgtgacaaagcaatt

SEQ ID NO: 174743 - DNA, 19 bp, Homo sapiens
  siRNA target sequence for KLRB1 (NM_002258.1,511-529).
ctgttttggattggattaa

SEQ ID NO: 174744 - DNA, 19 bp, Homo sapiens
  siRNA target sequence for KLRB1 (NM_002258.1,558-576).
gtggataaacggctctttt

SEQ ID NO: 174745 - DNA, 19 bp, Homo sapiens
  siRNA target sequence for KLRB1 (NM_002258.1,560-578).
ggataaacggctctttttt

SEQ ID NO: 174746 - DNA, 19 bp, Homo sapiens
  siRNA target sequence for KLRB1 (NM_002258.1,561-579).
gataaacggctctttttta

SEQ ID NO: 174747 - DNA, 19 bp, Homo sapiens
  siRNA target sequence for KLRB1 (NM_002258.1,658-676).
gagtactgtagtacagaaa

SEQ ID NO: 174748 - DNA, 19 bp, Homo sapiens
  siRNA target sequence for KLRB1 (NM_002258.1,684-702).
gatctgccaaaaagaacta

SEQ ID NO: 174749 - DNA, 19 bp, Homo sapiens
  siRNA target sequence for KLRB1 (NM_002258.1,687-705).
ctgccaaaaagaactaaca

SEQ ID NO: 174750 - DNA, 19 bp, Homo sapiens
  siRNA target sequence for KLRC1 (NM_002259.2,248-266).
gataaccaaggagtaatct

SEQ ID NO: 174751 - DNA, 19 bp, Homo sapiens
  siRNA target sequence for KLRC1 (NM_002259.2,345-363).
ctgaacaggaaataaccta

SEQ ID NO: 174752 - DNA, 19 bp, Homo sapiens
  siRNA target sequence for KLRC1 (NM_002259.2,361-379).
ctatgcggaattaaacctt

SEQ ID NO: 174753 - DNA, 19 bp, Homo sapiens
  siRNA target sequence for KLRC1 (NM_002259.2,464-482).
gggatcctgggaattatct

SEQ ID NO: 174754 - DNA, 19 bp, Homo sapiens
  siRNA target sequence for KLRC1 (NM_002259.2,466-484).
gatcctgggaattatctgt

SEQ ID NO: 174755 - DNA, 19 bp, Homo sapiens
  siRNA target sequence for KLRC1 (NM_002259.2,470-488).
ctgggaattatctgtctta

SEQ ID NO: 174756 - DNA, 19 bp, Homo sapiens
  siRNA target sequence for KLRC1 (NM_002259.2,496-514).
ggcctctgtggtaacgata

SEQ ID NO: 174757 - DNA, 19 bp, Homo sapiens
  siRNA target sequence for KLRC1 (NM_002259.2,499-517).
ctctgtggtaacgatagtt

SEQ ID NO: 174758 - DNA, 19 bp, Homo sapiens
  siRNA target sequence for KLRC1 (NM_002259.2,505-523).
ggtaacgatagttgttatt

SEQ ID NO: 174759 - DNA, 19 bp, Homo sapiens
  siRNA target sequence for KLRC1 (NM_002259.2,524-542).
ccctctacattaatacaga

SEQ ID NO: 174760 - DNA, 19 bp, Homo sapiens
  siRNA target sequence for KLRC4 (NM_013431.1,475-493).
gagtactggagcagaacaa

SEQ ID NO: 174761 - DNA, 19 bp, Homo sapiens
  siRNA target sequence for KLRD1 (NM_002262.2,277-295).
ccactctgtggaggttaat

SEQ ID NO: 174762 - DNA, 19 bp, Homo sapiens
  siRNA target sequence for KLRD1 (NM_002262.2,278-296).
cactctgtggaggttaatt

SEQ ID NO: 174763 - DNA, 19 bp, Homo sapiens
  siRNA target sequence for KLRD1 (NM_002262.2,298-316).
ctgggaccttagggataat

SEQ ID NO: 174764 - DNA, 19 bp, Homo sapiens
  siRNA target sequence for KLRD1 (NM_002262.2,310-328).
ggataatatgcctttcgtt

SEQ ID NO: 174765 - DNA, 19 bp, Homo sapiens
  siRNA target sequence for KLRD1 (NM_002262.2,374-392).
gagtattgagccagcattt

SEQ ID NO: 174766 - DNA, 19 bp, Homo sapiens
  siRNA target sequence for KLRD1 (NM_002262.2,459-477).
gggtaccggtgcaactgtt

SEQ ID NO: 174767 - DNA, 19 bp, Homo sapiens
  siRNA target sequence for KLRD1 (NM_002262.2,460-478).
ggtaccggtgcaactgtta

SEQ ID NO: 174768 - DNA, 19 bp, Homo sapiens
  siRNA target sequence for KLRD1 (NM_002262.2,465-483).
cggtgcaactgttacttca

SEQ ID NO: 174769 - DNA, 19 bp, Homo sapiens
  siRNA target sequence for KLRD1 (NM_002262.2,467-485).
gtgcaactgttacttcatt

SEQ ID NO: 174770 - DNA, 19 bp, Homo sapiens
  siRNA target sequence for KLRD1 (NM_002262.2,548-566).
gcttcagcttcaaaacaca

SEQ ID NO: 174771 - DNA, 19 bp, Homo sapiens
  siRNA target sequence for KLRD1 (NM_002262.2,661-679).
ctgcactctcccagtatct

SEQ ID NO: 174772 - DNA, 19 bp, Homo sapiens
  siRNA target sequence for KLRD1 (NM_002262.2,663-681).
gcactctcccagtatctat

SEQ ID NO: 174773 - DNA, 19 bp, Homo sapiens
  siRNA target sequence for KLRD1 (NM_002262.2,664-682).
cactctcccagtatctatt

SEQ ID NO: 174774 - DNA, 19 bp, Homo sapiens
  siRNA target sequence for KLRD1 (NM_002262.2,668-686).
ctcccagtatctatttcca

SEQ ID NO: 174775 - DNA, 19 bp, Homo sapiens
  siRNA target sequence for KLRD1 (NM_002262.2,710-728).
gaactgcatagcgtataat

SEQ ID NO: 174776 - DNA, 19 bp, Homo sapiens
  siRNA target sequence for KLRD1 (NM_002262.2,713-731).
ctgcatagcgtataatcca

SEQ ID NO: 174777 - DNA, 19 bp, Homo sapiens
  siRNA target sequence for KLRD1 (NM_002262.2,715-733).
gcatagcgtataatccaaa

SEQ ID NO: 174778 - DNA, 19 bp, Homo sapiens
  siRNA target sequence for KLRD1 (NM_002262.2,716-734).
catagcgtataatccaaat

SEQ ID NO: 174779 - DNA, 19 bp, Homo sapiens
  siRNA target sequence for KLRD1 (NM_002262.2,720-738).
gcgtataatccaaatggaa

SEQ ID NO: 174780 - DNA, 19 bp, Homo sapiens
  siRNA target sequence for KLRD1 (NM_002262.2,721-739).
cgtataatccaaatggaaa

SEQ ID NO: 174781 - DNA, 19 bp, Homo sapiens
  siRNA target sequence for KLRD1 (NM_002262.2,757-775).
gtgaagataaaaatcgtta

SEQ ID NO: 174782 - DNA, 19 bp, Homo sapiens
  siRNA target sequence for KLRF1 (NM_016523.1,81-99).
gatacatgacattgaatgt

SEQ ID NO: 174783 - DNA, 19 bp, Homo sapiens
  siRNA target sequence for KLRF1 (NM_016523.1,115-133).
gagttctgcccaaacatct

SEQ ID NO: 174784 - DNA, 19 bp, Homo sapiens
  siRNA target sequence for KLRF1 (NM_016523.1,122-140).
gcccaaacatctcaactta

SEQ ID NO: 174785 - DNA, 19 bp, Homo sapiens
  siRNA target sequence for KLRF1 (NM_016523.1,158-176).
gtgacgttgcactggtata

SEQ ID NO: 174786 - DNA, 19 bp, Homo sapiens
  siRNA target sequence for KLRF1 (NM_016523.1,160-178).
gacgttgcactggtataaa

SEQ ID NO: 174787 - DNA, 19 bp, Homo sapiens
  siRNA target sequence for KLRF1 (NM_016523.1,162-180).
cgttgcactggtataaaat

SEQ ID NO: 174788 - DNA, 19 bp, Homo sapiens
  siRNA target sequence for KLRF1 (NM_016523.1,195-213).
ctggaaccgtgaatggtat

SEQ ID NO: 174789 - DNA, 19 bp, Homo sapiens
  siRNA target sequence for KLRF1 (NM_016523.1,198-216).
gaaccgtgaatggtattct

SEQ ID NO: 174790 - DNA, 19 bp, Homo sapiens
  siRNA target sequence for KLRF1 (NM_016523.1,215-233).
ctcactttgactttgatct

SEQ ID NO: 174791 - DNA, 19 bp, Homo sapiens
  siRNA target sequence for KLRF1 (NM_016523.1,252-270).
ctcagggagtattgctaaa

SEQ ID NO: 174792 - DNA, 19 bp, Homo sapiens
  siRNA target sequence for KLRF1 (NM_016523.1,386-404).
gcagaccagacagtactat

SEQ ID NO: 174793 - DNA, 19 bp, Homo sapiens
  siRNA target sequence for KLRF1 (NM_016523.1,438-456).
gttattggttctctaatga

SEQ ID NO: 174794 - DNA, 19 bp, Homo sapiens
  siRNA target sequence for KLRF1 (NM_016523.1,444-462).
ggttctctaatgagatgaa

SEQ ID NO: 174795 - DNA, 19 bp, Homo sapiens
  siRNA target sequence for KLRF1 (NM_016523.1,445-463).
gttctctaatgagatgaaa

SEQ ID NO: 174796 - DNA, 19 bp, Homo sapiens
  siRNA target sequence for KLRF1 (NM_016523.1,469-487).
gagtgacagttatgtgtat

SEQ ID NO: 174797 - DNA, 19 bp, Homo sapiens
  siRNA target sequence for KLRF1 (NM_016523.1,498-516).
gaaaatctcatctactaat

SEQ ID NO: 174798 - DNA, 19 bp, Homo sapiens
  siRNA target sequence for KLRF1 (NM_016523.1,504-522).
ctcatctactaatcataca

SEQ ID NO: 174799 - DNA, 19 bp, Homo sapiens
  siRNA target sequence for KLRF1 (NM_016523.1,575-593).
gtatggattgggcttaact

SEQ ID NO: 174800 - DNA, 19 bp, Homo sapiens
  siRNA target sequence for KLRF1 (NM_016523.1,622-640).
ggtggatggttctccaata

SEQ ID NO: 174801 - DNA, 19 bp, Homo sapiens
  siRNA target sequence for KLRF1 (NM_016523.1,626-644).
gatggttctccaatagatt

SEQ ID NO: 174802 - DNA, 19 bp, Homo sapiens
  siRNA target sequence for KLRF1 (NM_016523.1,629-647).
ggttctccaatagattcaa

SEQ ID NO: 174803 - DNA, 19 bp, Homo sapiens
  siRNA target sequence for KLRF1 (NM_016523.1,633-651).
ctccaatagattcaaagat

SEQ ID NO: 174804 - DNA, 19 bp, Homo sapiens
  siRNA target sequence for KLRF1 (NM_016523.1,658-676).
cataaagggaccagctaaa

SEQ ID NO: 174805 - DNA, 19 bp, Homo sapiens
  siRNA target sequence for KLRF1 (NM_016523.1,684-702).
gctgtgctgccattaagga

SEQ ID NO: 174806 - DNA, 19 bp, Homo sapiens
  siRNA target sequence for KLRF1 (NM_016523.1,690-708).
ctgccattaaggaaagcaa

SEQ ID NO: 174807 - DNA, 19 bp, Homo sapiens
  siRNA target sequence for KLRG1 (NM_005810.2,26-44).
gacagtgttatttattcca

SEQ ID NO: 174808 - DNA, 19 bp, Homo sapiens
  siRNA target sequence for KLRG1 (NM_005810.2,82-100).
ctatggaccacagcaaaaa

SEQ ID NO: 174809 - DNA, 19 bp, Homo sapiens
  siRNA target sequence for KLRG1 (NM_005810.2,151-169).
gcttctgactgcagttctt

SEQ ID NO: 174810 - DNA, 19 bp, Homo sapiens
  siRNA target sequence for KLRG1 (NM_005810.2,250-268).
ccgctggatgaaatatggt

SEQ ID NO: 174811 - DNA, 19 bp, Homo sapiens
  siRNA target sequence for KLRG1 (NM_005810.2,251-269).
cgctggatgaaatatggta

SEQ ID NO: 174812 - DNA, 19 bp, Homo sapiens
  siRNA target sequence for KLRG1 (NM_005810.2,252-270).
gctggatgaaatatggtaa

SEQ ID NO: 174813 - DNA, 19 bp, Homo sapiens
  siRNA target sequence for KLRG1 (NM_005810.2,271-289).
ccattgttattatttctca

SEQ ID NO: 174814 - DNA, 19 bp, Homo sapiens
  siRNA target sequence for KLRG1 (NM_005810.2,455-473).
ggatcacctctaaacttct

SEQ ID NO: 174815 - DNA, 19 bp, Homo sapiens
  siRNA target sequence for KLRG1 (NM_005810.2,504-522).
catgcggtgccatcaacaa

SEQ ID NO: 174816 - DNA, 19 bp, Homo sapiens
  siRNA target sequence for KLRG1 (NM_005810.2,507-525).
gcggtgccatcaacaaaaa

SEQ ID NO: 174817 - DNA, 19 bp, Homo sapiens
  siRNA target sequence for KLRG1 (NM_005810.2,577-595).
gtgtccctttgcagatcaa

SEQ ID NO: 174818 - DNA, 19 bp, Homo sapiens
  siRNA target sequence for KLRG1 (NM_005810.2,583-601).
ctttgcagatcaagcttta

SEQ ID NO: 174819 - DNA, 19 bp, Homo sapiens
  siRNA target sequence for KLRK1 (NM_007360.1,454-472).
gtccagtagtcaaaagcaa

SEQ ID NO: 174820 - DNA, 19 bp, Homo sapiens
  siRNA target sequence for KLRK1 (NM_007360.1,523-541).
ccatgggaatccgtttcat

SEQ ID NO: 174821 - DNA, 19 bp, Homo sapiens
  siRNA target sequence for KLRK1 (NM_007360.1,524-542).
catgggaatccgtttcatt

SEQ ID NO: 174822 - DNA, 19 bp, Homo sapiens
  siRNA target sequence for KLRK1 (NM_007360.1,527-545).
gggaatccgtttcattatt

SEQ ID NO: 174823 - DNA, 19 bp, Homo sapiens
  siRNA target sequence for KLRK1 (NM_007360.1,528-546).
ggaatccgtttcattatta

SEQ ID NO: 174824 - DNA, 19 bp, Homo sapiens
  siRNA target sequence for KLRK1 (NM_007360.1,533-551).
ccgtttcattattatggta

SEQ ID NO: 174825 - DNA, 19 bp, Homo sapiens
  siRNA target sequence for KLRK1 (NM_007360.1,559-577).
ggagtgctgtattcctaaa

SEQ ID NO: 174826 - DNA, 19 bp, Homo sapiens
  siRNA target sequence for KLRK1 (NM_007360.1,606-624).
cccttgaccgaaagttact

SEQ ID NO: 174827 - DNA, 19 bp, Homo sapiens
  siRNA target sequence for KLRK1 (NM_007360.1,608-626).
cttgaccgaaagttactgt

SEQ ID NO: 174828 - DNA, 19 bp, Homo sapiens
  siRNA target sequence for KLRK1 (NM_007360.1,637-655).
ctaaaaactggatatgtta

SEQ ID NO: 174829 - DNA, 19 bp, Homo sapiens
  siRNA target sequence for KLRK1 (NM_007360.1,702-720).
gagagccaggcttcttgta

SEQ ID NO: 174830 - DNA, 19 bp, Homo sapiens
  siRNA target sequence for KLRK1 (NM_007360.1,759-777).
gaggaccaggatttactta

SEQ ID NO: 174831 - DNA, 19 bp, Homo sapiens
  siRNA target sequence for KLRK1 (NM_007360.1,800-818).
gatgggactagtacacatt

SEQ ID NO: 174832 - DNA, 19 bp, Homo sapiens
  siRNA target sequence for KLRK1 (NM_007360.1,858-876).
ctctcacccaacctactaa

SEQ ID NO: 174833 - DNA, 19 bp, Homo sapiens
  siRNA target sequence for KLRK1 (NM_007360.1,860-878).
ctcacccaacctactaaca

SEQ ID NO: 174834 - DNA, 19 bp, Homo sapiens
  siRNA target sequence for KLRK1 (NM_007360.1,862-880).
cacccaacctactaacaat

SEQ ID NO: 174835 - DNA, 19 bp, Homo sapiens
  siRNA target sequence for KLRK1 (NM_007360.1,864-882).
cccaacctactaacaataa

SEQ ID NO: 174836 - DNA, 19 bp, Homo sapiens
  siRNA target sequence for KLRK1 (NM_007360.1,865-883).
ccaacctactaacaataat

SEQ ID NO: 174837 - DNA, 19 bp, Homo sapiens
  siRNA target sequence for KLRK1 (NM_007360.1,866-884).
caacctactaacaataatt

SEQ ID NO: 174838 - DNA, 19 bp, Homo sapiens
  siRNA target sequence for KLRK1 (NM_007360.1,920-938).
gagctttaaaggctatata

SEQ ID NO: 174839 - DNA, 19 bp, Homo sapiens
  siRNA target sequence for KLRK1 (NM_007360.1,922-940).
gctttaaaggctatataga

SEQ ID NO: 174840 - DNA, 19 bp, Homo sapiens
  siRNA target sequence for KLRK1 (NM_007360.1,930-948).
ggctatatagaaaactgtt

SEQ ID NO: 174841 - DNA, 19 bp, Homo sapiens
  siRNA target sequence for LGALS1 (NM_002305.2,368-386).
gctgccagatggatacgaa

SEQ ID NO: 174842 - DNA, 19 bp, Homo sapiens
  siRNA target sequence for LGALS1 (NM_002305.2,369-387).
ctgccagatggatacgaat

SEQ ID NO: 174843 - DNA, 19 bp, Homo sapiens
  siRNA target sequence for LGALS1 (NM_002305.2,373-391).
cagatggatacgaattcaa

SEQ ID NO: 174844 - DNA, 19 bp, Homo sapiens
  siRNA target sequence for LGALS1 (NM_002305.2,375-393).
gatggatacgaattcaagt

SEQ ID NO: 174845 - DNA, 19 bp, Homo sapiens
  siRNA target sequence for LGALS1 (NM_002305.2,436-454).
ctgacggtgacttcaagat

SEQ ID NO: 174846 - DNA, 19 bp, Homo sapiens
  siRNA target sequence for LGALS1 (NM_002305.2,438-456).
gacggtgacttcaagatca

SEQ ID NO: 174847 - DNA, 19 bp, Homo sapiens
  siRNA target sequence for LGALS2 (NM_006498.1,34-52).
gggaacttgaggttaagaa

SEQ ID NO: 174848 - DNA, 19 bp, Homo sapiens
  siRNA target sequence for LGALS2 (NM_006498.1,187-205).
ccattgtctgcaactcatt

SEQ ID NO: 174849 - DNA, 19 bp, Homo sapiens
  siRNA target sequence for LGALS2 (NM_006498.1,403-421).
cctctttcaagttaaaaga

SEQ ID NO: 174850 - DNA, 19 bp, Homo sapiens
  siRNA target sequence for LGALS4 (NM_006149.2,134-152).
gctcaacgtgggaatgtct

SEQ ID NO: 174851 - DNA, 19 bp, Homo sapiens
  siRNA target sequence for LGALS4 (NM_006149.2,188-206).
gcggttcttcgtgaacttt

SEQ ID NO: 174852 - DNA, 19 bp, Homo sapiens
  siRNA target sequence for LGALS4 (NM_006149.2,190-208).
ggttcttcgtgaactttgt

SEQ ID NO: 174853 - DNA, 19 bp, Homo sapiens
  siRNA target sequence for LGALS4 (NM_006149.2,328-346).
ggagcatgcccttcaaaaa

SEQ ID NO: 174854 - DNA, 19 bp, Homo sapiens
  siRNA target sequence for LGALS4 (NM_006149.2,474-492).
ggggatctgcaacttcaat

SEQ ID NO: 174855 - DNA, 19 bp, Homo sapiens
  siRNA target sequence for LGALS4 (NM_006149.2,476-494).
ggatctgcaacttcaatca

SEQ ID NO: 174856 - DNA, 19 bp, Homo sapiens
  siRNA target sequence for LGALS4 (NM_006149.2,477-495).
gatctgcaacttcaatcaa

SEQ ID NO: 174857 - DNA, 19 bp, Homo sapiens
  siRNA target sequence for LGALS4 (NM_006149.2,480-498).
ctgcaacttcaatcaatca

SEQ ID NO: 174858 - DNA, 19 bp, Homo sapiens
  siRNA target sequence for LGALS4 (NM_006149.2,486-504).
cttcaatcaatcaacttca

SEQ ID NO: 174859 - DNA, 19 bp, Homo sapiens
  siRNA target sequence for LGALS4 (NM_006149.2,667-685).
ctcgaagaaccatcatcat

SEQ ID NO: 174860 - DNA, 19 bp, Homo sapiens
  siRNA target sequence for LGALS4 (NM_006149.2,669-687).
cgaagaaccatcatcatca

SEQ ID NO: 174861 - DNA, 19 bp, Homo sapiens
  siRNA target sequence for LGALS4 (NM_006149.2,706-724).
caggcaagagctttgctat

SEQ ID NO: 174862 - DNA, 19 bp, Homo sapiens
  siRNA target sequence for LGALS4 (NM_006149.2,709-727).
gcaagagctttgctatcaa

SEQ ID NO: 174863 - DNA, 19 bp, Homo sapiens
  siRNA target sequence for LGALS4 (NM_006149.2,971-989).
gagggtggacacattggaa

SEQ ID NO: 174864 - DNA, 19 bp, Homo sapiens
  siRNA target sequence for LGALS7 (NM_002307.1,199-217).
cgtcggaggtggtcttcaa

SEQ ID NO: 174865 - DNA, 19 bp, Homo sapiens
  siRNA target sequence for LGALS8 (NM_006499.2,401-419).
cctacagaatatcatctat

SEQ ID NO: 174866 - DNA, 19 bp, Homo sapiens
  siRNA target sequence for LGALS8 (NM_006499.2,558-576).
gccgatgtggcctttcatt

SEQ ID NO: 174867 - DNA, 19 bp, Homo sapiens
  siRNA target sequence for LGALS8 (NM_006499.2,599-617).
cggctgcattgtttgcaat

SEQ ID NO: 174868 - DNA, 19 bp, Homo sapiens
  siRNA target sequence for LGALS8 (NM_006499.2,600-618).
ggctgcattgtttgcaata

SEQ ID NO: 174869 - DNA, 19 bp, Homo sapiens
  siRNA target sequence for LGALS8 (NM_006499.2,602-620).
ctgcattgtttgcaatact

SEQ ID NO: 174870 - DNA, 19 bp, Homo sapiens
  siRNA target sequence for LGALS8 (NM_006499.2,655-673).
cctatgacacgcctttcaa

SEQ ID NO: 174871 - DNA, 19 bp, Homo sapiens
  siRNA target sequence for LGALS8 (NM_006499.2,656-674).
ctatgacacgcctttcaaa

SEQ ID NO: 174872 - DNA, 19 bp, Homo sapiens
  siRNA target sequence for LGALS8 (NM_006499.2,685-703).
cttttgagatcgtgattat

SEQ ID NO: 174873 - DNA, 19 bp, Homo sapiens
  siRNA target sequence for LGALS8 (NM_006499.2,723-741).
caggtggctgtaaatggaa

SEQ ID NO: 174874 - DNA, 19 bp, Homo sapiens
  siRNA target sequence for LGALS8 (NM_006499.2,766-784).
ggatcggcccagagaaaat

SEQ ID NO: 174875 - DNA, 19 bp, Homo sapiens
  siRNA target sequence for LGALS8 (NM_006499.2,767-785).
gatcggcccagagaaaata

SEQ ID NO: 174876 - DNA, 19 bp, Homo sapiens
  siRNA target sequence for LGALS8 (NM_006499.2,797-815).
catttatggcaaagtgaat

SEQ ID NO: 174877 - DNA, 19 bp, Homo sapiens
  siRNA target sequence for LGALS8 (NM_006499.2,804-822).
ggcaaagtgaatattcact

SEQ ID NO: 174878 - DNA, 19 bp, Homo sapiens
  siRNA target sequence for LGALS8 (NM_006499.2,835-853).
gcttcagctcggacttaca

SEQ ID NO: 174879 - DNA, 19 bp, Homo sapiens
  siRNA target sequence for LGALS8 (NM_006499.2,1102-1120).
gacgaactgtcgtcgttaa

SEQ ID NO: 174880 - DNA, 19 bp, Homo sapiens
  siRNA target sequence for LGALS8 (NM_006499.2,1115-1133).
cgttaaaggagaagtgaat

SEQ ID NO: 174881 - DNA, 19 bp, Homo sapiens
  siRNA target sequence for LGALS8 (NM_006499.2,1199-1217).
gaacccacgcctgaatatt

SEQ ID NO: 174882 - DNA, 19 bp, Homo sapiens
  siRNA target sequence for LGALS8 (NM_006499.2,1202-1220).
cccacgcctgaatattaaa

SEQ ID NO: 174883 - DNA, 19 bp, Homo sapiens
  siRNA target sequence for LGALS8 (NM_006499.2,1206-1224).
cgcctgaatattaaagcat

SEQ ID NO: 174884 - DNA, 19 bp, Homo sapiens
  siRNA target sequence for LGALS8 (NM_006499.2,1395-1413).
gagctcagcagtattgaca

SEQ ID NO: 174885 - DNA, 19 bp, Homo sapiens
  siRNA target sequence for LGALS8 (NM_006499.2,1405-1423).
gtattgacacgctggaaat

SEQ ID NO: 174886 - DNA, 19 bp, Homo sapiens
  siRNA target sequence for LGALS9 (NM_002308.2,834-852).
cgaagtctgccccgaaaaa

SEQ ID NO: 174887 - DNA, 19 bp, Homo sapiens
  siRNA target sequence for LGALS9 (NM_002308.2,928-946).
gtcagcacctgtttgaata

SEQ ID NO: 174888 - DNA, 19 bp, Homo sapiens
  siRNA target sequence for LGALS9 (NM_002308.2,930-948).
cagcacctgtttgaatact

SEQ ID NO: 174889 - DNA, 19 bp, Homo sapiens
  siRNA target sequence for LGALS9 (NM_009587.1,857-875).
cctgaacccccgttttgat

SEQ ID NO: 174890 - DNA, 19 bp, Homo sapiens
  siRNA target sequence for LGALS9 (NM_009587.1,863-881).
cccccgttttgatgagaat

SEQ ID NO: 174891 - DNA, 19 bp, Homo sapiens
  siRNA target sequence for LLT1 (NM_013269.1,83-101).
cattcaaaagagcattcta

SEQ ID NO: 174892 - DNA, 19 bp, Homo sapiens
  siRNA target sequence for LLT1 (NM_013269.1,111-129).
ccttaatttggcgcttatt

SEQ ID NO: 174893 - DNA, 19 bp, Homo sapiens
  siRNA target sequence for LLT1 (NM_013269.1,154-172).
catagtgtgtggaatggtt

SEQ ID NO: 174894 - DNA, 19 bp, Homo sapiens
  siRNA target sequence for LLT1 (NM_013269.1,164-182).
ggaatggttgctgctttaa

SEQ ID NO: 174895 - DNA, 19 bp, Homo sapiens
  siRNA target sequence for LLT1 (NM_013269.1,173-191).
gctgctttaagcgcaataa

SEQ ID NO: 174896 - DNA, 19 bp, Homo sapiens
  siRNA target sequence for LLT1 (NM_013269.1,192-210).
gagctaactgccatcaaga

SEQ ID NO: 174897 - DNA, 19 bp, Homo sapiens
  siRNA target sequence for LLT1 (NM_013269.1,203-221).
catcaagagccatcagtat

SEQ ID NO: 174898 - DNA, 19 bp, Homo sapiens
  siRNA target sequence for LLT1 (NM_013269.1,211-229).
gccatcagtatgtcttcaa

SEQ ID NO: 174899 - DNA, 19 bp, Homo sapiens
  siRNA target sequence for LLT1 (NM_013269.1,338-356).
gatcttgctcaggttgaaa

SEQ ID NO: 174900 - DNA, 19 bp, Homo sapiens
  siRNA target sequence for LLT1 (NM_013269.1,357-375).
gcttccaggaactgaattt

SEQ ID NO: 174901 - DNA, 19 bp, Homo sapiens
  siRNA target sequence for LLT1 (NM_013269.1,368-386).
ctgaatttcctgttgagat

SEQ ID NO: 174902 - DNA, 19 bp, Homo sapiens
  siRNA target sequence for LLT1 (NM_013269.1,494-512).
ggagagtgtgcctatttga

SEQ ID NO: 174903 - DNA, 19 bp, Homo sapiens
  siRNA target sequence for LLT1 (NM_013269.1,495-513).
gagagtgtgcctatttgaa

SEQ ID NO: 174904 - DNA, 19 bp, Homo sapiens
  siRNA target sequence for LLT1 (NM_013269.1,558-576).
ggatttgttccaaatcaga

SEQ ID NO: 174905 - DNA, 19 bp, Homo sapiens
  siRNA target sequence for LLT1 (NM_013269.1,559-577).
gatttgttccaaatcagat

SEQ ID NO: 174906 - DNA, 19 bp, Homo sapiens
  siRNA target sequence for LMAN1 (NM_005570.2,150-168).
cgccgtttcgagtacaaat

SEQ ID NO: 174907 - DNA, 19 bp, Homo sapiens
  siRNA target sequence for LMAN1 (NM_005570.2,153-171).
cgtttcgagtacaaataca

SEQ ID NO: 174908 - DNA, 19 bp, Homo sapiens
  siRNA target sequence for LMAN1 (NM_005570.2,261-279).
cgagtagcaccatctttaa

SEQ ID NO: 174909 - DNA, 19 bp, Homo sapiens
  siRNA target sequence for LMAN1 (NM_005570.2,262-280).
gagtagcaccatctttaaa

SEQ ID NO: 174910 - DNA, 19 bp, Homo sapiens
  siRNA target sequence for LMAN1 (NM_005570.2,356-374).
gactggaagaggtcgaatt

SEQ ID NO: 174911 - DNA, 19 bp, Homo sapiens
  siRNA target sequence for LMAN1 (NM_005570.2,376-394).
gagctgatggcctagcaat

SEQ ID NO: 174912 - DNA, 19 bp, Homo sapiens
  siRNA target sequence for LMAN1 (NM_005570.2,378-396).
gctgatggcctagcaattt

SEQ ID NO: 174913 - DNA, 19 bp, Homo sapiens
  siRNA target sequence for LMAN1 (NM_005570.2,527-545).
caacaatggacaaatccat

SEQ ID NO: 174914 - DNA, 19 bp, Homo sapiens
  siRNA target sequence for LMAN1 (NM_005570.2,593-611).
gagggacttccgcaacaaa

SEQ ID NO: 174915 - DNA, 19 bp, Homo sapiens
  siRNA target sequence for LMAN1 (NM_005570.2,618-636).
cctgtccgagcaaagatta

SEQ ID NO: 174916 - DNA, 19 bp, Homo sapiens
  siRNA target sequence for LMAN1 (NM_005570.2,621-639).
gtccgagcaaagattacct

SEQ ID NO: 174917 - DNA, 19 bp, Homo sapiens
  siRNA target sequence for LMAN1 (NM_005570.2,623-641).
ccgagcaaagattacctat

SEQ ID NO: 174918 - DNA, 19 bp, Homo sapiens
  siRNA target sequence for LMAN1 (NM_005570.2,624-642).
cgagcaaagattacctatt

SEQ ID NO: 174919 - DNA, 19 bp, Homo sapiens
  siRNA target sequence for LMAN1 (NM_005570.2,625-643).
gagcaaagattacctatta

SEQ ID NO: 174920 - DNA, 19 bp, Homo sapiens
  siRNA target sequence for LMAN1 (NM_005570.2,628-646).
caaagattacctattacca

SEQ ID NO: 174921 - DNA, 19 bp, Homo sapiens
  siRNA target sequence for LMAN1 (NM_005570.2,656-674).
gacagtaatgatcaataat

SEQ ID NO: 174922 - DNA, 19 bp, Homo sapiens
  siRNA target sequence for LMAN1 (NM_005570.2,665-683).
gatcaataatggctttaca

SEQ ID NO: 174923 - DNA, 19 bp, Homo sapiens
  siRNA target sequence for LMAN1 (NM_005570.2,676-694).
gctttacaccagataaaaa

SEQ ID NO: 174924 - DNA, 19 bp, Homo sapiens
  siRNA target sequence for LMAN1 (NM_005570.2,739-757).
cacaagggcattttggaat

SEQ ID NO: 174925 - DNA, 19 bp, Homo sapiens
  siRNA target sequence for LMAN1 (NM_005570.2,893-911).
ggaatttgagcactttcaa

SEQ ID NO: 174926 - DNA, 19 bp, Homo sapiens
  siRNA target sequence for LMAN1 (NM_005570.2,969-987).
cagcctgcggaggaaatat

SEQ ID NO: 174927 - DNA, 19 bp, Homo sapiens
  siRNA target sequence for LMAN1 (NM_005570.2,973-991).
ctgcggaggaaatatttga

SEQ ID NO: 174928 - DNA, 19 bp, Homo sapiens
  siRNA target sequence for LMAN1 (NM_005570.2,1030-1048).
gacagaatcgtattcatct

SEQ ID NO: 174929 - DNA, 19 bp, Homo sapiens
  siRNA target sequence for LMAN1 (NM_005570.2,1038-1056).
cgtattcatcttgaaatca

SEQ ID NO: 174930 - DNA, 19 bp, Homo sapiens
  siRNA target sequence for LMAN1 (NM_005570.2,1039-1057).
gtattcatcttgaaatcaa

SEQ ID NO: 174931 - DNA, 19 bp, Homo sapiens
  siRNA target sequence for LMAN1 (NM_005570.2,1062-1080).
ctgaaccggcagttagata

SEQ ID NO: 174932 - DNA, 19 bp, Homo sapiens
  siRNA target sequence for LMAN1 (NM_005570.2,1067-1085).
ccggcagttagatatgatt

SEQ ID NO: 174933 - DNA, 19 bp, Homo sapiens
  siRNA target sequence for LMAN1 (NM_005570.2,1073-1091).
gttagatatgattcttgat

SEQ ID NO: 174934 - DNA, 19 bp, Homo sapiens
  siRNA target sequence for LMAN1 (NM_005570.2,1155-1173).
gggcagcatgggcagatta

SEQ ID NO: 174935 - DNA, 19 bp, Homo sapiens
  siRNA target sequence for LMAN1 (NM_005570.2,1160-1178).
gcatgggcagattactcaa

SEQ ID NO: 174936 - DNA, 19 bp, Homo sapiens
  siRNA target sequence for LMAN1 (NM_005570.2,1165-1183).
ggcagattactcaacaaga

SEQ ID NO: 174937 - DNA, 19 bp, Homo sapiens
  siRNA target sequence for LMAN1 (NM_005570.2,1222-1240).
gacaagtaaatgaaatgaa

SEQ ID NO: 174938 - DNA, 19 bp, Homo sapiens
  siRNA target sequence for LMAN1 (NM_005570.2,1294-1312).
ctgctggaggcgtctatga

SEQ ID NO: 174939 - DNA, 19 bp, Homo sapiens
  siRNA target sequence for LMAN1 (NM_005570.2,1344-1362).
cacctgcacatagtaaaga

SEQ ID NO: 174940 - DNA, 19 bp, Homo sapiens
  siRNA target sequence for LMAN1 (NM_005570.2,1356-1374).
gtaaagagggacatagata

SEQ ID NO: 174941 - DNA, 19 bp, Homo sapiens
  siRNA target sequence for LMAN1 (NM_005570.2,1361-1379).
gagggacatagataactta

SEQ ID NO: 174942 - DNA, 19 bp, Homo sapiens
  siRNA target sequence for LMAN1 (NM_005570.2,1363-1381).
gggacatagataacttagt

SEQ ID NO: 174943 - DNA, 19 bp, Homo sapiens
  siRNA target sequence for LMAN1 (NM_005570.2,1385-1403).
gcgaaatatgccatcaaat

SEQ ID NO: 174944 - DNA, 19 bp, Homo sapiens
  siRNA target sequence for LMAN1 (NM_005570.2,1409-1427).
gccgaaatgcccagaacta

SEQ ID NO: 174945 - DNA, 19 bp, Homo sapiens
  siRNA target sequence for LMAN1 (NM_005570.2,1418-1436).
cccagaactaccaccattt

SEQ ID NO: 174946 - DNA, 19 bp, Homo sapiens
  siRNA target sequence for LMAN1 (NM_005570.2,1448-1466).
gtctacggtccacttcatt

SEQ ID NO: 174947 - DNA, 19 bp, Homo sapiens
  siRNA target sequence for LMAN1 (NM_005570.2,1450-1468).
ctacggtccacttcattat

SEQ ID NO: 174948 - DNA, 19 bp, Homo sapiens
  siRNA target sequence for LMAN1 (NM_005570.2,1453-1471).
cggtccacttcattatatt

SEQ ID NO: 174949 - DNA, 19 bp, Homo sapiens
  siRNA target sequence for LMAN1 (NM_005570.2,1454-1472).
ggtccacttcattatattt

SEQ ID NO: 174950 - DNA, 19 bp, Homo sapiens
  siRNA target sequence for LMAN1 (NM_005570.2,1457-1475).
ccacttcattatatttgtt

SEQ ID NO: 174951 - DNA, 19 bp, Homo sapiens
  siRNA target sequence for LMAN1 (NM_005570.2,1473-1491).
gttgtggtgcaaactgtat

SEQ ID NO: 174952 - DNA, 19 bp, Homo sapiens
  siRNA target sequence for LMAN1 (NM_005570.2,1476-1494).
gtggtgcaaactgtattat

SEQ ID NO: 174953 - DNA, 19 bp, Homo sapiens
  siRNA target sequence for LMAN1 (NM_005570.2,1481-1499).
gcaaactgtattattcatt

SEQ ID NO: 174954 - DNA, 19 bp, Homo sapiens
  siRNA target sequence for LMAN1 (NM_005570.2,1486-1504).
ctgtattattcattggtta

SEQ ID NO: 174955 - DNA, 19 bp, Homo sapiens
  siRNA target sequence for LMAN1 (NM_005570.2,1488-1506).
gtattattcattggttata

SEQ ID NO: 174956 - DNA, 19 bp, Homo sapiens
  siRNA target sequence for LMAN1 (NM_005570.2,1500-1518).
ggttatatcatgtataggt

SEQ ID NO: 174957 - DNA, 19 bp, Homo sapiens
  siRNA target sequence for LMAN1 (NM_005570.2,1531-1549).
cagctgccaaaaaattctt

SEQ ID NO: 174958 - DNA, 19 bp, Homo sapiens
  siRNA target sequence for LMAN1L (NM_021819.1,54-72).
ggtccaggtcccttattct

SEQ ID NO: 174959 - DNA, 19 bp, Homo sapiens
  siRNA target sequence for LMAN1L (NM_021819.1,123-141).
cctctacgcaggtttgagt

SEQ ID NO: 174960 - DNA, 19 bp, Homo sapiens
  siRNA target sequence for LMAN1L (NM_021819.1,124-142).
ctctacgcaggtttgagta

SEQ ID NO: 174961 - DNA, 19 bp, Homo sapiens
  siRNA target sequence for LMAN1L (NM_021819.1,432-450).
gacggcatcgggatcttct

SEQ ID NO: 174962 - DNA, 19 bp, Homo sapiens
  siRNA target sequence for LMAN1L (NM_021819.1,434-452).
cggcatcgggatcttcttt

SEQ ID NO: 174963 - DNA, 19 bp, Homo sapiens
  siRNA target sequence for LMAN1L (NM_021819.1,436-454).
gcatcgggatcttctttga

SEQ ID NO: 174964 - DNA, 19 bp, Homo sapiens
  siRNA target sequence for LMAN1L (NM_021819.1,457-475).
ctccggcagaggatactca

SEQ ID NO: 174965 - DNA, 19 bp, Homo sapiens
  siRNA target sequence for LMAN1L (NM_021819.1,743-761).
cggcaccctggcagatgat

SEQ ID NO: 174966 - DNA, 19 bp, Homo sapiens
  siRNA target sequence for LMAN1L (NM_021819.1,745-763).
gcaccctggcagatgatca

SEQ ID NO: 174967 - DNA, 19 bp, Homo sapiens
  siRNA target sequence for LMAN1L (NM_021819.1,746-764).
caccctggcagatgatcat

SEQ ID NO: 174968 - DNA, 19 bp, Homo sapiens
  siRNA target sequence for LMAN1L (NM_021819.1,902-920).
ggaggatgtaactccaaaa

SEQ ID NO: 174969 - DNA, 19 bp, Homo sapiens
  siRNA target sequence for LMAN1L (NM_021819.1,905-923).
ggatgtaactccaaaatca

SEQ ID NO: 174970 - DNA, 19 bp, Homo sapiens
  siRNA target sequence for LMAN1L (NM_021819.1,1148-1166).
cctctccatgtcactcaat

SEQ ID NO: 174971 - DNA, 19 bp, Homo sapiens
  siRNA target sequence for LMAN1L (NM_021819.1,1290-1308).
ggcattgagcatcatttct

SEQ ID NO: 174972 - DNA, 19 bp, Homo sapiens
  siRNA target sequence for LMAN2 (NM_006816.1,146-164).
gcaacagtgaacatctcaa

SEQ ID NO: 174973 - DNA, 19 bp, Homo sapiens
  siRNA target sequence for LMAN2 (NM_006816.1,167-185).
gggagcattcgctcattaa

SEQ ID NO: 174974 - DNA, 19 bp, Homo sapiens
  siRNA target sequence for LMAN2 (NM_006816.1,316-334).
ccgtgcttcctcaaagact

SEQ ID NO: 174975 - DNA, 19 bp, Homo sapiens
  siRNA target sequence for LMAN2 (NM_006816.1,514-532).
cgcgtgttcccgtacatct

SEQ ID NO: 174976 - DNA, 19 bp, Homo sapiens
  siRNA target sequence for LMAN2 (NM_006816.1,777-795).
cggcgacctgtctgacaat

SEQ ID NO: 174977 - DNA, 19 bp, Homo sapiens
  siRNA target sequence for LMAN2 (NM_006816.1,779-797).
gcgacctgtctgacaatca

SEQ ID NO: 174978 - DNA, 19 bp, Homo sapiens
  siRNA target sequence for LMAN2 (NM_006816.1,780-798).
cgacctgtctgacaatcat

SEQ ID NO: 174979 - DNA, 19 bp, Homo sapiens
  siRNA target sequence for LMAN2 (NM_006816.1,895-913).
ctcaagtcgcccaaagaca

SEQ ID NO: 174980 - DNA, 19 bp, Homo sapiens
  siRNA target sequence for LOC143903 (NM_178834.2,445-463).
gacacagaggccttgttat

SEQ ID NO: 174981 - DNA, 19 bp, Homo sapiens
  siRNA target sequence for LOC143903 (NM_178834.2,447-465).
cacagaggccttgttataa

SEQ ID NO: 174982 - DNA, 19 bp, Homo sapiens
  siRNA target sequence for LOC143903 (NM_178834.2,453-471).
ggccttgttataaagtcat

SEQ ID NO: 174983 - DNA, 19 bp, Homo sapiens
  siRNA target sequence for LOC143903 (NM_178834.2,454-472).
gccttgttataaagtcatt

SEQ ID NO: 174984 - DNA, 19 bp, Homo sapiens
  siRNA target sequence for LOC143903 (NM_178834.2,486-504).
cttctcgaagactgaactt

SEQ ID NO: 174985 - DNA, 19 bp, Homo sapiens
  siRNA target sequence for LOC143903 (NM_178834.2,489-507).
ctcgaagactgaactttga

SEQ ID NO: 174986 - DNA, 19 bp, Homo sapiens
  siRNA target sequence for LOC143903 (NM_178834.2,552-570).
gcatcgagtctgaagatga

SEQ ID NO: 174987 - DNA, 19 bp, Homo sapiens
  siRNA target sequence for LOC143903 (NM_178834.2,701-719).
ggcagcatatcacaattta

SEQ ID NO: 174988 - DNA, 19 bp, Homo sapiens
  siRNA target sequence for LOC143903 (NM_178834.2,833-851).
gaccggtgcaacatgaaga

SEQ ID NO: 174989 - DNA, 19 bp, Homo sapiens
  siRNA target sequence for LOC143903 (NM_178834.2,1055-1073).
gtggtcaccacagttgtat

SEQ ID NO: 174990 - DNA, 19 bp, Homo sapiens
  siRNA target sequence for LOC143903 (NM_178834.2,1058-1076).
gtcaccacagttgtatgtt

SEQ ID NO: 174991 - DNA, 19 bp, Homo sapiens
  siRNA target sequence for LOC143903 (NM_178834.2,1174-1192).
ggacctagaggtctacaat

SEQ ID NO: 174992 - DNA, 19 bp, Homo sapiens
  siRNA target sequence for LOC143903 (NM_178834.2,1181-1199).
gaggtctacaatgtcataa

SEQ ID NO: 174993 - DNA, 19 bp, Homo sapiens
  siRNA target sequence for LOC143903 (NM_178834.2,1315-1333).
ggctgtgaacccatcagaa

SEQ ID NO: 174994 - DNA, 19 bp, Homo sapiens
  siRNA target sequence for LOC143903 (NM_178834.2,1316-1334).
gctgtgaacccatcagaaa

SEQ ID NO: 174995 - DNA, 19 bp, Homo sapiens
  siRNA target sequence for LOC143903 (NM_178834.2,1358-1376).
gtggagagtggatttgtga

SEQ ID NO: 174996 - DNA, 19 bp, Homo sapiens
  siRNA target sequence for LOC143903 (NM_178834.2,1367-1385).
ggatttgtgaccaatgaca

SEQ ID NO: 174997 - DNA, 19 bp, Homo sapiens
  siRNA target sequence for LPHN1 (NM_014921.1,490-508).
gcgcacggacgacaagatt

SEQ ID NO: 174998 - DNA, 19 bp, Homo sapiens
  siRNA target sequence for LPHN1 (NM_014921.1,555-573).
cggacgccttcaagatcat

SEQ ID NO: 174999 - DNA, 19 bp, Homo sapiens
  siRNA target sequence for LPHN1 (NM_014921.1,642-660).
gtcctgggacctacaagta

SEQ ID NO: 175000 - DNA, 19 bp, Homo sapiens
  siRNA target sequence for LPHN1 (NM_014921.1,850-868).
ggacacactgactgagtat

SEQ ID NO: 175001 - DNA, 19 bp, Homo sapiens
  siRNA target sequence for LPHN1 (NM_014921.1,956-974).
gatggtgccgtcttctaca

SEQ ID NO: 175002 - DNA, 19 bp, Homo sapiens
  siRNA target sequence for LPHN1 (NM_014921.1,959-977).
ggtgccgtcttctacaaca

SEQ ID NO: 175003 - DNA, 19 bp, Homo sapiens
  siRNA target sequence for LPHN1 (NM_014921.1,988-1006).
gcgcaacatcgtcaagtat

SEQ ID NO: 175004 - DNA, 19 bp, Homo sapiens
  siRNA target sequence for LPHN1 (NM_014921.1,1010-1028).
ctacggacgcgcatcaaga

SEQ ID NO: 175005 - DNA, 19 bp, Homo sapiens
  siRNA target sequence for LPHN1 (NM_014921.1,1029-1047).
gcggggagacggtcatcaa

SEQ ID NO: 175006 - DNA, 19 bp, Homo sapiens
  siRNA target sequence for LPHN1 (NM_014921.1,1030-1048).
cggggagacggtcatcaat

SEQ ID NO: 175007 - DNA, 19 bp, Homo sapiens
  siRNA target sequence for LPHN1 (NM_014921.1,1031-1049).
ggggagacggtcatcaata

SEQ ID NO: 175008 - DNA, 19 bp, Homo sapiens
  siRNA target sequence for LPHN1 (NM_014921.1,1086-1104).
gcggaaagaccgacattga

SEQ ID NO: 175009 - DNA, 19 bp, Homo sapiens
  siRNA target sequence for LPHN1 (NM_014921.1,1287-1305).
ccgtgtacgtggatgatga

SEQ ID NO: 175010 - DNA, 19 bp, Homo sapiens
  siRNA target sequence for LPHN1 (NM_014921.1,1328-1346).
gtggactatgccttcaaca

SEQ ID NO: 175011 - DNA, 19 bp, Homo sapiens
  siRNA target sequence for LPHN1 (NM_014921.1,1441-1459).
gtacgtctggaacaactat

SEQ ID NO: 175012 - DNA, 19 bp, Homo sapiens
  siRNA target sequence for LPHN1 (NM_014921.1,1810-1828).
caaggggactcgaggaatt

SEQ ID NO: 175013 - DNA, 19 bp, Homo sapiens
  siRNA target sequence for LPHN1 (NM_014921.1,2097-2115).
gcaagaactacaacaagat

SEQ ID NO: 175014 - DNA, 19 bp, Homo sapiens
  siRNA target sequence for LPHN1 (NM_014921.1,2399-2417).
gagtacccgagaaagaact

SEQ ID NO: 175015 - DNA, 19 bp, Homo sapiens
  siRNA target sequence for LPHN1 (NM_014921.1,2463-2481).
gggtggtcaaagttgtctt

SEQ ID NO: 175016 - DNA, 19 bp, Homo sapiens
  siRNA target sequence for LPHN1 (NM_014921.1,3037-3055).
gatcgacaagactcagtat

SEQ ID NO: 175017 - DNA, 19 bp, Homo sapiens
  siRNA target sequence for LPHN1 (NM_014921.1,3080-3098).
ggcctgctgcactatttct

SEQ ID NO: 175018 - DNA, 19 bp, Homo sapiens
  siRNA target sequence for LPHN1 (NM_014921.1,3285-3303).
ggctccgagtggacaatta

SEQ ID NO: 175019 - DNA, 19 bp, Homo sapiens
  siRNA target sequence for LPHN1 (NM_014921.1,3327-3345).
cagtctccttcgttatcgt

SEQ ID NO: 175020 - DNA, 19 bp, Homo sapiens
  siRNA target sequence for LPHN1 (NM_014921.1,3368-3386).
gtgaccctgcacaagatga

SEQ ID NO: 175021 - DNA, 19 bp, Homo sapiens
  siRNA target sequence for LPHN1 (NM_014921.1,3420-3438).
gccgcctggacaacattaa

SEQ ID NO: 175022 - DNA, 19 bp, Homo sapiens
  siRNA target sequence for LPHN1 (NM_014921.1,3421-3439).
ccgcctggacaacattaaa

SEQ ID NO: 175023 - DNA, 19 bp, Homo sapiens
  siRNA target sequence for LPHN1 (NM_014921.1,3422-3440).
cgcctggacaacattaaat

SEQ ID NO: 175024 - DNA, 19 bp, Homo sapiens
  siRNA target sequence for LPHN1 (NM_014921.1,3492-3510).
ctttcggcctcctcttcat

SEQ ID NO: 175025 - DNA, 19 bp, Homo sapiens
  siRNA target sequence for LPHN1 (NM_014921.1,3913-3931).
cgagtcagtgggcttcaat

SEQ ID NO: 175026 - DNA, 19 bp, Homo sapiens
  siRNA target sequence for LPHN1 (NM_014921.1,4025-4043).
cccctgaacggcaacttca

SEQ ID NO: 175027 - DNA, 19 bp, Homo sapiens
  siRNA target sequence for LPHN1 (NM_014921.1,4026-4044).
ccctgaacggcaacttcaa

SEQ ID NO: 175028 - DNA, 19 bp, Homo sapiens
  siRNA target sequence for LPHN1 (NM_014921.1,4027-4045).
cctgaacggcaacttcaat

SEQ ID NO: 175029 - DNA, 19 bp, Homo sapiens
  siRNA target sequence for LPHN1 (NM_014921.1,4028-4046).
ctgaacggcaacttcaata

SEQ ID NO: 175030 - DNA, 19 bp, Homo sapiens
  siRNA target sequence for LPHN1 (NM_014921.1,4290-4308).
ccgagattgaacttctcta

SEQ ID NO: 175031 - DNA, 19 bp, Homo sapiens
  siRNA target sequence for LPHN1 (NM_014921.1,4291-4309).
cgagattgaacttctctat

SEQ ID NO: 175032 - DNA, 19 bp, Homo sapiens
  siRNA target sequence for LPHN2 (NM_012302.1,317-335).
ggctggtgaggcgagaatt

SEQ ID NO: 175033 - DNA, 19 bp, Homo sapiens
  siRNA target sequence for LPHN2 (NM_012302.1,322-340).
gtgaggcgagaattatcct

SEQ ID NO: 175034 - DNA, 19 bp, Homo sapiens
  siRNA target sequence for LPHN2 (NM_012302.1,338-356).
cctgtgaaggttattctat

SEQ ID NO: 175035 - DNA, 19 bp, Homo sapiens
  siRNA target sequence for LPHN2 (NM_012302.1,339-357).
ctgtgaaggttattctata

SEQ ID NO: 175036 - DNA, 19 bp, Homo sapiens
  siRNA target sequence for LPHN2 (NM_012302.1,390-408).
gattgagagcgctaactat

SEQ ID NO: 175037 - DNA, 19 bp, Homo sapiens
  siRNA target sequence for LPHN2 (NM_012302.1,410-428).
gtcggacggatgacaagat

SEQ ID NO: 175038 - DNA, 19 bp, Homo sapiens
  siRNA target sequence for LPHN2 (NM_012302.1,495-513).
gactcaaaggtgcaacaat

SEQ ID NO: 175039 - DNA, 19 bp, Homo sapiens
  siRNA target sequence for LPHN2 (NM_012302.1,499-517).
caaaggtgcaacaatcgaa

SEQ ID NO: 175040 - DNA, 19 bp, Homo sapiens
  siRNA target sequence for LPHN2 (NM_012302.1,510-528).
caatcgaacacagtgtata

SEQ ID NO: 175041 - DNA, 19 bp, Homo sapiens
  siRNA target sequence for LPHN2 (NM_012302.1,560-578).
catgtcctggaacatacaa

SEQ ID NO: 175042 - DNA, 19 bp, Homo sapiens
  siRNA target sequence for LPHN2 (NM_012302.1,563-581).
gtcctggaacatacaaata

SEQ ID NO: 175043 - DNA, 19 bp, Homo sapiens
  siRNA target sequence for LPHN2 (NM_012302.1,621-639).
gtgtcctgggaccttgaaa

SEQ ID NO: 175044 - DNA, 19 bp, Homo sapiens
  siRNA target sequence for LPHN2 (NM_012302.1,626-644).
ctgggaccttgaaagcaat

SEQ ID NO: 175045 - DNA, 19 bp, Homo sapiens
  siRNA target sequence for LPHN2 (NM_012302.1,629-647).
ggaccttgaaagcaattgt

SEQ ID NO: 175046 - DNA, 19 bp, Homo sapiens
  siRNA target sequence for LPHN2 (NM_012302.1,651-669).
ctcaccatgtatatatgaa

SEQ ID NO: 175047 - DNA, 19 bp, Homo sapiens
  siRNA target sequence for LPHN2 (NM_012302.1,736-754).
ccctggactccctatcgta

SEQ ID NO: 175048 - DNA, 19 bp, Homo sapiens
  siRNA target sequence for LPHN2 (NM_012302.1,745-763).
ccctatcgtaccgatactt

SEQ ID NO: 175049 - DNA, 19 bp, Homo sapiens
  siRNA target sequence for LPHN2 (NM_012302.1,746-764).
cctatcgtaccgatacttt

SEQ ID NO: 175050 - DNA, 19 bp, Homo sapiens
  siRNA target sequence for LPHN2 (NM_012302.1,747-765).
ctatcgtaccgatacttta

SEQ ID NO: 175051 - DNA, 19 bp, Homo sapiens
  siRNA target sequence for LPHN2 (NM_012302.1,752-770).
gtaccgatactttaataga

SEQ ID NO: 175052 - DNA, 19 bp, Homo sapiens
  siRNA target sequence for LPHN2 (NM_012302.1,755-773).
ccgatactttaatagaata

SEQ ID NO: 175053 - DNA, 19 bp, Homo sapiens
  siRNA target sequence for LPHN2 (NM_012302.1,776-794).
cttctttagaagatttcca

SEQ ID NO: 175054 - DNA, 19 bp, Homo sapiens
  siRNA target sequence for LPHN2 (NM_012302.1,800-818).
gtcgccaaacaacaacata

SEQ ID NO: 175055 - DNA, 19 bp, Homo sapiens
  siRNA target sequence for LPHN2 (NM_012302.1,812-830).
caacatataaacttccaaa

SEQ ID NO: 175056 - DNA, 19 bp, Homo sapiens
  siRNA target sequence for LPHN2 (NM_012302.1,862-880).
gatggtgctgtcttcttta

SEQ ID NO: 175057 - DNA, 19 bp, Homo sapiens
  siRNA target sequence for LPHN2 (NM_012302.1,933-951).
gagtggcgaggccataatt

SEQ ID NO: 175058 - DNA, 19 bp, Homo sapiens
  siRNA target sequence for LPHN2 (NM_012302.1,935-953).
gtggcgaggccataattaa

SEQ ID NO: 175059 - DNA, 19 bp, Homo sapiens
  siRNA target sequence for LPHN2 (NM_012302.1,937-955).
ggcgaggccataattaact

SEQ ID NO: 175060 - DNA, 19 bp, Homo sapiens
  siRNA target sequence for LPHN2 (NM_012302.1,938-956).
gcgaggccataattaacta

SEQ ID NO: 175061 - DNA, 19 bp, Homo sapiens
  siRNA target sequence for LPHN2 (NM_012302.1,939-957).
cgaggccataattaactat

SEQ ID NO: 175062 - DNA, 19 bp, Homo sapiens
  siRNA target sequence for LPHN2 (NM_012302.1,1008-1026).
cgacctagcagttgatgaa

SEQ ID NO: 175063 - DNA, 19 bp, Homo sapiens
  siRNA target sequence for LPHN2 (NM_012302.1,1047-1065).
cgccactgaacagaacaat

SEQ ID NO: 175064 - DNA, 19 bp, Homo sapiens
  siRNA target sequence for LPHN2 (NM_012302.1,1052-1070).
ctgaacagaacaatggaat

SEQ ID NO: 175065 - DNA, 19 bp, Homo sapiens
  siRNA target sequence for LPHN2 (NM_012302.1,1083-1101).
ccagctgaatccatacact

SEQ ID NO: 175066 - DNA, 19 bp, Homo sapiens
  siRNA target sequence for LPHN2 (NM_012302.1,1118-1136).
cgtgggagactgtatacga

SEQ ID NO: 175067 - DNA, 19 bp, Homo sapiens
  siRNA target sequence for LPHN2 (NM_012302.1,1137-1155).
caaacgtgccgcatcaaat

SEQ ID NO: 175068 - DNA, 19 bp, Homo sapiens
  siRNA target sequence for LPHN2 (NM_012302.1,1141-1159).
cgtgccgcatcaaatgctt

SEQ ID NO: 175069 - DNA, 19 bp, Homo sapiens
  siRNA target sequence for LPHN2 (NM_012302.1,1142-1160).
gtgccgcatcaaatgcttt

SEQ ID NO: 175070 - DNA, 19 bp, Homo sapiens
  siRNA target sequence for LPHN2 (NM_012302.1,1148-1166).
catcaaatgcttttatgat

SEQ ID NO: 175071 - DNA, 19 bp, Homo sapiens
  siRNA target sequence for LPHN2 (NM_012302.1,1191-1209).
gtcagtttatcaagacaat

SEQ ID NO: 175072 - DNA, 19 bp, Homo sapiens
  siRNA target sequence for LPHN2 (NM_012302.1,1220-1238).
caggcaagaactcaattga

SEQ ID NO: 175073 - DNA, 19 bp, Homo sapiens
  siRNA target sequence for LPHN2 (NM_012302.1,1230-1248).
ctcaattgattacatttat

SEQ ID NO: 175074 - DNA, 19 bp, Homo sapiens
  siRNA target sequence for LPHN2 (NM_012302.1,1232-1250).
caattgattacatttataa

SEQ ID NO: 175075 - DNA, 19 bp, Homo sapiens
  siRNA target sequence for LPHN2 (NM_012302.1,1256-1274).
gattaaaccgaggagaata

SEQ ID NO: 175076 - DNA, 19 bp, Homo sapiens
  siRNA target sequence for LPHN2 (NM_012302.1,1292-1310).
ccaaccagtatcagtatat

SEQ ID NO: 175077 - DNA, 19 bp, Homo sapiens
  siRNA target sequence for LPHN2 (NM_012302.1,1293-1311).
caaccagtatcagtatatt

SEQ ID NO: 175078 - DNA, 19 bp, Homo sapiens
  siRNA target sequence for LPHN2 (NM_012302.1,1326-1344).
caatccaagagataaccaa

SEQ ID NO: 175079 - DNA, 19 bp, Homo sapiens
  siRNA target sequence for LPHN2 (NM_012302.1,1334-1352).
gagataaccaactttacgt

SEQ ID NO: 175080 - DNA, 19 bp, Homo sapiens
  siRNA target sequence for LPHN2 (NM_012302.1,1345-1363).
ctttacgtgtggaacaata

SEQ ID NO: 175081 - DNA, 19 bp, Homo sapiens
  siRNA target sequence for LPHN2 (NM_012302.1,1351-1369).
gtgtggaacaataacttca

SEQ ID NO: 175082 - DNA, 19 bp, Homo sapiens
  siRNA target sequence for LPHN2 (NM_012302.1,1359-1377).
caataacttcattttacga

SEQ ID NO: 175083 - DNA, 19 bp, Homo sapiens
  siRNA target sequence for LPHN2 (NM_012302.1,1418-1436).
ctaccacagctgtgacaat

SEQ ID NO: 175084 - DNA, 19 bp, Homo sapiens
  siRNA target sequence for LPHN2 (NM_012302.1,1452-1470).
gctgttcaaaaccataata

SEQ ID NO: 175085 - DNA, 19 bp, Homo sapiens
  siRNA target sequence for LPHN2 (NM_012302.1,1453-1471).
ctgttcaaaaccataatat

SEQ ID NO: 175086 - DNA, 19 bp, Homo sapiens
  siRNA target sequence for LPHN2 (NM_012302.1,1500-1518).
ccccatgagcacaactgta

SEQ ID NO: 175087 - DNA, 19 bp, Homo sapiens
  siRNA target sequence for LPHN2 (NM_012302.1,1555-1573).
cctccagcagtttctacaa

SEQ ID NO: 175088 - DNA, 19 bp, Homo sapiens
  siRNA target sequence for LPHN2 (NM_012302.1,1582-1600).
ccacctataacaaatattt

SEQ ID NO: 175089 - DNA, 19 bp, Homo sapiens
  siRNA target sequence for LPHN2 (NM_012302.1,1614-1632).
gagattctgtgaagcatta

SEQ ID NO: 175090 - DNA, 19 bp, Homo sapiens
  siRNA target sequence for LPHN2 (NM_012302.1,1616-1634).
gattctgtgaagcattaga

SEQ ID NO: 175091 - DNA, 19 bp, Homo sapiens
  siRNA target sequence for LPHN2 (NM_012302.1,1633-1651).
gactccaaggggataaagt

SEQ ID NO: 175092 - DNA, 19 bp, Homo sapiens
  siRNA target sequence for LPHN2 (NM_012302.1,1706-1724).
gaggaactgcctcatatct

SEQ ID NO: 175093 - DNA, 19 bp, Homo sapiens
  siRNA target sequence for LPHN2 (NM_012302.1,1762-1780).
cccgatcttagcaactgta

SEQ ID NO: 175094 - DNA, 19 bp, Homo sapiens
  siRNA target sequence for LPHN2 (NM_012302.1,1812-1830).
gatcagaagcggagaaaat

SEQ ID NO: 175095 - DNA, 19 bp, Homo sapiens
  siRNA target sequence for LPHN2 (NM_012302.1,1835-1853).
ctagtcttgccaatgaact

SEQ ID NO: 175096 - DNA, 19 bp, Homo sapiens
  siRNA target sequence for LPHN2 (NM_012302.1,1844-1862).
ccaatgaactggctaaaca

SEQ ID NO: 175097 - DNA, 19 bp, Homo sapiens
  siRNA target sequence for LPHN2 (NM_012302.1,1978-1996).
gctggacggagttataaca

SEQ ID NO: 175098 - DNA, 19 bp, Homo sapiens
  siRNA target sequence for LPHN2 (NM_012302.1,1979-1997).
ctggacggagttataacaa

SEQ ID NO: 175099 - DNA, 19 bp, Homo sapiens
  siRNA target sequence for LPHN2 (NM_012302.1,2094-2112).
gttactcgatacattggaa

SEQ ID NO: 175100 - DNA, 19 bp, Homo sapiens
  siRNA target sequence for LPHN2 (NM_012302.1,2125-2143).
gtcctagctgacaatcttt

SEQ ID NO: 175101 - DNA, 19 bp, Homo sapiens
  siRNA target sequence for LPHN2 (NM_012302.1,2127-2145).
cctagctgacaatctttta

SEQ ID NO: 175102 - DNA, 19 bp, Homo sapiens
  siRNA target sequence for LPHN2 (NM_012302.1,2212-2230).
ggacagatccaagacttta

SEQ ID NO: 175103 - DNA, 19 bp, Homo sapiens
  siRNA target sequence for LPHN2 (NM_012302.1,2215-2233).
cagatccaagactttaaat

SEQ ID NO: 175104 - DNA, 19 bp, Homo sapiens
  siRNA target sequence for LPHN2 (NM_012302.1,2276-2294).
ccgcaaataccgtcaaaca

SEQ ID NO: 175105 - DNA, 19 bp, Homo sapiens
  siRNA target sequence for LPHN2 (NM_012302.1,2344-2362).
ctgggacagttccttagta

SEQ ID NO: 175106 - DNA, 19 bp, Homo sapiens
  siRNA target sequence for LPHN2 (NM_012302.1,2355-2373).
ccttagtacagaaaatgca

SEQ ID NO: 175107 - DNA, 19 bp, Homo sapiens
  siRNA target sequence for LPHN2 (NM_012302.1,2392-2410).
gattttattggtcgtaata

SEQ ID NO: 175108 - DNA, 19 bp, Homo sapiens
  siRNA target sequence for LPHN2 (NM_012302.1,2422-2440).
gtgaactctcacgtcattt

SEQ ID NO: 175109 - DNA, 19 bp, Homo sapiens
  siRNA target sequence for LPHN2 (NM_012302.1,2431-2449).
cacgtcatttcagtttcaa

SEQ ID NO: 175110 - DNA, 19 bp, Homo sapiens
  siRNA target sequence for LPHN2 (NM_012302.1,2506-2524).
cacattgatcctgacaatt

SEQ ID NO: 175111 - DNA, 19 bp, Homo sapiens
  siRNA target sequence for LPHN2 (NM_012302.1,2598-2616).
caagctggttgacactaat

SEQ ID NO: 175112 - DNA, 19 bp, Homo sapiens
  siRNA target sequence for LPHN2 (NM_012302.1,2601-2619).
gctggttgacactaataaa

SEQ ID NO: 175113 - DNA, 19 bp, Homo sapiens
  siRNA target sequence for LPHN2 (NM_012302.1,2602-2620).
ctggttgacactaataaaa

SEQ ID NO: 175114 - DNA, 19 bp, Homo sapiens
  siRNA target sequence for LPHN2 (NM_012302.1,2640-2658).
cagccacctaaccaatttt

SEQ ID NO: 175115 - DNA, 19 bp, Homo sapiens
  siRNA target sequence for LPHN2 (NM_012302.1,2676-2694).
cagggaaattgcatataaa

SEQ ID NO: 175116 - DNA, 19 bp, Homo sapiens
  siRNA target sequence for LPHN2 (NM_012302.1,2699-2717).
gcgttcatgaattacttct

SEQ ID NO: 175117 - DNA, 19 bp, Homo sapiens
  siRNA target sequence for LPHN2 (NM_012302.1,2700-2718).
cgttcatgaattacttctt

SEQ ID NO: 175118 - DNA, 19 bp, Homo sapiens
  siRNA target sequence for LPHN2 (NM_012302.1,2701-2719).
gttcatgaattacttctta

SEQ ID NO: 175119 - DNA, 19 bp, Homo sapiens
  siRNA target sequence for LPHN2 (NM_012302.1,2803-2821).
cagagtgaccgaaatacta

SEQ ID NO: 175120 - DNA, 19 bp, Homo sapiens
  siRNA target sequence for LPHN2 (NM_012302.1,2805-2823).
gagtgaccgaaatactatt

SEQ ID NO: 175121 - DNA, 19 bp, Homo sapiens
  siRNA target sequence for LPHN2 (NM_012302.1,2807-2825).
gtgaccgaaatactattca

SEQ ID NO: 175122 - DNA, 19 bp, Homo sapiens
  siRNA target sequence for LPHN2 (NM_012302.1,2869-2887).
ctaataggcattgataaga

SEQ ID NO: 175123 - DNA, 19 bp, Homo sapiens
  siRNA target sequence for LPHN2 (NM_012302.1,2875-2893).
ggcattgataagacaaaat

SEQ ID NO: 175124 - DNA, 19 bp, Homo sapiens
  siRNA target sequence for LPHN2 (NM_012302.1,2877-2895).
cattgataagacaaaatat

SEQ ID NO: 175125 - DNA, 19 bp, Homo sapiens
  siRNA target sequence for LPHN2 (NM_012302.1,2896-2914).
gcgattgcatgcccaatat

SEQ ID NO: 175126 - DNA, 19 bp, Homo sapiens
  siRNA target sequence for LPHN2 (NM_012302.1,2897-2915).
cgattgcatgcccaatatt

SEQ ID NO: 175127 - DNA, 19 bp, Homo sapiens
  siRNA target sequence for LPHN2 (NM_012302.1,2917-2935).
gcaggacttctacactttt

SEQ ID NO: 175128 - DNA, 19 bp, Homo sapiens
  siRNA target sequence for LPHN2 (NM_012302.1,2918-2936).
caggacttctacacttttt

SEQ ID NO: 175129 - DNA, 19 bp, Homo sapiens
  siRNA target sequence for LPHN2 (NM_012302.1,2971-2989).
ggtgtgcagctctacctaa

SEQ ID NO: 175130 - DNA, 19 bp, Homo sapiens
  siRNA target sequence for LPHN2 (NM_012302.1,2974-2992).
gtgcagctctacctaatgt

SEQ ID NO: 175131 - DNA, 19 bp, Homo sapiens
  siRNA target sequence for LPHN2 (NM_012302.1,2976-2994).
gcagctctacctaatgtta

SEQ ID NO: 175132 - DNA, 19 bp, Homo sapiens
  siRNA target sequence for LPHN2 (NM_012302.1,2985-3003).
cctaatgttagttgaagtt

SEQ ID NO: 175133 - DNA, 19 bp, Homo sapiens
  siRNA target sequence for LPHN2 (NM_012302.1,2986-3004).
ctaatgttagttgaagttt

SEQ ID NO: 175134 - DNA, 19 bp, Homo sapiens
  siRNA target sequence for LPHN2 (NM_012302.1,3074-3092).
gagtttcagctgctattga

SEQ ID NO: 175135 - DNA, 19 bp, Homo sapiens
  siRNA target sequence for LPHN2 (NM_012302.1,3091-3109).
gactataagagctatggaa

SEQ ID NO: 175136 - DNA, 19 bp, Homo sapiens
  siRNA target sequence for LPHN2 (NM_012302.1,3119-3137).
cttgctggcttcatgttga

SEQ ID NO: 175137 - DNA, 19 bp, Homo sapiens
  siRNA target sequence for LPHN2 (NM_012302.1,3125-3143).
ggcttcatgttgataacta

SEQ ID NO: 175138 - DNA, 19 bp, Homo sapiens
  siRNA target sequence for LPHN2 (NM_012302.1,3127-3145).
cttcatgttgataactact

SEQ ID NO: 175139 - DNA, 19 bp, Homo sapiens
  siRNA target sequence for LPHN2 (NM_012302.1,3133-3151).
gttgataactactttatat

SEQ ID NO: 175140 - DNA, 19 bp, Homo sapiens
  siRNA target sequence for LPHN2 (NM_012302.1,3136-3154).
gataactactttatatgga

SEQ ID NO: 175141 - DNA, 19 bp, Homo sapiens
  siRNA target sequence for LPHN2 (NM_012302.1,3205-3223).
gtgatcacattgtgcaaaa

SEQ ID NO: 175142 - DNA, 19 bp, Homo sapiens
  siRNA target sequence for LPHN2 (NM_012302.1,3257-3275).
ctagcaggttggaaaacat

SEQ ID NO: 175143 - DNA, 19 bp, Homo sapiens
  siRNA target sequence for LPHN2 (NM_012302.1,3362-3380).
ctattgtgatggcatatct

SEQ ID NO: 175144 - DNA, 19 bp, Homo sapiens
  siRNA target sequence for LPHN2 (NM_012302.1,3570-3588).
cacacagagtcgtataaga

SEQ ID NO: 175145 - DNA, 19 bp, Homo sapiens
  siRNA target sequence for LPHN2 (NM_012302.1,3645-3663).
catcaatagcacttcaaca

SEQ ID NO: 175146 - DNA, 19 bp, Homo sapiens
  siRNA target sequence for LPHN2 (NM_012302.1,3718-3736).
ctaccgctaaatggtaatt

SEQ ID NO: 175147 - DNA, 19 bp, Homo sapiens
  siRNA target sequence for LPHN2 (NM_012302.1,3721-3739).
ccgctaaatggtaatttta

SEQ ID NO: 175148 - DNA, 19 bp, Homo sapiens
  siRNA target sequence for LPHN2 (NM_012302.1,3753-3771).
gctgcacaagggtgactat

SEQ ID NO: 175149 - DNA, 19 bp, Homo sapiens
  siRNA target sequence for LPHN2 (NM_012302.1,3754-3772).
ctgcacaagggtgactata

SEQ ID NO: 175150 - DNA, 19 bp, Homo sapiens
  siRNA target sequence for LPHN2 (NM_012302.1,3756-3774).
gcacaagggtgactataat

SEQ ID NO: 175151 - DNA, 19 bp, Homo sapiens
  siRNA target sequence for LPHN2 (NM_012302.1,3795-3813).
ctgtggactaagtctgaat

SEQ ID NO: 175152 - DNA, 19 bp, Homo sapiens
  siRNA target sequence for LPHN2 (NM_012302.1,3797-3815).
gtggactaagtctgaatga

SEQ ID NO: 175153 - DNA, 19 bp, Homo sapiens
  siRNA target sequence for LPHN2 (NM_012302.1,3844-3862).
gaattagtgcacaacaact

SEQ ID NO: 175154 - DNA, 19 bp, Homo sapiens
  siRNA target sequence for LPHN2 (NM_012302.1,3894-3912).
gctcacgctaccagtcaaa

SEQ ID NO: 175155 - DNA, 19 bp, Homo sapiens
  siRNA target sequence for LPHN2 (NM_012302.1,3954-3972).
ggcagatgcttcatcttta

SEQ ID NO: 175156 - DNA, 19 bp, Homo sapiens
  siRNA target sequence for LPHN2 (NM_012302.1,4017-4035).
cgaggcaccacttattcct

SEQ ID NO: 175157 - DNA, 19 bp, Homo sapiens
  siRNA target sequence for LPHN2 (NM_012302.1,4056-4074).
gtaccaaccccagaagaaa

SEQ ID NO: 175158 - DNA, 19 bp, Homo sapiens
  siRNA target sequence for LPHN2 (NM_012302.1,4087-4105).
ggaactgacagctatgtct

SEQ ID NO: 175159 - DNA, 19 bp, Homo sapiens
  siRNA target sequence for LPHN2 (NM_012302.1,4323-4341).
cagcaggggcaatagtgat

SEQ ID NO: 175160 - DNA, 19 bp, Homo sapiens
  siRNA target sequence for LPHN2 (NM_012302.1,4329-4347).
gggcaatagtgatggttat

SEQ ID NO: 175161 - DNA, 19 bp, Homo sapiens
  siRNA target sequence for LPHN2 (NM_012302.1,4330-4348).
ggcaatagtgatggttata

SEQ ID NO: 175162 - DNA, 19 bp, Homo sapiens
  siRNA target sequence for LPHN2 (NM_012302.1,4331-4349).
gcaatagtgatggttatat

SEQ ID NO: 175163 - DNA, 19 bp, Homo sapiens
  siRNA target sequence for LPHN2 (NM_012302.1,4332-4350).
caatagtgatggttatata

SEQ ID NO: 175164 - DNA, 19 bp, Homo sapiens
  siRNA target sequence for LPHN2 (NM_012302.1,4362-4380).
caaagaagggtgtattcca

SEQ ID NO: 175165 - DNA, 19 bp, Homo sapiens
  siRNA target sequence for LPHN2 (NM_012302.1,4402-4420).
caaatgcagctggttacaa

SEQ ID NO: 175166 - DNA, 19 bp, Homo sapiens
  siRNA target sequence for LPHN2 (NM_012302.1,4407-4425).
gcagctggttacaagtctt

SEQ ID NO: 175167 - DNA, 19 bp, Homo sapiens
  siRNA target sequence for LPHN2 (NM_012302.1,4408-4426).
cagctggttacaagtcttt

SEQ ID NO: 175168 - DNA, 19 bp, Homo sapiens
  siRNA target sequence for LPHN3 (NM_015236.1,519-537).
ccatcgcagctactaattt

SEQ ID NO: 175169 - DNA, 19 bp, Homo sapiens
  siRNA target sequence for LPHN3 (NM_015236.1,523-541).
cgcagctactaattttcat

SEQ ID NO: 175170 - DNA, 19 bp, Homo sapiens
  siRNA target sequence for LPHN3 (NM_015236.1,542-560).
gatgctcttagctccaata

SEQ ID NO: 175171 - DNA, 19 bp, Homo sapiens
  siRNA target sequence for LPHN3 (NM_015236.1,572-590).
cagccgtgccccaattcca

SEQ ID NO: 175172 - DNA, 19 bp, Homo sapiens
  siRNA target sequence for LPHN3 (NM_015236.1,574-592).
gccgtgccccaattccaat

SEQ ID NO: 175173 - DNA, 19 bp, Homo sapiens
  siRNA target sequence for LPHN3 (NM_015236.1,651-669).
ggaacagacgtcatcatga

SEQ ID NO: 175174 - DNA, 19 bp, Homo sapiens
  siRNA target sequence for LPHN3 (NM_015236.1,652-670).
gaacagacgtcatcatgat

SEQ ID NO: 175175 - DNA, 19 bp, Homo sapiens
  siRNA target sequence for LPHN3 (NM_015236.1,655-673).
cagacgtcatcatgataga

SEQ ID NO: 175176 - DNA, 19 bp, Homo sapiens
  siRNA target sequence for LPHN3 (NM_015236.1,659-677).
cgtcatcatgatagaaagt

SEQ ID NO: 175177 - DNA, 19 bp, Homo sapiens
  siRNA target sequence for LPHN3 (NM_015236.1,687-705).
ggcaggactgatgacaaaa

SEQ ID NO: 175178 - DNA, 19 bp, Homo sapiens
  siRNA target sequence for LPHN3 (NM_015236.1,688-706).
gcaggactgatgacaaaat

SEQ ID NO: 175179 - DNA, 19 bp, Homo sapiens
  siRNA target sequence for LPHN3 (NM_015236.1,812-830).
ggcaggtcctgatgttttt

SEQ ID NO: 175180 - DNA, 19 bp, Homo sapiens
  siRNA target sequence for LPHN3 (NM_015236.1,836-854).
cccgtgtccaggaacctat

SEQ ID NO: 175181 - DNA, 19 bp, Homo sapiens
  siRNA target sequence for LPHN3 (NM_015236.1,837-855).
ccgtgtccaggaacctata

SEQ ID NO: 175182 - DNA, 19 bp, Homo sapiens
  siRNA target sequence for LPHN3 (NM_015236.1,838-856).
cgtgtccaggaacctataa

SEQ ID NO: 175183 - DNA, 19 bp, Homo sapiens
  siRNA target sequence for LPHN3 (NM_015236.1,885-903).
ccttacaaagtggaacaaa

SEQ ID NO: 175184 - DNA, 19 bp, Homo sapiens
  siRNA target sequence for LPHN3 (NM_015236.1,912-930).
ctttgtcctggactactaa

SEQ ID NO: 175185 - DNA, 19 bp, Homo sapiens
  siRNA target sequence for LPHN3 (NM_015236.1,922-940).
gactactaaaaggagtata

SEQ ID NO: 175186 - DNA, 19 bp, Homo sapiens
  siRNA target sequence for LPHN3 (NM_015236.1,1034-1052).
gactccctacagaactgat

SEQ ID NO: 175187 - DNA, 19 bp, Homo sapiens
  siRNA target sequence for LPHN3 (NM_015236.1,1155-1173).
gatggagctttgttcttca

SEQ ID NO: 175188 - DNA, 19 bp, Homo sapiens
  siRNA target sequence for LPHN3 (NM_015236.1,1158-1176).
ggagctttgttcttcaaca

SEQ ID NO: 175189 - DNA, 19 bp, Homo sapiens
  siRNA target sequence for LPHN3 (NM_015236.1,1159-1177).
gagctttgttcttcaacaa

SEQ ID NO: 175190 - DNA, 19 bp, Homo sapiens
  siRNA target sequence for LPHN3 (NM_015236.1,1181-1199).
gcgcaccaggaacatagta

SEQ ID NO: 175191 - DNA, 19 bp, Homo sapiens
  siRNA target sequence for LPHN3 (NM_015236.1,1182-1200).
cgcaccaggaacatagtaa

SEQ ID NO: 175192 - DNA, 19 bp, Homo sapiens
  siRNA target sequence for LPHN3 (NM_015236.1,1206-1224).
gatttgcggactaggataa

SEQ ID NO: 175193 - DNA, 19 bp, Homo sapiens
  siRNA target sequence for LPHN3 (NM_015236.1,1211-1229).
gcggactaggataaagagt

SEQ ID NO: 175194 - DNA, 19 bp, Homo sapiens
  siRNA target sequence for LPHN3 (NM_015236.1,1226-1244).
gagtggagaggctatcata

SEQ ID NO: 175195 - DNA, 19 bp, Homo sapiens
  siRNA target sequence for LPHN3 (NM_015236.1,1230-1248).
ggagaggctatcatagcaa

SEQ ID NO: 175196 - DNA, 19 bp, Homo sapiens
  siRNA target sequence for LPHN3 (NM_015236.1,1231-1249).
gagaggctatcatagcaaa

SEQ ID NO: 175197 - DNA, 19 bp, Homo sapiens
  siRNA target sequence for LPHN3 (NM_015236.1,1277-1295).
ccgatggggaggcaaatct

SEQ ID NO: 175198 - DNA, 19 bp, Homo sapiens
  siRNA target sequence for LPHN3 (NM_015236.1,1283-1301).
gggaggcaaatctgacata

SEQ ID NO: 175199 - DNA, 19 bp, Homo sapiens
  siRNA target sequence for LPHN3 (NM_015236.1,1326-1344).
ctatgggtaatctatgcaa

SEQ ID NO: 175200 - DNA, 19 bp, Homo sapiens
  siRNA target sequence for LPHN3 (NM_015236.1,1414-1432).
gggatactgcatatgataa

SEQ ID NO: 175201 - DNA, 19 bp, Homo sapiens
  siRNA target sequence for LPHN3 (NM_015236.1,1415-1433).
ggatactgcatatgataaa

SEQ ID NO: 175202 - DNA, 19 bp, Homo sapiens
  siRNA target sequence for LPHN3 (NM_015236.1,1438-1456).
cagcttccaatgcctttat

SEQ ID NO: 175203 - DNA, 19 bp, Homo sapiens
  siRNA target sequence for LPHN3 (NM_015236.1,1472-1490).
gtatgtggtcaaatctgta

SEQ ID NO: 175204 - DNA, 19 bp, Homo sapiens
  siRNA target sequence for LPHN3 (NM_015236.1,1505-1523).
caatgaggctactggaaat

SEQ ID NO: 175205 - DNA, 19 bp, Homo sapiens
  siRNA target sequence for LPHN3 (NM_015236.1,1516-1534).
ctggaaataagattgacta

SEQ ID NO: 175206 - DNA, 19 bp, Homo sapiens
  siRNA target sequence for LPHN3 (NM_015236.1,1519-1537).
gaaataagattgactacat

SEQ ID NO: 175207 - DNA, 19 bp, Homo sapiens
  siRNA target sequence for LPHN3 (NM_015236.1,1585-1603).
ctaattcataccagtacat

SEQ ID NO: 175208 - DNA, 19 bp, Homo sapiens
  siRNA target sequence for LPHN3 (NM_015236.1,1625-1643).
cagggacaacctactttat

SEQ ID NO: 175209 - DNA, 19 bp, Homo sapiens
  siRNA target sequence for LPHN3 (NM_015236.1,1627-1645).
gggacaacctactttatgt

SEQ ID NO: 175210 - DNA, 19 bp, Homo sapiens
  siRNA target sequence for LPHN3 (NM_015236.1,1655-1673).
ctatcacgtcgtgaaatat

SEQ ID NO: 175211 - DNA, 19 bp, Homo sapiens
  siRNA target sequence for LPHN3 (NM_015236.1,1686-1704).
ggacctctggatagtagat

SEQ ID NO: 175212 - DNA, 19 bp, Homo sapiens
  siRNA target sequence for LPHN3 (NM_015236.1,1774-1792).
gaccctctgttaaagatat

SEQ ID NO: 175213 - DNA, 19 bp, Homo sapiens
  siRNA target sequence for LPHN3 (NM_015236.1,1776-1794).
ccctctgttaaagatatct

SEQ ID NO: 175214 - DNA, 19 bp, Homo sapiens
  siRNA target sequence for LPHN3 (NM_015236.1,1840-1858).
cccttcggaccacaacttt

SEQ ID NO: 175215 - DNA, 19 bp, Homo sapiens
  siRNA target sequence for LPHN3 (NM_015236.1,1842-1860).
cttcggaccacaactttga

SEQ ID NO: 175216 - DNA, 19 bp, Homo sapiens
  siRNA target sequence for LPHN3 (NM_015236.1,1927-1945).
cagctgtcgaggtacttga

SEQ ID NO: 175217 - DNA, 19 bp, Homo sapiens
  siRNA target sequence for LPHN3 (NM_015236.1,1930-1948).
ctgtcgaggtacttgatga

SEQ ID NO: 175218 - DNA, 19 bp, Homo sapiens
  siRNA target sequence for LPHN3 (NM_015236.1,2023-2041).
gagaaatcatgtggtttaa

SEQ ID NO: 175219 - DNA, 19 bp, Homo sapiens
  siRNA target sequence for LPHN3 (NM_015236.1,2075-2093).
ccctgcaggaactataggt

SEQ ID NO: 175220 - DNA, 19 bp, Homo sapiens
  siRNA target sequence for LPHN3 (NM_015236.1,2086-2104).
ctataggtgtatcaactta

SEQ ID NO: 175221 - DNA, 19 bp, Homo sapiens
  siRNA target sequence for LPHN3 (NM_015236.1,2110-2128).
gccttgctcctgatggaat

SEQ ID NO: 175222 - DNA, 19 bp, Homo sapiens
  siRNA target sequence for LPHN3 (NM_015236.1,2173-2191).
gggtcaatcatataacaca

SEQ ID NO: 175223 - DNA, 19 bp, Homo sapiens
  siRNA target sequence for LPHN3 (NM_015236.1,2241-2259).
gaacagacaagaaatcact

SEQ ID NO: 175224 - DNA, 19 bp, Homo sapiens
  siRNA target sequence for LPHN3 (NM_015236.1,2336-2354).
cttgaccccaggtggaaaa

SEQ ID NO: 175225 - DNA, 19 bp, Homo sapiens
  siRNA target sequence for LPHN3 (NM_015236.1,2359-2377).
gtgctgcccggagtttgaa

SEQ ID NO: 175226 - DNA, 19 bp, Homo sapiens
  siRNA target sequence for LPHN3 (NM_015236.1,2371-2389).
gtttgaacaagcttcagaa

SEQ ID NO: 175227 - DNA, 19 bp, Homo sapiens
  siRNA target sequence for LPHN3 (NM_015236.1,2422-2440).
caatggtcgagacagttaa

SEQ ID NO: 175228 - DNA, 19 bp, Homo sapiens
  siRNA target sequence for LPHN3 (NM_015236.1,2454-2472).
ccacaagctttgaatgcat

SEQ ID NO: 175229 - DNA, 19 bp, Homo sapiens
  siRNA target sequence for LPHN3 (NM_015236.1,2508-2526).
gccaccatgttgcttcata

SEQ ID NO: 175230 - DNA, 19 bp, Homo sapiens
  siRNA target sequence for LPHN3 (NM_015236.1,2542-2560).
cttttgtgctggctgataa

SEQ ID NO: 175231 - DNA, 19 bp, Homo sapiens
  siRNA target sequence for LPHN3 (NM_015236.1,2547-2565).
gtgctggctgataaccttt

SEQ ID NO: 175232 - DNA, 19 bp, Homo sapiens
  siRNA target sequence for LPHN3 (NM_015236.1,2584-2602).
gggagaatacagacaatat

SEQ ID NO: 175233 - DNA, 19 bp, Homo sapiens
  siRNA target sequence for LPHN3 (NM_015236.1,2624-2642).
gagcacagaaggaaactta

SEQ ID NO: 175234 - DNA, 19 bp, Homo sapiens
  siRNA target sequence for LPHN3 (NM_015236.1,2697-2715).
gcaaataccttaaagcaaa

SEQ ID NO: 175235 - DNA, 19 bp, Homo sapiens
  siRNA target sequence for LPHN3 (NM_015236.1,2782-2800).
cggagaatgccagtatgaa

SEQ ID NO: 175236 - DNA, 19 bp, Homo sapiens
  siRNA target sequence for LPHN3 (NM_015236.1,2810-2828).
ggaagctttgtccacaaat

SEQ ID NO: 175237 - DNA, 19 bp, Homo sapiens
  siRNA target sequence for LPHN3 (NM_015236.1,2814-2832).
gctttgtccacaaatcatt

SEQ ID NO: 175238 - DNA, 19 bp, Homo sapiens
  siRNA target sequence for LPHN3 (NM_015236.1,2819-2837).
gtccacaaatcattctgtt

SEQ ID NO: 175239 - DNA, 19 bp, Homo sapiens
  siRNA target sequence for LPHN3 (NM_015236.1,2841-2859).
gtcaattcccctgttatta

SEQ ID NO: 175240 - DNA, 19 bp, Homo sapiens
  siRNA target sequence for LPHN3 (NM_015236.1,2853-2871).
gttattacggcagcaataa

SEQ ID NO: 175241 - DNA, 19 bp, Homo sapiens
  siRNA target sequence for LPHN3 (NM_015236.1,2860-2878).
cggcagcaataaacaaaga

SEQ ID NO: 175242 - DNA, 19 bp, Homo sapiens
  siRNA target sequence for LPHN3 (NM_015236.1,2907-2925).
cctgtggtatttactgtta

SEQ ID NO: 175243 - DNA, 19 bp, Homo sapiens
  siRNA target sequence for LPHN3 (NM_015236.1,2912-2930).
ggtatttactgttaaacat

SEQ ID NO: 175244 - DNA, 19 bp, Homo sapiens
  siRNA target sequence for LPHN3 (NM_015236.1,2977-2995).
gctactccaagcgtacaat

SEQ ID NO: 175245 - DNA, 19 bp, Homo sapiens
  siRNA target sequence for LPHN3 (NM_015236.1,2981-2999).
ctccaagcgtacaatgaca

SEQ ID NO: 175246 - DNA, 19 bp, Homo sapiens
  siRNA target sequence for LPHN3 (NM_015236.1,2988-3006).
cgtacaatgacaggttatt

SEQ ID NO: 175247 - DNA, 19 bp, Homo sapiens
  siRNA target sequence for LPHN3 (NM_015236.1,3022-3040).
gtcggctcctgacaacaaa

SEQ ID NO: 175248 - DNA, 19 bp, Homo sapiens
  siRNA target sequence for LPHN3 (NM_015236.1,3025-3043).
ggctcctgacaacaaataa

SEQ ID NO: 175249 - DNA, 19 bp, Homo sapiens
  siRNA target sequence for LPHN3 (NM_015236.1,3029-3047).
cctgacaacaaataagaca

SEQ ID NO: 175250 - DNA, 19 bp, Homo sapiens
  siRNA target sequence for LPHN3 (NM_015236.1,3048-3066).
catactacatgctcttgta

SEQ ID NO: 175251 - DNA, 19 bp, Homo sapiens
  siRNA target sequence for LPHN3 (NM_015236.1,3064-3082).
gtaaccacctaacaaattt

SEQ ID NO: 175252 - DNA, 19 bp, Homo sapiens
  siRNA target sequence for LPHN3 (NM_015236.1,3076-3094).
caaattttgcagtactgat

SEQ ID NO: 175253 - DNA, 19 bp, Homo sapiens
  siRNA target sequence for LPHN3 (NM_015236.1,3154-3172).
cgtgggttggaattttgct

SEQ ID NO: 175254 - DNA, 19 bp, Homo sapiens
  siRNA target sequence for LPHN3 (NM_015236.1,3189-3207).
ctgatttgcatcttcacat

SEQ ID NO: 175255 - DNA, 19 bp, Homo sapiens
  siRNA target sequence for LPHN3 (NM_015236.1,3308-3326).
ccgaactgaccaaccaatt

SEQ ID NO: 175256 - DNA, 19 bp, Homo sapiens
  siRNA target sequence for LPHN3 (NM_015236.1,3392-3410).
ggagggggtgcagctttat

SEQ ID NO: 175257 - DNA, 19 bp, Homo sapiens
  siRNA target sequence for LPHN3 (NM_015236.1,3393-3411).
gagggggtgcagctttata

SEQ ID NO: 175258 - DNA, 19 bp, Homo sapiens
  siRNA target sequence for LPHN3 (NM_015236.1,3396-3414).
ggggtgcagctttatatca

SEQ ID NO: 175259 - DNA, 19 bp, Homo sapiens
  siRNA target sequence for LPHN3 (NM_015236.1,3397-3415).
gggtgcagctttatatcat

SEQ ID NO: 175260 - DNA, 19 bp, Homo sapiens
  siRNA target sequence for LPHN3 (NM_015236.1,3425-3443).
ggtttttgagagtgaacat

SEQ ID NO: 175261 - DNA, 19 bp, Homo sapiens
  siRNA target sequence for LPHN3 (NM_015236.1,3438-3456).
gaacattcacgtaggaaat

SEQ ID NO: 175262 - DNA, 19 bp, Homo sapiens
  siRNA target sequence for LPHN3 (NM_015236.1,3445-3463).
cacgtaggaaatactttta

SEQ ID NO: 175263 - DNA, 19 bp, Homo sapiens
  siRNA target sequence for LPHN3 (NM_015236.1,3531-3549).
ggaacagataaagtatgtt

SEQ ID NO: 175264 - DNA, 19 bp, Homo sapiens
  siRNA target sequence for LPHN3 (NM_015236.1,3555-3573).
cgacttgacacctacttca

SEQ ID NO: 175265 - DNA, 19 bp, Homo sapiens
  siRNA target sequence for LPHN3 (NM_015236.1,3623-3641).
cttccttgggattgcttta

SEQ ID NO: 175266 - DNA, 19 bp, Homo sapiens
  siRNA target sequence for LPHN3 (NM_015236.1,3626-3644).
ccttgggattgctttatat

SEQ ID NO: 175267 - DNA, 19 bp, Homo sapiens
  siRNA target sequence for LPHN3 (NM_015236.1,3630-3648).
gggattgctttatataaaa

SEQ ID NO: 175268 - DNA, 19 bp, Homo sapiens
  siRNA target sequence for LPHN3 (NM_015236.1,3654-3672).
catcatactgctatactga

SEQ ID NO: 175269 - DNA, 19 bp, Homo sapiens
  siRNA target sequence for LPHN3 (NM_015236.1,3678-3696).
gaatcaggctgtcttgata

SEQ ID NO: 175270 - DNA, 19 bp, Homo sapiens
  siRNA target sequence for LPHN3 (NM_015236.1,3682-3700).
caggctgtcttgataacat

SEQ ID NO: 175271 - DNA, 19 bp, Homo sapiens
  siRNA target sequence for LPHN3 (NM_015236.1,3684-3702).
ggctgtcttgataacatca

SEQ ID NO: 175272 - DNA, 19 bp, Homo sapiens
  siRNA target sequence for LPHN3 (NM_015236.1,3685-3703).
gctgtcttgataacatcaa

SEQ ID NO: 175273 - DNA, 19 bp, Homo sapiens
  siRNA target sequence for LPHN3 (NM_015236.1,3688-3706).
gtcttgataacatcaacta

SEQ ID NO: 175274 - DNA, 19 bp, Homo sapiens
  siRNA target sequence for LPHN3 (NM_015236.1,3711-3729).
gataacagacccttcatca

SEQ ID NO: 175275 - DNA, 19 bp, Homo sapiens
  siRNA target sequence for LPHN3 (NM_015236.1,3725-3743).
catcaagtcatgggttata

SEQ ID NO: 175276 - DNA, 19 bp, Homo sapiens
  siRNA target sequence for LPHN3 (NM_015236.1,3728-3746).
caagtcatgggttataggt

SEQ ID NO: 175277 - DNA, 19 bp, Homo sapiens
  siRNA target sequence for LPHN3 (NM_015236.1,3737-3755).
ggttataggtgcaatagct

SEQ ID NO: 175278 - DNA, 19 bp, Homo sapiens
  siRNA target sequence for LPHN3 (NM_015236.1,3756-3774).
cttctctgcctattaggat

SEQ ID NO: 175279 - DNA, 19 bp, Homo sapiens
  siRNA target sequence for LPHN3 (NM_015236.1,3784-3802).
cctttggactcatgtatat

SEQ ID NO: 175280 - DNA, 19 bp, Homo sapiens
  siRNA target sequence for LPHN3 (NM_015236.1,3785-3803).
ctttggactcatgtatatt

SEQ ID NO: 175281 - DNA, 19 bp, Homo sapiens
  siRNA target sequence for LPHN3 (NM_015236.1,3917-3935).
gaaatgcctgcgaacacat

SEQ ID NO: 175282 - DNA, 19 bp, Homo sapiens
  siRNA target sequence for LPHN3 (NM_015236.1,4045-4063).
ggaatgacacggttcgaaa

SEQ ID NO: 175283 - DNA, 19 bp, Homo sapiens
  siRNA target sequence for LPHN3 (NM_015236.1,4064-4082).
gcagtcagagtcttccttt

SEQ ID NO: 175284 - DNA, 19 bp, Homo sapiens
  siRNA target sequence for LPHN3 (NM_015236.1,4065-4083).
cagtcagagtcttccttta

SEQ ID NO: 175285 - DNA, 19 bp, Homo sapiens
  siRNA target sequence for LPHN3 (NM_015236.1,4125-4143).
ccctacagagagacaagta

SEQ ID NO: 175286 - DNA, 19 bp, Homo sapiens
  siRNA target sequence for LPHN3 (NM_015236.1,4126-4144).
cctacagagagacaagtat

SEQ ID NO: 175287 - DNA, 19 bp, Homo sapiens
  siRNA target sequence for LPHN3 (NM_015236.1,4138-4156).
caagtatgggagtaaagct

SEQ ID NO: 175288 - DNA, 19 bp, Homo sapiens
  siRNA target sequence for LPHN3 (NM_015236.1,4141-4159).
gtatgggagtaaagctaaa

SEQ ID NO: 175289 - DNA, 19 bp, Homo sapiens
  siRNA target sequence for LPHN3 (NM_015236.1,4154-4172).
gctaaacattgcatatcaa

SEQ ID NO: 175290 - DNA, 19 bp, Homo sapiens
  siRNA target sequence for LPHN3 (NM_015236.1,4155-4173).
ctaaacattgcatatcaaa

SEQ ID NO: 175291 - DNA, 19 bp, Homo sapiens
  siRNA target sequence for LY6G5C (NM_025262.1,26-44).
cgctggaccctgctatact

SEQ ID NO: 175292 - DNA, 19 bp, Homo sapiens
  siRNA target sequence for LY6G5C (NM_025262.1,67-85).
ctctacacggtcctcttaa

SEQ ID NO: 175293 - DNA, 19 bp, Homo sapiens
  siRNA target sequence for LY6G5C (NM_025262.1,69-87).
ctacacggtcctcttaata

SEQ ID NO: 175294 - DNA, 19 bp, Homo sapiens
  siRNA target sequence for LY6G5C (NM_025262.1,108-126).
ggtgtttggtaagtttgtt

SEQ ID NO: 175295 - DNA, 19 bp, Homo sapiens
  siRNA target sequence for LY6G5C (NM_025262.1,143-161).
cccctcaaccacttccatt

SEQ ID NO: 175296 - DNA, 19 bp, Homo sapiens
  siRNA target sequence for LY6G5C (NM_025262.1,327-345).
gcagatgagtgattgttca

SEQ ID NO: 175297 - DNA, 19 bp, Homo sapiens
  siRNA target sequence for LY6G5C (NM_025262.1,330-348).
gatgagtgattgttcaaat

SEQ ID NO: 175298 - DNA, 19 bp, Homo sapiens
  siRNA target sequence for LY6G5C (NM_025262.1,364-382).
gtgtctggcttctggatat

SEQ ID NO: 175299 - DNA, 19 bp, Homo sapiens
  siRNA target sequence for LY75 (NM_002349.1,188-206).
gtgcatcaagccagtgtat

SEQ ID NO: 175300 - DNA, 19 bp, Homo sapiens
  siRNA target sequence for LY75 (NM_002349.1,219-237).
gcagacgactgtgatgaaa

SEQ ID NO: 175301 - DNA, 19 bp, Homo sapiens
  siRNA target sequence for LY75 (NM_002349.1,282-300).
catttgcactcccaaaagt

SEQ ID NO: 175302 - DNA, 19 bp, Homo sapiens
  siRNA target sequence for LY75 (NM_002349.1,299-317).
gtgccttggcctcgatatt

SEQ ID NO: 175303 - DNA, 19 bp, Homo sapiens
  siRNA target sequence for LY75 (NM_002349.1,303-321).
cttggcctcgatattacca

SEQ ID NO: 175304 - DNA, 19 bp, Homo sapiens
  siRNA target sequence for LY75 (NM_002349.1,306-324).
ggcctcgatattaccaaat

SEQ ID NO: 175305 - DNA, 19 bp, Homo sapiens
  siRNA target sequence for LY75 (NM_002349.1,438-456).
catggcacagcaatctcaa

SEQ ID NO: 175306 - DNA, 19 bp, Homo sapiens
  siRNA target sequence for LY75 (NM_002349.1,529-547).
ccagagatgggaactctta

SEQ ID NO: 175307 - DNA, 19 bp, Homo sapiens
  siRNA target sequence for LY75 (NM_002349.1,638-656).
caccaccttaaattatgaa

SEQ ID NO: 175308 - DNA, 19 bp, Homo sapiens
  siRNA target sequence for LY75 (NM_002349.1,686-704).
gcctgaaaacggttgtgaa

SEQ ID NO: 175309 - DNA, 19 bp, Homo sapiens
  siRNA target sequence for LY75 (NM_002349.1,690-708).
gaaaacggttgtgaagata

SEQ ID NO: 175310 - DNA, 19 bp, Homo sapiens
  siRNA target sequence for LY75 (NM_002349.1,733-751).
gaagttgctaccaatttaa

SEQ ID NO: 175311 - DNA, 19 bp, Homo sapiens
  siRNA target sequence for LY75 (NM_002349.1,758-776).
gacggctctttcttggaaa

SEQ ID NO: 175312 - DNA, 19 bp, Homo sapiens
  siRNA target sequence for LY75 (NM_002349.1,769-787).
cttggaaagaagcttatgt

SEQ ID NO: 175313 - DNA, 19 bp, Homo sapiens
  siRNA target sequence for LY75 (NM_002349.1,801-819).
caaggagctgatttactga

SEQ ID NO: 175314 - DNA, 19 bp, Homo sapiens
  siRNA target sequence for LY75 (NM_002349.1,875-893).
gattttctggattggttta

SEQ ID NO: 175315 - DNA, 19 bp, Homo sapiens
  siRNA target sequence for LY75 (NM_002349.1,925-943).
ggtcagaccacaaaccatt

SEQ ID NO: 175316 - DNA, 19 bp, Homo sapiens
  siRNA target sequence for LY75 (NM_002349.1,926-944).
gtcagaccacaaaccatta

SEQ ID NO: 175317 - DNA, 19 bp, Homo sapiens
  siRNA target sequence for LY75 (NM_002349.1,928-946).
cagaccacaaaccattaaa

SEQ ID NO: 175318 - DNA, 19 bp, Homo sapiens
  siRNA target sequence for LY75 (NM_002349.1,930-948).
gaccacaaaccattaaact

SEQ ID NO: 175319 - DNA, 19 bp, Homo sapiens
  siRNA target sequence for LY75 (NM_002349.1,974-992).
cagtgcacctactataggt

SEQ ID NO: 175320 - DNA, 19 bp, Homo sapiens
  siRNA target sequence for LY75 (NM_002349.1,1029-1047).
ctgtggcagagcttttcct

SEQ ID NO: 175321 - DNA, 19 bp, Homo sapiens
  siRNA target sequence for LY75 (NM_002349.1,1141-1159).
caggctggctgccaaataa

SEQ ID NO: 175322 - DNA, 19 bp, Homo sapiens
  siRNA target sequence for LY75 (NM_002349.1,1148-1166).
gctgccaaataatggattt

SEQ ID NO: 175323 - DNA, 19 bp, Homo sapiens
  siRNA target sequence for LY75 (NM_002349.1,1175-1193).
gctggtaaatgaaagtaat

SEQ ID NO: 175324 - DNA, 19 bp, Homo sapiens
  siRNA target sequence for LY75 (NM_002349.1,1205-1223).
ggcacatgcgaaatgcaaa

SEQ ID NO: 175325 - DNA, 19 bp, Homo sapiens
  siRNA target sequence for LY75 (NM_002349.1,1236-1254).
gacctaatcagcattcatt

SEQ ID NO: 175326 - DNA, 19 bp, Homo sapiens
  siRNA target sequence for LY75 (NM_002349.1,1287-1305).
ctccataatgaggatatca

SEQ ID NO: 175327 - DNA, 19 bp, Homo sapiens
  siRNA target sequence for LY75 (NM_002349.1,1318-1336).
ggataggccttaagaacat

SEQ ID NO: 175328 - DNA, 19 bp, Homo sapiens
  siRNA target sequence for LY75 (NM_002349.1,1319-1337).
gataggccttaagaacata

SEQ ID NO: 175329 - DNA, 19 bp, Homo sapiens
  siRNA target sequence for LY75 (NM_002349.1,1323-1341).
ggccttaagaacataaaca

SEQ ID NO: 175330 - DNA, 19 bp, Homo sapiens
  siRNA target sequence for LY75 (NM_002349.1,1325-1343).
ccttaagaacataaacata

SEQ ID NO: 175331 - DNA, 19 bp, Homo sapiens
  siRNA target sequence for LY75 (NM_002349.1,1368-1386).
ggtactgaagttactctaa

SEQ ID NO: 175332 - DNA, 19 bp, Homo sapiens
  siRNA target sequence for LY75 (NM_002349.1,1372-1390).
ctgaagttactctaacata

SEQ ID NO: 175333 - DNA, 19 bp, Homo sapiens
  siRNA target sequence for LY75 (NM_002349.1,1429-1447).
cgcccaactgtgtttccta

SEQ ID NO: 175334 - DNA, 19 bp, Homo sapiens
  siRNA target sequence for LY75 (NM_002349.1,1466-1484).
gtggaaagtccaatcatgt

SEQ ID NO: 175335 - DNA, 19 bp, Homo sapiens
  siRNA target sequence for LY75 (NM_002349.1,1533-1551).
gacgcaagttctgataaga

SEQ ID NO: 175336 - DNA, 19 bp, Homo sapiens
  siRNA target sequence for LY75 (NM_002349.1,1536-1554).
gcaagttctgataagatgt

SEQ ID NO: 175337 - DNA, 19 bp, Homo sapiens
  siRNA target sequence for LY75 (NM_002349.1,1587-1605).
gaaacctgttacaagattt

SEQ ID NO: 175338 - DNA, 19 bp, Homo sapiens
  siRNA target sequence for LY75 (NM_002349.1,1591-1609).
cctgttacaagatttatga

SEQ ID NO: 175339 - DNA, 19 bp, Homo sapiens
  siRNA target sequence for LY75 (NM_002349.1,1654-1672).
gcagatttgagcaagaata

SEQ ID NO: 175340 - DNA, 19 bp, Homo sapiens
  siRNA target sequence for LY75 (NM_002349.1,1664-1682).
gcaagaatacctaaatgat

SEQ ID NO: 175341 - DNA, 19 bp, Homo sapiens
  siRNA target sequence for LY75 (NM_002349.1,1665-1683).
caagaatacctaaatgatt

SEQ ID NO: 175342 - DNA, 19 bp, Homo sapiens
  siRNA target sequence for LY75 (NM_002349.1,1694-1712).
gtatgataaatctctaaga

SEQ ID NO: 175343 - DNA, 19 bp, Homo sapiens
  siRNA target sequence for LY75 (NM_002349.1,1724-1742).
gactggcctgagagatgta

SEQ ID NO: 175344 - DNA, 19 bp, Homo sapiens
  siRNA target sequence for LY75 (NM_002349.1,1743-1761).
gattcttgtggagagtata

SEQ ID NO: 175345 - DNA, 19 bp, Homo sapiens
  siRNA target sequence for LY75 (NM_002349.1,1757-1775).
gtataactgggcaactgtt

SEQ ID NO: 175346 - DNA, 19 bp, Homo sapiens
  siRNA target sequence for LY75 (NM_002349.1,1858-1876).
ctggaaagtctgttggaaa

SEQ ID NO: 175347 - DNA, 19 bp, Homo sapiens
  siRNA target sequence for LY75 (NM_002349.1,1901-1919).
cttcaaagcactttcaatt

SEQ ID NO: 175348 - DNA, 19 bp, Homo sapiens
  siRNA target sequence for LY75 (NM_002349.1,1984-2002).
ctgaaggctggcagagttt

SEQ ID NO: 175349 - DNA, 19 bp, Homo sapiens
  siRNA target sequence for LY75 (NM_002349.1,1997-2015).
gagtttccccgcaagtctt

SEQ ID NO: 175350 - DNA, 19 bp, Homo sapiens
  siRNA target sequence for LY75 (NM_002349.1,2003-2021).
ccccgcaagtctttcttgt

SEQ ID NO: 175351 - DNA, 19 bp, Homo sapiens
  siRNA target sequence for LY75 (NM_002349.1,2004-2022).
cccgcaagtctttcttgtt

SEQ ID NO: 175352 - DNA, 19 bp, Homo sapiens
  siRNA target sequence for LY75 (NM_002349.1,2005-2023).
ccgcaagtctttcttgtta

SEQ ID NO: 175353 - DNA, 19 bp, Homo sapiens
  siRNA target sequence for LY75 (NM_002349.1,2017-2035).
cttgttataaggtattcca

SEQ ID NO: 175354 - DNA, 19 bp, Homo sapiens
  siRNA target sequence for LY75 (NM_002349.1,2034-2052).
catgcagaaagaattgtaa

SEQ ID NO: 175355 - DNA, 19 bp, Homo sapiens
  siRNA target sequence for LY75 (NM_002349.1,2065-2083).
gggaagaagctgaacgatt

SEQ ID NO: 175356 - DNA, 19 bp, Homo sapiens
  siRNA target sequence for LY75 (NM_002349.1,2094-2112).
cttggagcacacctttcta

SEQ ID NO: 175357 - DNA, 19 bp, Homo sapiens
  siRNA target sequence for LY75 (NM_002349.1,2183-2201).
gctgtggattggtttgaat

SEQ ID NO: 175358 - DNA, 19 bp, Homo sapiens
  siRNA target sequence for LY75 (NM_002349.1,2244-2262).
cgtacaccagtgtctacta

SEQ ID NO: 175359 - DNA, 19 bp, Homo sapiens
  siRNA target sequence for LY75 (NM_002349.1,2245-2263).
gtacaccagtgtctactat

SEQ ID NO: 175360 - DNA, 19 bp, Homo sapiens
  siRNA target sequence for LY75 (NM_002349.1,2260-2278).
ctattatcatgccaaatga

SEQ ID NO: 175361 - DNA, 19 bp, Homo sapiens
  siRNA target sequence for LY75 (NM_002349.1,2348-2366).
ctggcatttctatgatgat

SEQ ID NO: 175362 - DNA, 19 bp, Homo sapiens
  siRNA target sequence for LY75 (NM_002349.1,2417-2435).
ggtgtgccaaattccaaaa

SEQ ID NO: 175363 - DNA, 19 bp, Homo sapiens
  siRNA target sequence for LY75 (NM_002349.1,2487-2505).
catggacctccacttataa

SEQ ID NO: 175364 - DNA, 19 bp, Homo sapiens
  siRNA target sequence for LY75 (NM_002349.1,2491-2509).
gacctccacttataattga

SEQ ID NO: 175365 - DNA, 19 bp, Homo sapiens
  siRNA target sequence for LY75 (NM_002349.1,2508-2526).
gaaggaagtgaatattggt

SEQ ID NO: 175366 - DNA, 19 bp, Homo sapiens
  siRNA target sequence for LY75 (NM_002349.1,2532-2550).
gctgatcttcacctaaact

SEQ ID NO: 175367 - DNA, 19 bp, Homo sapiens
  siRNA target sequence for LY75 (NM_002349.1,2533-2551).
ctgatcttcacctaaacta

SEQ ID NO: 175368 - DNA, 19 bp, Homo sapiens
  siRNA target sequence for LY75 (NM_002349.1,2615-2633).
gggactaaaagccatcaaa

SEQ ID NO: 175369 - DNA, 19 bp, Homo sapiens
  siRNA target sequence for LY75 (NM_002349.1,2661-2679).
ggacagaagtggtggataa

SEQ ID NO: 175370 - DNA, 19 bp, Homo sapiens
  siRNA target sequence for LY75 (NM_002349.1,2664-2682).
cagaagtggtggataagaa

SEQ ID NO: 175371 - DNA, 19 bp, Homo sapiens
  siRNA target sequence for LY75 (NM_002349.1,2686-2704).
gcgagtggccaatagatga

SEQ ID NO: 175372 - DNA, 19 bp, Homo sapiens
  siRNA target sequence for LY75 (NM_002349.1,2687-2705).
cgagtggccaatagatgat

SEQ ID NO: 175373 - DNA, 19 bp, Homo sapiens
  siRNA target sequence for LY75 (NM_002349.1,2690-2708).
gtggccaatagatgatcat

SEQ ID NO: 175374 - DNA, 19 bp, Homo sapiens
  siRNA target sequence for LY75 (NM_002349.1,2692-2710).
ggccaatagatgatcattt

SEQ ID NO: 175375 - DNA, 19 bp, Homo sapiens
  siRNA target sequence for LY75 (NM_002349.1,2693-2711).
gccaatagatgatcatttt

SEQ ID NO: 175376 - DNA, 19 bp, Homo sapiens
  siRNA target sequence for LY75 (NM_002349.1,2694-2712).
ccaatagatgatcatttta

SEQ ID NO: 175377 - DNA, 19 bp, Homo sapiens
  siRNA target sequence for LY75 (NM_002349.1,2700-2718).
gatgatcattttacatact

SEQ ID NO: 175378 - DNA, 19 bp, Homo sapiens
  siRNA target sequence for LY75 (NM_002349.1,2735-2753).
ccgctttcctgtgacattt

SEQ ID NO: 175379 - DNA, 19 bp, Homo sapiens
  siRNA target sequence for LY75 (NM_002349.1,2754-2772).
ggagaggaatgcttgtaca

SEQ ID NO: 175380 - DNA, 19 bp, Homo sapiens
  siRNA target sequence for LY75 (NM_002349.1,2755-2773).
gagaggaatgcttgtacat

SEQ ID NO: 175381 - DNA, 19 bp, Homo sapiens
  siRNA target sequence for LY75 (NM_002349.1,2779-2797).
ccaagacttggcttatcga

SEQ ID NO: 175382 - DNA, 19 bp, Homo sapiens
  siRNA target sequence for LY75 (NM_002349.1,2788-2806).
ggcttatcgacttaggtaa

SEQ ID NO: 175383 - DNA, 19 bp, Homo sapiens
  siRNA target sequence for LY75 (NM_002349.1,2789-2807).
gcttatcgacttaggtaaa

SEQ ID NO: 175384 - DNA, 19 bp, Homo sapiens
  siRNA target sequence for LY75 (NM_002349.1,2856-2874).
gtttcttcgttagagaaat

SEQ ID NO: 175385 - DNA, 19 bp, Homo sapiens
  siRNA target sequence for LY75 (NM_002349.1,2870-2888).
gaaatacagcccagattct

SEQ ID NO: 175386 - DNA, 19 bp, Homo sapiens
  siRNA target sequence for LY75 (NM_002349.1,2922-2940).
ccttttcagaataagtgtt

SEQ ID NO: 175387 - DNA, 19 bp, Homo sapiens
  siRNA target sequence for LY75 (NM_002349.1,2955-2973).
cccgtgtctctcacatttt

SEQ ID NO: 175388 - DNA, 19 bp, Homo sapiens
  siRNA target sequence for LY75 (NM_002349.1,2957-2975).
cgtgtctctcacattttct

SEQ ID NO: 175389 - DNA, 19 bp, Homo sapiens
  siRNA target sequence for LY75 (NM_002349.1,3019-3037).
cagtgttgagccagattga

SEQ ID NO: 175390 - DNA, 19 bp, Homo sapiens
  siRNA target sequence for LY75 (NM_002349.1,3029-3047).
ccagattgaacaagacttt

SEQ ID NO: 175391 - DNA, 19 bp, Homo sapiens
  siRNA target sequence for LY75 (NM_002349.1,3036-3054).
gaacaagactttattacat

SEQ ID NO: 175392 - DNA, 19 bp, Homo sapiens
  siRNA target sequence for LY75 (NM_002349.1,3056-3074).
cttgcttccggatatggaa

SEQ ID NO: 175393 - DNA, 19 bp, Homo sapiens
  siRNA target sequence for LY75 (NM_002349.1,3064-3082).
cggatatggaagctacttt

SEQ ID NO: 175394 - DNA, 19 bp, Homo sapiens
  siRNA target sequence for LY75 (NM_002349.1,3065-3083).
ggatatggaagctacttta

SEQ ID NO: 175395 - DNA, 19 bp, Homo sapiens
  siRNA target sequence for LY75 (NM_002349.1,3095-3113).
gcgctggactgcctatgaa

SEQ ID NO: 175396 - DNA, 19 bp, Homo sapiens
  siRNA target sequence for LY75 (NM_002349.1,3096-3114).
cgctggactgcctatgaaa

SEQ ID NO: 175397 - DNA, 19 bp, Homo sapiens
  siRNA target sequence for LY75 (NM_002349.1,3097-3115).
gctggactgcctatgaaaa

SEQ ID NO: 175398 - DNA, 19 bp, Homo sapiens
  siRNA target sequence for LY75 (NM_002349.1,3100-3118).
ggactgcctatgaaaagat

SEQ ID NO: 175399 - DNA, 19 bp, Homo sapiens
  siRNA target sequence for LY75 (NM_002349.1,3101-3119).
gactgcctatgaaaagata

SEQ ID NO: 175400 - DNA, 19 bp, Homo sapiens
  siRNA target sequence for LY75 (NM_002349.1,3141-3159).
gagctgacgtacagtaact

SEQ ID NO: 175401 - DNA, 19 bp, Homo sapiens
  siRNA target sequence for LY75 (NM_002349.1,3154-3172).
gtaactttcacccattatt

SEQ ID NO: 175402 - DNA, 19 bp, Homo sapiens
  siRNA target sequence for LY75 (NM_002349.1,3251-3269).
ccaaaaatcaccgtttact

SEQ ID NO: 175403 - DNA, 19 bp, Homo sapiens
  siRNA target sequence for LY75 (NM_002349.1,3270-3288).
gggacgtggaattttacat

SEQ ID NO: 175404 - DNA, 19 bp, Homo sapiens
  siRNA target sequence for LY75 (NM_002349.1,3292-3310).
gcagtgaacgccactttgt

SEQ ID NO: 175405 - DNA, 19 bp, Homo sapiens
  siRNA target sequence for LY75 (NM_002349.1,3309-3327).
gtgtctctctgtcagaaat

SEQ ID NO: 175406 - DNA, 19 bp, Homo sapiens
  siRNA target sequence for LY75 (NM_002349.1,3363-3381).
gcttcagaaactgtaaagt

SEQ ID NO: 175407 - DNA, 19 bp, Homo sapiens
  siRNA target sequence for LY75 (NM_002349.1,3373-3391).
ctgtaaagtatctaaataa

SEQ ID NO: 175408 - DNA, 19 bp, Homo sapiens
  siRNA target sequence for LY75 (NM_002349.1,3439-3457).
gggagtgtctgaaaagtaa

SEQ ID NO: 175409 - DNA, 19 bp, Homo sapiens
  siRNA target sequence for LY75 (NM_002349.1,3542-3560).
cggactcttcagtcaagat

SEQ ID NO: 175410 - DNA, 19 bp, Homo sapiens
  siRNA target sequence for LY75 (NM_002349.1,3544-3562).
gactcttcagtcaagatga

SEQ ID NO: 175411 - DNA, 19 bp, Homo sapiens
  siRNA target sequence for LY75 (NM_002349.1,3553-3571).
gtcaagatgatgaactcaa

SEQ ID NO: 175412 - DNA, 19 bp, Homo sapiens
  siRNA target sequence for LY75 (NM_002349.1,3607-3625).
gtcgctgggctgaaactaa

SEQ ID NO: 175413 - DNA, 19 bp, Homo sapiens
  siRNA target sequence for LY75 (NM_002349.1,3671-3689).
gaaaacagttgattgcaat

SEQ ID NO: 175414 - DNA, 19 bp, Homo sapiens
  siRNA target sequence for LY75 (NM_002349.1,3676-3694).
cagttgattgcaatgacaa

SEQ ID NO: 175415 - DNA, 19 bp, Homo sapiens
  siRNA target sequence for LY75 (NM_002349.1,3692-3710).
caatcaaccaggtgctatt

SEQ ID NO: 175416 - DNA, 19 bp, Homo sapiens
  siRNA target sequence for LY75 (NM_002349.1,3696-3714).
caaccaggtgctatttgct

SEQ ID NO: 175417 - DNA, 19 bp, Homo sapiens
  siRNA target sequence for LY75 (NM_002349.1,3750-3768).
ccagttgacagtgttaaat

SEQ ID NO: 175418 - DNA, 19 bp, Homo sapiens
  siRNA target sequence for LY75 (NM_002349.1,3769-3787).
gtccatctcctgttctaaa

SEQ ID NO: 175419 - DNA, 19 bp, Homo sapiens
  siRNA target sequence for LY75 (NM_002349.1,3807-3825).
cagaactgttgctacaatt

SEQ ID NO: 175420 - DNA, 19 bp, Homo sapiens
  siRNA target sequence for LY75 (NM_002349.1,3812-3830).
ctgttgctacaatttcata

SEQ ID NO: 175421 - DNA, 19 bp, Homo sapiens
  siRNA target sequence for LY75 (NM_002349.1,3863-3881).
ggatgaagttcatactaaa

SEQ ID NO: 175422 - DNA, 19 bp, Homo sapiens
  siRNA target sequence for LY75 (NM_002349.1,3912-3930).
ctgagtattcgagatgaaa

SEQ ID NO: 175423 - DNA, 19 bp, Homo sapiens
  siRNA target sequence for LY75 (NM_002349.1,3953-3971).
gcaactgctgtacttcaat

SEQ ID NO: 175424 - DNA, 19 bp, Homo sapiens
  siRNA target sequence for LY75 (NM_002349.1,3957-3975).
ctgctgtacttcaattata

SEQ ID NO: 175425 - DNA, 19 bp, Homo sapiens
  siRNA target sequence for LY75 (NM_002349.1,3977-3995).
ggcttcatgggtcatgtta

SEQ ID NO: 175426 - DNA, 19 bp, Homo sapiens
  siRNA target sequence for LY75 (NM_002349.1,3982-4000).
catgggtcatgttaggaat

SEQ ID NO: 175427 - DNA, 19 bp, Homo sapiens
  siRNA target sequence for LY75 (NM_002349.1,3987-4005).
gtcatgttaggaataactt

SEQ ID NO: 175428 - DNA, 19 bp, Homo sapiens
  siRNA target sequence for LY75 (NM_002349.1,4063-4081).
gagcaggaagaccaactat

SEQ ID NO: 175429 - DNA, 19 bp, Homo sapiens
  siRNA target sequence for LY75 (NM_002349.1,4118-4136).
cggcttctgggatattcaa

SEQ ID NO: 175430 - DNA, 19 bp, Homo sapiens
  siRNA target sequence for LY75 (NM_002349.1,4178-4196).
cagcattcttgcttgtaaa

SEQ ID NO: 175431 - DNA, 19 bp, Homo sapiens
  siRNA target sequence for LY75 (NM_002349.1,4231-4249).
ctacactgccacagtttat

SEQ ID NO: 175432 - DNA, 19 bp, Homo sapiens
  siRNA target sequence for LY75 (NM_002349.1,4244-4262).
gtttatgccatatgaagat

SEQ ID NO: 175433 - DNA, 19 bp, Homo sapiens
  siRNA target sequence for LY75 (NM_002349.1,4302-4320).
gaagcattaaacatgtgtt

SEQ ID NO: 175434 - DNA, 19 bp, Homo sapiens
  siRNA target sequence for LY75 (NM_002349.1,4412-4430).
ggttgggctctcaagtcat

SEQ ID NO: 175435 - DNA, 19 bp, Homo sapiens
  siRNA target sequence for LY75 (NM_002349.1,4456-4474).
ggtctgatggtagtacatt

SEQ ID NO: 175436 - DNA, 19 bp, Homo sapiens
  siRNA target sequence for LY75 (NM_002349.1,4457-4475).
gtctgatggtagtacattt

SEQ ID NO: 175437 - DNA, 19 bp, Homo sapiens
  siRNA target sequence for LY75 (NM_002349.1,4464-4482).
ggtagtacatttgactata

SEQ ID NO: 175438 - DNA, 19 bp, Homo sapiens
  siRNA target sequence for LY75 (NM_002349.1,4485-4503).
ccatggaaaggccaaacat

SEQ ID NO: 175439 - DNA, 19 bp, Homo sapiens
  siRNA target sequence for LY75 (NM_002349.1,4496-4514).
ccaaacatctcctggaaat

SEQ ID NO: 175440 - DNA, 19 bp, Homo sapiens
  siRNA target sequence for LY75 (NM_002349.1,4497-4515).
caaacatctcctggaaatt

SEQ ID NO: 175441 - DNA, 19 bp, Homo sapiens
  siRNA target sequence for LY75 (NM_002349.1,4571-4589).
ggatggtgctatttgttat

SEQ ID NO: 175442 - DNA, 19 bp, Homo sapiens
  siRNA target sequence for LY75 (NM_002349.1,4572-4590).
gatggtgctatttgttata

SEQ ID NO: 175443 - DNA, 19 bp, Homo sapiens
  siRNA target sequence for LY75 (NM_002349.1,4578-4596).
gctatttgttataaaccta

SEQ ID NO: 175444 - DNA, 19 bp, Homo sapiens
  siRNA target sequence for LY75 (NM_002349.1,4610-4628).
gctgtcccgtcttacatat

SEQ ID NO: 175445 - DNA, 19 bp, Homo sapiens
  siRNA target sequence for LY75 (NM_002349.1,4613-4631).
gtcccgtcttacatattca

SEQ ID NO: 175446 - DNA, 19 bp, Homo sapiens
  siRNA target sequence for LY75 (NM_002349.1,4616-4634).
ccgtcttacatattcatca

SEQ ID NO: 175447 - DNA, 19 bp, Homo sapiens
  siRNA target sequence for LY75 (NM_002349.1,4617-4635).
cgtcttacatattcatcaa

SEQ ID NO: 175448 - DNA, 19 bp, Homo sapiens
  siRNA target sequence for LY75 (NM_002349.1,4704-4722).
caggcattgcacagttttt

SEQ ID NO: 175449 - DNA, 19 bp, Homo sapiens
  siRNA target sequence for LY75 (NM_002349.1,4708-4726).
cattgcacagtttttcaga

SEQ ID NO: 175450 - DNA, 19 bp, Homo sapiens
  siRNA target sequence for LY75 (NM_002349.1,4755-4773).
cactctgcaactatcgttt

SEQ ID NO: 175451 - DNA, 19 bp, Homo sapiens
  siRNA target sequence for LY75 (NM_002349.1,4759-4777).
ctgcaactatcgtttccat

SEQ ID NO: 175452 - DNA, 19 bp, Homo sapiens
  siRNA target sequence for LY75 (NM_002349.1,4761-4779).
gcaactatcgtttccataa

SEQ ID NO: 175453 - DNA, 19 bp, Homo sapiens
  siRNA target sequence for LY75 (NM_002349.1,4762-4780).
caactatcgtttccataaa

SEQ ID NO: 175454 - DNA, 19 bp, Homo sapiens
  siRNA target sequence for LY75 (NM_002349.1,4769-4787).
cgtttccataaaagatgaa

SEQ ID NO: 175455 - DNA, 19 bp, Homo sapiens
  siRNA target sequence for LY75 (NM_002349.1,4841-4859).
gagagtttggcttggatta

SEQ ID NO: 175456 - DNA, 19 bp, Homo sapiens
  siRNA target sequence for LY75 (NM_002349.1,4855-4873).
gattatctcaacattctgt

SEQ ID NO: 175457 - DNA, 19 bp, Homo sapiens
  siRNA target sequence for LY75 (NM_002349.1,4877-4895).
ccagtcttggagttggtta

SEQ ID NO: 175458 - DNA, 19 bp, Homo sapiens
  siRNA target sequence for LY75 (NM_002349.1,4880-4898).
gtcttggagttggttagat

SEQ ID NO: 175459 - DNA, 19 bp, Homo sapiens
  siRNA target sequence for LY75 (NM_002349.1,4900-4918).
gatcagaagtgacatttgt

SEQ ID NO: 175460 - DNA, 19 bp, Homo sapiens
  siRNA target sequence for LY75 (NM_002349.1,4964-4982).
gttgatagcttcaaatgaa

SEQ ID NO: 175461 - DNA, 19 bp, Homo sapiens
  siRNA target sequence for LY75 (NM_002349.1,4967-4985).
gatagcttcaaatgaaact

SEQ ID NO: 175462 - DNA, 19 bp, Homo sapiens
  siRNA target sequence for LY75 (NM_002349.1,5045-5063).
ccctgattacacagcaata

SEQ ID NO: 175463 - DNA, 19 bp, Homo sapiens
  siRNA target sequence for LY75 (NM_002349.1,5069-5087).
catagttgccacactaagt

SEQ ID NO: 175464 - DNA, 19 bp, Homo sapiens
  siRNA target sequence for LY75 (NM_002349.1,5073-5091).
gttgccacactaagtatct

SEQ ID NO: 175465 - DNA, 19 bp, Homo sapiens
  siRNA target sequence for LY75 (NM_002349.1,5077-5095).
ccacactaagtatcttagt

SEQ ID NO: 175466 - DNA, 19 bp, Homo sapiens
  siRNA target sequence for LY75 (NM_002349.1,5097-5115).
ctcatgggcggactgattt

SEQ ID NO: 175467 - DNA, 19 bp, Homo sapiens
  siRNA target sequence for LY75 (NM_002349.1,5142-5160).
cacctggcgggtttctcat

SEQ ID NO: 175468 - DNA, 19 bp, Homo sapiens
  siRNA target sequence for LY75 (NM_002349.1,5147-5165).
ggcgggtttctcatcagtt

SEQ ID NO: 175469 - DNA, 19 bp, Homo sapiens
  siRNA target sequence for LY75 (NM_002349.1,5152-5170).
gtttctcatcagttcgata

SEQ ID NO: 175470 - DNA, 19 bp, Homo sapiens
  siRNA target sequence for LY75 (NM_002349.1,5156-5174).
ctcatcagttcgatatgca

SEQ ID NO: 175471 - DNA, 19 bp, Homo sapiens
  siRNA target sequence for MAG (NM_002361.2,174-192).
ctgttctggattatgattt

SEQ ID NO: 175472 - DNA, 19 bp, Homo sapiens
  siRNA target sequence for MAG (NM_002361.2,315-333).
catggtgtctggtacttca

SEQ ID NO: 175473 - DNA, 19 bp, Homo sapiens
  siRNA target sequence for MAG (NM_002361.2,870-888).
gtgattgtggagatgaact

SEQ ID NO: 175474 - DNA, 19 bp, Homo sapiens
  siRNA target sequence for MAG (NM_002361.2,1167-1185).
ggggagacggtctctatct

SEQ ID NO: 175475 - DNA, 19 bp, Homo sapiens
  siRNA target sequence for MAG (NM_002361.2,1168-1186).
gggagacggtctctatctt

SEQ ID NO: 175476 - DNA, 19 bp, Homo sapiens
  siRNA target sequence for MAG (NM_002361.2,1170-1188).
gagacggtctctatcttgt

SEQ ID NO: 175477 - DNA, 19 bp, Homo sapiens
  siRNA target sequence for MAG (NM_002361.2,1201-1219).
gcaacccggaccctattct

SEQ ID NO: 175478 - DNA, 19 bp, Homo sapiens
  siRNA target sequence for MAG (NM_002361.2,1923-1941).
gagctggacctgagctatt

SEQ ID NO: 175479 - DNA, 19 bp, Homo sapiens
  siRNA target sequence for MAG (NM_002361.2,1925-1943).
gctggacctgagctattct

SEQ ID NO: 175480 - DNA, 19 bp, Homo sapiens
  siRNA target sequence for MAG (NM_080600.1,1863-1881).
gagtccaaagaggtttcta

SEQ ID NO: 175481 - DNA, 19 bp, Homo sapiens
  siRNA target sequence for MRC2 (NM_006039.1,358-376).
cccgaaaccggctattcaa

SEQ ID NO: 175482 - DNA, 19 bp, Homo sapiens
  siRNA target sequence for MRC2 (NM_006039.1,428-446).
ggcctccctgggcatgtat

SEQ ID NO: 175483 - DNA, 19 bp, Homo sapiens
  siRNA target sequence for MRC2 (NM_006039.1,430-448).
cctccctgggcatgtatga

SEQ ID NO: 175484 - DNA, 19 bp, Homo sapiens
  siRNA target sequence for MRC2 (NM_006039.1,674-692).
gtgcaccatccccttcaaa

SEQ ID NO: 175485 - DNA, 19 bp, Homo sapiens
  siRNA target sequence for MRC2 (NM_006039.1,676-694).
gcaccatccccttcaaata

SEQ ID NO: 175486 - DNA, 19 bp, Homo sapiens
  siRNA target sequence for MRC2 (NM_006039.1,856-874).
gctgctaccagtttaactt

SEQ ID NO: 175487 - DNA, 19 bp, Homo sapiens
  siRNA target sequence for MRC2 (NM_006039.1,1233-1251).
gacaggtgggccaatgtga

SEQ ID NO: 175488 - DNA, 19 bp, Homo sapiens
  siRNA target sequence for MRC2 (NM_006039.1,1331-1349).
gtccaagaaggcatgtcta

SEQ ID NO: 175489 - DNA, 19 bp, Homo sapiens
  siRNA target sequence for MRC2 (NM_006039.1,1381-1399).
gcatggcggagctggaatt

SEQ ID NO: 175490 - DNA, 19 bp, Homo sapiens
  siRNA target sequence for MRC2 (NM_006039.1,1386-1404).
gcggagctggaattcatca

SEQ ID NO: 175491 - DNA, 19 bp, Homo sapiens
  siRNA target sequence for MRC2 (NM_006039.1,1438-1456).
ggatcggcctcaacgattt

SEQ ID NO: 175492 - DNA, 19 bp, Homo sapiens
  siRNA target sequence for MRC2 (NM_006039.1,1442-1460).
cggcctcaacgatttgaaa

SEQ ID NO: 175493 - DNA, 19 bp, Homo sapiens
  siRNA target sequence for MRC2 (NM_006039.1,1444-1462).
gcctcaacgatttgaaact

SEQ ID NO: 175494 - DNA, 19 bp, Homo sapiens
  siRNA target sequence for MRC2 (NM_006039.1,2146-2164).
ccaaactccggtattgcta

SEQ ID NO: 175495 - DNA, 19 bp, Homo sapiens
  siRNA target sequence for MRC2 (NM_006039.1,2287-2305).
ccaacatgctcaacaagat

SEQ ID NO: 175496 - DNA, 19 bp, Homo sapiens
  siRNA target sequence for MRC2 (NM_006039.1,2303-2321).
gatcttcggtgaatcagaa

SEQ ID NO: 175497 - DNA, 19 bp, Homo sapiens
  siRNA target sequence for MRC2 (NM_006039.1,2403-2421).
gacggcgtagggttctctt

SEQ ID NO: 175498 - DNA, 19 bp, Homo sapiens
  siRNA target sequence for MRC2 (NM_006039.1,2412-2430).
gggttctcttaccacaatt

SEQ ID NO: 175499 - DNA, 19 bp, Homo sapiens
  siRNA target sequence for MRC2 (NM_006039.1,2618-2636).
ggccgagtacaagttcttt

SEQ ID NO: 175500 - DNA, 19 bp, Homo sapiens
  siRNA target sequence for MRC2 (NM_006039.1,2620-2638).
ccgagtacaagttctttga

SEQ ID NO: 175501 - DNA, 19 bp, Homo sapiens
  siRNA target sequence for MRC2 (NM_006039.1,2821-2839).
ggacagatggttccattat

SEQ ID NO: 175502 - DNA, 19 bp, Homo sapiens
  siRNA target sequence for MRC2 (NM_006039.1,2822-2840).
gacagatggttccattata

SEQ ID NO: 175503 - DNA, 19 bp, Homo sapiens
  siRNA target sequence for MRC2 (NM_006039.1,2877-2895).
gtcggcaaggacaagaagt

SEQ ID NO: 175504 - DNA, 19 bp, Homo sapiens
  siRNA target sequence for MRC2 (NM_006039.1,3048-3066).
cagttcctcaacaagtgtt

SEQ ID NO: 175505 - DNA, 19 bp, Homo sapiens
  siRNA target sequence for MRC2 (NM_006039.1,3166-3184).
ccttagagcaagcattcat

SEQ ID NO: 175506 - DNA, 19 bp, Homo sapiens
  siRNA target sequence for MRC2 (NM_006039.1,3263-3281).
gcaggagcctttgatgtat

SEQ ID NO: 175507 - DNA, 19 bp, Homo sapiens
  siRNA target sequence for MRC2 (NM_006039.1,3772-3790).
gctgtacctacgtagatgt

SEQ ID NO: 175508 - DNA, 19 bp, Homo sapiens
  siRNA target sequence for MRC2 (NM_006039.1,4405-4423).
ccgcagccctcatccttta

SEQ ID NO: 175509 - DNA, 19 bp, Homo sapiens
  siRNA target sequence for NALP9 (NM_176820.2,250-268).
cctgtttctacagatcaat

SEQ ID NO: 175510 - DNA, 19 bp, Homo sapiens
  siRNA target sequence for NALP9 (NM_176820.2,320-338).
ccatacagaaagcatatga

SEQ ID NO: 175511 - DNA, 19 bp, Homo sapiens
  siRNA target sequence for NALP9 (NM_176820.2,380-398).
cacgtccctgagcatttct

SEQ ID NO: 175512 - DNA, 19 bp, Homo sapiens
  siRNA target sequence for NALP9 (NM_176820.2,552-570).
ggaaggacaggttcacatt

SEQ ID NO: 175513 - DNA, 19 bp, Homo sapiens
  siRNA target sequence for NALP9 (NM_176820.2,557-575).
gacaggttcacatttgtgt

SEQ ID NO: 175514 - DNA, 19 bp, Homo sapiens
  siRNA target sequence for NALP9 (NM_176820.2,648-666).
cggagtcttcagagaagat

SEQ ID NO: 175515 - DNA, 19 bp, Homo sapiens
  siRNA target sequence for NALP9 (NM_176820.2,657-675).
cagagaagatcgaagacat

SEQ ID NO: 175516 - DNA, 19 bp, Homo sapiens
  siRNA target sequence for NALP9 (NM_176820.2,727-745).
gaagtttaacttacaactt

SEQ ID NO: 175517 - DNA, 19 bp, Homo sapiens
  siRNA target sequence for NALP9 (NM_176820.2,749-767).
gctgacttgagcgatgatt

SEQ ID NO: 175518 - DNA, 19 bp, Homo sapiens
  siRNA target sequence for NALP9 (NM_176820.2,776-794).
cggcagccaatgccaatta

SEQ ID NO: 175519 - DNA, 19 bp, Homo sapiens
  siRNA target sequence for NALP9 (NM_176820.2,777-795).
ggcagccaatgccaattat

SEQ ID NO: 175520 - DNA, 19 bp, Homo sapiens
  siRNA target sequence for NALP9 (NM_176820.2,862-880).
ggctatgcaaaaacactat

SEQ ID NO: 175521 - DNA, 19 bp, Homo sapiens
  siRNA target sequence for NALP9 (NM_176820.2,889-907).
gcggcatccaaaactcata

SEQ ID NO: 175522 - DNA, 19 bp, Homo sapiens
  siRNA target sequence for NALP9 (NM_176820.2,891-909).
ggcatccaaaactcataaa

SEQ ID NO: 175523 - DNA, 19 bp, Homo sapiens
  siRNA target sequence for NALP9 (NM_176820.2,902-920).
ctcataaagctcttaggat

SEQ ID NO: 175524 - DNA, 19 bp, Homo sapiens
  siRNA target sequence for NALP9 (NM_176820.2,911-929).
ctcttaggattcagtgaat

SEQ ID NO: 175525 - DNA, 19 bp, Homo sapiens
  siRNA target sequence for NALP9 (NM_176820.2,913-931).
cttaggattcagtgaatct

SEQ ID NO: 175526 - DNA, 19 bp, Homo sapiens
  siRNA target sequence for NALP9 (NM_176820.2,972-990).
gcaaagccctgaaagtctt

SEQ ID NO: 175527 - DNA, 19 bp, Homo sapiens
  siRNA target sequence for NALP9 (NM_176820.2,1111-1129).
ccaaaacaccacctattta

SEQ ID NO: 175528 - DNA, 19 bp, Homo sapiens
  siRNA target sequence for NALP9 (NM_176820.2,1117-1135).
caccacctatttatatgca

SEQ ID NO: 175529 - DNA, 19 bp, Homo sapiens
  siRNA target sequence for NALP9 (NM_176820.2,1189-1207).
gaacagagcccgactaaaa

SEQ ID NO: 175530 - DNA, 19 bp, Homo sapiens
  siRNA target sequence for NALP9 (NM_176820.2,1232-1250).
ggaatttggacatatacat

SEQ ID NO: 175531 - DNA, 19 bp, Homo sapiens
  siRNA target sequence for NALP9 (NM_176820.2,1233-1251).
gaatttggacatatacatt

SEQ ID NO: 175532 - DNA, 19 bp, Homo sapiens
  siRNA target sequence for NALP9 (NM_176820.2,1306-1324).
gatgtgggtgggtatgaga

SEQ ID NO: 175533 - DNA, 19 bp, Homo sapiens
  siRNA target sequence for NALP9 (NM_176820.2,1353-1371).
ccttcatgcatctgtgtat

SEQ ID NO: 175534 - DNA, 19 bp, Homo sapiens
  siRNA target sequence for NALP9 (NM_176820.2,1378-1396).
gttttgtgccgccatgttt

SEQ ID NO: 175535 - DNA, 19 bp, Homo sapiens
  siRNA target sequence for NALP9 (NM_176820.2,1410-1428).
gacccaaagacgatcctaa

SEQ ID NO: 175536 - DNA, 19 bp, Homo sapiens
  siRNA target sequence for NALP9 (NM_176820.2,1444-1462).
cataacccagcttgtaaga

SEQ ID NO: 175537 - DNA, 19 bp, Homo sapiens
  siRNA target sequence for NALP9 (NM_176820.2,1494-1512).
cccaggtggggatattcat

SEQ ID NO: 175538 - DNA, 19 bp, Homo sapiens
  siRNA target sequence for NALP9 (NM_176820.2,1496-1514).
caggtggggatattcatgt

SEQ ID NO: 175539 - DNA, 19 bp, Homo sapiens
  siRNA target sequence for NALP9 (NM_176820.2,1607-1625).
cttgaaagtttaagtcaat

SEQ ID NO: 175540 - DNA, 19 bp, Homo sapiens
  siRNA target sequence for NALP9 (NM_176820.2,1634-1652).
gatagggaagccatagctt

SEQ ID NO: 175541 - DNA, 19 bp, Homo sapiens
  siRNA target sequence for NALP9 (NM_176820.2,1783-1801).
gaagcattgtcaacattta

SEQ ID NO: 175542 - DNA, 19 bp, Homo sapiens
  siRNA target sequence for NALP9 (NM_176820.2,1787-1805).
cattgtcaacatttaacga

SEQ ID NO: 175543 - DNA, 19 bp, Homo sapiens
  siRNA target sequence for NALP9 (NM_176820.2,1816-1834).
gtgtgtggagaatatcttt

SEQ ID NO: 175544 - DNA, 19 bp, Homo sapiens
  siRNA target sequence for NALP9 (NM_176820.2,1845-1863).
caggatgcatctcagatta

SEQ ID NO: 175545 - DNA, 19 bp, Homo sapiens
  siRNA target sequence for NALP9 (NM_176820.2,1886-1904).
cgggagctttgctcaatgt

SEQ ID NO: 175546 - DNA, 19 bp, Homo sapiens
  siRNA target sequence for NALP9 (NM_176820.2,1896-1914).
gctcaatgttcattaccaa

SEQ ID NO: 175547 - DNA, 19 bp, Homo sapiens
  siRNA target sequence for NALP9 (NM_176820.2,1961-1979).
ccctccctggcgattcttt

SEQ ID NO: 175548 - DNA, 19 bp, Homo sapiens
  siRNA target sequence for NALP9 (NM_176820.2,1988-2006).
ctggctcagcctgtttgta

SEQ ID NO: 175549 - DNA, 19 bp, Homo sapiens
  siRNA target sequence for NALP9 (NM_176820.2,1990-2008).
ggctcagcctgtttgtaaa

SEQ ID NO: 175550 - DNA, 19 bp, Homo sapiens
  siRNA target sequence for NALP9 (NM_176820.2,2004-2022).
gtaaactccgaaaactcat

SEQ ID NO: 175551 - DNA, 19 bp, Homo sapiens
  siRNA target sequence for NALP9 (NM_176820.2,2033-2051).
gtgtactttggacatgatt

SEQ ID NO: 175552 - DNA, 19 bp, Homo sapiens
  siRNA target sequence for NALP9 (NM_176820.2,2035-2053).
gtactttggacatgattca

SEQ ID NO: 175553 - DNA, 19 bp, Homo sapiens
  siRNA target sequence for NALP9 (NM_176820.2,2143-2161).
gtgtgagacgctgaaacat

SEQ ID NO: 175554 - DNA, 19 bp, Homo sapiens
  siRNA target sequence for NALP9 (NM_176820.2,2286-2304).
ccttgagggacgaaggaat

SEQ ID NO: 175555 - DNA, 19 bp, Homo sapiens
  siRNA target sequence for NALP9 (NM_176820.2,2671-2689).
gcatcctcactgtaaatta

SEQ ID NO: 175556 - DNA, 19 bp, Homo sapiens
  siRNA target sequence for NALP9 (NM_176820.2,2937-2955).
cccatctgaccatttcaca

SEQ ID NO: 175557 - DNA, 19 bp, Homo sapiens
  siRNA target sequence for NALP9 (NM_176820.2,2938-2956).
ccatctgaccatttcacat

SEQ ID NO: 175558 - DNA, 19 bp, Homo sapiens
  siRNA target sequence for NALP9 (NM_176820.2,2961-2979).
cttggattgacgaggaata

SEQ ID NO: 175559 - DNA, 19 bp, Homo sapiens
  siRNA target sequence for NALP9 (NM_176820.2,2964-2982).
ggattgacgaggaatacaa

SEQ ID NO: 175560 - DNA, 19 bp, Homo sapiens
  siRNA target sequence for NPTX2 (NM_002523.1,806-824).
gaggcaatagcgcctttaa

SEQ ID NO: 175561 - DNA, 19 bp, Homo sapiens
  siRNA target sequence for NPTX2 (NM_002523.1,808-826).
ggcaatagcgcctttaagt

SEQ ID NO: 175562 - DNA, 19 bp, Homo sapiens
  siRNA target sequence for NPTX2 (NM_002523.1,810-828).
caatagcgcctttaagtca

SEQ ID NO: 175563 - DNA, 19 bp, Homo sapiens
  siRNA target sequence for NPTX2 (NM_002523.1,856-874).
ctccgcacaaactacctat

SEQ ID NO: 175564 - DNA, 19 bp, Homo sapiens
  siRNA target sequence for NPTX2 (NM_002523.1,1058-1076).
cgcagctgcccctgtttgt

SEQ ID NO: 175565 - DNA, 19 bp, Homo sapiens
  siRNA target sequence for NPTX2 (NM_002523.1,1236-1254).
caccgtggggggtaggttt

SEQ ID NO: 175566 - DNA, 19 bp, Homo sapiens
  siRNA target sequence for NPTX2 (NM_002523.1,1239-1257).
cgtggggggtaggtttgat

SEQ ID NO: 175567 - DNA, 19 bp, Homo sapiens
  siRNA target sequence for NPTX2 (NM_002523.1,1279-1297).
gagctcagccagttcaaca

SEQ ID NO: 175568 - DNA, 19 bp, Homo sapiens
  siRNA target sequence for NPTX2 (NM_002523.1,1281-1299).
gctcagccagttcaacata

SEQ ID NO: 175569 - DNA, 19 bp, Homo sapiens
  siRNA target sequence for NPTX2 (NM_002523.1,1282-1300).
ctcagccagttcaacatat

SEQ ID NO: 175570 - DNA, 19 bp, Homo sapiens
  siRNA target sequence for NPTX2 (NM_002523.1,1308-1326).
cgtccttcgcgcacaagaa

SEQ ID NO: 175571 - DNA, 19 bp, Homo sapiens
  siRNA target sequence for NPTX2 (NM_002523.1,1311-1329).
ccttcgcgcacaagaaatt

SEQ ID NO: 175572 - DNA, 19 bp, Homo sapiens
  siRNA target sequence for NPTX2 (NM_002523.1,1315-1333).
cgcgcacaagaaattgtca

SEQ ID NO: 175573 - DNA, 19 bp, Homo sapiens
  siRNA target sequence for NPTX2 (NM_002523.1,1316-1334).
gcgcacaagaaattgtcaa

SEQ ID NO: 175574 - DNA, 19 bp, Homo sapiens
  siRNA target sequence for NPTX2 (NM_002523.1,1319-1337).
cacaagaaattgtcaacat

SEQ ID NO: 175575 - DNA, 19 bp, Homo sapiens
  siRNA target sequence for NRIP3 (NM_020645.1,235-253).
ggacatgcaacctcataat

SEQ ID NO: 175576 - DNA, 19 bp, Homo sapiens
  siRNA target sequence for NRIP3 (NM_020645.1,236-254).
gacatgcaacctcataata

SEQ ID NO: 175577 - DNA, 19 bp, Homo sapiens
  siRNA target sequence for NRIP3 (NM_020645.1,238-256).
catgcaacctcataatatt

SEQ ID NO: 175578 - DNA, 19 bp, Homo sapiens
  siRNA target sequence for NRIP3 (NM_020645.1,260-278).
cagaggcgcctcatggaaa

SEQ ID NO: 175579 - DNA, 19 bp, Homo sapiens
  siRNA target sequence for NRIP3 (NM_020645.1,311-329).
gtcccttgggcctctaaga

SEQ ID NO: 175580 - DNA, 19 bp, Homo sapiens
  siRNA target sequence for NRIP3 (NM_020645.1,321-339).
cctctaagacgaacaaact

SEQ ID NO: 175581 - DNA, 19 bp, Homo sapiens
  siRNA target sequence for NRIP3 (NM_020645.1,324-342).
ctaagacgaacaaactcaa

SEQ ID NO: 175582 - DNA, 19 bp, Homo sapiens
  siRNA target sequence for NRIP3 (NM_020645.1,374-392).
gaggaggatgacatgattt

SEQ ID NO: 175583 - DNA, 19 bp, Homo sapiens
  siRNA target sequence for NRIP3 (NM_020645.1,437-455).
gacacaggctgcctatata

SEQ ID NO: 175584 - DNA, 19 bp, Homo sapiens
  siRNA target sequence for NRIP3 (NM_020645.1,443-461).
ggctgcctatataatctca

SEQ ID NO: 175585 - DNA, 19 bp, Homo sapiens
  siRNA target sequence for NRIP3 (NM_020645.1,444-462).
gctgcctatataatctcat

SEQ ID NO: 175586 - DNA, 19 bp, Homo sapiens
  siRNA target sequence for OLR1 (NM_002543.2,193-211).
cctttgcctgggattagta

SEQ ID NO: 175587 - DNA, 19 bp, Homo sapiens
  siRNA target sequence for OLR1 (NM_002543.2,204-222).
gattagtagtgaccattat

SEQ ID NO: 175588 - DNA, 19 bp, Homo sapiens
  siRNA target sequence for OLR1 (NM_002543.2,250-268).
gtctgacctcctaacacaa

SEQ ID NO: 175589 - DNA, 19 bp, Homo sapiens
  siRNA target sequence for OLR1 (NM_002543.2,281-299).
ctaactcaccagaaaaaga

SEQ ID NO: 175590 - DNA, 19 bp, Homo sapiens
  siRNA target sequence for OLR1 (NM_002543.2,361-379).
cgaactcaaggaaatgata

SEQ ID NO: 175591 - DNA, 19 bp, Homo sapiens
  siRNA target sequence for OLR1 (NM_002543.2,516-534).
gagaaaactgttacctatt

SEQ ID NO: 175592 - DNA, 19 bp, Homo sapiens
  siRNA target sequence for OLR1 (NM_002543.2,635-653).
cagcaagcaatttcctatt

SEQ ID NO: 175593 - DNA, 19 bp, Homo sapiens
  siRNA target sequence for OLR1 (NM_002543.2,638-656).
caagcaatttcctattcca

SEQ ID NO: 175594 - DNA, 19 bp, Homo sapiens
  siRNA target sequence for OLR1 (NM_002543.2,725-743).
cctttgatgccccacttat

SEQ ID NO: 175595 - DNA, 19 bp, Homo sapiens
  siRNA target sequence for OLR1 (NM_002543.2,726-744).
ctttgatgccccacttatt

SEQ ID NO: 175596 - DNA, 19 bp, Homo sapiens
  siRNA target sequence for OLR1 (NM_002543.2,780-798).
caggtacctgtgcatatat

SEQ ID NO: 175597 - DNA, 19 bp, Homo sapiens
  siRNA target sequence for OLR1 (NM_002543.2,809-827).
gctgtttatgcggaaaact

SEQ ID NO: 175598 - DNA, 19 bp, Homo sapiens
  siRNA target sequence for PLA2R1 (NM_007366.2,308-326).
gtggcaggataaaggaata

SEQ ID NO: 175599 - DNA, 19 bp, Homo sapiens
  siRNA target sequence for PLA2R1 (NM_007366.2,310-328).
ggcaggataaaggaatatt

SEQ ID NO: 175600 - DNA, 19 bp, Homo sapiens
  siRNA target sequence for PLA2R1 (NM_007366.2,442-460).
caaaccatggcctctttaa

SEQ ID NO: 175601 - DNA, 19 bp, Homo sapiens
  siRNA target sequence for PLA2R1 (NM_007366.2,504-522).
gagcagccattaagcttat

SEQ ID NO: 175602 - DNA, 19 bp, Homo sapiens
  siRNA target sequence for PLA2R1 (NM_007366.2,506-524).
gcagccattaagcttatat

SEQ ID NO: 175603 - DNA, 19 bp, Homo sapiens
  siRNA target sequence for PLA2R1 (NM_007366.2,509-527).
gccattaagcttatatgaa

SEQ ID NO: 175604 - DNA, 19 bp, Homo sapiens
  siRNA target sequence for PLA2R1 (NM_007366.2,510-528).
ccattaagcttatatgaat

SEQ ID NO: 175605 - DNA, 19 bp, Homo sapiens
  siRNA target sequence for PLA2R1 (NM_007366.2,626-644).
ggtggcctcacggaagtat

SEQ ID NO: 175606 - DNA, 19 bp, Homo sapiens
  siRNA target sequence for PLA2R1 (NM_007366.2,627-645).
gtggcctcacggaagtata

SEQ ID NO: 175607 - DNA, 19 bp, Homo sapiens
  siRNA target sequence for PLA2R1 (NM_007366.2,629-647).
ggcctcacggaagtatatt

SEQ ID NO: 175608 - DNA, 19 bp, Homo sapiens
  siRNA target sequence for PLA2R1 (NM_007366.2,631-649).
cctcacggaagtatattca

SEQ ID NO: 175609 - DNA, 19 bp, Homo sapiens
  siRNA target sequence for PLA2R1 (NM_007366.2,632-650).
ctcacggaagtatattcat

SEQ ID NO: 175610 - DNA, 19 bp, Homo sapiens
  siRNA target sequence for PLA2R1 (NM_007366.2,636-654).
cggaagtatattcataagt

SEQ ID NO: 175611 - DNA, 19 bp, Homo sapiens
  siRNA target sequence for PLA2R1 (NM_007366.2,690-708).
gaatatctacacaaagatt

SEQ ID NO: 175612 - DNA, 19 bp, Homo sapiens
  siRNA target sequence for PLA2R1 (NM_007366.2,734-752).
cgggatgccgtgtatgttt

SEQ ID NO: 175613 - DNA, 19 bp, Homo sapiens
  siRNA target sequence for PLA2R1 (NM_007366.2,799-817).
gtcgggaagatgacttact

SEQ ID NO: 175614 - DNA, 19 bp, Homo sapiens
  siRNA target sequence for PLA2R1 (NM_007366.2,826-844).
ccacgacaagccgttatga

SEQ ID NO: 175615 - DNA, 19 bp, Homo sapiens
  siRNA target sequence for PLA2R1 (NM_007366.2,827-845).
cacgacaagccgttatgaa

SEQ ID NO: 175616 - DNA, 19 bp, Homo sapiens
  siRNA target sequence for PLA2R1 (NM_007366.2,830-848).
gacaagccgttatgaaaga

SEQ ID NO: 175617 - DNA, 19 bp, Homo sapiens
  siRNA target sequence for PLA2R1 (NM_007366.2,832-850).
caagccgttatgaaagaga

SEQ ID NO: 175618 - DNA, 19 bp, Homo sapiens
  siRNA target sequence for PLA2R1 (NM_007366.2,836-854).
ccgttatgaaagagatgaa

SEQ ID NO: 175619 - DNA, 19 bp, Homo sapiens
  siRNA target sequence for PLA2R1 (NM_007366.2,885-903).
gcagaagtaggttgtgata

SEQ ID NO: 175620 - DNA, 19 bp, Homo sapiens
  siRNA target sequence for PLA2R1 (NM_007366.2,888-906).
gaagtaggttgtgatacta

SEQ ID NO: 175621 - DNA, 19 bp, Homo sapiens
  siRNA target sequence for PLA2R1 (NM_007366.2,917-935).
ggacctcaattcacacatt

SEQ ID NO: 175622 - DNA, 19 bp, Homo sapiens
  siRNA target sequence for PLA2R1 (NM_007366.2,942-960).
cagttcaacctgctttcat

SEQ ID NO: 175623 - DNA, 19 bp, Homo sapiens
  siRNA target sequence for PLA2R1 (NM_007366.2,1002-1020).
ggaggtacgctgttaagta

SEQ ID NO: 175624 - DNA, 19 bp, Homo sapiens
  siRNA target sequence for PLA2R1 (NM_007366.2,1003-1021).
gaggtacgctgttaagtat

SEQ ID NO: 175625 - DNA, 19 bp, Homo sapiens
  siRNA target sequence for PLA2R1 (NM_007366.2,1005-1023).
ggtacgctgttaagtatta

SEQ ID NO: 175626 - DNA, 19 bp, Homo sapiens
  siRNA target sequence for PLA2R1 (NM_007366.2,1009-1027).
cgctgttaagtattacaga

SEQ ID NO: 175627 - DNA, 19 bp, Homo sapiens
  siRNA target sequence for PLA2R1 (NM_007366.2,1052-1070).
ggagcacatgagcagtaaa

SEQ ID NO: 175628 - DNA, 19 bp, Homo sapiens
  siRNA target sequence for PLA2R1 (NM_007366.2,1053-1071).
gagcacatgagcagtaaaa

SEQ ID NO: 175629 - DNA, 19 bp, Homo sapiens
  siRNA target sequence for PLA2R1 (NM_007366.2,1055-1073).
gcacatgagcagtaaaaca

SEQ ID NO: 175630 - DNA, 19 bp, Homo sapiens
  siRNA target sequence for PLA2R1 (NM_007366.2,1135-1153).
gaacgccgctcaactatct

SEQ ID NO: 175631 - DNA, 19 bp, Homo sapiens
  siRNA target sequence for PLA2R1 (NM_007366.2,1138-1156).
cgccgctcaactatctgaa

SEQ ID NO: 175632 - DNA, 19 bp, Homo sapiens
  siRNA target sequence for PLA2R1 (NM_007366.2,1139-1157).
gccgctcaactatctgaat

SEQ ID NO: 175633 - DNA, 19 bp, Homo sapiens
  siRNA target sequence for PLA2R1 (NM_007366.2,1140-1158).
ccgctcaactatctgaatt

SEQ ID NO: 175634 - DNA, 19 bp, Homo sapiens
  siRNA target sequence for PLA2R1 (NM_007366.2,1162-1180).
gcccagaggtaaattttga

SEQ ID NO: 175635 - DNA, 19 bp, Homo sapiens
  siRNA target sequence for PLA2R1 (NM_007366.2,1194-1212).
gatcactgtggaacattta

SEQ ID NO: 175636 - DNA, 19 bp, Homo sapiens
  siRNA target sequence for PLA2R1 (NM_007366.2,1197-1215).
cactgtggaacatttagtt

SEQ ID NO: 175637 - DNA, 19 bp, Homo sapiens
  siRNA target sequence for PLA2R1 (NM_007366.2,1234-1252).
ggaggagtcgggattgtga

SEQ ID NO: 175638 - DNA, 19 bp, Homo sapiens
  siRNA target sequence for PLA2R1 (NM_007366.2,1289-1307).
ccacattgatcatgaaata

SEQ ID NO: 175639 - DNA, 19 bp, Homo sapiens
  siRNA target sequence for PLA2R1 (NM_007366.2,1311-1329).
gaaaaagatgcgtggaaat

SEQ ID NO: 175640 - DNA, 19 bp, Homo sapiens
  siRNA target sequence for PLA2R1 (NM_007366.2,1320-1338).
gcgtggaaatattatgcta

SEQ ID NO: 175641 - DNA, 19 bp, Homo sapiens
  siRNA target sequence for PLA2R1 (NM_007366.2,1357-1375).
ggaatccctacaatcgtaa

SEQ ID NO: 175642 - DNA, 19 bp, Homo sapiens
  siRNA target sequence for PLA2R1 (NM_007366.2,1358-1376).
gaatccctacaatcgtaat

SEQ ID NO: 175643 - DNA, 19 bp, Homo sapiens
  siRNA target sequence for PLA2R1 (NM_007366.2,1362-1380).
ccctacaatcgtaattgct

SEQ ID NO: 175644 - DNA, 19 bp, Homo sapiens
  siRNA target sequence for PLA2R1 (NM_007366.2,1363-1381).
cctacaatcgtaattgcta

SEQ ID NO: 175645 - DNA, 19 bp, Homo sapiens
  siRNA target sequence for PLA2R1 (NM_007366.2,1433-1451).
ggctgataacagtgcatta

SEQ ID NO: 175646 - DNA, 19 bp, Homo sapiens
  siRNA target sequence for PLA2R1 (NM_007366.2,1435-1453).
ctgataacagtgcattaat

SEQ ID NO: 175647 - DNA, 19 bp, Homo sapiens
  siRNA target sequence for PLA2R1 (NM_007366.2,1446-1464).
gcattaatagacataacct

SEQ ID NO: 175648 - DNA, 19 bp, Homo sapiens
  siRNA target sequence for PLA2R1 (NM_007366.2,1473-1491).
gaggtggagtttcttgtaa

SEQ ID NO: 175649 - DNA, 19 bp, Homo sapiens
  siRNA target sequence for PLA2R1 (NM_007366.2,1613-1631).
gccccacatttttccaaat

SEQ ID NO: 175650 - DNA, 19 bp, Homo sapiens
  siRNA target sequence for PLA2R1 (NM_007366.2,1824-1842).
caagcttccagcggttatt

SEQ ID NO: 175651 - DNA, 19 bp, Homo sapiens
  siRNA target sequence for PLA2R1 (NM_007366.2,1827-1845).
gcttccagcggttattact

SEQ ID NO: 175652 - DNA, 19 bp, Homo sapiens
  siRNA target sequence for PLA2R1 (NM_007366.2,1844-1862).
ctgtcctcctgcacttgta

SEQ ID NO: 175653 - DNA, 19 bp, Homo sapiens
  siRNA target sequence for PLA2R1 (NM_007366.2,1854-1872).
gcacttgtaaccattacaa

SEQ ID NO: 175654 - DNA, 19 bp, Homo sapiens
  siRNA target sequence for PLA2R1 (NM_007366.2,1888-1906).
cttttattaccagtttgat

SEQ ID NO: 175655 - DNA, 19 bp, Homo sapiens
  siRNA target sequence for PLA2R1 (NM_007366.2,1904-1922).
gatcagtagtgtggtaaaa

SEQ ID NO: 175656 - DNA, 19 bp, Homo sapiens
  siRNA target sequence for PLA2R1 (NM_007366.2,1928-1946).
ggacagttatttttggata

SEQ ID NO: 175657 - DNA, 19 bp, Homo sapiens
  siRNA target sequence for PLA2R1 (NM_007366.2,2138-2156).
gtgcaagcagccagttgaa

SEQ ID NO: 175658 - DNA, 19 bp, Homo sapiens
  siRNA target sequence for PLA2R1 (NM_007366.2,2190-2208).
ccctttcacccctgctatt

SEQ ID NO: 175659 - DNA, 19 bp, Homo sapiens
  siRNA target sequence for PLA2R1 (NM_007366.2,2235-2253).
gccagttgcttcaaggtat

SEQ ID NO: 175660 - DNA, 19 bp, Homo sapiens
  siRNA target sequence for PLA2R1 (NM_007366.2,2236-2254).
ccagttgcttcaaggtatt

SEQ ID NO: 175661 - DNA, 19 bp, Homo sapiens
  siRNA target sequence for PLA2R1 (NM_007366.2,2332-2350).
caagctttgcccatattga

SEQ ID NO: 175662 - DNA, 19 bp, Homo sapiens
  siRNA target sequence for PLA2R1 (NM_007366.2,2342-2360).
ccatattgaggaagagaat

SEQ ID NO: 175663 - DNA, 19 bp, Homo sapiens
  siRNA target sequence for PLA2R1 (NM_007366.2,2409-2427).
cagttctggattggattta

SEQ ID NO: 175664 - DNA, 19 bp, Homo sapiens
  siRNA target sequence for PLA2R1 (NM_007366.2,2459-2477).
ggagtggtctgatagaact

SEQ ID NO: 175665 - DNA, 19 bp, Homo sapiens
  siRNA target sequence for PLA2R1 (NM_007366.2,2567-2585).
cttacactgtggttccaaa

SEQ ID NO: 175666 - DNA, 19 bp, Homo sapiens
  siRNA target sequence for PLA2R1 (NM_007366.2,2700-2718).
gcctcagaatggttgaact

SEQ ID NO: 175667 - DNA, 19 bp, Homo sapiens
  siRNA target sequence for PLA2R1 (NM_007366.2,2735-2753).
ctggctgcacagtgatctt

SEQ ID NO: 175668 - DNA, 19 bp, Homo sapiens
  siRNA target sequence for PLA2R1 (NM_007366.2,2744-2762).
cagtgatcttctcacaatt

SEQ ID NO: 175669 - DNA, 19 bp, Homo sapiens
  siRNA target sequence for PLA2R1 (NM_007366.2,2746-2764).
gtgatcttctcacaattca

SEQ ID NO: 175670 - DNA, 19 bp, Homo sapiens
  siRNA target sequence for PLA2R1 (NM_007366.2,2833-2851).
ggattggacttcaagaaga

SEQ ID NO: 175671 - DNA, 19 bp, Homo sapiens
  siRNA target sequence for PLA2R1 (NM_007366.2,2880-2898).
gatggaacaccagtgatat

SEQ ID NO: 175672 - DNA, 19 bp, Homo sapiens
  siRNA target sequence for PLA2R1 (NM_007366.2,2884-2902).
gaacaccagtgatatacca

SEQ ID NO: 175673 - DNA, 19 bp, Homo sapiens
  siRNA target sequence for PLA2R1 (NM_007366.2,2945-2963).
ccagagatgtggctttatt

SEQ ID NO: 175674 - DNA, 19 bp, Homo sapiens
  siRNA target sequence for PLA2R1 (NM_007366.2,3003-3021).
gtttctatgcctagtatct

SEQ ID NO: 175675 - DNA, 19 bp, Homo sapiens
  siRNA target sequence for PLA2R1 (NM_007366.2,3007-3025).
ctatgcctagtatctgtaa

SEQ ID NO: 175676 - DNA, 19 bp, Homo sapiens
  siRNA target sequence for PLA2R1 (NM_007366.2,3016-3034).
gtatctgtaagcgaaaaaa

SEQ ID NO: 175677 - DNA, 19 bp, Homo sapiens
  siRNA target sequence for PLA2R1 (NM_007366.2,3078-3096).
ggaacgtgtcccaaaggat

SEQ ID NO: 175678 - DNA, 19 bp, Homo sapiens
  siRNA target sequence for PLA2R1 (NM_007366.2,3203-3221).
cctggtcgccattgaaagt

SEQ ID NO: 175679 - DNA, 19 bp, Homo sapiens
  siRNA target sequence for PLA2R1 (NM_007366.2,3224-3242).
ggtggagcaagctttcatt

SEQ ID NO: 175680 - DNA, 19 bp, Homo sapiens
  siRNA target sequence for PLA2R1 (NM_007366.2,3235-3253).
ctttcattactatgaatct

SEQ ID NO: 175681 - DNA, 19 bp, Homo sapiens
  siRNA target sequence for PLA2R1 (NM_007366.2,3268-3286).
ccagtgtgtggataggttt

SEQ ID NO: 175682 - DNA, 19 bp, Homo sapiens
  siRNA target sequence for PLA2R1 (NM_007366.2,3275-3293).
gtggataggtttacaaaat

SEQ ID NO: 175683 - DNA, 19 bp, Homo sapiens
  siRNA target sequence for PLA2R1 (NM_007366.2,3278-3296).
gataggtttacaaaatgat

SEQ ID NO: 175684 - DNA, 19 bp, Homo sapiens
  siRNA target sequence for PLA2R1 (NM_007366.2,3341-3359).
ctggtctccatttgatata

SEQ ID NO: 175685 - DNA, 19 bp, Homo sapiens
  siRNA target sequence for PLA2R1 (NM_007366.2,3412-3430).
gtgccttactctcaagtaa

SEQ ID NO: 175686 - DNA, 19 bp, Homo sapiens
  siRNA target sequence for PLA2R1 (NM_007366.2,3424-3442).
caagtaatcctaattttca

SEQ ID NO: 175687 - DNA, 19 bp, Homo sapiens
  siRNA target sequence for PLA2R1 (NM_007366.2,3484-3502).
gctatgggtttgtttgtga

SEQ ID NO: 175688 - DNA, 19 bp, Homo sapiens
  siRNA target sequence for PLA2R1 (NM_007366.2,3517-3535).
cttctggacacggtgtaaa

SEQ ID NO: 175689 - DNA, 19 bp, Homo sapiens
  siRNA target sequence for PLA2R1 (NM_007366.2,3522-3540).
ggacacggtgtaaatacat

SEQ ID NO: 175690 - DNA, 19 bp, Homo sapiens
  siRNA target sequence for PLA2R1 (NM_007366.2,3527-3545).
cggtgtaaatacatctgat

SEQ ID NO: 175691 - DNA, 19 bp, Homo sapiens
  siRNA target sequence for PLA2R1 (NM_007366.2,3528-3546).
ggtgtaaatacatctgata

SEQ ID NO: 175692 - DNA, 19 bp, Homo sapiens
  siRNA target sequence for PLA2R1 (NM_007366.2,3570-3588).
gaatatggaaacagaactt

SEQ ID NO: 175693 - DNA, 19 bp, Homo sapiens
  siRNA target sequence for PLA2R1 (NM_007366.2,3664-3682).
gcatcacagaccagtatca

SEQ ID NO: 175694 - DNA, 19 bp, Homo sapiens
  siRNA target sequence for PLA2R1 (NM_007366.2,3704-3722).
cctcaaccggctaggatat

SEQ ID NO: 175695 - DNA, 19 bp, Homo sapiens
  siRNA target sequence for PLA2R1 (NM_007366.2,3735-3753).
ggactgttcaccacagata

SEQ ID NO: 175696 - DNA, 19 bp, Homo sapiens
  siRNA target sequence for PLA2R1 (NM_007366.2,3736-3754).
gactgttcaccacagataa

SEQ ID NO: 175697 - DNA, 19 bp, Homo sapiens
  siRNA target sequence for PLA2R1 (NM_007366.2,3827-3845).
ccttggtgactgcgttttt

SEQ ID NO: 175698 - DNA, 19 bp, Homo sapiens
  siRNA target sequence for PLA2R1 (NM_007366.2,3942-3960).
ccagagttgtgctcagaaa

SEQ ID NO: 175699 - DNA, 19 bp, Homo sapiens
  siRNA target sequence for PLA2R1 (NM_007366.2,3945-3963).
gagttgtgctcagaaacat

SEQ ID NO: 175700 - DNA, 19 bp, Homo sapiens
  siRNA target sequence for PLA2R1 (NM_007366.2,3961-3979).
catctattccctggataaa

SEQ ID NO: 175701 - DNA, 19 bp, Homo sapiens
  siRNA target sequence for PLA2R1 (NM_007366.2,4006-4024).
ctacagtcctagacagtat

SEQ ID NO: 175702 - DNA, 19 bp, Homo sapiens
  siRNA target sequence for PLA2R1 (NM_007366.2,4011-4029).
gtcctagacagtatgagtt

SEQ ID NO: 175703 - DNA, 19 bp, Homo sapiens
  siRNA target sequence for PLA2R1 (NM_007366.2,4059-4077).
gaaggttctaatcttttaa

SEQ ID NO: 175704 - DNA, 19 bp, Homo sapiens
  siRNA target sequence for PLA2R1 (NM_007366.2,4110-4128).
ctagaagagctgtttgctt

SEQ ID NO: 175705 - DNA, 19 bp, Homo sapiens
  siRNA target sequence for PLA2R1 (NM_007366.2,4121-4139).
gtttgcttttggttcttct

SEQ ID NO: 175706 - DNA, 19 bp, Homo sapiens
  siRNA target sequence for PLA2R1 (NM_007366.2,4138-4156).
ctgtccagatggtttggtt

SEQ ID NO: 175707 - DNA, 19 bp, Homo sapiens
  siRNA target sequence for PLA2R1 (NM_007366.2,4153-4171).
ggttgaatgctcaatttga

SEQ ID NO: 175708 - DNA, 19 bp, Homo sapiens
  siRNA target sequence for PLA2R1 (NM_007366.2,4207-4225).
ctcccacagaccagtcaaa

SEQ ID NO: 175709 - DNA, 19 bp, Homo sapiens
  siRNA target sequence for PLA2R1 (NM_007366.2,4256-4274).
cttcaagccccatcattgt

SEQ ID NO: 175710 - DNA, 19 bp, Homo sapiens
  siRNA target sequence for PLA2R1 (NM_007366.2,4283-4301).
gaggatccctgaaggatta

SEQ ID NO: 175711 - DNA, 19 bp, Homo sapiens
  siRNA target sequence for PLA2R1 (NM_007366.2,4307-4325).
gctatccccgtgtcaagaa

SEQ ID NO: 175712 - DNA, 19 bp, Homo sapiens
  siRNA target sequence for PLA2R1 (NM_007366.2,4308-4326).
ctatccccgtgtcaagaaa

SEQ ID NO: 175713 - DNA, 19 bp, Homo sapiens
  siRNA target sequence for PLA2R1 (NM_007366.2,4373-4391).
ggcgctgccagaaaaagga

SEQ ID NO: 175714 - DNA, 19 bp, Homo sapiens
  siRNA target sequence for PLA2R1 (NM_007366.2,4418-4436).
ggttgtactgacactgata

SEQ ID NO: 175715 - DNA, 19 bp, Homo sapiens
  siRNA target sequence for PLA2R1 (NM_007366.2,4422-4440).
gtactgacactgatagtca

SEQ ID NO: 175716 - DNA, 19 bp, Homo sapiens
  siRNA target sequence for PLA2R1 (NM_007366.2,4479-4497).
cataacggtggcttcttca

SEQ ID NO: 175717 - DNA, 19 bp, Homo sapiens
  siRNA target sequence for PLA2R1 (NM_007366.2,4506-4524).
gcagggtttcggaatcctt

SEQ ID NO: 175718 - DNA, 19 bp, Homo sapiens
  siRNA target sequence for PLA2R1 (NM_007366.2,4507-4525).
cagggtttcggaatcctta

SEQ ID NO: 175719 - DNA, 19 bp, Homo sapiens
  siRNA target sequence for PLA2R1 (NM_007366.2,4510-4528).
ggtttcggaatccttacta

SEQ ID NO: 175720 - DNA, 19 bp, Homo sapiens
  siRNA target sequence for PLA2R1 (NM_007366.2,4511-4529).
gtttcggaatccttactat

SEQ ID NO: 175721 - DNA, 19 bp, Homo sapiens
  siRNA target sequence for PLA2R1 (NM_007366.2,4526-4544).
ctatcctgcaaccaacttt

SEQ ID NO: 175722 - DNA, 19 bp, Homo sapiens
  siRNA target sequence for PRG2 (NM_002728.3,226-244).
gtggggctctggaagtgaa

SEQ ID NO: 175723 - DNA, 19 bp, Homo sapiens
  siRNA target sequence for PRG2 (NM_002728.3,229-247).
gggctctggaagtgaagat

SEQ ID NO: 175724 - DNA, 19 bp, Homo sapiens
  siRNA target sequence for PRG2 (NM_002728.3,449-467).
gtttccatccacaacttca

SEQ ID NO: 175725 - DNA, 19 bp, Homo sapiens
  siRNA target sequence for PRG2 (NM_002728.3,453-471).
ccatccacaacttcaatat

SEQ ID NO: 175726 - DNA, 19 bp, Homo sapiens
  siRNA target sequence for PRG2 (NM_002728.3,457-475).
ccacaacttcaatattaat

SEQ ID NO: 175727 - DNA, 19 bp, Homo sapiens
  siRNA target sequence for PRG2 (NM_002728.3,463-481).
cttcaatattaattatcga

SEQ ID NO: 175728 - DNA, 19 bp, Homo sapiens
  siRNA target sequence for PRG2 (NM_002728.3,679-697).
ccactgcctcagaagactt

SEQ ID NO: 175729 - DNA, 19 bp, Homo sapiens
  siRNA target sequence for PRG3 (NM_006093.2,307-325).
cttctgcctgtcaagacaa

SEQ ID NO: 175730 - DNA, 19 bp, Homo sapiens
  siRNA target sequence for PRG3 (NM_006093.2,310-328).
ctgcctgtcaagacaactt

SEQ ID NO: 175731 - DNA, 19 bp, Homo sapiens
  siRNA target sequence for PRG3 (NM_006093.2,452-470).
ggtgcggactcctaaaact

SEQ ID NO: 175732 - DNA, 19 bp, Homo sapiens
  siRNA target sequence for PRG3 (NM_006093.2,453-471).
gtgcggactcctaaaactt

SEQ ID NO: 175733 - DNA, 19 bp, Homo sapiens
  siRNA target sequence for PRG3 (NM_006093.2,474-492).
gcagaagctcagaatgtct

SEQ ID NO: 175734 - DNA, 19 bp, Homo sapiens
  siRNA target sequence for PRG3 (NM_006093.2,512-530).
caaccttgtctctatccat

SEQ ID NO: 175735 - DNA, 19 bp, Homo sapiens
  siRNA target sequence for PRG3 (NM_006093.2,523-541).
ctatccatgacttcaactt

SEQ ID NO: 175736 - DNA, 19 bp, Homo sapiens
  siRNA target sequence for PRG3 (NM_006093.2,645-663).
gatgggagccactggaatt

SEQ ID NO: 175737 - DNA, 19 bp, Homo sapiens
  siRNA target sequence for REG4 (NM_032044.2,321-339).
ggagtcctgggtgatatca

SEQ ID NO: 175738 - DNA, 19 bp, Homo sapiens
  siRNA target sequence for REG4 (NM_032044.2,322-340).
gagtcctgggtgatatcat

SEQ ID NO: 175739 - DNA, 19 bp, Homo sapiens
  siRNA target sequence for REG4 (NM_032044.2,327-345).
ctgggtgatatcatcatga

SEQ ID NO: 175740 - DNA, 19 bp, Homo sapiens
  siRNA target sequence for REG4 (NM_032044.2,355-373).
gtgctcctggatggtttta

SEQ ID NO: 175741 - DNA, 19 bp, Homo sapiens
  siRNA target sequence for REG4 (NM_032044.2,374-392).
ccacaagtccaattgctat

SEQ ID NO: 175742 - DNA, 19 bp, Homo sapiens
  siRNA target sequence for REG4 (NM_032044.2,382-400).
ccaattgctatggttactt

SEQ ID NO: 175743 - DNA, 19 bp, Homo sapiens
  siRNA target sequence for REG4 (NM_032044.2,496-514).
gcaccatagcagagtacat

SEQ ID NO: 175744 - DNA, 19 bp, Homo sapiens
  siRNA target sequence for REG4 (NM_032044.2,497-515).
caccatagcagagtacata

SEQ ID NO: 175745 - DNA, 19 bp, Homo sapiens
  siRNA target sequence for REG4 (NM_032044.2,500-518).
catagcagagtacataagt

SEQ ID NO: 175746 - DNA, 19 bp, Homo sapiens
  siRNA target sequence for REG4 (NM_032044.2,529-547).
gaagccagccgatatggat

SEQ ID NO: 175747 - DNA, 19 bp, Homo sapiens
  siRNA target sequence for REG4 (NM_032044.2,587-605).
gattgatggggccatgtat

SEQ ID NO: 175748 - DNA, 19 bp, Homo sapiens
  siRNA target sequence for REG4 (NM_032044.2,591-609).
gatggggccatgtatctgt

SEQ ID NO: 175749 - DNA, 19 bp, Homo sapiens
  siRNA target sequence for REG4 (NM_032044.2,654-672).
gctgagatgagctccaata

SEQ ID NO: 175750 - DNA, 19 bp, Homo sapiens
  siRNA target sequence for REG4 (NM_032044.2,662-680).
gagctccaataacaacttt

SEQ ID NO: 175751 - DNA, 19 bp, Homo sapiens
  siRNA target sequence for REG4 (NM_032044.2,664-682).
gctccaataacaacttttt

SEQ ID NO: 175752 - DNA, 19 bp, Homo sapiens
  siRNA target sequence for REG4 (NM_032044.2,665-683).
ctccaataacaacttttta

SEQ ID NO: 175753 - DNA, 19 bp, Homo sapiens
  siRNA target sequence for SELE (NM_000450.1,148-166).
ctttggtgcttctcattaa

SEQ ID NO: 175754 - DNA, 19 bp, Homo sapiens
  siRNA target sequence for SELE (NM_000450.1,194-212).
ctccacggaagctatgact

SEQ ID NO: 175755 - DNA, 19 bp, Homo sapiens
  siRNA target sequence for SELE (NM_000450.1,196-214).
ccacggaagctatgactta

SEQ ID NO: 175756 - DNA, 19 bp, Homo sapiens
  siRNA target sequence for SELE (NM_000450.1,197-215).
cacggaagctatgacttat

SEQ ID NO: 175757 - DNA, 19 bp, Homo sapiens
  siRNA target sequence for SELE (NM_000450.1,199-217).
cggaagctatgacttatga

SEQ ID NO: 175758 - DNA, 19 bp, Homo sapiens
  siRNA target sequence for SELE (NM_000450.1,200-218).
ggaagctatgacttatgat

SEQ ID NO: 175759 - DNA, 19 bp, Homo sapiens
  siRNA target sequence for SELE (NM_000450.1,229-247).
cttattgtcagcaaaggta

SEQ ID NO: 175760 - DNA, 19 bp, Homo sapiens
  siRNA target sequence for SELE (NM_000450.1,248-266).
cacacacctggttgcaatt

SEQ ID NO: 175761 - DNA, 19 bp, Homo sapiens
  siRNA target sequence for SELE (NM_000450.1,252-270).
cacctggttgcaattcaaa

SEQ ID NO: 175762 - DNA, 19 bp, Homo sapiens
  siRNA target sequence for SELE (NM_000450.1,296-314).
ctccatattgagctattca

SEQ ID NO: 175763 - DNA, 19 bp, Homo sapiens
  siRNA target sequence for SELE (NM_000450.1,328-346).
ggattggaatcagaaaagt

SEQ ID NO: 175764 - DNA, 19 bp, Homo sapiens
  siRNA target sequence for SELE (NM_000450.1,422-440).
caacaataggcaaaaagat

SEQ ID NO: 175765 - DNA, 19 bp, Homo sapiens
  siRNA target sequence for SELE (NM_000450.1,537-555).
gctgcctgtaccaatacat

SEQ ID NO: 175766 - DNA, 19 bp, Homo sapiens
  siRNA target sequence for SELE (NM_000450.1,707-725).
gggaaacttcagctacaat

SEQ ID NO: 175767 - DNA, 19 bp, Homo sapiens
  siRNA target sequence for SELE (NM_000450.1,839-857).
gtgtgatgctgtgacaaat

SEQ ID NO: 175768 - DNA, 19 bp, Homo sapiens
  siRNA target sequence for SELE (NM_000450.1,998-1016).
cgagaagccaacgtgtaaa

SEQ ID NO: 175769 - DNA, 19 bp, Homo sapiens
  siRNA target sequence for SELE (NM_000450.1,1034-1052).
cgtccgccagcctcagaat

SEQ ID NO: 175770 - DNA, 19 bp, Homo sapiens
  siRNA target sequence for SELE (NM_000450.1,1233-1251).
cccgagcgaggctacatga

SEQ ID NO: 175771 - DNA, 19 bp, Homo sapiens
  siRNA target sequence for SELE (NM_000450.1,1234-1252).
ccgagcgaggctacatgaa

SEQ ID NO: 175772 - DNA, 19 bp, Homo sapiens
  siRNA target sequence for SELE (NM_000450.1,1235-1253).
cgagcgaggctacatgaat

SEQ ID NO: 175773 - DNA, 19 bp, Homo sapiens
  siRNA target sequence for SELE (NM_000450.1,1236-1254).
gagcgaggctacatgaatt

SEQ ID NO: 175774 - DNA, 19 bp, Homo sapiens
  siRNA target sequence for SELE (NM_000450.1,1238-1256).
gcgaggctacatgaattgt

SEQ ID NO: 175775 - DNA, 19 bp, Homo sapiens
  siRNA target sequence for SELE (NM_000450.1,1240-1258).
gaggctacatgaattgtct

SEQ ID NO: 175776 - DNA, 19 bp, Homo sapiens
  siRNA target sequence for SELE (NM_000450.1,1605-1623).
gcagttccgggaaagatca

SEQ ID NO: 175777 - DNA, 19 bp, Homo sapiens
  siRNA target sequence for SELE (NM_000450.1,1611-1629).
ccgggaaagatcaacatga

SEQ ID NO: 175778 - DNA, 19 bp, Homo sapiens
  siRNA target sequence for SELE (NM_000450.1,1814-1832).
ctccctcctgacattagca

SEQ ID NO: 175779 - DNA, 19 bp, Homo sapiens
  siRNA target sequence for SELE (NM_000450.1,1820-1838).
cctgacattagcaccattt

SEQ ID NO: 175780 - DNA, 19 bp, Homo sapiens
  siRNA target sequence for SELE (NM_000450.1,1844-1862).
ctggcttcggaaatgctta

SEQ ID NO: 175781 - DNA, 19 bp, Homo sapiens
  siRNA target sequence for SELL (NM_000655.2,117-135).
cccagagggacttatggaa

SEQ ID NO: 175782 - DNA, 19 bp, Homo sapiens
  siRNA target sequence for SELL (NM_000655.2,199-217).
ctgctggacttaccattat

SEQ ID NO: 175783 - DNA, 19 bp, Homo sapiens
  siRNA target sequence for SELL (NM_000655.2,202-220).
ctggacttaccattattct

SEQ ID NO: 175784 - DNA, 19 bp, Homo sapiens
  siRNA target sequence for SELL (NM_000655.2,204-222).
ggacttaccattattctga

SEQ ID NO: 175785 - DNA, 19 bp, Homo sapiens
  siRNA target sequence for SELL (NM_000655.2,237-255).
ggcaaagggctagaagatt

SEQ ID NO: 175786 - DNA, 19 bp, Homo sapiens
  siRNA target sequence for SELL (NM_000655.2,252-270).
gattctgccgagacaatta

SEQ ID NO: 175787 - DNA, 19 bp, Homo sapiens
  siRNA target sequence for SELL (NM_000655.2,256-274).
ctgccgagacaattacaca

SEQ ID NO: 175788 - DNA, 19 bp, Homo sapiens
  siRNA target sequence for SELL (NM_000655.2,330-348).
ctttcagtcgttcttacta

SEQ ID NO: 175789 - DNA, 19 bp, Homo sapiens
  siRNA target sequence for SELL (NM_000655.2,361-379).
ccggaagataggaggaata

SEQ ID NO: 175790 - DNA, 19 bp, Homo sapiens
  siRNA target sequence for SELL (NM_000655.2,362-380).
cggaagataggaggaatat

SEQ ID NO: 175791 - DNA, 19 bp, Homo sapiens
  siRNA target sequence for SELL (NM_000655.2,391-409).
gggaaccaacaaatctctt

SEQ ID NO: 175792 - DNA, 19 bp, Homo sapiens
  siRNA target sequence for SELL (NM_000655.2,396-414).
ccaacaaatctcttactga

SEQ ID NO: 175793 - DNA, 19 bp, Homo sapiens
  siRNA target sequence for SELL (NM_000655.2,397-415).
caacaaatctcttactgaa

SEQ ID NO: 175794 - DNA, 19 bp, Homo sapiens
  siRNA target sequence for SELL (NM_000655.2,521-539).
gacgcctgccacaaactaa

SEQ ID NO: 175795 - DNA, 19 bp, Homo sapiens
  siRNA target sequence for SELL (NM_000655.2,631-649).
ctgtgatgtggggtactat

SEQ ID NO: 175796 - DNA, 19 bp, Homo sapiens
  siRNA target sequence for SELL (NM_000655.2,654-672).
cccagtgtcagtttgtgat

SEQ ID NO: 175797 - DNA, 19 bp, Homo sapiens
  siRNA target sequence for SELL (NM_000655.2,655-673).
ccagtgtcagtttgtgatt

SEQ ID NO: 175798 - DNA, 19 bp, Homo sapiens
  siRNA target sequence for SELL (NM_000655.2,843-861).
caacctgtcaagtgattca

SEQ ID NO: 175799 - DNA, 19 bp, Homo sapiens
  siRNA target sequence for SELL (NM_000655.2,870-888).
ctctatcagcaccagattt

SEQ ID NO: 175800 - DNA, 19 bp, Homo sapiens
  siRNA target sequence for SELL (NM_000655.2,1007-1025).
ggaatctggtcaaatccta

SEQ ID NO: 175801 - DNA, 19 bp, Homo sapiens
  siRNA target sequence for SELL (NM_000655.2,1015-1033).
gtcaaatcctagtccaata

SEQ ID NO: 175802 - DNA, 19 bp, Homo sapiens
  siRNA target sequence for SELL (NM_000655.2,1022-1040).
cctagtccaatatgtcaaa

SEQ ID NO: 175803 - DNA, 19 bp, Homo sapiens
  siRNA target sequence for SELL (NM_000655.2,1023-1041).
ctagtccaatatgtcaaaa

SEQ ID NO: 175804 - DNA, 19 bp, Homo sapiens
  siRNA target sequence for SELL (NM_000655.2,1046-1064).
gacaaaagtttctcaatga

SEQ ID NO: 175805 - DNA, 19 bp, Homo sapiens
  siRNA target sequence for SELL (NM_000655.2,1053-1071).
gtttctcaatgattaagga

SEQ ID NO: 175806 - DNA, 19 bp, Homo sapiens
  siRNA target sequence for SELL (NM_000655.2,1063-1081).
gattaaggagggtgattat

SEQ ID NO: 175807 - DNA, 19 bp, Homo sapiens
  siRNA target sequence for SELL (NM_000655.2,1127-1145).
gggttggcatttatcattt

SEQ ID NO: 175808 - DNA, 19 bp, Homo sapiens
  siRNA target sequence for SELL (NM_000655.2,1179-1197).
ccaagagaagtatgaatga

SEQ ID NO: 175809 - DNA, 19 bp, Homo sapiens
  siRNA target sequence for SELP (NM_003005.2,106-124).
gccaaatagccatcttgta

SEQ ID NO: 175810 - DNA, 19 bp, Homo sapiens
  siRNA target sequence for SELP (NM_003005.2,179-197).
cctgatctctgaactaaca

SEQ ID NO: 175811 - DNA, 19 bp, Homo sapiens
  siRNA target sequence for SELP (NM_003005.2,180-198).
ctgatctctgaactaacaa

SEQ ID NO: 175812 - DNA, 19 bp, Homo sapiens
  siRNA target sequence for SELP (NM_003005.2,216-234).
gcatggacttatcattaca

SEQ ID NO: 175813 - DNA, 19 bp, Homo sapiens
  siRNA target sequence for SELP (NM_003005.2,278-296).
gaatcgctacacagactta

SEQ ID NO: 175814 - DNA, 19 bp, Homo sapiens
  siRNA target sequence for SELP (NM_003005.2,299-317).
ggccatccagaataaaaat

SEQ ID NO: 175815 - DNA, 19 bp, Homo sapiens
  siRNA target sequence for SELP (NM_003005.2,318-336).
gaaattgattacctcaata

SEQ ID NO: 175816 - DNA, 19 bp, Homo sapiens
  siRNA target sequence for SELP (NM_003005.2,367-385).
ggattgggatccgaaagaa

SEQ ID NO: 175817 - DNA, 19 bp, Homo sapiens
  siRNA target sequence for SELP (NM_003005.2,377-395).
ccgaaagaacaataagaca

SEQ ID NO: 175818 - DNA, 19 bp, Homo sapiens
  siRNA target sequence for SELP (NM_003005.2,450-468).
gataatgaacctaacaaca

SEQ ID NO: 175819 - DNA, 19 bp, Homo sapiens
  siRNA target sequence for SELP (NM_003005.2,534-552).
gatgagcactgcttgaaga

SEQ ID NO: 175820 - DNA, 19 bp, Homo sapiens
  siRNA target sequence for SELP (NM_003005.2,557-575).
gcacgcattgtgttacaca

SEQ ID NO: 175821 - DNA, 19 bp, Homo sapiens
  siRNA target sequence for SELP (NM_003005.2,621-639).
gagaccatcgggaactaca

SEQ ID NO: 175822 - DNA, 19 bp, Homo sapiens
  siRNA target sequence for SELP (NM_003005.2,667-685).
ggccagaatgtgaatacgt

SEQ ID NO: 175823 - DNA, 19 bp, Homo sapiens
  siRNA target sequence for SELP (NM_003005.2,714-732).
caacacgtgctcatgaact

SEQ ID NO: 175824 - DNA, 19 bp, Homo sapiens
  siRNA target sequence for SELP (NM_003005.2,787-805).
ctgacgggtaccaagtaaa

SEQ ID NO: 175825 - DNA, 19 bp, Homo sapiens
  siRNA target sequence for SELP (NM_003005.2,878-896).
gtgcccacccctgaagatt

SEQ ID NO: 175826 - DNA, 19 bp, Homo sapiens
  siRNA target sequence for SELP (NM_003005.2,897-915).
cctgaacgaggaaacatga

SEQ ID NO: 175827 - DNA, 19 bp, Homo sapiens
  siRNA target sequence for SELP (NM_003005.2,1230-1248).
ccaacctgtgaggctattt

SEQ ID NO: 175828 - DNA, 19 bp, Homo sapiens
  siRNA target sequence for SELP (NM_003005.2,1272-1290).
gtccacggaagcatggatt

SEQ ID NO: 175829 - DNA, 19 bp, Homo sapiens
  siRNA target sequence for SELP (NM_003005.2,1300-1318).
ccttgagagcgtttcagta

SEQ ID NO: 175830 - DNA, 19 bp, Homo sapiens
  siRNA target sequence for SELP (NM_003005.2,1314-1332).
cagtatgacaccaactgta

SEQ ID NO: 175831 - DNA, 19 bp, Homo sapiens
  siRNA target sequence for SELP (NM_003005.2,1358-1376).
gctgagaggagccgatata

SEQ ID NO: 175832 - DNA, 19 bp, Homo sapiens
  siRNA target sequence for SELP (NM_003005.2,1361-1379).
gagaggagccgatatagtt

SEQ ID NO: 175833 - DNA, 19 bp, Homo sapiens
  siRNA target sequence for SELP (NM_003005.2,1371-1389).
gatatagttcggtgtgata

SEQ ID NO: 175834 - DNA, 19 bp, Homo sapiens
  siRNA target sequence for SELP (NM_003005.2,1575-1593).
gctactggaaactggaatt

SEQ ID NO: 175835 - DNA, 19 bp, Homo sapiens
  siRNA target sequence for SELP (NM_003005.2,1579-1597).
ctggaaactggaattctgt

SEQ ID NO: 175836 - DNA, 19 bp, Homo sapiens
  siRNA target sequence for SELP (NM_003005.2,1635-1653).
ctaagccctcagaatggaa

SEQ ID NO: 175837 - DNA, 19 bp, Homo sapiens
  siRNA target sequence for SELP (NM_003005.2,1639-1657).
gccctcagaatggaacaat

SEQ ID NO: 175838 - DNA, 19 bp, Homo sapiens
  siRNA target sequence for SELP (NM_003005.2,1714-1732).
gtgacgagggatattcttt

SEQ ID NO: 175839 - DNA, 19 bp, Homo sapiens
  siRNA target sequence for SELP (NM_003005.2,1716-1734).
gacgagggatattctttgt

SEQ ID NO: 175840 - DNA, 19 bp, Homo sapiens
  siRNA target sequence for SELP (NM_003005.2,1856-1874).
cactcgtggagaattcaat

SEQ ID NO: 175841 - DNA, 19 bp, Homo sapiens
  siRNA target sequence for SELP (NM_003005.2,2040-2058).
gggcagggaaccatgtact

SEQ ID NO: 175842 - DNA, 19 bp, Homo sapiens
  siRNA target sequence for SELP (NM_003005.2,2067-2085).
catccgggaacctttggtt

SEQ ID NO: 175843 - DNA, 19 bp, Homo sapiens
  siRNA target sequence for SELP (NM_003005.2,2070-2088).
ccgggaacctttggtttta

SEQ ID NO: 175844 - DNA, 19 bp, Homo sapiens
  siRNA target sequence for SELP (NM_003005.2,2082-2100).
ggttttaataccacttgtt

SEQ ID NO: 175845 - DNA, 19 bp, Homo sapiens
  siRNA target sequence for SELP (NM_003005.2,2108-2126).
ctgcaacgctggattcaca

SEQ ID NO: 175846 - DNA, 19 bp, Homo sapiens
  siRNA target sequence for SELP (NM_003005.2,2114-2132).
cgctggattcacactcata

SEQ ID NO: 175847 - DNA, 19 bp, Homo sapiens
  siRNA target sequence for SELP (NM_003005.2,2206-2224).
gctcagaactacatgttaa

SEQ ID NO: 175848 - DNA, 19 bp, Homo sapiens
  siRNA target sequence for SELP (NM_003005.2,2207-2225).
ctcagaactacatgttaat

SEQ ID NO: 175849 - DNA, 19 bp, Homo sapiens
  siRNA target sequence for SELP (NM_003005.2,2378-2396).
ccaagcaggaccattgact

SEQ ID NO: 175850 - DNA, 19 bp, Homo sapiens
  siRNA target sequence for SELP (NM_003005.2,2379-2397).
caagcaggaccattgacta

SEQ ID NO: 175851 - DNA, 19 bp, Homo sapiens
  siRNA target sequence for SELP (NM_003005.2,2466-2484).
ctcctggctttgctaagaa

SEQ ID NO: 175852 - DNA, 19 bp, Homo sapiens
  siRNA target sequence for SELP (NM_003005.2,2477-2495).
gctaagaaagcgtttcaga

SEQ ID NO: 175853 - DNA, 19 bp, Homo sapiens
  siRNA target sequence for SELP (NM_003005.2,2486-2504).
gcgtttcagacaaaaagat

SEQ ID NO: 175854 - DNA, 19 bp, Homo sapiens
  siRNA target sequence for SELP (NM_003005.2,2534-2552).
ccacctaggaacatatgga

SEQ ID NO: 175855 - DNA, 19 bp, Homo sapiens
  siRNA target sequence for SFTPD (NM_003019.2,443-461).
caagccaggcccaaaagga

SEQ ID NO: 175856 - DNA, 19 bp, Homo sapiens
  siRNA target sequence for SFTPD (NM_003019.2,740-758).
ggccttacagggacaagta

SEQ ID NO: 175857 - DNA, 19 bp, Homo sapiens
  siRNA target sequence for SFTPD (NM_003019.2,781-799).
ctcagtataagaaagttga

SEQ ID NO: 175858 - DNA, 19 bp, Homo sapiens
  siRNA target sequence for SFTPD (NM_003019.2,822-840).
gtcggggagaagattttca

SEQ ID NO: 175859 - DNA, 19 bp, Homo sapiens
  siRNA target sequence for SIGLEC10 (NM_033130.2,482-500).
gaggaagctatgtgagata

SEQ ID NO: 175860 - DNA, 19 bp, Homo sapiens
  siRNA target sequence for SIGLEC10 (NM_033130.2,507-525).
catgaacgatgggttcttt

SEQ ID NO: 175861 - DNA, 19 bp, Homo sapiens
  siRNA target sequence for SIGLEC10 (NM_033130.2,510-528).
gaacgatgggttctttcta

SEQ ID NO: 175862 - DNA, 19 bp, Homo sapiens
  siRNA target sequence for SIGLEC10 (NM_033130.2,1785-1803).
cggcatcacggctcttctt

SEQ ID NO: 175863 - DNA, 19 bp, Homo sapiens
  siRNA target sequence for SIGLEC10 (NM_033130.2,1786-1804).
ggcatcacggctcttcttt

SEQ ID NO: 175864 - DNA, 19 bp, Homo sapiens
  siRNA target sequence for SIGLEC10 (NM_033130.2,1892-1910).
gcacgatcctggattacat

SEQ ID NO: 175865 - DNA, 19 bp, Homo sapiens
  siRNA target sequence for SIGLEC10 (NM_033130.2,2172-2190).
gggcacccaggcggattat

SEQ ID NO: 175866 - DNA, 19 bp, Homo sapiens
  siRNA target sequence for SIGLEC10 (NM_033130.2,2175-2193).
cacccaggcggattatgca

SEQ ID NO: 175867 - DNA, 19 bp, Homo sapiens
  siRNA target sequence for SIGLEC10 (NM_033130.2,2183-2201).
cggattatgcagaagtcaa

SEQ ID NO: 175868 - DNA, 19 bp, Homo sapiens
  siRNA target sequence for SIGLEC11 (NM_052884.1,520-538).
cctgagcaatgcgttcttt

SEQ ID NO: 175869 - DNA, 19 bp, Homo sapiens
  siRNA target sequence for SIGLEC11 (NM_052884.1,1355-1373).
gagctgccacccattcaaa

SEQ ID NO: 175870 - DNA, 19 bp, Homo sapiens
  siRNA target sequence for SIGLEC11 (NM_052884.1,2136-2154).
caggctttgggcttcaatt

SEQ ID NO: 175871 - DNA, 19 bp, Homo sapiens
  siRNA target sequence for SIGLEC11 (NM_052884.1,2139-2157).
gctttgggcttcaattgga

SEQ ID NO: 175872 - DNA, 19 bp, Homo sapiens
  siRNA target sequence for SIGLEC5 (NM_003830.1,895-913).
gcaaaacacctcatacctt

SEQ ID NO: 175873 - DNA, 19 bp, Homo sapiens
  siRNA target sequence for SIGLEC5 (NM_003830.1,1099-1117).
gctgggcttcctgcaaatt

SEQ ID NO: 175874 - DNA, 19 bp, Homo sapiens
  siRNA target sequence for SIGLEC5 (NM_003830.1,1372-1390).
caaggcctggaacatctat

SEQ ID NO: 175875 - DNA, 19 bp, Homo sapiens
  siRNA target sequence for SIGLEC6 (NM_001245.2,330-348).
ccttccagcctcgtactat

SEQ ID NO: 175876 - DNA, 19 bp, Homo sapiens
  siRNA target sequence for SIGLEC6 (NM_001245.2,334-352).
ccagcctcgtactatggtt

SEQ ID NO: 175877 - DNA, 19 bp, Homo sapiens
  siRNA target sequence for SIGLEC6 (NM_001245.2,335-353).
cagcctcgtactatggtta

SEQ ID NO: 175878 - DNA, 19 bp, Homo sapiens
  siRNA target sequence for SIGLEC6 (NM_001245.2,526-544).
cggttgaagtccaaatgga

SEQ ID NO: 175879 - DNA, 19 bp, Homo sapiens
  siRNA target sequence for SIGLEC6 (NM_001245.2,911-929).
gcgcagccttcaaaatcct

SEQ ID NO: 175880 - DNA, 19 bp, Homo sapiens
  siRNA target sequence for SIGLEC6 (NM_001245.2,1365-1383).
gttccagacaggcatagtt

SEQ ID NO: 175881 - DNA, 19 bp, Homo sapiens
  siRNA target sequence for SIGLEC7 (NM_014385.1,266-284).
gcagggaatgatataagct

SEQ ID NO: 175882 - DNA, 19 bp, Homo sapiens
  siRNA target sequence for SIGLEC7 (NM_014385.1,1298-1316).
gagtcctgggcagatgata

SEQ ID NO: 175883 - DNA, 19 bp, Homo sapiens
  siRNA target sequence for SIGLEC8 (NM_014442.1,122-140).
gacaatatggggatggtta

SEQ ID NO: 175884 - DNA, 19 bp, Homo sapiens
  siRNA target sequence for SIGLEC8 (NM_014442.1,408-426).
gagggataaggggtcatat

SEQ ID NO: 175885 - DNA, 19 bp, Homo sapiens
  siRNA target sequence for SIGLECL1 (NM_033329.1,31-49).
ccctgctatgggcaaatga

SEQ ID NO: 175886 - DNA, 19 bp, Homo sapiens
  siRNA target sequence for SIGLECL1 (NM_033329.1,99-117).
caggacctactgtcaagat

SEQ ID NO: 175887 - DNA, 19 bp, Homo sapiens
  siRNA target sequence for SIGLECL1 (NM_033329.1,183-201).
gtcctttacccccattaca

SEQ ID NO: 175888 - DNA, 19 bp, Homo sapiens
  siRNA target sequence for SIGLECL1 (NM_033329.1,186-204).
ctttacccccattacaact

SEQ ID NO: 175889 - DNA, 19 bp, Homo sapiens
  siRNA target sequence for SIGLECL1 (NM_033329.1,212-230).
ctctagccctgtttatgga

SEQ ID NO: 175890 - DNA, 19 bp, Homo sapiens
  siRNA target sequence for SIGLECL1 (NM_033329.1,387-405).
ggggattcagggaagtact

SEQ ID NO: 175891 - DNA, 19 bp, Homo sapiens
  siRNA target sequence for SIGLECL1 (NM_033329.1,388-406).
gggattcagggaagtacta

SEQ ID NO: 175892 - DNA, 19 bp, Homo sapiens
  siRNA target sequence for SIGLECL1 (NM_033329.1,427-445).
gcaggaaatggaactacat

SEQ ID NO: 175893 - DNA, 19 bp, Homo sapiens
  siRNA target sequence for SIGLECL1 (NM_033329.1,436-454).
ggaactacatatatgacaa

SEQ ID NO: 175894 - DNA, 19 bp, Homo sapiens
  siRNA target sequence for SIGLECL1 (NM_033329.1,731-749).
ggctgtccgactcaacata

SEQ ID NO: 175895 - DNA, 19 bp, Homo sapiens
  siRNA target sequence for SIGLECL1 (NM_033329.1,732-750).
gctgtccgactcaacatat

SEQ ID NO: 175896 - DNA, 19 bp, Homo sapiens
  siRNA target sequence for SIGLECL1 (NM_033329.1,735-753).
gtccgactcaacatatcct

SEQ ID NO: 175897 - DNA, 19 bp, Homo sapiens
  siRNA target sequence for SIGLECL1 (NM_033329.1,737-755).
ccgactcaacatatcctat

SEQ ID NO: 175898 - DNA, 19 bp, Homo sapiens
  siRNA target sequence for SIGLECL1 (NM_053003.2,108-126).
gctaaggaacagaaggatt

SEQ ID NO: 175899 - DNA, 19 bp, Homo sapiens
  siRNA target sequence for SIGLECL1 (NM_053003.2,260-278).
ccatgtaagccggaacatt

SEQ ID NO: 175900 - DNA, 19 bp, Homo sapiens
  siRNA target sequence for SIGLECL1 (NM_053003.2,351-369).
ccacagaacaaggattgta

SEQ ID NO: 175901 - DNA, 19 bp, Homo sapiens
  siRNA target sequence for SIGLECL1 (NM_053003.2,402-420).
gcagggacatacgtctttt

SEQ ID NO: 175902 - DNA, 19 bp, Homo sapiens
  siRNA target sequence for SIGLECL1 (NM_053003.2,406-424).
ggacatacgtcttttgtgt

SEQ ID NO: 175903 - DNA, 19 bp, Homo sapiens
  siRNA target sequence for SIGLECL1 (NM_053003.2,407-425).
gacatacgtcttttgtgta

SEQ ID NO: 175904 - DNA, 19 bp, Homo sapiens
  siRNA target sequence for SN (NM_023068.2,112-130).
cttatcccctgcatcttca

SEQ ID NO: 175905 - DNA, 19 bp, Homo sapiens
  siRNA target sequence for SN (NM_023068.2,388-406).
ggcaccttggtcacagtaa

SEQ ID NO: 175906 - DNA, 19 bp, Homo sapiens
  siRNA target sequence for SN (NM_023068.2,555-573).
cttcaacagccagaagttt

SEQ ID NO: 175907 - DNA, 19 bp, Homo sapiens
  siRNA target sequence for SN (NM_023068.2,655-673).
ctctccgtggccaatcaca

SEQ ID NO: 175908 - DNA, 19 bp, Homo sapiens
  siRNA target sequence for SN (NM_023068.2,804-822).
ccctgcagtcagttccatt

SEQ ID NO: 175909 - DNA, 19 bp, Homo sapiens
  siRNA target sequence for SN (NM_023068.2,805-823).
cctgcagtcagttccatta

SEQ ID NO: 175910 - DNA, 19 bp, Homo sapiens
  siRNA target sequence for SN (NM_023068.2,839-857).
gggtacgcctccaaaccaa

SEQ ID NO: 175911 - DNA, 19 bp, Homo sapiens
  siRNA target sequence for SN (NM_023068.2,1208-1226).
ctgtcagcgtggtagtcaa

SEQ ID NO: 175912 - DNA, 19 bp, Homo sapiens
  siRNA target sequence for SN (NM_023068.2,1790-1808).
cccctcgacaaccaacatt

SEQ ID NO: 175913 - DNA, 19 bp, Homo sapiens
  siRNA target sequence for SN (NM_023068.2,1792-1810).
cctcgacaaccaacattca

SEQ ID NO: 175914 - DNA, 19 bp, Homo sapiens
  siRNA target sequence for SN (NM_023068.2,2286-2304).
gcccgtggccagaactgat

SEQ ID NO: 175915 - DNA, 19 bp, Homo sapiens
  siRNA target sequence for SN (NM_023068.2,2364-2382).
gctcctgagtgtactctat

SEQ ID NO: 175916 - DNA, 19 bp, Homo sapiens
  siRNA target sequence for SN (NM_023068.2,2429-2447).
gccacatggctctgttcat

SEQ ID NO: 175917 - DNA, 19 bp, Homo sapiens
  siRNA target sequence for SN (NM_023068.2,2565-2583).
ggccaactccctgaagtta

SEQ ID NO: 175918 - DNA, 19 bp, Homo sapiens
  siRNA target sequence for SN (NM_023068.2,2567-2585).
ccaactccctgaagttaga

SEQ ID NO: 175919 - DNA, 19 bp, Homo sapiens
  siRNA target sequence for SN (NM_023068.2,2622-2640).
ccgctgtgaggccacaaat

SEQ ID NO: 175920 - DNA, 19 bp, Homo sapiens
  siRNA target sequence for SN (NM_023068.2,2627-2645).
gtgaggccacaaatgttct

SEQ ID NO: 175921 - DNA, 19 bp, Homo sapiens
  siRNA target sequence for SN (NM_023068.2,2770-2788).
gaggggacctcatatcgtt

SEQ ID NO: 175922 - DNA, 19 bp, Homo sapiens
  siRNA target sequence for SN (NM_023068.2,2775-2793).
gacctcatatcgttggtat

SEQ ID NO: 175923 - DNA, 19 bp, Homo sapiens
  siRNA target sequence for SN (NM_023068.2,2835-2853).
ccgctttgcagccataact

SEQ ID NO: 175924 - DNA, 19 bp, Homo sapiens
  siRNA target sequence for SN (NM_023068.2,2836-2854).
cgctttgcagccataactt

SEQ ID NO: 175925 - DNA, 19 bp, Homo sapiens
  siRNA target sequence for SN (NM_023068.2,3246-3264).
cgacgctcaagctgtgaat

SEQ ID NO: 175926 - DNA, 19 bp, Homo sapiens
  siRNA target sequence for SN (NM_023068.2,3861-3879).
cgcacccacactctatact

SEQ ID NO: 175927 - DNA, 19 bp, Homo sapiens
  siRNA target sequence for SN (NM_023068.2,3952-3970).
catgcaggcgcctactctt

SEQ ID NO: 175928 - DNA, 19 bp, Homo sapiens
  siRNA target sequence for SN (NM_023068.2,4128-4146).
gctggccctatctcatgat

SEQ ID NO: 175929 - DNA, 19 bp, Homo sapiens
  siRNA target sequence for SN (NM_023068.2,4255-4273).
ggtgatgacacctatgttt

SEQ ID NO: 175930 - DNA, 19 bp, Homo sapiens
  siRNA target sequence for SN (NM_023068.2,4270-4288).
gtttgcacagcccaaaact

SEQ ID NO: 175931 - DNA, 19 bp, Homo sapiens
  siRNA target sequence for SN (NM_023068.2,4817-4835).
gcgaccaaggggaatacat

SEQ ID NO: 175932 - DNA, 19 bp, Homo sapiens
  siRNA target sequence for SN (NM_023068.2,4819-4837).
gaccaaggggaatacatct

SEQ ID NO: 175933 - DNA, 19 bp, Homo sapiens
  siRNA target sequence for SN (NM_023068.2,4997-5015).
gaaggaggcgtgtttgtaa

SEQ ID NO: 175934 - DNA, 19 bp, Homo sapiens
  siRNA target sequence for SN (NM_023068.2,5036-5054).
cggtggagatggcttttca

SEQ ID NO: 175935 - DNA, 19 bp, Homo sapiens
  siRNA target sequence for SN (NM_023068.2,5061-5079).
gaccacgcagctcattgat

SEQ ID NO: 175936 - DNA, 19 bp, Homo sapiens
  siRNA target sequence for TNA (NM_003278.1,205-223).
gttgtgaacacaaagatgt

SEQ ID NO: 175937 - DNA, 19 bp, Homo sapiens
  siRNA target sequence for TNA (NM_003278.1,544-562).
cgcatcgcctacaagaact

SEQ ID NO: 175938 - DNA, 19 bp, Homo sapiens
  siRNA target sequence for ZDHHC19 (NM_144637.2,291-309).
ggcctttcctgttatcaca

SEQ ID NO: 175939 - DNA, 19 bp, Homo sapiens
  siRNA target sequence for ZDHHC19 (NM_144637.2,363-381).
ccctggcatcttacatcaa

SEQ ID NO: 175940 - DNA, 19 bp, Homo sapiens
  siRNA target sequence for ZDHHC19 (NM_144637.2,806-824).
gacaccttcagggatacaa

SEQ ID NO: 175941 - DNA, 19 bp, Homo sapiens
  siRNA target sequence for ZDHHC19 (NM_144637.2,848-866).
gcaactggtatttaacaat

SEQ ID NO: 175942 - DNA, 19 bp, Homo sapiens
  siRNA target sequence for ZDHHC19 (NM_144637.2,849-867).
caactggtatttaacaatt

SEQ ID NO: 175943 - DNA, 19 bp, Homo sapiens
  siRNA target sequence for CHIA (NM_021797.1,615-633).
cgttggattccctacctat

SEQ ID NO: 175944 - DNA, 19 bp, Homo sapiens
  siRNA target sequence for CHIA (NM_021797.1,626-644).
ctacctatggacacaactt

SEQ ID NO: 175945 - DNA, 19 bp, Homo sapiens
  siRNA target sequence for CHIA (NM_021797.1,660-678).
ctccaacactggaattggt

SEQ ID NO: 175946 - DNA, 19 bp, Homo sapiens
  siRNA target sequence for CHIA (NM_021797.1,811-829).
gcctatcagggcaatgtgt

SEQ ID NO: 175947 - DNA, 19 bp, Homo sapiens
  siRNA target sequence for CHIA (NM_021797.1,875-893).
ggcttaagcacaacaaatt

SEQ ID NO: 175948 - DNA, 19 bp, Homo sapiens
  siRNA target sequence for CHIA (NM_021797.1,955-973).
ggcaagtttcccctaatct

SEQ ID NO: 175949 - DNA, 19 bp, Homo sapiens
  siRNA target sequence for CHIA (NM_021797.1,1029-1047).
gcccattgagccaataact

SEQ ID NO: 175950 - DNA, 19 bp, Homo sapiens
  siRNA target sequence for CHIA (NM_021797.1,1141-1159).
ctctaccccgtggcaaata

SEQ ID NO: 175951 - DNA, 19 bp, Homo sapiens
  siRNA target sequence for CHIA (NM_021797.1,1149-1167).
cgtggcaaataacagaaat

SEQ ID NO: 175952 - DNA, 19 bp, Homo sapiens
  siRNA target sequence for CHIT1 (NM_003465.1,593-611).
gatacgaggtggacaaaat

SEQ ID NO: 175953 - DNA, 19 bp, Homo sapiens
  siRNA target sequence for CHIT1 (NM_003465.1,612-630).
cgcccagaacctggatttt

SEQ ID NO: 175954 - DNA, 19 bp, Homo sapiens
  siRNA target sequence for CHIT1 (NM_003465.1,908-926).
ggatgctggcctactatga

SEQ ID NO: 175955 - DNA, 19 bp, Homo sapiens
  siRNA target sequence for CHIT1 (NM_003465.1,909-927).
gatgctggcctactatgaa

SEQ ID NO: 175956 - DNA, 19 bp, Homo sapiens
  siRNA target sequence for CHIT1 (NM_003465.1,1190-1208).
gcaccccagagcttgaagt

SEQ ID NO: 175957 - DNA, 19 bp, Homo sapiens
  siRNA target sequence for CHIT1 (NM_003465.1,1309-1327).
gaacggtccagcttctaca

SEQ ID NO: 175958 - DNA, 19 bp, Homo sapiens
  siRNA target sequence for TACR1 (NM_001058.2,266-284).
cctcggaacccaatcagtt

SEQ ID NO: 175959 - DNA, 19 bp, Homo sapiens
  siRNA target sequence for TACR1 (NM_001058.2,320-338).
ctgcctacacggtcattgt

SEQ ID NO: 175960 - DNA, 19 bp, Homo sapiens
  siRNA target sequence for TACR1 (NM_001058.2,401-419).
ggacagtgacgaactattt

SEQ ID NO: 175961 - DNA, 19 bp, Homo sapiens
  siRNA target sequence for TACR1 (NM_001058.2,402-420).
gacagtgacgaactatttt

SEQ ID NO: 175962 - DNA, 19 bp, Homo sapiens
  siRNA target sequence for TACR1 (NM_001058.2,404-422).
cagtgacgaactattttct

SEQ ID NO: 175963 - DNA, 19 bp, Homo sapiens
  siRNA target sequence for TACR1 (NM_001058.2,503-521).
ggtactacggcctgttcta

SEQ ID NO: 175964 - DNA, 19 bp, Homo sapiens
  siRNA target sequence for TACR1 (NM_001058.2,579-597).
gacggctgtggcctttgat

SEQ ID NO: 175965 - DNA, 19 bp, Homo sapiens
  siRNA target sequence for TACR1 (NM_001058.2,600-618).
gtacatggccatcatacat

SEQ ID NO: 175966 - DNA, 19 bp, Homo sapiens
  siRNA target sequence for TACR1 (NM_001058.2,700-718).
ccccagggctactactcaa

SEQ ID NO: 175967 - DNA, 19 bp, Homo sapiens
  siRNA target sequence for TACR1 (NM_001058.2,742-760).
gtcgtgtgcatgatcgaat

SEQ ID NO: 175968 - DNA, 19 bp, Homo sapiens
  siRNA target sequence for TACR1 (NM_001058.2,763-781).
ccagagcatccgaacaaga

SEQ ID NO: 175969 - DNA, 19 bp, Homo sapiens
  siRNA target sequence for TACR1 (NM_001058.2,764-782).
cagagcatccgaacaagat

SEQ ID NO: 175970 - DNA, 19 bp, Homo sapiens
  siRNA target sequence for TACR1 (NM_001058.2,766-784).
gagcatccgaacaagattt

SEQ ID NO: 175971 - DNA, 19 bp, Homo sapiens
  siRNA target sequence for TACR1 (NM_001058.2,772-790).
ccgaacaagatttatgaga

SEQ ID NO: 175972 - DNA, 19 bp, Homo sapiens
  siRNA target sequence for TACR1 (NM_001058.2,838-856).
ctggtgattggctatgcat

SEQ ID NO: 175973 - DNA, 19 bp, Homo sapiens
  siRNA target sequence for TACR1 (NM_001058.2,858-876).
caccgtagtgggaatcaca

SEQ ID NO: 175974 - DNA, 19 bp, Homo sapiens
  siRNA target sequence for TACR1 (NM_001058.2,862-880).
gtagtgggaatcacactat

SEQ ID NO: 175975 - DNA, 19 bp, Homo sapiens
  siRNA target sequence for TACR1 (NM_001058.2,940-958).
cgcaaggtggtcaaaatga

SEQ ID NO: 175976 - DNA, 19 bp, Homo sapiens
  siRNA target sequence for TACR2 (NM_001057.1,21-39).
gactgaagccaatatctca

SEQ ID NO: 175977 - DNA, 19 bp, Homo sapiens
  siRNA target sequence for TACR2 (NM_001057.1,259-277).
gccgccttcaactttgtct

SEQ ID NO: 175978 - DNA, 19 bp, Homo sapiens
  siRNA target sequence for TACR2 (NM_001057.1,260-278).
ccgccttcaactttgtcta

SEQ ID NO: 175979 - DNA, 19 bp, Homo sapiens
  siRNA target sequence for TACR2 (NM_001057.1,285-303).
ccacaacatctggtacttt

SEQ ID NO: 175980 - DNA, 19 bp, Homo sapiens
  siRNA target sequence for TACR2 (NM_001057.1,441-459).
caccaaggcggttattgct

SEQ ID NO: 175981 - DNA, 19 bp, Homo sapiens
  siRNA target sequence for TACR2 (NM_001057.1,624-642).
gccgctcgcggtgatgttt

SEQ ID NO: 175982 - DNA, 19 bp, Homo sapiens
  siRNA target sequence for TACR2 (NM_001057.1,626-644).
cgctcgcggtgatgtttgt

SEQ ID NO: 175983 - DNA, 19 bp, Homo sapiens
  siRNA target sequence for TACR2 (NM_001057.1,627-645).
gctcgcggtgatgtttgta

SEQ ID NO: 175984 - DNA, 19 bp, Homo sapiens
  siRNA target sequence for TACR2 (NM_001057.1,794-812).
cctaccacctctacttcat

SEQ ID NO: 175985 - DNA, 19 bp, Homo sapiens
  siRNA target sequence for TACR2 (NM_001057.1,821-839).
gcttccaggaggacatcta

SEQ ID NO: 175986 - DNA, 19 bp, Homo sapiens
  siRNA target sequence for TACR2 (NM_001057.1,989-1007).
ccaccaaggaagataagct

SEQ ID NO: 175987 - DNA, 19 bp, Homo sapiens
  siRNA target sequence for TACR2 (NM_001057.1,1054-1072).
cacactaaggagactttgt

SEQ ID NO: 175988 - DNA, 19 bp, Homo sapiens
  siRNA target sequence for TACR3 (NM_001059.1,439-457).
cagttttgggaaatctcat

SEQ ID NO: 175989 - DNA, 19 bp, Homo sapiens
  siRNA target sequence for TACR3 (NM_001059.1,691-709).
ggtatatggctattattga

SEQ ID NO: 175990 - DNA, 19 bp, Homo sapiens
  siRNA target sequence for TACR3 (NM_001059.1,692-710).
gtatatggctattattgat

SEQ ID NO: 175991 - DNA, 19 bp, Homo sapiens
  siRNA target sequence for TACR3 (NM_001059.1,760-778).
gtatttggattctagcatt

SEQ ID NO: 175992 - DNA, 19 bp, Homo sapiens
  siRNA target sequence for TACR3 (NM_001059.1,766-784).
ggattctagcatttctact

SEQ ID NO: 175993 - DNA, 19 bp, Homo sapiens
  siRNA target sequence for TACR3 (NM_001059.1,767-785).
gattctagcatttctactt

SEQ ID NO: 175994 - DNA, 19 bp, Homo sapiens
  siRNA target sequence for TACR3 (NM_001059.1,799-817).
gtctttattccaaaaccaa

SEQ ID NO: 175995 - DNA, 19 bp, Homo sapiens
  siRNA target sequence for TACR3 (NM_001059.1,854-872).
gccagaaggtcccaaacaa

SEQ ID NO: 175996 - DNA, 19 bp, Homo sapiens
  siRNA target sequence for TACR3 (NM_001059.1,856-874).
cagaaggtcccaaacaaca

SEQ ID NO: 175997 - DNA, 19 bp, Homo sapiens
  siRNA target sequence for TACR3 (NM_001059.1,923-941).
gctcatcatgggtattaca

SEQ ID NO: 175998 - DNA, 19 bp, Homo sapiens
  siRNA target sequence for TACR3 (NM_001059.1,991-1009).
cctgtgacaagtatcatga

SEQ ID NO: 175999 - DNA, 19 bp, Homo sapiens
  siRNA target sequence for TACR3 (NM_001059.1,1021-1039).
ccaaaagaaaggttgtcaa

SEQ ID NO: 176000 - DNA, 19 bp, Homo sapiens
  siRNA target sequence for TACR3 (NM_001059.1,1078-1096).
ggctgccctatcatattta

SEQ ID NO: 176001 - DNA, 19 bp, Homo sapiens
  siRNA target sequence for TACR3 (NM_001059.1,1080-1098).
ctgccctatcatatttact

SEQ ID NO: 176002 - DNA, 19 bp, Homo sapiens
  siRNA target sequence for TACR3 (NM_001059.1,1106-1124).
cactgcaatctatcaacaa

SEQ ID NO: 176003 - DNA, 19 bp, Homo sapiens
  siRNA target sequence for TACR3 (NM_001059.1,1110-1128).
gcaatctatcaacaactaa

SEQ ID NO: 176004 - DNA, 19 bp, Homo sapiens
  siRNA target sequence for TACR3 (NM_001059.1,1151-1169).
ggtctacctggctagcttt

SEQ ID NO: 176005 - DNA, 19 bp, Homo sapiens
  siRNA target sequence for TACR3 (NM_001059.1,1257-1275).
cgctggtgtcctttcatca

SEQ ID NO: 176006 - DNA, 19 bp, Homo sapiens
  siRNA target sequence for TACR3 (NM_001059.1,1261-1279).
ggtgtcctttcatcaaagt

SEQ ID NO: 176007 - DNA, 19 bp, Homo sapiens
  siRNA target sequence for TACR3 (NM_001059.1,1274-1292).
caaagtttccagctatgat

SEQ ID NO: 176008 - DNA, 19 bp, Homo sapiens
  siRNA target sequence for TACR3 (NM_001059.1,1366-1384).
ccatgacagtcgtgtttga

SEQ ID NO: 176009 - DNA, 19 bp, Homo sapiens
  siRNA target sequence for TACR3 (NM_001059.1,1482-1500).
gcctccgccacttcaagtt

SEQ ID NO: 176010 - DNA, 19 bp, Homo sapiens
  siRNA target sequence for TACR3 (NM_001059.1,1483-1501).
cctccgccacttcaagttt

SEQ ID NO: 176011 - DNA, 19 bp, Homo sapiens
  siRNA target sequence for TACR3 (NM_001059.1,1486-1504).
ccgccacttcaagtttcat

SEQ ID NO: 176012 - DNA, 19 bp, Homo sapiens
  siRNA target sequence for TACR3 (NM_001059.1,1487-1505).
cgccacttcaagtttcata

SEQ ID NO: 176013 - DNA, 19 bp, Homo sapiens
  siRNA target sequence for NPY1R (NM_000909.3,274-292).
cattcagtccactctaatt

SEQ ID NO: 176014 - DNA, 19 bp, Homo sapiens
  siRNA target sequence for NPY1R (NM_000909.3,410-428).
gaaacctggccttgatcat

SEQ ID NO: 176015 - DNA, 19 bp, Homo sapiens
  siRNA target sequence for NPY1R (NM_000909.3,513-531).
catgtgtctcccctttaca

SEQ ID NO: 176016 - DNA, 19 bp, Homo sapiens
  siRNA target sequence for NPY1R (NM_000909.3,565-583).
ggtgaggcgatgtgtaagt

SEQ ID NO: 176017 - DNA, 19 bp, Homo sapiens
  siRNA target sequence for NPY1R (NM_000909.3,566-584).
gtgaggcgatgtgtaagtt

SEQ ID NO: 176018 - DNA, 19 bp, Homo sapiens
  siRNA target sequence for NPY1R (NM_000909.3,568-586).
gaggcgatgtgtaagttga

SEQ ID NO: 176019 - DNA, 19 bp, Homo sapiens
  siRNA target sequence for NPY1R (NM_000909.3,570-588).
ggcgatgtgtaagttgaat

SEQ ID NO: 176020 - DNA, 19 bp, Homo sapiens
  siRNA target sequence for NPY1R (NM_000909.3,578-596).
gtaagttgaatccttttgt

SEQ ID NO: 176021 - DNA, 19 bp, Homo sapiens
  siRNA target sequence for NPY1R (NM_000909.3,597-615).
gcaatgtgtttcaatcact

SEQ ID NO: 176022 - DNA, 19 bp, Homo sapiens
  siRNA target sequence for NPY1R (NM_000909.3,649-667).
gaacgacatcagctgataa

SEQ ID NO: 176023 - DNA, 19 bp, Homo sapiens
  siRNA target sequence for NPY1R (NM_000909.3,652-670).
cgacatcagctgataatca

SEQ ID NO: 176024 - DNA, 19 bp, Homo sapiens
  siRNA target sequence for NPY1R (NM_000909.3,653-671).
gacatcagctgataatcaa

SEQ ID NO: 176025 - DNA, 19 bp, Homo sapiens
  siRNA target sequence for NPY1R (NM_000909.3,676-694).
cgagggtggagaccaaata

SEQ ID NO: 176026 - DNA, 19 bp, Homo sapiens
  siRNA target sequence for NPY1R (NM_000909.3,679-697).
gggtggagaccaaataata

SEQ ID NO: 176027 - DNA, 19 bp, Homo sapiens
  siRNA target sequence for NPY1R (NM_000909.3,681-699).
gtggagaccaaataataga

SEQ ID NO: 176028 - DNA, 19 bp, Homo sapiens
  siRNA target sequence for NPY1R (NM_000909.3,683-701).
ggagaccaaataatagaca

SEQ ID NO: 176029 - DNA, 19 bp, Homo sapiens
  siRNA target sequence for NPY1R (NM_000909.3,698-716).
gacatgcttatgtaggtat

SEQ ID NO: 176030 - DNA, 19 bp, Homo sapiens
  siRNA target sequence for NPY1R (NM_000909.3,760-778).
ctgatctaccaagtaatga

SEQ ID NO: 176031 - DNA, 19 bp, Homo sapiens
  siRNA target sequence for NPY1R (NM_000909.3,762-780).
gatctaccaagtaatgact

SEQ ID NO: 176032 - DNA, 19 bp, Homo sapiens
  siRNA target sequence for NPY1R (NM_000909.3,784-802).
gagccgttccaaaatgtaa

SEQ ID NO: 176033 - DNA, 19 bp, Homo sapiens
  siRNA target sequence for NPY1R (NM_000909.3,788-806).
cgttccaaaatgtaacact

SEQ ID NO: 176034 - DNA, 19 bp, Homo sapiens
  siRNA target sequence for NPY1R (NM_000909.3,789-807).
gttccaaaatgtaacactt

SEQ ID NO: 176035 - DNA, 19 bp, Homo sapiens
  siRNA target sequence for NPY1R (NM_000909.3,803-821).
cacttgatgcgtacaaaga

SEQ ID NO: 176036 - DNA, 19 bp, Homo sapiens
  siRNA target sequence for NPY1R (NM_000909.3,805-823).
cttgatgcgtacaaagaca

SEQ ID NO: 176037 - DNA, 19 bp, Homo sapiens
  siRNA target sequence for NPY1R (NM_000909.3,808-826).
gatgcgtacaaagacaaat

SEQ ID NO: 176038 - DNA, 19 bp, Homo sapiens
  siRNA target sequence for NPY1R (NM_000909.3,812-830).
cgtacaaagacaaatacgt

SEQ ID NO: 176039 - DNA, 19 bp, Homo sapiens
  siRNA target sequence for NPY1R (NM_000909.3,822-840).
caaatacgtgtgctttgat

SEQ ID NO: 176040 - DNA, 19 bp, Homo sapiens
  siRNA target sequence for NPY1R (NM_000909.3,828-846).
cgtgtgctttgatcaattt

SEQ ID NO: 176041 - DNA, 19 bp, Homo sapiens
  siRNA target sequence for NPY1R (NM_000909.3,848-866).
catcggactctcataggtt

SEQ ID NO: 176042 - DNA, 19 bp, Homo sapiens
  siRNA target sequence for NPY1R (NM_000909.3,853-871).
gactctcataggttgtctt

SEQ ID NO: 176043 - DNA, 19 bp, Homo sapiens
  siRNA target sequence for NPY1R (NM_000909.3,855-873).
ctctcataggttgtcttat

SEQ ID NO: 176044 - DNA, 19 bp, Homo sapiens
  siRNA target sequence for NPY1R (NM_000909.3,859-877).
cataggttgtcttatacca

SEQ ID NO: 176045 - DNA, 19 bp, Homo sapiens
  siRNA target sequence for NPY1R (NM_000909.3,888-906).
ggtgctgcagtattttggt

SEQ ID NO: 176046 - DNA, 19 bp, Homo sapiens
  siRNA target sequence for NPY1R (NM_000909.3,1138-1156).
cattgtggtagcatttgca

SEQ ID NO: 176047 - DNA, 19 bp, Homo sapiens
  siRNA target sequence for NPY1R (NM_000909.3,1359-1377).
ggtctcgggatgatgatta

SEQ ID NO: 176048 - DNA, 19 bp, Homo sapiens
  siRNA target sequence for NPY1R (NM_000909.3,1360-1378).
gtctcgggatgatgattat

SEQ ID NO: 176049 - DNA, 19 bp, Homo sapiens
  siRNA target sequence for NPY1R (NM_000909.3,1396-1414).
cacgatgcacacagatgtt

SEQ ID NO: 176050 - DNA, 19 bp, Homo sapiens
  siRNA target sequence for NPY1R (NM_000909.3,1436-1454).
gcaagcccagtcgcattta

SEQ ID NO: 176051 - DNA, 19 bp, Homo sapiens
  siRNA target sequence for NPY1R (NM_000909.3,1437-1455).
caagcccagtcgcatttaa

SEQ ID NO: 176052 - DNA, 19 bp, Homo sapiens
  siRNA target sequence for NPY1R (NM_000909.3,1440-1458).
gcccagtcgcatttaaaaa

SEQ ID NO: 176053 - DNA, 19 bp, Homo sapiens
  siRNA target sequence for NPY2R (NM_000910.2,556-574).
caatacgggccacaaacaa

SEQ ID NO: 176054 - DNA, 19 bp, Homo sapiens
  siRNA target sequence for NPY2R (NM_000910.2,600-618).
ccctgagccagagcttata

SEQ ID NO: 176055 - DNA, 19 bp, Homo sapiens
  siRNA target sequence for NPY2R (NM_000910.2,630-648).
gctgattgaggtacaagtt

SEQ ID NO: 176056 - DNA, 19 bp, Homo sapiens
  siRNA target sequence for NPY2R (NM_000910.2,639-657).
ggtacaagttgttctcata

SEQ ID NO: 176057 - DNA, 19 bp, Homo sapiens
  siRNA target sequence for NPY2R (NM_000910.2,640-658).
gtacaagttgttctcatat

SEQ ID NO: 176058 - DNA, 19 bp, Homo sapiens
  siRNA target sequence for NPY2R (NM_000910.2,662-680).
cctactgctccatcatctt

SEQ ID NO: 176059 - DNA, 19 bp, Homo sapiens
  siRNA target sequence for NPY2R (NM_000910.2,675-693).
catcttgcttggggtaatt

SEQ ID NO: 176060 - DNA, 19 bp, Homo sapiens
  siRNA target sequence for NPY2R (NM_000910.2,738-756).
gcgcacagtaaccaacttt

SEQ ID NO: 176061 - DNA, 19 bp, Homo sapiens
  siRNA target sequence for NPY2R (NM_000910.2,815-833).
ctcttacctataccttaat

SEQ ID NO: 176062 - DNA, 19 bp, Homo sapiens
  siRNA target sequence for NPY2R (NM_000910.2,885-903).
gggcctggcagtacaagta

SEQ ID NO: 176063 - DNA, 19 bp, Homo sapiens
  siRNA target sequence for NPY2R (NM_000910.2,908-926).
caatcaccttgacagtaat

SEQ ID NO: 176064 - DNA, 19 bp, Homo sapiens
  siRNA target sequence for NPY2R (NM_000910.2,982-1000).
cgaatcagcttcctgatta

SEQ ID NO: 176065 - DNA, 19 bp, Homo sapiens
  siRNA target sequence for NPY2R (NM_000910.2,1055-1073).
gggagtattcgctgattga

SEQ ID NO: 176066 - DNA, 19 bp, Homo sapiens
  siRNA target sequence for NPY2R (NM_000910.2,1057-1075).
gagtattcgctgattgaga

SEQ ID NO: 176067 - DNA, 19 bp, Homo sapiens
  siRNA target sequence for NPY2R (NM_000910.2,1185-1203).
gcctctgggcattatatca

SEQ ID NO: 176068 - DNA, 19 bp, Homo sapiens
  siRNA target sequence for NPY2R (NM_000910.2,1212-1230).
cactcgcatttggagtaaa

SEQ ID NO: 176069 - DNA, 19 bp, Homo sapiens
  siRNA target sequence for NPY2R (NM_000910.2,1216-1234).
cgcatttggagtaaattga

SEQ ID NO: 176070 - DNA, 19 bp, Homo sapiens
  siRNA target sequence for NPY2R (NM_000910.2,1217-1235).
gcatttggagtaaattgaa

SEQ ID NO: 176071 - DNA, 19 bp, Homo sapiens
  siRNA target sequence for NPY2R (NM_000910.2,1276-1294).
cagcgaaggcaaaaaacca

SEQ ID NO: 176072 - DNA, 19 bp, Homo sapiens
  siRNA target sequence for NPY2R (NM_000910.2,1356-1374).
ccagcttgccgttgacatt

SEQ ID NO: 176073 - DNA, 19 bp, Homo sapiens
  siRNA target sequence for NPY2R (NM_000910.2,1360-1378).
cttgccgttgacattgaca

SEQ ID NO: 176074 - DNA, 19 bp, Homo sapiens
  siRNA target sequence for NPY2R (NM_000910.2,1393-1411).
ctgaaggagtacaaactca

SEQ ID NO: 176075 - DNA, 19 bp, Homo sapiens
  siRNA target sequence for NPY2R (NM_000910.2,1465-1483).
ctctatggctggatgaaca

SEQ ID NO: 176076 - DNA, 19 bp, Homo sapiens
  siRNA target sequence for NPY2R (NM_000910.2,1528-1546).
cggttggatgccattcact

SEQ ID NO: 176077 - DNA, 19 bp, Homo sapiens
  siRNA target sequence for NPY2R (NM_000910.2,1547-1565).
ctgaggtgtccgtgacatt

SEQ ID NO: 176078 - DNA, 19 bp, Homo sapiens
  siRNA target sequence for NPY2R (NM_000910.2,1549-1567).
gaggtgtccgtgacattca

SEQ ID NO: 176079 - DNA, 19 bp, Homo sapiens
  siRNA target sequence for NPY2R (NM_000910.2,1605-1623).
ccccaatgactctttcaca

SEQ ID NO: 176080 - DNA, 19 bp, Homo sapiens
  siRNA target sequence for NPY5R (NM_006174.2,192-210).
gagctcgacgagtattata

SEQ ID NO: 176081 - DNA, 19 bp, Homo sapiens
  siRNA target sequence for NPY5R (NM_006174.2,195-213).
ctcgacgagtattataaca

SEQ ID NO: 176082 - DNA, 19 bp, Homo sapiens
  siRNA target sequence for NPY5R (NM_006174.2,198-216).
gacgagtattataacaaga

SEQ ID NO: 176083 - DNA, 19 bp, Homo sapiens
  siRNA target sequence for NPY5R (NM_006174.2,217-235).
cacttgccacagagaataa

SEQ ID NO: 176084 - DNA, 19 bp, Homo sapiens
  siRNA target sequence for NPY5R (NM_006174.2,243-261).
gccactcggaattctgatt

SEQ ID NO: 176085 - DNA, 19 bp, Homo sapiens
  siRNA target sequence for NPY5R (NM_006174.2,244-262).
ccactcggaattctgattt

SEQ ID NO: 176086 - DNA, 19 bp, Homo sapiens
  siRNA target sequence for NPY5R (NM_006174.2,289-307).
gtgtagatgacttacagta

SEQ ID NO: 176087 - DNA, 19 bp, Homo sapiens
  siRNA target sequence for NPY5R (NM_006174.2,291-309).
gtagatgacttacagtatt

SEQ ID NO: 176088 - DNA, 19 bp, Homo sapiens
  siRNA target sequence for NPY5R (NM_006174.2,312-330).
ctgattgggctctatacat

SEQ ID NO: 176089 - DNA, 19 bp, Homo sapiens
  siRNA target sequence for NPY5R (NM_006174.2,314-332).
gattgggctctatacattt

SEQ ID NO: 176090 - DNA, 19 bp, Homo sapiens
  siRNA target sequence for NPY5R (NM_006174.2,1100-1118).
gaaccactccagaatactt

SEQ ID NO: 176091 - DNA, 19 bp, Homo sapiens
  siRNA target sequence for NPY5R (NM_006174.2,1108-1126).
ccagaatacttccagaaaa

SEQ ID NO: 176092 - DNA, 19 bp, Homo sapiens
  siRNA target sequence for NPY5R (NM_006174.2,1153-1171).
cttcatccagtaagttcat

SEQ ID NO: 176093 - DNA, 19 bp, Homo sapiens
  siRNA target sequence for NPY5R (NM_006174.2,1221-1239).
gttcatgaattgagagtaa

SEQ ID NO: 176094 - DNA, 19 bp, Homo sapiens
  siRNA target sequence for NPY5R (NM_006174.2,1232-1250).
gagagtaaaacgttctgtt

SEQ ID NO: 176095 - DNA, 19 bp, Homo sapiens
  siRNA target sequence for NPY5R (NM_006174.2,1236-1254).
gtaaaacgttctgttacaa

SEQ ID NO: 176096 - DNA, 19 bp, Homo sapiens
  siRNA target sequence for NPY5R (NM_006174.2,1286-1304).
cagactgaccatactgata

SEQ ID NO: 176097 - DNA, 19 bp, Homo sapiens
  siRNA target sequence for NPY5R (NM_006174.2,1294-1312).
ccatactgatattagtatt

SEQ ID NO: 176098 - DNA, 19 bp, Homo sapiens
  siRNA target sequence for NPY5R (NM_006174.2,1391-1409).
caagttggtgtattgcatt

SEQ ID NO: 176099 - DNA, 19 bp, Homo sapiens
  siRNA target sequence for NPY5R (NM_006174.2,1413-1431).
catttgttgggcatgatgt

SEQ ID NO: 176100 - DNA, 19 bp, Homo sapiens
  siRNA target sequence for NPY5R (NM_006174.2,1427-1445).
gatgtcctgttgtcttaat
